United States Patent Application Publication US 2018/0305689 A1 - sequence listing, part 152

SEQ ID NO: 2164010 - RNA, 19 nt, Artificial Sequence
  Description of Artificial Sequence: Synthetic oligonucleotide
  Sense strand starting at position 1336 of SEQ ID NO: 1883018
cgcagaaaggucugacgca

SEQ ID NO: 2164011 - RNA, 19 nt, Artificial Sequence
  Description of Artificial Sequence: Synthetic oligonucleotide
  Antisense strand to SEQ ID NO: 2164010
ugcgucagaccuuucugcg

SEQ ID NO: 2164012 - RNA, 19 nt, Artificial Sequence
  Description of Artificial Sequence: Synthetic oligonucleotide
  Sense strand starting at position 1378 of SEQ ID NO: 1883018
gggugacagucgccaaguu

SEQ ID NO: 2164013 - RNA, 19 nt, Artificial Sequence
  Description of Artificial Sequence: Synthetic oligonucleotide
  Antisense strand to SEQ ID NO: 2164012
aacuuggcgacugucaccc

SEQ ID NO: 2164014 - RNA, 19 nt, Artificial Sequence
  Description of Artificial Sequence: Synthetic oligonucleotide
  Sense strand starting at position 1379 of SEQ ID NO: 1883018
ggugacagucgccaaguuu

SEQ ID NO: 2164015 - RNA, 19 nt, Artificial Sequence
  Description of Artificial Sequence: Synthetic oligonucleotide
  Antisense strand to SEQ ID NO: 2164014
aaacuuggcgacugucacc

SEQ ID NO: 2164016 - RNA, 19 nt, Artificial Sequence
  Description of Artificial Sequence: Synthetic oligonucleotide
  Sense strand starting at position 2221 of SEQ ID NO: 1883018
uguggauguuuacucgaua

SEQ ID NO: 2164017 - RNA, 19 nt, Artificial Sequence
  Description of Artificial Sequence: Synthetic oligonucleotide
  Antisense strand to SEQ ID NO: 2164016
uaucgaguaaacauccaca

SEQ ID NO: 2164018 - RNA, 19 nt, Artificial Sequence
  Description of Artificial Sequence: Synthetic oligonucleotide
  Sense strand starting at position 2222 of SEQ ID NO: 1883018
guggauguuuacucgauau

SEQ ID NO: 2164019 - RNA, 19 nt, Artificial Sequence
  Description of Artificial Sequence: Synthetic oligonucleotide
  Antisense strand to SEQ ID NO: 2164018
auaucgaguaaacauccac

SEQ ID NO: 2164020 - RNA, 19 nt, Artificial Sequence
  Description of Artificial Sequence: Synthetic oligonucleotide
  Sense strand starting at position 2224 of SEQ ID NO: 1883018
ggauguuuacucgauaucu

SEQ ID NO: 2164021 - RNA, 19 nt, Artificial Sequence
  Description of Artificial Sequence: Synthetic oligonucleotide
  Antisense strand to SEQ ID NO: 2164020
agauaucgaguaaacaucc

SEQ ID NO: 2164022 - RNA, 19 nt, Artificial Sequence
  Description of Artificial Sequence: Synthetic oligonucleotide
  Sense strand starting at position 2226 of SEQ ID NO: 1883018
auguuuacucgauaucuac

SEQ ID NO: 2164023 - RNA, 19 nt, Artificial Sequence
  Description of Artificial Sequence: Synthetic oligonucleotide
  Antisense strand to SEQ ID NO: 2164022
guagauaucgaguaaacau

SEQ ID NO: 2164024 - RNA, 19 nt, Artificial Sequence
  Description of Artificial Sequence: Synthetic oligonucleotide
  Sense strand starting at position 2250 of SEQ ID NO: 1883018
ugcccuaauuccuuuggca

SEQ ID NO: 2164025 - RNA, 19 nt, Artificial Sequence
  Description of Artificial Sequence: Synthetic oligonucleotide
  Antisense strand to SEQ ID NO: 2164024
ugccaaaggaauuagggca

SEQ ID NO: 2164026 - RNA, 19 nt, Artificial Sequence
  Description of Artificial Sequence: Synthetic oligonucleotide
  Sense strand starting at position 2252 of SEQ ID NO: 1883018
cccuaauuccuuuggcaag

SEQ ID NO: 2164027 - RNA, 19 nt, Artificial Sequence
  Description of Artificial Sequence: Synthetic oligonucleotide
  Antisense strand to SEQ ID NO: 2164026
cuugccaaaggaauuaggg

SEQ ID NO: 2164028 - RNA, 19 nt, Artificial Sequence
  Description of Artificial Sequence: Synthetic oligonucleotide
  Sense strand starting at position 2299 of SEQ ID NO: 1883018
gcggauuuccugugggcca

SEQ ID NO: 2164029 - RNA, 19 nt, Artificial Sequence
  Description of Artificial Sequence: Synthetic oligonucleotide
  Antisense strand to SEQ ID NO: 2164028
uggcccacaggaaauccgc

SEQ ID NO: 2164030 - RNA, 19 nt, Artificial Sequence
  Description of Artificial Sequence: Synthetic oligonucleotide
  Sense strand starting at position 2318 of SEQ ID NO: 1883018
ugcacuauucuaggaauug

SEQ ID NO: 2164031 - RNA, 19 nt, Artificial Sequence
  Description of Artificial Sequence: Synthetic oligonucleotide
  Antisense strand to SEQ ID NO: 2164030
caauuccuagaauagugca

SEQ ID NO: 2164032 - RNA, 19 nt, Artificial Sequence
  Description of Artificial Sequence: Synthetic oligonucleotide
  Sense strand starting at position 2669 of SEQ ID NO: 1883018
aacagaaucucgcuuuguu

SEQ ID NO: 2164033 - RNA, 19 nt, Artificial Sequence
  Description of Artificial Sequence: Synthetic oligonucleotide
  Antisense strand to SEQ ID NO: 2164032
aacaaagcgagauucuguu

SEQ ID NO: 2164034 - RNA, 19 nt, Artificial Sequence
  Description of Artificial Sequence: Synthetic oligonucleotide
  Sense strand starting at position 2772 of SEQ ID NO: 1883018
cacgucuggcuaggaauuu

SEQ ID NO: 2164035 - RNA, 19 nt, Artificial Sequence
  Description of Artificial Sequence: Synthetic oligonucleotide
  Antisense strand to SEQ ID NO: 2164034
aaauuccuagccagacgug

SEQ ID NO: 2164036 - RNA, 19 nt, Artificial Sequence
  Description of Artificial Sequence: Synthetic oligonucleotide
  Sense strand starting at position 2834 of SEQ ID NO: 1883018
guguucuugcaaggaugaa

SEQ ID NO: 2164037 - RNA, 19 nt, Artificial Sequence
  Description of Artificial Sequence: Synthetic oligonucleotide
  Antisense strand to SEQ ID NO: 2164036
uucauccuugcaagaacac

SEQ ID NO: 2164038 - RNA, 19 nt, Artificial Sequence
  Description of Artificial Sequence: Synthetic oligonucleotide
  Sense strand starting at position 2835 of SEQ ID NO: 1883018
uguucuugcaaggaugaaa

SEQ ID NO: 2164039 - RNA, 19 nt, Artificial Sequence
  Description of Artificial Sequence: Synthetic oligonucleotide
  Antisense strand to SEQ ID NO: 2164038
uuucauccuugcaagaaca

SEQ ID NO: 2164040 - RNA, 19 nt, Artificial Sequence
  Description of Artificial Sequence: Synthetic oligonucleotide
  Sense strand starting at position 2873 of SEQ ID NO: 1883018
agaggcucucauuggaguu

SEQ ID NO: 2164041 - RNA, 19 nt, Artificial Sequence
  Description of Artificial Sequence: Synthetic oligonucleotide
  Antisense strand to SEQ ID NO: 2164040
aacuccaaugagagccucu

SEQ ID NO: 2164042 - RNA, 19 nt, Artificial Sequence
  Description of Artificial Sequence: Synthetic oligonucleotide
  Sense strand starting at position 2886 of SEQ ID NO: 1883018
ggaguuauuuguugacaug

SEQ ID NO: 2164043 - RNA, 19 nt, Artificial Sequence
  Description of Artificial Sequence: Synthetic oligonucleotide
  Antisense strand to SEQ ID NO: 2164042
caugucaacaaauaacucc

SEQ ID NO: 2164044 - RNA, 19 nt, Artificial Sequence
  Description of Artificial Sequence: Synthetic oligonucleotide
  Sense strand starting at position 2952 of SEQ ID NO: 1883018
cugcauuucucccaaugag

SEQ ID NO: 2164045 - RNA, 19 nt, Artificial Sequence
  Description of Artificial Sequence: Synthetic oligonucleotide
  Antisense strand to SEQ ID NO: 2164044
cucauugggagaaaugcag

SEQ ID NO: 2164046 - RNA, 19 nt, Artificial Sequence
  Description of Artificial Sequence: Synthetic oligonucleotide
  Sense strand starting at position 2996 of SEQ ID NO: 1883018
cuagguagucuggaaucau

SEQ ID NO: 2164047 - RNA, 19 nt, Artificial Sequence
  Description of Artificial Sequence: Synthetic oligonucleotide
  Antisense strand to SEQ ID NO: 2164046
augauuccagacuaccuag

SEQ ID NO: 2164048 - RNA, 19 nt, Artificial Sequence
  Description of Artificial Sequence: Synthetic oligonucleotide
  Sense strand starting at position 3539 of SEQ ID NO: 1883018
uagauagggucuuucuaug

SEQ ID NO: 2164049 - RNA, 19 nt, Artificial Sequence
  Description of Artificial Sequence: Synthetic oligonucleotide
  Antisense strand to SEQ ID NO: 2164048
cauagaaagacccuaucua

SEQ ID NO: 2164050 - RNA, 19 nt, Artificial Sequence
  Description of Artificial Sequence: Synthetic oligonucleotide
  Sense strand starting at position 3559 of SEQ ID NO: 1883018
ugcucagguuggucugaaa

SEQ ID NO: 2164051 - RNA, 19 nt, Artificial Sequence
  Description of Artificial Sequence: Synthetic oligonucleotide
  Antisense strand to SEQ ID NO: 2164050
uuucagaccaaccugagca

SEQ ID NO: 2164052 - RNA, 19 nt, Artificial Sequence
  Description of Artificial Sequence: Synthetic oligonucleotide
  Sense strand starting at position 171 of SEQ ID NO: 1883019
aagccuguucuuuagauag

SEQ ID NO: 2164053 - RNA, 19 nt, Artificial Sequence
  Description of Artificial Sequence: Synthetic oligonucleotide
  Antisense strand to SEQ ID NO: 2164052
cuaucuaaagaacaggcuu

SEQ ID NO: 2164054 - RNA, 19 nt, Artificial Sequence
  Description of Artificial Sequence: Synthetic oligonucleotide
  Sense strand starting at position 267 of SEQ ID NO: 1883019
agauuacagucacucugau

SEQ ID NO: 2164055 - RNA, 19 nt, Artificial Sequence
  Description of Artificial Sequence: Synthetic oligonucleotide
  Antisense strand to SEQ ID NO: 2164054
aucagagugacuguaaucu

SEQ ID NO: 2164056 - RNA, 19 nt, Artificial Sequence
  Description of Artificial Sequence: Synthetic oligonucleotide
  Sense strand starting at position 303 of SEQ ID NO: 1883019
cuuguuauggcacaaauua

SEQ ID NO: 2164057 - RNA, 19 nt, Artificial Sequence
  Description of Artificial Sequence: Synthetic oligonucleotide
  Antisense strand to SEQ ID NO: 2164056
uaauuugugccauaacaag

SEQ ID NO: 2164058 - RNA, 19 nt, Artificial Sequence
  Description of Artificial Sequence: Synthetic oligonucleotide
  Sense strand starting at position 378 of SEQ ID NO: 1883019
gcacauauuuaugaagaca

SEQ ID NO: 2164059 - RNA, 19 nt, Artificial Sequence
  Description of Artificial Sequence: Synthetic oligonucleotide
  Antisense strand to SEQ ID NO: 2164058
ugucuucauaaauaugugc

SEQ ID NO: 2164060 - RNA, 19 nt, Artificial Sequence
  Description of Artificial Sequence: Synthetic oligonucleotide
  Sense strand starting at position 411 of SEQ ID NO: 1883019
cacagugggcucugauaaa

SEQ ID NO: 2164061 - RNA, 19 nt, Artificial Sequence
  Description of Artificial Sequence: Synthetic oligonucleotide
  Antisense strand to SEQ ID NO: 2164060
uuuaucagagcccacugug

SEQ ID NO: 2164062 - RNA, 19 nt, Artificial Sequence
  Description of Artificial Sequence: Synthetic oligonucleotide
  Sense strand starting at position 444 of SEQ ID NO: 1883019
aguaaaugcuacucucaag

SEQ ID NO: 2164063 - RNA, 19 nt, Artificial Sequence
  Description of Artificial Sequence: Synthetic oligonucleotide
  Antisense strand to SEQ ID NO: 2164062
cuugagaguagcauuuacu

SEQ ID NO: 2164064 - RNA, 19 nt, Artificial Sequence
  Description of Artificial Sequence: Synthetic oligonucleotide
  Sense strand starting at position 450 of SEQ ID NO: 1883019
ugcuacucucaagaagauu

SEQ ID NO: 2164065 - RNA, 19 nt, Artificial Sequence
  Description of Artificial Sequence: Synthetic oligonucleotide
  Antisense strand to SEQ ID NO: 2164064
aaucuucuugagaguagca

SEQ ID NO: 2164066 - RNA, 19 nt, Artificial Sequence
  Description of Artificial Sequence: Synthetic oligonucleotide
  Sense strand starting at position 517 of SEQ ID NO: 1883019
uaggacgugaagugauaaa

SEQ ID NO: 2164067 - RNA, 19 nt, Artificial Sequence
  Description of Artificial Sequence: Synthetic oligonucleotide
  Antisense strand to SEQ ID NO: 2164066
uuuaucacuucacguccua

SEQ ID NO: 2164068 - RNA, 19 nt, Artificial Sequence
  Description of Artificial Sequence: Synthetic oligonucleotide
  Sense strand starting at position 538 of SEQ ID NO: 1883019
guauaagacgaauggaguu

SEQ ID NO: 2164069 - RNA, 19 nt, Artificial Sequence
  Description of Artificial Sequence: Synthetic oligonucleotide
  Antisense strand to SEQ ID NO: 2164068
aacuccauucgucuuauac

SEQ ID NO: 2164070 - RNA, 19 nt, Artificial Sequence
  Description of Artificial Sequence: Synthetic oligonucleotide
  Sense strand starting at position 581 of SEQ ID NO: 1883019
gcuagaggaauugagcauu

SEQ ID NO: 2164071 - RNA, 19 nt, Artificial Sequence
  Description of Artificial Sequence: Synthetic oligonucleotide
  Antisense strand to SEQ ID NO: 2164070
aaugcucaauuccucuagc

SEQ ID NO: 2164072 - RNA, 19 nt, Artificial Sequence
  Description of Artificial Sequence: Synthetic oligonucleotide
  Sense strand starting at position 605 of SEQ ID NO: 1883019
uuagaagggucagcuuaga

SEQ ID NO: 2164073 - RNA, 19 nt, Artificial Sequence
  Description of Artificial Sequence: Synthetic oligonucleotide
  Antisense strand to SEQ ID NO: 2164072
ucuaagcugacccuucuaa

SEQ ID NO: 2164074 - RNA, 19 nt, Artificial Sequence
  Description of Artificial Sequence: Synthetic oligonucleotide
  Sense strand starting at position 619 of SEQ ID NO: 1883019
uuagaagggucauugaacu

SEQ ID NO: 2164075 - RNA, 19 nt, Artificial Sequence
  Description of Artificial Sequence: Synthetic oligonucleotide
  Antisense strand to SEQ ID NO: 2164074
aguucaaugacccuucuaa

SEQ ID NO: 2164076 - RNA, 19 nt, Artificial Sequence
  Description of Artificial Sequence: Synthetic oligonucleotide
  Sense strand starting at position 625 of SEQ ID NO: 1883019
gggucauugaacuaugccu

SEQ ID NO: 2164077 - RNA, 19 nt, Artificial Sequence
  Description of Artificial Sequence: Synthetic oligonucleotide
  Antisense strand to SEQ ID NO: 2164076
aggcauaguucaaugaccc

SEQ ID NO: 2164078 - RNA, 19 nt, Artificial Sequence
  Description of Artificial Sequence: Synthetic oligonucleotide
  Sense strand starting at position 639 of SEQ ID NO: 1883019
ugccuuagagaauggacua

SEQ ID NO: 2164079 - RNA, 19 nt, Artificial Sequence
  Description of Artificial Sequence: Synthetic oligonucleotide
  Antisense strand to SEQ ID NO: 2164078
uaguccauucucuaaggca

SEQ ID NO: 2164080 - RNA, 19 nt, Artificial Sequence
  Description of Artificial Sequence: Synthetic oligonucleotide
  Sense strand starting at position 790 of SEQ ID NO: 1883019
uguauuuccugcuugggua

SEQ ID NO: 2164081 - RNA, 19 nt, Artificial Sequence
  Description of Artificial Sequence: Synthetic oligonucleotide
  Antisense strand to SEQ ID NO: 2164080
uacccaagcaggaaauaca

SEQ ID NO: 2164082 - RNA, 19 nt, Artificial Sequence
  Description of Artificial Sequence: Synthetic oligonucleotide
  Sense strand starting at position 791 of SEQ ID NO: 1883019
guauuuccugcuuggguau

SEQ ID NO: 2164083 - RNA, 19 nt, Artificial Sequence
  Description of Artificial Sequence: Synthetic oligonucleotide
  Antisense strand to SEQ ID NO: 2164082
auacccaagcaggaaauac

SEQ ID NO: 2164084 - RNA, 19 nt, Artificial Sequence
  Description of Artificial Sequence: Synthetic oligonucleotide
  Sense strand starting at position 1445 of SEQ ID NO: 1883019
caugaaauugaccgucaga

SEQ ID NO: 2164085 - RNA, 19 nt, Artificial Sequence
  Description of Artificial Sequence: Synthetic oligonucleotide
  Antisense strand to SEQ ID NO: 2164084
ucugacggucaauuucaug

SEQ ID NO: 2164086 - RNA, 19 nt, Artificial Sequence
  Description of Artificial Sequence: Synthetic oligonucleotide
  Sense strand starting at position 1448 of SEQ ID NO: 1883019
gaaauugaccgucagagcu

SEQ ID NO: 2164087 - RNA, 19 nt, Artificial Sequence
  Description of Artificial Sequence: Synthetic oligonucleotide
  Antisense strand to SEQ ID NO: 2164086
agcucugacggucaauuuc

SEQ ID NO: 2164088 - RNA, 19 nt, Artificial Sequence
  Description of Artificial Sequence: Synthetic oligonucleotide
  Sense strand starting at position 1460 of SEQ ID NO: 1883019
cagagcugucaugaaucau

SEQ ID NO: 2164089 - RNA, 19 nt, Artificial Sequence
  Description of Artificial Sequence: Synthetic oligonucleotide
  Antisense strand to SEQ ID NO: 2164088
augauucaugacagcucug

SEQ ID NO: 2164090 - RNA, 19 nt, Artificial Sequence
  Description of Artificial Sequence: Synthetic oligonucleotide
  Sense strand starting at position 1464 of SEQ ID NO: 1883019
gcugucaugaaucaugaag

SEQ ID NO: 2164091 - RNA, 19 nt, Artificial Sequence
  Description of Artificial Sequence: Synthetic oligonucleotide
  Antisense strand to SEQ ID NO: 2164090
cuucaugauucaugacagc

SEQ ID NO: 2164092 - RNA, 19 nt, Artificial Sequence
  Description of Artificial Sequence: Synthetic oligonucleotide
  Sense strand starting at position 1805 of SEQ ID NO: 1883019
ucuugaaacuuagugcaaa

SEQ ID NO: 2164093 - RNA, 19 nt, Artificial Sequence
  Description of Artificial Sequence: Synthetic oligonucleotide
  Antisense strand to SEQ ID NO: 2164092
uuugcacuaaguuucaaga

SEQ ID NO: 2164094 - RNA, 19 nt, Artificial Sequence
  Description of Artificial Sequence: Synthetic oligonucleotide
  Sense strand starting at position 1808 of SEQ ID NO: 1883019
ugaaacuuagugcaaagua

SEQ ID NO: 2164095 - RNA, 19 nt, Artificial Sequence
  Description of Artificial Sequence: Synthetic oligonucleotide
  Antisense strand to SEQ ID NO: 2164094
uacuuugcacuaaguuuca

SEQ ID NO: 2164096 - RNA, 19 nt, Artificial Sequence
  Description of Artificial Sequence: Synthetic oligonucleotide
  Sense strand starting at position 2352 of SEQ ID NO: 1883019
ccugaauaucaguaaguau

SEQ ID NO: 2164097 - RNA, 19 nt, Artificial Sequence
  Description of Artificial Sequence: Synthetic oligonucleotide
  Antisense strand to SEQ ID NO: 2164096
auacuuacugauauucagg

SEQ ID NO: 2164098 - RNA, 19 nt, Artificial Sequence
  Description of Artificial Sequence: Synthetic oligonucleotide
  Sense strand starting at position 2411 of SEQ ID NO: 1883019
cugguaacgauuuguuuau

SEQ ID NO: 2164099 - RNA, 19 nt, Artificial Sequence
  Description of Artificial Sequence: Synthetic oligonucleotide
  Antisense strand to SEQ ID NO: 2164098
auaaacaaaucguuaccag

SEQ ID NO: 2164100 - RNA, 19 nt, Artificial Sequence
  Description of Artificial Sequence: Synthetic oligonucleotide
  Sense strand starting at position 2518 of SEQ ID NO: 1883019
aggccugaauuccuuauau

SEQ ID NO: 2164101 - RNA, 19 nt, Artificial Sequence
  Description of Artificial Sequence: Synthetic oligonucleotide
  Antisense strand to SEQ ID NO: 2164100
auauaaggaauucaggccu

SEQ ID NO: 2164102 - RNA, 19 nt, Artificial Sequence
  Description of Artificial Sequence: Synthetic oligonucleotide
  Sense strand starting at position 2655 of SEQ ID NO: 1883019
aaugauuuauugucugugu

SEQ ID NO: 2164103 - RNA, 19 nt, Artificial Sequence
  Description of Artificial Sequence: Synthetic oligonucleotide
  Antisense strand to SEQ ID NO: 2164102
acacagacaauaaaucauu

SEQ ID NO: 2164104 - RNA, 19 nt, Artificial Sequence
  Description of Artificial Sequence: Synthetic oligonucleotide
  Sense strand starting at position 2656 of SEQ ID NO: 1883019
augauuuauugucugugua

SEQ ID NO: 2164105 - RNA, 19 nt, Artificial Sequence
  Description of Artificial Sequence: Synthetic oligonucleotide
  Antisense strand to SEQ ID NO: 2164104
uacacagacaauaaaucau

SEQ ID NO: 2164106 - RNA, 19 nt, Artificial Sequence
  Description of Artificial Sequence: Synthetic oligonucleotide
  Sense strand starting at position 2657 of SEQ ID NO: 1883019
ugauuuauugucuguguaa

SEQ ID NO: 2164107 - RNA, 19 nt, Artificial Sequence
  Description of Artificial Sequence: Synthetic oligonucleotide
  Antisense strand to SEQ ID NO: 2164106
uuacacagacaauaaauca

SEQ ID NO: 2164108 - RNA, 19 nt, Artificial Sequence
  Description of Artificial Sequence: Synthetic oligonucleotide
  Sense strand starting at position 2713 of SEQ ID NO: 1883019
augguaugcuucuuuauuu

SEQ ID NO: 2164109 - RNA, 19 nt, Artificial Sequence
  Description of Artificial Sequence: Synthetic oligonucleotide
  Antisense strand to SEQ ID NO: 2164108
aaauaaagaagcauaccau

SEQ ID NO: 2164110 - RNA, 19 nt, Artificial Sequence
  Description of Artificial Sequence: Synthetic oligonucleotide
  Sense strand starting at position 2756 of SEQ ID NO: 1883019
auaacuuaucagggucaau

SEQ ID NO: 2164111 - RNA, 19 nt, Artificial Sequence
  Description of Artificial Sequence: Synthetic oligonucleotide
  Antisense strand to SEQ ID NO: 2164110
auugacccugauaaguuau

SEQ ID NO: 2164112 - RNA, 19 nt, Artificial Sequence
  Description of Artificial Sequence: Synthetic oligonucleotide
  Sense strand starting at position 2768 of SEQ ID NO: 1883019
ggucaaugauaagcucaau

SEQ ID NO: 2164113 - RNA, 19 nt, Artificial Sequence
  Description of Artificial Sequence: Synthetic oligonucleotide
  Antisense strand to SEQ ID NO: 2164112
auugagcuuaucauugacc

SEQ ID NO: 2164114 - RNA, 19 nt, Artificial Sequence
  Description of Artificial Sequence: Synthetic oligonucleotide
  Sense strand starting at position 2774 of SEQ ID NO: 1883019
ugauaagcucaauaucagu

SEQ ID NO: 2164115 - RNA, 19 nt, Artificial Sequence
  Description of Artificial Sequence: Synthetic oligonucleotide
  Antisense strand to SEQ ID NO: 2164114
acugauauugagcuuauca

SEQ ID NO: 2164116 - RNA, 19 nt, Artificial Sequence
  Description of Artificial Sequence: Synthetic oligonucleotide
  Sense strand starting at position 2779 of SEQ ID NO: 1883019
agcucaauaucagugauua

SEQ ID NO: 2164117 - RNA, 19 nt, Artificial Sequence
  Description of Artificial Sequence: Synthetic oligonucleotide
  Antisense strand to SEQ ID NO: 2164116
uaaucacugauauugagcu

SEQ ID NO: 2164118 - RNA, 19 nt, Artificial Sequence
  Description of Artificial Sequence: Synthetic oligonucleotide
  Sense strand starting at position 2802 of SEQ ID NO: 1883019
ggguuauccucacuggaau

SEQ ID NO: 2164119 - RNA, 19 nt, Artificial Sequence
  Description of Artificial Sequence: Synthetic oligonucleotide
  Antisense strand to SEQ ID NO: 2164118
auuccagugaggauaaccc

SEQ ID NO: 2164120 - RNA, 19 nt, Artificial Sequence
  Description of Artificial Sequence: Synthetic oligonucleotide
  Sense strand starting at position 2803 of SEQ ID NO: 1883019
gguuauccucacuggaauu

SEQ ID NO: 2164121 - RNA, 19 nt, Artificial Sequence
  Description of Artificial Sequence: Synthetic oligonucleotide
  Antisense strand to SEQ ID NO: 2164120
aauuccagugaggauaacc

SEQ ID NO: 2164122 - RNA, 19 nt, Artificial Sequence
  Description of Artificial Sequence: Synthetic oligonucleotide
  Sense strand starting at position 2837 of SEQ ID NO: 1883019
gcuuacauauucccaggaa

SEQ ID NO: 2164123 - RNA, 19 nt, Artificial Sequence
  Description of Artificial Sequence: Synthetic oligonucleotide
  Antisense strand to SEQ ID NO: 2164122
uuccugggaauauguaagc

SEQ ID NO: 2164124 - RNA, 19 nt, Artificial Sequence
  Description of Artificial Sequence: Synthetic oligonucleotide
  Sense strand starting at position 2871 of SEQ ID NO: 1883019
guucuugguccacagggau

SEQ ID NO: 2164125 - RNA, 19 nt, Artificial Sequence
  Description of Artificial Sequence: Synthetic oligonucleotide
  Antisense strand to SEQ ID NO: 2164124
aucccuguggaccaagaac

SEQ ID NO: 2164126 - RNA, 19 nt, Artificial Sequence
  Description of Artificial Sequence: Synthetic oligonucleotide
  Sense strand starting at position 3569 of SEQ ID NO: 1883019
uugguuaugcuccacugaa

SEQ ID NO: 2164127 - RNA, 19 nt, Artificial Sequence
  Description of Artificial Sequence: Synthetic oligonucleotide
  Antisense strand to SEQ ID NO: 2164126
uucaguggagcauaaccaa

SEQ ID NO: 2164128 - RNA, 19 nt, Artificial Sequence
  Description of Artificial Sequence: Synthetic oligonucleotide
  Sense strand starting at position 3607 of SEQ ID NO: 1883019
ccuuaaguuguggaaguaa

SEQ ID NO: 2164129 - RNA, 19 nt, Artificial Sequence
  Description of Artificial Sequence: Synthetic oligonucleotide
  Antisense strand to SEQ ID NO: 2164128
uuacuuccacaacuuaagg

SEQ ID NO: 2164130 - RNA, 19 nt, Artificial Sequence
  Description of Artificial Sequence: Synthetic oligonucleotide
  Sense strand starting at position 3748 of SEQ ID NO: 1883019
gguuaaaugcacugaacac

SEQ ID NO: 2164131 - RNA, 19 nt, Artificial Sequence
  Description of Artificial Sequence: Synthetic oligonucleotide
  Antisense strand to SEQ ID NO: 2164130
guguucagugcauuuaacc

SEQ ID NO: 2164132 - RNA, 19 nt, Artificial Sequence
  Description of Artificial Sequence: Synthetic oligonucleotide
  Sense strand starting at position 199 of SEQ ID NO: 1883020
uuuagcuaucagcaaaugu

SEQ ID NO: 2164133 - RNA, 19 nt, Artificial Sequence
  Description of Artificial Sequence: Synthetic oligonucleotide
  Antisense strand to SEQ ID NO: 2164132
acauuugcugauagcuaaa

SEQ ID NO: 2164134 - RNA, 19 nt, Artificial Sequence
  Description of Artificial Sequence: Synthetic oligonucleotide
  Sense strand starting at position 335 of SEQ ID NO: 1883020
aguugaggaguaugaaacu

SEQ ID NO: 2164135 - RNA, 19 nt, Artificial Sequence
  Description of Artificial Sequence: Synthetic oligonucleotide
  Antisense strand to SEQ ID NO: 2164134
aguuucauacuccucaacu

SEQ ID NO: 2164136 - RNA, 19 nt, Artificial Sequence
  Description of Artificial Sequence: Synthetic oligonucleotide
  Sense strand starting at position 484 of SEQ ID NO: 1883020
ucugguaacuguguaggau

SEQ ID NO: 2164137 - RNA, 19 nt, Artificial Sequence
  Description of Artificial Sequence: Synthetic oligonucleotide
  Antisense strand to SEQ ID NO: 2164136
auccuacacaguuaccaga

SEQ ID NO: 2164138 - RNA, 19 nt, Artificial Sequence
  Description of Artificial Sequence: Synthetic oligonucleotide
  Sense strand starting at position 485 of SEQ ID NO: 1883020
cugguaacuguguaggauu

SEQ ID NO: 2164139 - RNA, 19 nt, Artificial Sequence
  Description of Artificial Sequence: Synthetic oligonucleotide
  Antisense strand to SEQ ID NO: 2164138
aauccuacacaguuaccag

SEQ ID NO: 2164140 - RNA, 19 nt, Artificial Sequence
  Description of Artificial Sequence: Synthetic oligonucleotide
  Sense strand starting at position 487 of SEQ ID NO: 1883020
gguaacuguguaggauuga

SEQ ID NO: 2164141 - RNA, 19 nt, Artificial Sequence
  Description of Artificial Sequence: Synthetic oligonucleotide
  Antisense strand to SEQ ID NO: 2164140
ucaauccuacacaguuacc

SEQ ID NO: 2164142 - RNA, 19 nt, Artificial Sequence
  Description of Artificial Sequence: Synthetic oligonucleotide
  Sense strand starting at position 492 of SEQ ID NO: 1883020
cuguguaggauugaaauug

SEQ ID NO: 2164143 - RNA, 19 nt, Artificial Sequence
  Description of Artificial Sequence: Synthetic oligonucleotide
  Antisense strand to SEQ ID NO: 2164142
caauuucaauccuacacag

SEQ ID NO: 2164144 - RNA, 19 nt, Artificial Sequence
  Description of Artificial Sequence: Synthetic oligonucleotide
  Sense strand starting at position 759 of SEQ ID NO: 1883020
ugcuacuuaggaugauauu

SEQ ID NO: 2164145 - RNA, 19 nt, Artificial Sequence
  Description of Artificial Sequence: Synthetic oligonucleotide
  Antisense strand to SEQ ID NO: 2164144
aauaucauccuaaguagca

SEQ ID NO: 2164146 - RNA, 19 nt, Artificial Sequence
  Description of Artificial Sequence: Synthetic oligonucleotide
  Sense strand starting at position 867 of SEQ ID NO: 1883020
ggagacuguugaaggagau

SEQ ID NO: 2164147 - RNA, 19 nt, Artificial Sequence
  Description of Artificial Sequence: Synthetic oligonucleotide
  Antisense strand to SEQ ID NO: 2164146
aucuccuucaacagucucc

SEQ ID NO: 2164148 - RNA, 19 nt, Artificial Sequence
  Description of Artificial Sequence: Synthetic oligonucleotide
  Sense strand starting at position 978 of SEQ ID NO: 1883020
gcaggauaccacgauguca

SEQ ID NO: 2164149 - RNA, 19 nt, Artificial Sequence
  Description of Artificial Sequence: Synthetic oligonucleotide
  Antisense strand to SEQ ID NO: 2164148
ugacaucgugguauccugc

SEQ ID NO: 2164150 - RNA, 19 nt, Artificial Sequence
  Description of Artificial Sequence: Synthetic oligonucleotide
  Sense strand starting at position 995 of SEQ ID NO: 1883020
cacagaagucaagguggau

SEQ ID NO: 2164151 - RNA, 19 nt, Artificial Sequence
  Description of Artificial Sequence: Synthetic oligonucleotide
  Antisense strand to SEQ ID NO: 2164150
auccaccuugacuucugug

SEQ ID NO: 2164152 - RNA, 19 nt, Artificial Sequence
  Description of Artificial Sequence: Synthetic oligonucleotide
  Sense strand starting at position 998 of SEQ ID NO: 1883020
agaagucaagguggauauu

SEQ ID NO: 2164153 - RNA, 19 nt, Artificial Sequence
  Description of Artificial Sequence: Synthetic oligonucleotide
  Antisense strand to SEQ ID NO: 2164152
aauauccaccuugacuucu

SEQ ID NO: 2164154 - RNA, 19 nt, Artificial Sequence
  Description of Artificial Sequence: Synthetic oligonucleotide
  Sense strand starting at position 1007 of SEQ ID NO: 1883020
gguggauauuuacaagaaa

SEQ ID NO: 2164155 - RNA, 19 nt, Artificial Sequence
  Description of Artificial Sequence: Synthetic oligonucleotide
  Antisense strand to SEQ ID NO: 2164154
uuucuuguaaauauccacc

SEQ ID NO: 2164156 - RNA, 19 nt, Artificial Sequence
  Description of Artificial Sequence: Synthetic oligonucleotide
  Sense strand starting at position 1153 of SEQ ID NO: 1883020
gagugaaguccuuaguuac

SEQ ID NO: 2164157 - RNA, 19 nt, Artificial Sequence
  Description of Artificial Sequence: Synthetic oligonucleotide
  Antisense strand to SEQ ID NO: 2164156
guaacuaaggacuucacuc

SEQ ID NO: 2164158 - RNA, 19 nt, Artificial Sequence
  Description of Artificial Sequence: Synthetic oligonucleotide
  Sense strand starting at position 1156 of SEQ ID NO: 1883020
ugaaguccuuaguuacaga

SEQ ID NO: 2164159 - RNA, 19 nt, Artificial Sequence
  Description of Artificial Sequence: Synthetic oligonucleotide
  Antisense strand to SEQ ID NO: 2164158
ucuguaacuaaggacuuca

SEQ ID NO: 2164160 - RNA, 19 nt, Artificial Sequence
  Description of Artificial Sequence: Synthetic oligonucleotide
  Sense strand starting at position 1270 of SEQ ID NO: 1883020
cuuuaaggcuucuuuggaa

SEQ ID NO: 2164161 - RNA, 19 nt, Artificial Sequence
  Description of Artificial Sequence: Synthetic oligonucleotide
  Antisense strand to SEQ ID NO: 2164160
uuccaaagaagccuuaaag

SEQ ID NO: 2164162 - RNA, 19 nt, Artificial Sequence
  Description of Artificial Sequence: Synthetic oligonucleotide
  Sense strand starting at position 1296 of SEQ ID NO: 1883020
gguacagacugugcuugaa

SEQ ID NO: 2164163 - RNA, 19 nt, Artificial Sequence
  Description of Artificial Sequence: Synthetic oligonucleotide
  Antisense strand to SEQ ID NO: 2164162
uucaagcacagucuguacc

SEQ ID NO: 2164164 - RNA, 19 nt, Artificial Sequence
  Description of Artificial Sequence: Synthetic oligonucleotide
  Sense strand starting at position 1381 of SEQ ID NO: 1883020
cgcccagguagugagauua

SEQ ID NO: 2164165 - RNA, 19 nt, Artificial Sequence
  Description of Artificial Sequence: Synthetic oligonucleotide
  Antisense strand to SEQ ID NO: 2164164
uaaucucacuaccugggcg

SEQ ID NO: 2164166 - RNA, 19 nt, Artificial Sequence
  Description of Artificial Sequence: Synthetic oligonucleotide
  Sense strand starting at position 1478 of SEQ ID NO: 1883020
guuguagagaugcacugau

SEQ ID NO: 2164167 - RNA, 19 nt, Artificial Sequence
  Description of Artificial Sequence: Synthetic oligonucleotide
  Antisense strand to SEQ ID NO: 2164166
aucagugcaucucuacaac

SEQ ID NO: 2164168 - RNA, 19 nt, Artificial Sequence
  Description of Artificial Sequence: Synthetic oligonucleotide
  Sense strand starting at position 1561 of SEQ ID NO: 1883020
caaucucugguuugugaag

SEQ ID NO: 2164169 - RNA, 19 nt, Artificial Sequence
  Description of Artificial Sequence: Synthetic oligonucleotide
  Antisense strand to SEQ ID NO: 2164168
cuucacaaaccagagauug

SEQ ID NO: 2164170 - RNA, 19 nt, Artificial Sequence
  Description of Artificial Sequence: Synthetic oligonucleotide
  Sense strand starting at position 1570 of SEQ ID NO: 1883020
guuugugaagucuaaagcu

SEQ ID NO: 2164171 - RNA, 19 nt, Artificial Sequence
  Description of Artificial Sequence: Synthetic oligonucleotide
  Antisense strand to SEQ ID NO: 2164170
agcuuuagacuucacaaac

SEQ ID NO: 2164172 - RNA, 19 nt, Artificial Sequence
  Description of Artificial Sequence: Synthetic oligonucleotide
  Sense strand starting at position 2321 of SEQ ID NO: 1883020
uucuuauaaggcugauucu

SEQ ID NO: 2164173 - RNA, 19 nt, Artificial Sequence
  Description of Artificial Sequence: Synthetic oligonucleotide
  Antisense strand to SEQ ID NO: 2164172
agaaucagccuuauaagaa

SEQ ID NO: 2164174 - RNA, 19 nt, Artificial Sequence
  Description of Artificial Sequence: Synthetic oligonucleotide
  Sense strand starting at position 2322 of SEQ ID NO: 1883020
ucuuauaaggcugauucuu

SEQ ID NO: 2164175 - RNA, 19 nt, Artificial Sequence
  Description of Artificial Sequence: Synthetic oligonucleotide
  Antisense strand to SEQ ID NO: 2164174
aagaaucagccuuauaaga

SEQ ID NO: 2164176 - RNA, 19 nt, Artificial Sequence
  Description of Artificial Sequence: Synthetic oligonucleotide
  Sense strand starting at position 2330 of SEQ ID NO: 1883020
ggcugauucuuuccuuaua

SEQ ID NO: 2164177 - RNA, 19 nt, Artificial Sequence
  Description of Artificial Sequence: Synthetic oligonucleotide
  Antisense strand to SEQ ID NO: 2164176
uauaaggaaagaaucagcc

SEQ ID NO: 2164178 - RNA, 19 nt, Artificial Sequence
  Description of Artificial Sequence: Synthetic oligonucleotide
  Sense strand starting at position 2357 of SEQ ID NO: 1883020
auugcaugguuauuucuau

SEQ ID NO: 2164179 - RNA, 19 nt, Artificial Sequence
  Description of Artificial Sequence: Synthetic oligonucleotide
  Antisense strand to SEQ ID NO: 2164178
auagaaauaaccaugcaau

SEQ ID NO: 2164180 - RNA, 19 nt, Artificial Sequence
  Description of Artificial Sequence: Synthetic oligonucleotide
  Sense strand starting at position 2802 of SEQ ID NO: 1883020
gucuguugccuugaagaau

SEQ ID NO: 2164181 - RNA, 19 nt, Artificial Sequence
  Description of Artificial Sequence: Synthetic oligonucleotide
  Antisense strand to SEQ ID NO: 2164180
auucuucaaggcaacagac

SEQ ID NO: 2164182 - RNA, 19 nt, Artificial Sequence
  Description of Artificial Sequence: Synthetic oligonucleotide
  Sense strand starting at position 2899 of SEQ ID NO: 1883020
accauaggacauggucaua

SEQ ID NO: 2164183 - RNA, 19 nt, Artificial Sequence
  Description of Artificial Sequence: Synthetic oligonucleotide
  Antisense strand to SEQ ID NO: 2164182
uaugaccauguccuauggu

SEQ ID NO: 2164184 - RNA, 19 nt, Artificial Sequence
  Description of Artificial Sequence: Synthetic oligonucleotide
  Sense strand starting at position 2930 of SEQ ID NO: 1883020
cucugaaucccagguaagu

SEQ ID NO: 2164185 - RNA, 19 nt, Artificial Sequence
  Description of Artificial Sequence: Synthetic oligonucleotide
  Antisense strand to SEQ ID NO: 2164184
acuuaccugggauucagag

SEQ ID NO: 2164186 - RNA, 19 nt, Artificial Sequence
  Description of Artificial Sequence: Synthetic oligonucleotide
  Sense strand starting at position 2967 of SEQ ID NO: 1883020
agugaauuccuggaggcca

SEQ ID NO: 2164187 - RNA, 19 nt, Artificial Sequence
  Description of Artificial Sequence: Synthetic oligonucleotide
  Antisense strand to SEQ ID NO: 2164186
uggccuccaggaauucacu

SEQ ID NO: 2164188 - RNA, 19 nt, Artificial Sequence
  Description of Artificial Sequence: Synthetic oligonucleotide
  Sense strand starting at position 3004 of SEQ ID NO: 1883020
caggcauaacuauguuaag

SEQ ID NO: 2164189 - RNA, 19 nt, Artificial Sequence
  Description of Artificial Sequence: Synthetic oligonucleotide
  Antisense strand to SEQ ID NO: 2164188
cuuaacauaguuaugccug

SEQ ID NO: 2164190 - RNA, 19 nt, Artificial Sequence
  Description of Artificial Sequence: Synthetic oligonucleotide
  Sense strand starting at position 3370 of SEQ ID NO: 1883020
ggugagguggaagguuaau

SEQ ID NO: 2164191 - RNA, 19 nt, Artificial Sequence
  Description of Artificial Sequence: Synthetic oligonucleotide
  Antisense strand to SEQ ID NO: 2164190
auuaaccuuccaccucacc

SEQ ID NO: 2164192 - RNA, 19 nt, Artificial Sequence
  Description of Artificial Sequence: Synthetic oligonucleotide
  Sense strand starting at position 3557 of SEQ ID NO: 1883020
agucauaagcaaugacaua

SEQ ID NO: 2164193 - RNA, 19 nt, Artificial Sequence
  Description of Artificial Sequence: Synthetic oligonucleotide
  Antisense strand to SEQ ID NO: 2164192
uaugucauugcuuaugacu

SEQ ID NO: 2164194 - RNA, 19 nt, Artificial Sequence
  Description of Artificial Sequence: Synthetic oligonucleotide
  Sense strand starting at position 3637 of SEQ ID NO: 1883020
ugcaaaucucaagauaggu

SEQ ID NO: 2164195 - RNA, 19 nt, Artificial Sequence
  Description of Artificial Sequence: Synthetic oligonucleotide
  Antisense strand to SEQ ID NO: 2164194
accuaucuugagauuugca

SEQ ID NO: 2164196 - RNA, 19 nt, Artificial Sequence
  Description of Artificial Sequence: Synthetic oligonucleotide
  Sense strand starting at position 3693 of SEQ ID NO: 1883020
uaugaccuaugguuaagua

SEQ ID NO: 2164197 - RNA, 19 nt, Artificial Sequence
  Description of Artificial Sequence: Synthetic oligonucleotide
  Antisense strand to SEQ ID NO: 2164196
uacuuaaccauaggucaua

SEQ ID NO: 2164198 - RNA, 19 nt, Artificial Sequence
  Description of Artificial Sequence: Synthetic oligonucleotide
  Sense strand starting at position 3762 of SEQ ID NO: 1883020
ugacaugaauguguuauau

SEQ ID NO: 2164199 - RNA, 19 nt, Artificial Sequence
  Description of Artificial Sequence: Synthetic oligonucleotide
  Antisense strand to SEQ ID NO: 2164198
auauaacacauucauguca

SEQ ID NO: 2164200 - RNA, 19 nt, Artificial Sequence
  Description of Artificial Sequence: Synthetic oligonucleotide
  Sense strand starting at position 3782 of SEQ ID NO: 1883020
aaagaauaucuguguguua

SEQ ID NO: 2164201 - RNA, 19 nt, Artificial Sequence
  Description of Artificial Sequence: Synthetic oligonucleotide
  Antisense strand to SEQ ID NO: 2164200
uaacacacagauauucuuu

SEQ ID NO: 2164202 - RNA, 19 nt, Artificial Sequence
  Description of Artificial Sequence: Synthetic oligonucleotide
  Sense strand starting at position 3783 of SEQ ID NO: 1883020
aagaauaucuguguguuau

SEQ ID NO: 2164203 - RNA, 19 nt, Artificial Sequence
  Description of Artificial Sequence: Synthetic oligonucleotide
  Antisense strand to SEQ ID NO: 2164202
auaacacacagauauucuu

SEQ ID NO: 2164204 - RNA, 19 nt, Artificial Sequence
  Description of Artificial Sequence: Synthetic oligonucleotide
  Sense strand starting at position 3784 of SEQ ID NO: 1883020
agaauaucuguguguuaug

SEQ ID NO: 2164205 - RNA, 19 nt, Artificial Sequence
  Description of Artificial Sequence: Synthetic oligonucleotide
  Antisense strand to SEQ ID NO: 2164204
cauaacacacagauauucu

SEQ ID NO: 2164206 - RNA, 19 nt, Artificial Sequence
  Description of Artificial Sequence: Synthetic oligonucleotide
  Sense strand starting at position 3830 of SEQ ID NO: 1883020
ucauuuaucugguaagaug

SEQ ID NO: 2164207 - RNA, 19 nt, Artificial Sequence
  Description of Artificial Sequence: Synthetic oligonucleotide
  Antisense strand to SEQ ID NO: 2164206
caucuuaccagauaaauga

SEQ ID NO: 2164208 - RNA, 19 nt, Artificial Sequence
  Description of Artificial Sequence: Synthetic oligonucleotide
  Sense strand starting at position 3979 of SEQ ID NO: 1883020
uguuaugaucccuauguuu

SEQ ID NO: 2164209 - RNA, 19 nt, Artificial Sequence
  Description of Artificial Sequence: Synthetic oligonucleotide
  Antisense strand to SEQ ID NO: 2164208
aaacauagggaucauaaca

SEQ ID NO: 2164210 - RNA, 19 nt, Artificial Sequence
  Description of Artificial Sequence: Synthetic oligonucleotide
  Sense strand starting at position 3981 of SEQ ID NO: 1883020
uuaugaucccuauguuuau

SEQ ID NO: 2164211 - RNA, 19 nt, Artificial Sequence
  Description of Artificial Sequence: Synthetic oligonucleotide
  Antisense strand to SEQ ID NO: 2164210
auaaacauagggaucauaa

SEQ ID NO: 2164212 - RNA, 19 nt, Artificial Sequence
  Description of Artificial Sequence: Synthetic oligonucleotide
  Sense strand starting at position 171 of SEQ ID NO: 1883021
aagccuguucuuuagauag

SEQ ID NO: 2164213 - RNA, 19 nt, Artificial Sequence
  Description of Artificial Sequence: Synthetic oligonucleotide
  Antisense strand to SEQ ID NO: 2164212
cuaucuaaagaacaggcuu

SEQ ID NO: 2164214 - RNA, 19 nt, Artificial Sequence
  Description of Artificial Sequence: Synthetic oligonucleotide
  Sense strand starting at position 267 of SEQ ID NO: 1883021
agauuacagucacucugau

SEQ ID NO: 2164215 - RNA, 19 nt, Artificial Sequence
  Description of Artificial Sequence: Synthetic oligonucleotide
  Antisense strand to SEQ ID NO: 2164214
aucagagugacuguaaucu

SEQ ID NO: 2164216 - RNA, 19 nt, Artificial Sequence
  Description of Artificial Sequence: Synthetic oligonucleotide
  Sense strand starting at position 303 of SEQ ID NO: 1883021
cuuguuauggcacaaauua

SEQ ID NO: 2164217 - RNA, 19 nt, Artificial Sequence
  Description of Artificial Sequence: Synthetic oligonucleotide
  Antisense strand to SEQ ID NO: 2164216
uaauuugugccauaacaag

SEQ ID NO: 2164218 - RNA, 19 nt, Artificial Sequence
  Description of Artificial Sequence: Synthetic oligonucleotide
  Sense strand starting at position 378 of SEQ ID NO: 1883021
gcacauauuuaugaagaca

SEQ ID NO: 2164219 - RNA, 19 nt, Artificial Sequence
  Description of Artificial Sequence: Synthetic oligonucleotide
  Antisense strand to SEQ ID NO: 2164218
ugucuucauaaauaugugc

SEQ ID NO: 2164220 - RNA, 19 nt, Artificial Sequence
  Description of Artificial Sequence: Synthetic oligonucleotide
  Sense strand starting at position 411 of SEQ ID NO: 1883021
cacagugggcucugauaaa

SEQ ID NO: 2164221 - RNA, 19 nt, Artificial Sequence
  Description of Artificial Sequence: Synthetic oligonucleotide
  Antisense strand to SEQ ID NO: 2164220
uuuaucagagcccacugug

SEQ ID NO: 2164222 - RNA, 19 nt, Artificial Sequence
  Description of Artificial Sequence: Synthetic oligonucleotide
  Sense strand starting at position 444 of SEQ ID NO: 1883021
aguaaaugcuacucucaag

SEQ ID NO: 2164223 - RNA, 19 nt, Artificial Sequence
  Description of Artificial Sequence: Synthetic oligonucleotide
  Antisense strand to SEQ ID NO: 2164222
cuugagaguagcauuuacu

SEQ ID NO: 2164224 - RNA, 19 nt, Artificial Sequence
  Description of Artificial Sequence: Synthetic oligonucleotide
  Sense strand starting at position 450 of SEQ ID NO: 1883021
ugcuacucucaagaagauu

SEQ ID NO: 2164225 - RNA, 19 nt, Artificial Sequence
  Description of Artificial Sequence: Synthetic oligonucleotide
  Antisense strand to SEQ ID NO: 2164224
aaucuucuugagaguagca

SEQ ID NO: 2164226 - RNA, 19 nt, Artificial Sequence
  Description of Artificial Sequence: Synthetic oligonucleotide
  Sense strand starting at position 517 of SEQ ID NO: 1883021
uaggacgugaagugauaaa

SEQ ID NO: 2164227 - RNA, 19 nt, Artificial Sequence
  Description of Artificial Sequence: Synthetic oligonucleotide
  Antisense strand to SEQ ID NO: 2164226
uuuaucacuucacguccua

SEQ ID NO: 2164228 - RNA, 19 nt, Artificial Sequence
  Description of Artificial Sequence: Synthetic oligonucleotide
  Sense strand starting at position 538 of SEQ ID NO: 1883021
guauaagacgaauggaguu

SEQ ID NO: 2164229 - RNA, 19 nt, Artificial Sequence
  Description of Artificial Sequence: Synthetic oligonucleotide
  Antisense strand to SEQ ID NO: 2164228
aacuccauucgucuuauac

SEQ ID NO: 2164230 - RNA, 19 nt, Artificial Sequence
  Description of Artificial Sequence: Synthetic oligonucleotide
  Sense strand starting at position 581 of SEQ ID NO: 1883021
gcuagaggaauugagcauu

SEQ ID NO: 2164231 - RNA, 19 nt, Artificial Sequence
  Description of Artificial Sequence: Synthetic oligonucleotide
  Antisense strand to SEQ ID NO: 2164230
aaugcucaauuccucuagc

SEQ ID NO: 2164232 - RNA, 19 nt, Artificial Sequence
  Description of Artificial Sequence: Synthetic oligonucleotide
  Sense strand starting at position 605 of SEQ ID NO: 1883021
uuagaagggucagcuuaga

SEQ ID NO: 2164233 - RNA, 19 nt, Artificial Sequence
  Description of Artificial Sequence: Synthetic oligonucleotide
  Antisense strand to SEQ ID NO: 2164232
ucuaagcugacccuucuaa

SEQ ID NO: 2164234 - RNA, 19 nt, Artificial Sequence
  Description of Artificial Sequence: Synthetic oligonucleotide
  Sense strand starting at position 619 of SEQ ID NO: 1883021
uuagaagggucauugaacu

SEQ ID NO: 2164235 - RNA, 19 nt, Artificial Sequence
  Description of Artificial Sequence: Synthetic oligonucleotide
  Antisense strand to SEQ ID NO: 2164234
aguucaaugacccuucuaa

SEQ ID NO: 2164236 - RNA, 19 nt, Artificial Sequence
  Description of Artificial Sequence: Synthetic oligonucleotide
  Sense strand starting at position 625 of SEQ ID NO: 1883021
gggucauugaacuaugccu

SEQ ID NO: 2164237 - RNA, 19 nt, Artificial Sequence
  Description of Artificial Sequence: Synthetic oligonucleotide
  Antisense strand to SEQ ID NO: 2164236
aggcauaguucaaugaccc

SEQ ID NO: 2164238 - RNA, 19 nt, Artificial Sequence
  Description of Artificial Sequence: Synthetic oligonucleotide
  Sense strand starting at position 639 of SEQ ID NO: 1883021
ugccuuagagaauggacua

SEQ ID NO: 2164239 - RNA, 19 nt, Artificial Sequence
  Description of Artificial Sequence: Synthetic oligonucleotide
  Antisense strand to SEQ ID NO: 2164238
uaguccauucucuaaggca

SEQ ID NO: 2164240 - RNA, 19 nt, Artificial Sequence
  Description of Artificial Sequence: Synthetic oligonucleotide
  Sense strand starting at position 790 of SEQ ID NO: 1883021
uguauuuccugcuugggua

SEQ ID NO: 2164241 - RNA, 19 nt, Artificial Sequence
  Description of Artificial Sequence: Synthetic oligonucleotide
  Antisense strand to SEQ ID NO: 2164240
uacccaagcaggaaauaca

SEQ ID NO: 2164242 - RNA, 19 nt, Artificial Sequence
  Description of Artificial Sequence: Synthetic oligonucleotide
  Sense strand starting at position 791 of SEQ ID NO: 1883021
guauuuccugcuuggguau

SEQ ID NO: 2164243 - RNA, 19 nt, Artificial Sequence
  Description of Artificial Sequence: Synthetic oligonucleotide
  Antisense strand to SEQ ID NO: 2164242
auacccaagcaggaaauac

SEQ ID NO: 2164244 - RNA, 19 nt, Artificial Sequence
  Description of Artificial Sequence: Synthetic oligonucleotide
  Sense strand starting at position 1445 of SEQ ID NO: 1883021
caugaaauugaccgucaga

SEQ ID NO: 2164245 - RNA, 19 nt, Artificial Sequence
  Description of Artificial Sequence: Synthetic oligonucleotide
  Antisense strand to SEQ ID NO: 2164244
ucugacggucaauuucaug

SEQ ID NO: 2164246 - RNA, 19 nt, Artificial Sequence
  Description of Artificial Sequence: Synthetic oligonucleotide
  Sense strand starting at position 1448 of SEQ ID NO: 1883021
gaaauugaccgucagagcu

SEQ ID NO: 2164247 - RNA, 19 nt, Artificial Sequence
  Description of Artificial Sequence: Synthetic oligonucleotide
  Antisense strand to SEQ ID NO: 2164246
agcucugacggucaauuuc

SEQ ID NO: 2164248 - RNA, 19 nt, Artificial Sequence
  Description of Artificial Sequence: Synthetic oligonucleotide
  Sense strand starting at position 1460 of SEQ ID NO: 1883021
cagagcugucaugaaucau

SEQ ID NO: 2164249 - RNA, 19 nt, Artificial Sequence
  Description of Artificial Sequence: Synthetic oligonucleotide
  Antisense strand to SEQ ID NO: 2164248
augauucaugacagcucug

SEQ ID NO: 2164250 - RNA, 19 nt, Artificial Sequence
  Description of Artificial Sequence: Synthetic oligonucleotide
  Sense strand starting at position 1464 of SEQ ID NO: 1883021
gcugucaugaaucaugaag

SEQ ID NO: 2164251 - RNA, 19 nt, Artificial Sequence
  Description of Artificial Sequence: Synthetic oligonucleotide
  Antisense strand to SEQ ID NO: 2164250
cuucaugauucaugacagc

SEQ ID NO: 2164252 - RNA, 19 nt, Artificial Sequence
  Description of Artificial Sequence: Synthetic oligonucleotide
  Sense strand starting at position 1805 of SEQ ID NO: 1883021
ucuugaaacuuagugcaaa

SEQ ID NO: 2164253 - RNA, 19 nt, Artificial Sequence
  Description of Artificial Sequence: Synthetic oligonucleotide
  Antisense strand to SEQ ID NO: 2164252
uuugcacuaaguuucaaga

SEQ ID NO: 2164254 - RNA, 19 nt, Artificial Sequence
  Description of Artificial Sequence: Synthetic oligonucleotide
  Sense strand starting at position 1808 of SEQ ID NO: 1883021
ugaaacuuagugcaaagua

SEQ ID NO: 2164255 - RNA, 19 nt, Artificial Sequence
  Description of Artificial Sequence: Synthetic oligonucleotide
  Antisense strand to SEQ ID NO: 2164254
uacuuugcacuaaguuuca

SEQ ID NO: 2164256 - RNA, 19 nt, Artificial Sequence
  Description of Artificial Sequence: Synthetic oligonucleotide
  Sense strand starting at position 2352 of SEQ ID NO: 1883021
ccugaauaucaguaaguau

SEQ ID NO: 2164257 - RNA, 19 nt, Artificial Sequence
  Description of Artificial Sequence: Synthetic oligonucleotide
  Antisense strand to SEQ ID NO: 2164256
auacuuacugauauucagg

SEQ ID NO: 2164258 - RNA, 19 nt, Artificial Sequence
  Description of Artificial Sequence: Synthetic oligonucleotide
  Sense strand starting at position 2411 of SEQ ID NO: 1883021
cugguaacgauuuguuuau

SEQ ID NO: 2164259 - RNA, 19 nt, Artificial Sequence
  Description of Artificial Sequence: Synthetic oligonucleotide
  Antisense strand to SEQ ID NO: 2164258
auaaacaaaucguuaccag

SEQ ID NO: 2164260 - RNA, 19 nt, Artificial Sequence
  Description of Artificial Sequence: Synthetic oligonucleotide
  Sense strand starting at position 2518 of SEQ ID NO: 1883021
aggccugaauuccuuauau

SEQ ID NO: 2164261 - RNA, 19 nt, Artificial Sequence
  Description of Artificial Sequence: Synthetic oligonucleotide
  Antisense strand to SEQ ID NO: 2164260
auauaaggaauucaggccu

SEQ ID NO: 2164262 - RNA, 19 nt, Artificial Sequence
  Description of Artificial Sequence: Synthetic oligonucleotide
  Sense strand starting at position 2655 of SEQ ID NO: 1883021
aaugauuuauugucugugu

SEQ ID NO: 2164263 - RNA, 19 nt, Artificial Sequence
  Description of Artificial Sequence: Synthetic oligonucleotide
  Antisense strand to SEQ ID NO: 2164262
acacagacaauaaaucauu

SEQ ID NO: 2164264 - RNA, 19 nt, Artificial Sequence
  Description of Artificial Sequence: Synthetic oligonucleotide
  Sense strand starting at position 2656 of SEQ ID NO: 1883021
augauuuauugucugugua

SEQ ID NO: 2164265 - RNA, 19 nt, Artificial Sequence
  Description of Artificial Sequence: Synthetic oligonucleotide
  Antisense strand to SEQ ID NO: 2164264
uacacagacaauaaaucau

SEQ ID NO: 2164266 - RNA, 19 nt, Artificial Sequence
  Description of Artificial Sequence: Synthetic oligonucleotide
  Sense strand starting at position 2657 of SEQ ID NO: 1883021
ugauuuauugucuguguaa

SEQ ID NO: 2164267 - RNA, 19 nt, Artificial Sequence
  Description of Artificial Sequence: Synthetic oligonucleotide
  Antisense strand to SEQ ID NO: 2164266
uuacacagacaauaaauca

SEQ ID NO: 2164268 - RNA, 19 nt, Artificial Sequence
  Description of Artificial Sequence: Synthetic oligonucleotide
  Sense strand starting at position 2713 of SEQ ID NO: 1883021
augguaugcuucuuuauuu

SEQ ID NO: 2164269 - RNA, 19 nt, Artificial Sequence
  Description of Artificial Sequence: Synthetic oligonucleotide
  Antisense strand to SEQ ID NO: 2164268
aaauaaagaagcauaccau

SEQ ID NO: 2164270 - RNA, 19 nt, Artificial Sequence
  Description of Artificial Sequence: Synthetic oligonucleotide
  Sense strand starting at position 2756 of SEQ ID NO: 1883021
auaacuuaucagggucaau

SEQ ID NO: 2164271 - RNA, 19 nt, Artificial Sequence
  Description of Artificial Sequence: Synthetic oligonucleotide
  Antisense strand to SEQ ID NO: 2164270
auugacccugauaaguuau

SEQ ID NO: 2164272 - RNA, 19 nt, Artificial Sequence
  Description of Artificial Sequence: Synthetic oligonucleotide
  Sense strand starting at position 2768 of SEQ ID NO: 1883021
ggucaaugauaagcucaau

SEQ ID NO: 2164273 - RNA, 19 nt, Artificial Sequence
  Description of Artificial Sequence: Synthetic oligonucleotide
  Antisense strand to SEQ ID NO: 2164272
auugagcuuaucauugacc

SEQ ID NO: 2164274 - RNA, 19 nt, Artificial Sequence
  Description of Artificial Sequence: Synthetic oligonucleotide
  Sense strand starting at position 2774 of SEQ ID NO: 1883021
ugauaagcucaauaucagu

SEQ ID NO: 2164275 - RNA, 19 nt, Artificial Sequence
  Description of Artificial Sequence: Synthetic oligonucleotide
  Antisense strand to SEQ ID NO: 2164274
acugauauugagcuuauca

SEQ ID NO: 2164276 - RNA, 19 nt, Artificial Sequence
  Description of Artificial Sequence: Synthetic oligonucleotide
  Sense strand starting at position 2779 of SEQ ID NO: 1883021
agcucaauaucagugauua

SEQ ID NO: 2164277 - RNA, 19 nt, Artificial Sequence
  Description of Artificial Sequence: Synthetic oligonucleotide
  Antisense strand to SEQ ID NO: 2164276
uaaucacugauauugagcu

SEQ ID NO: 2164278 - RNA, 19 nt, Artificial Sequence
  Description of Artificial Sequence: Synthetic oligonucleotide
  Sense strand starting at position 2802 of SEQ ID NO: 1883021
ggguuauccucacuggaau

SEQ ID NO: 2164279 - RNA, 19 nt, Artificial Sequence
  Description of Artificial Sequence: Synthetic oligonucleotide
  Antisense strand to SEQ ID NO: 2164278
auuccagugaggauaaccc

SEQ ID NO: 2164280 - RNA, 19 nt, Artificial Sequence
  Description of Artificial Sequence: Synthetic oligonucleotide
  Sense strand starting at position 2803 of SEQ ID NO: 1883021
gguuauccucacuggaauu

SEQ ID NO: 2164281 - RNA, 19 nt, Artificial Sequence
  Description of Artificial Sequence: Synthetic oligonucleotide
  Antisense strand to SEQ ID NO: 2164280
aauuccagugaggauaacc

SEQ ID NO: 2164282 - RNA, 19 nt, Artificial Sequence
  Description of Artificial Sequence: Synthetic oligonucleotide
  Sense strand starting at position 2837 of SEQ ID NO: 1883021
gcuuacauauucccaggaa

SEQ ID NO: 2164283 - RNA, 19 nt, Artificial Sequence
  Description of Artificial Sequence: Synthetic oligonucleotide
  Antisense strand to SEQ ID NO: 2164282
uuccugggaauauguaagc

SEQ ID NO: 2164284 - RNA, 19 nt, Artificial Sequence
  Description of Artificial Sequence: Synthetic oligonucleotide
  Sense strand starting at position 2871 of SEQ ID NO: 1883021
guucuugguccacagggau

SEQ ID NO: 2164285 - RNA, 19 nt, Artificial Sequence
  Description of Artificial Sequence: Synthetic oligonucleotide
  Antisense strand to SEQ ID NO: 2164284
aucccuguggaccaagaac

SEQ ID NO: 2164286 - RNA, 19 nt, Artificial Sequence
  Description of Artificial Sequence: Synthetic oligonucleotide
  Sense strand starting at position 3569 of SEQ ID NO: 1883021
uugguuaugcuccacugaa

SEQ ID NO: 2164287 - RNA, 19 nt, Artificial Sequence
  Description of Artificial Sequence: Synthetic oligonucleotide
  Antisense strand to SEQ ID NO: 2164286
uucaguggagcauaaccaa

SEQ ID NO: 2164288 - RNA, 19 nt, Artificial Sequence
  Description of Artificial Sequence: Synthetic oligonucleotide
  Sense strand starting at position 3607 of SEQ ID NO: 1883021
ccuuaaguuguggaaguaa

SEQ ID NO: 2164289 - RNA, 19 nt, Artificial Sequence
  Description of Artificial Sequence: Synthetic oligonucleotide
  Antisense strand to SEQ ID NO: 2164288
uuacuuccacaacuuaagg

SEQ ID NO: 2164290 - RNA, 19 nt, Artificial Sequence
  Description of Artificial Sequence: Synthetic oligonucleotide
  Sense strand starting at position 3748 of SEQ ID NO: 1883021
gguuaaaugcacugaacac

SEQ ID NO: 2164291 - RNA, 19 nt, Artificial Sequence
  Description of Artificial Sequence: Synthetic oligonucleotide
  Antisense strand to SEQ ID NO: 2164290
guguucagugcauuuaacc

SEQ ID NO: 2164292 - RNA, 19 nt, Artificial Sequence
  Description of Artificial Sequence: Synthetic oligonucleotide
  Sense strand starting at position 171 of SEQ ID NO: 1883022
aagccuguucuuuagauag

SEQ ID NO: 2164293 - RNA, 19 nt, Artificial Sequence
  Description of Artificial Sequence: Synthetic oligonucleotide
  Antisense strand to SEQ ID NO: 2164292
cuaucuaaagaacaggcuu

SEQ ID NO: 2164294 - RNA, 19 nt, Artificial Sequence
  Description of Artificial Sequence: Synthetic oligonucleotide
  Sense strand starting at position 267 of SEQ ID NO: 1883022
agauuacagucacucugau

SEQ ID NO: 2164295 - RNA, 19 nt, Artificial Sequence
  Description of Artificial Sequence: Synthetic oligonucleotide
  Antisense strand to SEQ ID NO: 2164294
aucagagugacuguaaucu

SEQ ID NO: 2164296 - RNA, 19 nt, Artificial Sequence
  Description of Artificial Sequence: Synthetic oligonucleotide
  Sense strand starting at position 303 of SEQ ID NO: 1883022
cuuguuauggcacaaauua

SEQ ID NO: 2164297 - RNA, 19 nt, Artificial Sequence
  Description of Artificial Sequence: Synthetic oligonucleotide
  Antisense strand to SEQ ID NO: 2164296
uaauuugugccauaacaag

SEQ ID NO: 2164298 - RNA, 19 nt, Artificial Sequence
  Description of Artificial Sequence: Synthetic oligonucleotide
  Sense strand starting at position 378 of SEQ ID NO: 1883022
gcacauauuuaugaagaca

SEQ ID NO: 2164299 - RNA, 19 nt, Artificial Sequence
  Description of Artificial Sequence: Synthetic oligonucleotide
  Antisense strand to SEQ ID NO: 2164298
ugucuucauaaauaugugc

SEQ ID NO: 2164300 - RNA, 19 nt, Artificial Sequence
  Description of Artificial Sequence: Synthetic oligonucleotide
  Sense strand starting at position 411 of SEQ ID NO: 1883022
cacagugggcucugauaaa

SEQ ID NO: 2164301 - RNA, 19 nt, Artificial Sequence
  Description of Artificial Sequence: Synthetic oligonucleotide
  Antisense strand to SEQ ID NO: 2164300
uuuaucagagcccacugug

SEQ ID NO: 2164302 - RNA, 19 nt, Artificial Sequence
  Description of Artificial Sequence: Synthetic oligonucleotide
  Sense strand starting at position 444 of SEQ ID NO: 1883022
aguaaaugcuacucucaag

SEQ ID NO: 2164303 - RNA, 19 nt, Artificial Sequence
  Description of Artificial Sequence: Synthetic oligonucleotide
  Antisense strand to SEQ ID NO: 2164302
cuugagaguagcauuuacu

SEQ ID NO: 2164304 - RNA, 19 nt, Artificial Sequence
  Description of Artificial Sequence: Synthetic oligonucleotide
  Sense strand starting at position 450 of SEQ ID NO: 1883022
ugcuacucucaagaagauu

SEQ ID NO: 2164305 - RNA, 19 nt, Artificial Sequence
  Description of Artificial Sequence: Synthetic oligonucleotide
  Antisense strand to SEQ ID NO: 2164304
aaucuucuugagaguagca

SEQ ID NO: 2164306 - RNA, 19 nt, Artificial Sequence
  Description of Artificial Sequence: Synthetic oligonucleotide
  Sense strand starting at position 517 of SEQ ID NO: 1883022
uaggacgugaagugauaaa

SEQ ID NO: 2164307 - RNA, 19 nt, Artificial Sequence
  Description of Artificial Sequence: Synthetic oligonucleotide
  Antisense strand to SEQ ID NO: 2164306
uuuaucacuucacguccua

SEQ ID NO: 2164308 - RNA, 19 nt, Artificial Sequence
  Description of Artificial Sequence: Synthetic oligonucleotide
  Sense strand starting at position 538 of SEQ ID NO: 1883022
guauaagacgaauggaguu

SEQ ID NO: 2164309 - RNA, 19 nt, Artificial Sequence
  Description of Artificial Sequence: Synthetic oligonucleotide
  Antisense strand to SEQ ID NO: 2164308
aacuccauucgucuuauac

SEQ ID NO: 2164310 - RNA, 19 nt, Artificial Sequence
  Description of Artificial Sequence: Synthetic oligonucleotide
  Sense strand starting at position 581 of SEQ ID NO: 1883022
gcuagaggaauugagcauu

SEQ ID NO: 2164311 - RNA, 19 nt, Artificial Sequence
  Description of Artificial Sequence: Synthetic oligonucleotide
  Antisense strand to SEQ ID NO: 2164310
aaugcucaauuccucuagc

SEQ ID NO: 2164312 - RNA, 19 nt, Artificial Sequence
  Description of Artificial Sequence: Synthetic oligonucleotide
  Sense strand starting at position 605 of SEQ ID NO: 1883022
uuagaagggucagcuuaga

SEQ ID NO: 2164313 - RNA, 19 nt, Artificial Sequence
  Description of Artificial Sequence: Synthetic oligonucleotide
  Antisense strand to SEQ ID NO: 2164312
ucuaagcugacccuucuaa

SEQ ID NO: 2164314 - RNA, 19 nt, Artificial Sequence
  Description of Artificial Sequence: Synthetic oligonucleotide
  Sense strand starting at position 619 of SEQ ID NO: 1883022
uuagaagggucauugaacu

SEQ ID NO: 2164315 - RNA, 19 nt, Artificial Sequence
  Description of Artificial Sequence: Synthetic oligonucleotide
  Antisense strand to SEQ ID NO: 2164314
aguucaaugacccuucuaa

SEQ ID NO: 2164316 - RNA, 19 nt, Artificial Sequence
  Description of Artificial Sequence: Synthetic oligonucleotide
  Sense strand starting at position 625 of SEQ ID NO: 1883022
gggucauugaacuaugccu

SEQ ID NO: 2164317 - RNA, 19 nt, Artificial Sequence
  Description of Artificial Sequence: Synthetic oligonucleotide
  Antisense strand to SEQ ID NO: 2164316
aggcauaguucaaugaccc

SEQ ID NO: 2164318 - RNA, 19 nt, Artificial Sequence
  Description of Artificial Sequence: Synthetic oligonucleotide
  Sense strand starting at position 639 of SEQ ID NO: 1883022
ugccuuagagaauggacua

SEQ ID NO: 2164319 - RNA, 19 nt, Artificial Sequence
  Description of Artificial Sequence: Synthetic oligonucleotide
  Antisense strand to SEQ ID NO: 2164318
uaguccauucucuaaggca

SEQ ID NO: 2164320 - RNA, 19 nt, Artificial Sequence
  Description of Artificial Sequence: Synthetic oligonucleotide
  Sense strand starting at position 790 of SEQ ID NO: 1883022
uguauuuccugcuugggua

SEQ ID NO: 2164321 - RNA, 19 nt, Artificial Sequence
  Description of Artificial Sequence: Synthetic oligonucleotide
  Antisense strand to SEQ ID NO: 2164320
uacccaagcaggaaauaca

SEQ ID NO: 2164322 - RNA, 19 nt, Artificial Sequence
  Description of Artificial Sequence: Synthetic oligonucleotide
  Sense strand starting at position 791 of SEQ ID NO: 1883022
guauuuccugcuuggguau

SEQ ID NO: 2164323 - RNA, 19 nt, Artificial Sequence
  Description of Artificial Sequence: Synthetic oligonucleotide
  Antisense strand to SEQ ID NO: 2164322
auacccaagcaggaaauac

SEQ ID NO: 2164324 - RNA, 19 nt, Artificial Sequence
  Description of Artificial Sequence: Synthetic oligonucleotide
  Sense strand starting at position 1445 of SEQ ID NO: 1883022
caugaaauugaccgucaga

SEQ ID NO: 2164325 - RNA, 19 nt, Artificial Sequence
  Description of Artificial Sequence: Synthetic oligonucleotide
  Antisense strand to SEQ ID NO: 2164324
ucugacggucaauuucaug

SEQ ID NO: 2164326 - RNA, 19 nt, Artificial Sequence
  Description of Artificial Sequence: Synthetic oligonucleotide
  Sense strand starting at position 1448 of SEQ ID NO: 1883022
gaaauugaccgucagagcu

SEQ ID NO: 2164327 - RNA, 19 nt, Artificial Sequence
  Description of Artificial Sequence: Synthetic oligonucleotide
  Antisense strand to SEQ ID NO: 2164326
agcucugacggucaauuuc

SEQ ID NO: 2164328 - RNA, 19 nt, Artificial Sequence
  Description of Artificial Sequence: Synthetic oligonucleotide
  Sense strand starting at position 1460 of SEQ ID NO: 1883022
cagagcugucaugaaucau

SEQ ID NO: 2164329 - RNA, 19 nt, Artificial Sequence
  Description of Artificial Sequence: Synthetic oligonucleotide
  Antisense strand to SEQ ID NO: 2164328
augauucaugacagcucug

SEQ ID NO: 2164330 - RNA, 19 nt, Artificial Sequence
  Description of Artificial Sequence: Synthetic oligonucleotide
  Sense strand starting at position 1464 of SEQ ID NO: 1883022
gcugucaugaaucaugaag

SEQ ID NO: 2164331 - RNA, 19 nt, Artificial Sequence
  Description of Artificial Sequence: Synthetic oligonucleotide
  Antisense strand to SEQ ID NO: 2164330
cuucaugauucaugacagc

SEQ ID NO: 2164332 - RNA, 19 nt, Artificial Sequence
  Description of Artificial Sequence: Synthetic oligonucleotide
  Sense strand starting at position 1805 of SEQ ID NO: 1883022
ucuugaaacuuagugcaaa

SEQ ID NO: 2164333 - RNA, 19 nt, Artificial Sequence
  Description of Artificial Sequence: Synthetic oligonucleotide
  Antisense strand to SEQ ID NO: 2164332
uuugcacuaaguuucaaga

SEQ ID NO: 2164334 - RNA, 19 nt, Artificial Sequence
  Description of Artificial Sequence: Synthetic oligonucleotide
  Sense strand starting at position 1808 of SEQ ID NO: 1883022
ugaaacuuagugcaaagua

SEQ ID NO: 2164335 - RNA, 19 nt, Artificial Sequence
  Description of Artificial Sequence: Synthetic oligonucleotide
  Antisense strand to SEQ ID NO: 2164334
uacuuugcacuaaguuuca

SEQ ID NO: 2164336 - RNA, 19 nt, Artificial Sequence
  Description of Artificial Sequence: Synthetic oligonucleotide
  Sense strand starting at position 2352 of SEQ ID NO: 1883022
ccugaauaucaguaaguau

SEQ ID NO: 2164337 - RNA, 19 nt, Artificial Sequence
  Description of Artificial Sequence: Synthetic oligonucleotide
  Antisense strand to SEQ ID NO: 2164336
auacuuacugauauucagg

SEQ ID NO: 2164338 - RNA, 19 nt, Artificial Sequence
  Description of Artificial Sequence: Synthetic oligonucleotide
  Sense strand starting at position 2411 of SEQ ID NO: 1883022
cugguaacgauuuguuuau

SEQ ID NO: 2164339 - RNA, 19 nt, Artificial Sequence
  Description of Artificial Sequence: Synthetic oligonucleotide
  Antisense strand to SEQ ID NO: 2164338
auaaacaaaucguuaccag

SEQ ID NO: 2164340 - RNA, 19 nt, Artificial Sequence
  Description of Artificial Sequence: Synthetic oligonucleotide
  Sense strand starting at position 2518 of SEQ ID NO: 1883022
aggccugaauuccuuauau

SEQ ID NO: 2164341 - RNA, 19 nt, Artificial Sequence
  Description of Artificial Sequence: Synthetic oligonucleotide
  Antisense strand to SEQ ID NO: 2164340
auauaaggaauucaggccu

SEQ ID NO: 2164342 - RNA, 19 nt, Artificial Sequence
  Description of Artificial Sequence: Synthetic oligonucleotide
  Sense strand starting at position 2655 of SEQ ID NO: 1883022
aaugauuuauugucugugu

SEQ ID NO: 2164343 - RNA, 19 nt, Artificial Sequence
  Description of Artificial Sequence: Synthetic oligonucleotide
  Antisense strand to SEQ ID NO: 2164342
acacagacaauaaaucauu

SEQ ID NO: 2164344 - RNA, 19 nt, Artificial Sequence
  Description of Artificial Sequence: Synthetic oligonucleotide
  Sense strand starting at position 2656 of SEQ ID NO: 1883022
augauuuauugucugugua

SEQ ID NO: 2164345 - RNA, 19 nt, Artificial Sequence
  Description of Artificial Sequence: Synthetic oligonucleotide
  Antisense strand to SEQ ID NO: 2164344
uacacagacaauaaaucau

SEQ ID NO: 2164346 - RNA, 19 nt, Artificial Sequence
  Description of Artificial Sequence: Synthetic oligonucleotide
  Sense strand starting at position 2657 of SEQ ID NO: 1883022
ugauuuauugucuguguaa

SEQ ID NO: 2164347 - RNA, 19 nt, Artificial Sequence
  Description of Artificial Sequence: Synthetic oligonucleotide
  Antisense strand to SEQ ID NO: 2164346
uuacacagacaauaaauca

SEQ ID NO: 2164348 - RNA, 19 nt, Artificial Sequence
  Description of Artificial Sequence: Synthetic oligonucleotide
  Sense strand starting at position 2713 of SEQ ID NO: 1883022
augguaugcuucuuuauuu

SEQ ID NO: 2164349 - RNA, 19 nt, Artificial Sequence
  Description of Artificial Sequence: Synthetic oligonucleotide
  Antisense strand to SEQ ID NO: 2164348
aaauaaagaagcauaccau

SEQ ID NO: 2164350 - RNA, 19 nt, Artificial Sequence
  Description of Artificial Sequence: Synthetic oligonucleotide
  Sense strand starting at position 2756 of SEQ ID NO: 1883022
auaacuuaucagggucaau

SEQ ID NO: 2164351 - RNA, 19 nt, Artificial Sequence
  Description of Artificial Sequence: Synthetic oligonucleotide
  Antisense strand to SEQ ID NO: 2164350
auugacccugauaaguuau

SEQ ID NO: 2164352 - RNA, 19 nt, Artificial Sequence
  Description of Artificial Sequence: Synthetic oligonucleotide
  Sense strand starting at position 2768 of SEQ ID NO: 1883022
ggucaaugauaagcucaau

SEQ ID NO: 2164353 - RNA, 19 nt, Artificial Sequence
  Description of Artificial Sequence: Synthetic oligonucleotide
  Antisense strand to SEQ ID NO: 2164352
auugagcuuaucauugacc

SEQ ID NO: 2164354 - RNA, 19 nt, Artificial Sequence
  Description of Artificial Sequence: Synthetic oligonucleotide
  Sense strand starting at position 2774 of SEQ ID NO: 1883022
ugauaagcucaauaucagu

SEQ ID NO: 2164355 - RNA, 19 nt, Artificial Sequence
  Description of Artificial Sequence: Synthetic oligonucleotide
  Antisense strand to SEQ ID NO: 2164354
acugauauugagcuuauca

SEQ ID NO: 2164356 - RNA, 19 nt, Artificial Sequence
  Description of Artificial Sequence: Synthetic oligonucleotide
  Sense strand starting at position 2779 of SEQ ID NO: 1883022
agcucaauaucagugauua

SEQ ID NO: 2164357 - RNA, 19 nt, Artificial Sequence
  Description of Artificial Sequence: Synthetic oligonucleotide
  Antisense strand to SEQ ID NO: 2164356
uaaucacugauauugagcu

SEQ ID NO: 2164358 - RNA, 19 nt, Artificial Sequence
  Description of Artificial Sequence: Synthetic oligonucleotide
  Sense strand starting at position 2802 of SEQ ID NO: 1883022
ggguuauccucacuggaau

SEQ ID NO: 2164359 - RNA, 19 nt, Artificial Sequence
  Description of Artificial Sequence: Synthetic oligonucleotide
  Antisense strand to SEQ ID NO: 2164358
auuccagugaggauaaccc

SEQ ID NO: 2164360 - RNA, 19 nt, Artificial Sequence
  Description of Artificial Sequence: Synthetic oligonucleotide
  Sense strand starting at position 2803 of SEQ ID NO: 1883022
gguuauccucacuggaauu

SEQ ID NO: 2164361 - RNA, 19 nt, Artificial Sequence
  Description of Artificial Sequence: Synthetic oligonucleotide
  Antisense strand to SEQ ID NO: 2164360
aauuccagugaggauaacc

SEQ ID NO: 2164362 - RNA, 19 nt, Artificial Sequence
  Description of Artificial Sequence: Synthetic oligonucleotide
  Sense strand starting at position 2837 of SEQ ID NO: 1883022
gcuuacauauucccaggaa

SEQ ID NO: 2164363 - RNA, 19 nt, Artificial Sequence
  Description of Artificial Sequence: Synthetic oligonucleotide
  Antisense strand to SEQ ID NO: 2164362
uuccugggaauauguaagc

SEQ ID NO: 2164364 - RNA, 19 nt, Artificial Sequence
  Description of Artificial Sequence: Synthetic oligonucleotide
  Sense strand starting at position 2871 of SEQ ID NO: 1883022
guucuugguccacagggau

SEQ ID NO: 2164365 - RNA, 19 nt, Artificial Sequence
  Description of Artificial Sequence: Synthetic oligonucleotide
  Antisense strand to SEQ ID NO: 2164364
aucccuguggaccaagaac

SEQ ID NO: 2164366 - RNA, 19 nt, Artificial Sequence
  Description of Artificial Sequence: Synthetic oligonucleotide
  Sense strand starting at position 3569 of SEQ ID NO: 1883022
uugguuaugcuccacugaa

SEQ ID NO: 2164367 - RNA, 19 nt, Artificial Sequence
  Description of Artificial Sequence: Synthetic oligonucleotide
  Antisense strand to SEQ ID NO: 2164366
uucaguggagcauaaccaa

SEQ ID NO: 2164368 - RNA, 19 nt, Artificial Sequence
  Description of Artificial Sequence: Synthetic oligonucleotide
  Sense strand starting at position 3607 of SEQ ID NO: 1883022
ccuuaaguuguggaaguaa

SEQ ID NO: 2164369 - RNA, 19 nt, Artificial Sequence
  Description of Artificial Sequence: Synthetic oligonucleotide
  Antisense strand to SEQ ID NO: 2164368
uuacuuccacaacuuaagg

SEQ ID NO: 2164370 - RNA, 19 nt, Artificial Sequence
  Description of Artificial Sequence: Synthetic oligonucleotide
  Sense strand starting at position 3748 of SEQ ID NO: 1883022
gguuaaaugcacugaacac

SEQ ID NO: 2164371 - RNA, 19 nt, Artificial Sequence
  Description of Artificial Sequence: Synthetic oligonucleotide
  Antisense strand to SEQ ID NO: 2164370
guguucagugcauuuaacc

SEQ ID NO: 2164372 - RNA, 19 nt, Artificial Sequence
  Description of Artificial Sequence: Synthetic oligonucleotide
  Sense strand starting at position 171 of SEQ ID NO: 1883023
aagccuguucuuuagauag

SEQ ID NO: 2164373 - RNA, 19 nt, Artificial Sequence
  Description of Artificial Sequence: Synthetic oligonucleotide
  Antisense strand to SEQ ID NO: 2164372
cuaucuaaagaacaggcuu

SEQ ID NO: 2164374 - RNA, 19 nt, Artificial Sequence
  Description of Artificial Sequence: Synthetic oligonucleotide
  Sense strand starting at position 267 of SEQ ID NO: 1883023
agauuacagucacucugau

SEQ ID NO: 2164375 - RNA, 19 nt, Artificial Sequence
  Description of Artificial Sequence: Synthetic oligonucleotide
  Antisense strand to SEQ ID NO: 2164374
aucagagugacuguaaucu

SEQ ID NO: 2164376 - RNA, 19 nt, Artificial Sequence
  Description of Artificial Sequence: Synthetic oligonucleotide
  Sense strand starting at position 303 of SEQ ID NO: 1883023
cuuguuauggcacaaauua

SEQ ID NO: 2164377 - RNA, 19 nt, Artificial Sequence
  Description of Artificial Sequence: Synthetic oligonucleotide
  Antisense strand to SEQ ID NO: 2164376
uaauuugugccauaacaag

SEQ ID NO: 2164378 - RNA, 19 nt, Artificial Sequence
  Description of Artificial Sequence: Synthetic oligonucleotide
  Sense strand starting at position 378 of SEQ ID NO: 1883023
gcacauauuuaugaagaca

SEQ ID NO: 2164379 - RNA, 19 nt, Artificial Sequence
  Description of Artificial Sequence: Synthetic oligonucleotide
  Antisense strand to SEQ ID NO: 2164378
ugucuucauaaauaugugc

SEQ ID NO: 2164380 - RNA, 19 nt, Artificial Sequence
  Description of Artificial Sequence: Synthetic oligonucleotide
  Sense strand starting at position 411 of SEQ ID NO: 1883023
cacagugggcucugauaaa

SEQ ID NO: 2164381 - RNA, 19 nt, Artificial Sequence
  Description of Artificial Sequence: Synthetic oligonucleotide
  Antisense strand to SEQ ID NO: 2164380
uuuaucagagcccacugug

SEQ ID NO: 2164382 - RNA, 19 nt, Artificial Sequence
  Description of Artificial Sequence: Synthetic oligonucleotide
  Sense strand starting at position 444 of SEQ ID NO: 1883023
aguaaaugcuacucucaag

SEQ ID NO: 2164383 - RNA, 19 nt, Artificial Sequence
  Description of Artificial Sequence: Synthetic oligonucleotide
  Antisense strand to SEQ ID NO: 2164382
cuugagaguagcauuuacu

SEQ ID NO: 2164384 - RNA, 19 nt, Artificial Sequence
  Description of Artificial Sequence: Synthetic oligonucleotide
  Sense strand starting at position 450 of SEQ ID NO: 1883023
ugcuacucucaagaagauu

SEQ ID NO: 2164385 - RNA, 19 nt, Artificial Sequence
  Description of Artificial Sequence: Synthetic oligonucleotide
  Antisense strand to SEQ ID NO: 2164384
aaucuucuugagaguagca

SEQ ID NO: 2164386 - RNA, 19 nt, Artificial Sequence
  Description of Artificial Sequence: Synthetic oligonucleotide
  Sense strand starting at position 517 of SEQ ID NO: 1883023
uaggacgugaagugauaaa

SEQ ID NO: 2164387 - RNA, 19 nt, Artificial Sequence
  Description of Artificial Sequence: Synthetic oligonucleotide
  Antisense strand to SEQ ID NO: 2164386
uuuaucacuucacguccua

SEQ ID NO: 2164388 - RNA, 19 nt, Artificial Sequence
  Description of Artificial Sequence: Synthetic oligonucleotide
  Sense strand starting at position 538 of SEQ ID NO: 1883023
guauaagacgaauggaguu

SEQ ID NO: 2164389 - RNA, 19 nt, Artificial Sequence
  Description of Artificial Sequence: Synthetic oligonucleotide
  Antisense strand to SEQ ID NO: 2164388
aacuccauucgucuuauac

SEQ ID NO: 2164390 - RNA, 19 nt, Artificial Sequence
  Description of Artificial Sequence: Synthetic oligonucleotide
  Sense strand starting at position 581 of SEQ ID NO: 1883023
gcuagaggaauugagcauu

SEQ ID NO: 2164391 - RNA, 19 nt, Artificial Sequence
  Description of Artificial Sequence: Synthetic oligonucleotide
  Antisense strand to SEQ ID NO: 2164390
aaugcucaauuccucuagc

SEQ ID NO: 2164392 - RNA, 19 nt, Artificial Sequence
  Description of Artificial Sequence: Synthetic oligonucleotide
  Sense strand starting at position 605 of SEQ ID NO: 1883023
uuagaagggucagcuuaga

SEQ ID NO: 2164393 - RNA, 19 nt, Artificial Sequence
  Description of Artificial Sequence: Synthetic oligonucleotide
  Antisense strand to SEQ ID NO: 2164392
ucuaagcugacccuucuaa

SEQ ID NO: 2164394 - RNA, 19 nt, Artificial Sequence
  Description of Artificial Sequence: Synthetic oligonucleotide
  Sense strand starting at position 619 of SEQ ID NO: 1883023
uuagaagggucauugaacu

SEQ ID NO: 2164395 - RNA, 19 nt, Artificial Sequence
  Description of Artificial Sequence: Synthetic oligonucleotide
  Antisense strand to SEQ ID NO: 2164394
aguucaaugacccuucuaa

SEQ ID NO: 2164396 - RNA, 19 nt, Artificial Sequence
  Description of Artificial Sequence: Synthetic oligonucleotide
  Sense strand starting at position 625 of SEQ ID NO: 1883023
gggucauugaacuaugccu

SEQ ID NO: 2164397 - RNA, 19 nt, Artificial Sequence
  Description of Artificial Sequence: Synthetic oligonucleotide
  Antisense strand to SEQ ID NO: 2164396
aggcauaguucaaugaccc

SEQ ID NO: 2164398 - RNA, 19 nt, Artificial Sequence
  Description of Artificial Sequence: Synthetic oligonucleotide
  Sense strand starting at position 639 of SEQ ID NO: 1883023
ugccuuagagaauggacua

SEQ ID NO: 2164399 - RNA, 19 nt, Artificial Sequence
  Description of Artificial Sequence: Synthetic oligonucleotide
  Antisense strand to SEQ ID NO: 2164398
uaguccauucucuaaggca

SEQ ID NO: 2164400 - RNA, 19 nt, Artificial Sequence
  Description of Artificial Sequence: Synthetic oligonucleotide
  Sense strand starting at position 790 of SEQ ID NO: 1883023
uguauuuccugcuugggua

SEQ ID NO: 2164401 - RNA, 19 nt, Artificial Sequence
  Description of Artificial Sequence: Synthetic oligonucleotide
  Antisense strand to SEQ ID NO: 2164400
uacccaagcaggaaauaca

SEQ ID NO: 2164402 - RNA, 19 nt, Artificial Sequence
  Description of Artificial Sequence: Synthetic oligonucleotide
  Sense strand starting at position 791 of SEQ ID NO: 1883023
guauuuccugcuuggguau

SEQ ID NO: 2164403 - RNA, 19 nt, Artificial Sequence
  Description of Artificial Sequence: Synthetic oligonucleotide
  Antisense strand to SEQ ID NO: 2164402
auacccaagcaggaaauac

SEQ ID NO: 2164404 - RNA, 19 nt, Artificial Sequence
  Description of Artificial Sequence: Synthetic oligonucleotide
  Sense strand starting at position 1445 of SEQ ID NO: 1883023
caugaaauugaccgucaga

SEQ ID NO: 2164405 - RNA, 19 nt, Artificial Sequence
  Description of Artificial Sequence: Synthetic oligonucleotide
  Antisense strand to SEQ ID NO: 2164404
ucugacggucaauuucaug

SEQ ID NO: 2164406 - RNA, 19 nt, Artificial Sequence
  Description of Artificial Sequence: Synthetic oligonucleotide
  Sense strand starting at position 1448 of SEQ ID NO: 1883023
gaaauugaccgucagagcu

SEQ ID NO: 2164407 - RNA, 19 nt, Artificial Sequence
  Description of Artificial Sequence: Synthetic oligonucleotide
  Antisense strand to SEQ ID NO: 2164406
agcucugacggucaauuuc

SEQ ID NO: 2164408 - RNA, 19 nt, Artificial Sequence
  Description of Artificial Sequence: Synthetic oligonucleotide
  Sense strand starting at position 1460 of SEQ ID NO: 1883023
cagagcugucaugaaucau

SEQ ID NO: 2164409 - RNA, 19 nt, Artificial Sequence
  Description of Artificial Sequence: Synthetic oligonucleotide
  Antisense strand to SEQ ID NO: 2164408
augauucaugacagcucug

SEQ ID NO: 2164410 - RNA, 19 nt, Artificial Sequence
  Description of Artificial Sequence: Synthetic oligonucleotide
  Sense strand starting at position 1464 of SEQ ID NO: 1883023
gcugucaugaaucaugaag

SEQ ID NO: 2164411 - RNA, 19 nt, Artificial Sequence
  Description of Artificial Sequence: Synthetic oligonucleotide
  Antisense strand to SEQ ID NO: 2164410
cuucaugauucaugacagc

SEQ ID NO: 2164412 - RNA, 19 nt, Artificial Sequence
  Description of Artificial Sequence: Synthetic oligonucleotide
  Sense strand starting at position 1805 of SEQ ID NO: 1883023
ucuugaaacuuagugcaaa

SEQ ID NO: 2164413 - RNA, 19 nt, Artificial Sequence
  Description of Artificial Sequence: Synthetic oligonucleotide
  Antisense strand to SEQ ID NO: 2164412
uuugcacuaaguuucaaga

SEQ ID NO: 2164414 - RNA, 19 nt, Artificial Sequence
  Description of Artificial Sequence: Synthetic oligonucleotide
  Sense strand starting at position 1808 of SEQ ID NO: 1883023
ugaaacuuagugcaaagua

SEQ ID NO: 2164415 - RNA, 19 nt, Artificial Sequence
  Description of Artificial Sequence: Synthetic oligonucleotide
  Antisense strand to SEQ ID NO: 2164414
uacuuugcacuaaguuuca

SEQ ID NO: 2164416 - RNA, 19 nt, Artificial Sequence
  Description of Artificial Sequence: Synthetic oligonucleotide
  Sense strand starting at position 2352 of SEQ ID NO: 1883023
ccugaauaucaguaaguau

SEQ ID NO: 2164417 - RNA, 19 nt, Artificial Sequence
  Description of Artificial Sequence: Synthetic oligonucleotide
  Antisense strand to SEQ ID NO: 2164416
auacuuacugauauucagg

SEQ ID NO: 2164418 - RNA, 19 nt, Artificial Sequence
  Description of Artificial Sequence: Synthetic oligonucleotide
  Sense strand starting at position 2411 of SEQ ID NO: 1883023
cugguaacgauuuguuuau

SEQ ID NO: 2164419 - RNA, 19 nt, Artificial Sequence
  Description of Artificial Sequence: Synthetic oligonucleotide
  Antisense strand to SEQ ID NO: 2164418
auaaacaaaucguuaccag

SEQ ID NO: 2164420 - RNA, 19 nt, Artificial Sequence
  Description of Artificial Sequence: Synthetic oligonucleotide
  Sense strand starting at position 2518 of SEQ ID NO: 1883023
aggccugaauuccuuauau

SEQ ID NO: 2164421 - RNA, 19 nt, Artificial Sequence
  Description of Artificial Sequence: Synthetic oligonucleotide
  Antisense strand to SEQ ID NO: 2164420
auauaaggaauucaggccu

SEQ ID NO: 2164422 - RNA, 19 nt, Artificial Sequence
  Description of Artificial Sequence: Synthetic oligonucleotide
  Sense strand starting at position 2655 of SEQ ID NO: 1883023
aaugauuuauugucugugu

SEQ ID NO: 2164423 - RNA, 19 nt, Artificial Sequence
  Description of Artificial Sequence: Synthetic oligonucleotide
  Antisense strand to SEQ ID NO: 2164422
acacagacaauaaaucauu

SEQ ID NO: 2164424 - RNA, 19 nt, Artificial Sequence
  Description of Artificial Sequence: Synthetic oligonucleotide
  Sense strand starting at position 2656 of SEQ ID NO: 1883023
augauuuauugucugugua

SEQ ID NO: 2164425 - RNA, 19 nt, Artificial Sequence
  Description of Artificial Sequence: Synthetic oligonucleotide
  Antisense strand to SEQ ID NO: 2164424
uacacagacaauaaaucau

SEQ ID NO: 2164426 - RNA, 19 nt, Artificial Sequence
  Description of Artificial Sequence: Synthetic oligonucleotide
  Sense strand starting at position 2657 of SEQ ID NO: 1883023
ugauuuauugucuguguaa

SEQ ID NO: 2164427 - RNA, 19 nt, Artificial Sequence
  Description of Artificial Sequence: Synthetic oligonucleotide
  Antisense strand to SEQ ID NO: 2164426
uuacacagacaauaaauca

SEQ ID NO: 2164428 - RNA, 19 nt, Artificial Sequence
  Description of Artificial Sequence: Synthetic oligonucleotide
  Sense strand starting at position 2713 of SEQ ID NO: 1883023
augguaugcuucuuuauuu

SEQ ID NO: 2164429 - RNA, 19 nt, Artificial Sequence
  Description of Artificial Sequence: Synthetic oligonucleotide
  Antisense strand to SEQ ID NO: 2164428
aaauaaagaagcauaccau

SEQ ID NO: 2164430 - RNA, 19 nt, Artificial Sequence
  Description of Artificial Sequence: Synthetic oligonucleotide
  Sense strand starting at position 2756 of SEQ ID NO: 1883023
auaacuuaucagggucaau

SEQ ID NO: 2164431 - RNA, 19 nt, Artificial Sequence
  Description of Artificial Sequence: Synthetic oligonucleotide
  Antisense strand to SEQ ID NO: 2164430
auugacccugauaaguuau

SEQ ID NO: 2164432 - RNA, 19 nt, Artificial Sequence
  Description of Artificial Sequence: Synthetic oligonucleotide
  Sense strand starting at position 2768 of SEQ ID NO: 1883023
ggucaaugauaagcucaau

SEQ ID NO: 2164433 - RNA, 19 nt, Artificial Sequence
  Description of Artificial Sequence: Synthetic oligonucleotide
  Antisense strand to SEQ ID NO: 2164432
auugagcuuaucauugacc

SEQ ID NO: 2164434 - RNA, 19 nt, Artificial Sequence
  Description of Artificial Sequence: Synthetic oligonucleotide
  Sense strand starting at position 2774 of SEQ ID NO: 1883023
ugauaagcucaauaucagu

SEQ ID NO: 2164435 - RNA, 19 nt, Artificial Sequence
  Description of Artificial Sequence: Synthetic oligonucleotide
  Antisense strand to SEQ ID NO: 2164434
acugauauugagcuuauca

SEQ ID NO: 2164436 - RNA, 19 nt, Artificial Sequence
  Description of Artificial Sequence: Synthetic oligonucleotide
  Sense strand starting at position 2779 of SEQ ID NO: 1883023
agcucaauaucagugauua

SEQ ID NO: 2164437 - RNA, 19 nt, Artificial Sequence
  Description of Artificial Sequence: Synthetic oligonucleotide
  Antisense strand to SEQ ID NO: 2164436
uaaucacugauauugagcu

SEQ ID NO: 2164438 - RNA, 19 nt, Artificial Sequence
  Description of Artificial Sequence: Synthetic oligonucleotide
  Sense strand starting at position 2802 of SEQ ID NO: 1883023
ggguuauccucacuggaau

SEQ ID NO: 2164439 - RNA, 19 nt, Artificial Sequence
  Description of Artificial Sequence: Synthetic oligonucleotide
  Antisense strand to SEQ ID NO: 2164438
auuccagugaggauaaccc

SEQ ID NO: 2164440 - RNA, 19 nt, Artificial Sequence
  Description of Artificial Sequence: Synthetic oligonucleotide
  Sense strand starting at position 2803 of SEQ ID NO: 1883023
gguuauccucacuggaauu

SEQ ID NO: 2164441 - RNA, 19 nt, Artificial Sequence
  Description of Artificial Sequence: Synthetic oligonucleotide
  Antisense strand to SEQ ID NO: 2164440
aauuccagugaggauaacc

SEQ ID NO: 2164442 - RNA, 19 nt, Artificial Sequence
  Description of Artificial Sequence: Synthetic oligonucleotide
  Sense strand starting at position 2837 of SEQ ID NO: 1883023
gcuuacauauucccaggaa

SEQ ID NO: 2164443 - RNA, 19 nt, Artificial Sequence
  Description of Artificial Sequence: Synthetic oligonucleotide
  Antisense strand to SEQ ID NO: 2164442
uuccugggaauauguaagc

SEQ ID NO: 2164444 - RNA, 19 nt, Artificial Sequence
  Description of Artificial Sequence: Synthetic oligonucleotide
  Sense strand starting at position 2871 of SEQ ID NO: 1883023
guucuugguccacagggau

SEQ ID NO: 2164445 - RNA, 19 nt, Artificial Sequence
  Description of Artificial Sequence: Synthetic oligonucleotide
  Antisense strand to SEQ ID NO: 2164444
aucccuguggaccaagaac

SEQ ID NO: 2164446 - RNA, 19 nt, Artificial Sequence
  Description of Artificial Sequence: Synthetic oligonucleotide
  Sense strand starting at position 3569 of SEQ ID NO: 1883023
uugguuaugcuccacugaa

SEQ ID NO: 2164447 - RNA, 19 nt, Artificial Sequence
  Description of Artificial Sequence: Synthetic oligonucleotide
  Antisense strand to SEQ ID NO: 2164446
uucaguggagcauaaccaa

SEQ ID NO: 2164448 - RNA, 19 nt, Artificial Sequence
  Description of Artificial Sequence: Synthetic oligonucleotide
  Sense strand starting at position 3607 of SEQ ID NO: 1883023
ccuuaaguuguggaaguaa

SEQ ID NO: 2164449 - RNA, 19 nt, Artificial Sequence
  Description of Artificial Sequence: Synthetic oligonucleotide
  Antisense strand to SEQ ID NO: 2164448
uuacuuccacaacuuaagg

SEQ ID NO: 2164450 - RNA, 19 nt, Artificial Sequence
  Description of Artificial Sequence: Synthetic oligonucleotide
  Sense strand starting at position 3748 of SEQ ID NO: 1883023
gguuaaaugcacugaacac

SEQ ID NO: 2164451 - RNA, 19 nt, Artificial Sequence
  Description of Artificial Sequence: Synthetic oligonucleotide
  Antisense strand to SEQ ID NO: 2164450
guguucagugcauuuaacc

SEQ ID NO: 2164452 - RNA, 19 nt, Artificial Sequence
  Description of Artificial Sequence: Synthetic oligonucleotide
  Sense strand starting at position 171 of SEQ ID NO: 1883024
aagccuguucuuuagauag

SEQ ID NO: 2164453 - RNA, 19 nt, Artificial Sequence
  Description of Artificial Sequence: Synthetic oligonucleotide
  Antisense strand to SEQ ID NO: 2164452
cuaucuaaagaacaggcuu

SEQ ID NO: 2164454 - RNA, 19 nt, Artificial Sequence
  Description of Artificial Sequence: Synthetic oligonucleotide
  Sense strand starting at position 267 of SEQ ID NO: 1883024
agauuacagucacucugau

SEQ ID NO: 2164455 - RNA, 19 nt, Artificial Sequence
  Description of Artificial Sequence: Synthetic oligonucleotide
  Antisense strand to SEQ ID NO: 2164454
aucagagugacuguaaucu

SEQ ID NO: 2164456 - RNA, 19 nt, Artificial Sequence
  Description of Artificial Sequence: Synthetic oligonucleotide
  Sense strand starting at position 303 of SEQ ID NO: 1883024
cuuguuauggcacaaauua

SEQ ID NO: 2164457 - RNA, 19 nt, Artificial Sequence
  Description of Artificial Sequence: Synthetic oligonucleotide
  Antisense strand to SEQ ID NO: 2164456
uaauuugugccauaacaag

SEQ ID NO: 2164458 - RNA, 19 nt, Artificial Sequence
  Description of Artificial Sequence: Synthetic oligonucleotide
  Sense strand starting at position 378 of SEQ ID NO: 1883024
gcacauauuuaugaagaca

SEQ ID NO: 2164459 - RNA, 19 nt, Artificial Sequence
  Description of Artificial Sequence: Synthetic oligonucleotide
  Antisense strand to SEQ ID NO: 2164458
ugucuucauaaauaugugc

SEQ ID NO: 2164460 - RNA, 19 nt, Artificial Sequence
  Description of Artificial Sequence: Synthetic oligonucleotide
  Sense strand starting at position 411 of SEQ ID NO: 1883024
cacagugggcucugauaaa

SEQ ID NO: 2164461 - RNA, 19 nt, Artificial Sequence
  Description of Artificial Sequence: Synthetic oligonucleotide
  Antisense strand to SEQ ID NO: 2164460
uuuaucagagcccacugug

SEQ ID NO: 2164462 - RNA, 19 nt, Artificial Sequence
  Description of Artificial Sequence: Synthetic oligonucleotide
  Sense strand starting at position 444 of SEQ ID NO: 1883024
aguaaaugcuacucucaag

SEQ ID NO: 2164463 - RNA, 19 nt, Artificial Sequence
  Description of Artificial Sequence: Synthetic oligonucleotide
  Antisense strand to SEQ ID NO: 2164462
cuugagaguagcauuuacu

SEQ ID NO: 2164464 - RNA, 19 nt, Artificial Sequence
  Description of Artificial Sequence: Synthetic oligonucleotide
  Sense strand starting at position 450 of SEQ ID NO: 1883024
ugcuacucucaagaagauu

SEQ ID NO: 2164465 - RNA, 19 nt, Artificial Sequence
  Description of Artificial Sequence: Synthetic oligonucleotide
  Antisense strand to SEQ ID NO: 2164464
aaucuucuugagaguagca

SEQ ID NO: 2164466 - RNA, 19 nt, Artificial Sequence
  Description of Artificial Sequence: Synthetic oligonucleotide
  Sense strand starting at position 517 of SEQ ID NO: 1883024
uaggacgugaagugauaaa

SEQ ID NO: 2164467 - RNA, 19 nt, Artificial Sequence
  Description of Artificial Sequence: Synthetic oligonucleotide
  Antisense strand to SEQ ID NO: 2164466
uuuaucacuucacguccua

SEQ ID NO: 2164468 - RNA, 19 nt, Artificial Sequence
  Description of Artificial Sequence: Synthetic oligonucleotide
  Sense strand starting at position 538 of SEQ ID NO: 1883024
guauaagacgaauggaguu

SEQ ID NO: 2164469 - RNA, 19 nt, Artificial Sequence
  Description of Artificial Sequence: Synthetic oligonucleotide
  Antisense strand to SEQ ID NO: 2164468
aacuccauucgucuuauac

SEQ ID NO: 2164470 - RNA, 19 nt, Artificial Sequence
  Description of Artificial Sequence: Synthetic oligonucleotide
  Sense strand starting at position 581 of SEQ ID NO: 1883024
gcuagaggaauugagcauu

SEQ ID NO: 2164471 - RNA, 19 nt, Artificial Sequence
  Description of Artificial Sequence: Synthetic oligonucleotide
  Antisense strand to SEQ ID NO: 2164470
aaugcucaauuccucuagc

SEQ ID NO: 2164472 - RNA, 19 nt, Artificial Sequence
  Description of Artificial Sequence: Synthetic oligonucleotide
  Sense strand starting at position 605 of SEQ ID NO: 1883024
uuagaagggucagcuuaga

SEQ ID NO: 2164473 - RNA, 19 nt, Artificial Sequence
  Description of Artificial Sequence: Synthetic oligonucleotide
  Antisense strand to SEQ ID NO: 2164472
ucuaagcugacccuucuaa

SEQ ID NO: 2164474 - RNA, 19 nt, Artificial Sequence
  Description of Artificial Sequence: Synthetic oligonucleotide
  Sense strand starting at position 619 of SEQ ID NO: 1883024
uuagaagggucauugaacu

SEQ ID NO: 2164475 - RNA, 19 nt, Artificial Sequence
  Description of Artificial Sequence: Synthetic oligonucleotide
  Antisense strand to SEQ ID NO: 2164474
aguucaaugacccuucuaa

SEQ ID NO: 2164476 - RNA, 19 nt, Artificial Sequence
  Description of Artificial Sequence: Synthetic oligonucleotide
  Sense strand starting at position 625 of SEQ ID NO: 1883024
gggucauugaacuaugccu

SEQ ID NO: 2164477 - RNA, 19 nt, Artificial Sequence
  Description of Artificial Sequence: Synthetic oligonucleotide
  Antisense strand to SEQ ID NO: 2164476
aggcauaguucaaugaccc

SEQ ID NO: 2164478 - RNA, 19 nt, Artificial Sequence
  Description of Artificial Sequence: Synthetic oligonucleotide
  Sense strand starting at position 639 of SEQ ID NO: 1883024
ugccuuagagaauggacua

SEQ ID NO: 2164479 - RNA, 19 nt, Artificial Sequence
  Description of Artificial Sequence: Synthetic oligonucleotide
  Antisense strand to SEQ ID NO: 2164478
uaguccauucucuaaggca

SEQ ID NO: 2164480 - RNA, 19 nt, Artificial Sequence
  Description of Artificial Sequence: Synthetic oligonucleotide
  Sense strand starting at position 790 of SEQ ID NO: 1883024
uguauuuccugcuugggua

SEQ ID NO: 2164481 - RNA, 19 nt, Artificial Sequence
  Description of Artificial Sequence: Synthetic oligonucleotide
  Antisense strand to SEQ ID NO: 2164480
uacccaagcaggaaauaca

SEQ ID NO: 2164482 - RNA, 19 nt, Artificial Sequence
  Description of Artificial Sequence: Synthetic oligonucleotide
  Sense strand starting at position 791 of SEQ ID NO: 1883024
guauuuccugcuuggguau

SEQ ID NO: 2164483 - RNA, 19 nt, Artificial Sequence
  Description of Artificial Sequence: Synthetic oligonucleotide
  Antisense strand to SEQ ID NO: 2164482
auacccaagcaggaaauac

SEQ ID NO: 2164484 - RNA, 19 nt, Artificial Sequence
  Description of Artificial Sequence: Synthetic oligonucleotide
  Sense strand starting at position 1445 of SEQ ID NO: 1883024
caugaaauugaccgucaga

SEQ ID NO: 2164485 - RNA, 19 nt, Artificial Sequence
  Description of Artificial Sequence: Synthetic oligonucleotide
  Antisense strand to SEQ ID NO: 2164484
ucugacggucaauuucaug

SEQ ID NO: 2164486 - RNA, 19 nt, Artificial Sequence
  Description of Artificial Sequence: Synthetic oligonucleotide
  Sense strand starting at position 1448 of SEQ ID NO: 1883024
gaaauugaccgucagagcu

SEQ ID NO: 2164487 - RNA, 19 nt, Artificial Sequence
  Description of Artificial Sequence: Synthetic oligonucleotide
  Antisense strand to SEQ ID NO: 2164486
agcucugacggucaauuuc

SEQ ID NO: 2164488 - RNA, 19 nt, Artificial Sequence
  Description of Artificial Sequence: Synthetic oligonucleotide
  Sense strand starting at position 1460 of SEQ ID NO: 1883024
cagagcugucaugaaucau

SEQ ID NO: 2164489 - RNA, 19 nt, Artificial Sequence
  Description of Artificial Sequence: Synthetic oligonucleotide
  Antisense strand to SEQ ID NO: 2164488
augauucaugacagcucug

SEQ ID NO: 2164490 - RNA, 19 nt, Artificial Sequence
  Description of Artificial Sequence: Synthetic oligonucleotide
  Sense strand starting at position 1464 of SEQ ID NO: 1883024
gcugucaugaaucaugaag

SEQ ID NO: 2164491 - RNA, 19 nt, Artificial Sequence
  Description of Artificial Sequence: Synthetic oligonucleotide
  Antisense strand to SEQ ID NO: 2164490
cuucaugauucaugacagc

SEQ ID NO: 2164492 - RNA, 19 nt, Artificial Sequence
  Description of Artificial Sequence: Synthetic oligonucleotide
  Sense strand starting at position 1805 of SEQ ID NO: 1883024
ucuugaaacuuagugcaaa

SEQ ID NO: 2164493 - RNA, 19 nt, Artificial Sequence
  Description of Artificial Sequence: Synthetic oligonucleotide
  Antisense strand to SEQ ID NO: 2164492
uuugcacuaaguuucaaga

SEQ ID NO: 2164494 - RNA, 19 nt, Artificial Sequence
  Description of Artificial Sequence: Synthetic oligonucleotide
  Sense strand starting at position 1808 of SEQ ID NO: 1883024
ugaaacuuagugcaaagua

SEQ ID NO: 2164495 - RNA, 19 nt, Artificial Sequence
  Description of Artificial Sequence: Synthetic oligonucleotide
  Antisense strand to SEQ ID NO: 2164494
uacuuugcacuaaguuuca

SEQ ID NO: 2164496 - RNA, 19 nt, Artificial Sequence
  Description of Artificial Sequence: Synthetic oligonucleotide
  Sense strand starting at position 2352 of SEQ ID NO: 1883024
ccugaauaucaguaaguau

SEQ ID NO: 2164497 - RNA, 19 nt, Artificial Sequence
  Description of Artificial Sequence: Synthetic oligonucleotide
  Antisense strand to SEQ ID NO: 2164496
auacuuacugauauucagg

SEQ ID NO: 2164498 - RNA, 19 nt, Artificial Sequence
  Description of Artificial Sequence: Synthetic oligonucleotide
  Sense strand starting at position 2411 of SEQ ID NO: 1883024
cugguaacgauuuguuuau

SEQ ID NO: 2164499 - RNA, 19 nt, Artificial Sequence
  Description of Artificial Sequence: Synthetic oligonucleotide
  Antisense strand to SEQ ID NO: 2164498
auaaacaaaucguuaccag

SEQ ID NO: 2164500 - RNA, 19 nt, Artificial Sequence
  Description of Artificial Sequence: Synthetic oligonucleotide
  Sense strand starting at position 2518 of SEQ ID NO: 1883024
aggccugaauuccuuauau

SEQ ID NO: 2164501 - RNA, 19 nt, Artificial Sequence
  Description of Artificial Sequence: Synthetic oligonucleotide
  Antisense strand to SEQ ID NO: 2164500
auauaaggaauucaggccu

SEQ ID NO: 2164502 - RNA, 19 nt, Artificial Sequence
  Description of Artificial Sequence: Synthetic oligonucleotide
  Sense strand starting at position 2655 of SEQ ID NO: 1883024
aaugauuuauugucugugu

SEQ ID NO: 2164503 - RNA, 19 nt, Artificial Sequence
  Description of Artificial Sequence: Synthetic oligonucleotide
  Antisense strand to SEQ ID NO: 2164502
acacagacaauaaaucauu

SEQ ID NO: 2164504 - RNA, 19 nt, Artificial Sequence
  Description of Artificial Sequence: Synthetic oligonucleotide
  Sense strand starting at position 2656 of SEQ ID NO: 1883024
augauuuauugucugugua

SEQ ID NO: 2164505 - RNA, 19 nt, Artificial Sequence
  Description of Artificial Sequence: Synthetic oligonucleotide
  Antisense strand to SEQ ID NO: 2164504
uacacagacaauaaaucau

SEQ ID NO: 2164506 - RNA, 19 nt, Artificial Sequence
  Description of Artificial Sequence: Synthetic oligonucleotide
  Sense strand starting at position 2657 of SEQ ID NO: 1883024
ugauuuauugucuguguaa

SEQ ID NO: 2164507 - RNA, 19 nt, Artificial Sequence
  Description of Artificial Sequence: Synthetic oligonucleotide
  Antisense strand to SEQ ID NO: 2164506
uuacacagacaauaaauca

SEQ ID NO: 2164508 - RNA, 19 nt, Artificial Sequence
  Description of Artificial Sequence: Synthetic oligonucleotide
  Sense strand starting at position 2713 of SEQ ID NO: 1883024
augguaugcuucuuuauuu

SEQ ID NO: 2164509 - RNA, 19 nt, Artificial Sequence
  Description of Artificial Sequence: Synthetic oligonucleotide
  Antisense strand to SEQ ID NO: 2164508
aaauaaagaagcauaccau

SEQ ID NO: 2164510 - RNA, 19 nt, Artificial Sequence
  Description of Artificial Sequence: Synthetic oligonucleotide
  Sense strand starting at position 2756 of SEQ ID NO: 1883024
auaacuuaucagggucaau

SEQ ID NO: 2164511 - RNA, 19 nt, Artificial Sequence
  Description of Artificial Sequence: Synthetic oligonucleotide
  Antisense strand to SEQ ID NO: 2164510
auugacccugauaaguuau

SEQ ID NO: 2164512 - RNA, 19 nt, Artificial Sequence
  Description of Artificial Sequence: Synthetic oligonucleotide
  Sense strand starting at position 2768 of SEQ ID NO: 1883024
ggucaaugauaagcucaau

SEQ ID NO: 2164513 - RNA, 19 nt, Artificial Sequence
  Description of Artificial Sequence: Synthetic oligonucleotide
  Antisense strand to SEQ ID NO: 2164512
auugagcuuaucauugacc

SEQ ID NO: 2164514 - RNA, 19 nt, Artificial Sequence
  Description of Artificial Sequence: Synthetic oligonucleotide
  Sense strand starting at position 2774 of SEQ ID NO: 1883024
ugauaagcucaauaucagu

SEQ ID NO: 2164515 - RNA, 19 nt, Artificial Sequence
  Description of Artificial Sequence: Synthetic oligonucleotide
  Antisense strand to SEQ ID NO: 2164514
acugauauugagcuuauca

SEQ ID NO: 2164516 - RNA, 19 nt, Artificial Sequence
  Description of Artificial Sequence: Synthetic oligonucleotide
  Sense strand starting at position 2779 of SEQ ID NO: 1883024
agcucaauaucagugauua

SEQ ID NO: 2164517 - RNA, 19 nt, Artificial Sequence
  Description of Artificial Sequence: Synthetic oligonucleotide
  Antisense strand to SEQ ID NO: 2164516
uaaucacugauauugagcu

SEQ ID NO: 2164518 - RNA, 19 nt, Artificial Sequence
  Description of Artificial Sequence: Synthetic oligonucleotide
  Sense strand starting at position 2802 of SEQ ID NO: 1883024
ggguuauccucacuggaau

SEQ ID NO: 2164519 - RNA, 19 nt, Artificial Sequence
  Description of Artificial Sequence: Synthetic oligonucleotide
  Antisense strand to SEQ ID NO: 2164518
auuccagugaggauaaccc

SEQ ID NO: 2164520 - RNA, 19 nt, Artificial Sequence
  Description of Artificial Sequence: Synthetic oligonucleotide
  Sense strand starting at position 2803 of SEQ ID NO: 1883024
gguuauccucacuggaauu

SEQ ID NO: 2164521 - RNA, 19 nt, Artificial Sequence
  Description of Artificial Sequence: Synthetic oligonucleotide
  Antisense strand to SEQ ID NO: 2164520
aauuccagugaggauaacc

SEQ ID NO: 2164522 - RNA, 19 nt, Artificial Sequence
  Description of Artificial Sequence: Synthetic oligonucleotide
  Sense strand starting at position 2837 of SEQ ID NO: 1883024
gcuuacauauucccaggaa

SEQ ID NO: 2164523 - RNA, 19 nt, Artificial Sequence
  Description of Artificial Sequence: Synthetic oligonucleotide
  Antisense strand to SEQ ID NO: 2164522
uuccugggaauauguaagc

SEQ ID NO: 2164524 - RNA, 19 nt, Artificial Sequence
  Description of Artificial Sequence: Synthetic oligonucleotide
  Sense strand starting at position 2871 of SEQ ID NO: 1883024
guucuugguccacagggau

SEQ ID NO: 2164525 - RNA, 19 nt, Artificial Sequence
  Description of Artificial Sequence: Synthetic oligonucleotide
  Antisense strand to SEQ ID NO: 2164524
aucccuguggaccaagaac

SEQ ID NO: 2164526 - RNA, 19 nt, Artificial Sequence
  Description of Artificial Sequence: Synthetic oligonucleotide
  Sense strand starting at position 3569 of SEQ ID NO: 1883024
uugguuaugcuccacugaa

SEQ ID NO: 2164527 - RNA, 19 nt, Artificial Sequence
  Description of Artificial Sequence: Synthetic oligonucleotide
  Antisense strand to SEQ ID NO: 2164526
uucaguggagcauaaccaa

SEQ ID NO: 2164528 - RNA, 19 nt, Artificial Sequence
  Description of Artificial Sequence: Synthetic oligonucleotide
  Sense strand starting at position 3607 of SEQ ID NO: 1883024
ccuuaaguuguggaaguaa

SEQ ID NO: 2164529 - RNA, 19 nt, Artificial Sequence
  Description of Artificial Sequence: Synthetic oligonucleotide
  Antisense strand to SEQ ID NO: 2164528
uuacuuccacaacuuaagg

SEQ ID NO: 2164530 - RNA, 19 nt, Artificial Sequence
  Description of Artificial Sequence: Synthetic oligonucleotide
  Sense strand starting at position 3748 of SEQ ID NO: 1883024
gguuaaaugcacugaacac

SEQ ID NO: 2164531 - RNA, 19 nt, Artificial Sequence
  Description of Artificial Sequence: Synthetic oligonucleotide
  Antisense strand to SEQ ID NO: 2164530
guguucagugcauuuaacc

SEQ ID NO: 2164532 - RNA, 19 nt, Artificial Sequence
  Description of Artificial Sequence: Synthetic oligonucleotide
  Sense strand starting at position 110 of SEQ ID NO: 1883025
uggccaauagacuguuacu

SEQ ID NO: 2164533 - RNA, 19 nt, Artificial Sequence
  Description of Artificial Sequence: Synthetic oligonucleotide
  Antisense strand to SEQ ID NO: 2164532
aguaacagucuauuggcca

SEQ ID NO: 2164534 - RNA, 19 nt, Artificial Sequence
  Description of Artificial Sequence: Synthetic oligonucleotide
  Sense strand starting at position 148 of SEQ ID NO: 1883025
uugccauuauuccugagau

SEQ ID NO: 2164535 - RNA, 19 nt, Artificial Sequence
  Description of Artificial Sequence: Synthetic oligonucleotide
  Antisense strand to SEQ ID NO: 2164534
aucucaggaauaauggcaa

SEQ ID NO: 2164536 - RNA, 19 nt, Artificial Sequence
  Description of Artificial Sequence: Synthetic oligonucleotide
  Sense strand starting at position 150 of SEQ ID NO: 1883025
gccauuauuccugagauac

SEQ ID NO: 2164537 - RNA, 19 nt, Artificial Sequence
  Description of Artificial Sequence: Synthetic oligonucleotide
  Antisense strand to SEQ ID NO: 2164536
guaucucaggaauaauggc

SEQ ID NO: 2164538 - RNA, 19 nt, Artificial Sequence
  Description of Artificial Sequence: Synthetic oligonucleotide
  Sense strand starting at position 199 of SEQ ID NO: 1883025
ugaucauagcaacaucagu

SEQ ID NO: 2164539 - RNA, 19 nt, Artificial Sequence
  Description of Artificial Sequence: Synthetic oligonucleotide
  Antisense strand to SEQ ID NO: 2164538
acugauguugcuaugauca

SEQ ID NO: 2164540 - RNA, 19 nt, Artificial Sequence
  Description of Artificial Sequence: Synthetic oligonucleotide
  Sense strand starting at position 212 of SEQ ID NO: 1883025
aucaguuggcuugaacaau

SEQ ID NO: 2164541 - RNA, 19 nt, Artificial Sequence
  Description of Artificial Sequence: Synthetic oligonucleotide
  Antisense strand to SEQ ID NO: 2164540
auuguucaagccaacugau

SEQ ID NO: 2164542 - RNA, 19 nt, Artificial Sequence
  Description of Artificial Sequence: Synthetic oligonucleotide
  Sense strand starting at position 235 of SEQ ID NO: 1883025
guaauuaaggcauaucuau

SEQ ID NO: 2164543 - RNA, 19 nt, Artificial Sequence
  Description of Artificial Sequence: Synthetic oligonucleotide
  Antisense strand to SEQ ID NO: 2164542
auagauaugccuuaauuac

SEQ ID NO: 2164544 - RNA, 19 nt, Artificial Sequence
  Description of Artificial Sequence: Synthetic oligonucleotide
  Sense strand starting at position 244 of SEQ ID NO: 1883025
gcauaucuauuauugaaga

SEQ ID NO: 2164545 - RNA, 19 nt, Artificial Sequence
  Description of Artificial Sequence: Synthetic oligonucleotide
  Antisense strand to SEQ ID NO: 2164544
ucuucaauaauagauaugc

SEQ ID NO: 2164546 - RNA, 19 nt, Artificial Sequence
  Description of Artificial Sequence: Synthetic oligonucleotide
  Sense strand starting at position 914 of SEQ ID NO: 1883025
gacccuuuguuucugauga

SEQ ID NO: 2164547 - RNA, 19 nt, Artificial Sequence
  Description of Artificial Sequence: Synthetic oligonucleotide
  Antisense strand to SEQ ID NO: 2164546
ucaucagaaacaaaggguc

SEQ ID NO: 2164548 - RNA, 19 nt, Artificial Sequence
  Description of Artificial Sequence: Synthetic oligonucleotide
  Sense strand starting at position 939 of SEQ ID NO: 1883025
agcugcguggcuuucuaaa

SEQ ID NO: 2164549 - RNA, 19 nt, Artificial Sequence
  Description of Artificial Sequence: Synthetic oligonucleotide
  Antisense strand to SEQ ID NO: 2164548
uuuagaaagccacgcagcu

SEQ ID NO: 2164550 - RNA, 19 nt, Artificial Sequence
  Description of Artificial Sequence: Synthetic oligonucleotide
  Sense strand starting at position 1148 of SEQ ID NO: 1883025
gauugucgacuuugaaaug

SEQ ID NO: 2164551 - RNA, 19 nt, Artificial Sequence
  Description of Artificial Sequence: Synthetic oligonucleotide
  Antisense strand to SEQ ID NO: 2164550
cauuucaaagucgacaauc

SEQ ID NO: 2164552 - RNA, 19 nt, Artificial Sequence
  Description of Artificial Sequence: Synthetic oligonucleotide
  Sense strand starting at position 1187 of SEQ ID NO: 1883025
aguguuguaucaucaaaua

SEQ ID NO: 2164553 - RNA, 19 nt, Artificial Sequence
  Description of Artificial Sequence: Synthetic oligonucleotide
  Antisense strand to SEQ ID NO: 2164552
uauuugaugauacaacacu

SEQ ID NO: 2164554 - RNA, 19 nt, Artificial Sequence
  Description of Artificial Sequence: Synthetic oligonucleotide
  Sense strand starting at position 1623 of SEQ ID NO: 1883025
ugucuuugaucucuuagga

SEQ ID NO: 2164555 - RNA, 19 nt, Artificial Sequence
  Description of Artificial Sequence: Synthetic oligonucleotide
  Antisense strand to SEQ ID NO: 2164554
uccuaagagaucaaagaca

SEQ ID NO: 2164556 - RNA, 19 nt, Artificial Sequence
  Description of Artificial Sequence: Synthetic oligonucleotide
  Sense strand starting at position 1663 of SEQ ID NO: 1883025
auaauugguccguaguauc

SEQ ID NO: 2164557 - RNA, 19 nt, Artificial Sequence
  Description of Artificial Sequence: Synthetic oligonucleotide
  Antisense strand to SEQ ID NO: 2164556
gauacuacggaccaauuau

SEQ ID NO: 2164558 - RNA, 19 nt, Artificial Sequence
  Description of Artificial Sequence: Synthetic oligonucleotide
  Sense strand starting at position 1766 of SEQ ID NO: 1883025
aaagaauaguacuucguuu

SEQ ID NO: 2164559 - RNA, 19 nt, Artificial Sequence
  Description of Artificial Sequence: Synthetic oligonucleotide
  Antisense strand to SEQ ID NO: 2164558
aaacgaaguacuauucuuu

SEQ ID NO: 2164560 - RNA, 19 nt, Artificial Sequence
  Description of Artificial Sequence: Synthetic oligonucleotide
  Sense strand starting at position 2080 of SEQ ID NO: 1883025
guuuacugaugacuauauu

SEQ ID NO: 2164561 - RNA, 19 nt, Artificial Sequence
  Description of Artificial Sequence: Synthetic oligonucleotide
  Antisense strand to SEQ ID NO: 2164560
aauauagucaucaguaaac

SEQ ID NO: 2164562 - RNA, 19 nt, Artificial Sequence
  Description of Artificial Sequence: Synthetic oligonucleotide
  Sense strand starting at position 2125 of SEQ ID NO: 1883025
cuaagaauucccuggcaca

SEQ ID NO: 2164563 - RNA, 19 nt, Artificial Sequence
  Description of Artificial Sequence: Synthetic oligonucleotide
  Antisense strand to SEQ ID NO: 2164562
ugugccagggaauucuuag

SEQ ID NO: 2164564 - RNA, 19 nt, Artificial Sequence
  Description of Artificial Sequence: Synthetic oligonucleotide
  Sense strand starting at position 2179 of SEQ ID NO: 1883025
acaagaaucagacguguug

SEQ ID NO: 2164565 - RNA, 19 nt, Artificial Sequence
  Description of Artificial Sequence: Synthetic oligonucleotide
  Antisense strand to SEQ ID NO: 2164564
caacacgucugauucuugu

SEQ ID NO: 2164566 - RNA, 19 nt, Artificial Sequence
  Description of Artificial Sequence: Synthetic oligonucleotide
  Sense strand starting at position 2198 of SEQ ID NO: 1883025
cuaagcauccugggaaaga

SEQ ID NO: 2164567 - RNA, 19 nt, Artificial Sequence
  Description of Artificial Sequence: Synthetic oligonucleotide
  Antisense strand to SEQ ID NO: 2164566
ucuuucccaggaugcuuag

SEQ ID NO: 2164568 - RNA, 19 nt, Artificial Sequence
  Description of Artificial Sequence: Synthetic oligonucleotide
  Sense strand starting at position 2376 of SEQ ID NO: 1883025
aacugugagcccuacagau

SEQ ID NO: 2164569 - RNA, 19 nt, Artificial Sequence
  Description of Artificial Sequence: Synthetic oligonucleotide
  Antisense strand to SEQ ID NO: 2164568
aucuguagggcucacaguu

SEQ ID NO: 2164570 - RNA, 19 nt, Artificial Sequence
  Description of Artificial Sequence: Synthetic oligonucleotide
  Sense strand starting at position 2378 of SEQ ID NO: 1883025
cugugagcccuacagauaa

SEQ ID NO: 2164571 - RNA, 19 nt, Artificial Sequence
  Description of Artificial Sequence: Synthetic oligonucleotide
  Antisense strand to SEQ ID NO: 2164570
uuaucuguagggcucacag

SEQ ID NO: 2164572 - RNA, 19 nt, Artificial Sequence
  Description of Artificial Sequence: Synthetic oligonucleotide
  Sense strand starting at position 2597 of SEQ ID NO: 1883025
cuuggauuguuccugagga

SEQ ID NO: 2164573 - RNA, 19 nt, Artificial Sequence
  Description of Artificial Sequence: Synthetic oligonucleotide
  Antisense strand to SEQ ID NO: 2164572
uccucaggaacaauccaag

SEQ ID NO: 2164574 - RNA, 19 nt, Artificial Sequence
  Description of Artificial Sequence: Synthetic oligonucleotide
  Sense strand starting at position 2599 of SEQ ID NO: 1883025
uggauuguuccugaggacu

SEQ ID NO: 2164575 - RNA, 19 nt, Artificial Sequence
  Description of Artificial Sequence: Synthetic oligonucleotide
  Antisense strand to SEQ ID NO: 2164574
aguccucaggaacaaucca

SEQ ID NO: 2164576 - RNA, 19 nt, Artificial Sequence
  Description of Artificial Sequence: Synthetic oligonucleotide
  Sense strand starting at position 2689 of SEQ ID NO: 1883025
aaagauuucugugaaagug

SEQ ID NO: 2164577 - RNA, 19 nt, Artificial Sequence
  Description of Artificial Sequence: Synthetic oligonucleotide
  Antisense strand to SEQ ID NO: 2164576
cacuuucacagaaaucuuu

SEQ ID NO: 2164578 - RNA, 19 nt, Artificial Sequence
  Description of Artificial Sequence: Synthetic oligonucleotide
  Sense strand starting at position 2701 of SEQ ID NO: 1883025
gaaagugucagaggcaaag

SEQ ID NO: 2164579 - RNA, 19 nt, Artificial Sequence
  Description of Artificial Sequence: Synthetic oligonucleotide
  Antisense strand to SEQ ID NO: 2164578
cuuugccucugacacuuuc

SEQ ID NO: 2164580 - RNA, 19 nt, Artificial Sequence
  Description of Artificial Sequence: Synthetic oligonucleotide
  Sense strand starting at position 2711 of SEQ ID NO: 1883025
gaggcaaagcucugaaaga

SEQ ID NO: 2164581 - RNA, 19 nt, Artificial Sequence
  Description of Artificial Sequence: Synthetic oligonucleotide
  Antisense strand to SEQ ID NO: 2164580
ucuuucagagcuuugccuc

SEQ ID NO: 2164582 - RNA, 19 nt, Artificial Sequence
  Description of Artificial Sequence: Synthetic oligonucleotide
  Sense strand starting at position 2733 of SEQ ID NO: 1883025
gaaacucaugccgaaagca

SEQ ID NO: 2164583 - RNA, 19 nt, Artificial Sequence
  Description of Artificial Sequence: Synthetic oligonucleotide
  Antisense strand to SEQ ID NO: 2164582
ugcuuucggcaugaguuuc

SEQ ID NO: 2164584 - RNA, 19 nt, Artificial Sequence
  Description of Artificial Sequence: Synthetic oligonucleotide
  Sense strand starting at position 2771 of SEQ ID NO: 1883025
uagggaugugucuggagca

SEQ ID NO: 2164585 - RNA, 19 nt, Artificial Sequence
  Description of Artificial Sequence: Synthetic oligonucleotide
  Antisense strand to SEQ ID NO: 2164584
ugcuccagacacaucccua

SEQ ID NO: 2164586 - RNA, 19 nt, Artificial Sequence
  Description of Artificial Sequence: Synthetic oligonucleotide
  Sense strand starting at position 2869 of SEQ ID NO: 1883025
gcgaguagaccuuacugua

SEQ ID NO: 2164587 - RNA, 19 nt, Artificial Sequence
  Description of Artificial Sequence: Synthetic oligonucleotide
  Antisense strand to SEQ ID NO: 2164586
uacaguaaggucuacucgc

SEQ ID NO: 2164588 - RNA, 19 nt, Artificial Sequence
  Description of Artificial Sequence: Synthetic oligonucleotide
  Sense strand starting at position 3202 of SEQ ID NO: 1883025
gauguugcucucuagcaaa

SEQ ID NO: 2164589 - RNA, 19 nt, Artificial Sequence
  Description of Artificial Sequence: Synthetic oligonucleotide
  Antisense strand to SEQ ID NO: 2164588
uuugcuagagagcaacauc

SEQ ID NO: 2164590 - RNA, 19 nt, Artificial Sequence
  Description of Artificial Sequence: Synthetic oligonucleotide
  Sense strand starting at position 3263 of SEQ ID NO: 1883025
ggcagccaacuugaaauua

SEQ ID NO: 2164591 - RNA, 19 nt, Artificial Sequence
  Description of Artificial Sequence: Synthetic oligonucleotide
  Antisense strand to SEQ ID NO: 2164590
uaauuucaaguuggcugcc

SEQ ID NO: 2164592 - RNA, 19 nt, Artificial Sequence
  Description of Artificial Sequence: Synthetic oligonucleotide
  Sense strand starting at position 3289 of SEQ ID NO: 1883025
aaaggugugcgccagaaua

SEQ ID NO: 2164593 - RNA, 19 nt, Artificial Sequence
  Description of Artificial Sequence: Synthetic oligonucleotide
  Antisense strand to SEQ ID NO: 2164592
uauucuggcgcacaccuuu

SEQ ID NO: 2164594 - RNA, 19 nt, Artificial Sequence
  Description of Artificial Sequence: Synthetic oligonucleotide
  Sense strand starting at position 3345 of SEQ ID NO: 1883025
uugacuaaguuguuuauac

SEQ ID NO: 2164595 - RNA, 19 nt, Artificial Sequence
  Description of Artificial Sequence: Synthetic oligonucleotide
  Antisense strand to SEQ ID NO: 2164594
guauaaacaacuuagucaa

SEQ ID NO: 2164596 - RNA, 19 nt, Artificial Sequence
  Description of Artificial Sequence: Synthetic oligonucleotide
  Sense strand starting at position 3392 of SEQ ID NO: 1883025
ggugaucuagucuacuaug

SEQ ID NO: 2164597 - RNA, 19 nt, Artificial Sequence
  Description of Artificial Sequence: Synthetic oligonucleotide
  Antisense strand to SEQ ID NO: 2164596
cauaguagacuagaucacc

SEQ ID NO: 2164598 - RNA, 19 nt, Artificial Sequence
  Description of Artificial Sequence: Synthetic oligonucleotide
  Sense strand starting at position 3592 of SEQ ID NO: 1883025
caugauaugcagugagaau

SEQ ID NO: 2164599 - RNA, 19 nt, Artificial Sequence
  Description of Artificial Sequence: Synthetic oligonucleotide
  Antisense strand to SEQ ID NO: 2164598
auucucacugcauaucaug

SEQ ID NO: 2164600 - RNA, 19 nt, Artificial Sequence
  Description of Artificial Sequence: Synthetic oligonucleotide
  Sense strand starting at position 3603 of SEQ ID NO: 1883025
gugagaauccggcaggcau

SEQ ID NO: 2164601 - RNA, 19 nt, Artificial Sequence
  Description of Artificial Sequence: Synthetic oligonucleotide
  Antisense strand to SEQ ID NO: 2164600
augccugccggauucucac

SEQ ID NO: 2164602 - RNA, 19 nt, Artificial Sequence
  Description of Artificial Sequence: Synthetic oligonucleotide
  Sense strand starting at position 3605 of SEQ ID NO: 1883025
gagaauccggcaggcauua

SEQ ID NO: 2164603 - RNA, 19 nt, Artificial Sequence
  Description of Artificial Sequence: Synthetic oligonucleotide
  Antisense strand to SEQ ID NO: 2164602
uaaugccugccggauucuc

SEQ ID NO: 2164604 - RNA, 19 nt, Artificial Sequence
  Description of Artificial Sequence: Synthetic oligonucleotide
  Sense strand starting at position 3693 of SEQ ID NO: 1883025
gcuaucucuggucaaguca

SEQ ID NO: 2164605 - RNA, 19 nt, Artificial Sequence
  Description of Artificial Sequence: Synthetic oligonucleotide
  Antisense strand to SEQ ID NO: 2164604
ugacuugaccagagauagc

SEQ ID NO: 2164606 - RNA, 19 nt, Artificial Sequence
  Description of Artificial Sequence: Synthetic oligonucleotide
  Sense strand starting at position 3749 of SEQ ID NO: 1883025
auggucauaaucgaaguau

SEQ ID NO: 2164607 - RNA, 19 nt, Artificial Sequence
  Description of Artificial Sequence: Synthetic oligonucleotide
  Antisense strand to SEQ ID NO: 2164606
auacuucgauuaugaccau

SEQ ID NO: 2164608 - RNA, 19 nt, Artificial Sequence
  Description of Artificial Sequence: Synthetic oligonucleotide
  Sense strand starting at position 3760 of SEQ ID NO: 1883025
cgaaguaucuaucuuauag

SEQ ID NO: 2164609 - RNA, 19 nt, Artificial Sequence
  Description of Artificial Sequence: Synthetic oligonucleotide
  Antisense strand to SEQ ID NO: 2164608
cuauaagauagauacuucg

SEQ ID NO: 2164610 - RNA, 19 nt, Artificial Sequence
  Description of Artificial Sequence: Synthetic oligonucleotide
  Sense strand starting at position 3812 of SEQ ID NO: 1883025
aguuuacuggcacauuaaa

SEQ ID NO: 2164611 - RNA, 19 nt, Artificial Sequence
  Description of Artificial Sequence: Synthetic oligonucleotide
  Antisense strand to SEQ ID NO: 2164610
uuuaaugugccaguaaacu

SEQ ID NO: 2164612 - RNA, 19 nt, Artificial Sequence
  Description of Artificial Sequence: Synthetic oligonucleotide
  Sense strand starting at position 116 of SEQ ID NO: 1883026
ccggccuugaauuguaauu

SEQ ID NO: 2164613 - RNA, 19 nt, Artificial Sequence
  Description of Artificial Sequence: Synthetic oligonucleotide
  Antisense strand to SEQ ID NO: 2164612
aauuacaauucaaggccgg

SEQ ID NO: 2164614 - RNA, 19 nt, Artificial Sequence
  Description of Artificial Sequence: Synthetic oligonucleotide
  Sense strand starting at position 187 of SEQ ID NO: 1883026
acuuaagggucuccucaau

SEQ ID NO: 2164615 - RNA, 19 nt, Artificial Sequence
  Description of Artificial Sequence: Synthetic oligonucleotide
  Antisense strand to SEQ ID NO: 2164614
auugaggagacccuuaagu

SEQ ID NO: 2164616 - RNA, 19 nt, Artificial Sequence
  Description of Artificial Sequence: Synthetic oligonucleotide
  Sense strand starting at position 203 of SEQ ID NO: 1883026
aaucuaagucccgaggcuu

SEQ ID NO: 2164617 - RNA, 19 nt, Artificial Sequence
  Description of Artificial Sequence: Synthetic oligonucleotide
  Antisense strand to SEQ ID NO: 2164616
aagccucgggacuuagauu

SEQ ID NO: 2164618 - RNA, 19 nt, Artificial Sequence
  Description of Artificial Sequence: Synthetic oligonucleotide
  Sense strand starting at position 264 of SEQ ID NO: 1883026
ccuuaauuacagugauugu

SEQ ID NO: 2164619 - RNA, 19 nt, Artificial Sequence
  Description of Artificial Sequence: Synthetic oligonucleotide
  Antisense strand to SEQ ID NO: 2164618
acaaucacuguaauuaagg

SEQ ID NO: 2164620 - RNA, 19 nt, Artificial Sequence
  Description of Artificial Sequence: Synthetic oligonucleotide
  Sense strand starting at position 488 of SEQ ID NO: 1883026
uucuuugcaguccaguuaa

SEQ ID NO: 2164621 - RNA, 19 nt, Artificial Sequence
  Description of Artificial Sequence: Synthetic oligonucleotide
  Antisense strand to SEQ ID NO: 2164620
uuaacuggacugcaaagaa

SEQ ID NO: 2164622 - RNA, 19 nt, Artificial Sequence
  Description of Artificial Sequence: Synthetic oligonucleotide
  Sense strand starting at position 502 of SEQ ID NO: 1883026
guuaaauuaguaugacaga

SEQ ID NO: 2164623 - RNA, 19 nt, Artificial Sequence
  Description of Artificial Sequence: Synthetic oligonucleotide
  Antisense strand to SEQ ID NO: 2164622
ucugucauacuaauuuaac

SEQ ID NO: 2164624 - RNA, 19 nt, Artificial Sequence
  Description of Artificial Sequence: Synthetic oligonucleotide
  Sense strand starting at position 712 of SEQ ID NO: 1883026
cuauuccagucaguggaaa

SEQ ID NO: 2164625 - RNA, 19 nt, Artificial Sequence
  Description of Artificial Sequence: Synthetic oligonucleotide
  Antisense strand to SEQ ID NO: 2164624
uuuccacugacuggaauag

SEQ ID NO: 2164626 - RNA, 19 nt, Artificial Sequence
  Description of Artificial Sequence: Synthetic oligonucleotide
  Sense strand starting at position 799 of SEQ ID NO: 1883026
guaguugaugguggaauaa

SEQ ID NO: 2164627 - RNA, 19 nt, Artificial Sequence
  Description of Artificial Sequence: Synthetic oligonucleotide
  Antisense strand to SEQ ID NO: 2164626
uuauuccaccaucaacuac

SEQ ID NO: 2164628 - RNA, 19 nt, Artificial Sequence
  Description of Artificial Sequence: Synthetic oligonucleotide
  Sense strand starting at position 865 of SEQ ID NO: 1883026
cucugacuuuagguugauu

SEQ ID NO: 2164629 - RNA, 19 nt, Artificial Sequence
  Description of Artificial Sequence: Synthetic oligonucleotide
  Antisense strand to SEQ ID NO: 2164628
aaucaaccuaaagucagag

SEQ ID NO: 2164630 - RNA, 19 nt, Artificial Sequence
  Description of Artificial Sequence: Synthetic oligonucleotide
  Sense strand starting at position 912 of SEQ ID NO: 1883026
ucuaucagucuugaugaca

SEQ ID NO: 2164631 - RNA, 19 nt, Artificial Sequence
  Description of Artificial Sequence: Synthetic oligonucleotide
  Antisense strand to SEQ ID NO: 2164630
ugucaucaagacugauaga

SEQ ID NO: 2164632 - RNA, 19 nt, Artificial Sequence
  Description of Artificial Sequence: Synthetic oligonucleotide
  Sense strand starting at position 926 of SEQ ID NO: 1883026
ugacauauguauccuaucu

SEQ ID NO: 2164633 - RNA, 19 nt, Artificial Sequence
  Description of Artificial Sequence: Synthetic oligonucleotide
  Antisense strand to SEQ ID NO: 2164632
agauaggauacauauguca

SEQ ID NO: 2164634 - RNA, 19 nt, Artificial Sequence
  Description of Artificial Sequence: Synthetic oligonucleotide
  Sense strand starting at position 1008 of SEQ ID NO: 1883026
gccagcucagaguaauaug

SEQ ID NO: 2164635 - RNA, 19 nt, Artificial Sequence
  Description of Artificial Sequence: Synthetic oligonucleotide
  Antisense strand to SEQ ID NO: 2164634
cauauuacucugagcuggc

SEQ ID NO: 2164636 - RNA, 19 nt, Artificial Sequence
  Description of Artificial Sequence: Synthetic oligonucleotide
  Sense strand starting at position 1016 of SEQ ID NO: 1883026
agaguaauaugauaacuug

SEQ ID NO: 2164637 - RNA, 19 nt, Artificial Sequence
  Description of Artificial Sequence: Synthetic oligonucleotide
  Antisense strand to SEQ ID NO: 2164636
caaguuaucauauuacucu

SEQ ID NO: 2164638 - RNA, 19 nt, Artificial Sequence
  Description of Artificial Sequence: Synthetic oligonucleotide
  Sense strand starting at position 1024 of SEQ ID NO: 1883026
augauaacuugaggaagaa

SEQ ID NO: 2164639 - RNA, 19 nt, Artificial Sequence
  Description of Artificial Sequence: Synthetic oligonucleotide
  Antisense strand to SEQ ID NO: 2164638
uucuuccucaaguuaucau

SEQ ID NO: 2164640 - RNA, 19 nt, Artificial Sequence
  Description of Artificial Sequence: Synthetic oligonucleotide
  Sense strand starting at position 1044 of SEQ ID NO: 1883026
agaguuuggcauuaguucu

SEQ ID NO: 2164641 - RNA, 19 nt, Artificial Sequence
  Description of Artificial Sequence: Synthetic oligonucleotide
  Antisense strand to SEQ ID NO: 2164640
agaacuaaugccaaacucu

SEQ ID NO: 2164642 - RNA, 19 nt, Artificial Sequence
  Description of Artificial Sequence: Synthetic oligonucleotide
  Sense strand starting at position 1050 of SEQ ID NO: 1883026
uggcauuaguucuuuccua

SEQ ID NO: 2164643 - RNA, 19 nt, Artificial Sequence
  Description of Artificial Sequence: Synthetic oligonucleotide
  Antisense strand to SEQ ID NO: 2164642
uaggaaagaacuaaugcca

SEQ ID NO: 2164644 - RNA, 19 nt, Artificial Sequence
  Description of Artificial Sequence: Synthetic oligonucleotide
  Sense strand starting at position 1051 of SEQ ID NO: 1883026
ggcauuaguucuuuccuaa

SEQ ID NO: 2164645 - RNA, 19 nt, Artificial Sequence
  Description of Artificial Sequence: Synthetic oligonucleotide
  Antisense strand to SEQ ID NO: 2164644
uuaggaaagaacuaaugcc

SEQ ID NO: 2164646 - RNA, 19 nt, Artificial Sequence
  Description of Artificial Sequence: Synthetic oligonucleotide
  Sense strand starting at position 1073 of SEQ ID NO: 1883026
guauuugaauaagauagga

SEQ ID NO: 2164647 - RNA, 19 nt, Artificial Sequence
  Description of Artificial Sequence: Synthetic oligonucleotide
  Antisense strand to SEQ ID NO: 2164646
uccuaucuuauucaaauac

SEQ ID NO: 2164648 - RNA, 19 nt, Artificial Sequence
  Description of Artificial Sequence: Synthetic oligonucleotide
  Sense strand starting at position 1107 of SEQ ID NO: 1883026
caggaugccuggucaaauu

SEQ ID NO: 2164649 - RNA, 19 nt, Artificial Sequence
  Description of Artificial Sequence: Synthetic oligonucleotide
  Antisense strand to SEQ ID NO: 2164648
aauuugaccaggcauccug

SEQ ID NO: 2164650 - RNA, 19 nt, Artificial Sequence
  Description of Artificial Sequence: Synthetic oligonucleotide
  Sense strand starting at position 1115 of SEQ ID NO: 1883026
cuggucaaauuugaacaau

SEQ ID NO: 2164651 - RNA, 19 nt, Artificial Sequence
  Description of Artificial Sequence: Synthetic oligonucleotide
  Antisense strand to SEQ ID NO: 2164650
auuguucaaauuugaccag

SEQ ID NO: 2164652 - RNA, 19 nt, Artificial Sequence
  Description of Artificial Sequence: Synthetic oligonucleotide
  Sense strand starting at position 1320 of SEQ ID NO: 1883026
gauccagguuuagagauaa

SEQ ID NO: 2164653 - RNA, 19 nt, Artificial Sequence
  Description of Artificial Sequence: Synthetic oligonucleotide
  Antisense strand to SEQ ID NO: 2164652
uuaucucuaaaccuggauc

SEQ ID NO: 2164654 - RNA, 19 nt, Artificial Sequence
  Description of Artificial Sequence: Synthetic oligonucleotide
  Sense strand starting at position 1389 of SEQ ID NO: 1883026
agaggaaagcuucgugucu

SEQ ID NO: 2164655 - RNA, 19 nt, Artificial Sequence
  Description of Artificial Sequence: Synthetic oligonucleotide
  Antisense strand to SEQ ID NO: 2164654
agacacgaagcuuuccucu

SEQ ID NO: 2164656 - RNA, 19 nt, Artificial Sequence
  Description of Artificial Sequence: Synthetic oligonucleotide
  Sense strand starting at position 1393 of SEQ ID NO: 1883026
gaaagcuucgugucugcau

SEQ ID NO: 2164657 - RNA, 19 nt, Artificial Sequence
  Description of Artificial Sequence: Synthetic oligonucleotide
  Antisense strand to SEQ ID NO: 2164656
augcagacacgaagcuuuc

SEQ ID NO: 2164658 - RNA, 19 nt, Artificial Sequence
  Description of Artificial Sequence: Synthetic oligonucleotide
  Sense strand starting at position 1419 of SEQ ID NO: 1883026
agguuaacagcuugggauu

SEQ ID NO: 2164659 - RNA, 19 nt, Artificial Sequence
  Description of Artificial Sequence: Synthetic oligonucleotide
  Antisense strand to SEQ ID NO: 2164658
aaucccaagcuguuaaccu

SEQ ID NO: 2164660 - RNA, 19 nt, Artificial Sequence
  Description of Artificial Sequence: Synthetic oligonucleotide
  Sense strand starting at position 1526 of SEQ ID NO: 1883026
agaaucaugcuauguacau

SEQ ID NO: 2164661 - RNA, 19 nt, Artificial Sequence
  Description of Artificial Sequence: Synthetic oligonucleotide
  Antisense strand to SEQ ID NO: 2164660
auguacauagcaugauucu

SEQ ID NO: 2164662 - RNA, 19 nt, Artificial Sequence
  Description of Artificial Sequence: Synthetic oligonucleotide
  Sense strand starting at position 1683 of SEQ ID NO: 1883026
accuaugguucuccuuauu

SEQ ID NO: 2164663 - RNA, 19 nt, Artificial Sequence
  Description of Artificial Sequence: Synthetic oligonucleotide
  Antisense strand to SEQ ID NO: 2164662
aauaaggagaaccauaggu

SEQ ID NO: 2164664 - RNA, 19 nt, Artificial Sequence
  Description of Artificial Sequence: Synthetic oligonucleotide
  Sense strand starting at position 1778 of SEQ ID NO: 1883026
ugcucuguccacuagucau

SEQ ID NO: 2164665 - RNA, 19 nt, Artificial Sequence
  Description of Artificial Sequence: Synthetic oligonucleotide
  Antisense strand to SEQ ID NO: 2164664
augacuaguggacagagca

SEQ ID NO: 2164666 - RNA, 19 nt, Artificial Sequence
  Description of Artificial Sequence: Synthetic oligonucleotide
  Sense strand starting at position 1805 of SEQ ID NO: 1883026
gcaaguaguggugugcuua

SEQ ID NO: 2164667 - RNA, 19 nt, Artificial Sequence
  Description of Artificial Sequence: Synthetic oligonucleotide
  Antisense strand to SEQ ID NO: 2164666
uaagcacaccacuacuugc

SEQ ID NO: 2164668 - RNA, 19 nt, Artificial Sequence
  Description of Artificial Sequence: Synthetic oligonucleotide
  Sense strand starting at position 2025 of SEQ ID NO: 1883026
uuauauaagccucgaaagu

SEQ ID NO: 2164669 - RNA, 19 nt, Artificial Sequence
  Description of Artificial Sequence: Synthetic oligonucleotide
  Antisense strand to SEQ ID NO: 2164668
acuuucgaggcuuauauaa

SEQ ID NO: 2164670 - RNA, 19 nt, Artificial Sequence
  Description of Artificial Sequence: Synthetic oligonucleotide
  Sense strand starting at position 2026 of SEQ ID NO: 1883026
uauauaagccucgaaaguu

SEQ ID NO: 2164671 - RNA, 19 nt, Artificial Sequence
  Description of Artificial Sequence: Synthetic oligonucleotide
  Antisense strand to SEQ ID NO: 2164670
aacuuucgaggcuuauaua

SEQ ID NO: 2164672 - RNA, 19 nt, Artificial Sequence
  Description of Artificial Sequence: Synthetic oligonucleotide
  Sense strand starting at position 2055 of SEQ ID NO: 1883026
cauaguuacggugacuauu

SEQ ID NO: 2164673 - RNA, 19 nt, Artificial Sequence
  Description of Artificial Sequence: Synthetic oligonucleotide
  Antisense strand to SEQ ID NO: 2164672
aauagucaccguaacuaug

SEQ ID NO: 2164674 - RNA, 19 nt, Artificial Sequence
  Description of Artificial Sequence: Synthetic oligonucleotide
  Sense strand starting at position 2225 of SEQ ID NO: 1883026
cauugugggugauuugcau

SEQ ID NO: 2164675 - RNA, 19 nt, Artificial Sequence
  Description of Artificial Sequence: Synthetic oligonucleotide
  Antisense strand to SEQ ID NO: 2164674
augcaaaucacccacaaug

SEQ ID NO: 2164676 - RNA, 19 nt, Artificial Sequence
  Description of Artificial Sequence: Synthetic oligonucleotide
  Sense strand starting at position 2229 of SEQ ID NO: 1883026
gugggugauuugcauggaa

SEQ ID NO: 2164677 - RNA, 19 nt, Artificial Sequence
  Description of Artificial Sequence: Synthetic oligonucleotide
  Antisense strand to SEQ ID NO: 2164676
uuccaugcaaaucacccac

SEQ ID NO: 2164678 - RNA, 19 nt, Artificial Sequence
  Description of Artificial Sequence: Synthetic oligonucleotide
  Sense strand starting at position 2687 of SEQ ID NO: 1883026
guuugagcucuuuaggaag

SEQ ID NO: 2164679 - RNA, 19 nt, Artificial Sequence
  Description of Artificial Sequence: Synthetic oligonucleotide
  Antisense strand to SEQ ID NO: 2164678
cuuccuaaagagcucaaac

SEQ ID NO: 2164680 - RNA, 19 nt, Artificial Sequence
  Description of Artificial Sequence: Synthetic oligonucleotide
  Sense strand starting at position 2787 of SEQ ID NO: 1883026
gcuauucuggaaggagguu

SEQ ID NO: 2164681 - RNA, 19 nt, Artificial Sequence
  Description of Artificial Sequence: Synthetic oligonucleotide
  Antisense strand to SEQ ID NO: 2164680
aaccuccuuccagaauagc

SEQ ID NO: 2164682 - RNA, 19 nt, Artificial Sequence
  Description of Artificial Sequence: Synthetic oligonucleotide
  Sense strand starting at position 2832 of SEQ ID NO: 1883026
aaacauucgguccguggaa

SEQ ID NO: 2164683 - RNA, 19 nt, Artificial Sequence
  Description of Artificial Sequence: Synthetic oligonucleotide
  Antisense strand to SEQ ID NO: 2164682
uuccacggaccgaauguuu

SEQ ID NO: 2164684 - RNA, 19 nt, Artificial Sequence
  Description of Artificial Sequence: Synthetic oligonucleotide
  Sense strand starting at position 2841 of SEQ ID NO: 1883026
guccguggaagcuaacauu

SEQ ID NO: 2164685 - RNA, 19 nt, Artificial Sequence
  Description of Artificial Sequence: Synthetic oligonucleotide
  Antisense strand to SEQ ID NO: 2164684
aauguuagcuuccacggac

SEQ ID NO: 2164686 - RNA, 19 nt, Artificial Sequence
  Description of Artificial Sequence: Synthetic oligonucleotide
  Sense strand starting at position 3189 of SEQ ID NO: 1883026
caguauguaucacuggauu

SEQ ID NO: 2164687 - RNA, 19 nt, Artificial Sequence
  Description of Artificial Sequence: Synthetic oligonucleotide
  Antisense strand to SEQ ID NO: 2164686
aauccagugauacauacug

SEQ ID NO: 2164688 - RNA, 19 nt, Artificial Sequence
  Description of Artificial Sequence: Synthetic oligonucleotide
  Sense strand starting at position 3208 of SEQ ID NO: 1883026
uugcgauuaguccauuaau

SEQ ID NO: 2164689 - RNA, 19 nt, Artificial Sequence
  Description of Artificial Sequence: Synthetic oligonucleotide
  Antisense strand to SEQ ID NO: 2164688
auuaauggacuaaucgcaa

SEQ ID NO: 2164690 - RNA, 19 nt, Artificial Sequence
  Description of Artificial Sequence: Synthetic oligonucleotide
  Sense strand starting at position 3359 of SEQ ID NO: 1883026
ugcguaaaggcuguguguu

SEQ ID NO: 2164691 - RNA, 19 nt, Artificial Sequence
  Description of Artificial Sequence: Synthetic oligonucleotide
  Antisense strand to SEQ ID NO: 2164690
aacacacagccuuuacgca

SEQ ID NO: 2164692 - RNA, 19 nt, Artificial Sequence
  Description of Artificial Sequence: Synthetic oligonucleotide
  Sense strand starting at position 92 of SEQ ID NO: 1883027
guuauuaugcuguauucuu

SEQ ID NO: 2164693 - RNA, 19 nt, Artificial Sequence
  Description of Artificial Sequence: Synthetic oligonucleotide
  Antisense strand to SEQ ID NO: 2164692
aagaauacagcauaauaac

SEQ ID NO: 2164694 - RNA, 19 nt, Artificial Sequence
  Description of Artificial Sequence: Synthetic oligonucleotide
  Sense strand starting at position 99 of SEQ ID NO: 1883027
ugcuguauucuuuaaugaa

SEQ ID NO: 2164695 - RNA, 19 nt, Artificial Sequence
  Description of Artificial Sequence: Synthetic oligonucleotide
  Antisense strand to SEQ ID NO: 2164694
uucauuaaagaauacagca

SEQ ID NO: 2164696 - RNA, 19 nt, Artificial Sequence
  Description of Artificial Sequence: Synthetic oligonucleotide
  Sense strand starting at position 528 of SEQ ID NO: 1883027
cgcaucugacccuaacuau

SEQ ID NO: 2164697 - RNA, 19 nt, Artificial Sequence
  Description of Artificial Sequence: Synthetic oligonucleotide
  Antisense strand to SEQ ID NO: 2164696
auaguuagggucagaugcg

SEQ ID NO: 2164698 - RNA, 19 nt, Artificial Sequence
  Description of Artificial Sequence: Synthetic oligonucleotide
  Sense strand starting at position 620 of SEQ ID NO: 1883027
ggcguucuuauuuggugua

SEQ ID NO: 2164699 - RNA, 19 nt, Artificial Sequence
  Description of Artificial Sequence: Synthetic oligonucleotide
  Antisense strand to SEQ ID NO: 2164698
uacaccaaauaagaacgcc

SEQ ID NO: 2164700 - RNA, 19 nt, Artificial Sequence
  Description of Artificial Sequence: Synthetic oligonucleotide
  Sense strand starting at position 772 of SEQ ID NO: 1883027
ggugaucaugauugggcua

SEQ ID NO: 2164701 - RNA, 19 nt, Artificial Sequence
  Description of Artificial Sequence: Synthetic oligonucleotide
  Antisense strand to SEQ ID NO: 2164700
uagcccaaucaugaucacc

SEQ ID NO: 2164702 - RNA, 19 nt, Artificial Sequence
  Description of Artificial Sequence: Synthetic oligonucleotide
  Sense strand starting at position 775 of SEQ ID NO: 1883027
gaucaugauugggcuacaa

SEQ ID NO: 2164703 - RNA, 19 nt, Artificial Sequence
  Description of Artificial Sequence: Synthetic oligonucleotide
  Antisense strand to SEQ ID NO: 2164702
uuguagcccaaucaugauc

SEQ ID NO: 2164704 - RNA, 19 nt, Artificial Sequence
  Description of Artificial Sequence: Synthetic oligonucleotide
  Sense strand starting at position 841 of SEQ ID NO: 1883027
gagaaauguggccaaggca

SEQ ID NO: 2164705 - RNA, 19 nt, Artificial Sequence
  Description of Artificial Sequence: Synthetic oligonucleotide
  Antisense strand to SEQ ID NO: 2164704
ugccuuggccacauuucuc

SEQ ID NO: 2164706 - RNA, 19 nt, Artificial Sequence
  Description of Artificial Sequence: Synthetic oligonucleotide
  Sense strand starting at position 989 of SEQ ID NO: 1883027
ccaggaggccuuuguuguu

SEQ ID NO: 2164707 - RNA, 19 nt, Artificial Sequence
  Description of Artificial Sequence: Synthetic oligonucleotide
  Antisense strand to SEQ ID NO: 2164706
aacaacaaaggccuccugg

SEQ ID NO: 2164708 - RNA, 19 nt, Artificial Sequence
  Description of Artificial Sequence: Synthetic oligonucleotide
  Sense strand starting at position 1019 of SEQ ID NO: 1883027
gcaucaggaaguugaucau

SEQ ID NO: 2164709 - RNA, 19 nt, Artificial Sequence
  Description of Artificial Sequence: Synthetic oligonucleotide
  Antisense strand to SEQ ID NO: 2164708
augaucaacuuccugaugc

SEQ ID NO: 2164710 - RNA, 19 nt, Artificial Sequence
  Description of Artificial Sequence: Synthetic oligonucleotide
  Sense strand starting at position 1025 of SEQ ID NO: 1883027
ggaaguugaucauuccauu

SEQ ID NO: 2164711 - RNA, 19 nt, Artificial Sequence
  Description of Artificial Sequence: Synthetic oligonucleotide
  Antisense strand to SEQ ID NO: 2164710
aauggaaugaucaacuucc

SEQ ID NO: 2164712 - RNA, 19 nt, Artificial Sequence
  Description of Artificial Sequence: Synthetic oligonucleotide
  Sense strand starting at position 1034 of SEQ ID NO: 1883027
ucauuccauuccguagaga

SEQ ID NO: 2164713 - RNA, 19 nt, Artificial Sequence
  Description of Artificial Sequence: Synthetic oligonucleotide
  Antisense strand to SEQ ID NO: 2164712
ucucuacggaauggaauga

SEQ ID NO: 2164714 - RNA, 19 nt, Artificial Sequence
  Description of Artificial Sequence: Synthetic oligonucleotide
  Sense strand starting at position 1120 of SEQ ID NO: 1883027
agaaguuucuuggagagac

SEQ ID NO: 2164715 - RNA, 19 nt, Artificial Sequence
  Description of Artificial Sequence: Synthetic oligonucleotide
  Antisense strand to SEQ ID NO: 2164714
gucucuccaagaaacuucu

SEQ ID NO: 2164716 - RNA, 19 nt, Artificial Sequence
  Description of Artificial Sequence: Synthetic oligonucleotide
  Sense strand starting at position 1147 of SEQ ID NO: 1883027
acagaaucgguugagcaga

SEQ ID NO: 2164717 - RNA, 19 nt, Artificial Sequence
  Description of Artificial Sequence: Synthetic oligonucleotide
  Antisense strand to SEQ ID NO: 2164716
ucugcucaaccgauucugu

SEQ ID NO: 2164718 - RNA, 19 nt, Artificial Sequence
  Description of Artificial Sequence: Synthetic oligonucleotide
  Sense strand starting at position 1230 of SEQ ID NO: 1883027
ugcagcaaggauugugaau

SEQ ID NO: 2164719 - RNA, 19 nt, Artificial Sequence
  Description of Artificial Sequence: Synthetic oligonucleotide
  Antisense strand to SEQ ID NO: 2164718
auucacaauccuugcugca

SEQ ID NO: 2164720 - RNA, 19 nt, Artificial Sequence
  Description of Artificial Sequence: Synthetic oligonucleotide
  Sense strand starting at position 1319 of SEQ ID NO: 1883027
gggccuccuuguuugagga

SEQ ID NO: 2164721 - RNA, 19 nt, Artificial Sequence
  Description of Artificial Sequence: Synthetic oligonucleotide
  Antisense strand to SEQ ID NO: 2164720
uccucaaacaaggaggccc

SEQ ID NO: 2164722 - RNA, 19 nt, Artificial Sequence
  Description of Artificial Sequence: Synthetic oligonucleotide
  Sense strand starting at position 1581 of SEQ ID NO: 1883027
gcaggauaacuugagccaa

SEQ ID NO: 2164723 - RNA, 19 nt, Artificial Sequence
  Description of Artificial Sequence: Synthetic oligonucleotide
  Antisense strand to SEQ ID NO: 2164722
uuggcucaaguuauccugc

SEQ ID NO: 2164724 - RNA, 19 nt, Artificial Sequence
  Description of Artificial Sequence: Synthetic oligonucleotide
  Sense strand starting at position 1824 of SEQ ID NO: 1883027
acauuuauguaagaaugcu

SEQ ID NO: 2164725 - RNA, 19 nt, Artificial Sequence
  Description of Artificial Sequence: Synthetic oligonucleotide
  Antisense strand to SEQ ID NO: 2164724
agcauucuuacauaaaugu

SEQ ID NO: 2164726 - RNA, 19 nt, Artificial Sequence
  Description of Artificial Sequence: Synthetic oligonucleotide
  Sense strand starting at position 1867 of SEQ ID NO: 1883027
aaaguuagcuuguuugauu

SEQ ID NO: 2164727 - RNA, 19 nt, Artificial Sequence
  Description of Artificial Sequence: Synthetic oligonucleotide
  Antisense strand to SEQ ID NO: 2164726
aaucaaacaagcuaacuuu

SEQ ID NO: 2164728 - RNA, 19 nt, Artificial Sequence
  Description of Artificial Sequence: Synthetic oligonucleotide
  Sense strand starting at position 1872 of SEQ ID NO: 1883027
uagcuuguuugauugaaau

SEQ ID NO: 2164729 - RNA, 19 nt, Artificial Sequence
  Description of Artificial Sequence: Synthetic oligonucleotide
  Antisense strand to SEQ ID NO: 2164728
auuucaaucaaacaagcua

SEQ ID NO: 2164730 - RNA, 19 nt, Artificial Sequence
  Description of Artificial Sequence: Synthetic oligonucleotide
  Sense strand starting at position 2025 of SEQ ID NO: 1883027
uuuauaaaucucugaagug

SEQ ID NO: 2164731 - RNA, 19 nt, Artificial Sequence
  Description of Artificial Sequence: Synthetic oligonucleotide
  Antisense strand to SEQ ID NO: 2164730
cacuucagagauuuauaaa

SEQ ID NO: 2164732 - RNA, 19 nt, Artificial Sequence
  Description of Artificial Sequence: Synthetic oligonucleotide
  Sense strand starting at position 2037 of SEQ ID NO: 1883027
ugaaguggcuacucuaaau

SEQ ID NO: 2164733 - RNA, 19 nt, Artificial Sequence
  Description of Artificial Sequence: Synthetic oligonucleotide
  Antisense strand to SEQ ID NO: 2164732
auuuagaguagccacuuca

SEQ ID NO: 2164734 - RNA, 19 nt, Artificial Sequence
  Description of Artificial Sequence: Synthetic oligonucleotide
  Sense strand starting at position 2204 of SEQ ID NO: 1883027
aguugcaugaugggaaaua

SEQ ID NO: 2164735 - RNA, 19 nt, Artificial Sequence
  Description of Artificial Sequence: Synthetic oligonucleotide
  Antisense strand to SEQ ID NO: 2164734
uauuucccaucaugcaacu

SEQ ID NO: 2164736 - RNA, 19 nt, Artificial Sequence
  Description of Artificial Sequence: Synthetic oligonucleotide
  Sense strand starting at position 2298 of SEQ ID NO: 1883027
ugaacauauuugugucaaa

SEQ ID NO: 2164737 - RNA, 19 nt, Artificial Sequence
  Description of Artificial Sequence: Synthetic oligonucleotide
  Antisense strand to SEQ ID NO: 2164736
uuugacacaaauauguuca

SEQ ID NO: 2164738 - RNA, 19 nt, Artificial Sequence
  Description of Artificial Sequence: Synthetic oligonucleotide
  Sense strand starting at position 2309 of SEQ ID NO: 1883027
gugucaaaugcccagcaau

SEQ ID NO: 2164739 - RNA, 19 nt, Artificial Sequence
  Description of Artificial Sequence: Synthetic oligonucleotide
  Antisense strand to SEQ ID NO: 2164738
auugcugggcauuugacac

SEQ ID NO: 2164740 - RNA, 19 nt, Artificial Sequence
  Description of Artificial Sequence: Synthetic oligonucleotide
  Sense strand starting at position 2312 of SEQ ID NO: 1883027
ucaaaugcccagcaauaga

SEQ ID NO: 2164741 - RNA, 19 nt, Artificial Sequence
  Description of Artificial Sequence: Synthetic oligonucleotide
  Antisense strand to SEQ ID NO: 2164740
ucuauugcugggcauuuga

SEQ ID NO: 2164742 - RNA, 19 nt, Artificial Sequence
  Description of Artificial Sequence: Synthetic oligonucleotide
  Sense strand starting at position 2583 of SEQ ID NO: 1883027
gguuguuuccugggacuuu

SEQ ID NO: 2164743 - RNA, 19 nt, Artificial Sequence
  Description of Artificial Sequence: Synthetic oligonucleotide
  Antisense strand to SEQ ID NO: 2164742
aaagucccaggaaacaacc

SEQ ID NO: 2164744 - RNA, 19 nt, Artificial Sequence
  Description of Artificial Sequence: Synthetic oligonucleotide
  Sense strand starting at position 2635 of SEQ ID NO: 1883027
auggguacgccagguuuaa

SEQ ID NO: 2164745 - RNA, 19 nt, Artificial Sequence
  Description of Artificial Sequence: Synthetic oligonucleotide
  Antisense strand to SEQ ID NO: 2164744
uuaaaccuggcguacccau

SEQ ID NO: 2164746 - RNA, 19 nt, Artificial Sequence
  Description of Artificial Sequence: Synthetic oligonucleotide
  Sense strand starting at position 2645 of SEQ ID NO: 1883027
cagguuuaauaugcucaga

SEQ ID NO: 2164747 - RNA, 19 nt, Artificial Sequence
  Description of Artificial Sequence: Synthetic oligonucleotide
  Antisense strand to SEQ ID NO: 2164746
ucugagcauauuaaaccug

SEQ ID NO: 2164748 - RNA, 19 nt, Artificial Sequence
  Description of Artificial Sequence: Synthetic oligonucleotide
  Sense strand starting at position 2647 of SEQ ID NO: 1883027
gguuuaauaugcucagauc

SEQ ID NO: 2164749 - RNA, 19 nt, Artificial Sequence
  Description of Artificial Sequence: Synthetic oligonucleotide
  Antisense strand to SEQ ID NO: 2164748
gaucugagcauauuaaacc

SEQ ID NO: 2164750 - RNA, 19 nt, Artificial Sequence
  Description of Artificial Sequence: Synthetic oligonucleotide
  Sense strand starting at position 2648 of SEQ ID NO: 1883027
guuuaauaugcucagaucu

SEQ ID NO: 2164751 - RNA, 19 nt, Artificial Sequence
  Description of Artificial Sequence: Synthetic oligonucleotide
  Antisense strand to SEQ ID NO: 2164750
agaucugagcauauuaaac

SEQ ID NO: 2164752 - RNA, 19 nt, Artificial Sequence
  Description of Artificial Sequence: Synthetic oligonucleotide
  Sense strand starting at position 2686 of SEQ ID NO: 1883027
gcugcuggcauugagaagu

SEQ ID NO: 2164753 - RNA, 19 nt, Artificial Sequence
  Description of Artificial Sequence: Synthetic oligonucleotide
  Antisense strand to SEQ ID NO: 2164752
acuucucaaugccagcagc

SEQ ID NO: 2164754 - RNA, 19 nt, Artificial Sequence
  Description of Artificial Sequence: Synthetic oligonucleotide
  Sense strand starting at position 3385 of SEQ ID NO: 1883027
cuggaaauguuacuuucua

SEQ ID NO: 2164755 - RNA, 19 nt, Artificial Sequence
  Description of Artificial Sequence: Synthetic oligonucleotide
  Antisense strand to SEQ ID NO: 2164754
uagaaaguaacauuuccag

SEQ ID NO: 2164756 - RNA, 19 nt, Artificial Sequence
  Description of Artificial Sequence: Synthetic oligonucleotide
  Sense strand starting at position 3386 of SEQ ID NO: 1883027
uggaaauguuacuuucuaa

SEQ ID NO: 2164757 - RNA, 19 nt, Artificial Sequence
  Description of Artificial Sequence: Synthetic oligonucleotide
  Antisense strand to SEQ ID NO: 2164756
uuagaaaguaacauuucca

SEQ ID NO: 2164758 - RNA, 19 nt, Artificial Sequence
  Description of Artificial Sequence: Synthetic oligonucleotide
  Sense strand starting at position 3428 of SEQ ID NO: 1883027
auguauugagcucagcuaa

SEQ ID NO: 2164759 - RNA, 19 nt, Artificial Sequence
  Description of Artificial Sequence: Synthetic oligonucleotide
  Antisense strand to SEQ ID NO: 2164758
uuagcugagcucaauacau

SEQ ID NO: 2164760 - RNA, 19 nt, Artificial Sequence
  Description of Artificial Sequence: Synthetic oligonucleotide
  Sense strand starting at position 3480 of SEQ ID NO: 1883027
aauuauaauuguucuggga

SEQ ID NO: 2164761 - RNA, 19 nt, Artificial Sequence
  Description of Artificial Sequence: Synthetic oligonucleotide
  Antisense strand to SEQ ID NO: 2164760
ucccagaacaauuauaauu

SEQ ID NO: 2164762 - RNA, 19 nt, Artificial Sequence
  Description of Artificial Sequence: Synthetic oligonucleotide
  Sense strand starting at position 3501 of SEQ ID NO: 1883027
ugggcuuagagaugugaag

SEQ ID NO: 2164763 - RNA, 19 nt, Artificial Sequence
  Description of Artificial Sequence: Synthetic oligonucleotide
  Antisense strand to SEQ ID NO: 2164762
cuucacaucucuaagccca

SEQ ID NO: 2164764 - RNA, 19 nt, Artificial Sequence
  Description of Artificial Sequence: Synthetic oligonucleotide
  Sense strand starting at position 3579 of SEQ ID NO: 1883027
cuuggugauugcuccagca

SEQ ID NO: 2164765 - RNA, 19 nt, Artificial Sequence
  Description of Artificial Sequence: Synthetic oligonucleotide
  Antisense strand to SEQ ID NO: 2164764
ugcuggagcaaucaccaag

SEQ ID NO: 2164766 - RNA, 19 nt, Artificial Sequence
  Description of Artificial Sequence: Synthetic oligonucleotide
  Sense strand starting at position 3581 of SEQ ID NO: 1883027
uggugauugcuccagcagu

SEQ ID NO: 2164767 - RNA, 19 nt, Artificial Sequence
  Description of Artificial Sequence: Synthetic oligonucleotide
  Antisense strand to SEQ ID NO: 2164766
acugcuggagcaaucacca

SEQ ID NO: 2164768 - RNA, 19 nt, Artificial Sequence
  Description of Artificial Sequence: Synthetic oligonucleotide
  Sense strand starting at position 3604 of SEQ ID NO: 1883027
aggacaacuuuccaaagua

SEQ ID NO: 2164769 - RNA, 19 nt, Artificial Sequence
  Description of Artificial Sequence: Synthetic oligonucleotide
  Antisense strand to SEQ ID NO: 2164768
uacuuuggaaaguuguccu

SEQ ID NO: 2164770 - RNA, 19 nt, Artificial Sequence
  Description of Artificial Sequence: Synthetic oligonucleotide
  Sense strand starting at position 3617 of SEQ ID NO: 1883027
aaaguagacuagcugagau

SEQ ID NO: 2164771 - RNA, 19 nt, Artificial Sequence
  Description of Artificial Sequence: Synthetic oligonucleotide
  Antisense strand to SEQ ID NO: 2164770
aucucagcuagucuacuuu

SEQ ID NO: 2164772 - RNA, 19 nt, Artificial Sequence
  Description of Artificial Sequence: Synthetic oligonucleotide
  Sense strand starting at position 195 of SEQ ID NO: 1883028
uuggguuugagucauaggu

SEQ ID NO: 2164773 - RNA, 19 nt, Artificial Sequence
  Description of Artificial Sequence: Synthetic oligonucleotide
  Antisense strand to SEQ ID NO: 2164772
accuaugacucaaacccaa

SEQ ID NO: 2164774 - RNA, 19 nt, Artificial Sequence
  Description of Artificial Sequence: Synthetic oligonucleotide
  Sense strand starting at position 202 of SEQ ID NO: 1883028
ugagucauagguugaaauu

SEQ ID NO: 2164775 - RNA, 19 nt, Artificial Sequence
  Description of Artificial Sequence: Synthetic oligonucleotide
  Antisense strand to SEQ ID NO: 2164774
aauuucaaccuaugacuca

SEQ ID NO: 2164776 - RNA, 19 nt, Artificial Sequence
  Description of Artificial Sequence: Synthetic oligonucleotide
  Sense strand starting at position 283 of SEQ ID NO: 1883028
gucaccugaaguggauauu

SEQ ID NO: 2164777 - RNA, 19 nt, Artificial Sequence
  Description of Artificial Sequence: Synthetic oligonucleotide
  Antisense strand to SEQ ID NO: 2164776
aauauccacuucaggugac

SEQ ID NO: 2164778 - RNA, 19 nt, Artificial Sequence
  Description of Artificial Sequence: Synthetic oligonucleotide
  Sense strand starting at position 746 of SEQ ID NO: 1883028
guuuaagaaggcugacaga

SEQ ID NO: 2164779 - RNA, 19 nt, Artificial Sequence
  Description of Artificial Sequence: Synthetic oligonucleotide
  Antisense strand to SEQ ID NO: 2164778
ucugucagccuucuuaaac

SEQ ID NO: 2164780 - RNA, 19 nt, Artificial Sequence
  Description of Artificial Sequence: Synthetic oligonucleotide
  Sense strand starting at position 852 of SEQ ID NO: 1883028
gagauuuaguaaugauagg

SEQ ID NO: 2164781 - RNA, 19 nt, Artificial Sequence
  Description of Artificial Sequence: Synthetic oligonucleotide
  Antisense strand to SEQ ID NO: 2164780
ccuaucauuacuaaaucuc

SEQ ID NO: 2164782 - RNA, 19 nt, Artificial Sequence
  Description of Artificial Sequence: Synthetic oligonucleotide
  Sense strand starting at position 905 of SEQ ID NO: 1883028
ggagcaaauuuacaauaga

SEQ ID NO: 2164783 - RNA, 19 nt, Artificial Sequence
  Description of Artificial Sequence: Synthetic oligonucleotide
  Antisense strand to SEQ ID NO: 2164782
ucuauuguaaauuugcucc

SEQ ID NO: 2164784 - RNA, 19 nt, Artificial Sequence
  Description of Artificial Sequence: Synthetic oligonucleotide
  Sense strand starting at position 995 of SEQ ID NO: 1883028
gauugaaucugagugucaa

SEQ ID NO: 2164785 - RNA, 19 nt, Artificial Sequence
  Description of Artificial Sequence: Synthetic oligonucleotide
  Antisense strand to SEQ ID NO: 2164784
uugacacucagauucaauc

SEQ ID NO: 2164786 - RNA, 19 nt, Artificial Sequence
  Description of Artificial Sequence: Synthetic oligonucleotide
  Sense strand starting at position 996 of SEQ ID NO: 1883028
auugaaucugagugucaac

SEQ ID NO: 2164787 - RNA, 19 nt, Artificial Sequence
  Description of Artificial Sequence: Synthetic oligonucleotide
  Antisense strand to SEQ ID NO: 2164786
guugacacucagauucaau

SEQ ID NO: 2164788 - RNA, 19 nt, Artificial Sequence
  Description of Artificial Sequence: Synthetic oligonucleotide
  Sense strand starting at position 1005 of SEQ ID NO: 1883028
gagugucaacucuaagcaa

SEQ ID NO: 2164789 - RNA, 19 nt, Artificial Sequence
  Description of Artificial Sequence: Synthetic oligonucleotide
  Antisense strand to SEQ ID NO: 2164788
uugcuuagaguugacacuc

SEQ ID NO: 2164790 - RNA, 19 nt, Artificial Sequence
  Description of Artificial Sequence: Synthetic oligonucleotide
  Sense strand starting at position 1056 of SEQ ID NO: 1883028
gaugaaugccagcgaggaa

SEQ ID NO: 2164791 - RNA, 19 nt, Artificial Sequence
  Description of Artificial Sequence: Synthetic oligonucleotide
  Antisense strand to SEQ ID NO: 2164790
uuccucgcuggcauucauc

SEQ ID NO: 2164792 - RNA, 19 nt, Artificial Sequence
  Description of Artificial Sequence: Synthetic oligonucleotide
  Sense strand starting at position 1111 of SEQ ID NO: 1883028
uucuuagcugguuauaaau

SEQ ID NO: 2164793 - RNA, 19 nt, Artificial Sequence
  Description of Artificial Sequence: Synthetic oligonucleotide
  Antisense strand to SEQ ID NO: 2164792
auuuauaaccagcuaagaa

SEQ ID NO: 2164794 - RNA, 19 nt, Artificial Sequence
  Description of Artificial Sequence: Synthetic oligonucleotide
  Sense strand starting at position 1128 of SEQ ID NO: 1883028
auuggauauugauccgaau

SEQ ID NO: 2164795 - RNA, 19 nt, Artificial Sequence
  Description of Artificial Sequence: Synthetic oligonucleotide
  Antisense strand to SEQ ID NO: 2164794
auucggaucaauauccaau

SEQ ID NO: 2164796 - RNA, 19 nt, Artificial Sequence
  Description of Artificial Sequence: Synthetic oligonucleotide
  Sense strand starting at position 1130 of SEQ ID NO: 1883028
uggauauugauccgaaucu

SEQ ID NO: 2164797 - RNA, 19 nt, Artificial Sequence
  Description of Artificial Sequence: Synthetic oligonucleotide
  Antisense strand to SEQ ID NO: 2164796
agauucggaucaauaucca

SEQ ID NO: 2164798 - RNA, 19 nt, Artificial Sequence
  Description of Artificial Sequence: Synthetic oligonucleotide
  Sense strand starting at position 1753 of SEQ ID NO: 1883028
cugggaaguuaaucuuacu

SEQ ID NO: 2164799 - RNA, 19 nt, Artificial Sequence
  Description of Artificial Sequence: Synthetic oligonucleotide
  Antisense strand to SEQ ID NO: 2164798
aguaagauuaacuucccag

SEQ ID NO: 2164800 - RNA, 19 nt, Artificial Sequence
  Description of Artificial Sequence: Synthetic oligonucleotide
  Sense strand starting at position 1779 of SEQ ID NO: 1883028
gcuuauaaccaauaggcuu

SEQ ID NO: 2164801 - RNA, 19 nt, Artificial Sequence
  Description of Artificial Sequence: Synthetic oligonucleotide
  Antisense strand to SEQ ID NO: 2164800
aagccuauugguuauaagc

SEQ ID NO: 2164802 - RNA, 19 nt, Artificial Sequence
  Description of Artificial Sequence: Synthetic oligonucleotide
  Sense strand starting at position 1787 of SEQ ID NO: 1883028
ccaauaggcuuccuugaaa

SEQ ID NO: 2164803 - RNA, 19 nt, Artificial Sequence
  Description of Artificial Sequence: Synthetic oligonucleotide
  Antisense strand to SEQ ID NO: 2164802
uuucaaggaagccuauugg

SEQ ID NO: 2164804 - RNA, 19 nt, Artificial Sequence
  Description of Artificial Sequence: Synthetic oligonucleotide
  Sense strand starting at position 1790 of SEQ ID NO: 1883028
auaggcuuccuugaaaguu

SEQ ID NO: 2164805 - RNA, 19 nt, Artificial Sequence
  Description of Artificial Sequence: Synthetic oligonucleotide
  Antisense strand to SEQ ID NO: 2164804
aacuuucaaggaagccuau

SEQ ID NO: 2164806 - RNA, 19 nt, Artificial Sequence
  Description of Artificial Sequence: Synthetic oligonucleotide
  Sense strand starting at position 2012 of SEQ ID NO: 1883028
gugagucucuuguuauuua

SEQ ID NO: 2164807 - RNA, 19 nt, Artificial Sequence
  Description of Artificial Sequence: Synthetic oligonucleotide
  Antisense strand to SEQ ID NO: 2164806
uaaauaacaagagacucac

SEQ ID NO: 2164808 - RNA, 19 nt, Artificial Sequence
  Description of Artificial Sequence: Synthetic oligonucleotide
  Sense strand starting at position 2016 of SEQ ID NO: 1883028
gucucuuguuauuuauagu

SEQ ID NO: 2164809 - RNA, 19 nt, Artificial Sequence
  Description of Artificial Sequence: Synthetic oligonucleotide
  Antisense strand to SEQ ID NO: 2164808
acuauaaauaacaagagac

SEQ ID NO: 2164810 - RNA, 19 nt, Artificial Sequence
  Description of Artificial Sequence: Synthetic oligonucleotide
  Sense strand starting at position 2154 of SEQ ID NO: 1883028
uuaagagaguuuguaagaa

SEQ ID NO: 2164811 - RNA, 19 nt, Artificial Sequence
  Description of Artificial Sequence: Synthetic oligonucleotide
  Antisense strand to SEQ ID NO: 2164810
uucuuacaaacucucuuaa

SEQ ID NO: 2164812 - RNA, 19 nt, Artificial Sequence
  Description of Artificial Sequence: Synthetic oligonucleotide
  Sense strand starting at position 2286 of SEQ ID NO: 1883028
cgggcaauugcgcuuuagu

SEQ ID NO: 2164813 - RNA, 19 nt, Artificial Sequence
  Description of Artificial Sequence: Synthetic oligonucleotide
  Antisense strand to SEQ ID NO: 2164812
acuaaagcgcaauugcccg

SEQ ID NO: 2164814 - RNA, 19 nt, Artificial Sequence
  Description of Artificial Sequence: Synthetic oligonucleotide
  Sense strand starting at position 2287 of SEQ ID NO: 1883028
gggcaauugcgcuuuaguc

SEQ ID NO: 2164815 - RNA, 19 nt, Artificial Sequence
  Description of Artificial Sequence: Synthetic oligonucleotide
  Antisense strand to SEQ ID NO: 2164814
gacuaaagcgcaauugccc

SEQ ID NO: 2164816 - RNA, 19 nt, Artificial Sequence
  Description of Artificial Sequence: Synthetic oligonucleotide
  Sense strand starting at position 2288 of SEQ ID NO: 1883028
ggcaauugcgcuuuagucu

SEQ ID NO: 2164817 - RNA, 19 nt, Artificial Sequence
  Description of Artificial Sequence: Synthetic oligonucleotide
  Antisense strand to SEQ ID NO: 2164816
agacuaaagcgcaauugcc

SEQ ID NO: 2164818 - RNA, 19 nt, Artificial Sequence
  Description of Artificial Sequence: Synthetic oligonucleotide
  Sense strand starting at position 2368 of SEQ ID NO: 1883028
gucaaugauccaggaaauc

SEQ ID NO: 2164819 - RNA, 19 nt, Artificial Sequence
  Description of Artificial Sequence: Synthetic oligonucleotide
  Antisense strand to SEQ ID NO: 2164818
gauuuccuggaucauugac

SEQ ID NO: 2164820 - RNA, 19 nt, Artificial Sequence
  Description of Artificial Sequence: Synthetic oligonucleotide
  Sense strand starting at position 2626 of SEQ ID NO: 1883028
ggucucuacugaucagaga

SEQ ID NO: 2164821 - RNA, 19 nt, Artificial Sequence
  Description of Artificial Sequence: Synthetic oligonucleotide
  Antisense strand to SEQ ID NO: 2164820
ucucugaucaguagagacc

SEQ ID NO: 2164822 - RNA, 19 nt, Artificial Sequence
  Description of Artificial Sequence: Synthetic oligonucleotide
  Sense strand starting at position 2640 of SEQ ID NO: 1883028
agagauugagagugaguca

SEQ ID NO: 2164823 - RNA, 19 nt, Artificial Sequence
  Description of Artificial Sequence: Synthetic oligonucleotide
  Antisense strand to SEQ ID NO: 2164822
ugacucacucucaaucucu

SEQ ID NO: 2164824 - RNA, 19 nt, Artificial Sequence
  Description of Artificial Sequence: Synthetic oligonucleotide
  Sense strand starting at position 2643 of SEQ ID NO: 1883028
gauugagagugagucaaca

SEQ ID NO: 2164825 - RNA, 19 nt, Artificial Sequence
  Description of Artificial Sequence: Synthetic oligonucleotide
  Antisense strand to SEQ ID NO: 2164824
uguugacucacucucaauc

SEQ ID NO: 2164826 - RNA, 19 nt, Artificial Sequence
  Description of Artificial Sequence: Synthetic oligonucleotide
  Sense strand starting at position 2774 of SEQ ID NO: 1883028
guuuaaaucgcccaugaau

SEQ ID NO: 2164827 - RNA, 19 nt, Artificial Sequence
  Description of Artificial Sequence: Synthetic oligonucleotide
  Antisense strand to SEQ ID NO: 2164826
auucaugggcgauuuaaac

SEQ ID NO: 2164828 - RNA, 19 nt, Artificial Sequence
  Description of Artificial Sequence: Synthetic oligonucleotide
  Sense strand starting at position 3111 of SEQ ID NO: 1883028
cugaauuauuucuaaggau

SEQ ID NO: 2164829 - RNA, 19 nt, Artificial Sequence
  Description of Artificial Sequence: Synthetic oligonucleotide
  Antisense strand to SEQ ID NO: 2164828
auccuuagaaauaauucag

SEQ ID NO: 2164830 - RNA, 19 nt, Artificial Sequence
  Description of Artificial Sequence: Synthetic oligonucleotide
  Sense strand starting at position 3319 of SEQ ID NO: 1883028
aaccuauagugauuaguga

SEQ ID NO: 2164831 - RNA, 19 nt, Artificial Sequence
  Description of Artificial Sequence: Synthetic oligonucleotide
  Antisense strand to SEQ ID NO: 2164830
ucacuaaucacuauagguu

SEQ ID NO: 2164832 - RNA, 19 nt, Artificial Sequence
  Description of Artificial Sequence: Synthetic oligonucleotide
  Sense strand starting at position 3547 of SEQ ID NO: 1883028
uuaggaauguugucaaaug

SEQ ID NO: 2164833 - RNA, 19 nt, Artificial Sequence
  Description of Artificial Sequence: Synthetic oligonucleotide
  Antisense strand to SEQ ID NO: 2164832
cauuugacaacauuccuaa

SEQ ID NO: 2164834 - RNA, 19 nt, Artificial Sequence
  Description of Artificial Sequence: Synthetic oligonucleotide
  Sense strand starting at position 3581 of SEQ ID NO: 1883028
ggauaauugcuuuagugac

SEQ ID NO: 2164835 - RNA, 19 nt, Artificial Sequence
  Description of Artificial Sequence: Synthetic oligonucleotide
  Antisense strand to SEQ ID NO: 2164834
gucacuaaagcaauuaucc

SEQ ID NO: 2164836 - RNA, 19 nt, Artificial Sequence
  Description of Artificial Sequence: Synthetic oligonucleotide
  Sense strand starting at position 3624 of SEQ ID NO: 1883028
uuaugauuaagguggcaau

SEQ ID NO: 2164837 - RNA, 19 nt, Artificial Sequence
  Description of Artificial Sequence: Synthetic oligonucleotide
  Antisense strand to SEQ ID NO: 2164836
auugccaccuuaaucauaa

SEQ ID NO: 2164838 - RNA, 19 nt, Artificial Sequence
  Description of Artificial Sequence: Synthetic oligonucleotide
  Sense strand starting at position 3625 of SEQ ID NO: 1883028
uaugauuaagguggcaauu

SEQ ID NO: 2164839 - RNA, 19 nt, Artificial Sequence
  Description of Artificial Sequence: Synthetic oligonucleotide
  Antisense strand to SEQ ID NO: 2164838
aauugccaccuuaaucaua

SEQ ID NO: 2164840 - RNA, 19 nt, Artificial Sequence
  Description of Artificial Sequence: Synthetic oligonucleotide
  Sense strand starting at position 3652 of SEQ ID NO: 1883028
gucaucauucuagauugua

SEQ ID NO: 2164841 - RNA, 19 nt, Artificial Sequence
  Description of Artificial Sequence: Synthetic oligonucleotide
  Antisense strand to SEQ ID NO: 2164840
uacaaucuagaaugaugac

SEQ ID NO: 2164842 - RNA, 19 nt, Artificial Sequence
  Description of Artificial Sequence: Synthetic oligonucleotide
  Sense strand starting at position 3814 of SEQ ID NO: 1883028
gacacuuugucaucaggau

SEQ ID NO: 2164843 - RNA, 19 nt, Artificial Sequence
  Description of Artificial Sequence: Synthetic oligonucleotide
  Antisense strand to SEQ ID NO: 2164842
auccugaugacaaaguguc

SEQ ID NO: 2164844 - RNA, 19 nt, Artificial Sequence
  Description of Artificial Sequence: Synthetic oligonucleotide
  Sense strand starting at position 3815 of SEQ ID NO: 1883028
acacuuugucaucaggauu

SEQ ID NO: 2164845 - RNA, 19 nt, Artificial Sequence
  Description of Artificial Sequence: Synthetic oligonucleotide
  Antisense strand to SEQ ID NO: 2164844
aauccugaugacaaagugu

SEQ ID NO: 2164846 - RNA, 19 nt, Artificial Sequence
  Description of Artificial Sequence: Synthetic oligonucleotide
  Sense strand starting at position 3818 of SEQ ID NO: 1883028
cuuugucaucaggauuauu

SEQ ID NO: 2164847 - RNA, 19 nt, Artificial Sequence
  Description of Artificial Sequence: Synthetic oligonucleotide
  Antisense strand to SEQ ID NO: 2164846
aauaauccugaugacaaag

SEQ ID NO: 2164848 - RNA, 19 nt, Artificial Sequence
  Description of Artificial Sequence: Synthetic oligonucleotide
  Sense strand starting at position 3920 of SEQ ID NO: 1883028
gagaaaggaggcugcuaua

SEQ ID NO: 2164849 - RNA, 19 nt, Artificial Sequence
  Description of Artificial Sequence: Synthetic oligonucleotide
  Antisense strand to SEQ ID NO: 2164848
uauagcagccuccuuucuc

SEQ ID NO: 2164850 - RNA, 19 nt, Artificial Sequence
  Description of Artificial Sequence: Synthetic oligonucleotide
  Sense strand starting at position 3949 of SEQ ID NO: 1883028
uuggguuaggucuacucau

SEQ ID NO: 2164851 - RNA, 19 nt, Artificial Sequence
  Description of Artificial Sequence: Synthetic oligonucleotide
  Antisense strand to SEQ ID NO: 2164850
augaguagaccuaacccaa

SEQ ID NO: 2164852 - RNA, 19 nt, Artificial Sequence
  Description of Artificial Sequence: Synthetic oligonucleotide
  Sense strand starting at position 43 of SEQ ID NO: 1883029
uacgguaccucuguuuaaa

SEQ ID NO: 2164853 - RNA, 19 nt, Artificial Sequence
  Description of Artificial Sequence: Synthetic oligonucleotide
  Antisense strand to SEQ ID NO: 2164852
uuuaaacagagguaccgua

SEQ ID NO: 2164854 - RNA, 19 nt, Artificial Sequence
  Description of Artificial Sequence: Synthetic oligonucleotide
  Sense strand starting at position 87 of SEQ ID NO: 1883029
guuuguaaccuaugccuuu

SEQ ID NO: 2164855 - RNA, 19 nt, Artificial Sequence
  Description of Artificial Sequence: Synthetic oligonucleotide
  Antisense strand to SEQ ID NO: 2164854
aaaggcauagguuacaaac

SEQ ID NO: 2164856 - RNA, 19 nt, Artificial Sequence
  Description of Artificial Sequence: Synthetic oligonucleotide
  Sense strand starting at position 133 of SEQ ID NO: 1883029
gguacaaguucugugucuu

SEQ ID NO: 2164857 - RNA, 19 nt, Artificial Sequence
  Description of Artificial Sequence: Synthetic oligonucleotide
  Antisense strand to SEQ ID NO: 2164856
aagacacagaacuuguacc

SEQ ID NO: 2164858 - RNA, 19 nt, Artificial Sequence
  Description of Artificial Sequence: Synthetic oligonucleotide
  Sense strand starting at position 134 of SEQ ID NO: 1883029
guacaaguucugugucuuu

SEQ ID NO: 2164859 - RNA, 19 nt, Artificial Sequence
  Description of Artificial Sequence: Synthetic oligonucleotide
  Antisense strand to SEQ ID NO: 2164858
aaagacacagaacuuguac

SEQ ID NO: 2164860 - RNA, 19 nt, Artificial Sequence
  Description of Artificial Sequence: Synthetic oligonucleotide
  Sense strand starting at position 208 of SEQ ID NO: 1883029
aggguugccuagcuacuaa

SEQ ID NO: 2164861 - RNA, 19 nt, Artificial Sequence
  Description of Artificial Sequence: Synthetic oligonucleotide
  Antisense strand to SEQ ID NO: 2164860
uuaguagcuaggcaacccu

SEQ ID NO: 2164862 - RNA, 19 nt, Artificial Sequence
  Description of Artificial Sequence: Synthetic oligonucleotide
  Sense strand starting at position 287 of SEQ ID NO: 1883029
aguggaggaucacuaagua

SEQ ID NO: 2164863 - RNA, 19 nt, Artificial Sequence
  Description of Artificial Sequence: Synthetic oligonucleotide
  Antisense strand to SEQ ID NO: 2164862
uacuuagugauccuccacu

SEQ ID NO: 2164864 - RNA, 19 nt, Artificial Sequence
  Description of Artificial Sequence: Synthetic oligonucleotide
  Sense strand starting at position 409 of SEQ ID NO: 1883029
ucuguaugccuauguuuau

SEQ ID NO: 2164865 - RNA, 19 nt, Artificial Sequence
  Description of Artificial Sequence: Synthetic oligonucleotide
  Antisense strand to SEQ ID NO: 2164864
auaaacauaggcauacaga

SEQ ID NO: 2164866 - RNA, 19 nt, Artificial Sequence
  Description of Artificial Sequence: Synthetic oligonucleotide
  Sense strand starting at position 410 of SEQ ID NO: 1883029
cuguaugccuauguuuaua

SEQ ID NO: 2164867 - RNA, 19 nt, Artificial Sequence
  Description of Artificial Sequence: Synthetic oligonucleotide
  Antisense strand to SEQ ID NO: 2164866
uauaaacauaggcauacag

SEQ ID NO: 2164868 - RNA, 19 nt, Artificial Sequence
  Description of Artificial Sequence: Synthetic oligonucleotide
  Sense strand starting at position 428 of SEQ ID NO: 1883029
auguguuacaggcauguga

SEQ ID NO: 2164869 - RNA, 19 nt, Artificial Sequence
  Description of Artificial Sequence: Synthetic oligonucleotide
  Antisense strand to SEQ ID NO: 2164868
ucacaugccuguaacacau

SEQ ID NO: 2164870 - RNA, 19 nt, Artificial Sequence
  Description of Artificial Sequence: Synthetic oligonucleotide
  Sense strand starting at position 430 of SEQ ID NO: 1883029
guguuacaggcaugugaca

SEQ ID NO: 2164871 - RNA, 19 nt, Artificial Sequence
  Description of Artificial Sequence: Synthetic oligonucleotide
  Antisense strand to SEQ ID NO: 2164870
ugucacaugccuguaacac

SEQ ID NO: 2164872 - RNA, 19 nt, Artificial Sequence
  Description of Artificial Sequence: Synthetic oligonucleotide
  Sense strand starting at position 506 of SEQ ID NO: 1883029
cugacauacugaugacucu

SEQ ID NO: 2164873 - RNA, 19 nt, Artificial Sequence
  Description of Artificial Sequence: Synthetic oligonucleotide
  Antisense strand to SEQ ID NO: 2164872
agagucaucaguaugucag

SEQ ID NO: 2164874 - RNA, 19 nt, Artificial Sequence
  Description of Artificial Sequence: Synthetic oligonucleotide
  Sense strand starting at position 512 of SEQ ID NO: 1883029
uacugaugacucugagcua

SEQ ID NO: 2164875 - RNA, 19 nt, Artificial Sequence
  Description of Artificial Sequence: Synthetic oligonucleotide
  Antisense strand to SEQ ID NO: 2164874
uagcucagagucaucagua

SEQ ID NO: 2164876 - RNA, 19 nt, Artificial Sequence
  Description of Artificial Sequence: Synthetic oligonucleotide
  Sense strand starting at position 613 of SEQ ID NO: 1883029
aaaggaaauuuccaugagu

SEQ ID NO: 2164877 - RNA, 19 nt, Artificial Sequence
  Description of Artificial Sequence: Synthetic oligonucleotide
  Antisense strand to SEQ ID NO: 2164876
acucauggaaauuuccuuu

SEQ ID NO: 2164878 - RNA, 19 nt, Artificial Sequence
  Description of Artificial Sequence: Synthetic oligonucleotide
  Sense strand starting at position 628 of SEQ ID NO: 1883029
gaguaaacguaucuguauc

SEQ ID NO: 2164879 - RNA, 19 nt, Artificial Sequence
  Description of Artificial Sequence: Synthetic oligonucleotide
  Antisense strand to SEQ ID NO: 2164878
gauacagauacguuuacuc

SEQ ID NO: 2164880 - RNA, 19 nt, Artificial Sequence
  Description of Artificial Sequence: Synthetic oligonucleotide
  Sense strand starting at position 629 of SEQ ID NO: 1883029
aguaaacguaucuguauca

SEQ ID NO: 2164881 - RNA, 19 nt, Artificial Sequence
  Description of Artificial Sequence: Synthetic oligonucleotide
  Antisense strand to SEQ ID NO: 2164880
ugauacagauacguuuacu

SEQ ID NO: 2164882 - RNA, 19 nt, Artificial Sequence
  Description of Artificial Sequence: Synthetic oligonucleotide
  Sense strand starting at position 634 of SEQ ID NO: 1883029
acguaucuguaucagaaag

SEQ ID NO: 2164883 - RNA, 19 nt, Artificial Sequence
  Description of Artificial Sequence: Synthetic oligonucleotide
  Antisense strand to SEQ ID NO: 2164882
cuuucugauacagauacgu

SEQ ID NO: 2164884 - RNA, 19 nt, Artificial Sequence
  Description of Artificial Sequence: Synthetic oligonucleotide
  Sense strand starting at position 845 of SEQ ID NO: 1883029
uuguuaaucugucuuauga

SEQ ID NO: 2164885 - RNA, 19 nt, Artificial Sequence
  Description of Artificial Sequence: Synthetic oligonucleotide
  Antisense strand to SEQ ID NO: 2164884
ucauaagacagauuaacaa

SEQ ID NO: 2164886 - RNA, 19 nt, Artificial Sequence
  Description of Artificial Sequence: Synthetic oligonucleotide
  Sense strand starting at position 1234 of SEQ ID NO: 1883029
gucccuucuccguagcaga

SEQ ID NO: 2164887 - RNA, 19 nt, Artificial Sequence
  Description of Artificial Sequence: Synthetic oligonucleotide
  Antisense strand to SEQ ID NO: 2164886
ucugcuacggagaagggac

SEQ ID NO: 2164888 - RNA, 19 nt, Artificial Sequence
  Description of Artificial Sequence: Synthetic oligonucleotide
  Sense strand starting at position 1319 of SEQ ID NO: 1883029
cagcgugcucgguugaacu

SEQ ID NO: 2164889 - RNA, 19 nt, Artificial Sequence
  Description of Artificial Sequence: Synthetic oligonucleotide
  Antisense strand to SEQ ID NO: 2164888
aguucaaccgagcacgcug

SEQ ID NO: 2164890 - RNA, 19 nt, Artificial Sequence
  Description of Artificial Sequence: Synthetic oligonucleotide
  Sense strand starting at position 1339 of SEQ ID NO: 1883029
gccuguucgguccacaaau

SEQ ID NO: 2164891 - RNA, 19 nt, Artificial Sequence
  Description of Artificial Sequence: Synthetic oligonucleotide
  Antisense strand to SEQ ID NO: 2164890
auuuguggaccgaacaggc

SEQ ID NO: 2164892 - RNA, 19 nt, Artificial Sequence
  Description of Artificial Sequence: Synthetic oligonucleotide
  Sense strand starting at position 2193 of SEQ ID NO: 1883029
gcaagucagguuuguagau

SEQ ID NO: 2164893 - RNA, 19 nt, Artificial Sequence
  Description of Artificial Sequence: Synthetic oligonucleotide
  Antisense strand to SEQ ID NO: 2164892
aucuacaaaccugacuugc

SEQ ID NO: 2164894 - RNA, 19 nt, Artificial Sequence
  Description of Artificial Sequence: Synthetic oligonucleotide
  Sense strand starting at position 2202 of SEQ ID NO: 1883029
guuuguagaucccuaguga

SEQ ID NO: 2164895 - RNA, 19 nt, Artificial Sequence
  Description of Artificial Sequence: Synthetic oligonucleotide
  Antisense strand to SEQ ID NO: 2164894
ucacuagggaucuacaaac

SEQ ID NO: 2164896 - RNA, 19 nt, Artificial Sequence
  Description of Artificial Sequence: Synthetic oligonucleotide
  Sense strand starting at position 2203 of SEQ ID NO: 1883029
uuuguagaucccuagugac

SEQ ID NO: 2164897 - RNA, 19 nt, Artificial Sequence
  Description of Artificial Sequence: Synthetic oligonucleotide
  Antisense strand to SEQ ID NO: 2164896
gucacuagggaucuacaaa

SEQ ID NO: 2164898 - RNA, 19 nt, Artificial Sequence
  Description of Artificial Sequence: Synthetic oligonucleotide
  Sense strand starting at position 2229 of SEQ ID NO: 1883029
acgggagcugcucauuaca

SEQ ID NO: 2164899 - RNA, 19 nt, Artificial Sequence
  Description of Artificial Sequence: Synthetic oligonucleotide
  Antisense strand to SEQ ID NO: 2164898
uguaaugagcagcucccgu

SEQ ID NO: 2164900 - RNA, 19 nt, Artificial Sequence
  Description of Artificial Sequence: Synthetic oligonucleotide
  Sense strand starting at position 2231 of SEQ ID NO: 1883029
gggagcugcucauuacaua

SEQ ID NO: 2164901 - RNA, 19 nt, Artificial Sequence
  Description of Artificial Sequence: Synthetic oligonucleotide
  Antisense strand to SEQ ID NO: 2164900
uauguaaugagcagcuccc

SEQ ID NO: 2164902 - RNA, 19 nt, Artificial Sequence
  Description of Artificial Sequence: Synthetic oligonucleotide
  Sense strand starting at position 2349 of SEQ ID NO: 1883029
uauuguauuuagcaaggua

SEQ ID NO: 2164903 - RNA, 19 nt, Artificial Sequence
  Description of Artificial Sequence: Synthetic oligonucleotide
  Antisense strand to SEQ ID NO: 2164902
uaccuugcuaaauacaaua

SEQ ID NO: 2164904 - RNA, 19 nt, Artificial Sequence
  Description of Artificial Sequence: Synthetic oligonucleotide
  Sense strand starting at position 2363 of SEQ ID NO: 1883029
agguauagguucuggagau

SEQ ID NO: 2164905 - RNA, 19 nt, Artificial Sequence
  Description of Artificial Sequence: Synthetic oligonucleotide
  Antisense strand to SEQ ID NO: 2164904
aucuccagaaccuauaccu

SEQ ID NO: 2164906 - RNA, 19 nt, Artificial Sequence
  Description of Artificial Sequence: Synthetic oligonucleotide
  Sense strand starting at position 2470 of SEQ ID NO: 1883029
uuaccacccuuauagugau

SEQ ID NO: 2164907 - RNA, 19 nt, Artificial Sequence
  Description of Artificial Sequence: Synthetic oligonucleotide
  Antisense strand to SEQ ID NO: 2164906
aucacuauaagggugguaa

SEQ ID NO: 2164908 - RNA, 19 nt, Artificial Sequence
  Description of Artificial Sequence: Synthetic oligonucleotide
  Sense strand starting at position 2476 of SEQ ID NO: 1883029
cccuuauagugaucuacac

SEQ ID NO: 2164909 - RNA, 19 nt, Artificial Sequence
  Description of Artificial Sequence: Synthetic oligonucleotide
  Antisense strand to SEQ ID NO: 2164908
guguagaucacuauaaggg

SEQ ID NO: 2164910 - RNA, 19 nt, Artificial Sequence
  Description of Artificial Sequence: Synthetic oligonucleotide
  Sense strand starting at position 2498 of SEQ ID NO: 1883029
cagugcaaucccuggcaaa

SEQ ID NO: 2164911 - RNA, 19 nt, Artificial Sequence
  Description of Artificial Sequence: Synthetic oligonucleotide
  Antisense strand to SEQ ID NO: 2164910
uuugccagggauugcacug

SEQ ID NO: 2164912 - RNA, 19 nt, Artificial Sequence
  Description of Artificial Sequence: Synthetic oligonucleotide
  Sense strand starting at position 2682 of SEQ ID NO: 1883029
ccuuguauuccaggaauca

SEQ ID NO: 2164913 - RNA, 19 nt, Artificial Sequence
  Description of Artificial Sequence: Synthetic oligonucleotide
  Antisense strand to SEQ ID NO: 2164912
ugauuccuggaauacaagg

SEQ ID NO: 2164914 - RNA, 19 nt, Artificial Sequence
  Description of Artificial Sequence: Synthetic oligonucleotide
  Sense strand starting at position 2716 of SEQ ID NO: 1883029
agugcauuacccuguuaau

SEQ ID NO: 2164915 - RNA, 19 nt, Artificial Sequence
  Description of Artificial Sequence: Synthetic oligonucleotide
  Antisense strand to SEQ ID NO: 2164914
auuaacaggguaaugcacu

SEQ ID NO: 2164916 - RNA, 19 nt, Artificial Sequence
  Description of Artificial Sequence: Synthetic oligonucleotide
  Sense strand starting at position 2719 of SEQ ID NO: 1883029
gcauuacccuguuaauaag

SEQ ID NO: 2164917 - RNA, 19 nt, Artificial Sequence
  Description of Artificial Sequence: Synthetic oligonucleotide
  Antisense strand to SEQ ID NO: 2164916
cuuauuaacaggguaaugc

SEQ ID NO: 2164918 - RNA, 19 nt, Artificial Sequence
  Description of Artificial Sequence: Synthetic oligonucleotide
  Sense strand starting at position 2777 of SEQ ID NO: 1883029
ugcauuaauguugauaagu

SEQ ID NO: 2164919 - RNA, 19 nt, Artificial Sequence
  Description of Artificial Sequence: Synthetic oligonucleotide
  Antisense strand to SEQ ID NO: 2164918
acuuaucaacauuaaugca

SEQ ID NO: 2164920 - RNA, 19 nt, Artificial Sequence
  Description of Artificial Sequence: Synthetic oligonucleotide
  Sense strand starting at position 2779 of SEQ ID NO: 1883029
cauuaauguugauaaguga

SEQ ID NO: 2164921 - RNA, 19 nt, Artificial Sequence
  Description of Artificial Sequence: Synthetic oligonucleotide
  Antisense strand to SEQ ID NO: 2164920
ucacuuaucaacauuaaug

SEQ ID NO: 2164922 - RNA, 19 nt, Artificial Sequence
  Description of Artificial Sequence: Synthetic oligonucleotide
  Sense strand starting at position 2856 of SEQ ID NO: 1883029
gccucaauaugagauagga

SEQ ID NO: 2164923 - RNA, 19 nt, Artificial Sequence
  Description of Artificial Sequence: Synthetic oligonucleotide
  Antisense strand to SEQ ID NO: 2164922
uccuaucucauauugaggc

SEQ ID NO: 2164924 - RNA, 19 nt, Artificial Sequence
  Description of Artificial Sequence: Synthetic oligonucleotide
  Sense strand starting at position 3268 of SEQ ID NO: 1883029
caauuagguccagagcuuu

SEQ ID NO: 2164925 - RNA, 19 nt, Artificial Sequence
  Description of Artificial Sequence: Synthetic oligonucleotide
  Antisense strand to SEQ ID NO: 2164924
aaagcucuggaccuaauug

SEQ ID NO: 2164926 - RNA, 19 nt, Artificial Sequence
  Description of Artificial Sequence: Synthetic oligonucleotide
  Sense strand starting at position 3285 of SEQ ID NO: 1883029
uuucuuuggugguaaauuu

SEQ ID NO: 2164927 - RNA, 19 nt, Artificial Sequence
  Description of Artificial Sequence: Synthetic oligonucleotide
  Antisense strand to SEQ ID NO: 2164926
aaauuuaccaccaaagaaa

SEQ ID NO: 2164928 - RNA, 19 nt, Artificial Sequence
  Description of Artificial Sequence: Synthetic oligonucleotide
  Sense strand starting at position 3319 of SEQ ID NO: 1883029
uuuagagacuugcuaaagu

SEQ ID NO: 2164929 - RNA, 19 nt, Artificial Sequence
  Description of Artificial Sequence: Synthetic oligonucleotide
  Antisense strand to SEQ ID NO: 2164928
acuuuagcaagucucuaaa

SEQ ID NO: 2164930 - RNA, 19 nt, Artificial Sequence
  Description of Artificial Sequence: Synthetic oligonucleotide
  Sense strand starting at position 3734 of SEQ ID NO: 1883029
cugcuuacugucuaguguu

SEQ ID NO: 2164931 - RNA, 19 nt, Artificial Sequence
  Description of Artificial Sequence: Synthetic oligonucleotide
  Antisense strand to SEQ ID NO: 2164930
aacacuagacaguaagcag

SEQ ID NO: 2164932 - RNA, 19 nt, Artificial Sequence
  Description of Artificial Sequence: Synthetic oligonucleotide
  Sense strand starting at position 17 of SEQ ID NO: 1883030
guauuagaugcucaauaca

SEQ ID NO: 2164933 - RNA, 19 nt, Artificial Sequence
  Description of Artificial Sequence: Synthetic oligonucleotide
  Antisense strand to SEQ ID NO: 2164932
uguauugagcaucuaauac

SEQ ID NO: 2164934 - RNA, 19 nt, Artificial Sequence
  Description of Artificial Sequence: Synthetic oligonucleotide
  Sense strand starting at position 50 of SEQ ID NO: 1883030
acauguauccuguauauag

SEQ ID NO: 2164935 - RNA, 19 nt, Artificial Sequence
  Description of Artificial Sequence: Synthetic oligonucleotide
  Antisense strand to SEQ ID NO: 2164934
cuauauacaggauacaugu

SEQ ID NO: 2164936 - RNA, 19 nt, Artificial Sequence
  Description of Artificial Sequence: Synthetic oligonucleotide
  Sense strand starting at position 54 of SEQ ID NO: 1883030
guauccuguauauagaagu

SEQ ID NO: 2164937 - RNA, 19 nt, Artificial Sequence
  Description of Artificial Sequence: Synthetic oligonucleotide
  Antisense strand to SEQ ID NO: 2164936
acuucuauauacaggauac

SEQ ID NO: 2164938 - RNA, 19 nt, Artificial Sequence
  Description of Artificial Sequence: Synthetic oligonucleotide
  Sense strand starting at position 182 of SEQ ID NO: 1883030
uguauacuacgucacagaa

SEQ ID NO: 2164939 - RNA, 19 nt, Artificial Sequence
  Description of Artificial Sequence: Synthetic oligonucleotide
  Antisense strand to SEQ ID NO: 2164938
uucugugacguaguauaca

SEQ ID NO: 2164940 - RNA, 19 nt, Artificial Sequence
  Description of Artificial Sequence: Synthetic oligonucleotide
  Sense strand starting at position 241 of SEQ ID NO: 1883030
uuaggaauacuauguccuu

SEQ ID NO: 2164941 - RNA, 19 nt, Artificial Sequence
  Description of Artificial Sequence: Synthetic oligonucleotide
  Antisense strand to SEQ ID NO: 2164940
aaggacauaguauuccuaa

SEQ ID NO: 2164942 - RNA, 19 nt, Artificial Sequence
  Description of Artificial Sequence: Synthetic oligonucleotide
  Sense strand starting at position 244 of SEQ ID NO: 1883030
ggaauacuauguccuucua

SEQ ID NO: 2164943 - RNA, 19 nt, Artificial Sequence
  Description of Artificial Sequence: Synthetic oligonucleotide
  Antisense strand to SEQ ID NO: 2164942
uagaaggacauaguauucc

SEQ ID NO: 2164944 - RNA, 19 nt, Artificial Sequence
  Description of Artificial Sequence: Synthetic oligonucleotide
  Sense strand starting at position 768 of SEQ ID NO: 1883030
ggcaauaaccacugcaaca

SEQ ID NO: 2164945 - RNA, 19 nt, Artificial Sequence
  Description of Artificial Sequence: Synthetic oligonucleotide
  Antisense strand to SEQ ID NO: 2164944
uguugcagugguuauugcc

SEQ ID NO: 2164946 - RNA, 19 nt, Artificial Sequence
  Description of Artificial Sequence: Synthetic oligonucleotide
  Sense strand starting at position 974 of SEQ ID NO: 1883030
cuuagagaguuagaaauuu

SEQ ID NO: 2164947 - RNA, 19 nt, Artificial Sequence
  Description of Artificial Sequence: Synthetic oligonucleotide
  Antisense strand to SEQ ID NO: 2164946
aaauuucuaacucucuaag

SEQ ID NO: 2164948 - RNA, 19 nt, Artificial Sequence
  Description of Artificial Sequence: Synthetic oligonucleotide
  Sense strand starting at position 1053 of SEQ ID NO: 1883030
ugaaucucucguggaaaga

SEQ ID NO: 2164949 - RNA, 19 nt, Artificial Sequence
  Description of Artificial Sequence: Synthetic oligonucleotide
  Antisense strand to SEQ ID NO: 2164948
ucuuuccacgagagauuca

SEQ ID NO: 2164950 - RNA, 19 nt, Artificial Sequence
  Description of Artificial Sequence: Synthetic oligonucleotide
  Sense strand starting at position 1086 of SEQ ID NO: 1883030
gagggucacugaucaaagu

SEQ ID NO: 2164951 - RNA, 19 nt, Artificial Sequence
  Description of Artificial Sequence: Synthetic oligonucleotide
  Antisense strand to SEQ ID NO: 2164950
acuuugaucagugacccuc

SEQ ID NO: 2164952 - RNA, 19 nt, Artificial Sequence
  Description of Artificial Sequence: Synthetic oligonucleotide
  Sense strand starting at position 1330 of SEQ ID NO: 1883030
gcuuuacaggcacagauau

SEQ ID NO: 2164953 - RNA, 19 nt, Artificial Sequence
  Description of Artificial Sequence: Synthetic oligonucleotide
  Antisense strand to SEQ ID NO: 2164952
auaucugugccuguaaagc

SEQ ID NO: 2164954 - RNA, 19 nt, Artificial Sequence
  Description of Artificial Sequence: Synthetic oligonucleotide
  Sense strand starting at position 1399 of SEQ ID NO: 1883030
agagcauuacaauaacguu

SEQ ID NO: 2164955 - RNA, 19 nt, Artificial Sequence
  Description of Artificial Sequence: Synthetic oligonucleotide
  Antisense strand to SEQ ID NO: 2164954
aacguuauuguaaugcucu

SEQ ID NO: 2164956 - RNA, 19 nt, Artificial Sequence
  Description of Artificial Sequence: Synthetic oligonucleotide
  Sense strand starting at position 1487 of SEQ ID NO: 1883030
aacaaagagcacuguuaga

SEQ ID NO: 2164957 - RNA, 19 nt, Artificial Sequence
  Description of Artificial Sequence: Synthetic oligonucleotide
  Antisense strand to SEQ ID NO: 2164956
ucuaacagugcucuuuguu

SEQ ID NO: 2164958 - RNA, 19 nt, Artificial Sequence
  Description of Artificial Sequence: Synthetic oligonucleotide
  Sense strand starting at position 1603 of SEQ ID NO: 1883030
gacaguaaugguggugauu

SEQ ID NO: 2164959 - RNA, 19 nt, Artificial Sequence
  Description of Artificial Sequence: Synthetic oligonucleotide
  Antisense strand to SEQ ID NO: 2164958
aaucaccaccauuacuguc

SEQ ID NO: 2164960 - RNA, 19 nt, Artificial Sequence
  Description of Artificial Sequence: Synthetic oligonucleotide
  Sense strand starting at position 1644 of SEQ ID NO: 1883030
cuaauuauugaguaugucu

SEQ ID NO: 2164961 - RNA, 19 nt, Artificial Sequence
  Description of Artificial Sequence: Synthetic oligonucleotide
  Antisense strand to SEQ ID NO: 2164960
agacauacucaauaauuag

SEQ ID NO: 2164962 - RNA, 19 nt, Artificial Sequence
  Description of Artificial Sequence: Synthetic oligonucleotide
  Sense strand starting at position 1652 of SEQ ID NO: 1883030
ugaguaugucuguacucaa

SEQ ID NO: 2164963 - RNA, 19 nt, Artificial Sequence
  Description of Artificial Sequence: Synthetic oligonucleotide
  Antisense strand to SEQ ID NO: 2164962
uugaguacagacauacuca

SEQ ID NO: 2164964 - RNA, 19 nt, Artificial Sequence
  Description of Artificial Sequence: Synthetic oligonucleotide
  Sense strand starting at position 1873 of SEQ ID NO: 1883030
ccugucucccgugaggaaa

SEQ ID NO: 2164965 - RNA, 19 nt, Artificial Sequence
  Description of Artificial Sequence: Synthetic oligonucleotide
  Antisense strand to SEQ ID NO: 2164964
uuuccucacgggagacagg

SEQ ID NO: 2164966 - RNA, 19 nt, Artificial Sequence
  Description of Artificial Sequence: Synthetic oligonucleotide
  Sense strand starting at position 2079 of SEQ ID NO: 1883030
ugugaaauuguauauccaa

SEQ ID NO: 2164967 - RNA, 19 nt, Artificial Sequence
  Description of Artificial Sequence: Synthetic oligonucleotide
  Antisense strand to SEQ ID NO: 2164966
uuggauauacaauuucaca

SEQ ID NO: 2164968 - RNA, 19 nt, Artificial Sequence
  Description of Artificial Sequence: Synthetic oligonucleotide
  Sense strand starting at position 2155 of SEQ ID NO: 1883030
ccacuuacgagacauguga

SEQ ID NO: 2164969 - RNA, 19 nt, Artificial Sequence
  Description of Artificial Sequence: Synthetic oligonucleotide
  Antisense strand to SEQ ID NO: 2164968
ucacaugucucguaagugg

SEQ ID NO: 2164970 - RNA, 19 nt, Artificial Sequence
  Description of Artificial Sequence: Synthetic oligonucleotide
  Sense strand starting at position 2157 of SEQ ID NO: 1883030
acuuacgagacaugugauu

SEQ ID NO: 2164971 - RNA, 19 nt, Artificial Sequence
  Description of Artificial Sequence: Synthetic oligonucleotide
  Antisense strand to SEQ ID NO: 2164970
aaucacaugucucguaagu

SEQ ID NO: 2164972 - RNA, 19 nt, Artificial Sequence
  Description of Artificial Sequence: Synthetic oligonucleotide
  Sense strand starting at position 2229 of SEQ ID NO: 1883030
gaauaauuggaaugcaagu

SEQ ID NO: 2164973 - RNA, 19 nt, Artificial Sequence
  Description of Artificial Sequence: Synthetic oligonucleotide
  Antisense strand to SEQ ID NO: 2164972
acuugcauuccaauuauuc

SEQ ID NO: 2164974 - RNA, 19 nt, Artificial Sequence
  Description of Artificial Sequence: Synthetic oligonucleotide
  Sense strand starting at position 2285 of SEQ ID NO: 1883030
auaguaacuggccaagagu

SEQ ID NO: 2164975 - RNA, 19 nt, Artificial Sequence
  Description of Artificial Sequence: Synthetic oligonucleotide
  Antisense strand to SEQ ID NO: 2164974
acucuuggccaguuacuau

SEQ ID NO: 2164976 - RNA, 19 nt, Artificial Sequence
  Description of Artificial Sequence: Synthetic oligonucleotide
  Sense strand starting at position 2288 of SEQ ID NO: 1883030
guaacuggccaagaguuaa

SEQ ID NO: 2164977 - RNA, 19 nt, Artificial Sequence
  Description of Artificial Sequence: Synthetic oligonucleotide
  Antisense strand to SEQ ID NO: 2164976
uuaacucuuggccaguuac

SEQ ID NO: 2164978 - RNA, 19 nt, Artificial Sequence
  Description of Artificial Sequence: Synthetic oligonucleotide
  Sense strand starting at position 2299 of SEQ ID NO: 1883030
agaguuaaguacucaguau

SEQ ID NO: 2164979 - RNA, 19 nt, Artificial Sequence
  Description of Artificial Sequence: Synthetic oligonucleotide
  Antisense strand to SEQ ID NO: 2164978
auacugaguacuuaacucu

SEQ ID NO: 2164980 - RNA, 19 nt, Artificial Sequence
  Description of Artificial Sequence: Synthetic oligonucleotide
  Sense strand starting at position 2307 of SEQ ID NO: 1883030
guacucaguauuugucagu

SEQ ID NO: 2164981 - RNA, 19 nt, Artificial Sequence
  Description of Artificial Sequence: Synthetic oligonucleotide
  Antisense strand to SEQ ID NO: 2164980
acugacaaauacugaguac

SEQ ID NO: 2164982 - RNA, 19 nt, Artificial Sequence
  Description of Artificial Sequence: Synthetic oligonucleotide
  Sense strand starting at position 2312 of SEQ ID NO: 1883030
caguauuugucaguuucuc

SEQ ID NO: 2164983 - RNA, 19 nt, Artificial Sequence
  Description of Artificial Sequence: Synthetic oligonucleotide
  Antisense strand to SEQ ID NO: 2164982
gagaaacugacaaauacug

SEQ ID NO: 2164984 - RNA, 19 nt, Artificial Sequence
  Description of Artificial Sequence: Synthetic oligonucleotide
  Sense strand starting at position 2405 of SEQ ID NO: 1883030
ggauguuuauauccuagag

SEQ ID NO: 2164985 - RNA, 19 nt, Artificial Sequence
  Description of Artificial Sequence: Synthetic oligonucleotide
  Antisense strand to SEQ ID NO: 2164984
cucuaggauauaaacaucc

SEQ ID NO: 2164986 - RNA, 19 nt, Artificial Sequence
  Description of Artificial Sequence: Synthetic oligonucleotide
  Sense strand starting at position 2452 of SEQ ID NO: 1883030
gcagauuuguugguuucua

SEQ ID NO: 2164987 - RNA, 19 nt, Artificial Sequence
  Description of Artificial Sequence: Synthetic oligonucleotide
  Antisense strand to SEQ ID NO: 2164986
uagaaaccaacaaaucugc

SEQ ID NO: 2164988 - RNA, 19 nt, Artificial Sequence
  Description of Artificial Sequence: Synthetic oligonucleotide
  Sense strand starting at position 2659 of SEQ ID NO: 1883030
ucaacuguccuacauaugu

SEQ ID NO: 2164989 - RNA, 19 nt, Artificial Sequence
  Description of Artificial Sequence: Synthetic oligonucleotide
  Antisense strand to SEQ ID NO: 2164988
acauauguaggacaguuga

SEQ ID NO: 2164990 - RNA, 19 nt, Artificial Sequence
  Description of Artificial Sequence: Synthetic oligonucleotide
  Sense strand starting at position 2672 of SEQ ID NO: 1883030
auauguauucuguaacuuc

SEQ ID NO: 2164991 - RNA, 19 nt, Artificial Sequence
  Description of Artificial Sequence: Synthetic oligonucleotide
  Antisense strand to SEQ ID NO: 2164990
gaaguuacagaauacauau

SEQ ID NO: 2164992 - RNA, 19 nt, Artificial Sequence
  Description of Artificial Sequence: Synthetic oligonucleotide
  Sense strand starting at position 2956 of SEQ ID NO: 1883030
cugaauuaugcauaaugua

SEQ ID NO: 2164993 - RNA, 19 nt, Artificial Sequence
  Description of Artificial Sequence: Synthetic oligonucleotide
  Antisense strand to SEQ ID NO: 2164992
uacauuaugcauaauucag

SEQ ID NO: 2164994 - RNA, 19 nt, Artificial Sequence
  Description of Artificial Sequence: Synthetic oligonucleotide
  Sense strand starting at position 3077 of SEQ ID NO: 1883030
ugaggcacuugacuguaau

SEQ ID NO: 2164995 - RNA, 19 nt, Artificial Sequence
  Description of Artificial Sequence: Synthetic oligonucleotide
  Antisense strand to SEQ ID NO: 2164994
auuacagucaagugccuca

SEQ ID NO: 2164996 - RNA, 19 nt, Artificial Sequence
  Description of Artificial Sequence: Synthetic oligonucleotide
  Sense strand starting at position 3080 of SEQ ID NO: 1883030
ggcacuugacuguaaucag

SEQ ID NO: 2164997 - RNA, 19 nt, Artificial Sequence
  Description of Artificial Sequence: Synthetic oligonucleotide
  Antisense strand to SEQ ID NO: 2164996
cugauuacagucaagugcc

SEQ ID NO: 2164998 - RNA, 19 nt, Artificial Sequence
  Description of Artificial Sequence: Synthetic oligonucleotide
  Sense strand starting at position 3083 of SEQ ID NO: 1883030
acuugacuguaaucagaua

SEQ ID NO: 2164999 - RNA, 19 nt, Artificial Sequence
  Description of Artificial Sequence: Synthetic oligonucleotide
  Antisense strand to SEQ ID NO: 2164998
uaucugauuacagucaagu

SEQ ID NO: 2165000 - RNA, 19 nt, Artificial Sequence
  Description of Artificial Sequence: Synthetic oligonucleotide
  Sense strand starting at position 3168 of SEQ ID NO: 1883030
cgguuauccuaaucugaaa

SEQ ID NO: 2165001 - RNA, 19 nt, Artificial Sequence
  Description of Artificial Sequence: Synthetic oligonucleotide
  Antisense strand to SEQ ID NO: 2165000
uuucagauuaggauaaccg

SEQ ID NO: 2165002 - RNA, 19 nt, Artificial Sequence
  Description of Artificial Sequence: Synthetic oligonucleotide
  Sense strand starting at position 3311 of SEQ ID NO: 1883030
agguuuccgagguaugaua

SEQ ID NO: 2165003 - RNA, 19 nt, Artificial Sequence
  Description of Artificial Sequence: Synthetic oligonucleotide
  Antisense strand to SEQ ID NO: 2165002
uaucauaccucggaaaccu

SEQ ID NO: 2165004 - RNA, 19 nt, Artificial Sequence
  Description of Artificial Sequence: Synthetic oligonucleotide
  Sense strand starting at position 3326 of SEQ ID NO: 1883030
gauaccugucagcauguga

SEQ ID NO: 2165005 - RNA, 19 nt, Artificial Sequence
  Description of Artificial Sequence: Synthetic oligonucleotide
  Antisense strand to SEQ ID NO: 2165004
ucacaugcugacagguauc

SEQ ID NO: 2165006 - RNA, 19 nt, Artificial Sequence
  Description of Artificial Sequence: Synthetic oligonucleotide
  Sense strand starting at position 3549 of SEQ ID NO: 1883030
ucaccacguggagauuaau

SEQ ID NO: 2165007 - RNA, 19 nt, Artificial Sequence
  Description of Artificial Sequence: Synthetic oligonucleotide
  Antisense strand to SEQ ID NO: 2165006
auuaaucuccacgugguga

SEQ ID NO: 2165008 - RNA, 19 nt, Artificial Sequence
  Description of Artificial Sequence: Synthetic oligonucleotide
  Sense strand starting at position 3581 of SEQ ID NO: 1883030
ggcacuguaaacugagaga

SEQ ID NO: 2165009 - RNA, 19 nt, Artificial Sequence
  Description of Artificial Sequence: Synthetic oligonucleotide
  Antisense strand to SEQ ID NO: 2165008
ucucucaguuuacagugcc

SEQ ID NO: 2165010 - RNA, 19 nt, Artificial Sequence
  Description of Artificial Sequence: Synthetic oligonucleotide
  Sense strand starting at position 3750 of SEQ ID NO: 1883030
ugacuugucuuacuaucag

SEQ ID NO: 2165011 - RNA, 19 nt, Artificial Sequence
  Description of Artificial Sequence: Synthetic oligonucleotide
  Antisense strand to SEQ ID NO: 2165010
cugauaguaagacaaguca

SEQ ID NO: 2165012 - RNA, 19 nt, Artificial Sequence
  Description of Artificial Sequence: Synthetic oligonucleotide
  Sense strand starting at position 338 of SEQ ID NO: 1883031
ggcucucauuagcucagaa

SEQ ID NO: 2165013 - RNA, 19 nt, Artificial Sequence
  Description of Artificial Sequence: Synthetic oligonucleotide
  Antisense strand to SEQ ID NO: 2165012
uucugagcuaaugagagcc

SEQ ID NO: 2165014 - RNA, 19 nt, Artificial Sequence
  Description of Artificial Sequence: Synthetic oligonucleotide
  Sense strand starting at position 340 of SEQ ID NO: 1883031
cucucauuagcucagaaga

SEQ ID NO: 2165015 - RNA, 19 nt, Artificial Sequence
  Description of Artificial Sequence: Synthetic oligonucleotide
  Antisense strand to SEQ ID NO: 2165014
ucuucugagcuaaugagag

SEQ ID NO: 2165016 - RNA, 19 nt, Artificial Sequence
  Description of Artificial Sequence: Synthetic oligonucleotide
  Sense strand starting at position 366 of SEQ ID NO: 1883031
auagucuccugauucugaa

SEQ ID NO: 2165017 - RNA, 19 nt, Artificial Sequence
  Description of Artificial Sequence: Synthetic oligonucleotide
  Antisense strand to SEQ ID NO: 2165016
uucagaaucaggagacuau

SEQ ID NO: 2165018 - RNA, 19 nt, Artificial Sequence
  Description of Artificial Sequence: Synthetic oligonucleotide
  Sense strand starting at position 575 of SEQ ID NO: 1883031
aggccagcucuacauaaau

SEQ ID NO: 2165019 - RNA, 19 nt, Artificial Sequence
  Description of Artificial Sequence: Synthetic oligonucleotide
  Antisense strand to SEQ ID NO: 2165018
auuuauguagagcuggccu

SEQ ID NO: 2165020 - RNA, 19 nt, Artificial Sequence
  Description of Artificial Sequence: Synthetic oligonucleotide
  Sense strand starting at position 720 of SEQ ID NO: 1883031
ugauuuccagugugugaca

SEQ ID NO: 2165021 - RNA, 19 nt, Artificial Sequence
  Description of Artificial Sequence: Synthetic oligonucleotide
  Antisense strand to SEQ ID NO: 2165020
ugucacacacuggaaauca

SEQ ID NO: 2165022 - RNA, 19 nt, Artificial Sequence
  Description of Artificial Sequence: Synthetic oligonucleotide
  Sense strand starting at position 818 of SEQ ID NO: 1883031
cagaauuaccuguggaguu

SEQ ID NO: 2165023 - RNA, 19 nt, Artificial Sequence
  Description of Artificial Sequence: Synthetic oligonucleotide
  Antisense strand to SEQ ID NO: 2165022
aacuccacagguaauucug

SEQ ID NO: 2165024 - RNA, 19 nt, Artificial Sequence
  Description of Artificial Sequence: Synthetic oligonucleotide
  Sense strand starting at position 886 of SEQ ID NO: 1883031
acuuuaauggcugaucuau

SEQ ID NO: 2165025 - RNA, 19 nt, Artificial Sequence
  Description of Artificial Sequence: Synthetic oligonucleotide
  Antisense strand to SEQ ID NO: 2165024
auagaucagccauuaaagu

SEQ ID NO: 2165026 - RNA, 19 nt, Artificial Sequence
  Description of Artificial Sequence: Synthetic oligonucleotide
  Sense strand starting at position 1005 of SEQ ID NO: 1883031
ggaggugcucuucauagcu

SEQ ID NO: 2165027 - RNA, 19 nt, Artificial Sequence
  Description of Artificial Sequence: Synthetic oligonucleotide
  Antisense strand to SEQ ID NO: 2165026
agcuaugaagagcaccucc

SEQ ID NO: 2165028 - RNA, 19 nt, Artificial Sequence
  Description of Artificial Sequence: Synthetic oligonucleotide
  Sense strand starting at position 1175 of SEQ ID NO: 1883031
ugauacaugcggcgaucaa

SEQ ID NO: 2165029 - RNA, 19 nt, Artificial Sequence
  Description of Artificial Sequence: Synthetic oligonucleotide
  Antisense strand to SEQ ID NO: 2165028
uugaucgccgcauguauca

SEQ ID NO: 2165030 - RNA, 19 nt, Artificial Sequence
  Description of Artificial Sequence: Synthetic oligonucleotide
  Sense strand starting at position 1176 of SEQ ID NO: 1883031
gauacaugcggcgaucaau

SEQ ID NO: 2165031 - RNA, 19 nt, Artificial Sequence
  Description of Artificial Sequence: Synthetic oligonucleotide
  Antisense strand to SEQ ID NO: 2165030
auugaucgccgcauguauc

SEQ ID NO: 2165032 - RNA, 19 nt, Artificial Sequence
  Description of Artificial Sequence: Synthetic oligonucleotide
  Sense strand starting at position 1227 of SEQ ID NO: 1883031
ggugcagaauccucauucu

SEQ ID NO: 2165033 - RNA, 19 nt, Artificial Sequence
  Description of Artificial Sequence: Synthetic oligonucleotide
  Antisense strand to SEQ ID NO: 2165032
agaaugaggauucugcacc

SEQ ID NO: 2165034 - RNA, 19 nt, Artificial Sequence
  Description of Artificial Sequence: Synthetic oligonucleotide
  Sense strand starting at position 1426 of SEQ ID NO: 1883031
ggaguuggcauuggugauu

SEQ ID NO: 2165035 - RNA, 19 nt, Artificial Sequence
  Description of Artificial Sequence: Synthetic oligonucleotide
  Antisense strand to SEQ ID NO: 2165034
aaucaccaaugccaacucc

SEQ ID NO: 2165036 - RNA, 19 nt, Artificial Sequence
  Description of Artificial Sequence: Synthetic oligonucleotide
  Sense strand starting at position 1626 of SEQ ID NO: 1883031
gcaguuucucuagauaauu

SEQ ID NO: 2165037 - RNA, 19 nt, Artificial Sequence
  Description of Artificial Sequence: Synthetic oligonucleotide
  Antisense strand to SEQ ID NO: 2165036
aauuaucuagagaaacugc

SEQ ID NO: 2165038 - RNA, 19 nt, Artificial Sequence
  Description of Artificial Sequence: Synthetic oligonucleotide
  Sense strand starting at position 1707 of SEQ ID NO: 1883031
uuagucauuuggcacaaag

SEQ ID NO: 2165039 - RNA, 19 nt, Artificial Sequence
  Description of Artificial Sequence: Synthetic oligonucleotide
  Antisense strand to SEQ ID NO: 2165038
cuuugugccaaaugacuaa

SEQ ID NO: 2165040 - RNA, 19 nt, Artificial Sequence
  Description of Artificial Sequence: Synthetic oligonucleotide
  Sense strand starting at position 1730 of SEQ ID NO: 1883031
acaagcauuuaggaaggau

SEQ ID NO: 2165041 - RNA, 19 nt, Artificial Sequence
  Description of Artificial Sequence: Synthetic oligonucleotide
  Antisense strand to SEQ ID NO: 2165040
auccuuccuaaaugcuugu

SEQ ID NO: 2165042 - RNA, 19 nt, Artificial Sequence
  Description of Artificial Sequence: Synthetic oligonucleotide
  Sense strand starting at position 1891 of SEQ ID NO: 1883031
accacauugcuagguagaa

SEQ ID NO: 2165043 - RNA, 19 nt, Artificial Sequence
  Description of Artificial Sequence: Synthetic oligonucleotide
  Antisense strand to SEQ ID NO: 2165042
uucuaccuagcaauguggu

SEQ ID NO: 2165044 - RNA, 19 nt, Artificial Sequence
  Description of Artificial Sequence: Synthetic oligonucleotide
  Sense strand starting at position 1892 of SEQ ID NO: 1883031
ccacauugcuagguagaaa

SEQ ID NO: 2165045 - RNA, 19 nt, Artificial Sequence
  Description of Artificial Sequence: Synthetic oligonucleotide
  Antisense strand to SEQ ID NO: 2165044
uuucuaccuagcaaugugg

SEQ ID NO: 2165046 - RNA, 19 nt, Artificial Sequence
  Description of Artificial Sequence: Synthetic oligonucleotide
  Sense strand starting at position 1895 of SEQ ID NO: 1883031
cauugcuagguagaaaguu

SEQ ID NO: 2165047 - RNA, 19 nt, Artificial Sequence
  Description of Artificial Sequence: Synthetic oligonucleotide
  Antisense strand to SEQ ID NO: 2165046
aacuuucuaccuagcaaug

SEQ ID NO: 2165048 - RNA, 19 nt, Artificial Sequence
  Description of Artificial Sequence: Synthetic oligonucleotide
  Sense strand starting at position 2194 of SEQ ID NO: 1883031
gaaaguuugacagggcaag

SEQ ID NO: 2165049 - RNA, 19 nt, Artificial Sequence
  Description of Artificial Sequence: Synthetic oligonucleotide
  Antisense strand to SEQ ID NO: 2165048
cuugcccugucaaacuuuc

SEQ ID NO: 2165050 - RNA, 19 nt, Artificial Sequence
  Description of Artificial Sequence: Synthetic oligonucleotide
  Sense strand starting at position 2809 of SEQ ID NO: 1883031
gcaagagcuugucuaagaa

SEQ ID NO: 2165051 - RNA, 19 nt, Artificial Sequence
  Description of Artificial Sequence: Synthetic oligonucleotide
  Antisense strand to SEQ ID NO: 2165050
uucuuagacaagcucuugc

SEQ ID NO: 2165052 - RNA, 19 nt, Artificial Sequence
  Description of Artificial Sequence: Synthetic oligonucleotide
  Sense strand starting at position 2869 of SEQ ID NO: 1883031
gggaauaauugaguaguua

SEQ ID NO: 2165053 - RNA, 19 nt, Artificial Sequence
  Description of Artificial Sequence: Synthetic oligonucleotide
  Antisense strand to SEQ ID NO: 2165052
uaacuacucaauuauuccc

SEQ ID NO: 2165054 - RNA, 19 nt, Artificial Sequence
  Description of Artificial Sequence: Synthetic oligonucleotide
  Sense strand starting at position 2883 of SEQ ID NO: 1883031
aguuaaauucuauguggua

SEQ ID NO: 2165055 - RNA, 19 nt, Artificial Sequence
  Description of Artificial Sequence: Synthetic oligonucleotide
  Antisense strand to SEQ ID NO: 2165054
uaccacauagaauuuaacu

SEQ ID NO: 2165056 - RNA, 19 nt, Artificial Sequence
  Description of Artificial Sequence: Synthetic oligonucleotide
  Sense strand starting at position 2884 of SEQ ID NO: 1883031
guuaaauucuaugugguaa

SEQ ID NO: 2165057 - RNA, 19 nt, Artificial Sequence
  Description of Artificial Sequence: Synthetic oligonucleotide
  Antisense strand to SEQ ID NO: 2165056
uuaccacauagaauuuaac

SEQ ID NO: 2165058 - RNA, 19 nt, Artificial Sequence
  Description of Artificial Sequence: Synthetic oligonucleotide
  Sense strand starting at position 2947 of SEQ ID NO: 1883031
ucuaguguucuuuaaucug

SEQ ID NO: 2165059 - RNA, 19 nt, Artificial Sequence
  Description of Artificial Sequence: Synthetic oligonucleotide
  Antisense strand to SEQ ID NO: 2165058
cagauuaaagaacacuaga

SEQ ID NO: 2165060 - RNA, 19 nt, Artificial Sequence
  Description of Artificial Sequence: Synthetic oligonucleotide
  Sense strand starting at position 2950 of SEQ ID NO: 1883031
aguguucuuuaaucuguca

SEQ ID NO: 2165061 - RNA, 19 nt, Artificial Sequence
  Description of Artificial Sequence: Synthetic oligonucleotide
  Antisense strand to SEQ ID NO: 2165060
ugacagauuaaagaacacu

SEQ ID NO: 2165062 - RNA, 19 nt, Artificial Sequence
  Description of Artificial Sequence: Synthetic oligonucleotide
  Sense strand starting at position 3036 of SEQ ID NO: 1883031
guaacuaugcaucagcuaa

SEQ ID NO: 2165063 - RNA, 19 nt, Artificial Sequence
  Description of Artificial Sequence: Synthetic oligonucleotide
  Antisense strand to SEQ ID NO: 2165062
uuagcugaugcauaguuac

SEQ ID NO: 2165064 - RNA, 19 nt, Artificial Sequence
  Description of Artificial Sequence: Synthetic oligonucleotide
  Sense strand starting at position 3164 of SEQ ID NO: 1883031
gaggcauucuucucgauuu

SEQ ID NO: 2165065 - RNA, 19 nt, Artificial Sequence
  Description of Artificial Sequence: Synthetic oligonucleotide
  Antisense strand to SEQ ID NO: 2165064
aaaucgagaagaaugccuc

SEQ ID NO: 2165066 - RNA, 19 nt, Artificial Sequence
  Description of Artificial Sequence: Synthetic oligonucleotide
  Sense strand starting at position 3166 of SEQ ID NO: 1883031
ggcauucuucucgauuugu

SEQ ID NO: 2165067 - RNA, 19 nt, Artificial Sequence
  Description of Artificial Sequence: Synthetic oligonucleotide
  Antisense strand to SEQ ID NO: 2165066
acaaaucgagaagaaugcc

SEQ ID NO: 2165068 - RNA, 19 nt, Artificial Sequence
  Description of Artificial Sequence: Synthetic oligonucleotide
  Sense strand starting at position 3286 of SEQ ID NO: 1883031
gccugaacuguccaacuuu

SEQ ID NO: 2165069 - RNA, 19 nt, Artificial Sequence
  Description of Artificial Sequence: Synthetic oligonucleotide
  Antisense strand to SEQ ID NO: 2165068
aaaguuggacaguucaggc

SEQ ID NO: 2165070 - RNA, 19 nt, Artificial Sequence
  Description of Artificial Sequence: Synthetic oligonucleotide
  Sense strand starting at position 3370 of SEQ ID NO: 1883031
aacugauacgauuaccgua

SEQ ID NO: 2165071 - RNA, 19 nt, Artificial Sequence
  Description of Artificial Sequence: Synthetic oligonucleotide
  Antisense strand to SEQ ID NO: 2165070
uacgguaaucguaucaguu

SEQ ID NO: 2165072 - RNA, 19 nt, Artificial Sequence
  Description of Artificial Sequence: Synthetic oligonucleotide
  Sense strand starting at position 3637 of SEQ ID NO: 1883031
ucaugcuauaggugaugua

SEQ ID NO: 2165073 - RNA, 19 nt, Artificial Sequence
  Description of Artificial Sequence: Synthetic oligonucleotide
  Antisense strand to SEQ ID NO: 2165072
uacaucaccuauagcauga

SEQ ID NO: 2165074 - RNA, 19 nt, Artificial Sequence
  Description of Artificial Sequence: Synthetic oligonucleotide
  Sense strand starting at position 3638 of SEQ ID NO: 1883031
caugcuauaggugauguaa

SEQ ID NO: 2165075 - RNA, 19 nt, Artificial Sequence
  Description of Artificial Sequence: Synthetic oligonucleotide
  Antisense strand to SEQ ID NO: 2165074
uuacaucaccuauagcaug

SEQ ID NO: 2165076 - RNA, 19 nt, Artificial Sequence
  Description of Artificial Sequence: Synthetic oligonucleotide
  Sense strand starting at position 3668 of SEQ ID NO: 1883031
agaguuuaauagcuuccau

SEQ ID NO: 2165077 - RNA, 19 nt, Artificial Sequence
  Description of Artificial Sequence: Synthetic oligonucleotide
  Antisense strand to SEQ ID NO: 2165076
auggaagcuauuaaacucu

SEQ ID NO: 2165078 - RNA, 19 nt, Artificial Sequence
  Description of Artificial Sequence: Synthetic oligonucleotide
  Sense strand starting at position 3690 of SEQ ID NO: 1883031
gcaauaaaguuguuaacag

SEQ ID NO: 2165079 - RNA, 19 nt, Artificial Sequence
  Description of Artificial Sequence: Synthetic oligonucleotide
  Antisense strand to SEQ ID NO: 2165078
cuguuaacaacuuuauugc

SEQ ID NO: 2165080 - RNA, 19 nt, Artificial Sequence
  Description of Artificial Sequence: Synthetic oligonucleotide
  Sense strand starting at position 3698 of SEQ ID NO: 1883031
guuguuaacaguuggaucu

SEQ ID NO: 2165081 - RNA, 19 nt, Artificial Sequence
  Description of Artificial Sequence: Synthetic oligonucleotide
  Antisense strand to SEQ ID NO: 2165080
agauccaacuguuaacaac

SEQ ID NO: 2165082 - RNA, 19 nt, Artificial Sequence
  Description of Artificial Sequence: Synthetic oligonucleotide
  Sense strand starting at position 3699 of SEQ ID NO: 1883031
uuguuaacaguuggaucua

SEQ ID NO: 2165083 - RNA, 19 nt, Artificial Sequence
  Description of Artificial Sequence: Synthetic oligonucleotide
  Antisense strand to SEQ ID NO: 2165082
uagauccaacuguuaacaa

SEQ ID NO: 2165084 - RNA, 19 nt, Artificial Sequence
  Description of Artificial Sequence: Synthetic oligonucleotide
  Sense strand starting at position 3810 of SEQ ID NO: 1883031
aguagauaccuagguucua

SEQ ID NO: 2165085 - RNA, 19 nt, Artificial Sequence
  Description of Artificial Sequence: Synthetic oligonucleotide
  Antisense strand to SEQ ID NO: 2165084
uagaaccuagguaucuacu

SEQ ID NO: 2165086 - RNA, 19 nt, Artificial Sequence
  Description of Artificial Sequence: Synthetic oligonucleotide
  Sense strand starting at position 3811 of SEQ ID NO: 1883031
guagauaccuagguucuaa

SEQ ID NO: 2165087 - RNA, 19 nt, Artificial Sequence
  Description of Artificial Sequence: Synthetic oligonucleotide
  Antisense strand to SEQ ID NO: 2165086
uuagaaccuagguaucuac

SEQ ID NO: 2165088 - RNA, 19 nt, Artificial Sequence
  Description of Artificial Sequence: Synthetic oligonucleotide
  Sense strand starting at position 3823 of SEQ ID NO: 1883031
guucuaaaguuaguagcau

SEQ ID NO: 2165089 - RNA, 19 nt, Artificial Sequence
  Description of Artificial Sequence: Synthetic oligonucleotide
  Antisense strand to SEQ ID NO: 2165088
augcuacuaacuuuagaac

SEQ ID NO: 2165090 - RNA, 19 nt, Artificial Sequence
  Description of Artificial Sequence: Synthetic oligonucleotide
  Sense strand starting at position 3941 of SEQ ID NO: 1883031
guacuugggagaugcucaa

SEQ ID NO: 2165091 - RNA, 19 nt, Artificial Sequence
  Description of Artificial Sequence: Synthetic oligonucleotide
  Antisense strand to SEQ ID NO: 2165090
uugagcaucucccaaguac

SEQ ID NO: 2165092 - RNA, 19 nt, Artificial Sequence
  Description of Artificial Sequence: Synthetic oligonucleotide
  Sense strand starting at position 158 of SEQ ID NO: 1883032
agguguaacucacugaaca

SEQ ID NO: 2165093 - RNA, 19 nt, Artificial Sequence
  Description of Artificial Sequence: Synthetic oligonucleotide
  Antisense strand to SEQ ID NO: 2165092
uguucagugaguuacaccu

SEQ ID NO: 2165094 - RNA, 19 nt, Artificial Sequence
  Description of Artificial Sequence: Synthetic oligonucleotide
  Sense strand starting at position 159 of SEQ ID NO: 1883032
gguguaacucacugaacaa

SEQ ID NO: 2165095 - RNA, 19 nt, Artificial Sequence
  Description of Artificial Sequence: Synthetic oligonucleotide
  Antisense strand to SEQ ID NO: 2165094
uuguucagugaguuacacc

SEQ ID NO: 2165096 - RNA, 19 nt, Artificial Sequence
  Description of Artificial Sequence: Synthetic oligonucleotide
  Sense strand starting at position 228 of SEQ ID NO: 1883032
ucaagaggcucccuaaauc

SEQ ID NO: 2165097 - RNA, 19 nt, Artificial Sequence
  Description of Artificial Sequence: Synthetic oligonucleotide
  Antisense strand to SEQ ID NO: 2165096
gauuuagggagccucuuga

SEQ ID NO: 2165098 - RNA, 19 nt, Artificial Sequence
  Description of Artificial Sequence: Synthetic oligonucleotide
  Sense strand starting at position 318 of SEQ ID NO: 1883032
aacaguuugcuaggugacu

SEQ ID NO: 2165099 - RNA, 19 nt, Artificial Sequence
  Description of Artificial Sequence: Synthetic oligonucleotide
  Antisense strand to SEQ ID NO: 2165098
agucaccuagcaaacuguu

SEQ ID NO: 2165100 - RNA, 19 nt, Artificial Sequence
  Description of Artificial Sequence: Synthetic oligonucleotide
  Sense strand starting at position 339 of SEQ ID NO: 1883032
ucaauaagauuaguuagcu

SEQ ID NO: 2165101 - RNA, 19 nt, Artificial Sequence
  Description of Artificial Sequence: Synthetic oligonucleotide
  Antisense strand to SEQ ID NO: 2165100
agcuaacuaaucuuauuga

SEQ ID NO: 2165102 - RNA, 19 nt, Artificial Sequence
  Description of Artificial Sequence: Synthetic oligonucleotide
  Sense strand starting at position 490 of SEQ ID NO: 1883032
uuugaaugcugcucuuaag

SEQ ID NO: 2165103 - RNA, 19 nt, Artificial Sequence
  Description of Artificial Sequence: Synthetic oligonucleotide
  Antisense strand to SEQ ID NO: 2165102
cuuaagagcagcauucaaa

SEQ ID NO: 2165104 - RNA, 19 nt, Artificial Sequence
  Description of Artificial Sequence: Synthetic oligonucleotide
  Sense strand starting at position 888 of SEQ ID NO: 1883032
gacugaagggugugagacu

SEQ ID NO: 2165105 - RNA, 19 nt, Artificial Sequence
  Description of Artificial Sequence: Synthetic oligonucleotide
  Antisense strand to SEQ ID NO: 2165104
agucucacacccuucaguc

SEQ ID NO: 2165106 - RNA, 19 nt, Artificial Sequence
  Description of Artificial Sequence: Synthetic oligonucleotide
  Sense strand starting at position 1031 of SEQ ID NO: 1883032
uguuccuuugaccagaguu

SEQ ID NO: 2165107 - RNA, 19 nt, Artificial Sequence
  Description of Artificial Sequence: Synthetic oligonucleotide
  Antisense strand to SEQ ID NO: 2165106
aacucuggucaaaggaaca

SEQ ID NO: 2165108 - RNA, 19 nt, Artificial Sequence
  Description of Artificial Sequence: Synthetic oligonucleotide
  Sense strand starting at position 1041 of SEQ ID NO: 1883032
accagaguuccugagcacu

SEQ ID NO: 2165109 - RNA, 19 nt, Artificial Sequence
  Description of Artificial Sequence: Synthetic oligonucleotide
  Antisense strand to SEQ ID NO: 2165108
agugcucaggaacucuggu

SEQ ID NO: 2165110 - RNA, 19 nt, Artificial Sequence
  Description of Artificial Sequence: Synthetic oligonucleotide
  Sense strand starting at position 1043 of SEQ ID NO: 1883032
cagaguuccugagcacuga

SEQ ID NO: 2165111 - RNA, 19 nt, Artificial Sequence
  Description of Artificial Sequence: Synthetic oligonucleotide
  Antisense strand to SEQ ID NO: 2165110
ucagugcucaggaacucug

SEQ ID NO: 2165112 - RNA, 19 nt, Artificial Sequence
  Description of Artificial Sequence: Synthetic oligonucleotide
  Sense strand starting at position 1044 of SEQ ID NO: 1883032
agaguuccugagcacugaa

SEQ ID NO: 2165113 - RNA, 19 nt, Artificial Sequence
  Description of Artificial Sequence: Synthetic oligonucleotide
  Antisense strand to SEQ ID NO: 2165112
uucagugcucaggaacucu

SEQ ID NO: 2165114 - RNA, 19 nt, Artificial Sequence
  Description of Artificial Sequence: Synthetic oligonucleotide
  Sense strand starting at position 1223 of SEQ ID NO: 1883032
gacaaacaugucuauuggu

SEQ ID NO: 2165115 - RNA, 19 nt, Artificial Sequence
  Description of Artificial Sequence: Synthetic oligonucleotide
  Antisense strand to SEQ ID NO: 2165114
accaauagacauguuuguc

SEQ ID NO: 2165116 - RNA, 19 nt, Artificial Sequence
  Description of Artificial Sequence: Synthetic oligonucleotide
  Sense strand starting at position 1279 of SEQ ID NO: 1883032
gcuguaggcuacucaugaa

SEQ ID NO: 2165117 - RNA, 19 nt, Artificial Sequence
  Description of Artificial Sequence: Synthetic oligonucleotide
  Antisense strand to SEQ ID NO: 2165116
uucaugaguagccuacagc

SEQ ID NO: 2165118 - RNA, 19 nt, Artificial Sequence
  Description of Artificial Sequence: Synthetic oligonucleotide
  Sense strand starting at position 1337 of SEQ ID NO: 1883032
augaauagugaagguuuaa

SEQ ID NO: 2165119 - RNA, 19 nt, Artificial Sequence
  Description of Artificial Sequence: Synthetic oligonucleotide
  Antisense strand to SEQ ID NO: 2165118
uuaaaccuucacuauucau

SEQ ID NO: 2165120 - RNA, 19 nt, Artificial Sequence
  Description of Artificial Sequence: Synthetic oligonucleotide
  Sense strand starting at position 2120 of SEQ ID NO: 1883032
uuugccaauuuguuaaagu

SEQ ID NO: 2165121 - RNA, 19 nt, Artificial Sequence
  Description of Artificial Sequence: Synthetic oligonucleotide
  Antisense strand to SEQ ID NO: 2165120
acuuuaacaaauuggcaaa

SEQ ID NO: 2165122 - RNA, 19 nt, Artificial Sequence
  Description of Artificial Sequence: Synthetic oligonucleotide
  Sense strand starting at position 2169 of SEQ ID NO: 1883032
aaaguauguggcuaguaac

SEQ ID NO: 2165123 - RNA, 19 nt, Artificial Sequence
  Description of Artificial Sequence: Synthetic oligonucleotide
  Antisense strand to SEQ ID NO: 2165122
guuacuagccacauacuuu

SEQ ID NO: 2165124 - RNA, 19 nt, Artificial Sequence
  Description of Artificial Sequence: Synthetic oligonucleotide
  Sense strand starting at position 2181 of SEQ ID NO: 1883032
uaguaacgagucuaguaau

SEQ ID NO: 2165125 - RNA, 19 nt, Artificial Sequence
  Description of Artificial Sequence: Synthetic oligonucleotide
  Antisense strand to SEQ ID NO: 2165124
auuacuagacucguuacua

SEQ ID NO: 2165126 - RNA, 19 nt, Artificial Sequence
  Description of Artificial Sequence: Synthetic oligonucleotide
  Sense strand starting at position 2220 of SEQ ID NO: 1883032
uacgguauucucuaguacu

SEQ ID NO: 2165127 - RNA, 19 nt, Artificial Sequence
  Description of Artificial Sequence: Synthetic oligonucleotide
  Antisense strand to SEQ ID NO: 2165126
aguacuagagaauaccgua

SEQ ID NO: 2165128 - RNA, 19 nt, Artificial Sequence
  Description of Artificial Sequence: Synthetic oligonucleotide
  Sense strand starting at position 2236 of SEQ ID NO: 1883032
acugaauauuugcaacaug

SEQ ID NO: 2165129 - RNA, 19 nt, Artificial Sequence
  Description of Artificial Sequence: Synthetic oligonucleotide
  Antisense strand to SEQ ID NO: 2165128
cauguugcaaauauucagu

SEQ ID NO: 2165130 - RNA, 19 nt, Artificial Sequence
  Description of Artificial Sequence: Synthetic oligonucleotide
  Sense strand starting at position 2336 of SEQ ID NO: 1883032
gccugaccuuccuucggaa

SEQ ID NO: 2165131 - RNA, 19 nt, Artificial Sequence
  Description of Artificial Sequence: Synthetic oligonucleotide
  Antisense strand to SEQ ID NO: 2165130
uuccgaaggaaggucaggc

SEQ ID NO: 2165132 - RNA, 19 nt, Artificial Sequence
  Description of Artificial Sequence: Synthetic oligonucleotide
  Sense strand starting at position 2399 of SEQ ID NO: 1883032
auugaauagucaccguuga

SEQ ID NO: 2165133 - RNA, 19 nt, Artificial Sequence
  Description of Artificial Sequence: Synthetic oligonucleotide
  Antisense strand to SEQ ID NO: 2165132
ucaacggugacuauucaau

SEQ ID NO: 2165134 - RNA, 19 nt, Artificial Sequence
  Description of Artificial Sequence: Synthetic oligonucleotide
  Sense strand starting at position 2400 of SEQ ID NO: 1883032
uugaauagucaccguugaa

SEQ ID NO: 2165135 - RNA, 19 nt, Artificial Sequence
  Description of Artificial Sequence: Synthetic oligonucleotide
  Antisense strand to SEQ ID NO: 2165134
uucaacggugacuauucaa

SEQ ID NO: 2165136 - RNA, 19 nt, Artificial Sequence
  Description of Artificial Sequence: Synthetic oligonucleotide
  Sense strand starting at position 2403 of SEQ ID NO: 1883032
aauagucaccguugaauag

SEQ ID NO: 2165137 - RNA, 19 nt, Artificial Sequence
  Description of Artificial Sequence: Synthetic oligonucleotide
  Antisense strand to SEQ ID NO: 2165136
cuauucaacggugacuauu

SEQ ID NO: 2165138 - RNA, 19 nt, Artificial Sequence
  Description of Artificial Sequence: Synthetic oligonucleotide
  Sense strand starting at position 2556 of SEQ ID NO: 1883032
ggagcuuccuucucuggga

SEQ ID NO: 2165139 - RNA, 19 nt, Artificial Sequence
  Description of Artificial Sequence: Synthetic oligonucleotide
  Antisense strand to SEQ ID NO: 2165138
ucccagagaaggaagcucc

SEQ ID NO: 2165140 - RNA, 19 nt, Artificial Sequence
  Description of Artificial Sequence: Synthetic oligonucleotide
  Sense strand starting at position 2557 of SEQ ID NO: 1883032
gagcuuccuucucugggaa

SEQ ID NO: 2165141 - RNA, 19 nt, Artificial Sequence
  Description of Artificial Sequence: Synthetic oligonucleotide
  Antisense strand to SEQ ID NO: 2165140
uucccagagaaggaagcuc

SEQ ID NO: 2165142 - RNA, 19 nt, Artificial Sequence
  Description of Artificial Sequence: Synthetic oligonucleotide
  Sense strand starting at position 2718 of SEQ ID NO: 1883032
cagagauccugacuggcau

SEQ ID NO: 2165143 - RNA, 19 nt, Artificial Sequence
  Description of Artificial Sequence: Synthetic oligonucleotide
  Antisense strand to SEQ ID NO: 2165142
augccagucaggaucucug

SEQ ID NO: 2165144 - RNA, 19 nt, Artificial Sequence
  Description of Artificial Sequence: Synthetic oligonucleotide
  Sense strand starting at position 2908 of SEQ ID NO: 1883032
ucaaguuuauggcccauua

SEQ ID NO: 2165145 - RNA, 19 nt, Artificial Sequence
  Description of Artificial Sequence: Synthetic oligonucleotide
  Antisense strand to SEQ ID NO: 2165144
uaaugggccauaaacuuga

SEQ ID NO: 2165146 - RNA, 19 nt, Artificial Sequence
  Description of Artificial Sequence: Synthetic oligonucleotide
  Sense strand starting at position 2958 of SEQ ID NO: 1883032
ugcggaacuaaucaguuau

SEQ ID NO: 2165147 - RNA, 19 nt, Artificial Sequence
  Description of Artificial Sequence: Synthetic oligonucleotide
  Antisense strand to SEQ ID NO: 2165146
auaacugauuaguuccgca

SEQ ID NO: 2165148 - RNA, 19 nt, Artificial Sequence
  Description of Artificial Sequence: Synthetic oligonucleotide
  Sense strand starting at position 2960 of SEQ ID NO: 1883032
cggaacuaaucaguuaucu

SEQ ID NO: 2165149 - RNA, 19 nt, Artificial Sequence
  Description of Artificial Sequence: Synthetic oligonucleotide
  Antisense strand to SEQ ID NO: 2165148
agauaacugauuaguuccg

SEQ ID NO: 2165150 - RNA, 19 nt, Artificial Sequence
  Description of Artificial Sequence: Synthetic oligonucleotide
  Sense strand starting at position 2996 of SEQ ID NO: 1883032
gggcuagcauuugugaauu

SEQ ID NO: 2165151 - RNA, 19 nt, Artificial Sequence
  Description of Artificial Sequence: Synthetic oligonucleotide
  Antisense strand to SEQ ID NO: 2165150
aauucacaaaugcuagccc

SEQ ID NO: 2165152 - RNA, 19 nt, Artificial Sequence
  Description of Artificial Sequence: Synthetic oligonucleotide
  Sense strand starting at position 3069 of SEQ ID NO: 1883032
acugaucagugcuuugaau

SEQ ID NO: 2165153 - RNA, 19 nt, Artificial Sequence
  Description of Artificial Sequence: Synthetic oligonucleotide
  Antisense strand to SEQ ID NO: 2165152
auucaaagcacugaucagu

SEQ ID NO: 2165154 - RNA, 19 nt, Artificial Sequence
  Description of Artificial Sequence: Synthetic oligonucleotide
  Sense strand starting at position 3168 of SEQ ID NO: 1883032
auucuuugcucagugaaca

SEQ ID NO: 2165155 - RNA, 19 nt, Artificial Sequence
  Description of Artificial Sequence: Synthetic oligonucleotide
  Antisense strand to SEQ ID NO: 2165154
uguucacugagcaaagaau

SEQ ID NO: 2165156 - RNA, 19 nt, Artificial Sequence
  Description of Artificial Sequence: Synthetic oligonucleotide
  Sense strand starting at position 3289 of SEQ ID NO: 1883032
uuccauacucaggguuaau

SEQ ID NO: 2165157 - RNA, 19 nt, Artificial Sequence
  Description of Artificial Sequence: Synthetic oligonucleotide
  Antisense strand to SEQ ID NO: 2165156
auuaacccugaguauggaa

SEQ ID NO: 2165158 - RNA, 19 nt, Artificial Sequence
  Description of Artificial Sequence: Synthetic oligonucleotide
  Sense strand starting at position 3429 of SEQ ID NO: 1883032
aagagacauuuguagagga

SEQ ID NO: 2165159 - RNA, 19 nt, Artificial Sequence
  Description of Artificial Sequence: Synthetic oligonucleotide
  Antisense strand to SEQ ID NO: 2165158
uccucuacaaaugucucuu

SEQ ID NO: 2165160 - RNA, 19 nt, Artificial Sequence
  Description of Artificial Sequence: Synthetic oligonucleotide
  Sense strand starting at position 3494 of SEQ ID NO: 1883032
uaagaucuaggcuaauguu

SEQ ID NO: 2165161 - RNA, 19 nt, Artificial Sequence
  Description of Artificial Sequence: Synthetic oligonucleotide
  Antisense strand to SEQ ID NO: 2165160
aacauuagccuagaucuua

SEQ ID NO: 2165162 - RNA, 19 nt, Artificial Sequence
  Description of Artificial Sequence: Synthetic oligonucleotide
  Sense strand starting at position 3528 of SEQ ID NO: 1883032
agguacuuuccacaaguca

SEQ ID NO: 2165163 - RNA, 19 nt, Artificial Sequence
  Description of Artificial Sequence: Synthetic oligonucleotide
  Antisense strand to SEQ ID NO: 2165162
ugacuuguggaaaguaccu

SEQ ID NO: 2165164 - RNA, 19 nt, Artificial Sequence
  Description of Artificial Sequence: Synthetic oligonucleotide
  Sense strand starting at position 3586 of SEQ ID NO: 1883032
acggucuaaucuuucuaaa

SEQ ID NO: 2165165 - RNA, 19 nt, Artificial Sequence
  Description of Artificial Sequence: Synthetic oligonucleotide
  Antisense strand to SEQ ID NO: 2165164
uuuagaaagauuagaccgu

SEQ ID NO: 2165166 - RNA, 19 nt, Artificial Sequence
  Description of Artificial Sequence: Synthetic oligonucleotide
  Sense strand starting at position 3614 of SEQ ID NO: 1883032
caguucuuugaaggcaaga

SEQ ID NO: 2165167 - RNA, 19 nt, Artificial Sequence
  Description of Artificial Sequence: Synthetic oligonucleotide
  Antisense strand to SEQ ID NO: 2165166
ucuugccuucaaagaacug

SEQ ID NO: 2165168 - RNA, 19 nt, Artificial Sequence
  Description of Artificial Sequence: Synthetic oligonucleotide
  Sense strand starting at position 3616 of SEQ ID NO: 1883032
guucuuugaaggcaagaau

SEQ ID NO: 2165169 - RNA, 19 nt, Artificial Sequence
  Description of Artificial Sequence: Synthetic oligonucleotide
  Antisense strand to SEQ ID NO: 2165168
auucuugccuucaaagaac

SEQ ID NO: 2165170 - RNA, 19 nt, Artificial Sequence
  Description of Artificial Sequence: Synthetic oligonucleotide
  Sense strand starting at position 3657 of SEQ ID NO: 1883032
ucuuguacccaaggauuau

SEQ ID NO: 2165171 - RNA, 19 nt, Artificial Sequence
  Description of Artificial Sequence: Synthetic oligonucleotide
  Antisense strand to SEQ ID NO: 2165170
auaauccuuggguacaaga

SEQ ID NO: 2165172 - RNA, 19 nt, Artificial Sequence
  Description of Artificial Sequence: Synthetic oligonucleotide
  Sense strand starting at position 113 of SEQ ID NO: 1883033
gugguuccaucagauucua

SEQ ID NO: 2165173 - RNA, 19 nt, Artificial Sequence
  Description of Artificial Sequence: Synthetic oligonucleotide
  Antisense strand to SEQ ID NO: 2165172
uagaaucugauggaaccac

SEQ ID NO: 2165174 - RNA, 19 nt, Artificial Sequence
  Description of Artificial Sequence: Synthetic oligonucleotide
  Sense strand starting at position 541 of SEQ ID NO: 1883033
aguuauagauuucuucguu

SEQ ID NO: 2165175 - RNA, 19 nt, Artificial Sequence
  Description of Artificial Sequence: Synthetic oligonucleotide
  Antisense strand to SEQ ID NO: 2165174
aacgaagaaaucuauaacu

SEQ ID NO: 2165176 - RNA, 19 nt, Artificial Sequence
  Description of Artificial Sequence: Synthetic oligonucleotide
  Sense strand starting at position 542 of SEQ ID NO: 1883033
guuauagauuucuucguuc

SEQ ID NO: 2165177 - RNA, 19 nt, Artificial Sequence
  Description of Artificial Sequence: Synthetic oligonucleotide
  Antisense strand to SEQ ID NO: 2165176
gaacgaagaaaucuauaac

SEQ ID NO: 2165178 - RNA, 19 nt, Artificial Sequence
  Description of Artificial Sequence: Synthetic oligonucleotide
  Sense strand starting at position 545 of SEQ ID NO: 1883033
auagauuucuucguuccuu

SEQ ID NO: 2165179 - RNA, 19 nt, Artificial Sequence
  Description of Artificial Sequence: Synthetic oligonucleotide
  Antisense strand to SEQ ID NO: 2165178
aaggaacgaagaaaucuau

SEQ ID NO: 2165180 - RNA, 19 nt, Artificial Sequence
  Description of Artificial Sequence: Synthetic oligonucleotide
  Sense strand starting at position 580 of SEQ ID NO: 1883033
ucacuugauuagccaggaa

SEQ ID NO: 2165181 - RNA, 19 nt, Artificial Sequence
  Description of Artificial Sequence: Synthetic oligonucleotide
  Antisense strand to SEQ ID NO: 2165180
uuccuggcuaaucaaguga

SEQ ID NO: 2165182 - RNA, 19 nt, Artificial Sequence
  Description of Artificial Sequence: Synthetic oligonucleotide
  Sense strand starting at position 583 of SEQ ID NO: 1883033
cuugauuagccaggaagga

SEQ ID NO: 2165183 - RNA, 19 nt, Artificial Sequence
  Description of Artificial Sequence: Synthetic oligonucleotide
  Antisense strand to SEQ ID NO: 2165182
uccuuccuggcuaaucaag

SEQ ID NO: 2165184 - RNA, 19 nt, Artificial Sequence
  Description of Artificial Sequence: Synthetic oligonucleotide
  Sense strand starting at position 826 of SEQ ID NO: 1883033
ggguauaaauauguguuga

SEQ ID NO: 2165185 - RNA, 19 nt, Artificial Sequence
  Description of Artificial Sequence: Synthetic oligonucleotide
  Antisense strand to SEQ ID NO: 2165184
ucaacacauauuuauaccc

SEQ ID NO: 2165186 - RNA, 19 nt, Artificial Sequence
  Description of Artificial Sequence: Synthetic oligonucleotide
  Sense strand starting at position 827 of SEQ ID NO: 1883033
gguauaaauauguguugaa

SEQ ID NO: 2165187 - RNA, 19 nt, Artificial Sequence
  Description of Artificial Sequence: Synthetic oligonucleotide
  Antisense strand to SEQ ID NO: 2165186
uucaacacauauuuauacc

SEQ ID NO: 2165188 - RNA, 19 nt, Artificial Sequence
  Description of Artificial Sequence: Synthetic oligonucleotide
  Sense strand starting at position 903 of SEQ ID NO: 1883033
gagagacuuguaggcuuga

SEQ ID NO: 2165189 - RNA, 19 nt, Artificial Sequence
  Description of Artificial Sequence: Synthetic oligonucleotide
  Antisense strand to SEQ ID NO: 2165188
ucaagccuacaagucucuc

SEQ ID NO: 2165190 - RNA, 19 nt, Artificial Sequence
  Description of Artificial Sequence: Synthetic oligonucleotide
  Sense strand starting at position 904 of SEQ ID NO: 1883033
agagacuuguaggcuugaa

SEQ ID NO: 2165191 - RNA, 19 nt, Artificial Sequence
  Description of Artificial Sequence: Synthetic oligonucleotide
  Antisense strand to SEQ ID NO: 2165190
uucaagccuacaagucucu

SEQ ID NO: 2165192 - RNA, 19 nt, Artificial Sequence
  Description of Artificial Sequence: Synthetic oligonucleotide
  Sense strand starting at position 908 of SEQ ID NO: 1883033
acuuguaggcuugaaacaa

SEQ ID NO: 2165193 - RNA, 19 nt, Artificial Sequence
  Description of Artificial Sequence: Synthetic oligonucleotide
  Antisense strand to SEQ ID NO: 2165192
uuguuucaagccuacaagu

SEQ ID NO: 2165194 - RNA, 19 nt, Artificial Sequence
  Description of Artificial Sequence: Synthetic oligonucleotide
  Sense strand starting at position 2001 of SEQ ID NO: 1883033
gcacauucgugucuuuaca

SEQ ID NO: 2165195 - RNA, 19 nt, Artificial Sequence
  Description of Artificial Sequence: Synthetic oligonucleotide
  Antisense strand to SEQ ID NO: 2165194
uguaaagacacgaaugugc

SEQ ID NO: 2165196 - RNA, 19 nt, Artificial Sequence
  Description of Artificial Sequence: Synthetic oligonucleotide
  Sense strand starting at position 2003 of SEQ ID NO: 1883033
acauucgugucuuuacaga

SEQ ID NO: 2165197 - RNA, 19 nt, Artificial Sequence
  Description of Artificial Sequence: Synthetic oligonucleotide
  Antisense strand to SEQ ID NO: 2165196
ucuguaaagacacgaaugu

SEQ ID NO: 2165198 - RNA, 19 nt, Artificial Sequence
  Description of Artificial Sequence: Synthetic oligonucleotide
  Sense strand starting at position 2048 of SEQ ID NO: 1883033
uuuacaaucuagggauuau

SEQ ID NO: 2165199 - RNA, 19 nt, Artificial Sequence
  Description of Artificial Sequence: Synthetic oligonucleotide
  Antisense strand to SEQ ID NO: 2165198
auaaucccuagauuguaaa

SEQ ID NO: 2165200 - RNA, 19 nt, Artificial Sequence
  Description of Artificial Sequence: Synthetic oligonucleotide
  Sense strand starting at position 2080 of SEQ ID NO: 1883033
uguuguuguuagcuaauua

SEQ ID NO: 2165201 - RNA, 19 nt, Artificial Sequence
  Description of Artificial Sequence: Synthetic oligonucleotide
  Antisense strand to SEQ ID NO: 2165200
uaauuagcuaacaacaaca

SEQ ID NO: 2165202 - RNA, 19 nt, Artificial Sequence
  Description of Artificial Sequence: Synthetic oligonucleotide
  Sense strand starting at position 2081 of SEQ ID NO: 1883033
guuguuguuagcuaauuag

SEQ ID NO: 2165203 - RNA, 19 nt, Artificial Sequence
  Description of Artificial Sequence: Synthetic oligonucleotide
  Antisense strand to SEQ ID NO: 2165202
cuaauuagcuaacaacaac

SEQ ID NO: 2165204 - RNA, 19 nt, Artificial Sequence
  Description of Artificial Sequence: Synthetic oligonucleotide
  Sense strand starting at position 2209 of SEQ ID NO: 1883033
ugguguugugucucuguaa

SEQ ID NO: 2165205 - RNA, 19 nt, Artificial Sequence
  Description of Artificial Sequence: Synthetic oligonucleotide
  Antisense strand to SEQ ID NO: 2165204
uuacagagacacaacacca

SEQ ID NO: 2165206 - RNA, 19 nt, Artificial Sequence
  Description of Artificial Sequence: Synthetic oligonucleotide
  Sense strand starting at position 2210 of SEQ ID NO: 1883033
gguguugugucucuguaau

SEQ ID NO: 2165207 - RNA, 19 nt, Artificial Sequence
  Description of Artificial Sequence: Synthetic oligonucleotide
  Antisense strand to SEQ ID NO: 2165206
auuacagagacacaacacc

SEQ ID NO: 2165208 - RNA, 19 nt, Artificial Sequence
  Description of Artificial Sequence: Synthetic oligonucleotide
  Sense strand starting at position 2389 of SEQ ID NO: 1883033
gugaaauaaguuuaccgua

SEQ ID NO: 2165209 - RNA, 19 nt, Artificial Sequence
  Description of Artificial Sequence: Synthetic oligonucleotide
  Antisense strand to SEQ ID NO: 2165208
uacgguaaacuuauuucac

SEQ ID NO: 2165210 - RNA, 19 nt, Artificial Sequence
  Description of Artificial Sequence: Synthetic oligonucleotide
  Sense strand starting at position 2391 of SEQ ID NO: 1883033
gaaauaaguuuaccguaac

SEQ ID NO: 2165211 - RNA, 19 nt, Artificial Sequence
  Description of Artificial Sequence: Synthetic oligonucleotide
  Antisense strand to SEQ ID NO: 2165210
guuacgguaaacuuauuuc

SEQ ID NO: 2165212 - RNA, 19 nt, Artificial Sequence
  Description of Artificial Sequence: Synthetic oligonucleotide
  Sense strand starting at position 2394 of SEQ ID NO: 1883033
auaaguuuaccguaacuuc

SEQ ID NO: 2165213 - RNA, 19 nt, Artificial Sequence
  Description of Artificial Sequence: Synthetic oligonucleotide
  Antisense strand to SEQ ID NO: 2165212
gaaguuacgguaaacuuau

SEQ ID NO: 2165214 - RNA, 19 nt, Artificial Sequence
  Description of Artificial Sequence: Synthetic oligonucleotide
  Sense strand starting at position 2402 of SEQ ID NO: 1883033
accguaacuuccuagaauu

SEQ ID NO: 2165215 - RNA, 19 nt, Artificial Sequence
  Description of Artificial Sequence: Synthetic oligonucleotide
  Antisense strand to SEQ ID NO: 2165214
aauucuaggaaguuacggu

SEQ ID NO: 2165216 - RNA, 19 nt, Artificial Sequence
  Description of Artificial Sequence: Synthetic oligonucleotide
  Sense strand starting at position 2437 of SEQ ID NO: 1883033
ugagaucacgccuguaauc

SEQ ID NO: 2165217 - RNA, 19 nt, Artificial Sequence
  Description of Artificial Sequence: Synthetic oligonucleotide
  Antisense strand to SEQ ID NO: 2165216
gauuacaggcgugaucuca

SEQ ID NO: 2165218 - RNA, 19 nt, Artificial Sequence
  Description of Artificial Sequence: Synthetic oligonucleotide
  Sense strand starting at position 2738 of SEQ ID NO: 1883033
aagggaguuucguucuugu

SEQ ID NO: 2165219 - RNA, 19 nt, Artificial Sequence
  Description of Artificial Sequence: Synthetic oligonucleotide
  Antisense strand to SEQ ID NO: 2165218
acaagaacgaaacucccuu

SEQ ID NO: 2165220 - RNA, 19 nt, Artificial Sequence
  Description of Artificial Sequence: Synthetic oligonucleotide
  Sense strand starting at position 2912 of SEQ ID NO: 1883033
uucugcaauguuggucaga

SEQ ID NO: 2165221 - RNA, 19 nt, Artificial Sequence
  Description of Artificial Sequence: Synthetic oligonucleotide
  Antisense strand to SEQ ID NO: 2165220
ucugaccaacauugcagaa

SEQ ID NO: 2165222 - RNA, 19 nt, Artificial Sequence
  Description of Artificial Sequence: Synthetic oligonucleotide
  Sense strand starting at position 2914 of SEQ ID NO: 1883033
cugcaauguuggucagacu

SEQ ID NO: 2165223 - RNA, 19 nt, Artificial Sequence
  Description of Artificial Sequence: Synthetic oligonucleotide
  Antisense strand to SEQ ID NO: 2165222
agucugaccaacauugcag

SEQ ID NO: 2165224 - RNA, 19 nt, Artificial Sequence
  Description of Artificial Sequence: Synthetic oligonucleotide
  Sense strand starting at position 3160 of SEQ ID NO: 1883033
gcauaaugauaugcauaua

SEQ ID NO: 2165225 - RNA, 19 nt, Artificial Sequence
  Description of Artificial Sequence: Synthetic oligonucleotide
  Antisense strand to SEQ ID NO: 2165224
uauaugcauaucauuaugc

SEQ ID NO: 2165226 - RNA, 19 nt, Artificial Sequence
  Description of Artificial Sequence: Synthetic oligonucleotide
  Sense strand starting at position 3163 of SEQ ID NO: 1883033
uaaugauaugcauauacgu

SEQ ID NO: 2165227 - RNA, 19 nt, Artificial Sequence
  Description of Artificial Sequence: Synthetic oligonucleotide
  Antisense strand to SEQ ID NO: 2165226
acguauaugcauaucauua

SEQ ID NO: 2165228 - RNA, 19 nt, Artificial Sequence
  Description of Artificial Sequence: Synthetic oligonucleotide
  Sense strand starting at position 3171 of SEQ ID NO: 1883033
ugcauauacguauauuaca

SEQ ID NO: 2165229 - RNA, 19 nt, Artificial Sequence
  Description of Artificial Sequence: Synthetic oligonucleotide
  Antisense strand to SEQ ID NO: 2165228
uguaauauacguauaugca

SEQ ID NO: 2165230 - RNA, 19 nt, Artificial Sequence
  Description of Artificial Sequence: Synthetic oligonucleotide
  Sense strand starting at position 3202 of SEQ ID NO: 1883033
acaugcauauacguauauu

SEQ ID NO: 2165231 - RNA, 19 nt, Artificial Sequence
  Description of Artificial Sequence: Synthetic oligonucleotide
  Antisense strand to SEQ ID NO: 2165230
aauauacguauaugcaugu

SEQ ID NO: 2165232 - RNA, 19 nt, Artificial Sequence
  Description of Artificial Sequence: Synthetic oligonucleotide
  Sense strand starting at position 3417 of SEQ ID NO: 1883033
cguauauaccuauaauacg

SEQ ID NO: 2165233 - RNA, 19 nt, Artificial Sequence
  Description of Artificial Sequence: Synthetic oligonucleotide
  Antisense strand to SEQ ID NO: 2165232
cguauuauagguauauacg

SEQ ID NO: 2165234 - RNA, 19 nt, Artificial Sequence
  Description of Artificial Sequence: Synthetic oligonucleotide
  Sense strand starting at position 3426 of SEQ ID NO: 1883033
cuauaauacguauauacgu

SEQ ID NO: 2165235 - RNA, 19 nt, Artificial Sequence
  Description of Artificial Sequence: Synthetic oligonucleotide
  Antisense strand to SEQ ID NO: 2165234
acguauauacguauuauag

SEQ ID NO: 2165236 - RNA, 19 nt, Artificial Sequence
  Description of Artificial Sequence: Synthetic oligonucleotide
  Sense strand starting at position 3449 of SEQ ID NO: 1883033
guauauacguauuauaggu

SEQ ID NO: 2165237 - RNA, 19 nt, Artificial Sequence
  Description of Artificial Sequence: Synthetic oligonucleotide
  Antisense strand to SEQ ID NO: 2165236
accuauaauacguauauac

SEQ ID NO: 2165238 - RNA, 19 nt, Artificial Sequence
  Description of Artificial Sequence: Synthetic oligonucleotide
  Sense strand starting at position 3457 of SEQ ID NO: 1883033
guauuauagguauauacgu

SEQ ID NO: 2165239 - RNA, 19 nt, Artificial Sequence
  Description of Artificial Sequence: Synthetic oligonucleotide
  Antisense strand to SEQ ID NO: 2165238
acguauauaccuauaauac

SEQ ID NO: 2165240 - RNA, 19 nt, Artificial Sequence
  Description of Artificial Sequence: Synthetic oligonucleotide
  Sense strand starting at position 3465 of SEQ ID NO: 1883033
gguauauacguauauacgu

SEQ ID NO: 2165241 - RNA, 19 nt, Artificial Sequence
  Description of Artificial Sequence: Synthetic oligonucleotide
  Antisense strand to SEQ ID NO: 2165240
acguauauacguauauacc

SEQ ID NO: 2165242 - RNA, 19 nt, Artificial Sequence
  Description of Artificial Sequence: Synthetic oligonucleotide
  Sense strand starting at position 3487 of SEQ ID NO: 1883033
auagguauauaagugugua

SEQ ID NO: 2165243 - RNA, 19 nt, Artificial Sequence
  Description of Artificial Sequence: Synthetic oligonucleotide
  Antisense strand to SEQ ID NO: 2165242
uacacacuuauauaccuau

SEQ ID NO: 2165244 - RNA, 19 nt, Artificial Sequence
  Description of Artificial Sequence: Synthetic oligonucleotide
  Sense strand starting at position 3490 of SEQ ID NO: 1883033
gguauauaaguguguauau

SEQ ID NO: 2165245 - RNA, 19 nt, Artificial Sequence
  Description of Artificial Sequence: Synthetic oligonucleotide
  Antisense strand to SEQ ID NO: 2165244
auauacacacuuauauacc

SEQ ID NO: 2165246 - RNA, 19 nt, Artificial Sequence
  Description of Artificial Sequence: Synthetic oligonucleotide
  Sense strand starting at position 3794 of SEQ ID NO: 1883033
agccuuaacucaguauaug

SEQ ID NO: 2165247 - RNA, 19 nt, Artificial Sequence
  Description of Artificial Sequence: Synthetic oligonucleotide
  Antisense strand to SEQ ID NO: 2165246
cauauacugaguuaaggcu

SEQ ID NO: 2165248 - RNA, 19 nt, Artificial Sequence
  Description of Artificial Sequence: Synthetic oligonucleotide
  Sense strand starting at position 3795 of SEQ ID NO: 1883033
gccuuaacucaguauaugu

SEQ ID NO: 2165249 - RNA, 19 nt, Artificial Sequence
  Description of Artificial Sequence: Synthetic oligonucleotide
  Antisense strand to SEQ ID NO: 2165248
acauauacugaguuaaggc

SEQ ID NO: 2165250 - RNA, 19 nt, Artificial Sequence
  Description of Artificial Sequence: Synthetic oligonucleotide
  Sense strand starting at position 3802 of SEQ ID NO: 1883033
cucaguauauguugccaaa

SEQ ID NO: 2165251 - RNA, 19 nt, Artificial Sequence
  Description of Artificial Sequence: Synthetic oligonucleotide
  Antisense strand to SEQ ID NO: 2165250
uuuggcaacauauacugag

SEQ ID NO: 2165252 - RNA, 19 nt, Artificial Sequence
  Description of Artificial Sequence: Synthetic oligonucleotide
  Sense strand starting at position 421 of SEQ ID NO: 1883034
aagugauauugugcaguuc

SEQ ID NO: 2165253 - RNA, 19 nt, Artificial Sequence
  Description of Artificial Sequence: Synthetic oligonucleotide
  Antisense strand to SEQ ID NO: 2165252
gaacugcacaauaucacuu

SEQ ID NO: 2165254 - RNA, 19 nt, Artificial Sequence
  Description of Artificial Sequence: Synthetic oligonucleotide
  Sense strand starting at position 438 of SEQ ID NO: 1883034
ucacauuauugcuugguua

SEQ ID NO: 2165255 - RNA, 19 nt, Artificial Sequence
  Description of Artificial Sequence: Synthetic oligonucleotide
  Antisense strand to SEQ ID NO: 2165254
uaaccaagcaauaauguga

SEQ ID NO: 2165256 - RNA, 19 nt, Artificial Sequence
  Description of Artificial Sequence: Synthetic oligonucleotide
  Sense strand starting at position 440 of SEQ ID NO: 1883034
acauuauugcuugguuagu

SEQ ID NO: 2165257 - RNA, 19 nt, Artificial Sequence
  Description of Artificial Sequence: Synthetic oligonucleotide
  Antisense strand to SEQ ID NO: 2165256
acuaaccaagcaauaaugu

SEQ ID NO: 2165258 - RNA, 19 nt, Artificial Sequence
  Description of Artificial Sequence: Synthetic oligonucleotide
  Sense strand starting at position 453 of SEQ ID NO: 1883034
guuagucuuuccuccagaa

SEQ ID NO: 2165259 - RNA, 19 nt, Artificial Sequence
  Description of Artificial Sequence: Synthetic oligonucleotide
  Antisense strand to SEQ ID NO: 2165258
uucuggaggaaagacuaac

SEQ ID NO: 2165260 - RNA, 19 nt, Artificial Sequence
  Description of Artificial Sequence: Synthetic oligonucleotide
  Sense strand starting at position 506 of SEQ ID NO: 1883034
cguuauaaaugguuauuag

SEQ ID NO: 2165261 - RNA, 19 nt, Artificial Sequence
  Description of Artificial Sequence: Synthetic oligonucleotide
  Antisense strand to SEQ ID NO: 2165260
cuaauaaccauuuauaacg

SEQ ID NO: 2165262 - RNA, 19 nt, Artificial Sequence
  Description of Artificial Sequence: Synthetic oligonucleotide
  Sense strand starting at position 516 of SEQ ID NO: 1883034
gguuauuaggguuagcuau

SEQ ID NO: 2165263 - RNA, 19 nt, Artificial Sequence
  Description of Artificial Sequence: Synthetic oligonucleotide
  Antisense strand to SEQ ID NO: 2165262
auagcuaacccuaauaacc

SEQ ID NO: 2165264 - RNA, 19 nt, Artificial Sequence
  Description of Artificial Sequence: Synthetic oligonucleotide
  Sense strand starting at position 696 of SEQ ID NO: 1883034
gagagaaaguccuauguga

SEQ ID NO: 2165265 - RNA, 19 nt, Artificial Sequence
  Description of Artificial Sequence: Synthetic oligonucleotide
  Antisense strand to SEQ ID NO: 2165264
ucacauaggacuuucucuc

SEQ ID NO: 2165266 - RNA, 19 nt, Artificial Sequence
  Description of Artificial Sequence: Synthetic oligonucleotide
  Sense strand starting at position 698 of SEQ ID NO: 1883034
gagaaaguccuaugugaau

SEQ ID NO: 2165267 - RNA, 19 nt, Artificial Sequence
  Description of Artificial Sequence: Synthetic oligonucleotide
  Antisense strand to SEQ ID NO: 2165266
auucacauaggacuuucuc

SEQ ID NO: 2165268 - RNA, 19 nt, Artificial Sequence
  Description of Artificial Sequence: Synthetic oligonucleotide
  Sense strand starting at position 704 of SEQ ID NO: 1883034
guccuaugugaauauacuu

SEQ ID NO: 2165269 - RNA, 19 nt, Artificial Sequence
  Description of Artificial Sequence: Synthetic oligonucleotide
  Antisense strand to SEQ ID NO: 2165268
aaguauauucacauaggac

SEQ ID NO: 2165270 - RNA, 19 nt, Artificial Sequence
  Description of Artificial Sequence: Synthetic oligonucleotide
  Sense strand starting at position 794 of SEQ ID NO: 1883034
ccugaugaccuuuagugua

SEQ ID NO: 2165271 - RNA, 19 nt, Artificial Sequence
  Description of Artificial Sequence: Synthetic oligonucleotide
  Antisense strand to SEQ ID NO: 2165270
uacacuaaaggucaucagg

SEQ ID NO: 2165272 - RNA, 19 nt, Artificial Sequence
  Description of Artificial Sequence: Synthetic oligonucleotide
  Sense strand starting at position 796 of SEQ ID NO: 1883034
ugaugaccuuuaguguaga

SEQ ID NO: 2165273 - RNA, 19 nt, Artificial Sequence
  Description of Artificial Sequence: Synthetic oligonucleotide
  Antisense strand to SEQ ID NO: 2165272
ucuacacuaaaggucauca

SEQ ID NO: 2165274 - RNA, 19 nt, Artificial Sequence
  Description of Artificial Sequence: Synthetic oligonucleotide
  Sense strand starting at position 1251 of SEQ ID NO: 1883034
uacugagaucuaugacagu

SEQ ID NO: 2165275 - RNA, 19 nt, Artificial Sequence
  Description of Artificial Sequence: Synthetic oligonucleotide
  Antisense strand to SEQ ID NO: 2165274
acugucauagaucucagua

SEQ ID NO: 2165276 - RNA, 19 nt, Artificial Sequence
  Description of Artificial Sequence: Synthetic oligonucleotide
  Sense strand starting at position 1254 of SEQ ID NO: 1883034
ugagaucuaugacaguauu

SEQ ID NO: 2165277 - RNA, 19 nt, Artificial Sequence
  Description of Artificial Sequence: Synthetic oligonucleotide
  Antisense strand to SEQ ID NO: 2165276
aauacugucauagaucuca

SEQ ID NO: 2165278 - RNA, 19 nt, Artificial Sequence
  Description of Artificial Sequence: Synthetic oligonucleotide
  Sense strand starting at position 1284 of SEQ ID NO: 1883034
guucucagccaucauuauu

SEQ ID NO: 2165279 - RNA, 19 nt, Artificial Sequence
  Description of Artificial Sequence: Synthetic oligonucleotide
  Antisense strand to SEQ ID NO: 2165278
aauaaugauggcugagaac

SEQ ID NO: 2165280 - RNA, 19 nt, Artificial Sequence
  Description of Artificial Sequence: Synthetic oligonucleotide
  Sense strand starting at position 1290 of SEQ ID NO: 1883034
agccaucauuauucuagga

SEQ ID NO: 2165281 - RNA, 19 nt, Artificial Sequence
  Description of Artificial Sequence: Synthetic oligonucleotide
  Antisense strand to SEQ ID NO: 2165280
uccuagaauaaugauggcu

SEQ ID NO: 2165282 - RNA, 19 nt, Artificial Sequence
  Description of Artificial Sequence: Synthetic oligonucleotide
  Sense strand starting at position 1312 of SEQ ID NO: 1883034
ggaccacaauuaugagauu

SEQ ID NO: 2165283 - RNA, 19 nt, Artificial Sequence
  Description of Artificial Sequence: Synthetic oligonucleotide
  Antisense strand to SEQ ID NO: 2165282
aaucucauaauuguggucc

SEQ ID NO: 2165284 - RNA, 19 nt, Artificial Sequence
  Description of Artificial Sequence: Synthetic oligonucleotide
  Sense strand starting at position 2066 of SEQ ID NO: 1883034
gauguuuagugaccggguu

SEQ ID NO: 2165285 - RNA, 19 nt, Artificial Sequence
  Description of Artificial Sequence: Synthetic oligonucleotide
  Antisense strand to SEQ ID NO: 2165284
aacccggucacuaaacauc

SEQ ID NO: 2165286 - RNA, 19 nt, Artificial Sequence
  Description of Artificial Sequence: Synthetic oligonucleotide
  Sense strand starting at position 2068 of SEQ ID NO: 1883034
uguuuagugaccggguuga

SEQ ID NO: 2165287 - RNA, 19 nt, Artificial Sequence
  Description of Artificial Sequence: Synthetic oligonucleotide
  Antisense strand to SEQ ID NO: 2165286
ucaacccggucacuaaaca

SEQ ID NO: 2165288 - RNA, 19 nt, Artificial Sequence
  Description of Artificial Sequence: Synthetic oligonucleotide
  Sense strand starting at position 2105 of SEQ ID NO: 1883034
ccucguuccgcggaauuca

SEQ ID NO: 2165289 - RNA, 19 nt, Artificial Sequence
  Description of Artificial Sequence: Synthetic oligonucleotide
  Antisense strand to SEQ ID NO: 2165288
ugaauuccgcggaacgagg

SEQ ID NO: 2165290 - RNA, 19 nt, Artificial Sequence
  Description of Artificial Sequence: Synthetic oligonucleotide
  Sense strand starting at position 2436 of SEQ ID NO: 1883034
gaucuuccagcguuagcuu

SEQ ID NO: 2165291 - RNA, 19 nt, Artificial Sequence
  Description of Artificial Sequence: Synthetic oligonucleotide
  Antisense strand to SEQ ID NO: 2165290
aagcuaacgcuggaagauc

SEQ ID NO: 2165292 - RNA, 19 nt, Artificial Sequence
  Description of Artificial Sequence: Synthetic oligonucleotide
  Sense strand starting at position 2443 of SEQ ID NO: 1883034
cagcguuagcuucccaagu

SEQ ID NO: 2165293 - RNA, 19 nt, Artificial Sequence
  Description of Artificial Sequence: Synthetic oligonucleotide
  Antisense strand to SEQ ID NO: 2165292
acuugggaagcuaacgcug

SEQ ID NO: 2165294 - RNA, 19 nt, Artificial Sequence
  Description of Artificial Sequence: Synthetic oligonucleotide
  Sense strand starting at position 2488 of SEQ ID NO: 1883034
acgccaagcuaauuuaauu

SEQ ID NO: 2165295 - RNA, 19 nt, Artificial Sequence
  Description of Artificial Sequence: Synthetic oligonucleotide
  Antisense strand to SEQ ID NO: 2165294
aauuaaauuagcuuggcgu

SEQ ID NO: 2165296 - RNA, 19 nt, Artificial Sequence
  Description of Artificial Sequence: Synthetic oligonucleotide
  Sense strand starting at position 2704 of SEQ ID NO: 1883034
gccuauagcccuuaacaga

SEQ ID NO: 2165297 - RNA, 19 nt, Artificial Sequence
  Description of Artificial Sequence: Synthetic oligonucleotide
  Antisense strand to SEQ ID NO: 2165296
ucuguuaagggcuauaggc

SEQ ID NO: 2165298 - RNA, 19 nt, Artificial Sequence
  Description of Artificial Sequence: Synthetic oligonucleotide
  Sense strand starting at position 2729 of SEQ ID NO: 1883034
cgacgagauuaacuacaau

SEQ ID NO: 2165299 - RNA, 19 nt, Artificial Sequence
  Description of Artificial Sequence: Synthetic oligonucleotide
  Antisense strand to SEQ ID NO: 2165298
auuguaguuaaucucgucg

SEQ ID NO: 2165300 - RNA, 19 nt, Artificial Sequence
  Description of Artificial Sequence: Synthetic oligonucleotide
  Sense strand starting at position 2822 of SEQ ID NO: 1883034
uuucuacagucgguuuauu

SEQ ID NO: 2165301 - RNA, 19 nt, Artificial Sequence
  Description of Artificial Sequence: Synthetic oligonucleotide
  Antisense strand to SEQ ID NO: 2165300
aauaaaccgacuguagaaa

SEQ ID NO: 2165302 - RNA, 19 nt, Artificial Sequence
  Description of Artificial Sequence: Synthetic oligonucleotide
  Sense strand starting at position 3007 of SEQ ID NO: 1883034
cggugcuuauuucuggaca

SEQ ID NO: 2165303 - RNA, 19 nt, Artificial Sequence
  Description of Artificial Sequence: Synthetic oligonucleotide
  Antisense strand to SEQ ID NO: 2165302
uguccagaaauaagcaccg

SEQ ID NO: 2165304 - RNA, 19 nt, Artificial Sequence
  Description of Artificial Sequence: Synthetic oligonucleotide
  Sense strand starting at position 3524 of SEQ ID NO: 1883034
ccacuuuacccacguguau

SEQ ID NO: 2165305 - RNA, 19 nt, Artificial Sequence
  Description of Artificial Sequence: Synthetic oligonucleotide
  Antisense strand to SEQ ID NO: 2165304
auacacguggguaaagugg

SEQ ID NO: 2165306 - RNA, 19 nt, Artificial Sequence
  Description of Artificial Sequence: Synthetic oligonucleotide
  Sense strand starting at position 3614 of SEQ ID NO: 1883034
gaagccagguccuuccaua

SEQ ID NO: 2165307 - RNA, 19 nt, Artificial Sequence
  Description of Artificial Sequence: Synthetic oligonucleotide
  Antisense strand to SEQ ID NO: 2165306
uauggaaggaccuggcuuc

SEQ ID NO: 2165308 - RNA, 19 nt, Artificial Sequence
  Description of Artificial Sequence: Synthetic oligonucleotide
  Sense strand starting at position 3655 of SEQ ID NO: 1883034
gacguaaggucaguuacuu

SEQ ID NO: 2165309 - RNA, 19 nt, Artificial Sequence
  Description of Artificial Sequence: Synthetic oligonucleotide
  Antisense strand to SEQ ID NO: 2165308
aaguaacugaccuuacguc

SEQ ID NO: 2165310 - RNA, 19 nt, Artificial Sequence
  Description of Artificial Sequence: Synthetic oligonucleotide
  Sense strand starting at position 3659 of SEQ ID NO: 1883034
uaaggucaguuacuugaga

SEQ ID NO: 2165311 - RNA, 19 nt, Artificial Sequence
  Description of Artificial Sequence: Synthetic oligonucleotide
  Antisense strand to SEQ ID NO: 2165310
ucucaaguaacugaccuua

SEQ ID NO: 2165312 - RNA, 19 nt, Artificial Sequence
  Description of Artificial Sequence: Synthetic oligonucleotide
  Sense strand starting at position 3660 of SEQ ID NO: 1883034
aaggucaguuacuugagaa

SEQ ID NO: 2165313 - RNA, 19 nt, Artificial Sequence
  Description of Artificial Sequence: Synthetic oligonucleotide
  Antisense strand to SEQ ID NO: 2165312
uucucaaguaacugaccuu

SEQ ID NO: 2165314 - RNA, 19 nt, Artificial Sequence
  Description of Artificial Sequence: Synthetic oligonucleotide
  Sense strand starting at position 3661 of SEQ ID NO: 1883034
aggucaguuacuugagaau

SEQ ID NO: 2165315 - RNA, 19 nt, Artificial Sequence
  Description of Artificial Sequence: Synthetic oligonucleotide
  Antisense strand to SEQ ID NO: 2165314
auucucaaguaacugaccu

SEQ ID NO: 2165316 - RNA, 19 nt, Artificial Sequence
  Description of Artificial Sequence: Synthetic oligonucleotide
  Sense strand starting at position 3686 of SEQ ID NO: 1883034
caaguuuaaccgugagccu

SEQ ID NO: 2165317 - RNA, 19 nt, Artificial Sequence
  Description of Artificial Sequence: Synthetic oligonucleotide
  Antisense strand to SEQ ID NO: 2165316
aggcucacgguuaaacuug

SEQ ID NO: 2165318 - RNA, 19 nt, Artificial Sequence
  Description of Artificial Sequence: Synthetic oligonucleotide
  Sense strand starting at position 3687 of SEQ ID NO: 1883034
aaguuuaaccgugagccuu

SEQ ID NO: 2165319 - RNA, 19 nt, Artificial Sequence
  Description of Artificial Sequence: Synthetic oligonucleotide
  Antisense strand to SEQ ID NO: 2165318
aaggcucacgguuaaacuu

SEQ ID NO: 2165320 - RNA, 19 nt, Artificial Sequence
  Description of Artificial Sequence: Synthetic oligonucleotide
  Sense strand starting at position 3832 of SEQ ID NO: 1883034
aaugcucauuucgaaguga

SEQ ID NO: 2165321 - RNA, 19 nt, Artificial Sequence
  Description of Artificial Sequence: Synthetic oligonucleotide
  Antisense strand to SEQ ID NO: 2165320
ucacuucgaaaugagcauu

SEQ ID NO: 2165322 - RNA, 19 nt, Artificial Sequence
  Description of Artificial Sequence: Synthetic oligonucleotide
  Sense strand starting at position 3875 of SEQ ID NO: 1883034
uucuuugaguuaguguuaa

SEQ ID NO: 2165323 - RNA, 19 nt, Artificial Sequence
  Description of Artificial Sequence: Synthetic oligonucleotide
  Antisense strand to SEQ ID NO: 2165322
uuaacacuaacucaaagaa

SEQ ID NO: 2165324 - RNA, 19 nt, Artificial Sequence
  Description of Artificial Sequence: Synthetic oligonucleotide
  Sense strand starting at position 3885 of SEQ ID NO: 1883034
uaguguuaacaguaugaua

SEQ ID NO: 2165325 - RNA, 19 nt, Artificial Sequence
  Description of Artificial Sequence: Synthetic oligonucleotide
  Antisense strand to SEQ ID NO: 2165324
uaucauacuguuaacacua

SEQ ID NO: 2165326 - RNA, 19 nt, Artificial Sequence
  Description of Artificial Sequence: Synthetic oligonucleotide
  Sense strand starting at position 3887 of SEQ ID NO: 1883034
guguuaacaguaugauaau

SEQ ID NO: 2165327 - RNA, 19 nt, Artificial Sequence
  Description of Artificial Sequence: Synthetic oligonucleotide
  Antisense strand to SEQ ID NO: 2165326
auuaucauacuguuaacac

SEQ ID NO: 2165328 - RNA, 19 nt, Artificial Sequence
  Description of Artificial Sequence: Synthetic oligonucleotide
  Sense strand starting at position 3916 of SEQ ID NO: 1883034
uacuacauaguguguuauu

SEQ ID NO: 2165329 - RNA, 19 nt, Artificial Sequence
  Description of Artificial Sequence: Synthetic oligonucleotide
  Antisense strand to SEQ ID NO: 2165328
aauaacacacuauguagua

SEQ ID NO: 2165330 - RNA, 19 nt, Artificial Sequence
  Description of Artificial Sequence: Synthetic oligonucleotide
  Sense strand starting at position 3917 of SEQ ID NO: 1883034
acuacauaguguguuauuu

SEQ ID NO: 2165331 - RNA, 19 nt, Artificial Sequence
  Description of Artificial Sequence: Synthetic oligonucleotide
  Antisense strand to SEQ ID NO: 2165330
aaauaacacacuauguagu

SEQ ID NO: 2165332 - RNA, 19 nt, Artificial Sequence
  Description of Artificial Sequence: Synthetic oligonucleotide
  Sense strand starting at position 121 of SEQ ID NO: 1883035
ccggccacucugugugauu

SEQ ID NO: 2165333 - RNA, 19 nt, Artificial Sequence
  Description of Artificial Sequence: Synthetic oligonucleotide
  Antisense strand to SEQ ID NO: 2165332
aaucacacagaguggccgg

SEQ ID NO: 2165334 - RNA, 19 nt, Artificial Sequence
  Description of Artificial Sequence: Synthetic oligonucleotide
  Sense strand starting at position 122 of SEQ ID NO: 1883035
cggccacucugugugauuu

SEQ ID NO: 2165335 - RNA, 19 nt, Artificial Sequence
  Description of Artificial Sequence: Synthetic oligonucleotide
  Antisense strand to SEQ ID NO: 2165334
aaaucacacagaguggccg

SEQ ID NO: 2165336 - RNA, 19 nt, Artificial Sequence
  Description of Artificial Sequence: Synthetic oligonucleotide
  Sense strand starting at position 336 of SEQ ID NO: 1883035
ccuuuagacuauuagguua

SEQ ID NO: 2165337 - RNA, 19 nt, Artificial Sequence
  Description of Artificial Sequence: Synthetic oligonucleotide
  Antisense strand to SEQ ID NO: 2165336
uaaccuaauagucuaaagg

SEQ ID NO: 2165338 - RNA, 19 nt, Artificial Sequence
  Description of Artificial Sequence: Synthetic oligonucleotide
  Sense strand starting at position 407 of SEQ ID NO: 1883035
gguaauauuuacuaagcau

SEQ ID NO: 2165339 - RNA, 19 nt, Artificial Sequence
  Description of Artificial Sequence: Synthetic oligonucleotide
  Antisense strand to SEQ ID NO: 2165338
augcuuaguaaauauuacc

SEQ ID NO: 2165340 - RNA, 19 nt, Artificial Sequence
  Description of Artificial Sequence: Synthetic oligonucleotide
  Sense strand starting at position 475 of SEQ ID NO: 1883035
ccuguuagauaaguauuau

SEQ ID NO: 2165341 - RNA, 19 nt, Artificial Sequence
  Description of Artificial Sequence: Synthetic oligonucleotide
  Antisense strand to SEQ ID NO: 2165340
auaauacuuaucuaacagg

SEQ ID NO: 2165342 - RNA, 19 nt, Artificial Sequence
  Description of Artificial Sequence: Synthetic oligonucleotide
  Sense strand starting at position 486 of SEQ ID NO: 1883035
aguauuaucuccguuuaua

SEQ ID NO: 2165343 - RNA, 19 nt, Artificial Sequence
  Description of Artificial Sequence: Synthetic oligonucleotide
  Antisense strand to SEQ ID NO: 2165342
uauaaacggagauaauacu

SEQ ID NO: 2165344 - RNA, 19 nt, Artificial Sequence
  Description of Artificial Sequence: Synthetic oligonucleotide
  Sense strand starting at position 489 of SEQ ID NO: 1883035
auuaucuccguuuauagau

SEQ ID NO: 2165345 - RNA, 19 nt, Artificial Sequence
  Description of Artificial Sequence: Synthetic oligonucleotide
  Antisense strand to SEQ ID NO: 2165344
aucuauaaacggagauaau

SEQ ID NO: 2165346 - RNA, 19 nt, Artificial Sequence
  Description of Artificial Sequence: Synthetic oligonucleotide
  Sense strand starting at position 722 of SEQ ID NO: 1883035
acagauaaguugcaacaga

SEQ ID NO: 2165347 - RNA, 19 nt, Artificial Sequence
  Description of Artificial Sequence: Synthetic oligonucleotide
  Antisense strand to SEQ ID NO: 2165346
ucuguugcaacuuaucugu

SEQ ID NO: 2165348 - RNA, 19 nt, Artificial Sequence
  Description of Artificial Sequence: Synthetic oligonucleotide
  Sense strand starting at position 767 of SEQ ID NO: 1883035
agacuuacgaaauggcaua

SEQ ID NO: 2165349 - RNA, 19 nt, Artificial Sequence
  Description of Artificial Sequence: Synthetic oligonucleotide
  Antisense strand to SEQ ID NO: 2165348
uaugccauuucguaagucu

SEQ ID NO: 2165350 - RNA, 19 nt, Artificial Sequence
  Description of Artificial Sequence: Synthetic oligonucleotide
  Sense strand starting at position 872 of SEQ ID NO: 1883035
aggaaauaauuacaaguga

SEQ ID NO: 2165351 - RNA, 19 nt, Artificial Sequence
  Description of Artificial Sequence: Synthetic oligonucleotide
  Antisense strand to SEQ ID NO: 2165350
ucacuuguaauuauuuccu

SEQ ID NO: 2165352 - RNA, 19 nt, Artificial Sequence
  Description of Artificial Sequence: Synthetic oligonucleotide
  Sense strand starting at position 934 of SEQ ID NO: 1883035
ucaagauauuucugguaga

SEQ ID NO: 2165353 - RNA, 19 nt, Artificial Sequence
  Description of Artificial Sequence: Synthetic oligonucleotide
  Antisense strand to SEQ ID NO: 2165352
ucuaccagaaauaucuuga

SEQ ID NO: 2165354 - RNA, 19 nt, Artificial Sequence
  Description of Artificial Sequence: Synthetic oligonucleotide
  Sense strand starting at position 935 of SEQ ID NO: 1883035
caagauauuucugguagaa

SEQ ID NO: 2165355 - RNA, 19 nt, Artificial Sequence
  Description of Artificial Sequence: Synthetic oligonucleotide
  Antisense strand to SEQ ID NO: 2165354
uucuaccagaaauaucuug

SEQ ID NO: 2165356 - RNA, 19 nt, Artificial Sequence
  Description of Artificial Sequence: Synthetic oligonucleotide
  Sense strand starting at position 1015 of SEQ ID NO: 1883035
agcaaccaguauucugaau

SEQ ID NO: 2165357 - RNA, 19 nt, Artificial Sequence
  Description of Artificial Sequence: Synthetic oligonucleotide
  Antisense strand to SEQ ID NO: 2165356
auucagaauacugguugcu

SEQ ID NO: 2165358 - RNA, 19 nt, Artificial Sequence
  Description of Artificial Sequence: Synthetic oligonucleotide
  Sense strand starting at position 1026 of SEQ ID NO: 1883035
uucugaauuugguaucuau

SEQ ID NO: 2165359 - RNA, 19 nt, Artificial Sequence
  Description of Artificial Sequence: Synthetic oligonucleotide
  Antisense strand to SEQ ID NO: 2165358
auagauaccaaauucagaa

SEQ ID NO: 2165360 - RNA, 19 nt, Artificial Sequence
  Description of Artificial Sequence: Synthetic oligonucleotide
  Sense strand starting at position 1162 of SEQ ID NO: 1883035
gguuaaugacucuauccau

SEQ ID NO: 2165361 - RNA, 19 nt, Artificial Sequence
  Description of Artificial Sequence: Synthetic oligonucleotide
  Antisense strand to SEQ ID NO: 2165360
auggauagagucauuaacc

SEQ ID NO: 2165362 - RNA, 19 nt, Artificial Sequence
  Description of Artificial Sequence: Synthetic oligonucleotide
  Sense strand starting at position 1481 of SEQ ID NO: 1883035
gguuauuccgagugaagua

SEQ ID NO: 2165363 - RNA, 19 nt, Artificial Sequence
  Description of Artificial Sequence: Synthetic oligonucleotide
  Antisense strand to SEQ ID NO: 2165362
uacuucacucggaauaacc

SEQ ID NO: 2165364 - RNA, 19 nt, Artificial Sequence
  Description of Artificial Sequence: Synthetic oligonucleotide
  Sense strand starting at position 1482 of SEQ ID NO: 1883035
guuauuccgagugaaguaa

SEQ ID NO: 2165365 - RNA, 19 nt, Artificial Sequence
  Description of Artificial Sequence: Synthetic oligonucleotide
  Antisense strand to SEQ ID NO: 2165364
uuacuucacucggaauaac

SEQ ID NO: 2165366 - RNA, 19 nt, Artificial Sequence
  Description of Artificial Sequence: Synthetic oligonucleotide
  Sense strand starting at position 1530 of SEQ ID NO: 1883035
uuccaaugacagcgacauu

SEQ ID NO: 2165367 - RNA, 19 nt, Artificial Sequence
  Description of Artificial Sequence: Synthetic oligonucleotide
  Antisense strand to SEQ ID NO: 2165366
aaugucgcugucauuggaa

SEQ ID NO: 2165368 - RNA, 19 nt, Artificial Sequence
  Description of Artificial Sequence: Synthetic oligonucleotide
  Sense strand starting at position 1605 of SEQ ID NO: 1883035
aguaguuccuguguccauu

SEQ ID NO: 2165369 - RNA, 19 nt, Artificial Sequence
  Description of Artificial Sequence: Synthetic oligonucleotide
  Antisense strand to SEQ ID NO: 2165368
aauggacacaggaacuacu

SEQ ID NO: 2165370 - RNA, 19 nt, Artificial Sequence
  Description of Artificial Sequence: Synthetic oligonucleotide
  Sense strand starting at position 1755 of SEQ ID NO: 1883035
gugugauggcgcgagggaa

SEQ ID NO: 2165371 - RNA, 19 nt, Artificial Sequence
  Description of Artificial Sequence: Synthetic oligonucleotide
  Antisense strand to SEQ ID NO: 2165370
uucccucgcgccaucacac

SEQ ID NO: 2165372 - RNA, 19 nt, Artificial Sequence
  Description of Artificial Sequence: Synthetic oligonucleotide
  Sense strand starting at position 2163 of SEQ ID NO: 1883035
acaaauguaacgcgguuaa

SEQ ID NO: 2165373 - RNA, 19 nt, Artificial Sequence
  Description of Artificial Sequence: Synthetic oligonucleotide
  Antisense strand to SEQ ID NO: 2165372
uuaaccgcguuacauuugu

SEQ ID NO: 2165374 - RNA, 19 nt, Artificial Sequence
  Description of Artificial Sequence: Synthetic oligonucleotide
  Sense strand starting at position 2207 of SEQ ID NO: 1883035
cgcaaagaggccugaguau

SEQ ID NO: 2165375 - RNA, 19 nt, Artificial Sequence
  Description of Artificial Sequence: Synthetic oligonucleotide
  Antisense strand to SEQ ID NO: 2165374
auacucaggccucuuugcg

SEQ ID NO: 2165376 - RNA, 19 nt, Artificial Sequence
  Description of Artificial Sequence: Synthetic oligonucleotide
  Sense strand starting at position 2218 of SEQ ID NO: 1883035
cugaguauccaugaccuca

SEQ ID NO: 2165377 - RNA, 19 nt, Artificial Sequence
  Description of Artificial Sequence: Synthetic oligonucleotide
  Antisense strand to SEQ ID NO: 2165376
ugaggucauggauacucag

SEQ ID NO: 2165378 - RNA, 19 nt, Artificial Sequence
  Description of Artificial Sequence: Synthetic oligonucleotide
  Sense strand starting at position 2220 of SEQ ID NO: 1883035
gaguauccaugaccucagu

SEQ ID NO: 2165379 - RNA, 19 nt, Artificial Sequence
  Description of Artificial Sequence: Synthetic oligonucleotide
  Antisense strand to SEQ ID NO: 2165378
acugaggucauggauacuc

SEQ ID NO: 2165380 - RNA, 19 nt, Artificial Sequence
  Description of Artificial Sequence: Synthetic oligonucleotide
  Sense strand starting at position 2305 of SEQ ID NO: 1883035
ugaagucaugcucgaaaug

SEQ ID NO: 2165381 - RNA, 19 nt, Artificial Sequence
  Description of Artificial Sequence: Synthetic oligonucleotide
  Antisense strand to SEQ ID NO: 2165380
cauuucgagcaugacuuca

SEQ ID NO: 2165382 - RNA, 19 nt, Artificial Sequence
  Description of Artificial Sequence: Synthetic oligonucleotide
  Sense strand starting at position 2347 of SEQ ID NO: 1883035
ggcgguaaucucgcgagau

SEQ ID NO: 2165383 - RNA, 19 nt, Artificial Sequence
  Description of Artificial Sequence: Synthetic oligonucleotide
  Antisense strand to SEQ ID NO: 2165382
aucucgcgagauuaccgcc

SEQ ID NO: 2165384 - RNA, 19 nt, Artificial Sequence
  Description of Artificial Sequence: Synthetic oligonucleotide
  Sense strand starting at position 2351 of SEQ ID NO: 1883035
guaaucucgcgagauggaa

SEQ ID NO: 2165385 - RNA, 19 nt, Artificial Sequence
  Description of Artificial Sequence: Synthetic oligonucleotide
  Antisense strand to SEQ ID NO: 2165384
uuccaucucgcgagauuac

SEQ ID NO: 2165386 - RNA, 19 nt, Artificial Sequence
  Description of Artificial Sequence: Synthetic oligonucleotide
  Sense strand starting at position 2845 of SEQ ID NO: 1883035
uugaauugaacgugaggag

SEQ ID NO: 2165387 - RNA, 19 nt, Artificial Sequence
  Description of Artificial Sequence: Synthetic oligonucleotide
  Antisense strand to SEQ ID NO: 2165386
cuccucacguucaauucaa

SEQ ID NO: 2165388 - RNA, 19 nt, Artificial Sequence
  Description of Artificial Sequence: Synthetic oligonucleotide
  Sense strand starting at position 3345 of SEQ ID NO: 1883035
gagggagaaucgguaguuu

SEQ ID NO: 2165389 - RNA, 19 nt, Artificial Sequence
  Description of Artificial Sequence: Synthetic oligonucleotide
  Antisense strand to SEQ ID NO: 2165388
aaacuaccgauucucccuc

SEQ ID NO: 2165390 - RNA, 19 nt, Artificial Sequence
  Description of Artificial Sequence: Synthetic oligonucleotide
  Sense strand starting at position 3349 of SEQ ID NO: 1883035
gagaaucgguaguuugguu

SEQ ID NO: 2165391 - RNA, 19 nt, Artificial Sequence
  Description of Artificial Sequence: Synthetic oligonucleotide
  Antisense strand to SEQ ID NO: 2165390
aaccaaacuaccgauucuc

SEQ ID NO: 2165392 - RNA, 19 nt, Artificial Sequence
  Description of Artificial Sequence: Synthetic oligonucleotide
  Sense strand starting at position 3354 of SEQ ID NO: 1883035
ucgguaguuugguuuggaa

SEQ ID NO: 2165393 - RNA, 19 nt, Artificial Sequence
  Description of Artificial Sequence: Synthetic oligonucleotide
  Antisense strand to SEQ ID NO: 2165392
uuccaaaccaaacuaccga

SEQ ID NO: 2165394 - RNA, 19 nt, Artificial Sequence
  Description of Artificial Sequence: Synthetic oligonucleotide
  Sense strand starting at position 3356 of SEQ ID NO: 1883035
gguaguuugguuuggaauu

SEQ ID NO: 2165395 - RNA, 19 nt, Artificial Sequence
  Description of Artificial Sequence: Synthetic oligonucleotide
  Antisense strand to SEQ ID NO: 2165394
aauuccaaaccaaacuacc

SEQ ID NO: 2165396 - RNA, 19 nt, Artificial Sequence
  Description of Artificial Sequence: Synthetic oligonucleotide
  Sense strand starting at position 3633 of SEQ ID NO: 1883035
uucagcuguguguauagua

SEQ ID NO: 2165397 - RNA, 19 nt, Artificial Sequence
  Description of Artificial Sequence: Synthetic oligonucleotide
  Antisense strand to SEQ ID NO: 2165396
uacuauacacacagcugaa

SEQ ID NO: 2165398 - RNA, 19 nt, Artificial Sequence
  Description of Artificial Sequence: Synthetic oligonucleotide
  Sense strand starting at position 3682 of SEQ ID NO: 1883035
auuuccauuugcugaguua

SEQ ID NO: 2165399 - RNA, 19 nt, Artificial Sequence
  Description of Artificial Sequence: Synthetic oligonucleotide
  Antisense strand to SEQ ID NO: 2165398
uaacucagcaaauggaaau

SEQ ID NO: 2165400 - RNA, 19 nt, Artificial Sequence
  Description of Artificial Sequence: Synthetic oligonucleotide
  Sense strand starting at position 3685 of SEQ ID NO: 1883035
uccauuugcugaguuacuu

SEQ ID NO: 2165401 - RNA, 19 nt, Artificial Sequence
  Description of Artificial Sequence: Synthetic oligonucleotide
  Antisense strand to SEQ ID NO: 2165400
aaguaacucagcaaaugga

SEQ ID NO: 2165402 - RNA, 19 nt, Artificial Sequence
  Description of Artificial Sequence: Synthetic oligonucleotide
  Sense strand starting at position 3734 of SEQ ID NO: 1883035
uuuacaguccuaggaaaga

SEQ ID NO: 2165403 - RNA, 19 nt, Artificial Sequence
  Description of Artificial Sequence: Synthetic oligonucleotide
  Antisense strand to SEQ ID NO: 2165402
ucuuuccuaggacuguaaa

SEQ ID NO: 2165404 - RNA, 19 nt, Artificial Sequence
  Description of Artificial Sequence: Synthetic oligonucleotide
  Sense strand starting at position 3755 of SEQ ID NO: 1883035
uugugacguccagguguuu

SEQ ID NO: 2165405 - RNA, 19 nt, Artificial Sequence
  Description of Artificial Sequence: Synthetic oligonucleotide
  Antisense strand to SEQ ID NO: 2165404
aaacaccuggacgucacaa

SEQ ID NO: 2165406 - RNA, 19 nt, Artificial Sequence
  Description of Artificial Sequence: Synthetic oligonucleotide
  Sense strand starting at position 3965 of SEQ ID NO: 1883035
caugcaggugaugaguaua

SEQ ID NO: 2165407 - RNA, 19 nt, Artificial Sequence
  Description of Artificial Sequence: Synthetic oligonucleotide
  Antisense strand to SEQ ID NO: 2165406
uauacucaucaccugcaug

SEQ ID NO: 2165408 - RNA, 19 nt, Artificial Sequence
  Description of Artificial Sequence: Synthetic oligonucleotide
  Sense strand starting at position 3971 of SEQ ID NO: 1883035
ggugaugaguauagucagu

SEQ ID NO: 2165409 - RNA, 19 nt, Artificial Sequence
  Description of Artificial Sequence: Synthetic oligonucleotide
  Antisense strand to SEQ ID NO: 2165408
acugacuauacucaucacc

SEQ ID NO: 2165410 - RNA, 19 nt, Artificial Sequence
  Description of Artificial Sequence: Synthetic oligonucleotide
  Sense strand starting at position 3973 of SEQ ID NO: 1883035
ugaugaguauagucaguuu

SEQ ID NO: 2165411 - RNA, 19 nt, Artificial Sequence
  Description of Artificial Sequence: Synthetic oligonucleotide
  Antisense strand to SEQ ID NO: 2165410
aaacugacuauacucauca

SEQ ID NO: 2165412 - RNA, 19 nt, Artificial Sequence
  Description of Artificial Sequence: Synthetic oligonucleotide
  Sense strand starting at position 313 of SEQ ID NO: 1883036
gaauuagccaagcguggua

SEQ ID NO: 2165413 - RNA, 19 nt, Artificial Sequence
  Description of Artificial Sequence: Synthetic oligonucleotide
  Antisense strand to SEQ ID NO: 2165412
uaccacgcuuggcuaauuc

SEQ ID NO: 2165414 - RNA, 19 nt, Artificial Sequence
  Description of Artificial Sequence: Synthetic oligonucleotide
  Sense strand starting at position 1072 of SEQ ID NO: 1883036
gcucgaucgcauguauaua

SEQ ID NO: 2165415 - RNA, 19 nt, Artificial Sequence
  Description of Artificial Sequence: Synthetic oligonucleotide
  Antisense strand to SEQ ID NO: 2165414
uauauacaugcgaucgagc

SEQ ID NO: 2165416 - RNA, 19 nt, Artificial Sequence
  Description of Artificial Sequence: Synthetic oligonucleotide
  Sense strand starting at position 2002 of SEQ ID NO: 1883036
gcggucuccugcgaaguca

SEQ ID NO: 2165417 - RNA, 19 nt, Artificial Sequence
  Description of Artificial Sequence: Synthetic oligonucleotide
  Antisense strand to SEQ ID NO: 2165416
ugacuucgcaggagaccgc

SEQ ID NO: 2165418 - RNA, 19 nt, Artificial Sequence
  Description of Artificial Sequence: Synthetic oligonucleotide
  Sense strand starting at position 3280 of SEQ ID NO: 1883036
ugcagugagcuaugguaau

SEQ ID NO: 2165419 - RNA, 19 nt, Artificial Sequence
  Description of Artificial Sequence: Synthetic oligonucleotide
  Antisense strand to SEQ ID NO: 2165418
auuaccauagcucacugca

SEQ ID NO: 2165420 - RNA, 19 nt, Artificial Sequence
  Description of Artificial Sequence: Synthetic oligonucleotide
  Sense strand starting at position 3286 of SEQ ID NO: 1883036
gagcuaugguaaucccacu

SEQ ID NO: 2165421 - RNA, 19 nt, Artificial Sequence
  Description of Artificial Sequence: Synthetic oligonucleotide
  Antisense strand to SEQ ID NO: 2165420
agugggauuaccauagcuc

SEQ ID NO: 2165422 - RNA, 19 nt, Artificial Sequence
  Description of Artificial Sequence: Synthetic oligonucleotide
  Sense strand starting at position 3327 of SEQ ID NO: 1883036
augaaagcaugucucgaga

SEQ ID NO: 2165423 - RNA, 19 nt, Artificial Sequence
  Description of Artificial Sequence: Synthetic oligonucleotide
  Antisense strand to SEQ ID NO: 2165422
ucucgagacaugcuuucau

SEQ ID NO: 2165424 - RNA, 19 nt, Artificial Sequence
  Description of Artificial Sequence: Synthetic oligonucleotide
  Sense strand starting at position 3329 of SEQ ID NO: 1883036
gaaagcaugucucgagaua

SEQ ID NO: 2165425 - RNA, 19 nt, Artificial Sequence
  Description of Artificial Sequence: Synthetic oligonucleotide
  Antisense strand to SEQ ID NO: 2165424
uaucucgagacaugcuuuc

SEQ ID NO: 2165426 - RNA, 19 nt, Artificial Sequence
  Description of Artificial Sequence: Synthetic oligonucleotide
  Sense strand starting at position 3330 of SEQ ID NO: 1883036
aaagcaugucucgagauag

SEQ ID NO: 2165427 - RNA, 19 nt, Artificial Sequence
  Description of Artificial Sequence: Synthetic oligonucleotide
  Antisense strand to SEQ ID NO: 2165426
cuaucucgagacaugcuuu

SEQ ID NO: 2165428 - RNA, 19 nt, Artificial Sequence
  Description of Artificial Sequence: Synthetic oligonucleotide
  Sense strand starting at position 3341 of SEQ ID NO: 1883036
cgagauagcuagcuagcua

SEQ ID NO: 2165429 - RNA, 19 nt, Artificial Sequence
  Description of Artificial Sequence: Synthetic oligonucleotide
  Antisense strand to SEQ ID NO: 2165428
uagcuagcuagcuaucucg

SEQ ID NO: 2165430 - RNA, 19 nt, Artificial Sequence
  Description of Artificial Sequence: Synthetic oligonucleotide
  Sense strand starting at position 3363 of SEQ ID NO: 1883036
agauaauugauagguaguu

SEQ ID NO: 2165431 - RNA, 19 nt, Artificial Sequence
  Description of Artificial Sequence: Synthetic oligonucleotide
  Antisense strand to SEQ ID NO: 2165430
aacuaccuaucaauuaucu

SEQ ID NO: 2165432 - RNA, 19 nt, Artificial Sequence
  Description of Artificial Sequence: Synthetic oligonucleotide
  Sense strand starting at position 3364 of SEQ ID NO: 1883036
gauaauugauagguaguuu

SEQ ID NO: 2165433 - RNA, 19 nt, Artificial Sequence
  Description of Artificial Sequence: Synthetic oligonucleotide
  Antisense strand to SEQ ID NO: 2165432
aaacuaccuaucaauuauc

SEQ ID NO: 2165434 - RNA, 19 nt, Artificial Sequence
  Description of Artificial Sequence: Synthetic oligonucleotide
  Sense strand starting at position 3447 of SEQ ID NO: 1883036
uuuacaguguuacuaguua

SEQ ID NO: 2165435 - RNA, 19 nt, Artificial Sequence
  Description of Artificial Sequence: Synthetic oligonucleotide
  Antisense strand to SEQ ID NO: 2165434
uaacuaguaacacuguaaa

SEQ ID NO: 2165436 - RNA, 19 nt, Artificial Sequence
  Description of Artificial Sequence: Synthetic oligonucleotide
  Sense strand starting at position 3484 of SEQ ID NO: 1883036
uguaaaguauccuuuacaa

SEQ ID NO: 2165437 - RNA, 19 nt, Artificial Sequence
  Description of Artificial Sequence: Synthetic oligonucleotide
  Antisense strand to SEQ ID NO: 2165436
uuguaaaggauacuuuaca

SEQ ID NO: 2165438 - RNA, 19 nt, Artificial Sequence
  Description of Artificial Sequence: Synthetic oligonucleotide
  Sense strand starting at position 3580 of SEQ ID NO: 1883036
uuguccaccugauuggaaa

SEQ ID NO: 2165439 - RNA, 19 nt, Artificial Sequence
  Description of Artificial Sequence: Synthetic oligonucleotide
  Antisense strand to SEQ ID NO: 2165438
uuuccaaucagguggacaa

SEQ ID NO: 2165440 - RNA, 19 nt, Artificial Sequence
  Description of Artificial Sequence: Synthetic oligonucleotide
  Sense strand starting at position 3669 of SEQ ID NO: 1883036
guguccagucgccuucuaa

SEQ ID NO: 2165441 - RNA, 19 nt, Artificial Sequence
  Description of Artificial Sequence: Synthetic oligonucleotide
  Antisense strand to SEQ ID NO: 2165440
uuagaaggcgacuggacac

SEQ ID NO: 2165442 - RNA, 19 nt, Artificial Sequence
  Description of Artificial Sequence: Synthetic oligonucleotide
  Sense strand starting at position 3727 of SEQ ID NO: 1883036
auagaaguauuguauguag

SEQ ID NO: 2165443 - RNA, 19 nt, Artificial Sequence
  Description of Artificial Sequence: Synthetic oligonucleotide
  Antisense strand to SEQ ID NO: 2165442
cuacauacaauacuucuau

SEQ ID NO: 2165444 - RNA, 19 nt, Artificial Sequence
  Description of Artificial Sequence: Synthetic oligonucleotide
  Sense strand starting at position 3729 of SEQ ID NO: 1883036
agaaguauuguauguagaa

SEQ ID NO: 2165445 - RNA, 19 nt, Artificial Sequence
  Description of Artificial Sequence: Synthetic oligonucleotide
  Antisense strand to SEQ ID NO: 2165444
uucuacauacaauacuucu

SEQ ID NO: 2165446 - RNA, 19 nt, Artificial Sequence
  Description of Artificial Sequence: Synthetic oligonucleotide
  Sense strand starting at position 3730 of SEQ ID NO: 1883036
gaaguauuguauguagaau

SEQ ID NO: 2165447 - RNA, 19 nt, Artificial Sequence
  Description of Artificial Sequence: Synthetic oligonucleotide
  Antisense strand to SEQ ID NO: 2165446
auucuacauacaauacuuc

SEQ ID NO: 2165448 - RNA, 19 nt, Artificial Sequence
  Description of Artificial Sequence: Synthetic oligonucleotide
  Sense strand starting at position 312 of SEQ ID NO: 1883037
ccaccuacucuagggaauu

SEQ ID NO: 2165449 - RNA, 19 nt, Artificial Sequence
  Description of Artificial Sequence: Synthetic oligonucleotide
  Antisense strand to SEQ ID NO: 2165448
aauucccuagaguaggugg

SEQ ID NO: 2165450 - RNA, 19 nt, Artificial Sequence
  Description of Artificial Sequence: Synthetic oligonucleotide
  Sense strand starting at position 400 of SEQ ID NO: 1883037
gcuugaaaggguuaaggca

SEQ ID NO: 2165451 - RNA, 19 nt, Artificial Sequence
  Description of Artificial Sequence: Synthetic oligonucleotide
  Antisense strand to SEQ ID NO: 2165450
ugccuuaacccuuucaagc

SEQ ID NO: 2165452 - RNA, 19 nt, Artificial Sequence
  Description of Artificial Sequence: Synthetic oligonucleotide
  Sense strand starting at position 435 of SEQ ID NO: 1883037
ccuagugaugcucagagaa

SEQ ID NO: 2165453 - RNA, 19 nt, Artificial Sequence
  Description of Artificial Sequence: Synthetic oligonucleotide
  Antisense strand to SEQ ID NO: 2165452
uucucugagcaucacuagg

SEQ ID NO: 2165454 - RNA, 19 nt, Artificial Sequence
  Description of Artificial Sequence: Synthetic oligonucleotide
  Sense strand starting at position 531 of SEQ ID NO: 1883037
cagaguacuuuccuaagga

SEQ ID NO: 2165455 - RNA, 19 nt, Artificial Sequence
  Description of Artificial Sequence: Synthetic oligonucleotide
  Antisense strand to SEQ ID NO: 2165454
uccuuaggaaaguacucug

SEQ ID NO: 2165456 - RNA, 19 nt, Artificial Sequence
  Description of Artificial Sequence: Synthetic oligonucleotide
  Sense strand starting at position 704 of SEQ ID NO: 1883037
ugauuaguuugcuugaaua

SEQ ID NO: 2165457 - RNA, 19 nt, Artificial Sequence
  Description of Artificial Sequence: Synthetic oligonucleotide
  Antisense strand to SEQ ID NO: 2165456
uauucaagcaaacuaauca

SEQ ID NO: 2165458 - RNA, 19 nt, Artificial Sequence
  Description of Artificial Sequence: Synthetic oligonucleotide
  Sense strand starting at position 753 of SEQ ID NO: 1883037
ccucuugaggguuaucaca

SEQ ID NO: 2165459 - RNA, 19 nt, Artificial Sequence
  Description of Artificial Sequence: Synthetic oligonucleotide
  Antisense strand to SEQ ID NO: 2165458
ugugauaacccucaagagg

SEQ ID NO: 2165460 - RNA, 19 nt, Artificial Sequence
  Description of Artificial Sequence: Synthetic oligonucleotide
  Sense strand starting at position 755 of SEQ ID NO: 1883037
ucuugaggguuaucacaga

SEQ ID NO: 2165461 - RNA, 19 nt, Artificial Sequence
  Description of Artificial Sequence: Synthetic oligonucleotide
  Antisense strand to SEQ ID NO: 2165460
ucugugauaacccucaaga

SEQ ID NO: 2165462 - RNA, 19 nt, Artificial Sequence
  Description of Artificial Sequence: Synthetic oligonucleotide
  Sense strand starting at position 839 of SEQ ID NO: 1883037
uaagaaguuguauaggcuu

SEQ ID NO: 2165463 - RNA, 19 nt, Artificial Sequence
  Description of Artificial Sequence: Synthetic oligonucleotide
  Antisense strand to SEQ ID NO: 2165462
aagccuauacaacuucuua

SEQ ID NO: 2165464 - RNA, 19 nt, Artificial Sequence
  Description of Artificial Sequence: Synthetic oligonucleotide
  Sense strand starting at position 841 of SEQ ID NO: 1883037
agaaguuguauaggcuuga

SEQ ID NO: 2165465 - RNA, 19 nt, Artificial Sequence
  Description of Artificial Sequence: Synthetic oligonucleotide
  Antisense strand to SEQ ID NO: 2165464
ucaagccuauacaacuucu

SEQ ID NO: 2165466 - RNA, 19 nt, Artificial Sequence
  Description of Artificial Sequence: Synthetic oligonucleotide
  Sense strand starting at position 842 of SEQ ID NO: 1883037
gaaguuguauaggcuugau

SEQ ID NO: 2165467 - RNA, 19 nt, Artificial Sequence
  Description of Artificial Sequence: Synthetic oligonucleotide
  Antisense strand to SEQ ID NO: 2165466
aucaagccuauacaacuuc

SEQ ID NO: 2165468 - RNA, 19 nt, Artificial Sequence
  Description of Artificial Sequence: Synthetic oligonucleotide
  Sense strand starting at position 845 of SEQ ID NO: 1883037
guuguauaggcuugauuag

SEQ ID NO: 2165469 - RNA, 19 nt, Artificial Sequence
  Description of Artificial Sequence: Synthetic oligonucleotide
  Antisense strand to SEQ ID NO: 2165468
cuaaucaagccuauacaac

SEQ ID NO: 2165470 - RNA, 19 nt, Artificial Sequence
  Description of Artificial Sequence: Synthetic oligonucleotide
  Sense strand starting at position 846 of SEQ ID NO: 1883037
uuguauaggcuugauuaga

SEQ ID NO: 2165471 - RNA, 19 nt, Artificial Sequence
  Description of Artificial Sequence: Synthetic oligonucleotide
  Antisense strand to SEQ ID NO: 2165470
ucuaaucaagccuauacaa

SEQ ID NO: 2165472 - RNA, 19 nt, Artificial Sequence
  Description of Artificial Sequence: Synthetic oligonucleotide
  Sense strand starting at position 921 of SEQ ID NO: 1883037
ugggacuaaauaugguauu

SEQ ID NO: 2165473 - RNA, 19 nt, Artificial Sequence
  Description of Artificial Sequence: Synthetic oligonucleotide
  Antisense strand to SEQ ID NO: 2165472
aauaccauauuuaguccca

SEQ ID NO: 2165474 - RNA, 19 nt, Artificial Sequence
  Description of Artificial Sequence: Synthetic oligonucleotide
  Sense strand starting at position 934 of SEQ ID NO: 1883037
gguauucugccagagaagu

SEQ ID NO: 2165475 - RNA, 19 nt, Artificial Sequence
  Description of Artificial Sequence: Synthetic oligonucleotide
  Antisense strand to SEQ ID NO: 2165474
acuucucuggcagaauacc

SEQ ID NO: 2165476 - RNA, 19 nt, Artificial Sequence
  Description of Artificial Sequence: Synthetic oligonucleotide
  Sense strand starting at position 973 of SEQ ID NO: 1883037
cugaaaugguguccagguu

SEQ ID NO: 2165477 - RNA, 19 nt, Artificial Sequence
  Description of Artificial Sequence: Synthetic oligonucleotide
  Antisense strand to SEQ ID NO: 2165476
aaccuggacaccauuucag

SEQ ID NO: 2165478 - RNA, 19 nt, Artificial Sequence
  Description of Artificial Sequence: Synthetic oligonucleotide
  Sense strand starting at position 974 of SEQ ID NO: 1883037
ugaaaugguguccagguuu

SEQ ID NO: 2165479 - RNA, 19 nt, Artificial Sequence
  Description of Artificial Sequence: Synthetic oligonucleotide
  Antisense strand to SEQ ID NO: 2165478
aaaccuggacaccauuuca

SEQ ID NO: 2165480 - RNA, 19 nt, Artificial Sequence
  Description of Artificial Sequence: Synthetic oligonucleotide
  Sense strand starting at position 1035 of SEQ ID NO: 1883037
uuuccucuggguuagugaa

SEQ ID NO: 2165481 - RNA, 19 nt, Artificial Sequence
  Description of Artificial Sequence: Synthetic oligonucleotide
  Antisense strand to SEQ ID NO: 2165480
uucacuaacccagaggaaa

SEQ ID NO: 2165482 - RNA, 19 nt, Artificial Sequence
  Description of Artificial Sequence: Synthetic oligonucleotide
  Sense strand starting at position 1042 of SEQ ID NO: 1883037
uggguuagugaaugauuca

SEQ ID NO: 2165483 - RNA, 19 nt, Artificial Sequence
  Description of Artificial Sequence: Synthetic oligonucleotide
  Antisense strand to SEQ ID NO: 2165482
ugaaucauucacuaaccca

SEQ ID NO: 2165484 - RNA, 19 nt, Artificial Sequence
  Description of Artificial Sequence: Synthetic oligonucleotide
  Sense strand starting at position 1169 of SEQ ID NO: 1883037
aucuaaguguugucagaug

SEQ ID NO: 2165485 - RNA, 19 nt, Artificial Sequence
  Description of Artificial Sequence: Synthetic oligonucleotide
  Antisense strand to SEQ ID NO: 2165484
caucugacaacacuuagau

SEQ ID NO: 2165486 - RNA, 19 nt, Artificial Sequence
  Description of Artificial Sequence: Synthetic oligonucleotide
  Sense strand starting at position 1174 of SEQ ID NO: 1883037
aguguugucagauggagag

SEQ ID NO: 2165487 - RNA, 19 nt, Artificial Sequence
  Description of Artificial Sequence: Synthetic oligonucleotide
  Antisense strand to SEQ ID NO: 2165486
cucuccaucugacaacacu

SEQ ID NO: 2165488 - RNA, 19 nt, Artificial Sequence
  Description of Artificial Sequence: Synthetic oligonucleotide
  Sense strand starting at position 1344 of SEQ ID NO: 1883037
acguaauaggaucaggcuu

SEQ ID NO: 2165489 - RNA, 19 nt, Artificial Sequence
  Description of Artificial Sequence: Synthetic oligonucleotide
  Antisense strand to SEQ ID NO: 2165488
aagccugauccuauuacgu

SEQ ID NO: 2165490 - RNA, 19 nt, Artificial Sequence
  Description of Artificial Sequence: Synthetic oligonucleotide
  Sense strand starting at position 2315 of SEQ ID NO: 1883037
gacacauacuuugcuggau

SEQ ID NO: 2165491 - RNA, 19 nt, Artificial Sequence
  Description of Artificial Sequence: Synthetic oligonucleotide
  Antisense strand to SEQ ID NO: 2165490
auccagcaaaguauguguc

SEQ ID NO: 2165492 - RNA, 19 nt, Artificial Sequence
  Description of Artificial Sequence: Synthetic oligonucleotide
  Sense strand starting at position 2316 of SEQ ID NO: 1883037
acacauacuuugcuggaua

SEQ ID NO: 2165493 - RNA, 19 nt, Artificial Sequence
  Description of Artificial Sequence: Synthetic oligonucleotide
  Antisense strand to SEQ ID NO: 2165492
uauccagcaaaguaugugu

SEQ ID NO: 2165494 - RNA, 19 nt, Artificial Sequence
  Description of Artificial Sequence: Synthetic oligonucleotide
  Sense strand starting at position 2410 of SEQ ID NO: 1883037
ugacuuagaaggcgagauu

SEQ ID NO: 2165495 - RNA, 19 nt, Artificial Sequence
  Description of Artificial Sequence: Synthetic oligonucleotide
  Antisense strand to SEQ ID NO: 2165494
aaucucgccuucuaaguca

SEQ ID NO: 2165496 - RNA, 19 nt, Artificial Sequence
  Description of Artificial Sequence: Synthetic oligonucleotide
  Sense strand starting at position 2422 of SEQ ID NO: 1883037
cgagauugcaaauauugcu

SEQ ID NO: 2165497 - RNA, 19 nt, Artificial Sequence
  Description of Artificial Sequence: Synthetic oligonucleotide
  Antisense strand to SEQ ID NO: 2165496
agcaauauuugcaaucucg

SEQ ID NO: 2165498 - RNA, 19 nt, Artificial Sequence
  Description of Artificial Sequence: Synthetic oligonucleotide
  Sense strand starting at position 2493 of SEQ ID NO: 1883037
gaauguagugcagaacgua

SEQ ID NO: 2165499 - RNA, 19 nt, Artificial Sequence
  Description of Artificial Sequence: Synthetic oligonucleotide
  Antisense strand to SEQ ID NO: 2165498
uacguucugcacuacauuc

SEQ ID NO: 2165500 - RNA, 19 nt, Artificial Sequence
  Description of Artificial Sequence: Synthetic oligonucleotide
  Sense strand starting at position 2705 of SEQ ID NO: 1883037
uuuauaagacaguggugau

SEQ ID NO: 2165501 - RNA, 19 nt, Artificial Sequence
  Description of Artificial Sequence: Synthetic oligonucleotide
  Antisense strand to SEQ ID NO: 2165500
aucaccacugucuuauaaa

SEQ ID NO: 2165502 - RNA, 19 nt, Artificial Sequence
  Description of Artificial Sequence: Synthetic oligonucleotide
  Sense strand starting at position 2706 of SEQ ID NO: 1883037
uuauaagacaguggugauc

SEQ ID NO: 2165503 - RNA, 19 nt, Artificial Sequence
  Description of Artificial Sequence: Synthetic oligonucleotide
  Antisense strand to SEQ ID NO: 2165502
gaucaccacugucuuauaa

SEQ ID NO: 2165504 - RNA, 19 nt, Artificial Sequence
  Description of Artificial Sequence: Synthetic oligonucleotide
  Sense strand starting at position 2749 of SEQ ID NO: 1883037
guagguuguggauguaaua

SEQ ID NO: 2165505 - RNA, 19 nt, Artificial Sequence
  Description of Artificial Sequence: Synthetic oligonucleotide
  Antisense strand to SEQ ID NO: 2165504
uauuacauccacaaccuac

SEQ ID NO: 2165506 - RNA, 19 nt, Artificial Sequence
  Description of Artificial Sequence: Synthetic oligonucleotide
  Sense strand starting at position 2968 of SEQ ID NO: 1883037
gacuguucccagggcucaa

SEQ ID NO: 2165507 - RNA, 19 nt, Artificial Sequence
  Description of Artificial Sequence: Synthetic oligonucleotide
  Antisense strand to SEQ ID NO: 2165506
uugagcccugggaacaguc

SEQ ID NO: 2165508 - RNA, 19 nt, Artificial Sequence
  Description of Artificial Sequence: Synthetic oligonucleotide
  Sense strand starting at position 3356 of SEQ ID NO: 1883037
uugaucuugagcuauggga

SEQ ID NO: 2165509 - RNA, 19 nt, Artificial Sequence
  Description of Artificial Sequence: Synthetic oligonucleotide
  Antisense strand to SEQ ID NO: 2165508
ucccauagcucaagaucaa

SEQ ID NO: 2165510 - RNA, 19 nt, Artificial Sequence
  Description of Artificial Sequence: Synthetic oligonucleotide
  Sense strand starting at position 3358 of SEQ ID NO: 1883037
gaucuugagcuaugggauu

SEQ ID NO: 2165511 - RNA, 19 nt, Artificial Sequence
  Description of Artificial Sequence: Synthetic oligonucleotide
  Antisense strand to SEQ ID NO: 2165510
aaucccauagcucaagauc

SEQ ID NO: 2165512 - RNA, 19 nt, Artificial Sequence
  Description of Artificial Sequence: Synthetic oligonucleotide
  Sense strand starting at position 3459 of SEQ ID NO: 1883037
ggguaugcaccuuaacuga

SEQ ID NO: 2165513 - RNA, 19 nt, Artificial Sequence
  Description of Artificial Sequence: Synthetic oligonucleotide
  Antisense strand to SEQ ID NO: 2165512
ucaguuaaggugcauaccc

SEQ ID NO: 2165514 - RNA, 19 nt, Artificial Sequence
  Description of Artificial Sequence: Synthetic oligonucleotide
  Sense strand starting at position 3526 of SEQ ID NO: 1883037
aucucucuauggucugaau

SEQ ID NO: 2165515 - RNA, 19 nt, Artificial Sequence
  Description of Artificial Sequence: Synthetic oligonucleotide
  Antisense strand to SEQ ID NO: 2165514
auucagaccauagagagau

SEQ ID NO: 2165516 - RNA, 19 nt, Artificial Sequence
  Description of Artificial Sequence: Synthetic oligonucleotide
  Sense strand starting at position 3528 of SEQ ID NO: 1883037
cucucuauggucugaaugu

SEQ ID NO: 2165517 - RNA, 19 nt, Artificial Sequence
  Description of Artificial Sequence: Synthetic oligonucleotide
  Antisense strand to SEQ ID NO: 2165516
acauucagaccauagagag

SEQ ID NO: 2165518 - RNA, 19 nt, Artificial Sequence
  Description of Artificial Sequence: Synthetic oligonucleotide
  Sense strand starting at position 3556 of SEQ ID NO: 1883037
aauugauguguuggauaca

SEQ ID NO: 2165519 - RNA, 19 nt, Artificial Sequence
  Description of Artificial Sequence: Synthetic oligonucleotide
  Antisense strand to SEQ ID NO: 2165518
uguauccaacacaucaauu

SEQ ID NO: 2165520 - RNA, 19 nt, Artificial Sequence
  Description of Artificial Sequence: Synthetic oligonucleotide
  Sense strand starting at position 3559 of SEQ ID NO: 1883037
ugauguguuggauacaauc

SEQ ID NO: 2165521 - RNA, 19 nt, Artificial Sequence
  Description of Artificial Sequence: Synthetic oligonucleotide
  Antisense strand to SEQ ID NO: 2165520
gauuguauccaacacauca

SEQ ID NO: 2165522 - RNA, 19 nt, Artificial Sequence
  Description of Artificial Sequence: Synthetic oligonucleotide
  Sense strand starting at position 3576 of SEQ ID NO: 1883037
ucucuaaugcaucaguguu

SEQ ID NO: 2165523 - RNA, 19 nt, Artificial Sequence
  Description of Artificial Sequence: Synthetic oligonucleotide
  Antisense strand to SEQ ID NO: 2165522
aacacugaugcauuagaga

SEQ ID NO: 2165524 - RNA, 19 nt, Artificial Sequence
  Description of Artificial Sequence: Synthetic oligonucleotide
  Sense strand starting at position 3736 of SEQ ID NO: 1883037
auuccucaccuuugaagga

SEQ ID NO: 2165525 - RNA, 19 nt, Artificial Sequence
  Description of Artificial Sequence: Synthetic oligonucleotide
  Antisense strand to SEQ ID NO: 2165524
uccuucaaaggugaggaau

SEQ ID NO: 2165526 - RNA, 19 nt, Artificial Sequence
  Description of Artificial Sequence: Synthetic oligonucleotide
  Sense strand starting at position 3825 of SEQ ID NO: 1883037
cuuccuagcgucuagaacu

SEQ ID NO: 2165527 - RNA, 19 nt, Artificial Sequence
  Description of Artificial Sequence: Synthetic oligonucleotide
  Antisense strand to SEQ ID NO: 2165526
aguucuagacgcuaggaag

SEQ ID NO: 2165528 - RNA, 19 nt, Artificial Sequence
  Description of Artificial Sequence: Synthetic oligonucleotide
  Sense strand starting at position 9 of SEQ ID NO: 1883038
uugaaagcuguugacucau

SEQ ID NO: 2165529 - RNA, 19 nt, Artificial Sequence
  Description of Artificial Sequence: Synthetic oligonucleotide
  Antisense strand to SEQ ID NO: 2165528
augagucaacagcuuucaa

SEQ ID NO: 2165530 - RNA, 19 nt, Artificial Sequence
  Description of Artificial Sequence: Synthetic oligonucleotide
  Sense strand starting at position 158 of SEQ ID NO: 1883038
uggauuacggaagguugau

SEQ ID NO: 2165531 - RNA, 19 nt, Artificial Sequence
  Description of Artificial Sequence: Synthetic oligonucleotide
  Antisense strand to SEQ ID NO: 2165530
aucaaccuuccguaaucca

SEQ ID NO: 2165532 - RNA, 19 nt, Artificial Sequence
  Description of Artificial Sequence: Synthetic oligonucleotide
  Sense strand starting at position 170 of SEQ ID NO: 1883038
gguugauguacagaggucu

SEQ ID NO: 2165533 - RNA, 19 nt, Artificial Sequence
  Description of Artificial Sequence: Synthetic oligonucleotide
  Antisense strand to SEQ ID NO: 2165532
agaccucuguacaucaacc

SEQ ID NO: 2165534 - RNA, 19 nt, Artificial Sequence
  Description of Artificial Sequence: Synthetic oligonucleotide
  Sense strand starting at position 176 of SEQ ID NO: 1883038
uguacagaggucuguauuu

SEQ ID NO: 2165535 - RNA, 19 nt, Artificial Sequence
  Description of Artificial Sequence: Synthetic oligonucleotide
  Antisense strand to SEQ ID NO: 2165534
aaauacagaccucuguaca

SEQ ID NO: 2165536 - RNA, 19 nt, Artificial Sequence
  Description of Artificial Sequence: Synthetic oligonucleotide
  Sense strand starting at position 228 of SEQ ID NO: 1883038
acaaucaggcgagaauguu

SEQ ID NO: 2165537 - RNA, 19 nt, Artificial Sequence
  Description of Artificial Sequence: Synthetic oligonucleotide
  Antisense strand to SEQ ID NO: 2165536
aacauucucgccugauugu

SEQ ID NO: 2165538 - RNA, 19 nt, Artificial Sequence
  Description of Artificial Sequence: Synthetic oligonucleotide
  Sense strand starting at position 375 of SEQ ID NO: 1883038
ucuugauuuccauguaguc

SEQ ID NO: 2165539 - RNA, 19 nt, Artificial Sequence
  Description of Artificial Sequence: Synthetic oligonucleotide
  Antisense strand to SEQ ID NO: 2165538
gacuacauggaaaucaaga

SEQ ID NO: 2165540 - RNA, 19 nt, Artificial Sequence
  Description of Artificial Sequence: Synthetic oligonucleotide
  Sense strand starting at position 382 of SEQ ID NO: 1883038
uuccauguaguccaguuua

SEQ ID NO: 2165541 - RNA, 19 nt, Artificial Sequence
  Description of Artificial Sequence: Synthetic oligonucleotide
  Antisense strand to SEQ ID NO: 2165540
uaaacuggacuacauggaa

SEQ ID NO: 2165542 - RNA, 19 nt, Artificial Sequence
  Description of Artificial Sequence: Synthetic oligonucleotide
  Sense strand starting at position 408 of SEQ ID NO: 1883038
ccugauuguccaggagaau

SEQ ID NO: 2165543 - RNA, 19 nt, Artificial Sequence
  Description of Artificial Sequence: Synthetic oligonucleotide
  Antisense strand to SEQ ID NO: 2165542
auucuccuggacaaucagg

SEQ ID NO: 2165544 - RNA, 19 nt, Artificial Sequence
  Description of Artificial Sequence: Synthetic oligonucleotide
  Sense strand starting at position 442 of SEQ ID NO: 1883038
cagagucuaguggguaaga

SEQ ID NO: 2165545 - RNA, 19 nt, Artificial Sequence
  Description of Artificial Sequence: Synthetic oligonucleotide
  Antisense strand to SEQ ID NO: 2165544
ucuuacccacuagacucug

SEQ ID NO: 2165546 - RNA, 19 nt, Artificial Sequence
  Description of Artificial Sequence: Synthetic oligonucleotide
  Sense strand starting at position 443 of SEQ ID NO: 1883038
agagucuaguggguaagaa

SEQ ID NO: 2165547 - RNA, 19 nt, Artificial Sequence
  Description of Artificial Sequence: Synthetic oligonucleotide
  Antisense strand to SEQ ID NO: 2165546
uucuuacccacuagacucu

SEQ ID NO: 2165548 - RNA, 19 nt, Artificial Sequence
  Description of Artificial Sequence: Synthetic oligonucleotide
  Sense strand starting at position 537 of SEQ ID NO: 1883038
aucugaguaaaucgugaac

SEQ ID NO: 2165549 - RNA, 19 nt, Artificial Sequence
  Description of Artificial Sequence: Synthetic oligonucleotide
  Antisense strand to SEQ ID NO: 2165548
guucacgauuuacucagau

SEQ ID NO: 2165550 - RNA, 19 nt, Artificial Sequence
  Description of Artificial Sequence: Synthetic oligonucleotide
  Sense strand starting at position 540 of SEQ ID NO: 1883038
ugaguaaaucgugaacucu

SEQ ID NO: 2165551 - RNA, 19 nt, Artificial Sequence
  Description of Artificial Sequence: Synthetic oligonucleotide
  Antisense strand to SEQ ID NO: 2165550
agaguucacgauuuacuca

SEQ ID NO: 2165552 - RNA, 19 nt, Artificial Sequence
  Description of Artificial Sequence: Synthetic oligonucleotide
  Sense strand starting at position 765 of SEQ ID NO: 1883038
cucgcaacccuugagauua

SEQ ID NO: 2165553 - RNA, 19 nt, Artificial Sequence
  Description of Artificial Sequence: Synthetic oligonucleotide
  Antisense strand to SEQ ID NO: 2165552
uaaucucaaggguugcgag

SEQ ID NO: 2165554 - RNA, 19 nt, Artificial Sequence
  Description of Artificial Sequence: Synthetic oligonucleotide
  Sense strand starting at position 777 of SEQ ID NO: 1883038
gagauuaguaacgggauga

SEQ ID NO: 2165555 - RNA, 19 nt, Artificial Sequence
  Description of Artificial Sequence: Synthetic oligonucleotide
  Antisense strand to SEQ ID NO: 2165554
ucaucccguuacuaaucuc

SEQ ID NO: 2165556 - RNA, 19 nt, Artificial Sequence
  Description of Artificial Sequence: Synthetic oligonucleotide
  Sense strand starting at position 778 of SEQ ID NO: 1883038
agauuaguaacgggaugag

SEQ ID NO: 2165557 - RNA, 19 nt, Artificial Sequence
  Description of Artificial Sequence: Synthetic oligonucleotide
  Antisense strand to SEQ ID NO: 2165556
cucaucccguuacuaaucu

SEQ ID NO: 2165558 - RNA, 19 nt, Artificial Sequence
  Description of Artificial Sequence: Synthetic oligonucleotide
  Sense strand starting at position 781 of SEQ ID NO: 1883038
uuaguaacgggaugaguga

SEQ ID NO: 2165559 - RNA, 19 nt, Artificial Sequence
  Description of Artificial Sequence: Synthetic oligonucleotide
  Antisense strand to SEQ ID NO: 2165558
ucacucaucccguuacuaa

SEQ ID NO: 2165560 - RNA, 19 nt, Artificial Sequence
  Description of Artificial Sequence: Synthetic oligonucleotide
  Sense strand starting at position 1059 of SEQ ID NO: 1883038
ugaguucgcccugaagaug

SEQ ID NO: 2165561 - RNA, 19 nt, Artificial Sequence
  Description of Artificial Sequence: Synthetic oligonucleotide
  Antisense strand to SEQ ID NO: 2165560
caucuucagggcgaacuca

SEQ ID NO: 2165562 - RNA, 19 nt, Artificial Sequence
  Description of Artificial Sequence: Synthetic oligonucleotide
  Sense strand starting at position 1135 of SEQ ID NO: 1883038
acucuuaaguggucacgga

SEQ ID NO: 2165563 - RNA, 19 nt, Artificial Sequence
  Description of Artificial Sequence: Synthetic oligonucleotide
  Antisense strand to SEQ ID NO: 2165562
uccgugaccacuuaagagu

SEQ ID NO: 2165564 - RNA, 19 nt, Artificial Sequence
  Description of Artificial Sequence: Synthetic oligonucleotide
  Sense strand starting at position 1136 of SEQ ID NO: 1883038
cucuuaaguggucacggau

SEQ ID NO: 2165565 - RNA, 19 nt, Artificial Sequence
  Description of Artificial Sequence: Synthetic oligonucleotide
  Antisense strand to SEQ ID NO: 2165564
auccgugaccacuuaagag

SEQ ID NO: 2165566 - RNA, 19 nt, Artificial Sequence
  Description of Artificial Sequence: Synthetic oligonucleotide
  Sense strand starting at position 1174 of SEQ ID NO: 1883038
acagcuuucuuucugagac

SEQ ID NO: 2165567 - RNA, 19 nt, Artificial Sequence
  Description of Artificial Sequence: Synthetic oligonucleotide
  Antisense strand to SEQ ID NO: 2165566
gucucagaaagaaagcugu

SEQ ID NO: 2165568 - RNA, 19 nt, Artificial Sequence
  Description of Artificial Sequence: Synthetic oligonucleotide
  Sense strand starting at position 1230 of SEQ ID NO: 1883038
gggagagacuugcucaaua

SEQ ID NO: 2165569 - RNA, 19 nt, Artificial Sequence
  Description of Artificial Sequence: Synthetic oligonucleotide
  Antisense strand to SEQ ID NO: 2165568
uauugagcaagucucuccc

SEQ ID NO: 2165570 - RNA, 19 nt, Artificial Sequence
  Description of Artificial Sequence: Synthetic oligonucleotide
  Sense strand starting at position 1241 of SEQ ID NO: 1883038
gcucaauaagcugaaaguu

SEQ ID NO: 2165571 - RNA, 19 nt, Artificial Sequence
  Description of Artificial Sequence: Synthetic oligonucleotide
  Antisense strand to SEQ ID NO: 2165570
aacuuucagcuuauugagc

SEQ ID NO: 2165572 - RNA, 19 nt, Artificial Sequence
  Description of Artificial Sequence: Synthetic oligonucleotide
  Sense strand starting at position 2337 of SEQ ID NO: 1883038
uugggagcuuguuuaaaug

SEQ ID NO: 2165573 - RNA, 19 nt, Artificial Sequence
  Description of Artificial Sequence: Synthetic oligonucleotide
  Antisense strand to SEQ ID NO: 2165572
cauuuaaacaagcucccaa

SEQ ID NO: 2165574 - RNA, 19 nt, Artificial Sequence
  Description of Artificial Sequence: Synthetic oligonucleotide
  Sense strand starting at position 2375 of SEQ ID NO: 1883038
gcucuugaccaggaggagu

SEQ ID NO: 2165575 - RNA, 19 nt, Artificial Sequence
  Description of Artificial Sequence: Synthetic oligonucleotide
  Antisense strand to SEQ ID NO: 2165574
acuccuccuggucaagagc

SEQ ID NO: 2165576 - RNA, 19 nt, Artificial Sequence
  Description of Artificial Sequence: Synthetic oligonucleotide
  Sense strand starting at position 2632 of SEQ ID NO: 1883038
gacguaguaguauaaugaa

SEQ ID NO: 2165577 - RNA, 19 nt, Artificial Sequence
  Description of Artificial Sequence: Synthetic oligonucleotide
  Antisense strand to SEQ ID NO: 2165576
uucauuauacuacuacguc

SEQ ID NO: 2165578 - RNA, 19 nt, Artificial Sequence
  Description of Artificial Sequence: Synthetic oligonucleotide
  Sense strand starting at position 2990 of SEQ ID NO: 1883038
aucuguaggucacugaauu

SEQ ID NO: 2165579 - RNA, 19 nt, Artificial Sequence
  Description of Artificial Sequence: Synthetic oligonucleotide
  Antisense strand to SEQ ID NO: 2165578
aauucagugaccuacagau

SEQ ID NO: 2165580 - RNA, 19 nt, Artificial Sequence
  Description of Artificial Sequence: Synthetic oligonucleotide
  Sense strand starting at position 3037 of SEQ ID NO: 1883038
guauacauuccucaugcua

SEQ ID NO: 2165581 - RNA, 19 nt, Artificial Sequence
  Description of Artificial Sequence: Synthetic oligonucleotide
  Antisense strand to SEQ ID NO: 2165580
uagcaugaggaauguauac

SEQ ID NO: 2165582 - RNA, 19 nt, Artificial Sequence
  Description of Artificial Sequence: Synthetic oligonucleotide
  Sense strand starting at position 3285 of SEQ ID NO: 1883038
uccuguguucucuagaaga

SEQ ID NO: 2165583 - RNA, 19 nt, Artificial Sequence
  Description of Artificial Sequence: Synthetic oligonucleotide
  Antisense strand to SEQ ID NO: 2165582
ucuucuagagaacacagga

SEQ ID NO: 2165584 - RNA, 19 nt, Artificial Sequence
  Description of Artificial Sequence: Synthetic oligonucleotide
  Sense strand starting at position 3287 of SEQ ID NO: 1883038
cuguguucucuagaagagu

SEQ ID NO: 2165585 - RNA, 19 nt, Artificial Sequence
  Description of Artificial Sequence: Synthetic oligonucleotide
  Antisense strand to SEQ ID NO: 2165584
acucuucuagagaacacag

SEQ ID NO: 2165586 - RNA, 19 nt, Artificial Sequence
  Description of Artificial Sequence: Synthetic oligonucleotide
  Sense strand starting at position 3319 of SEQ ID NO: 1883038
uagauacaguucuuggcaa

SEQ ID NO: 2165587 - RNA, 19 nt, Artificial Sequence
  Description of Artificial Sequence: Synthetic oligonucleotide
  Antisense strand to SEQ ID NO: 2165586
uugccaagaacuguaucua

SEQ ID NO: 2165588 - RNA, 19 nt, Artificial Sequence
  Description of Artificial Sequence: Synthetic oligonucleotide
  Sense strand starting at position 3445 of SEQ ID NO: 1883038
auugguugugacugagauu

SEQ ID NO: 2165589 - RNA, 19 nt, Artificial Sequence
  Description of Artificial Sequence: Synthetic oligonucleotide
  Antisense strand to SEQ ID NO: 2165588
aaucucagucacaaccaau

SEQ ID NO: 2165590 - RNA, 19 nt, Artificial Sequence
  Description of Artificial Sequence: Synthetic oligonucleotide
  Sense strand starting at position 3452 of SEQ ID NO: 1883038
gugacugagauuggauuga

SEQ ID NO: 2165591 - RNA, 19 nt, Artificial Sequence
  Description of Artificial Sequence: Synthetic oligonucleotide
  Antisense strand to SEQ ID NO: 2165590
ucaauccaaucucagucac

SEQ ID NO: 2165592 - RNA, 19 nt, Artificial Sequence
  Description of Artificial Sequence: Synthetic oligonucleotide
  Sense strand starting at position 3636 of SEQ ID NO: 1883038
agguaagauguuggcagau

SEQ ID NO: 2165593 - RNA, 19 nt, Artificial Sequence
  Description of Artificial Sequence: Synthetic oligonucleotide
  Antisense strand to SEQ ID NO: 2165592
aucugccaacaucuuaccu

SEQ ID NO: 2165594 - RNA, 19 nt, Artificial Sequence
  Description of Artificial Sequence: Synthetic oligonucleotide
  Sense strand starting at position 3698 of SEQ ID NO: 1883038
cuaccauaggucugugaca

SEQ ID NO: 2165595 - RNA, 19 nt, Artificial Sequence
  Description of Artificial Sequence: Synthetic oligonucleotide
  Antisense strand to SEQ ID NO: 2165594
ugucacagaccuaugguag

SEQ ID NO: 2165596 - RNA, 19 nt, Artificial Sequence
  Description of Artificial Sequence: Synthetic oligonucleotide
  Sense strand starting at position 3700 of SEQ ID NO: 1883038
accauaggucugugacaga

SEQ ID NO: 2165597 - RNA, 19 nt, Artificial Sequence
  Description of Artificial Sequence: Synthetic oligonucleotide
  Antisense strand to SEQ ID NO: 2165596
ucugucacagaccuauggu

SEQ ID NO: 2165598 - RNA, 19 nt, Artificial Sequence
  Description of Artificial Sequence: Synthetic oligonucleotide
  Sense strand starting at position 3705 of SEQ ID NO: 1883038
aggucugugacagaugguu

SEQ ID NO: 2165599 - RNA, 19 nt, Artificial Sequence
  Description of Artificial Sequence: Synthetic oligonucleotide
  Antisense strand to SEQ ID NO: 2165598
aaccaucugucacagaccu

SEQ ID NO: 2165600 - RNA, 19 nt, Artificial Sequence
  Description of Artificial Sequence: Synthetic oligonucleotide
  Sense strand starting at position 3799 of SEQ ID NO: 1883038
agaguucucuuccugggaa

SEQ ID NO: 2165601 - RNA, 19 nt, Artificial Sequence
  Description of Artificial Sequence: Synthetic oligonucleotide
  Antisense strand to SEQ ID NO: 2165600
uucccaggaagagaacucu

SEQ ID NO: 2165602 - RNA, 19 nt, Artificial Sequence
  Description of Artificial Sequence: Synthetic oligonucleotide
  Sense strand starting at position 3801 of SEQ ID NO: 1883038
aguucucuuccugggaaac

SEQ ID NO: 2165603 - RNA, 19 nt, Artificial Sequence
  Description of Artificial Sequence: Synthetic oligonucleotide
  Antisense strand to SEQ ID NO: 2165602
guuucccaggaagagaacu

SEQ ID NO: 2165604 - RNA, 19 nt, Artificial Sequence
  Description of Artificial Sequence: Synthetic oligonucleotide
  Sense strand starting at position 3802 of SEQ ID NO: 1883038
guucucuuccugggaaacu

SEQ ID NO: 2165605 - RNA, 19 nt, Artificial Sequence
  Description of Artificial Sequence: Synthetic oligonucleotide
  Antisense strand to SEQ ID NO: 2165604
aguuucccaggaagagaac

SEQ ID NO: 2165606 - RNA, 19 nt, Artificial Sequence
  Description of Artificial Sequence: Synthetic oligonucleotide
  Sense strand starting at position 3865 of SEQ ID NO: 1883038
ggcaguggcuucucaauuu

SEQ ID NO: 2165607 - RNA, 19 nt, Artificial Sequence
  Description of Artificial Sequence: Synthetic oligonucleotide
  Antisense strand to SEQ ID NO: 2165606
aaauugagaagccacugcc

SEQ ID NO: 2165608 - RNA, 19 nt, Artificial Sequence
  Description of Artificial Sequence: Synthetic oligonucleotide
  Sense strand starting at position 204 of SEQ ID NO: 1883039
auguaauggcaacaugauu

SEQ ID NO: 2165609 - RNA, 19 nt, Artificial Sequence
  Description of Artificial Sequence: Synthetic oligonucleotide
  Antisense strand to SEQ ID NO: 2165608
aaucauguugccauuacau

SEQ ID NO: 2165610 - RNA, 19 nt, Artificial Sequence
  Description of Artificial Sequence: Synthetic oligonucleotide
  Sense strand starting at position 278 of SEQ ID NO: 1883039
cugguaacucaauagucuu

SEQ ID NO: 2165611 - RNA, 19 nt, Artificial Sequence
  Description of Artificial Sequence: Synthetic oligonucleotide
  Antisense strand to SEQ ID NO: 2165610
aagacuauugaguuaccag

SEQ ID NO: 2165612 - RNA, 19 nt, Artificial Sequence
  Description of Artificial Sequence: Synthetic oligonucleotide
  Sense strand starting at position 367 of SEQ ID NO: 1883039
gaucaaguugaucaugcuu

SEQ ID NO: 2165613 - RNA, 19 nt, Artificial Sequence
  Description of Artificial Sequence: Synthetic oligonucleotide
  Antisense strand to SEQ ID NO: 2165612
aagcaugaucaacuugauc

SEQ ID NO: 2165614 - RNA, 19 nt, Artificial Sequence
  Description of Artificial Sequence: Synthetic oligonucleotide
  Sense strand starting at position 593 of SEQ ID NO: 1883039
caaagcauugugggaauau

SEQ ID NO: 2165615 - RNA, 19 nt, Artificial Sequence
  Description of Artificial Sequence: Synthetic oligonucleotide
  Antisense strand to SEQ ID NO: 2165614
auauucccacaaugcuuug

SEQ ID NO: 2165616 - RNA, 19 nt, Artificial Sequence
  Description of Artificial Sequence: Synthetic oligonucleotide
  Sense strand starting at position 675 of SEQ ID NO: 1883039
uucugagaaaggcauguuu

SEQ ID NO: 2165617 - RNA, 19 nt, Artificial Sequence
  Description of Artificial Sequence: Synthetic oligonucleotide
  Antisense strand to SEQ ID NO: 2165616
aaacaugccuuucucagaa

SEQ ID NO: 2165618 - RNA, 19 nt, Artificial Sequence
  Description of Artificial Sequence: Synthetic oligonucleotide
  Sense strand starting at position 677 of SEQ ID NO: 1883039
cugagaaaggcauguuuag

SEQ ID NO: 2165619 - RNA, 19 nt, Artificial Sequence
  Description of Artificial Sequence: Synthetic oligonucleotide
  Antisense strand to SEQ ID NO: 2165618
cuaaacaugccuuucucag

SEQ ID NO: 2165620 - RNA, 19 nt, Artificial Sequence
  Description of Artificial Sequence: Synthetic oligonucleotide
  Sense strand starting at position 693 of SEQ ID NO: 1883039
uagguuugguuaccacaga

SEQ ID NO: 2165621 - RNA, 19 nt, Artificial Sequence
  Description of Artificial Sequence: Synthetic oligonucleotide
  Antisense strand to SEQ ID NO: 2165620
ucugugguaaccaaaccua

SEQ ID NO: 2165622 - RNA, 19 nt, Artificial Sequence
  Description of Artificial Sequence: Synthetic oligonucleotide
  Sense strand starting at position 825 of SEQ ID NO: 1883039
ucucaauccugacuggaca

SEQ ID NO: 2165623 - RNA, 19 nt, Artificial Sequence
  Description of Artificial Sequence: Synthetic oligonucleotide
  Antisense strand to SEQ ID NO: 2165622
uguccagucaggauugaga

SEQ ID NO: 2165624 - RNA, 19 nt, Artificial Sequence
  Description of Artificial Sequence: Synthetic oligonucleotide
  Sense strand starting at position 826 of SEQ ID NO: 1883039
cucaauccugacuggacau

SEQ ID NO: 2165625 - RNA, 19 nt, Artificial Sequence
  Description of Artificial Sequence: Synthetic oligonucleotide
  Antisense strand to SEQ ID NO: 2165624
auguccagucaggauugag

SEQ ID NO: 2165626 - RNA, 19 nt, Artificial Sequence
  Description of Artificial Sequence: Synthetic oligonucleotide
  Sense strand starting at position 1244 of SEQ ID NO: 1883039
aaacgauuguauucuggag

SEQ ID NO: 2165627 - RNA, 19 nt, Artificial Sequence
  Description of Artificial Sequence: Synthetic oligonucleotide
  Antisense strand to SEQ ID NO: 2165626
cuccagaauacaaucguuu

SEQ ID NO: 2165628 - RNA, 19 nt, Artificial Sequence
  Description of Artificial Sequence: Synthetic oligonucleotide
  Sense strand starting at position 1390 of SEQ ID NO: 1883039
augcaaaugcaauggaauu

SEQ ID NO: 2165629 - RNA, 19 nt, Artificial Sequence
  Description of Artificial Sequence: Synthetic oligonucleotide
  Antisense strand to SEQ ID NO: 2165628
aauuccauugcauuugcau

SEQ ID NO: 2165630 - RNA, 19 nt, Artificial Sequence
  Description of Artificial Sequence: Synthetic oligonucleotide
  Sense strand starting at position 1409 of SEQ ID NO: 1883039
auacauugguugcugagaa

SEQ ID NO: 2165631 - RNA, 19 nt, Artificial Sequence
  Description of Artificial Sequence: Synthetic oligonucleotide
  Antisense strand to SEQ ID NO: 2165630
uucucagcaaccaauguau

SEQ ID NO: 2165632 - RNA, 19 nt, Artificial Sequence
  Description of Artificial Sequence: Synthetic oligonucleotide
  Sense strand starting at position 1423 of SEQ ID NO: 1883039
gagaaccauuggucccaua

SEQ ID NO: 2165633 - RNA, 19 nt, Artificial Sequence
  Description of Artificial Sequence: Synthetic oligonucleotide
  Antisense strand to SEQ ID NO: 2165632
uaugggaccaaugguucuc

SEQ ID NO: 2165634 - RNA, 19 nt, Artificial Sequence
  Description of Artificial Sequence: Synthetic oligonucleotide
  Sense strand starting at position 1652 of SEQ ID NO: 1883039
cugguugauagcuaaggau

SEQ ID NO: 2165635 - RNA, 19 nt, Artificial Sequence
  Description of Artificial Sequence: Synthetic oligonucleotide
  Antisense strand to SEQ ID NO: 2165634
auccuuagcuaucaaccag

SEQ ID NO: 2165636 - RNA, 19 nt, Artificial Sequence
  Description of Artificial Sequence: Synthetic oligonucleotide
  Sense strand starting at position 1666 of SEQ ID NO: 1883039
aggauaucuuaggcugauc

SEQ ID NO: 2165637 - RNA, 19 nt, Artificial Sequence
  Description of Artificial Sequence: Synthetic oligonucleotide
  Antisense strand to SEQ ID NO: 2165636
gaucagccuaagauauccu

SEQ ID NO: 2165638 - RNA, 19 nt, Artificial Sequence
  Description of Artificial Sequence: Synthetic oligonucleotide
  Sense strand starting at position 1753 of SEQ ID NO: 1883039
aauaguggugugugauuua

SEQ ID NO: 2165639 - RNA, 19 nt, Artificial Sequence
  Description of Artificial Sequence: Synthetic oligonucleotide
  Antisense strand to SEQ ID NO: 2165638
uaaaucacacaccacuauu

SEQ ID NO: 2165640 - RNA, 19 nt, Artificial Sequence
  Description of Artificial Sequence: Synthetic oligonucleotide
  Sense strand starting at position 1756 of SEQ ID NO: 1883039
aguggugugugauuuagac

SEQ ID NO: 2165641 - RNA, 19 nt, Artificial Sequence
  Description of Artificial Sequence: Synthetic oligonucleotide
  Antisense strand to SEQ ID NO: 2165640
gucuaaaucacacaccacu

SEQ ID NO: 2165642 - RNA, 19 nt, Artificial Sequence
  Description of Artificial Sequence: Synthetic oligonucleotide
  Sense strand starting at position 1787 of SEQ ID NO: 1883039
ugaggaauccuuugaucug

SEQ ID NO: 2165643 - RNA, 19 nt, Artificial Sequence
  Description of Artificial Sequence: Synthetic oligonucleotide
  Antisense strand to SEQ ID NO: 2165642
cagaucaaaggauuccuca

SEQ ID NO: 2165644 - RNA, 19 nt, Artificial Sequence
  Description of Artificial Sequence: Synthetic oligonucleotide
  Sense strand starting at position 1790 of SEQ ID NO: 1883039
ggaauccuuugaucuggau

SEQ ID NO: 2165645 - RNA, 19 nt, Artificial Sequence
  Description of Artificial Sequence: Synthetic oligonucleotide
  Antisense strand to SEQ ID NO: 2165644
auccagaucaaaggauucc

SEQ ID NO: 2165646 - RNA, 19 nt, Artificial Sequence
  Description of Artificial Sequence: Synthetic oligonucleotide
  Sense strand starting at position 1996 of SEQ ID NO: 1883039
uggcccuauguauagaaga

SEQ ID NO: 2165647 - RNA, 19 nt, Artificial Sequence
  Description of Artificial Sequence: Synthetic oligonucleotide
  Antisense strand to SEQ ID NO: 2165646
ucuucuauacauagggcca

SEQ ID NO: 2165648 - RNA, 19 nt, Artificial Sequence
  Description of Artificial Sequence: Synthetic oligonucleotide
  Sense strand starting at position 2158 of SEQ ID NO: 1883039
gcgauagacuaauuauaua

SEQ ID NO: 2165649 - RNA, 19 nt, Artificial Sequence
  Description of Artificial Sequence: Synthetic oligonucleotide
  Antisense strand to SEQ ID NO: 2165648
uauauaauuagucuaucgc

SEQ ID NO: 2165650 - RNA, 19 nt, Artificial Sequence
  Description of Artificial Sequence: Synthetic oligonucleotide
  Sense strand starting at position 2203 of SEQ ID NO: 1883039
acugcuaggaugugagaaa

SEQ ID NO: 2165651 - RNA, 19 nt, Artificial Sequence
  Description of Artificial Sequence: Synthetic oligonucleotide
  Antisense strand to SEQ ID NO: 2165650
uuucucacauccuagcagu

SEQ ID NO: 2165652 - RNA, 19 nt, Artificial Sequence
  Description of Artificial Sequence: Synthetic oligonucleotide
  Sense strand starting at position 2289 of SEQ ID NO: 1883039
gagaaauuguguccagaau

SEQ ID NO: 2165653 - RNA, 19 nt, Artificial Sequence
  Description of Artificial Sequence: Synthetic oligonucleotide
  Antisense strand to SEQ ID NO: 2165652
auucuggacacaauuucuc

SEQ ID NO: 2165654 - RNA, 19 nt, Artificial Sequence
  Description of Artificial Sequence: Synthetic oligonucleotide
  Sense strand starting at position 2325 of SEQ ID NO: 1883039
gggagcaaauccucuuaga

SEQ ID NO: 2165655 - RNA, 19 nt, Artificial Sequence
  Description of Artificial Sequence: Synthetic oligonucleotide
  Antisense strand to SEQ ID NO: 2165654
ucuaagaggauuugcuccc

SEQ ID NO: 2165656 - RNA, 19 nt, Artificial Sequence
  Description of Artificial Sequence: Synthetic oligonucleotide
  Sense strand starting at position 2407 of SEQ ID NO: 1883039
aguugaucuugaucaauua

SEQ ID NO: 2165657 - RNA, 19 nt, Artificial Sequence
  Description of Artificial Sequence: Synthetic oligonucleotide
  Antisense strand to SEQ ID NO: 2165656
uaauugaucaagaucaacu

SEQ ID NO: 2165658 - RNA, 19 nt, Artificial Sequence
  Description of Artificial Sequence: Synthetic oligonucleotide
  Sense strand starting at position 2838 of SEQ ID NO: 1883039
guuguugguaccuacaaua

SEQ ID NO: 2165659 - RNA, 19 nt, Artificial Sequence
  Description of Artificial Sequence: Synthetic oligonucleotide
  Antisense strand to SEQ ID NO: 2165658
uauuguagguaccaacaac

SEQ ID NO: 2165660 - RNA, 19 nt, Artificial Sequence
  Description of Artificial Sequence: Synthetic oligonucleotide
  Sense strand starting at position 2868 of SEQ ID NO: 1883039
gaaguugguccuggaacua

SEQ ID NO: 2165661 - RNA, 19 nt, Artificial Sequence
  Description of Artificial Sequence: Synthetic oligonucleotide
  Antisense strand to SEQ ID NO: 2165660
uaguuccaggaccaacuuc

SEQ ID NO: 2165662 - RNA, 19 nt, Artificial Sequence
  Description of Artificial Sequence: Synthetic oligonucleotide
  Sense strand starting at position 3109 of SEQ ID NO: 1883039
cgugcuuccuauuuaucau

SEQ ID NO: 2165663 - RNA, 19 nt, Artificial Sequence
  Description of Artificial Sequence: Synthetic oligonucleotide
  Antisense strand to SEQ ID NO: 2165662
augauaaauaggaagcacg

SEQ ID NO: 2165664 - RNA, 19 nt, Artificial Sequence
  Description of Artificial Sequence: Synthetic oligonucleotide
  Sense strand starting at position 3246 of SEQ ID NO: 1883039
gacuuugaucgucaauuaa

SEQ ID NO: 2165665 - RNA, 19 nt, Artificial Sequence
  Description of Artificial Sequence: Synthetic oligonucleotide
  Antisense strand to SEQ ID NO: 2165664
uuaauugacgaucaaaguc

SEQ ID NO: 2165666 - RNA, 19 nt, Artificial Sequence
  Description of Artificial Sequence: Synthetic oligonucleotide
  Sense strand starting at position 3303 of SEQ ID NO: 1883039
auccauugauuguuagaaa

SEQ ID NO: 2165667 - RNA, 19 nt, Artificial Sequence
  Description of Artificial Sequence: Synthetic oligonucleotide
  Antisense strand to SEQ ID NO: 2165666
uuucuaacaaucaauggau

SEQ ID NO: 2165668 - RNA, 19 nt, Artificial Sequence
  Description of Artificial Sequence: Synthetic oligonucleotide
  Sense strand starting at position 3377 of SEQ ID NO: 1883039
cucaaauacuuguuggauu

SEQ ID NO: 2165669 - RNA, 19 nt, Artificial Sequence
  Description of Artificial Sequence: Synthetic oligonucleotide
  Antisense strand to SEQ ID NO: 2165668
aauccaacaaguauuugag

SEQ ID NO: 2165670 - RNA, 19 nt, Artificial Sequence
  Description of Artificial Sequence: Synthetic oligonucleotide
  Sense strand starting at position 3379 of SEQ ID NO: 1883039
caaauacuuguuggauuga

SEQ ID NO: 2165671 - RNA, 19 nt, Artificial Sequence
  Description of Artificial Sequence: Synthetic oligonucleotide
  Antisense strand to SEQ ID NO: 2165670
ucaauccaacaaguauuug

SEQ ID NO: 2165672 - RNA, 19 nt, Artificial Sequence
  Description of Artificial Sequence: Synthetic oligonucleotide
  Sense strand starting at position 3384 of SEQ ID NO: 1883039
acuuguuggauugagucaa

SEQ ID NO: 2165673 - RNA, 19 nt, Artificial Sequence
  Description of Artificial Sequence: Synthetic oligonucleotide
  Antisense strand to SEQ ID NO: 2165672
uugacucaauccaacaagu

SEQ ID NO: 2165674 - RNA, 19 nt, Artificial Sequence
  Description of Artificial Sequence: Synthetic oligonucleotide
  Sense strand starting at position 3388 of SEQ ID NO: 1883039
guuggauugagucaauucu

SEQ ID NO: 2165675 - RNA, 19 nt, Artificial Sequence
  Description of Artificial Sequence: Synthetic oligonucleotide
  Antisense strand to SEQ ID NO: 2165674
agaauugacucaauccaac

SEQ ID NO: 2165676 - RNA, 19 nt, Artificial Sequence
  Description of Artificial Sequence: Synthetic oligonucleotide
  Sense strand starting at position 3424 of SEQ ID NO: 1883039
auuaaugaggaacguguaa

SEQ ID NO: 2165677 - RNA, 19 nt, Artificial Sequence
  Description of Artificial Sequence: Synthetic oligonucleotide
  Antisense strand to SEQ ID NO: 2165676
uuacacguuccucauuaau

SEQ ID NO: 2165678 - RNA, 19 nt, Artificial Sequence
  Description of Artificial Sequence: Synthetic oligonucleotide
  Sense strand starting at position 3527 of SEQ ID NO: 1883039
cuagaaagcuuuccaagag

SEQ ID NO: 2165679 - RNA, 19 nt, Artificial Sequence
  Description of Artificial Sequence: Synthetic oligonucleotide
  Antisense strand to SEQ ID NO: 2165678
cucuuggaaagcuuucuag

SEQ ID NO: 2165680 - RNA, 19 nt, Artificial Sequence
  Description of Artificial Sequence: Synthetic oligonucleotide
  Sense strand starting at position 3531 of SEQ ID NO: 1883039
aaagcuuuccaagagugca

SEQ ID NO: 2165681 - RNA, 19 nt, Artificial Sequence
  Description of Artificial Sequence: Synthetic oligonucleotide
  Antisense strand to SEQ ID NO: 2165680
ugcacucuuggaaagcuuu

SEQ ID NO: 2165682 - RNA, 19 nt, Artificial Sequence
  Description of Artificial Sequence: Synthetic oligonucleotide
  Sense strand starting at position 3554 of SEQ ID NO: 1883039
agauaugagcuauagcaac

SEQ ID NO: 2165683 - RNA, 19 nt, Artificial Sequence
  Description of Artificial Sequence: Synthetic oligonucleotide
  Antisense strand to SEQ ID NO: 2165682
guugcuauagcucauaucu

SEQ ID NO: 2165684 - RNA, 19 nt, Artificial Sequence
  Description of Artificial Sequence: Synthetic oligonucleotide
  Sense strand starting at position 3676 of SEQ ID NO: 1883039
gcaauacuaccguaauuag

SEQ ID NO: 2165685 - RNA, 19 nt, Artificial Sequence
  Description of Artificial Sequence: Synthetic oligonucleotide
  Antisense strand to SEQ ID NO: 2165684
cuaauuacgguaguauugc

SEQ ID NO: 2165686 - RNA, 19 nt, Artificial Sequence
  Description of Artificial Sequence: Synthetic oligonucleotide
  Sense strand starting at position 3679 of SEQ ID NO: 1883039
auacuaccguaauuagaag

SEQ ID NO: 2165687 - RNA, 19 nt, Artificial Sequence
  Description of Artificial Sequence: Synthetic oligonucleotide
  Antisense strand to SEQ ID NO: 2165686
cuucuaauuacgguaguau

SEQ ID NO: 2165688 - RNA, 19 nt, Artificial Sequence
  Description of Artificial Sequence: Synthetic oligonucleotide
  Sense strand starting at position 2069 of SEQ ID NO: 1883040
gaggcaugggcauagcaaa

SEQ ID NO: 2165689 - RNA, 19 nt, Artificial Sequence
  Description of Artificial Sequence: Synthetic oligonucleotide
  Antisense strand to SEQ ID NO: 2165688
uuugcuaugcccaugccuc

SEQ ID NO: 2165690 - RNA, 19 nt, Artificial Sequence
  Description of Artificial Sequence: Synthetic oligonucleotide
  Sense strand starting at position 2148 of SEQ ID NO: 1883040
gacugacucuuagucaaug

SEQ ID NO: 2165691 - RNA, 19 nt, Artificial Sequence
  Description of Artificial Sequence: Synthetic oligonucleotide
  Antisense strand to SEQ ID NO: 2165690
cauugacuaagagucaguc

SEQ ID NO: 2165692 - RNA, 19 nt, Artificial Sequence
  Description of Artificial Sequence: Synthetic oligonucleotide
  Sense strand starting at position 2149 of SEQ ID NO: 1883040
acugacucuuagucaaugu

SEQ ID NO: 2165693 - RNA, 19 nt, Artificial Sequence
  Description of Artificial Sequence: Synthetic oligonucleotide
  Antisense strand to SEQ ID NO: 2165692
acauugacuaagagucagu

SEQ ID NO: 2165694 - RNA, 19 nt, Artificial Sequence
  Description of Artificial Sequence: Synthetic oligonucleotide
  Sense strand starting at position 2153 of SEQ ID NO: 1883040
acucuuagucaauguggga

SEQ ID NO: 2165695 - RNA, 19 nt, Artificial Sequence
  Description of Artificial Sequence: Synthetic oligonucleotide
  Antisense strand to SEQ ID NO: 2165694
ucccacauugacuaagagu

SEQ ID NO: 2165696 - RNA, 19 nt, Artificial Sequence
  Description of Artificial Sequence: Synthetic oligonucleotide
  Sense strand starting at position 2209 of SEQ ID NO: 1883040
ccagauauucuaugguuga

SEQ ID NO: 2165697 - RNA, 19 nt, Artificial Sequence
  Description of Artificial Sequence: Synthetic oligonucleotide
  Antisense strand to SEQ ID NO: 2165696
ucaaccauagaauaucugg

SEQ ID NO: 2165698 - RNA, 19 nt, Artificial Sequence
  Description of Artificial Sequence: Synthetic oligonucleotide
  Sense strand starting at position 2276 of SEQ ID NO: 1883040
cuggcaugauuugaggaga

SEQ ID NO: 2165699 - RNA, 19 nt, Artificial Sequence
  Description of Artificial Sequence: Synthetic oligonucleotide
  Antisense strand to SEQ ID NO: 2165698
ucuccucaaaucaugccag

SEQ ID NO: 2165700 - RNA, 19 nt, Artificial Sequence
  Description of Artificial Sequence: Synthetic oligonucleotide
  Sense strand starting at position 2299 of SEQ ID NO: 1883040
gcauuugauuuggaaugca

SEQ ID NO: 2165701 - RNA, 19 nt, Artificial Sequence
  Description of Artificial Sequence: Synthetic oligonucleotide
  Antisense strand to SEQ ID NO: 2165700
ugcauuccaaaucaaaugc

SEQ ID NO: 2165702 - RNA, 19 nt, Artificial Sequence
  Description of Artificial Sequence: Synthetic oligonucleotide
  Sense strand starting at position 2329 of SEQ ID NO: 1883040
uuuaguauaugucuuacca

SEQ ID NO: 2165703 - RNA, 19 nt, Artificial Sequence
  Description of Artificial Sequence: Synthetic oligonucleotide
  Antisense strand to SEQ ID NO: 2165702
ugguaagacauauacuaaa

SEQ ID NO: 2165704 - RNA, 19 nt, Artificial Sequence
  Description of Artificial Sequence: Synthetic oligonucleotide
  Sense strand starting at position 2333 of SEQ ID NO: 1883040
guauaugucuuaccauuag

SEQ ID NO: 2165705 - RNA, 19 nt, Artificial Sequence
  Description of Artificial Sequence: Synthetic oligonucleotide
  Antisense strand to SEQ ID NO: 2165704
cuaaugguaagacauauac

SEQ ID NO: 2165706 - RNA, 19 nt, Artificial Sequence
  Description of Artificial Sequence: Synthetic oligonucleotide
  Sense strand starting at position 2344 of SEQ ID NO: 1883040
accauuagcucugugaaca

SEQ ID NO: 2165707 - RNA, 19 nt, Artificial Sequence
  Description of Artificial Sequence: Synthetic oligonucleotide
  Antisense strand to SEQ ID NO: 2165706
uguucacagagcuaauggu

SEQ ID NO: 2165708 - RNA, 19 nt, Artificial Sequence
  Description of Artificial Sequence: Synthetic oligonucleotide
  Sense strand starting at position 2345 of SEQ ID NO: 1883040
ccauuagcucugugaacag

SEQ ID NO: 2165709 - RNA, 19 nt, Artificial Sequence
  Description of Artificial Sequence: Synthetic oligonucleotide
  Antisense strand to SEQ ID NO: 2165708
cuguucacagagcuaaugg

SEQ ID NO: 2165710 - RNA, 19 nt, Artificial Sequence
  Description of Artificial Sequence: Synthetic oligonucleotide
  Sense strand starting at position 2385 of SEQ ID NO: 1883040
gguguccugaacuguaaga

SEQ ID NO: 2165711 - RNA, 19 nt, Artificial Sequence
  Description of Artificial Sequence: Synthetic oligonucleotide
  Antisense strand to SEQ ID NO: 2165710
ucuuacaguucaggacacc

SEQ ID NO: 2165712 - RNA, 19 nt, Artificial Sequence
  Description of Artificial Sequence: Synthetic oligonucleotide
  Sense strand starting at position 2387 of SEQ ID NO: 1883040
uguccugaacuguaagaca

SEQ ID NO: 2165713 - RNA, 19 nt, Artificial Sequence
  Description of Artificial Sequence: Synthetic oligonucleotide
  Antisense strand to SEQ ID NO: 2165712
ugucuuacaguucaggaca

SEQ ID NO: 2165714 - RNA, 19 nt, Artificial Sequence
  Description of Artificial Sequence: Synthetic oligonucleotide
  Sense strand starting at position 2395 of SEQ ID NO: 1883040
acuguaagacaggguuaau

SEQ ID NO: 2165715 - RNA, 19 nt, Artificial Sequence
  Description of Artificial Sequence: Synthetic oligonucleotide
  Antisense strand to SEQ ID NO: 2165714
auuaacccugucuuacagu

SEQ ID NO: 2165716 - RNA, 19 nt, Artificial Sequence
  Description of Artificial Sequence: Synthetic oligonucleotide
  Sense strand starting at position 2423 of SEQ ID NO: 1883040
auagguuugcugugagauu

SEQ ID NO: 2165717 - RNA, 19 nt, Artificial Sequence
  Description of Artificial Sequence: Synthetic oligonucleotide
  Antisense strand to SEQ ID NO: 2165716
aaucucacagcaaaccuau

SEQ ID NO: 2165718 - RNA, 19 nt, Artificial Sequence
  Description of Artificial Sequence: Synthetic oligonucleotide
  Sense strand starting at position 2499 of SEQ ID NO: 1883040
aagguuugaucgcuauuaa

SEQ ID NO: 2165719 - RNA, 19 nt, Artificial Sequence
  Description of Artificial Sequence: Synthetic oligonucleotide
  Antisense strand to SEQ ID NO: 2165718
uuaauagcgaucaaaccuu

SEQ ID NO: 2165720 - RNA, 19 nt, Artificial Sequence
  Description of Artificial Sequence: Synthetic oligonucleotide
  Sense strand starting at position 2500 of SEQ ID NO: 1883040
agguuugaucgcuauuaag

SEQ ID NO: 2165721 - RNA, 19 nt, Artificial Sequence
  Description of Artificial Sequence: Synthetic oligonucleotide
  Antisense strand to SEQ ID NO: 2165720
cuuaauagcgaucaaaccu

SEQ ID NO: 2165722 - RNA, 19 nt, Artificial Sequence
  Description of Artificial Sequence: Synthetic oligonucleotide
  Sense strand starting at position 2508 of SEQ ID NO: 1883040
ucgcuauuaagacaggagu

SEQ ID NO: 2165723 - RNA, 19 nt, Artificial Sequence
  Description of Artificial Sequence: Synthetic oligonucleotide
  Antisense strand to SEQ ID NO: 2165722
acuccugucuuaauagcga

SEQ ID NO: 2165724 - RNA, 19 nt, Artificial Sequence
  Description of Artificial Sequence: Synthetic oligonucleotide
  Sense strand starting at position 2510 of SEQ ID NO: 1883040
gcuauuaagacaggaguuu

SEQ ID NO: 2165725 - RNA, 19 nt, Artificial Sequence
  Description of Artificial Sequence: Synthetic oligonucleotide
  Antisense strand to SEQ ID NO: 2165724
aaacuccugucuuaauagc

SEQ ID NO: 2165726 - RNA, 19 nt, Artificial Sequence
  Description of Artificial Sequence: Synthetic oligonucleotide
  Sense strand starting at position 2668 of SEQ ID NO: 1883040
aagcuugugggaugagaga

SEQ ID NO: 2165727 - RNA, 19 nt, Artificial Sequence
  Description of Artificial Sequence: Synthetic oligonucleotide
  Antisense strand to SEQ ID NO: 2165726
ucucucaucccacaagcuu

SEQ ID NO: 2165728 - RNA, 19 nt, Artificial Sequence
  Description of Artificial Sequence: Synthetic oligonucleotide
  Sense strand starting at position 2683 of SEQ ID NO: 1883040
gagagcuauuuagaaagcu

SEQ ID NO: 2165729 - RNA, 19 nt, Artificial Sequence
  Description of Artificial Sequence: Synthetic oligonucleotide
  Antisense strand to SEQ ID NO: 2165728
agcuuucuaaauagcucuc

SEQ ID NO: 2165730 - RNA, 19 nt, Artificial Sequence
  Description of Artificial Sequence: Synthetic oligonucleotide
  Sense strand starting at position 2725 of SEQ ID NO: 1883040
cugggcaguggcugagaua

SEQ ID NO: 2165731 - RNA, 19 nt, Artificial Sequence
  Description of Artificial Sequence: Synthetic oligonucleotide
  Antisense strand to SEQ ID NO: 2165730
uaucucagccacugcccag

SEQ ID NO: 2165732 - RNA, 19 nt, Artificial Sequence
  Description of Artificial Sequence: Synthetic oligonucleotide
  Sense strand starting at position 2726 of SEQ ID NO: 1883040
ugggcaguggcugagauaa

SEQ ID NO: 2165733 - RNA, 19 nt, Artificial Sequence
  Description of Artificial Sequence: Synthetic oligonucleotide
  Antisense strand to SEQ ID NO: 2165732
uuaucucagccacugccca

SEQ ID NO: 2165734 - RNA, 19 nt, Artificial Sequence
  Description of Artificial Sequence: Synthetic oligonucleotide
  Sense strand starting at position 2817 of SEQ ID NO: 1883040
uuauuuguggcucggagag

SEQ ID NO: 2165735 - RNA, 19 nt, Artificial Sequence
  Description of Artificial Sequence: Synthetic oligonucleotide
  Antisense strand to SEQ ID NO: 2165734
cucuccgagccacaaauaa

SEQ ID NO: 2165736 - RNA, 19 nt, Artificial Sequence
  Description of Artificial Sequence: Synthetic oligonucleotide
  Sense strand starting at position 2906 of SEQ ID NO: 1883040
guccauuacuuucuuggaa

SEQ ID NO: 2165737 - RNA, 19 nt, Artificial Sequence
  Description of Artificial Sequence: Synthetic oligonucleotide
  Antisense strand to SEQ ID NO: 2165736
uuccaagaaaguaauggac

SEQ ID NO: 2165738 - RNA, 19 nt, Artificial Sequence
  Description of Artificial Sequence: Synthetic oligonucleotide
  Sense strand starting at position 2963 of SEQ ID NO: 1883040
gagauauaacuuugcuagu

SEQ ID NO: 2165739 - RNA, 19 nt, Artificial Sequence
  Description of Artificial Sequence: Synthetic oligonucleotide
  Antisense strand to SEQ ID NO: 2165738
acuagcaaaguuauaucuc

SEQ ID NO: 2165740 - RNA, 19 nt, Artificial Sequence
  Description of Artificial Sequence: Synthetic oligonucleotide
  Sense strand starting at position 2965 of SEQ ID NO: 1883040
gauauaacuuugcuagugu

SEQ ID NO: 2165741 - RNA, 19 nt, Artificial Sequence
  Description of Artificial Sequence: Synthetic oligonucleotide
  Antisense strand to SEQ ID NO: 2165740
acacuagcaaaguuauauc

SEQ ID NO: 2165742 - RNA, 19 nt, Artificial Sequence
  Description of Artificial Sequence: Synthetic oligonucleotide
  Sense strand starting at position 3111 of SEQ ID NO: 1883040
gacagagauugagauaaac

SEQ ID NO: 2165743 - RNA, 19 nt, Artificial Sequence
  Description of Artificial Sequence: Synthetic oligonucleotide
  Antisense strand to SEQ ID NO: 2165742
guuuaucucaaucucuguc

SEQ ID NO: 2165744 - RNA, 19 nt, Artificial Sequence
  Description of Artificial Sequence: Synthetic oligonucleotide
  Sense strand starting at position 3129 of SEQ ID NO: 1883040
cuugaaacugcuuagagca

SEQ ID NO: 2165745 - RNA, 19 nt, Artificial Sequence
  Description of Artificial Sequence: Synthetic oligonucleotide
  Antisense strand to SEQ ID NO: 2165744
ugcucuaagcaguuucaag

SEQ ID NO: 2165746 - RNA, 19 nt, Artificial Sequence
  Description of Artificial Sequence: Synthetic oligonucleotide
  Sense strand starting at position 3139 of SEQ ID NO: 1883040
cuuagagcaguuuaucuau

SEQ ID NO: 2165747 - RNA, 19 nt, Artificial Sequence
  Description of Artificial Sequence: Synthetic oligonucleotide
  Antisense strand to SEQ ID NO: 2165746
auagauaaacugcucuaag

SEQ ID NO: 2165748 - RNA, 19 nt, Artificial Sequence
  Description of Artificial Sequence: Synthetic oligonucleotide
  Sense strand starting at position 3324 of SEQ ID NO: 1883040
ggcaacaguugcuuauaau

SEQ ID NO: 2165749 - RNA, 19 nt, Artificial Sequence
  Description of Artificial Sequence: Synthetic oligonucleotide
  Antisense strand to SEQ ID NO: 2165748
auuauaagcaacuguugcc

SEQ ID NO: 2165750 - RNA, 19 nt, Artificial Sequence
  Description of Artificial Sequence: Synthetic oligonucleotide
  Sense strand starting at position 3325 of SEQ ID NO: 1883040
gcaacaguugcuuauaaug

SEQ ID NO: 2165751 - RNA, 19 nt, Artificial Sequence
  Description of Artificial Sequence: Synthetic oligonucleotide
  Antisense strand to SEQ ID NO: 2165750
cauuauaagcaacuguugc

SEQ ID NO: 2165752 - RNA, 19 nt, Artificial Sequence
  Description of Artificial Sequence: Synthetic oligonucleotide
  Sense strand starting at position 3568 of SEQ ID NO: 1883040
ucuaaugugucagaaagga

SEQ ID NO: 2165753 - RNA, 19 nt, Artificial Sequence
  Description of Artificial Sequence: Synthetic oligonucleotide
  Antisense strand to SEQ ID NO: 2165752
uccuuucugacacauuaga

SEQ ID NO: 2165754 - RNA, 19 nt, Artificial Sequence
  Description of Artificial Sequence: Synthetic oligonucleotide
  Sense strand starting at position 3690 of SEQ ID NO: 1883040
guuaaacuaugacacugau

SEQ ID NO: 2165755 - RNA, 19 nt, Artificial Sequence
  Description of Artificial Sequence: Synthetic oligonucleotide
  Antisense strand to SEQ ID NO: 2165754
aucagugucauaguuuaac

SEQ ID NO: 2165756 - RNA, 19 nt, Artificial Sequence
  Description of Artificial Sequence: Synthetic oligonucleotide
  Sense strand starting at position 3732 of SEQ ID NO: 1883040
ccuuuaagacuucggguuu

SEQ ID NO: 2165757 - RNA, 19 nt, Artificial Sequence
  Description of Artificial Sequence: Synthetic oligonucleotide
  Antisense strand to SEQ ID NO: 2165756
aaacccgaagucuuaaagg

SEQ ID NO: 2165758 - RNA, 19 nt, Artificial Sequence
  Description of Artificial Sequence: Synthetic oligonucleotide
  Sense strand starting at position 3786 of SEQ ID NO: 1883040
agcaacuggucagugagua

SEQ ID NO: 2165759 - RNA, 19 nt, Artificial Sequence
  Description of Artificial Sequence: Synthetic oligonucleotide
  Antisense strand to SEQ ID NO: 2165758
uacucacugaccaguugcu

SEQ ID NO: 2165760 - RNA, 19 nt, Artificial Sequence
  Description of Artificial Sequence: Synthetic oligonucleotide
  Sense strand starting at position 3787 of SEQ ID NO: 1883040
gcaacuggucagugaguau

SEQ ID NO: 2165761 - RNA, 19 nt, Artificial Sequence
  Description of Artificial Sequence: Synthetic oligonucleotide
  Antisense strand to SEQ ID NO: 2165760
auacucacugaccaguugc

SEQ ID NO: 2165762 - RNA, 19 nt, Artificial Sequence
  Description of Artificial Sequence: Synthetic oligonucleotide
  Sense strand starting at position 3815 of SEQ ID NO: 1883040
agcugccuucuggaagaaa

SEQ ID NO: 2165763 - RNA, 19 nt, Artificial Sequence
  Description of Artificial Sequence: Synthetic oligonucleotide
  Antisense strand to SEQ ID NO: 2165762
uuucuuccagaaggcagcu

SEQ ID NO: 2165764 - RNA, 19 nt, Artificial Sequence
  Description of Artificial Sequence: Synthetic oligonucleotide
  Sense strand starting at position 3892 of SEQ ID NO: 1883040
guggcuugggauugcuaga

SEQ ID NO: 2165765 - RNA, 19 nt, Artificial Sequence
  Description of Artificial Sequence: Synthetic oligonucleotide
  Antisense strand to SEQ ID NO: 2165764
ucuagcaaucccaagccac

SEQ ID NO: 2165766 - RNA, 19 nt, Artificial Sequence
  Description of Artificial Sequence: Synthetic oligonucleotide
  Sense strand starting at position 3897 of SEQ ID NO: 1883040
uugggauugcuagaucagu

SEQ ID NO: 2165767 - RNA, 19 nt, Artificial Sequence
  Description of Artificial Sequence: Synthetic oligonucleotide
  Antisense strand to SEQ ID NO: 2165766
acugaucuagcaaucccaa

SEQ ID NO: 2165768 - RNA, 19 nt, Artificial Sequence
  Description of Artificial Sequence: Synthetic oligonucleotide
  Sense strand starting at position 260 of SEQ ID NO: 1883041
cugagacuuugguucucuu

SEQ ID NO: 2165769 - RNA, 19 nt, Artificial Sequence
  Description of Artificial Sequence: Synthetic oligonucleotide
  Antisense strand to SEQ ID NO: 2165768
aagagaaccaaagucucag

SEQ ID NO: 2165770 - RNA, 19 nt, Artificial Sequence
  Description of Artificial Sequence: Synthetic oligonucleotide
  Sense strand starting at position 322 of SEQ ID NO: 1883041
aggacucuucccuguuauu

SEQ ID NO: 2165771 - RNA, 19 nt, Artificial Sequence
  Description of Artificial Sequence: Synthetic oligonucleotide
  Antisense strand to SEQ ID NO: 2165770
aauaacagggaagaguccu

SEQ ID NO: 2165772 - RNA, 19 nt, Artificial Sequence
  Description of Artificial Sequence: Synthetic oligonucleotide
  Sense strand starting at position 509 of SEQ ID NO: 1883041
cuuccacagcgacagaaau

SEQ ID NO: 2165773 - RNA, 19 nt, Artificial Sequence
  Description of Artificial Sequence: Synthetic oligonucleotide
  Antisense strand to SEQ ID NO: 2165772
auuucugucgcuguggaag

SEQ ID NO: 2165774 - RNA, 19 nt, Artificial Sequence
  Description of Artificial Sequence: Synthetic oligonucleotide
  Sense strand starting at position 522 of SEQ ID NO: 1883041
agaaaugcccucuaaucug

SEQ ID NO: 2165775 - RNA, 19 nt, Artificial Sequence
  Description of Artificial Sequence: Synthetic oligonucleotide
  Antisense strand to SEQ ID NO: 2165774
cagauuagagggcauuucu

SEQ ID NO: 2165776 - RNA, 19 nt, Artificial Sequence
  Description of Artificial Sequence: Synthetic oligonucleotide
  Sense strand starting at position 574 of SEQ ID NO: 1883041
ggcuacugaucaucugaaa

SEQ ID NO: 2165777 - RNA, 19 nt, Artificial Sequence
  Description of Artificial Sequence: Synthetic oligonucleotide
  Antisense strand to SEQ ID NO: 2165776
uuucagaugaucaguagcc

SEQ ID NO: 2165778 - RNA, 19 nt, Artificial Sequence
  Description of Artificial Sequence: Synthetic oligonucleotide
  Sense strand starting at position 661 of SEQ ID NO: 1883041
auuagauggcacggaucua

SEQ ID NO: 2165779 - RNA, 19 nt, Artificial Sequence
  Description of Artificial Sequence: Synthetic oligonucleotide
  Antisense strand to SEQ ID NO: 2165778
uagauccgugccaucuaau

SEQ ID NO: 2165780 - RNA, 19 nt, Artificial Sequence
  Description of Artificial Sequence: Synthetic oligonucleotide
  Sense strand starting at position 662 of SEQ ID NO: 1883041
uuagauggcacggaucuau

SEQ ID NO: 2165781 - RNA, 19 nt, Artificial Sequence
  Description of Artificial Sequence: Synthetic oligonucleotide
  Antisense strand to SEQ ID NO: 2165780
auagauccgugccaucuaa

SEQ ID NO: 2165782 - RNA, 19 nt, Artificial Sequence
  Description of Artificial Sequence: Synthetic oligonucleotide
  Sense strand starting at position 666 of SEQ ID NO: 1883041
auggcacggaucuauacaa

SEQ ID NO: 2165783 - RNA, 19 nt, Artificial Sequence
  Description of Artificial Sequence: Synthetic oligonucleotide
  Antisense strand to SEQ ID NO: 2165782
uuguauagauccgugccau

SEQ ID NO: 2165784 - RNA, 19 nt, Artificial Sequence
  Description of Artificial Sequence: Synthetic oligonucleotide
  Sense strand starting at position 709 of SEQ ID NO: 1883041
ggaggaagucauugucuga

SEQ ID NO: 2165785 - RNA, 19 nt, Artificial Sequence
  Description of Artificial Sequence: Synthetic oligonucleotide
  Antisense strand to SEQ ID NO: 2165784
ucagacaaugacuuccucc

SEQ ID NO: 2165786 - RNA, 19 nt, Artificial Sequence
  Description of Artificial Sequence: Synthetic oligonucleotide
  Sense strand starting at position 712 of SEQ ID NO: 1883041
ggaagucauugucugaaau

SEQ ID NO: 2165787 - RNA, 19 nt, Artificial Sequence
  Description of Artificial Sequence: Synthetic oligonucleotide
  Antisense strand to SEQ ID NO: 2165786
auuucagacaaugacuucc

SEQ ID NO: 2165788 - RNA, 19 nt, Artificial Sequence
  Description of Artificial Sequence: Synthetic oligonucleotide
  Sense strand starting at position 733 of SEQ ID NO: 1883041
cuauaaccuugcucuggau

SEQ ID NO: 2165789 - RNA, 19 nt, Artificial Sequence
  Description of Artificial Sequence: Synthetic oligonucleotide
  Antisense strand to SEQ ID NO: 2165788
auccagagcaagguuauag

SEQ ID NO: 2165790 - RNA, 19 nt, Artificial Sequence
  Description of Artificial Sequence: Synthetic oligonucleotide
  Sense strand starting at position 1003 of SEQ ID NO: 1883041
gaaagauccuuucuggcug

SEQ ID NO: 2165791 - RNA, 19 nt, Artificial Sequence
  Description of Artificial Sequence: Synthetic oligonucleotide
  Antisense strand to SEQ ID NO: 2165790
cagccagaaaggaucuuuc

SEQ ID NO: 2165792 - RNA, 19 nt, Artificial Sequence
  Description of Artificial Sequence: Synthetic oligonucleotide
  Sense strand starting at position 1007 of SEQ ID NO: 1883041
gauccuuucuggcugagga

SEQ ID NO: 2165793 - RNA, 19 nt, Artificial Sequence
  Description of Artificial Sequence: Synthetic oligonucleotide
  Antisense strand to SEQ ID NO: 2165792
uccucagccagaaaggauc

SEQ ID NO: 2165794 - RNA, 19 nt, Artificial Sequence
  Description of Artificial Sequence: Synthetic oligonucleotide
  Sense strand starting at position 1008 of SEQ ID NO: 1883041
auccuuucuggcugaggaa

SEQ ID NO: 2165795 - RNA, 19 nt, Artificial Sequence
  Description of Artificial Sequence: Synthetic oligonucleotide
  Antisense strand to SEQ ID NO: 2165794
uuccucagccagaaaggau

SEQ ID NO: 2165796 - RNA, 19 nt, Artificial Sequence
  Description of Artificial Sequence: Synthetic oligonucleotide
  Sense strand starting at position 1028 of SEQ ID NO: 1883041
aagggaaggugucuuggaa

SEQ ID NO: 2165797 - RNA, 19 nt, Artificial Sequence
  Description of Artificial Sequence: Synthetic oligonucleotide
  Antisense strand to SEQ ID NO: 2165796
uuccaagacaccuucccuu

SEQ ID NO: 2165798 - RNA, 19 nt, Artificial Sequence
  Description of Artificial Sequence: Synthetic oligonucleotide
  Sense strand starting at position 1231 of SEQ ID NO: 1883041
aucacuucugaaggaguaa

SEQ ID NO: 2165799 - RNA, 19 nt, Artificial Sequence
  Description of Artificial Sequence: Synthetic oligonucleotide
  Antisense strand to SEQ ID NO: 2165798
uuacuccuucagaagugau

SEQ ID NO: 2165800 - RNA, 19 nt, Artificial Sequence
  Description of Artificial Sequence: Synthetic oligonucleotide
  Sense strand starting at position 1341 of SEQ ID NO: 1883041
gucucugcaacgugauuua

SEQ ID NO: 2165801 - RNA, 19 nt, Artificial Sequence
  Description of Artificial Sequence: Synthetic oligonucleotide
  Antisense strand to SEQ ID NO: 2165800
uaaaucacguugcagagac

SEQ ID NO: 2165802 - RNA, 19 nt, Artificial Sequence
  Description of Artificial Sequence: Synthetic oligonucleotide
  Sense strand starting at position 1651 of SEQ ID NO: 1883041
ccacuucucggcugaaaga

SEQ ID NO: 2165803 - RNA, 19 nt, Artificial Sequence
  Description of Artificial Sequence: Synthetic oligonucleotide
  Antisense strand to SEQ ID NO: 2165802
ucuuucagccgagaagugg

SEQ ID NO: 2165804 - RNA, 19 nt, Artificial Sequence
  Description of Artificial Sequence: Synthetic oligonucleotide
  Sense strand starting at position 1676 of SEQ ID NO: 1883041
cgagguuacucaucaagua

SEQ ID NO: 2165805 - RNA, 19 nt, Artificial Sequence
  Description of Artificial Sequence: Synthetic oligonucleotide
  Antisense strand to SEQ ID NO: 2165804
uacuugaugaguaaccucg

SEQ ID NO: 2165806 - RNA, 19 nt, Artificial Sequence
  Description of Artificial Sequence: Synthetic oligonucleotide
  Sense strand starting at position 1770 of SEQ ID NO: 1883041
aaggcuuggucuccaagaa

SEQ ID NO: 2165807 - RNA, 19 nt, Artificial Sequence
  Description of Artificial Sequence: Synthetic oligonucleotide
  Antisense strand to SEQ ID NO: 2165806
uucuuggagaccaagccuu

SEQ ID NO: 2165808 - RNA, 19 nt, Artificial Sequence
  Description of Artificial Sequence: Synthetic oligonucleotide
  Sense strand starting at position 1771 of SEQ ID NO: 1883041
aggcuuggucuccaagaau

SEQ ID NO: 2165809 - RNA, 19 nt, Artificial Sequence
  Description of Artificial Sequence: Synthetic oligonucleotide
  Antisense strand to SEQ ID NO: 2165808
auucuuggagaccaagccu

SEQ ID NO: 2165810 - RNA, 19 nt, Artificial Sequence
  Description of Artificial Sequence: Synthetic oligonucleotide
  Sense strand starting at position 2199 of SEQ ID NO: 1883041
cuccuuuagugaccagaag

SEQ ID NO: 2165811 - RNA, 19 nt, Artificial Sequence
  Description of Artificial Sequence: Synthetic oligonucleotide
  Antisense strand to SEQ ID NO: 2165810
cuucuggucacuaaaggag

SEQ ID NO: 2165812 - RNA, 19 nt, Artificial Sequence
  Description of Artificial Sequence: Synthetic oligonucleotide
  Sense strand starting at position 2214 of SEQ ID NO: 1883041
gaaggcuggaguuacguaa

SEQ ID NO: 2165813 - RNA, 19 nt, Artificial Sequence
  Description of Artificial Sequence: Synthetic oligonucleotide
  Antisense strand to SEQ ID NO: 2165812
uuacguaacuccagccuuc

SEQ ID NO: 2165814 - RNA, 19 nt, Artificial Sequence
  Description of Artificial Sequence: Synthetic oligonucleotide
  Sense strand starting at position 2578 of SEQ ID NO: 1883041
ucaggaauguuucuuggga

SEQ ID NO: 2165815 - RNA, 19 nt, Artificial Sequence
  Description of Artificial Sequence: Synthetic oligonucleotide
  Antisense strand to SEQ ID NO: 2165814
ucccaagaaacauuccuga

SEQ ID NO: 2165816 - RNA, 19 nt, Artificial Sequence
  Description of Artificial Sequence: Synthetic oligonucleotide
  Sense strand starting at position 2579 of SEQ ID NO: 1883041
caggaauguuucuugggag

SEQ ID NO: 2165817 - RNA, 19 nt, Artificial Sequence
  Description of Artificial Sequence: Synthetic oligonucleotide
  Antisense strand to SEQ ID NO: 2165816
cucccaagaaacauuccug

SEQ ID NO: 2165818 - RNA, 19 nt, Artificial Sequence
  Description of Artificial Sequence: Synthetic oligonucleotide
  Sense strand starting at position 2594 of SEQ ID NO: 1883041
ggagccaucuccuugaagu

SEQ ID NO: 2165819 - RNA, 19 nt, Artificial Sequence
  Description of Artificial Sequence: Synthetic oligonucleotide
  Antisense strand to SEQ ID NO: 2165818
acuucaaggagauggcucc

SEQ ID NO: 2165820 - RNA, 19 nt, Artificial Sequence
  Description of Artificial Sequence: Synthetic oligonucleotide
  Sense strand starting at position 2923 of SEQ ID NO: 1883041
gcaauuguuaagggacgaa

SEQ ID NO: 2165821 - RNA, 19 nt, Artificial Sequence
  Description of Artificial Sequence: Synthetic oligonucleotide
  Antisense strand to SEQ ID NO: 2165820
uucgucccuuaacaauugc

SEQ ID NO: 2165822 - RNA, 19 nt, Artificial Sequence
  Description of Artificial Sequence: Synthetic oligonucleotide
  Sense strand starting at position 2956 of SEQ ID NO: 1883041
agcuucuuaggaggacaaa

SEQ ID NO: 2165823 - RNA, 19 nt, Artificial Sequence
  Description of Artificial Sequence: Synthetic oligonucleotide
  Antisense strand to SEQ ID NO: 2165822
uuuguccuccuaagaagcu

SEQ ID NO: 2165824 - RNA, 19 nt, Artificial Sequence
  Description of Artificial Sequence: Synthetic oligonucleotide
  Sense strand starting at position 3012 of SEQ ID NO: 1883041
acauaaugugaugggcuau

SEQ ID NO: 2165825 - RNA, 19 nt, Artificial Sequence
  Description of Artificial Sequence: Synthetic oligonucleotide
  Antisense strand to SEQ ID NO: 2165824
auagcccaucacauuaugu

SEQ ID NO: 2165826 - RNA, 19 nt, Artificial Sequence
  Description of Artificial Sequence: Synthetic oligonucleotide
  Sense strand starting at position 3032 of SEQ ID NO: 1883041
ucuacuuagcugcauagaa

SEQ ID NO: 2165827 - RNA, 19 nt, Artificial Sequence
  Description of Artificial Sequence: Synthetic oligonucleotide
  Antisense strand to SEQ ID NO: 2165826
uucuaugcagcuaaguaga

SEQ ID NO: 2165828 - RNA, 19 nt, Artificial Sequence
  Description of Artificial Sequence: Synthetic oligonucleotide
  Sense strand starting at position 3066 of SEQ ID NO: 1883041
cuuuguguugccuuuagca

SEQ ID NO: 2165829 - RNA, 19 nt, Artificial Sequence
  Description of Artificial Sequence: Synthetic oligonucleotide
  Antisense strand to SEQ ID NO: 2165828
ugcuaaaggcaacacaaag

SEQ ID NO: 2165830 - RNA, 19 nt, Artificial Sequence
  Description of Artificial Sequence: Synthetic oligonucleotide
  Sense strand starting at position 3165 of SEQ ID NO: 1883041
gagguuucauggguuggga

SEQ ID NO: 2165831 - RNA, 19 nt, Artificial Sequence
  Description of Artificial Sequence: Synthetic oligonucleotide
  Antisense strand to SEQ ID NO: 2165830
ucccaacccaugaaaccuc

SEQ ID NO: 2165832 - RNA, 19 nt, Artificial Sequence
  Description of Artificial Sequence: Synthetic oligonucleotide
  Sense strand starting at position 3268 of SEQ ID NO: 1883041
uggugauacagcuaaguau

SEQ ID NO: 2165833 - RNA, 19 nt, Artificial Sequence
  Description of Artificial Sequence: Synthetic oligonucleotide
  Antisense strand to SEQ ID NO: 2165832
auacuuagcuguaucacca

SEQ ID NO: 2165834 - RNA, 19 nt, Artificial Sequence
  Description of Artificial Sequence: Synthetic oligonucleotide
  Sense strand starting at position 3295 of SEQ ID NO: 1883041
uguaguguucuggaagggu

SEQ ID NO: 2165835 - RNA, 19 nt, Artificial Sequence
  Description of Artificial Sequence: Synthetic oligonucleotide
  Antisense strand to SEQ ID NO: 2165834
acccuuccagaacacuaca

SEQ ID NO: 2165836 - RNA, 19 nt, Artificial Sequence
  Description of Artificial Sequence: Synthetic oligonucleotide
  Sense strand starting at position 3336 of SEQ ID NO: 1883041
ggacgauguguucaagggu

SEQ ID NO: 2165837 - RNA, 19 nt, Artificial Sequence
  Description of Artificial Sequence: Synthetic oligonucleotide
  Antisense strand to SEQ ID NO: 2165836
acccuugaacacaucgucc

SEQ ID NO: 2165838 - RNA, 19 nt, Artificial Sequence
  Description of Artificial Sequence: Synthetic oligonucleotide
  Sense strand starting at position 3411 of SEQ ID NO: 1883041
gugcuugaaacucguauuu

SEQ ID NO: 2165839 - RNA, 19 nt, Artificial Sequence
  Description of Artificial Sequence: Synthetic oligonucleotide
  Antisense strand to SEQ ID NO: 2165838
aaauacgaguuucaagcac

SEQ ID NO: 2165840 - RNA, 19 nt, Artificial Sequence
  Description of Artificial Sequence: Synthetic oligonucleotide
  Sense strand starting at position 3527 of SEQ ID NO: 1883041
cuguuacuuccagauuacu

SEQ ID NO: 2165841 - RNA, 19 nt, Artificial Sequence
  Description of Artificial Sequence: Synthetic oligonucleotide
  Antisense strand to SEQ ID NO: 2165840
aguaaucuggaaguaacag

SEQ ID NO: 2165842 - RNA, 19 nt, Artificial Sequence
  Description of Artificial Sequence: Synthetic oligonucleotide
  Sense strand starting at position 3538 of SEQ ID NO: 1883041
agauuacuaacguggaaac

SEQ ID NO: 2165843 - RNA, 19 nt, Artificial Sequence
  Description of Artificial Sequence: Synthetic oligonucleotide
  Antisense strand to SEQ ID NO: 2165842
guuuccacguuaguaaucu

SEQ ID NO: 2165844 - RNA, 19 nt, Artificial Sequence
  Description of Artificial Sequence: Synthetic oligonucleotide
  Sense strand starting at position 3539 of SEQ ID NO: 1883041
gauuacuaacguggaaacu

SEQ ID NO: 2165845 - RNA, 19 nt, Artificial Sequence
  Description of Artificial Sequence: Synthetic oligonucleotide
  Antisense strand to SEQ ID NO: 2165844
aguuuccacguuaguaauc

SEQ ID NO: 2165846 - RNA, 19 nt, Artificial Sequence
  Description of Artificial Sequence: Synthetic oligonucleotide
  Sense strand starting at position 3696 of SEQ ID NO: 1883041
gggcuagccugacugacau

SEQ ID NO: 2165847 - RNA, 19 nt, Artificial Sequence
  Description of Artificial Sequence: Synthetic oligonucleotide
  Antisense strand to SEQ ID NO: 2165846
augucagucaggcuagccc

SEQ ID NO: 2165848 - RNA, 19 nt, Artificial Sequence
  Description of Artificial Sequence: Synthetic oligonucleotide
  Sense strand starting at position 341 of SEQ ID NO: 1883042
ggaaguuuauuaucuguac

SEQ ID NO: 2165849 - RNA, 19 nt, Artificial Sequence
  Description of Artificial Sequence: Synthetic oligonucleotide
  Antisense strand to SEQ ID NO: 2165848
guacagauaauaaacuucc

SEQ ID NO: 2165850 - RNA, 19 nt, Artificial Sequence
  Description of Artificial Sequence: Synthetic oligonucleotide
  Sense strand starting at position 344 of SEQ ID NO: 1883042
aguuuauuaucuguacuga

SEQ ID NO: 2165851 - RNA, 19 nt, Artificial Sequence
  Description of Artificial Sequence: Synthetic oligonucleotide
  Antisense strand to SEQ ID NO: 2165850
ucaguacagauaauaaacu

SEQ ID NO: 2165852 - RNA, 19 nt, Artificial Sequence
  Description of Artificial Sequence: Synthetic oligonucleotide
  Sense strand starting at position 345 of SEQ ID NO: 1883042
guuuauuaucuguacugag

SEQ ID NO: 2165853 - RNA, 19 nt, Artificial Sequence
  Description of Artificial Sequence: Synthetic oligonucleotide
  Antisense strand to SEQ ID NO: 2165852
cucaguacagauaauaaac

SEQ ID NO: 2165854 - RNA, 19 nt, Artificial Sequence
  Description of Artificial Sequence: Synthetic oligonucleotide
  Sense strand starting at position 369 of SEQ ID NO: 1883042
ggugcagauuucuuugugu

SEQ ID NO: 2165855 - RNA, 19 nt, Artificial Sequence
  Description of Artificial Sequence: Synthetic oligonucleotide
  Antisense strand to SEQ ID NO: 2165854
acacaaagaaaucugcacc

SEQ ID NO: 2165856 - RNA, 19 nt, Artificial Sequence
  Description of Artificial Sequence: Synthetic oligonucleotide
  Sense strand starting at position 372 of SEQ ID NO: 1883042
gcagauuucuuuguguuua

SEQ ID NO: 2165857 - RNA, 19 nt, Artificial Sequence
  Description of Artificial Sequence: Synthetic oligonucleotide
  Antisense strand to SEQ ID NO: 2165856
uaaacacaaagaaaucugc

SEQ ID NO: 2165858 - RNA, 19 nt, Artificial Sequence
  Description of Artificial Sequence: Synthetic oligonucleotide
  Sense strand starting at position 930 of SEQ ID NO: 1883042
uguuguuuagguuagguga

SEQ ID NO: 2165859 - RNA, 19 nt, Artificial Sequence
  Description of Artificial Sequence: Synthetic oligonucleotide
  Antisense strand to SEQ ID NO: 2165858
ucaccuaaccuaaacaaca

SEQ ID NO: 2165860 - RNA, 19 nt, Artificial Sequence
  Description of Artificial Sequence: Synthetic oligonucleotide
  Sense strand starting at position 931 of SEQ ID NO: 1883042
guuguuuagguuaggugau

SEQ ID NO: 2165861 - RNA, 19 nt, Artificial Sequence
  Description of Artificial Sequence: Synthetic oligonucleotide
  Antisense strand to SEQ ID NO: 2165860
aucaccuaaccuaaacaac

SEQ ID NO: 2165862 - RNA, 19 nt, Artificial Sequence
  Description of Artificial Sequence: Synthetic oligonucleotide
  Sense strand starting at position 933 of SEQ ID NO: 1883042
uguuuagguuaggugauuu

SEQ ID NO: 2165863 - RNA, 19 nt, Artificial Sequence
  Description of Artificial Sequence: Synthetic oligonucleotide
  Antisense strand to SEQ ID NO: 2165862
aaaucaccuaaccuaaaca

SEQ ID NO: 2165864 - RNA, 19 nt, Artificial Sequence
  Description of Artificial Sequence: Synthetic oligonucleotide
  Sense strand starting at position 1041 of SEQ ID NO: 1883042
uuguauauuucgguucuaa

SEQ ID NO: 2165865 - RNA, 19 nt, Artificial Sequence
  Description of Artificial Sequence: Synthetic oligonucleotide
  Antisense strand to SEQ ID NO: 2165864
uuagaaccgaaauauacaa

SEQ ID NO: 2165866 - RNA, 19 nt, Artificial Sequence
  Description of Artificial Sequence: Synthetic oligonucleotide
  Sense strand starting at position 1045 of SEQ ID NO: 1883042
auauuucgguucuaagaca

SEQ ID NO: 2165867 - RNA, 19 nt, Artificial Sequence
  Description of Artificial Sequence: Synthetic oligonucleotide
  Antisense strand to SEQ ID NO: 2165866
ugucuuagaaccgaaauau

SEQ ID NO: 2165868 - RNA, 19 nt, Artificial Sequence
  Description of Artificial Sequence: Synthetic oligonucleotide
  Sense strand starting at position 1096 of SEQ ID NO: 1883042
acaucugugucauccugau

SEQ ID NO: 2165869 - RNA, 19 nt, Artificial Sequence
  Description of Artificial Sequence: Synthetic oligonucleotide
  Antisense strand to SEQ ID NO: 2165868
aucaggaugacacagaugu

SEQ ID NO: 2165870 - RNA, 19 nt, Artificial Sequence
  Description of Artificial Sequence: Synthetic oligonucleotide
  Sense strand starting at position 1161 of SEQ ID NO: 1883042
ugguucuugguauagugau

SEQ ID NO: 2165871 - RNA, 19 nt, Artificial Sequence
  Description of Artificial Sequence: Synthetic oligonucleotide
  Antisense strand to SEQ ID NO: 2165870
aucacuauaccaagaacca

SEQ ID NO: 2165872 - RNA, 19 nt, Artificial Sequence
  Description of Artificial Sequence: Synthetic oligonucleotide
  Sense strand starting at position 1197 of SEQ ID NO: 1883042
ugggcauucuggguacuuu

SEQ ID NO: 2165873 - RNA, 19 nt, Artificial Sequence
  Description of Artificial Sequence: Synthetic oligonucleotide
  Antisense strand to SEQ ID NO: 2165872
aaaguacccagaaugccca

SEQ ID NO: 2165874 - RNA, 19 nt, Artificial Sequence
  Description of Artificial Sequence: Synthetic oligonucleotide
  Sense strand starting at position 1198 of SEQ ID NO: 1883042
gggcauucuggguacuuua

SEQ ID NO: 2165875 - RNA, 19 nt, Artificial Sequence
  Description of Artificial Sequence: Synthetic oligonucleotide
  Antisense strand to SEQ ID NO: 2165874
uaaaguacccagaaugccc

SEQ ID NO: 2165876 - RNA, 19 nt, Artificial Sequence
  Description of Artificial Sequence: Synthetic oligonucleotide
  Sense strand starting at position 1201 of SEQ ID NO: 1883042
cauucuggguacuuuaaga

SEQ ID NO: 2165877 - RNA, 19 nt, Artificial Sequence
  Description of Artificial Sequence: Synthetic oligonucleotide
  Antisense strand to SEQ ID NO: 2165876
ucuuaaaguacccagaaug

SEQ ID NO: 2165878 - RNA, 19 nt, Artificial Sequence
  Description of Artificial Sequence: Synthetic oligonucleotide
  Sense strand starting at position 1783 of SEQ ID NO: 1883042
uuccuugcuuccuugaaga

SEQ ID NO: 2165879 - RNA, 19 nt, Artificial Sequence
  Description of Artificial Sequence: Synthetic oligonucleotide
  Antisense strand to SEQ ID NO: 2165878
ucuucaaggaagcaaggaa

SEQ ID NO: 2165880 - RNA, 19 nt, Artificial Sequence
  Description of Artificial Sequence: Synthetic oligonucleotide
  Sense strand starting at position 1785 of SEQ ID NO: 1883042
ccuugcuuccuugaagagu

SEQ ID NO: 2165881 - RNA, 19 nt, Artificial Sequence
  Description of Artificial Sequence: Synthetic oligonucleotide
  Antisense strand to SEQ ID NO: 2165880
acucuucaaggaagcaagg

SEQ ID NO: 2165882 - RNA, 19 nt, Artificial Sequence
  Description of Artificial Sequence: Synthetic oligonucleotide
  Sense strand starting at position 1793 of SEQ ID NO: 1883042
ccuugaagagucgagguuu

SEQ ID NO: 2165883 - RNA, 19 nt, Artificial Sequence
  Description of Artificial Sequence: Synthetic oligonucleotide
  Antisense strand to SEQ ID NO: 2165882
aaaccucgacucuucaagg

SEQ ID NO: 2165884 - RNA, 19 nt, Artificial Sequence
  Description of Artificial Sequence: Synthetic oligonucleotide
  Sense strand starting at position 1805 of SEQ ID NO: 1883042
gagguuuccuuggcuauuu

SEQ ID NO: 2165885 - RNA, 19 nt, Artificial Sequence
  Description of Artificial Sequence: Synthetic oligonucleotide
  Antisense strand to SEQ ID NO: 2165884
aaauagccaaggaaaccuc

SEQ ID NO: 2165886 - RNA, 19 nt, Artificial Sequence
  Description of Artificial Sequence: Synthetic oligonucleotide
  Sense strand starting at position 1866 of SEQ ID NO: 1883042
aaagauguugcagguauga

SEQ ID NO: 2165887 - RNA, 19 nt, Artificial Sequence
  Description of Artificial Sequence: Synthetic oligonucleotide
  Antisense strand to SEQ ID NO: 2165886
ucauaccugcaacaucuuu

SEQ ID NO: 2165888 - RNA, 19 nt, Artificial Sequence
  Description of Artificial Sequence: Synthetic oligonucleotide
  Sense strand starting at position 1986 of SEQ ID NO: 1883042
aggguuuaagaaugcaauu

SEQ ID NO: 2165889 - RNA, 19 nt, Artificial Sequence
  Description of Artificial Sequence: Synthetic oligonucleotide
  Antisense strand to SEQ ID NO: 2165888
aauugcauucuuaaacccu

SEQ ID NO: 2165890 - RNA, 19 nt, Artificial Sequence
  Description of Artificial Sequence: Synthetic oligonucleotide
  Sense strand starting at position 2007 of SEQ ID NO: 1883042
uuggcucuugaugaaucua

SEQ ID NO: 2165891 - RNA, 19 nt, Artificial Sequence
  Description of Artificial Sequence: Synthetic oligonucleotide
  Antisense strand to SEQ ID NO: 2165890
uagauucaucaagagccaa

SEQ ID NO: 2165892 - RNA, 19 nt, Artificial Sequence
  Description of Artificial Sequence: Synthetic oligonucleotide
  Sense strand starting at position 2162 of SEQ ID NO: 1883042
ccacuaagauguguuauaa

SEQ ID NO: 2165893 - RNA, 19 nt, Artificial Sequence
  Description of Artificial Sequence: Synthetic oligonucleotide
  Antisense strand to SEQ ID NO: 2165892
uuauaacacaucuuagugg

SEQ ID NO: 2165894 - RNA, 19 nt, Artificial Sequence
  Description of Artificial Sequence: Synthetic oligonucleotide
  Sense strand starting at position 2271 of SEQ ID NO: 1883042
uauuauaugugaucgaaca

SEQ ID NO: 2165895 - RNA, 19 nt, Artificial Sequence
  Description of Artificial Sequence: Synthetic oligonucleotide
  Antisense strand to SEQ ID NO: 2165894
uguucgaucacauauaaua

SEQ ID NO: 2165896 - RNA, 19 nt, Artificial Sequence
  Description of Artificial Sequence: Synthetic oligonucleotide
  Sense strand starting at position 2272 of SEQ ID NO: 1883042
auuauaugugaucgaacaa

SEQ ID NO: 2165897 - RNA, 19 nt, Artificial Sequence
  Description of Artificial Sequence: Synthetic oligonucleotide
  Antisense strand to SEQ ID NO: 2165896
uuguucgaucacauauaau

SEQ ID NO: 2165898 - RNA, 19 nt, Artificial Sequence
  Description of Artificial Sequence: Synthetic oligonucleotide
  Sense strand starting at position 2306 of SEQ ID NO: 1883042
aucugcucucauggacuua

SEQ ID NO: 2165899 - RNA, 19 nt, Artificial Sequence
  Description of Artificial Sequence: Synthetic oligonucleotide
  Antisense strand to SEQ ID NO: 2165898
uaaguccaugagagcagau

SEQ ID NO: 2165900 - RNA, 19 nt, Artificial Sequence
  Description of Artificial Sequence: Synthetic oligonucleotide
  Sense strand starting at position 2324 of SEQ ID NO: 1883042
aaccuaaguuggucuuaag

SEQ ID NO: 2165901 - RNA, 19 nt, Artificial Sequence
  Description of Artificial Sequence: Synthetic oligonucleotide
  Antisense strand to SEQ ID NO: 2165900
cuuaagaccaacuuagguu

SEQ ID NO: 2165902 - RNA, 19 nt, Artificial Sequence
  Description of Artificial Sequence: Synthetic oligonucleotide
  Sense strand starting at position 2415 of SEQ ID NO: 1883042
uaaagucuggugugacuau

SEQ ID NO: 2165903 - RNA, 19 nt, Artificial Sequence
  Description of Artificial Sequence: Synthetic oligonucleotide
  Antisense strand to SEQ ID NO: 2165902
auagucacaccagacuuua

SEQ ID NO: 2165904 - RNA, 19 nt, Artificial Sequence
  Description of Artificial Sequence: Synthetic oligonucleotide
  Sense strand starting at position 2435 of SEQ ID NO: 1883042
uugagcucagagugaauau

SEQ ID NO: 2165905 - RNA, 19 nt, Artificial Sequence
  Description of Artificial Sequence: Synthetic oligonucleotide
  Antisense strand to SEQ ID NO: 2165904
auauucacucugagcucaa

SEQ ID NO: 2165906 - RNA, 19 nt, Artificial Sequence
  Description of Artificial Sequence: Synthetic oligonucleotide
  Sense strand starting at position 2436 of SEQ ID NO: 1883042
ugagcucagagugaauauu

SEQ ID NO: 2165907 - RNA, 19 nt, Artificial Sequence
  Description of Artificial Sequence: Synthetic oligonucleotide
  Antisense strand to SEQ ID NO: 2165906
aauauucacucugagcuca

SEQ ID NO: 2165908 - RNA, 19 nt, Artificial Sequence
  Description of Artificial Sequence: Synthetic oligonucleotide
  Sense strand starting at position 2876 of SEQ ID NO: 1883042
acuaaaucgcuuuggaaau

SEQ ID NO: 2165909 - RNA, 19 nt, Artificial Sequence
  Description of Artificial Sequence: Synthetic oligonucleotide
  Antisense strand to SEQ ID NO: 2165908
auuuccaaagcgauuuagu

SEQ ID NO: 2165910 - RNA, 19 nt, Artificial Sequence
  Description of Artificial Sequence: Synthetic oligonucleotide
  Sense strand starting at position 2920 of SEQ ID NO: 1883042
ucuuaaugaggccaaucua

SEQ ID NO: 2165911 - RNA, 19 nt, Artificial Sequence
  Description of Artificial Sequence: Synthetic oligonucleotide
  Antisense strand to SEQ ID NO: 2165910
uagauuggccucauuaaga

SEQ ID NO: 2165912 - RNA, 19 nt, Artificial Sequence
  Description of Artificial Sequence: Synthetic oligonucleotide
  Sense strand starting at position 2973 of SEQ ID NO: 1883042
cuuauauugcgguaaaguc

SEQ ID NO: 2165913 - RNA, 19 nt, Artificial Sequence
  Description of Artificial Sequence: Synthetic oligonucleotide
  Antisense strand to SEQ ID NO: 2165912
gacuuuaccgcaauauaag

SEQ ID NO: 2165914 - RNA, 19 nt, Artificial Sequence
  Description of Artificial Sequence: Synthetic oligonucleotide
  Sense strand starting at position 3052 of SEQ ID NO: 1883042
cuagacugucaagguuaga

SEQ ID NO: 2165915 - RNA, 19 nt, Artificial Sequence
  Description of Artificial Sequence: Synthetic oligonucleotide
  Antisense strand to SEQ ID NO: 2165914
ucuaaccuugacagucuag

SEQ ID NO: 2165916 - RNA, 19 nt, Artificial Sequence
  Description of Artificial Sequence: Synthetic oligonucleotide
  Sense strand starting at position 3257 of SEQ ID NO: 1883042
ggaaguggcugaucugcaa

SEQ ID NO: 2165917 - RNA, 19 nt, Artificial Sequence
  Description of Artificial Sequence: Synthetic oligonucleotide
  Antisense strand to SEQ ID NO: 2165916
uugcagaucagccacuucc

SEQ ID NO: 2165918 - RNA, 19 nt, Artificial Sequence
  Description of Artificial Sequence: Synthetic oligonucleotide
  Sense strand starting at position 3335 of SEQ ID NO: 1883042
gcugucuuccaaugauuaa

SEQ ID NO: 2165919 - RNA, 19 nt, Artificial Sequence
  Description of Artificial Sequence: Synthetic oligonucleotide
  Antisense strand to SEQ ID NO: 2165918
uuaaucauuggaagacagc

SEQ ID NO: 2165920 - RNA, 19 nt, Artificial Sequence
  Description of Artificial Sequence: Synthetic oligonucleotide
  Sense strand starting at position 3383 of SEQ ID NO: 1883042
ccaauauaacuuggcagua

SEQ ID NO: 2165921 - RNA, 19 nt, Artificial Sequence
  Description of Artificial Sequence: Synthetic oligonucleotide
  Antisense strand to SEQ ID NO: 2165920
uacugccaaguuauauugg

SEQ ID NO: 2165922 - RNA, 19 nt, Artificial Sequence
  Description of Artificial Sequence: Synthetic oligonucleotide
  Sense strand starting at position 3396 of SEQ ID NO: 1883042
gcaguaccuauuuguguga

SEQ ID NO: 2165923 - RNA, 19 nt, Artificial Sequence
  Description of Artificial Sequence: Synthetic oligonucleotide
  Antisense strand to SEQ ID NO: 2165922
ucacacaaauagguacugc

SEQ ID NO: 2165924 - RNA, 19 nt, Artificial Sequence
  Description of Artificial Sequence: Synthetic oligonucleotide
  Sense strand starting at position 3682 of SEQ ID NO: 1883042
gguguauacuacccaccau

SEQ ID NO: 2165925 - RNA, 19 nt, Artificial Sequence
  Description of Artificial Sequence: Synthetic oligonucleotide
  Antisense strand to SEQ ID NO: 2165924
augguggguaguauacacc

SEQ ID NO: 2165926 - RNA, 19 nt, Artificial Sequence
  Description of Artificial Sequence: Synthetic oligonucleotide
  Sense strand starting at position 3914 of SEQ ID NO: 1883042
acucaacuguuauuaguua

SEQ ID NO: 2165927 - RNA, 19 nt, Artificial Sequence
  Description of Artificial Sequence: Synthetic oligonucleotide
  Antisense strand to SEQ ID NO: 2165926
uaacuaauaacaguugagu

SEQ ID NO: 2165928 - RNA, 19 nt, Artificial Sequence
  Description of Artificial Sequence: Synthetic oligonucleotide
  Sense strand starting at position 24 of SEQ ID NO: 1883043
guuuacucauacugaagua

SEQ ID NO: 2165929 - RNA, 19 nt, Artificial Sequence
  Description of Artificial Sequence: Synthetic oligonucleotide
  Antisense strand to SEQ ID NO: 2165928
uacuucaguaugaguaaac

SEQ ID NO: 2165930 - RNA, 19 nt, Artificial Sequence
  Description of Artificial Sequence: Synthetic oligonucleotide
  Sense strand starting at position 117 of SEQ ID NO: 1883043
gacaauaggucuugcacau

SEQ ID NO: 2165931 - RNA, 19 nt, Artificial Sequence
  Description of Artificial Sequence: Synthetic oligonucleotide
  Antisense strand to SEQ ID NO: 2165930
augugcaagaccuauuguc

SEQ ID NO: 2165932 - RNA, 19 nt, Artificial Sequence
  Description of Artificial Sequence: Synthetic oligonucleotide
  Sense strand starting at position 249 of SEQ ID NO: 1883043
uggcauuaauugcuaucuu

SEQ ID NO: 2165933 - RNA, 19 nt, Artificial Sequence
  Description of Artificial Sequence: Synthetic oligonucleotide
  Antisense strand to SEQ ID NO: 2165932
aagauagcaauuaaugcca

SEQ ID NO: 2165934 - RNA, 19 nt, Artificial Sequence
  Description of Artificial Sequence: Synthetic oligonucleotide
  Sense strand starting at position 250 of SEQ ID NO: 1883043
ggcauuaauugcuaucuuu

SEQ ID NO: 2165935 - RNA, 19 nt, Artificial Sequence
  Description of Artificial Sequence: Synthetic oligonucleotide
  Antisense strand to SEQ ID NO: 2165934
aaagauagcaauuaaugcc

SEQ ID NO: 2165936 - RNA, 19 nt, Artificial Sequence
  Description of Artificial Sequence: Synthetic oligonucleotide
  Sense strand starting at position 431 of SEQ ID NO: 1883043
gucuacucgucccuuaauu

SEQ ID NO: 2165937 - RNA, 19 nt, Artificial Sequence
  Description of Artificial Sequence: Synthetic oligonucleotide
  Antisense strand to SEQ ID NO: 2165936
aauuaagggacgaguagac

SEQ ID NO: 2165938 - RNA, 19 nt, Artificial Sequence
  Description of Artificial Sequence: Synthetic oligonucleotide
  Sense strand starting at position 1187 of SEQ ID NO: 1883043
gcagcaauacaccagucau

SEQ ID NO: 2165939 - RNA, 19 nt, Artificial Sequence
  Description of Artificial Sequence: Synthetic oligonucleotide
  Antisense strand to SEQ ID NO: 2165938
augacugguguauugcugc

SEQ ID NO: 2165940 - RNA, 19 nt, Artificial Sequence
  Description of Artificial Sequence: Synthetic oligonucleotide
  Sense strand starting at position 1371 of SEQ ID NO: 1883043
ccaaauauaucuggaugau

SEQ ID NO: 2165941 - RNA, 19 nt, Artificial Sequence
  Description of Artificial Sequence: Synthetic oligonucleotide
  Antisense strand to SEQ ID NO: 2165940
aucauccagauauauuugg

SEQ ID NO: 2165942 - RNA, 19 nt, Artificial Sequence
  Description of Artificial Sequence: Synthetic oligonucleotide
  Sense strand starting at position 1377 of SEQ ID NO: 1883043
auaucuggaugaugaggaa

SEQ ID NO: 2165943 - RNA, 19 nt, Artificial Sequence
  Description of Artificial Sequence: Synthetic oligonucleotide
  Antisense strand to SEQ ID NO: 2165942
uuccucaucauccagauau

SEQ ID NO: 2165944 - RNA, 19 nt, Artificial Sequence
  Description of Artificial Sequence: Synthetic oligonucleotide
  Sense strand starting at position 1391 of SEQ ID NO: 1883043
aggaauaccuguucuagag

SEQ ID NO: 2165945 - RNA, 19 nt, Artificial Sequence
  Description of Artificial Sequence: Synthetic oligonucleotide
  Antisense strand to SEQ ID NO: 2165944
cucuagaacagguauuccu

SEQ ID NO: 2165946 - RNA, 19 nt, Artificial Sequence
  Description of Artificial Sequence: Synthetic oligonucleotide
  Sense strand starting at position 1393 of SEQ ID NO: 1883043
gaauaccuguucuagaguc

SEQ ID NO: 2165947 - RNA, 19 nt, Artificial Sequence
  Description of Artificial Sequence: Synthetic oligonucleotide
  Antisense strand to SEQ ID NO: 2165946
gacucuagaacagguauuc

SEQ ID NO: 2165948 - RNA, 19 nt, Artificial Sequence
  Description of Artificial Sequence: Synthetic oligonucleotide
  Sense strand starting at position 1401 of SEQ ID NO: 1883043
guucuagagucagaaagaa

SEQ ID NO: 2165949 - RNA, 19 nt, Artificial Sequence
  Description of Artificial Sequence: Synthetic oligonucleotide
  Antisense strand to SEQ ID NO: 2165948
uucuuucugacucuagaac

SEQ ID NO: 2165950 - RNA, 19 nt, Artificial Sequence
  Description of Artificial Sequence: Synthetic oligonucleotide
  Sense strand starting at position 1464 of SEQ ID NO: 1883043
ccuacauuaucagaaaggu

SEQ ID NO: 2165951 - RNA, 19 nt, Artificial Sequence
  Description of Artificial Sequence: Synthetic oligonucleotide
  Antisense strand to SEQ ID NO: 2165950
accuuucugauaauguagg

SEQ ID NO: 2165952 - RNA, 19 nt, Artificial Sequence
  Description of Artificial Sequence: Synthetic oligonucleotide
  Sense strand starting at position 1478 of SEQ ID NO: 1883043
aagguuugaucagcugaau

SEQ ID NO: 2165953 - RNA, 19 nt, Artificial Sequence
  Description of Artificial Sequence: Synthetic oligonucleotide
  Antisense strand to SEQ ID NO: 2165952
auucagcugaucaaaccuu

SEQ ID NO: 2165954 - RNA, 19 nt, Artificial Sequence
  Description of Artificial Sequence: Synthetic oligonucleotide
  Sense strand starting at position 1500 of SEQ ID NO: 1883043
uuggaagauugacuguuaa

SEQ ID NO: 2165955 - RNA, 19 nt, Artificial Sequence
  Description of Artificial Sequence: Synthetic oligonucleotide
  Antisense strand to SEQ ID NO: 2165954
uuaacagucaaucuuccaa

SEQ ID NO: 2165956 - RNA, 19 nt, Artificial Sequence
  Description of Artificial Sequence: Synthetic oligonucleotide
  Sense strand starting at position 1521 of SEQ ID NO: 1883043
gcaugcacaccuugggaau

SEQ ID NO: 2165957 - RNA, 19 nt, Artificial Sequence
  Description of Artificial Sequence: Synthetic oligonucleotide
  Antisense strand to SEQ ID NO: 2165956
auucccaaggugugcaugc

SEQ ID NO: 2165958 - RNA, 19 nt, Artificial Sequence
  Description of Artificial Sequence: Synthetic oligonucleotide
  Sense strand starting at position 1524 of SEQ ID NO: 1883043
ugcacaccuugggaauaau

SEQ ID NO: 2165959 - RNA, 19 nt, Artificial Sequence
  Description of Artificial Sequence: Synthetic oligonucleotide
  Antisense strand to SEQ ID NO: 2165958
auuauucccaaggugugca

SEQ ID NO: 2165960 - RNA, 19 nt, Artificial Sequence
  Description of Artificial Sequence: Synthetic oligonucleotide
  Sense strand starting at position 2034 of SEQ ID NO: 1883043
gaaauacagugaggaucuu

SEQ ID NO: 2165961 - RNA, 19 nt, Artificial Sequence
  Description of Artificial Sequence: Synthetic oligonucleotide
  Antisense strand to SEQ ID NO: 2165960
aagauccucacuguauuuc

SEQ ID NO: 2165962 - RNA, 19 nt, Artificial Sequence
  Description of Artificial Sequence: Synthetic oligonucleotide
  Sense strand starting at position 2040 of SEQ ID NO: 1883043
cagugaggaucuuaccauc

SEQ ID NO: 2165963 - RNA, 19 nt, Artificial Sequence
  Description of Artificial Sequence: Synthetic oligonucleotide
  Antisense strand to SEQ ID NO: 2165962
gaugguaagauccucacug

SEQ ID NO: 2165964 - RNA, 19 nt, Artificial Sequence
  Description of Artificial Sequence: Synthetic oligonucleotide
  Sense strand starting at position 2278 of SEQ ID NO: 1883043
ugacaaguagcauauuaau

SEQ ID NO: 2165965 - RNA, 19 nt, Artificial Sequence
  Description of Artificial Sequence: Synthetic oligonucleotide
  Antisense strand to SEQ ID NO: 2165964
auuaauaugcuacuuguca

SEQ ID NO: 2165966 - RNA, 19 nt, Artificial Sequence
  Description of Artificial Sequence: Synthetic oligonucleotide
  Sense strand starting at position 2284 of SEQ ID NO: 1883043
guagcauauuaauaaggaa

SEQ ID NO: 2165967 - RNA, 19 nt, Artificial Sequence
  Description of Artificial Sequence: Synthetic oligonucleotide
  Antisense strand to SEQ ID NO: 2165966
uuccuuauuaauaugcuac

SEQ ID NO: 2165968 - RNA, 19 nt, Artificial Sequence
  Description of Artificial Sequence: Synthetic oligonucleotide
  Sense strand starting at position 2532 of SEQ ID NO: 1883043
gccugagcccgggaguuua

SEQ ID NO: 2165969 - RNA, 19 nt, Artificial Sequence
  Description of Artificial Sequence: Synthetic oligonucleotide
  Antisense strand to SEQ ID NO: 2165968
uaaacucccgggcucaggc

SEQ ID NO: 2165970 - RNA, 19 nt, Artificial Sequence
  Description of Artificial Sequence: Synthetic oligonucleotide
  Sense strand starting at position 3155 of SEQ ID NO: 1883043
acaagagcucuuuauuagc

SEQ ID NO: 2165971 - RNA, 19 nt, Artificial Sequence
  Description of Artificial Sequence: Synthetic oligonucleotide
  Antisense strand to SEQ ID NO: 2165970
gcuaauaaagagcucuugu

SEQ ID NO: 2165972 - RNA, 19 nt, Artificial Sequence
  Description of Artificial Sequence: Synthetic oligonucleotide
  Sense strand starting at position 3161 of SEQ ID NO: 1883043
gcucuuuauuagccaggca

SEQ ID NO: 2165973 - RNA, 19 nt, Artificial Sequence
  Description of Artificial Sequence: Synthetic oligonucleotide
  Antisense strand to SEQ ID NO: 2165972
ugccuggcuaauaaagagc

SEQ ID NO: 2165974 - RNA, 19 nt, Artificial Sequence
  Description of Artificial Sequence: Synthetic oligonucleotide
  Sense strand starting at position 3354 of SEQ ID NO: 1883043
ggcugagaauccuaugaac

SEQ ID NO: 2165975 - RNA, 19 nt, Artificial Sequence
  Description of Artificial Sequence: Synthetic oligonucleotide
  Antisense strand to SEQ ID NO: 2165974
guucauaggauucucagcc

SEQ ID NO: 2165976 - RNA, 19 nt, Artificial Sequence
  Description of Artificial Sequence: Synthetic oligonucleotide
  Sense strand starting at position 3640 of SEQ ID NO: 1883043
gggugcacaaugugaauau

SEQ ID NO: 2165977 - RNA, 19 nt, Artificial Sequence
  Description of Artificial Sequence: Synthetic oligonucleotide
  Antisense strand to SEQ ID NO: 2165976
auauucacauugugcaccc

SEQ ID NO: 2165978 - RNA, 19 nt, Artificial Sequence
  Description of Artificial Sequence: Synthetic oligonucleotide
  Sense strand starting at position 3641 of SEQ ID NO: 1883043
ggugcacaaugugaauaua

SEQ ID NO: 2165979 - RNA, 19 nt, Artificial Sequence
  Description of Artificial Sequence: Synthetic oligonucleotide
  Antisense strand to SEQ ID NO: 2165978
uauauucacauugugcacc

SEQ ID NO: 2165980 - RNA, 19 nt, Artificial Sequence
  Description of Artificial Sequence: Synthetic oligonucleotide
  Sense strand starting at position 3644 of SEQ ID NO: 1883043
gcacaaugugaauauaguu

SEQ ID NO: 2165981 - RNA, 19 nt, Artificial Sequence
  Description of Artificial Sequence: Synthetic oligonucleotide
  Antisense strand to SEQ ID NO: 2165980
aacuauauucacauugugc

SEQ ID NO: 2165982 - RNA, 19 nt, Artificial Sequence
  Description of Artificial Sequence: Synthetic oligonucleotide
  Sense strand starting at position 3749 of SEQ ID NO: 1883043
aagucaaauuacucggaua

SEQ ID NO: 2165983 - RNA, 19 nt, Artificial Sequence
  Description of Artificial Sequence: Synthetic oligonucleotide
  Antisense strand to SEQ ID NO: 2165982
uauccgaguaauuugacuu

SEQ ID NO: 2165984 - RNA, 19 nt, Artificial Sequence
  Description of Artificial Sequence: Synthetic oligonucleotide
  Sense strand starting at position 3752 of SEQ ID NO: 1883043
ucaaauuacucggauaccu

SEQ ID NO: 2165985 - RNA, 19 nt, Artificial Sequence
  Description of Artificial Sequence: Synthetic oligonucleotide
  Antisense strand to SEQ ID NO: 2165984
agguauccgaguaauuuga

SEQ ID NO: 2165986 - RNA, 19 nt, Artificial Sequence
  Description of Artificial Sequence: Synthetic oligonucleotide
  Sense strand starting at position 3761 of SEQ ID NO: 1883043
ucggauaccucuccauauu

SEQ ID NO: 2165987 - RNA, 19 nt, Artificial Sequence
  Description of Artificial Sequence: Synthetic oligonucleotide
  Antisense strand to SEQ ID NO: 2165986
aauauggagagguauccga

SEQ ID NO: 2165988 - RNA, 19 nt, Artificial Sequence
  Description of Artificial Sequence: Synthetic oligonucleotide
  Sense strand starting at position 3841 of SEQ ID NO: 1883043
gggucaauucccuguaaca

SEQ ID NO: 2165989 - RNA, 19 nt, Artificial Sequence
  Description of Artificial Sequence: Synthetic oligonucleotide
  Antisense strand to SEQ ID NO: 2165988
uguuacagggaauugaccc

SEQ ID NO: 2165990 - RNA, 19 nt, Artificial Sequence
  Description of Artificial Sequence: Synthetic oligonucleotide
  Sense strand starting at position 3901 of SEQ ID NO: 1883043
aaaggaugauacguacuau

SEQ ID NO: 2165991 - RNA, 19 nt, Artificial Sequence
  Description of Artificial Sequence: Synthetic oligonucleotide
  Antisense strand to SEQ ID NO: 2165990
auaguacguaucauccuuu

SEQ ID NO: 2165992 - RNA, 19 nt, Artificial Sequence
  Description of Artificial Sequence: Synthetic oligonucleotide
  Sense strand starting at position 3905 of SEQ ID NO: 1883043
gaugauacguacuauuuag

SEQ ID NO: 2165993 - RNA, 19 nt, Artificial Sequence
  Description of Artificial Sequence: Synthetic oligonucleotide
  Antisense strand to SEQ ID NO: 2165992
cuaaauaguacguaucauc

SEQ ID NO: 2165994 - RNA, 19 nt, Artificial Sequence
  Description of Artificial Sequence: Synthetic oligonucleotide
  Sense strand starting at position 3912 of SEQ ID NO: 1883043
cguacuauuuaguuuauac

SEQ ID NO: 2165995 - RNA, 19 nt, Artificial Sequence
  Description of Artificial Sequence: Synthetic oligonucleotide
  Antisense strand to SEQ ID NO: 2165994
guauaaacuaaauaguacg

SEQ ID NO: 2165996 - RNA, 19 nt, Artificial Sequence
  Description of Artificial Sequence: Synthetic oligonucleotide
  Sense strand starting at position 70 of SEQ ID NO: 1883044
cagagauagucucccuggu

SEQ ID NO: 2165997 - RNA, 19 nt, Artificial Sequence
  Description of Artificial Sequence: Synthetic oligonucleotide
  Antisense strand to SEQ ID NO: 2165996
accagggagacuaucucug

SEQ ID NO: 2165998 - RNA, 19 nt, Artificial Sequence
  Description of Artificial Sequence: Synthetic oligonucleotide
  Sense strand starting at position 72 of SEQ ID NO: 1883044
gagauagucucccugguag

SEQ ID NO: 2165999 - RNA, 19 nt, Artificial Sequence
  Description of Artificial Sequence: Synthetic oligonucleotide
  Antisense strand to SEQ ID NO: 2165998
cuaccagggagacuaucuc

SEQ ID NO: 2166000 - RNA, 19 nt, Artificial Sequence
  Description of Artificial Sequence: Synthetic oligonucleotide
  Sense strand starting at position 1312 of SEQ ID NO: 1883044
cuggaagcuuucuaauaac

SEQ ID NO: 2166001 - RNA, 19 nt, Artificial Sequence
  Description of Artificial Sequence: Synthetic oligonucleotide
  Antisense strand to SEQ ID NO: 2166000
guuauuagaaagcuuccag

SEQ ID NO: 2166002 - RNA, 19 nt, Artificial Sequence
  Description of Artificial Sequence: Synthetic oligonucleotide
  Sense strand starting at position 1814 of SEQ ID NO: 1883044
agacaauucuuggagggau

SEQ ID NO: 2166003 - RNA, 19 nt, Artificial Sequence
  Description of Artificial Sequence: Synthetic oligonucleotide
  Antisense strand to SEQ ID NO: 2166002
aucccuccaagaauugucu

SEQ ID NO: 2166004 - RNA, 19 nt, Artificial Sequence
  Description of Artificial Sequence: Synthetic oligonucleotide
  Sense strand starting at position 1826 of SEQ ID NO: 1883044
gagggauacucugaucauc

SEQ ID NO: 2166005 - RNA, 19 nt, Artificial Sequence
  Description of Artificial Sequence: Synthetic oligonucleotide
  Antisense strand to SEQ ID NO: 2166004
gaugaucagaguaucccuc

SEQ ID NO: 2166006 - RNA, 19 nt, Artificial Sequence
  Description of Artificial Sequence: Synthetic oligonucleotide
  Sense strand starting at position 1828 of SEQ ID NO: 1883044
gggauacucugaucauccu

SEQ ID NO: 2166007 - RNA, 19 nt, Artificial Sequence
  Description of Artificial Sequence: Synthetic oligonucleotide
  Antisense strand to SEQ ID NO: 2166006
aggaugaucagaguauccc

SEQ ID NO: 2166008 - RNA, 19 nt, Artificial Sequence
  Description of Artificial Sequence: Synthetic oligonucleotide
  Sense strand starting at position 2243 of SEQ ID NO: 1883044
uugguugucucuuuccuaa

SEQ ID NO: 2166009 - RNA, 19 nt, Artificial Sequence
  Description of Artificial Sequence: Synthetic oligonucleotide
  Antisense strand to SEQ ID NO: 2166008
uuaggaaagagacaaccaa

SEQ ID NO: 2166010 - RNA, 19 nt, Artificial Sequence
  Description of Artificial Sequence: Synthetic oligonucleotide
  Sense strand starting at position 2245 of SEQ ID NO: 1883044
gguugucucuuuccuaaca

SEQ ID NO: 2166011 - RNA, 19 nt, Artificial Sequence
  Description of Artificial Sequence: Synthetic oligonucleotide
  Antisense strand to SEQ ID NO: 2166010
uguuaggaaagagacaacc

SEQ ID NO: 2166012 - RNA, 19 nt, Artificial Sequence
  Description of Artificial Sequence: Synthetic oligonucleotide
  Sense strand starting at position 2246 of SEQ ID NO: 1883044
guugucucuuuccuaacaa

SEQ ID NO: 2166013 - RNA, 19 nt, Artificial Sequence
  Description of Artificial Sequence: Synthetic oligonucleotide
  Antisense strand to SEQ ID NO: 2166012
uuguuaggaaagagacaac

SEQ ID NO: 2166014 - RNA, 19 nt, Artificial Sequence
  Description of Artificial Sequence: Synthetic oligonucleotide
  Sense strand starting at position 2510 of SEQ ID NO: 1883044
ugacacguccuauauacaa

SEQ ID NO: 2166015 - RNA, 19 nt, Artificial Sequence
  Description of Artificial Sequence: Synthetic oligonucleotide
  Antisense strand to SEQ ID NO: 2166014
uuguauauaggacguguca

SEQ ID NO: 2166016 - RNA, 19 nt, Artificial Sequence
  Description of Artificial Sequence: Synthetic oligonucleotide
  Sense strand starting at position 3147 of SEQ ID NO: 1883044
gucacaauuugcuaucaug

SEQ ID NO: 2166017 - RNA, 19 nt, Artificial Sequence
  Description of Artificial Sequence: Synthetic oligonucleotide
  Antisense strand to SEQ ID NO: 2166016
caugauagcaaauugugac

SEQ ID NO: 2166018 - RNA, 19 nt, Artificial Sequence
  Description of Artificial Sequence: Synthetic oligonucleotide
  Sense strand starting at position 3156 of SEQ ID NO: 1883044
ugcuaucaugcgcaugcaa

SEQ ID NO: 2166019 - RNA, 19 nt, Artificial Sequence
  Description of Artificial Sequence: Synthetic oligonucleotide
  Antisense strand to SEQ ID NO: 2166018
uugcaugcgcaugauagca

SEQ ID NO: 2166020 - RNA, 19 nt, Artificial Sequence
  Description of Artificial Sequence: Synthetic oligonucleotide
  Sense strand starting at position 3158 of SEQ ID NO: 1883044
cuaucaugcgcaugcaauu

SEQ ID NO: 2166021 - RNA, 19 nt, Artificial Sequence
  Description of Artificial Sequence: Synthetic oligonucleotide
  Antisense strand to SEQ ID NO: 2166020
aauugcaugcgcaugauag

SEQ ID NO: 2166022 - RNA, 19 nt, Artificial Sequence
  Description of Artificial Sequence: Synthetic oligonucleotide
  Sense strand starting at position 3169 of SEQ ID NO: 1883044
augcaauuauaaugaugga

SEQ ID NO: 2166023 - RNA, 19 nt, Artificial Sequence
  Description of Artificial Sequence: Synthetic oligonucleotide
  Antisense strand to SEQ ID NO: 2166022
uccaucauuauaauugcau

SEQ ID NO: 2166024 - RNA, 19 nt, Artificial Sequence
  Description of Artificial Sequence: Synthetic oligonucleotide
  Sense strand starting at position 3241 of SEQ ID NO: 1883044
aagcuugaggcucagugaa

SEQ ID NO: 2166025 - RNA, 19 nt, Artificial Sequence
  Description of Artificial Sequence: Synthetic oligonucleotide
  Antisense strand to SEQ ID NO: 2166024
uucacugagccucaagcuu

SEQ ID NO: 2166026 - RNA, 19 nt, Artificial Sequence
  Description of Artificial Sequence: Synthetic oligonucleotide
  Sense strand starting at position 3243 of SEQ ID NO: 1883044
gcuugaggcucagugaaag

SEQ ID NO: 2166027 - RNA, 19 nt, Artificial Sequence
  Description of Artificial Sequence: Synthetic oligonucleotide
  Antisense strand to SEQ ID NO: 2166026
cuuucacugagccucaagc

SEQ ID NO: 2166028 - RNA, 19 nt, Artificial Sequence
  Description of Artificial Sequence: Synthetic oligonucleotide
  Sense strand starting at position 3254 of SEQ ID NO: 1883044
agugaaaguuuacgcaaga

SEQ ID NO: 2166029 - RNA, 19 nt, Artificial Sequence
  Description of Artificial Sequence: Synthetic oligonucleotide
  Antisense strand to SEQ ID NO: 2166028
ucuugcguaaacuuucacu

SEQ ID NO: 2166030 - RNA, 19 nt, Artificial Sequence
  Description of Artificial Sequence: Synthetic oligonucleotide
  Sense strand starting at position 3255 of SEQ ID NO: 1883044
gugaaaguuuacgcaagau

SEQ ID NO: 2166031 - RNA, 19 nt, Artificial Sequence
  Description of Artificial Sequence: Synthetic oligonucleotide
  Antisense strand to SEQ ID NO: 2166030
aucuugcguaaacuuucac

SEQ ID NO: 2166032 - RNA, 19 nt, Artificial Sequence
  Description of Artificial Sequence: Synthetic oligonucleotide
  Sense strand starting at position 3259 of SEQ ID NO: 1883044
aaguuuacgcaagaugaca

SEQ ID NO: 2166033 - RNA, 19 nt, Artificial Sequence
  Description of Artificial Sequence: Synthetic oligonucleotide
  Antisense strand to SEQ ID NO: 2166032
ugucaucuugcguaaacuu

SEQ ID NO: 2166034 - RNA, 19 nt, Artificial Sequence
  Description of Artificial Sequence: Synthetic oligonucleotide
  Sense strand starting at position 3285 of SEQ ID NO: 1883044
guuaacaguaacggauaau

SEQ ID NO: 2166035 - RNA, 19 nt, Artificial Sequence
  Description of Artificial Sequence: Synthetic oligonucleotide
  Antisense strand to SEQ ID NO: 2166034
auuauccguuacuguuaac

SEQ ID NO: 2166036 - RNA, 19 nt, Artificial Sequence
  Description of Artificial Sequence: Synthetic oligonucleotide
  Sense strand starting at position 3328 of SEQ ID NO: 1883044
aguguagggcucuacgaga

SEQ ID NO: 2166037 - RNA, 19 nt, Artificial Sequence
  Description of Artificial Sequence: Synthetic oligonucleotide
  Antisense strand to SEQ ID NO: 2166036
ucucguagagcccuacacu

SEQ ID NO: 2166038 - RNA, 19 nt, Artificial Sequence
  Description of Artificial Sequence: Synthetic oligonucleotide
  Sense strand starting at position 3341 of SEQ ID NO: 1883044
acgagaauaagccagguau

SEQ ID NO: 2166039 - RNA, 19 nt, Artificial Sequence
  Description of Artificial Sequence: Synthetic oligonucleotide
  Antisense strand to SEQ ID NO: 2166038
auaccuggcuuauucucgu

SEQ ID NO: 2166040 - RNA, 19 nt, Artificial Sequence
  Description of Artificial Sequence: Synthetic oligonucleotide
  Sense strand starting at position 3831 of SEQ ID NO: 1883044
guguguccacuuuauaauu

SEQ ID NO: 2166041 - RNA, 19 nt, Artificial Sequence
  Description of Artificial Sequence: Synthetic oligonucleotide
  Antisense strand to SEQ ID NO: 2166040
aauuauaaaguggacacac

SEQ ID NO: 2166042 - RNA, 19 nt, Artificial Sequence
  Description of Artificial Sequence: Synthetic oligonucleotide
  Sense strand starting at position 3833 of SEQ ID NO: 1883044
guguccacuuuauaauuau

SEQ ID NO: 2166043 - RNA, 19 nt, Artificial Sequence
  Description of Artificial Sequence: Synthetic oligonucleotide
  Antisense strand to SEQ ID NO: 2166042
auaauuauaaaguggacac

SEQ ID NO: 2166044 - RNA, 19 nt, Artificial Sequence
  Description of Artificial Sequence: Synthetic oligonucleotide
  Sense strand starting at position 3858 of SEQ ID NO: 1883044
aauuguaaauguucuacgu

SEQ ID NO: 2166045 - RNA, 19 nt, Artificial Sequence
  Description of Artificial Sequence: Synthetic oligonucleotide
  Antisense strand to SEQ ID NO: 2166044
acguagaacauuuacaauu

SEQ ID NO: 2166046 - RNA, 19 nt, Artificial Sequence
  Description of Artificial Sequence: Synthetic oligonucleotide
  Sense strand starting at position 3862 of SEQ ID NO: 1883044
guaaauguucuacgugcuu

SEQ ID NO: 2166047 - RNA, 19 nt, Artificial Sequence
  Description of Artificial Sequence: Synthetic oligonucleotide
  Antisense strand to SEQ ID NO: 2166046
aagcacguagaacauuuac

SEQ ID NO: 2166048 - RNA, 19 nt, Artificial Sequence
  Description of Artificial Sequence: Synthetic oligonucleotide
  Sense strand starting at position 3873 of SEQ ID NO: 1883044
acgugcuucucucuacuua

SEQ ID NO: 2166049 - RNA, 19 nt, Artificial Sequence
  Description of Artificial Sequence: Synthetic oligonucleotide
  Antisense strand to SEQ ID NO: 2166048
uaaguagagagaagcacgu

SEQ ID NO: 2166050 - RNA, 19 nt, Artificial Sequence
  Description of Artificial Sequence: Synthetic oligonucleotide
  Sense strand starting at position 3874 of SEQ ID NO: 1883044
cgugcuucucucuacuuau

SEQ ID NO: 2166051 - RNA, 19 nt, Artificial Sequence
  Description of Artificial Sequence: Synthetic oligonucleotide
  Antisense strand to SEQ ID NO: 2166050
auaaguagagagaagcacg

SEQ ID NO: 2166052 - RNA, 19 nt, Artificial Sequence
  Description of Artificial Sequence: Synthetic oligonucleotide
  Sense strand starting at position 161 of SEQ ID NO: 1883045
uggugaggccuggagcaau

SEQ ID NO: 2166053 - RNA, 19 nt, Artificial Sequence
  Description of Artificial Sequence: Synthetic oligonucleotide
  Antisense strand to SEQ ID NO: 2166052
auugcuccaggccucacca

SEQ ID NO: 2166054 - RNA, 19 nt, Artificial Sequence
  Description of Artificial Sequence: Synthetic oligonucleotide
  Sense strand starting at position 172 of SEQ ID NO: 1883045
ggagcaauccugggcuuga

SEQ ID NO: 2166055 - RNA, 19 nt, Artificial Sequence
  Description of Artificial Sequence: Synthetic oligonucleotide
  Antisense strand to SEQ ID NO: 2166054
ucaagcccaggauugcucc

SEQ ID NO: 2166056 - RNA, 19 nt, Artificial Sequence
  Description of Artificial Sequence: Synthetic oligonucleotide
  Sense strand starting at position 173 of SEQ ID NO: 1883045
gagcaauccugggcuugaa

SEQ ID NO: 2166057 - RNA, 19 nt, Artificial Sequence
  Description of Artificial Sequence: Synthetic oligonucleotide
  Antisense strand to SEQ ID NO: 2166056
uucaagcccaggauugcuc

SEQ ID NO: 2166058 - RNA, 19 nt, Artificial Sequence
  Description of Artificial Sequence: Synthetic oligonucleotide
  Sense strand starting at position 254 of SEQ ID NO: 1883045
gcuggcauuugauuagguu

SEQ ID NO: 2166059 - RNA, 19 nt, Artificial Sequence
  Description of Artificial Sequence: Synthetic oligonucleotide
  Antisense strand to SEQ ID NO: 2166058
aaccuaaucaaaugccagc

SEQ ID NO: 2166060 - RNA, 19 nt, Artificial Sequence
  Description of Artificial Sequence: Synthetic oligonucleotide
  Sense strand starting at position 261 of SEQ ID NO: 1883045
uuugauuagguuuacuaca

SEQ ID NO: 2166061 - RNA, 19 nt, Artificial Sequence
  Description of Artificial Sequence: Synthetic oligonucleotide
  Antisense strand to SEQ ID NO: 2166060
uguaguaaaccuaaucaaa

SEQ ID NO: 2166062 - RNA, 19 nt, Artificial Sequence
  Description of Artificial Sequence: Synthetic oligonucleotide
  Sense strand starting at position 313 of SEQ ID NO: 1883045
cccauaaugucuccaagug

SEQ ID NO: 2166063 - RNA, 19 nt, Artificial Sequence
  Description of Artificial Sequence: Synthetic oligonucleotide
  Antisense strand to SEQ ID NO: 2166062
cacuuggagacauuauggg

SEQ ID NO: 2166064 - RNA, 19 nt, Artificial Sequence
  Description of Artificial Sequence: Synthetic oligonucleotide
  Sense strand starting at position 314 of SEQ ID NO: 1883045
ccauaaugucuccaaguga

SEQ ID NO: 2166065 - RNA, 19 nt, Artificial Sequence
  Description of Artificial Sequence: Synthetic oligonucleotide
  Antisense strand to SEQ ID NO: 2166064
ucacuuggagacauuaugg

SEQ ID NO: 2166066 - RNA, 19 nt, Artificial Sequence
  Description of Artificial Sequence: Synthetic oligonucleotide
  Sense strand starting at position 355 of SEQ ID NO: 1883045
aaucucugguccucugaga

SEQ ID NO: 2166067 - RNA, 19 nt, Artificial Sequence
  Description of Artificial Sequence: Synthetic oligonucleotide
  Antisense strand to SEQ ID NO: 2166066
ucucagaggaccagagauu

SEQ ID NO: 2166068 - RNA, 19 nt, Artificial Sequence
  Description of Artificial Sequence: Synthetic oligonucleotide
  Sense strand starting at position 575 of SEQ ID NO: 1883045
uggagcuucugagcaucaa

SEQ ID NO: 2166069 - RNA, 19 nt, Artificial Sequence
  Description of Artificial Sequence: Synthetic oligonucleotide
  Antisense strand to SEQ ID NO: 2166068
uugaugcucagaagcucca

SEQ ID NO: 2166070 - RNA, 19 nt, Artificial Sequence
  Description of Artificial Sequence: Synthetic oligonucleotide
  Sense strand starting at position 868 of SEQ ID NO: 1883045
ccucuuggucuggauggaa

SEQ ID NO: 2166071 - RNA, 19 nt, Artificial Sequence
  Description of Artificial Sequence: Synthetic oligonucleotide
  Antisense strand to SEQ ID NO: 2166070
uuccauccagaccaagagg

SEQ ID NO: 2166072 - RNA, 19 nt, Artificial Sequence
  Description of Artificial Sequence: Synthetic oligonucleotide
  Sense strand starting at position 931 of SEQ ID NO: 1883045
gggugauguccugcgcucu

SEQ ID NO: 2166073 - RNA, 19 nt, Artificial Sequence
  Description of Artificial Sequence: Synthetic oligonucleotide
  Antisense strand to SEQ ID NO: 2166072
agagcgcaggacaucaccc

SEQ ID NO: 2166074 - RNA, 19 nt, Artificial Sequence
  Description of Artificial Sequence: Synthetic oligonucleotide
  Sense strand starting at position 966 of SEQ ID NO: 1883045
gugggucagaaauagcaga

SEQ ID NO: 2166075 - RNA, 19 nt, Artificial Sequence
  Description of Artificial Sequence: Synthetic oligonucleotide
  Antisense strand to SEQ ID NO: 2166074
ucugcuauuucugacccac

SEQ ID NO: 2166076 - RNA, 19 nt, Artificial Sequence
  Description of Artificial Sequence: Synthetic oligonucleotide
  Sense strand starting at position 1225 of SEQ ID NO: 1883045
ccaguaaacuuaguuuaga

SEQ ID NO: 2166077 - RNA, 19 nt, Artificial Sequence
  Description of Artificial Sequence: Synthetic oligonucleotide
  Antisense strand to SEQ ID NO: 2166076
ucuaaacuaaguuuacugg

SEQ ID NO: 2166078 - RNA, 19 nt, Artificial Sequence
  Description of Artificial Sequence: Synthetic oligonucleotide
  Sense strand starting at position 1236 of SEQ ID NO: 1883045
aguuuagacuggucacaca

SEQ ID NO: 2166079 - RNA, 19 nt, Artificial Sequence
  Description of Artificial Sequence: Synthetic oligonucleotide
  Antisense strand to SEQ ID NO: 2166078
ugugugaccagucuaaacu

SEQ ID NO: 2166080 - RNA, 19 nt, Artificial Sequence
  Description of Artificial Sequence: Synthetic oligonucleotide
  Sense strand starting at position 1322 of SEQ ID NO: 1883045
gacaguucucaguggauuc

SEQ ID NO: 2166081 - RNA, 19 nt, Artificial Sequence
  Description of Artificial Sequence: Synthetic oligonucleotide
  Antisense strand to SEQ ID NO: 2166080
gaauccacugagaacuguc

SEQ ID NO: 2166082 - RNA, 19 nt, Artificial Sequence
  Description of Artificial Sequence: Synthetic oligonucleotide
  Sense strand starting at position 1332 of SEQ ID NO: 1883045
aguggauucucagucucau

SEQ ID NO: 2166083 - RNA, 19 nt, Artificial Sequence
  Description of Artificial Sequence: Synthetic oligonucleotide
  Antisense strand to SEQ ID NO: 2166082
augagacugagaauccacu

SEQ ID NO: 2166084 - RNA, 19 nt, Artificial Sequence
  Description of Artificial Sequence: Synthetic oligonucleotide
  Sense strand starting at position 1396 of SEQ ID NO: 1883045
cacuuauaauggucaguga

SEQ ID NO: 2166085 - RNA, 19 nt, Artificial Sequence
  Description of Artificial Sequence: Synthetic oligonucleotide
  Antisense strand to SEQ ID NO: 2166084
ucacugaccauuauaagug

SEQ ID NO: 2166086 - RNA, 19 nt, Artificial Sequence
  Description of Artificial Sequence: Synthetic oligonucleotide
  Sense strand starting at position 1399 of SEQ ID NO: 1883045
uuauaauggucagugaaag

SEQ ID NO: 2166087 - RNA, 19 nt, Artificial Sequence
  Description of Artificial Sequence: Synthetic oligonucleotide
  Antisense strand to SEQ ID NO: 2166086
cuuucacugaccauuauaa

SEQ ID NO: 2166088 - RNA, 19 nt, Artificial Sequence
  Description of Artificial Sequence: Synthetic oligonucleotide
  Sense strand starting at position 1400 of SEQ ID NO: 1883045
uauaauggucagugaaaga

SEQ ID NO: 2166089 - RNA, 19 nt, Artificial Sequence
  Description of Artificial Sequence: Synthetic oligonucleotide
  Antisense strand to SEQ ID NO: 2166088
ucuuucacugaccauuaua

SEQ ID NO: 2166090 - RNA, 19 nt, Artificial Sequence
  Description of Artificial Sequence: Synthetic oligonucleotide
  Sense strand starting at position 1533 of SEQ ID NO: 1883045
cuuuacuuucccgacuaag

SEQ ID NO: 2166091 - RNA, 19 nt, Artificial Sequence
  Description of Artificial Sequence: Synthetic oligonucleotide
  Antisense strand to SEQ ID NO: 2166090
cuuagucgggaaaguaaag

SEQ ID NO: 2166092 - RNA, 19 nt, Artificial Sequence
  Description of Artificial Sequence: Synthetic oligonucleotide
  Sense strand starting at position 1795 of SEQ ID NO: 1883045
caggguuuagcuggagaga

SEQ ID NO: 2166093 - RNA, 19 nt, Artificial Sequence
  Description of Artificial Sequence: Synthetic oligonucleotide
  Antisense strand to SEQ ID NO: 2166092
ucucuccagcuaaacccug

SEQ ID NO: 2166094 - RNA, 19 nt, Artificial Sequence
  Description of Artificial Sequence: Synthetic oligonucleotide
  Sense strand starting at position 1804 of SEQ ID NO: 1883045
gcuggagagagucagcaau

SEQ ID NO: 2166095 - RNA, 19 nt, Artificial Sequence
  Description of Artificial Sequence: Synthetic oligonucleotide
  Antisense strand to SEQ ID NO: 2166094
auugcugacucucuccagc

SEQ ID NO: 2166096 - RNA, 19 nt, Artificial Sequence
  Description of Artificial Sequence: Synthetic oligonucleotide
  Sense strand starting at position 1806 of SEQ ID NO: 1883045
uggagagagucagcaauca

SEQ ID NO: 2166097 - RNA, 19 nt, Artificial Sequence
  Description of Artificial Sequence: Synthetic oligonucleotide
  Antisense strand to SEQ ID NO: 2166096
ugauugcugacucucucca

SEQ ID NO: 2166098 - RNA, 19 nt, Artificial Sequence
  Description of Artificial Sequence: Synthetic oligonucleotide
  Sense strand starting at position 1847 of SEQ ID NO: 1883045
agccucgaggucuagauau

SEQ ID NO: 2166099 - RNA, 19 nt, Artificial Sequence
  Description of Artificial Sequence: Synthetic oligonucleotide
  Antisense strand to SEQ ID NO: 2166098
auaucuagaccucgaggcu

SEQ ID NO: 2166100 - RNA, 19 nt, Artificial Sequence
  Description of Artificial Sequence: Synthetic oligonucleotide
  Sense strand starting at position 1867 of SEQ ID NO: 1883045
ugaugucuguaaccaaauu

SEQ ID NO: 2166101 - RNA, 19 nt, Artificial Sequence
  Description of Artificial Sequence: Synthetic oligonucleotide
  Antisense strand to SEQ ID NO: 2166100
aauuugguuacagacauca

SEQ ID NO: 2166102 - RNA, 19 nt, Artificial Sequence
  Description of Artificial Sequence: Synthetic oligonucleotide
  Sense strand starting at position 2041 of SEQ ID NO: 1883045
guccaaagggcucaccaua

SEQ ID NO: 2166103 - RNA, 19 nt, Artificial Sequence
  Description of Artificial Sequence: Synthetic oligonucleotide
  Antisense strand to SEQ ID NO: 2166102
uauggugagcccuuuggac

SEQ ID NO: 2166104 - RNA, 19 nt, Artificial Sequence
  Description of Artificial Sequence: Synthetic oligonucleotide
  Sense strand starting at position 2081 of SEQ ID NO: 1883045
cacaucuuucgucagagag

SEQ ID NO: 2166105 - RNA, 19 nt, Artificial Sequence
  Description of Artificial Sequence: Synthetic oligonucleotide
  Antisense strand to SEQ ID NO: 2166104
cucucugacgaaagaugug

SEQ ID NO: 2166106 - RNA, 19 nt, Artificial Sequence
  Description of Artificial Sequence: Synthetic oligonucleotide
  Sense strand starting at position 2582 of SEQ ID NO: 1883045
agcacaucuccaggagagu

SEQ ID NO: 2166107 - RNA, 19 nt, Artificial Sequence
  Description of Artificial Sequence: Synthetic oligonucleotide
  Antisense strand to SEQ ID NO: 2166106
acucuccuggagaugugcu

SEQ ID NO: 2166108 - RNA, 19 nt, Artificial Sequence
  Description of Artificial Sequence: Synthetic oligonucleotide
  Sense strand starting at position 2583 of SEQ ID NO: 1883045
gcacaucuccaggagaguu

SEQ ID NO: 2166109 - RNA, 19 nt, Artificial Sequence
  Description of Artificial Sequence: Synthetic oligonucleotide
  Antisense strand to SEQ ID NO: 2166108
aacucuccuggagaugugc

SEQ ID NO: 2166110 - RNA, 19 nt, Artificial Sequence
  Description of Artificial Sequence: Synthetic oligonucleotide
  Sense strand starting at position 2597 of SEQ ID NO: 1883045
gaguucuagccagaagcca

SEQ ID NO: 2166111 - RNA, 19 nt, Artificial Sequence
  Description of Artificial Sequence: Synthetic oligonucleotide
  Antisense strand to SEQ ID NO: 2166110
uggcuucuggcuagaacuc

SEQ ID NO: 2166112 - RNA, 19 nt, Artificial Sequence
  Description of Artificial Sequence: Synthetic oligonucleotide
  Sense strand starting at position 3007 of SEQ ID NO: 1883045
caucaugacggucacuaau

SEQ ID NO: 2166113 - RNA, 19 nt, Artificial Sequence
  Description of Artificial Sequence: Synthetic oligonucleotide
  Antisense strand to SEQ ID NO: 2166112
auuagugaccgucaugaug

SEQ ID NO: 2166114 - RNA, 19 nt, Artificial Sequence
  Description of Artificial Sequence: Synthetic oligonucleotide
  Sense strand starting at position 3016 of SEQ ID NO: 1883045
ggucacuaaugugugggaa

SEQ ID NO: 2166115 - RNA, 19 nt, Artificial Sequence
  Description of Artificial Sequence: Synthetic oligonucleotide
  Antisense strand to SEQ ID NO: 2166114
uucccacacauuagugacc

SEQ ID NO: 2166116 - RNA, 19 nt, Artificial Sequence
  Description of Artificial Sequence: Synthetic oligonucleotide
  Sense strand starting at position 3017 of SEQ ID NO: 1883045
gucacuaaugugugggaau

SEQ ID NO: 2166117 - RNA, 19 nt, Artificial Sequence
  Description of Artificial Sequence: Synthetic oligonucleotide
  Antisense strand to SEQ ID NO: 2166116
auucccacacauuagugac

SEQ ID NO: 2166118 - RNA, 19 nt, Artificial Sequence
  Description of Artificial Sequence: Synthetic oligonucleotide
  Sense strand starting at position 3019 of SEQ ID NO: 1883045
cacuaaugugugggaaucu

SEQ ID NO: 2166119 - RNA, 19 nt, Artificial Sequence
  Description of Artificial Sequence: Synthetic oligonucleotide
  Antisense strand to SEQ ID NO: 2166118
agauucccacacauuagug

SEQ ID NO: 2166120 - RNA, 19 nt, Artificial Sequence
  Description of Artificial Sequence: Synthetic oligonucleotide
  Sense strand starting at position 3093 of SEQ ID NO: 1883045
gcgagugcugcuccuguga

SEQ ID NO: 2166121 - RNA, 19 nt, Artificial Sequence
  Description of Artificial Sequence: Synthetic oligonucleotide
  Antisense strand to SEQ ID NO: 2166120
ucacaggagcagcacucgc

SEQ ID NO: 2166122 - RNA, 19 nt, Artificial Sequence
  Description of Artificial Sequence: Synthetic oligonucleotide
  Sense strand starting at position 3275 of SEQ ID NO: 1883045
gaggcaaucuaggcagaga

SEQ ID NO: 2166123 - RNA, 19 nt, Artificial Sequence
  Description of Artificial Sequence: Synthetic oligonucleotide
  Antisense strand to SEQ ID NO: 2166122
ucucugccuagauugccuc

SEQ ID NO: 2166124 - RNA, 19 nt, Artificial Sequence
  Description of Artificial Sequence: Synthetic oligonucleotide
  Sense strand starting at position 3303 of SEQ ID NO: 1883045
ggagaaaugauguggcacu

SEQ ID NO: 2166125 - RNA, 19 nt, Artificial Sequence
  Description of Artificial Sequence: Synthetic oligonucleotide
  Antisense strand to SEQ ID NO: 2166124
agugccacaucauuucucc

SEQ ID NO: 2166126 - RNA, 19 nt, Artificial Sequence
  Description of Artificial Sequence: Synthetic oligonucleotide
  Sense strand starting at position 3706 of SEQ ID NO: 1883045
gcacauuucugcucaaggu

SEQ ID NO: 2166127 - RNA, 19 nt, Artificial Sequence
  Description of Artificial Sequence: Synthetic oligonucleotide
  Antisense strand to SEQ ID NO: 2166126
accuugagcagaaaugugc

SEQ ID NO: 2166128 - RNA, 19 nt, Artificial Sequence
  Description of Artificial Sequence: Synthetic oligonucleotide
  Sense strand starting at position 3807 of SEQ ID NO: 1883045
gaccuaauguaguugauua

SEQ ID NO: 2166129 - RNA, 19 nt, Artificial Sequence
  Description of Artificial Sequence: Synthetic oligonucleotide
  Antisense strand to SEQ ID NO: 2166128
uaaucaacuacauuagguc

SEQ ID NO: 2166130 - RNA, 19 nt, Artificial Sequence
  Description of Artificial Sequence: Synthetic oligonucleotide
  Sense strand starting at position 3809 of SEQ ID NO: 1883045
ccuaauguaguugauuaaa

SEQ ID NO: 2166131 - RNA, 19 nt, Artificial Sequence
  Description of Artificial Sequence: Synthetic oligonucleotide
  Antisense strand to SEQ ID NO: 2166130
uuuaaucaacuacauuagg

SEQ ID NO: 2166132 - RNA, 19 nt, Artificial Sequence
  Description of Artificial Sequence: Synthetic oligonucleotide
  Sense strand starting at position 26 of SEQ ID NO: 1883046
ggcugagccacuugaguaa

SEQ ID NO: 2166133 - RNA, 19 nt, Artificial Sequence
  Description of Artificial Sequence: Synthetic oligonucleotide
  Antisense strand to SEQ ID NO: 2166132
uuacucaaguggcucagcc

SEQ ID NO: 2166134 - RNA, 19 nt, Artificial Sequence
  Description of Artificial Sequence: Synthetic oligonucleotide
  Sense strand starting at position 137 of SEQ ID NO: 1883046
ucuggugaaagcugaguuu

SEQ ID NO: 2166135 - RNA, 19 nt, Artificial Sequence
  Description of Artificial Sequence: Synthetic oligonucleotide
  Antisense strand to SEQ ID NO: 2166134
aaacucagcuuucaccaga

SEQ ID NO: 2166136 - RNA, 19 nt, Artificial Sequence
  Description of Artificial Sequence: Synthetic oligonucleotide
  Sense strand starting at position 178 of SEQ ID NO: 1883046
caggguuuagcuggagaga

SEQ ID NO: 2166137 - RNA, 19 nt, Artificial Sequence
  Description of Artificial Sequence: Synthetic oligonucleotide
  Antisense strand to SEQ ID NO: 2166136
ucucuccagcuaaacccug

SEQ ID NO: 2166138 - RNA, 19 nt, Artificial Sequence
  Description of Artificial Sequence: Synthetic oligonucleotide
  Sense strand starting at position 180 of SEQ ID NO: 1883046
ggguuuagcuggagagagu

SEQ ID NO: 2166139 - RNA, 19 nt, Artificial Sequence
  Description of Artificial Sequence: Synthetic oligonucleotide
  Antisense strand to SEQ ID NO: 2166138
acucucuccagcuaaaccc

SEQ ID NO: 2166140 - RNA, 19 nt, Artificial Sequence
  Description of Artificial Sequence: Synthetic oligonucleotide
  Sense strand starting at position 187 of SEQ ID NO: 1883046
gcuggagagagucagcaau

SEQ ID NO: 2166141 - RNA, 19 nt, Artificial Sequence
  Description of Artificial Sequence: Synthetic oligonucleotide
  Antisense strand to SEQ ID NO: 2166140
auugcugacucucuccagc

SEQ ID NO: 2166142 - RNA, 19 nt, Artificial Sequence
  Description of Artificial Sequence: Synthetic oligonucleotide
  Sense strand starting at position 189 of SEQ ID NO: 1883046
uggagagagucagcaauca

SEQ ID NO: 2166143 - RNA, 19 nt, Artificial Sequence
  Description of Artificial Sequence: Synthetic oligonucleotide
  Antisense strand to SEQ ID NO: 2166142
ugauugcugacucucucca

SEQ ID NO: 2166144 - RNA, 19 nt, Artificial Sequence
  Description of Artificial Sequence: Synthetic oligonucleotide
  Sense strand starting at position 230 of SEQ ID NO: 1883046
agccucgaggucuagauau

SEQ ID NO: 2166145 - RNA, 19 nt, Artificial Sequence
  Description of Artificial Sequence: Synthetic oligonucleotide
  Antisense strand to SEQ ID NO: 2166144
auaucuagaccucgaggcu

SEQ ID NO: 2166146 - RNA, 19 nt, Artificial Sequence
  Description of Artificial Sequence: Synthetic oligonucleotide
  Sense strand starting at position 250 of SEQ ID NO: 1883046
ugaugucuguaaccaaauu

SEQ ID NO: 2166147 - RNA, 19 nt, Artificial Sequence
  Description of Artificial Sequence: Synthetic oligonucleotide
  Antisense strand to SEQ ID NO: 2166146
aauuugguuacagacauca

SEQ ID NO: 2166148 - RNA, 19 nt, Artificial Sequence
  Description of Artificial Sequence: Synthetic oligonucleotide
  Sense strand starting at position 424 of SEQ ID NO: 1883046
guccaaagggcucaccaua

SEQ ID NO: 2166149 - RNA, 19 nt, Artificial Sequence
  Description of Artificial Sequence: Synthetic oligonucleotide
  Antisense strand to SEQ ID NO: 2166148
uauggugagcccuuuggac

SEQ ID NO: 2166150 - RNA, 19 nt, Artificial Sequence
  Description of Artificial Sequence: Synthetic oligonucleotide
  Sense strand starting at position 463 of SEQ ID NO: 1883046
gcacaucuuucgucagaga

SEQ ID NO: 2166151 - RNA, 19 nt, Artificial Sequence
  Description of Artificial Sequence: Synthetic oligonucleotide
  Antisense strand to SEQ ID NO: 2166150
ucucugacgaaagaugugc

SEQ ID NO: 2166152 - RNA, 19 nt, Artificial Sequence
  Description of Artificial Sequence: Synthetic oligonucleotide
  Sense strand starting at position 464 of SEQ ID NO: 1883046
cacaucuuucgucagagag

SEQ ID NO: 2166153 - RNA, 19 nt, Artificial Sequence
  Description of Artificial Sequence: Synthetic oligonucleotide
  Antisense strand to SEQ ID NO: 2166152
cucucugacgaaagaugug

SEQ ID NO: 2166154 - RNA, 19 nt, Artificial Sequence
  Description of Artificial Sequence: Synthetic oligonucleotide
  Sense strand starting at position 965 of SEQ ID NO: 1883046
agcacaucuccaggagagu

SEQ ID NO: 2166155 - RNA, 19 nt, Artificial Sequence
  Description of Artificial Sequence: Synthetic oligonucleotide
  Antisense strand to SEQ ID NO: 2166154
acucuccuggagaugugcu

SEQ ID NO: 2166156 - RNA, 19 nt, Artificial Sequence
  Description of Artificial Sequence: Synthetic oligonucleotide
  Sense strand starting at position 966 of SEQ ID NO: 1883046
gcacaucuccaggagaguu

SEQ ID NO: 2166157 - RNA, 19 nt, Artificial Sequence
  Description of Artificial Sequence: Synthetic oligonucleotide
  Antisense strand to SEQ ID NO: 2166156
aacucuccuggagaugugc

SEQ ID NO: 2166158 - RNA, 19 nt, Artificial Sequence
  Description of Artificial Sequence: Synthetic oligonucleotide
  Sense strand starting at position 980 of SEQ ID NO: 1883046
gaguucuagccagaagcca

SEQ ID NO: 2166159 - RNA, 19 nt, Artificial Sequence
  Description of Artificial Sequence: Synthetic oligonucleotide
  Antisense strand to SEQ ID NO: 2166158
uggcuucuggcuagaacuc

SEQ ID NO: 2166160 - RNA, 19 nt, Artificial Sequence
  Description of Artificial Sequence: Synthetic oligonucleotide
  Sense strand starting at position 1122 of SEQ ID NO: 1883046
gcaaguggugcuugaugaa

SEQ ID NO: 2166161 - RNA, 19 nt, Artificial Sequence
  Description of Artificial Sequence: Synthetic oligonucleotide
  Antisense strand to SEQ ID NO: 2166160
uucaucaagcaccacuugc

SEQ ID NO: 2166162 - RNA, 19 nt, Artificial Sequence
  Description of Artificial Sequence: Synthetic oligonucleotide
  Sense strand starting at position 1390 of SEQ ID NO: 1883046
caucaugacggucacuaau

SEQ ID NO: 2166163 - RNA, 19 nt, Artificial Sequence
  Description of Artificial Sequence: Synthetic oligonucleotide
  Antisense strand to SEQ ID NO: 2166162
auuagugaccgucaugaug

SEQ ID NO: 2166164 - RNA, 19 nt, Artificial Sequence
  Description of Artificial Sequence: Synthetic oligonucleotide
  Sense strand starting at position 1399 of SEQ ID NO: 1883046
ggucacuaaugugugggaa

SEQ ID NO: 2166165 - RNA, 19 nt, Artificial Sequence
  Description of Artificial Sequence: Synthetic oligonucleotide
  Antisense strand to SEQ ID NO: 2166164
uucccacacauuagugacc

SEQ ID NO: 2166166 - RNA, 19 nt, Artificial Sequence
  Description of Artificial Sequence: Synthetic oligonucleotide
  Sense strand starting at position 1400 of SEQ ID NO: 1883046
gucacuaaugugugggaau

SEQ ID NO: 2166167 - RNA, 19 nt, Artificial Sequence
  Description of Artificial Sequence: Synthetic oligonucleotide
  Antisense strand to SEQ ID NO: 2166166
auucccacacauuagugac

SEQ ID NO: 2166168 - RNA, 19 nt, Artificial Sequence
  Description of Artificial Sequence: Synthetic oligonucleotide
  Sense strand starting at position 1402 of SEQ ID NO: 1883046
cacuaaugugugggaaucu

SEQ ID NO: 2166169 - RNA, 19 nt, Artificial Sequence
  Description of Artificial Sequence: Synthetic oligonucleotide
  Antisense strand to SEQ ID NO: 2166168
agauucccacacauuagug

SEQ ID NO: 2166170 - RNA, 19 nt, Artificial Sequence
  Description of Artificial Sequence: Synthetic oligonucleotide
  Sense strand starting at position 1476 of SEQ ID NO: 1883046
gcgagugcugcuccuguga

SEQ ID NO: 2166171 - RNA, 19 nt, Artificial Sequence
  Description of Artificial Sequence: Synthetic oligonucleotide
  Antisense strand to SEQ ID NO: 2166170
ucacaggagcagcacucgc

SEQ ID NO: 2166172 - RNA, 19 nt, Artificial Sequence
  Description of Artificial Sequence: Synthetic oligonucleotide
  Sense strand starting at position 1658 of SEQ ID NO: 1883046
gaggcaaucuaggcagaga

SEQ ID NO: 2166173 - RNA, 19 nt, Artificial Sequence
  Description of Artificial Sequence: Synthetic oligonucleotide
  Antisense strand to SEQ ID NO: 2166172
ucucugccuagauugccuc

SEQ ID NO: 2166174 - RNA, 19 nt, Artificial Sequence
  Description of Artificial Sequence: Synthetic oligonucleotide
  Sense strand starting at position 1686 of SEQ ID NO: 1883046
ggagaaaugauguggcacu

SEQ ID NO: 2166175 - RNA, 19 nt, Artificial Sequence
  Description of Artificial Sequence: Synthetic oligonucleotide
  Antisense strand to SEQ ID NO: 2166174
agugccacaucauuucucc

SEQ ID NO: 2166176 - RNA, 19 nt, Artificial Sequence
  Description of Artificial Sequence: Synthetic oligonucleotide
  Sense strand starting at position 1869 of SEQ ID NO: 1883046
uggugucuguaaccaaauu

SEQ ID NO: 2166177 - RNA, 19 nt, Artificial Sequence
  Description of Artificial Sequence: Synthetic oligonucleotide
  Antisense strand to SEQ ID NO: 2166176
aauuugguuacagacacca

SEQ ID NO: 2166178 - RNA, 19 nt, Artificial Sequence
  Description of Artificial Sequence: Synthetic oligonucleotide
  Sense strand starting at position 2089 of SEQ ID NO: 1883046
gcacauuucugcucaaggu

SEQ ID NO: 2166179 - RNA, 19 nt, Artificial Sequence
  Description of Artificial Sequence: Synthetic oligonucleotide
  Antisense strand to SEQ ID NO: 2166178
accuugagcagaaaugugc

SEQ ID NO: 2166180 - RNA, 19 nt, Artificial Sequence
  Description of Artificial Sequence: Synthetic oligonucleotide
  Sense strand starting at position 2190 of SEQ ID NO: 1883046
gaccuaauguaguugauua

SEQ ID NO: 2166181 - RNA, 19 nt, Artificial Sequence
  Description of Artificial Sequence: Synthetic oligonucleotide
  Antisense strand to SEQ ID NO: 2166180
uaaucaacuacauuagguc

SEQ ID NO: 2166182 - RNA, 19 nt, Artificial Sequence
  Description of Artificial Sequence: Synthetic oligonucleotide
  Sense strand starting at position 2192 of SEQ ID NO: 1883046
ccuaauguaguugauuaaa

SEQ ID NO: 2166183 - RNA, 19 nt, Artificial Sequence
  Description of Artificial Sequence: Synthetic oligonucleotide
  Antisense strand to SEQ ID NO: 2166182
uuuaaucaacuacauuagg

SEQ ID NO: 2166184 - RNA, 19 nt, Artificial Sequence
  Description of Artificial Sequence: Synthetic oligonucleotide
  Sense strand starting at position 2496 of SEQ ID NO: 1883046
gugaaacccugugccuauu

SEQ ID NO: 2166185 - RNA, 19 nt, Artificial Sequence
  Description of Artificial Sequence: Synthetic oligonucleotide
  Antisense strand to SEQ ID NO: 2166184
aauaggcacaggguuucac

SEQ ID NO: 2166186 - RNA, 19 nt, Artificial Sequence
  Description of Artificial Sequence: Synthetic oligonucleotide
  Sense strand starting at position 2780 of SEQ ID NO: 1883046
aguuucuggcaacgugaaa

SEQ ID NO: 2166187 - RNA, 19 nt, Artificial Sequence
  Description of Artificial Sequence: Synthetic oligonucleotide
  Antisense strand to SEQ ID NO: 2166186
uuucacguugccagaaacu

SEQ ID NO: 2166188 - RNA, 19 nt, Artificial Sequence
  Description of Artificial Sequence: Synthetic oligonucleotide
  Sense strand starting at position 2791 of SEQ ID NO: 1883046
acgugaaaguuucuuagga

SEQ ID NO: 2166189 - RNA, 19 nt, Artificial Sequence
  Description of Artificial Sequence: Synthetic oligonucleotide
  Antisense strand to SEQ ID NO: 2166188
uccuaagaaacuuucacgu

SEQ ID NO: 2166190 - RNA, 19 nt, Artificial Sequence
  Description of Artificial Sequence: Synthetic oligonucleotide
  Sense strand starting at position 2792 of SEQ ID NO: 1883046
cgugaaaguuucuuaggaa

SEQ ID NO: 2166191 - RNA, 19 nt, Artificial Sequence
  Description of Artificial Sequence: Synthetic oligonucleotide
  Antisense strand to SEQ ID NO: 2166190
uuccuaagaaacuuucacg

SEQ ID NO: 2166192 - RNA, 19 nt, Artificial Sequence
  Description of Artificial Sequence: Synthetic oligonucleotide
  Sense strand starting at position 2799 of SEQ ID NO: 1883046
guuucuuaggaaugcaacu

SEQ ID NO: 2166193 - RNA, 19 nt, Artificial Sequence
  Description of Artificial Sequence: Synthetic oligonucleotide
  Antisense strand to SEQ ID NO: 2166192
aguugcauuccuaagaaac

SEQ ID NO: 2166194 - RNA, 19 nt, Artificial Sequence
  Description of Artificial Sequence: Synthetic oligonucleotide
  Sense strand starting at position 3238 of SEQ ID NO: 1883046
ccugcuuuguuucugaaga

SEQ ID NO: 2166195 - RNA, 19 nt, Artificial Sequence
  Description of Artificial Sequence: Synthetic oligonucleotide
  Antisense strand to SEQ ID NO: 2166194
ucuucagaaacaaagcagg

SEQ ID NO: 2166196 - RNA, 19 nt, Artificial Sequence
  Description of Artificial Sequence: Synthetic oligonucleotide
  Sense strand starting at position 3243 of SEQ ID NO: 1883046
uuuguuucugaagagggua

SEQ ID NO: 2166197 - RNA, 19 nt, Artificial Sequence
  Description of Artificial Sequence: Synthetic oligonucleotide
  Antisense strand to SEQ ID NO: 2166196
uacccucuucagaaacaaa

SEQ ID NO: 2166198 - RNA, 19 nt, Artificial Sequence
  Description of Artificial Sequence: Synthetic oligonucleotide
  Sense strand starting at position 3332 of SEQ ID NO: 1883046
ugaauccagccuugcagaa

SEQ ID NO: 2166199 - RNA, 19 nt, Artificial Sequence
  Description of Artificial Sequence: Synthetic oligonucleotide
  Antisense strand to SEQ ID NO: 2166198
uucugcaaggcuggauuca

SEQ ID NO: 2166200 - RNA, 19 nt, Artificial Sequence
  Description of Artificial Sequence: Synthetic oligonucleotide
  Sense strand starting at position 3423 of SEQ ID NO: 1883046
ucagucucugcgcuuauga

SEQ ID NO: 2166201 - RNA, 19 nt, Artificial Sequence
  Description of Artificial Sequence: Synthetic oligonucleotide
  Antisense strand to SEQ ID NO: 2166200
ucauaagcgcagagacuga

SEQ ID NO: 2166202 - RNA, 19 nt, Artificial Sequence
  Description of Artificial Sequence: Synthetic oligonucleotide
  Sense strand starting at position 3431 of SEQ ID NO: 1883046
ugcgcuuaugaaugagaag

SEQ ID NO: 2166203 - RNA, 19 nt, Artificial Sequence
  Description of Artificial Sequence: Synthetic oligonucleotide
  Antisense strand to SEQ ID NO: 2166202
cuucucauucauaagcgca

SEQ ID NO: 2166204 - RNA, 19 nt, Artificial Sequence
  Description of Artificial Sequence: Synthetic oligonucleotide
  Sense strand starting at position 3550 of SEQ ID NO: 1883046
agaagaucugggugucuac

SEQ ID NO: 2166205 - RNA, 19 nt, Artificial Sequence
  Description of Artificial Sequence: Synthetic oligonucleotide
  Antisense strand to SEQ ID NO: 2166204
guagacacccagaucuucu

SEQ ID NO: 2166206 - RNA, 19 nt, Artificial Sequence
  Description of Artificial Sequence: Synthetic oligonucleotide
  Sense strand starting at position 3657 of SEQ ID NO: 1883046
ucagucuugcaucauaaga

SEQ ID NO: 2166207 - RNA, 19 nt, Artificial Sequence
  Description of Artificial Sequence: Synthetic oligonucleotide
  Antisense strand to SEQ ID NO: 2166206
ucuuaugaugcaagacuga

SEQ ID NO: 2166208 - RNA, 19 nt, Artificial Sequence
  Description of Artificial Sequence: Synthetic oligonucleotide
  Sense strand starting at position 3720 of SEQ ID NO: 1883046
uuagaauuguagccaaaua

SEQ ID NO: 2166209 - RNA, 19 nt, Artificial Sequence
  Description of Artificial Sequence: Synthetic oligonucleotide
  Antisense strand to SEQ ID NO: 2166208
uauuuggcuacaauucuaa

SEQ ID NO: 2166210 - RNA, 19 nt, Artificial Sequence
  Description of Artificial Sequence: Synthetic oligonucleotide
  Sense strand starting at position 3880 of SEQ ID NO: 1883046
cccuuacuauaugugauga

SEQ ID NO: 2166211 - RNA, 19 nt, Artificial Sequence
  Description of Artificial Sequence: Synthetic oligonucleotide
  Antisense strand to SEQ ID NO: 2166210
ucaucacauauaguaaggg

SEQ ID NO: 2166212 - RNA, 19 nt, Artificial Sequence
  Description of Artificial Sequence: Synthetic oligonucleotide
  Sense strand starting at position 15 of SEQ ID NO: 1883047
uggagcuucugagcaucaa

SEQ ID NO: 2166213 - RNA, 19 nt, Artificial Sequence
  Description of Artificial Sequence: Synthetic oligonucleotide
  Antisense strand to SEQ ID NO: 2166212
uugaugcucagaagcucca

SEQ ID NO: 2166214 - RNA, 19 nt, Artificial Sequence
  Description of Artificial Sequence: Synthetic oligonucleotide
  Sense strand starting at position 308 of SEQ ID NO: 1883047
ccucuuggucuggauggaa

SEQ ID NO: 2166215 - RNA, 19 nt, Artificial Sequence
  Description of Artificial Sequence: Synthetic oligonucleotide
  Antisense strand to SEQ ID NO: 2166214
uuccauccagaccaagagg

SEQ ID NO: 2166216 - RNA, 19 nt, Artificial Sequence
  Description of Artificial Sequence: Synthetic oligonucleotide
  Sense strand starting at position 371 of SEQ ID NO: 1883047
gggugauguccugcgcucu

SEQ ID NO: 2166217 - RNA, 19 nt, Artificial Sequence
  Description of Artificial Sequence: Synthetic oligonucleotide
  Antisense strand to SEQ ID NO: 2166216
agagcgcaggacaucaccc

SEQ ID NO: 2166218 - RNA, 19 nt, Artificial Sequence
  Description of Artificial Sequence: Synthetic oligonucleotide
  Sense strand starting at position 406 of SEQ ID NO: 1883047
gugggucagaaauagcaga

SEQ ID NO: 2166219 - RNA, 19 nt, Artificial Sequence
  Description of Artificial Sequence: Synthetic oligonucleotide
  Antisense strand to SEQ ID NO: 2166218
ucugcuauuucugacccac

SEQ ID NO: 2166220 - RNA, 19 nt, Artificial Sequence
  Description of Artificial Sequence: Synthetic oligonucleotide
  Sense strand starting at position 631 of SEQ ID NO: 1883047
ucuuucugauaagggauuu

SEQ ID NO: 2166221 - RNA, 19 nt, Artificial Sequence
  Description of Artificial Sequence: Synthetic oligonucleotide
  Antisense strand to SEQ ID NO: 2166220
aaaucccuuaucagaaaga

SEQ ID NO: 2166222 - RNA, 19 nt, Artificial Sequence
  Description of Artificial Sequence: Synthetic oligonucleotide
  Sense strand starting at position 665 of SEQ ID NO: 1883047
ccaguaaacuuaguuuaga

SEQ ID NO: 2166223 - RNA, 19 nt, Artificial Sequence
  Description of Artificial Sequence: Synthetic oligonucleotide
  Antisense strand to SEQ ID NO: 2166222
ucuaaacuaaguuuacugg

SEQ ID NO: 2166224 - RNA, 19 nt, Artificial Sequence
  Description of Artificial Sequence: Synthetic oligonucleotide
  Sense strand starting at position 676 of SEQ ID NO: 1883047
aguuuagacuggucacaca

SEQ ID NO: 2166225 - RNA, 19 nt, Artificial Sequence
  Description of Artificial Sequence: Synthetic oligonucleotide
  Antisense strand to SEQ ID NO: 2166224
ugugugaccagucuaaacu

SEQ ID NO: 2166226 - RNA, 19 nt, Artificial Sequence
  Description of Artificial Sequence: Synthetic oligonucleotide
  Sense strand starting at position 712 of SEQ ID NO: 1883047
gucaucuuucuguacaguu

SEQ ID NO: 2166227 - RNA, 19 nt, Artificial Sequence
  Description of Artificial Sequence: Synthetic oligonucleotide
  Antisense strand to SEQ ID NO: 2166226
aacuguacagaaagaugac

SEQ ID NO: 2166228 - RNA, 19 nt, Artificial Sequence
  Description of Artificial Sequence: Synthetic oligonucleotide
  Sense strand starting at position 762 of SEQ ID NO: 1883047
gacaguucucaguggauuc

SEQ ID NO: 2166229 - RNA, 19 nt, Artificial Sequence
  Description of Artificial Sequence: Synthetic oligonucleotide
  Antisense strand to SEQ ID NO: 2166228
gaauccacugagaacuguc

SEQ ID NO: 2166230 - RNA, 19 nt, Artificial Sequence
  Description of Artificial Sequence: Synthetic oligonucleotide
  Sense strand starting at position 772 of SEQ ID NO: 1883047
aguggauucucagucucau

SEQ ID NO: 2166231 - RNA, 19 nt, Artificial Sequence
  Description of Artificial Sequence: Synthetic oligonucleotide
  Antisense strand to SEQ ID NO: 2166230
augagacugagaauccacu

SEQ ID NO: 2166232 - RNA, 19 nt, Artificial Sequence
  Description of Artificial Sequence: Synthetic oligonucleotide
  Sense strand starting at position 836 of SEQ ID NO: 1883047
cacuuauaauggucaguga

SEQ ID NO: 2166233 - RNA, 19 nt, Artificial Sequence
  Description of Artificial Sequence: Synthetic oligonucleotide
  Antisense strand to SEQ ID NO: 2166232
ucacugaccauuauaagug

SEQ ID NO: 2166234 - RNA, 19 nt, Artificial Sequence
  Description of Artificial Sequence: Synthetic oligonucleotide
  Sense strand starting at position 839 of SEQ ID NO: 1883047
uuauaauggucagugaaag

SEQ ID NO: 2166235 - RNA, 19 nt, Artificial Sequence
  Description of Artificial Sequence: Synthetic oligonucleotide
  Antisense strand to SEQ ID NO: 2166234
cuuucacugaccauuauaa

SEQ ID NO: 2166236 - RNA, 19 nt, Artificial Sequence
  Description of Artificial Sequence: Synthetic oligonucleotide
  Sense strand starting at position 840 of SEQ ID NO: 1883047
uauaauggucagugaaaga

SEQ ID NO: 2166237 - RNA, 19 nt, Artificial Sequence
  Description of Artificial Sequence: Synthetic oligonucleotide
  Antisense strand to SEQ ID NO: 2166236
ucuuucacugaccauuaua

SEQ ID NO: 2166238 - RNA, 19 nt, Artificial Sequence
  Description of Artificial Sequence: Synthetic oligonucleotide
  Sense strand starting at position 973 of SEQ ID NO: 1883047
cuuuacuuucccgacuaag

SEQ ID NO: 2166239 - RNA, 19 nt, Artificial Sequence
  Description of Artificial Sequence: Synthetic oligonucleotide
  Antisense strand to SEQ ID NO: 2166238
cuuagucgggaaaguaaag

SEQ ID NO: 2166240 - RNA, 19 nt, Artificial Sequence
  Description of Artificial Sequence: Synthetic oligonucleotide
  Sense strand starting at position 1083 of SEQ ID NO: 1883047
ggcugagccacuugaguaa

SEQ ID NO: 2166241 - RNA, 19 nt, Artificial Sequence
  Description of Artificial Sequence: Synthetic oligonucleotide
  Antisense strand to SEQ ID NO: 2166240
uuacucaaguggcucagcc

SEQ ID NO: 2166242 - RNA, 19 nt, Artificial Sequence
  Description of Artificial Sequence: Synthetic oligonucleotide
  Sense strand starting at position 1194 of SEQ ID NO: 1883047
ucuggugaaagcugaguuu

SEQ ID NO: 2166243 - RNA, 19 nt, Artificial Sequence
  Description of Artificial Sequence: Synthetic oligonucleotide
  Antisense strand to SEQ ID NO: 2166242
aaacucagcuuucaccaga

SEQ ID NO: 2166244 - RNA, 19 nt, Artificial Sequence
  Description of Artificial Sequence: Synthetic oligonucleotide
  Sense strand starting at position 1235 of SEQ ID NO: 1883047
caggguuuagcuggagaga

SEQ ID NO: 2166245 - RNA, 19 nt, Artificial Sequence
  Description of Artificial Sequence: Synthetic oligonucleotide
  Antisense strand to SEQ ID NO: 2166244
ucucuccagcuaaacccug

SEQ ID NO: 2166246 - RNA, 19 nt, Artificial Sequence
  Description of Artificial Sequence: Synthetic oligonucleotide
  Sense strand starting at position 1244 of SEQ ID NO: 1883047
gcuggagagagucagcaau

SEQ ID NO: 2166247 - RNA, 19 nt, Artificial Sequence
  Description of Artificial Sequence: Synthetic oligonucleotide
  Antisense strand to SEQ ID NO: 2166246
auugcugacucucuccagc

SEQ ID NO: 2166248 - RNA, 19 nt, Artificial Sequence
  Description of Artificial Sequence: Synthetic oligonucleotide
  Sense strand starting at position 1246 of SEQ ID NO: 1883047
uggagagagucagcaauca

SEQ ID NO: 2166249 - RNA, 19 nt, Artificial Sequence
  Description of Artificial Sequence: Synthetic oligonucleotide
  Antisense strand to SEQ ID NO: 2166248
ugauugcugacucucucca

SEQ ID NO: 2166250 - RNA, 19 nt, Artificial Sequence
  Description of Artificial Sequence: Synthetic oligonucleotide
  Sense strand starting at position 1287 of SEQ ID NO: 1883047
agccucgaggucuagauau

SEQ ID NO: 2166251 - RNA, 19 nt, Artificial Sequence
  Description of Artificial Sequence: Synthetic oligonucleotide
  Antisense strand to SEQ ID NO: 2166250
auaucuagaccucgaggcu

SEQ ID NO: 2166252 - RNA, 19 nt, Artificial Sequence
  Description of Artificial Sequence: Synthetic oligonucleotide
  Sense strand starting at position 1307 of SEQ ID NO: 1883047
ugaugucuguaaccaaauu

SEQ ID NO: 2166253 - RNA, 19 nt, Artificial Sequence
  Description of Artificial Sequence: Synthetic oligonucleotide
  Antisense strand to SEQ ID NO: 2166252
aauuugguuacagacauca

SEQ ID NO: 2166254 - RNA, 19 nt, Artificial Sequence
  Description of Artificial Sequence: Synthetic oligonucleotide
  Sense strand starting at position 1481 of SEQ ID NO: 1883047
guccaaagggcucaccaua

SEQ ID NO: 2166255 - RNA, 19 nt, Artificial Sequence
  Description of Artificial Sequence: Synthetic oligonucleotide
  Antisense strand to SEQ ID NO: 2166254
uauggugagcccuuuggac

SEQ ID NO: 2166256 - RNA, 19 nt, Artificial Sequence
  Description of Artificial Sequence: Synthetic oligonucleotide
  Sense strand starting at position 1521 of SEQ ID NO: 1883047
cacaucuuucgucagagag

SEQ ID NO: 2166257 - RNA, 19 nt, Artificial Sequence
  Description of Artificial Sequence: Synthetic oligonucleotide
  Antisense strand to SEQ ID NO: 2166256
cucucugacgaaagaugug

SEQ ID NO: 2166258 - RNA, 19 nt, Artificial Sequence
  Description of Artificial Sequence: Synthetic oligonucleotide
  Sense strand starting at position 2022 of SEQ ID NO: 1883047
agcacaucuccaggagagu

SEQ ID NO: 2166259 - RNA, 19 nt, Artificial Sequence
  Description of Artificial Sequence: Synthetic oligonucleotide
  Antisense strand to SEQ ID NO: 2166258
acucuccuggagaugugcu

SEQ ID NO: 2166260 - RNA, 19 nt, Artificial Sequence
  Description of Artificial Sequence: Synthetic oligonucleotide
  Sense strand starting at position 2023 of SEQ ID NO: 1883047
gcacaucuccaggagaguu

SEQ ID NO: 2166261 - RNA, 19 nt, Artificial Sequence
  Description of Artificial Sequence: Synthetic oligonucleotide
  Antisense strand to SEQ ID NO: 2166260
aacucuccuggagaugugc

SEQ ID NO: 2166262 - RNA, 19 nt, Artificial Sequence
  Description of Artificial Sequence: Synthetic oligonucleotide
  Sense strand starting at position 2037 of SEQ ID NO: 1883047
gaguucuagccagaagcca

SEQ ID NO: 2166263 - RNA, 19 nt, Artificial Sequence
  Description of Artificial Sequence: Synthetic oligonucleotide
  Antisense strand to SEQ ID NO: 2166262
uggcuucuggcuagaacuc

SEQ ID NO: 2166264 - RNA, 19 nt, Artificial Sequence
  Description of Artificial Sequence: Synthetic oligonucleotide
  Sense strand starting at position 2447 of SEQ ID NO: 1883047
caucaugacggucacuaau

SEQ ID NO: 2166265 - RNA, 19 nt, Artificial Sequence
  Description of Artificial Sequence: Synthetic oligonucleotide
  Antisense strand to SEQ ID NO: 2166264
auuagugaccgucaugaug

SEQ ID NO: 2166266 - RNA, 19 nt, Artificial Sequence
  Description of Artificial Sequence: Synthetic oligonucleotide
  Sense strand starting at position 2456 of SEQ ID NO: 1883047
ggucacuaaugugugggaa

SEQ ID NO: 2166267 - RNA, 19 nt, Artificial Sequence
  Description of Artificial Sequence: Synthetic oligonucleotide
  Antisense strand to SEQ ID NO: 2166266
uucccacacauuagugacc

SEQ ID NO: 2166268 - RNA, 19 nt, Artificial Sequence
  Description of Artificial Sequence: Synthetic oligonucleotide
  Sense strand starting at position 2457 of SEQ ID NO: 1883047
gucacuaaugugugggaau

SEQ ID NO: 2166269 - RNA, 19 nt, Artificial Sequence
  Description of Artificial Sequence: Synthetic oligonucleotide
  Antisense strand to SEQ ID NO: 2166268
auucccacacauuagugac

SEQ ID NO: 2166270 - RNA, 19 nt, Artificial Sequence
  Description of Artificial Sequence: Synthetic oligonucleotide
  Sense strand starting at position 2459 of SEQ ID NO: 1883047
cacuaaugugugggaaucu

SEQ ID NO: 2166271 - RNA, 19 nt, Artificial Sequence
  Description of Artificial Sequence: Synthetic oligonucleotide
  Antisense strand to SEQ ID NO: 2166270
agauucccacacauuagug

SEQ ID NO: 2166272 - RNA, 19 nt, Artificial Sequence
  Description of Artificial Sequence: Synthetic oligonucleotide
  Sense strand starting at position 2533 of SEQ ID NO: 1883047
gcgagugcugcuccuguga

SEQ ID NO: 2166273 - RNA, 19 nt, Artificial Sequence
  Description of Artificial Sequence: Synthetic oligonucleotide
  Antisense strand to SEQ ID NO: 2166272
ucacaggagcagcacucgc

SEQ ID NO: 2166274 - RNA, 19 nt, Artificial Sequence
  Description of Artificial Sequence: Synthetic oligonucleotide
  Sense strand starting at position 2715 of SEQ ID NO: 1883047
gaggcaaucuaggcagaga

SEQ ID NO: 2166275 - RNA, 19 nt, Artificial Sequence
  Description of Artificial Sequence: Synthetic oligonucleotide
  Antisense strand to SEQ ID NO: 2166274
ucucugccuagauugccuc

SEQ ID NO: 2166276 - RNA, 19 nt, Artificial Sequence
  Description of Artificial Sequence: Synthetic oligonucleotide
  Sense strand starting at position 2743 of SEQ ID NO: 1883047
ggagaaaugauguggcacu

SEQ ID NO: 2166277 - RNA, 19 nt, Artificial Sequence
  Description of Artificial Sequence: Synthetic oligonucleotide
  Antisense strand to SEQ ID NO: 2166276
agugccacaucauuucucc

SEQ ID NO: 2166278 - RNA, 19 nt, Artificial Sequence
  Description of Artificial Sequence: Synthetic oligonucleotide
  Sense strand starting at position 2926 of SEQ ID NO: 1883047
uggugucuguaaccaaauu

SEQ ID NO: 2166279 - RNA, 19 nt, Artificial Sequence
  Description of Artificial Sequence: Synthetic oligonucleotide
  Antisense strand to SEQ ID NO: 2166278
aauuugguuacagacacca

SEQ ID NO: 2166280 - RNA, 19 nt, Artificial Sequence
  Description of Artificial Sequence: Synthetic oligonucleotide
  Sense strand starting at position 3146 of SEQ ID NO: 1883047
gcacauuucugcucaaggu

SEQ ID NO: 2166281 - RNA, 19 nt, Artificial Sequence
  Description of Artificial Sequence: Synthetic oligonucleotide
  Antisense strand to SEQ ID NO: 2166280
accuugagcagaaaugugc

SEQ ID NO: 2166282 - RNA, 19 nt, Artificial Sequence
  Description of Artificial Sequence: Synthetic oligonucleotide
  Sense strand starting at position 3247 of SEQ ID NO: 1883047
gaccuaauguaguugauua

SEQ ID NO: 2166283 - RNA, 19 nt, Artificial Sequence
  Description of Artificial Sequence: Synthetic oligonucleotide
  Antisense strand to SEQ ID NO: 2166282
uaaucaacuacauuagguc

SEQ ID NO: 2166284 - RNA, 19 nt, Artificial Sequence
  Description of Artificial Sequence: Synthetic oligonucleotide
  Sense strand starting at position 3249 of SEQ ID NO: 1883047
ccuaauguaguugauuaaa

SEQ ID NO: 2166285 - RNA, 19 nt, Artificial Sequence
  Description of Artificial Sequence: Synthetic oligonucleotide
  Antisense strand to SEQ ID NO: 2166284
uuuaaucaacuacauuagg

SEQ ID NO: 2166286 - RNA, 19 nt, Artificial Sequence
  Description of Artificial Sequence: Synthetic oligonucleotide
  Sense strand starting at position 3848 of SEQ ID NO: 1883047
acgugaaaguuucuuagga

SEQ ID NO: 2166287 - RNA, 19 nt, Artificial Sequence
  Description of Artificial Sequence: Synthetic oligonucleotide
  Antisense strand to SEQ ID NO: 2166286
uccuaagaaacuuucacgu

SEQ ID NO: 2166288 - RNA, 19 nt, Artificial Sequence
  Description of Artificial Sequence: Synthetic oligonucleotide
  Sense strand starting at position 3849 of SEQ ID NO: 1883047
cgugaaaguuucuuaggaa

SEQ ID NO: 2166289 - RNA, 19 nt, Artificial Sequence
  Description of Artificial Sequence: Synthetic oligonucleotide
  Antisense strand to SEQ ID NO: 2166288
uuccuaagaaacuuucacg

SEQ ID NO: 2166290 - RNA, 19 nt, Artificial Sequence
  Description of Artificial Sequence: Synthetic oligonucleotide
  Sense strand starting at position 3856 of SEQ ID NO: 1883047
guuucuuaggaaugcaacu

SEQ ID NO: 2166291 - RNA, 19 nt, Artificial Sequence
  Description of Artificial Sequence: Synthetic oligonucleotide
  Antisense strand to SEQ ID NO: 2166290
aguugcauuccuaagaaac

SEQ ID NO: 2166292 - RNA, 19 nt, Artificial Sequence
  Description of Artificial Sequence: Synthetic oligonucleotide
  Sense strand starting at position 139 of SEQ ID NO: 1883048
agacaacuguuugucccaa

SEQ ID NO: 2166293 - RNA, 19 nt, Artificial Sequence
  Description of Artificial Sequence: Synthetic oligonucleotide
  Antisense strand to SEQ ID NO: 2166292
uugggacaaacaguugucu

SEQ ID NO: 2166294 - RNA, 19 nt, Artificial Sequence
  Description of Artificial Sequence: Synthetic oligonucleotide
  Sense strand starting at position 159 of SEQ ID NO: 1883048
auaguauugugagcuugaa

SEQ ID NO: 2166295 - RNA, 19 nt, Artificial Sequence
  Description of Artificial Sequence: Synthetic oligonucleotide
  Antisense strand to SEQ ID NO: 2166294
uucaagcucacaauacuau

SEQ ID NO: 2166296 - RNA, 19 nt, Artificial Sequence
  Description of Artificial Sequence: Synthetic oligonucleotide
  Sense strand starting at position 163 of SEQ ID NO: 1883048
uauugugagcuugaagaca

SEQ ID NO: 2166297 - RNA, 19 nt, Artificial Sequence
  Description of Artificial Sequence: Synthetic oligonucleotide
  Antisense strand to SEQ ID NO: 2166296
ugucuucaagcucacaaua

SEQ ID NO: 2166298 - RNA, 19 nt, Artificial Sequence
  Description of Artificial Sequence: Synthetic oligonucleotide
  Sense strand starting at position 276 of SEQ ID NO: 1883048
agugacuugccaggucaga

SEQ ID NO: 2166299 - RNA, 19 nt, Artificial Sequence
  Description of Artificial Sequence: Synthetic oligonucleotide
  Antisense strand to SEQ ID NO: 2166298
ucugaccuggcaagucacu

SEQ ID NO: 2166300 - RNA, 19 nt, Artificial Sequence
  Description of Artificial Sequence: Synthetic oligonucleotide
  Sense strand starting at position 350 of SEQ ID NO: 1883048
aagguaucuucucucaggu

SEQ ID NO: 2166301 - RNA, 19 nt, Artificial Sequence
  Description of Artificial Sequence: Synthetic oligonucleotide
  Antisense strand to SEQ ID NO: 2166300
accugagagaagauaccuu

SEQ ID NO: 2166302 - RNA, 19 nt, Artificial Sequence
  Description of Artificial Sequence: Synthetic oligonucleotide
  Sense strand starting at position 787 of SEQ ID NO: 1883048
ggugguagaacaugcuuga

SEQ ID NO: 2166303 - RNA, 19 nt, Artificial Sequence
  Description of Artificial Sequence: Synthetic oligonucleotide
  Antisense strand to SEQ ID NO: 2166302
ucaagcauguucuaccacc

SEQ ID NO: 2166304 - RNA, 19 nt, Artificial Sequence
  Description of Artificial Sequence: Synthetic oligonucleotide
  Sense strand starting at position 843 of SEQ ID NO: 1883048
ucacaagacugcuugaaca

SEQ ID NO: 2166305 - RNA, 19 nt, Artificial Sequence
  Description of Artificial Sequence: Synthetic oligonucleotide
  Antisense strand to SEQ ID NO: 2166304
uguucaagcagucuuguga

SEQ ID NO: 2166306 - RNA, 19 nt, Artificial Sequence
  Description of Artificial Sequence: Synthetic oligonucleotide
  Sense strand starting at position 934 of SEQ ID NO: 1883048
gcugaaagccucuaccuuu

SEQ ID NO: 2166307 - RNA, 19 nt, Artificial Sequence
  Description of Artificial Sequence: Synthetic oligonucleotide
  Antisense strand to SEQ ID NO: 2166306
aaagguagaggcuuucagc

SEQ ID NO: 2166308 - RNA, 19 nt, Artificial Sequence
  Description of Artificial Sequence: Synthetic oligonucleotide
  Sense strand starting at position 940 of SEQ ID NO: 1883048
agccucuaccuuuaagaga

SEQ ID NO: 2166309 - RNA, 19 nt, Artificial Sequence
  Description of Artificial Sequence: Synthetic oligonucleotide
  Antisense strand to SEQ ID NO: 2166308
ucucuuaaagguagaggcu

SEQ ID NO: 2166310 - RNA, 19 nt, Artificial Sequence
  Description of Artificial Sequence: Synthetic oligonucleotide
  Sense strand starting at position 1321 of SEQ ID NO: 1883048
cuuccucuuccaugaguuu

SEQ ID NO: 2166311 - RNA, 19 nt, Artificial Sequence
  Description of Artificial Sequence: Synthetic oligonucleotide
  Antisense strand to SEQ ID NO: 2166310
aaacucauggaagaggaag

SEQ ID NO: 2166312 - RNA, 19 nt, Artificial Sequence
  Description of Artificial Sequence: Synthetic oligonucleotide
  Sense strand starting at position 1410 of SEQ ID NO: 1883048
cugagacuuugguucucuu

SEQ ID NO: 2166313 - RNA, 19 nt, Artificial Sequence
  Description of Artificial Sequence: Synthetic oligonucleotide
  Antisense strand to SEQ ID NO: 2166312
aagagaaccaaagucucag

SEQ ID NO: 2166314 - RNA, 19 nt, Artificial Sequence
  Description of Artificial Sequence: Synthetic oligonucleotide
  Sense strand starting at position 1472 of SEQ ID NO: 1883048
aggacucuucccuguuauu

SEQ ID NO: 2166315 - RNA, 19 nt, Artificial Sequence
  Description of Artificial Sequence: Synthetic oligonucleotide
  Antisense strand to SEQ ID NO: 2166314
aauaacagggaagaguccu

SEQ ID NO: 2166316 - RNA, 19 nt, Artificial Sequence
  Description of Artificial Sequence: Synthetic oligonucleotide
  Sense strand starting at position 1659 of SEQ ID NO: 1883048
cuuccacagcgacagaaau

SEQ ID NO: 2166317 - RNA, 19 nt, Artificial Sequence
  Description of Artificial Sequence: Synthetic oligonucleotide
  Antisense strand to SEQ ID NO: 2166316
auuucugucgcuguggaag

SEQ ID NO: 2166318 - RNA, 19 nt, Artificial Sequence
  Description of Artificial Sequence: Synthetic oligonucleotide
  Sense strand starting at position 1672 of SEQ ID NO: 1883048
agaaaugcccucuaaucug

SEQ ID NO: 2166319 - RNA, 19 nt, Artificial Sequence
  Description of Artificial Sequence: Synthetic oligonucleotide
  Antisense strand to SEQ ID NO: 2166318
cagauuagagggcauuucu

SEQ ID NO: 2166320 - RNA, 19 nt, Artificial Sequence
  Description of Artificial Sequence: Synthetic oligonucleotide
  Sense strand starting at position 1724 of SEQ ID NO: 1883048
ggcuacugaucaucugaaa

SEQ ID NO: 2166321 - RNA, 19 nt, Artificial Sequence
  Description of Artificial Sequence: Synthetic oligonucleotide
  Antisense strand to SEQ ID NO: 2166320
uuucagaugaucaguagcc

SEQ ID NO: 2166322 - RNA, 19 nt, Artificial Sequence
  Description of Artificial Sequence: Synthetic oligonucleotide
  Sense strand starting at position 1811 of SEQ ID NO: 1883048
auuagauggcacggaucua

SEQ ID NO: 2166323 - RNA, 19 nt, Artificial Sequence
  Description of Artificial Sequence: Synthetic oligonucleotide
  Antisense strand to SEQ ID NO: 2166322
uagauccgugccaucuaau

SEQ ID NO: 2166324 - RNA, 19 nt, Artificial Sequence
  Description of Artificial Sequence: Synthetic oligonucleotide
  Sense strand starting at position 1812 of SEQ ID NO: 1883048
uuagauggcacggaucuau

SEQ ID NO: 2166325 - RNA, 19 nt, Artificial Sequence
  Description of Artificial Sequence: Synthetic oligonucleotide
  Antisense strand to SEQ ID NO: 2166324
auagauccgugccaucuaa

SEQ ID NO: 2166326 - RNA, 19 nt, Artificial Sequence
  Description of Artificial Sequence: Synthetic oligonucleotide
  Sense strand starting at position 1816 of SEQ ID NO: 1883048
auggcacggaucuauacaa

SEQ ID NO: 2166327 - RNA, 19 nt, Artificial Sequence
  Description of Artificial Sequence: Synthetic oligonucleotide
  Antisense strand to SEQ ID NO: 2166326
uuguauagauccgugccau

SEQ ID NO: 2166328 - RNA, 19 nt, Artificial Sequence
  Description of Artificial Sequence: Synthetic oligonucleotide
  Sense strand starting at position 1859 of SEQ ID NO: 1883048
ggaggaagucauugucuga

SEQ ID NO: 2166329 - RNA, 19 nt, Artificial Sequence
  Description of Artificial Sequence: Synthetic oligonucleotide
  Antisense strand to SEQ ID NO: 2166328
ucagacaaugacuuccucc

SEQ ID NO: 2166330 - RNA, 19 nt, Artificial Sequence
  Description of Artificial Sequence: Synthetic oligonucleotide
  Sense strand starting at position 1862 of SEQ ID NO: 1883048
ggaagucauugucugaaau

SEQ ID NO: 2166331 - RNA, 19 nt, Artificial Sequence
  Description of Artificial Sequence: Synthetic oligonucleotide
  Antisense strand to SEQ ID NO: 2166330
auuucagacaaugacuucc

SEQ ID NO: 2166332 - RNA, 19 nt, Artificial Sequence
  Description of Artificial Sequence: Synthetic oligonucleotide
  Sense strand starting at position 1883 of SEQ ID NO: 1883048
cuauaaccuugcucuggau

SEQ ID NO: 2166333 - RNA, 19 nt, Artificial Sequence
  Description of Artificial Sequence: Synthetic oligonucleotide
  Antisense strand to SEQ ID NO: 2166332
auccagagcaagguuauag

SEQ ID NO: 2166334 - RNA, 19 nt, Artificial Sequence
  Description of Artificial Sequence: Synthetic oligonucleotide
  Sense strand starting at position 2153 of SEQ ID NO: 1883048
gaaagauccuuucuggcug

SEQ ID NO: 2166335 - RNA, 19 nt, Artificial Sequence
  Description of Artificial Sequence: Synthetic oligonucleotide
  Antisense strand to SEQ ID NO: 2166334
cagccagaaaggaucuuuc

SEQ ID NO: 2166336 - RNA, 19 nt, Artificial Sequence
  Description of Artificial Sequence: Synthetic oligonucleotide
  Sense strand starting at position 2157 of SEQ ID NO: 1883048
gauccuuucuggcugagga

SEQ ID NO: 2166337 - RNA, 19 nt, Artificial Sequence
  Description of Artificial Sequence: Synthetic oligonucleotide
  Antisense strand to SEQ ID NO: 2166336
uccucagccagaaaggauc

SEQ ID NO: 2166338 - RNA, 19 nt, Artificial Sequence
  Description of Artificial Sequence: Synthetic oligonucleotide
  Sense strand starting at position 2158 of SEQ ID NO: 1883048
auccuuucuggcugaggaa

SEQ ID NO: 2166339 - RNA, 19 nt, Artificial Sequence
  Description of Artificial Sequence: Synthetic oligonucleotide
  Antisense strand to SEQ ID NO: 2166338
uuccucagccagaaaggau

SEQ ID NO: 2166340 - RNA, 19 nt, Artificial Sequence
  Description of Artificial Sequence: Synthetic oligonucleotide
  Sense strand starting at position 2178 of SEQ ID NO: 1883048
aagggaaggugucuuggaa

SEQ ID NO: 2166341 - RNA, 19 nt, Artificial Sequence
  Description of Artificial Sequence: Synthetic oligonucleotide
  Antisense strand to SEQ ID NO: 2166340
uuccaagacaccuucccuu

SEQ ID NO: 2166342 - RNA, 19 nt, Artificial Sequence
  Description of Artificial Sequence: Synthetic oligonucleotide
  Sense strand starting at position 2381 of SEQ ID NO: 1883048
aucacuucugaaggaguaa

SEQ ID NO: 2166343 - RNA, 19 nt, Artificial Sequence
  Description of Artificial Sequence: Synthetic oligonucleotide
  Antisense strand to SEQ ID NO: 2166342
uuacuccuucagaagugau

SEQ ID NO: 2166344 - RNA, 19 nt, Artificial Sequence
  Description of Artificial Sequence: Synthetic oligonucleotide
  Sense strand starting at position 2491 of SEQ ID NO: 1883048
gucucugcaacgugauuua

SEQ ID NO: 2166345 - RNA, 19 nt, Artificial Sequence
  Description of Artificial Sequence: Synthetic oligonucleotide
  Antisense strand to SEQ ID NO: 2166344
uaaaucacguugcagagac

SEQ ID NO: 2166346 - RNA, 19 nt, Artificial Sequence
  Description of Artificial Sequence: Synthetic oligonucleotide
  Sense strand starting at position 2801 of SEQ ID NO: 1883048
ccacuucucggcugaaaga

SEQ ID NO: 2166347 - RNA, 19 nt, Artificial Sequence
  Description of Artificial Sequence: Synthetic oligonucleotide
  Antisense strand to SEQ ID NO: 2166346
ucuuucagccgagaagugg

SEQ ID NO: 2166348 - RNA, 19 nt, Artificial Sequence
  Description of Artificial Sequence: Synthetic oligonucleotide
  Sense strand starting at position 2823 of SEQ ID NO: 1883048
gcacgagguuacucaucaa

SEQ ID NO: 2166349 - RNA, 19 nt, Artificial Sequence
  Description of Artificial Sequence: Synthetic oligonucleotide
  Antisense strand to SEQ ID NO: 2166348
uugaugaguaaccucgugc

SEQ ID NO: 2166350 - RNA, 19 nt, Artificial Sequence
  Description of Artificial Sequence: Synthetic oligonucleotide
  Sense strand starting at position 2826 of SEQ ID NO: 1883048
cgagguuacucaucaagua

SEQ ID NO: 2166351 - RNA, 19 nt, Artificial Sequence
  Description of Artificial Sequence: Synthetic oligonucleotide
  Antisense strand to SEQ ID NO: 2166350
uacuugaugaguaaccucg

SEQ ID NO: 2166352 - RNA, 19 nt, Artificial Sequence
  Description of Artificial Sequence: Synthetic oligonucleotide
  Sense strand starting at position 2889 of SEQ ID NO: 1883048
cgccucuugagaggaagua

SEQ ID NO: 2166353 - RNA, 19 nt, Artificial Sequence
  Description of Artificial Sequence: Synthetic oligonucleotide
  Antisense strand to SEQ ID NO: 2166352
uacuuccucucaagaggcg

SEQ ID NO: 2166354 - RNA, 19 nt, Artificial Sequence
  Description of Artificial Sequence: Synthetic oligonucleotide
  Sense strand starting at position 2920 of SEQ ID NO: 1883048
aaggcuuggucuccaagaa

SEQ ID NO: 2166355 - RNA, 19 nt, Artificial Sequence
  Description of Artificial Sequence: Synthetic oligonucleotide
  Antisense strand to SEQ ID NO: 2166354
uucuuggagaccaagccuu

SEQ ID NO: 2166356 - RNA, 19 nt, Artificial Sequence
  Description of Artificial Sequence: Synthetic oligonucleotide
  Sense strand starting at position 2921 of SEQ ID NO: 1883048
aggcuuggucuccaagaau

SEQ ID NO: 2166357 - RNA, 19 nt, Artificial Sequence
  Description of Artificial Sequence: Synthetic oligonucleotide
  Antisense strand to SEQ ID NO: 2166356
auucuuggagaccaagccu

SEQ ID NO: 2166358 - RNA, 19 nt, Artificial Sequence
  Description of Artificial Sequence: Synthetic oligonucleotide
  Sense strand starting at position 3349 of SEQ ID NO: 1883048
cuccuuuagugaccagaag

SEQ ID NO: 2166359 - RNA, 19 nt, Artificial Sequence
  Description of Artificial Sequence: Synthetic oligonucleotide
  Antisense strand to SEQ ID NO: 2166358
cuucuggucacuaaaggag

SEQ ID NO: 2166360 - RNA, 19 nt, Artificial Sequence
  Description of Artificial Sequence: Synthetic oligonucleotide
  Sense strand starting at position 3364 of SEQ ID NO: 1883048
gaaggcuggaguuacguaa

SEQ ID NO: 2166361 - RNA, 19 nt, Artificial Sequence
  Description of Artificial Sequence: Synthetic oligonucleotide
  Antisense strand to SEQ ID NO: 2166360
uuacguaacuccagccuuc

SEQ ID NO: 2166362 - RNA, 19 nt, Artificial Sequence
  Description of Artificial Sequence: Synthetic oligonucleotide
  Sense strand starting at position 3368 of SEQ ID NO: 1883048
gcuggaguuacguaaucug

SEQ ID NO: 2166363 - RNA, 19 nt, Artificial Sequence
  Description of Artificial Sequence: Synthetic oligonucleotide
  Antisense strand to SEQ ID NO: 2166362
cagauuacguaacuccagc

SEQ ID NO: 2166364 - RNA, 19 nt, Artificial Sequence
  Description of Artificial Sequence: Synthetic oligonucleotide
  Sense strand starting at position 3728 of SEQ ID NO: 1883048
ucaggaauguuucuuggga

SEQ ID NO: 2166365 - RNA, 19 nt, Artificial Sequence
  Description of Artificial Sequence: Synthetic oligonucleotide
  Antisense strand to SEQ ID NO: 2166364
ucccaagaaacauuccuga

SEQ ID NO: 2166366 - RNA, 19 nt, Artificial Sequence
  Description of Artificial Sequence: Synthetic oligonucleotide
  Sense strand starting at position 3729 of SEQ ID NO: 1883048
caggaauguuucuugggag

SEQ ID NO: 2166367 - RNA, 19 nt, Artificial Sequence
  Description of Artificial Sequence: Synthetic oligonucleotide
  Antisense strand to SEQ ID NO: 2166366
cucccaagaaacauuccug

SEQ ID NO: 2166368 - RNA, 19 nt, Artificial Sequence
  Description of Artificial Sequence: Synthetic oligonucleotide
  Sense strand starting at position 3744 of SEQ ID NO: 1883048
ggagccaucuccuugaagu

SEQ ID NO: 2166369 - RNA, 19 nt, Artificial Sequence
  Description of Artificial Sequence: Synthetic oligonucleotide
  Antisense strand to SEQ ID NO: 2166368
acuucaaggagauggcucc

SEQ ID NO: 2166370 - RNA, 19 nt, Artificial Sequence
  Description of Artificial Sequence: Synthetic oligonucleotide
  Sense strand starting at position 3745 of SEQ ID NO: 1883048
gagccaucuccuugaagug

SEQ ID NO: 2166371 - RNA, 19 nt, Artificial Sequence
  Description of Artificial Sequence: Synthetic oligonucleotide
  Antisense strand to SEQ ID NO: 2166370
cacuucaaggagauggcuc

SEQ ID NO: 2166372 - RNA, 19 nt, Artificial Sequence
  Description of Artificial Sequence: Synthetic oligonucleotide
  Sense strand starting at position 73 of SEQ ID NO: 1883049
aagucauguuuauugaagu

SEQ ID NO: 2166373 - RNA, 19 nt, Artificial Sequence
  Description of Artificial Sequence: Synthetic oligonucleotide
  Antisense strand to SEQ ID NO: 2166372
acuucaauaaacaugacuu

SEQ ID NO: 2166374 - RNA, 19 nt, Artificial Sequence
  Description of Artificial Sequence: Synthetic oligonucleotide
  Sense strand starting at position 118 of SEQ ID NO: 1883049
ccuguuaagguuugacaaa

SEQ ID NO: 2166375 - RNA, 19 nt, Artificial Sequence
  Description of Artificial Sequence: Synthetic oligonucleotide
  Antisense strand to SEQ ID NO: 2166374
uuugucaaaccuuaacagg

SEQ ID NO: 2166376 - RNA, 19 nt, Artificial Sequence
  Description of Artificial Sequence: Synthetic oligonucleotide
  Sense strand starting at position 437 of SEQ ID NO: 1883049
ucguauauauggcucaaca

SEQ ID NO: 2166377 - RNA, 19 nt, Artificial Sequence
  Description of Artificial Sequence: Synthetic oligonucleotide
  Antisense strand to SEQ ID NO: 2166376
uguugagccauauauacga

SEQ ID NO: 2166378 - RNA, 19 nt, Artificial Sequence
  Description of Artificial Sequence: Synthetic oligonucleotide
  Sense strand starting at position 439 of SEQ ID NO: 1883049
guauauauggcucaacagu

SEQ ID NO: 2166379 - RNA, 19 nt, Artificial Sequence
  Description of Artificial Sequence: Synthetic oligonucleotide
  Antisense strand to SEQ ID NO: 2166378
acuguugagccauauauac

SEQ ID NO: 2166380 - RNA, 19 nt, Artificial Sequence
  Description of Artificial Sequence: Synthetic oligonucleotide
  Sense strand starting at position 445 of SEQ ID NO: 1883049
auggcucaacaguaauauu

SEQ ID NO: 2166381 - RNA, 19 nt, Artificial Sequence
  Description of Artificial Sequence: Synthetic oligonucleotide
  Antisense strand to SEQ ID NO: 2166380
aauauuacuguugagccau

SEQ ID NO: 2166382 - RNA, 19 nt, Artificial Sequence
  Description of Artificial Sequence: Synthetic oligonucleotide
  Sense strand starting at position 467 of SEQ ID NO: 1883049
gaauauacugcuggguaua

SEQ ID NO: 2166383 - RNA, 19 nt, Artificial Sequence
  Description of Artificial Sequence: Synthetic oligonucleotide
  Antisense strand to SEQ ID NO: 2166382
uauacccagcaguauauuc

SEQ ID NO: 2166384 - RNA, 19 nt, Artificial Sequence
  Description of Artificial Sequence: Synthetic oligonucleotide
  Sense strand starting at position 1290 of SEQ ID NO: 1883049
cuuuguugaccaugugaac

SEQ ID NO: 2166385 - RNA, 19 nt, Artificial Sequence
  Description of Artificial Sequence: Synthetic oligonucleotide
  Antisense strand to SEQ ID NO: 2166384
guucacauggucaacaaag

SEQ ID NO: 2166386 - RNA, 19 nt, Artificial Sequence
  Description of Artificial Sequence: Synthetic oligonucleotide
  Sense strand starting at position 1299 of SEQ ID NO: 1883049
ccaugugaaccaugaugaa

SEQ ID NO: 2166387 - RNA, 19 nt, Artificial Sequence
  Description of Artificial Sequence: Synthetic oligonucleotide
  Antisense strand to SEQ ID NO: 2166386
uucaucaugguucacaugg

SEQ ID NO: 2166388 - RNA, 19 nt, Artificial Sequence
  Description of Artificial Sequence: Synthetic oligonucleotide
  Sense strand starting at position 1394 of SEQ ID NO: 1883049
agaauugaauuccacagaa

SEQ ID NO: 2166389 - RNA, 19 nt, Artificial Sequence
  Description of Artificial Sequence: Synthetic oligonucleotide
  Antisense strand to SEQ ID NO: 2166388
uucuguggaauucaauucu

SEQ ID NO: 2166390 - RNA, 19 nt, Artificial Sequence
  Description of Artificial Sequence: Synthetic oligonucleotide
  Sense strand starting at position 1407 of SEQ ID NO: 1883049
acagaaauguucuacagga

SEQ ID NO: 2166391 - RNA, 19 nt, Artificial Sequence
  Description of Artificial Sequence: Synthetic oligonucleotide
  Antisense strand to SEQ ID NO: 2166390
uccuguagaacauuucugu

SEQ ID NO: 2166392 - RNA, 19 nt, Artificial Sequence
  Description of Artificial Sequence: Synthetic oligonucleotide
  Sense strand starting at position 1422 of SEQ ID NO: 1883049
aggaucaagucagcuauaa

SEQ ID NO: 2166393 - RNA, 19 nt, Artificial Sequence
  Description of Artificial Sequence: Synthetic oligonucleotide
  Antisense strand to SEQ ID NO: 2166392
uuauagcugacuugauccu

SEQ ID NO: 2166394 - RNA, 19 nt, Artificial Sequence
  Description of Artificial Sequence: Synthetic oligonucleotide
  Sense strand starting at position 1510 of SEQ ID NO: 1883049
ccuugcuaccacugugaaa

SEQ ID NO: 2166395 - RNA, 19 nt, Artificial Sequence
  Description of Artificial Sequence: Synthetic oligonucleotide
  Antisense strand to SEQ ID NO: 2166394
uuucacagugguagcaagg

SEQ ID NO: 2166396 - RNA, 19 nt, Artificial Sequence
  Description of Artificial Sequence: Synthetic oligonucleotide
  Sense strand starting at position 1555 of SEQ ID NO: 1883049
accucuauucuguagauac

SEQ ID NO: 2166397 - RNA, 19 nt, Artificial Sequence
  Description of Artificial Sequence: Synthetic oligonucleotide
  Antisense strand to SEQ ID NO: 2166396
guaucuacagaauagaggu

SEQ ID NO: 2166398 - RNA, 19 nt, Artificial Sequence
  Description of Artificial Sequence: Synthetic oligonucleotide
  Sense strand starting at position 1557 of SEQ ID NO: 1883049
cucuauucuguagauacua

SEQ ID NO: 2166399 - RNA, 19 nt, Artificial Sequence
  Description of Artificial Sequence: Synthetic oligonucleotide
  Antisense strand to SEQ ID NO: 2166398
uaguaucuacagaauagag

SEQ ID NO: 2166400 - RNA, 19 nt, Artificial Sequence
  Description of Artificial Sequence: Synthetic oligonucleotide
  Sense strand starting at position 1650 of SEQ ID NO: 1883049
gaaguaucacaguagguau

SEQ ID NO: 2166401 - RNA, 19 nt, Artificial Sequence
  Description of Artificial Sequence: Synthetic oligonucleotide
  Antisense strand to SEQ ID NO: 2166400
auaccuacugugauacuuc

SEQ ID NO: 2166402 - RNA, 19 nt, Artificial Sequence
  Description of Artificial Sequence: Synthetic oligonucleotide
  Sense strand starting at position 1652 of SEQ ID NO: 1883049
aguaucacaguagguauua

SEQ ID NO: 2166403 - RNA, 19 nt, Artificial Sequence
  Description of Artificial Sequence: Synthetic oligonucleotide
  Antisense strand to SEQ ID NO: 2166402
uaauaccuacugugauacu

SEQ ID NO: 2166404 - RNA, 19 nt, Artificial Sequence
  Description of Artificial Sequence: Synthetic oligonucleotide
  Sense strand starting at position 1692 of SEQ ID NO: 1883049
ugucuagacuguuuacaaa

SEQ ID NO: 2166405 - RNA, 19 nt, Artificial Sequence
  Description of Artificial Sequence: Synthetic oligonucleotide
  Antisense strand to SEQ ID NO: 2166404
uuuguaaacagucuagaca

SEQ ID NO: 2166406 - RNA, 19 nt, Artificial Sequence
  Description of Artificial Sequence: Synthetic oligonucleotide
  Sense strand starting at position 1713 of SEQ ID NO: 1883049
cugugcaaguaaguaaaua

SEQ ID NO: 2166407 - RNA, 19 nt, Artificial Sequence
  Description of Artificial Sequence: Synthetic oligonucleotide
  Antisense strand to SEQ ID NO: 2166406
uauuuacuuacuugcacag

SEQ ID NO: 2166408 - RNA, 19 nt, Artificial Sequence
  Description of Artificial Sequence: Synthetic oligonucleotide
  Sense strand starting at position 1749 of SEQ ID NO: 1883049
acacacuguugcuuuagua

SEQ ID NO: 2166409 - RNA, 19 nt, Artificial Sequence
  Description of Artificial Sequence: Synthetic oligonucleotide
  Antisense strand to SEQ ID NO: 2166408
uacuaaagcaacagugugu

SEQ ID NO: 2166410 - RNA, 19 nt, Artificial Sequence
  Description of Artificial Sequence: Synthetic oligonucleotide
  Sense strand starting at position 2083 of SEQ ID NO: 1883049
uccaccaagccugguuaaa

SEQ ID NO: 2166411 - RNA, 19 nt, Artificial Sequence
  Description of Artificial Sequence: Synthetic oligonucleotide
  Antisense strand to SEQ ID NO: 2166410
uuuaaccaggcuuggugga

SEQ ID NO: 2166412 - RNA, 19 nt, Artificial Sequence
  Description of Artificial Sequence: Synthetic oligonucleotide
  Sense strand starting at position 2111 of SEQ ID NO: 1883049
agacaauguuaagaauauc

SEQ ID NO: 2166413 - RNA, 19 nt, Artificial Sequence
  Description of Artificial Sequence: Synthetic oligonucleotide
  Antisense strand to SEQ ID NO: 2166412
gauauucuuaacauugucu

SEQ ID NO: 2166414 - RNA, 19 nt, Artificial Sequence
  Description of Artificial Sequence: Synthetic oligonucleotide
  Sense strand starting at position 2144 of SEQ ID NO: 1883049
uuuaaugaguggucuuuau

SEQ ID NO: 2166415 - RNA, 19 nt, Artificial Sequence
  Description of Artificial Sequence: Synthetic oligonucleotide
  Antisense strand to SEQ ID NO: 2166414
auaaagaccacucauuaaa

SEQ ID NO: 2166416 - RNA, 19 nt, Artificial Sequence
  Description of Artificial Sequence: Synthetic oligonucleotide
  Sense strand starting at position 2148 of SEQ ID NO: 1883049
augaguggucuuuauggug

SEQ ID NO: 2166417 - RNA, 19 nt, Artificial Sequence
  Description of Artificial Sequence: Synthetic oligonucleotide
  Antisense strand to SEQ ID NO: 2166416
caccauaaagaccacucau

SEQ ID NO: 2166418 - RNA, 19 nt, Artificial Sequence
  Description of Artificial Sequence: Synthetic oligonucleotide
  Sense strand starting at position 2157 of SEQ ID NO: 1883049
cuuuaugguggcuauccaa

SEQ ID NO: 2166419 - RNA, 19 nt, Artificial Sequence
  Description of Artificial Sequence: Synthetic oligonucleotide
  Antisense strand to SEQ ID NO: 2166418
uuggauagccaccauaaag

SEQ ID NO: 2166420 - RNA, 19 nt, Artificial Sequence
  Description of Artificial Sequence: Synthetic oligonucleotide
  Sense strand starting at position 2178 of SEQ ID NO: 1883049
gcucucuuugaugaguaaa

SEQ ID NO: 2166421 - RNA, 19 nt, Artificial Sequence
  Description of Artificial Sequence: Synthetic oligonucleotide
  Antisense strand to SEQ ID NO: 2166420
uuuacucaucaaagagagc

SEQ ID NO: 2166422 - RNA, 19 nt, Artificial Sequence
  Description of Artificial Sequence: Synthetic oligonucleotide
  Sense strand starting at position 2180 of SEQ ID NO: 1883049
ucucuuugaugaguaaaua

SEQ ID NO: 2166423 - RNA, 19 nt, Artificial Sequence
  Description of Artificial Sequence: Synthetic oligonucleotide
  Antisense strand to SEQ ID NO: 2166422
uauuuacucaucaaagaga

SEQ ID NO: 2166424 - RNA, 19 nt, Artificial Sequence
  Description of Artificial Sequence: Synthetic oligonucleotide
  Sense strand starting at position 2241 of SEQ ID NO: 1883049
uuuccugauacuugggagu

SEQ ID NO: 2166425 - RNA, 19 nt, Artificial Sequence
  Description of Artificial Sequence: Synthetic oligonucleotide
  Antisense strand to SEQ ID NO: 2166424
acucccaaguaucaggaaa

SEQ ID NO: 2166426 - RNA, 19 nt, Artificial Sequence
  Description of Artificial Sequence: Synthetic oligonucleotide
  Sense strand starting at position 2254 of SEQ ID NO: 1883049
gggagucuucuguaguuuc

SEQ ID NO: 2166427 - RNA, 19 nt, Artificial Sequence
  Description of Artificial Sequence: Synthetic oligonucleotide
  Antisense strand to SEQ ID NO: 2166426
gaaacuacagaagacuccc

SEQ ID NO: 2166428 - RNA, 19 nt, Artificial Sequence
  Description of Artificial Sequence: Synthetic oligonucleotide
  Sense strand starting at position 2297 of SEQ ID NO: 1883049
gucacuaucuucccacuga

SEQ ID NO: 2166429 - RNA, 19 nt, Artificial Sequence
  Description of Artificial Sequence: Synthetic oligonucleotide
  Antisense strand to SEQ ID NO: 2166428
ucagugggaagauagugac

SEQ ID NO: 2166430 - RNA, 19 nt, Artificial Sequence
  Description of Artificial Sequence: Synthetic oligonucleotide
  Sense strand starting at position 2301 of SEQ ID NO: 1883049
cuaucuucccacugaugag

SEQ ID NO: 2166431 - RNA, 19 nt, Artificial Sequence
  Description of Artificial Sequence: Synthetic oligonucleotide
  Antisense strand to SEQ ID NO: 2166430
cucaucagugggaagauag

SEQ ID NO: 2166432 - RNA, 19 nt, Artificial Sequence
  Description of Artificial Sequence: Synthetic oligonucleotide
  Sense strand starting at position 3033 of SEQ ID NO: 1883049
aucuauaacgcuggauaaa

SEQ ID NO: 2166433 - RNA, 19 nt, Artificial Sequence
  Description of Artificial Sequence: Synthetic oligonucleotide
  Antisense strand to SEQ ID NO: 2166432
uuuauccagcguuauagau

SEQ ID NO: 2166434 - RNA, 19 nt, Artificial Sequence
  Description of Artificial Sequence: Synthetic oligonucleotide
  Sense strand starting at position 3207 of SEQ ID NO: 1883049
cuaugcuagccacaaagau

SEQ ID NO: 2166435 - RNA, 19 nt, Artificial Sequence
  Description of Artificial Sequence: Synthetic oligonucleotide
  Antisense strand to SEQ ID NO: 2166434
aucuuuguggcuagcauag

SEQ ID NO: 2166436 - RNA, 19 nt, Artificial Sequence
  Description of Artificial Sequence: Synthetic oligonucleotide
  Sense strand starting at position 3265 of SEQ ID NO: 1883049
uuuacuaaauucgcaaagu

SEQ ID NO: 2166437 - RNA, 19 nt, Artificial Sequence
  Description of Artificial Sequence: Synthetic oligonucleotide
  Antisense strand to SEQ ID NO: 2166436
acuuugcgaauuuaguaaa

SEQ ID NO: 2166438 - RNA, 19 nt, Artificial Sequence
  Description of Artificial Sequence: Synthetic oligonucleotide
  Sense strand starting at position 3276 of SEQ ID NO: 1883049
cgcaaaguaucccuuuaua

SEQ ID NO: 2166439 - RNA, 19 nt, Artificial Sequence
  Description of Artificial Sequence: Synthetic oligonucleotide
  Antisense strand to SEQ ID NO: 2166438
uauaaagggauacuuugcg

SEQ ID NO: 2166440 - RNA, 19 nt, Artificial Sequence
  Description of Artificial Sequence: Synthetic oligonucleotide
  Sense strand starting at position 3402 of SEQ ID NO: 1883049
ugcguauuucuacaccuua

SEQ ID NO: 2166441 - RNA, 19 nt, Artificial Sequence
  Description of Artificial Sequence: Synthetic oligonucleotide
  Antisense strand to SEQ ID NO: 2166440
uaagguguagaaauacgca

SEQ ID NO: 2166442 - RNA, 19 nt, Artificial Sequence
  Description of Artificial Sequence: Synthetic oligonucleotide
  Sense strand starting at position 3443 of SEQ ID NO: 1883049
acaccuuguccugguccaa

SEQ ID NO: 2166443 - RNA, 19 nt, Artificial Sequence
  Description of Artificial Sequence: Synthetic oligonucleotide
  Antisense strand to SEQ ID NO: 2166442
uuggaccaggacaaggugu

SEQ ID NO: 2166444 - RNA, 19 nt, Artificial Sequence
  Description of Artificial Sequence: Synthetic oligonucleotide
  Sense strand starting at position 3548 of SEQ ID NO: 1883049
ggcccugugcuguaauaac

SEQ ID NO: 2166445 - RNA, 19 nt, Artificial Sequence
  Description of Artificial Sequence: Synthetic oligonucleotide
  Antisense strand to SEQ ID NO: 2166444
guuauuacagcacagggcc

SEQ ID NO: 2166446 - RNA, 19 nt, Artificial Sequence
  Description of Artificial Sequence: Synthetic oligonucleotide
  Sense strand starting at position 3588 of SEQ ID NO: 1883049
gcgaaucuucgggaggaaa

SEQ ID NO: 2166447 - RNA, 19 nt, Artificial Sequence
  Description of Artificial Sequence: Synthetic oligonucleotide
  Antisense strand to SEQ ID NO: 2166446
uuuccucccgaagauucgc

SEQ ID NO: 2166448 - RNA, 19 nt, Artificial Sequence
  Description of Artificial Sequence: Synthetic oligonucleotide
  Sense strand starting at position 3745 of SEQ ID NO: 1883049
gauggcugcgcgagugaaa

SEQ ID NO: 2166449 - RNA, 19 nt, Artificial Sequence
  Description of Artificial Sequence: Synthetic oligonucleotide
  Antisense strand to SEQ ID NO: 2166448
uuucacucgcgcagccauc

SEQ ID NO: 2166450 - RNA, 19 nt, Artificial Sequence
  Description of Artificial Sequence: Synthetic oligonucleotide
  Sense strand starting at position 3746 of SEQ ID NO: 1883049
auggcugcgcgagugaaau

SEQ ID NO: 2166451 - RNA, 19 nt, Artificial Sequence
  Description of Artificial Sequence: Synthetic oligonucleotide
  Antisense strand to SEQ ID NO: 2166450
auuucacucgcgcagccau

SEQ ID NO: 2166452 - RNA, 19 nt, Artificial Sequence
  Description of Artificial Sequence: Synthetic oligonucleotide
  Sense strand starting at position 34 of SEQ ID NO: 1883050
uaaugaacgugcuuauuuc

SEQ ID NO: 2166453 - RNA, 19 nt, Artificial Sequence
  Description of Artificial Sequence: Synthetic oligonucleotide
  Antisense strand to SEQ ID NO: 2166452
gaaauaagcacguucauua

SEQ ID NO: 2166454 - RNA, 19 nt, Artificial Sequence
  Description of Artificial Sequence: Synthetic oligonucleotide
  Sense strand starting at position 38 of SEQ ID NO: 1883050
gaacgugcuuauuucuauu

SEQ ID NO: 2166455 - RNA, 19 nt, Artificial Sequence
  Description of Artificial Sequence: Synthetic oligonucleotide
  Antisense strand to SEQ ID NO: 2166454
aauagaaauaagcacguuc

SEQ ID NO: 2166456 - RNA, 19 nt, Artificial Sequence
  Description of Artificial Sequence: Synthetic oligonucleotide
  Sense strand starting at position 79 of SEQ ID NO: 1883050
gguccuucccauuaguaaa

SEQ ID NO: 2166457 - RNA, 19 nt, Artificial Sequence
  Description of Artificial Sequence: Synthetic oligonucleotide
  Antisense strand to SEQ ID NO: 2166456
uuuacuaaugggaaggacc

SEQ ID NO: 2166458 - RNA, 19 nt, Artificial Sequence
  Description of Artificial Sequence: Synthetic oligonucleotide
  Sense strand starting at position 249 of SEQ ID NO: 1883050
accaguugaguccaugcua

SEQ ID NO: 2166459 - RNA, 19 nt, Artificial Sequence
  Description of Artificial Sequence: Synthetic oligonucleotide
  Antisense strand to SEQ ID NO: 2166458
uagcauggacucaacuggu

SEQ ID NO: 2166460 - RNA, 19 nt, Artificial Sequence
  Description of Artificial Sequence: Synthetic oligonucleotide
  Sense strand starting at position 823 of SEQ ID NO: 1883050
ugcagaagcuggucaacua

SEQ ID NO: 2166461 - RNA, 19 nt, Artificial Sequence
  Description of Artificial Sequence: Synthetic oligonucleotide
  Antisense strand to SEQ ID NO: 2166460
uaguugaccagcuucugca

SEQ ID NO: 2166462 - RNA, 19 nt, Artificial Sequence
  Description of Artificial Sequence: Synthetic oligonucleotide
  Sense strand starting at position 824 of SEQ ID NO: 1883050
gcagaagcuggucaacuau

SEQ ID NO: 2166463 - RNA, 19 nt, Artificial Sequence
  Description of Artificial Sequence: Synthetic oligonucleotide
  Antisense strand to SEQ ID NO: 2166462
auaguugaccagcuucugc

SEQ ID NO: 2166464 - RNA, 19 nt, Artificial Sequence
  Description of Artificial Sequence: Synthetic oligonucleotide
  Sense strand starting at position 1010 of SEQ ID NO: 1883050
cucccaucuggcugaauga

SEQ ID NO: 2166465 - RNA, 19 nt, Artificial Sequence
  Description of Artificial Sequence: Synthetic oligonucleotide
  Antisense strand to SEQ ID NO: 2166464
ucauucagccagaugggag

SEQ ID NO: 2166466 - RNA, 19 nt, Artificial Sequence
  Description of Artificial Sequence: Synthetic oligonucleotide
  Sense strand starting at position 1011 of SEQ ID NO: 1883050
ucccaucuggcugaaugau

SEQ ID NO: 2166467 - RNA, 19 nt, Artificial Sequence
  Description of Artificial Sequence: Synthetic oligonucleotide
  Antisense strand to SEQ ID NO: 2166466
aucauucagccagauggga

SEQ ID NO: 2166468 - RNA, 19 nt, Artificial Sequence
  Description of Artificial Sequence: Synthetic oligonucleotide
  Sense strand starting at position 1021 of SEQ ID NO: 1883050
cugaaugauccugguccca

SEQ ID NO: 2166469 - RNA, 19 nt, Artificial Sequence
  Description of Artificial Sequence: Synthetic oligonucleotide
  Antisense strand to SEQ ID NO: 2166468
ugggaccaggaucauucag

SEQ ID NO: 2166470 - RNA, 19 nt, Artificial Sequence
  Description of Artificial Sequence: Synthetic oligonucleotide
  Sense strand starting at position 1023 of SEQ ID NO: 1883050
gaaugauccuggucccaac

SEQ ID NO: 2166471 - RNA, 19 nt, Artificial Sequence
  Description of Artificial Sequence: Synthetic oligonucleotide
  Antisense strand to SEQ ID NO: 2166470
guugggaccaggaucauuc

SEQ ID NO: 2166472 - RNA, 19 nt, Artificial Sequence
  Description of Artificial Sequence: Synthetic oligonucleotide
  Sense strand starting at position 1149 of SEQ ID NO: 1883050
acgugucuuguagagauag

SEQ ID NO: 2166473 - RNA, 19 nt, Artificial Sequence
  Description of Artificial Sequence: Synthetic oligonucleotide
  Antisense strand to SEQ ID NO: 2166472
cuaucucuacaagacacgu

SEQ ID NO: 2166474 - RNA, 19 nt, Artificial Sequence
  Description of Artificial Sequence: Synthetic oligonucleotide
  Sense strand starting at position 1151 of SEQ ID NO: 1883050
gugucuuguagagauagaa

SEQ ID NO: 2166475 - RNA, 19 nt, Artificial Sequence
  Description of Artificial Sequence: Synthetic oligonucleotide
  Antisense strand to SEQ ID NO: 2166474
uucuaucucuacaagacac

SEQ ID NO: 2166476 - RNA, 19 nt, Artificial Sequence
  Description of Artificial Sequence: Synthetic oligonucleotide
  Sense strand starting at position 1246 of SEQ ID NO: 1883050
guaugaugcaucggaacug

SEQ ID NO: 2166477 - RNA, 19 nt, Artificial Sequence
  Description of Artificial Sequence: Synthetic oligonucleotide
  Antisense strand to SEQ ID NO: 2166476
caguuccgaugcaucauac

SEQ ID NO: 2166478 - RNA, 19 nt, Artificial Sequence
  Description of Artificial Sequence: Synthetic oligonucleotide
  Sense strand starting at position 1278 of SEQ ID NO: 1883050
ugcuuuccuggucaccaaa

SEQ ID NO: 2166479 - RNA, 19 nt, Artificial Sequence
  Description of Artificial Sequence: Synthetic oligonucleotide
  Antisense strand to SEQ ID NO: 2166478
uuuggugaccaggaaagca

SEQ ID NO: 2166480 - RNA, 19 nt, Artificial Sequence
  Description of Artificial Sequence: Synthetic oligonucleotide
  Sense strand starting at position 1397 of SEQ ID NO: 1883050
aaggcuacccguuaaugaa

SEQ ID NO: 2166481 - RNA, 19 nt, Artificial Sequence
  Description of Artificial Sequence: Synthetic oligonucleotide
  Antisense strand to SEQ ID NO: 2166480
uucauuaacggguagccuu

SEQ ID NO: 2166482 - RNA, 19 nt, Artificial Sequence
  Description of Artificial Sequence: Synthetic oligonucleotide
  Sense strand starting at position 1404 of SEQ ID NO: 1883050
cccguuaaugaaugaauaa

SEQ ID NO: 2166483 - RNA, 19 nt, Artificial Sequence
  Description of Artificial Sequence: Synthetic oligonucleotide
  Antisense strand to SEQ ID NO: 2166482
uuauucauucauuaacggg

SEQ ID NO: 2166484 - RNA, 19 nt, Artificial Sequence
  Description of Artificial Sequence: Synthetic oligonucleotide
  Sense strand starting at position 1497 of SEQ ID NO: 1883050
cuucuuccguaaucuagaa

SEQ ID NO: 2166485 - RNA, 19 nt, Artificial Sequence
  Description of Artificial Sequence: Synthetic oligonucleotide
  Antisense strand to SEQ ID NO: 2166484
uucuagauuacggaagaag

SEQ ID NO: 2166486 - RNA, 19 nt, Artificial Sequence
  Description of Artificial Sequence: Synthetic oligonucleotide
  Sense strand starting at position 1501 of SEQ ID NO: 1883050
uuccguaaucuagaaucca

SEQ ID NO: 2166487 - RNA, 19 nt, Artificial Sequence
  Description of Artificial Sequence: Synthetic oligonucleotide
  Antisense strand to SEQ ID NO: 2166486
uggauucuagauuacggaa

SEQ ID NO: 2166488 - RNA, 19 nt, Artificial Sequence
  Description of Artificial Sequence: Synthetic oligonucleotide
  Sense strand starting at position 1556 of SEQ ID NO: 1883050
ccaagaaucccuggaucga

SEQ ID NO: 2166489 - RNA, 19 nt, Artificial Sequence
  Description of Artificial Sequence: Synthetic oligonucleotide
  Antisense strand to SEQ ID NO: 2166488
ucgauccagggauucuugg

SEQ ID NO: 2166490 - RNA, 19 nt, Artificial Sequence
  Description of Artificial Sequence: Synthetic oligonucleotide
  Sense strand starting at position 2313 of SEQ ID NO: 1883050
ggcuaugguguuuauauaa

SEQ ID NO: 2166491 - RNA, 19 nt, Artificial Sequence
  Description of Artificial Sequence: Synthetic oligonucleotide
  Antisense strand to SEQ ID NO: 2166490
uuauauaaacaccauagcc

SEQ ID NO: 2166492 - RNA, 19 nt, Artificial Sequence
  Description of Artificial Sequence: Synthetic oligonucleotide
  Sense strand starting at position 2345 of SEQ ID NO: 1883050
uuugucuauguuugaaaug

SEQ ID NO: 2166493 - RNA, 19 nt, Artificial Sequence
  Description of Artificial Sequence: Synthetic oligonucleotide
  Antisense strand to SEQ ID NO: 2166492
cauuucaaacauagacaaa

SEQ ID NO: 2166494 - RNA, 19 nt, Artificial Sequence
  Description of Artificial Sequence: Synthetic oligonucleotide
  Sense strand starting at position 2461 of SEQ ID NO: 1883050
accuguuugcaugggaaac

SEQ ID NO: 2166495 - RNA, 19 nt, Artificial Sequence
  Description of Artificial Sequence: Synthetic oligonucleotide
  Antisense strand to SEQ ID NO: 2166494
guuucccaugcaaacaggu

SEQ ID NO: 2166496 - RNA, 19 nt, Artificial Sequence
  Description of Artificial Sequence: Synthetic oligonucleotide
  Sense strand starting at position 2499 of SEQ ID NO: 1883050
gcuaauaagugacugaaug

SEQ ID NO: 2166497 - RNA, 19 nt, Artificial Sequence
  Description of Artificial Sequence: Synthetic oligonucleotide
  Antisense strand to SEQ ID NO: 2166496
cauucagucacuuauuagc

SEQ ID NO: 2166498 - RNA, 19 nt, Artificial Sequence
  Description of Artificial Sequence: Synthetic oligonucleotide
  Sense strand starting at position 2679 of SEQ ID NO: 1883050
auacaauguugugucuuaa

SEQ ID NO: 2166499 - RNA, 19 nt, Artificial Sequence
  Description of Artificial Sequence: Synthetic oligonucleotide
  Antisense strand to SEQ ID NO: 2166498
uuaagacacaacauuguau

SEQ ID NO: 2166500 - RNA, 19 nt, Artificial Sequence
  Description of Artificial Sequence: Synthetic oligonucleotide
  Sense strand starting at position 3150 of SEQ ID NO: 1883050
cccuaugcuccgcaaagaa

SEQ ID NO: 2166501 - RNA, 19 nt, Artificial Sequence
  Description of Artificial Sequence: Synthetic oligonucleotide
  Antisense strand to SEQ ID NO: 2166500
uucuuugcggagcauaggg

SEQ ID NO: 2166502 - RNA, 19 nt, Artificial Sequence
  Description of Artificial Sequence: Synthetic oligonucleotide
  Sense strand starting at position 3244 of SEQ ID NO: 1883050
acuuauugucaagagcaug

SEQ ID NO: 2166503 - RNA, 19 nt, Artificial Sequence
  Description of Artificial Sequence: Synthetic oligonucleotide
  Antisense strand to SEQ ID NO: 2166502
caugcucuugacaauaagu

SEQ ID NO: 2166504 - RNA, 19 nt, Artificial Sequence
  Description of Artificial Sequence: Synthetic oligonucleotide
  Sense strand starting at position 3249 of SEQ ID NO: 1883050
uugucaagagcaugacuuu

SEQ ID NO: 2166505 - RNA, 19 nt, Artificial Sequence
  Description of Artificial Sequence: Synthetic oligonucleotide
  Antisense strand to SEQ ID NO: 2166504
aaagucaugcucuugacaa

SEQ ID NO: 2166506 - RNA, 19 nt, Artificial Sequence
  Description of Artificial Sequence: Synthetic oligonucleotide
  Sense strand starting at position 3250 of SEQ ID NO: 1883050
ugucaagagcaugacuuua

SEQ ID NO: 2166507 - RNA, 19 nt, Artificial Sequence
  Description of Artificial Sequence: Synthetic oligonucleotide
  Antisense strand to SEQ ID NO: 2166506
uaaagucaugcucuugaca

SEQ ID NO: 2166508 - RNA, 19 nt, Artificial Sequence
  Description of Artificial Sequence: Synthetic oligonucleotide
  Sense strand starting at position 3252 of SEQ ID NO: 1883050
ucaagagcaugacuuuaca

SEQ ID NO: 2166509 - RNA, 19 nt, Artificial Sequence
  Description of Artificial Sequence: Synthetic oligonucleotide
  Antisense strand to SEQ ID NO: 2166508
uguaaagucaugcucuuga

SEQ ID NO: 2166510 - RNA, 19 nt, Artificial Sequence
  Description of Artificial Sequence: Synthetic oligonucleotide
  Sense strand starting at position 3263 of SEQ ID NO: 1883050
acuuuacagcuguagacaa

SEQ ID NO: 2166511 - RNA, 19 nt, Artificial Sequence
  Description of Artificial Sequence: Synthetic oligonucleotide
  Antisense strand to SEQ ID NO: 2166510
uugucuacagcuguaaagu

SEQ ID NO: 2166512 - RNA, 19 nt, Artificial Sequence
  Description of Artificial Sequence: Synthetic oligonucleotide
  Sense strand starting at position 3287 of SEQ ID NO: 1883050
caacaaacccuuggagagu

SEQ ID NO: 2166513 - RNA, 19 nt, Artificial Sequence
  Description of Artificial Sequence: Synthetic oligonucleotide
  Antisense strand to SEQ ID NO: 2166512
acucuccaaggguuuguug

SEQ ID NO: 2166514 - RNA, 19 nt, Artificial Sequence
  Description of Artificial Sequence: Synthetic oligonucleotide
  Sense strand starting at position 3343 of SEQ ID NO: 1883050
cccuauuaagacugguaac

SEQ ID NO: 2166515 - RNA, 19 nt, Artificial Sequence
  Description of Artificial Sequence: Synthetic oligonucleotide
  Antisense strand to SEQ ID NO: 2166514
guuaccagucuuaauaggg

SEQ ID NO: 2166516 - RNA, 19 nt, Artificial Sequence
  Description of Artificial Sequence: Synthetic oligonucleotide
  Sense strand starting at position 3697 of SEQ ID NO: 1883050
aggaaacuuaagugauggu

SEQ ID NO: 2166517 - RNA, 19 nt, Artificial Sequence
  Description of Artificial Sequence: Synthetic oligonucleotide
  Antisense strand to SEQ ID NO: 2166516
accaucacuuaaguuuccu

SEQ ID NO: 2166518 - RNA, 19 nt, Artificial Sequence
  Description of Artificial Sequence: Synthetic oligonucleotide
  Sense strand starting at position 3704 of SEQ ID NO: 1883050
uuaagugauggucaccuuu

SEQ ID NO: 2166519 - RNA, 19 nt, Artificial Sequence
  Description of Artificial Sequence: Synthetic oligonucleotide
  Antisense strand to SEQ ID NO: 2166518
aaaggugaccaucacuuaa

SEQ ID NO: 2166520 - RNA, 19 nt, Artificial Sequence
  Description of Artificial Sequence: Synthetic oligonucleotide
  Sense strand starting at position 3742 of SEQ ID NO: 1883050
guuauaccaucagugggau

SEQ ID NO: 2166521 - RNA, 19 nt, Artificial Sequence
  Description of Artificial Sequence: Synthetic oligonucleotide
  Antisense strand to SEQ ID NO: 2166520
aucccacugaugguauaac

SEQ ID NO: 2166522 - RNA, 19 nt, Artificial Sequence
  Description of Artificial Sequence: Synthetic oligonucleotide
  Sense strand starting at position 3743 of SEQ ID NO: 1883050
uuauaccaucagugggauu

SEQ ID NO: 2166523 - RNA, 19 nt, Artificial Sequence
  Description of Artificial Sequence: Synthetic oligonucleotide
  Antisense strand to SEQ ID NO: 2166522
aaucccacugaugguauaa

SEQ ID NO: 2166524 - RNA, 19 nt, Artificial Sequence
  Description of Artificial Sequence: Synthetic oligonucleotide
  Sense strand starting at position 3750 of SEQ ID NO: 1883050
aucagugggauuggguaaa

SEQ ID NO: 2166525 - RNA, 19 nt, Artificial Sequence
  Description of Artificial Sequence: Synthetic oligonucleotide
  Antisense strand to SEQ ID NO: 2166524
uuuacccaaucccacugau

SEQ ID NO: 2166526 - RNA, 19 nt, Artificial Sequence
  Description of Artificial Sequence: Synthetic oligonucleotide
  Sense strand starting at position 3773 of SEQ ID NO: 1883050
gggacucuacggugguuaa

SEQ ID NO: 2166527 - RNA, 19 nt, Artificial Sequence
  Description of Artificial Sequence: Synthetic oligonucleotide
  Antisense strand to SEQ ID NO: 2166526
uuaaccaccguagaguccc

SEQ ID NO: 2166528 - RNA, 19 nt, Artificial Sequence
  Description of Artificial Sequence: Synthetic oligonucleotide
  Sense strand starting at position 3776 of SEQ ID NO: 1883050
acucuacggugguuaagaa

SEQ ID NO: 2166529 - RNA, 19 nt, Artificial Sequence
  Description of Artificial Sequence: Synthetic oligonucleotide
  Antisense strand to SEQ ID NO: 2166528
uucuuaaccaccguagagu

SEQ ID NO: 2166530 - RNA, 19 nt, Artificial Sequence
  Description of Artificial Sequence: Synthetic oligonucleotide
  Sense strand starting at position 3777 of SEQ ID NO: 1883050
cucuacggugguuaagaaa

SEQ ID NO: 2166531 - RNA, 19 nt, Artificial Sequence
  Description of Artificial Sequence: Synthetic oligonucleotide
  Antisense strand to SEQ ID NO: 2166530
uuucuuaaccaccguagag

SEQ ID NO: 2166532 - RNA, 19 nt, Artificial Sequence
  Description of Artificial Sequence: Synthetic oligonucleotide
  Sense strand starting at position 47 of SEQ ID NO: 1883051
caggaauuagagggugcaa

SEQ ID NO: 2166533 - RNA, 19 nt, Artificial Sequence
  Description of Artificial Sequence: Synthetic oligonucleotide
  Antisense strand to SEQ ID NO: 2166532
uugcacccucuaauuccug

SEQ ID NO: 2166534 - RNA, 19 nt, Artificial Sequence
  Description of Artificial Sequence: Synthetic oligonucleotide
  Sense strand starting at position 198 of SEQ ID NO: 1883051
ucagcauucugggaugcca

SEQ ID NO: 2166535 - RNA, 19 nt, Artificial Sequence
  Description of Artificial Sequence: Synthetic oligonucleotide
  Antisense strand to SEQ ID NO: 2166534
uggcaucccagaaugcuga

SEQ ID NO: 2166536 - RNA, 19 nt, Artificial Sequence
  Description of Artificial Sequence: Synthetic oligonucleotide
  Sense strand starting at position 659 of SEQ ID NO: 1883051
aucagaugucagugugaga

SEQ ID NO: 2166537 - RNA, 19 nt, Artificial Sequence
  Description of Artificial Sequence: Synthetic oligonucleotide
  Antisense strand to SEQ ID NO: 2166536
ucucacacugacaucugau

SEQ ID NO: 2166538 - RNA, 19 nt, Artificial Sequence
  Description of Artificial Sequence: Synthetic oligonucleotide
  Sense strand starting at position 1183 of SEQ ID NO: 1883051
aaugcaguggccugauauu

SEQ ID NO: 2166539 - RNA, 19 nt, Artificial Sequence
  Description of Artificial Sequence: Synthetic oligonucleotide
  Antisense strand to SEQ ID NO: 2166538
aauaucaggccacugcauu

SEQ ID NO: 2166540 - RNA, 19 nt, Artificial Sequence
  Description of Artificial Sequence: Synthetic oligonucleotide
  Sense strand starting at position 1834 of SEQ ID NO: 1883051
ucagauuugucccaccacu

SEQ ID NO: 2166541 - RNA, 19 nt, Artificial Sequence
  Description of Artificial Sequence: Synthetic oligonucleotide
  Antisense strand to SEQ ID NO: 2166540
aguggugggacaaaucuga

SEQ ID NO: 2166542 - RNA, 19 nt, Artificial Sequence
  Description of Artificial Sequence: Synthetic oligonucleotide
  Sense strand starting at position 2746 of SEQ ID NO: 1883051
ucugguuggucuugaacaa

SEQ ID NO: 2166543 - RNA, 19 nt, Artificial Sequence
  Description of Artificial Sequence: Synthetic oligonucleotide
  Antisense strand to SEQ ID NO: 2166542
uuguucaagaccaaccaga

SEQ ID NO: 2166544 - RNA, 19 nt, Artificial Sequence
  Description of Artificial Sequence: Synthetic oligonucleotide
  Sense strand starting at position 2750 of SEQ ID NO: 1883051
guuggucuugaacaacuga

SEQ ID NO: 2166545 - RNA, 19 nt, Artificial Sequence
  Description of Artificial Sequence: Synthetic oligonucleotide
  Antisense strand to SEQ ID NO: 2166544
ucaguuguucaagaccaac

SEQ ID NO: 2166546 - RNA, 19 nt, Artificial Sequence
  Description of Artificial Sequence: Synthetic oligonucleotide
  Sense strand starting at position 2963 of SEQ ID NO: 1883051
gugcuaggaucucaggcau

SEQ ID NO: 2166547 - RNA, 19 nt, Artificial Sequence
  Description of Artificial Sequence: Synthetic oligonucleotide
  Antisense strand to SEQ ID NO: 2166546
augccugagauccuagcac

SEQ ID NO: 2166548 - RNA, 19 nt, Artificial Sequence
  Description of Artificial Sequence: Synthetic oligonucleotide
  Sense strand starting at position 3565 of SEQ ID NO: 1883051
ucucucuguucucggaaca

SEQ ID NO: 2166549 - RNA, 19 nt, Artificial Sequence
  Description of Artificial Sequence: Synthetic oligonucleotide
  Antisense strand to SEQ ID NO: 2166548
uguuccgagaacagagaga

SEQ ID NO: 2166550 - RNA, 19 nt, Artificial Sequence
  Description of Artificial Sequence: Synthetic oligonucleotide
  Sense strand starting at position 23 of SEQ ID NO: 1883057
gcagaaguccaccaaucaa

SEQ ID NO: 2166551 - RNA, 19 nt, Artificial Sequence
  Description of Artificial Sequence: Synthetic oligonucleotide
  Antisense strand to SEQ ID NO: 2166550
uugauugguggacuucugc

SEQ ID NO: 2166552 - RNA, 19 nt, Artificial Sequence
  Description of Artificial Sequence: Synthetic oligonucleotide
  Sense strand starting at position 159 of SEQ ID NO: 1883057
augagaaccugugucauga

SEQ ID NO: 2166553 - RNA, 19 nt, Artificial Sequence
  Description of Artificial Sequence: Synthetic oligonucleotide
  Antisense strand to SEQ ID NO: 2166552
ucaugacacagguucucau

SEQ ID NO: 2166554 - RNA, 19 nt, Artificial Sequence
  Description of Artificial Sequence: Synthetic oligonucleotide
  Sense strand starting at position 185 of SEQ ID NO: 1883057
aaugucauuugagugcuca

SEQ ID NO: 2166555 - RNA, 19 nt, Artificial Sequence
  Description of Artificial Sequence: Synthetic oligonucleotide
  Antisense strand to SEQ ID NO: 2166554
ugagcacucaaaugacauu

SEQ ID NO: 2166556 - RNA, 19 nt, Artificial Sequence
  Description of Artificial Sequence: Synthetic oligonucleotide
  Sense strand starting at position 186 of SEQ ID NO: 1883057
augucauuugagugcucag

SEQ ID NO: 2166557 - RNA, 19 nt, Artificial Sequence
  Description of Artificial Sequence: Synthetic oligonucleotide
  Antisense strand to SEQ ID NO: 2166556
cugagcacucaaaugacau

SEQ ID NO: 2166558 - RNA, 19 nt, Artificial Sequence
  Description of Artificial Sequence: Synthetic oligonucleotide
  Sense strand starting at position 458 of SEQ ID NO: 1883057
ccaagaauauaggauuaag

SEQ ID NO: 2166559 - RNA, 19 nt, Artificial Sequence
  Description of Artificial Sequence: Synthetic oligonucleotide
  Antisense strand to SEQ ID NO: 2166558
cuuaauccuauauucuugg

SEQ ID NO: 2166560 - RNA, 19 nt, Artificial Sequence
  Description of Artificial Sequence: Synthetic oligonucleotide
  Sense strand starting at position 580 of SEQ ID NO: 1883057
gaaugugguaagugaggaa

SEQ ID NO: 2166561 - RNA, 19 nt, Artificial Sequence
  Description of Artificial Sequence: Synthetic oligonucleotide
  Antisense strand to SEQ ID NO: 2166560
uuccucacuuaccacauuc

SEQ ID NO: 2166562 - RNA, 19 nt, Artificial Sequence
  Description of Artificial Sequence: Synthetic oligonucleotide
  Sense strand starting at position 649 of SEQ ID NO: 1883057
gacccauacuaaguggaau

SEQ ID NO: 2166563 - RNA, 19 nt, Artificial Sequence
  Description of Artificial Sequence: Synthetic oligonucleotide
  Antisense strand to SEQ ID NO: 2166562
auuccacuuaguauggguc

SEQ ID NO: 2166564 - RNA, 19 nt, Artificial Sequence
  Description of Artificial Sequence: Synthetic oligonucleotide
  Sense strand starting at position 686 of SEQ ID NO: 1883057
uagugaaaucucuggugac

SEQ ID NO: 2166565 - RNA, 19 nt, Artificial Sequence
  Description of Artificial Sequence: Synthetic oligonucleotide
  Antisense strand to SEQ ID NO: 2166564
gucaccagagauuucacua

SEQ ID NO: 2166566 - RNA, 19 nt, Artificial Sequence
  Description of Artificial Sequence: Synthetic oligonucleotide
  Sense strand starting at position 790 of SEQ ID NO: 1883057
gcaacuacaugccuuaaga

SEQ ID NO: 2166567 - RNA, 19 nt, Artificial Sequence
  Description of Artificial Sequence: Synthetic oligonucleotide
  Antisense strand to SEQ ID NO: 2166566
ucuuaaggcauguaguugc

SEQ ID NO: 2166568 - RNA, 19 nt, Artificial Sequence
  Description of Artificial Sequence: Synthetic oligonucleotide
  Sense strand starting at position 835 of SEQ ID NO: 1883057
gucuuuaggucacuaaaga

SEQ ID NO: 2166569 - RNA, 19 nt, Artificial Sequence
  Description of Artificial Sequence: Synthetic oligonucleotide
  Antisense strand to SEQ ID NO: 2166568
ucuuuagugaccuaaagac

SEQ ID NO: 2166570 - RNA, 19 nt, Artificial Sequence
  Description of Artificial Sequence: Synthetic oligonucleotide
  Sense strand starting at position 860 of SEQ ID NO: 1883057
auguccucucacugguuaa

SEQ ID NO: 2166571 - RNA, 19 nt, Artificial Sequence
  Description of Artificial Sequence: Synthetic oligonucleotide
  Antisense strand to SEQ ID NO: 2166570
uuaaccagugagaggacau

SEQ ID NO: 2166572 - RNA, 19 nt, Artificial Sequence
  Description of Artificial Sequence: Synthetic oligonucleotide
  Sense strand starting at position 913 of SEQ ID NO: 1883057
gauuccuauuacgugugaa

SEQ ID NO: 2166573 - RNA, 19 nt, Artificial Sequence
  Description of Artificial Sequence: Synthetic oligonucleotide
  Antisense strand to SEQ ID NO: 2166572
uucacacguaauaggaauc

SEQ ID NO: 2166574 - RNA, 19 nt, Artificial Sequence
  Description of Artificial Sequence: Synthetic oligonucleotide
  Sense strand starting at position 916 of SEQ ID NO: 1883057
uccuauuacgugugaauaa

SEQ ID NO: 2166575 - RNA, 19 nt, Artificial Sequence
  Description of Artificial Sequence: Synthetic oligonucleotide
  Antisense strand to SEQ ID NO: 2166574
uuauucacacguaauagga

SEQ ID NO: 2166576 - RNA, 19 nt, Artificial Sequence
  Description of Artificial Sequence: Synthetic oligonucleotide
  Sense strand starting at position 1068 of SEQ ID NO: 1883057
gaagucuucugaucacugu

SEQ ID NO: 2166577 - RNA, 19 nt, Artificial Sequence
  Description of Artificial Sequence: Synthetic oligonucleotide
  Antisense strand to SEQ ID NO: 2166576
acagugaucagaagacuuc

SEQ ID NO: 2166578 - RNA, 19 nt, Artificial Sequence
  Description of Artificial Sequence: Synthetic oligonucleotide
  Sense strand starting at position 1074 of SEQ ID NO: 1883057
uucugaucacuguggcuga

SEQ ID NO: 2166579 - RNA, 19 nt, Artificial Sequence
  Description of Artificial Sequence: Synthetic oligonucleotide
  Antisense strand to SEQ ID NO: 2166578
ucagccacagugaucagaa

SEQ ID NO: 2166580 - RNA, 19 nt, Artificial Sequence
  Description of Artificial Sequence: Synthetic oligonucleotide
  Sense strand starting at position 1079 of SEQ ID NO: 1883057
aucacuguggcugauagua

SEQ ID NO: 2166581 - RNA, 19 nt, Artificial Sequence
  Description of Artificial Sequence: Synthetic oligonucleotide
  Antisense strand to SEQ ID NO: 2166580
uacuaucagccacagugau

SEQ ID NO: 2166582 - RNA, 19 nt, Artificial Sequence
  Description of Artificial Sequence: Synthetic oligonucleotide
  Sense strand starting at position 1120 of SEQ ID NO: 1883057
acaagugacuaccuguaau

SEQ ID NO: 2166583 - RNA, 19 nt, Artificial Sequence
  Description of Artificial Sequence: Synthetic oligonucleotide
  Antisense strand to SEQ ID NO: 2166582
auuacagguagucacuugu

SEQ ID NO: 2166584 - RNA, 19 nt, Artificial Sequence
  Description of Artificial Sequence: Synthetic oligonucleotide
  Sense strand starting at position 1123 of SEQ ID NO: 1883057
agugacuaccuguaauaca

SEQ ID NO: 2166585 - RNA, 19 nt, Artificial Sequence
  Description of Artificial Sequence: Synthetic oligonucleotide
  Antisense strand to SEQ ID NO: 2166584
uguauuacagguagucacu

SEQ ID NO: 2166586 - RNA, 19 nt, Artificial Sequence
  Description of Artificial Sequence: Synthetic oligonucleotide
  Sense strand starting at position 2123 of SEQ ID NO: 1883057
uggugaguuuggaagguuu

SEQ ID NO: 2166587 - RNA, 19 nt, Artificial Sequence
  Description of Artificial Sequence: Synthetic oligonucleotide
  Antisense strand to SEQ ID NO: 2166586
aaaccuuccaaacucacca

SEQ ID NO: 2166588 - RNA, 19 nt, Artificial Sequence
  Description of Artificial Sequence: Synthetic oligonucleotide
  Sense strand starting at position 2125 of SEQ ID NO: 1883057
gugaguuuggaagguuuca

SEQ ID NO: 2166589 - RNA, 19 nt, Artificial Sequence
  Description of Artificial Sequence: Synthetic oligonucleotide
  Antisense strand to SEQ ID NO: 2166588
ugaaaccuuccaaacucac

SEQ ID NO: 2166590 - RNA, 19 nt, Artificial Sequence
  Description of Artificial Sequence: Synthetic oligonucleotide
  Sense strand starting at position 2168 of SEQ ID NO: 1883057
agguuucaaguuuggaaag

SEQ ID NO: 2166591 - RNA, 19 nt, Artificial Sequence
  Description of Artificial Sequence: Synthetic oligonucleotide
  Antisense strand to SEQ ID NO: 2166590
cuuuccaaacuugaaaccu

SEQ ID NO: 2166592 - RNA, 19 nt, Artificial Sequence
  Description of Artificial Sequence: Synthetic oligonucleotide
  Sense strand starting at position 2704 of SEQ ID NO: 1883057
gcaggaaauccgggaggaa

SEQ ID NO: 2166593 - RNA, 19 nt, Artificial Sequence
  Description of Artificial Sequence: Synthetic oligonucleotide
  Antisense strand to SEQ ID NO: 2166592
uuccucccggauuuccugc

SEQ ID NO: 2166594 - RNA, 19 nt, Artificial Sequence
  Description of Artificial Sequence: Synthetic oligonucleotide
  Sense strand starting at position 2727 of SEQ ID NO: 1883057
auaagagucauguguaccu

SEQ ID NO: 2166595 - RNA, 19 nt, Artificial Sequence
  Description of Artificial Sequence: Synthetic oligonucleotide
  Antisense strand to SEQ ID NO: 2166594
agguacacaugacucuuau

SEQ ID NO: 2166596 - RNA, 19 nt, Artificial Sequence
  Description of Artificial Sequence: Synthetic oligonucleotide
  Sense strand starting at position 2729 of SEQ ID NO: 1883057
aagagucauguguaccuua

SEQ ID NO: 2166597 - RNA, 19 nt, Artificial Sequence
  Description of Artificial Sequence: Synthetic oligonucleotide
  Antisense strand to SEQ ID NO: 2166596
uaagguacacaugacucuu

SEQ ID NO: 2166598 - RNA, 19 nt, Artificial Sequence
  Description of Artificial Sequence: Synthetic oligonucleotide
  Sense strand starting at position 2732 of SEQ ID NO: 1883057
agucauguguaccuuaaca

SEQ ID NO: 2166599 - RNA, 19 nt, Artificial Sequence
  Description of Artificial Sequence: Synthetic oligonucleotide
  Antisense strand to SEQ ID NO: 2166598
uguuaagguacacaugacu

SEQ ID NO: 2166600 - RNA, 19 nt, Artificial Sequence
  Description of Artificial Sequence: Synthetic oligonucleotide
  Sense strand starting at position 2734 of SEQ ID NO: 1883057
ucauguguaccuuaacaac

SEQ ID NO: 2166601 - RNA, 19 nt, Artificial Sequence
  Description of Artificial Sequence: Synthetic oligonucleotide
  Antisense strand to SEQ ID NO: 2166600
guuguuaagguacacauga

SEQ ID NO: 2166602 - RNA, 19 nt, Artificial Sequence
  Description of Artificial Sequence: Synthetic oligonucleotide
  Sense strand starting at position 2752 of SEQ ID NO: 1883057
caggguaaggucugaggau

SEQ ID NO: 2166603 - RNA, 19 nt, Artificial Sequence
  Description of Artificial Sequence: Synthetic oligonucleotide
  Antisense strand to SEQ ID NO: 2166602
auccucagaccuuacccug

SEQ ID NO: 2166604 - RNA, 19 nt, Artificial Sequence
  Description of Artificial Sequence: Synthetic oligonucleotide
  Sense strand starting at position 2764 of SEQ ID NO: 1883057
ugaggauugcgucauuagg

SEQ ID NO: 2166605 - RNA, 19 nt, Artificial Sequence
  Description of Artificial Sequence: Synthetic oligonucleotide
  Antisense strand to SEQ ID NO: 2166604
ccuaaugacgcaauccuca

SEQ ID NO: 2166606 - RNA, 19 nt, Artificial Sequence
  Description of Artificial Sequence: Synthetic oligonucleotide
  Sense strand starting at position 2872 of SEQ ID NO: 1883057
gcugcuuccaggcugcaaa

SEQ ID NO: 2166607 - RNA, 19 nt, Artificial Sequence
  Description of Artificial Sequence: Synthetic oligonucleotide
  Antisense strand to SEQ ID NO: 2166606
uuugcagccuggaagcagc

SEQ ID NO: 2166608 - RNA, 19 nt, Artificial Sequence
  Description of Artificial Sequence: Synthetic oligonucleotide
  Sense strand starting at position 3102 of SEQ ID NO: 1883057
caugaaggucuaggacauu

SEQ ID NO: 2166609 - RNA, 19 nt, Artificial Sequence
  Description of Artificial Sequence: Synthetic oligonucleotide
  Antisense strand to SEQ ID NO: 2166608
aauguccuagaccuucaug

SEQ ID NO: 2166610 - RNA, 19 nt, Artificial Sequence
  Description of Artificial Sequence: Synthetic oligonucleotide
  Sense strand starting at position 3159 of SEQ ID NO: 1883057
aggcuacacucaguuuaua

SEQ ID NO: 2166611 - RNA, 19 nt, Artificial Sequence
  Description of Artificial Sequence: Synthetic oligonucleotide
  Antisense strand to SEQ ID NO: 2166610
uauaaacugaguguagccu

SEQ ID NO: 2166612 - RNA, 19 nt, Artificial Sequence
  Description of Artificial Sequence: Synthetic oligonucleotide
  Sense strand starting at position 3429 of SEQ ID NO: 1883057
uacacagggucauuaugau

SEQ ID NO: 2166613 - RNA, 19 nt, Artificial Sequence
  Description of Artificial Sequence: Synthetic oligonucleotide
  Antisense strand to SEQ ID NO: 2166612
aucauaaugacccugugua

SEQ ID NO: 2166614 - RNA, 19 nt, Artificial Sequence
  Description of Artificial Sequence: Synthetic oligonucleotide
  Sense strand starting at position 3435 of SEQ ID NO: 1883057
gggucauuaugaucaaucu

SEQ ID NO: 2166615 - RNA, 19 nt, Artificial Sequence
  Description of Artificial Sequence: Synthetic oligonucleotide
  Antisense strand to SEQ ID NO: 2166614
agauugaucauaaugaccc

SEQ ID NO: 2166616 - RNA, 19 nt, Artificial Sequence
  Description of Artificial Sequence: Synthetic oligonucleotide
  Sense strand starting at position 3436 of SEQ ID NO: 1883057
ggucauuaugaucaaucuc

SEQ ID NO: 2166617 - RNA, 19 nt, Artificial Sequence
  Description of Artificial Sequence: Synthetic oligonucleotide
  Antisense strand to SEQ ID NO: 2166616
gagauugaucauaaugacc

SEQ ID NO: 2166618 - RNA, 19 nt, Artificial Sequence
  Description of Artificial Sequence: Synthetic oligonucleotide
  Sense strand starting at position 3518 of SEQ ID NO: 1883057
ugucaucuccuauaacagu

SEQ ID NO: 2166619 - RNA, 19 nt, Artificial Sequence
  Description of Artificial Sequence: Synthetic oligonucleotide
  Antisense strand to SEQ ID NO: 2166618
acuguuauaggagaugaca

SEQ ID NO: 2166620 - RNA, 19 nt, Artificial Sequence
  Description of Artificial Sequence: Synthetic oligonucleotide
  Sense strand starting at position 3649 of SEQ ID NO: 1883057
gugacauagucauuauuaa

SEQ ID NO: 2166621 - RNA, 19 nt, Artificial Sequence
  Description of Artificial Sequence: Synthetic oligonucleotide
  Antisense strand to SEQ ID NO: 2166620
uuaauaaugacuaugucac

SEQ ID NO: 2166622 - RNA, 19 nt, Artificial Sequence
  Description of Artificial Sequence: Synthetic oligonucleotide
  Sense strand starting at position 3682 of SEQ ID NO: 1883057
ugaguaauacauugcauuc

SEQ ID NO: 2166623 - RNA, 19 nt, Artificial Sequence
  Description of Artificial Sequence: Synthetic oligonucleotide
  Antisense strand to SEQ ID NO: 2166622
gaaugcaauguauuacuca

SEQ ID NO: 2166624 - RNA, 19 nt, Artificial Sequence
  Description of Artificial Sequence: Synthetic oligonucleotide
  Sense strand starting at position 3715 of SEQ ID NO: 1883057
guaugaugucacuagacga

SEQ ID NO: 2166625 - RNA, 19 nt, Artificial Sequence
  Description of Artificial Sequence: Synthetic oligonucleotide
  Antisense strand to SEQ ID NO: 2166624
ucgucuagugacaucauac

SEQ ID NO: 2166626 - RNA, 19 nt, Artificial Sequence
  Description of Artificial Sequence: Synthetic oligonucleotide
  Sense strand starting at position 3825 of SEQ ID NO: 1883057
agugcaugacuguauuaaa

SEQ ID NO: 2166627 - RNA, 19 nt, Artificial Sequence
  Description of Artificial Sequence: Synthetic oligonucleotide
  Antisense strand to SEQ ID NO: 2166626
uuuaauacagucaugcacu

SEQ ID NO: 2166628 - RNA, 19 nt, Artificial Sequence
  Description of Artificial Sequence: Synthetic oligonucleotide
  Sense strand starting at position 3909 of SEQ ID NO: 1883057
uguguauauguguacuuau

SEQ ID NO: 2166629 - RNA, 19 nt, Artificial Sequence
  Description of Artificial Sequence: Synthetic oligonucleotide
  Antisense strand to SEQ ID NO: 2166628
auaaguacacauauacaca

SEQ ID NO: 2166630 - RNA, 19 nt, Artificial Sequence
  Description of Artificial Sequence: Synthetic oligonucleotide
  Sense strand starting at position 12 of SEQ ID NO: 1883058
aguuccauccauuauguau

SEQ ID NO: 2166631 - RNA, 19 nt, Artificial Sequence
  Description of Artificial Sequence: Synthetic oligonucleotide
  Antisense strand to SEQ ID NO: 2166630
auacauaauggauggaacu

SEQ ID NO: 2166632 - RNA, 19 nt, Artificial Sequence
  Description of Artificial Sequence: Synthetic oligonucleotide
  Sense strand starting at position 19 of SEQ ID NO: 1883058
uccauuauguaugccguaa

SEQ ID NO: 2166633 - RNA, 19 nt, Artificial Sequence
  Description of Artificial Sequence: Synthetic oligonucleotide
  Antisense strand to SEQ ID NO: 2166632
uuacggcauacauaaugga

SEQ ID NO: 2166634 - RNA, 19 nt, Artificial Sequence
  Description of Artificial Sequence: Synthetic oligonucleotide
  Sense strand starting at position 23 of SEQ ID NO: 1883058
uuauguaugccguaauagg

SEQ ID NO: 2166635 - RNA, 19 nt, Artificial Sequence
  Description of Artificial Sequence: Synthetic oligonucleotide
  Antisense strand to SEQ ID NO: 2166634
ccuauuacggcauacauaa

SEQ ID NO: 2166636 - RNA, 19 nt, Artificial Sequence
  Description of Artificial Sequence: Synthetic oligonucleotide
  Sense strand starting at position 33 of SEQ ID NO: 1883058
cguaauaggcccuauaugu

SEQ ID NO: 2166637 - RNA, 19 nt, Artificial Sequence
  Description of Artificial Sequence: Synthetic oligonucleotide
  Antisense strand to SEQ ID NO: 2166636
acauauagggccuauuacg

SEQ ID NO: 2166638 - RNA, 19 nt, Artificial Sequence
  Description of Artificial Sequence: Synthetic oligonucleotide
  Sense strand starting at position 82 of SEQ ID NO: 1883058
aggaaacuauuauacaagu

SEQ ID NO: 2166639 - RNA, 19 nt, Artificial Sequence
  Description of Artificial Sequence: Synthetic oligonucleotide
  Antisense strand to SEQ ID NO: 2166638
acuuguauaauaguuuccu

SEQ ID NO: 2166640 - RNA, 19 nt, Artificial Sequence
  Description of Artificial Sequence: Synthetic oligonucleotide
  Sense strand starting at position 326 of SEQ ID NO: 1883058
aauggacuuucuguuagag

SEQ ID NO: 2166641 - RNA, 19 nt, Artificial Sequence
  Description of Artificial Sequence: Synthetic oligonucleotide
  Antisense strand to SEQ ID NO: 2166640
cucuaacagaaaguccauu

SEQ ID NO: 2166642 - RNA, 19 nt, Artificial Sequence
  Description of Artificial Sequence: Synthetic oligonucleotide
  Sense strand starting at position 370 of SEQ ID NO: 1883058
cccagagaauuguuuauau

SEQ ID NO: 2166643 - RNA, 19 nt, Artificial Sequence
  Description of Artificial Sequence: Synthetic oligonucleotide
  Antisense strand to SEQ ID NO: 2166642
auauaaacaauucucuggg

SEQ ID NO: 2166644 - RNA, 19 nt, Artificial Sequence
  Description of Artificial Sequence: Synthetic oligonucleotide
  Sense strand starting at position 402 of SEQ ID NO: 1883058
agaauaguuugaccucuga

SEQ ID NO: 2166645 - RNA, 19 nt, Artificial Sequence
  Description of Artificial Sequence: Synthetic oligonucleotide
  Antisense strand to SEQ ID NO: 2166644
ucagaggucaaacuauucu

SEQ ID NO: 2166646 - RNA, 19 nt, Artificial Sequence
  Description of Artificial Sequence: Synthetic oligonucleotide
  Sense strand starting at position 629 of SEQ ID NO: 1883058
ccugaauccugauaaggga

SEQ ID NO: 2166647 - RNA, 19 nt, Artificial Sequence
  Description of Artificial Sequence: Synthetic oligonucleotide
  Antisense strand to SEQ ID NO: 2166646
ucccuuaucaggauucagg

SEQ ID NO: 2166648 - RNA, 19 nt, Artificial Sequence
  Description of Artificial Sequence: Synthetic oligonucleotide
  Sense strand starting at position 701 of SEQ ID NO: 1883058
uugguuccaccuuaaggua

SEQ ID NO: 2166649 - RNA, 19 nt, Artificial Sequence
  Description of Artificial Sequence: Synthetic oligonucleotide
  Antisense strand to SEQ ID NO: 2166648
uaccuuaagguggaaccaa

SEQ ID NO: 2166650 - RNA, 19 nt, Artificial Sequence
  Description of Artificial Sequence: Synthetic oligonucleotide
  Sense strand starting at position 834 of SEQ ID NO: 1883058
gugguaaacgcucaacuua

SEQ ID NO: 2166651 - RNA, 19 nt, Artificial Sequence
  Description of Artificial Sequence: Synthetic oligonucleotide
  Antisense strand to SEQ ID NO: 2166650
uaaguugagcguuuaccac

SEQ ID NO: 2166652 - RNA, 19 nt, Artificial Sequence
  Description of Artificial Sequence: Synthetic oligonucleotide
  Sense strand starting at position 845 of SEQ ID NO: 1883058
ucaacuuaugcggguugua

SEQ ID NO: 2166653 - RNA, 19 nt, Artificial Sequence
  Description of Artificial Sequence: Synthetic oligonucleotide
  Antisense strand to SEQ ID NO: 2166652
uacaacccgcauaaguuga

SEQ ID NO: 2166654 - RNA, 19 nt, Artificial Sequence
  Description of Artificial Sequence: Synthetic oligonucleotide
  Sense strand starting at position 848 of SEQ ID NO: 1883058
acuuaugcggguuguaacu

SEQ ID NO: 2166655 - RNA, 19 nt, Artificial Sequence
  Description of Artificial Sequence: Synthetic oligonucleotide
  Antisense strand to SEQ ID NO: 2166654
aguuacaacccgcauaagu

SEQ ID NO: 2166656 - RNA, 19 nt, Artificial Sequence
  Description of Artificial Sequence: Synthetic oligonucleotide
  Sense strand starting at position 962 of SEQ ID NO: 1883058
ccacgugaucgcuccacga

SEQ ID NO: 2166657 - RNA, 19 nt, Artificial Sequence
  Description of Artificial Sequence: Synthetic oligonucleotide
  Antisense strand to SEQ ID NO: 2166656
ucguggagcgaucacgugg

SEQ ID NO: 2166658 - RNA, 19 nt, Artificial Sequence
  Description of Artificial Sequence: Synthetic oligonucleotide
  Sense strand starting at position 964 of SEQ ID NO: 1883058
acgugaucgcuccacgaaa

SEQ ID NO: 2166659 - RNA, 19 nt, Artificial Sequence
  Description of Artificial Sequence: Synthetic oligonucleotide
  Antisense strand to SEQ ID NO: 2166658
uuucguggagcgaucacgu

SEQ ID NO: 2166660 - RNA, 19 nt, Artificial Sequence
  Description of Artificial Sequence: Synthetic oligonucleotide
  Sense strand starting at position 965 of SEQ ID NO: 1883058
cgugaucgcuccacgaaag

SEQ ID NO: 2166661 - RNA, 19 nt, Artificial Sequence
  Description of Artificial Sequence: Synthetic oligonucleotide
  Antisense strand to SEQ ID NO: 2166660
cuuucguggagcgaucacg

SEQ ID NO: 2166662 - RNA, 19 nt, Artificial Sequence
  Description of Artificial Sequence: Synthetic oligonucleotide
  Sense strand starting at position 991 of SEQ ID NO: 1883058
uagggaccuuuagagaguu

SEQ ID NO: 2166663 - RNA, 19 nt, Artificial Sequence
  Description of Artificial Sequence: Synthetic oligonucleotide
  Antisense strand to SEQ ID NO: 2166662
aacucucuaaaggucccua

SEQ ID NO: 2166664 - RNA, 19 nt, Artificial Sequence
  Description of Artificial Sequence: Synthetic oligonucleotide
  Sense strand starting at position 2018 of SEQ ID NO: 1883058
caccaaauggauugucgaa

SEQ ID NO: 2166665 - RNA, 19 nt, Artificial Sequence
  Description of Artificial Sequence: Synthetic oligonucleotide
  Antisense strand to SEQ ID NO: 2166664
uucgacaauccauuuggug

SEQ ID NO: 2166666 - RNA, 19 nt, Artificial Sequence
  Description of Artificial Sequence: Synthetic oligonucleotide
  Sense strand starting at position 2060 of SEQ ID NO: 1883058
gcuggaauuucugaggguu

SEQ ID NO: 2166667 - RNA, 19 nt, Artificial Sequence
  Description of Artificial Sequence: Synthetic oligonucleotide
  Antisense strand to SEQ ID NO: 2166666
aacccucagaaauuccagc

SEQ ID NO: 2166668 - RNA, 19 nt, Artificial Sequence
  Description of Artificial Sequence: Synthetic oligonucleotide
  Sense strand starting at position 2062 of SEQ ID NO: 1883058
uggaauuucugaggguuuc

SEQ ID NO: 2166669 - RNA, 19 nt, Artificial Sequence
  Description of Artificial Sequence: Synthetic oligonucleotide
  Antisense strand to SEQ ID NO: 2166668
gaaacccucagaaauucca

SEQ ID NO: 2166670 - RNA, 19 nt, Artificial Sequence
  Description of Artificial Sequence: Synthetic oligonucleotide
  Sense strand starting at position 2497 of SEQ ID NO: 1883058
gguguuuagcugcauuaaa

SEQ ID NO: 2166671 - RNA, 19 nt, Artificial Sequence
  Description of Artificial Sequence: Synthetic oligonucleotide
  Antisense strand to SEQ ID NO: 2166670
uuuaaugcagcuaaacacc

SEQ ID NO: 2166672 - RNA, 19 nt, Artificial Sequence
  Description of Artificial Sequence: Synthetic oligonucleotide
  Sense strand starting at position 2635 of SEQ ID NO: 1883058
uguaguaucccucgggauc

SEQ ID NO: 2166673 - RNA, 19 nt, Artificial Sequence
  Description of Artificial Sequence: Synthetic oligonucleotide
  Antisense strand to SEQ ID NO: 2166672
gaucccgagggauacuaca

SEQ ID NO: 2166674 - RNA, 19 nt, Artificial Sequence
  Description of Artificial Sequence: Synthetic oligonucleotide
  Sense strand starting at position 2816 of SEQ ID NO: 1883058
acaaguaugucuccaggau

SEQ ID NO: 2166675 - RNA, 19 nt, Artificial Sequence
  Description of Artificial Sequence: Synthetic oligonucleotide
  Antisense strand to SEQ ID NO: 2166674
auccuggagacauacuugu

SEQ ID NO: 2166676 - RNA, 19 nt, Artificial Sequence
  Description of Artificial Sequence: Synthetic oligonucleotide
  Sense strand starting at position 2817 of SEQ ID NO: 1883058
caaguaugucuccaggaua

SEQ ID NO: 2166677 - RNA, 19 nt, Artificial Sequence
  Description of Artificial Sequence: Synthetic oligonucleotide
  Antisense strand to SEQ ID NO: 2166676
uauccuggagacauacuug

SEQ ID NO: 2166678 - RNA, 19 nt, Artificial Sequence
  Description of Artificial Sequence: Synthetic oligonucleotide
  Sense strand starting at position 2820 of SEQ ID NO: 1883058
guaugucuccaggauaccu

SEQ ID NO: 2166679 - RNA, 19 nt, Artificial Sequence
  Description of Artificial Sequence: Synthetic oligonucleotide
  Antisense strand to SEQ ID NO: 2166678
agguauccuggagacauac

SEQ ID NO: 2166680 - RNA, 19 nt, Artificial Sequence
  Description of Artificial Sequence: Synthetic oligonucleotide
  Sense strand starting at position 2897 of SEQ ID NO: 1883058
uacguauuuguugguaaca

SEQ ID NO: 2166681 - RNA, 19 nt, Artificial Sequence
  Description of Artificial Sequence: Synthetic oligonucleotide
  Antisense strand to SEQ ID NO: 2166680
uguuaccaacaaauacgua

SEQ ID NO: 2166682 - RNA, 19 nt, Artificial Sequence
  Description of Artificial Sequence: Synthetic oligonucleotide
  Sense strand starting at position 3052 of SEQ ID NO: 1883058
gcugucaucccuuggugga

SEQ ID NO: 2166683 - RNA, 19 nt, Artificial Sequence
  Description of Artificial Sequence: Synthetic oligonucleotide
  Antisense strand to SEQ ID NO: 2166682
uccaccaagggaugacagc

SEQ ID NO: 2166684 - RNA, 19 nt, Artificial Sequence
  Description of Artificial Sequence: Synthetic oligonucleotide
  Sense strand starting at position 3053 of SEQ ID NO: 1883058
cugucaucccuugguggaa

SEQ ID NO: 2166685 - RNA, 19 nt, Artificial Sequence
  Description of Artificial Sequence: Synthetic oligonucleotide
  Antisense strand to SEQ ID NO: 2166684
uuccaccaagggaugacag

SEQ ID NO: 2166686 - RNA, 19 nt, Artificial Sequence
  Description of Artificial Sequence: Synthetic oligonucleotide
  Sense strand starting at position 3350 of SEQ ID NO: 1883058
uguauauauguguaagugu

SEQ ID NO: 2166687 - RNA, 19 nt, Artificial Sequence
  Description of Artificial Sequence: Synthetic oligonucleotide
  Antisense strand to SEQ ID NO: 2166686
acacuuacacauauauaca

SEQ ID NO: 2166688 - RNA, 19 nt, Artificial Sequence
  Description of Artificial Sequence: Synthetic oligonucleotide
  Sense strand starting at position 3375 of SEQ ID NO: 1883058
cagugcucugugcagauca

SEQ ID NO: 2166689 - RNA, 19 nt, Artificial Sequence
  Description of Artificial Sequence: Synthetic oligonucleotide
  Antisense strand to SEQ ID NO: 2166688
ugaucugcacagagcacug

SEQ ID NO: 2166690 - RNA, 19 nt, Artificial Sequence
  Description of Artificial Sequence: Synthetic oligonucleotide
  Sense strand starting at position 3445 of SEQ ID NO: 1883058
auuguuaggucuucuagca

SEQ ID NO: 2166691 - RNA, 19 nt, Artificial Sequence
  Description of Artificial Sequence: Synthetic oligonucleotide
  Antisense strand to SEQ ID NO: 2166690
ugcuagaagaccuaacaau

SEQ ID NO: 2166692 - RNA, 19 nt, Artificial Sequence
  Description of Artificial Sequence: Synthetic oligonucleotide
  Sense strand starting at position 3471 of SEQ ID NO: 1883058
ucuagcauuucucagagau

SEQ ID NO: 2166693 - RNA, 19 nt, Artificial Sequence
  Description of Artificial Sequence: Synthetic oligonucleotide
  Antisense strand to SEQ ID NO: 2166692
aucucugagaaaugcuaga

SEQ ID NO: 2166694 - RNA, 19 nt, Artificial Sequence
  Description of Artificial Sequence: Synthetic oligonucleotide
  Sense strand starting at position 3483 of SEQ ID NO: 1883058
cagagaugccuuuguuaau

SEQ ID NO: 2166695 - RNA, 19 nt, Artificial Sequence
  Description of Artificial Sequence: Synthetic oligonucleotide
  Antisense strand to SEQ ID NO: 2166694
auuaacaaaggcaucucug

SEQ ID NO: 2166696 - RNA, 19 nt, Artificial Sequence
  Description of Artificial Sequence: Synthetic oligonucleotide
  Sense strand starting at position 3484 of SEQ ID NO: 1883058
agagaugccuuuguuaauu

SEQ ID NO: 2166697 - RNA, 19 nt, Artificial Sequence
  Description of Artificial Sequence: Synthetic oligonucleotide
  Antisense strand to SEQ ID NO: 2166696
aauuaacaaaggcaucucu

SEQ ID NO: 2166698 - RNA, 19 nt, Artificial Sequence
  Description of Artificial Sequence: Synthetic oligonucleotide
  Sense strand starting at position 3514 of SEQ ID NO: 1883058
aguucuaagagauagcgaa

SEQ ID NO: 2166699 - RNA, 19 nt, Artificial Sequence
  Description of Artificial Sequence: Synthetic oligonucleotide
  Antisense strand to SEQ ID NO: 2166698
uucgcuaucucuuagaacu

SEQ ID NO: 2166700 - RNA, 19 nt, Artificial Sequence
  Description of Artificial Sequence: Synthetic oligonucleotide
  Sense strand starting at position 3558 of SEQ ID NO: 1883058
ggcuguaccuugcuagaca

SEQ ID NO: 2166701 - RNA, 19 nt, Artificial Sequence
  Description of Artificial Sequence: Synthetic oligonucleotide
  Antisense strand to SEQ ID NO: 2166700
ugucuagcaagguacagcc

SEQ ID NO: 2166702 - RNA, 19 nt, Artificial Sequence
  Description of Artificial Sequence: Synthetic oligonucleotide
  Sense strand starting at position 3561 of SEQ ID NO: 1883058
uguaccuugcuagacacau

SEQ ID NO: 2166703 - RNA, 19 nt, Artificial Sequence
  Description of Artificial Sequence: Synthetic oligonucleotide
  Antisense strand to SEQ ID NO: 2166702
augugucuagcaagguaca

SEQ ID NO: 2166704 - RNA, 19 nt, Artificial Sequence
  Description of Artificial Sequence: Synthetic oligonucleotide
  Sense strand starting at position 3718 of SEQ ID NO: 1883058
ggaggaggacuuuggcauu

SEQ ID NO: 2166705 - RNA, 19 nt, Artificial Sequence
  Description of Artificial Sequence: Synthetic oligonucleotide
  Antisense strand to SEQ ID NO: 2166704
aaugccaaaguccuccucc

SEQ ID NO: 2166706 - RNA, 19 nt, Artificial Sequence
  Description of Artificial Sequence: Synthetic oligonucleotide
  Sense strand starting at position 3771 of SEQ ID NO: 1883058
ccuagaacaguuuagguuu

SEQ ID NO: 2166707 - RNA, 19 nt, Artificial Sequence
  Description of Artificial Sequence: Synthetic oligonucleotide
  Antisense strand to SEQ ID NO: 2166706
aaaccuaaacuguucuagg

SEQ ID NO: 2166708 - RNA, 19 nt, Artificial Sequence
  Description of Artificial Sequence: Synthetic oligonucleotide
  Sense strand starting at position 3933 of SEQ ID NO: 1883058
aguuucuguacugaaguua

SEQ ID NO: 2166709 - RNA, 19 nt, Artificial Sequence
  Description of Artificial Sequence: Synthetic oligonucleotide
  Antisense strand to SEQ ID NO: 2166708
uaacuucaguacagaaacu

SEQ ID NO: 2166710 - RNA, 19 nt, Artificial Sequence
  Description of Artificial Sequence: Synthetic oligonucleotide
  Sense strand starting at position 37 of SEQ ID NO: 1883060
cuuguuaaaggucauguaa

SEQ ID NO: 2166711 - RNA, 19 nt, Artificial Sequence
  Description of Artificial Sequence: Synthetic oligonucleotide
  Antisense strand to SEQ ID NO: 2166710
uuacaugaccuuuaacaag

SEQ ID NO: 2166712 - RNA, 19 nt, Artificial Sequence
  Description of Artificial Sequence: Synthetic oligonucleotide
  Sense strand starting at position 226 of SEQ ID NO: 1883060
acuguuauuguccaagaga

SEQ ID NO: 2166713 - RNA, 19 nt, Artificial Sequence
  Description of Artificial Sequence: Synthetic oligonucleotide
  Antisense strand to SEQ ID NO: 2166712
ucucuuggacaauaacagu

SEQ ID NO: 2166714 - RNA, 19 nt, Artificial Sequence
  Description of Artificial Sequence: Synthetic oligonucleotide
  Sense strand starting at position 229 of SEQ ID NO: 1883060
guuauuguccaagagauau

SEQ ID NO: 2166715 - RNA, 19 nt, Artificial Sequence
  Description of Artificial Sequence: Synthetic oligonucleotide
  Antisense strand to SEQ ID NO: 2166714
auaucucuuggacaauaac

SEQ ID NO: 2166716 - RNA, 19 nt, Artificial Sequence
  Description of Artificial Sequence: Synthetic oligonucleotide
  Sense strand starting at position 242 of SEQ ID NO: 1883060
agauauuguuaagugaaga

SEQ ID NO: 2166717 - RNA, 19 nt, Artificial Sequence
  Description of Artificial Sequence: Synthetic oligonucleotide
  Antisense strand to SEQ ID NO: 2166716
ucuucacuuaacaauaucu

SEQ ID NO: 2166718 - RNA, 19 nt, Artificial Sequence
  Description of Artificial Sequence: Synthetic oligonucleotide
  Sense strand starting at position 316 of SEQ ID NO: 1883060
gcuaauauagacuaauagu

SEQ ID NO: 2166719 - RNA, 19 nt, Artificial Sequence
  Description of Artificial Sequence: Synthetic oligonucleotide
  Antisense strand to SEQ ID NO: 2166718
acuauuagucuauauuagc

SEQ ID NO: 2166720 - RNA, 19 nt, Artificial Sequence
  Description of Artificial Sequence: Synthetic oligonucleotide
  Sense strand starting at position 394 of SEQ ID NO: 1883060
gugcguuuaccuguugaua

SEQ ID NO: 2166721 - RNA, 19 nt, Artificial Sequence
  Description of Artificial Sequence: Synthetic oligonucleotide
  Antisense strand to SEQ ID NO: 2166720
uaucaacagguaaacgcac

SEQ ID NO: 2166722 - RNA, 19 nt, Artificial Sequence
  Description of Artificial Sequence: Synthetic oligonucleotide
  Sense strand starting at position 575 of SEQ ID NO: 1883060
cucucuaguguccagauga

SEQ ID NO: 2166723 - RNA, 19 nt, Artificial Sequence
  Description of Artificial Sequence: Synthetic oligonucleotide
  Antisense strand to SEQ ID NO: 2166722
ucaucuggacacuagagag

SEQ ID NO: 2166724 - RNA, 19 nt, Artificial Sequence
  Description of Artificial Sequence: Synthetic oligonucleotide
  Sense strand starting at position 1115 of SEQ ID NO: 1883060
gagucacuuguauaagcau

SEQ ID NO: 2166725 - RNA, 19 nt, Artificial Sequence
  Description of Artificial Sequence: Synthetic oligonucleotide
  Antisense strand to SEQ ID NO: 2166724
augcuuauacaagugacuc

SEQ ID NO: 2166726 - RNA, 19 nt, Artificial Sequence
  Description of Artificial Sequence: Synthetic oligonucleotide
  Sense strand starting at position 1152 of SEQ ID NO: 1883060
uagagaaagucuuuagcau

SEQ ID NO: 2166727 - RNA, 19 nt, Artificial Sequence
  Description of Artificial Sequence: Synthetic oligonucleotide
  Antisense strand to SEQ ID NO: 2166726
augcuaaagacuuucucua

SEQ ID NO: 2166728 - RNA, 19 nt, Artificial Sequence
  Description of Artificial Sequence: Synthetic oligonucleotide
  Sense strand starting at position 1153 of SEQ ID NO: 1883060
agagaaagucuuuagcauu

SEQ ID NO: 2166729 - RNA, 19 nt, Artificial Sequence
  Description of Artificial Sequence: Synthetic oligonucleotide
  Antisense strand to SEQ ID NO: 2166728
aaugcuaaagacuuucucu

SEQ ID NO: 2166730 - RNA, 19 nt, Artificial Sequence
  Description of Artificial Sequence: Synthetic oligonucleotide
  Sense strand starting at position 1199 of SEQ ID NO: 1883060
uuagguaauguugaguauu

SEQ ID NO: 2166731 - RNA, 19 nt, Artificial Sequence
  Description of Artificial Sequence: Synthetic oligonucleotide
  Antisense strand to SEQ ID NO: 2166730
aauacucaacauuaccuaa

SEQ ID NO: 2166732 - RNA, 19 nt, Artificial Sequence
  Description of Artificial Sequence: Synthetic oligonucleotide
  Sense strand starting at position 1202 of SEQ ID NO: 1883060
gguaauguugaguauuaua

SEQ ID NO: 2166733 - RNA, 19 nt, Artificial Sequence
  Description of Artificial Sequence: Synthetic oligonucleotide
  Antisense strand to SEQ ID NO: 2166732
uauaauacucaacauuacc

SEQ ID NO: 2166734 - RNA, 19 nt, Artificial Sequence
  Description of Artificial Sequence: Synthetic oligonucleotide
  Sense strand starting at position 1643 of SEQ ID NO: 1883060
gggaaauauggauguggug

SEQ ID NO: 2166735 - RNA, 19 nt, Artificial Sequence
  Description of Artificial Sequence: Synthetic oligonucleotide
  Antisense strand to SEQ ID NO: 2166734
caccacauccauauuuccc

SEQ ID NO: 2166736 - RNA, 19 nt, Artificial Sequence
  Description of Artificial Sequence: Synthetic oligonucleotide
  Sense strand starting at position 1645 of SEQ ID NO: 1883060
gaaauauggauguggugaa

SEQ ID NO: 2166737 - RNA, 19 nt, Artificial Sequence
  Description of Artificial Sequence: Synthetic oligonucleotide
  Antisense strand to SEQ ID NO: 2166736
uucaccacauccauauuuc

SEQ ID NO: 2166738 - RNA, 19 nt, Artificial Sequence
  Description of Artificial Sequence: Synthetic oligonucleotide
  Sense strand starting at position 1700 of SEQ ID NO: 1883060
cagaccugugacuaguuua

SEQ ID NO: 2166739 - RNA, 19 nt, Artificial Sequence
  Description of Artificial Sequence: Synthetic oligonucleotide
  Antisense strand to SEQ ID NO: 2166738
uaaacuagucacaggucug

SEQ ID NO: 2166740 - RNA, 19 nt, Artificial Sequence
  Description of Artificial Sequence: Synthetic oligonucleotide
  Sense strand starting at position 1730 of SEQ ID NO: 1883060
auuaguuuccuggaacugu

SEQ ID NO: 2166741 - RNA, 19 nt, Artificial Sequence
  Description of Artificial Sequence: Synthetic oligonucleotide
  Antisense strand to SEQ ID NO: 2166740
acaguuccaggaaacuaau

SEQ ID NO: 2166742 - RNA, 19 nt, Artificial Sequence
  Description of Artificial Sequence: Synthetic oligonucleotide
  Sense strand starting at position 2066 of SEQ ID NO: 1883060
auuguuucugcagaaacac

SEQ ID NO: 2166743 - RNA, 19 nt, Artificial Sequence
  Description of Artificial Sequence: Synthetic oligonucleotide
  Antisense strand to SEQ ID NO: 2166742
guguuucugcagaaacaau

SEQ ID NO: 2166744 - RNA, 19 nt, Artificial Sequence
  Description of Artificial Sequence: Synthetic oligonucleotide
  Sense strand starting at position 2121 of SEQ ID NO: 1883060
uuaggaucucaacaugucu

SEQ ID NO: 2166745 - RNA, 19 nt, Artificial Sequence
  Description of Artificial Sequence: Synthetic oligonucleotide
  Antisense strand to SEQ ID NO: 2166744
agacauguugagauccuaa

SEQ ID NO: 2166746 - RNA, 19 nt, Artificial Sequence
  Description of Artificial Sequence: Synthetic oligonucleotide
  Sense strand starting at position 2163 of SEQ ID NO: 1883060
acaauagcaggucauauau

SEQ ID NO: 2166747 - RNA, 19 nt, Artificial Sequence
  Description of Artificial Sequence: Synthetic oligonucleotide
  Antisense strand to SEQ ID NO: 2166746
auauaugaccugcuauugu

SEQ ID NO: 2166748 - RNA, 19 nt, Artificial Sequence
  Description of Artificial Sequence: Synthetic oligonucleotide
  Sense strand starting at position 2381 of SEQ ID NO: 1883060
ccuuguguccuuucugcau

SEQ ID NO: 2166749 - RNA, 19 nt, Artificial Sequence
  Description of Artificial Sequence: Synthetic oligonucleotide
  Antisense strand to SEQ ID NO: 2166748
augcagaaaggacacaagg

SEQ ID NO: 2166750 - RNA, 19 nt, Artificial Sequence
  Description of Artificial Sequence: Synthetic oligonucleotide
  Sense strand starting at position 2416 of SEQ ID NO: 1883060
aggauucccagcugagaac

SEQ ID NO: 2166751 - RNA, 19 nt, Artificial Sequence
  Description of Artificial Sequence: Synthetic oligonucleotide
  Antisense strand to SEQ ID NO: 2166750
guucucagcugggaauccu

SEQ ID NO: 2166752 - RNA, 19 nt, Artificial Sequence
  Description of Artificial Sequence: Synthetic oligonucleotide
  Sense strand starting at position 2565 of SEQ ID NO: 1883060
aguaauuuaugcucauugu

SEQ ID NO: 2166753 - RNA, 19 nt, Artificial Sequence
  Description of Artificial Sequence: Synthetic oligonucleotide
  Antisense strand to SEQ ID NO: 2166752
acaaugagcauaaauuacu

SEQ ID NO: 2166754 - RNA, 19 nt, Artificial Sequence
  Description of Artificial Sequence: Synthetic oligonucleotide
  Sense strand starting at position 2642 of SEQ ID NO: 1883060
acuguaaaggcauauguga

SEQ ID NO: 2166755 - RNA, 19 nt, Artificial Sequence
  Description of Artificial Sequence: Synthetic oligonucleotide
  Antisense strand to SEQ ID NO: 2166754
ucacauaugccuuuacagu

SEQ ID NO: 2166756 - RNA, 19 nt, Artificial Sequence
  Description of Artificial Sequence: Synthetic oligonucleotide
  Sense strand starting at position 2649 of SEQ ID NO: 1883060
aggcauaugugacugaaga

SEQ ID NO: 2166757 - RNA, 19 nt, Artificial Sequence
  Description of Artificial Sequence: Synthetic oligonucleotide
  Antisense strand to SEQ ID NO: 2166756
ucuucagucacauaugccu

SEQ ID NO: 2166758 - RNA, 19 nt, Artificial Sequence
  Description of Artificial Sequence: Synthetic oligonucleotide
  Sense strand starting at position 2650 of SEQ ID NO: 1883060
ggcauaugugacugaagac

SEQ ID NO: 2166759 - RNA, 19 nt, Artificial Sequence
  Description of Artificial Sequence: Synthetic oligonucleotide
  Antisense strand to SEQ ID NO: 2166758
gucuucagucacauaugcc

SEQ ID NO: 2166760 - RNA, 19 nt, Artificial Sequence
  Description of Artificial Sequence: Synthetic oligonucleotide
  Sense strand starting at position 2651 of SEQ ID NO: 1883060
gcauaugugacugaagacu

SEQ ID NO: 2166761 - RNA, 19 nt, Artificial Sequence
  Description of Artificial Sequence: Synthetic oligonucleotide
  Antisense strand to SEQ ID NO: 2166760
agucuucagucacauaugc

SEQ ID NO: 2166762 - RNA, 19 nt, Artificial Sequence
  Description of Artificial Sequence: Synthetic oligonucleotide
  Sense strand starting at position 2815 of SEQ ID NO: 1883060
ucauacagggcuuauugau

SEQ ID NO: 2166763 - RNA, 19 nt, Artificial Sequence
  Description of Artificial Sequence: Synthetic oligonucleotide
  Antisense strand to SEQ ID NO: 2166762
aucaauaagcccuguauga

SEQ ID NO: 2166764 - RNA, 19 nt, Artificial Sequence
  Description of Artificial Sequence: Synthetic oligonucleotide
  Sense strand starting at position 2822 of SEQ ID NO: 1883060
gggcuuauugaucacagua

SEQ ID NO: 2166765 - RNA, 19 nt, Artificial Sequence
  Description of Artificial Sequence: Synthetic oligonucleotide
  Antisense strand to SEQ ID NO: 2166764
uacugugaucaauaagccc

SEQ ID NO: 2166766 - RNA, 19 nt, Artificial Sequence
  Description of Artificial Sequence: Synthetic oligonucleotide
  Sense strand starting at position 2898 of SEQ ID NO: 1883060
gagugacaugaccagucuu

SEQ ID NO: 2166767 - RNA, 19 nt, Artificial Sequence
  Description of Artificial Sequence: Synthetic oligonucleotide
  Antisense strand to SEQ ID NO: 2166766
aagacuggucaugucacuc

SEQ ID NO: 2166768 - RNA, 19 nt, Artificial Sequence
  Description of Artificial Sequence: Synthetic oligonucleotide
  Sense strand starting at position 3034 of SEQ ID NO: 1883060
gugugaagugaucagauuc

SEQ ID NO: 2166769 - RNA, 19 nt, Artificial Sequence
  Description of Artificial Sequence: Synthetic oligonucleotide
  Antisense strand to SEQ ID NO: 2166768
gaaucugaucacuucacac

SEQ ID NO: 2166770 - RNA, 19 nt, Artificial Sequence
  Description of Artificial Sequence: Synthetic oligonucleotide
  Sense strand starting at position 3118 of SEQ ID NO: 1883060
aagagaagucagggcugau

SEQ ID NO: 2166771 - RNA, 19 nt, Artificial Sequence
  Description of Artificial Sequence: Synthetic oligonucleotide
  Antisense strand to SEQ ID NO: 2166770
aucagcccugacuucucuu

SEQ ID NO: 2166772 - RNA, 19 nt, Artificial Sequence
  Description of Artificial Sequence: Synthetic oligonucleotide
  Sense strand starting at position 3122 of SEQ ID NO: 1883060
gaagucagggcugauucua

SEQ ID NO: 2166773 - RNA, 19 nt, Artificial Sequence
  Description of Artificial Sequence: Synthetic oligonucleotide
  Antisense strand to SEQ ID NO: 2166772
uagaaucagcccugacuuc

SEQ ID NO: 2166774 - RNA, 19 nt, Artificial Sequence
  Description of Artificial Sequence: Synthetic oligonucleotide
  Sense strand starting at position 3432 of SEQ ID NO: 1883060
acagucuuugcagaauaca

SEQ ID NO: 2166775 - RNA, 19 nt, Artificial Sequence
  Description of Artificial Sequence: Synthetic oligonucleotide
  Antisense strand to SEQ ID NO: 2166774
uguauucugcaaagacugu

SEQ ID NO: 2166776 - RNA, 19 nt, Artificial Sequence
  Description of Artificial Sequence: Synthetic oligonucleotide
  Sense strand starting at position 3435 of SEQ ID NO: 1883060
gucuuugcagaauacagaa

SEQ ID NO: 2166777 - RNA, 19 nt, Artificial Sequence
  Description of Artificial Sequence: Synthetic oligonucleotide
  Antisense strand to SEQ ID NO: 2166776
uucuguauucugcaaagac

SEQ ID NO: 2166778 - RNA, 19 nt, Artificial Sequence
  Description of Artificial Sequence: Synthetic oligonucleotide
  Sense strand starting at position 3458 of SEQ ID NO: 1883060
gugucuuguguguuuaauu

SEQ ID NO: 2166779 - RNA, 19 nt, Artificial Sequence
  Description of Artificial Sequence: Synthetic oligonucleotide
  Antisense strand to SEQ ID NO: 2166778
aauuaaacacacaagacac

SEQ ID NO: 2166780 - RNA, 19 nt, Artificial Sequence
  Description of Artificial Sequence: Synthetic oligonucleotide
  Sense strand starting at position 3602 of SEQ ID NO: 1883060
uuguguucuuacucuauuu

SEQ ID NO: 2166781 - RNA, 19 nt, Artificial Sequence
  Description of Artificial Sequence: Synthetic oligonucleotide
  Antisense strand to SEQ ID NO: 2166780
aaauagaguaagaacacaa

SEQ ID NO: 2166782 - RNA, 19 nt, Artificial Sequence
  Description of Artificial Sequence: Synthetic oligonucleotide
  Sense strand starting at position 3641 of SEQ ID NO: 1883060
gaaggaacuccagguuucu

SEQ ID NO: 2166783 - RNA, 19 nt, Artificial Sequence
  Description of Artificial Sequence: Synthetic oligonucleotide
  Antisense strand to SEQ ID NO: 2166782
agaaaccuggaguuccuuc

SEQ ID NO: 2166784 - RNA, 19 nt, Artificial Sequence
  Description of Artificial Sequence: Synthetic oligonucleotide
  Sense strand starting at position 3700 of SEQ ID NO: 1883060
cuuguagacaugugagaaa

SEQ ID NO: 2166785 - RNA, 19 nt, Artificial Sequence
  Description of Artificial Sequence: Synthetic oligonucleotide
  Antisense strand to SEQ ID NO: 2166784
uuucucacaugucuacaag

SEQ ID NO: 2166786 - RNA, 19 nt, Artificial Sequence
  Description of Artificial Sequence: Synthetic oligonucleotide
  Sense strand starting at position 3811 of SEQ ID NO: 1883060
cgagcaauaccugacuaug

SEQ ID NO: 2166787 - RNA, 19 nt, Artificial Sequence
  Description of Artificial Sequence: Synthetic oligonucleotide
  Antisense strand to SEQ ID NO: 2166786
cauagucagguauugcucg

SEQ ID NO: 2166788 - RNA, 19 nt, Artificial Sequence
  Description of Artificial Sequence: Synthetic oligonucleotide
  Sense strand starting at position 3862 of SEQ ID NO: 1883060
gcacgucuauauuuaauau

SEQ ID NO: 2166789 - RNA, 19 nt, Artificial Sequence
  Description of Artificial Sequence: Synthetic oligonucleotide
  Antisense strand to SEQ ID NO: 2166788
auauuaaauauagacgugc

SEQ ID NO: 2166790 - RNA, 19 nt, Artificial Sequence
  Description of Artificial Sequence: Synthetic oligonucleotide
  Sense strand starting at position 57 of SEQ ID NO: 1883059
cccauaagagcauguaaua

SEQ ID NO: 2166791 - RNA, 19 nt, Artificial Sequence
  Description of Artificial Sequence: Synthetic oligonucleotide
  Antisense strand to SEQ ID NO: 2166790
uauuacaugcucuuauggg

SEQ ID NO: 2166792 - RNA, 19 nt, Artificial Sequence
  Description of Artificial Sequence: Synthetic oligonucleotide
  Sense strand starting at position 101 of SEQ ID NO: 1883059
gcaagaacugagcaaucca

SEQ ID NO: 2166793 - RNA, 19 nt, Artificial Sequence
  Description of Artificial Sequence: Synthetic oligonucleotide
  Antisense strand to SEQ ID NO: 2166792
uggauugcucaguucuugc

SEQ ID NO: 2166794 - RNA, 19 nt, Artificial Sequence
  Description of Artificial Sequence: Synthetic oligonucleotide
  Sense strand starting at position 443 of SEQ ID NO: 1883059
ccuagagcuccuugaggau

SEQ ID NO: 2166795 - RNA, 19 nt, Artificial Sequence
  Description of Artificial Sequence: Synthetic oligonucleotide
  Antisense strand to SEQ ID NO: 2166794
auccucaaggagcucuagg

SEQ ID NO: 2166796 - RNA, 19 nt, Artificial Sequence
  Description of Artificial Sequence: Synthetic oligonucleotide
  Sense strand starting at position 519 of SEQ ID NO: 1883059
ccacacguugaauaugaau

SEQ ID NO: 2166797 - RNA, 19 nt, Artificial Sequence
  Description of Artificial Sequence: Synthetic oligonucleotide
  Antisense strand to SEQ ID NO: 2166796
auucauauucaacgugugg

SEQ ID NO: 2166798 - RNA, 19 nt, Artificial Sequence
  Description of Artificial Sequence: Synthetic oligonucleotide
  Sense strand starting at position 536 of SEQ ID NO: 1883059
auaucuauugaauggccaa

SEQ ID NO: 2166799 - RNA, 19 nt, Artificial Sequence
  Description of Artificial Sequence: Synthetic oligonucleotide
  Antisense strand to SEQ ID NO: 2166798
uuggccauucaauagauau

SEQ ID NO: 2166800 - RNA, 19 nt, Artificial Sequence
  Description of Artificial Sequence: Synthetic oligonucleotide
  Sense strand starting at position 720 of SEQ ID NO: 1883059
aaaccugugcgggauuacu

SEQ ID NO: 2166801 - RNA, 19 nt, Artificial Sequence
  Description of Artificial Sequence: Synthetic oligonucleotide
  Antisense strand to SEQ ID NO: 2166800
aguaaucccgcacagguuu

SEQ ID NO: 2166802 - RNA, 19 nt, Artificial Sequence
  Description of Artificial Sequence: Synthetic oligonucleotide
  Sense strand starting at position 1154 of SEQ ID NO: 1883059
gacuuagaguuaccaguca

SEQ ID NO: 2166803 - RNA, 19 nt, Artificial Sequence
  Description of Artificial Sequence: Synthetic oligonucleotide
  Antisense strand to SEQ ID NO: 2166802
ugacugguaacucuaaguc

SEQ ID NO: 2166804 - RNA, 19 nt, Artificial Sequence
  Description of Artificial Sequence: Synthetic oligonucleotide
  Sense strand starting at position 1207 of SEQ ID NO: 1883059
ggugaagucaaguauguaa

SEQ ID NO: 2166805 - RNA, 19 nt, Artificial Sequence
  Description of Artificial Sequence: Synthetic oligonucleotide
  Antisense strand to SEQ ID NO: 2166804
uuacauacuugacuucacc

SEQ ID NO: 2166806 - RNA, 19 nt, Artificial Sequence
  Description of Artificial Sequence: Synthetic oligonucleotide
  Sense strand starting at position 1235 of SEQ ID NO: 1883059
gaaagauuccguugugaaa

SEQ ID NO: 2166807 - RNA, 19 nt, Artificial Sequence
  Description of Artificial Sequence: Synthetic oligonucleotide
  Antisense strand to SEQ ID NO: 2166806
uuucacaacggaaucuuuc

SEQ ID NO: 2166808 - RNA, 19 nt, Artificial Sequence
  Description of Artificial Sequence: Synthetic oligonucleotide
  Sense strand starting at position 1323 of SEQ ID NO: 1883059
ucuacauagccauagucuu

SEQ ID NO: 2166809 - RNA, 19 nt, Artificial Sequence
  Description of Artificial Sequence: Synthetic oligonucleotide
  Antisense strand to SEQ ID NO: 2166808
aagacuauggcuauguaga

SEQ ID NO: 2166810 - RNA, 19 nt, Artificial Sequence
  Description of Artificial Sequence: Synthetic oligonucleotide
  Sense strand starting at position 1359 of SEQ ID NO: 1883059
uaaguauaucugggaccau

SEQ ID NO: 2166811 - RNA, 19 nt, Artificial Sequence
  Description of Artificial Sequence: Synthetic oligonucleotide
  Antisense strand to SEQ ID NO: 2166810
auggucccagauauacuua

SEQ ID NO: 2166812 - RNA, 19 nt, Artificial Sequence
  Description of Artificial Sequence: Synthetic oligonucleotide
  Sense strand starting at position 1547 of SEQ ID NO: 1883059
ucuuaugaagguuauuauc

SEQ ID NO: 2166813 - RNA, 19 nt, Artificial Sequence
  Description of Artificial Sequence: Synthetic oligonucleotide
  Antisense strand to SEQ ID NO: 2166812
gauaauaaccuucauaaga

SEQ ID NO: 2166814 - RNA, 19 nt, Artificial Sequence
  Description of Artificial Sequence: Synthetic oligonucleotide
  Sense strand starting at position 1573 of SEQ ID NO: 1883059
cugggaaaugguuguuaua

SEQ ID NO: 2166815 - RNA, 19 nt, Artificial Sequence
  Description of Artificial Sequence: Synthetic oligonucleotide
  Antisense strand to SEQ ID NO: 2166814
uauaacaaccauuucccag

SEQ ID NO: 2166816 - RNA, 19 nt, Artificial Sequence
  Description of Artificial Sequence: Synthetic oligonucleotide
  Sense strand starting at position 1575 of SEQ ID NO: 1883059
gggaaaugguuguuauaac

SEQ ID NO: 2166817 - RNA, 19 nt, Artificial Sequence
  Description of Artificial Sequence: Synthetic oligonucleotide
  Antisense strand to SEQ ID NO: 2166816
guuauaacaaccauuuccc

SEQ ID NO: 2166818 - RNA, 19 nt, Artificial Sequence
  Description of Artificial Sequence: Synthetic oligonucleotide
  Sense strand starting at position 1616 of SEQ ID NO: 1883059
cuuguagucauuuagcguu

SEQ ID NO: 2166819 - RNA, 19 nt, Artificial Sequence
  Description of Artificial Sequence: Synthetic oligonucleotide
  Antisense strand to SEQ ID NO: 2166818
aacgcuaaaugacuacaag

SEQ ID NO: 2166820 - RNA, 19 nt, Artificial Sequence
  Description of Artificial Sequence: Synthetic oligonucleotide
  Sense strand starting at position 1630 of SEQ ID NO: 1883059
gcguuuaucaaacauugag

SEQ ID NO: 2166821 - RNA, 19 nt, Artificial Sequence
  Description of Artificial Sequence: Synthetic oligonucleotide
  Antisense strand to SEQ ID NO: 2166820
cucaauguuugauaaacgc

SEQ ID NO: 2166822 - RNA, 19 nt, Artificial Sequence
  Description of Artificial Sequence: Synthetic oligonucleotide
  Sense strand starting at position 2006 of SEQ ID NO: 1883059
gggaacagaucgucugaga

SEQ ID NO: 2166823 - RNA, 19 nt, Artificial Sequence
  Description of Artificial Sequence: Synthetic oligonucleotide
  Antisense strand to SEQ ID NO: 2166822
ucucagacgaucuguuccc

SEQ ID NO: 2166824 - RNA, 19 nt, Artificial Sequence
  Description of Artificial Sequence: Synthetic oligonucleotide
  Sense strand starting at position 2032 of SEQ ID NO: 1883059
ccacuuguccuugaggguu

SEQ ID NO: 2166825 - RNA, 19 nt, Artificial Sequence
  Description of Artificial Sequence: Synthetic oligonucleotide
  Antisense strand to SEQ ID NO: 2166824
aacccucaaggacaagugg

SEQ ID NO: 2166826 - RNA, 19 nt, Artificial Sequence
  Description of Artificial Sequence: Synthetic oligonucleotide
  Sense strand starting at position 2038 of SEQ ID NO: 1883059
guccuugaggguuauuaag

SEQ ID NO: 2166827 - RNA, 19 nt, Artificial Sequence
  Description of Artificial Sequence: Synthetic oligonucleotide
  Antisense strand to SEQ ID NO: 2166826
cuuaauaacccucaaggac

SEQ ID NO: 2166828 - RNA, 19 nt, Artificial Sequence
  Description of Artificial Sequence: Synthetic oligonucleotide
  Sense strand starting at position 2040 of SEQ ID NO: 1883059
ccuugaggguuauuaaggu

SEQ ID NO: 2166829 - RNA, 19 nt, Artificial Sequence
  Description of Artificial Sequence: Synthetic oligonucleotide
  Antisense strand to SEQ ID NO: 2166828
accuuaauaacccucaagg

SEQ ID NO: 2166830 - RNA, 19 nt, Artificial Sequence
  Description of Artificial Sequence: Synthetic oligonucleotide
  Sense strand starting at position 2149 of SEQ ID NO: 1883059
gacugaacacugcauuguu

SEQ ID NO: 2166831 - RNA, 19 nt, Artificial Sequence
  Description of Artificial Sequence: Synthetic oligonucleotide
  Antisense strand to SEQ ID NO: 2166830
aacaaugcaguguucaguc

SEQ ID NO: 2166832 - RNA, 19 nt, Artificial Sequence
  Description of Artificial Sequence: Synthetic oligonucleotide
  Sense strand starting at position 2178 of SEQ ID NO: 1883059
caguuugcgccaguauagu

SEQ ID NO: 2166833 - RNA, 19 nt, Artificial Sequence
  Description of Artificial Sequence: Synthetic oligonucleotide
  Antisense strand to SEQ ID NO: 2166832
acuauacuggcgcaaacug

SEQ ID NO: 2166834 - RNA, 19 nt, Artificial Sequence
  Description of Artificial Sequence: Synthetic oligonucleotide
  Sense strand starting at position 2269 of SEQ ID NO: 1883059
gaaacaguguaccuguaaa

SEQ ID NO: 2166835 - RNA, 19 nt, Artificial Sequence
  Description of Artificial Sequence: Synthetic oligonucleotide
  Antisense strand to SEQ ID NO: 2166834
uuuacagguacacuguuuc

SEQ ID NO: 2166836 - RNA, 19 nt, Artificial Sequence
  Description of Artificial Sequence: Synthetic oligonucleotide
  Sense strand starting at position 2342 of SEQ ID NO: 1883059
gguuucuugccauaggaau

SEQ ID NO: 2166837 - RNA, 19 nt, Artificial Sequence
  Description of Artificial Sequence: Synthetic oligonucleotide
  Antisense strand to SEQ ID NO: 2166836
auuccuauggcaagaaacc

SEQ ID NO: 2166838 - RNA, 19 nt, Artificial Sequence
  Description of Artificial Sequence: Synthetic oligonucleotide
  Sense strand starting at position 2350 of SEQ ID NO: 1883059
gccauaggaaugggucuaa

SEQ ID NO: 2166839 - RNA, 19 nt, Artificial Sequence
  Description of Artificial Sequence: Synthetic oligonucleotide
  Antisense strand to SEQ ID NO: 2166838
uuagacccauuccuauggc

SEQ ID NO: 2166840 - RNA, 19 nt, Artificial Sequence
  Description of Artificial Sequence: Synthetic oligonucleotide
  Sense strand starting at position 2539 of SEQ ID NO: 1883059
uuuaauccuugaucgaacu

SEQ ID NO: 2166841 - RNA, 19 nt, Artificial Sequence
  Description of Artificial Sequence: Synthetic oligonucleotide
  Antisense strand to SEQ ID NO: 2166840
aguucgaucaaggauuaaa

SEQ ID NO: 2166842 - RNA, 19 nt, Artificial Sequence
  Description of Artificial Sequence: Synthetic oligonucleotide
  Sense strand starting at position 2634 of SEQ ID NO: 1883059
aaccacuuacugggugaaa

SEQ ID NO: 2166843 - RNA, 19 nt, Artificial Sequence
  Description of Artificial Sequence: Synthetic oligonucleotide
  Antisense strand to SEQ ID NO: 2166842
uuucacccaguaagugguu

SEQ ID NO: 2166844 - RNA, 19 nt, Artificial Sequence
  Description of Artificial Sequence: Synthetic oligonucleotide
  Sense strand starting at position 2635 of SEQ ID NO: 1883059
accacuuacugggugaaau

SEQ ID NO: 2166845 - RNA, 19 nt, Artificial Sequence
  Description of Artificial Sequence: Synthetic oligonucleotide
  Antisense strand to SEQ ID NO: 2166844
auuucacccaguaaguggu

SEQ ID NO: 2166846 - RNA, 19 nt, Artificial Sequence
  Description of Artificial Sequence: Synthetic oligonucleotide
  Sense strand starting at position 2636 of SEQ ID NO: 1883059
ccacuuacugggugaaaug

SEQ ID NO: 2166847 - RNA, 19 nt, Artificial Sequence
  Description of Artificial Sequence: Synthetic oligonucleotide
  Antisense strand to SEQ ID NO: 2166846
cauuucacccaguaagugg

SEQ ID NO: 2166848 - RNA, 19 nt, Artificial Sequence
  Description of Artificial Sequence: Synthetic oligonucleotide
  Sense strand starting at position 2866 of SEQ ID NO: 1883059
auuagccagcauuaucaga

SEQ ID NO: 2166849 - RNA, 19 nt, Artificial Sequence
  Description of Artificial Sequence: Synthetic oligonucleotide
  Antisense strand to SEQ ID NO: 2166848
ucugauaaugcuggcuaau

SEQ ID NO: 2166850 - RNA, 19 nt, Artificial Sequence
  Description of Artificial Sequence: Synthetic oligonucleotide
  Sense strand starting at position 2879 of SEQ ID NO: 1883059
aucagaugucaauguugau

SEQ ID NO: 2166851 - RNA, 19 nt, Artificial Sequence
  Description of Artificial Sequence: Synthetic oligonucleotide
  Antisense strand to SEQ ID NO: 2166850
aucaacauugacaucugau

SEQ ID NO: 2166852 - RNA, 19 nt, Artificial Sequence
  Description of Artificial Sequence: Synthetic oligonucleotide
  Sense strand starting at position 2914 of SEQ ID NO: 1883059
uauuauguuggugauggua

SEQ ID NO: 2166853 - RNA, 19 nt, Artificial Sequence
  Description of Artificial Sequence: Synthetic oligonucleotide
  Antisense strand to SEQ ID NO: 2166852
uaccaucaccaacauaaua

SEQ ID NO: 2166854 - RNA, 19 nt, Artificial Sequence
  Description of Artificial Sequence: Synthetic oligonucleotide
  Sense strand starting at position 3583 of SEQ ID NO: 1883059
gaucguuggagucacuuua

SEQ ID NO: 2166855 - RNA, 19 nt, Artificial Sequence
  Description of Artificial Sequence: Synthetic oligonucleotide
  Antisense strand to SEQ ID NO: 2166854
uaaagugacuccaacgauc

SEQ ID NO: 2166856 - RNA, 19 nt, Artificial Sequence
  Description of Artificial Sequence: Synthetic oligonucleotide
  Sense strand starting at position 3654 of SEQ ID NO: 1883059
cugugcaaucuggaaaucu

SEQ ID NO: 2166857 - RNA, 19 nt, Artificial Sequence
  Description of Artificial Sequence: Synthetic oligonucleotide
  Antisense strand to SEQ ID NO: 2166856
agauuuccagauugcacag

SEQ ID NO: 2166858 - RNA, 19 nt, Artificial Sequence
  Description of Artificial Sequence: Synthetic oligonucleotide
  Sense strand starting at position 3663 of SEQ ID NO: 1883059
cuggaaaucuguuugaaau

SEQ ID NO: 2166859 - RNA, 19 nt, Artificial Sequence
  Description of Artificial Sequence: Synthetic oligonucleotide
  Antisense strand to SEQ ID NO: 2166858
auuucaaacagauuuccag

SEQ ID NO: 2166860 - RNA, 19 nt, Artificial Sequence
  Description of Artificial Sequence: Synthetic oligonucleotide
  Sense strand starting at position 3664 of SEQ ID NO: 1883059
uggaaaucuguuugaaauu

SEQ ID NO: 2166861 - RNA, 19 nt, Artificial Sequence
  Description of Artificial Sequence: Synthetic oligonucleotide
  Antisense strand to SEQ ID NO: 2166860
aauuucaaacagauuucca

SEQ ID NO: 2166862 - RNA, 19 nt, Artificial Sequence
  Description of Artificial Sequence: Synthetic oligonucleotide
  Sense strand starting at position 3676 of SEQ ID NO: 1883059
ugaaauuagcaggagugua

SEQ ID NO: 2166863 - RNA, 19 nt, Artificial Sequence
  Description of Artificial Sequence: Synthetic oligonucleotide
  Antisense strand to SEQ ID NO: 2166862
uacacuccugcuaauuuca

SEQ ID NO: 2166864 - RNA, 19 nt, Artificial Sequence
  Description of Artificial Sequence: Synthetic oligonucleotide
  Sense strand starting at position 3681 of SEQ ID NO: 1883059
uuagcaggaguguaaacua

SEQ ID NO: 2166865 - RNA, 19 nt, Artificial Sequence
  Description of Artificial Sequence: Synthetic oligonucleotide
  Antisense strand to SEQ ID NO: 2166864
uaguuuacacuccugcuaa

SEQ ID NO: 2166866 - RNA, 19 nt, Artificial Sequence
  Description of Artificial Sequence: Synthetic oligonucleotide
  Sense strand starting at position 3732 of SEQ ID NO: 1883059
uccuuugguaaaugaggaa

SEQ ID NO: 2166867 - RNA, 19 nt, Artificial Sequence
  Description of Artificial Sequence: Synthetic oligonucleotide
  Antisense strand to SEQ ID NO: 2166866
uuccucauuuaccaaagga

SEQ ID NO: 2166868 - RNA, 19 nt, Artificial Sequence
  Description of Artificial Sequence: Synthetic oligonucleotide
  Sense strand starting at position 3958 of SEQ ID NO: 1883059
agacuaacuuaucucguaa

SEQ ID NO: 2166869 - RNA, 19 nt, Artificial Sequence
  Description of Artificial Sequence: Synthetic oligonucleotide
  Antisense strand to SEQ ID NO: 2166868
uuacgagauaaguuagucu

SEQ ID NO: 2166870 - RNA, 19 nt, Artificial Sequence
  Description of Artificial Sequence: Synthetic oligonucleotide
  Sense strand starting at position 11 of SEQ ID NO: 1883061
gaggaacucccuggugcua

SEQ ID NO: 2166871 - RNA, 19 nt, Artificial Sequence
  Description of Artificial Sequence: Synthetic oligonucleotide
  Antisense strand to SEQ ID NO: 2166870
uagcaccagggaguuccuc

SEQ ID NO: 2166872 - RNA, 19 nt, Artificial Sequence
  Description of Artificial Sequence: Synthetic oligonucleotide
  Sense strand starting at position 77 of SEQ ID NO: 1883061
ggugaucacuaaucuguuc

SEQ ID NO: 2166873 - RNA, 19 nt, Artificial Sequence
  Description of Artificial Sequence: Synthetic oligonucleotide
  Antisense strand to SEQ ID NO: 2166872
gaacagauuagugaucacc

SEQ ID NO: 2166874 - RNA, 19 nt, Artificial Sequence
  Description of Artificial Sequence: Synthetic oligonucleotide
  Sense strand starting at position 100 of SEQ ID NO: 1883061
caguucugucugccugcua

SEQ ID NO: 2166875 - RNA, 19 nt, Artificial Sequence
  Description of Artificial Sequence: Synthetic oligonucleotide
  Antisense strand to SEQ ID NO: 2166874
uagcaggcagacagaacug

SEQ ID NO: 2166876 - RNA, 19 nt, Artificial Sequence
  Description of Artificial Sequence: Synthetic oligonucleotide
  Sense strand starting at position 171 of SEQ ID NO: 1883061
aguagcuaccaguagugau

SEQ ID NO: 2166877 - RNA, 19 nt, Artificial Sequence
  Description of Artificial Sequence: Synthetic oligonucleotide
  Antisense strand to SEQ ID NO: 2166876
aucacuacugguagcuacu

SEQ ID NO: 2166878 - RNA, 19 nt, Artificial Sequence
  Description of Artificial Sequence: Synthetic oligonucleotide
  Sense strand starting at position 175 of SEQ ID NO: 1883061
gcuaccaguagugauugaa

SEQ ID NO: 2166879 - RNA, 19 nt, Artificial Sequence
  Description of Artificial Sequence: Synthetic oligonucleotide
  Antisense strand to SEQ ID NO: 2166878
uucaaucacuacugguagc

SEQ ID NO: 2166880 - RNA, 19 nt, Artificial Sequence
  Description of Artificial Sequence: Synthetic oligonucleotide
  Sense strand starting at position 178 of SEQ ID NO: 1883061
accaguagugauugaaaug

SEQ ID NO: 2166881 - RNA, 19 nt, Artificial Sequence
  Description of Artificial Sequence: Synthetic oligonucleotide
  Antisense strand to SEQ ID NO: 2166880
cauuucaaucacuacuggu

SEQ ID NO: 2166882 - RNA, 19 nt, Artificial Sequence
  Description of Artificial Sequence: Synthetic oligonucleotide
  Sense strand starting at position 187 of SEQ ID NO: 1883061
gauugaaaugguggcaaua

SEQ ID NO: 2166883 - RNA, 19 nt, Artificial Sequence
  Description of Artificial Sequence: Synthetic oligonucleotide
  Antisense strand to SEQ ID NO: 2166882
uauugccaccauuucaauc

SEQ ID NO: 2166884 - RNA, 19 nt, Artificial Sequence
  Description of Artificial Sequence: Synthetic oligonucleotide
  Sense strand starting at position 348 of SEQ ID NO: 1883061
gcauuuagcuagcuacauu

SEQ ID NO: 2166885 - RNA, 19 nt, Artificial Sequence
  Description of Artificial Sequence: Synthetic oligonucleotide
  Antisense strand to SEQ ID NO: 2166884
aauguagcuagcuaaaugc

SEQ ID NO: 2166886 - RNA, 19 nt, Artificial Sequence
  Description of Artificial Sequence: Synthetic oligonucleotide
  Sense strand starting at position 410 of SEQ ID NO: 1883061
aggaaauaaugagauauca

SEQ ID NO: 2166887 - RNA, 19 nt, Artificial Sequence
  Description of Artificial Sequence: Synthetic oligonucleotide
  Antisense strand to SEQ ID NO: 2166886
ugauaucucauuauuuccu

SEQ ID NO: 2166888 - RNA, 19 nt, Artificial Sequence
  Description of Artificial Sequence: Synthetic oligonucleotide
  Sense strand starting at position 467 of SEQ ID NO: 1883061
aguaaauguuucucacuua

SEQ ID NO: 2166889 - RNA, 19 nt, Artificial Sequence
  Description of Artificial Sequence: Synthetic oligonucleotide
  Antisense strand to SEQ ID NO: 2166888
uaagugagaaacauuuacu

SEQ ID NO: 2166890 - RNA, 19 nt, Artificial Sequence
  Description of Artificial Sequence: Synthetic oligonucleotide
  Sense strand starting at position 474 of SEQ ID NO: 1883061
guuucucacuuagucaaag

SEQ ID NO: 2166891 - RNA, 19 nt, Artificial Sequence
  Description of Artificial Sequence: Synthetic oligonucleotide
  Antisense strand to SEQ ID NO: 2166890
cuuugacuaagugagaaac

SEQ ID NO: 2166892 - RNA, 19 nt, Artificial Sequence
  Description of Artificial Sequence: Synthetic oligonucleotide
  Sense strand starting at position 949 of SEQ ID NO: 1883061
gaagauagaugucuguuua

SEQ ID NO: 2166893 - RNA, 19 nt, Artificial Sequence
  Description of Artificial Sequence: Synthetic oligonucleotide
  Antisense strand to SEQ ID NO: 2166892
uaaacagacaucuaucuuc

SEQ ID NO: 2166894 - RNA, 19 nt, Artificial Sequence
  Description of Artificial Sequence: Synthetic oligonucleotide
  Sense strand starting at position 950 of SEQ ID NO: 1883061
aagauagaugucuguuuaa

SEQ ID NO: 2166895 - RNA, 19 nt, Artificial Sequence
  Description of Artificial Sequence: Synthetic oligonucleotide
  Antisense strand to SEQ ID NO: 2166894
uuaaacagacaucuaucuu

SEQ ID NO: 2166896 - RNA, 19 nt, Artificial Sequence
  Description of Artificial Sequence: Synthetic oligonucleotide
  Sense strand starting at position 953 of SEQ ID NO: 1883061
auagaugucuguuuaacuu

SEQ ID NO: 2166897 - RNA, 19 nt, Artificial Sequence
  Description of Artificial Sequence: Synthetic oligonucleotide
  Antisense strand to SEQ ID NO: 2166896
aaguuaaacagacaucuau

SEQ ID NO: 2166898 - RNA, 19 nt, Artificial Sequence
  Description of Artificial Sequence: Synthetic oligonucleotide
  Sense strand starting at position 960 of SEQ ID NO: 1883061
ucuguuuaacuuuauugga

SEQ ID NO: 2166899 - RNA, 19 nt, Artificial Sequence
  Description of Artificial Sequence: Synthetic oligonucleotide
  Antisense strand to SEQ ID NO: 2166898
uccaauaaaguuaaacaga

SEQ ID NO: 2166900 - RNA, 19 nt, Artificial Sequence
  Description of Artificial Sequence: Synthetic oligonucleotide
  Sense strand starting at position 983 of SEQ ID NO: 1883061
guuagacaguguuccaaag

SEQ ID NO: 2166901 - RNA, 19 nt, Artificial Sequence
  Description of Artificial Sequence: Synthetic oligonucleotide
  Antisense strand to SEQ ID NO: 2166900
cuuuggaacacugucuaac

SEQ ID NO: 2166902 - RNA, 19 nt, Artificial Sequence
  Description of Artificial Sequence: Synthetic oligonucleotide
  Sense strand starting at position 1074 of SEQ ID NO: 1883061
gcaguuauuggcuagaagg

SEQ ID NO: 2166903 - RNA, 19 nt, Artificial Sequence
  Description of Artificial Sequence: Synthetic oligonucleotide
  Antisense strand to SEQ ID NO: 2166902
ccuucuagccaauaacugc

SEQ ID NO: 2166904 - RNA, 19 nt, Artificial Sequence
  Description of Artificial Sequence: Synthetic oligonucleotide
  Sense strand starting at position 1091 of SEQ ID NO: 1883061
gggaguaugaggcaaccuu

SEQ ID NO: 2166905 - RNA, 19 nt, Artificial Sequence
  Description of Artificial Sequence: Synthetic oligonucleotide
  Antisense strand to SEQ ID NO: 2166904
aagguugccucauacuccc

SEQ ID NO: 2166906 - RNA, 19 nt, Artificial Sequence
  Description of Artificial Sequence: Synthetic oligonucleotide
  Sense strand starting at position 1144 of SEQ ID NO: 1883061
agcagucacauggguauau

SEQ ID NO: 2166907 - RNA, 19 nt, Artificial Sequence
  Description of Artificial Sequence: Synthetic oligonucleotide
  Antisense strand to SEQ ID NO: 2166906
auauacccaugugacugcu

SEQ ID NO: 2166908 - RNA, 19 nt, Artificial Sequence
  Description of Artificial Sequence: Synthetic oligonucleotide
  Sense strand starting at position 1145 of SEQ ID NO: 1883061
gcagucacauggguauaua

SEQ ID NO: 2166909 - RNA, 19 nt, Artificial Sequence
  Description of Artificial Sequence: Synthetic oligonucleotide
  Antisense strand to SEQ ID NO: 2166908
uauauacccaugugacugc

SEQ ID NO: 2166910 - RNA, 19 nt, Artificial Sequence
  Description of Artificial Sequence: Synthetic oligonucleotide
  Sense strand starting at position 1447 of SEQ ID NO: 1883061
caagguagucucgaacuca

SEQ ID NO: 2166911 - RNA, 19 nt, Artificial Sequence
  Description of Artificial Sequence: Synthetic oligonucleotide
  Antisense strand to SEQ ID NO: 2166910
ugaguucgagacuaccuug

SEQ ID NO: 2166912 - RNA, 19 nt, Artificial Sequence
  Description of Artificial Sequence: Synthetic oligonucleotide
  Sense strand starting at position 1603 of SEQ ID NO: 1883061
accugaagaugucuuaucu

SEQ ID NO: 2166913 - RNA, 19 nt, Artificial Sequence
  Description of Artificial Sequence: Synthetic oligonucleotide
  Antisense strand to SEQ ID NO: 2166912
agauaagacaucuucaggu

SEQ ID NO: 2166914 - RNA, 19 nt, Artificial Sequence
  Description of Artificial Sequence: Synthetic oligonucleotide
  Sense strand starting at position 1790 of SEQ ID NO: 1883061
uagcaaucuucuguaggau

SEQ ID NO: 2166915 - RNA, 19 nt, Artificial Sequence
  Description of Artificial Sequence: Synthetic oligonucleotide
  Antisense strand to SEQ ID NO: 2166914
auccuacagaagauugcua

SEQ ID NO: 2166916 - RNA, 19 nt, Artificial Sequence
  Description of Artificial Sequence: Synthetic oligonucleotide
  Sense strand starting at position 1791 of SEQ ID NO: 1883061
agcaaucuucuguaggaua

SEQ ID NO: 2166917 - RNA, 19 nt, Artificial Sequence
  Description of Artificial Sequence: Synthetic oligonucleotide
  Antisense strand to SEQ ID NO: 2166916
uauccuacagaagauugcu

SEQ ID NO: 2166918 - RNA, 19 nt, Artificial Sequence
  Description of Artificial Sequence: Synthetic oligonucleotide
  Sense strand starting at position 2048 of SEQ ID NO: 1883061
augauuguguggucaacaa

SEQ ID NO: 2166919 - RNA, 19 nt, Artificial Sequence
  Description of Artificial Sequence: Synthetic oligonucleotide
  Antisense strand to SEQ ID NO: 2166918
uuguugaccacacaaucau

SEQ ID NO: 2166920 - RNA, 19 nt, Artificial Sequence
  Description of Artificial Sequence: Synthetic oligonucleotide
  Sense strand starting at position 2128 of SEQ ID NO: 1883061
uuauguaagccaugaacau

SEQ ID NO: 2166921 - RNA, 19 nt, Artificial Sequence
  Description of Artificial Sequence: Synthetic oligonucleotide
  Antisense strand to SEQ ID NO: 2166920
auguucauggcuuacauaa

SEQ ID NO: 2166922 - RNA, 19 nt, Artificial Sequence
  Description of Artificial Sequence: Synthetic oligonucleotide
  Sense strand starting at position 2389 of SEQ ID NO: 1883061
acugguguuaaucaguuau

SEQ ID NO: 2166923 - RNA, 19 nt, Artificial Sequence
  Description of Artificial Sequence: Synthetic oligonucleotide
  Antisense strand to SEQ ID NO: 2166922
auaacugauuaacaccagu

SEQ ID NO: 2166924 - RNA, 19 nt, Artificial Sequence
  Description of Artificial Sequence: Synthetic oligonucleotide
  Sense strand starting at position 2561 of SEQ ID NO: 1883061
auguguuuccaagaucuga

SEQ ID NO: 2166925 - RNA, 19 nt, Artificial Sequence
  Description of Artificial Sequence: Synthetic oligonucleotide
  Antisense strand to SEQ ID NO: 2166924
ucagaucuuggaaacacau

SEQ ID NO: 2166926 - RNA, 19 nt, Artificial Sequence
  Description of Artificial Sequence: Synthetic oligonucleotide
  Sense strand starting at position 2653 of SEQ ID NO: 1883061
ugcaacagucugcaaugau

SEQ ID NO: 2166927 - RNA, 19 nt, Artificial Sequence
  Description of Artificial Sequence: Synthetic oligonucleotide
  Antisense strand to SEQ ID NO: 2166926
aucauugcagacuguugca

SEQ ID NO: 2166928 - RNA, 19 nt, Artificial Sequence
  Description of Artificial Sequence: Synthetic oligonucleotide
  Sense strand starting at position 2656 of SEQ ID NO: 1883061
aacagucugcaaugauaug

SEQ ID NO: 2166929 - RNA, 19 nt, Artificial Sequence
  Description of Artificial Sequence: Synthetic oligonucleotide
  Antisense strand to SEQ ID NO: 2166928
cauaucauugcagacuguu

SEQ ID NO: 2166930 - RNA, 19 nt, Artificial Sequence
  Description of Artificial Sequence: Synthetic oligonucleotide
  Sense strand starting at position 2667 of SEQ ID NO: 1883061
augauaugucugcaaccac

SEQ ID NO: 2166931 - RNA, 19 nt, Artificial Sequence
  Description of Artificial Sequence: Synthetic oligonucleotide
  Antisense strand to SEQ ID NO: 2166930
gugguugcagacauaucau

SEQ ID NO: 2166932 - RNA, 19 nt, Artificial Sequence
  Description of Artificial Sequence: Synthetic oligonucleotide
  Sense strand starting at position 2705 of SEQ ID NO: 1883061
uccauauuccuccauggua

SEQ ID NO: 2166933 - RNA, 19 nt, Artificial Sequence
  Description of Artificial Sequence: Synthetic oligonucleotide
  Antisense strand to SEQ ID NO: 2166932
uaccauggaggaauaugga

SEQ ID NO: 2166934 - RNA, 19 nt, Artificial Sequence
  Description of Artificial Sequence: Synthetic oligonucleotide
  Sense strand starting at position 3255 of SEQ ID NO: 1883061
cuaacaaaugaguggcaga

SEQ ID NO: 2166935 - RNA, 19 nt, Artificial Sequence
  Description of Artificial Sequence: Synthetic oligonucleotide
  Antisense strand to SEQ ID NO: 2166934
ucugccacucauuuguuag

SEQ ID NO: 2166936 - RNA, 19 nt, Artificial Sequence
  Description of Artificial Sequence: Synthetic oligonucleotide
  Sense strand starting at position 3299 of SEQ ID NO: 1883061
gucacuaucccauaauguu

SEQ ID NO: 2166937 - RNA, 19 nt, Artificial Sequence
  Description of Artificial Sequence: Synthetic oligonucleotide
  Antisense strand to SEQ ID NO: 2166936
aacauuaugggauagugac

SEQ ID NO: 2166938 - RNA, 19 nt, Artificial Sequence
  Description of Artificial Sequence: Synthetic oligonucleotide
  Sense strand starting at position 3392 of SEQ ID NO: 1883061
uccuguaaugugggagacu

SEQ ID NO: 2166939 - RNA, 19 nt, Artificial Sequence
  Description of Artificial Sequence: Synthetic oligonucleotide
  Antisense strand to SEQ ID NO: 2166938
agucucccacauuacagga

SEQ ID NO: 2166940 - RNA, 19 nt, Artificial Sequence
  Description of Artificial Sequence: Synthetic oligonucleotide
  Sense strand starting at position 3395 of SEQ ID NO: 1883061
uguaaugugggagacuuua

SEQ ID NO: 2166941 - RNA, 19 nt, Artificial Sequence
  Description of Artificial Sequence: Synthetic oligonucleotide
  Antisense strand to SEQ ID NO: 2166940
uaaagucucccacauuaca

SEQ ID NO: 2166942 - RNA, 19 nt, Artificial Sequence
  Description of Artificial Sequence: Synthetic oligonucleotide
  Sense strand starting at position 3466 of SEQ ID NO: 1883061
acuuguacguacuuauuua

SEQ ID NO: 2166943 - RNA, 19 nt, Artificial Sequence
  Description of Artificial Sequence: Synthetic oligonucleotide
  Antisense strand to SEQ ID NO: 2166942
uaaauaaguacguacaagu

SEQ ID NO: 2166944 - RNA, 19 nt, Artificial Sequence
  Description of Artificial Sequence: Synthetic oligonucleotide
  Sense strand starting at position 3470 of SEQ ID NO: 1883061
guacguacuuauuuagcua

SEQ ID NO: 2166945 - RNA, 19 nt, Artificial Sequence
  Description of Artificial Sequence: Synthetic oligonucleotide
  Antisense strand to SEQ ID NO: 2166944
uagcuaaauaaguacguac

SEQ ID NO: 2166946 - RNA, 19 nt, Artificial Sequence
  Description of Artificial Sequence: Synthetic oligonucleotide
  Sense strand starting at position 3478 of SEQ ID NO: 1883061
uuauuuagcuaucugucau

SEQ ID NO: 2166947 - RNA, 19 nt, Artificial Sequence
  Description of Artificial Sequence: Synthetic oligonucleotide
  Antisense strand to SEQ ID NO: 2166946
augacagauagcuaaauaa

SEQ ID NO: 2166948 - RNA, 19 nt, Artificial Sequence
  Description of Artificial Sequence: Synthetic oligonucleotide
  Sense strand starting at position 3640 of SEQ ID NO: 1883061
auagucucagcauaaagua

SEQ ID NO: 2166949 - RNA, 19 nt, Artificial Sequence
  Description of Artificial Sequence: Synthetic oligonucleotide
  Antisense strand to SEQ ID NO: 2166948
uacuuuaugcugagacuau

SEQ ID NO: 2166950 - RNA, 19 nt, Artificial Sequence
  Description of Artificial Sequence: Synthetic oligonucleotide
  Sense strand starting at position 170 of SEQ ID NO: 1883062
gccugaucugcacagagca

SEQ ID NO: 2166951 - RNA, 19 nt, Artificial Sequence
  Description of Artificial Sequence: Synthetic oligonucleotide
  Antisense strand to SEQ ID NO: 2166950
ugcucugugcagaucaggc

SEQ ID NO: 2166952 - RNA, 19 nt, Artificial Sequence
  Description of Artificial Sequence: Synthetic oligonucleotide
  Sense strand starting at position 358 of SEQ ID NO: 1883062
gggaccugugagugguaau

SEQ ID NO: 2166953 - RNA, 19 nt, Artificial Sequence
  Description of Artificial Sequence: Synthetic oligonucleotide
  Antisense strand to SEQ ID NO: 2166952
auuaccacucacagguccc

SEQ ID NO: 2166954 - RNA, 19 nt, Artificial Sequence
  Description of Artificial Sequence: Synthetic oligonucleotide
  Sense strand starting at position 359 of SEQ ID NO: 1883062
ggaccugugagugguaauu

SEQ ID NO: 2166955 - RNA, 19 nt, Artificial Sequence
  Description of Artificial Sequence: Synthetic oligonucleotide
  Antisense strand to SEQ ID NO: 2166954
aauuaccacucacaggucc

SEQ ID NO: 2166956 - RNA, 19 nt, Artificial Sequence
  Description of Artificial Sequence: Synthetic oligonucleotide
  Sense strand starting at position 365 of SEQ ID NO: 1883062
gugagugguaauuagguca

SEQ ID NO: 2166957 - RNA, 19 nt, Artificial Sequence
  Description of Artificial Sequence: Synthetic oligonucleotide
  Antisense strand to SEQ ID NO: 2166956
ugaccuaauuaccacucac

SEQ ID NO: 2166958 - RNA, 19 nt, Artificial Sequence
  Description of Artificial Sequence: Synthetic oligonucleotide
  Sense strand starting at position 368 of SEQ ID NO: 1883062
agugguaauuaggucauga

SEQ ID NO: 2166959 - RNA, 19 nt, Artificial Sequence
  Description of Artificial Sequence: Synthetic oligonucleotide
  Antisense strand to SEQ ID NO: 2166958
ucaugaccuaauuaccacu

SEQ ID NO: 2166960 - RNA, 19 nt, Artificial Sequence
  Description of Artificial Sequence: Synthetic oligonucleotide
  Sense strand starting at position 709 of SEQ ID NO: 1883062
auagaacuuugagaccaga

SEQ ID NO: 2166961 - RNA, 19 nt, Artificial Sequence
  Description of Artificial Sequence: Synthetic oligonucleotide
  Antisense strand to SEQ ID NO: 2166960
ucuggucucaaaguucuau

SEQ ID NO: 2166962 - RNA, 19 nt, Artificial Sequence
  Description of Artificial Sequence: Synthetic oligonucleotide
  Sense strand starting at position 738 of SEQ ID NO: 1883062
gagacauacuugucuaaag

SEQ ID NO: 2166963 - RNA, 19 nt, Artificial Sequence
  Description of Artificial Sequence: Synthetic oligonucleotide
  Antisense strand to SEQ ID NO: 2166962
cuuuagacaaguaugucuc

SEQ ID NO: 2166964 - RNA, 19 nt, Artificial Sequence
  Description of Artificial Sequence: Synthetic oligonucleotide
  Sense strand starting at position 745 of SEQ ID NO: 1883062
acuugucuaaagcgaagaa

SEQ ID NO: 2166965 - RNA, 19 nt, Artificial Sequence
  Description of Artificial Sequence: Synthetic oligonucleotide
  Antisense strand to SEQ ID NO: 2166964
uucuucgcuuuagacaagu

SEQ ID NO: 2166966 - RNA, 19 nt, Artificial Sequence
  Description of Artificial Sequence: Synthetic oligonucleotide
  Sense strand starting at position 979 of SEQ ID NO: 1883062
uuaaguuaguaucugaaag

SEQ ID NO: 2166967 - RNA, 19 nt, Artificial Sequence
  Description of Artificial Sequence: Synthetic oligonucleotide
  Antisense strand to SEQ ID NO: 2166966
cuuucagauacuaacuuaa

SEQ ID NO: 2166968 - RNA, 19 nt, Artificial Sequence
  Description of Artificial Sequence: Synthetic oligonucleotide
  Sense strand starting at position 987 of SEQ ID NO: 1883062
guaucugaaagguacaagu

SEQ ID NO: 2166969 - RNA, 19 nt, Artificial Sequence
  Description of Artificial Sequence: Synthetic oligonucleotide
  Antisense strand to SEQ ID NO: 2166968
acuuguaccuuucagauac

SEQ ID NO: 2166970 - RNA, 19 nt, Artificial Sequence
  Description of Artificial Sequence: Synthetic oligonucleotide
  Sense strand starting at position 996 of SEQ ID NO: 1883062
agguacaaguuuccuaaca

SEQ ID NO: 2166971 - RNA, 19 nt, Artificial Sequence
  Description of Artificial Sequence: Synthetic oligonucleotide
  Antisense strand to SEQ ID NO: 2166970
uguuaggaaacuuguaccu

SEQ ID NO: 2166972 - RNA, 19 nt, Artificial Sequence
  Description of Artificial Sequence: Synthetic oligonucleotide
  Sense strand starting at position 997 of SEQ ID NO: 1883062
gguacaaguuuccuaacaa

SEQ ID NO: 2166973 - RNA, 19 nt, Artificial Sequence
  Description of Artificial Sequence: Synthetic oligonucleotide
  Antisense strand to SEQ ID NO: 2166972
uuguuaggaaacuuguacc

SEQ ID NO: 2166974 - RNA, 19 nt, Artificial Sequence
  Description of Artificial Sequence: Synthetic oligonucleotide
  Sense strand starting at position 1017 of SEQ ID NO: 1883062
augaguacauuaucucaag

SEQ ID NO: 2166975 - RNA, 19 nt, Artificial Sequence
  Description of Artificial Sequence: Synthetic oligonucleotide
  Antisense strand to SEQ ID NO: 2166974
cuugagauaauguacucau

SEQ ID NO: 2166976 - RNA, 19 nt, Artificial Sequence
  Description of Artificial Sequence: Synthetic oligonucleotide
  Sense strand starting at position 1171 of SEQ ID NO: 1883062
uucccaguacugugaaauu

SEQ ID NO: 2166977 - RNA, 19 nt, Artificial Sequence
  Description of Artificial Sequence: Synthetic oligonucleotide
  Antisense strand to SEQ ID NO: 2166976
aauuucacaguacugggaa

SEQ ID NO: 2166978 - RNA, 19 nt, Artificial Sequence
  Description of Artificial Sequence: Synthetic oligonucleotide
  Sense strand starting at position 2140 of SEQ ID NO: 1883062
gcgcgaguugcacuaacuu

SEQ ID NO: 2166979 - RNA, 19 nt, Artificial Sequence
  Description of Artificial Sequence: Synthetic oligonucleotide
  Antisense strand to SEQ ID NO: 2166978
aaguuagugcaacucgcgc

SEQ ID NO: 2166980 - RNA, 19 nt, Artificial Sequence
  Description of Artificial Sequence: Synthetic oligonucleotide
  Sense strand starting at position 2562 of SEQ ID NO: 1883062
ucuaaaggucccuacaagu

SEQ ID NO: 2166981 - RNA, 19 nt, Artificial Sequence
  Description of Artificial Sequence: Synthetic oligonucleotide
  Antisense strand to SEQ ID NO: 2166980
acuuguagggaccuuuaga

SEQ ID NO: 2166982 - RNA, 19 nt, Artificial Sequence
  Description of Artificial Sequence: Synthetic oligonucleotide
  Sense strand starting at position 2618 of SEQ ID NO: 1883062
gcguucuggguccauuuau

SEQ ID NO: 2166983 - RNA, 19 nt, Artificial Sequence
  Description of Artificial Sequence: Synthetic oligonucleotide
  Antisense strand to SEQ ID NO: 2166982
auaaauggacccagaacgc

SEQ ID NO: 2166984 - RNA, 19 nt, Artificial Sequence
  Description of Artificial Sequence: Synthetic oligonucleotide
  Sense strand starting at position 2645 of SEQ ID NO: 1883062
ugcuaauauuuagaaagag

SEQ ID NO: 2166985 - RNA, 19 nt, Artificial Sequence
  Description of Artificial Sequence: Synthetic oligonucleotide
  Antisense strand to SEQ ID NO: 2166984
cucuuucuaaauauuagca

SEQ ID NO: 2166986 - RNA, 19 nt, Artificial Sequence
  Description of Artificial Sequence: Synthetic oligonucleotide
  Sense strand starting at position 2700 of SEQ ID NO: 1883062
aguuacaacccgcauaagu

SEQ ID NO: 2166987 - RNA, 19 nt, Artificial Sequence
  Description of Artificial Sequence: Synthetic oligonucleotide
  Antisense strand to SEQ ID NO: 2166986
acuuaugcggguuguaacu

SEQ ID NO: 2166988 - RNA, 19 nt, Artificial Sequence
  Description of Artificial Sequence: Synthetic oligonucleotide
  Sense strand starting at position 2999 of SEQ ID NO: 1883062
gcuaguaggccugaagaua

SEQ ID NO: 2166989 - RNA, 19 nt, Artificial Sequence
  Description of Artificial Sequence: Synthetic oligonucleotide
  Antisense strand to SEQ ID NO: 2166988
uaucuucaggccuacuagc

SEQ ID NO: 2166990 - RNA, 19 nt, Artificial Sequence
  Description of Artificial Sequence: Synthetic oligonucleotide
  Sense strand starting at position 3045 of SEQ ID NO: 1883062
ggcagaugcuauuuaccuu

SEQ ID NO: 2166991 - RNA, 19 nt, Artificial Sequence
  Description of Artificial Sequence: Synthetic oligonucleotide
  Antisense strand to SEQ ID NO: 2166990
aagguaaauagcaucugcc

SEQ ID NO: 2166992 - RNA, 19 nt, Artificial Sequence
  Description of Artificial Sequence: Synthetic oligonucleotide
  Sense strand starting at position 3100 of SEQ ID NO: 1883062
gagaaaucuugacagauga

SEQ ID NO: 2166993 - RNA, 19 nt, Artificial Sequence
  Description of Artificial Sequence: Synthetic oligonucleotide
  Antisense strand to SEQ ID NO: 2166992
ucaucugucaagauuucuc

SEQ ID NO: 2166994 - RNA, 19 nt, Artificial Sequence
  Description of Artificial Sequence: Synthetic oligonucleotide
  Sense strand starting at position 3108 of SEQ ID NO: 1883062
uugacagaugaauguuuau

SEQ ID NO: 2166995 - RNA, 19 nt, Artificial Sequence
  Description of Artificial Sequence: Synthetic oligonucleotide
  Antisense strand to SEQ ID NO: 2166994
auaaacauucaucugucaa

SEQ ID NO: 2166996 - RNA, 19 nt, Artificial Sequence
  Description of Artificial Sequence: Synthetic oligonucleotide
  Sense strand starting at position 3117 of SEQ ID NO: 1883062
gaauguuuauccuccaggu

SEQ ID NO: 2166997 - RNA, 19 nt, Artificial Sequence
  Description of Artificial Sequence: Synthetic oligonucleotide
  Antisense strand to SEQ ID NO: 2166996
accuggaggauaaacauuc

SEQ ID NO: 2166998 - RNA, 19 nt, Artificial Sequence
  Description of Artificial Sequence: Synthetic oligonucleotide
  Sense strand starting at position 3119 of SEQ ID NO: 1883062
auguuuauccuccagguuu

SEQ ID NO: 2166999 - RNA, 19 nt, Artificial Sequence
  Description of Artificial Sequence: Synthetic oligonucleotide
  Antisense strand to SEQ ID NO: 2166998
aaaccuggaggauaaacau

SEQ ID NO: 2167000 - RNA, 19 nt, Artificial Sequence
  Description of Artificial Sequence: Synthetic oligonucleotide
  Sense strand starting at position 3271 of SEQ ID NO: 1883062
uuugacugugcugaauaaa

SEQ ID NO: 2167001 - RNA, 19 nt, Artificial Sequence
  Description of Artificial Sequence: Synthetic oligonucleotide
  Antisense strand to SEQ ID NO: 2167000
uuuauucagcacagucaaa

SEQ ID NO: 2167002 - RNA, 19 nt, Artificial Sequence
  Description of Artificial Sequence: Synthetic oligonucleotide
  Sense strand starting at position 3340 of SEQ ID NO: 1883062
uucuguccguaagugauuu

SEQ ID NO: 2167003 - RNA, 19 nt, Artificial Sequence
  Description of Artificial Sequence: Synthetic oligonucleotide
  Antisense strand to SEQ ID NO: 2167002
aaaucacuuacggacagaa

SEQ ID NO: 2167004 - RNA, 19 nt, Artificial Sequence
  Description of Artificial Sequence: Synthetic oligonucleotide
  Sense strand starting at position 3344 of SEQ ID NO: 1883062
guccguaagugauuugacu

SEQ ID NO: 2167005 - RNA, 19 nt, Artificial Sequence
  Description of Artificial Sequence: Synthetic oligonucleotide
  Antisense strand to SEQ ID NO: 2167004
agucaaaucacuuacggac

SEQ ID NO: 2167006 - RNA, 19 nt, Artificial Sequence
  Description of Artificial Sequence: Synthetic oligonucleotide
  Sense strand starting at position 3346 of SEQ ID NO: 1883062
ccguaagugauuugacuuu

SEQ ID NO: 2167007 - RNA, 19 nt, Artificial Sequence
  Description of Artificial Sequence: Synthetic oligonucleotide
  Antisense strand to SEQ ID NO: 2167006
aaagucaaaucacuuacgg

SEQ ID NO: 2167008 - RNA, 19 nt, Artificial Sequence
  Description of Artificial Sequence: Synthetic oligonucleotide
  Sense strand starting at position 3366 of SEQ ID NO: 1883062
uauguauuagaugguaaug

SEQ ID NO: 2167009 - RNA, 19 nt, Artificial Sequence
  Description of Artificial Sequence: Synthetic oligonucleotide
  Antisense strand to SEQ ID NO: 2167008
cauuaccaucuaauacaua

SEQ ID NO: 2167010 - RNA, 19 nt, Artificial Sequence
  Description of Artificial Sequence: Synthetic oligonucleotide
  Sense strand starting at position 3461 of SEQ ID NO: 1883062
ugcuuacuuguauaauagu

SEQ ID NO: 2167011 - RNA, 19 nt, Artificial Sequence
  Description of Artificial Sequence: Synthetic oligonucleotide
  Antisense strand to SEQ ID NO: 2167010
acuauuauacaaguaagca

SEQ ID NO: 2167012 - RNA, 19 nt, Artificial Sequence
  Description of Artificial Sequence: Synthetic oligonucleotide
  Sense strand starting at position 3523 of SEQ ID NO: 1883062
ggccuauuacggcauacau

SEQ ID NO: 2167013 - RNA, 19 nt, Artificial Sequence
  Description of Artificial Sequence: Synthetic oligonucleotide
  Antisense strand to SEQ ID NO: 2167012
auguaugccguaauaggcc

SEQ ID NO: 2167014 - RNA, 19 nt, Artificial Sequence
  Description of Artificial Sequence: Synthetic oligonucleotide
  Sense strand starting at position 3525 of SEQ ID NO: 1883062
ccuauuacggcauacauaa

SEQ ID NO: 2167015 - RNA, 19 nt, Artificial Sequence
  Description of Artificial Sequence: Synthetic oligonucleotide
  Antisense strand to SEQ ID NO: 2167014
uuauguaugccguaauagg

SEQ ID NO: 2167016 - RNA, 19 nt, Artificial Sequence
  Description of Artificial Sequence: Synthetic oligonucleotide
  Sense strand starting at position 3612 of SEQ ID NO: 1883062
gaucuacuacagugagauc

SEQ ID NO: 2167017 - RNA, 19 nt, Artificial Sequence
  Description of Artificial Sequence: Synthetic oligonucleotide
  Antisense strand to SEQ ID NO: 2167016
gaucucacuguaguagauc

SEQ ID NO: 2167018 - RNA, 19 nt, Artificial Sequence
  Description of Artificial Sequence: Synthetic oligonucleotide
  Sense strand starting at position 3621 of SEQ ID NO: 1883062
cagugagauccaggccaga

SEQ ID NO: 2167019 - RNA, 19 nt, Artificial Sequence
  Description of Artificial Sequence: Synthetic oligonucleotide
  Antisense strand to SEQ ID NO: 2167018
ucuggccuggaucucacug

SEQ ID NO: 2167020 - RNA, 19 nt, Artificial Sequence
  Description of Artificial Sequence: Synthetic oligonucleotide
  Sense strand starting at position 3632 of SEQ ID NO: 1883062
aggccagaauaagugaaau

SEQ ID NO: 2167021 - RNA, 19 nt, Artificial Sequence
  Description of Artificial Sequence: Synthetic oligonucleotide
  Antisense strand to SEQ ID NO: 2167020
auuucacuuauucuggccu

SEQ ID NO: 2167022 - RNA, 19 nt, Artificial Sequence
  Description of Artificial Sequence: Synthetic oligonucleotide
  Sense strand starting at position 3708 of SEQ ID NO: 1883062
ugugucuaacacugauaca

SEQ ID NO: 2167023 - RNA, 19 nt, Artificial Sequence
  Description of Artificial Sequence: Synthetic oligonucleotide
  Antisense strand to SEQ ID NO: 2167022
uguaucaguguuagacaca

SEQ ID NO: 2167024 - RNA, 19 nt, Artificial Sequence
  Description of Artificial Sequence: Synthetic oligonucleotide
  Sense strand starting at position 3747 of SEQ ID NO: 1883062
acaauauugucaccaguaa

SEQ ID NO: 2167025 - RNA, 19 nt, Artificial Sequence
  Description of Artificial Sequence: Synthetic oligonucleotide
  Antisense strand to SEQ ID NO: 2167024
uuacuggugacaauauugu

SEQ ID NO: 2167026 - RNA, 19 nt, Artificial Sequence
  Description of Artificial Sequence: Synthetic oligonucleotide
  Sense strand starting at position 3759 of SEQ ID NO: 1883062
ccaguaaaggaucgugacu

SEQ ID NO: 2167027 - RNA, 19 nt, Artificial Sequence
  Description of Artificial Sequence: Synthetic oligonucleotide
  Antisense strand to SEQ ID NO: 2167026
agucacgauccuuuacugg

SEQ ID NO: 2167028 - RNA, 19 nt, Artificial Sequence
  Description of Artificial Sequence: Synthetic oligonucleotide
  Sense strand starting at position 3957 of SEQ ID NO: 1883062
gaaguuucccuuuggcaac

SEQ ID NO: 2167029 - RNA, 19 nt, Artificial Sequence
  Description of Artificial Sequence: Synthetic oligonucleotide
  Antisense strand to SEQ ID NO: 2167028
guugccaaagggaaacuuc

SEQ ID NO: 2167030 - RNA, 19 nt, Artificial Sequence
  Description of Artificial Sequence: Synthetic oligonucleotide
  Sense strand starting at position 161 of SEQ ID NO: 1883063
aguggacagugccuguaau

SEQ ID NO: 2167031 - RNA, 19 nt, Artificial Sequence
  Description of Artificial Sequence: Synthetic oligonucleotide
  Antisense strand to SEQ ID NO: 2167030
auuacaggcacuguccacu

SEQ ID NO: 2167032 - RNA, 19 nt, Artificial Sequence
  Description of Artificial Sequence: Synthetic oligonucleotide
  Sense strand starting at position 335 of SEQ ID NO: 1883063
cacauuguuuagggauacu

SEQ ID NO: 2167033 - RNA, 19 nt, Artificial Sequence
  Description of Artificial Sequence: Synthetic oligonucleotide
  Antisense strand to SEQ ID NO: 2167032
aguaucccuaaacaaugug

SEQ ID NO: 2167034 - RNA, 19 nt, Artificial Sequence
  Description of Artificial Sequence: Synthetic oligonucleotide
  Sense strand starting at position 372 of SEQ ID NO: 1883063
agacaagcaugacauaauu

SEQ ID NO: 2167035 - RNA, 19 nt, Artificial Sequence
  Description of Artificial Sequence: Synthetic oligonucleotide
  Antisense strand to SEQ ID NO: 2167034
aauuaugucaugcuugucu

SEQ ID NO: 2167036 - RNA, 19 nt, Artificial Sequence
  Description of Artificial Sequence: Synthetic oligonucleotide
  Sense strand starting at position 2223 of SEQ ID NO: 1883063
gguguugcauccuuggaga

SEQ ID NO: 2167037 - RNA, 19 nt, Artificial Sequence
  Description of Artificial Sequence: Synthetic oligonucleotide
  Antisense strand to SEQ ID NO: 2167036
ucuccaaggaugcaacacc

SEQ ID NO: 2167038 - RNA, 19 nt, Artificial Sequence
  Description of Artificial Sequence: Synthetic oligonucleotide
  Sense strand starting at position 2225 of SEQ ID NO: 1883063
uguugcauccuuggagaga

SEQ ID NO: 2167039 - RNA, 19 nt, Artificial Sequence
  Description of Artificial Sequence: Synthetic oligonucleotide
  Antisense strand to SEQ ID NO: 2167038
ucucuccaaggaugcaaca

SEQ ID NO: 2167040 - RNA, 19 nt, Artificial Sequence
  Description of Artificial Sequence: Synthetic oligonucleotide
  Sense strand starting at position 289 of SEQ ID NO: 1883064
ugaccauauuguuuaggga

SEQ ID NO: 2167041 - RNA, 19 nt, Artificial Sequence
  Description of Artificial Sequence: Synthetic oligonucleotide
  Antisense strand to SEQ ID NO: 2167040
ucccuaaacaauaugguca

SEQ ID NO: 2167042 - RNA, 19 nt, Artificial Sequence
  Description of Artificial Sequence: Synthetic oligonucleotide
  Sense strand starting at position 411 of SEQ ID NO: 1883064
gacaaugugugucaaccua

SEQ ID NO: 2167043 - RNA, 19 nt, Artificial Sequence
  Description of Artificial Sequence: Synthetic oligonucleotide
  Antisense strand to SEQ ID NO: 2167042
uagguugacacacauuguc

SEQ ID NO: 2167044 - RNA, 19 nt, Artificial Sequence
  Description of Artificial Sequence: Synthetic oligonucleotide
  Sense strand starting at position 2805 of SEQ ID NO: 1883064
gacauauccuaauuugcgu

SEQ ID NO: 2167045 - RNA, 19 nt, Artificial Sequence
  Description of Artificial Sequence: Synthetic oligonucleotide
  Antisense strand to SEQ ID NO: 2167044
acgcaaauuaggauauguc

SEQ ID NO: 2167046 - RNA, 19 nt, Artificial Sequence
  Description of Artificial Sequence: Synthetic oligonucleotide
  Sense strand starting at position 2859 of SEQ ID NO: 1883064
ccuguuaggguaugugauu

SEQ ID NO: 2167047 - RNA, 19 nt, Artificial Sequence
  Description of Artificial Sequence: Synthetic oligonucleotide
  Antisense strand to SEQ ID NO: 2167046
aaucacauacccuaacagg

SEQ ID NO: 2167048 - RNA, 19 nt, Artificial Sequence
  Description of Artificial Sequence: Synthetic oligonucleotide
  Sense strand starting at position 2860 of SEQ ID NO: 1883064
cuguuaggguaugugauuu

SEQ ID NO: 2167049 - RNA, 19 nt, Artificial Sequence
  Description of Artificial Sequence: Synthetic oligonucleotide
  Antisense strand to SEQ ID NO: 2167048
aaaucacauacccuaacag

SEQ ID NO: 2167050 - RNA, 19 nt, Artificial Sequence
  Description of Artificial Sequence: Synthetic oligonucleotide
  Sense strand starting at position 3014 of SEQ ID NO: 1883064
aaauaaauuugccgucugu

SEQ ID NO: 2167051 - RNA, 19 nt, Artificial Sequence
  Description of Artificial Sequence: Synthetic oligonucleotide
  Antisense strand to SEQ ID NO: 2167050
acagacggcaaauuuauuu

SEQ ID NO: 2167052 - RNA, 19 nt, Artificial Sequence
  Description of Artificial Sequence: Synthetic oligonucleotide
  Sense strand starting at position 291 of SEQ ID NO: 1883065
agaccauauuguuuaggga

SEQ ID NO: 2167053 - RNA, 19 nt, Artificial Sequence
  Description of Artificial Sequence: Synthetic oligonucleotide
  Antisense strand to SEQ ID NO: 2167052
ucccuaaacaauauggucu

SEQ ID NO: 2167054 - RNA, 19 nt, Artificial Sequence
  Description of Artificial Sequence: Synthetic oligonucleotide
  Sense strand starting at position 2285 of SEQ ID NO: 1883065
uuccgaccucccuggaaau

SEQ ID NO: 2167055 - RNA, 19 nt, Artificial Sequence
  Description of Artificial Sequence: Synthetic oligonucleotide
  Antisense strand to SEQ ID NO: 2167054
auuuccagggaggucggaa

SEQ ID NO: 2167056 - RNA, 19 nt, Artificial Sequence
  Description of Artificial Sequence: Synthetic oligonucleotide
  Sense strand starting at position 2855 of SEQ ID NO: 1883065
ccucuuaggguaugugauu

SEQ ID NO: 2167057 - RNA, 19 nt, Artificial Sequence
  Description of Artificial Sequence: Synthetic oligonucleotide
  Antisense strand to SEQ ID NO: 2167056
aaucacauacccuaagagg

SEQ ID NO: 2167058 - RNA, 19 nt, Artificial Sequence
  Description of Artificial Sequence: Synthetic oligonucleotide
  Sense strand starting at position 709 of SEQ ID NO: 1883066
uagggauacuuaggugaca

SEQ ID NO: 2167059 - RNA, 19 nt, Artificial Sequence
  Description of Artificial Sequence: Synthetic oligonucleotide
  Antisense strand to SEQ ID NO: 2167058
ugucaccuaaguaucccua

SEQ ID NO: 2167060 - RNA, 19 nt, Artificial Sequence
  Description of Artificial Sequence: Synthetic oligonucleotide
  Sense strand starting at position 852 of SEQ ID NO: 1883066
uggaguucgcuuuguaauu

SEQ ID NO: 2167061 - RNA, 19 nt, Artificial Sequence
  Description of Artificial Sequence: Synthetic oligonucleotide
  Antisense strand to SEQ ID NO: 2167060
aauuacaaagcgaacucca

SEQ ID NO: 2167062 - RNA, 19 nt, Artificial Sequence
  Description of Artificial Sequence: Synthetic oligonucleotide
  Sense strand starting at position 853 of SEQ ID NO: 1883066
ggaguucgcuuuguaauuc

SEQ ID NO: 2167063 - RNA, 19 nt, Artificial Sequence
  Description of Artificial Sequence: Synthetic oligonucleotide
  Antisense strand to SEQ ID NO: 2167062
gaauuacaaagcgaacucc

SEQ ID NO: 2167064 - RNA, 19 nt, Artificial Sequence
  Description of Artificial Sequence: Synthetic oligonucleotide
  Sense strand starting at position 908 of SEQ ID NO: 1883066
agggcagaaucucugaacu

SEQ ID NO: 2167065 - RNA, 19 nt, Artificial Sequence
  Description of Artificial Sequence: Synthetic oligonucleotide
  Antisense strand to SEQ ID NO: 2167064
aguucagagauucugcccu

SEQ ID NO: 2167066 - RNA, 19 nt, Artificial Sequence
  Description of Artificial Sequence: Synthetic oligonucleotide
  Sense strand starting at position 910 of SEQ ID NO: 1883066
ggcagaaucucugaacuaa

SEQ ID NO: 2167067 - RNA, 19 nt, Artificial Sequence
  Description of Artificial Sequence: Synthetic oligonucleotide
  Antisense strand to SEQ ID NO: 2167066
uuaguucagagauucugcc

SEQ ID NO: 2167068 - RNA, 19 nt, Artificial Sequence
  Description of Artificial Sequence: Synthetic oligonucleotide
  Sense strand starting at position 1142 of SEQ ID NO: 1883066
ggugguucacgccugguau

SEQ ID NO: 2167069 - RNA, 19 nt, Artificial Sequence
  Description of Artificial Sequence: Synthetic oligonucleotide
  Antisense strand to SEQ ID NO: 2167068
auaccaggcgugaaccacc

SEQ ID NO: 2167070 - RNA, 19 nt, Artificial Sequence
  Description of Artificial Sequence: Synthetic oligonucleotide
  Sense strand starting at position 1153 of SEQ ID NO: 1883066
ccugguaucucagcgcuuu

SEQ ID NO: 2167071 - RNA, 19 nt, Artificial Sequence
  Description of Artificial Sequence: Synthetic oligonucleotide
  Antisense strand to SEQ ID NO: 2167070
aaagcgcugagauaccagg

SEQ ID NO: 2167072 - RNA, 19 nt, Artificial Sequence
  Description of Artificial Sequence: Synthetic oligonucleotide
  Sense strand starting at position 1569 of SEQ ID NO: 1883066
cauaaagguuugggugagu

SEQ ID NO: 2167073 - RNA, 19 nt, Artificial Sequence
  Description of Artificial Sequence: Synthetic oligonucleotide
  Antisense strand to SEQ ID NO: 2167072
acucacccaaaccuuuaug

SEQ ID NO: 2167074 - RNA, 19 nt, Artificial Sequence
  Description of Artificial Sequence: Synthetic oligonucleotide
  Sense strand starting at position 1987 of SEQ ID NO: 1883066
gcugcggucguucgggaaa

SEQ ID NO: 2167075 - RNA, 19 nt, Artificial Sequence
  Description of Artificial Sequence: Synthetic oligonucleotide
  Antisense strand to SEQ ID NO: 2167074
uuucccgaacgaccgcagc

SEQ ID NO: 2167076 - RNA, 19 nt, Artificial Sequence
  Description of Artificial Sequence: Synthetic oligonucleotide
  Sense strand starting at position 2064 of SEQ ID NO: 1883066
cgaccuuugacggagcuaa

SEQ ID NO: 2167077 - RNA, 19 nt, Artificial Sequence
  Description of Artificial Sequence: Synthetic oligonucleotide
  Antisense strand to SEQ ID NO: 2167076
uuagcuccgucaaaggucg

SEQ ID NO: 2167078 - RNA, 19 nt, Artificial Sequence
  Description of Artificial Sequence: Synthetic oligonucleotide
  Sense strand starting at position 2292 of SEQ ID NO: 1883066
gcgcguccuccuugagaac

SEQ ID NO: 2167079 - RNA, 19 nt, Artificial Sequence
  Description of Artificial Sequence: Synthetic oligonucleotide
  Antisense strand to SEQ ID NO: 2167078
guucucaaggaggacgcgc

SEQ ID NO: 2167080 - RNA, 19 nt, Artificial Sequence
  Description of Artificial Sequence: Synthetic oligonucleotide
  Sense strand starting at position 2317 of SEQ ID NO: 1883066
guuccaaccucccuggaaa

SEQ ID NO: 2167081 - RNA, 19 nt, Artificial Sequence
  Description of Artificial Sequence: Synthetic oligonucleotide
  Antisense strand to SEQ ID NO: 2167080
uuuccagggagguuggaac

SEQ ID NO: 2167082 - RNA, 19 nt, Artificial Sequence
  Description of Artificial Sequence: Synthetic oligonucleotide
  Sense strand starting at position 2686 of SEQ ID NO: 1883066
ugcugaggcugaucucgaa

SEQ ID NO: 2167083 - RNA, 19 nt, Artificial Sequence
  Description of Artificial Sequence: Synthetic oligonucleotide
  Antisense strand to SEQ ID NO: 2167082
uucgagaucagccucagca

SEQ ID NO: 2167084 - RNA, 19 nt, Artificial Sequence
  Description of Artificial Sequence: Synthetic oligonucleotide
  Sense strand starting at position 2751 of SEQ ID NO: 1883066
gaauuacaggccugaugca

SEQ ID NO: 2167085 - RNA, 19 nt, Artificial Sequence
  Description of Artificial Sequence: Synthetic oligonucleotide
  Antisense strand to SEQ ID NO: 2167084
ugcaucaggccuguaauuc

SEQ ID NO: 2167086 - RNA, 19 nt, Artificial Sequence
  Description of Artificial Sequence: Synthetic oligonucleotide
  Sense strand starting at position 2872 of SEQ ID NO: 1883066
auuucuaccuguuaggaua

SEQ ID NO: 2167087 - RNA, 19 nt, Artificial Sequence
  Description of Artificial Sequence: Synthetic oligonucleotide
  Antisense strand to SEQ ID NO: 2167086
uauccuaacagguagaaau

SEQ ID NO: 2167088 - RNA, 19 nt, Artificial Sequence
  Description of Artificial Sequence: Synthetic oligonucleotide
  Sense strand starting at position 2879 of SEQ ID NO: 1883066
ccuguuaggauaugugauu

SEQ ID NO: 2167089 - RNA, 19 nt, Artificial Sequence
  Description of Artificial Sequence: Synthetic oligonucleotide
  Antisense strand to SEQ ID NO: 2167088
aaucacauauccuaacagg

SEQ ID NO: 2167090 - RNA, 19 nt, Artificial Sequence
  Description of Artificial Sequence: Synthetic oligonucleotide
  Sense strand starting at position 2934 of SEQ ID NO: 1883066
aguugcauuccaugucaga

SEQ ID NO: 2167091 - RNA, 19 nt, Artificial Sequence
  Description of Artificial Sequence: Synthetic oligonucleotide
  Antisense strand to SEQ ID NO: 2167090
ucugacauggaaugcaacu

SEQ ID NO: 2167092 - RNA, 19 nt, Artificial Sequence
  Description of Artificial Sequence: Synthetic oligonucleotide
  Sense strand starting at position 2937 of SEQ ID NO: 1883066
ugcauuccaugucagauau

SEQ ID NO: 2167093 - RNA, 19 nt, Artificial Sequence
  Description of Artificial Sequence: Synthetic oligonucleotide
  Antisense strand to SEQ ID NO: 2167092
auaucugacauggaaugca

SEQ ID NO: 2167094 - RNA, 19 nt, Artificial Sequence
  Description of Artificial Sequence: Synthetic oligonucleotide
  Sense strand starting at position 2966 of SEQ ID NO: 1883066
auucgcucucugcauuuaa

SEQ ID NO: 2167095 - RNA, 19 nt, Artificial Sequence
  Description of Artificial Sequence: Synthetic oligonucleotide
  Antisense strand to SEQ ID NO: 2167094
uuaaaugcagagagcgaau

SEQ ID NO: 2167096 - RNA, 19 nt, Artificial Sequence
  Description of Artificial Sequence: Synthetic oligonucleotide
  Sense strand starting at position 3405 of SEQ ID NO: 1883066
gccuauaguguguugccua

SEQ ID NO: 2167097 - RNA, 19 nt, Artificial Sequence
  Description of Artificial Sequence: Synthetic oligonucleotide
  Antisense strand to SEQ ID NO: 2167096
uaggcaacacacuauaggc

SEQ ID NO: 2167098 - RNA, 19 nt, Artificial Sequence
  Description of Artificial Sequence: Synthetic oligonucleotide
  Sense strand starting at position 3406 of SEQ ID NO: 1883066
ccuauaguguguugccuaa

SEQ ID NO: 2167099 - RNA, 19 nt, Artificial Sequence
  Description of Artificial Sequence: Synthetic oligonucleotide
  Antisense strand to SEQ ID NO: 2167098
uuaggcaacacacuauagg

SEQ ID NO: 2167100 - RNA, 19 nt, Artificial Sequence
  Description of Artificial Sequence: Synthetic oligonucleotide
  Sense strand starting at position 3408 of SEQ ID NO: 1883066
uauaguguguugccuaaua

SEQ ID NO: 2167101 - RNA, 19 nt, Artificial Sequence
  Description of Artificial Sequence: Synthetic oligonucleotide
  Antisense strand to SEQ ID NO: 2167100
uauuaggcaacacacuaua

SEQ ID NO: 2167102 - RNA, 19 nt, Artificial Sequence
  Description of Artificial Sequence: Synthetic oligonucleotide
  Sense strand starting at position 3410 of SEQ ID NO: 1883066
uaguguguugccuaauaaa

SEQ ID NO: 2167103 - RNA, 19 nt, Artificial Sequence
  Description of Artificial Sequence: Synthetic oligonucleotide
  Antisense strand to SEQ ID NO: 2167102
uuuauuaggcaacacacua

SEQ ID NO: 2167104 - RNA, 19 nt, Artificial Sequence
  Description of Artificial Sequence: Synthetic oligonucleotide
  Sense strand starting at position 3413 of SEQ ID NO: 1883066
uguguugccuaauaaauuu

SEQ ID NO: 2167105 - RNA, 19 nt, Artificial Sequence
  Description of Artificial Sequence: Synthetic oligonucleotide
  Antisense strand to SEQ ID NO: 2167104
aaauuuauuaggcaacaca

SEQ ID NO: 2167106 - RNA, 19 nt, Artificial Sequence
  Description of Artificial Sequence: Synthetic oligonucleotide
  Sense strand starting at position 3565 of SEQ ID NO: 1883066
aggccuacaaugugguaaa

SEQ ID NO: 2167107 - RNA, 19 nt, Artificial Sequence
  Description of Artificial Sequence: Synthetic oligonucleotide
  Antisense strand to SEQ ID NO: 2167106
uuuaccacauuguaggccu

SEQ ID NO: 2167108 - RNA, 19 nt, Artificial Sequence
  Description of Artificial Sequence: Synthetic oligonucleotide
  Sense strand starting at position 3566 of SEQ ID NO: 1883066
ggccuacaaugugguaaau

SEQ ID NO: 2167109 - RNA, 19 nt, Artificial Sequence
  Description of Artificial Sequence: Synthetic oligonucleotide
  Antisense strand to SEQ ID NO: 2167108
auuuaccacauuguaggcc

SEQ ID NO: 2167110 - RNA, 19 nt, Artificial Sequence
  Description of Artificial Sequence: Synthetic oligonucleotide
  Sense strand starting at position 3575 of SEQ ID NO: 1883066
ugugguaaaugcuguagga

SEQ ID NO: 2167111 - RNA, 19 nt, Artificial Sequence
  Description of Artificial Sequence: Synthetic oligonucleotide
  Antisense strand to SEQ ID NO: 2167110
uccuacagcauuuaccaca

SEQ ID NO: 2167112 - RNA, 19 nt, Artificial Sequence
  Description of Artificial Sequence: Synthetic oligonucleotide
  Sense strand starting at position 3579 of SEQ ID NO: 1883066
guaaaugcuguaggaaaua

SEQ ID NO: 2167113 - RNA, 19 nt, Artificial Sequence
  Description of Artificial Sequence: Synthetic oligonucleotide
  Antisense strand to SEQ ID NO: 2167112
uauuuccuacagcauuuac

SEQ ID NO: 2167114 - RNA, 19 nt, Artificial Sequence
  Description of Artificial Sequence: Synthetic oligonucleotide
  Sense strand starting at position 3663 of SEQ ID NO: 1883066
acuggaaauugcuaaguua

SEQ ID NO: 2167115 - RNA, 19 nt, Artificial Sequence
  Description of Artificial Sequence: Synthetic oligonucleotide
  Antisense strand to SEQ ID NO: 2167114
uaacuuagcaauuuccagu

SEQ ID NO: 2167116 - RNA, 19 nt, Artificial Sequence
  Description of Artificial Sequence: Synthetic oligonucleotide
  Sense strand starting at position 277 of SEQ ID NO: 1883067
gccugagaauuccuugaac

SEQ ID NO: 2167117 - RNA, 19 nt, Artificial Sequence
  Description of Artificial Sequence: Synthetic oligonucleotide
  Antisense strand to SEQ ID NO: 2167116
guucaaggaauucucaggc

SEQ ID NO: 2167118 - RNA, 19 nt, Artificial Sequence
  Description of Artificial Sequence: Synthetic oligonucleotide
  Sense strand starting at position 410 of SEQ ID NO: 1883067
ccauauuguuuagggauac

SEQ ID NO: 2167119 - RNA, 19 nt, Artificial Sequence
  Description of Artificial Sequence: Synthetic oligonucleotide
  Antisense strand to SEQ ID NO: 2167118
guaucccuaaacaauaugg

SEQ ID NO: 2167120 - RNA, 19 nt, Artificial Sequence
  Description of Artificial Sequence: Synthetic oligonucleotide
  Sense strand starting at position 411 of SEQ ID NO: 1883067
cauauuguuuagggauacu

SEQ ID NO: 2167121 - RNA, 19 nt, Artificial Sequence
  Description of Artificial Sequence: Synthetic oligonucleotide
  Antisense strand to SEQ ID NO: 2167120
aguaucccuaaacaauaug

SEQ ID NO: 2167122 - RNA, 19 nt, Artificial Sequence
  Description of Artificial Sequence: Synthetic oligonucleotide
  Sense strand starting at position 592 of SEQ ID NO: 1883067
gcauuuaugugcuacucac

SEQ ID NO: 2167123 - RNA, 19 nt, Artificial Sequence
  Description of Artificial Sequence: Synthetic oligonucleotide
  Antisense strand to SEQ ID NO: 2167122
gugaguagcacauaaaugc

SEQ ID NO: 2167124 - RNA, 19 nt, Artificial Sequence
  Description of Artificial Sequence: Synthetic oligonucleotide
  Sense strand starting at position 1137 of SEQ ID NO: 1883067
gcgcucgaccaggaaagau

SEQ ID NO: 2167125 - RNA, 19 nt, Artificial Sequence
  Description of Artificial Sequence: Synthetic oligonucleotide
  Antisense strand to SEQ ID NO: 2167124
aucuuuccuggucgagcgc

SEQ ID NO: 2167126 - RNA, 19 nt, Artificial Sequence
  Description of Artificial Sequence: Synthetic oligonucleotide
  Sense strand starting at position 2296 of SEQ ID NO: 1883067
guccaaccucccuggaaau

SEQ ID NO: 2167127 - RNA, 19 nt, Artificial Sequence
  Description of Artificial Sequence: Synthetic oligonucleotide
  Antisense strand to SEQ ID NO: 2167126
auuuccagggagguuggac

SEQ ID NO: 2167128 - RNA, 19 nt, Artificial Sequence
  Description of Artificial Sequence: Synthetic oligonucleotide
  Sense strand starting at position 2542 of SEQ ID NO: 1883067
acgugaaaucccuauagac

SEQ ID NO: 2167129 - RNA, 19 nt, Artificial Sequence
  Description of Artificial Sequence: Synthetic oligonucleotide
  Antisense strand to SEQ ID NO: 2167128
gucuauagggauuucacgu

SEQ ID NO: 2167130 - RNA, 19 nt, Artificial Sequence
  Description of Artificial Sequence: Synthetic oligonucleotide
  Sense strand starting at position 2875 of SEQ ID NO: 1883067
guaugugauuucuggcuag

SEQ ID NO: 2167131 - RNA, 19 nt, Artificial Sequence
  Description of Artificial Sequence: Synthetic oligonucleotide
  Antisense strand to SEQ ID NO: 2167130
cuagccagaaaucacauac

SEQ ID NO: 2167132 - RNA, 19 nt, Artificial Sequence
  Description of Artificial Sequence: Synthetic oligonucleotide
  Sense strand starting at position 2878 of SEQ ID NO: 1883067
ugugauuucuggcuaguaa

SEQ ID NO: 2167133 - RNA, 19 nt, Artificial Sequence
  Description of Artificial Sequence: Synthetic oligonucleotide
  Antisense strand to SEQ ID NO: 2167132
uuacuagccagaaaucaca

SEQ ID NO: 2167134 - RNA, 19 nt, Artificial Sequence
  Description of Artificial Sequence: Synthetic oligonucleotide
  Sense strand starting at position 2882 of SEQ ID NO: 1883067
auuucuggcuaguaagcua

SEQ ID NO: 2167135 - RNA, 19 nt, Artificial Sequence
  Description of Artificial Sequence: Synthetic oligonucleotide
  Antisense strand to SEQ ID NO: 2167134
uagcuuacuagccagaaau

SEQ ID NO: 2167136 - RNA, 19 nt, Artificial Sequence
  Description of Artificial Sequence: Synthetic oligonucleotide
  Sense strand starting at position 3458 of SEQ ID NO: 1883067
uagacagacuuuggugaga

SEQ ID NO: 2167137 - RNA, 19 nt, Artificial Sequence
  Description of Artificial Sequence: Synthetic oligonucleotide
  Antisense strand to SEQ ID NO: 2167136
ucucaccaaagucugucua

SEQ ID NO: 2167138 - RNA, 19 nt, Artificial Sequence
  Description of Artificial Sequence: Synthetic oligonucleotide
  Sense strand starting at position 3460 of SEQ ID NO: 1883067
gacagacuuuggugagauu

SEQ ID NO: 2167139 - RNA, 19 nt, Artificial Sequence
  Description of Artificial Sequence: Synthetic oligonucleotide
  Antisense strand to SEQ ID NO: 2167138
aaucucaccaaagucuguc

SEQ ID NO: 2167140 - RNA, 19 nt, Artificial Sequence
  Description of Artificial Sequence: Synthetic oligonucleotide
  Sense strand starting at position 3463 of SEQ ID NO: 1883067
agacuuuggugagauucuu

SEQ ID NO: 2167141 - RNA, 19 nt, Artificial Sequence
  Description of Artificial Sequence: Synthetic oligonucleotide
  Antisense strand to SEQ ID NO: 2167140
aagaaucucaccaaagucu

SEQ ID NO: 2167142 - RNA, 19 nt, Artificial Sequence
  Description of Artificial Sequence: Synthetic oligonucleotide
  Sense strand starting at position 3469 of SEQ ID NO: 1883067
uggugagauucuuagcaac

SEQ ID NO: 2167143 - RNA, 19 nt, Artificial Sequence
  Description of Artificial Sequence: Synthetic oligonucleotide
  Antisense strand to SEQ ID NO: 2167142
guugcuaagaaucucacca

SEQ ID NO: 2167144 - RNA, 19 nt, Artificial Sequence
  Description of Artificial Sequence: Synthetic oligonucleotide
  Sense strand starting at position 3537 of SEQ ID NO: 1883067
ggccuacaauguguuaaau

SEQ ID NO: 2167145 - RNA, 19 nt, Artificial Sequence
  Description of Artificial Sequence: Synthetic oligonucleotide
  Antisense strand to SEQ ID NO: 2167144
auuuaacacauuguaggcc

SEQ ID NO: 2167146 - RNA, 19 nt, Artificial Sequence
  Description of Artificial Sequence: Synthetic oligonucleotide
  Sense strand starting at position 3635 of SEQ ID NO: 1883067
acuggaacuugcuaaguua

SEQ ID NO: 2167147 - RNA, 19 nt, Artificial Sequence
  Description of Artificial Sequence: Synthetic oligonucleotide
  Antisense strand to SEQ ID NO: 2167146
uaacuuagcaaguuccagu

SEQ ID NO: 2167148 - RNA, 19 nt, Artificial Sequence
  Description of Artificial Sequence: Synthetic oligonucleotide
  Sense strand starting at position 3642 of SEQ ID NO: 1883067
cuugcuaaguuagugaaca

SEQ ID NO: 2167149 - RNA, 19 nt, Artificial Sequence
  Description of Artificial Sequence: Synthetic oligonucleotide
  Antisense strand to SEQ ID NO: 2167148
uguucacuaacuuagcaag

SEQ ID NO: 2167150 - RNA, 19 nt, Artificial Sequence
  Description of Artificial Sequence: Synthetic oligonucleotide
  Sense strand starting at position 263 of SEQ ID NO: 1883068
gccugagaauuccuugaac

SEQ ID NO: 2167151 - RNA, 19 nt, Artificial Sequence
  Description of Artificial Sequence: Synthetic oligonucleotide
  Antisense strand to SEQ ID NO: 2167150
guucaaggaauucucaggc

SEQ ID NO: 2167152 - RNA, 19 nt, Artificial Sequence
  Description of Artificial Sequence: Synthetic oligonucleotide
  Sense strand starting at position 396 of SEQ ID NO: 1883068
ccauauuguuuagggauac

SEQ ID NO: 2167153 - RNA, 19 nt, Artificial Sequence
  Description of Artificial Sequence: Synthetic oligonucleotide
  Antisense strand to SEQ ID NO: 2167152
guaucccuaaacaauaugg

SEQ ID NO: 2167154 - RNA, 19 nt, Artificial Sequence
  Description of Artificial Sequence: Synthetic oligonucleotide
  Sense strand starting at position 397 of SEQ ID NO: 1883068
cauauuguuuagggauacu

SEQ ID NO: 2167155 - RNA, 19 nt, Artificial Sequence
  Description of Artificial Sequence: Synthetic oligonucleotide
  Antisense strand to SEQ ID NO: 2167154
aguaucccuaaacaauaug

SEQ ID NO: 2167156 - RNA, 19 nt, Artificial Sequence
  Description of Artificial Sequence: Synthetic oligonucleotide
  Sense strand starting at position 578 of SEQ ID NO: 1883068
gcauuuaugugcuacucac

SEQ ID NO: 2167157 - RNA, 19 nt, Artificial Sequence
  Description of Artificial Sequence: Synthetic oligonucleotide
  Antisense strand to SEQ ID NO: 2167156
gugaguagcacauaaaugc

SEQ ID NO: 2167158 - RNA, 19 nt, Artificial Sequence
  Description of Artificial Sequence: Synthetic oligonucleotide
  Sense strand starting at position 1123 of SEQ ID NO: 1883068
gcgcucgaccaggaaagau

SEQ ID NO: 2167159 - RNA, 19 nt, Artificial Sequence
  Description of Artificial Sequence: Synthetic oligonucleotide
  Antisense strand to SEQ ID NO: 2167158
aucuuuccuggucgagcgc

SEQ ID NO: 2167160 - RNA, 19 nt, Artificial Sequence
  Description of Artificial Sequence: Synthetic oligonucleotide
  Sense strand starting at position 2282 of SEQ ID NO: 1883068
guccaaccucccuggaaau

SEQ ID NO: 2167161 - RNA, 19 nt, Artificial Sequence
  Description of Artificial Sequence: Synthetic oligonucleotide
  Antisense strand to SEQ ID NO: 2167160
auuuccagggagguuggac

SEQ ID NO: 2167162 - RNA, 19 nt, Artificial Sequence
  Description of Artificial Sequence: Synthetic oligonucleotide
  Sense strand starting at position 2528 of SEQ ID NO: 1883068
acgugaaaucccuauagac

SEQ ID NO: 2167163 - RNA, 19 nt, Artificial Sequence
  Description of Artificial Sequence: Synthetic oligonucleotide
  Antisense strand to SEQ ID NO: 2167162
gucuauagggauuucacgu

SEQ ID NO: 2167164 - RNA, 19 nt, Artificial Sequence
  Description of Artificial Sequence: Synthetic oligonucleotide
  Sense strand starting at position 2861 of SEQ ID NO: 1883068
guaugugauuucuggcuag

SEQ ID NO: 2167165 - RNA, 19 nt, Artificial Sequence
  Description of Artificial Sequence: Synthetic oligonucleotide
  Antisense strand to SEQ ID NO: 2167164
cuagccagaaaucacauac

SEQ ID NO: 2167166 - RNA, 19 nt, Artificial Sequence
  Description of Artificial Sequence: Synthetic oligonucleotide
  Sense strand starting at position 2864 of SEQ ID NO: 1883068
ugugauuucuggcuaguaa

SEQ ID NO: 2167167 - RNA, 19 nt, Artificial Sequence
  Description of Artificial Sequence: Synthetic oligonucleotide
  Antisense strand to SEQ ID NO: 2167166
uuacuagccagaaaucaca

SEQ ID NO: 2167168 - RNA, 19 nt, Artificial Sequence
  Description of Artificial Sequence: Synthetic oligonucleotide
  Sense strand starting at position 2868 of SEQ ID NO: 1883068
auuucuggcuaguaagcua

SEQ ID NO: 2167169 - RNA, 19 nt, Artificial Sequence
  Description of Artificial Sequence: Synthetic oligonucleotide
  Antisense strand to SEQ ID NO: 2167168
uagcuuacuagccagaaau

SEQ ID NO: 2167170 - RNA, 19 nt, Artificial Sequence
  Description of Artificial Sequence: Synthetic oligonucleotide
  Sense strand starting at position 3444 of SEQ ID NO: 1883068
uagacagacuuuggugaga

SEQ ID NO: 2167171 - RNA, 19 nt, Artificial Sequence
  Description of Artificial Sequence: Synthetic oligonucleotide
  Antisense strand to SEQ ID NO: 2167170
ucucaccaaagucugucua

SEQ ID NO: 2167172 - RNA, 19 nt, Artificial Sequence
  Description of Artificial Sequence: Synthetic oligonucleotide
  Sense strand starting at position 3446 of SEQ ID NO: 1883068
gacagacuuuggugagauu

SEQ ID NO: 2167173 - RNA, 19 nt, Artificial Sequence
  Description of Artificial Sequence: Synthetic oligonucleotide
  Antisense strand to SEQ ID NO: 2167172
aaucucaccaaagucuguc

SEQ ID NO: 2167174 - RNA, 19 nt, Artificial Sequence
  Description of Artificial Sequence: Synthetic oligonucleotide
  Sense strand starting at position 3449 of SEQ ID NO: 1883068
agacuuuggugagauucuu

SEQ ID NO: 2167175 - RNA, 19 nt, Artificial Sequence
  Description of Artificial Sequence: Synthetic oligonucleotide
  Antisense strand to SEQ ID NO: 2167174
aagaaucucaccaaagucu

SEQ ID NO: 2167176 - RNA, 19 nt, Artificial Sequence
  Description of Artificial Sequence: Synthetic oligonucleotide
  Sense strand starting at position 3455 of SEQ ID NO: 1883068
uggugagauucuuagcaac

SEQ ID NO: 2167177 - RNA, 19 nt, Artificial Sequence
  Description of Artificial Sequence: Synthetic oligonucleotide
  Antisense strand to SEQ ID NO: 2167176
guugcuaagaaucucacca

SEQ ID NO: 2167178 - RNA, 19 nt, Artificial Sequence
  Description of Artificial Sequence: Synthetic oligonucleotide
  Sense strand starting at position 3523 of SEQ ID NO: 1883068
ggccuacaauguguuaaau

SEQ ID NO: 2167179 - RNA, 19 nt, Artificial Sequence
  Description of Artificial Sequence: Synthetic oligonucleotide
  Antisense strand to SEQ ID NO: 2167178
auuuaacacauuguaggcc

SEQ ID NO: 2167180 - RNA, 19 nt, Artificial Sequence
  Description of Artificial Sequence: Synthetic oligonucleotide
  Sense strand starting at position 3621 of SEQ ID NO: 1883068
acuggaacuugcuaaguua

SEQ ID NO: 2167181 - RNA, 19 nt, Artificial Sequence
  Description of Artificial Sequence: Synthetic oligonucleotide
  Antisense strand to SEQ ID NO: 2167180
uaacuuagcaaguuccagu

SEQ ID NO: 2167182 - RNA, 19 nt, Artificial Sequence
  Description of Artificial Sequence: Synthetic oligonucleotide
  Sense strand starting at position 3628 of SEQ ID NO: 1883068
cuugcuaaguuagugaaca

SEQ ID NO: 2167183 - RNA, 19 nt, Artificial Sequence
  Description of Artificial Sequence: Synthetic oligonucleotide
  Antisense strand to SEQ ID NO: 2167182
uguucacuaacuuagcaag

SEQ ID NO: 2167184 - RNA, 19 nt, Artificial Sequence
  Description of Artificial Sequence: Synthetic oligonucleotide
  Sense strand starting at position 10 of SEQ ID NO: 1883069
auagaaguggcucaauauu

SEQ ID NO: 2167185 - RNA, 19 nt, Artificial Sequence
  Description of Artificial Sequence: Synthetic oligonucleotide
  Antisense strand to SEQ ID NO: 2167184
aauauugagccacuucuau

SEQ ID NO: 2167186 - RNA, 19 nt, Artificial Sequence
  Description of Artificial Sequence: Synthetic oligonucleotide
  Sense strand starting at position 31 of SEQ ID NO: 1883069
ugaagugaaugacuugcua

SEQ ID NO: 2167187 - RNA, 19 nt, Artificial Sequence
  Description of Artificial Sequence: Synthetic oligonucleotide
  Antisense strand to SEQ ID NO: 2167186
uagcaagucauucacuuca

SEQ ID NO: 2167188 - RNA, 19 nt, Artificial Sequence
  Description of Artificial Sequence: Synthetic oligonucleotide
  Sense strand starting at position 199 of SEQ ID NO: 1883069
ucaguugagucacuuacua

SEQ ID NO: 2167189 - RNA, 19 nt, Artificial Sequence
  Description of Artificial Sequence: Synthetic oligonucleotide
  Antisense strand to SEQ ID NO: 2167188
uaguaagugacucaacuga

SEQ ID NO: 2167190 - RNA, 19 nt, Artificial Sequence
  Description of Artificial Sequence: Synthetic oligonucleotide
  Sense strand starting at position 203 of SEQ ID NO: 1883069
uugagucacuuacuacuuu

SEQ ID NO: 2167191 - RNA, 19 nt, Artificial Sequence
  Description of Artificial Sequence: Synthetic oligonucleotide
  Antisense strand to SEQ ID NO: 2167190
aaaguaguaagugacucaa

SEQ ID NO: 2167192 - RNA, 19 nt, Artificial Sequence
  Description of Artificial Sequence: Synthetic oligonucleotide
  Sense strand starting at position 232 of SEQ ID NO: 1883069
agagauuucucagagagca

SEQ ID NO: 2167193 - RNA, 19 nt, Artificial Sequence
  Description of Artificial Sequence: Synthetic oligonucleotide
  Antisense strand to SEQ ID NO: 2167192
ugcucucugagaaaucucu

SEQ ID NO: 2167194 - RNA, 19 nt, Artificial Sequence
  Description of Artificial Sequence: Synthetic oligonucleotide
  Sense strand starting at position 322 of SEQ ID NO: 1883069
auuaguuaccauggaaguu

SEQ ID NO: 2167195 - RNA, 19 nt, Artificial Sequence
  Description of Artificial Sequence: Synthetic oligonucleotide
  Antisense strand to SEQ ID NO: 2167194
aacuuccaugguaacuaau

SEQ ID NO: 2167196 - RNA, 19 nt, Artificial Sequence
  Description of Artificial Sequence: Synthetic oligonucleotide
  Sense strand starting at position 540 of SEQ ID NO: 1883069
agucaaagcccauguuaag

SEQ ID NO: 2167197 - RNA, 19 nt, Artificial Sequence
  Description of Artificial Sequence: Synthetic oligonucleotide
  Antisense strand to SEQ ID NO: 2167196
cuuaacaugggcuuugacu

SEQ ID NO: 2167198 - RNA, 19 nt, Artificial Sequence
  Description of Artificial Sequence: Synthetic oligonucleotide
  Sense strand starting at position 849 of SEQ ID NO: 1883069
acuuguuuccaguaaccaa

SEQ ID NO: 2167199 - RNA, 19 nt, Artificial Sequence
  Description of Artificial Sequence: Synthetic oligonucleotide
  Antisense strand to SEQ ID NO: 2167198
uugguuacuggaaacaagu

SEQ ID NO: 2167200 - RNA, 19 nt, Artificial Sequence
  Description of Artificial Sequence: Synthetic oligonucleotide
  Sense strand starting at position 1026 of SEQ ID NO: 1883069
aaagguuaaucuguguaug

SEQ ID NO: 2167201 - RNA, 19 nt, Artificial Sequence
  Description of Artificial Sequence: Synthetic oligonucleotide
  Antisense strand to SEQ ID NO: 2167200
cauacacagauuaaccuuu

SEQ ID NO: 2167202 - RNA, 19 nt, Artificial Sequence
  Description of Artificial Sequence: Synthetic oligonucleotide
  Sense strand starting at position 1028 of SEQ ID NO: 1883069
agguuaaucuguguaugga

SEQ ID NO: 2167203 - RNA, 19 nt, Artificial Sequence
  Description of Artificial Sequence: Synthetic oligonucleotide
  Antisense strand to SEQ ID NO: 2167202
uccauacacagauuaaccu

SEQ ID NO: 2167204 - RNA, 19 nt, Artificial Sequence
  Description of Artificial Sequence: Synthetic oligonucleotide
  Sense strand starting at position 1029 of SEQ ID NO: 1883069
gguuaaucuguguauggac

SEQ ID NO: 2167205 - RNA, 19 nt, Artificial Sequence
  Description of Artificial Sequence: Synthetic oligonucleotide
  Antisense strand to SEQ ID NO: 2167204
guccauacacagauuaacc

SEQ ID NO: 2167206 - RNA, 19 nt, Artificial Sequence
  Description of Artificial Sequence: Synthetic oligonucleotide
  Sense strand starting at position 1031 of SEQ ID NO: 1883069
uuaaucuguguauggacua

SEQ ID NO: 2167207 - RNA, 19 nt, Artificial Sequence
  Description of Artificial Sequence: Synthetic oligonucleotide
  Antisense strand to SEQ ID NO: 2167206
uaguccauacacagauuaa

SEQ ID NO: 2167208 - RNA, 19 nt, Artificial Sequence
  Description of Artificial Sequence: Synthetic oligonucleotide
  Sense strand starting at position 1172 of SEQ ID NO: 1883069
uugaaaugguacuuuacua

SEQ ID NO: 2167209 - RNA, 19 nt, Artificial Sequence
  Description of Artificial Sequence: Synthetic oligonucleotide
  Antisense strand to SEQ ID NO: 2167208
uaguaaaguaccauuucaa

SEQ ID NO: 2167210 - RNA, 19 nt, Artificial Sequence
  Description of Artificial Sequence: Synthetic oligonucleotide
  Sense strand starting at position 1314 of SEQ ID NO: 1883069
ugguaauccgcagggagaa

SEQ ID NO: 2167211 - RNA, 19 nt, Artificial Sequence
  Description of Artificial Sequence: Synthetic oligonucleotide
  Antisense strand to SEQ ID NO: 2167210
uucucccugcggauuacca

SEQ ID NO: 2167212 - RNA, 19 nt, Artificial Sequence
  Description of Artificial Sequence: Synthetic oligonucleotide
  Sense strand starting at position 1315 of SEQ ID NO: 1883069
gguaauccgcagggagaaa

SEQ ID NO: 2167213 - RNA, 19 nt, Artificial Sequence
  Description of Artificial Sequence: Synthetic oligonucleotide
  Antisense strand to SEQ ID NO: 2167212
uuucucccugcggauuacc

SEQ ID NO: 2167214 - RNA, 19 nt, Artificial Sequence
  Description of Artificial Sequence: Synthetic oligonucleotide
  Sense strand starting at position 1414 of SEQ ID NO: 1883069
uggcuuucgcaggaacaca

SEQ ID NO: 2167215 - RNA, 19 nt, Artificial Sequence
  Description of Artificial Sequence: Synthetic oligonucleotide
  Antisense strand to SEQ ID NO: 2167214
uguguuccugcgaaagcca

SEQ ID NO: 2167216 - RNA, 19 nt, Artificial Sequence
  Description of Artificial Sequence: Synthetic oligonucleotide
  Sense strand starting at position 1514 of SEQ ID NO: 1883069
acagaauaaucucugcagu

SEQ ID NO: 2167217 - RNA, 19 nt, Artificial Sequence
  Description of Artificial Sequence: Synthetic oligonucleotide
  Antisense strand to SEQ ID NO: 2167216
acugcagagauuauucugu

SEQ ID NO: 2167218 - RNA, 19 nt, Artificial Sequence
  Description of Artificial Sequence: Synthetic oligonucleotide
  Sense strand starting at position 1551 of SEQ ID NO: 1883069
cuccuauccgagggaguuu

SEQ ID NO: 2167219 - RNA, 19 nt, Artificial Sequence
  Description of Artificial Sequence: Synthetic oligonucleotide
  Antisense strand to SEQ ID NO: 2167218
aaacucccucggauaggag

SEQ ID NO: 2167220 - RNA, 19 nt, Artificial Sequence
  Description of Artificial Sequence: Synthetic oligonucleotide
  Sense strand starting at position 1622 of SEQ ID NO: 1883069
agacguuugggauagggua

SEQ ID NO: 2167221 - RNA, 19 nt, Artificial Sequence
  Description of Artificial Sequence: Synthetic oligonucleotide
  Antisense strand to SEQ ID NO: 2167220
uacccuaucccaaacgucu

SEQ ID NO: 2167222 - RNA, 19 nt, Artificial Sequence
  Description of Artificial Sequence: Synthetic oligonucleotide
  Sense strand starting at position 1624 of SEQ ID NO: 1883069
acguuugggauaggguaaa

SEQ ID NO: 2167223 - RNA, 19 nt, Artificial Sequence
  Description of Artificial Sequence: Synthetic oligonucleotide
  Antisense strand to SEQ ID NO: 2167222
uuuacccuaucccaaacgu

SEQ ID NO: 2167224 - RNA, 19 nt, Artificial Sequence
  Description of Artificial Sequence: Synthetic oligonucleotide
  Sense strand starting at position 1685 of SEQ ID NO: 1883069
cuuggaggcuugucagaag

SEQ ID NO: 2167225 - RNA, 19 nt, Artificial Sequence
  Description of Artificial Sequence: Synthetic oligonucleotide
  Antisense strand to SEQ ID NO: 2167224
cuucugacaagccuccaag

SEQ ID NO: 2167226 - RNA, 19 nt, Artificial Sequence
  Description of Artificial Sequence: Synthetic oligonucleotide
  Sense strand starting at position 1749 of SEQ ID NO: 1883069
gugggaaucgcguaagaaa

SEQ ID NO: 2167227 - RNA, 19 nt, Artificial Sequence
  Description of Artificial Sequence: Synthetic oligonucleotide
  Antisense strand to SEQ ID NO: 2167226
uuucuuacgcgauucccac

SEQ ID NO: 2167228 - RNA, 19 nt, Artificial Sequence
  Description of Artificial Sequence: Synthetic oligonucleotide
  Sense strand starting at position 1827 of SEQ ID NO: 1883069
aggcuugacuauucuaaag

SEQ ID NO: 2167229 - RNA, 19 nt, Artificial Sequence
  Description of Artificial Sequence: Synthetic oligonucleotide
  Antisense strand to SEQ ID NO: 2167228
cuuuagaauagucaagccu

SEQ ID NO: 2167230 - RNA, 19 nt, Artificial Sequence
  Description of Artificial Sequence: Synthetic oligonucleotide
  Sense strand starting at position 2689 of SEQ ID NO: 1883069
gacauugucccagguagga

SEQ ID NO: 2167231 - RNA, 19 nt, Artificial Sequence
  Description of Artificial Sequence: Synthetic oligonucleotide
  Antisense strand to SEQ ID NO: 2167230
uccuaccugggacaauguc

SEQ ID NO: 2167232 - RNA, 19 nt, Artificial Sequence
  Description of Artificial Sequence: Synthetic oligonucleotide
  Sense strand starting at position 2833 of SEQ ID NO: 1883069
agcagucauuugguuuauu

SEQ ID NO: 2167233 - RNA, 19 nt, Artificial Sequence
  Description of Artificial Sequence: Synthetic oligonucleotide
  Antisense strand to SEQ ID NO: 2167232
aauaaaccaaaugacugcu

SEQ ID NO: 2167234 - RNA, 19 nt, Artificial Sequence
  Description of Artificial Sequence: Synthetic oligonucleotide
  Sense strand starting at position 3063 of SEQ ID NO: 1883069
uggagaaggauugguguca

SEQ ID NO: 2167235 - RNA, 19 nt, Artificial Sequence
  Description of Artificial Sequence: Synthetic oligonucleotide
  Antisense strand to SEQ ID NO: 2167234
ugacaccaauccuucucca

SEQ ID NO: 2167236 - RNA, 19 nt, Artificial Sequence
  Description of Artificial Sequence: Synthetic oligonucleotide
  Sense strand starting at position 3122 of SEQ ID NO: 1883069
caguccaggccauaguuaa

SEQ ID NO: 2167237 - RNA, 19 nt, Artificial Sequence
  Description of Artificial Sequence: Synthetic oligonucleotide
  Antisense strand to SEQ ID NO: 2167236
uuaacuauggccuggacug

SEQ ID NO: 2167238 - RNA, 19 nt, Artificial Sequence
  Description of Artificial Sequence: Synthetic oligonucleotide
  Sense strand starting at position 3140 of SEQ ID NO: 1883069
auuaucgcucaucaguaua

SEQ ID NO: 2167239 - RNA, 19 nt, Artificial Sequence
  Description of Artificial Sequence: Synthetic oligonucleotide
  Antisense strand to SEQ ID NO: 2167238
uauacugaugagcgauaau

SEQ ID NO: 2167240 - RNA, 19 nt, Artificial Sequence
  Description of Artificial Sequence: Synthetic oligonucleotide
  Sense strand starting at position 3143 of SEQ ID NO: 1883069
aucgcucaucaguauagga

SEQ ID NO: 2167241 - RNA, 19 nt, Artificial Sequence
  Description of Artificial Sequence: Synthetic oligonucleotide
  Antisense strand to SEQ ID NO: 2167240
uccuauacugaugagcgau

SEQ ID NO: 2167242 - RNA, 19 nt, Artificial Sequence
  Description of Artificial Sequence: Synthetic oligonucleotide
  Sense strand starting at position 3145 of SEQ ID NO: 1883069
cgcucaucaguauaggaga

SEQ ID NO: 2167243 - RNA, 19 nt, Artificial Sequence
  Description of Artificial Sequence: Synthetic oligonucleotide
  Antisense strand to SEQ ID NO: 2167242
ucuccuauacugaugagcg

SEQ ID NO: 2167244 - RNA, 19 nt, Artificial Sequence
  Description of Artificial Sequence: Synthetic oligonucleotide
  Sense strand starting at position 3452 of SEQ ID NO: 1883069
uuugcaggauguuuagaaa

SEQ ID NO: 2167245 - RNA, 19 nt, Artificial Sequence
  Description of Artificial Sequence: Synthetic oligonucleotide
  Antisense strand to SEQ ID NO: 2167244
uuucuaaacauccugcaaa

SEQ ID NO: 2167246 - RNA, 19 nt, Artificial Sequence
  Description of Artificial Sequence: Synthetic oligonucleotide
  Sense strand starting at position 3557 of SEQ ID NO: 1883069
agacaauauugagaaugac

SEQ ID NO: 2167247 - RNA, 19 nt, Artificial Sequence
  Description of Artificial Sequence: Synthetic oligonucleotide
  Antisense strand to SEQ ID NO: 2167246
gucauucucaauauugucu

SEQ ID NO: 2167248 - RNA, 19 nt, Artificial Sequence
  Description of Artificial Sequence: Synthetic oligonucleotide
  Sense strand starting at position 3571 of SEQ ID NO: 1883069
augacaacuugagcaaauu

SEQ ID NO: 2167249 - RNA, 19 nt, Artificial Sequence
  Description of Artificial Sequence: Synthetic oligonucleotide
  Antisense strand to SEQ ID NO: 2167248
aauuugcucaaguugucau

SEQ ID NO: 2167250 - RNA, 19 nt, Artificial Sequence
  Description of Artificial Sequence: Synthetic oligonucleotide
  Sense strand starting at position 3584 of SEQ ID NO: 1883069
caaauugugcaguaaggaa

SEQ ID NO: 2167251 - RNA, 19 nt, Artificial Sequence
  Description of Artificial Sequence: Synthetic oligonucleotide
  Antisense strand to SEQ ID NO: 2167250
uuccuuacugcacaauuug

SEQ ID NO: 2167252 - RNA, 19 nt, Artificial Sequence
  Description of Artificial Sequence: Synthetic oligonucleotide
  Sense strand starting at position 3650 of SEQ ID NO: 1883069
aaauguggugaaugaacau

SEQ ID NO: 2167253 - RNA, 19 nt, Artificial Sequence
  Description of Artificial Sequence: Synthetic oligonucleotide
  Antisense strand to SEQ ID NO: 2167252
auguucauucaccacauuu

SEQ ID NO: 2167254 - RNA, 19 nt, Artificial Sequence
  Description of Artificial Sequence: Synthetic oligonucleotide
  Sense strand starting at position 3656 of SEQ ID NO: 1883069
ggugaaugaacauaguugu

SEQ ID NO: 2167255 - RNA, 19 nt, Artificial Sequence
  Description of Artificial Sequence: Synthetic oligonucleotide
  Antisense strand to SEQ ID NO: 2167254
acaacuauguucauucacc

SEQ ID NO: 2167256 - RNA, 19 nt, Artificial Sequence
  Description of Artificial Sequence: Synthetic oligonucleotide
  Sense strand starting at position 3659 of SEQ ID NO: 1883069
gaaugaacauaguuguauu

SEQ ID NO: 2167257 - RNA, 19 nt, Artificial Sequence
  Description of Artificial Sequence: Synthetic oligonucleotide
  Antisense strand to SEQ ID NO: 2167256
aauacaacuauguucauuc

SEQ ID NO: 2167258 - RNA, 19 nt, Artificial Sequence
  Description of Artificial Sequence: Synthetic oligonucleotide
  Sense strand starting at position 3718 of SEQ ID NO: 1883069
aagaaaggauuguaaauga

SEQ ID NO: 2167259 - RNA, 19 nt, Artificial Sequence
  Description of Artificial Sequence: Synthetic oligonucleotide
  Antisense strand to SEQ ID NO: 2167258
ucauuuacaauccuuucuu

SEQ ID NO: 2167260 - RNA, 19 nt, Artificial Sequence
  Description of Artificial Sequence: Synthetic oligonucleotide
  Sense strand starting at position 3725 of SEQ ID NO: 1883069
gauuguaaaugaguuagaa

SEQ ID NO: 2167261 - RNA, 19 nt, Artificial Sequence
  Description of Artificial Sequence: Synthetic oligonucleotide
  Antisense strand to SEQ ID NO: 2167260
uucuaacucauuuacaauc

SEQ ID NO: 2167262 - RNA, 19 nt, Artificial Sequence
  Description of Artificial Sequence: Synthetic oligonucleotide
  Sense strand starting at position 3789 of SEQ ID NO: 1883069
aggcgugauaaaggacaua

SEQ ID NO: 2167263 - RNA, 19 nt, Artificial Sequence
  Description of Artificial Sequence: Synthetic oligonucleotide
  Antisense strand to SEQ ID NO: 2167262
uauguccuuuaucacgccu

SEQ ID NO: 2167264 - RNA, 19 nt, Artificial Sequence
  Description of Artificial Sequence: Synthetic oligonucleotide
  Sense strand starting at position 13 of SEQ ID NO: 1883070
gugucaguaccuuuaucgu

SEQ ID NO: 2167265 - RNA, 19 nt, Artificial Sequence
  Description of Artificial Sequence: Synthetic oligonucleotide
  Antisense strand to SEQ ID NO: 2167264
acgauaaagguacugacac

SEQ ID NO: 2167266 - RNA, 19 nt, Artificial Sequence
  Description of Artificial Sequence: Synthetic oligonucleotide
  Sense strand starting at position 413 of SEQ ID NO: 1883070
ggacuuccacaauguaaac

SEQ ID NO: 2167267 - RNA, 19 nt, Artificial Sequence
  Description of Artificial Sequence: Synthetic oligonucleotide
  Antisense strand to SEQ ID NO: 2167266
guuuacauuguggaagucc

SEQ ID NO: 2167268 - RNA, 19 nt, Artificial Sequence
  Description of Artificial Sequence: Synthetic oligonucleotide
  Sense strand starting at position 512 of SEQ ID NO: 1883070
uuugaagauuccgugggau

SEQ ID NO: 2167269 - RNA, 19 nt, Artificial Sequence
  Description of Artificial Sequence: Synthetic oligonucleotide
  Antisense strand to SEQ ID NO: 2167268
aucccacggaaucuucaaa

SEQ ID NO: 2167270 - RNA, 19 nt, Artificial Sequence
  Description of Artificial Sequence: Synthetic oligonucleotide
  Sense strand starting at position 514 of SEQ ID NO: 1883070
ugaagauuccgugggauua

SEQ ID NO: 2167271 - RNA, 19 nt, Artificial Sequence
  Description of Artificial Sequence: Synthetic oligonucleotide
  Antisense strand to SEQ ID NO: 2167270
uaaucccacggaaucuuca

SEQ ID NO: 2167272 - RNA, 19 nt, Artificial Sequence
  Description of Artificial Sequence: Synthetic oligonucleotide
  Sense strand starting at position 515 of SEQ ID NO: 1883070
gaagauuccgugggauuaa

SEQ ID NO: 2167273 - RNA, 19 nt, Artificial Sequence
  Description of Artificial Sequence: Synthetic oligonucleotide
  Antisense strand to SEQ ID NO: 2167272
uuaaucccacggaaucuuc

SEQ ID NO: 2167274 - RNA, 19 nt, Artificial Sequence
  Description of Artificial Sequence: Synthetic oligonucleotide
  Sense strand starting at position 1122 of SEQ ID NO: 1883070
auggauuacuuugucacaa

SEQ ID NO: 2167275 - RNA, 19 nt, Artificial Sequence
  Description of Artificial Sequence: Synthetic oligonucleotide
  Antisense strand to SEQ ID NO: 2167274
uugugacaaaguaauccau

SEQ ID NO: 2167276 - RNA, 19 nt, Artificial Sequence
  Description of Artificial Sequence: Synthetic oligonucleotide
  Sense strand starting at position 1123 of SEQ ID NO: 1883070
uggauuacuuugucacaac

SEQ ID NO: 2167277 - RNA, 19 nt, Artificial Sequence
  Description of Artificial Sequence: Synthetic oligonucleotide
  Antisense strand to SEQ ID NO: 2167276
guugugacaaaguaaucca

SEQ ID NO: 2167278 - RNA, 19 nt, Artificial Sequence
  Description of Artificial Sequence: Synthetic oligonucleotide
  Sense strand starting at position 1267 of SEQ ID NO: 1883070
gacuauauauucccacgga

SEQ ID NO: 2167279 - RNA, 19 nt, Artificial Sequence
  Description of Artificial Sequence: Synthetic oligonucleotide
  Antisense strand to SEQ ID NO: 2167278
uccgugggaauauauaguc

SEQ ID NO: 2167280 - RNA, 19 nt, Artificial Sequence
  Description of Artificial Sequence: Synthetic oligonucleotide
  Sense strand starting at position 1287 of SEQ ID NO: 1883070
agcauuaaggcuuaaauuc

SEQ ID NO: 2167281 - RNA, 19 nt, Artificial Sequence
  Description of Artificial Sequence: Synthetic oligonucleotide
  Antisense strand to SEQ ID NO: 2167280
gaauuuaagccuuaaugcu

SEQ ID NO: 2167282 - RNA, 19 nt, Artificial Sequence
  Description of Artificial Sequence: Synthetic oligonucleotide
  Sense strand starting at position 1346 of SEQ ID NO: 1883070
ccaagaagcuacuucuaga

SEQ ID NO: 2167283 - RNA, 19 nt, Artificial Sequence
  Description of Artificial Sequence: Synthetic oligonucleotide
  Antisense strand to SEQ ID NO: 2167282
ucuagaaguagcuucuugg

SEQ ID NO: 2167284 - RNA, 19 nt, Artificial Sequence
  Description of Artificial Sequence: Synthetic oligonucleotide
  Sense strand starting at position 1351 of SEQ ID NO: 1883070
aagcuacuucuagaguagu

SEQ ID NO: 2167285 - RNA, 19 nt, Artificial Sequence
  Description of Artificial Sequence: Synthetic oligonucleotide
  Antisense strand to SEQ ID NO: 2167284
acuacucuagaaguagcuu

SEQ ID NO: 2167286 - RNA, 19 nt, Artificial Sequence
  Description of Artificial Sequence: Synthetic oligonucleotide
  Sense strand starting at position 1389 of SEQ ID NO: 1883070
augacuugcccugauuaug

SEQ ID NO: 2167287 - RNA, 19 nt, Artificial Sequence
  Description of Artificial Sequence: Synthetic oligonucleotide
  Antisense strand to SEQ ID NO: 2167286
cauaaucagggcaagucau

SEQ ID NO: 2167288 - RNA, 19 nt, Artificial Sequence
  Description of Artificial Sequence: Synthetic oligonucleotide
  Sense strand starting at position 2164 of SEQ ID NO: 1883070
ugacuuuagaggugacgua

SEQ ID NO: 2167289 - RNA, 19 nt, Artificial Sequence
  Description of Artificial Sequence: Synthetic oligonucleotide
  Antisense strand to SEQ ID NO: 2167288
uacgucaccucuaaaguca

SEQ ID NO: 2167290 - RNA, 19 nt, Artificial Sequence
  Description of Artificial Sequence: Synthetic oligonucleotide
  Sense strand starting at position 2180 of SEQ ID NO: 1883070
guaggauuucguggucuuu

SEQ ID NO: 2167291 - RNA, 19 nt, Artificial Sequence
  Description of Artificial Sequence: Synthetic oligonucleotide
  Antisense strand to SEQ ID NO: 2167290
aaagaccacgaaauccuac

SEQ ID NO: 2167292 - RNA, 19 nt, Artificial Sequence
  Description of Artificial Sequence: Synthetic oligonucleotide
  Sense strand starting at position 2313 of SEQ ID NO: 1883070
ucagauugguagcuuuaca

SEQ ID NO: 2167293 - RNA, 19 nt, Artificial Sequence
  Description of Artificial Sequence: Synthetic oligonucleotide
  Antisense strand to SEQ ID NO: 2167292
uguaaagcuaccaaucuga

SEQ ID NO: 2167294 - RNA, 19 nt, Artificial Sequence
  Description of Artificial Sequence: Synthetic oligonucleotide
  Sense strand starting at position 2324 of SEQ ID NO: 1883070
gcuuuacaagcguugguca

SEQ ID NO: 2167295 - RNA, 19 nt, Artificial Sequence
  Description of Artificial Sequence: Synthetic oligonucleotide
  Antisense strand to SEQ ID NO: 2167294
ugaccaacgcuuguaaagc

SEQ ID NO: 2167296 - RNA, 19 nt, Artificial Sequence
  Description of Artificial Sequence: Synthetic oligonucleotide
  Sense strand starting at position 2329 of SEQ ID NO: 1883070
acaagcguuggucaacuaa

SEQ ID NO: 2167297 - RNA, 19 nt, Artificial Sequence
  Description of Artificial Sequence: Synthetic oligonucleotide
  Antisense strand to SEQ ID NO: 2167296
uuaguugaccaacgcuugu

SEQ ID NO: 2167298 - RNA, 19 nt, Artificial Sequence
  Description of Artificial Sequence: Synthetic oligonucleotide
  Sense strand starting at position 2419 of SEQ ID NO: 1883070
ugcuucuuugcagauauua

SEQ ID NO: 2167299 - RNA, 19 nt, Artificial Sequence
  Description of Artificial Sequence: Synthetic oligonucleotide
  Antisense strand to SEQ ID NO: 2167298
uaauaucugcaaagaagca

SEQ ID NO: 2167300 - RNA, 19 nt, Artificial Sequence
  Description of Artificial Sequence: Synthetic oligonucleotide
  Sense strand starting at position 2431 of SEQ ID NO: 1883070
gauauuacacuuuguggca

SEQ ID NO: 2167301 - RNA, 19 nt, Artificial Sequence
  Description of Artificial Sequence: Synthetic oligonucleotide
  Antisense strand to SEQ ID NO: 2167300
ugccacaaaguguaauauc

SEQ ID NO: 2167302 - RNA, 19 nt, Artificial Sequence
  Description of Artificial Sequence: Synthetic oligonucleotide
  Sense strand starting at position 2493 of SEQ ID NO: 1883070
cagcuugaagguuaaagua

SEQ ID NO: 2167303 - RNA, 19 nt, Artificial Sequence
  Description of Artificial Sequence: Synthetic oligonucleotide
  Antisense strand to SEQ ID NO: 2167302
uacuuuaaccuucaagcug

SEQ ID NO: 2167304 - RNA, 19 nt, Artificial Sequence
  Description of Artificial Sequence: Synthetic oligonucleotide
  Sense strand starting at position 2550 of SEQ ID NO: 1883070
gggugaacauauguauaca

SEQ ID NO: 2167305 - RNA, 19 nt, Artificial Sequence
  Description of Artificial Sequence: Synthetic oligonucleotide
  Antisense strand to SEQ ID NO: 2167304
uguauacauauguucaccc

SEQ ID NO: 2167306 - RNA, 19 nt, Artificial Sequence
  Description of Artificial Sequence: Synthetic oligonucleotide
  Sense strand starting at position 2562 of SEQ ID NO: 1883070
guauacacuguugaaauca

SEQ ID NO: 2167307 - RNA, 19 nt, Artificial Sequence
  Description of Artificial Sequence: Synthetic oligonucleotide
  Antisense strand to SEQ ID NO: 2167306
ugauuucaacaguguauac

SEQ ID NO: 2167308 - RNA, 19 nt, Artificial Sequence
  Description of Artificial Sequence: Synthetic oligonucleotide
  Sense strand starting at position 2633 of SEQ ID NO: 1883070
guuguaauaccugacuccu

SEQ ID NO: 2167309 - RNA, 19 nt, Artificial Sequence
  Description of Artificial Sequence: Synthetic oligonucleotide
  Antisense strand to SEQ ID NO: 2167308
aggagucagguauuacaac

SEQ ID NO: 2167310 - RNA, 19 nt, Artificial Sequence
  Description of Artificial Sequence: Synthetic oligonucleotide
  Sense strand starting at position 2677 of SEQ ID NO: 1883070
accauauauuaguuugcau

SEQ ID NO: 2167311 - RNA, 19 nt, Artificial Sequence
  Description of Artificial Sequence: Synthetic oligonucleotide
  Antisense strand to SEQ ID NO: 2167310
augcaaacuaauauauggu

SEQ ID NO: 2167312 - RNA, 19 nt, Artificial Sequence
  Description of Artificial Sequence: Synthetic oligonucleotide
  Sense strand starting at position 2781 of SEQ ID NO: 1883070
aauuucguccuauguguca

SEQ ID NO: 2167313 - RNA, 19 nt, Artificial Sequence
  Description of Artificial Sequence: Synthetic oligonucleotide
  Antisense strand to SEQ ID NO: 2167312
ugacacauaggacgaaauu

SEQ ID NO: 2167314 - RNA, 19 nt, Artificial Sequence
  Description of Artificial Sequence: Synthetic oligonucleotide
  Sense strand starting at position 2957 of SEQ ID NO: 1883070
cauaucucauggguuagua

SEQ ID NO: 2167315 - RNA, 19 nt, Artificial Sequence
  Description of Artificial Sequence: Synthetic oligonucleotide
  Antisense strand to SEQ ID NO: 2167314
uacuaacccaugagauaug

SEQ ID NO: 2167316 - RNA, 19 nt, Artificial Sequence
  Description of Artificial Sequence: Synthetic oligonucleotide
  Sense strand starting at position 2966 of SEQ ID NO: 1883070
uggguuaguaccuaggagu

SEQ ID NO: 2167317 - RNA, 19 nt, Artificial Sequence
  Description of Artificial Sequence: Synthetic oligonucleotide
  Antisense strand to SEQ ID NO: 2167316
acuccuagguacuaaccca

SEQ ID NO: 2167318 - RNA, 19 nt, Artificial Sequence
  Description of Artificial Sequence: Synthetic oligonucleotide
  Sense strand starting at position 2990 of SEQ ID NO: 1883070
ggccaagucauagaauugu

SEQ ID NO: 2167319 - RNA, 19 nt, Artificial Sequence
  Description of Artificial Sequence: Synthetic oligonucleotide
  Antisense strand to SEQ ID NO: 2167318
acaauucuaugacuuggcc

SEQ ID NO: 2167320 - RNA, 19 nt, Artificial Sequence
  Description of Artificial Sequence: Synthetic oligonucleotide
  Sense strand starting at position 3104 of SEQ ID NO: 1883070
accaucauuugauaugguu

SEQ ID NO: 2167321 - RNA, 19 nt, Artificial Sequence
  Description of Artificial Sequence: Synthetic oligonucleotide
  Antisense strand to SEQ ID NO: 2167320
aaccauaucaaaugauggu

SEQ ID NO: 2167322 - RNA, 19 nt, Artificial Sequence
  Description of Artificial Sequence: Synthetic oligonucleotide
  Sense strand starting at position 3260 of SEQ ID NO: 1883070
aaaugagguguccaagcuu

SEQ ID NO: 2167323 - RNA, 19 nt, Artificial Sequence
  Description of Artificial Sequence: Synthetic oligonucleotide
  Antisense strand to SEQ ID NO: 2167322
aagcuuggacaccucauuu

SEQ ID NO: 2167324 - RNA, 19 nt, Artificial Sequence
  Description of Artificial Sequence: Synthetic oligonucleotide
  Sense strand starting at position 3322 of SEQ ID NO: 1883070
cuuuauauacuguggauaa

SEQ ID NO: 2167325 - RNA, 19 nt, Artificial Sequence
  Description of Artificial Sequence: Synthetic oligonucleotide
  Antisense strand to SEQ ID NO: 2167324
uuauccacaguauauaaag

SEQ ID NO: 2167326 - RNA, 19 nt, Artificial Sequence
  Description of Artificial Sequence: Synthetic oligonucleotide
  Sense strand starting at position 3439 of SEQ ID NO: 1883070
aagucuaauuuaucgguuu

SEQ ID NO: 2167327 - RNA, 19 nt, Artificial Sequence
  Description of Artificial Sequence: Synthetic oligonucleotide
  Antisense strand to SEQ ID NO: 2167326
aaaccgauaaauuagacuu

SEQ ID NO: 2167328 - RNA, 19 nt, Artificial Sequence
  Description of Artificial Sequence: Synthetic oligonucleotide
  Sense strand starting at position 3477 of SEQ ID NO: 1883070
uuguguuguauguaaggaa

SEQ ID NO: 2167329 - RNA, 19 nt, Artificial Sequence
  Description of Artificial Sequence: Synthetic oligonucleotide
  Antisense strand to SEQ ID NO: 2167328
uuccuuacauacaacacaa

SEQ ID NO: 2167330 - RNA, 19 nt, Artificial Sequence
  Description of Artificial Sequence: Synthetic oligonucleotide
  Sense strand starting at position 3703 of SEQ ID NO: 1883070
uuugcacuauugucagaga

SEQ ID NO: 2167331 - RNA, 19 nt, Artificial Sequence
  Description of Artificial Sequence: Synthetic oligonucleotide
  Antisense strand to SEQ ID NO: 2167330
ucucugacaauagugcaaa

SEQ ID NO: 2167332 - RNA, 19 nt, Artificial Sequence
  Description of Artificial Sequence: Synthetic oligonucleotide
  Sense strand starting at position 3830 of SEQ ID NO: 1883070
auuucaugcgaucguagaa

SEQ ID NO: 2167333 - RNA, 19 nt, Artificial Sequence
  Description of Artificial Sequence: Synthetic oligonucleotide
  Antisense strand to SEQ ID NO: 2167332
uucuacgaucgcaugaaau

SEQ ID NO: 2167334 - RNA, 19 nt, Artificial Sequence
  Description of Artificial Sequence: Synthetic oligonucleotide
  Sense strand starting at position 3848 of SEQ ID NO: 1883070
agcaauuugucagcaucua

SEQ ID NO: 2167335 - RNA, 19 nt, Artificial Sequence
  Description of Artificial Sequence: Synthetic oligonucleotide
  Antisense strand to SEQ ID NO: 2167334
uagaugcugacaaauugcu

SEQ ID NO: 2167336 - RNA, 19 nt, Artificial Sequence
  Description of Artificial Sequence: Synthetic oligonucleotide
  Sense strand starting at position 3918 of SEQ ID NO: 1883070
uugggaucacauugaaugu

SEQ ID NO: 2167337 - RNA, 19 nt, Artificial Sequence
  Description of Artificial Sequence: Synthetic oligonucleotide
  Antisense strand to SEQ ID NO: 2167336
acauucaaugugaucccaa

SEQ ID NO: 2167338 - RNA, 19 nt, Artificial Sequence
  Description of Artificial Sequence: Synthetic oligonucleotide
  Sense strand starting at position 3939 of SEQ ID NO: 1883070
acaccaauuugaggagaau

SEQ ID NO: 2167339 - RNA, 19 nt, Artificial Sequence
  Description of Artificial Sequence: Synthetic oligonucleotide
  Antisense strand to SEQ ID NO: 2167338
auucuccucaaauuggugu

SEQ ID NO: 2167340 - RNA, 19 nt, Artificial Sequence
  Description of Artificial Sequence: Synthetic oligonucleotide
  Sense strand starting at position 3956 of SEQ ID NO: 1883070
auggacaucuuagcuauau

SEQ ID NO: 2167341 - RNA, 19 nt, Artificial Sequence
  Description of Artificial Sequence: Synthetic oligonucleotide
  Antisense strand to SEQ ID NO: 2167340
auauagcuaagauguccau

SEQ ID NO: 2167342 - RNA, 19 nt, Artificial Sequence
  Description of Artificial Sequence: Synthetic oligonucleotide
  Sense strand starting at position 3957 of SEQ ID NO: 1883070
uggacaucuuagcuauauu

SEQ ID NO: 2167343 - RNA, 19 nt, Artificial Sequence
  Description of Artificial Sequence: Synthetic oligonucleotide
  Antisense strand to SEQ ID NO: 2167342
aauauagcuaagaugucca

SEQ ID NO: 2167344 - RNA, 19 nt, Artificial Sequence
  Description of Artificial Sequence: Synthetic oligonucleotide
  Sense strand starting at position 200 of SEQ ID NO: 1883071
gacagagcucuuuauuaug

SEQ ID NO: 2167345 - RNA, 19 nt, Artificial Sequence
  Description of Artificial Sequence: Synthetic oligonucleotide
  Antisense strand to SEQ ID NO: 2167344
cauaauaaagagcucuguc

SEQ ID NO: 2167346 - RNA, 19 nt, Artificial Sequence
  Description of Artificial Sequence: Synthetic oligonucleotide
  Sense strand starting at position 225 of SEQ ID NO: 1883071
gauguauuccaggagccca

SEQ ID NO: 2167347 - RNA, 19 nt, Artificial Sequence
  Description of Artificial Sequence: Synthetic oligonucleotide
  Antisense strand to SEQ ID NO: 2167346
ugggcuccuggaauacauc

SEQ ID NO: 2167348 - RNA, 19 nt, Artificial Sequence
  Description of Artificial Sequence: Synthetic oligonucleotide
  Sense strand starting at position 282 of SEQ ID NO: 1883071
aguuguaaggcuuagagau

SEQ ID NO: 2167349 - RNA, 19 nt, Artificial Sequence
  Description of Artificial Sequence: Synthetic oligonucleotide
  Antisense strand to SEQ ID NO: 2167348
aucucuaagccuuacaacu

SEQ ID NO: 2167350 - RNA, 19 nt, Artificial Sequence
  Description of Artificial Sequence: Synthetic oligonucleotide
  Sense strand starting at position 297 of SEQ ID NO: 1883071
agauauuggugcucaguaa

SEQ ID NO: 2167351 - RNA, 19 nt, Artificial Sequence
  Description of Artificial Sequence: Synthetic oligonucleotide
  Antisense strand to SEQ ID NO: 2167350
uuacugagcaccaauaucu

SEQ ID NO: 2167352 - RNA, 19 nt, Artificial Sequence
  Description of Artificial Sequence: Synthetic oligonucleotide
  Sense strand starting at position 298 of SEQ ID NO: 1883071
gauauuggugcucaguaaa

SEQ ID NO: 2167353 - RNA, 19 nt, Artificial Sequence
  Description of Artificial Sequence: Synthetic oligonucleotide
  Antisense strand to SEQ ID NO: 2167352
uuuacugagcaccaauauc

SEQ ID NO: 2167354 - RNA, 19 nt, Artificial Sequence
  Description of Artificial Sequence: Synthetic oligonucleotide
  Sense strand starting at position 301 of SEQ ID NO: 1883071
auuggugcucaguaaauac

SEQ ID NO: 2167355 - RNA, 19 nt, Artificial Sequence
  Description of Artificial Sequence: Synthetic oligonucleotide
  Antisense strand to SEQ ID NO: 2167354
guauuuacugagcaccaau

SEQ ID NO: 2167356 - RNA, 19 nt, Artificial Sequence
  Description of Artificial Sequence: Synthetic oligonucleotide
  Sense strand starting at position 308 of SEQ ID NO: 1883071
cucaguaaauacuugguau

SEQ ID NO: 2167357 - RNA, 19 nt, Artificial Sequence
  Description of Artificial Sequence: Synthetic oligonucleotide
  Antisense strand to SEQ ID NO: 2167356
auaccaaguauuuacugag

SEQ ID NO: 2167358 - RNA, 19 nt, Artificial Sequence
  Description of Artificial Sequence: Synthetic oligonucleotide
  Sense strand starting at position 311 of SEQ ID NO: 1883071
aguaaauacuugguaucac

SEQ ID NO: 2167359 - RNA, 19 nt, Artificial Sequence
  Description of Artificial Sequence: Synthetic oligonucleotide
  Antisense strand to SEQ ID NO: 2167358
gugauaccaaguauuuacu

SEQ ID NO: 2167360 - RNA, 19 nt, Artificial Sequence
  Description of Artificial Sequence: Synthetic oligonucleotide
  Sense strand starting at position 360 of SEQ ID NO: 1883071
gagccuacacuguaguuaa

SEQ ID NO: 2167361 - RNA, 19 nt, Artificial Sequence
  Description of Artificial Sequence: Synthetic oligonucleotide
  Antisense strand to SEQ ID NO: 2167360
uuaacuacaguguaggcuc

SEQ ID NO: 2167362 - RNA, 19 nt, Artificial Sequence
  Description of Artificial Sequence: Synthetic oligonucleotide
  Sense strand starting at position 887 of SEQ ID NO: 1883071
gggagaaccgcuugaacca

SEQ ID NO: 2167363 - RNA, 19 nt, Artificial Sequence
  Description of Artificial Sequence: Synthetic oligonucleotide
  Antisense strand to SEQ ID NO: 2167362
ugguucaagcgguucuccc

SEQ ID NO: 2167364 - RNA, 19 nt, Artificial Sequence
  Description of Artificial Sequence: Synthetic oligonucleotide
  Sense strand starting at position 1348 of SEQ ID NO: 1883071
aucaauacugcuuaggagu

SEQ ID NO: 2167365 - RNA, 19 nt, Artificial Sequence
  Description of Artificial Sequence: Synthetic oligonucleotide
  Antisense strand to SEQ ID NO: 2167364
acuccuaagcaguauugau

SEQ ID NO: 2167366 - RNA, 19 nt, Artificial Sequence
  Description of Artificial Sequence: Synthetic oligonucleotide
  Sense strand starting at position 1354 of SEQ ID NO: 1883071
acugcuuaggaguaguaca

SEQ ID NO: 2167367 - RNA, 19 nt, Artificial Sequence
  Description of Artificial Sequence: Synthetic oligonucleotide
  Antisense strand to SEQ ID NO: 2167366
uguacuacuccuaagcagu

SEQ ID NO: 2167368 - RNA, 19 nt, Artificial Sequence
  Description of Artificial Sequence: Synthetic oligonucleotide
  Sense strand starting at position 1680 of SEQ ID NO: 1883071
ggguuaacuuaagcgagau

SEQ ID NO: 2167369 - RNA, 19 nt, Artificial Sequence
  Description of Artificial Sequence: Synthetic oligonucleotide
  Antisense strand to SEQ ID NO: 2167368
aucucgcuuaaguuaaccc

SEQ ID NO: 2167370 - RNA, 19 nt, Artificial Sequence
  Description of Artificial Sequence: Synthetic oligonucleotide
  Sense strand starting at position 1681 of SEQ ID NO: 1883071
gguuaacuuaagcgagauc

SEQ ID NO: 2167371 - RNA, 19 nt, Artificial Sequence
  Description of Artificial Sequence: Synthetic oligonucleotide
  Antisense strand to SEQ ID NO: 2167370
gaucucgcuuaaguuaacc

SEQ ID NO: 2167372 - RNA, 19 nt, Artificial Sequence
  Description of Artificial Sequence: Synthetic oligonucleotide
  Sense strand starting at position 2047 of SEQ ID NO: 1883071
gaauaaguccucuaggcuc

SEQ ID NO: 2167373 - RNA, 19 nt, Artificial Sequence
  Description of Artificial Sequence: Synthetic oligonucleotide
  Antisense strand to SEQ ID NO: 2167372
gagccuagaggacuuauuc

SEQ ID NO: 2167374 - RNA, 19 nt, Artificial Sequence
  Description of Artificial Sequence: Synthetic oligonucleotide
  Sense strand starting at position 2060 of SEQ ID NO: 1883071
aggcucgcagaaugaaauu

SEQ ID NO: 2167375 - RNA, 19 nt, Artificial Sequence
  Description of Artificial Sequence: Synthetic oligonucleotide
  Antisense strand to SEQ ID NO: 2167374
aauuucauucugcgagccu

SEQ ID NO: 2167376 - RNA, 19 nt, Artificial Sequence
  Description of Artificial Sequence: Synthetic oligonucleotide
  Sense strand starting at position 2478 of SEQ ID NO: 1883071
agcaaaugcgaagguauuu

SEQ ID NO: 2167377 - RNA, 19 nt, Artificial Sequence
  Description of Artificial Sequence: Synthetic oligonucleotide
  Antisense strand to SEQ ID NO: 2167376
aaauaccuucgcauuugcu

SEQ ID NO: 2167378 - RNA, 19 nt, Artificial Sequence
  Description of Artificial Sequence: Synthetic oligonucleotide
  Sense strand starting at position 2549 of SEQ ID NO: 1883071
cggacauccuagccuguau

SEQ ID NO: 2167379 - RNA, 19 nt, Artificial Sequence
  Description of Artificial Sequence: Synthetic oligonucleotide
  Antisense strand to SEQ ID NO: 2167378
auacaggcuaggauguccg

SEQ ID NO: 2167380 - RNA, 19 nt, Artificial Sequence
  Description of Artificial Sequence: Synthetic oligonucleotide
  Sense strand starting at position 2611 of SEQ ID NO: 1883071
gguggagcuuggcugaauu

SEQ ID NO: 2167381 - RNA, 19 nt, Artificial Sequence
  Description of Artificial Sequence: Synthetic oligonucleotide
  Antisense strand to SEQ ID NO: 2167380
aauucagccaagcuccacc

SEQ ID NO: 2167382 - RNA, 19 nt, Artificial Sequence
  Description of Artificial Sequence: Synthetic oligonucleotide
  Sense strand starting at position 2795 of SEQ ID NO: 1883071
gaguguuuaccucauguca

SEQ ID NO: 2167383 - RNA, 19 nt, Artificial Sequence
  Description of Artificial Sequence: Synthetic oligonucleotide
  Antisense strand to SEQ ID NO: 2167382
ugacaugagguaaacacuc

SEQ ID NO: 2167384 - RNA, 19 nt, Artificial Sequence
  Description of Artificial Sequence: Synthetic oligonucleotide
  Sense strand starting at position 2932 of SEQ ID NO: 1883071
ggguuugagggugaguaau

SEQ ID NO: 2167385 - RNA, 19 nt, Artificial Sequence
  Description of Artificial Sequence: Synthetic oligonucleotide
  Antisense strand to SEQ ID NO: 2167384
auuacucacccucaaaccc

SEQ ID NO: 2167386 - RNA, 19 nt, Artificial Sequence
  Description of Artificial Sequence: Synthetic oligonucleotide
  Sense strand starting at position 2934 of SEQ ID NO: 1883071
guuugagggugaguaauuc

SEQ ID NO: 2167387 - RNA, 19 nt, Artificial Sequence
  Description of Artificial Sequence: Synthetic oligonucleotide
  Antisense strand to SEQ ID NO: 2167386
gaauuacucacccucaaac

SEQ ID NO: 2167388 - RNA, 19 nt, Artificial Sequence
  Description of Artificial Sequence: Synthetic oligonucleotide
  Sense strand starting at position 3026 of SEQ ID NO: 1883071
cggugcguacuauauggau

SEQ ID NO: 2167389 - RNA, 19 nt, Artificial Sequence
  Description of Artificial Sequence: Synthetic oligonucleotide
  Antisense strand to SEQ ID NO: 2167388
auccauauaguacgcaccg

SEQ ID NO: 2167390 - RNA, 19 nt, Artificial Sequence
  Description of Artificial Sequence: Synthetic oligonucleotide
  Sense strand starting at position 3028 of SEQ ID NO: 1883071
gugcguacuauauggauuu

SEQ ID NO: 2167391 - RNA, 19 nt, Artificial Sequence
  Description of Artificial Sequence: Synthetic oligonucleotide
  Antisense strand to SEQ ID NO: 2167390
aaauccauauaguacgcac

SEQ ID NO: 2167392 - RNA, 19 nt, Artificial Sequence
  Description of Artificial Sequence: Synthetic oligonucleotide
  Sense strand starting at position 3141 of SEQ ID NO: 1883071
uuacguuucuucccuggau

SEQ ID NO: 2167393 - RNA, 19 nt, Artificial Sequence
  Description of Artificial Sequence: Synthetic oligonucleotide
  Antisense strand to SEQ ID NO: 2167392
auccagggaagaaacguaa

SEQ ID NO: 2167394 - RNA, 19 nt, Artificial Sequence
  Description of Artificial Sequence: Synthetic oligonucleotide
  Sense strand starting at position 3142 of SEQ ID NO: 1883071
uacguuucuucccuggauu

SEQ ID NO: 2167395 - RNA, 19 nt, Artificial Sequence
  Description of Artificial Sequence: Synthetic oligonucleotide
  Antisense strand to SEQ ID NO: 2167394
aauccagggaagaaacgua

SEQ ID NO: 2167396 - RNA, 19 nt, Artificial Sequence
  Description of Artificial Sequence: Synthetic oligonucleotide
  Sense strand starting at position 3182 of SEQ ID NO: 1883071
ccucaacuguauuccagua

SEQ ID NO: 2167397 - RNA, 19 nt, Artificial Sequence
  Description of Artificial Sequence: Synthetic oligonucleotide
  Antisense strand to SEQ ID NO: 2167396
uacuggaauacaguugagg

SEQ ID NO: 2167398 - RNA, 19 nt, Artificial Sequence
  Description of Artificial Sequence: Synthetic oligonucleotide
  Sense strand starting at position 3187 of SEQ ID NO: 1883071
acuguauuccaguaucaug

SEQ ID NO: 2167399 - RNA, 19 nt, Artificial Sequence
  Description of Artificial Sequence: Synthetic oligonucleotide
  Antisense strand to SEQ ID NO: 2167398
caugauacuggaauacagu

SEQ ID NO: 2167400 - RNA, 19 nt, Artificial Sequence
  Description of Artificial Sequence: Synthetic oligonucleotide
  Sense strand starting at position 3478 of SEQ ID NO: 1883071
uugucauccuugguuuauc

SEQ ID NO: 2167401 - RNA, 19 nt, Artificial Sequence
  Description of Artificial Sequence: Synthetic oligonucleotide
  Antisense strand to SEQ ID NO: 2167400
gauaaaccaaggaugacaa

SEQ ID NO: 2167402 - RNA, 19 nt, Artificial Sequence
  Description of Artificial Sequence: Synthetic oligonucleotide
  Sense strand starting at position 3486 of SEQ ID NO: 1883071
cuugguuuaucugucccaa

SEQ ID NO: 2167403 - RNA, 19 nt, Artificial Sequence
  Description of Artificial Sequence: Synthetic oligonucleotide
  Antisense strand to SEQ ID NO: 2167402
uugggacagauaaaccaag

SEQ ID NO: 2167404 - RNA, 19 nt, Artificial Sequence
  Description of Artificial Sequence: Synthetic oligonucleotide
  Sense strand starting at position 3488 of SEQ ID NO: 1883071
ugguuuaucugucccaacu

SEQ ID NO: 2167405 - RNA, 19 nt, Artificial Sequence
  Description of Artificial Sequence: Synthetic oligonucleotide
  Antisense strand to SEQ ID NO: 2167404
aguugggacagauaaacca

SEQ ID NO: 2167406 - RNA, 19 nt, Artificial Sequence
  Description of Artificial Sequence: Synthetic oligonucleotide
  Sense strand starting at position 3510 of SEQ ID NO: 1883071
cugacagagaccuguagau

SEQ ID NO: 2167407 - RNA, 19 nt, Artificial Sequence
  Description of Artificial Sequence: Synthetic oligonucleotide
  Antisense strand to SEQ ID NO: 2167406
aucuacaggucucugucag

SEQ ID NO: 2167408 - RNA, 19 nt, Artificial Sequence
  Description of Artificial Sequence: Synthetic oligonucleotide
  Sense strand starting at position 3528 of SEQ ID NO: 1883071
uagagauaauaggucuuau

SEQ ID NO: 2167409 - RNA, 19 nt, Artificial Sequence
  Description of Artificial Sequence: Synthetic oligonucleotide
  Antisense strand to SEQ ID NO: 2167408
auaagaccuauuaucucua

SEQ ID NO: 2167410 - RNA, 19 nt, Artificial Sequence
  Description of Artificial Sequence: Synthetic oligonucleotide
  Sense strand starting at position 3541 of SEQ ID NO: 1883071
ucuuauugcugucuauauu

SEQ ID NO: 2167411 - RNA, 19 nt, Artificial Sequence
  Description of Artificial Sequence: Synthetic oligonucleotide
  Antisense strand to SEQ ID NO: 2167410
aauauagacagcaauaaga

SEQ ID NO: 2167412 - RNA, 19 nt, Artificial Sequence
  Description of Artificial Sequence: Synthetic oligonucleotide
  Sense strand starting at position 3549 of SEQ ID NO: 1883071
cugucuauauuguuaguau

SEQ ID NO: 2167413 - RNA, 19 nt, Artificial Sequence
  Description of Artificial Sequence: Synthetic oligonucleotide
  Antisense strand to SEQ ID NO: 2167412
auacuaacaauauagacag

SEQ ID NO: 2167414 - RNA, 19 nt, Artificial Sequence
  Description of Artificial Sequence: Synthetic oligonucleotide
  Sense strand starting at position 3552 of SEQ ID NO: 1883071
ucuauauuguuaguaugca

SEQ ID NO: 2167415 - RNA, 19 nt, Artificial Sequence
  Description of Artificial Sequence: Synthetic oligonucleotide
  Antisense strand to SEQ ID NO: 2167414
ugcauacuaacaauauaga

SEQ ID NO: 2167416 - RNA, 19 nt, Artificial Sequence
  Description of Artificial Sequence: Synthetic oligonucleotide
  Sense strand starting at position 3596 of SEQ ID NO: 1883071
gcaggauaacagugaauac

SEQ ID NO: 2167417 - RNA, 19 nt, Artificial Sequence
  Description of Artificial Sequence: Synthetic oligonucleotide
  Antisense strand to SEQ ID NO: 2167416
guauucacuguuauccugc

SEQ ID NO: 2167418 - RNA, 19 nt, Artificial Sequence
  Description of Artificial Sequence: Synthetic oligonucleotide
  Sense strand starting at position 3614 of SEQ ID NO: 1883071
cuuauacagugcucacuau

SEQ ID NO: 2167419 - RNA, 19 nt, Artificial Sequence
  Description of Artificial Sequence: Synthetic oligonucleotide
  Antisense strand to SEQ ID NO: 2167418
auagugagcacuguauaag

SEQ ID NO: 2167420 - RNA, 19 nt, Artificial Sequence
  Description of Artificial Sequence: Synthetic oligonucleotide
  Sense strand starting at position 3632 of SEQ ID NO: 1883071
ugugccagccuuuauauau

SEQ ID NO: 2167421 - RNA, 19 nt, Artificial Sequence
  Description of Artificial Sequence: Synthetic oligonucleotide
  Antisense strand to SEQ ID NO: 2167420
auauauaaaggcuggcaca

SEQ ID NO: 2167422 - RNA, 19 nt, Artificial Sequence
  Description of Artificial Sequence: Synthetic oligonucleotide
  Sense strand starting at position 3639 of SEQ ID NO: 1883071
gccuuuauauauguugauu

SEQ ID NO: 2167423 - RNA, 19 nt, Artificial Sequence
  Description of Artificial Sequence: Synthetic oligonucleotide
  Antisense strand to SEQ ID NO: 2167422
aaucaacauauauaaaggc

SEQ ID NO: 2167424 - RNA, 19 nt, Artificial Sequence
  Description of Artificial Sequence: Synthetic oligonucleotide
  Sense strand starting at position 100 of SEQ ID NO: 1883072
accacuucugcuugguaca

SEQ ID NO: 2167425 - RNA, 19 nt, Artificial Sequence
  Description of Artificial Sequence: Synthetic oligonucleotide
  Antisense strand to SEQ ID NO: 2167424
uguaccaagcagaaguggu

SEQ ID NO: 2167426 - RNA, 19 nt, Artificial Sequence
  Description of Artificial Sequence: Synthetic oligonucleotide
  Sense strand starting at position 141 of SEQ ID NO: 1883072
ugaaccagguuauuaauau

SEQ ID NO: 2167427 - RNA, 19 nt, Artificial Sequence
  Description of Artificial Sequence: Synthetic oligonucleotide
  Antisense strand to SEQ ID NO: 2167426
auauuaauaaccugguuca

SEQ ID NO: 2167428 - RNA, 19 nt, Artificial Sequence
  Description of Artificial Sequence: Synthetic oligonucleotide
  Sense strand starting at position 150 of SEQ ID NO: 1883072
uuauuaauauggcccaaga

SEQ ID NO: 2167429 - RNA, 19 nt, Artificial Sequence
  Description of Artificial Sequence: Synthetic oligonucleotide
  Antisense strand to SEQ ID NO: 2167428
ucuugggccauauuaauaa

SEQ ID NO: 2167430 - RNA, 19 nt, Artificial Sequence
  Description of Artificial Sequence: Synthetic oligonucleotide
  Sense strand starting at position 304 of SEQ ID NO: 1883072
agcauagcuauugaugaga

SEQ ID NO: 2167431 - RNA, 19 nt, Artificial Sequence
  Description of Artificial Sequence: Synthetic oligonucleotide
  Antisense strand to SEQ ID NO: 2167430
ucucaucaauagcuaugcu

SEQ ID NO: 2167432 - RNA, 19 nt, Artificial Sequence
  Description of Artificial Sequence: Synthetic oligonucleotide
  Sense strand starting at position 415 of SEQ ID NO: 1883072
uaauuauaguggcugacau

SEQ ID NO: 2167433 - RNA, 19 nt, Artificial Sequence
  Description of Artificial Sequence: Synthetic oligonucleotide
  Antisense strand to SEQ ID NO: 2167432
augucagccacuauaauua

SEQ ID NO: 2167434 - RNA, 19 nt, Artificial Sequence
  Description of Artificial Sequence: Synthetic oligonucleotide
  Sense strand starting at position 416 of SEQ ID NO: 1883072
aauuauaguggcugacauc

SEQ ID NO: 2167435 - RNA, 19 nt, Artificial Sequence
  Description of Artificial Sequence: Synthetic oligonucleotide
  Antisense strand to SEQ ID NO: 2167434
gaugucagccacuauaauu

SEQ ID NO: 2167436 - RNA, 19 nt, Artificial Sequence
  Description of Artificial Sequence: Synthetic oligonucleotide
  Sense strand starting at position 469 of SEQ ID NO: 1883072
ucgggcuucccggagcaua

SEQ ID NO: 2167437 - RNA, 19 nt, Artificial Sequence
  Description of Artificial Sequence: Synthetic oligonucleotide
  Antisense strand to SEQ ID NO: 2167436
uaugcuccgggaagcccga

SEQ ID NO: 2167438 - RNA, 19 nt, Artificial Sequence
  Description of Artificial Sequence: Synthetic oligonucleotide
  Sense strand starting at position 761 of SEQ ID NO: 1883072
ugcauaaugcuugaugcuu

SEQ ID NO: 2167439 - RNA, 19 nt, Artificial Sequence
  Description of Artificial Sequence: Synthetic oligonucleotide
  Antisense strand to SEQ ID NO: 2167438
aagcaucaagcauuaugca

SEQ ID NO: 2167440 - RNA, 19 nt, Artificial Sequence
  Description of Artificial Sequence: Synthetic oligonucleotide
  Sense strand starting at position 793 of SEQ ID NO: 1883072
cccaguuauuaaucuagag

SEQ ID NO: 2167441 - RNA, 19 nt, Artificial Sequence
  Description of Artificial Sequence: Synthetic oligonucleotide
  Antisense strand to SEQ ID NO: 2167440
cucuagauuaauaacuggg

SEQ ID NO: 2167442 - RNA, 19 nt, Artificial Sequence
  Description of Artificial Sequence: Synthetic oligonucleotide
  Sense strand starting at position 854 of SEQ ID NO: 1883072
ggacuccaguccuccauua

SEQ ID NO: 2167443 - RNA, 19 nt, Artificial Sequence
  Description of Artificial Sequence: Synthetic oligonucleotide
  Antisense strand to SEQ ID NO: 2167442
uaauggaggacuggagucc

SEQ ID NO: 2167444 - RNA, 19 nt, Artificial Sequence
  Description of Artificial Sequence: Synthetic oligonucleotide
  Sense strand starting at position 931 of SEQ ID NO: 1883072
uugaauggguaacucuaau

SEQ ID NO: 2167445 - RNA, 19 nt, Artificial Sequence
  Description of Artificial Sequence: Synthetic oligonucleotide
  Antisense strand to SEQ ID NO: 2167444
auuagaguuacccauucaa

SEQ ID NO: 2167446 - RNA, 19 nt, Artificial Sequence
  Description of Artificial Sequence: Synthetic oligonucleotide
  Sense strand starting at position 965 of SEQ ID NO: 1883072
ggcgaauaugcauaaaugu

SEQ ID NO: 2167447 - RNA, 19 nt, Artificial Sequence
  Description of Artificial Sequence: Synthetic oligonucleotide
  Antisense strand to SEQ ID NO: 2167446
acauuuaugcauauucgcc

SEQ ID NO: 2167448 - RNA, 19 nt, Artificial Sequence
  Description of Artificial Sequence: Synthetic oligonucleotide
  Sense strand starting at position 990 of SEQ ID NO: 1883072
uuaugaggccuucgaccua

SEQ ID NO: 2167449 - RNA, 19 nt, Artificial Sequence
  Description of Artificial Sequence: Synthetic oligonucleotide
  Antisense strand to SEQ ID NO: 2167448
uaggucgaaggccucauaa

SEQ ID NO: 2167450 - RNA, 19 nt, Artificial Sequence
  Description of Artificial Sequence: Synthetic oligonucleotide
  Sense strand starting at position 1074 of SEQ ID NO: 1883072
ggaguucaaguuugagauc

SEQ ID NO: 2167451 - RNA, 19 nt, Artificial Sequence
  Description of Artificial Sequence: Synthetic oligonucleotide
  Antisense strand to SEQ ID NO: 2167450
gaucucaaacuugaacucc

SEQ ID NO: 2167452 - RNA, 19 nt, Artificial Sequence
  Description of Artificial Sequence: Synthetic oligonucleotide
  Sense strand starting at position 1445 of SEQ ID NO: 1883072
agcguucucagucacugaa

SEQ ID NO: 2167453 - RNA, 19 nt, Artificial Sequence
  Description of Artificial Sequence: Synthetic oligonucleotide
  Antisense strand to SEQ ID NO: 2167452
uucagugacugagaacgcu

SEQ ID NO: 2167454 - RNA, 19 nt, Artificial Sequence
  Description of Artificial Sequence: Synthetic oligonucleotide
  Sense strand starting at position 1448 of SEQ ID NO: 1883072
guucucagucacugaauca

SEQ ID NO: 2167455 - RNA, 19 nt, Artificial Sequence
  Description of Artificial Sequence: Synthetic oligonucleotide
  Antisense strand to SEQ ID NO: 2167454
ugauucagugacugagaac

SEQ ID NO: 2167456 - RNA, 19 nt, Artificial Sequence
  Description of Artificial Sequence: Synthetic oligonucleotide
  Sense strand starting at position 1506 of SEQ ID NO: 1883072
aaagauuaaccuggcuguu

SEQ ID NO: 2167457 - RNA, 19 nt, Artificial Sequence
  Description of Artificial Sequence: Synthetic oligonucleotide
  Antisense strand to SEQ ID NO: 2167456
aacagccagguuaaucuuu

SEQ ID NO: 2167458 - RNA, 19 nt, Artificial Sequence
  Description of Artificial Sequence: Synthetic oligonucleotide
  Sense strand starting at position 1534 of SEQ ID NO: 1883072
uucugaagcuguguuaaua

SEQ ID NO: 2167459 - RNA, 19 nt, Artificial Sequence
  Description of Artificial Sequence: Synthetic oligonucleotide
  Antisense strand to SEQ ID NO: 2167458
uauuaacacagcuucagaa

SEQ ID NO: 2167460 - RNA, 19 nt, Artificial Sequence
  Description of Artificial Sequence: Synthetic oligonucleotide
  Sense strand starting at position 1552 of SEQ ID NO: 1883072
acucacucccgcuagauua

SEQ ID NO: 2167461 - RNA, 19 nt, Artificial Sequence
  Description of Artificial Sequence: Synthetic oligonucleotide
  Antisense strand to SEQ ID NO: 2167460
uaaucuagcgggagugagu

SEQ ID NO: 2167462 - RNA, 19 nt, Artificial Sequence
  Description of Artificial Sequence: Synthetic oligonucleotide
  Sense strand starting at position 2001 of SEQ ID NO: 1883072
ugaugacugcacugucaau

SEQ ID NO: 2167463 - RNA, 19 nt, Artificial Sequence
  Description of Artificial Sequence: Synthetic oligonucleotide
  Antisense strand to SEQ ID NO: 2167462
auugacagugcagucauca

SEQ ID NO: 2167464 - RNA, 19 nt, Artificial Sequence
  Description of Artificial Sequence: Synthetic oligonucleotide
  Sense strand starting at position 2096 of SEQ ID NO: 1883072
acggacuuguacucugaga

SEQ ID NO: 2167465 - RNA, 19 nt, Artificial Sequence
  Description of Artificial Sequence: Synthetic oligonucleotide
  Antisense strand to SEQ ID NO: 2167464
ucucagaguacaaguccgu

SEQ ID NO: 2167466 - RNA, 19 nt, Artificial Sequence
  Description of Artificial Sequence: Synthetic oligonucleotide
  Sense strand starting at position 2098 of SEQ ID NO: 1883072
ggacuuguacucugagagg

SEQ ID NO: 2167467 - RNA, 19 nt, Artificial Sequence
  Description of Artificial Sequence: Synthetic oligonucleotide
  Antisense strand to SEQ ID NO: 2167466
ccucucagaguacaagucc

SEQ ID NO: 2167468 - RNA, 19 nt, Artificial Sequence
  Description of Artificial Sequence: Synthetic oligonucleotide
  Sense strand starting at position 2225 of SEQ ID NO: 1883072
agugaagauacaugucaag

SEQ ID NO: 2167469 - RNA, 19 nt, Artificial Sequence
  Description of Artificial Sequence: Synthetic oligonucleotide
  Antisense strand to SEQ ID NO: 2167468
cuugacauguaucuucacu

SEQ ID NO: 2167470 - RNA, 19 nt, Artificial Sequence
  Description of Artificial Sequence: Synthetic oligonucleotide
  Sense strand starting at position 2228 of SEQ ID NO: 1883072
gaagauacaugucaagaga

SEQ ID NO: 2167471 - RNA, 19 nt, Artificial Sequence
  Description of Artificial Sequence: Synthetic oligonucleotide
  Antisense strand to SEQ ID NO: 2167470
ucucuugacauguaucuuc

SEQ ID NO: 2167472 - RNA, 19 nt, Artificial Sequence
  Description of Artificial Sequence: Synthetic oligonucleotide
  Sense strand starting at position 2239 of SEQ ID NO: 1883072
ucaagagauucugaauauc

SEQ ID NO: 2167473 - RNA, 19 nt, Artificial Sequence
  Description of Artificial Sequence: Synthetic oligonucleotide
  Antisense strand to SEQ ID NO: 2167472
gauauucagaaucucuuga

SEQ ID NO: 2167474 - RNA, 19 nt, Artificial Sequence
  Description of Artificial Sequence: Synthetic oligonucleotide
  Sense strand starting at position 2427 of SEQ ID NO: 1883072
gggcuucucaaguguuuga

SEQ ID NO: 2167475 - RNA, 19 nt, Artificial Sequence
  Description of Artificial Sequence: Synthetic oligonucleotide
  Antisense strand to SEQ ID NO: 2167474
ucaaacacuugagaagccc

SEQ ID NO: 2167476 - RNA, 19 nt, Artificial Sequence
  Description of Artificial Sequence: Synthetic oligonucleotide
  Sense strand starting at position 2483 of SEQ ID NO: 1883072
uagcuuugagcuuaucuga

SEQ ID NO: 2167477 - RNA, 19 nt, Artificial Sequence
  Description of Artificial Sequence: Synthetic oligonucleotide
  Antisense strand to SEQ ID NO: 2167476
ucagauaagcucaaagcua

SEQ ID NO: 2167478 - RNA, 19 nt, Artificial Sequence
  Description of Artificial Sequence: Synthetic oligonucleotide
  Sense strand starting at position 2486 of SEQ ID NO: 1883072
cuuugagcuuaucugacua

SEQ ID NO: 2167479 - RNA, 19 nt, Artificial Sequence
  Description of Artificial Sequence: Synthetic oligonucleotide
  Antisense strand to SEQ ID NO: 2167478
uagucagauaagcucaaag

SEQ ID NO: 2167480 - RNA, 19 nt, Artificial Sequence
  Description of Artificial Sequence: Synthetic oligonucleotide
  Sense strand starting at position 2490 of SEQ ID NO: 1883072
gagcuuaucugacuaaagu

SEQ ID NO: 2167481 - RNA, 19 nt, Artificial Sequence
  Description of Artificial Sequence: Synthetic oligonucleotide
  Antisense strand to SEQ ID NO: 2167480
acuuuagucagauaagcuc

SEQ ID NO: 2167482 - RNA, 19 nt, Artificial Sequence
  Description of Artificial Sequence: Synthetic oligonucleotide
  Sense strand starting at position 2491 of SEQ ID NO: 1883072
agcuuaucugacuaaagug

SEQ ID NO: 2167483 - RNA, 19 nt, Artificial Sequence
  Description of Artificial Sequence: Synthetic oligonucleotide
  Antisense strand to SEQ ID NO: 2167482
cacuuuagucagauaagcu

SEQ ID NO: 2167484 - RNA, 19 nt, Artificial Sequence
  Description of Artificial Sequence: Synthetic oligonucleotide
  Sense strand starting at position 2582 of SEQ ID NO: 1883072
ggaggcuuccauggugaau

SEQ ID NO: 2167485 - RNA, 19 nt, Artificial Sequence
  Description of Artificial Sequence: Synthetic oligonucleotide
  Antisense strand to SEQ ID NO: 2167484
auucaccauggaagccucc

SEQ ID NO: 2167486 - RNA, 19 nt, Artificial Sequence
  Description of Artificial Sequence: Synthetic oligonucleotide
  Sense strand starting at position 3184 of SEQ ID NO: 1883072
agaucuuugccucagcaca

SEQ ID NO: 2167487 - RNA, 19 nt, Artificial Sequence
  Description of Artificial Sequence: Synthetic oligonucleotide
  Antisense strand to SEQ ID NO: 2167486
ugugcugaggcaaagaucu

SEQ ID NO: 2167488 - RNA, 19 nt, Artificial Sequence
  Description of Artificial Sequence: Synthetic oligonucleotide
  Sense strand starting at position 3209 of SEQ ID NO: 1883072
ucagguuauccagaguuga

SEQ ID NO: 2167489 - RNA, 19 nt, Artificial Sequence
  Description of Artificial Sequence: Synthetic oligonucleotide
  Antisense strand to SEQ ID NO: 2167488
ucaacucuggauaaccuga

SEQ ID NO: 2167490 - RNA, 19 nt, Artificial Sequence
  Description of Artificial Sequence: Synthetic oligonucleotide
  Sense strand starting at position 3213 of SEQ ID NO: 1883072
guuauccagaguugagaca

SEQ ID NO: 2167491 - RNA, 19 nt, Artificial Sequence
  Description of Artificial Sequence: Synthetic oligonucleotide
  Antisense strand to SEQ ID NO: 2167490
ugucucaacucuggauaac

SEQ ID NO: 2167492 - RNA, 19 nt, Artificial Sequence
  Description of Artificial Sequence: Synthetic oligonucleotide
  Sense strand starting at position 3459 of SEQ ID NO: 1883072
cugagagaauucgucauua

SEQ ID NO: 2167493 - RNA, 19 nt, Artificial Sequence
  Description of Artificial Sequence: Synthetic oligonucleotide
  Antisense strand to SEQ ID NO: 2167492
uaaugacgaauucucucag

SEQ ID NO: 2167494 - RNA, 19 nt, Artificial Sequence
  Description of Artificial Sequence: Synthetic oligonucleotide
  Sense strand starting at position 3461 of SEQ ID NO: 1883072
gagagaauucgucauuacc

SEQ ID NO: 2167495 - RNA, 19 nt, Artificial Sequence
  Description of Artificial Sequence: Synthetic oligonucleotide
  Antisense strand to SEQ ID NO: 2167494
gguaaugacgaauucucuc

SEQ ID NO: 2167496 - RNA, 19 nt, Artificial Sequence
  Description of Artificial Sequence: Synthetic oligonucleotide
  Sense strand starting at position 3463 of SEQ ID NO: 1883072
gagaauucgucauuaccaa

SEQ ID NO: 2167497 - RNA, 19 nt, Artificial Sequence
  Description of Artificial Sequence: Synthetic oligonucleotide
  Antisense strand to SEQ ID NO: 2167496
uugguaaugacgaauucuc

SEQ ID NO: 2167498 - RNA, 19 nt, Artificial Sequence
  Description of Artificial Sequence: Synthetic oligonucleotide
  Sense strand starting at position 3908 of SEQ ID NO: 1883072
aggucuuaggauggucaca

SEQ ID NO: 2167499 - RNA, 19 nt, Artificial Sequence
  Description of Artificial Sequence: Synthetic oligonucleotide
  Antisense strand to SEQ ID NO: 2167498
ugugaccauccuaagaccu

SEQ ID NO: 2167500 - RNA, 19 nt, Artificial Sequence
  Description of Artificial Sequence: Synthetic oligonucleotide
  Sense strand starting at position 3926 of SEQ ID NO: 1883072
agguacauuuguuacagaa

SEQ ID NO: 2167501 - RNA, 19 nt, Artificial Sequence
  Description of Artificial Sequence: Synthetic oligonucleotide
  Antisense strand to SEQ ID NO: 2167500
uucuguaacaaauguaccu

SEQ ID NO: 2167502 - RNA, 19 nt, Artificial Sequence
  Description of Artificial Sequence: Synthetic oligonucleotide
  Sense strand starting at position 3958 of SEQ ID NO: 1883072
ggugcagauucccuggaaa

SEQ ID NO: 2167503 - RNA, 19 nt, Artificial Sequence
  Description of Artificial Sequence: Synthetic oligonucleotide
  Antisense strand to SEQ ID NO: 2167502
uuuccagggaaucugcacc

SEQ ID NO: 2167504 - RNA, 19 nt, Artificial Sequence
  Description of Artificial Sequence: Synthetic oligonucleotide
  Sense strand starting at position 2340 of SEQ ID NO: 1883073
gggugagaggaguguagaa

SEQ ID NO: 2167505 - RNA, 19 nt, Artificial Sequence
  Description of Artificial Sequence: Synthetic oligonucleotide
  Antisense strand to SEQ ID NO: 2167504
uucuacacuccucucaccc

SEQ ID NO: 2167506 - RNA, 19 nt, Artificial Sequence
  Description of Artificial Sequence: Synthetic oligonucleotide
  Sense strand starting at position 2359 of SEQ ID NO: 1883073
acggcauucuuucgugagu

SEQ ID NO: 2167507 - RNA, 19 nt, Artificial Sequence
  Description of Artificial Sequence: Synthetic oligonucleotide
  Antisense strand to SEQ ID NO: 2167506
acucacgaaagaaugccgu

SEQ ID NO: 2167508 - RNA, 19 nt, Artificial Sequence
  Description of Artificial Sequence: Synthetic oligonucleotide
  Sense strand starting at position 2361 of SEQ ID NO: 1883073
ggcauucuuucgugaguca

SEQ ID NO: 2167509 - RNA, 19 nt, Artificial Sequence
  Description of Artificial Sequence: Synthetic oligonucleotide
  Antisense strand to SEQ ID NO: 2167508
ugacucacgaaagaaugcc

SEQ ID NO: 2167510 - RNA, 19 nt, Artificial Sequence
  Description of Artificial Sequence: Synthetic oligonucleotide
  Sense strand starting at position 2362 of SEQ ID NO: 1883073
gcauucuuucgugagucag

SEQ ID NO: 2167511 - RNA, 19 nt, Artificial Sequence
  Description of Artificial Sequence: Synthetic oligonucleotide
  Antisense strand to SEQ ID NO: 2167510
cugacucacgaaagaaugc

SEQ ID NO: 2167512 - RNA, 19 nt, Artificial Sequence
  Description of Artificial Sequence: Synthetic oligonucleotide
  Sense strand starting at position 2364 of SEQ ID NO: 1883073
auucuuucgugagucaguu

SEQ ID NO: 2167513 - RNA, 19 nt, Artificial Sequence
  Description of Artificial Sequence: Synthetic oligonucleotide
  Antisense strand to SEQ ID NO: 2167512
aacugacucacgaaagaau

SEQ ID NO: 2167514 - RNA, 19 nt, Artificial Sequence
  Description of Artificial Sequence: Synthetic oligonucleotide
  Sense strand starting at position 2370 of SEQ ID NO: 1883073
ucgugagucaguuccuugu

SEQ ID NO: 2167515 - RNA, 19 nt, Artificial Sequence
  Description of Artificial Sequence: Synthetic oligonucleotide
  Antisense strand to SEQ ID NO: 2167514
acaaggaacugacucacga

SEQ ID NO: 2167516 - RNA, 19 nt, Artificial Sequence
  Description of Artificial Sequence: Synthetic oligonucleotide
  Sense strand starting at position 2439 of SEQ ID NO: 1883073
gaaggaauaucucaaagug

SEQ ID NO: 2167517 - RNA, 19 nt, Artificial Sequence
  Description of Artificial Sequence: Synthetic oligonucleotide
  Antisense strand to SEQ ID NO: 2167516
cacuuugagauauuccuuc

SEQ ID NO: 2167518 - RNA, 19 nt, Artificial Sequence
  Description of Artificial Sequence: Synthetic oligonucleotide
  Sense strand starting at position 2478 of SEQ ID NO: 1883073
aguuguuaucuguagagua

SEQ ID NO: 2167519 - RNA, 19 nt, Artificial Sequence
  Description of Artificial Sequence: Synthetic oligonucleotide
  Antisense strand to SEQ ID NO: 2167518
uacucuacagauaacaacu

SEQ ID NO: 2167520 - RNA, 19 nt, Artificial Sequence
  Description of Artificial Sequence: Synthetic oligonucleotide
  Sense strand starting at position 2480 of SEQ ID NO: 1883073
uuguuaucuguagaguagu

SEQ ID NO: 2167521 - RNA, 19 nt, Artificial Sequence
  Description of Artificial Sequence: Synthetic oligonucleotide
  Antisense strand to SEQ ID NO: 2167520
acuacucuacagauaacaa

SEQ ID NO: 2167522 - RNA, 19 nt, Artificial Sequence
  Description of Artificial Sequence: Synthetic oligonucleotide
  Sense strand starting at position 2483 of SEQ ID NO: 1883073
uuaucuguagaguaguuaa

SEQ ID NO: 2167523 - RNA, 19 nt, Artificial Sequence
  Description of Artificial Sequence: Synthetic oligonucleotide
  Antisense strand to SEQ ID NO: 2167522
uuaacuacucuacagauaa

SEQ ID NO: 2167524 - RNA, 19 nt, Artificial Sequence
  Description of Artificial Sequence: Synthetic oligonucleotide
  Sense strand starting at position 2493 of SEQ ID NO: 1883073
aguaguuaaagggagcuau

SEQ ID NO: 2167525 - RNA, 19 nt, Artificial Sequence
  Description of Artificial Sequence: Synthetic oligonucleotide
  Antisense strand to SEQ ID NO: 2167524
auagcucccuuuaacuacu

SEQ ID NO: 2167526 - RNA, 19 nt, Artificial Sequence
  Description of Artificial Sequence: Synthetic oligonucleotide
  Sense strand starting at position 2589 of SEQ ID NO: 1883073
agcgauggacggugaauuu

SEQ ID NO: 2167527 - RNA, 19 nt, Artificial Sequence
  Description of Artificial Sequence: Synthetic oligonucleotide
  Antisense strand to SEQ ID NO: 2167526
aaauucaccguccaucgcu

SEQ ID NO: 2167528 - RNA, 19 nt, Artificial Sequence
  Description of Artificial Sequence: Synthetic oligonucleotide
  Sense strand starting at position 2600 of SEQ ID NO: 1883073
gugaauuugccacaagcgu

SEQ ID NO: 2167529 - RNA, 19 nt, Artificial Sequence
  Description of Artificial Sequence: Synthetic oligonucleotide
  Antisense strand to SEQ ID NO: 2167528
acgcuuguggcaaauucac

SEQ ID NO: 2167530 - RNA, 19 nt, Artificial Sequence
  Description of Artificial Sequence: Synthetic oligonucleotide
  Sense strand starting at position 2608 of SEQ ID NO: 1883073
gccacaagcgugguguauu

SEQ ID NO: 2167531 - RNA, 19 nt, Artificial Sequence
  Description of Artificial Sequence: Synthetic oligonucleotide
  Antisense strand to SEQ ID NO: 2167530
aauacaccacgcuuguggc

SEQ ID NO: 2167532 - RNA, 19 nt, Artificial Sequence
  Description of Artificial Sequence: Synthetic oligonucleotide
  Sense strand starting at position 2609 of SEQ ID NO: 1883073
ccacaagcgugguguauuu

SEQ ID NO: 2167533 - RNA, 19 nt, Artificial Sequence
  Description of Artificial Sequence: Synthetic oligonucleotide
  Antisense strand to SEQ ID NO: 2167532
aaauacaccacgcuugugg

SEQ ID NO: 2167534 - RNA, 19 nt, Artificial Sequence
  Description of Artificial Sequence: Synthetic oligonucleotide
  Sense strand starting at position 2981 of SEQ ID NO: 1883073
gugcccagccucugauuaa

SEQ ID NO: 2167535 - RNA, 19 nt, Artificial Sequence
  Description of Artificial Sequence: Synthetic oligonucleotide
  Antisense strand to SEQ ID NO: 2167534
uuaaucagaggcugggcac

SEQ ID NO: 2167536 - RNA, 19 nt, Artificial Sequence
  Description of Artificial Sequence: Synthetic oligonucleotide
  Sense strand starting at position 2988 of SEQ ID NO: 1883073
gccucugauuaacuguaua

SEQ ID NO: 2167537 - RNA, 19 nt, Artificial Sequence
  Description of Artificial Sequence: Synthetic oligonucleotide
  Antisense strand to SEQ ID NO: 2167536
uauacaguuaaucagaggc

SEQ ID NO: 2167538 - RNA, 19 nt, Artificial Sequence
  Description of Artificial Sequence: Synthetic oligonucleotide
  Sense strand starting at position 3008 of SEQ ID NO: 1883073
aguuuauagggauggccaa

SEQ ID NO: 2167539 - RNA, 19 nt, Artificial Sequence
  Description of Artificial Sequence: Synthetic oligonucleotide
  Antisense strand to SEQ ID NO: 2167538
uuggccaucccuauaaacu

SEQ ID NO: 2167540 - RNA, 19 nt, Artificial Sequence
  Description of Artificial Sequence: Synthetic oligonucleotide
  Sense strand starting at position 3793 of SEQ ID NO: 1883073
gagcguucuuccuccacaa

SEQ ID NO: 2167541 - RNA, 19 nt, Artificial Sequence
  Description of Artificial Sequence: Synthetic oligonucleotide
  Antisense strand to SEQ ID NO: 2167540
uuguggaggaagaacgcuc

SEQ ID NO: 2167542 - RNA, 19 nt, Artificial Sequence
  Description of Artificial Sequence: Synthetic oligonucleotide
  Sense strand starting at position 3795 of SEQ ID NO: 1883073
gcguucuuccuccacaacu

SEQ ID NO: 2167543 - RNA, 19 nt, Artificial Sequence
  Description of Artificial Sequence: Synthetic oligonucleotide
  Antisense strand to SEQ ID NO: 2167542
aguuguggaggaagaacgc

SEQ ID NO: 2167544 - RNA, 19 nt, Artificial Sequence
  Description of Artificial Sequence: Synthetic oligonucleotide
  Sense strand starting at position 1027 of SEQ ID NO: 1883075
agcuauugugucuacacua

SEQ ID NO: 2167545 - RNA, 19 nt, Artificial Sequence
  Description of Artificial Sequence: Synthetic oligonucleotide
  Antisense strand to SEQ ID NO: 2167544
uaguguagacacaauagcu

SEQ ID NO: 2167546 - RNA, 19 nt, Artificial Sequence
  Description of Artificial Sequence: Synthetic oligonucleotide
  Sense strand starting at position 1032 of SEQ ID NO: 1883075
uugugucuacacuagcaau

SEQ ID NO: 2167547 - RNA, 19 nt, Artificial Sequence
  Description of Artificial Sequence: Synthetic oligonucleotide
  Antisense strand to SEQ ID NO: 2167546
auugcuaguguagacacaa

SEQ ID NO: 2167548 - RNA, 19 nt, Artificial Sequence
  Description of Artificial Sequence: Synthetic oligonucleotide
  Sense strand starting at position 1060 of SEQ ID NO: 1883075
ggcugugucagauaccaaa

SEQ ID NO: 2167549 - RNA, 19 nt, Artificial Sequence
  Description of Artificial Sequence: Synthetic oligonucleotide
  Antisense strand to SEQ ID NO: 2167548
uuugguaucugacacagcc

SEQ ID NO: 2167550 - RNA, 19 nt, Artificial Sequence
  Description of Artificial Sequence: Synthetic oligonucleotide
  Sense strand starting at position 1089 of SEQ ID NO: 1883075
gauauuucuuuguuugguu

SEQ ID NO: 2167551 - RNA, 19 nt, Artificial Sequence
  Description of Artificial Sequence: Synthetic oligonucleotide
  Antisense strand to SEQ ID NO: 2167550
aaccaaacaaagaaauauc

SEQ ID NO: 2167552 - RNA, 19 nt, Artificial Sequence
  Description of Artificial Sequence: Synthetic oligonucleotide
  Sense strand starting at position 1128 of SEQ ID NO: 1883075
auaaaucaucuguagaguc

SEQ ID NO: 2167553 - RNA, 19 nt, Artificial Sequence
  Description of Artificial Sequence: Synthetic oligonucleotide
  Antisense strand to SEQ ID NO: 2167552
gacucuacagaugauuuau

SEQ ID NO: 2167554 - RNA, 19 nt, Artificial Sequence
  Description of Artificial Sequence: Synthetic oligonucleotide
  Sense strand starting at position 1155 of SEQ ID NO: 1883075
uuccgaaauucucucuaug

SEQ ID NO: 2167555 - RNA, 19 nt, Artificial Sequence
  Description of Artificial Sequence: Synthetic oligonucleotide
  Antisense strand to SEQ ID NO: 2167554
cauagagagaauuucggaa

SEQ ID NO: 2167556 - RNA, 19 nt, Artificial Sequence
  Description of Artificial Sequence: Synthetic oligonucleotide
  Sense strand starting at position 1157 of SEQ ID NO: 1883075
ccgaaauucucucuauguc

SEQ ID NO: 2167557 - RNA, 19 nt, Artificial Sequence
  Description of Artificial Sequence: Synthetic oligonucleotide
  Antisense strand to SEQ ID NO: 2167556
gacauagagagaauuucgg

SEQ ID NO: 2167558 - RNA, 19 nt, Artificial Sequence
  Description of Artificial Sequence: Synthetic oligonucleotide
  Sense strand starting at position 1158 of SEQ ID NO: 1883075
cgaaauucucucuaugucu

SEQ ID NO: 2167559 - RNA, 19 nt, Artificial Sequence
  Description of Artificial Sequence: Synthetic oligonucleotide
  Antisense strand to SEQ ID NO: 2167558
agacauagagagaauuucg

SEQ ID NO: 2167560 - RNA, 19 nt, Artificial Sequence
  Description of Artificial Sequence: Synthetic oligonucleotide
  Sense strand starting at position 2227 of SEQ ID NO: 1883075
guacuuaggaccggaguua

SEQ ID NO: 2167561 - RNA, 19 nt, Artificial Sequence
  Description of Artificial Sequence: Synthetic oligonucleotide
  Antisense strand to SEQ ID NO: 2167560
uaacuccgguccuaaguac

SEQ ID NO: 2167562 - RNA, 19 nt, Artificial Sequence
  Description of Artificial Sequence: Synthetic oligonucleotide
  Sense strand starting at position 2238 of SEQ ID NO: 1883075
cggaguuagcauuaaccuu

SEQ ID NO: 2167563 - RNA, 19 nt, Artificial Sequence
  Description of Artificial Sequence: Synthetic oligonucleotide
  Antisense strand to SEQ ID NO: 2167562
aagguuaaugcuaacuccg

SEQ ID NO: 2167564 - RNA, 19 nt, Artificial Sequence
  Description of Artificial Sequence: Synthetic oligonucleotide
  Sense strand starting at position 2315 of SEQ ID NO: 1883075
gguaauuuaccuugugcgu

SEQ ID NO: 2167565 - RNA, 19 nt, Artificial Sequence
  Description of Artificial Sequence: Synthetic oligonucleotide
  Antisense strand to SEQ ID NO: 2167564
acgcacaagguaaauuacc

SEQ ID NO: 2167566 - RNA, 19 nt, Artificial Sequence
  Description of Artificial Sequence: Synthetic oligonucleotide
  Sense strand starting at position 2376 of SEQ ID NO: 1883075
cucuguagaucaucacaca

SEQ ID NO: 2167567 - RNA, 19 nt, Artificial Sequence
  Description of Artificial Sequence: Synthetic oligonucleotide
  Antisense strand to SEQ ID NO: 2167566
ugugugaugaucuacagag

SEQ ID NO: 2167568 - RNA, 19 nt, Artificial Sequence
  Description of Artificial Sequence: Synthetic oligonucleotide
  Sense strand starting at position 2435 of SEQ ID NO: 1883075
guguguccugcuuccauua

SEQ ID NO: 2167569 - RNA, 19 nt, Artificial Sequence
  Description of Artificial Sequence: Synthetic oligonucleotide
  Antisense strand to SEQ ID NO: 2167568
uaauggaagcaggacacac

SEQ ID NO: 2167570 - RNA, 19 nt, Artificial Sequence
  Description of Artificial Sequence: Synthetic oligonucleotide
  Sense strand starting at position 2477 of SEQ ID NO: 1883075
cccuguauucugcagaccu

SEQ ID NO: 2167571 - RNA, 19 nt, Artificial Sequence
  Description of Artificial Sequence: Synthetic oligonucleotide
  Antisense strand to SEQ ID NO: 2167570
aggucugcagaauacaggg

SEQ ID NO: 2167572 - RNA, 19 nt, Artificial Sequence
  Description of Artificial Sequence: Synthetic oligonucleotide
  Sense strand starting at position 2496 of SEQ ID NO: 1883075
gucagaaguguuagugugu

SEQ ID NO: 2167573 - RNA, 19 nt, Artificial Sequence
  Description of Artificial Sequence: Synthetic oligonucleotide
  Antisense strand to SEQ ID NO: 2167572
acacacuaacacuucugac

SEQ ID NO: 2167574 - RNA, 19 nt, Artificial Sequence
  Description of Artificial Sequence: Synthetic oligonucleotide
  Sense strand starting at position 2502 of SEQ ID NO: 1883075
aguguuaguguguauauuu

SEQ ID NO: 2167575 - RNA, 19 nt, Artificial Sequence
  Description of Artificial Sequence: Synthetic oligonucleotide
  Antisense strand to SEQ ID NO: 2167574
aaauauacacacuaacacu

SEQ ID NO: 2167576 - RNA, 19 nt, Artificial Sequence
  Description of Artificial Sequence: Synthetic oligonucleotide
  Sense strand starting at position 2507 of SEQ ID NO: 1883075
uaguguguauauuucuuga

SEQ ID NO: 2167577 - RNA, 19 nt, Artificial Sequence
  Description of Artificial Sequence: Synthetic oligonucleotide
  Antisense strand to SEQ ID NO: 2167576
ucaagaaauauacacacua

SEQ ID NO: 2167578 - RNA, 19 nt, Artificial Sequence
  Description of Artificial Sequence: Synthetic oligonucleotide
  Sense strand starting at position 2621 of SEQ ID NO: 1883075
cccagcauuuaccugguua

SEQ ID NO: 2167579 - RNA, 19 nt, Artificial Sequence
  Description of Artificial Sequence: Synthetic oligonucleotide
  Antisense strand to SEQ ID NO: 2167578
uaaccagguaaaugcuggg

SEQ ID NO: 2167580 - RNA, 19 nt, Artificial Sequence
  Description of Artificial Sequence: Synthetic oligonucleotide
  Sense strand starting at position 2625 of SEQ ID NO: 1883075
gcauuuaccugguuaugua

SEQ ID NO: 2167581 - RNA, 19 nt, Artificial Sequence
  Description of Artificial Sequence: Synthetic oligonucleotide
  Antisense strand to SEQ ID NO: 2167580
uacauaaccagguaaaugc

SEQ ID NO: 2167582 - RNA, 19 nt, Artificial Sequence
  Description of Artificial Sequence: Synthetic oligonucleotide
  Sense strand starting at position 2728 of SEQ ID NO: 1883075
cuaacaugguuccugaaac

SEQ ID NO: 2167583 - RNA, 19 nt, Artificial Sequence
  Description of Artificial Sequence: Synthetic oligonucleotide
  Antisense strand to SEQ ID NO: 2167582
guuucaggaaccauguuag

SEQ ID NO: 2167584 - RNA, 19 nt, Artificial Sequence
  Description of Artificial Sequence: Synthetic oligonucleotide
  Sense strand starting at position 2746 of SEQ ID NO: 1883075
cgugguaggucacuaacua

SEQ ID NO: 2167585 - RNA, 19 nt, Artificial Sequence
  Description of Artificial Sequence: Synthetic oligonucleotide
  Antisense strand to SEQ ID NO: 2167584
uaguuagugaccuaccacg

SEQ ID NO: 2167586 - RNA, 19 nt, Artificial Sequence
  Description of Artificial Sequence: Synthetic oligonucleotide
  Sense strand starting at position 2788 of SEQ ID NO: 1883075
ucaccacaccugugaagau

SEQ ID NO: 2167587 - RNA, 19 nt, Artificial Sequence
  Description of Artificial Sequence: Synthetic oligonucleotide
  Antisense strand to SEQ ID NO: 2167586
aucuucacaggugugguga

SEQ ID NO: 2167588 - RNA, 19 nt, Artificial Sequence
  Description of Artificial Sequence: Synthetic oligonucleotide
  Sense strand starting at position 2841 of SEQ ID NO: 1883075
guuaagucggaguagggua

SEQ ID NO: 2167589 - RNA, 19 nt, Artificial Sequence
  Description of Artificial Sequence: Synthetic oligonucleotide
  Antisense strand to SEQ ID NO: 2167588
uacccuacuccgacuuaac

SEQ ID NO: 2167590 - RNA, 19 nt, Artificial Sequence
  Description of Artificial Sequence: Synthetic oligonucleotide
  Sense strand starting at position 2890 of SEQ ID NO: 1883075
auacuugguccuugagcca

SEQ ID NO: 2167591 - RNA, 19 nt, Artificial Sequence
  Description of Artificial Sequence: Synthetic oligonucleotide
  Antisense strand to SEQ ID NO: 2167590
uggcucaaggaccaaguau

SEQ ID NO: 2167592 - RNA, 19 nt, Artificial Sequence
  Description of Artificial Sequence: Synthetic oligonucleotide
  Sense strand starting at position 3090 of SEQ ID NO: 1883075
ugagaauaacugugucugu

SEQ ID NO: 2167593 - RNA, 19 nt, Artificial Sequence
  Description of Artificial Sequence: Synthetic oligonucleotide
  Antisense strand to SEQ ID NO: 2167592
acagacacaguuauucuca

SEQ ID NO: 2167594 - RNA, 19 nt, Artificial Sequence
  Description of Artificial Sequence: Synthetic oligonucleotide
  Sense strand starting at position 3091 of SEQ ID NO: 1883075
gagaauaacugugucugua

SEQ ID NO: 2167595 - RNA, 19 nt, Artificial Sequence
  Description of Artificial Sequence: Synthetic oligonucleotide
  Antisense strand to SEQ ID NO: 2167594
uacagacacaguuauucuc

SEQ ID NO: 2167596 - RNA, 19 nt, Artificial Sequence
  Description of Artificial Sequence: Synthetic oligonucleotide
  Sense strand starting at position 3093 of SEQ ID NO: 1883075
gaauaacugugucuguagu

SEQ ID NO: 2167597 - RNA, 19 nt, Artificial Sequence
  Description of Artificial Sequence: Synthetic oligonucleotide
  Antisense strand to SEQ ID NO: 2167596
acuacagacacaguuauuc

SEQ ID NO: 2167598 - RNA, 19 nt, Artificial Sequence
  Description of Artificial Sequence: Synthetic oligonucleotide
  Sense strand starting at position 3141 of SEQ ID NO: 1883075
ugaagauucucugucccag

SEQ ID NO: 2167599 - RNA, 19 nt, Artificial Sequence
  Description of Artificial Sequence: Synthetic oligonucleotide
  Antisense strand to SEQ ID NO: 2167598
cugggacagagaaucuuca

SEQ ID NO: 2167600 - RNA, 19 nt, Artificial Sequence
  Description of Artificial Sequence: Synthetic oligonucleotide
  Sense strand starting at position 3227 of SEQ ID NO: 1883075
ugugucucuaugcaaagua

SEQ ID NO: 2167601 - RNA, 19 nt, Artificial Sequence
  Description of Artificial Sequence: Synthetic oligonucleotide
  Antisense strand to SEQ ID NO: 2167600
uacuuugcauagagacaca

SEQ ID NO: 2167602 - RNA, 19 nt, Artificial Sequence
  Description of Artificial Sequence: Synthetic oligonucleotide
  Sense strand starting at position 3316 of SEQ ID NO: 1883075
gaaaguacagcuggaauca

SEQ ID NO: 2167603 - RNA, 19 nt, Artificial Sequence
  Description of Artificial Sequence: Synthetic oligonucleotide
  Antisense strand to SEQ ID NO: 2167602
ugauuccagcuguacuuuc

SEQ ID NO: 2167604 - RNA, 19 nt, Artificial Sequence
  Description of Artificial Sequence: Synthetic oligonucleotide
  Sense strand starting at position 3336 of SEQ ID NO: 1883075
gacugcagucuacaguuaa

SEQ ID NO: 2167605 - RNA, 19 nt, Artificial Sequence
  Description of Artificial Sequence: Synthetic oligonucleotide
  Antisense strand to SEQ ID NO: 2167604
uuaacuguagacugcaguc

SEQ ID NO: 2167606 - RNA, 19 nt, Artificial Sequence
  Description of Artificial Sequence: Synthetic oligonucleotide
  Sense strand starting at position 3369 of SEQ ID NO: 1883075
gaaauuggccaagggucau

SEQ ID NO: 2167607 - RNA, 19 nt, Artificial Sequence
  Description of Artificial Sequence: Synthetic oligonucleotide
  Antisense strand to SEQ ID NO: 2167606
augacccuuggccaauuuc

SEQ ID NO: 2167608 - RNA, 19 nt, Artificial Sequence
  Description of Artificial Sequence: Synthetic oligonucleotide
  Sense strand starting at position 3512 of SEQ ID NO: 1883075
ggaccuuuguagcuuaagu

SEQ ID NO: 2167609 - RNA, 19 nt, Artificial Sequence
  Description of Artificial Sequence: Synthetic oligonucleotide
  Antisense strand to SEQ ID NO: 2167608
acuuaagcuacaaaggucc

SEQ ID NO: 2167610 - RNA, 19 nt, Artificial Sequence
  Description of Artificial Sequence: Synthetic oligonucleotide
  Sense strand starting at position 3600 of SEQ ID NO: 1883075
cuggcugugcccguucaua

SEQ ID NO: 2167611 - RNA, 19 nt, Artificial Sequence
  Description of Artificial Sequence: Synthetic oligonucleotide
  Antisense strand to SEQ ID NO: 2167610
uaugaacgggcacagccag

SEQ ID NO: 2167612 - RNA, 19 nt, Artificial Sequence
  Description of Artificial Sequence: Synthetic oligonucleotide
  Sense strand starting at position 3602 of SEQ ID NO: 1883075
ggcugugcccguucauaca

SEQ ID NO: 2167613 - RNA, 19 nt, Artificial Sequence
  Description of Artificial Sequence: Synthetic oligonucleotide
  Antisense strand to SEQ ID NO: 2167612
uguaugaacgggcacagcc

SEQ ID NO: 2167614 - RNA, 19 nt, Artificial Sequence
  Description of Artificial Sequence: Synthetic oligonucleotide
  Sense strand starting at position 3622 of SEQ ID NO: 1883075
ucucaauuccaguaaugua

SEQ ID NO: 2167615 - RNA, 19 nt, Artificial Sequence
  Description of Artificial Sequence: Synthetic oligonucleotide
  Antisense strand to SEQ ID NO: 2167614
uacauuacuggaauugaga

SEQ ID NO: 2167616 - RNA, 19 nt, Artificial Sequence
  Description of Artificial Sequence: Synthetic oligonucleotide
  Sense strand starting at position 3902 of SEQ ID NO: 1883075
uugaaucgauaugccauaa

SEQ ID NO: 2167617 - RNA, 19 nt, Artificial Sequence
  Description of Artificial Sequence: Synthetic oligonucleotide
  Antisense strand to SEQ ID NO: 2167616
uuauggcauaucgauucaa

SEQ ID NO: 2167618 - RNA, 19 nt, Artificial Sequence
  Description of Artificial Sequence: Synthetic oligonucleotide
  Sense strand starting at position 3938 of SEQ ID NO: 1883075
caugauacguugcucaaua

SEQ ID NO: 2167619 - RNA, 19 nt, Artificial Sequence
  Description of Artificial Sequence: Synthetic oligonucleotide
  Antisense strand to SEQ ID NO: 2167618
uauugagcaacguaucaug

SEQ ID NO: 2167620 - RNA, 19 nt, Artificial Sequence
  Description of Artificial Sequence: Synthetic oligonucleotide
  Sense strand starting at position 3939 of SEQ ID NO: 1883075
augauacguugcucaauaa

SEQ ID NO: 2167621 - RNA, 19 nt, Artificial Sequence
  Description of Artificial Sequence: Synthetic oligonucleotide
  Antisense strand to SEQ ID NO: 2167620
uuauugagcaacguaucau

SEQ ID NO: 2167622 - RNA, 19 nt, Artificial Sequence
  Description of Artificial Sequence: Synthetic oligonucleotide
  Sense strand starting at position 3940 of SEQ ID NO: 1883075
ugauacguugcucaauaac

SEQ ID NO: 2167623 - RNA, 19 nt, Artificial Sequence
  Description of Artificial Sequence: Synthetic oligonucleotide
  Antisense strand to SEQ ID NO: 2167622
guuauugagcaacguauca

SEQ ID NO: 2167624 - RNA, 19 nt, Artificial Sequence
  Description of Artificial Sequence: Synthetic oligonucleotide
  Sense strand starting at position 976 of SEQ ID NO: 1883074
agcuauugugucuacacua

SEQ ID NO: 2167625 - RNA, 19 nt, Artificial Sequence
  Description of Artificial Sequence: Synthetic oligonucleotide
  Antisense strand to SEQ ID NO: 2167624
uaguguagacacaauagcu

SEQ ID NO: 2167626 - RNA, 19 nt, Artificial Sequence
  Description of Artificial Sequence: Synthetic oligonucleotide
  Sense strand starting at position 981 of SEQ ID NO: 1883074
uugugucuacacuagcaau

SEQ ID NO: 2167627 - RNA, 19 nt, Artificial Sequence
  Description of Artificial Sequence: Synthetic oligonucleotide
  Antisense strand to SEQ ID NO: 2167626
auugcuaguguagacacaa

SEQ ID NO: 2167628 - RNA, 19 nt, Artificial Sequence
  Description of Artificial Sequence: Synthetic oligonucleotide
  Sense strand starting at position 1009 of SEQ ID NO: 1883074
ggcugugucagauaccaaa

SEQ ID NO: 2167629 - RNA, 19 nt, Artificial Sequence
  Description of Artificial Sequence: Synthetic oligonucleotide
  Antisense strand to SEQ ID NO: 2167628
uuugguaucugacacagcc

SEQ ID NO: 2167630 - RNA, 19 nt, Artificial Sequence
  Description of Artificial Sequence: Synthetic oligonucleotide
  Sense strand starting at position 1038 of SEQ ID NO: 1883074
gauauuucuuuguuugguu

SEQ ID NO: 2167631 - RNA, 19 nt, Artificial Sequence
  Description of Artificial Sequence: Synthetic oligonucleotide
  Antisense strand to SEQ ID NO: 2167630
aaccaaacaaagaaauauc

SEQ ID NO: 2167632 - RNA, 19 nt, Artificial Sequence
  Description of Artificial Sequence: Synthetic oligonucleotide
  Sense strand starting at position 1077 of SEQ ID NO: 1883074
auaaaucaucuguagaguc

SEQ ID NO: 2167633 - RNA, 19 nt, Artificial Sequence
  Description of Artificial Sequence: Synthetic oligonucleotide
  Antisense strand to SEQ ID NO: 2167632
gacucuacagaugauuuau

SEQ ID NO: 2167634 - RNA, 19 nt, Artificial Sequence
  Description of Artificial Sequence: Synthetic oligonucleotide
  Sense strand starting at position 1104 of SEQ ID NO: 1883074
uuccgaaauucucucuaug

SEQ ID NO: 2167635 - RNA, 19 nt, Artificial Sequence
  Description of Artificial Sequence: Synthetic oligonucleotide
  Antisense strand to SEQ ID NO: 2167634
cauagagagaauuucggaa

SEQ ID NO: 2167636 - RNA, 19 nt, Artificial Sequence
  Description of Artificial Sequence: Synthetic oligonucleotide
  Sense strand starting at position 1106 of SEQ ID NO: 1883074
ccgaaauucucucuauguc

SEQ ID NO: 2167637 - RNA, 19 nt, Artificial Sequence
  Description of Artificial Sequence: Synthetic oligonucleotide
  Antisense strand to SEQ ID NO: 2167636
gacauagagagaauuucgg

SEQ ID NO: 2167638 - RNA, 19 nt, Artificial Sequence
  Description of Artificial Sequence: Synthetic oligonucleotide
  Sense strand starting at position 1107 of SEQ ID NO: 1883074
cgaaauucucucuaugucu

SEQ ID NO: 2167639 - RNA, 19 nt, Artificial Sequence
  Description of Artificial Sequence: Synthetic oligonucleotide
  Antisense strand to SEQ ID NO: 2167638
agacauagagagaauuucg

SEQ ID NO: 2167640 - RNA, 19 nt, Artificial Sequence
  Description of Artificial Sequence: Synthetic oligonucleotide
  Sense strand starting at position 2176 of SEQ ID NO: 1883074
guacuuaggaccggaguua

SEQ ID NO: 2167641 - RNA, 19 nt, Artificial Sequence
  Description of Artificial Sequence: Synthetic oligonucleotide
  Antisense strand to SEQ ID NO: 2167640
uaacuccgguccuaaguac

SEQ ID NO: 2167642 - RNA, 19 nt, Artificial Sequence
  Description of Artificial Sequence: Synthetic oligonucleotide
  Sense strand starting at position 2187 of SEQ ID NO: 1883074
cggaguuagcauuaaccuu

SEQ ID NO: 2167643 - RNA, 19 nt, Artificial Sequence
  Description of Artificial Sequence: Synthetic oligonucleotide
  Antisense strand to SEQ ID NO: 2167642
aagguuaaugcuaacuccg

SEQ ID NO: 2167644 - RNA, 19 nt, Artificial Sequence
  Description of Artificial Sequence: Synthetic oligonucleotide
  Sense strand starting at position 2264 of SEQ ID NO: 1883074
gguaauuuaccuugugcgu

SEQ ID NO: 2167645 - RNA, 19 nt, Artificial Sequence
  Description of Artificial Sequence: Synthetic oligonucleotide
  Antisense strand to SEQ ID NO: 2167644
acgcacaagguaaauuacc

SEQ ID NO: 2167646 - RNA, 19 nt, Artificial Sequence
  Description of Artificial Sequence: Synthetic oligonucleotide
  Sense strand starting at position 2325 of SEQ ID NO: 1883074
cucuguagaucaucacaca

SEQ ID NO: 2167647 - RNA, 19 nt, Artificial Sequence
  Description of Artificial Sequence: Synthetic oligonucleotide
  Antisense strand to SEQ ID NO: 2167646
ugugugaugaucuacagag

SEQ ID NO: 2167648 - RNA, 19 nt, Artificial Sequence
  Description of Artificial Sequence: Synthetic oligonucleotide
  Sense strand starting at position 2384 of SEQ ID NO: 1883074
guguguccugcuuccauua

SEQ ID NO: 2167649 - RNA, 19 nt, Artificial Sequence
  Description of Artificial Sequence: Synthetic oligonucleotide
  Antisense strand to SEQ ID NO: 2167648
uaauggaagcaggacacac

SEQ ID NO: 2167650 - RNA, 19 nt, Artificial Sequence
  Description of Artificial Sequence: Synthetic oligonucleotide
  Sense strand starting at position 2426 of SEQ ID NO: 1883074
cccuguauucugcagaccu

SEQ ID NO: 2167651 - RNA, 19 nt, Artificial Sequence
  Description of Artificial Sequence: Synthetic oligonucleotide
  Antisense strand to SEQ ID NO: 2167650
aggucugcagaauacaggg

SEQ ID NO: 2167652 - RNA, 19 nt, Artificial Sequence
  Description of Artificial Sequence: Synthetic oligonucleotide
  Sense strand starting at position 2445 of SEQ ID NO: 1883074
gucagaaguguuagugugu

SEQ ID NO: 2167653 - RNA, 19 nt, Artificial Sequence
  Description of Artificial Sequence: Synthetic oligonucleotide
  Antisense strand to SEQ ID NO: 2167652
acacacuaacacuucugac

SEQ ID NO: 2167654 - RNA, 19 nt, Artificial Sequence
  Description of Artificial Sequence: Synthetic oligonucleotide
  Sense strand starting at position 2451 of SEQ ID NO: 1883074
aguguuaguguguauauuu

SEQ ID NO: 2167655 - RNA, 19 nt, Artificial Sequence
  Description of Artificial Sequence: Synthetic oligonucleotide
  Antisense strand to SEQ ID NO: 2167654
aaauauacacacuaacacu

SEQ ID NO: 2167656 - RNA, 19 nt, Artificial Sequence
  Description of Artificial Sequence: Synthetic oligonucleotide
  Sense strand starting at position 2456 of SEQ ID NO: 1883074
uaguguguauauuucuuga

SEQ ID NO: 2167657 - RNA, 19 nt, Artificial Sequence
  Description of Artificial Sequence: Synthetic oligonucleotide
  Antisense strand to SEQ ID NO: 2167656
ucaagaaauauacacacua

SEQ ID NO: 2167658 - RNA, 19 nt, Artificial Sequence
  Description of Artificial Sequence: Synthetic oligonucleotide
  Sense strand starting at position 2570 of SEQ ID NO: 1883074
cccagcauuuaccugguua

SEQ ID NO: 2167659 - RNA, 19 nt, Artificial Sequence
  Description of Artificial Sequence: Synthetic oligonucleotide
  Antisense strand to SEQ ID NO: 2167658
uaaccagguaaaugcuggg

SEQ ID NO: 2167660 - RNA, 19 nt, Artificial Sequence
  Description of Artificial Sequence: Synthetic oligonucleotide
  Sense strand starting at position 2574 of SEQ ID NO: 1883074
gcauuuaccugguuaugua

SEQ ID NO: 2167661 - RNA, 19 nt, Artificial Sequence
  Description of Artificial Sequence: Synthetic oligonucleotide
  Antisense strand to SEQ ID NO: 2167660
uacauaaccagguaaaugc

SEQ ID NO: 2167662 - RNA, 19 nt, Artificial Sequence
  Description of Artificial Sequence: Synthetic oligonucleotide
  Sense strand starting at position 2677 of SEQ ID NO: 1883074
cuaacaugguuccugaaac

SEQ ID NO: 2167663 - RNA, 19 nt, Artificial Sequence
  Description of Artificial Sequence: Synthetic oligonucleotide
  Antisense strand to SEQ ID NO: 2167662
guuucaggaaccauguuag

SEQ ID NO: 2167664 - RNA, 19 nt, Artificial Sequence
  Description of Artificial Sequence: Synthetic oligonucleotide
  Sense strand starting at position 2695 of SEQ ID NO: 1883074
cgugguaggucacuaacua

SEQ ID NO: 2167665 - RNA, 19 nt, Artificial Sequence
  Description of Artificial Sequence: Synthetic oligonucleotide
  Antisense strand to SEQ ID NO: 2167664
uaguuagugaccuaccacg

SEQ ID NO: 2167666 - RNA, 19 nt, Artificial Sequence
  Description of Artificial Sequence: Synthetic oligonucleotide
  Sense strand starting at position 2737 of SEQ ID NO: 1883074
ucaccacaccugugaagau

SEQ ID NO: 2167667 - RNA, 19 nt, Artificial Sequence
  Description of Artificial Sequence: Synthetic oligonucleotide
  Antisense strand to SEQ ID NO: 2167666
aucuucacaggugugguga

SEQ ID NO: 2167668 - RNA, 19 nt, Artificial Sequence
  Description of Artificial Sequence: Synthetic oligonucleotide
  Sense strand starting at position 2790 of SEQ ID NO: 1883074
guuaagucggaguagggua

SEQ ID NO: 2167669 - RNA, 19 nt, Artificial Sequence
  Description of Artificial Sequence: Synthetic oligonucleotide
  Antisense strand to SEQ ID NO: 2167668
uacccuacuccgacuuaac

SEQ ID NO: 2167670 - RNA, 19 nt, Artificial Sequence
  Description of Artificial Sequence: Synthetic oligonucleotide
  Sense strand starting at position 2839 of SEQ ID NO: 1883074
auacuugguccuugagcca

SEQ ID NO: 2167671 - RNA, 19 nt, Artificial Sequence
  Description of Artificial Sequence: Synthetic oligonucleotide
  Antisense strand to SEQ ID NO: 2167670
uggcucaaggaccaaguau

SEQ ID NO: 2167672 - RNA, 19 nt, Artificial Sequence
  Description of Artificial Sequence: Synthetic oligonucleotide
  Sense strand starting at position 3039 of SEQ ID NO: 1883074
ugagaauaacugugucugu

SEQ ID NO: 2167673 - RNA, 19 nt, Artificial Sequence
  Description of Artificial Sequence: Synthetic oligonucleotide
  Antisense strand to SEQ ID NO: 2167672
acagacacaguuauucuca

SEQ ID NO: 2167674 - RNA, 19 nt, Artificial Sequence
  Description of Artificial Sequence: Synthetic oligonucleotide
  Sense strand starting at position 3040 of SEQ ID NO: 1883074
gagaauaacugugucugua

SEQ ID NO: 2167675 - RNA, 19 nt, Artificial Sequence
  Description of Artificial Sequence: Synthetic oligonucleotide
  Antisense strand to SEQ ID NO: 2167674
uacagacacaguuauucuc

SEQ ID NO: 2167676 - RNA, 19 nt, Artificial Sequence
  Description of Artificial Sequence: Synthetic oligonucleotide
  Sense strand starting at position 3042 of SEQ ID NO: 1883074
gaauaacugugucuguagu

SEQ ID NO: 2167677 - RNA, 19 nt, Artificial Sequence
  Description of Artificial Sequence: Synthetic oligonucleotide
  Antisense strand to SEQ ID NO: 2167676
acuacagacacaguuauuc

SEQ ID NO: 2167678 - RNA, 19 nt, Artificial Sequence
  Description of Artificial Sequence: Synthetic oligonucleotide
  Sense strand starting at position 3090 of SEQ ID NO: 1883074
ugaagauucucugucccag

SEQ ID NO: 2167679 - RNA, 19 nt, Artificial Sequence
  Description of Artificial Sequence: Synthetic oligonucleotide
  Antisense strand to SEQ ID NO: 2167678
cugggacagagaaucuuca

SEQ ID NO: 2167680 - RNA, 19 nt, Artificial Sequence
  Description of Artificial Sequence: Synthetic oligonucleotide
  Sense strand starting at position 3176 of SEQ ID NO: 1883074
ugugucucuaugcaaagua

SEQ ID NO: 2167681 - RNA, 19 nt, Artificial Sequence
  Description of Artificial Sequence: Synthetic oligonucleotide
  Antisense strand to SEQ ID NO: 2167680
uacuuugcauagagacaca

SEQ ID NO: 2167682 - RNA, 19 nt, Artificial Sequence
  Description of Artificial Sequence: Synthetic oligonucleotide
  Sense strand starting at position 3265 of SEQ ID NO: 1883074
gaaaguacagcuggaauca

SEQ ID NO: 2167683 - RNA, 19 nt, Artificial Sequence
  Description of Artificial Sequence: Synthetic oligonucleotide
  Antisense strand to SEQ ID NO: 2167682
ugauuccagcuguacuuuc

SEQ ID NO: 2167684 - RNA, 19 nt, Artificial Sequence
  Description of Artificial Sequence: Synthetic oligonucleotide
  Sense strand starting at position 3285 of SEQ ID NO: 1883074
gacugcagucuacaguuaa

SEQ ID NO: 2167685 - RNA, 19 nt, Artificial Sequence
  Description of Artificial Sequence: Synthetic oligonucleotide
  Antisense strand to SEQ ID NO: 2167684
uuaacuguagacugcaguc

SEQ ID NO: 2167686 - RNA, 19 nt, Artificial Sequence
  Description of Artificial Sequence: Synthetic oligonucleotide
  Sense strand starting at position 3318 of SEQ ID NO: 1883074
gaaauuggccaagggucau

SEQ ID NO: 2167687 - RNA, 19 nt, Artificial Sequence
  Description of Artificial Sequence: Synthetic oligonucleotide
  Antisense strand to SEQ ID NO: 2167686
augacccuuggccaauuuc

SEQ ID NO: 2167688 - RNA, 19 nt, Artificial Sequence
  Description of Artificial Sequence: Synthetic oligonucleotide
  Sense strand starting at position 3461 of SEQ ID NO: 1883074
ggaccuuuguagcuuaagu

SEQ ID NO: 2167689 - RNA, 19 nt, Artificial Sequence
  Description of Artificial Sequence: Synthetic oligonucleotide
  Antisense strand to SEQ ID NO: 2167688
acuuaagcuacaaaggucc

SEQ ID NO: 2167690 - RNA, 19 nt, Artificial Sequence
  Description of Artificial Sequence: Synthetic oligonucleotide
  Sense strand starting at position 3549 of SEQ ID NO: 1883074
cuggcugugcccguucaua

SEQ ID NO: 2167691 - RNA, 19 nt, Artificial Sequence
  Description of Artificial Sequence: Synthetic oligonucleotide
  Antisense strand to SEQ ID NO: 2167690
uaugaacgggcacagccag

SEQ ID NO: 2167692 - RNA, 19 nt, Artificial Sequence
  Description of Artificial Sequence: Synthetic oligonucleotide
  Sense strand starting at position 3551 of SEQ ID NO: 1883074
ggcugugcccguucauaca

SEQ ID NO: 2167693 - RNA, 19 nt, Artificial Sequence
  Description of Artificial Sequence: Synthetic oligonucleotide
  Antisense strand to SEQ ID NO: 2167692
uguaugaacgggcacagcc

SEQ ID NO: 2167694 - RNA, 19 nt, Artificial Sequence
  Description of Artificial Sequence: Synthetic oligonucleotide
  Sense strand starting at position 3571 of SEQ ID NO: 1883074
ucucaauuccaguaaugua

SEQ ID NO: 2167695 - RNA, 19 nt, Artificial Sequence
  Description of Artificial Sequence: Synthetic oligonucleotide
  Antisense strand to SEQ ID NO: 2167694
uacauuacuggaauugaga

SEQ ID NO: 2167696 - RNA, 19 nt, Artificial Sequence
  Description of Artificial Sequence: Synthetic oligonucleotide
  Sense strand starting at position 3851 of SEQ ID NO: 1883074
uugaaucgauaugccauaa

SEQ ID NO: 2167697 - RNA, 19 nt, Artificial Sequence
  Description of Artificial Sequence: Synthetic oligonucleotide
  Antisense strand to SEQ ID NO: 2167696
uuauggcauaucgauucaa

SEQ ID NO: 2167698 - RNA, 19 nt, Artificial Sequence
  Description of Artificial Sequence: Synthetic oligonucleotide
  Sense strand starting at position 3887 of SEQ ID NO: 1883074
caugauacguugcucaaua

SEQ ID NO: 2167699 - RNA, 19 nt, Artificial Sequence
  Description of Artificial Sequence: Synthetic oligonucleotide
  Antisense strand to SEQ ID NO: 2167698
uauugagcaacguaucaug

SEQ ID NO: 2167700 - RNA, 19 nt, Artificial Sequence
  Description of Artificial Sequence: Synthetic oligonucleotide
  Sense strand starting at position 3888 of SEQ ID NO: 1883074
augauacguugcucaauaa

SEQ ID NO: 2167701 - RNA, 19 nt, Artificial Sequence
  Description of Artificial Sequence: Synthetic oligonucleotide
  Antisense strand to SEQ ID NO: 2167700
uuauugagcaacguaucau

SEQ ID NO: 2167702 - RNA, 19 nt, Artificial Sequence
  Description of Artificial Sequence: Synthetic oligonucleotide
  Sense strand starting at position 3889 of SEQ ID NO: 1883074
ugauacguugcucaauaac

SEQ ID NO: 2167703 - RNA, 19 nt, Artificial Sequence
  Description of Artificial Sequence: Synthetic oligonucleotide
  Antisense strand to SEQ ID NO: 2167702
guuauugagcaacguauca

SEQ ID NO: 2167704 - RNA, 19 nt, Artificial Sequence
  Description of Artificial Sequence: Synthetic oligonucleotide
  Sense strand starting at position 163 of SEQ ID NO: 1883076
aucgguuugccgucacuaa

SEQ ID NO: 2167705 - RNA, 19 nt, Artificial Sequence
  Description of Artificial Sequence: Synthetic oligonucleotide
  Antisense strand to SEQ ID NO: 2167704
uuagugacggcaaaccgau

SEQ ID NO: 2167706 - RNA, 19 nt, Artificial Sequence
  Description of Artificial Sequence: Synthetic oligonucleotide
  Sense strand starting at position 265 of SEQ ID NO: 1883076
acugccagagucugauuau

SEQ ID NO: 2167707 - RNA, 19 nt, Artificial Sequence
  Description of Artificial Sequence: Synthetic oligonucleotide
  Antisense strand to SEQ ID NO: 2167706
auaaucagacucuggcagu

SEQ ID NO: 2167708 - RNA, 19 nt, Artificial Sequence
  Description of Artificial Sequence: Synthetic oligonucleotide
  Sense strand starting at position 346 of SEQ ID NO: 1883076
ccaaguccugucuacuauu

SEQ ID NO: 2167709 - RNA, 19 nt, Artificial Sequence
  Description of Artificial Sequence: Synthetic oligonucleotide
  Antisense strand to SEQ ID NO: 2167708
aauaguagacaggacuugg

SEQ ID NO: 2167710 - RNA, 19 nt, Artificial Sequence
  Description of Artificial Sequence: Synthetic oligonucleotide
  Sense strand starting at position 1114 of SEQ ID NO: 1883076
caugaauguuugguuucua

SEQ ID NO: 2167711 - RNA, 19 nt, Artificial Sequence
  Description of Artificial Sequence: Synthetic oligonucleotide
  Antisense strand to SEQ ID NO: 2167710
uagaaaccaaacauucaug

SEQ ID NO: 2167712 - RNA, 19 nt, Artificial Sequence
  Description of Artificial Sequence: Synthetic oligonucleotide
  Sense strand starting at position 1115 of SEQ ID NO: 1883076
augaauguuugguuucuau

SEQ ID NO: 2167713 - RNA, 19 nt, Artificial Sequence
  Description of Artificial Sequence: Synthetic oligonucleotide
  Antisense strand to SEQ ID NO: 2167712
auagaaaccaaacauucau

SEQ ID NO: 2167714 - RNA, 19 nt, Artificial Sequence
  Description of Artificial Sequence: Synthetic oligonucleotide
  Sense strand starting at position 1208 of SEQ ID NO: 1883076
agggaauggcuugaggcau

SEQ ID NO: 2167715 - RNA, 19 nt, Artificial Sequence
  Description of Artificial Sequence: Synthetic oligonucleotide
  Antisense strand to SEQ ID NO: 2167714
augccucaagccauucccu

SEQ ID NO: 2167716 - RNA, 19 nt, Artificial Sequence
  Description of Artificial Sequence: Synthetic oligonucleotide
  Sense strand starting at position 1219 of SEQ ID NO: 1883076
ugaggcauaccguaucacu

SEQ ID NO: 2167717 - RNA, 19 nt, Artificial Sequence
  Description of Artificial Sequence: Synthetic oligonucleotide
  Antisense strand to SEQ ID NO: 2167716
agugauacgguaugccuca

SEQ ID NO: 2167718 - RNA, 19 nt, Artificial Sequence
  Description of Artificial Sequence: Synthetic oligonucleotide
  Sense strand starting at position 1275 of SEQ ID NO: 1883076
aagugucaaggcugaaaga

SEQ ID NO: 2167719 - RNA, 19 nt, Artificial Sequence
  Description of Artificial Sequence: Synthetic oligonucleotide
  Antisense strand to SEQ ID NO: 2167718
ucuuucagccuugacacuu

SEQ ID NO: 2167720 - RNA, 19 nt, Artificial Sequence
  Description of Artificial Sequence: Synthetic oligonucleotide
  Sense strand starting at position 1328 of SEQ ID NO: 1883076
aguucugaauuacugauaa

SEQ ID NO: 2167721 - RNA, 19 nt, Artificial Sequence
  Description of Artificial Sequence: Synthetic oligonucleotide
  Antisense strand to SEQ ID NO: 2167720
uuaucaguaauucagaacu

SEQ ID NO: 2167722 - RNA, 19 nt, Artificial Sequence
  Description of Artificial Sequence: Synthetic oligonucleotide
  Sense strand starting at position 1340 of SEQ ID NO: 1883076
cugauaacucuuugagcca

SEQ ID NO: 2167723 - RNA, 19 nt, Artificial Sequence
  Description of Artificial Sequence: Synthetic oligonucleotide
  Antisense strand to SEQ ID NO: 2167722
uggcucaaagaguuaucag

SEQ ID NO: 2167724 - RNA, 19 nt, Artificial Sequence
  Description of Artificial Sequence: Synthetic oligonucleotide
  Sense strand starting at position 1354 of SEQ ID NO: 1883076
agccaucucauacgaggaa

SEQ ID NO: 2167725 - RNA, 19 nt, Artificial Sequence
  Description of Artificial Sequence: Synthetic oligonucleotide
  Antisense strand to SEQ ID NO: 2167724
uuccucguaugagauggcu

SEQ ID NO: 2167726 - RNA, 19 nt, Artificial Sequence
  Description of Artificial Sequence: Synthetic oligonucleotide
  Sense strand starting at position 1686 of SEQ ID NO: 1883076
agugucuaugccuagaucu

SEQ ID NO: 2167727 - RNA, 19 nt, Artificial Sequence
  Description of Artificial Sequence: Synthetic oligonucleotide
  Antisense strand to SEQ ID NO: 2167726
agaucuaggcauagacacu

SEQ ID NO: 2167728 - RNA, 19 nt, Artificial Sequence
  Description of Artificial Sequence: Synthetic oligonucleotide
  Sense strand starting at position 1899 of SEQ ID NO: 1883076
gccagugucggcguaaacu

SEQ ID NO: 2167729 - RNA, 19 nt, Artificial Sequence
  Description of Artificial Sequence: Synthetic oligonucleotide
  Antisense strand to SEQ ID NO: 2167728
aguuuacgccgacacuggc

SEQ ID NO: 2167730 - RNA, 19 nt, Artificial Sequence
  Description of Artificial Sequence: Synthetic oligonucleotide
  Sense strand starting at position 1947 of SEQ ID NO: 1883076
cauguuuccgccgccgaaa

SEQ ID NO: 2167731 - RNA, 19 nt, Artificial Sequence
  Description of Artificial Sequence: Synthetic oligonucleotide
  Antisense strand to SEQ ID NO: 2167730
uuucggcggcggaaacaug

SEQ ID NO: 2167732 - RNA, 19 nt, Artificial Sequence
  Description of Artificial Sequence: Synthetic oligonucleotide
  Sense strand starting at position 1948 of SEQ ID NO: 1883076
auguuuccgccgccgaaau

SEQ ID NO: 2167733 - RNA, 19 nt, Artificial Sequence
  Description of Artificial Sequence: Synthetic oligonucleotide
  Antisense strand to SEQ ID NO: 2167732
auuucggcggcggaaacau

SEQ ID NO: 2167734 - RNA, 19 nt, Artificial Sequence
  Description of Artificial Sequence: Synthetic oligonucleotide
  Sense strand starting at position 2188 of SEQ ID NO: 1883076
caaagaucaggcugacagu

SEQ ID NO: 2167735 - RNA, 19 nt, Artificial Sequence
  Description of Artificial Sequence: Synthetic oligonucleotide
  Antisense strand to SEQ ID NO: 2167734
acugucagccugaucuuug

SEQ ID NO: 2167736 - RNA, 19 nt, Artificial Sequence
  Description of Artificial Sequence: Synthetic oligonucleotide
  Sense strand starting at position 2201 of SEQ ID NO: 1883076
gacagugcccaucaagcau

SEQ ID NO: 2167737 - RNA, 19 nt, Artificial Sequence
  Description of Artificial Sequence: Synthetic oligonucleotide
  Antisense strand to SEQ ID NO: 2167736
augcuugaugggcacuguc

SEQ ID NO: 2167738 - RNA, 19 nt, Artificial Sequence
  Description of Artificial Sequence: Synthetic oligonucleotide
  Sense strand starting at position 2296 of SEQ ID NO: 1883076
ggaggcguugcugcucauu

SEQ ID NO: 2167739 - RNA, 19 nt, Artificial Sequence
  Description of Artificial Sequence: Synthetic oligonucleotide
  Antisense strand to SEQ ID NO: 2167738
aaugagcagcaacgccucc

SEQ ID NO: 2167740 - RNA, 19 nt, Artificial Sequence
  Description of Artificial Sequence: Synthetic oligonucleotide
  Sense strand starting at position 2330 of SEQ ID NO: 1883076
auauauggcuuuguaacca

SEQ ID NO: 2167741 - RNA, 19 nt, Artificial Sequence
  Description of Artificial Sequence: Synthetic oligonucleotide
  Antisense strand to SEQ ID NO: 2167740
ugguuacaaagccauauau

SEQ ID NO: 2167742 - RNA, 19 nt, Artificial Sequence
  Description of Artificial Sequence: Synthetic oligonucleotide
  Sense strand starting at position 2570 of SEQ ID NO: 1883076
uccauaauagagugugaau

SEQ ID NO: 2167743 - RNA, 19 nt, Artificial Sequence
  Description of Artificial Sequence: Synthetic oligonucleotide
  Antisense strand to SEQ ID NO: 2167742
auucacacucuauuaugga

SEQ ID NO: 2167744 - RNA, 19 nt, Artificial Sequence
  Description of Artificial Sequence: Synthetic oligonucleotide
  Sense strand starting at position 2658 of SEQ ID NO: 1883076
gauugagauucugcauaug

SEQ ID NO: 2167745 - RNA, 19 nt, Artificial Sequence
  Description of Artificial Sequence: Synthetic oligonucleotide
  Antisense strand to SEQ ID NO: 2167744
cauaugcagaaucucaauc

SEQ ID NO: 2167746 - RNA, 19 nt, Artificial Sequence
  Description of Artificial Sequence: Synthetic oligonucleotide
  Sense strand starting at position 2663 of SEQ ID NO: 1883076
agauucugcauauguggau

SEQ ID NO: 2167747 - RNA, 19 nt, Artificial Sequence
  Description of Artificial Sequence: Synthetic oligonucleotide
  Antisense strand to SEQ ID NO: 2167746
auccacauaugcagaaucu

SEQ ID NO: 2167748 - RNA, 19 nt, Artificial Sequence
  Description of Artificial Sequence: Synthetic oligonucleotide
  Sense strand starting at position 2667 of SEQ ID NO: 1883076
ucugcauauguggaugaaa

SEQ ID NO: 2167749 - RNA, 19 nt, Artificial Sequence
  Description of Artificial Sequence: Synthetic oligonucleotide
  Antisense strand to SEQ ID NO: 2167748
uuucauccacauaugcaga

SEQ ID NO: 2167750 - RNA, 19 nt, Artificial Sequence
  Description of Artificial Sequence: Synthetic oligonucleotide
  Sense strand starting at position 2690 of SEQ ID NO: 1883076
ugaguuagauucucucuag

SEQ ID NO: 2167751 - RNA, 19 nt, Artificial Sequence
  Description of Artificial Sequence: Synthetic oligonucleotide
  Antisense strand to SEQ ID NO: 2167750
cuagagagaaucuaacuca

SEQ ID NO: 2167752 - RNA, 19 nt, Artificial Sequence
  Description of Artificial Sequence: Synthetic oligonucleotide
  Sense strand starting at position 2691 of SEQ ID NO: 1883076
gaguuagauucucucuaga

SEQ ID NO: 2167753 - RNA, 19 nt, Artificial Sequence
  Description of Artificial Sequence: Synthetic oligonucleotide
  Antisense strand to SEQ ID NO: 2167752
ucuagagagaaucuaacuc

SEQ ID NO: 2167754 - RNA, 19 nt, Artificial Sequence
  Description of Artificial Sequence: Synthetic oligonucleotide
  Sense strand starting at position 2693 of SEQ ID NO: 1883076
guuagauucucucuagacu

SEQ ID NO: 2167755 - RNA, 19 nt, Artificial Sequence
  Description of Artificial Sequence: Synthetic oligonucleotide
  Antisense strand to SEQ ID NO: 2167754
agucuagagagaaucuaac

SEQ ID NO: 2167756 - RNA, 19 nt, Artificial Sequence
  Description of Artificial Sequence: Synthetic oligonucleotide
  Sense strand starting at position 2839 of SEQ ID NO: 1883076
ucaacuugccuuuaaugga

SEQ ID NO: 2167757 - RNA, 19 nt, Artificial Sequence
  Description of Artificial Sequence: Synthetic oligonucleotide
  Antisense strand to SEQ ID NO: 2167756
uccauuaaaggcaaguuga

SEQ ID NO: 2167758 - RNA, 19 nt, Artificial Sequence
  Description of Artificial Sequence: Synthetic oligonucleotide
  Sense strand starting at position 2945 of SEQ ID NO: 1883076
cgcugaaaugcugaacacu

SEQ ID NO: 2167759 - RNA, 19 nt, Artificial Sequence
  Description of Artificial Sequence: Synthetic oligonucleotide
  Antisense strand to SEQ ID NO: 2167758
aguguucagcauuucagcg

SEQ ID NO: 2167760 - RNA, 19 nt, Artificial Sequence
  Description of Artificial Sequence: Synthetic oligonucleotide
  Sense strand starting at position 2954 of SEQ ID NO: 1883076
gcugaacacuuguuuaacu

SEQ ID NO: 2167761 - RNA, 19 nt, Artificial Sequence
  Description of Artificial Sequence: Synthetic oligonucleotide
  Antisense strand to SEQ ID NO: 2167760
aguuaaacaaguguucagc

SEQ ID NO: 2167762 - RNA, 19 nt, Artificial Sequence
  Description of Artificial Sequence: Synthetic oligonucleotide
  Sense strand starting at position 2987 of SEQ ID NO: 1883076
gcuggaagccaugagucaa

SEQ ID NO: 2167763 - RNA, 19 nt, Artificial Sequence
  Description of Artificial Sequence: Synthetic oligonucleotide
  Antisense strand to SEQ ID NO: 2167762
uugacucauggcuuccagc

SEQ ID NO: 2167764 - RNA, 19 nt, Artificial Sequence
  Description of Artificial Sequence: Synthetic oligonucleotide
  Sense strand starting at position 3029 of SEQ ID NO: 1883076
ccaggucaccuguaggagu

SEQ ID NO: 2167765 - RNA, 19 nt, Artificial Sequence
  Description of Artificial Sequence: Synthetic oligonucleotide
  Antisense strand to SEQ ID NO: 2167764
acuccuacaggugaccugg

SEQ ID NO: 2167766 - RNA, 19 nt, Artificial Sequence
  Description of Artificial Sequence: Synthetic oligonucleotide
  Sense strand starting at position 3031 of SEQ ID NO: 1883076
aggucaccuguaggaguau

SEQ ID NO: 2167767 - RNA, 19 nt, Artificial Sequence
  Description of Artificial Sequence: Synthetic oligonucleotide
  Antisense strand to SEQ ID NO: 2167766
auacuccuacaggugaccu

SEQ ID NO: 2167768 - RNA, 19 nt, Artificial Sequence
  Description of Artificial Sequence: Synthetic oligonucleotide
  Sense strand starting at position 3044 of SEQ ID NO: 1883076
gaguauagcaaguguagag

SEQ ID NO: 2167769 - RNA, 19 nt, Artificial Sequence
  Description of Artificial Sequence: Synthetic oligonucleotide
  Antisense strand to SEQ ID NO: 2167768
cucuacacuugcuauacuc

SEQ ID NO: 2167770 - RNA, 19 nt, Artificial Sequence
  Description of Artificial Sequence: Synthetic oligonucleotide
  Sense strand starting at position 3133 of SEQ ID NO: 1883076
acaugucagagaugcaaga

SEQ ID NO: 2167771 - RNA, 19 nt, Artificial Sequence
  Description of Artificial Sequence: Synthetic oligonucleotide
  Antisense strand to SEQ ID NO: 2167770
ucuugcaucucugacaugu

SEQ ID NO: 2167772 - RNA, 19 nt, Artificial Sequence
  Description of Artificial Sequence: Synthetic oligonucleotide
  Sense strand starting at position 3222 of SEQ ID NO: 1883076
cuguguacauuucugggua

SEQ ID NO: 2167773 - RNA, 19 nt, Artificial Sequence
  Description of Artificial Sequence: Synthetic oligonucleotide
  Antisense strand to SEQ ID NO: 2167772
uacccagaaauguacacag

SEQ ID NO: 2167774 - RNA, 19 nt, Artificial Sequence
  Description of Artificial Sequence: Synthetic oligonucleotide
  Sense strand starting at position 3244 of SEQ ID NO: 1883076
ugugacagacucuguacua

SEQ ID NO: 2167775 - RNA, 19 nt, Artificial Sequence
  Description of Artificial Sequence: Synthetic oligonucleotide
  Antisense strand to SEQ ID NO: 2167774
uaguacagagucugucaca

SEQ ID NO: 2167776 - RNA, 19 nt, Artificial Sequence
  Description of Artificial Sequence: Synthetic oligonucleotide
  Sense strand starting at position 3451 of SEQ ID NO: 1883076
gguugcuuuccauaacuaa

SEQ ID NO: 2167777 - RNA, 19 nt, Artificial Sequence
  Description of Artificial Sequence: Synthetic oligonucleotide
  Antisense strand to SEQ ID NO: 2167776
uuaguuauggaaagcaacc

SEQ ID NO: 2167778 - RNA, 19 nt, Artificial Sequence
  Description of Artificial Sequence: Synthetic oligonucleotide
  Sense strand starting at position 3542 of SEQ ID NO: 1883076
cugauugugggccacuaua

SEQ ID NO: 2167779 - RNA, 19 nt, Artificial Sequence
  Description of Artificial Sequence: Synthetic oligonucleotide
  Antisense strand to SEQ ID NO: 2167778
uauaguggcccacaaucag

SEQ ID NO: 2167780 - RNA, 19 nt, Artificial Sequence
  Description of Artificial Sequence: Synthetic oligonucleotide
  Sense strand starting at position 3596 of SEQ ID NO: 1883076
accucuagaggguguuuau

SEQ ID NO: 2167781 - RNA, 19 nt, Artificial Sequence
  Description of Artificial Sequence: Synthetic oligonucleotide
  Antisense strand to SEQ ID NO: 2167780
auaaacacccucuagaggu

SEQ ID NO: 2167782 - RNA, 19 nt, Artificial Sequence
  Description of Artificial Sequence: Synthetic oligonucleotide
  Sense strand starting at position 3945 of SEQ ID NO: 1883076
cucacuaaaucagugguuu

SEQ ID NO: 2167783 - RNA, 19 nt, Artificial Sequence
  Description of Artificial Sequence: Synthetic oligonucleotide
  Antisense strand to SEQ ID NO: 2167782
aaaccacugauuuagugag

SEQ ID NO: 2167784 - RNA, 19 nt, Artificial Sequence
  Description of Artificial Sequence: Synthetic oligonucleotide
  Sense strand starting at position 340 of SEQ ID NO: 1883077
aaggcaaaguugcuccaua

SEQ ID NO: 2167785 - RNA, 19 nt, Artificial Sequence
  Description of Artificial Sequence: Synthetic oligonucleotide
  Antisense strand to SEQ ID NO: 2167784
uauggagcaacuuugccuu

SEQ ID NO: 2167786 - RNA, 19 nt, Artificial Sequence
  Description of Artificial Sequence: Synthetic oligonucleotide
  Sense strand starting at position 446 of SEQ ID NO: 1883077
accuuuaaguaucaguuau

SEQ ID NO: 2167787 - RNA, 19 nt, Artificial Sequence
  Description of Artificial Sequence: Synthetic oligonucleotide
  Antisense strand to SEQ ID NO: 2167786
auaacugauacuuaaaggu

SEQ ID NO: 2167788 - RNA, 19 nt, Artificial Sequence
  Description of Artificial Sequence: Synthetic oligonucleotide
  Sense strand starting at position 450 of SEQ ID NO: 1883077
uuaaguaucaguuaugagu

SEQ ID NO: 2167789 - RNA, 19 nt, Artificial Sequence
  Description of Artificial Sequence: Synthetic oligonucleotide
  Antisense strand to SEQ ID NO: 2167788
acucauaacugauacuuaa

SEQ ID NO: 2167790 - RNA, 19 nt, Artificial Sequence
  Description of Artificial Sequence: Synthetic oligonucleotide
  Sense strand starting at position 452 of SEQ ID NO: 1883077
aaguaucaguuaugaguua

SEQ ID NO: 2167791 - RNA, 19 nt, Artificial Sequence
  Description of Artificial Sequence: Synthetic oligonucleotide
  Antisense strand to SEQ ID NO: 2167790
uaacucauaacugauacuu

SEQ ID NO: 2167792 - RNA, 19 nt, Artificial Sequence
  Description of Artificial Sequence: Synthetic oligonucleotide
  Sense strand starting at position 495 of SEQ ID NO: 1883077
aaauaugguugugaguaua

SEQ ID NO: 2167793 - RNA, 19 nt, Artificial Sequence
  Description of Artificial Sequence: Synthetic oligonucleotide
  Antisense strand to SEQ ID NO: 2167792
uauacucacaaccauauuu

SEQ ID NO: 2167794 - RNA, 19 nt, Artificial Sequence
  Description of Artificial Sequence: Synthetic oligonucleotide
  Sense strand starting at position 613 of SEQ ID NO: 1883077
gaaccuaagucagccagau

SEQ ID NO: 2167795 - RNA, 19 nt, Artificial Sequence
  Description of Artificial Sequence: Synthetic oligonucleotide
  Antisense strand to SEQ ID NO: 2167794
aucuggcugacuuagguuc

SEQ ID NO: 2167796 - RNA, 19 nt, Artificial Sequence
  Description of Artificial Sequence: Synthetic oligonucleotide
  Sense strand starting at position 746 of SEQ ID NO: 1883077
uuaaauaucucaccggaug

SEQ ID NO: 2167797 - RNA, 19 nt, Artificial Sequence
  Description of Artificial Sequence: Synthetic oligonucleotide
  Antisense strand to SEQ ID NO: 2167796
cauccggugagauauuuaa

SEQ ID NO: 2167798 - RNA, 19 nt, Artificial Sequence
  Description of Artificial Sequence: Synthetic oligonucleotide
  Sense strand starting at position 955 of SEQ ID NO: 1883077
ucgcaugaguaagaaucua

SEQ ID NO: 2167799 - RNA, 19 nt, Artificial Sequence
  Description of Artificial Sequence: Synthetic oligonucleotide
  Antisense strand to SEQ ID NO: 2167798
uagauucuuacucaugcga

SEQ ID NO: 2167800 - RNA, 19 nt, Artificial Sequence
  Description of Artificial Sequence: Synthetic oligonucleotide
  Sense strand starting at position 971 of SEQ ID NO: 1883077
cuagaaaccugagaaguuu

SEQ ID NO: 2167801 - RNA, 19 nt, Artificial Sequence
  Description of Artificial Sequence: Synthetic oligonucleotide
  Antisense strand to SEQ ID NO: 2167800
aaacuucucagguuucuag

SEQ ID NO: 2167802 - RNA, 19 nt, Artificial Sequence
  Description of Artificial Sequence: Synthetic oligonucleotide
  Sense strand starting at position 979 of SEQ ID NO: 1883077
cugagaaguuucgagaaga

SEQ ID NO: 2167803 - RNA, 19 nt, Artificial Sequence
  Description of Artificial Sequence: Synthetic oligonucleotide
  Antisense strand to SEQ ID NO: 2167802
ucuucucgaaacuucucag

SEQ ID NO: 2167804 - RNA, 19 nt, Artificial Sequence
  Description of Artificial Sequence: Synthetic oligonucleotide
  Sense strand starting at position 1212 of SEQ ID NO: 1883077
agauuagauugaugccaca

SEQ ID NO: 2167805 - RNA, 19 nt, Artificial Sequence
  Description of Artificial Sequence: Synthetic oligonucleotide
  Antisense strand to SEQ ID NO: 2167804
uguggcaucaaucuaaucu

SEQ ID NO: 2167806 - RNA, 19 nt, Artificial Sequence
  Description of Artificial Sequence: Synthetic oligonucleotide
  Sense strand starting at position 1215 of SEQ ID NO: 1883077
uuagauugaugccacaauc

SEQ ID NO: 2167807 - RNA, 19 nt, Artificial Sequence
  Description of Artificial Sequence: Synthetic oligonucleotide
  Antisense strand to SEQ ID NO: 2167806
gauuguggcaucaaucuaa

SEQ ID NO: 2167808 - RNA, 19 nt, Artificial Sequence
  Description of Artificial Sequence: Synthetic oligonucleotide
  Sense strand starting at position 1225 of SEQ ID NO: 1883077
gccacaaucgaagaguaua

SEQ ID NO: 2167809 - RNA, 19 nt, Artificial Sequence
  Description of Artificial Sequence: Synthetic oligonucleotide
  Antisense strand to SEQ ID NO: 2167808
uauacucuucgauuguggc

SEQ ID NO: 2167810 - RNA, 19 nt, Artificial Sequence
  Description of Artificial Sequence: Synthetic oligonucleotide
  Sense strand starting at position 1278 of SEQ ID NO: 1883077
gggccaguucgcgaccgau

SEQ ID NO: 2167811 - RNA, 19 nt, Artificial Sequence
  Description of Artificial Sequence: Synthetic oligonucleotide
  Antisense strand to SEQ ID NO: 2167810
aucggucgcgaacuggccc

SEQ ID NO: 2167812 - RNA, 19 nt, Artificial Sequence
  Description of Artificial Sequence: Synthetic oligonucleotide
  Sense strand starting at position 1280 of SEQ ID NO: 1883077
gccaguucgcgaccgauca

SEQ ID NO: 2167813 - RNA, 19 nt, Artificial Sequence
  Description of Artificial Sequence: Synthetic oligonucleotide
  Antisense strand to SEQ ID NO: 2167812
ugaucggucgcgaacuggc

SEQ ID NO: 2167814 - RNA, 19 nt, Artificial Sequence
  Description of Artificial Sequence: Synthetic oligonucleotide
  Sense strand starting at position 1527 of SEQ ID NO: 1883077
ggaucugggucgugguaaa

SEQ ID NO: 2167815 - RNA, 19 nt, Artificial Sequence
  Description of Artificial Sequence: Synthetic oligonucleotide
  Antisense strand to SEQ ID NO: 2167814
uuuaccacgacccagaucc

SEQ ID NO: 2167816 - RNA, 19 nt, Artificial Sequence
  Description of Artificial Sequence: Synthetic oligonucleotide
  Sense strand starting at position 1629 of SEQ ID NO: 1883077
cugauucuucuccggagga

SEQ ID NO: 2167817 - RNA, 19 nt, Artificial Sequence
  Description of Artificial Sequence: Synthetic oligonucleotide
  Antisense strand to SEQ ID NO: 2167816
uccuccggagaagaaucag

SEQ ID NO: 2167818 - RNA, 19 nt, Artificial Sequence
  Description of Artificial Sequence: Synthetic oligonucleotide
  Sense strand starting at position 1630 of SEQ ID NO: 1883077
ugauucuucuccggaggau

SEQ ID NO: 2167819 - RNA, 19 nt, Artificial Sequence
  Description of Artificial Sequence: Synthetic oligonucleotide
  Antisense strand to SEQ ID NO: 2167818
auccuccggagaagaauca

SEQ ID NO: 2167820 - RNA, 19 nt, Artificial Sequence
  Description of Artificial Sequence: Synthetic oligonucleotide
  Sense strand starting at position 1631 of SEQ ID NO: 1883077
gauucuucuccggaggauu

SEQ ID NO: 2167821 - RNA, 19 nt, Artificial Sequence
  Description of Artificial Sequence: Synthetic oligonucleotide
  Antisense strand to SEQ ID NO: 2167820
aauccuccggagaagaauc

SEQ ID NO: 2167822 - RNA, 19 nt, Artificial Sequence
  Description of Artificial Sequence: Synthetic oligonucleotide
  Sense strand starting at position 1642 of SEQ ID NO: 1883077
ggaggauuccucgguugcu

SEQ ID NO: 2167823 - RNA, 19 nt, Artificial Sequence
  Description of Artificial Sequence: Synthetic oligonucleotide
  Antisense strand to SEQ ID NO: 2167822
agcaaccgaggaauccucc

SEQ ID NO: 2167824 - RNA, 19 nt, Artificial Sequence
  Description of Artificial Sequence: Synthetic oligonucleotide
  Sense strand starting at position 1744 of SEQ ID NO: 1883077
gaaggcucuccguggaagu

SEQ ID NO: 2167825 - RNA, 19 nt, Artificial Sequence
  Description of Artificial Sequence: Synthetic oligonucleotide
  Antisense strand to SEQ ID NO: 2167824
acuuccacggagagccuuc

SEQ ID NO: 2167826 - RNA, 19 nt, Artificial Sequence
  Description of Artificial Sequence: Synthetic oligonucleotide
  Sense strand starting at position 1745 of SEQ ID NO: 1883077
aaggcucuccguggaaguu

SEQ ID NO: 2167827 - RNA, 19 nt, Artificial Sequence
  Description of Artificial Sequence: Synthetic oligonucleotide
  Antisense strand to SEQ ID NO: 2167826
aacuuccacggagagccuu

SEQ ID NO: 2167828 - RNA, 19 nt, Artificial Sequence
  Description of Artificial Sequence: Synthetic oligonucleotide
  Sense strand starting at position 1777 of SEQ ID NO: 1883077
cagcuauuaggucguauuc

SEQ ID NO: 2167829 - RNA, 19 nt, Artificial Sequence
  Description of Artificial Sequence: Synthetic oligonucleotide
  Antisense strand to SEQ ID NO: 2167828
gaauacgaccuaauagcug

SEQ ID NO: 2167830 - RNA, 19 nt, Artificial Sequence
  Description of Artificial Sequence: Synthetic oligonucleotide
  Sense strand starting at position 1779 of SEQ ID NO: 1883077
gcuauuaggucguauucag

SEQ ID NO: 2167831 - RNA, 19 nt, Artificial Sequence
  Description of Artificial Sequence: Synthetic oligonucleotide
  Antisense strand to SEQ ID NO: 2167830
cugaauacgaccuaauagc

SEQ ID NO: 2167832 - RNA, 19 nt, Artificial Sequence
  Description of Artificial Sequence: Synthetic oligonucleotide
  Sense strand starting at position 1959 of SEQ ID NO: 1883077
caccgauaccuuuggcaca

SEQ ID NO: 2167833 - RNA, 19 nt, Artificial Sequence
  Description of Artificial Sequence: Synthetic oligonucleotide
  Antisense strand to SEQ ID NO: 2167832
ugugccaaagguaucggug

SEQ ID NO: 2167834 - RNA, 19 nt, Artificial Sequence
  Description of Artificial Sequence: Synthetic oligonucleotide
  Sense strand starting at position 56 of SEQ ID NO: 1883078
ucacaaaucuuagcaggaa

SEQ ID NO: 2167835 - RNA, 19 nt, Artificial Sequence
  Description of Artificial Sequence: Synthetic oligonucleotide
  Antisense strand to SEQ ID NO: 2167834
uuccugcuaagauuuguga

SEQ ID NO: 2167836 - RNA, 19 nt, Artificial Sequence
  Description of Artificial Sequence: Synthetic oligonucleotide
  Sense strand starting at position 75 of SEQ ID NO: 1883078
gccaguuaugcagauugaa

SEQ ID NO: 2167837 - RNA, 19 nt, Artificial Sequence
  Description of Artificial Sequence: Synthetic oligonucleotide
  Antisense strand to SEQ ID NO: 2167836
uucaaucugcauaacuggc

SEQ ID NO: 2167838 - RNA, 19 nt, Artificial Sequence
  Description of Artificial Sequence: Synthetic oligonucleotide
  Sense strand starting at position 78 of SEQ ID NO: 1883078
aguuaugcagauugaaaca

SEQ ID NO: 2167839 - RNA, 19 nt, Artificial Sequence
  Description of Artificial Sequence: Synthetic oligonucleotide
  Antisense strand to SEQ ID NO: 2167838
uguuucaaucugcauaacu

SEQ ID NO: 2167840 - RNA, 19 nt, Artificial Sequence
  Description of Artificial Sequence: Synthetic oligonucleotide
  Sense strand starting at position 177 of SEQ ID NO: 1883078
ugguaugcugaguaagaac

SEQ ID NO: 2167841 - RNA, 19 nt, Artificial Sequence
  Description of Artificial Sequence: Synthetic oligonucleotide
  Antisense strand to SEQ ID NO: 2167840
guucuuacucagcauacca

SEQ ID NO: 2167842 - RNA, 19 nt, Artificial Sequence
  Description of Artificial Sequence: Synthetic oligonucleotide
  Sense strand starting at position 314 of SEQ ID NO: 1883078
uggaacaacuucuugcuau

SEQ ID NO: 2167843 - RNA, 19 nt, Artificial Sequence
  Description of Artificial Sequence: Synthetic oligonucleotide
  Antisense strand to SEQ ID NO: 2167842
auagcaagaaguuguucca

SEQ ID NO: 2167844 - RNA, 19 nt, Artificial Sequence
  Description of Artificial Sequence: Synthetic oligonucleotide
  Sense strand starting at position 381 of SEQ ID NO: 1883078
cccgcuccacucuaagaaa

SEQ ID NO: 2167845 - RNA, 19 nt, Artificial Sequence
  Description of Artificial Sequence: Synthetic oligonucleotide
  Antisense strand to SEQ ID NO: 2167844
uuucuuagaguggagcggg

SEQ ID NO: 2167846 - RNA, 19 nt, Artificial Sequence
  Description of Artificial Sequence: Synthetic oligonucleotide
  Sense strand starting at position 516 of SEQ ID NO: 1883078
gguacauaugcuuaucagu

SEQ ID NO: 2167847 - RNA, 19 nt, Artificial Sequence
  Description of Artificial Sequence: Synthetic oligonucleotide
  Antisense strand to SEQ ID NO: 2167846
acugauaagcauauguacc

SEQ ID NO: 2167848 - RNA, 19 nt, Artificial Sequence
  Description of Artificial Sequence: Synthetic oligonucleotide
  Sense strand starting at position 787 of SEQ ID NO: 1883078
caacgaagguuucugagua

SEQ ID NO: 2167849 - RNA, 19 nt, Artificial Sequence
  Description of Artificial Sequence: Synthetic oligonucleotide
  Antisense strand to SEQ ID NO: 2167848
uacucagaaaccuucguug

SEQ ID NO: 2167850 - RNA, 19 nt, Artificial Sequence
  Description of Artificial Sequence: Synthetic oligonucleotide
  Sense strand starting at position 1126 of SEQ ID NO: 1883078
ggucaaacuuuacugcuaa

SEQ ID NO: 2167851 - RNA, 19 nt, Artificial Sequence
  Description of Artificial Sequence: Synthetic oligonucleotide
  Antisense strand to SEQ ID NO: 2167850
uuagcaguaaaguuugacc

SEQ ID NO: 2167852 - RNA, 19 nt, Artificial Sequence
  Description of Artificial Sequence: Synthetic oligonucleotide
  Sense strand starting at position 1336 of SEQ ID NO: 1883078
ugaauuaaucugugaaacu

SEQ ID NO: 2167853 - RNA, 19 nt, Artificial Sequence
  Description of Artificial Sequence: Synthetic oligonucleotide
  Antisense strand to SEQ ID NO: 2167852
aguuucacagauuaauuca

SEQ ID NO: 2167854 - RNA, 19 nt, Artificial Sequence
  Description of Artificial Sequence: Synthetic oligonucleotide
  Sense strand starting at position 1392 of SEQ ID NO: 1883078
cuccacucugguuaaagau

SEQ ID NO: 2167855 - RNA, 19 nt, Artificial Sequence
  Description of Artificial Sequence: Synthetic oligonucleotide
  Antisense strand to SEQ ID NO: 2167854
aucuuuaaccagaguggag

SEQ ID NO: 2167856 - RNA, 19 nt, Artificial Sequence
  Description of Artificial Sequence: Synthetic oligonucleotide
  Sense strand starting at position 1566 of SEQ ID NO: 1883078
ucagccuccgaagauuaaa

SEQ ID NO: 2167857 - RNA, 19 nt, Artificial Sequence
  Description of Artificial Sequence: Synthetic oligonucleotide
  Antisense strand to SEQ ID NO: 2167856
uuuaaucuucggaggcuga

SEQ ID NO: 2167858 - RNA, 19 nt, Artificial Sequence
  Description of Artificial Sequence: Synthetic oligonucleotide
  Sense strand starting at position 1595 of SEQ ID NO: 1883078
caaguaggaaucuguguga

SEQ ID NO: 2167859 - RNA, 19 nt, Artificial Sequence
  Description of Artificial Sequence: Synthetic oligonucleotide
  Antisense strand to SEQ ID NO: 2167858
ucacacagauuccuacuug

SEQ ID NO: 2167860 - RNA, 19 nt, Artificial Sequence
  Description of Artificial Sequence: Synthetic oligonucleotide
  Sense strand starting at position 1598 of SEQ ID NO: 1883078
guaggaaucugugugauca

SEQ ID NO: 2167861 - RNA, 19 nt, Artificial Sequence
  Description of Artificial Sequence: Synthetic oligonucleotide
  Antisense strand to SEQ ID NO: 2167860
ugaucacacagauuccuac

SEQ ID NO: 2167862 - RNA, 19 nt, Artificial Sequence
  Description of Artificial Sequence: Synthetic oligonucleotide
  Sense strand starting at position 1599 of SEQ ID NO: 1883078
uaggaaucugugugaucac

SEQ ID NO: 2167863 - RNA, 19 nt, Artificial Sequence
  Description of Artificial Sequence: Synthetic oligonucleotide
  Antisense strand to SEQ ID NO: 2167862
gugaucacacagauuccua

SEQ ID NO: 2167864 - RNA, 19 nt, Artificial Sequence
  Description of Artificial Sequence: Synthetic oligonucleotide
  Sense strand starting at position 1738 of SEQ ID NO: 1883078
agaccugcggcgagaaguu

SEQ ID NO: 2167865 - RNA, 19 nt, Artificial Sequence
  Description of Artificial Sequence: Synthetic oligonucleotide
  Antisense strand to SEQ ID NO: 2167864
aacuucucgccgcaggucu

SEQ ID NO: 2167866 - RNA, 19 nt, Artificial Sequence
  Description of Artificial Sequence: Synthetic oligonucleotide
  Sense strand starting at position 1788 of SEQ ID NO: 1883078
gcaucuaucccagaggguu

SEQ ID NO: 2167867 - RNA, 19 nt, Artificial Sequence
  Description of Artificial Sequence: Synthetic oligonucleotide
  Antisense strand to SEQ ID NO: 2167866
aacccucugggauagaugc

SEQ ID NO: 2167868 - RNA, 19 nt, Artificial Sequence
  Description of Artificial Sequence: Synthetic oligonucleotide
  Sense strand starting at position 2351 of SEQ ID NO: 1883078
cgcaaaggugccuggauuu

SEQ ID NO: 2167869 - RNA, 19 nt, Artificial Sequence
  Description of Artificial Sequence: Synthetic oligonucleotide
  Antisense strand to SEQ ID NO: 2167868
aaauccaggcaccuuugcg

SEQ ID NO: 2167870 - RNA, 19 nt, Artificial Sequence
  Description of Artificial Sequence: Synthetic oligonucleotide
  Sense strand starting at position 2446 of SEQ ID NO: 1883078
cuccguuguagugcuuaga

SEQ ID NO: 2167871 - RNA, 19 nt, Artificial Sequence
  Description of Artificial Sequence: Synthetic oligonucleotide
  Antisense strand to SEQ ID NO: 2167870
ucuaagcacuacaacggag

SEQ ID NO: 2167872 - RNA, 19 nt, Artificial Sequence
  Description of Artificial Sequence: Synthetic oligonucleotide
  Sense strand starting at position 2447 of SEQ ID NO: 1883078
uccguuguagugcuuagau

SEQ ID NO: 2167873 - RNA, 19 nt, Artificial Sequence
  Description of Artificial Sequence: Synthetic oligonucleotide
  Antisense strand to SEQ ID NO: 2167872
aucuaagcacuacaacgga

SEQ ID NO: 2167874 - RNA, 19 nt, Artificial Sequence
  Description of Artificial Sequence: Synthetic oligonucleotide
  Sense strand starting at position 2449 of SEQ ID NO: 1883078
cguuguagugcuuagauuu

SEQ ID NO: 2167875 - RNA, 19 nt, Artificial Sequence
  Description of Artificial Sequence: Synthetic oligonucleotide
  Antisense strand to SEQ ID NO: 2167874
aaaucuaagcacuacaacg

SEQ ID NO: 2167876 - RNA, 19 nt, Artificial Sequence
  Description of Artificial Sequence: Synthetic oligonucleotide
  Sense strand starting at position 2729 of SEQ ID NO: 1883078
aaaguuugucuugggaacu

SEQ ID NO: 2167877 - RNA, 19 nt, Artificial Sequence
  Description of Artificial Sequence: Synthetic oligonucleotide
  Antisense strand to SEQ ID NO: 2167876
aguucccaagacaaacuuu

SEQ ID NO: 2167878 - RNA, 19 nt, Artificial Sequence
  Description of Artificial Sequence: Synthetic oligonucleotide
  Sense strand starting at position 3081 of SEQ ID NO: 1883078
uaaucuuugugguugagaa

SEQ ID NO: 2167879 - RNA, 19 nt, Artificial Sequence
  Description of Artificial Sequence: Synthetic oligonucleotide
  Antisense strand to SEQ ID NO: 2167878
uucucaaccacaaagauua

SEQ ID NO: 2167880 - RNA, 19 nt, Artificial Sequence
  Description of Artificial Sequence: Synthetic oligonucleotide
  Sense strand starting at position 3082 of SEQ ID NO: 1883078
aaucuuugugguugagaau

SEQ ID NO: 2167881 - RNA, 19 nt, Artificial Sequence
  Description of Artificial Sequence: Synthetic oligonucleotide
  Antisense strand to SEQ ID NO: 2167880
auucucaaccacaaagauu

SEQ ID NO: 2167882 - RNA, 19 nt, Artificial Sequence
  Description of Artificial Sequence: Synthetic oligonucleotide
  Sense strand starting at position 3083 of SEQ ID NO: 1883078
aucuuugugguugagaauu

SEQ ID NO: 2167883 - RNA, 19 nt, Artificial Sequence
  Description of Artificial Sequence: Synthetic oligonucleotide
  Antisense strand to SEQ ID NO: 2167882
aauucucaaccacaaagau

SEQ ID NO: 2167884 - RNA, 19 nt, Artificial Sequence
  Description of Artificial Sequence: Synthetic oligonucleotide
  Sense strand starting at position 3169 of SEQ ID NO: 1883078
cacuauaguggguauguaa

SEQ ID NO: 2167885 - RNA, 19 nt, Artificial Sequence
  Description of Artificial Sequence: Synthetic oligonucleotide
  Antisense strand to SEQ ID NO: 2167884
uuacauacccacuauagug

SEQ ID NO: 2167886 - RNA, 19 nt, Artificial Sequence
  Description of Artificial Sequence: Synthetic oligonucleotide
  Sense strand starting at position 3172 of SEQ ID NO: 1883078
uauaguggguauguaacua

SEQ ID NO: 2167887 - RNA, 19 nt, Artificial Sequence
  Description of Artificial Sequence: Synthetic oligonucleotide
  Antisense strand to SEQ ID NO: 2167886
uaguuacauacccacuaua

SEQ ID NO: 2167888 - RNA, 19 nt, Artificial Sequence
  Description of Artificial Sequence: Synthetic oligonucleotide
  Sense strand starting at position 3380 of SEQ ID NO: 1883078
gaguacuuggcuuagaauu

SEQ ID NO: 2167889 - RNA, 19 nt, Artificial Sequence
  Description of Artificial Sequence: Synthetic oligonucleotide
  Antisense strand to SEQ ID NO: 2167888
aauucuaagccaaguacuc

SEQ ID NO: 2167890 - RNA, 19 nt, Artificial Sequence
  Description of Artificial Sequence: Synthetic oligonucleotide
  Sense strand starting at position 3410 of SEQ ID NO: 1883078
aaaccaagguuucuguaga

SEQ ID NO: 2167891 - RNA, 19 nt, Artificial Sequence
  Description of Artificial Sequence: Synthetic oligonucleotide
  Antisense strand to SEQ ID NO: 2167890
ucuacagaaaccuugguuu

SEQ ID NO: 2167892 - RNA, 19 nt, Artificial Sequence
  Description of Artificial Sequence: Synthetic oligonucleotide
  Sense strand starting at position 3661 of SEQ ID NO: 1883078
gugauuagauuaguuccaa

SEQ ID NO: 2167893 - RNA, 19 nt, Artificial Sequence
  Description of Artificial Sequence: Synthetic oligonucleotide
  Antisense strand to SEQ ID NO: 2167892
uuggaacuaaucuaaucac

SEQ ID NO: 2167894 - RNA, 19 nt, Artificial Sequence
  Description of Artificial Sequence: Synthetic oligonucleotide
  Sense strand starting at position 3662 of SEQ ID NO: 1883078
ugauuagauuaguuccaau

SEQ ID NO: 2167895 - RNA, 19 nt, Artificial Sequence
  Description of Artificial Sequence: Synthetic oligonucleotide
  Antisense strand to SEQ ID NO: 2167894
auuggaacuaaucuaauca

SEQ ID NO: 2167896 - RNA, 19 nt, Artificial Sequence
  Description of Artificial Sequence: Synthetic oligonucleotide
  Sense strand starting at position 3673 of SEQ ID NO: 1883078
guuccaauucgauaauauc

SEQ ID NO: 2167897 - RNA, 19 nt, Artificial Sequence
  Description of Artificial Sequence: Synthetic oligonucleotide
  Antisense strand to SEQ ID NO: 2167896
gauauuaucgaauuggaac

SEQ ID NO: 2167898 - RNA, 19 nt, Artificial Sequence
  Description of Artificial Sequence: Synthetic oligonucleotide
  Sense strand starting at position 3700 of SEQ ID NO: 1883078
aaggucaguucuguagaga

SEQ ID NO: 2167899 - RNA, 19 nt, Artificial Sequence
  Description of Artificial Sequence: Synthetic oligonucleotide
  Antisense strand to SEQ ID NO: 2167898
ucucuacagaacugaccuu

SEQ ID NO: 2167900 - RNA, 19 nt, Artificial Sequence
  Description of Artificial Sequence: Synthetic oligonucleotide
  Sense strand starting at position 3701 of SEQ ID NO: 1883078
aggucaguucuguagagaa

SEQ ID NO: 2167901 - RNA, 19 nt, Artificial Sequence
  Description of Artificial Sequence: Synthetic oligonucleotide
  Antisense strand to SEQ ID NO: 2167900
uucucuacagaacugaccu

SEQ ID NO: 2167902 - RNA, 19 nt, Artificial Sequence
  Description of Artificial Sequence: Synthetic oligonucleotide
  Sense strand starting at position 3703 of SEQ ID NO: 1883078
gucaguucuguagagaaua

SEQ ID NO: 2167903 - RNA, 19 nt, Artificial Sequence
  Description of Artificial Sequence: Synthetic oligonucleotide
  Antisense strand to SEQ ID NO: 2167902
uauucucuacagaacugac

SEQ ID NO: 2167904 - RNA, 19 nt, Artificial Sequence
  Description of Artificial Sequence: Synthetic oligonucleotide
  Sense strand starting at position 3802 of SEQ ID NO: 1883078
aguaauugugccuaccaca

SEQ ID NO: 2167905 - RNA, 19 nt, Artificial Sequence
  Description of Artificial Sequence: Synthetic oligonucleotide
  Antisense strand to SEQ ID NO: 2167904
ugugguaggcacaauuacu

SEQ ID NO: 2167906 - RNA, 19 nt, Artificial Sequence
  Description of Artificial Sequence: Synthetic oligonucleotide
  Sense strand starting at position 3825 of SEQ ID NO: 1883078
ggugguuucaggcaggauu

SEQ ID NO: 2167907 - RNA, 19 nt, Artificial Sequence
  Description of Artificial Sequence: Synthetic oligonucleotide
  Antisense strand to SEQ ID NO: 2167906
aauccugccugaaaccacc

SEQ ID NO: 2167908 - RNA, 19 nt, Artificial Sequence
  Description of Artificial Sequence: Synthetic oligonucleotide
  Sense strand starting at position 3827 of SEQ ID NO: 1883078
ugguuucaggcaggauuau

SEQ ID NO: 2167909 - RNA, 19 nt, Artificial Sequence
  Description of Artificial Sequence: Synthetic oligonucleotide
  Antisense strand to SEQ ID NO: 2167908
auaauccugccugaaacca

SEQ ID NO: 2167910 - RNA, 19 nt, Artificial Sequence
  Description of Artificial Sequence: Synthetic oligonucleotide
  Sense strand starting at position 3828 of SEQ ID NO: 1883078
gguuucaggcaggauuauu

SEQ ID NO: 2167911 - RNA, 19 nt, Artificial Sequence
  Description of Artificial Sequence: Synthetic oligonucleotide
  Antisense strand to SEQ ID NO: 2167910
aauaauccugccugaaacc

SEQ ID NO: 2167912 - RNA, 19 nt, Artificial Sequence
  Description of Artificial Sequence: Synthetic oligonucleotide
  Sense strand starting at position 3898 of SEQ ID NO: 1883078
ugaauuguaugauuaacca

SEQ ID NO: 2167913 - RNA, 19 nt, Artificial Sequence
  Description of Artificial Sequence: Synthetic oligonucleotide
  Antisense strand to SEQ ID NO: 2167912
ugguuaaucauacaauuca

SEQ ID NO: 2167914 - RNA, 19 nt, Artificial Sequence
  Description of Artificial Sequence: Synthetic oligonucleotide
  Sense strand starting at position 2191 of SEQ ID NO: 1883079
gccagaaucuguggacuca

SEQ ID NO: 2167915 - RNA, 19 nt, Artificial Sequence
  Description of Artificial Sequence: Synthetic oligonucleotide
  Antisense strand to SEQ ID NO: 2167914
ugaguccacagauucuggc

SEQ ID NO: 2167916 - RNA, 19 nt, Artificial Sequence
  Description of Artificial Sequence: Synthetic oligonucleotide
  Sense strand starting at position 2397 of SEQ ID NO: 1883079
cgaggaauccuccggagaa

SEQ ID NO: 2167917 - RNA, 19 nt, Artificial Sequence
  Description of Artificial Sequence: Synthetic oligonucleotide
  Antisense strand to SEQ ID NO: 2167916
uucuccggaggauuccucg

SEQ ID NO: 2167918 - RNA, 19 nt, Artificial Sequence
  Description of Artificial Sequence: Synthetic oligonucleotide
  Sense strand starting at position 2398 of SEQ ID NO: 1883079
gaggaauccuccggagaag

SEQ ID NO: 2167919 - RNA, 19 nt, Artificial Sequence
  Description of Artificial Sequence: Synthetic oligonucleotide
  Antisense strand to SEQ ID NO: 2167918
cuucuccggaggauuccuc

SEQ ID NO: 2167920 - RNA, 19 nt, Artificial Sequence
  Description of Artificial Sequence: Synthetic oligonucleotide
  Sense strand starting at position 2470 of SEQ ID NO: 1883079
cgacauugcagcucgugua

SEQ ID NO: 2167921 - RNA, 19 nt, Artificial Sequence
  Description of Artificial Sequence: Synthetic oligonucleotide
  Antisense strand to SEQ ID NO: 2167920
uacacgagcugcaaugucg

SEQ ID NO: 2167922 - RNA, 19 nt, Artificial Sequence
  Description of Artificial Sequence: Synthetic oligonucleotide
  Sense strand starting at position 2748 of SEQ ID NO: 1883079
gcaccugaucggucgcgaa

SEQ ID NO: 2167923 - RNA, 19 nt, Artificial Sequence
  Description of Artificial Sequence: Synthetic oligonucleotide
  Antisense strand to SEQ ID NO: 2167922
uucgcgaccgaucaggugc

SEQ ID NO: 2167924 - RNA, 19 nt, Artificial Sequence
  Description of Artificial Sequence: Synthetic oligonucleotide
  Sense strand starting at position 2783 of SEQ ID NO: 1883079
ccggcagaaucugauuugu

SEQ ID NO: 2167925 - RNA, 19 nt, Artificial Sequence
  Description of Artificial Sequence: Synthetic oligonucleotide
  Antisense strand to SEQ ID NO: 2167924
acaaaucagauucugccgg

SEQ ID NO: 2167926 - RNA, 19 nt, Artificial Sequence
  Description of Artificial Sequence: Synthetic oligonucleotide
  Sense strand starting at position 2789 of SEQ ID NO: 1883079
gaaucugauuuguaggucu

SEQ ID NO: 2167927 - RNA, 19 nt, Artificial Sequence
  Description of Artificial Sequence: Synthetic oligonucleotide
  Antisense strand to SEQ ID NO: 2167926
agaccuacaaaucagauuc

SEQ ID NO: 2167928 - RNA, 19 nt, Artificial Sequence
  Description of Artificial Sequence: Synthetic oligonucleotide
  Sense strand starting at position 2804 of SEQ ID NO: 1883079
gucuuauacucuucgauug

SEQ ID NO: 2167929 - RNA, 19 nt, Artificial Sequence
  Description of Artificial Sequence: Synthetic oligonucleotide
  Antisense strand to SEQ ID NO: 2167928
caaucgaagaguauaagac

SEQ ID NO: 2167930 - RNA, 19 nt, Artificial Sequence
  Description of Artificial Sequence: Synthetic oligonucleotide
  Sense strand starting at position 2805 of SEQ ID NO: 1883079
ucuuauacucuucgauugu

SEQ ID NO: 2167931 - RNA, 19 nt, Artificial Sequence
  Description of Artificial Sequence: Synthetic oligonucleotide
  Antisense strand to SEQ ID NO: 2167930
acaaucgaagaguauaaga

SEQ ID NO: 2167932 - RNA, 19 nt, Artificial Sequence
  Description of Artificial Sequence: Synthetic oligonucleotide
  Sense strand starting at position 2814 of SEQ ID NO: 1883079
cuucgauuguggcaucaau

SEQ ID NO: 2167933 - RNA, 19 nt, Artificial Sequence
  Description of Artificial Sequence: Synthetic oligonucleotide
  Antisense strand to SEQ ID NO: 2167932
auugaugccacaaucgaag

SEQ ID NO: 2167934 - RNA, 19 nt, Artificial Sequence
  Description of Artificial Sequence: Synthetic oligonucleotide
  Sense strand starting at position 2839 of SEQ ID NO: 1883079
uuguuuaaguucucccuuu

SEQ ID NO: 2167935 - RNA, 19 nt, Artificial Sequence
  Description of Artificial Sequence: Synthetic oligonucleotide
  Antisense strand to SEQ ID NO: 2167934
aaagggagaacuuaaacaa

SEQ ID NO: 2167936 - RNA, 19 nt, Artificial Sequence
  Description of Artificial Sequence: Synthetic oligonucleotide
  Sense strand starting at position 2914 of SEQ ID NO: 1883079
cccaguguuucuccaccuu

SEQ ID NO: 2167937 - RNA, 19 nt, Artificial Sequence
  Description of Artificial Sequence: Synthetic oligonucleotide
  Antisense strand to SEQ ID NO: 2167936
aagguggagaaacacuggg

SEQ ID NO: 2167938 - RNA, 19 nt, Artificial Sequence
  Description of Artificial Sequence: Synthetic oligonucleotide
  Sense strand starting at position 2926 of SEQ ID NO: 1883079
ccaccuuccgcuuaagaag

SEQ ID NO: 2167939 - RNA, 19 nt, Artificial Sequence
  Description of Artificial Sequence: Synthetic oligonucleotide
  Antisense strand to SEQ ID NO: 2167938
cuucuuaagcggaaggugg

SEQ ID NO: 2167940 - RNA, 19 nt, Artificial Sequence
  Description of Artificial Sequence: Synthetic oligonucleotide
  Sense strand starting at position 2937 of SEQ ID NO: 1883079
uuaagaaggcuuuauucgu

SEQ ID NO: 2167941 - RNA, 19 nt, Artificial Sequence
  Description of Artificial Sequence: Synthetic oligonucleotide
  Antisense strand to SEQ ID NO: 2167940
acgaauaaagccuucuuaa

SEQ ID NO: 2167942 - RNA, 19 nt, Artificial Sequence
  Description of Artificial Sequence: Synthetic oligonucleotide
  Sense strand starting at position 3039 of SEQ ID NO: 1883079
ccaguuugagucuguucuu

SEQ ID NO: 2167943 - RNA, 19 nt, Artificial Sequence
  Description of Artificial Sequence: Synthetic oligonucleotide
  Antisense strand to SEQ ID NO: 2167942
aagaacagacucaaacugg

SEQ ID NO: 2167944 - RNA, 19 nt, Artificial Sequence
  Description of Artificial Sequence: Synthetic oligonucleotide
  Sense strand starting at position 3042 of SEQ ID NO: 1883079
guuugagucuguucuucuc

SEQ ID NO: 2167945 - RNA, 19 nt, Artificial Sequence
  Description of Artificial Sequence: Synthetic oligonucleotide
  Antisense strand to SEQ ID NO: 2167944
gagaagaacagacucaaac

SEQ ID NO: 2167946 - RNA, 19 nt, Artificial Sequence
  Description of Artificial Sequence: Synthetic oligonucleotide
  Sense strand starting at position 3045 of SEQ ID NO: 1883079
ugagucuguucuucucgaa

SEQ ID NO: 2167947 - RNA, 19 nt, Artificial Sequence
  Description of Artificial Sequence: Synthetic oligonucleotide
  Antisense strand to SEQ ID NO: 2167946
uucgagaagaacagacuca

SEQ ID NO: 2167948 - RNA, 19 nt, Artificial Sequence
  Description of Artificial Sequence: Synthetic oligonucleotide
  Sense strand starting at position 3049 of SEQ ID NO: 1883079
ucuguucuucucgaaacuu

SEQ ID NO: 2167949 - RNA, 19 nt, Artificial Sequence
  Description of Artificial Sequence: Synthetic oligonucleotide
  Antisense strand to SEQ ID NO: 2167948
aaguuucgagaagaacaga

SEQ ID NO: 2167950 - RNA, 19 nt, Artificial Sequence
  Description of Artificial Sequence: Synthetic oligonucleotide
  Sense strand starting at position 3057 of SEQ ID NO: 1883079
ucucgaaacuucucagguu

SEQ ID NO: 2167951 - RNA, 19 nt, Artificial Sequence
  Description of Artificial Sequence: Synthetic oligonucleotide
  Antisense strand to SEQ ID NO: 2167950
aaccugagaaguuucgaga

SEQ ID NO: 2167952 - RNA, 19 nt, Artificial Sequence
  Description of Artificial Sequence: Synthetic oligonucleotide
  Sense strand starting at position 3058 of SEQ ID NO: 1883079
cucgaaacuucucagguuu

SEQ ID NO: 2167953 - RNA, 19 nt, Artificial Sequence
  Description of Artificial Sequence: Synthetic oligonucleotide
  Antisense strand to SEQ ID NO: 2167952
aaaccugagaaguuucgag

SEQ ID NO: 2167954 - RNA, 19 nt, Artificial Sequence
  Description of Artificial Sequence: Synthetic oligonucleotide
  Sense strand starting at position 3065 of SEQ ID NO: 1883079
cuucucagguuucuagauu

SEQ ID NO: 2167955 - RNA, 19 nt, Artificial Sequence
  Description of Artificial Sequence: Synthetic oligonucleotide
  Antisense strand to SEQ ID NO: 2167954
aaucuagaaaccugagaag

SEQ ID NO: 2167956 - RNA, 19 nt, Artificial Sequence
  Description of Artificial Sequence: Synthetic oligonucleotide
  Sense strand starting at position 3073 of SEQ ID NO: 1883079
guuucuagauucuuacuca

SEQ ID NO: 2167957 - RNA, 19 nt, Artificial Sequence
  Description of Artificial Sequence: Synthetic oligonucleotide
  Antisense strand to SEQ ID NO: 2167956
ugaguaagaaucuagaaac

SEQ ID NO: 2167958 - RNA, 19 nt, Artificial Sequence
  Description of Artificial Sequence: Synthetic oligonucleotide
  Sense strand starting at position 3282 of SEQ ID NO: 1883079
gugugcauccggugagaua

SEQ ID NO: 2167959 - RNA, 19 nt, Artificial Sequence
  Description of Artificial Sequence: Synthetic oligonucleotide
  Antisense strand to SEQ ID NO: 2167958
uaucucaccggaugcacac

SEQ ID NO: 2167960 - RNA, 19 nt, Artificial Sequence
  Description of Artificial Sequence: Synthetic oligonucleotide
  Sense strand starting at position 3283 of SEQ ID NO: 1883079
ugugcauccggugagauau

SEQ ID NO: 2167961 - RNA, 19 nt, Artificial Sequence
  Description of Artificial Sequence: Synthetic oligonucleotide
  Antisense strand to SEQ ID NO: 2167960
auaucucaccggaugcaca

SEQ ID NO: 2167962 - RNA, 19 nt, Artificial Sequence
  Description of Artificial Sequence: Synthetic oligonucleotide
  Sense strand starting at position 3308 of SEQ ID NO: 1883079
guagcuuauaucuguugua

SEQ ID NO: 2167963 - RNA, 19 nt, Artificial Sequence
  Description of Artificial Sequence: Synthetic oligonucleotide
  Antisense strand to SEQ ID NO: 2167962
uacaacagauauaagcuac

SEQ ID NO: 2167964 - RNA, 19 nt, Artificial Sequence
  Description of Artificial Sequence: Synthetic oligonucleotide
  Sense strand starting at position 3311 of SEQ ID NO: 1883079
gcuuauaucuguuguauuu

SEQ ID NO: 2167965 - RNA, 19 nt, Artificial Sequence
  Description of Artificial Sequence: Synthetic oligonucleotide
  Antisense strand to SEQ ID NO: 2167964
aaauacaacagauauaagc

SEQ ID NO: 2167966 - RNA, 19 nt, Artificial Sequence
  Description of Artificial Sequence: Synthetic oligonucleotide
  Sense strand starting at position 3318 of SEQ ID NO: 1883079
ucuguuguauuucugcauu

SEQ ID NO: 2167967 - RNA, 19 nt, Artificial Sequence
  Description of Artificial Sequence: Synthetic oligonucleotide
  Antisense strand to SEQ ID NO: 2167966
aaugcagaaauacaacaga

SEQ ID NO: 2167968 - RNA, 19 nt, Artificial Sequence
  Description of Artificial Sequence: Synthetic oligonucleotide
  Sense strand starting at position 3321 of SEQ ID NO: 1883079
guuguauuucugcauucuu

SEQ ID NO: 2167969 - RNA, 19 nt, Artificial Sequence
  Description of Artificial Sequence: Synthetic oligonucleotide
  Antisense strand to SEQ ID NO: 2167968
aagaaugcagaaauacaac

SEQ ID NO: 2167970 - RNA, 19 nt, Artificial Sequence
  Description of Artificial Sequence: Synthetic oligonucleotide
  Sense strand starting at position 3397 of SEQ ID NO: 1883079
uguguaaauguguauucuu

SEQ ID NO: 2167971 - RNA, 19 nt, Artificial Sequence
  Description of Artificial Sequence: Synthetic oligonucleotide
  Antisense strand to SEQ ID NO: 2167970
aagaauacacauuuacaca

SEQ ID NO: 2167972 - RNA, 19 nt, Artificial Sequence
  Description of Artificial Sequence: Synthetic oligonucleotide
  Sense strand starting at position 3400 of SEQ ID NO: 1883079
guaaauguguauucuuggu

SEQ ID NO: 2167973 - RNA, 19 nt, Artificial Sequence
  Description of Artificial Sequence: Synthetic oligonucleotide
  Antisense strand to SEQ ID NO: 2167972
accaagaauacacauuuac

SEQ ID NO: 2167974 - RNA, 19 nt, Artificial Sequence
  Description of Artificial Sequence: Synthetic oligonucleotide
  Sense strand starting at position 3402 of SEQ ID NO: 1883079
aaauguguauucuugguua

SEQ ID NO: 2167975 - RNA, 19 nt, Artificial Sequence
  Description of Artificial Sequence: Synthetic oligonucleotide
  Antisense strand to SEQ ID NO: 2167974
uaaccaagaauacacauuu

SEQ ID NO: 2167976 - RNA, 19 nt, Artificial Sequence
  Description of Artificial Sequence: Synthetic oligonucleotide
  Sense strand starting at position 3404 of SEQ ID NO: 1883079
auguguauucuugguuauc

SEQ ID NO: 2167977 - RNA, 19 nt, Artificial Sequence
  Description of Artificial Sequence: Synthetic oligonucleotide
  Antisense strand to SEQ ID NO: 2167976
gauaaccaagaauacacau

SEQ ID NO: 2167978 - RNA, 19 nt, Artificial Sequence
  Description of Artificial Sequence: Synthetic oligonucleotide
  Sense strand starting at position 3405 of SEQ ID NO: 1883079
uguguauucuugguuaucu

SEQ ID NO: 2167979 - RNA, 19 nt, Artificial Sequence
  Description of Artificial Sequence: Synthetic oligonucleotide
  Antisense strand to SEQ ID NO: 2167978
agauaaccaagaauacaca

SEQ ID NO: 2167980 - RNA, 19 nt, Artificial Sequence
  Description of Artificial Sequence: Synthetic oligonucleotide
  Sense strand starting at position 3406 of SEQ ID NO: 1883079
guguauucuugguuaucug

SEQ ID NO: 2167981 - RNA, 19 nt, Artificial Sequence
  Description of Artificial Sequence: Synthetic oligonucleotide
  Antisense strand to SEQ ID NO: 2167980
cagauaaccaagaauacac

SEQ ID NO: 2167982 - RNA, 19 nt, Artificial Sequence
  Description of Artificial Sequence: Synthetic oligonucleotide
  Sense strand starting at position 3414 of SEQ ID NO: 1883079
uugguuaucuggcugacuu

SEQ ID NO: 2167983 - RNA, 19 nt, Artificial Sequence
  Description of Artificial Sequence: Synthetic oligonucleotide
  Antisense strand to SEQ ID NO: 2167982
aagucagccagauaaccaa

SEQ ID NO: 2167984 - RNA, 19 nt, Artificial Sequence
  Description of Artificial Sequence: Synthetic oligonucleotide
  Sense strand starting at position 3415 of SEQ ID NO: 1883079
ugguuaucuggcugacuua

SEQ ID NO: 2167985 - RNA, 19 nt, Artificial Sequence
  Description of Artificial Sequence: Synthetic oligonucleotide
  Antisense strand to SEQ ID NO: 2167984
uaagucagccagauaacca

SEQ ID NO: 2167986 - RNA, 19 nt, Artificial Sequence
  Description of Artificial Sequence: Synthetic oligonucleotide
  Sense strand starting at position 3434 of SEQ ID NO: 1883079
gguucuaauguaggaugua

SEQ ID NO: 2167987 - RNA, 19 nt, Artificial Sequence
  Description of Artificial Sequence: Synthetic oligonucleotide
  Antisense strand to SEQ ID NO: 2167986
uacauccuacauuagaacc

SEQ ID NO: 2167988 - RNA, 19 nt, Artificial Sequence
  Description of Artificial Sequence: Synthetic oligonucleotide
  Sense strand starting at position 3603 of SEQ ID NO: 1883079
ggugcucugccuuauuaaa

SEQ ID NO: 2167989 - RNA, 19 nt, Artificial Sequence
  Description of Artificial Sequence: Synthetic oligonucleotide
  Antisense strand to SEQ ID NO: 2167988
uuuaauaaggcagagcacc

SEQ ID NO: 2167990 - RNA, 19 nt, Artificial Sequence
  Description of Artificial Sequence: Synthetic oligonucleotide
  Sense strand starting at position 3633 of SEQ ID NO: 1883079
gcugcaagugcauaauauu

SEQ ID NO: 2167991 - RNA, 19 nt, Artificial Sequence
  Description of Artificial Sequence: Synthetic oligonucleotide
  Antisense strand to SEQ ID NO: 2167990
aauauuaugcacuugcagc

SEQ ID NO: 2167992 - RNA, 19 nt, Artificial Sequence
  Description of Artificial Sequence: Synthetic oligonucleotide
  Sense strand starting at position 3636 of SEQ ID NO: 1883079
gcaagugcauaauauuuaa

SEQ ID NO: 2167993 - RNA, 19 nt, Artificial Sequence
  Description of Artificial Sequence: Synthetic oligonucleotide
  Antisense strand to SEQ ID NO: 2167992
uuaaauauuaugcacuugc

SEQ ID NO: 2167994 - RNA, 19 nt, Artificial Sequence
  Description of Artificial Sequence: Synthetic oligonucleotide
  Sense strand starting at position 183 of SEQ ID NO: 1883080
acauucugguaguuaaugu

SEQ ID NO: 2167995 - RNA, 19 nt, Artificial Sequence
  Description of Artificial Sequence: Synthetic oligonucleotide
  Antisense strand to SEQ ID NO: 2167994
acauuaacuaccagaaugu

SEQ ID NO: 2167996 - RNA, 19 nt, Artificial Sequence
  Description of Artificial Sequence: Synthetic oligonucleotide
  Sense strand starting at position 259 of SEQ ID NO: 1883080
uaaaguaccguugaaugua

SEQ ID NO: 2167997 - RNA, 19 nt, Artificial Sequence
  Description of Artificial Sequence: Synthetic oligonucleotide
  Antisense strand to SEQ ID NO: 2167996
uacauucaacgguacuuua

SEQ ID NO: 2167998 - RNA, 19 nt, Artificial Sequence
  Description of Artificial Sequence: Synthetic oligonucleotide
  Sense strand starting at position 457 of SEQ ID NO: 1883080
ugagaaucgccuugugaua

SEQ ID NO: 2167999 - RNA, 19 nt, Artificial Sequence
  Description of Artificial Sequence: Synthetic oligonucleotide
  Antisense strand to SEQ ID NO: 2167998
uaucacaaggcgauucuca

SEQ ID NO: 2168000 - RNA, 19 nt, Artificial Sequence
  Description of Artificial Sequence: Synthetic oligonucleotide
  Sense strand starting at position 512 of SEQ ID NO: 1883080
ucuuauugguucguaagaa

SEQ ID NO: 2168001 - RNA, 19 nt, Artificial Sequence
  Description of Artificial Sequence: Synthetic oligonucleotide
  Antisense strand to SEQ ID NO: 2168000
uucuuacgaaccaauaaga

SEQ ID NO: 2168002 - RNA, 19 nt, Artificial Sequence
  Description of Artificial Sequence: Synthetic oligonucleotide
  Sense strand starting at position 579 of SEQ ID NO: 1883080
agauauuacuccucaugug

SEQ ID NO: 2168003 - RNA, 19 nt, Artificial Sequence
  Description of Artificial Sequence: Synthetic oligonucleotide
  Antisense strand to SEQ ID NO: 2168002
cacaugaggaguaauaucu

SEQ ID NO: 2168004 - RNA, 19 nt, Artificial Sequence
  Description of Artificial Sequence: Synthetic oligonucleotide
  Sense strand starting at position 613 of SEQ ID NO: 1883080
ggcaccuauggugaauuga

SEQ ID NO: 2168005 - RNA, 19 nt, Artificial Sequence
  Description of Artificial Sequence: Synthetic oligonucleotide
  Antisense strand to SEQ ID NO: 2168004
ucaauucaccauaggugcc

SEQ ID NO: 2168006 - RNA, 19 nt, Artificial Sequence
  Description of Artificial Sequence: Synthetic oligonucleotide
  Sense strand starting at position 667 of SEQ ID NO: 1883080
uagggugucuaguuugaug

SEQ ID NO: 2168007 - RNA, 19 nt, Artificial Sequence
  Description of Artificial Sequence: Synthetic oligonucleotide
  Antisense strand to SEQ ID NO: 2168006
caucaaacuagacacccua

SEQ ID NO: 2168008 - RNA, 19 nt, Artificial Sequence
  Description of Artificial Sequence: Synthetic oligonucleotide
  Sense strand starting at position 698 of SEQ ID NO: 1883080
aggccaaucucaccuagaa

SEQ ID NO: 2168009 - RNA, 19 nt, Artificial Sequence
  Description of Artificial Sequence: Synthetic oligonucleotide
  Antisense strand to SEQ ID NO: 2168008
uucuaggugagauuggccu

SEQ ID NO: 2168010 - RNA, 19 nt, Artificial Sequence
  Description of Artificial Sequence: Synthetic oligonucleotide
  Sense strand starting at position 731 of SEQ ID NO: 1883080
aucaucguuuaagucuaau

SEQ ID NO: 2168011 - RNA, 19 nt, Artificial Sequence
  Description of Artificial Sequence: Synthetic oligonucleotide
  Antisense strand to SEQ ID NO: 2168010
auuagacuuaaacgaugau

SEQ ID NO: 2168012 - RNA, 19 nt, Artificial Sequence
  Description of Artificial Sequence: Synthetic oligonucleotide
  Sense strand starting at position 734 of SEQ ID NO: 1883080
aucguuuaagucuaaugau

SEQ ID NO: 2168013 - RNA, 19 nt, Artificial Sequence
  Description of Artificial Sequence: Synthetic oligonucleotide
  Antisense strand to SEQ ID NO: 2168012
aucauuagacuuaaacgau

SEQ ID NO: 2168014 - RNA, 19 nt, Artificial Sequence
  Description of Artificial Sequence: Synthetic oligonucleotide
  Sense strand starting at position 779 of SEQ ID NO: 1883080
auuuguaacuaguaaggua

SEQ ID NO: 2168015 - RNA, 19 nt, Artificial Sequence
  Description of Artificial Sequence: Synthetic oligonucleotide
  Antisense strand to SEQ ID NO: 2168014
uaccuuacuaguuacaaau

SEQ ID NO: 2168016 - RNA, 19 nt, Artificial Sequence
  Description of Artificial Sequence: Synthetic oligonucleotide
  Sense strand starting at position 815 of SEQ ID NO: 1883080
guuuccauacaguaaguca

SEQ ID NO: 2168017 - RNA, 19 nt, Artificial Sequence
  Description of Artificial Sequence: Synthetic oligonucleotide
  Antisense strand to SEQ ID NO: 2168016
ugacuuacuguauggaaac

SEQ ID NO: 2168018 - RNA, 19 nt, Artificial Sequence
  Description of Artificial Sequence: Synthetic oligonucleotide
  Sense strand starting at position 1020 of SEQ ID NO: 1883080
ucacauucugaugaaguuu

SEQ ID NO: 2168019 - RNA, 19 nt, Artificial Sequence
  Description of Artificial Sequence: Synthetic oligonucleotide
  Antisense strand to SEQ ID NO: 2168018
aaacuucaucagaauguga

SEQ ID NO: 2168020 - RNA, 19 nt, Artificial Sequence
  Description of Artificial Sequence: Synthetic oligonucleotide
  Sense strand starting at position 1028 of SEQ ID NO: 1883080
ugaugaaguuucucucauu

SEQ ID NO: 2168021 - RNA, 19 nt, Artificial Sequence
  Description of Artificial Sequence: Synthetic oligonucleotide
  Antisense strand to SEQ ID NO: 2168020
aaugagagaaacuucauca

SEQ ID NO: 2168022 - RNA, 19 nt, Artificial Sequence
  Description of Artificial Sequence: Synthetic oligonucleotide
  Sense strand starting at position 1072 of SEQ ID NO: 1883080
auucuagugugaucucaau

SEQ ID NO: 2168023 - RNA, 19 nt, Artificial Sequence
  Description of Artificial Sequence: Synthetic oligonucleotide
  Antisense strand to SEQ ID NO: 2168022
auugagaucacacuagaau

SEQ ID NO: 2168024 - RNA, 19 nt, Artificial Sequence
  Description of Artificial Sequence: Synthetic oligonucleotide
  Sense strand starting at position 1116 of SEQ ID NO: 1883080
ugagacuucuguccagcaa

SEQ ID NO: 2168025 - RNA, 19 nt, Artificial Sequence
  Description of Artificial Sequence: Synthetic oligonucleotide
  Antisense strand to SEQ ID NO: 2168024
uugcuggacagaagucuca

SEQ ID NO: 2168026 - RNA, 19 nt, Artificial Sequence
  Description of Artificial Sequence: Synthetic oligonucleotide
  Sense strand starting at position 1117 of SEQ ID NO: 1883080
gagacuucuguccagcaag

SEQ ID NO: 2168027 - RNA, 19 nt, Artificial Sequence
  Description of Artificial Sequence: Synthetic oligonucleotide
  Antisense strand to SEQ ID NO: 2168026
cuugcuggacagaagucuc

SEQ ID NO: 2168028 - RNA, 19 nt, Artificial Sequence
  Description of Artificial Sequence: Synthetic oligonucleotide
  Sense strand starting at position 1344 of SEQ ID NO: 1883080
gagagacauuguucuacau

SEQ ID NO: 2168029 - RNA, 19 nt, Artificial Sequence
  Description of Artificial Sequence: Synthetic oligonucleotide
  Antisense strand to SEQ ID NO: 2168028
auguagaacaaugucucuc

SEQ ID NO: 2168030 - RNA, 19 nt, Artificial Sequence
  Description of Artificial Sequence: Synthetic oligonucleotide
  Sense strand starting at position 1378 of SEQ ID NO: 1883080
ucaaacaugugucucuaua

SEQ ID NO: 2168031 - RNA, 19 nt, Artificial Sequence
  Description of Artificial Sequence: Synthetic oligonucleotide
  Antisense strand to SEQ ID NO: 2168030
uauagagacacauguuuga

SEQ ID NO: 2168032 - RNA, 19 nt, Artificial Sequence
  Description of Artificial Sequence: Synthetic oligonucleotide
  Sense strand starting at position 1497 of SEQ ID NO: 1883080
aggugcacugcagauauua

SEQ ID NO: 2168033 - RNA, 19 nt, Artificial Sequence
  Description of Artificial Sequence: Synthetic oligonucleotide
  Antisense strand to SEQ ID NO: 2168032
uaauaucugcagugcaccu

SEQ ID NO: 2168034 - RNA, 19 nt, Artificial Sequence
  Description of Artificial Sequence: Synthetic oligonucleotide
  Sense strand starting at position 1499 of SEQ ID NO: 1883080
gugcacugcagauauuagu

SEQ ID NO: 2168035 - RNA, 19 nt, Artificial Sequence
  Description of Artificial Sequence: Synthetic oligonucleotide
  Antisense strand to SEQ ID NO: 2168034
acuaauaucugcagugcac

SEQ ID NO: 2168036 - RNA, 19 nt, Artificial Sequence
  Description of Artificial Sequence: Synthetic oligonucleotide
  Sense strand starting at position 1508 of SEQ ID NO: 1883080
agauauuagucugcuuucu

SEQ ID NO: 2168037 - RNA, 19 nt, Artificial Sequence
  Description of Artificial Sequence: Synthetic oligonucleotide
  Antisense strand to SEQ ID NO: 2168036
agaaagcagacuaauaucu

SEQ ID NO: 2168038 - RNA, 19 nt, Artificial Sequence
  Description of Artificial Sequence: Synthetic oligonucleotide
  Sense strand starting at position 1510 of SEQ ID NO: 1883080
auauuagucugcuuucuga

SEQ ID NO: 2168039 - RNA, 19 nt, Artificial Sequence
  Description of Artificial Sequence: Synthetic oligonucleotide
  Antisense strand to SEQ ID NO: 2168038
ucagaaagcagacuaauau

SEQ ID NO: 2168040 - RNA, 19 nt, Artificial Sequence
  Description of Artificial Sequence: Synthetic oligonucleotide
  Sense strand starting at position 1520 of SEQ ID NO: 1883080
gcuuucugaggguagggau

SEQ ID NO: 2168041 - RNA, 19 nt, Artificial Sequence
  Description of Artificial Sequence: Synthetic oligonucleotide
  Antisense strand to SEQ ID NO: 2168040
aucccuacccucagaaagc

SEQ ID NO: 2168042 - RNA, 19 nt, Artificial Sequence
  Description of Artificial Sequence: Synthetic oligonucleotide
  Sense strand starting at position 1771 of SEQ ID NO: 1883080
acauuuaccuuagagcaga

SEQ ID NO: 2168043 - RNA, 19 nt, Artificial Sequence
  Description of Artificial Sequence: Synthetic oligonucleotide
  Antisense strand to SEQ ID NO: 2168042
ucugcucuaagguaaaugu

SEQ ID NO: 2168044 - RNA, 19 nt, Artificial Sequence
  Description of Artificial Sequence: Synthetic oligonucleotide
  Sense strand starting at position 2299 of SEQ ID NO: 1883080
ccuucugugcuagggauca

SEQ ID NO: 2168045 - RNA, 19 nt, Artificial Sequence
  Description of Artificial Sequence: Synthetic oligonucleotide
  Antisense strand to SEQ ID NO: 2168044
ugaucccuagcacagaagg

SEQ ID NO: 2168046 - RNA, 19 nt, Artificial Sequence
  Description of Artificial Sequence: Synthetic oligonucleotide
  Sense strand starting at position 2636 of SEQ ID NO: 1883080
uguaaucaccugugaucuu

SEQ ID NO: 2168047 - RNA, 19 nt, Artificial Sequence
  Description of Artificial Sequence: Synthetic oligonucleotide
  Antisense strand to SEQ ID NO: 2168046
aagaucacaggugauuaca

SEQ ID NO: 2168048 - RNA, 19 nt, Artificial Sequence
  Description of Artificial Sequence: Synthetic oligonucleotide
  Sense strand starting at position 2711 of SEQ ID NO: 1883080
acagcaucuucuguacuau

SEQ ID NO: 2168049 - RNA, 19 nt, Artificial Sequence
  Description of Artificial Sequence: Synthetic oligonucleotide
  Antisense strand to SEQ ID NO: 2168048
auaguacagaagaugcugu

SEQ ID NO: 2168050 - RNA, 19 nt, Artificial Sequence
  Description of Artificial Sequence: Synthetic oligonucleotide
  Sense strand starting at position 2734 of SEQ ID NO: 1883080
ucugcaacuccagggauau

SEQ ID NO: 2168051 - RNA, 19 nt, Artificial Sequence
  Description of Artificial Sequence: Synthetic oligonucleotide
  Antisense strand to SEQ ID NO: 2168050
auaucccuggaguugcaga

SEQ ID NO: 2168052 - RNA, 19 nt, Artificial Sequence
  Description of Artificial Sequence: Synthetic oligonucleotide
  Sense strand starting at position 2735 of SEQ ID NO: 1883080
cugcaacuccagggauaug

SEQ ID NO: 2168053 - RNA, 19 nt, Artificial Sequence
  Description of Artificial Sequence: Synthetic oligonucleotide
  Antisense strand to SEQ ID NO: 2168052
cauaucccuggaguugcag

SEQ ID NO: 2168054 - RNA, 19 nt, Artificial Sequence
  Description of Artificial Sequence: Synthetic oligonucleotide
  Sense strand starting at position 2746 of SEQ ID NO: 1883080
gggauauguuggaaucagg

SEQ ID NO: 2168055 - RNA, 19 nt, Artificial Sequence
  Description of Artificial Sequence: Synthetic oligonucleotide
  Antisense strand to SEQ ID NO: 2168054
ccugauuccaacauauccc

SEQ ID NO: 2168056 - RNA, 19 nt, Artificial Sequence
  Description of Artificial Sequence: Synthetic oligonucleotide
  Sense strand starting at position 2930 of SEQ ID NO: 1883080
gcuucugguacacaagaga

SEQ ID NO: 2168057 - RNA, 19 nt, Artificial Sequence
  Description of Artificial Sequence: Synthetic oligonucleotide
  Antisense strand to SEQ ID NO: 2168056
ucucuuguguaccagaagc

SEQ ID NO: 2168058 - RNA, 19 nt, Artificial Sequence
  Description of Artificial Sequence: Synthetic oligonucleotide
  Sense strand starting at position 3243 of SEQ ID NO: 1883080
ggguauuuauacugaauca

SEQ ID NO: 2168059 - RNA, 19 nt, Artificial Sequence
  Description of Artificial Sequence: Synthetic oligonucleotide
  Antisense strand to SEQ ID NO: 2168058
ugauucaguauaaauaccc

SEQ ID NO: 2168060 - RNA, 19 nt, Artificial Sequence
  Description of Artificial Sequence: Synthetic oligonucleotide
  Sense strand starting at position 3280 of SEQ ID NO: 1883080
agagaucgcagcugagagu

SEQ ID NO: 2168061 - RNA, 19 nt, Artificial Sequence
  Description of Artificial Sequence: Synthetic oligonucleotide
  Antisense strand to SEQ ID NO: 2168060
acucucagcugcgaucucu

SEQ ID NO: 2168062 - RNA, 19 nt, Artificial Sequence
  Description of Artificial Sequence: Synthetic oligonucleotide
  Sense strand starting at position 3300 of SEQ ID NO: 1883080
cugcuuacuccuuaugucu

SEQ ID NO: 2168063 - RNA, 19 nt, Artificial Sequence
  Description of Artificial Sequence: Synthetic oligonucleotide
  Antisense strand to SEQ ID NO: 2168062
agacauaaggaguaagcag

SEQ ID NO: 2168064 - RNA, 19 nt, Artificial Sequence
  Description of Artificial Sequence: Synthetic oligonucleotide
  Sense strand starting at position 3359 of SEQ ID NO: 1883080
aggccuagauaugcaguua

SEQ ID NO: 2168065 - RNA, 19 nt, Artificial Sequence
  Description of Artificial Sequence: Synthetic oligonucleotide
  Antisense strand to SEQ ID NO: 2168064
uaacugcauaucuaggccu

SEQ ID NO: 2168066 - RNA, 19 nt, Artificial Sequence
  Description of Artificial Sequence: Synthetic oligonucleotide
  Sense strand starting at position 3360 of SEQ ID NO: 1883080
ggccuagauaugcaguuaa

SEQ ID NO: 2168067 - RNA, 19 nt, Artificial Sequence
  Description of Artificial Sequence: Synthetic oligonucleotide
  Antisense strand to SEQ ID NO: 2168066
uuaacugcauaucuaggcc

SEQ ID NO: 2168068 - RNA, 19 nt, Artificial Sequence
  Description of Artificial Sequence: Synthetic oligonucleotide
  Sense strand starting at position 3546 of SEQ ID NO: 1883080
ggguacauaauccgaauau

SEQ ID NO: 2168069 - RNA, 19 nt, Artificial Sequence
  Description of Artificial Sequence: Synthetic oligonucleotide
  Antisense strand to SEQ ID NO: 2168068
auauucggauuauguaccc

SEQ ID NO: 2168070 - RNA, 19 nt, Artificial Sequence
  Description of Artificial Sequence: Synthetic oligonucleotide
  Sense strand starting at position 3709 of SEQ ID NO: 1883080
guaaacuauuuacauggaa

SEQ ID NO: 2168071 - RNA, 19 nt, Artificial Sequence
  Description of Artificial Sequence: Synthetic oligonucleotide
  Antisense strand to SEQ ID NO: 2168070
uuccauguaaauaguuuac

SEQ ID NO: 2168072 - RNA, 19 nt, Artificial Sequence
  Description of Artificial Sequence: Synthetic oligonucleotide
  Sense strand starting at position 3747 of SEQ ID NO: 1883080
gaagaugcauuuggagauu

SEQ ID NO: 2168073 - RNA, 19 nt, Artificial Sequence
  Description of Artificial Sequence: Synthetic oligonucleotide
  Antisense strand to SEQ ID NO: 2168072
aaucuccaaaugcaucuuc

SEQ ID NO: 2168074 - RNA, 19 nt, Artificial Sequence
  Description of Artificial Sequence: Synthetic oligonucleotide
  Sense strand starting at position 7 of SEQ ID NO: 1883081
cuguguauuuccuuuguau

SEQ ID NO: 2168075 - RNA, 19 nt, Artificial Sequence
  Description of Artificial Sequence: Synthetic oligonucleotide
  Antisense strand to SEQ ID NO: 2168074
auacaaaggaaauacacag

SEQ ID NO: 2168076 - RNA, 19 nt, Artificial Sequence
  Description of Artificial Sequence: Synthetic oligonucleotide
  Sense strand starting at position 80 of SEQ ID NO: 1883081
cagccagauggcuaagauu

SEQ ID NO: 2168077 - RNA, 19 nt, Artificial Sequence
  Description of Artificial Sequence: Synthetic oligonucleotide
  Antisense strand to SEQ ID NO: 2168076
aaucuuagccaucuggcug

SEQ ID NO: 2168078 - RNA, 19 nt, Artificial Sequence
  Description of Artificial Sequence: Synthetic oligonucleotide
  Sense strand starting at position 89 of SEQ ID NO: 1883081
ggcuaagauuucugaauuu

SEQ ID NO: 2168079 - RNA, 19 nt, Artificial Sequence
  Description of Artificial Sequence: Synthetic oligonucleotide
  Antisense strand to SEQ ID NO: 2168078
aaauucagaaaucuuagcc

SEQ ID NO: 2168080 - RNA, 19 nt, Artificial Sequence
  Description of Artificial Sequence: Synthetic oligonucleotide
  Sense strand starting at position 111 of SEQ ID NO: 1883081
agaaccguucuauacucau

SEQ ID NO: 2168081 - RNA, 19 nt, Artificial Sequence
  Description of Artificial Sequence: Synthetic oligonucleotide
  Antisense strand to SEQ ID NO: 2168080
augaguauagaacgguucu

SEQ ID NO: 2168082 - RNA, 19 nt, Artificial Sequence
  Description of Artificial Sequence: Synthetic oligonucleotide
  Sense strand starting at position 135 of SEQ ID NO: 1883081
ugaguaggucuugaucaca

SEQ ID NO: 2168083 - RNA, 19 nt, Artificial Sequence
  Description of Artificial Sequence: Synthetic oligonucleotide
  Antisense strand to SEQ ID NO: 2168082
ugugaucaagaccuacuca

SEQ ID NO: 2168084 - RNA, 19 nt, Artificial Sequence
  Description of Artificial Sequence: Synthetic oligonucleotide
  Sense strand starting at position 180 of SEQ ID NO: 1883081
cacugagauuugcaaggaa

SEQ ID NO: 2168085 - RNA, 19 nt, Artificial Sequence
  Description of Artificial Sequence: Synthetic oligonucleotide
  Antisense strand to SEQ ID NO: 2168084
uuccuugcaaaucucagug

SEQ ID NO: 2168086 - RNA, 19 nt, Artificial Sequence
  Description of Artificial Sequence: Synthetic oligonucleotide
  Sense strand starting at position 263 of SEQ ID NO: 1883081
agucuuugaccucauccua

SEQ ID NO: 2168087 - RNA, 19 nt, Artificial Sequence
  Description of Artificial Sequence: Synthetic oligonucleotide
  Antisense strand to SEQ ID NO: 2168086
uaggaugaggucaaagacu

SEQ ID NO: 2168088 - RNA, 19 nt, Artificial Sequence
  Description of Artificial Sequence: Synthetic oligonucleotide
  Sense strand starting at position 316 of SEQ ID NO: 1883081
gccgauuucucagcuuaau

SEQ ID NO: 2168089 - RNA, 19 nt, Artificial Sequence
  Description of Artificial Sequence: Synthetic oligonucleotide
  Antisense strand to SEQ ID NO: 2168088
auuaagcugagaaaucggc

SEQ ID NO: 2168090 - RNA, 19 nt, Artificial Sequence
  Description of Artificial Sequence: Synthetic oligonucleotide
  Sense strand starting at position 663 of SEQ ID NO: 1883081
uaacaaguauuguugauga

SEQ ID NO: 2168091 - RNA, 19 nt, Artificial Sequence
  Description of Artificial Sequence: Synthetic oligonucleotide
  Antisense strand to SEQ ID NO: 2168090
ucaucaacaauacuuguua

SEQ ID NO: 2168092 - RNA, 19 nt, Artificial Sequence
  Description of Artificial Sequence: Synthetic oligonucleotide
  Sense strand starting at position 751 of SEQ ID NO: 1883081
ccaaauuuguguucuguuu

SEQ ID NO: 2168093 - RNA, 19 nt, Artificial Sequence
  Description of Artificial Sequence: Synthetic oligonucleotide
  Antisense strand to SEQ ID NO: 2168092
aaacagaacacaaauuugg

SEQ ID NO: 2168094 - RNA, 19 nt, Artificial Sequence
  Description of Artificial Sequence: Synthetic oligonucleotide
  Sense strand starting at position 763 of SEQ ID NO: 1883081
ucuguuucccaaugggaac

SEQ ID NO: 2168095 - RNA, 19 nt, Artificial Sequence
  Description of Artificial Sequence: Synthetic oligonucleotide
  Antisense strand to SEQ ID NO: 2168094
guucccauugggaaacaga

SEQ ID NO: 2168096 - RNA, 19 nt, Artificial Sequence
  Description of Artificial Sequence: Synthetic oligonucleotide
  Sense strand starting at position 1016 of SEQ ID NO: 1883081
uccugauuaucuuuagagu

SEQ ID NO: 2168097 - RNA, 19 nt, Artificial Sequence
  Description of Artificial Sequence: Synthetic oligonucleotide
  Antisense strand to SEQ ID NO: 2168096
acucuaaagauaaucagga

SEQ ID NO: 2168098 - RNA, 19 nt, Artificial Sequence
  Description of Artificial Sequence: Synthetic oligonucleotide
  Sense strand starting at position 1017 of SEQ ID NO: 1883081
ccugauuaucuuuagaguc

SEQ ID NO: 2168099 - RNA, 19 nt, Artificial Sequence
  Description of Artificial Sequence: Synthetic oligonucleotide
  Antisense strand to SEQ ID NO: 2168098
gacucuaaagauaaucagg

SEQ ID NO: 2168100 - RNA, 19 nt, Artificial Sequence
  Description of Artificial Sequence: Synthetic oligonucleotide
  Sense strand starting at position 1030 of SEQ ID NO: 1883081
agagucuuuagccagagca

SEQ ID NO: 2168101 - RNA, 19 nt, Artificial Sequence
  Description of Artificial Sequence: Synthetic oligonucleotide
  Antisense strand to SEQ ID NO: 2168100
ugcucuggcuaaagacucu

SEQ ID NO: 2168102 - RNA, 19 nt, Artificial Sequence
  Description of Artificial Sequence: Synthetic oligonucleotide
  Sense strand starting at position 1043 of SEQ ID NO: 1883081
agagcagcuccuggagaau

SEQ ID NO: 2168103 - RNA, 19 nt, Artificial Sequence
  Description of Artificial Sequence: Synthetic oligonucleotide
  Antisense strand to SEQ ID NO: 2168102
auucuccaggagcugcucu

SEQ ID NO: 2168104 - RNA, 19 nt, Artificial Sequence
  Description of Artificial Sequence: Synthetic oligonucleotide
  Sense strand starting at position 1046 of SEQ ID NO: 1883081
gcagcuccuggagaaucaa

SEQ ID NO: 2168105 - RNA, 19 nt, Artificial Sequence
  Description of Artificial Sequence: Synthetic oligonucleotide
  Antisense strand to SEQ ID NO: 2168104
uugauucuccaggagcugc

SEQ ID NO: 2168106 - RNA, 19 nt, Artificial Sequence
  Description of Artificial Sequence: Synthetic oligonucleotide
  Sense strand starting at position 1101 of SEQ ID NO: 1883081
gccagaacuggcuagggua

SEQ ID NO: 2168107 - RNA, 19 nt, Artificial Sequence
  Description of Artificial Sequence: Synthetic oligonucleotide
  Antisense strand to SEQ ID NO: 2168106
uacccuagccaguucuggc

SEQ ID NO: 2168108 - RNA, 19 nt, Artificial Sequence
  Description of Artificial Sequence: Synthetic oligonucleotide
  Sense strand starting at position 1272 of SEQ ID NO: 1883081
ugugaaacuuacuuacaug

SEQ ID NO: 2168109 - RNA, 19 nt, Artificial Sequence
  Description of Artificial Sequence: Synthetic oligonucleotide
  Antisense strand to SEQ ID NO: 2168108
cauguaaguaaguuucaca

SEQ ID NO: 2168110 - RNA, 19 nt, Artificial Sequence
  Description of Artificial Sequence: Synthetic oligonucleotide
  Sense strand starting at position 1283 of SEQ ID NO: 1883081
cuuacaugcugaucagaag

SEQ ID NO: 2168111 - RNA, 19 nt, Artificial Sequence
  Description of Artificial Sequence: Synthetic oligonucleotide
  Antisense strand to SEQ ID NO: 2168110
cuucugaucagcauguaag

SEQ ID NO: 2168112 - RNA, 19 nt, Artificial Sequence
  Description of Artificial Sequence: Synthetic oligonucleotide
  Sense strand starting at position 1588 of SEQ ID NO: 1883081
auuuaaauguccuccgcuu

SEQ ID NO: 2168113 - RNA, 19 nt, Artificial Sequence
  Description of Artificial Sequence: Synthetic oligonucleotide
  Antisense strand to SEQ ID NO: 2168112
aagcggaggacauuuaaau

SEQ ID NO: 2168114 - RNA, 19 nt, Artificial Sequence
  Description of Artificial Sequence: Synthetic oligonucleotide
  Sense strand starting at position 1603 of SEQ ID NO: 1883081
gcuuccuagcuguuuaguu

SEQ ID NO: 2168115 - RNA, 19 nt, Artificial Sequence
  Description of Artificial Sequence: Synthetic oligonucleotide
  Antisense strand to SEQ ID NO: 2168114
aacuaaacagcuaggaagc

SEQ ID NO: 2168116 - RNA, 19 nt, Artificial Sequence
  Description of Artificial Sequence: Synthetic oligonucleotide
  Sense strand starting at position 1748 of SEQ ID NO: 1883081
gacagaucucgccaggaac

SEQ ID NO: 2168117 - RNA, 19 nt, Artificial Sequence
  Description of Artificial Sequence: Synthetic oligonucleotide
  Antisense strand to SEQ ID NO: 2168116
guuccuggcgagaucuguc

SEQ ID NO: 2168118 - RNA, 19 nt, Artificial Sequence
  Description of Artificial Sequence: Synthetic oligonucleotide
  Sense strand starting at position 1766 of SEQ ID NO: 1883081
cagacaaguugaucaagcu

SEQ ID NO: 2168119 - RNA, 19 nt, Artificial Sequence
  Description of Artificial Sequence: Synthetic oligonucleotide
  Antisense strand to SEQ ID NO: 2168118
agcuugaucaacuugucug

SEQ ID NO: 2168120 - RNA, 19 nt, Artificial Sequence
  Description of Artificial Sequence: Synthetic oligonucleotide
  Sense strand starting at position 1994 of SEQ ID NO: 1883081
aaaucuugccuggaguuau

SEQ ID NO: 2168121 - RNA, 19 nt, Artificial Sequence
  Description of Artificial Sequence: Synthetic oligonucleotide
  Antisense strand to SEQ ID NO: 2168120
auaacuccaggcaagauuu

SEQ ID NO: 2168122 - RNA, 19 nt, Artificial Sequence
  Description of Artificial Sequence: Synthetic oligonucleotide
  Sense strand starting at position 2204 of SEQ ID NO: 1883081
ugaugaggaagcuaugguu

SEQ ID NO: 2168123 - RNA, 19 nt, Artificial Sequence
  Description of Artificial Sequence: Synthetic oligonucleotide
  Antisense strand to SEQ ID NO: 2168122
aaccauagcuuccucauca

SEQ ID NO: 2168124 - RNA, 19 nt, Artificial Sequence
  Description of Artificial Sequence: Synthetic oligonucleotide
  Sense strand starting at position 2571 of SEQ ID NO: 1883081
ugagauuagaaugguuugu

SEQ ID NO: 2168125 - RNA, 19 nt, Artificial Sequence
  Description of Artificial Sequence: Synthetic oligonucleotide
  Antisense strand to SEQ ID NO: 2168124
acaaaccauucuaaucuca

SEQ ID NO: 2168126 - RNA, 19 nt, Artificial Sequence
  Description of Artificial Sequence: Synthetic oligonucleotide
  Sense strand starting at position 2573 of SEQ ID NO: 1883081
agauuagaaugguuugucu

SEQ ID NO: 2168127 - RNA, 19 nt, Artificial Sequence
  Description of Artificial Sequence: Synthetic oligonucleotide
  Antisense strand to SEQ ID NO: 2168126
agacaaaccauucuaaucu

SEQ ID NO: 2168128 - RNA, 19 nt, Artificial Sequence
  Description of Artificial Sequence: Synthetic oligonucleotide
  Sense strand starting at position 2781 of SEQ ID NO: 1883081
ccuauuggaugaucugaau

SEQ ID NO: 2168129 - RNA, 19 nt, Artificial Sequence
  Description of Artificial Sequence: Synthetic oligonucleotide
  Antisense strand to SEQ ID NO: 2168128
auucagaucauccaauagg

SEQ ID NO: 2168130 - RNA, 19 nt, Artificial Sequence
  Description of Artificial Sequence: Synthetic oligonucleotide
  Sense strand starting at position 2911 of SEQ ID NO: 1883081
cccacagagacggguaaua

SEQ ID NO: 2168131 - RNA, 19 nt, Artificial Sequence
  Description of Artificial Sequence: Synthetic oligonucleotide
  Antisense strand to SEQ ID NO: 2168130
uauuacccgucucuguggg

SEQ ID NO: 2168132 - RNA, 19 nt, Artificial Sequence
  Description of Artificial Sequence: Synthetic oligonucleotide
  Sense strand starting at position 3016 of SEQ ID NO: 1883081
uaaggagcugaucaguuau

SEQ ID NO: 2168133 - RNA, 19 nt, Artificial Sequence
  Description of Artificial Sequence: Synthetic oligonucleotide
  Antisense strand to SEQ ID NO: 2168132
auaacugaucagcuccuua

SEQ ID NO: 2168134 - RNA, 19 nt, Artificial Sequence
  Description of Artificial Sequence: Synthetic oligonucleotide
  Sense strand starting at position 3018 of SEQ ID NO: 1883081
aggagcugaucaguuauaa

SEQ ID NO: 2168135 - RNA, 19 nt, Artificial Sequence
  Description of Artificial Sequence: Synthetic oligonucleotide
  Antisense strand to SEQ ID NO: 2168134
uuauaacugaucagcuccu

SEQ ID NO: 2168136 - RNA, 19 nt, Artificial Sequence
  Description of Artificial Sequence: Synthetic oligonucleotide
  Sense strand starting at position 3236 of SEQ ID NO: 1883081
ugacaaauacugugcuaua

SEQ ID NO: 2168137 - RNA, 19 nt, Artificial Sequence
  Description of Artificial Sequence: Synthetic oligonucleotide
  Antisense strand to SEQ ID NO: 2168136
uauagcacaguauuuguca

SEQ ID NO: 2168138 - RNA, 19 nt, Artificial Sequence
  Description of Artificial Sequence: Synthetic oligonucleotide
  Sense strand starting at position 3450 of SEQ ID NO: 1883081
ggccuuauuucugcuaagu

SEQ ID NO: 2168139 - RNA, 19 nt, Artificial Sequence
  Description of Artificial Sequence: Synthetic oligonucleotide
  Antisense strand to SEQ ID NO: 2168138
acuuagcagaaauaaggcc

SEQ ID NO: 2168140 - RNA, 19 nt, Artificial Sequence
  Description of Artificial Sequence: Synthetic oligonucleotide
  Sense strand starting at position 3643 of SEQ ID NO: 1883081
agaaaucacuuugugaaug

SEQ ID NO: 2168141 - RNA, 19 nt, Artificial Sequence
  Description of Artificial Sequence: Synthetic oligonucleotide
  Antisense strand to SEQ ID NO: 2168140
cauucacaaagugauuucu

SEQ ID NO: 2168142 - RNA, 19 nt, Artificial Sequence
  Description of Artificial Sequence: Synthetic oligonucleotide
  Sense strand starting at position 3651 of SEQ ID NO: 1883081
cuuugugaauguuuaugaa

SEQ ID NO: 2168143 - RNA, 19 nt, Artificial Sequence
  Description of Artificial Sequence: Synthetic oligonucleotide
  Antisense strand to SEQ ID NO: 2168142
uucauaaacauucacaaag

SEQ ID NO: 2168144 - RNA, 19 nt, Artificial Sequence
  Description of Artificial Sequence: Synthetic oligonucleotide
  Sense strand starting at position 3685 of SEQ ID NO: 1883081
ggagucuguuaaccuauaa

SEQ ID NO: 2168145 - RNA, 19 nt, Artificial Sequence
  Description of Artificial Sequence: Synthetic oligonucleotide
  Antisense strand to SEQ ID NO: 2168144
uuauagguuaacagacucc

SEQ ID NO: 2168146 - RNA, 19 nt, Artificial Sequence
  Description of Artificial Sequence: Synthetic oligonucleotide
  Sense strand starting at position 3714 of SEQ ID NO: 1883081
gccacauugcuggaaccua

SEQ ID NO: 2168147 - RNA, 19 nt, Artificial Sequence
  Description of Artificial Sequence: Synthetic oligonucleotide
  Antisense strand to SEQ ID NO: 2168146
uagguuccagcaauguggc

SEQ ID NO: 2168148 - RNA, 19 nt, Artificial Sequence
  Description of Artificial Sequence: Synthetic oligonucleotide
  Sense strand starting at position 3722 of SEQ ID NO: 1883081
gcuggaaccuacccugaau

SEQ ID NO: 2168149 - RNA, 19 nt, Artificial Sequence
  Description of Artificial Sequence: Synthetic oligonucleotide
  Antisense strand to SEQ ID NO: 2168148
auucaggguagguuccagc

SEQ ID NO: 2168150 - RNA, 19 nt, Artificial Sequence
  Description of Artificial Sequence: Synthetic oligonucleotide
  Sense strand starting at position 3837 of SEQ ID NO: 1883081
uaagcuaucggaggagaac

SEQ ID NO: 2168151 - RNA, 19 nt, Artificial Sequence
  Description of Artificial Sequence: Synthetic oligonucleotide
  Antisense strand to SEQ ID NO: 2168150
guucuccuccgauagcuua

SEQ ID NO: 2168152 - RNA, 19 nt, Artificial Sequence
  Description of Artificial Sequence: Synthetic oligonucleotide
  Sense strand starting at position 3948 of SEQ ID NO: 1883081
agaauaugaaggcgacuau

SEQ ID NO: 2168153 - RNA, 19 nt, Artificial Sequence
  Description of Artificial Sequence: Synthetic oligonucleotide
  Antisense strand to SEQ ID NO: 2168152
auagucgccuucauauucu

SEQ ID NO: 2168154 - RNA, 19 nt, Artificial Sequence
  Description of Artificial Sequence: Synthetic oligonucleotide
  Sense strand starting at position 192 of SEQ ID NO: 1883082
agugucaggguucauguaa

SEQ ID NO: 2168155 - RNA, 19 nt, Artificial Sequence
  Description of Artificial Sequence: Synthetic oligonucleotide
  Antisense strand to SEQ ID NO: 2168154
uuacaugaacccugacacu

SEQ ID NO: 2168156 - RNA, 19 nt, Artificial Sequence
  Description of Artificial Sequence: Synthetic oligonucleotide
  Sense strand starting at position 575 of SEQ ID NO: 1883082
ugcaguguugugucacuua

SEQ ID NO: 2168157 - RNA, 19 nt, Artificial Sequence
  Description of Artificial Sequence: Synthetic oligonucleotide
  Antisense strand to SEQ ID NO: 2168156
uaagugacacaacacugca

SEQ ID NO: 2168158 - RNA, 19 nt, Artificial Sequence
  Description of Artificial Sequence: Synthetic oligonucleotide
  Sense strand starting at position 598 of SEQ ID NO: 1883082
uaagcaauugcgucauugu

SEQ ID NO: 2168159 - RNA, 19 nt, Artificial Sequence
  Description of Artificial Sequence: Synthetic oligonucleotide
  Antisense strand to SEQ ID NO: 2168158
acaaugacgcaauugcuua

SEQ ID NO: 2168160 - RNA, 19 nt, Artificial Sequence
  Description of Artificial Sequence: Synthetic oligonucleotide
  Sense strand starting at position 645 of SEQ ID NO: 1883082
accugaaucuaggcuauau

SEQ ID NO: 2168161 - RNA, 19 nt, Artificial Sequence
  Description of Artificial Sequence: Synthetic oligonucleotide
  Antisense strand to SEQ ID NO: 2168160
auauagccuagauucaggu

SEQ ID NO: 2168162 - RNA, 19 nt, Artificial Sequence
  Description of Artificial Sequence: Synthetic oligonucleotide
  Sense strand starting at position 847 of SEQ ID NO: 1883082
auaaauggagcuugugagu

SEQ ID NO: 2168163 - RNA, 19 nt, Artificial Sequence
  Description of Artificial Sequence: Synthetic oligonucleotide
  Antisense strand to SEQ ID NO: 2168162
acucacaagcuccauuuau

SEQ ID NO: 2168164 - RNA, 19 nt, Artificial Sequence
  Description of Artificial Sequence: Synthetic oligonucleotide
  Sense strand starting at position 879 of SEQ ID NO: 1883082
uggaugagucggugaguga

SEQ ID NO: 2168165 - RNA, 19 nt, Artificial Sequence
  Description of Artificial Sequence: Synthetic oligonucleotide
  Antisense strand to SEQ ID NO: 2168164
ucacucaccgacucaucca

SEQ ID NO: 2168166 - RNA, 19 nt, Artificial Sequence
  Description of Artificial Sequence: Synthetic oligonucleotide
  Sense strand starting at position 880 of SEQ ID NO: 1883082
ggaugagucggugagugaa

SEQ ID NO: 2168167 - RNA, 19 nt, Artificial Sequence
  Description of Artificial Sequence: Synthetic oligonucleotide
  Antisense strand to SEQ ID NO: 2168166
uucacucaccgacucaucc

SEQ ID NO: 2168168 - RNA, 19 nt, Artificial Sequence
  Description of Artificial Sequence: Synthetic oligonucleotide
  Sense strand starting at position 927 of SEQ ID NO: 1883082
ugcuguagacuugauaaac

SEQ ID NO: 2168169 - RNA, 19 nt, Artificial Sequence
  Description of Artificial Sequence: Synthetic oligonucleotide
  Antisense strand to SEQ ID NO: 2168168
guuuaucaagucuacagca

SEQ ID NO: 2168170 - RNA, 19 nt, Artificial Sequence
  Description of Artificial Sequence: Synthetic oligonucleotide
  Sense strand starting at position 949 of SEQ ID NO: 1883082
guauucuuaggguacacua

SEQ ID NO: 2168171 - RNA, 19 nt, Artificial Sequence
  Description of Artificial Sequence: Synthetic oligonucleotide
  Antisense strand to SEQ ID NO: 2168170
uaguguacccuaagaauac

SEQ ID NO: 2168172 - RNA, 19 nt, Artificial Sequence
  Description of Artificial Sequence: Synthetic oligonucleotide
  Sense strand starting at position 1066 of SEQ ID NO: 1883082
uuguaauaauacucgaaac

SEQ ID NO: 2168173 - RNA, 19 nt, Artificial Sequence
  Description of Artificial Sequence: Synthetic oligonucleotide
  Antisense strand to SEQ ID NO: 2168172
guuucgaguauuauuacaa

SEQ ID NO: 2168174 - RNA, 19 nt, Artificial Sequence
  Description of Artificial Sequence: Synthetic oligonucleotide
  Sense strand starting at position 2096 of SEQ ID NO: 1883082
gagccauaaugucuuaaga

SEQ ID NO: 2168175 - RNA, 19 nt, Artificial Sequence
  Description of Artificial Sequence: Synthetic oligonucleotide
  Antisense strand to SEQ ID NO: 2168174
ucuuaagacauuauggcuc

SEQ ID NO: 2168176 - RNA, 19 nt, Artificial Sequence
  Description of Artificial Sequence: Synthetic oligonucleotide
  Sense strand starting at position 2379 of SEQ ID NO: 1883082
gugacauuacuaggugacu

SEQ ID NO: 2168177 - RNA, 19 nt, Artificial Sequence
  Description of Artificial Sequence: Synthetic oligonucleotide
  Antisense strand to SEQ ID NO: 2168176
agucaccuaguaaugucac

SEQ ID NO: 2168178 - RNA, 19 nt, Artificial Sequence
  Description of Artificial Sequence: Synthetic oligonucleotide
  Sense strand starting at position 2385 of SEQ ID NO: 1883082
uuacuaggugacuggaauu

SEQ ID NO: 2168179 - RNA, 19 nt, Artificial Sequence
  Description of Artificial Sequence: Synthetic oligonucleotide
  Antisense strand to SEQ ID NO: 2168178
aauuccagucaccuaguaa

SEQ ID NO: 2168180 - RNA, 19 nt, Artificial Sequence
  Description of Artificial Sequence: Synthetic oligonucleotide
  Sense strand starting at position 2765 of SEQ ID NO: 1883082
cagucauaguuaucagaag

SEQ ID NO: 2168181 - RNA, 19 nt, Artificial Sequence
  Description of Artificial Sequence: Synthetic oligonucleotide
  Antisense strand to SEQ ID NO: 2168180
cuucugauaacuaugacug

SEQ ID NO: 2168182 - RNA, 19 nt, Artificial Sequence
  Description of Artificial Sequence: Synthetic oligonucleotide
  Sense strand starting at position 2771 of SEQ ID NO: 1883082
uaguuaucagaagggauuc

SEQ ID NO: 2168183 - RNA, 19 nt, Artificial Sequence
  Description of Artificial Sequence: Synthetic oligonucleotide
  Antisense strand to SEQ ID NO: 2168182
gaaucccuucugauaacua

SEQ ID NO: 2168184 - RNA, 19 nt, Artificial Sequence
  Description of Artificial Sequence: Synthetic oligonucleotide
  Sense strand starting at position 2862 of SEQ ID NO: 1883082
ggcacuggcauguaguaaa

SEQ ID NO: 2168185 - RNA, 19 nt, Artificial Sequence
  Description of Artificial Sequence: Synthetic oligonucleotide
  Antisense strand to SEQ ID NO: 2168184
uuuacuacaugccagugcc

SEQ ID NO: 2168186 - RNA, 19 nt, Artificial Sequence
  Description of Artificial Sequence: Synthetic oligonucleotide
  Sense strand starting at position 2992 of SEQ ID NO: 1883082
uugagaagccacuauucuu

SEQ ID NO: 2168187 - RNA, 19 nt, Artificial Sequence
  Description of Artificial Sequence: Synthetic oligonucleotide
  Antisense strand to SEQ ID NO: 2168186
aagaauaguggcuucucaa

SEQ ID NO: 2168188 - RNA, 19 nt, Artificial Sequence
  Description of Artificial Sequence: Synthetic oligonucleotide
  Sense strand starting at position 3030 of SEQ ID NO: 1883082
gagaucagaucaguccuau

SEQ ID NO: 2168189 - RNA, 19 nt, Artificial Sequence
  Description of Artificial Sequence: Synthetic oligonucleotide
  Antisense strand to SEQ ID NO: 2168188
auaggacugaucugaucuc

SEQ ID NO: 2168190 - RNA, 19 nt, Artificial Sequence
  Description of Artificial Sequence: Synthetic oligonucleotide
  Sense strand starting at position 3055 of SEQ ID NO: 1883082
agguccauccuggaauguu

SEQ ID NO: 2168191 - RNA, 19 nt, Artificial Sequence
  Description of Artificial Sequence: Synthetic oligonucleotide
  Antisense strand to SEQ ID NO: 2168190
aacauuccaggauggaccu

SEQ ID NO: 2168192 - RNA, 19 nt, Artificial Sequence
  Description of Artificial Sequence: Synthetic oligonucleotide
  Sense strand starting at position 3063 of SEQ ID NO: 1883082
ccuggaauguuuguuaacu

SEQ ID NO: 2168193 - RNA, 19 nt, Artificial Sequence
  Description of Artificial Sequence: Synthetic oligonucleotide
  Antisense strand to SEQ ID NO: 2168192
aguuaacaaacauuccagg

SEQ ID NO: 2168194 - RNA, 19 nt, Artificial Sequence
  Description of Artificial Sequence: Synthetic oligonucleotide
  Sense strand starting at position 3064 of SEQ ID NO: 1883082
cuggaauguuuguuaacug

SEQ ID NO: 2168195 - RNA, 19 nt, Artificial Sequence
  Description of Artificial Sequence: Synthetic oligonucleotide
  Antisense strand to SEQ ID NO: 2168194
caguuaacaaacauuccag

SEQ ID NO: 2168196 - RNA, 19 nt, Artificial Sequence
  Description of Artificial Sequence: Synthetic oligonucleotide
  Sense strand starting at position 3092 of SEQ ID NO: 1883082
ggcauuuguucuguggaug

SEQ ID NO: 2168197 - RNA, 19 nt, Artificial Sequence
  Description of Artificial Sequence: Synthetic oligonucleotide
  Antisense strand to SEQ ID NO: 2168196
cauccacagaacaaaugcc

SEQ ID NO: 2168198 - RNA, 19 nt, Artificial Sequence
  Description of Artificial Sequence: Synthetic oligonucleotide
  Sense strand starting at position 3135 of SEQ ID NO: 1883082
ggucuuuccugauugagau

SEQ ID NO: 2168199 - RNA, 19 nt, Artificial Sequence
  Description of Artificial Sequence: Synthetic oligonucleotide
  Antisense strand to SEQ ID NO: 2168198
aucucaaucaggaaagacc

SEQ ID NO: 2168200 - RNA, 19 nt, Artificial Sequence
  Description of Artificial Sequence: Synthetic oligonucleotide
  Sense strand starting at position 3136 of SEQ ID NO: 1883082
gucuuuccugauugagauc

SEQ ID NO: 2168201 - RNA, 19 nt, Artificial Sequence
  Description of Artificial Sequence: Synthetic oligonucleotide
  Antisense strand to SEQ ID NO: 2168200
gaucucaaucaggaaagac

SEQ ID NO: 2168202 - RNA, 19 nt, Artificial Sequence
  Description of Artificial Sequence: Synthetic oligonucleotide
  Sense strand starting at position 3235 of SEQ ID NO: 1883082
uuuaguuuaaugggauaag

SEQ ID NO: 2168203 - RNA, 19 nt, Artificial Sequence
  Description of Artificial Sequence: Synthetic oligonucleotide
  Antisense strand to SEQ ID NO: 2168202
cuuaucccauuaaacuaaa

SEQ ID NO: 2168204 - RNA, 19 nt, Artificial Sequence
  Description of Artificial Sequence: Synthetic oligonucleotide
  Sense strand starting at position 3364 of SEQ ID NO: 1883082
caaggacaacuguguuaug

SEQ ID NO: 2168205 - RNA, 19 nt, Artificial Sequence
  Description of Artificial Sequence: Synthetic oligonucleotide
  Antisense strand to SEQ ID NO: 2168204
cauaacacaguuguccuug

SEQ ID NO: 2168206 - RNA, 19 nt, Artificial Sequence
  Description of Artificial Sequence: Synthetic oligonucleotide
  Sense strand starting at position 3457 of SEQ ID NO: 1883082
auguauaucuccuuguaga

SEQ ID NO: 2168207 - RNA, 19 nt, Artificial Sequence
  Description of Artificial Sequence: Synthetic oligonucleotide
  Antisense strand to SEQ ID NO: 2168206
ucuacaaggagauauacau

SEQ ID NO: 2168208 - RNA, 19 nt, Artificial Sequence
  Description of Artificial Sequence: Synthetic oligonucleotide
  Sense strand starting at position 3479 of SEQ ID NO: 1883082
uaaaguaugguugguugaa

SEQ ID NO: 2168209 - RNA, 19 nt, Artificial Sequence
  Description of Artificial Sequence: Synthetic oligonucleotide
  Antisense strand to SEQ ID NO: 2168208
uucaaccaaccauacuuua

SEQ ID NO: 2168210 - RNA, 19 nt, Artificial Sequence
  Description of Artificial Sequence: Synthetic oligonucleotide
  Sense strand starting at position 3480 of SEQ ID NO: 1883082
aaaguaugguugguugaau

SEQ ID NO: 2168211 - RNA, 19 nt, Artificial Sequence
  Description of Artificial Sequence: Synthetic oligonucleotide
  Antisense strand to SEQ ID NO: 2168210
auucaaccaaccauacuuu

SEQ ID NO: 2168212 - RNA, 19 nt, Artificial Sequence
  Description of Artificial Sequence: Synthetic oligonucleotide
  Sense strand starting at position 3481 of SEQ ID NO: 1883082
aaguaugguugguugaauc

SEQ ID NO: 2168213 - RNA, 19 nt, Artificial Sequence
  Description of Artificial Sequence: Synthetic oligonucleotide
  Antisense strand to SEQ ID NO: 2168212
gauucaaccaaccauacuu

SEQ ID NO: 2168214 - RNA, 19 nt, Artificial Sequence
  Description of Artificial Sequence: Synthetic oligonucleotide
  Sense strand starting at position 3574 of SEQ ID NO: 1883082
gaagcuguccuccagguua

SEQ ID NO: 2168215 - RNA, 19 nt, Artificial Sequence
  Description of Artificial Sequence: Synthetic oligonucleotide
  Antisense strand to SEQ ID NO: 2168214
uaaccuggaggacagcuuc

SEQ ID NO: 2168216 - RNA, 19 nt, Artificial Sequence
  Description of Artificial Sequence: Synthetic oligonucleotide
  Sense strand starting at position 3585 of SEQ ID NO: 1883082
ccagguuaucuccagauua

SEQ ID NO: 2168217 - RNA, 19 nt, Artificial Sequence
  Description of Artificial Sequence: Synthetic oligonucleotide
  Antisense strand to SEQ ID NO: 2168216
uaaucuggagauaaccugg

SEQ ID NO: 2168218 - RNA, 19 nt, Artificial Sequence
  Description of Artificial Sequence: Synthetic oligonucleotide
  Sense strand starting at position 3587 of SEQ ID NO: 1883082
agguuaucuccagauuauu

SEQ ID NO: 2168219 - RNA, 19 nt, Artificial Sequence
  Description of Artificial Sequence: Synthetic oligonucleotide
  Antisense strand to SEQ ID NO: 2168218
aauaaucuggagauaaccu

SEQ ID NO: 2168220 - RNA, 19 nt, Artificial Sequence
  Description of Artificial Sequence: Synthetic oligonucleotide
  Sense strand starting at position 3611 of SEQ ID NO: 1883082
cucugugaaguguaagcua

SEQ ID NO: 2168221 - RNA, 19 nt, Artificial Sequence
  Description of Artificial Sequence: Synthetic oligonucleotide
  Antisense strand to SEQ ID NO: 2168220
uagcuuacacuucacagag

SEQ ID NO: 2168222 - RNA, 19 nt, Artificial Sequence
  Description of Artificial Sequence: Synthetic oligonucleotide
  Sense strand starting at position 3643 of SEQ ID NO: 1883082
uuuguuaucagucagguag

SEQ ID NO: 2168223 - RNA, 19 nt, Artificial Sequence
  Description of Artificial Sequence: Synthetic oligonucleotide
  Antisense strand to SEQ ID NO: 2168222
cuaccugacugauaacaaa

SEQ ID NO: 2168224 - RNA, 19 nt, Artificial Sequence
  Description of Artificial Sequence: Synthetic oligonucleotide
  Sense strand starting at position 3663 of SEQ ID NO: 1883082
aggcauauacuauguuuaa

SEQ ID NO: 2168225 - RNA, 19 nt, Artificial Sequence
  Description of Artificial Sequence: Synthetic oligonucleotide
  Antisense strand to SEQ ID NO: 2168224
uuaaacauaguauaugccu

SEQ ID NO: 2168226 - RNA, 19 nt, Artificial Sequence
  Description of Artificial Sequence: Synthetic oligonucleotide
  Sense strand starting at position 3664 of SEQ ID NO: 1883082
ggcauauacuauguuuaaa

SEQ ID NO: 2168227 - RNA, 19 nt, Artificial Sequence
  Description of Artificial Sequence: Synthetic oligonucleotide
  Antisense strand to SEQ ID NO: 2168226
uuuaaacauaguauaugcc

SEQ ID NO: 2168228 - RNA, 19 nt, Artificial Sequence
  Description of Artificial Sequence: Synthetic oligonucleotide
  Sense strand starting at position 3705 of SEQ ID NO: 1883082
gccauuguggcgaguguga

SEQ ID NO: 2168229 - RNA, 19 nt, Artificial Sequence
  Description of Artificial Sequence: Synthetic oligonucleotide
  Antisense strand to SEQ ID NO: 2168228
ucacacucgccacaauggc

SEQ ID NO: 2168230 - RNA, 19 nt, Artificial Sequence
  Description of Artificial Sequence: Synthetic oligonucleotide
  Sense strand starting at position 3895 of SEQ ID NO: 1883082
acagcauucuaggcacuau

SEQ ID NO: 2168231 - RNA, 19 nt, Artificial Sequence
  Description of Artificial Sequence: Synthetic oligonucleotide
  Antisense strand to SEQ ID NO: 2168230
auagugccuagaaugcugu

SEQ ID NO: 2168232 - RNA, 19 nt, Artificial Sequence
  Description of Artificial Sequence: Synthetic oligonucleotide
  Sense strand starting at position 3970 of SEQ ID NO: 1883082
auagucagcuuucuggaua

SEQ ID NO: 2168233 - RNA, 19 nt, Artificial Sequence
  Description of Artificial Sequence: Synthetic oligonucleotide
  Antisense strand to SEQ ID NO: 2168232
uauccagaaagcugacuau

SEQ ID NO: 2168234 - RNA, 19 nt, Artificial Sequence
  Description of Artificial Sequence: Synthetic oligonucleotide
  Sense strand starting at position 11 of SEQ ID NO: 1883083
cucaaaucagauugguaag

SEQ ID NO: 2168235 - RNA, 19 nt, Artificial Sequence
  Description of Artificial Sequence: Synthetic oligonucleotide
  Antisense strand to SEQ ID NO: 2168234
cuuaccaaucugauuugag

SEQ ID NO: 2168236 - RNA, 19 nt, Artificial Sequence
  Description of Artificial Sequence: Synthetic oligonucleotide
  Sense strand starting at position 13 of SEQ ID NO: 1883083
caaaucagauugguaaguu

SEQ ID NO: 2168237 - RNA, 19 nt, Artificial Sequence
  Description of Artificial Sequence: Synthetic oligonucleotide
  Antisense strand to SEQ ID NO: 2168236
aacuuaccaaucugauuug

SEQ ID NO: 2168238 - RNA, 19 nt, Artificial Sequence
  Description of Artificial Sequence: Synthetic oligonucleotide
  Sense strand starting at position 17 of SEQ ID NO: 1883083
ucagauugguaaguuacuu

SEQ ID NO: 2168239 - RNA, 19 nt, Artificial Sequence
  Description of Artificial Sequence: Synthetic oligonucleotide
  Antisense strand to SEQ ID NO: 2168238
aaguaacuuaccaaucuga

SEQ ID NO: 2168240 - RNA, 19 nt, Artificial Sequence
  Description of Artificial Sequence: Synthetic oligonucleotide
  Sense strand starting at position 22 of SEQ ID NO: 1883083
uugguaaguuacuugcaua

SEQ ID NO: 2168241 - RNA, 19 nt, Artificial Sequence
  Description of Artificial Sequence: Synthetic oligonucleotide
  Antisense strand to SEQ ID NO: 2168240
uaugcaaguaacuuaccaa

SEQ ID NO: 2168242 - RNA, 19 nt, Artificial Sequence
  Description of Artificial Sequence: Synthetic oligonucleotide
  Sense strand starting at position 125 of SEQ ID NO: 1883083
gaagaagaauguuuguugu

SEQ ID NO: 2168243 - RNA, 19 nt, Artificial Sequence
  Description of Artificial Sequence: Synthetic oligonucleotide
  Antisense strand to SEQ ID NO: 2168242
acaacaaacauucuucuuc

SEQ ID NO: 2168244 - RNA, 19 nt, Artificial Sequence
  Description of Artificial Sequence: Synthetic oligonucleotide
  Sense strand starting at position 128 of SEQ ID NO: 1883083
gaagaauguuuguuguuua

SEQ ID NO: 2168245 - RNA, 19 nt, Artificial Sequence
  Description of Artificial Sequence: Synthetic oligonucleotide
  Antisense strand to SEQ ID NO: 2168244
uaaacaacaaacauucuuc

SEQ ID NO: 2168246 - RNA, 19 nt, Artificial Sequence
  Description of Artificial Sequence: Synthetic oligonucleotide
  Sense strand starting at position 131 of SEQ ID NO: 1883083
gaauguuuguuguuuaucu

SEQ ID NO: 2168247 - RNA, 19 nt, Artificial Sequence
  Description of Artificial Sequence: Synthetic oligonucleotide
  Antisense strand to SEQ ID NO: 2168246
agauaaacaacaaacauuc

SEQ ID NO: 2168248 - RNA, 19 nt, Artificial Sequence
  Description of Artificial Sequence: Synthetic oligonucleotide
  Sense strand starting at position 138 of SEQ ID NO: 1883083
uguuguuuaucuuuaggga

SEQ ID NO: 2168249 - RNA, 19 nt, Artificial Sequence
  Description of Artificial Sequence: Synthetic oligonucleotide
  Antisense strand to SEQ ID NO: 2168248
ucccuaaagauaaacaaca

SEQ ID NO: 2168250 - RNA, 19 nt, Artificial Sequence
  Description of Artificial Sequence: Synthetic oligonucleotide
  Sense strand starting at position 139 of SEQ ID NO: 1883083
guuguuuaucuuuagggaa

SEQ ID NO: 2168251 - RNA, 19 nt, Artificial Sequence
  Description of Artificial Sequence: Synthetic oligonucleotide
  Antisense strand to SEQ ID NO: 2168250
uucccuaaagauaaacaac

SEQ ID NO: 2168252 - RNA, 19 nt, Artificial Sequence
  Description of Artificial Sequence: Synthetic oligonucleotide
  Sense strand starting at position 232 of SEQ ID NO: 1883083
uuacaauaaguuugcguua

SEQ ID NO: 2168253 - RNA, 19 nt, Artificial Sequence
  Description of Artificial Sequence: Synthetic oligonucleotide
  Antisense strand to SEQ ID NO: 2168252
uaacgcaaacuuauuguaa

SEQ ID NO: 2168254 - RNA, 19 nt, Artificial Sequence
  Description of Artificial Sequence: Synthetic oligonucleotide
  Sense strand starting at position 233 of SEQ ID NO: 1883083
uacaauaaguuugcguuaa

SEQ ID NO: 2168255 - RNA, 19 nt, Artificial Sequence
  Description of Artificial Sequence: Synthetic oligonucleotide
  Antisense strand to SEQ ID NO: 2168254
uuaacgcaaacuuauugua

SEQ ID NO: 2168256 - RNA, 19 nt, Artificial Sequence
  Description of Artificial Sequence: Synthetic oligonucleotide
  Sense strand starting at position 235 of SEQ ID NO: 1883083
caauaaguuugcguuaauu

SEQ ID NO: 2168257 - RNA, 19 nt, Artificial Sequence
  Description of Artificial Sequence: Synthetic oligonucleotide
  Antisense strand to SEQ ID NO: 2168256
aauuaacgcaaacuuauug

SEQ ID NO: 2168258 - RNA, 19 nt, Artificial Sequence
  Description of Artificial Sequence: Synthetic oligonucleotide
  Sense strand starting at position 353 of SEQ ID NO: 1883083
gcugaaaguauuggaacca

SEQ ID NO: 2168259 - RNA, 19 nt, Artificial Sequence
  Description of Artificial Sequence: Synthetic oligonucleotide
  Antisense strand to SEQ ID NO: 2168258
ugguuccaauacuuucagc

SEQ ID NO: 2168260 - RNA, 19 nt, Artificial Sequence
  Description of Artificial Sequence: Synthetic oligonucleotide
  Sense strand starting at position 354 of SEQ ID NO: 1883083
cugaaaguauuggaaccaa

SEQ ID NO: 2168261 - RNA, 19 nt, Artificial Sequence
  Description of Artificial Sequence: Synthetic oligonucleotide
  Antisense strand to SEQ ID NO: 2168260
uugguuccaauacuuucag

SEQ ID NO: 2168262 - RNA, 19 nt, Artificial Sequence
  Description of Artificial Sequence: Synthetic oligonucleotide
  Sense strand starting at position 376 of SEQ ID NO: 1883083
uauaauuugugcucgauac

SEQ ID NO: 2168263 - RNA, 19 nt, Artificial Sequence
  Description of Artificial Sequence: Synthetic oligonucleotide
  Antisense strand to SEQ ID NO: 2168262
guaucgagcacaaauuaua

SEQ ID NO: 2168264 - RNA, 19 nt, Artificial Sequence
  Description of Artificial Sequence: Synthetic oligonucleotide
  Sense strand starting at position 377 of SEQ ID NO: 1883083
auaauuugugcucgauaca

SEQ ID NO: 2168265 - RNA, 19 nt, Artificial Sequence
  Description of Artificial Sequence: Synthetic oligonucleotide
  Antisense strand to SEQ ID NO: 2168264
uguaucgagcacaaauuau

SEQ ID NO: 2168266 - RNA, 19 nt, Artificial Sequence
  Description of Artificial Sequence: Synthetic oligonucleotide
  Sense strand starting at position 388 of SEQ ID NO: 1883083
ucgauacaccugugcugaa

SEQ ID NO: 2168267 - RNA, 19 nt, Artificial Sequence
  Description of Artificial Sequence: Synthetic oligonucleotide
  Antisense strand to SEQ ID NO: 2168266
uucagcacagguguaucga

SEQ ID NO: 2168268 - RNA, 19 nt, Artificial Sequence
  Description of Artificial Sequence: Synthetic oligonucleotide
  Sense strand starting at position 389 of SEQ ID NO: 1883083
cgauacaccugugcugaau

SEQ ID NO: 2168269 - RNA, 19 nt, Artificial Sequence
  Description of Artificial Sequence: Synthetic oligonucleotide
  Antisense strand to SEQ ID NO: 2168268
auucagcacagguguaucg

SEQ ID NO: 2168270 - RNA, 19 nt, Artificial Sequence
  Description of Artificial Sequence: Synthetic oligonucleotide
  Sense strand starting at position 421 of SEQ ID NO: 1883083
ggugaugagguuuaaugca

SEQ ID NO: 2168271 - RNA, 19 nt, Artificial Sequence
  Description of Artificial Sequence: Synthetic oligonucleotide
  Antisense strand to SEQ ID NO: 2168270
ugcauuaaaccucaucacc

SEQ ID NO: 2168272 - RNA, 19 nt, Artificial Sequence
  Description of Artificial Sequence: Synthetic oligonucleotide
  Sense strand starting at position 430 of SEQ ID NO: 1883083
guuuaaugcagaggacuag

SEQ ID NO: 2168273 - RNA, 19 nt, Artificial Sequence
  Description of Artificial Sequence: Synthetic oligonucleotide
  Antisense strand to SEQ ID NO: 2168272
cuaguccucugcauuaaac

SEQ ID NO: 2168274 - RNA, 19 nt, Artificial Sequence
  Description of Artificial Sequence: Synthetic oligonucleotide
  Sense strand starting at position 482 of SEQ ID NO: 1883083
guaagagcagcugagaaau

SEQ ID NO: 2168275 - RNA, 19 nt, Artificial Sequence
  Description of Artificial Sequence: Synthetic oligonucleotide
  Antisense strand to SEQ ID NO: 2168274
auuucucagcugcucuuac

SEQ ID NO: 2168276 - RNA, 19 nt, Artificial Sequence
  Description of Artificial Sequence: Synthetic oligonucleotide
  Sense strand starting at position 652 of SEQ ID NO: 1883083
cgcgguuacagccaaugaa

SEQ ID NO: 2168277 - RNA, 19 nt, Artificial Sequence
  Description of Artificial Sequence: Synthetic oligonucleotide
  Antisense strand to SEQ ID NO: 2168276
uucauuggcuguaaccgcg

SEQ ID NO: 2168278 - RNA, 19 nt, Artificial Sequence
  Description of Artificial Sequence: Synthetic oligonucleotide
  Sense strand starting at position 845 of SEQ ID NO: 1883083
gccucuuucuacuccggau

SEQ ID NO: 2168279 - RNA, 19 nt, Artificial Sequence
  Description of Artificial Sequence: Synthetic oligonucleotide
  Antisense strand to SEQ ID NO: 2168278
auccggaguagaaagaggc

SEQ ID NO: 2168280 - RNA, 19 nt, Artificial Sequence
  Description of Artificial Sequence: Synthetic oligonucleotide
  Sense strand starting at position 866 of SEQ ID NO: 1883083
cagacuguguuucuuugaa

SEQ ID NO: 2168281 - RNA, 19 nt, Artificial Sequence
  Description of Artificial Sequence: Synthetic oligonucleotide
  Antisense strand to SEQ ID NO: 2168280
uucaaagaaacacagucug

SEQ ID NO: 2168282 - RNA, 19 nt, Artificial Sequence
  Description of Artificial Sequence: Synthetic oligonucleotide
  Sense strand starting at position 868 of SEQ ID NO: 1883083
gacuguguuucuuugaaac

SEQ ID NO: 2168283 - RNA, 19 nt, Artificial Sequence
  Description of Artificial Sequence: Synthetic oligonucleotide
  Antisense strand to SEQ ID NO: 2168282
guuucaaagaaacacaguc

SEQ ID NO: 2168284 - RNA, 19 nt, Artificial Sequence
  Description of Artificial Sequence: Synthetic oligonucleotide
  Sense strand starting at position 1077 of SEQ ID NO: 1883083
ccaagaacagguugccaua

SEQ ID NO: 2168285 - RNA, 19 nt, Artificial Sequence
  Description of Artificial Sequence: Synthetic oligonucleotide
  Antisense strand to SEQ ID NO: 2168284
uauggcaaccuguucuugg

SEQ ID NO: 2168286 - RNA, 19 nt, Artificial Sequence
  Description of Artificial Sequence: Synthetic oligonucleotide
  Sense strand starting at position 1079 of SEQ ID NO: 1883083
aagaacagguugccauaua

SEQ ID NO: 2168287 - RNA, 19 nt, Artificial Sequence
  Description of Artificial Sequence: Synthetic oligonucleotide
  Antisense strand to SEQ ID NO: 2168286
uauauggcaaccuguucuu

SEQ ID NO: 2168288 - RNA, 19 nt, Artificial Sequence
  Description of Artificial Sequence: Synthetic oligonucleotide
  Sense strand starting at position 1144 of SEQ ID NO: 1883083
aacgcauaugccugugaag

SEQ ID NO: 2168289 - RNA, 19 nt, Artificial Sequence
  Description of Artificial Sequence: Synthetic oligonucleotide
  Antisense strand to SEQ ID NO: 2168288
cuucacaggcauaugcguu

SEQ ID NO: 2168290 - RNA, 19 nt, Artificial Sequence
  Description of Artificial Sequence: Synthetic oligonucleotide
  Sense strand starting at position 1178 of SEQ ID NO: 1883083
gccagauaacucgaugaca

SEQ ID NO: 2168291 - RNA, 19 nt, Artificial Sequence
  Description of Artificial Sequence: Synthetic oligonucleotide
  Antisense strand to SEQ ID NO: 2168290
ugucaucgaguuaucuggc

SEQ ID NO: 2168292 - RNA, 19 nt, Artificial Sequence
  Description of Artificial Sequence: Synthetic oligonucleotide
  Sense strand starting at position 1217 of SEQ ID NO: 1883083
uuguuaaauguugacucga

SEQ ID NO: 2168293 - RNA, 19 nt, Artificial Sequence
  Description of Artificial Sequence: Synthetic oligonucleotide
  Antisense strand to SEQ ID NO: 2168292
ucgagucaacauuuaacaa

SEQ ID NO: 2168294 - RNA, 19 nt, Artificial Sequence
  Description of Artificial Sequence: Synthetic oligonucleotide
  Sense strand starting at position 1219 of SEQ ID NO: 1883083
guuaaauguugacucgaug

SEQ ID NO: 2168295 - RNA, 19 nt, Artificial Sequence
  Description of Artificial Sequence: Synthetic oligonucleotide
  Antisense strand to SEQ ID NO: 2168294
caucgagucaacauuuaac

SEQ ID NO: 2168296 - RNA, 19 nt, Artificial Sequence
  Description of Artificial Sequence: Synthetic oligonucleotide
  Sense strand starting at position 1258 of SEQ ID NO: 1883083
cucugaaagcucgcguaac

SEQ ID NO: 2168297 - RNA, 19 nt, Artificial Sequence
  Description of Artificial Sequence: Synthetic oligonucleotide
  Antisense strand to SEQ ID NO: 2168296
guuacgcgagcuuucagag

SEQ ID NO: 2168298 - RNA, 19 nt, Artificial Sequence
  Description of Artificial Sequence: Synthetic oligonucleotide
  Sense strand starting at position 1337 of SEQ ID NO: 1883083
aucacuucgucacuuaagu

SEQ ID NO: 2168299 - RNA, 19 nt, Artificial Sequence
  Description of Artificial Sequence: Synthetic oligonucleotide
  Antisense strand to SEQ ID NO: 2168298
acuuaagugacgaagugau

SEQ ID NO: 2168300 - RNA, 19 nt, Artificial Sequence
  Description of Artificial Sequence: Synthetic oligonucleotide
  Sense strand starting at position 2281 of SEQ ID NO: 1883083
ccaguucuguuacucauua

SEQ ID NO: 2168301 - RNA, 19 nt, Artificial Sequence
  Description of Artificial Sequence: Synthetic oligonucleotide
  Antisense strand to SEQ ID NO: 2168300
uaaugaguaacagaacugg

SEQ ID NO: 2168302 - RNA, 19 nt, Artificial Sequence
  Description of Artificial Sequence: Synthetic oligonucleotide
  Sense strand starting at position 2869 of SEQ ID NO: 1883083
cucuguuacuugcuuccua

SEQ ID NO: 2168303 - RNA, 19 nt, Artificial Sequence
  Description of Artificial Sequence: Synthetic oligonucleotide
  Antisense strand to SEQ ID NO: 2168302
uaggaagcaaguaacagag

SEQ ID NO: 2168304 - RNA, 19 nt, Artificial Sequence
  Description of Artificial Sequence: Synthetic oligonucleotide
  Sense strand starting at position 2892 of SEQ ID NO: 1883083
gaacuccaguuccugagaa

SEQ ID NO: 2168305 - RNA, 19 nt, Artificial Sequence
  Description of Artificial Sequence: Synthetic oligonucleotide
  Antisense strand to SEQ ID NO: 2168304
uucucaggaacuggaguuc

SEQ ID NO: 2168306 - RNA, 19 nt, Artificial Sequence
  Description of Artificial Sequence: Synthetic oligonucleotide
  Sense strand starting at position 3658 of SEQ ID NO: 1883083
gggcacacacuauguaaau

SEQ ID NO: 2168307 - RNA, 19 nt, Artificial Sequence
  Description of Artificial Sequence: Synthetic oligonucleotide
  Antisense strand to SEQ ID NO: 2168306
auuuacauagugugugccc

SEQ ID NO: 2168308 - RNA, 19 nt, Artificial Sequence
  Description of Artificial Sequence: Synthetic oligonucleotide
  Sense strand starting at position 3820 of SEQ ID NO: 1883083
ugguuaggaaguugcuauu

SEQ ID NO: 2168309 - RNA, 19 nt, Artificial Sequence
  Description of Artificial Sequence: Synthetic oligonucleotide
  Antisense strand to SEQ ID NO: 2168308
aauagcaacuuccuaacca

SEQ ID NO: 2168310 - RNA, 19 nt, Artificial Sequence
  Description of Artificial Sequence: Synthetic oligonucleotide
  Sense strand starting at position 3913 of SEQ ID NO: 1883083
gagaauguucuuggaucuu

SEQ ID NO: 2168311 - RNA, 19 nt, Artificial Sequence
  Description of Artificial Sequence: Synthetic oligonucleotide
  Antisense strand to SEQ ID NO: 2168310
aagauccaagaacauucuc

SEQ ID NO: 2168312 - RNA, 19 nt, Artificial Sequence
  Description of Artificial Sequence: Synthetic oligonucleotide
  Sense strand starting at position 3981 of SEQ ID NO: 1883083
gaagcaagcuuauugagaa

SEQ ID NO: 2168313 - RNA, 19 nt, Artificial Sequence
  Description of Artificial Sequence: Synthetic oligonucleotide
  Antisense strand to SEQ ID NO: 2168312
uucucaauaagcuugcuuc

SEQ ID NO: 2168314 - RNA, 19 nt, Artificial Sequence
  Description of Artificial Sequence: Synthetic oligonucleotide
  Sense strand starting at position 1177 of SEQ ID NO: 1883084
uguauauaagcauaugcaa

SEQ ID NO: 2168315 - RNA, 19 nt, Artificial Sequence
  Description of Artificial Sequence: Synthetic oligonucleotide
  Antisense strand to SEQ ID NO: 2168314
uugcauaugcuuauauaca

SEQ ID NO: 2168316 - RNA, 19 nt, Artificial Sequence
  Description of Artificial Sequence: Synthetic oligonucleotide
  Sense strand starting at position 1236 of SEQ ID NO: 1883084
agggauuauuaagugucaa

SEQ ID NO: 2168317 - RNA, 19 nt, Artificial Sequence
  Description of Artificial Sequence: Synthetic oligonucleotide
  Antisense strand to SEQ ID NO: 2168316
uugacacuuaauaaucccu

SEQ ID NO: 2168318 - RNA, 19 nt, Artificial Sequence
  Description of Artificial Sequence: Synthetic oligonucleotide
  Sense strand starting at position 1237 of SEQ ID NO: 1883084
gggauuauuaagugucaau

SEQ ID NO: 2168319 - RNA, 19 nt, Artificial Sequence
  Description of Artificial Sequence: Synthetic oligonucleotide
  Antisense strand to SEQ ID NO: 2168318
auugacacuuaauaauccc

SEQ ID NO: 2168320 - RNA, 19 nt, Artificial Sequence
  Description of Artificial Sequence: Synthetic oligonucleotide
  Sense strand starting at position 1291 of SEQ ID NO: 1883084
cccugugaggauuauagua

SEQ ID NO: 2168321 - RNA, 19 nt, Artificial Sequence
  Description of Artificial Sequence: Synthetic oligonucleotide
  Antisense strand to SEQ ID NO: 2168320
uacuauaauccucacaggg

SEQ ID NO: 2168322 - RNA, 19 nt, Artificial Sequence
  Description of Artificial Sequence: Synthetic oligonucleotide
  Sense strand starting at position 1312 of SEQ ID NO: 1883084
guucucauuuaaggaauga

SEQ ID NO: 2168323 - RNA, 19 nt, Artificial Sequence
  Description of Artificial Sequence: Synthetic oligonucleotide
  Antisense strand to SEQ ID NO: 2168322
ucauuccuuaaaugagaac

SEQ ID NO: 2168324 - RNA, 19 nt, Artificial Sequence
  Description of Artificial Sequence: Synthetic oligonucleotide
  Sense strand starting at position 1667 of SEQ ID NO: 1883084
cagacauacugugcuguga

SEQ ID NO: 2168325 - RNA, 19 nt, Artificial Sequence
  Description of Artificial Sequence: Synthetic oligonucleotide
  Antisense strand to SEQ ID NO: 2168324
ucacagcacaguaugucug

SEQ ID NO: 2168326 - RNA, 19 nt, Artificial Sequence
  Description of Artificial Sequence: Synthetic oligonucleotide
  Sense strand starting at position 2014 of SEQ ID NO: 1883084
ggaaucacuugagacaaga

SEQ ID NO: 2168327 - RNA, 19 nt, Artificial Sequence
  Description of Artificial Sequence: Synthetic oligonucleotide
  Antisense strand to SEQ ID NO: 2168326
ucuugucucaagugauucc

SEQ ID NO: 2168328 - RNA, 19 nt, Artificial Sequence
  Description of Artificial Sequence: Synthetic oligonucleotide
  Sense strand starting at position 2142 of SEQ ID NO: 1883084
uugauaucauaggcccaaa

SEQ ID NO: 2168329 - RNA, 19 nt, Artificial Sequence
  Description of Artificial Sequence: Synthetic oligonucleotide
  Antisense strand to SEQ ID NO: 2168328
uuugggccuaugauaucaa

SEQ ID NO: 2168330 - RNA, 19 nt, Artificial Sequence
  Description of Artificial Sequence: Synthetic oligonucleotide
  Sense strand starting at position 2186 of SEQ ID NO: 1883084
uuaaauaugguuugcagga

SEQ ID NO: 2168331 - RNA, 19 nt, Artificial Sequence
  Description of Artificial Sequence: Synthetic oligonucleotide
  Antisense strand to SEQ ID NO: 2168330
uccugcaaaccauauuuaa

SEQ ID NO: 2168332 - RNA, 19 nt, Artificial Sequence
  Description of Artificial Sequence: Synthetic oligonucleotide
  Sense strand starting at position 2191 of SEQ ID NO: 1883084
uaugguuugcaggagaauu

SEQ ID NO: 2168333 - RNA, 19 nt, Artificial Sequence
  Description of Artificial Sequence: Synthetic oligonucleotide
  Antisense strand to SEQ ID NO: 2168332
aauucuccugcaaaccaua

SEQ ID NO: 2168334 - RNA, 19 nt, Artificial Sequence
  Description of Artificial Sequence: Synthetic oligonucleotide
  Sense strand starting at position 2262 of SEQ ID NO: 1883084
cagauuccuuggccuguau

SEQ ID NO: 2168335 - RNA, 19 nt, Artificial Sequence
  Description of Artificial Sequence: Synthetic oligonucleotide
  Antisense strand to SEQ ID NO: 2168334
auacaggccaaggaaucug

SEQ ID NO: 2168336 - RNA, 19 nt, Artificial Sequence
  Description of Artificial Sequence: Synthetic oligonucleotide
  Sense strand starting at position 2264 of SEQ ID NO: 1883084
gauuccuuggccuguauua

SEQ ID NO: 2168337 - RNA, 19 nt, Artificial Sequence
  Description of Artificial Sequence: Synthetic oligonucleotide
  Antisense strand to SEQ ID NO: 2168336
uaauacaggccaaggaauc

SEQ ID NO: 2168338 - RNA, 19 nt, Artificial Sequence
  Description of Artificial Sequence: Synthetic oligonucleotide
  Sense strand starting at position 2271 of SEQ ID NO: 1883084
uggccuguauuauccaaau

SEQ ID NO: 2168339 - RNA, 19 nt, Artificial Sequence
  Description of Artificial Sequence: Synthetic oligonucleotide
  Antisense strand to SEQ ID NO: 2168338
auuuggauaauacaggcca

SEQ ID NO: 2168340 - RNA, 19 nt, Artificial Sequence
  Description of Artificial Sequence: Synthetic oligonucleotide
  Sense strand starting at position 2324 of SEQ ID NO: 1883084
acacuugauuuacauaguu

SEQ ID NO: 2168341 - RNA, 19 nt, Artificial Sequence
  Description of Artificial Sequence: Synthetic oligonucleotide
  Antisense strand to SEQ ID NO: 2168340
aacuauguaaaucaagugu

SEQ ID NO: 2168342 - RNA, 19 nt, Artificial Sequence
  Description of Artificial Sequence: Synthetic oligonucleotide
  Sense strand starting at position 2339 of SEQ ID NO: 1883084
aguugccauuuauaugaua

SEQ ID NO: 2168343 - RNA, 19 nt, Artificial Sequence
  Description of Artificial Sequence: Synthetic oligonucleotide
  Antisense strand to SEQ ID NO: 2168342
uaucauauaaauggcaacu

SEQ ID NO: 2168344 - RNA, 19 nt, Artificial Sequence
  Description of Artificial Sequence: Synthetic oligonucleotide
  Sense strand starting at position 2342 of SEQ ID NO: 1883084
ugccauuuauaugauagaa

SEQ ID NO: 2168345 - RNA, 19 nt, Artificial Sequence
  Description of Artificial Sequence: Synthetic oligonucleotide
  Antisense strand to SEQ ID NO: 2168344
uucuaucauauaaauggca

SEQ ID NO: 2168346 - RNA, 19 nt, Artificial Sequence
  Description of Artificial Sequence: Synthetic oligonucleotide
  Sense strand starting at position 2424 of SEQ ID NO: 1883084
agcgguaagggcugaauua

SEQ ID NO: 2168347 - RNA, 19 nt, Artificial Sequence
  Description of Artificial Sequence: Synthetic oligonucleotide
  Antisense strand to SEQ ID NO: 2168346
uaauucagcccuuaccgcu

SEQ ID NO: 2168348 - RNA, 19 nt, Artificial Sequence
  Description of Artificial Sequence: Synthetic oligonucleotide
  Sense strand starting at position 2425 of SEQ ID NO: 1883084
gcgguaagggcugaauuau

SEQ ID NO: 2168349 - RNA, 19 nt, Artificial Sequence
  Description of Artificial Sequence: Synthetic oligonucleotide
  Antisense strand to SEQ ID NO: 2168348
auaauucagcccuuaccgc

SEQ ID NO: 2168350 - RNA, 19 nt, Artificial Sequence
  Description of Artificial Sequence: Synthetic oligonucleotide
  Sense strand starting at position 2433 of SEQ ID NO: 1883084
ggcugaauuauaugacuga

SEQ ID NO: 2168351 - RNA, 19 nt, Artificial Sequence
  Description of Artificial Sequence: Synthetic oligonucleotide
  Antisense strand to SEQ ID NO: 2168350
ucagucauauaauucagcc

SEQ ID NO: 2168352 - RNA, 19 nt, Artificial Sequence
  Description of Artificial Sequence: Synthetic oligonucleotide
  Sense strand starting at position 2551 of SEQ ID NO: 1883084
uuugacauccuguguuaag

SEQ ID NO: 2168353 - RNA, 19 nt, Artificial Sequence
  Description of Artificial Sequence: Synthetic oligonucleotide
  Antisense strand to SEQ ID NO: 2168352
cuuaacacaggaugucaaa

SEQ ID NO: 2168354 - RNA, 19 nt, Artificial Sequence
  Description of Artificial Sequence: Synthetic oligonucleotide
  Sense strand starting at position 2552 of SEQ ID NO: 1883084
uugacauccuguguuaaga

SEQ ID NO: 2168355 - RNA, 19 nt, Artificial Sequence
  Description of Artificial Sequence: Synthetic oligonucleotide
  Antisense strand to SEQ ID NO: 2168354
ucuuaacacaggaugucaa

SEQ ID NO: 2168356 - RNA, 19 nt, Artificial Sequence
  Description of Artificial Sequence: Synthetic oligonucleotide
  Sense strand starting at position 2560 of SEQ ID NO: 1883084
cuguguuaagaucaauccu

SEQ ID NO: 2168357 - RNA, 19 nt, Artificial Sequence
  Description of Artificial Sequence: Synthetic oligonucleotide
  Antisense strand to SEQ ID NO: 2168356
aggauugaucuuaacacag

SEQ ID NO: 2168358 - RNA, 19 nt, Artificial Sequence
  Description of Artificial Sequence: Synthetic oligonucleotide
  Sense strand starting at position 2777 of SEQ ID NO: 1883084
uguugaucacagcagugaa

SEQ ID NO: 2168359 - RNA, 19 nt, Artificial Sequence
  Description of Artificial Sequence: Synthetic oligonucleotide
  Antisense strand to SEQ ID NO: 2168358
uucacugcugugaucaaca

SEQ ID NO: 2168360 - RNA, 19 nt, Artificial Sequence
  Description of Artificial Sequence: Synthetic oligonucleotide
  Sense strand starting at position 3061 of SEQ ID NO: 1883084
uuaauaagcucccugauga

SEQ ID NO: 2168361 - RNA, 19 nt, Artificial Sequence
  Description of Artificial Sequence: Synthetic oligonucleotide
  Antisense strand to SEQ ID NO: 2168360
ucaucagggagcuuauuaa

SEQ ID NO: 2168362 - RNA, 19 nt, Artificial Sequence
  Description of Artificial Sequence: Synthetic oligonucleotide
  Sense strand starting at position 3071 of SEQ ID NO: 1883084
cccugaugagucuggcaua

SEQ ID NO: 2168363 - RNA, 19 nt, Artificial Sequence
  Description of Artificial Sequence: Synthetic oligonucleotide
  Antisense strand to SEQ ID NO: 2168362
uaugccagacucaucaggg

SEQ ID NO: 2168364 - RNA, 19 nt, Artificial Sequence
  Description of Artificial Sequence: Synthetic oligonucleotide
  Sense strand starting at position 3126 of SEQ ID NO: 1883084
gggagucuugaucaguucu

SEQ ID NO: 2168365 - RNA, 19 nt, Artificial Sequence
  Description of Artificial Sequence: Synthetic oligonucleotide
  Antisense strand to SEQ ID NO: 2168364
agaacugaucaagacuccc

SEQ ID NO: 2168366 - RNA, 19 nt, Artificial Sequence
  Description of Artificial Sequence: Synthetic oligonucleotide
  Sense strand starting at position 3128 of SEQ ID NO: 1883084
gagucuugaucaguucuag

SEQ ID NO: 2168367 - RNA, 19 nt, Artificial Sequence
  Description of Artificial Sequence: Synthetic oligonucleotide
  Antisense strand to SEQ ID NO: 2168366
cuagaacugaucaagacuc

SEQ ID NO: 2168368 - RNA, 19 nt, Artificial Sequence
  Description of Artificial Sequence: Synthetic oligonucleotide
  Sense strand starting at position 3134 of SEQ ID NO: 1883084
ugaucaguucuagaguagu

SEQ ID NO: 2168369 - RNA, 19 nt, Artificial Sequence
  Description of Artificial Sequence: Synthetic oligonucleotide
  Antisense strand to SEQ ID NO: 2168368
acuacucuagaacugauca

SEQ ID NO: 2168370 - RNA, 19 nt, Artificial Sequence
  Description of Artificial Sequence: Synthetic oligonucleotide
  Sense strand starting at position 3282 of SEQ ID NO: 1883084
gugauaaacuguccuaguu

SEQ ID NO: 2168371 - RNA, 19 nt, Artificial Sequence
  Description of Artificial Sequence: Synthetic oligonucleotide
  Antisense strand to SEQ ID NO: 2168370
aacuaggacaguuuaucac

SEQ ID NO: 2168372 - RNA, 19 nt, Artificial Sequence
  Description of Artificial Sequence: Synthetic oligonucleotide
  Sense strand starting at position 3330 of SEQ ID NO: 1883084
ugugacuuugagcacuaaa

SEQ ID NO: 2168373 - RNA, 19 nt, Artificial Sequence
  Description of Artificial Sequence: Synthetic oligonucleotide
  Antisense strand to SEQ ID NO: 2168372
uuuagugcucaaagucaca

SEQ ID NO: 2168374 - RNA, 19 nt, Artificial Sequence
  Description of Artificial Sequence: Synthetic oligonucleotide
  Sense strand starting at position 3333 of SEQ ID NO: 1883084
gacuuugagcacuaaaggu

SEQ ID NO: 2168375 - RNA, 19 nt, Artificial Sequence
  Description of Artificial Sequence: Synthetic oligonucleotide
  Antisense strand to SEQ ID NO: 2168374
accuuuagugcucaaaguc

SEQ ID NO: 2168376 - RNA, 19 nt, Artificial Sequence
  Description of Artificial Sequence: Synthetic oligonucleotide
  Sense strand starting at position 3400 of SEQ ID NO: 1883084
ugcugagaacuugaugagu

SEQ ID NO: 2168377 - RNA, 19 nt, Artificial Sequence
  Description of Artificial Sequence: Synthetic oligonucleotide
  Antisense strand to SEQ ID NO: 2168376
acucaucaaguucucagca

SEQ ID NO: 2168378 - RNA, 19 nt, Artificial Sequence
  Description of Artificial Sequence: Synthetic oligonucleotide
  Sense strand starting at position 3585 of SEQ ID NO: 1883084
gaaugagauuaggaacuca

SEQ ID NO: 2168379 - RNA, 19 nt, Artificial Sequence
  Description of Artificial Sequence: Synthetic oligonucleotide
  Antisense strand to SEQ ID NO: 2168378
ugaguuccuaaucucauuc

SEQ ID NO: 2168380 - RNA, 19 nt, Artificial Sequence
  Description of Artificial Sequence: Synthetic oligonucleotide
  Sense strand starting at position 3669 of SEQ ID NO: 1883084
cacacaugcucuguuguga

SEQ ID NO: 2168381 - RNA, 19 nt, Artificial Sequence
  Description of Artificial Sequence: Synthetic oligonucleotide
  Antisense strand to SEQ ID NO: 2168380
ucacaacagagcaugugug

SEQ ID NO: 2168382 - RNA, 19 nt, Artificial Sequence
  Description of Artificial Sequence: Synthetic oligonucleotide
  Sense strand starting at position 3727 of SEQ ID NO: 1883084
uggaauagauuggauuaga

SEQ ID NO: 2168383 - RNA, 19 nt, Artificial Sequence
  Description of Artificial Sequence: Synthetic oligonucleotide
  Antisense strand to SEQ ID NO: 2168382
ucuaauccaaucuauucca

SEQ ID NO: 2168384 - RNA, 19 nt, Artificial Sequence
  Description of Artificial Sequence: Synthetic oligonucleotide
  Sense strand starting at position 3779 of SEQ ID NO: 1883084
aaaccaguauugguuagaa

SEQ ID NO: 2168385 - RNA, 19 nt, Artificial Sequence
  Description of Artificial Sequence: Synthetic oligonucleotide
  Antisense strand to SEQ ID NO: 2168384
uucuaaccaauacugguuu

SEQ ID NO: 2168386 - RNA, 19 nt, Artificial Sequence
  Description of Artificial Sequence: Synthetic oligonucleotide
  Sense strand starting at position 3831 of SEQ ID NO: 1883084
ggagacaauuacuaggaca

SEQ ID NO: 2168387 - RNA, 19 nt, Artificial Sequence
  Description of Artificial Sequence: Synthetic oligonucleotide
  Antisense strand to SEQ ID NO: 2168386
uguccuaguaauugucucc

SEQ ID NO: 2168388 - RNA, 19 nt, Artificial Sequence
  Description of Artificial Sequence: Synthetic oligonucleotide
  Sense strand starting at position 3844 of SEQ ID NO: 1883084
aggacaauucaguguggca

SEQ ID NO: 2168389 - RNA, 19 nt, Artificial Sequence
  Description of Artificial Sequence: Synthetic oligonucleotide
  Antisense strand to SEQ ID NO: 2168388
ugccacacugaauuguccu

SEQ ID NO: 2168390 - RNA, 19 nt, Artificial Sequence
  Description of Artificial Sequence: Synthetic oligonucleotide
  Sense strand starting at position 3891 of SEQ ID NO: 1883084
aggcuuccucaagaccaau

SEQ ID NO: 2168391 - RNA, 19 nt, Artificial Sequence
  Description of Artificial Sequence: Synthetic oligonucleotide
  Antisense strand to SEQ ID NO: 2168390
auuggucuugaggaagccu

SEQ ID NO: 2168392 - RNA, 19 nt, Artificial Sequence
  Description of Artificial Sequence: Synthetic oligonucleotide
  Sense strand starting at position 3971 of SEQ ID NO: 1883084
ugagaaagcuaagauaaau

SEQ ID NO: 2168393 - RNA, 19 nt, Artificial Sequence
  Description of Artificial Sequence: Synthetic oligonucleotide
  Antisense strand to SEQ ID NO: 2168392
auuuaucuuagcuuucuca

SEQ ID NO: 2168394 - RNA, 19 nt, Artificial Sequence
  Description of Artificial Sequence: Synthetic oligonucleotide
  Sense strand starting at position 461 of SEQ ID NO: 1883085
cucggaauuccugaccuca

SEQ ID NO: 2168395 - RNA, 19 nt, Artificial Sequence
  Description of Artificial Sequence: Synthetic oligonucleotide
  Antisense strand to SEQ ID NO: 2168394
ugaggucaggaauuccgag

SEQ ID NO: 2168396 - RNA, 19 nt, Artificial Sequence
  Description of Artificial Sequence: Synthetic oligonucleotide
  Sense strand starting at position 567 of SEQ ID NO: 1883085
gcuagucucucagugagag

SEQ ID NO: 2168397 - RNA, 19 nt, Artificial Sequence
  Description of Artificial Sequence: Synthetic oligonucleotide
  Antisense strand to SEQ ID NO: 2168396
cucucacugagagacuagc

SEQ ID NO: 2168398 - RNA, 19 nt, Artificial Sequence
  Description of Artificial Sequence: Synthetic oligonucleotide
  Sense strand starting at position 568 of SEQ ID NO: 1883085
cuagucucucagugagaga

SEQ ID NO: 2168399 - RNA, 19 nt, Artificial Sequence
  Description of Artificial Sequence: Synthetic oligonucleotide
  Antisense strand to SEQ ID NO: 2168398
ucucucacugagagacuag

SEQ ID NO: 2168400 - RNA, 19 nt, Artificial Sequence
  Description of Artificial Sequence: Synthetic oligonucleotide
  Sense strand starting at position 1317 of SEQ ID NO: 1883085
ggcuacaacucaguaguua

SEQ ID NO: 2168401 - RNA, 19 nt, Artificial Sequence
  Description of Artificial Sequence: Synthetic oligonucleotide
  Antisense strand to SEQ ID NO: 2168400
uaacuacugaguuguagcc

SEQ ID NO: 2168402 - RNA, 19 nt, Artificial Sequence
  Description of Artificial Sequence: Synthetic oligonucleotide
  Sense strand starting at position 1318 of SEQ ID NO: 1883085
gcuacaacucaguaguuau

SEQ ID NO: 2168403 - RNA, 19 nt, Artificial Sequence
  Description of Artificial Sequence: Synthetic oligonucleotide
  Antisense strand to SEQ ID NO: 2168402
auaacuacugaguuguagc

SEQ ID NO: 2168404 - RNA, 19 nt, Artificial Sequence
  Description of Artificial Sequence: Synthetic oligonucleotide
  Sense strand starting at position 1321 of SEQ ID NO: 1883085
acaacucaguaguuauaca

SEQ ID NO: 2168405 - RNA, 19 nt, Artificial Sequence
  Description of Artificial Sequence: Synthetic oligonucleotide
  Antisense strand to SEQ ID NO: 2168404
uguauaacuacugaguugu

SEQ ID NO: 2168406 - RNA, 19 nt, Artificial Sequence
  Description of Artificial Sequence: Synthetic oligonucleotide
  Sense strand starting at position 1375 of SEQ ID NO: 1883085
aacugcugucuuggagauu

SEQ ID NO: 2168407 - RNA, 19 nt, Artificial Sequence
  Description of Artificial Sequence: Synthetic oligonucleotide
  Antisense strand to SEQ ID NO: 2168406
aaucuccaagacagcaguu

SEQ ID NO: 2168408 - RNA, 19 nt, Artificial Sequence
  Description of Artificial Sequence: Synthetic oligonucleotide
  Sense strand starting at position 1376 of SEQ ID NO: 1883085
acugcugucuuggagauuu

SEQ ID NO: 2168409 - RNA, 19 nt, Artificial Sequence
  Description of Artificial Sequence: Synthetic oligonucleotide
  Antisense strand to SEQ ID NO: 2168408
aaaucuccaagacagcagu

SEQ ID NO: 2168410 - RNA, 19 nt, Artificial Sequence
  Description of Artificial Sequence: Synthetic oligonucleotide
  Sense strand starting at position 1388 of SEQ ID NO: 1883085
gagauuuauuggcaacaag

SEQ ID NO: 2168411 - RNA, 19 nt, Artificial Sequence
  Description of Artificial Sequence: Synthetic oligonucleotide
  Antisense strand to SEQ ID NO: 2168410
cuuguugccaauaaaucuc

SEQ ID NO: 2168412 - RNA, 19 nt, Artificial Sequence
  Description of Artificial Sequence: Synthetic oligonucleotide
  Sense strand starting at position 1496 of SEQ ID NO: 1883085
ccacauguuuaggacaaau

SEQ ID NO: 2168413 - RNA, 19 nt, Artificial Sequence
  Description of Artificial Sequence: Synthetic oligonucleotide
  Antisense strand to SEQ ID NO: 2168412
auuuguccuaaacaugugg

SEQ ID NO: 2168414 - RNA, 19 nt, Artificial Sequence
  Description of Artificial Sequence: Synthetic oligonucleotide
  Sense strand starting at position 1506 of SEQ ID NO: 1883085
aggacaaauugucacauuc

SEQ ID NO: 2168415 - RNA, 19 nt, Artificial Sequence
  Description of Artificial Sequence: Synthetic oligonucleotide
  Antisense strand to SEQ ID NO: 2168414
gaaugugacaauuuguccu

SEQ ID NO: 2168416 - RNA, 19 nt, Artificial Sequence
  Description of Artificial Sequence: Synthetic oligonucleotide
  Sense strand starting at position 1819 of SEQ ID NO: 1883085
auggcauguagaggaauaa

SEQ ID NO: 2168417 - RNA, 19 nt, Artificial Sequence
  Description of Artificial Sequence: Synthetic oligonucleotide
  Antisense strand to SEQ ID NO: 2168416
uuauuccucuacaugccau

SEQ ID NO: 2168418 - RNA, 19 nt, Artificial Sequence
  Description of Artificial Sequence: Synthetic oligonucleotide
  Sense strand starting at position 2009 of SEQ ID NO: 1883085
cggcgaccgcuuaguaaua

SEQ ID NO: 2168419 - RNA, 19 nt, Artificial Sequence
  Description of Artificial Sequence: Synthetic oligonucleotide
  Antisense strand to SEQ ID NO: 2168418
uauuacuaagcggucgccg

SEQ ID NO: 2168420 - RNA, 19 nt, Artificial Sequence
  Description of Artificial Sequence: Synthetic oligonucleotide
  Sense strand starting at position 2020 of SEQ ID NO: 1883085
uaguaauacgcauguucca

SEQ ID NO: 2168421 - RNA, 19 nt, Artificial Sequence
  Description of Artificial Sequence: Synthetic oligonucleotide
  Antisense strand to SEQ ID NO: 2168420
uggaacaugcguauuacua

SEQ ID NO: 2168422 - RNA, 19 nt, Artificial Sequence
  Description of Artificial Sequence: Synthetic oligonucleotide
  Sense strand starting at position 2177 of SEQ ID NO: 1883085
ggcuguuaccuuggagguu

SEQ ID NO: 2168423 - RNA, 19 nt, Artificial Sequence
  Description of Artificial Sequence: Synthetic oligonucleotide
  Antisense strand to SEQ ID NO: 2168422
aaccuccaagguaacagcc

SEQ ID NO: 2168424 - RNA, 19 nt, Artificial Sequence
  Description of Artificial Sequence: Synthetic oligonucleotide
  Sense strand starting at position 2253 of SEQ ID NO: 1883085
gacuuauucccagggcgac

SEQ ID NO: 2168425 - RNA, 19 nt, Artificial Sequence
  Description of Artificial Sequence: Synthetic oligonucleotide
  Antisense strand to SEQ ID NO: 2168424
gucgcccugggaauaaguc

SEQ ID NO: 2168426 - RNA, 19 nt, Artificial Sequence
  Description of Artificial Sequence: Synthetic oligonucleotide
  Sense strand starting at position 2254 of SEQ ID NO: 1883085
acuuauucccagggcgacu

SEQ ID NO: 2168427 - RNA, 19 nt, Artificial Sequence
  Description of Artificial Sequence: Synthetic oligonucleotide
  Antisense strand to SEQ ID NO: 2168426
agucgcccugggaauaagu

SEQ ID NO: 2168428 - RNA, 19 nt, Artificial Sequence
  Description of Artificial Sequence: Synthetic oligonucleotide
  Sense strand starting at position 2721 of SEQ ID NO: 1883085
gcaggaguaucgguccaug

SEQ ID NO: 2168429 - RNA, 19 nt, Artificial Sequence
  Description of Artificial Sequence: Synthetic oligonucleotide
  Antisense strand to SEQ ID NO: 2168428
cauggaccgauacuccugc

SEQ ID NO: 2168430 - RNA, 19 nt, Artificial Sequence
  Description of Artificial Sequence: Synthetic oligonucleotide
  Sense strand starting at position 2724 of SEQ ID NO: 1883085
ggaguaucgguccaugaaa

SEQ ID NO: 2168431 - RNA, 19 nt, Artificial Sequence
  Description of Artificial Sequence: Synthetic oligonucleotide
  Antisense strand to SEQ ID NO: 2168430
uuucauggaccgauacucc

SEQ ID NO: 2168432 - RNA, 19 nt, Artificial Sequence
  Description of Artificial Sequence: Synthetic oligonucleotide
  Sense strand starting at position 2818 of SEQ ID NO: 1883085
uauauuuaaucggagagag

SEQ ID NO: 2168433 - RNA, 19 nt, Artificial Sequence
  Description of Artificial Sequence: Synthetic oligonucleotide
  Antisense strand to SEQ ID NO: 2168432
cucucuccgauuaaauaua

SEQ ID NO: 2168434 - RNA, 19 nt, Artificial Sequence
  Description of Artificial Sequence: Synthetic oligonucleotide
  Sense strand starting at position 2896 of SEQ ID NO: 1883085
acccuuggccauugauagu

SEQ ID NO: 2168435 - RNA, 19 nt, Artificial Sequence
  Description of Artificial Sequence: Synthetic oligonucleotide
  Antisense strand to SEQ ID NO: 2168434
acuaucaauggccaagggu

SEQ ID NO: 2168436 - RNA, 19 nt, Artificial Sequence
  Description of Artificial Sequence: Synthetic oligonucleotide
  Sense strand starting at position 2995 of SEQ ID NO: 1883085
gcuccacugugguccagaa

SEQ ID NO: 2168437 - RNA, 19 nt, Artificial Sequence
  Description of Artificial Sequence: Synthetic oligonucleotide
  Antisense strand to SEQ ID NO: 2168436
uucuggaccacaguggagc

SEQ ID NO: 2168438 - RNA, 19 nt, Artificial Sequence
  Description of Artificial Sequence: Synthetic oligonucleotide
  Sense strand starting at position 3017 of SEQ ID NO: 1883085
gaggccuuucgaugucuga

SEQ ID NO: 2168439 - RNA, 19 nt, Artificial Sequence
  Description of Artificial Sequence: Synthetic oligonucleotide
  Antisense strand to SEQ ID NO: 2168438
ucagacaucgaaaggccuc

SEQ ID NO: 2168440 - RNA, 19 nt, Artificial Sequence
  Description of Artificial Sequence: Synthetic oligonucleotide
  Sense strand starting at position 3020 of SEQ ID NO: 1883085
gccuuucgaugucugagaa

SEQ ID NO: 2168441 - RNA, 19 nt, Artificial Sequence
  Description of Artificial Sequence: Synthetic oligonucleotide
  Antisense strand to SEQ ID NO: 2168440
uucucagacaucgaaaggc

SEQ ID NO: 2168442 - RNA, 19 nt, Artificial Sequence
  Description of Artificial Sequence: Synthetic oligonucleotide
  Sense strand starting at position 3021 of SEQ ID NO: 1883085
ccuuucgaugucugagaaa

SEQ ID NO: 2168443 - RNA, 19 nt, Artificial Sequence
  Description of Artificial Sequence: Synthetic oligonucleotide
  Antisense strand to SEQ ID NO: 2168442
uuucucagacaucgaaagg

SEQ ID NO: 2168444 - RNA, 19 nt, Artificial Sequence
  Description of Artificial Sequence: Synthetic oligonucleotide
  Sense strand starting at position 3118 of SEQ ID NO: 1883085
cugucuucuugcuuccaga

SEQ ID NO: 2168445 - RNA, 19 nt, Artificial Sequence
  Description of Artificial Sequence: Synthetic oligonucleotide
  Antisense strand to SEQ ID NO: 2168444
ucuggaagcaagaagacag

SEQ ID NO: 2168446 - RNA, 19 nt, Artificial Sequence
  Description of Artificial Sequence: Synthetic oligonucleotide
  Sense strand starting at position 3223 of SEQ ID NO: 1883085
gggccucuguaaccuugaa

SEQ ID NO: 2168447 - RNA, 19 nt, Artificial Sequence
  Description of Artificial Sequence: Synthetic oligonucleotide
  Antisense strand to SEQ ID NO: 2168446
uucaagguuacagaggccc

SEQ ID NO: 2168448 - RNA, 19 nt, Artificial Sequence
  Description of Artificial Sequence: Synthetic oligonucleotide
  Sense strand starting at position 3227 of SEQ ID NO: 1883085
cucuguaaccuugaaaugu

SEQ ID NO: 2168449 - RNA, 19 nt, Artificial Sequence
  Description of Artificial Sequence: Synthetic oligonucleotide
  Antisense strand to SEQ ID NO: 2168448
acauuucaagguuacagag

SEQ ID NO: 2168450 - RNA, 19 nt, Artificial Sequence
  Description of Artificial Sequence: Synthetic oligonucleotide
  Sense strand starting at position 3291 of SEQ ID NO: 1883085
guacgaaacuugucuuucu

SEQ ID NO: 2168451 - RNA, 19 nt, Artificial Sequence
  Description of Artificial Sequence: Synthetic oligonucleotide
  Antisense strand to SEQ ID NO: 2168450
agaaagacaaguuucguac

SEQ ID NO: 2168452 - RNA, 19 nt, Artificial Sequence
  Description of Artificial Sequence: Synthetic oligonucleotide
  Sense strand starting at position 3336 of SEQ ID NO: 1883085
ccugguccaggguaagaau

SEQ ID NO: 2168453 - RNA, 19 nt, Artificial Sequence
  Description of Artificial Sequence: Synthetic oligonucleotide
  Antisense strand to SEQ ID NO: 2168452
auucuuacccuggaccagg

SEQ ID NO: 2168454 - RNA, 19 nt, Artificial Sequence
  Description of Artificial Sequence: Synthetic oligonucleotide
  Sense strand starting at position 3403 of SEQ ID NO: 1883085
gggcacuccuccuuauguu

SEQ ID NO: 2168455 - RNA, 19 nt, Artificial Sequence
  Description of Artificial Sequence: Synthetic oligonucleotide
  Antisense strand to SEQ ID NO: 2168454
aacauaaggaggagugccc

SEQ ID NO: 2168456 - RNA, 19 nt, Artificial Sequence
  Description of Artificial Sequence: Synthetic oligonucleotide
  Sense strand starting at position 3407 of SEQ ID NO: 1883085
acuccuccuuauguugaua

SEQ ID NO: 2168457 - RNA, 19 nt, Artificial Sequence
  Description of Artificial Sequence: Synthetic oligonucleotide
  Antisense strand to SEQ ID NO: 2168456
uaucaacauaaggaggagu

SEQ ID NO: 2168458 - RNA, 19 nt, Artificial Sequence
  Description of Artificial Sequence: Synthetic oligonucleotide
  Sense strand starting at position 3419 of SEQ ID NO: 1883085
guugauagcauguaggagu

SEQ ID NO: 2168459 - RNA, 19 nt, Artificial Sequence
  Description of Artificial Sequence: Synthetic oligonucleotide
  Antisense strand to SEQ ID NO: 2168458
acuccuacaugcuaucaac

SEQ ID NO: 2168460 - RNA, 19 nt, Artificial Sequence
  Description of Artificial Sequence: Synthetic oligonucleotide
  Sense strand starting at position 3499 of SEQ ID NO: 1883085
uggagaaguuacucuguag

SEQ ID NO: 2168461 - RNA, 19 nt, Artificial Sequence
  Description of Artificial Sequence: Synthetic oligonucleotide
  Antisense strand to SEQ ID NO: 2168460
cuacagaguaacuucucca

SEQ ID NO: 2168462 - RNA, 19 nt, Artificial Sequence
  Description of Artificial Sequence: Synthetic oligonucleotide
  Sense strand starting at position 3502 of SEQ ID NO: 1883085
agaaguuacucuguaggca

SEQ ID NO: 2168463 - RNA, 19 nt, Artificial Sequence
  Description of Artificial Sequence: Synthetic oligonucleotide
  Antisense strand to SEQ ID NO: 2168462
ugccuacagaguaacuucu

SEQ ID NO: 2168464 - RNA, 19 nt, Artificial Sequence
  Description of Artificial Sequence: Synthetic oligonucleotide
  Sense strand starting at position 3503 of SEQ ID NO: 1883085
gaaguuacucuguaggcau

SEQ ID NO: 2168465 - RNA, 19 nt, Artificial Sequence
  Description of Artificial Sequence: Synthetic oligonucleotide
  Antisense strand to SEQ ID NO: 2168464
augccuacagaguaacuuc

SEQ ID NO: 2168466 - RNA, 19 nt, Artificial Sequence
  Description of Artificial Sequence: Synthetic oligonucleotide
  Sense strand starting at position 3559 of SEQ ID NO: 1883085
ugucaugcuuuauuaucca

SEQ ID NO: 2168467 - RNA, 19 nt, Artificial Sequence
  Description of Artificial Sequence: Synthetic oligonucleotide
  Antisense strand to SEQ ID NO: 2168466
uggauaauaaagcaugaca

SEQ ID NO: 2168468 - RNA, 19 nt, Artificial Sequence
  Description of Artificial Sequence: Synthetic oligonucleotide
  Sense strand starting at position 3563 of SEQ ID NO: 1883085
augcuuuauuauccauagu

SEQ ID NO: 2168469 - RNA, 19 nt, Artificial Sequence
  Description of Artificial Sequence: Synthetic oligonucleotide
  Antisense strand to SEQ ID NO: 2168468
acuauggauaauaaagcau

SEQ ID NO: 2168470 - RNA, 19 nt, Artificial Sequence
  Description of Artificial Sequence: Synthetic oligonucleotide
  Sense strand starting at position 3618 of SEQ ID NO: 1883085
uggagucuugcgcucuguu

SEQ ID NO: 2168471 - RNA, 19 nt, Artificial Sequence
  Description of Artificial Sequence: Synthetic oligonucleotide
  Antisense strand to SEQ ID NO: 2168470
aacagagcgcaagacucca

SEQ ID NO: 2168472 - RNA, 19 nt, Artificial Sequence
  Description of Artificial Sequence: Synthetic oligonucleotide
  Sense strand starting at position 3922 of SEQ ID NO: 1883085
gggauuacagcauaaugcu

SEQ ID NO: 2168473 - RNA, 19 nt, Artificial Sequence
  Description of Artificial Sequence: Synthetic oligonucleotide
  Antisense strand to SEQ ID NO: 2168472
agcauuaugcuguaauccc

SEQ ID NO: 2168474 - RNA, 19 nt, Artificial Sequence
  Description of Artificial Sequence: Synthetic oligonucleotide
  Sense strand starting at position 208 of SEQ ID NO: 1883086
aggccacucuggguauaaa

SEQ ID NO: 2168475 - RNA, 19 nt, Artificial Sequence
  Description of Artificial Sequence: Synthetic oligonucleotide
  Antisense strand to SEQ ID NO: 2168474
uuuauacccagaguggccu

SEQ ID NO: 2168476 - RNA, 19 nt, Artificial Sequence
  Description of Artificial Sequence: Synthetic oligonucleotide
  Sense strand starting at position 293 of SEQ ID NO: 1883086
caguacuggucgucccauu

SEQ ID NO: 2168477 - RNA, 19 nt, Artificial Sequence
  Description of Artificial Sequence: Synthetic oligonucleotide
  Antisense strand to SEQ ID NO: 2168476
aaugggacgaccaguacug

SEQ ID NO: 2168478 - RNA, 19 nt, Artificial Sequence
  Description of Artificial Sequence: Synthetic oligonucleotide
  Sense strand starting at position 313 of SEQ ID NO: 1883086
cgggcuagcucgccaaaga

SEQ ID NO: 2168479 - RNA, 19 nt, Artificial Sequence
  Description of Artificial Sequence: Synthetic oligonucleotide
  Antisense strand to SEQ ID NO: 2168478
ucuuuggcgagcuagcccg

SEQ ID NO: 2168480 - RNA, 19 nt, Artificial Sequence
  Description of Artificial Sequence: Synthetic oligonucleotide
  Sense strand starting at position 351 of SEQ ID NO: 1883086
ucccuaggcuccugagaga

SEQ ID NO: 2168481 - RNA, 19 nt, Artificial Sequence
  Description of Artificial Sequence: Synthetic oligonucleotide
  Antisense strand to SEQ ID NO: 2168480
ucucucaggagccuaggga

SEQ ID NO: 2168482 - RNA, 19 nt, Artificial Sequence
  Description of Artificial Sequence: Synthetic oligonucleotide
  Sense strand starting at position 372 of SEQ ID NO: 1883086
ccuggagcguucuggaaau

SEQ ID NO: 2168483 - RNA, 19 nt, Artificial Sequence
  Description of Artificial Sequence: Synthetic oligonucleotide
  Antisense strand to SEQ ID NO: 2168482
auuuccagaacgcuccagg

SEQ ID NO: 2168484 - RNA, 19 nt, Artificial Sequence
  Description of Artificial Sequence: Synthetic oligonucleotide
  Sense strand starting at position 384 of SEQ ID NO: 1883086
uggaaauccugcuaccuuu

SEQ ID NO: 2168485 - RNA, 19 nt, Artificial Sequence
  Description of Artificial Sequence: Synthetic oligonucleotide
  Antisense strand to SEQ ID NO: 2168484
aaagguagcaggauuucca

SEQ ID NO: 2168486 - RNA, 19 nt, Artificial Sequence
  Description of Artificial Sequence: Synthetic oligonucleotide
  Sense strand starting at position 638 of SEQ ID NO: 1883086
aaaguagaauccugggugu

SEQ ID NO: 2168487 - RNA, 19 nt, Artificial Sequence
  Description of Artificial Sequence: Synthetic oligonucleotide
  Antisense strand to SEQ ID NO: 2168486
acacccaggauucuacuuu

SEQ ID NO: 2168488 - RNA, 19 nt, Artificial Sequence
  Description of Artificial Sequence: Synthetic oligonucleotide
  Sense strand starting at position 657 of SEQ ID NO: 1883086
gcgcgugauuucccaggga

SEQ ID NO: 2168489 - RNA, 19 nt, Artificial Sequence
  Description of Artificial Sequence: Synthetic oligonucleotide
  Antisense strand to SEQ ID NO: 2168488
ucccugggaaaucacgcgc

SEQ ID NO: 2168490 - RNA, 19 nt, Artificial Sequence
  Description of Artificial Sequence: Synthetic oligonucleotide
  Sense strand starting at position 2028 of SEQ ID NO: 1883086
ggaaaucucccuugacaac

SEQ ID NO: 2168491 - RNA, 19 nt, Artificial Sequence
  Description of Artificial Sequence: Synthetic oligonucleotide
  Antisense strand to SEQ ID NO: 2168490
guugucaagggagauuucc

SEQ ID NO: 2168492 - RNA, 19 nt, Artificial Sequence
  Description of Artificial Sequence: Synthetic oligonucleotide
  Sense strand starting at position 2150 of SEQ ID NO: 1883086
ggcauuuccuguugacgac

SEQ ID NO: 2168493 - RNA, 19 nt, Artificial Sequence
  Description of Artificial Sequence: Synthetic oligonucleotide
  Antisense strand to SEQ ID NO: 2168492
gucgucaacaggaaaugcc

SEQ ID NO: 2168494 - RNA, 19 nt, Artificial Sequence
  Description of Artificial Sequence: Synthetic oligonucleotide
  Sense strand starting at position 2179 of SEQ ID NO: 1883086
acaguagacgcuuguuaag

SEQ ID NO: 2168495 - RNA, 19 nt, Artificial Sequence
  Description of Artificial Sequence: Synthetic oligonucleotide
  Antisense strand to SEQ ID NO: 2168494
cuuaacaagcgucuacugu

SEQ ID NO: 2168496 - RNA, 19 nt, Artificial Sequence
  Description of Artificial Sequence: Synthetic oligonucleotide
  Sense strand starting at position 2272 of SEQ ID NO: 1883086
uuaaguaauucgcccaggu

SEQ ID NO: 2168497 - RNA, 19 nt, Artificial Sequence
  Description of Artificial Sequence: Synthetic oligonucleotide
  Antisense strand to SEQ ID NO: 2168496
accugggcgaauuacuuaa

SEQ ID NO: 2168498 - RNA, 19 nt, Artificial Sequence
  Description of Artificial Sequence: Synthetic oligonucleotide
  Sense strand starting at position 2322 of SEQ ID NO: 1883086
gagcccucucauugcugua

SEQ ID NO: 2168499 - RNA, 19 nt, Artificial Sequence
  Description of Artificial Sequence: Synthetic oligonucleotide
  Antisense strand to SEQ ID NO: 2168498
uacagcaaugagagggcuc

SEQ ID NO: 2168500 - RNA, 19 nt, Artificial Sequence
  Description of Artificial Sequence: Synthetic oligonucleotide
  Sense strand starting at position 2324 of SEQ ID NO: 1883086
gcccucucauugcuguaaa

SEQ ID NO: 2168501 - RNA, 19 nt, Artificial Sequence
  Description of Artificial Sequence: Synthetic oligonucleotide
  Antisense strand to SEQ ID NO: 2168500
uuuacagcaaugagagggc

SEQ ID NO: 2168502 - RNA, 19 nt, Artificial Sequence
  Description of Artificial Sequence: Synthetic oligonucleotide
  Sense strand starting at position 2523 of SEQ ID NO: 1883086
guggguaguucuuuaucac

SEQ ID NO: 2168503 - RNA, 19 nt, Artificial Sequence
  Description of Artificial Sequence: Synthetic oligonucleotide
  Antisense strand to SEQ ID NO: 2168502
gugauaaagaacuacccac

SEQ ID NO: 2168504 - RNA, 19 nt, Artificial Sequence
  Description of Artificial Sequence: Synthetic oligonucleotide
  Sense strand starting at position 2595 of SEQ ID NO: 1883086
ccaacuuagguaggauauu

SEQ ID NO: 2168505 - RNA, 19 nt, Artificial Sequence
  Description of Artificial Sequence: Synthetic oligonucleotide
  Antisense strand to SEQ ID NO: 2168504
aauauccuaccuaaguugg

SEQ ID NO: 2168506 - RNA, 19 nt, Artificial Sequence
  Description of Artificial Sequence: Synthetic oligonucleotide
  Sense strand starting at position 2596 of SEQ ID NO: 1883086
caacuuagguaggauauua

SEQ ID NO: 2168507 - RNA, 19 nt, Artificial Sequence
  Description of Artificial Sequence: Synthetic oligonucleotide
  Antisense strand to SEQ ID NO: 2168506
uaauauccuaccuaaguug

SEQ ID NO: 2168508 - RNA, 19 nt, Artificial Sequence
  Description of Artificial Sequence: Synthetic oligonucleotide
  Sense strand starting at position 2623 of SEQ ID NO: 1883086
auuggcuaauccugauacu

SEQ ID NO: 2168509 - RNA, 19 nt, Artificial Sequence
  Description of Artificial Sequence: Synthetic oligonucleotide
  Antisense strand to SEQ ID NO: 2168508
aguaucaggauuagccaau

SEQ ID NO: 2168510 - RNA, 19 nt, Artificial Sequence
  Description of Artificial Sequence: Synthetic oligonucleotide
  Sense strand starting at position 2626 of SEQ ID NO: 1883086
ggcuaauccugauacugcu

SEQ ID NO: 2168511 - RNA, 19 nt, Artificial Sequence
  Description of Artificial Sequence: Synthetic oligonucleotide
  Antisense strand to SEQ ID NO: 2168510
agcaguaucaggauuagcc

SEQ ID NO: 2168512 - RNA, 19 nt, Artificial Sequence
  Description of Artificial Sequence: Synthetic oligonucleotide
  Sense strand starting at position 2983 of SEQ ID NO: 1883086
uuacauaguuagggcagau

SEQ ID NO: 2168513 - RNA, 19 nt, Artificial Sequence
  Description of Artificial Sequence: Synthetic oligonucleotide
  Antisense strand to SEQ ID NO: 2168512
aucugcccuaacuauguaa

SEQ ID NO: 2168514 - RNA, 19 nt, Artificial Sequence
  Description of Artificial Sequence: Synthetic oligonucleotide
  Sense strand starting at position 3044 of SEQ ID NO: 1883086
ugggaguugguguggauaa

SEQ ID NO: 2168515 - RNA, 19 nt, Artificial Sequence
  Description of Artificial Sequence: Synthetic oligonucleotide
  Antisense strand to SEQ ID NO: 2168514
uuauccacaccaacuccca

SEQ ID NO: 2168516 - RNA, 19 nt, Artificial Sequence
  Description of Artificial Sequence: Synthetic oligonucleotide
  Sense strand starting at position 3045 of SEQ ID NO: 1883086
gggaguugguguggauaau

SEQ ID NO: 2168517 - RNA, 19 nt, Artificial Sequence
  Description of Artificial Sequence: Synthetic oligonucleotide
  Antisense strand to SEQ ID NO: 2168516
auuauccacaccaacuccc

SEQ ID NO: 2168518 - RNA, 19 nt, Artificial Sequence
  Description of Artificial Sequence: Synthetic oligonucleotide
  Sense strand starting at position 3046 of SEQ ID NO: 1883086
ggaguugguguggauaaug

SEQ ID NO: 2168519 - RNA, 19 nt, Artificial Sequence
  Description of Artificial Sequence: Synthetic oligonucleotide
  Antisense strand to SEQ ID NO: 2168518
cauuauccacaccaacucc

SEQ ID NO: 2168520 - RNA, 19 nt, Artificial Sequence
  Description of Artificial Sequence: Synthetic oligonucleotide
  Sense strand starting at position 3155 of SEQ ID NO: 1883086
uagaaauguuaaguccagu

SEQ ID NO: 2168521 - RNA, 19 nt, Artificial Sequence
  Description of Artificial Sequence: Synthetic oligonucleotide
  Antisense strand to SEQ ID NO: 2168520
acuggacuuaacauuucua

SEQ ID NO: 2168522 - RNA, 19 nt, Artificial Sequence
  Description of Artificial Sequence: Synthetic oligonucleotide
  Sense strand starting at position 3174 of SEQ ID NO: 1883086
ugguauugcucccaaacau

SEQ ID NO: 2168523 - RNA, 19 nt, Artificial Sequence
  Description of Artificial Sequence: Synthetic oligonucleotide
  Antisense strand to SEQ ID NO: 2168522
auguuugggagcaauacca

SEQ ID NO: 2168524 - RNA, 19 nt, Artificial Sequence
  Description of Artificial Sequence: Synthetic oligonucleotide
  Sense strand starting at position 3219 of SEQ ID NO: 1883086
ggugguguuucagaaaugc

SEQ ID NO: 2168525 - RNA, 19 nt, Artificial Sequence
  Description of Artificial Sequence: Synthetic oligonucleotide
  Antisense strand to SEQ ID NO: 2168524
gcauuucugaaacaccacc

SEQ ID NO: 2168526 - RNA, 19 nt, Artificial Sequence
  Description of Artificial Sequence: Synthetic oligonucleotide
  Sense strand starting at position 3262 of SEQ ID NO: 1883086
gaugcaguccuccaugaau

SEQ ID NO: 2168527 - RNA, 19 nt, Artificial Sequence
  Description of Artificial Sequence: Synthetic oligonucleotide
  Antisense strand to SEQ ID NO: 2168526
auucauggaggacugcauc

SEQ ID NO: 2168528 - RNA, 19 nt, Artificial Sequence
  Description of Artificial Sequence: Synthetic oligonucleotide
  Sense strand starting at position 3264 of SEQ ID NO: 1883086
ugcaguccuccaugaauag

SEQ ID NO: 2168529 - RNA, 19 nt, Artificial Sequence
  Description of Artificial Sequence: Synthetic oligonucleotide
  Antisense strand to SEQ ID NO: 2168528
cuauucauggaggacugca

SEQ ID NO: 2168530 - RNA, 19 nt, Artificial Sequence
  Description of Artificial Sequence: Synthetic oligonucleotide
  Sense strand starting at position 3274 of SEQ ID NO: 1883086
caugaauagggcuguagaa

SEQ ID NO: 2168531 - RNA, 19 nt, Artificial Sequence
  Description of Artificial Sequence: Synthetic oligonucleotide
  Antisense strand to SEQ ID NO: 2168530
uucuacagcccuauucaug

SEQ ID NO: 2168532 - RNA, 19 nt, Artificial Sequence
  Description of Artificial Sequence: Synthetic oligonucleotide
  Sense strand starting at position 3295 of SEQ ID NO: 1883086
ggcauuucuucuuguuguu

SEQ ID NO: 2168533 - RNA, 19 nt, Artificial Sequence
  Description of Artificial Sequence: Synthetic oligonucleotide
  Antisense strand to SEQ ID NO: 2168532
aacaacaagaagaaaugcc

SEQ ID NO: 2168534 - RNA, 19 nt, Artificial Sequence
  Description of Artificial Sequence: Synthetic oligonucleotide
  Sense strand starting at position 3612 of SEQ ID NO: 1883086
uggcauuucuaacaagcuu

SEQ ID NO: 2168535 - RNA, 19 nt, Artificial Sequence
  Description of Artificial Sequence: Synthetic oligonucleotide
  Antisense strand to SEQ ID NO: 2168534
aagcuuguuagaaaugcca

SEQ ID NO: 2168536 - RNA, 19 nt, Artificial Sequence
  Description of Artificial Sequence: Synthetic oligonucleotide
  Sense strand starting at position 366 of SEQ ID NO: 1883087
gugacaucauaccugcuaa

SEQ ID NO: 2168537 - RNA, 19 nt, Artificial Sequence
  Description of Artificial Sequence: Synthetic oligonucleotide
  Antisense strand to SEQ ID NO: 2168536
uuagcagguaugaugucac

SEQ ID NO: 2168538 - RNA, 19 nt, Artificial Sequence
  Description of Artificial Sequence: Synthetic oligonucleotide
  Sense strand starting at position 388 of SEQ ID NO: 1883087
aucagaaugcaauguauua

SEQ ID NO: 2168539 - RNA, 19 nt, Artificial Sequence
  Description of Artificial Sequence: Synthetic oligonucleotide
  Antisense strand to SEQ ID NO: 2168538
uaauacauugcauucugau

SEQ ID NO: 2168540 - RNA, 19 nt, Artificial Sequence
  Description of Artificial Sequence: Synthetic oligonucleotide
  Sense strand starting at position 406 of SEQ ID NO: 1883087
acucauguguuacuugaua

SEQ ID NO: 2168541 - RNA, 19 nt, Artificial Sequence
  Description of Artificial Sequence: Synthetic oligonucleotide
  Antisense strand to SEQ ID NO: 2168540
uaucaaguaacacaugagu

SEQ ID NO: 2168542 - RNA, 19 nt, Artificial Sequence
  Description of Artificial Sequence: Synthetic oligonucleotide
  Sense strand starting at position 631 of SEQ ID NO: 1883087
gaaggcugagauugaucau

SEQ ID NO: 2168543 - RNA, 19 nt, Artificial Sequence
  Description of Artificial Sequence: Synthetic oligonucleotide
  Antisense strand to SEQ ID NO: 2168542
augaucaaucucagccuuc

SEQ ID NO: 2168544 - RNA, 19 nt, Artificial Sequence
  Description of Artificial Sequence: Synthetic oligonucleotide
  Sense strand starting at position 634 of SEQ ID NO: 1883087
ggcugagauugaucauaau

SEQ ID NO: 2168545 - RNA, 19 nt, Artificial Sequence
  Description of Artificial Sequence: Synthetic oligonucleotide
  Antisense strand to SEQ ID NO: 2168544
auuaugaucaaucucagcc

SEQ ID NO: 2168546 - RNA, 19 nt, Artificial Sequence
  Description of Artificial Sequence: Synthetic oligonucleotide
  Sense strand starting at position 637 of SEQ ID NO: 1883087
ugagauugaucauaaugac

SEQ ID NO: 2168547 - RNA, 19 nt, Artificial Sequence
  Description of Artificial Sequence: Synthetic oligonucleotide
  Antisense strand to SEQ ID NO: 2168546
gucauuaugaucaaucuca

SEQ ID NO: 2168548 - RNA, 19 nt, Artificial Sequence
  Description of Artificial Sequence: Synthetic oligonucleotide
  Sense strand starting at position 646 of SEQ ID NO: 1883087
ucauaaugacccuguguag

SEQ ID NO: 2168549 - RNA, 19 nt, Artificial Sequence
  Description of Artificial Sequence: Synthetic oligonucleotide
  Antisense strand to SEQ ID NO: 2168548
cuacacagggucauuauga

SEQ ID NO: 2168550 - RNA, 19 nt, Artificial Sequence
  Description of Artificial Sequence: Synthetic oligonucleotide
  Sense strand starting at position 870 of SEQ ID NO: 1883087
aaguuauagugagugaaag

SEQ ID NO: 2168551 - RNA, 19 nt, Artificial Sequence
  Description of Artificial Sequence: Synthetic oligonucleotide
  Antisense strand to SEQ ID NO: 2168550
cuuucacucacuauaacuu

SEQ ID NO: 2168552 - RNA, 19 nt, Artificial Sequence
  Description of Artificial Sequence: Synthetic oligonucleotide
  Sense strand starting at position 871 of SEQ ID NO: 1883087
aguuauagugagugaaagu

SEQ ID NO: 2168553 - RNA, 19 nt, Artificial Sequence
  Description of Artificial Sequence: Synthetic oligonucleotide
  Antisense strand to SEQ ID NO: 2168552
acuuucacucacuauaacu

SEQ ID NO: 2168554 - RNA, 19 nt, Artificial Sequence
  Description of Artificial Sequence: Synthetic oligonucleotide
  Sense strand starting at position 872 of SEQ ID NO: 1883087
guuauagugagugaaaguu

SEQ ID NO: 2168555 - RNA, 19 nt, Artificial Sequence
  Description of Artificial Sequence: Synthetic oligonucleotide
  Antisense strand to SEQ ID NO: 2168554
aacuuucacucacuauaac

SEQ ID NO: 2168556 - RNA, 19 nt, Artificial Sequence
  Description of Artificial Sequence: Synthetic oligonucleotide
  Sense strand starting at position 952 of SEQ ID NO: 1883087
aaguguuuaguggguacaa

SEQ ID NO: 2168557 - RNA, 19 nt, Artificial Sequence
  Description of Artificial Sequence: Synthetic oligonucleotide
  Antisense strand to SEQ ID NO: 2168556
uuguacccacuaaacacuu

SEQ ID NO: 2168558 - RNA, 19 nt, Artificial Sequence
  Description of Artificial Sequence: Synthetic oligonucleotide
  Sense strand starting at position 953 of SEQ ID NO: 1883087
aguguuuaguggguacaau

SEQ ID NO: 2168559 - RNA, 19 nt, Artificial Sequence
  Description of Artificial Sequence: Synthetic oligonucleotide
  Antisense strand to SEQ ID NO: 2168558
auuguacccacuaaacacu

SEQ ID NO: 2168560 - RNA, 19 nt, Artificial Sequence
  Description of Artificial Sequence: Synthetic oligonucleotide
  Sense strand starting at position 954 of SEQ ID NO: 1883087
guguuuaguggguacaaua

SEQ ID NO: 2168561 - RNA, 19 nt, Artificial Sequence
  Description of Artificial Sequence: Synthetic oligonucleotide
  Antisense strand to SEQ ID NO: 2168560
uauuguacccacuaaacac

SEQ ID NO: 2168562 - RNA, 19 nt, Artificial Sequence
  Description of Artificial Sequence: Synthetic oligonucleotide
  Sense strand starting at position 1256 of SEQ ID NO: 1883087
caccaucuaggucgucaaa

SEQ ID NO: 2168563 - RNA, 19 nt, Artificial Sequence
  Description of Artificial Sequence: Synthetic oligonucleotide
  Antisense strand to SEQ ID NO: 2168562
uuugacgaccuagauggug

SEQ ID NO: 2168564 - RNA, 19 nt, Artificial Sequence
  Description of Artificial Sequence: Synthetic oligonucleotide
  Sense strand starting at position 1259 of SEQ ID NO: 1883087
caucuaggucgucaaagua

SEQ ID NO: 2168565 - RNA, 19 nt, Artificial Sequence
  Description of Artificial Sequence: Synthetic oligonucleotide
  Antisense strand to SEQ ID NO: 2168564
uacuuugacgaccuagaug

SEQ ID NO: 2168566 - RNA, 19 nt, Artificial Sequence
  Description of Artificial Sequence: Synthetic oligonucleotide
  Sense strand starting at position 1424 of SEQ ID NO: 1883087
auuauuugauugccaguuu

SEQ ID NO: 2168567 - RNA, 19 nt, Artificial Sequence
  Description of Artificial Sequence: Synthetic oligonucleotide
  Antisense strand to SEQ ID NO: 2168566
aaacuggcaaucaaauaau

SEQ ID NO: 2168568 - RNA, 19 nt, Artificial Sequence
  Description of Artificial Sequence: Synthetic oligonucleotide
  Sense strand starting at position 2003 of SEQ ID NO: 1883087
agagaagaucgcggaacuu

SEQ ID NO: 2168569 - RNA, 19 nt, Artificial Sequence
  Description of Artificial Sequence: Synthetic oligonucleotide
  Antisense strand to SEQ ID NO: 2168568
aaguuccgcgaucuucucu

SEQ ID NO: 2168570 - RNA, 19 nt, Artificial Sequence
  Description of Artificial Sequence: Synthetic oligonucleotide
  Sense strand starting at position 2049 of SEQ ID NO: 1883087
gcgcuagccggcaguauuu

SEQ ID NO: 2168571 - RNA, 19 nt, Artificial Sequence
  Description of Artificial Sequence: Synthetic oligonucleotide
  Antisense strand to SEQ ID NO: 2168570
aaauacugccggcuagcgc

SEQ ID NO: 2168572 - RNA, 19 nt, Artificial Sequence
  Description of Artificial Sequence: Synthetic oligonucleotide
  Sense strand starting at position 2060 of SEQ ID NO: 1883087
caguauuuccaaggcgcaa

SEQ ID NO: 2168573 - RNA, 19 nt, Artificial Sequence
  Description of Artificial Sequence: Synthetic oligonucleotide
  Antisense strand to SEQ ID NO: 2168572
uugcgccuuggaaauacug

SEQ ID NO: 2168574 - RNA, 19 nt, Artificial Sequence
  Description of Artificial Sequence: Synthetic oligonucleotide
  Sense strand starting at position 2847 of SEQ ID NO: 1883087
ugccauaagagguaauguu

SEQ ID NO: 2168575 - RNA, 19 nt, Artificial Sequence
  Description of Artificial Sequence: Synthetic oligonucleotide
  Antisense strand to SEQ ID NO: 2168574
aacauuaccucuuauggca

SEQ ID NO: 2168576 - RNA, 19 nt, Artificial Sequence
  Description of Artificial Sequence: Synthetic oligonucleotide
  Sense strand starting at position 2963 of SEQ ID NO: 1883087
agucacuugucuguauuaa

SEQ ID NO: 2168577 - RNA, 19 nt, Artificial Sequence
  Description of Artificial Sequence: Synthetic oligonucleotide
  Antisense strand to SEQ ID NO: 2168576
uuaauacagacaagugacu

SEQ ID NO: 2168578 - RNA, 19 nt, Artificial Sequence
  Description of Artificial Sequence: Synthetic oligonucleotide
  Sense strand starting at position 2964 of SEQ ID NO: 1883087
gucacuugucuguauuaau

SEQ ID NO: 2168579 - RNA, 19 nt, Artificial Sequence
  Description of Artificial Sequence: Synthetic oligonucleotide
  Antisense strand to SEQ ID NO: 2168578
auuaauacagacaagugac

SEQ ID NO: 2168580 - RNA, 19 nt, Artificial Sequence
  Description of Artificial Sequence: Synthetic oligonucleotide
  Sense strand starting at position 3082 of SEQ ID NO: 1883087
cucauuugauauggaggau

SEQ ID NO: 2168581 - RNA, 19 nt, Artificial Sequence
  Description of Artificial Sequence: Synthetic oligonucleotide
  Antisense strand to SEQ ID NO: 2168580
auccuccauaucaaaugag

SEQ ID NO: 2168582 - RNA, 19 nt, Artificial Sequence
  Description of Artificial Sequence: Synthetic oligonucleotide
  Sense strand starting at position 3230 of SEQ ID NO: 1883087
cauuaaaggucuuuaguga

SEQ ID NO: 2168583 - RNA, 19 nt, Artificial Sequence
  Description of Artificial Sequence: Synthetic oligonucleotide
  Antisense strand to SEQ ID NO: 2168582
ucacuaaagaccuuuaaug

SEQ ID NO: 2168584 - RNA, 19 nt, Artificial Sequence
  Description of Artificial Sequence: Synthetic oligonucleotide
  Sense strand starting at position 3237 of SEQ ID NO: 1883087
ggucuuuagugaccuaaag

SEQ ID NO: 2168585 - RNA, 19 nt, Artificial Sequence
  Description of Artificial Sequence: Synthetic oligonucleotide
  Antisense strand to SEQ ID NO: 2168584
cuuuaggucacuaaagacc

SEQ ID NO: 2168586 - RNA, 19 nt, Artificial Sequence
  Description of Artificial Sequence: Synthetic oligonucleotide
  Sense strand starting at position 3261 of SEQ ID NO: 1883087
aggaaucauuguuccaacu

SEQ ID NO: 2168587 - RNA, 19 nt, Artificial Sequence
  Description of Artificial Sequence: Synthetic oligonucleotide
  Antisense strand to SEQ ID NO: 2168586
aguuggaacaaugauuccu

SEQ ID NO: 2168588 - RNA, 19 nt, Artificial Sequence
  Description of Artificial Sequence: Synthetic oligonucleotide
  Sense strand starting at position 3381 of SEQ ID NO: 1883087
cucaguggucaccagagau

SEQ ID NO: 2168589 - RNA, 19 nt, Artificial Sequence
  Description of Artificial Sequence: Synthetic oligonucleotide
  Antisense strand to SEQ ID NO: 2168588
aucucuggugaccacugag

SEQ ID NO: 2168590 - RNA, 19 nt, Artificial Sequence
  Description of Artificial Sequence: Synthetic oligonucleotide
  Sense strand starting at position 3433 of SEQ ID NO: 1883087
uaguauggguccucacuuu

SEQ ID NO: 2168591 - RNA, 19 nt, Artificial Sequence
  Description of Artificial Sequence: Synthetic oligonucleotide
  Antisense strand to SEQ ID NO: 2168590
aaagugaggacccauacua

SEQ ID NO: 2168592 - RNA, 19 nt, Artificial Sequence
  Description of Artificial Sequence: Synthetic oligonucleotide
  Sense strand starting at position 3589 of SEQ ID NO: 1883087
ccuccaugacucugucauu

SEQ ID NO: 2168593 - RNA, 19 nt, Artificial Sequence
  Description of Artificial Sequence: Synthetic oligonucleotide
  Antisense strand to SEQ ID NO: 2168592
aaugacagagucauggagg

SEQ ID NO: 2168594 - RNA, 19 nt, Artificial Sequence
  Description of Artificial Sequence: Synthetic oligonucleotide
  Sense strand starting at position 3647 of SEQ ID NO: 1883087
accuguauguaucuuuaau

SEQ ID NO: 2168595 - RNA, 19 nt, Artificial Sequence
  Description of Artificial Sequence: Synthetic oligonucleotide
  Antisense strand to SEQ ID NO: 2168594
auuaaagauacauacaggu

SEQ ID NO: 2168596 - RNA, 19 nt, Artificial Sequence
  Description of Artificial Sequence: Synthetic oligonucleotide
  Sense strand starting at position 3649 of SEQ ID NO: 1883087
cuguauguaucuuuaaucu

SEQ ID NO: 2168597 - RNA, 19 nt, Artificial Sequence
  Description of Artificial Sequence: Synthetic oligonucleotide
  Antisense strand to SEQ ID NO: 2168596
agauuaaagauacauacag

SEQ ID NO: 2168598 - RNA, 19 nt, Artificial Sequence
  Description of Artificial Sequence: Synthetic oligonucleotide
  Sense strand starting at position 3709 of SEQ ID NO: 1883087
gcuucuuaacacuaacguu

SEQ ID NO: 2168599 - RNA, 19 nt, Artificial Sequence
  Description of Artificial Sequence: Synthetic oligonucleotide
  Antisense strand to SEQ ID NO: 2168598
aacguuaguguuaagaagc

SEQ ID NO: 2168600 - RNA, 19 nt, Artificial Sequence
  Description of Artificial Sequence: Synthetic oligonucleotide
  Sense strand starting at position 3849 of SEQ ID NO: 1883087
uuauaaaucucuguguaag

SEQ ID NO: 2168601 - RNA, 19 nt, Artificial Sequence
  Description of Artificial Sequence: Synthetic oligonucleotide
  Antisense strand to SEQ ID NO: 2168600
cuuacacagagauuuauaa

SEQ ID NO: 2168602 - RNA, 19 nt, Artificial Sequence
  Description of Artificial Sequence: Synthetic oligonucleotide
  Sense strand starting at position 3851 of SEQ ID NO: 1883087
auaaaucucuguguaagau

SEQ ID NO: 2168603 - RNA, 19 nt, Artificial Sequence
  Description of Artificial Sequence: Synthetic oligonucleotide
  Antisense strand to SEQ ID NO: 2168602
aucuuacacagagauuuau

SEQ ID NO: 2168604 - RNA, 19 nt, Artificial Sequence
  Description of Artificial Sequence: Synthetic oligonucleotide
  Sense strand starting at position 3855 of SEQ ID NO: 1883087
aucucuguguaagauuuau

SEQ ID NO: 2168605 - RNA, 19 nt, Artificial Sequence
  Description of Artificial Sequence: Synthetic oligonucleotide
  Antisense strand to SEQ ID NO: 2168604
auaaaucuuacacagagau

SEQ ID NO: 2168606 - RNA, 19 nt, Artificial Sequence
  Description of Artificial Sequence: Synthetic oligonucleotide
  Sense strand starting at position 3864 of SEQ ID NO: 1883087
uaagauuuaugaggucuag

SEQ ID NO: 2168607 - RNA, 19 nt, Artificial Sequence
  Description of Artificial Sequence: Synthetic oligonucleotide
  Antisense strand to SEQ ID NO: 2168606
cuagaccucauaaaucuua

SEQ ID NO: 2168608 - RNA, 19 nt, Artificial Sequence
  Description of Artificial Sequence: Synthetic oligonucleotide
  Sense strand starting at position 3922 of SEQ ID NO: 1883087
acagguucucauuagcagu

SEQ ID NO: 2168609 - RNA, 19 nt, Artificial Sequence
  Description of Artificial Sequence: Synthetic oligonucleotide
  Antisense strand to SEQ ID NO: 2168608
acugcuaaugagaaccugu

SEQ ID NO: 2168610 - RNA, 19 nt, Artificial Sequence
  Description of Artificial Sequence: Synthetic oligonucleotide
  Sense strand starting at position 3930 of SEQ ID NO: 1883087
ucauuagcaguuugauucu

SEQ ID NO: 2168611 - RNA, 19 nt, Artificial Sequence
  Description of Artificial Sequence: Synthetic oligonucleotide
  Antisense strand to SEQ ID NO: 2168610
agaaucaaacugcuaauga

SEQ ID NO: 2168612 - RNA, 19 nt, Artificial Sequence
  Description of Artificial Sequence: Synthetic oligonucleotide
  Sense strand starting at position 3933 of SEQ ID NO: 1883087
uuagcaguuugauucuaua

SEQ ID NO: 2168613 - RNA, 19 nt, Artificial Sequence
  Description of Artificial Sequence: Synthetic oligonucleotide
  Antisense strand to SEQ ID NO: 2168612
uauagaaucaaacugcuaa

SEQ ID NO: 2168614 - RNA, 19 nt, Artificial Sequence
  Description of Artificial Sequence: Synthetic oligonucleotide
  Sense strand starting at position 3943 of SEQ ID NO: 1883087
gauucuauaguauguugua

SEQ ID NO: 2168615 - RNA, 19 nt, Artificial Sequence
  Description of Artificial Sequence: Synthetic oligonucleotide
  Antisense strand to SEQ ID NO: 2168614
uacaacauacuauagaauc

SEQ ID NO: 2168616 - RNA, 19 nt, Artificial Sequence
  Description of Artificial Sequence: Synthetic oligonucleotide
  Sense strand starting at position 14 of SEQ ID NO: 1883088
guuacacucuccucacaga

SEQ ID NO: 2168617 - RNA, 19 nt, Artificial Sequence
  Description of Artificial Sequence: Synthetic oligonucleotide
  Antisense strand to SEQ ID NO: 2168616
ucugugaggagaguguaac

SEQ ID NO: 2168618 - RNA, 19 nt, Artificial Sequence
  Description of Artificial Sequence: Synthetic oligonucleotide
  Sense strand starting at position 39 of SEQ ID NO: 1883088
guucuuuccuuacugaaga

SEQ ID NO: 2168619 - RNA, 19 nt, Artificial Sequence
  Description of Artificial Sequence: Synthetic oligonucleotide
  Antisense strand to SEQ ID NO: 2168618
ucuucaguaaggaaagaac

SEQ ID NO: 2168620 - RNA, 19 nt, Artificial Sequence
  Description of Artificial Sequence: Synthetic oligonucleotide
  Sense strand starting at position 157 of SEQ ID NO: 1883088
agaaucaaacagugcuaua

SEQ ID NO: 2168621 - RNA, 19 nt, Artificial Sequence
  Description of Artificial Sequence: Synthetic oligonucleotide
  Antisense strand to SEQ ID NO: 2168620
uauagcacuguuugauucu

SEQ ID NO: 2168622 - RNA, 19 nt, Artificial Sequence
  Description of Artificial Sequence: Synthetic oligonucleotide
  Sense strand starting at position 168 of SEQ ID NO: 1883088
gugcuauaacuccauaaag

SEQ ID NO: 2168623 - RNA, 19 nt, Artificial Sequence
  Description of Artificial Sequence: Synthetic oligonucleotide
  Antisense strand to SEQ ID NO: 2168622
cuuuauggaguuauagcac

SEQ ID NO: 2168624 - RNA, 19 nt, Artificial Sequence
  Description of Artificial Sequence: Synthetic oligonucleotide
  Sense strand starting at position 234 of SEQ ID NO: 1883088
cccagauguucucuauuag

SEQ ID NO: 2168625 - RNA, 19 nt, Artificial Sequence
  Description of Artificial Sequence: Synthetic oligonucleotide
  Antisense strand to SEQ ID NO: 2168624
cuaauagagaacaucuggg

SEQ ID NO: 2168626 - RNA, 19 nt, Artificial Sequence
  Description of Artificial Sequence: Synthetic oligonucleotide
  Sense strand starting at position 235 of SEQ ID NO: 1883088
ccagauguucucuauuagu

SEQ ID NO: 2168627 - RNA, 19 nt, Artificial Sequence
  Description of Artificial Sequence: Synthetic oligonucleotide
  Antisense strand to SEQ ID NO: 2168626
acuaauagagaacaucugg

SEQ ID NO: 2168628 - RNA, 19 nt, Artificial Sequence
  Description of Artificial Sequence: Synthetic oligonucleotide
  Sense strand starting at position 245 of SEQ ID NO: 1883088
ucuauuagucgugaaaugu

SEQ ID NO: 2168629 - RNA, 19 nt, Artificial Sequence
  Description of Artificial Sequence: Synthetic oligonucleotide
  Antisense strand to SEQ ID NO: 2168628
acauuucacgacuaauaga

SEQ ID NO: 2168630 - RNA, 19 nt, Artificial Sequence
  Description of Artificial Sequence: Synthetic oligonucleotide
  Sense strand starting at position 253 of SEQ ID NO: 1883088
ucgugaaauguuuagaaag

SEQ ID NO: 2168631 - RNA, 19 nt, Artificial Sequence
  Description of Artificial Sequence: Synthetic oligonucleotide
  Antisense strand to SEQ ID NO: 2168630
cuuucuaaacauuucacga

SEQ ID NO: 2168632 - RNA, 19 nt, Artificial Sequence
  Description of Artificial Sequence: Synthetic oligonucleotide
  Sense strand starting at position 314 of SEQ ID NO: 1883088
gcgaucaaacaaggagaau

SEQ ID NO: 2168633 - RNA, 19 nt, Artificial Sequence
  Description of Artificial Sequence: Synthetic oligonucleotide
  Antisense strand to SEQ ID NO: 2168632
auucuccuuguuugaucgc

SEQ ID NO: 2168634 - RNA, 19 nt, Artificial Sequence
  Description of Artificial Sequence: Synthetic oligonucleotide
  Sense strand starting at position 405 of SEQ ID NO: 1883088
uuaagugacagcugagaga

SEQ ID NO: 2168635 - RNA, 19 nt, Artificial Sequence
  Description of Artificial Sequence: Synthetic oligonucleotide
  Antisense strand to SEQ ID NO: 2168634
ucucucagcugucacuuaa

SEQ ID NO: 2168636 - RNA, 19 nt, Artificial Sequence
  Description of Artificial Sequence: Synthetic oligonucleotide
  Sense strand starting at position 658 of SEQ ID NO: 1883088
cugcucuagucuguaauuu

SEQ ID NO: 2168637 - RNA, 19 nt, Artificial Sequence
  Description of Artificial Sequence: Synthetic oligonucleotide
  Antisense strand to SEQ ID NO: 2168636
aaauuacagacuagagcag

SEQ ID NO: 2168638 - RNA, 19 nt, Artificial Sequence
  Description of Artificial Sequence: Synthetic oligonucleotide
  Sense strand starting at position 830 of SEQ ID NO: 1883088
ggagaacgguuucuagaug

SEQ ID NO: 2168639 - RNA, 19 nt, Artificial Sequence
  Description of Artificial Sequence: Synthetic oligonucleotide
  Antisense strand to SEQ ID NO: 2168638
caucuagaaaccguucucc

SEQ ID NO: 2168640 - RNA, 19 nt, Artificial Sequence
  Description of Artificial Sequence: Synthetic oligonucleotide
  Sense strand starting at position 851 of SEQ ID NO: 1883088
gagggaaucugccuuugga

SEQ ID NO: 2168641 - RNA, 19 nt, Artificial Sequence
  Description of Artificial Sequence: Synthetic oligonucleotide
  Antisense strand to SEQ ID NO: 2168640
uccaaaggcagauucccuc

SEQ ID NO: 2168642 - RNA, 19 nt, Artificial Sequence
  Description of Artificial Sequence: Synthetic oligonucleotide
  Sense strand starting at position 854 of SEQ ID NO: 1883088
ggaaucugccuuuggaacu

SEQ ID NO: 2168643 - RNA, 19 nt, Artificial Sequence
  Description of Artificial Sequence: Synthetic oligonucleotide
  Antisense strand to SEQ ID NO: 2168642
aguuccaaaggcagauucc

SEQ ID NO: 2168644 - RNA, 19 nt, Artificial Sequence
  Description of Artificial Sequence: Synthetic oligonucleotide
  Sense strand starting at position 976 of SEQ ID NO: 1883088
gacgguugugaacaaggua

SEQ ID NO: 2168645 - RNA, 19 nt, Artificial Sequence
  Description of Artificial Sequence: Synthetic oligonucleotide
  Antisense strand to SEQ ID NO: 2168644
uaccuuguucacaaccguc

SEQ ID NO: 2168646 - RNA, 19 nt, Artificial Sequence
  Description of Artificial Sequence: Synthetic oligonucleotide
  Sense strand starting at position 979 of SEQ ID NO: 1883088
gguugugaacaagguaaca

SEQ ID NO: 2168647 - RNA, 19 nt, Artificial Sequence
  Description of Artificial Sequence: Synthetic oligonucleotide
  Antisense strand to SEQ ID NO: 2168646
uguuaccuuguucacaacc

SEQ ID NO: 2168648 - RNA, 19 nt, Artificial Sequence
  Description of Artificial Sequence: Synthetic oligonucleotide
  Sense strand starting at position 1030 of SEQ ID NO: 1883088
gcauuaaagccauagucuc

SEQ ID NO: 2168649 - RNA, 19 nt, Artificial Sequence
  Description of Artificial Sequence: Synthetic oligonucleotide
  Antisense strand to SEQ ID NO: 2168648
gagacuauggcuuuaaugc

SEQ ID NO: 2168650 - RNA, 19 nt, Artificial Sequence
  Description of Artificial Sequence: Synthetic oligonucleotide
  Sense strand starting at position 1147 of SEQ ID NO: 1883088
acuccugacuggcugaauu

SEQ ID NO: 2168651 - RNA, 19 nt, Artificial Sequence
  Description of Artificial Sequence: Synthetic oligonucleotide
  Antisense strand to SEQ ID NO: 2168650
aauucagccagucaggagu

SEQ ID NO: 2168652 - RNA, 19 nt, Artificial Sequence
  Description of Artificial Sequence: Synthetic oligonucleotide
  Sense strand starting at position 1171 of SEQ ID NO: 1883088
gucgauuuaccuugaggca

SEQ ID NO: 2168653 - RNA, 19 nt, Artificial Sequence
  Description of Artificial Sequence: Synthetic oligonucleotide
  Antisense strand to SEQ ID NO: 2168652
ugccucaagguaaaucgac

SEQ ID NO: 2168654 - RNA, 19 nt, Artificial Sequence
  Description of Artificial Sequence: Synthetic oligonucleotide
  Sense strand starting at position 1313 of SEQ ID NO: 1883088
cacgucucucaacaggaua

SEQ ID NO: 2168655 - RNA, 19 nt, Artificial Sequence
  Description of Artificial Sequence: Synthetic oligonucleotide
  Antisense strand to SEQ ID NO: 2168654
uauccuguugagagacgug

SEQ ID NO: 2168656 - RNA, 19 nt, Artificial Sequence
  Description of Artificial Sequence: Synthetic oligonucleotide
  Sense strand starting at position 1420 of SEQ ID NO: 1883088
aguugucaaagcugaaaug

SEQ ID NO: 2168657 - RNA, 19 nt, Artificial Sequence
  Description of Artificial Sequence: Synthetic oligonucleotide
  Antisense strand to SEQ ID NO: 2168656
cauuucagcuuugacaacu

SEQ ID NO: 2168658 - RNA, 19 nt, Artificial Sequence
  Description of Artificial Sequence: Synthetic oligonucleotide
  Sense strand starting at position 1421 of SEQ ID NO: 1883088
guugucaaagcugaaauga

SEQ ID NO: 2168659 - RNA, 19 nt, Artificial Sequence
  Description of Artificial Sequence: Synthetic oligonucleotide
  Antisense strand to SEQ ID NO: 2168658
ucauuucagcuuugacaac

SEQ ID NO: 2168660 - RNA, 19 nt, Artificial Sequence
  Description of Artificial Sequence: Synthetic oligonucleotide
  Sense strand starting at position 1849 of SEQ ID NO: 1883088
gcgagacucgcugauaaag

SEQ ID NO: 2168661 - RNA, 19 nt, Artificial Sequence
  Description of Artificial Sequence: Synthetic oligonucleotide
  Antisense strand to SEQ ID NO: 2168660
cuuuaucagcgagucucgc

SEQ ID NO: 2168662 - RNA, 19 nt, Artificial Sequence
  Description of Artificial Sequence: Synthetic oligonucleotide
  Sense strand starting at position 2078 of SEQ ID NO: 1883088
gcaugaaaugauggcaaga

SEQ ID NO: 2168663 - RNA, 19 nt, Artificial Sequence
  Description of Artificial Sequence: Synthetic oligonucleotide
  Antisense strand to SEQ ID NO: 2168662
ucuugccaucauuucaugc

SEQ ID NO: 2168664 - RNA, 19 nt, Artificial Sequence
  Description of Artificial Sequence: Synthetic oligonucleotide
  Sense strand starting at position 2309 of SEQ ID NO: 1883088
gauuacuaugcaugggaua

SEQ ID NO: 2168665 - RNA, 19 nt, Artificial Sequence
  Description of Artificial Sequence: Synthetic oligonucleotide
  Antisense strand to SEQ ID NO: 2168664
uaucccaugcauaguaauc

SEQ ID NO: 2168666 - RNA, 19 nt, Artificial Sequence
  Description of Artificial Sequence: Synthetic oligonucleotide
  Sense strand starting at position 2841 of SEQ ID NO: 1883088
ccguuuaucaccggaaagg

SEQ ID NO: 2168667 - RNA, 19 nt, Artificial Sequence
  Description of Artificial Sequence: Synthetic oligonucleotide
  Antisense strand to SEQ ID NO: 2168666
ccuuuccggugauaaacgg

SEQ ID NO: 2168668 - RNA, 19 nt, Artificial Sequence
  Description of Artificial Sequence: Synthetic oligonucleotide
  Sense strand starting at position 2842 of SEQ ID NO: 1883088
cguuuaucaccggaaagga

SEQ ID NO: 2168669 - RNA, 19 nt, Artificial Sequence
  Description of Artificial Sequence: Synthetic oligonucleotide
  Antisense strand to SEQ ID NO: 2168668
uccuuuccggugauaaacg

SEQ ID NO: 2168670 - RNA, 19 nt, Artificial Sequence
  Description of Artificial Sequence: Synthetic oligonucleotide
  Sense strand starting at position 2961 of SEQ ID NO: 1883088
gaguaugcgccugugugua

SEQ ID NO: 2168671 - RNA, 19 nt, Artificial Sequence
  Description of Artificial Sequence: Synthetic oligonucleotide
  Antisense strand to SEQ ID NO: 2168670
uacacacaggcgcauacuc

SEQ ID NO: 2168672 - RNA, 19 nt, Artificial Sequence
  Description of Artificial Sequence: Synthetic oligonucleotide
  Sense strand starting at position 3672 of SEQ ID NO: 1883088
ucacuucuaccgugaauaa

SEQ ID NO: 2168673 - RNA, 19 nt, Artificial Sequence
  Description of Artificial Sequence: Synthetic oligonucleotide
  Antisense strand to SEQ ID NO: 2168672
uuauucacgguagaaguga

SEQ ID NO: 2168674 - RNA, 19 nt, Artificial Sequence
  Description of Artificial Sequence: Synthetic oligonucleotide
  Sense strand starting at position 3676 of SEQ ID NO: 1883088
uucuaccgugaauaaagua

SEQ ID NO: 2168675 - RNA, 19 nt, Artificial Sequence
  Description of Artificial Sequence: Synthetic oligonucleotide
  Antisense strand to SEQ ID NO: 2168674
uacuuuauucacgguagaa

SEQ ID NO: 2168676 - RNA, 19 nt, Artificial Sequence
  Description of Artificial Sequence: Synthetic oligonucleotide
  Sense strand starting at position 3681 of SEQ ID NO: 1883088
ccgugaauaaaguaggagu

SEQ ID NO: 2168677 - RNA, 19 nt, Artificial Sequence
  Description of Artificial Sequence: Synthetic oligonucleotide
  Antisense strand to SEQ ID NO: 2168676
acuccuacuuuauucacgg

SEQ ID NO: 2168678 - RNA, 19 nt, Artificial Sequence
  Description of Artificial Sequence: Synthetic oligonucleotide
  Sense strand starting at position 3719 of SEQ ID NO: 1883088
aagguagacaguuguauga

SEQ ID NO: 2168679 - RNA, 19 nt, Artificial Sequence
  Description of Artificial Sequence: Synthetic oligonucleotide
  Antisense strand to SEQ ID NO: 2168678
ucauacaacugucuaccuu

SEQ ID NO: 2168680 - RNA, 19 nt, Artificial Sequence
  Description of Artificial Sequence: Synthetic oligonucleotide
  Sense strand starting at position 3723 of SEQ ID NO: 1883088
uagacaguuguaugauucu

SEQ ID NO: 2168681 - RNA, 19 nt, Artificial Sequence
  Description of Artificial Sequence: Synthetic oligonucleotide
  Antisense strand to SEQ ID NO: 2168680
agaaucauacaacugucua

SEQ ID NO: 2168682 - RNA, 19 nt, Artificial Sequence
  Description of Artificial Sequence: Synthetic oligonucleotide
  Sense strand starting at position 3729 of SEQ ID NO: 1883088
guuguaugauucucucaug

SEQ ID NO: 2168683 - RNA, 19 nt, Artificial Sequence
  Description of Artificial Sequence: Synthetic oligonucleotide
  Antisense strand to SEQ ID NO: 2168682
caugagagaaucauacaac

SEQ ID NO: 2168684 - RNA, 19 nt, Artificial Sequence
  Description of Artificial Sequence: Synthetic oligonucleotide
  Sense strand starting at position 3735 of SEQ ID NO: 1883088
ugauucucucauggagauu

SEQ ID NO: 2168685 - RNA, 19 nt, Artificial Sequence
  Description of Artificial Sequence: Synthetic oligonucleotide
  Antisense strand to SEQ ID NO: 2168684
aaucuccaugagagaauca

SEQ ID NO: 2168686 - RNA, 19 nt, Artificial Sequence
  Description of Artificial Sequence: Synthetic oligonucleotide
  Sense strand starting at position 3744 of SEQ ID NO: 1883088
cauggagauuaugauuuga

SEQ ID NO: 2168687 - RNA, 19 nt, Artificial Sequence
  Description of Artificial Sequence: Synthetic oligonucleotide
  Antisense strand to SEQ ID NO: 2168686
ucaaaucauaaucuccaug

SEQ ID NO: 2168688 - RNA, 19 nt, Artificial Sequence
  Description of Artificial Sequence: Synthetic oligonucleotide
  Sense strand starting at position 3749 of SEQ ID NO: 1883088
agauuaugauuugaaacca

SEQ ID NO: 2168689 - RNA, 19 nt, Artificial Sequence
  Description of Artificial Sequence: Synthetic oligonucleotide
  Antisense strand to SEQ ID NO: 2168688
ugguuucaaaucauaaucu

SEQ ID NO: 2168690 - RNA, 19 nt, Artificial Sequence
  Description of Artificial Sequence: Synthetic oligonucleotide
  Sense strand starting at position 3829 of SEQ ID NO: 1883088
guguuagaaguacauggaa

SEQ ID NO: 2168691 - RNA, 19 nt, Artificial Sequence
  Description of Artificial Sequence: Synthetic oligonucleotide
  Antisense strand to SEQ ID NO: 2168690
uuccauguacuucuaacac

SEQ ID NO: 2168692 - RNA, 19 nt, Artificial Sequence
  Description of Artificial Sequence: Synthetic oligonucleotide
  Sense strand starting at position 3831 of SEQ ID NO: 1883088
guuagaaguacauggaaug

SEQ ID NO: 2168693 - RNA, 19 nt, Artificial Sequence
  Description of Artificial Sequence: Synthetic oligonucleotide
  Antisense strand to SEQ ID NO: 2168692
cauuccauguacuucuaac

SEQ ID NO: 2168694 - RNA, 19 nt, Artificial Sequence
  Description of Artificial Sequence: Synthetic oligonucleotide
  Sense strand starting at position 3845 of SEQ ID NO: 1883088
gaaugugaccaucagcuua

SEQ ID NO: 2168695 - RNA, 19 nt, Artificial Sequence
  Description of Artificial Sequence: Synthetic oligonucleotide
  Antisense strand to SEQ ID NO: 2168694
uaagcugauggucacauuc

SEQ ID NO: 2168696 - RNA, 19 nt, Artificial Sequence
  Description of Artificial Sequence: Synthetic oligonucleotide
  Sense strand starting at position 69 of SEQ ID NO: 1883089
uaauaugagcuguaaagcu

SEQ ID NO: 2168697 - RNA, 19 nt, Artificial Sequence
  Description of Artificial Sequence: Synthetic oligonucleotide
  Antisense strand to SEQ ID NO: 2168696
agcuuuacagcucauauua

SEQ ID NO: 2168698 - RNA, 19 nt, Artificial Sequence
  Description of Artificial Sequence: Synthetic oligonucleotide
  Sense strand starting at position 2063 of SEQ ID NO: 1883089
agaagaaacugauaaacuu

SEQ ID NO: 2168699 - RNA, 19 nt, Artificial Sequence
  Description of Artificial Sequence: Synthetic oligonucleotide
  Antisense strand to SEQ ID NO: 2168698
aaguuuaucaguuucuucu

SEQ ID NO: 2168700 - RNA, 19 nt, Artificial Sequence
  Description of Artificial Sequence: Synthetic oligonucleotide
  Sense strand starting at position 2135 of SEQ ID NO: 1883089
gcugcauaaugagagacaa

SEQ ID NO: 2168701 - RNA, 19 nt, Artificial Sequence
  Description of Artificial Sequence: Synthetic oligonucleotide
  Antisense strand to SEQ ID NO: 2168700
uugucucucauuaugcagc

SEQ ID NO: 2168702 - RNA, 19 nt, Artificial Sequence
  Description of Artificial Sequence: Synthetic oligonucleotide
  Sense strand starting at position 2166 of SEQ ID NO: 1883089
cauaucuucucgggcucua

SEQ ID NO: 2168703 - RNA, 19 nt, Artificial Sequence
  Description of Artificial Sequence: Synthetic oligonucleotide
  Antisense strand to SEQ ID NO: 2168702
uagagcccgagaagauaug

SEQ ID NO: 2168704 - RNA, 19 nt, Artificial Sequence
  Description of Artificial Sequence: Synthetic oligonucleotide
  Sense strand starting at position 2177 of SEQ ID NO: 1883089
gggcucuaguauccggaau

SEQ ID NO: 2168705 - RNA, 19 nt, Artificial Sequence
  Description of Artificial Sequence: Synthetic oligonucleotide
  Antisense strand to SEQ ID NO: 2168704
auuccggauacuagagccc

SEQ ID NO: 2168706 - RNA, 19 nt, Artificial Sequence
  Description of Artificial Sequence: Synthetic oligonucleotide
  Sense strand starting at position 2178 of SEQ ID NO: 1883089
ggcucuaguauccggaaua

SEQ ID NO: 2168707 - RNA, 19 nt, Artificial Sequence
  Description of Artificial Sequence: Synthetic oligonucleotide
  Antisense strand to SEQ ID NO: 2168706
uauuccggauacuagagcc

SEQ ID NO: 2168708 - RNA, 19 nt, Artificial Sequence
  Description of Artificial Sequence: Synthetic oligonucleotide
  Sense strand starting at position 2179 of SEQ ID NO: 1883089
gcucuaguauccggaauac

SEQ ID NO: 2168709 - RNA, 19 nt, Artificial Sequence
  Description of Artificial Sequence: Synthetic oligonucleotide
  Antisense strand to SEQ ID NO: 2168708
guauuccggauacuagagc

SEQ ID NO: 2168710 - RNA, 19 nt, Artificial Sequence
  Description of Artificial Sequence: Synthetic oligonucleotide
  Sense strand starting at position 2215 of SEQ ID NO: 1883089
acucuuguaugucaauaau

SEQ ID NO: 2168711 - RNA, 19 nt, Artificial Sequence
  Description of Artificial Sequence: Synthetic oligonucleotide
  Antisense strand to SEQ ID NO: 2168710
auuauugacauacaagagu

SEQ ID NO: 2168712 - RNA, 19 nt, Artificial Sequence
  Description of Artificial Sequence: Synthetic oligonucleotide
  Sense strand starting at position 2417 of SEQ ID NO: 1883089
auaacaagugucggcaaau

SEQ ID NO: 2168713 - RNA, 19 nt, Artificial Sequence
  Description of Artificial Sequence: Synthetic oligonucleotide
  Antisense strand to SEQ ID NO: 2168712
auuugccgacacuuguuau

SEQ ID NO: 2168714 - RNA, 19 nt, Artificial Sequence
  Description of Artificial Sequence: Synthetic oligonucleotide
  Sense strand starting at position 2418 of SEQ ID NO: 1883089
uaacaagugucggcaaaug

SEQ ID NO: 2168715 - RNA, 19 nt, Artificial Sequence
  Description of Artificial Sequence: Synthetic oligonucleotide
  Antisense strand to SEQ ID NO: 2168714
cauuugccgacacuuguua

SEQ ID NO: 2168716 - RNA, 19 nt, Artificial Sequence
  Description of Artificial Sequence: Synthetic oligonucleotide
  Sense strand starting at position 2427 of SEQ ID NO: 1883089
ucggcaaauguggaaagua

SEQ ID NO: 2168717 - RNA, 19 nt, Artificial Sequence
  Description of Artificial Sequence: Synthetic oligonucleotide
  Antisense strand to SEQ ID NO: 2168716
uacuuuccacauuugccga

SEQ ID NO: 2168718 - RNA, 19 nt, Artificial Sequence
  Description of Artificial Sequence: Synthetic oligonucleotide
  Sense strand starting at position 2435 of SEQ ID NO: 1883089
uguggaaaguauggaauuu

SEQ ID NO: 2168719 - RNA, 19 nt, Artificial Sequence
  Description of Artificial Sequence: Synthetic oligonucleotide
  Antisense strand to SEQ ID NO: 2168718
aaauuccauacuuuccaca

SEQ ID NO: 2168720 - RNA, 19 nt, Artificial Sequence
  Description of Artificial Sequence: Synthetic oligonucleotide
  Sense strand starting at position 2538 of SEQ ID NO: 1883089
ugccacauggcucagaaau

SEQ ID NO: 2168721 - RNA, 19 nt, Artificial Sequence
  Description of Artificial Sequence: Synthetic oligonucleotide
  Antisense strand to SEQ ID NO: 2168720
auuucugagccauguggca

SEQ ID NO: 2168722 - RNA, 19 nt, Artificial Sequence
  Description of Artificial Sequence: Synthetic oligonucleotide
  Sense strand starting at position 2540 of SEQ ID NO: 1883089
ccacauggcucagaaauuu

SEQ ID NO: 2168723 - RNA, 19 nt, Artificial Sequence
  Description of Artificial Sequence: Synthetic oligonucleotide
  Antisense strand to SEQ ID NO: 2168722
aaauuucugagccaugugg

SEQ ID NO: 2168724 - RNA, 19 nt, Artificial Sequence
  Description of Artificial Sequence: Synthetic oligonucleotide
  Sense strand starting at position 2627 of SEQ ID NO: 1883089
agcagcaauguuuauaaga

SEQ ID NO: 2168725 - RNA, 19 nt, Artificial Sequence
  Description of Artificial Sequence: Synthetic oligonucleotide
  Antisense strand to SEQ ID NO: 2168724
ucuuauaaacauugcugcu

SEQ ID NO: 2168726 - RNA, 19 nt, Artificial Sequence
  Description of Artificial Sequence: Synthetic oligonucleotide
  Sense strand starting at position 2694 of SEQ ID NO: 1883089
gugucauauuuaugcaaua

SEQ ID NO: 2168727 - RNA, 19 nt, Artificial Sequence
  Description of Artificial Sequence: Synthetic oligonucleotide
  Antisense strand to SEQ ID NO: 2168726
uauugcauaaauaugacac

SEQ ID NO: 2168728 - RNA, 19 nt, Artificial Sequence
  Description of Artificial Sequence: Synthetic oligonucleotide
  Sense strand starting at position 2719 of SEQ ID NO: 1883089
ucagcagucaaagggaauu

SEQ ID NO: 2168729 - RNA, 19 nt, Artificial Sequence
  Description of Artificial Sequence: Synthetic oligonucleotide
  Antisense strand to SEQ ID NO: 2168728
aauucccuuugacugcuga

SEQ ID NO: 2168730 - RNA, 19 nt, Artificial Sequence
  Description of Artificial Sequence: Synthetic oligonucleotide
  Sense strand starting at position 2890 of SEQ ID NO: 1883089
ugucuaaggccugggugau

SEQ ID NO: 2168731 - RNA, 19 nt, Artificial Sequence
  Description of Artificial Sequence: Synthetic oligonucleotide
  Antisense strand to SEQ ID NO: 2168730
aucacccaggccuuagaca

SEQ ID NO: 2168732 - RNA, 19 nt, Artificial Sequence
  Description of Artificial Sequence: Synthetic oligonucleotide
  Sense strand starting at position 2965 of SEQ ID NO: 1883089
aaaguuaguugugauuauc

SEQ ID NO: 2168733 - RNA, 19 nt, Artificial Sequence
  Description of Artificial Sequence: Synthetic oligonucleotide
  Antisense strand to SEQ ID NO: 2168732
gauaaucacaacuaacuuu

SEQ ID NO: 2168734 - RNA, 19 nt, Artificial Sequence
  Description of Artificial Sequence: Synthetic oligonucleotide
  Sense strand starting at position 2968 of SEQ ID NO: 1883089
guuaguugugauuaucaau

SEQ ID NO: 2168735 - RNA, 19 nt, Artificial Sequence
  Description of Artificial Sequence: Synthetic oligonucleotide
  Antisense strand to SEQ ID NO: 2168734
auugauaaucacaacuaac

SEQ ID NO: 2168736 - RNA, 19 nt, Artificial Sequence
  Description of Artificial Sequence: Synthetic oligonucleotide
  Sense strand starting at position 2971 of SEQ ID NO: 1883089
aguugugauuaucaauaug

SEQ ID NO: 2168737 - RNA, 19 nt, Artificial Sequence
  Description of Artificial Sequence: Synthetic oligonucleotide
  Antisense strand to SEQ ID NO: 2168736
cauauugauaaucacaacu

SEQ ID NO: 2168738 - RNA, 19 nt, Artificial Sequence
  Description of Artificial Sequence: Synthetic oligonucleotide
  Sense strand starting at position 3539 of SEQ ID NO: 1883089
cauuauagagguuacguaa

SEQ ID NO: 2168739 - RNA, 19 nt, Artificial Sequence
  Description of Artificial Sequence: Synthetic oligonucleotide
  Antisense strand to SEQ ID NO: 2168738
uuacguaaccucuauaaug

SEQ ID NO: 2168740 - RNA, 19 nt, Artificial Sequence
  Description of Artificial Sequence: Synthetic oligonucleotide
  Sense strand starting at position 3568 of SEQ ID NO: 1883089
aacaguuuguaaggaguau

SEQ ID NO: 2168741 - RNA, 19 nt, Artificial Sequence
  Description of Artificial Sequence: Synthetic oligonucleotide
  Antisense strand to SEQ ID NO: 2168740
auacuccuuacaaacuguu

SEQ ID NO: 2168742 - RNA, 19 nt, Artificial Sequence
  Description of Artificial Sequence: Synthetic oligonucleotide
  Sense strand starting at position 3569 of SEQ ID NO: 1883089
acaguuuguaaggaguauu

SEQ ID NO: 2168743 - RNA, 19 nt, Artificial Sequence
  Description of Artificial Sequence: Synthetic oligonucleotide
  Antisense strand to SEQ ID NO: 2168742
aauacuccuuacaaacugu

SEQ ID NO: 2168744 - RNA, 19 nt, Artificial Sequence
  Description of Artificial Sequence: Synthetic oligonucleotide
  Sense strand starting at position 3627 of SEQ ID NO: 1883089
ugaagucauuuacagaaga

SEQ ID NO: 2168745 - RNA, 19 nt, Artificial Sequence
  Description of Artificial Sequence: Synthetic oligonucleotide
  Antisense strand to SEQ ID NO: 2168744
ucuucuguaaaugacuuca

SEQ ID NO: 2168746 - RNA, 19 nt, Artificial Sequence
  Description of Artificial Sequence: Synthetic oligonucleotide
  Sense strand starting at position 3638 of SEQ ID NO: 1883089
acagaagacuacuguaacu

SEQ ID NO: 2168747 - RNA, 19 nt, Artificial Sequence
  Description of Artificial Sequence: Synthetic oligonucleotide
  Antisense strand to SEQ ID NO: 2168746
aguuacaguagucuucugu

SEQ ID NO: 2168748 - RNA, 19 nt, Artificial Sequence
  Description of Artificial Sequence: Synthetic oligonucleotide
  Sense strand starting at position 3767 of SEQ ID NO: 1883089
cgucucuacagucagagua

SEQ ID NO: 2168749 - RNA, 19 nt, Artificial Sequence
  Description of Artificial Sequence: Synthetic oligonucleotide
  Antisense strand to SEQ ID NO: 2168748
uacucugacuguagagacg

SEQ ID NO: 2168750 - RNA, 19 nt, Artificial Sequence
  Description of Artificial Sequence: Synthetic oligonucleotide
  Sense strand starting at position 3777 of SEQ ID NO: 1883089
gucagaguagccuauugcu

SEQ ID NO: 2168751 - RNA, 19 nt, Artificial Sequence
  Description of Artificial Sequence: Synthetic oligonucleotide
  Antisense strand to SEQ ID NO: 2168750
agcaauaggcuacucugac

SEQ ID NO: 2168752 - RNA, 19 nt, Artificial Sequence
  Description of Artificial Sequence: Synthetic oligonucleotide
  Sense strand starting at position 3780 of SEQ ID NO: 1883089
agaguagccuauugcuaau

SEQ ID NO: 2168753 - RNA, 19 nt, Artificial Sequence
  Description of Artificial Sequence: Synthetic oligonucleotide
  Antisense strand to SEQ ID NO: 2168752
auuagcaauaggcuacucu

SEQ ID NO: 2168754 - RNA, 19 nt, Artificial Sequence
  Description of Artificial Sequence: Synthetic oligonucleotide
  Sense strand starting at position 3873 of SEQ ID NO: 1883089
uacuguaauuuaugagaag

SEQ ID NO: 2168755 - RNA, 19 nt, Artificial Sequence
  Description of Artificial Sequence: Synthetic oligonucleotide
  Antisense strand to SEQ ID NO: 2168754
cuucucauaaauuacagua

SEQ ID NO: 2168756 - RNA, 19 nt, Artificial Sequence
  Description of Artificial Sequence: Synthetic oligonucleotide
  Sense strand starting at position 3874 of SEQ ID NO: 1883089
acuguaauuuaugagaaga

SEQ ID NO: 2168757 - RNA, 19 nt, Artificial Sequence
  Description of Artificial Sequence: Synthetic oligonucleotide
  Antisense strand to SEQ ID NO: 2168756
ucuucucauaaauuacagu

SEQ ID NO: 2168758 - RNA, 19 nt, Artificial Sequence
  Description of Artificial Sequence: Synthetic oligonucleotide
  Sense strand starting at position 3884 of SEQ ID NO: 1883089
augagaagauaucugccua

SEQ ID NO: 2168759 - RNA, 19 nt, Artificial Sequence
  Description of Artificial Sequence: Synthetic oligonucleotide
  Antisense strand to SEQ ID NO: 2168758
uaggcagauaucuucucau

SEQ ID NO: 2168760 - RNA, 19 nt, Artificial Sequence
  Description of Artificial Sequence: Synthetic oligonucleotide
  Sense strand starting at position 3912 of SEQ ID NO: 1883089
acauaacauggcuaauguu

SEQ ID NO: 2168761 - RNA, 19 nt, Artificial Sequence
  Description of Artificial Sequence: Synthetic oligonucleotide
  Antisense strand to SEQ ID NO: 2168760
aacauuagccauguuaugu

SEQ ID NO: 2168762 - RNA, 19 nt, Artificial Sequence
  Description of Artificial Sequence: Synthetic oligonucleotide
  Sense strand starting at position 1 of SEQ ID NO: 1883090
aaggaugaucaguguuuau

SEQ ID NO: 2168763 - RNA, 19 nt, Artificial Sequence
  Description of Artificial Sequence: Synthetic oligonucleotide
  Antisense strand to SEQ ID NO: 2168762
auaaacacugaucauccuu

SEQ ID NO: 2168764 - RNA, 19 nt, Artificial Sequence
  Description of Artificial Sequence: Synthetic oligonucleotide
  Sense strand starting at position 4 of SEQ ID NO: 1883090
gaugaucaguguuuaugca

SEQ ID NO: 2168765 - RNA, 19 nt, Artificial Sequence
  Description of Artificial Sequence: Synthetic oligonucleotide
  Antisense strand to SEQ ID NO: 2168764
ugcauaaacacugaucauc

SEQ ID NO: 2168766 - RNA, 19 nt, Artificial Sequence
  Description of Artificial Sequence: Synthetic oligonucleotide
  Sense strand starting at position 8 of SEQ ID NO: 1883090
aucaguguuuaugcaguga

SEQ ID NO: 2168767 - RNA, 19 nt, Artificial Sequence
  Description of Artificial Sequence: Synthetic oligonucleotide
  Antisense strand to SEQ ID NO: 2168766
ucacugcauaaacacugau

SEQ ID NO: 2168768 - RNA, 19 nt, Artificial Sequence
  Description of Artificial Sequence: Synthetic oligonucleotide
  Sense strand starting at position 12 of SEQ ID NO: 1883090
guguuuaugcagugaaugu

SEQ ID NO: 2168769 - RNA, 19 nt, Artificial Sequence
  Description of Artificial Sequence: Synthetic oligonucleotide
  Antisense strand to SEQ ID NO: 2168768
acauucacugcauaaacac

SEQ ID NO: 2168770 - RNA, 19 nt, Artificial Sequence
  Description of Artificial Sequence: Synthetic oligonucleotide
  Sense strand starting at position 21 of SEQ ID NO: 1883090
cagugaaugugucugacuu

SEQ ID NO: 2168771 - RNA, 19 nt, Artificial Sequence
  Description of Artificial Sequence: Synthetic oligonucleotide
  Antisense strand to SEQ ID NO: 2168770
aagucagacacauucacug

SEQ ID NO: 2168772 - RNA, 19 nt, Artificial Sequence
  Description of Artificial Sequence: Synthetic oligonucleotide
  Sense strand starting at position 22 of SEQ ID NO: 1883090
agugaaugugucugacuug

SEQ ID NO: 2168773 - RNA, 19 nt, Artificial Sequence
  Description of Artificial Sequence: Synthetic oligonucleotide
  Antisense strand to SEQ ID NO: 2168772
caagucagacacauucacu

SEQ ID NO: 2168774 - RNA, 19 nt, Artificial Sequence
  Description of Artificial Sequence: Synthetic oligonucleotide
  Sense strand starting at position 25 of SEQ ID NO: 1883090
gaaugugucugacuugacu

SEQ ID NO: 2168775 - RNA, 19 nt, Artificial Sequence
  Description of Artificial Sequence: Synthetic oligonucleotide
  Antisense strand to SEQ ID NO: 2168774
agucaagucagacacauuc

SEQ ID NO: 2168776 - RNA, 19 nt, Artificial Sequence
  Description of Artificial Sequence: Synthetic oligonucleotide
  Sense strand starting at position 719 of SEQ ID NO: 1883090
uggccugucauccgucauu

SEQ ID NO: 2168777 - RNA, 19 nt, Artificial Sequence
  Description of Artificial Sequence: Synthetic oligonucleotide
  Antisense strand to SEQ ID NO: 2168776
aaugacggaugacaggcca

SEQ ID NO: 2168778 - RNA, 19 nt, Artificial Sequence
  Description of Artificial Sequence: Synthetic oligonucleotide
  Sense strand starting at position 724 of SEQ ID NO: 1883090
ugucauccgucauuucuuu

SEQ ID NO: 2168779 - RNA, 19 nt, Artificial Sequence
  Description of Artificial Sequence: Synthetic oligonucleotide
  Antisense strand to SEQ ID NO: 2168778
aaagaaaugacggaugaca

SEQ ID NO: 2168780 - RNA, 19 nt, Artificial Sequence
  Description of Artificial Sequence: Synthetic oligonucleotide
  Sense strand starting at position 739 of SEQ ID NO: 1883090
cuuugcugccucguacuua

SEQ ID NO: 2168781 - RNA, 19 nt, Artificial Sequence
  Description of Artificial Sequence: Synthetic oligonucleotide
  Antisense strand to SEQ ID NO: 2168780
uaaguacgaggcagcaaag

SEQ ID NO: 2168782 - RNA, 19 nt, Artificial Sequence
  Description of Artificial Sequence: Synthetic oligonucleotide
  Sense strand starting at position 1286 of SEQ ID NO: 1883090
ggccucucuccagaucuuu

SEQ ID NO: 2168783 - RNA, 19 nt, Artificial Sequence
  Description of Artificial Sequence: Synthetic oligonucleotide
  Antisense strand to SEQ ID NO: 2168782
aaagaucuggagagaggcc

SEQ ID NO: 2168784 - RNA, 19 nt, Artificial Sequence
  Description of Artificial Sequence: Synthetic oligonucleotide
  Sense strand starting at position 1328 of SEQ ID NO: 1883090
ccagcucuguccuuccaua

SEQ ID NO: 2168785 - RNA, 19 nt, Artificial Sequence
  Description of Artificial Sequence: Synthetic oligonucleotide
  Antisense strand to SEQ ID NO: 2168784
uauggaaggacagagcugg

SEQ ID NO: 2168786 - RNA, 19 nt, Artificial Sequence
  Description of Artificial Sequence: Synthetic oligonucleotide
  Sense strand starting at position 1622 of SEQ ID NO: 1883090
aguugaaaguuaccaucca

SEQ ID NO: 2168787 - RNA, 19 nt, Artificial Sequence
  Description of Artificial Sequence: Synthetic oligonucleotide
  Antisense strand to SEQ ID NO: 2168786
uggaugguaacuuucaacu

SEQ ID NO: 2168788 - RNA, 19 nt, Artificial Sequence
  Description of Artificial Sequence: Synthetic oligonucleotide
  Sense strand starting at position 1643 of SEQ ID NO: 1883090
agaagcaucguagauugaa

SEQ ID NO: 2168789 - RNA, 19 nt, Artificial Sequence
  Description of Artificial Sequence: Synthetic oligonucleotide
  Antisense strand to SEQ ID NO: 2168788
uucaaucuacgaugcuucu

SEQ ID NO: 2168790 - RNA, 19 nt, Artificial Sequence
  Description of Artificial Sequence: Synthetic oligonucleotide
  Sense strand starting at position 1652 of SEQ ID NO: 1883090
guagauugaaaucgaggga

SEQ ID NO: 2168791 - RNA, 19 nt, Artificial Sequence
  Description of Artificial Sequence: Synthetic oligonucleotide
  Antisense strand to SEQ ID NO: 2168790
ucccucgauuucaaucuac

SEQ ID NO: 2168792 - RNA, 19 nt, Artificial Sequence
  Description of Artificial Sequence: Synthetic oligonucleotide
  Sense strand starting at position 1864 of SEQ ID NO: 1883090
aaagguguccagggugaug

SEQ ID NO: 2168793 - RNA, 19 nt, Artificial Sequence
  Description of Artificial Sequence: Synthetic oligonucleotide
  Antisense strand to SEQ ID NO: 2168792
caucacccuggacaccuuu

SEQ ID NO: 2168794 - RNA, 19 nt, Artificial Sequence
  Description of Artificial Sequence: Synthetic oligonucleotide
  Sense strand starting at position 1867 of SEQ ID NO: 1883090
gguguccagggugaugaaa

SEQ ID NO: 2168795 - RNA, 19 nt, Artificial Sequence
  Description of Artificial Sequence: Synthetic oligonucleotide
  Antisense strand to SEQ ID NO: 2168794
uuucaucacccuggacacc

SEQ ID NO: 2168796 - RNA, 19 nt, Artificial Sequence
  Description of Artificial Sequence: Synthetic oligonucleotide
  Sense strand starting at position 1970 of SEQ ID NO: 1883090
gucauauaccaaggaucag

SEQ ID NO: 2168797 - RNA, 19 nt, Artificial Sequence
  Description of Artificial Sequence: Synthetic oligonucleotide
  Antisense strand to SEQ ID NO: 2168796
cugauccuugguauaugac

SEQ ID NO: 2168798 - RNA, 19 nt, Artificial Sequence
  Description of Artificial Sequence: Synthetic oligonucleotide
  Sense strand starting at position 2041 of SEQ ID NO: 1883090
guggaacauugucugcaga

SEQ ID NO: 2168799 - RNA, 19 nt, Artificial Sequence
  Description of Artificial Sequence: Synthetic oligonucleotide
  Antisense strand to SEQ ID NO: 2168798
ucugcagacaauguuccac

SEQ ID NO: 2168800 - RNA, 19 nt, Artificial Sequence
  Description of Artificial Sequence: Synthetic oligonucleotide
  Sense strand starting at position 2042 of SEQ ID NO: 1883090
uggaacauugucugcagaa

SEQ ID NO: 2168801 - RNA, 19 nt, Artificial Sequence
  Description of Artificial Sequence: Synthetic oligonucleotide
  Antisense strand to SEQ ID NO: 2168800
uucugcagacaauguucca

SEQ ID NO: 2168802 - RNA, 19 nt, Artificial Sequence
  Description of Artificial Sequence: Synthetic oligonucleotide
  Sense strand starting at position 2043 of SEQ ID NO: 1883090
ggaacauugucugcagaau

SEQ ID NO: 2168803 - RNA, 19 nt, Artificial Sequence
  Description of Artificial Sequence: Synthetic oligonucleotide
  Antisense strand to SEQ ID NO: 2168802
auucugcagacaauguucc

SEQ ID NO: 2168804 - RNA, 19 nt, Artificial Sequence
  Description of Artificial Sequence: Synthetic oligonucleotide
  Sense strand starting at position 2044 of SEQ ID NO: 1883090
gaacauugucugcagaauu

SEQ ID NO: 2168805 - RNA, 19 nt, Artificial Sequence
  Description of Artificial Sequence: Synthetic oligonucleotide
  Antisense strand to SEQ ID NO: 2168804
aauucugcagacaauguuc

SEQ ID NO: 2168806 - RNA, 19 nt, Artificial Sequence
  Description of Artificial Sequence: Synthetic oligonucleotide
  Sense strand starting at position 2091 of SEQ ID NO: 1883090
uucuauaacuggcaacagu

SEQ ID NO: 2168807 - RNA, 19 nt, Artificial Sequence
  Description of Artificial Sequence: Synthetic oligonucleotide
  Antisense strand to SEQ ID NO: 2168806
acuguugccaguuauagaa

SEQ ID NO: 2168808 - RNA, 19 nt, Artificial Sequence
  Description of Artificial Sequence: Synthetic oligonucleotide
  Sense strand starting at position 2433 of SEQ ID NO: 1883090
cuggcaaaucacggagaaa

SEQ ID NO: 2168809 - RNA, 19 nt, Artificial Sequence
  Description of Artificial Sequence: Synthetic oligonucleotide
  Antisense strand to SEQ ID NO: 2168808
uuucuccgugauuugccag

SEQ ID NO: 2168810 - RNA, 19 nt, Artificial Sequence
  Description of Artificial Sequence: Synthetic oligonucleotide
  Sense strand starting at position 2449 of SEQ ID NO: 1883090
aaagauaagucacagagga

SEQ ID NO: 2168811 - RNA, 19 nt, Artificial Sequence
  Description of Artificial Sequence: Synthetic oligonucleotide
  Antisense strand to SEQ ID NO: 2168810
uccucugugacuuaucuuu

SEQ ID NO: 2168812 - RNA, 19 nt, Artificial Sequence
  Description of Artificial Sequence: Synthetic oligonucleotide
  Sense strand starting at position 2628 of SEQ ID NO: 1883090
cagcaugacuuggcucauu

SEQ ID NO: 2168813 - RNA, 19 nt, Artificial Sequence
  Description of Artificial Sequence: Synthetic oligonucleotide
  Antisense strand to SEQ ID NO: 2168812
aaugagccaagucaugcug

SEQ ID NO: 2168814 - RNA, 19 nt, Artificial Sequence
  Description of Artificial Sequence: Synthetic oligonucleotide
  Sense strand starting at position 2886 of SEQ ID NO: 1883090
auugguaguacggaguauu

SEQ ID NO: 2168815 - RNA, 19 nt, Artificial Sequence
  Description of Artificial Sequence: Synthetic oligonucleotide
  Antisense strand to SEQ ID NO: 2168814
aauacuccguacuaccaau

SEQ ID NO: 2168816 - RNA, 19 nt, Artificial Sequence
  Description of Artificial Sequence: Synthetic oligonucleotide
  Sense strand starting at position 2889 of SEQ ID NO: 1883090
gguaguacggaguauugga

SEQ ID NO: 2168817 - RNA, 19 nt, Artificial Sequence
  Description of Artificial Sequence: Synthetic oligonucleotide
  Antisense strand to SEQ ID NO: 2168816
uccaauacuccguacuacc

SEQ ID NO: 2168818 - RNA, 19 nt, Artificial Sequence
  Description of Artificial Sequence: Synthetic oligonucleotide
  Sense strand starting at position 2898 of SEQ ID NO: 1883090
gaguauuggacaggaugca

SEQ ID NO: 2168819 - RNA, 19 nt, Artificial Sequence
  Description of Artificial Sequence: Synthetic oligonucleotide
  Antisense strand to SEQ ID NO: 2168818
ugcauccuguccaauacuc

SEQ ID NO: 2168820 - RNA, 19 nt, Artificial Sequence
  Description of Artificial Sequence: Synthetic oligonucleotide
  Sense strand starting at position 2922 of SEQ ID NO: 1883090
auacgaacucagugaugau

SEQ ID NO: 2168821 - RNA, 19 nt, Artificial Sequence
  Description of Artificial Sequence: Synthetic oligonucleotide
  Antisense strand to SEQ ID NO: 2168820
aucaucacugaguucguau

SEQ ID NO: 2168822 - RNA, 19 nt, Artificial Sequence
  Description of Artificial Sequence: Synthetic oligonucleotide
  Sense strand starting at position 2925 of SEQ ID NO: 1883090
cgaacucagugaugauaag

SEQ ID NO: 2168823 - RNA, 19 nt, Artificial Sequence
  Description of Artificial Sequence: Synthetic oligonucleotide
  Antisense strand to SEQ ID NO: 2168822
cuuaucaucacugaguucg

SEQ ID NO: 2168824 - RNA, 19 nt, Artificial Sequence
  Description of Artificial Sequence: Synthetic oligonucleotide
  Sense strand starting at position 2931 of SEQ ID NO: 1883090
cagugaugauaagacugua

SEQ ID NO: 2168825 - RNA, 19 nt, Artificial Sequence
  Description of Artificial Sequence: Synthetic oligonucleotide
  Antisense strand to SEQ ID NO: 2168824
uacagucuuaucaucacug

SEQ ID NO: 2168826 - RNA, 19 nt, Artificial Sequence
  Description of Artificial Sequence: Synthetic oligonucleotide
  Sense strand starting at position 2934 of SEQ ID NO: 1883090
ugaugauaagacuguaggu

SEQ ID NO: 2168827 - RNA, 19 nt, Artificial Sequence
  Description of Artificial Sequence: Synthetic oligonucleotide
  Antisense strand to SEQ ID NO: 2168826
accuacagucuuaucauca

SEQ ID NO: 2168828 - RNA, 19 nt, Artificial Sequence
  Description of Artificial Sequence: Synthetic oligonucleotide
  Sense strand starting at position 3098 of SEQ ID NO: 1883090
gcaguaugugccuguaggu

SEQ ID NO: 2168829 - RNA, 19 nt, Artificial Sequence
  Description of Artificial Sequence: Synthetic oligonucleotide
  Antisense strand to SEQ ID NO: 2168828
accuacaggcacauacugc

SEQ ID NO: 2168830 - RNA, 19 nt, Artificial Sequence
  Description of Artificial Sequence: Synthetic oligonucleotide
  Sense strand starting at position 3446 of SEQ ID NO: 1883090
gcuuguauuguagagauag

SEQ ID NO: 2168831 - RNA, 19 nt, Artificial Sequence
  Description of Artificial Sequence: Synthetic oligonucleotide
  Antisense strand to SEQ ID NO: 2168830
cuaucucuacaauacaagc

SEQ ID NO: 2168832 - RNA, 19 nt, Artificial Sequence
  Description of Artificial Sequence: Synthetic oligonucleotide
  Sense strand starting at position 3919 of SEQ ID NO: 1883090
uuugacaaugacuguugaa

SEQ ID NO: 2168833 - RNA, 19 nt, Artificial Sequence
  Description of Artificial Sequence: Synthetic oligonucleotide
  Antisense strand to SEQ ID NO: 2168832
uucaacagucauugucaaa

SEQ ID NO: 2168834 - RNA, 19 nt, Artificial Sequence
  Description of Artificial Sequence: Synthetic oligonucleotide
  Sense strand starting at position 3922 of SEQ ID NO: 1883090
gacaaugacuguugaacuu

SEQ ID NO: 2168835 - RNA, 19 nt, Artificial Sequence
  Description of Artificial Sequence: Synthetic oligonucleotide
  Antisense strand to SEQ ID NO: 2168834
aaguucaacagucauuguc

SEQ ID NO: 2168836 - RNA, 19 nt, Artificial Sequence
  Description of Artificial Sequence: Synthetic oligonucleotide
  Sense strand starting at position 3946 of SEQ ID NO: 1883090
ugugcauaucuuugaccua

SEQ ID NO: 2168837 - RNA, 19 nt, Artificial Sequence
  Description of Artificial Sequence: Synthetic oligonucleotide
  Antisense strand to SEQ ID NO: 2168836
uaggucaaagauaugcaca

SEQ ID NO: 2168838 - RNA, 19 nt, Artificial Sequence
  Description of Artificial Sequence: Synthetic oligonucleotide
  Sense strand starting at position 3947 of SEQ ID NO: 1883090
gugcauaucuuugaccuaa

SEQ ID NO: 2168839 - RNA, 19 nt, Artificial Sequence
  Description of Artificial Sequence: Synthetic oligonucleotide
  Antisense strand to SEQ ID NO: 2168838
uuaggucaaagauaugcac

SEQ ID NO: 2168840 - RNA, 19 nt, Artificial Sequence
  Description of Artificial Sequence: Synthetic oligonucleotide
  Sense strand starting at position 3971 of SEQ ID NO: 1883090
cuaggaaacuugcuacaga

SEQ ID NO: 2168841 - RNA, 19 nt, Artificial Sequence
  Description of Artificial Sequence: Synthetic oligonucleotide
  Antisense strand to SEQ ID NO: 2168840
ucuguagcaaguuuccuag

SEQ ID NO: 2168842 - RNA, 19 nt, Artificial Sequence
  Description of Artificial Sequence: Synthetic oligonucleotide
  Sense strand starting at position 42 of SEQ ID NO: 1883091
cccuaugccucagugacua

SEQ ID NO: 2168843 - RNA, 19 nt, Artificial Sequence
  Description of Artificial Sequence: Synthetic oligonucleotide
  Antisense strand to SEQ ID NO: 2168842
uagucacugaggcauaggg

SEQ ID NO: 2168844 - RNA, 19 nt, Artificial Sequence
  Description of Artificial Sequence: Synthetic oligonucleotide
  Sense strand starting at position 50 of SEQ ID NO: 1883091
cucagugacuacuccaagu

SEQ ID NO: 2168845 - RNA, 19 nt, Artificial Sequence
  Description of Artificial Sequence: Synthetic oligonucleotide
  Antisense strand to SEQ ID NO: 2168844
acuuggaguagucacugag

SEQ ID NO: 2168846 - RNA, 19 nt, Artificial Sequence
  Description of Artificial Sequence: Synthetic oligonucleotide
  Sense strand starting at position 257 of SEQ ID NO: 1883091
ggaagucggguugagugaa

SEQ ID NO: 2168847 - RNA, 19 nt, Artificial Sequence
  Description of Artificial Sequence: Synthetic oligonucleotide
  Antisense strand to SEQ ID NO: 2168846
uucacucaacccgacuucc

SEQ ID NO: 2168848 - RNA, 19 nt, Artificial Sequence
  Description of Artificial Sequence: Synthetic oligonucleotide
  Sense strand starting at position 288 of SEQ ID NO: 1883091
gccucaaaggguuagcuuu

SEQ ID NO: 2168849 - RNA, 19 nt, Artificial Sequence
  Description of Artificial Sequence: Synthetic oligonucleotide
  Antisense strand to SEQ ID NO: 2168848
aaagcuaacccuuugaggc

SEQ ID NO: 2168850 - RNA, 19 nt, Artificial Sequence
  Description of Artificial Sequence: Synthetic oligonucleotide
  Sense strand starting at position 296 of SEQ ID NO: 1883091
ggguuagcuuuccaaagga

SEQ ID NO: 2168851 - RNA, 19 nt, Artificial Sequence
  Description of Artificial Sequence: Synthetic oligonucleotide
  Antisense strand to SEQ ID NO: 2168850
uccuuuggaaagcuaaccc

SEQ ID NO: 2168852 - RNA, 19 nt, Artificial Sequence
  Description of Artificial Sequence: Synthetic oligonucleotide
  Sense strand starting at position 384 of SEQ ID NO: 1883091
cucagauuguccucugucu

SEQ ID NO: 2168853 - RNA, 19 nt, Artificial Sequence
  Description of Artificial Sequence: Synthetic oligonucleotide
  Antisense strand to SEQ ID NO: 2168852
agacagaggacaaucugag

SEQ ID NO: 2168854 - RNA, 19 nt, Artificial Sequence
  Description of Artificial Sequence: Synthetic oligonucleotide
  Sense strand starting at position 442 of SEQ ID NO: 1883091
gcugaaauuuacuagagau

SEQ ID NO: 2168855 - RNA, 19 nt, Artificial Sequence
  Description of Artificial Sequence: Synthetic oligonucleotide
  Antisense strand to SEQ ID NO: 2168854
aucucuaguaaauuucagc

SEQ ID NO: 2168856 - RNA, 19 nt, Artificial Sequence
  Description of Artificial Sequence: Synthetic oligonucleotide
  Sense strand starting at position 602 of SEQ ID NO: 1883091
ugauaagaucucugcgccu

SEQ ID NO: 2168857 - RNA, 19 nt, Artificial Sequence
  Description of Artificial Sequence: Synthetic oligonucleotide
  Antisense strand to SEQ ID NO: 2168856
aggcgcagagaucuuauca

SEQ ID NO: 2168858 - RNA, 19 nt, Artificial Sequence
  Description of Artificial Sequence: Synthetic oligonucleotide
  Sense strand starting at position 608 of SEQ ID NO: 1883091
gaucucugcgccuagggaa

SEQ ID NO: 2168859 - RNA, 19 nt, Artificial Sequence
  Description of Artificial Sequence: Synthetic oligonucleotide
  Antisense strand to SEQ ID NO: 2168858
uucccuaggcgcagagauc

SEQ ID NO: 2168860 - RNA, 19 nt, Artificial Sequence
  Description of Artificial Sequence: Synthetic oligonucleotide
  Sense strand starting at position 881 of SEQ ID NO: 1883091
cugaaagucaguuaggcua

SEQ ID NO: 2168861 - RNA, 19 nt, Artificial Sequence
  Description of Artificial Sequence: Synthetic oligonucleotide
  Antisense strand to SEQ ID NO: 2168860
uagccuaacugacuuucag

SEQ ID NO: 2168862 - RNA, 19 nt, Artificial Sequence
  Description of Artificial Sequence: Synthetic oligonucleotide
  Sense strand starting at position 883 of SEQ ID NO: 1883091
gaaagucaguuaggcuaaa

SEQ ID NO: 2168863 - RNA, 19 nt, Artificial Sequence
  Description of Artificial Sequence: Synthetic oligonucleotide
  Antisense strand to SEQ ID NO: 2168862
uuuagccuaacugacuuuc

SEQ ID NO: 2168864 - RNA, 19 nt, Artificial Sequence
  Description of Artificial Sequence: Synthetic oligonucleotide
  Sense strand starting at position 933 of SEQ ID NO: 1883091
cugcuugagacacgugaaa

SEQ ID NO: 2168865 - RNA, 19 nt, Artificial Sequence
  Description of Artificial Sequence: Synthetic oligonucleotide
  Antisense strand to SEQ ID NO: 2168864
uuucacgugucucaagcag

SEQ ID NO: 2168866 - RNA, 19 nt, Artificial Sequence
  Description of Artificial Sequence: Synthetic oligonucleotide
  Sense strand starting at position 935 of SEQ ID NO: 1883091
gcuugagacacgugaaagu

SEQ ID NO: 2168867 - RNA, 19 nt, Artificial Sequence
  Description of Artificial Sequence: Synthetic oligonucleotide
  Antisense strand to SEQ ID NO: 2168866
acuuucacgugucucaagc

SEQ ID NO: 2168868 - RNA, 19 nt, Artificial Sequence
  Description of Artificial Sequence: Synthetic oligonucleotide
  Sense strand starting at position 1134 of SEQ ID NO: 1883091
uuaagcucugauuacguga

SEQ ID NO: 2168869 - RNA, 19 nt, Artificial Sequence
  Description of Artificial Sequence: Synthetic oligonucleotide
  Antisense strand to SEQ ID NO: 2168868
ucacguaaucagagcuuaa

SEQ ID NO: 2168870 - RNA, 19 nt, Artificial Sequence
  Description of Artificial Sequence: Synthetic oligonucleotide
  Sense strand starting at position 1139 of SEQ ID NO: 1883091
cucugauuacgugaccaga

SEQ ID NO: 2168871 - RNA, 19 nt, Artificial Sequence
  Description of Artificial Sequence: Synthetic oligonucleotide
  Antisense strand to SEQ ID NO: 2168870
ucuggucacguaaucagag

SEQ ID NO: 2168872 - RNA, 19 nt, Artificial Sequence
  Description of Artificial Sequence: Synthetic oligonucleotide
  Sense strand starting at position 1141 of SEQ ID NO: 1883091
cugauuacgugaccagaaa

SEQ ID NO: 2168873 - RNA, 19 nt, Artificial Sequence
  Description of Artificial Sequence: Synthetic oligonucleotide
  Antisense strand to SEQ ID NO: 2168872
uuucuggucacguaaucag

SEQ ID NO: 2168874 - RNA, 19 nt, Artificial Sequence
  Description of Artificial Sequence: Synthetic oligonucleotide
  Sense strand starting at position 1214 of SEQ ID NO: 1883091
ugaguuugcuuuccuuuau

SEQ ID NO: 2168875 - RNA, 19 nt, Artificial Sequence
  Description of Artificial Sequence: Synthetic oligonucleotide
  Antisense strand to SEQ ID NO: 2168874
auaaaggaaagcaaacuca

SEQ ID NO: 2168876 - RNA, 19 nt, Artificial Sequence
  Description of Artificial Sequence: Synthetic oligonucleotide
  Sense strand starting at position 1296 of SEQ ID NO: 1883091
cugggugcucuauaauucu

SEQ ID NO: 2168877 - RNA, 19 nt, Artificial Sequence
  Description of Artificial Sequence: Synthetic oligonucleotide
  Antisense strand to SEQ ID NO: 2168876
agaauuauagagcacccag

SEQ ID NO: 2168878 - RNA, 19 nt, Artificial Sequence
  Description of Artificial Sequence: Synthetic oligonucleotide
  Sense strand starting at position 1349 of SEQ ID NO: 1883091
uguggugacuuccauagau

SEQ ID NO: 2168879 - RNA, 19 nt, Artificial Sequence
  Description of Artificial Sequence: Synthetic oligonucleotide
  Antisense strand to SEQ ID NO: 2168878
aucuauggaagucaccaca

SEQ ID NO: 2168880 - RNA, 19 nt, Artificial Sequence
  Description of Artificial Sequence: Synthetic oligonucleotide
  Sense strand starting at position 2018 of SEQ ID NO: 1883091
agcaguccugauuggauaa

SEQ ID NO: 2168881 - RNA, 19 nt, Artificial Sequence
  Description of Artificial Sequence: Synthetic oligonucleotide
  Antisense strand to SEQ ID NO: 2168880
uuauccaaucaggacugcu

SEQ ID NO: 2168882 - RNA, 19 nt, Artificial Sequence
  Description of Artificial Sequence: Synthetic oligonucleotide
  Sense strand starting at position 2069 of SEQ ID NO: 1883091
gacagaagcugugcucaga

SEQ ID NO: 2168883 - RNA, 19 nt, Artificial Sequence
  Description of Artificial Sequence: Synthetic oligonucleotide
  Antisense strand to SEQ ID NO: 2168882
ucugagcacagcuucuguc

SEQ ID NO: 2168884 - RNA, 19 nt, Artificial Sequence
  Description of Artificial Sequence: Synthetic oligonucleotide
  Sense strand starting at position 2295 of SEQ ID NO: 1883091
ucugaauucugguccuuug

SEQ ID NO: 2168885 - RNA, 19 nt, Artificial Sequence
  Description of Artificial Sequence: Synthetic oligonucleotide
  Antisense strand to SEQ ID NO: 2168884
caaaggaccagaauucaga

SEQ ID NO: 2168886 - RNA, 19 nt, Artificial Sequence
  Description of Artificial Sequence: Synthetic oligonucleotide
  Sense strand starting at position 2361 of SEQ ID NO: 1883091
acgugagccacauguguau

SEQ ID NO: 2168887 - RNA, 19 nt, Artificial Sequence
  Description of Artificial Sequence: Synthetic oligonucleotide
  Antisense strand to SEQ ID NO: 2168886
auacacauguggcucacgu

SEQ ID NO: 2168888 - RNA, 19 nt, Artificial Sequence
  Description of Artificial Sequence: Synthetic oligonucleotide
  Sense strand starting at position 2365 of SEQ ID NO: 1883091
gagccacauguguauucua

SEQ ID NO: 2168889 - RNA, 19 nt, Artificial Sequence
  Description of Artificial Sequence: Synthetic oligonucleotide
  Antisense strand to SEQ ID NO: 2168888
uagaauacacauguggcuc

SEQ ID NO: 2168890 - RNA, 19 nt, Artificial Sequence
  Description of Artificial Sequence: Synthetic oligonucleotide
  Sense strand starting at position 2368 of SEQ ID NO: 1883091
ccacauguguauucuaaau

SEQ ID NO: 2168891 - RNA, 19 nt, Artificial Sequence
  Description of Artificial Sequence: Synthetic oligonucleotide
  Antisense strand to SEQ ID NO: 2168890
auuuagaauacacaugugg

SEQ ID NO: 2168892 - RNA, 19 nt, Artificial Sequence
  Description of Artificial Sequence: Synthetic oligonucleotide
  Sense strand starting at position 2795 of SEQ ID NO: 1883091
auaucugagcaauauguaa

SEQ ID NO: 2168893 - RNA, 19 nt, Artificial Sequence
  Description of Artificial Sequence: Synthetic oligonucleotide
  Antisense strand to SEQ ID NO: 2168892
uuacauauugcucagauau

SEQ ID NO: 2168894 - RNA, 19 nt, Artificial Sequence
  Description of Artificial Sequence: Synthetic oligonucleotide
  Sense strand starting at position 2927 of SEQ ID NO: 1883091
gccaauagcugucacauua

SEQ ID NO: 2168895 - RNA, 19 nt, Artificial Sequence
  Description of Artificial Sequence: Synthetic oligonucleotide
  Antisense strand to SEQ ID NO: 2168894
uaaugugacagcuauuggc

SEQ ID NO: 2168896 - RNA, 19 nt, Artificial Sequence
  Description of Artificial Sequence: Synthetic oligonucleotide
  Sense strand starting at position 2968 of SEQ ID NO: 1883091
guuugaagggccugaacau

SEQ ID NO: 2168897 - RNA, 19 nt, Artificial Sequence
  Description of Artificial Sequence: Synthetic oligonucleotide
  Antisense strand to SEQ ID NO: 2168896
auguucaggcccuucaaac

SEQ ID NO: 2168898 - RNA, 19 nt, Artificial Sequence
  Description of Artificial Sequence: Synthetic oligonucleotide
  Sense strand starting at position 3038 of SEQ ID NO: 1883091
ucaguucugagguggaaca

SEQ ID NO: 2168899 - RNA, 19 nt, Artificial Sequence
  Description of Artificial Sequence: Synthetic oligonucleotide
  Antisense strand to SEQ ID NO: 2168898
uguuccaccucagaacuga

SEQ ID NO: 2168900 - RNA, 19 nt, Artificial Sequence
  Description of Artificial Sequence: Synthetic oligonucleotide
  Sense strand starting at position 3099 of SEQ ID NO: 1883091
aaccuaagguuguuaagaa

SEQ ID NO: 2168901 - RNA, 19 nt, Artificial Sequence
  Description of Artificial Sequence: Synthetic oligonucleotide
  Antisense strand to SEQ ID NO: 2168900
uucuuaacaaccuuagguu

SEQ ID NO: 2168902 - RNA, 19 nt, Artificial Sequence
  Description of Artificial Sequence: Synthetic oligonucleotide
  Sense strand starting at position 3100 of SEQ ID NO: 1883091
accuaagguuguuaagaau

SEQ ID NO: 2168903 - RNA, 19 nt, Artificial Sequence
  Description of Artificial Sequence: Synthetic oligonucleotide
  Antisense strand to SEQ ID NO: 2168902
auucuuaacaaccuuaggu

SEQ ID NO: 2168904 - RNA, 19 nt, Artificial Sequence
  Description of Artificial Sequence: Synthetic oligonucleotide
  Sense strand starting at position 3172 of SEQ ID NO: 1883091
cugcauagagaauguauaa

SEQ ID NO: 2168905 - RNA, 19 nt, Artificial Sequence
  Description of Artificial Sequence: Synthetic oligonucleotide
  Antisense strand to SEQ ID NO: 2168904
uuauacauucucuaugcag

SEQ ID NO: 2168906 - RNA, 19 nt, Artificial Sequence
  Description of Artificial Sequence: Synthetic oligonucleotide
  Sense strand starting at position 3214 of SEQ ID NO: 1883091
ggaagaaaguuagaaacau

SEQ ID NO: 2168907 - RNA, 19 nt, Artificial Sequence
  Description of Artificial Sequence: Synthetic oligonucleotide
  Antisense strand to SEQ ID NO: 2168906
auguuucuaacuuucuucc

SEQ ID NO: 2168908 - RNA, 19 nt, Artificial Sequence
  Description of Artificial Sequence: Synthetic oligonucleotide
  Sense strand starting at position 3560 of SEQ ID NO: 1883091
ugcagucuuucucagguuu

SEQ ID NO: 2168909 - RNA, 19 nt, Artificial Sequence
  Description of Artificial Sequence: Synthetic oligonucleotide
  Antisense strand to SEQ ID NO: 2168908
aaaccugagaaagacugca

SEQ ID NO: 2168910 - RNA, 19 nt, Artificial Sequence
  Description of Artificial Sequence: Synthetic oligonucleotide
  Sense strand starting at position 3679 of SEQ ID NO: 1883091
ggugaucugugguccuauu

SEQ ID NO: 2168911 - RNA, 19 nt, Artificial Sequence
  Description of Artificial Sequence: Synthetic oligonucleotide
  Antisense strand to SEQ ID NO: 2168910
aauaggaccacagaucacc

SEQ ID NO: 2168912 - RNA, 19 nt, Artificial Sequence
  Description of Artificial Sequence: Synthetic oligonucleotide
  Sense strand starting at position 3793 of SEQ ID NO: 1883091
gaugcuauagagugucaau

SEQ ID NO: 2168913 - RNA, 19 nt, Artificial Sequence
  Description of Artificial Sequence: Synthetic oligonucleotide
  Antisense strand to SEQ ID NO: 2168912
auugacacucuauagcauc

SEQ ID NO: 2168914 - RNA, 19 nt, Artificial Sequence
  Description of Artificial Sequence: Synthetic oligonucleotide
  Sense strand starting at position 3796 of SEQ ID NO: 1883091
gcuauagagugucaaugca

SEQ ID NO: 2168915 - RNA, 19 nt, Artificial Sequence
  Description of Artificial Sequence: Synthetic oligonucleotide
  Antisense strand to SEQ ID NO: 2168914
ugcauugacacucuauagc

SEQ ID NO: 2168916 - RNA, 19 nt, Artificial Sequence
  Description of Artificial Sequence: Synthetic oligonucleotide
  Sense strand starting at position 59 of SEQ ID NO: 1883092
ucacuuaagugcuaaacga

SEQ ID NO: 2168917 - RNA, 19 nt, Artificial Sequence
  Description of Artificial Sequence: Synthetic oligonucleotide
  Antisense strand to SEQ ID NO: 2168916
ucguuuagcacuuaaguga

SEQ ID NO: 2168918 - RNA, 19 nt, Artificial Sequence
  Description of Artificial Sequence: Synthetic oligonucleotide
  Sense strand starting at position 152 of SEQ ID NO: 1883092
uugcaaguucuugaaccau

SEQ ID NO: 2168919 - RNA, 19 nt, Artificial Sequence
  Description of Artificial Sequence: Synthetic oligonucleotide
  Antisense strand to SEQ ID NO: 2168918
augguucaagaacuugcaa

SEQ ID NO: 2168920 - RNA, 19 nt, Artificial Sequence
  Description of Artificial Sequence: Synthetic oligonucleotide
  Sense strand starting at position 234 of SEQ ID NO: 1883092
aauccagugggccgaaauu

SEQ ID NO: 2168921 - RNA, 19 nt, Artificial Sequence
  Description of Artificial Sequence: Synthetic oligonucleotide
  Antisense strand to SEQ ID NO: 2168920
aauuucggcccacuggauu

SEQ ID NO: 2168922 - RNA, 19 nt, Artificial Sequence
  Description of Artificial Sequence: Synthetic oligonucleotide
  Sense strand starting at position 245 of SEQ ID NO: 1883092
ccgaaauuauuucuguguu

SEQ ID NO: 2168923 - RNA, 19 nt, Artificial Sequence
  Description of Artificial Sequence: Synthetic oligonucleotide
  Antisense strand to SEQ ID NO: 2168922
aacacagaaauaauuucgg

SEQ ID NO: 2168924 - RNA, 19 nt, Artificial Sequence
  Description of Artificial Sequence: Synthetic oligonucleotide
  Sense strand starting at position 246 of SEQ ID NO: 1883092
cgaaauuauuucuguguuc

SEQ ID NO: 2168925 - RNA, 19 nt, Artificial Sequence
  Description of Artificial Sequence: Synthetic oligonucleotide
  Antisense strand to SEQ ID NO: 2168924
gaacacagaaauaauuucg

SEQ ID NO: 2168926 - RNA, 19 nt, Artificial Sequence
  Description of Artificial Sequence: Synthetic oligonucleotide
  Sense strand starting at position 276 of SEQ ID NO: 1883092
ccagcauaugauugauuga

SEQ ID NO: 2168927 - RNA, 19 nt, Artificial Sequence
  Description of Artificial Sequence: Synthetic oligonucleotide
  Antisense strand to SEQ ID NO: 2168926
ucaaucaaucauaugcugg

SEQ ID NO: 2168928 - RNA, 19 nt, Artificial Sequence
  Description of Artificial Sequence: Synthetic oligonucleotide
  Sense strand starting at position 279 of SEQ ID NO: 1883092
gcauaugauugauugacca

SEQ ID NO: 2168929 - RNA, 19 nt, Artificial Sequence
  Description of Artificial Sequence: Synthetic oligonucleotide
  Antisense strand to SEQ ID NO: 2168928
uggucaaucaaucauaugc

SEQ ID NO: 2168930 - RNA, 19 nt, Artificial Sequence
  Description of Artificial Sequence: Synthetic oligonucleotide
  Sense strand starting at position 283 of SEQ ID NO: 1883092
augauugauugaccagcaa

SEQ ID NO: 2168931 - RNA, 19 nt, Artificial Sequence
  Description of Artificial Sequence: Synthetic oligonucleotide
  Antisense strand to SEQ ID NO: 2168930
uugcuggucaaucaaucau

SEQ ID NO: 2168932 - RNA, 19 nt, Artificial Sequence
  Description of Artificial Sequence: Synthetic oligonucleotide
  Sense strand starting at position 297 of SEQ ID NO: 1883092
agcaauaugucuccggaaa

SEQ ID NO: 2168933 - RNA, 19 nt, Artificial Sequence
  Description of Artificial Sequence: Synthetic oligonucleotide
  Antisense strand to SEQ ID NO: 2168932
uuuccggagacauauugcu

SEQ ID NO: 2168934 - RNA, 19 nt, Artificial Sequence
  Description of Artificial Sequence: Synthetic oligonucleotide
  Sense strand starting at position 298 of SEQ ID NO: 1883092
gcaauaugucuccggaaau

SEQ ID NO: 2168935 - RNA, 19 nt, Artificial Sequence
  Description of Artificial Sequence: Synthetic oligonucleotide
  Antisense strand to SEQ ID NO: 2168934
auuuccggagacauauugc

SEQ ID NO: 2168936 - RNA, 19 nt, Artificial Sequence
  Description of Artificial Sequence: Synthetic oligonucleotide
  Sense strand starting at position 299 of SEQ ID NO: 1883092
caauaugucuccggaaaug

SEQ ID NO: 2168937 - RNA, 19 nt, Artificial Sequence
  Description of Artificial Sequence: Synthetic oligonucleotide
  Antisense strand to SEQ ID NO: 2168936
cauuuccggagacauauug

SEQ ID NO: 2168938 - RNA, 19 nt, Artificial Sequence
  Description of Artificial Sequence: Synthetic oligonucleotide
  Sense strand starting at position 322 of SEQ ID NO: 1883092
cuggguugguuugaagaca

SEQ ID NO: 2168939 - RNA, 19 nt, Artificial Sequence
  Description of Artificial Sequence: Synthetic oligonucleotide
  Antisense strand to SEQ ID NO: 2168938
ugucuucaaaccaacccag

SEQ ID NO: 2168940 - RNA, 19 nt, Artificial Sequence
  Description of Artificial Sequence: Synthetic oligonucleotide
  Sense strand starting at position 502 of SEQ ID NO: 1883092
gcugaaauuuaccagagau

SEQ ID NO: 2168941 - RNA, 19 nt, Artificial Sequence
  Description of Artificial Sequence: Synthetic oligonucleotide
  Antisense strand to SEQ ID NO: 2168940
aucucugguaaauuucagc

SEQ ID NO: 2168942 - RNA, 19 nt, Artificial Sequence
  Description of Artificial Sequence: Synthetic oligonucleotide
  Sense strand starting at position 663 of SEQ ID NO: 1883092
ugauaagaucucuguaccu

SEQ ID NO: 2168943 - RNA, 19 nt, Artificial Sequence
  Description of Artificial Sequence: Synthetic oligonucleotide
  Antisense strand to SEQ ID NO: 2168942
agguacagagaucuuauca

SEQ ID NO: 2168944 - RNA, 19 nt, Artificial Sequence
  Description of Artificial Sequence: Synthetic oligonucleotide
  Sense strand starting at position 672 of SEQ ID NO: 1883092
cucuguaccuagggaagau

SEQ ID NO: 2168945 - RNA, 19 nt, Artificial Sequence
  Description of Artificial Sequence: Synthetic oligonucleotide
  Antisense strand to SEQ ID NO: 2168944
aucuucccuagguacagag

SEQ ID NO: 2168946 - RNA, 19 nt, Artificial Sequence
  Description of Artificial Sequence: Synthetic oligonucleotide
  Sense strand starting at position 752 of SEQ ID NO: 1883092
gguuucuucucaugggaaa

SEQ ID NO: 2168947 - RNA, 19 nt, Artificial Sequence
  Description of Artificial Sequence: Synthetic oligonucleotide
  Antisense strand to SEQ ID NO: 2168946
uuucccaugagaagaaacc

SEQ ID NO: 2168948 - RNA, 19 nt, Artificial Sequence
  Description of Artificial Sequence: Synthetic oligonucleotide
  Sense strand starting at position 753 of SEQ ID NO: 1883092
guuucuucucaugggaaau

SEQ ID NO: 2168949 - RNA, 19 nt, Artificial Sequence
  Description of Artificial Sequence: Synthetic oligonucleotide
  Antisense strand to SEQ ID NO: 2168948
auuucccaugagaagaaac

SEQ ID NO: 2168950 - RNA, 19 nt, Artificial Sequence
  Description of Artificial Sequence: Synthetic oligonucleotide
  Sense strand starting at position 1153 of SEQ ID NO: 1883092
guaaauuacuaccuuguga

SEQ ID NO: 2168951 - RNA, 19 nt, Artificial Sequence
  Description of Artificial Sequence: Synthetic oligonucleotide
  Antisense strand to SEQ ID NO: 2168950
ucacaagguaguaauuuac

SEQ ID NO: 2168952 - RNA, 19 nt, Artificial Sequence
  Description of Artificial Sequence: Synthetic oligonucleotide
  Sense strand starting at position 1534 of SEQ ID NO: 1883092
cccgucgucucugcacaau

SEQ ID NO: 2168953 - RNA, 19 nt, Artificial Sequence
  Description of Artificial Sequence: Synthetic oligonucleotide
  Antisense strand to SEQ ID NO: 2168952
auugugcagagacgacggg

SEQ ID NO: 2168954 - RNA, 19 nt, Artificial Sequence
  Description of Artificial Sequence: Synthetic oligonucleotide
  Sense strand starting at position 1726 of SEQ ID NO: 1883092
gcgggaagacccgaguacu

SEQ ID NO: 2168955 - RNA, 19 nt, Artificial Sequence
  Description of Artificial Sequence: Synthetic oligonucleotide
  Antisense strand to SEQ ID NO: 2168954
aguacucgggucuucccgc

SEQ ID NO: 2168956 - RNA, 19 nt, Artificial Sequence
  Description of Artificial Sequence: Synthetic oligonucleotide
  Sense strand starting at position 2033 of SEQ ID NO: 1883092
cggcgucccugauuggaua

SEQ ID NO: 2168957 - RNA, 19 nt, Artificial Sequence
  Description of Artificial Sequence: Synthetic oligonucleotide
  Antisense strand to SEQ ID NO: 2168956
uauccaaucagggacgccg

SEQ ID NO: 2168958 - RNA, 19 nt, Artificial Sequence
  Description of Artificial Sequence: Synthetic oligonucleotide
  Sense strand starting at position 2034 of SEQ ID NO: 1883092
ggcgucccugauuggauaa

SEQ ID NO: 2168959 - RNA, 19 nt, Artificial Sequence
  Description of Artificial Sequence: Synthetic oligonucleotide
  Antisense strand to SEQ ID NO: 2168958
uuauccaaucagggacgcc

SEQ ID NO: 2168960 - RNA, 19 nt, Artificial Sequence
  Description of Artificial Sequence: Synthetic oligonucleotide
  Sense strand starting at position 2045 of SEQ ID NO: 1883092
uuggauaacguuuaacaac

SEQ ID NO: 2168961 - RNA, 19 nt, Artificial Sequence
  Description of Artificial Sequence: Synthetic oligonucleotide
  Antisense strand to SEQ ID NO: 2168960
guuguuaaacguuauccaa

SEQ ID NO: 2168962 - RNA, 19 nt, Artificial Sequence
  Description of Artificial Sequence: Synthetic oligonucleotide
  Sense strand starting at position 2672 of SEQ ID NO: 1883092
cacucuaauugagaugguu

SEQ ID NO: 2168963 - RNA, 19 nt, Artificial Sequence
  Description of Artificial Sequence: Synthetic oligonucleotide
  Antisense strand to SEQ ID NO: 2168962
aaccaucucaauuagagug

SEQ ID NO: 2168964 - RNA, 19 nt, Artificial Sequence
  Description of Artificial Sequence: Synthetic oligonucleotide
  Sense strand starting at position 2674 of SEQ ID NO: 1883092
cucuaauugagaugguuag

SEQ ID NO: 2168965 - RNA, 19 nt, Artificial Sequence
  Description of Artificial Sequence: Synthetic oligonucleotide
  Antisense strand to SEQ ID NO: 2168964
cuaaccaucucaauuagag

SEQ ID NO: 2168966 - RNA, 19 nt, Artificial Sequence
  Description of Artificial Sequence: Synthetic oligonucleotide
  Sense strand starting at position 2675 of SEQ ID NO: 1883092
ucuaauugagaugguuagu

SEQ ID NO: 2168967 - RNA, 19 nt, Artificial Sequence
  Description of Artificial Sequence: Synthetic oligonucleotide
  Antisense strand to SEQ ID NO: 2168966
acuaaccaucucaauuaga

SEQ ID NO: 2168968 - RNA, 19 nt, Artificial Sequence
  Description of Artificial Sequence: Synthetic oligonucleotide
  Sense strand starting at position 2714 of SEQ ID NO: 1883092
agaccauucuugugaccuc

SEQ ID NO: 2168969 - RNA, 19 nt, Artificial Sequence
  Description of Artificial Sequence: Synthetic oligonucleotide
  Antisense strand to SEQ ID NO: 2168968
gaggucacaagaauggucu

SEQ ID NO: 2168970 - RNA, 19 nt, Artificial Sequence
  Description of Artificial Sequence: Synthetic oligonucleotide
  Sense strand starting at position 2895 of SEQ ID NO: 1883092
auaguagccuucugaaaga

SEQ ID NO: 2168971 - RNA, 19 nt, Artificial Sequence
  Description of Artificial Sequence: Synthetic oligonucleotide
  Antisense strand to SEQ ID NO: 2168970
ucuuucagaaggcuacuau

SEQ ID NO: 2168972 - RNA, 19 nt, Artificial Sequence
  Description of Artificial Sequence: Synthetic oligonucleotide
  Sense strand starting at position 3140 of SEQ ID NO: 1883092
uugcauaugugguuuauau

SEQ ID NO: 2168973 - RNA, 19 nt, Artificial Sequence
  Description of Artificial Sequence: Synthetic oligonucleotide
  Antisense strand to SEQ ID NO: 2168972
auauaaaccacauaugcaa

SEQ ID NO: 2168974 - RNA, 19 nt, Artificial Sequence
  Description of Artificial Sequence: Synthetic oligonucleotide
  Sense strand starting at position 3142 of SEQ ID NO: 1883092
gcauaugugguuuauauaa

SEQ ID NO: 2168975 - RNA, 19 nt, Artificial Sequence
  Description of Artificial Sequence: Synthetic oligonucleotide
  Antisense strand to SEQ ID NO: 2168974
uuauauaaaccacauaugc

SEQ ID NO: 2168976 - RNA, 19 nt, Artificial Sequence
  Description of Artificial Sequence: Synthetic oligonucleotide
  Sense strand starting at position 3309 of SEQ ID NO: 1883092
cccauauagcacuguuuau

SEQ ID NO: 2168977 - RNA, 19 nt, Artificial Sequence
  Description of Artificial Sequence: Synthetic oligonucleotide
  Antisense strand to SEQ ID NO: 2168976
auaaacagugcuauauggg

SEQ ID NO: 2168978 - RNA, 19 nt, Artificial Sequence
  Description of Artificial Sequence: Synthetic oligonucleotide
  Sense strand starting at position 3367 of SEQ ID NO: 1883092
cacgguagcucacaucuau

SEQ ID NO: 2168979 - RNA, 19 nt, Artificial Sequence
  Description of Artificial Sequence: Synthetic oligonucleotide
  Antisense strand to SEQ ID NO: 2168978
auagaugugagcuaccgug

SEQ ID NO: 2168980 - RNA, 19 nt, Artificial Sequence
  Description of Artificial Sequence: Synthetic oligonucleotide
  Sense strand starting at position 3413 of SEQ ID NO: 1883092
gggagaaucacuugcgcuc

SEQ ID NO: 2168981 - RNA, 19 nt, Artificial Sequence
  Description of Artificial Sequence: Synthetic oligonucleotide
  Antisense strand to SEQ ID NO: 2168980
gagcgcaagugauucuccc

SEQ ID NO: 2168982 - RNA, 19 nt, Artificial Sequence
  Description of Artificial Sequence: Synthetic oligonucleotide
  Sense strand starting at position 3438 of SEQ ID NO: 1883092
ucaagugcagccugaauaa

SEQ ID NO: 2168983 - RNA, 19 nt, Artificial Sequence
  Description of Artificial Sequence: Synthetic oligonucleotide
  Antisense strand to SEQ ID NO: 2168982
uuauucaggcugcacuuga

SEQ ID NO: 2168984 - RNA, 19 nt, Artificial Sequence
  Description of Artificial Sequence: Synthetic oligonucleotide
  Sense strand starting at position 3465 of SEQ ID NO: 1883092
agauccuaugugcaugaaa

SEQ ID NO: 2168985 - RNA, 19 nt, Artificial Sequence
  Description of Artificial Sequence: Synthetic oligonucleotide
  Antisense strand to SEQ ID NO: 2168984
uuucaugcacauaggaucu

SEQ ID NO: 2168986 - RNA, 19 nt, Artificial Sequence
  Description of Artificial Sequence: Synthetic oligonucleotide
  Sense strand starting at position 3885 of SEQ ID NO: 1883092
gagccaugauugguuacga

SEQ ID NO: 2168987 - RNA, 19 nt, Artificial Sequence
  Description of Artificial Sequence: Synthetic oligonucleotide
  Antisense strand to SEQ ID NO: 2168986
ucguaaccaaucauggcuc

SEQ ID NO: 2168988 - RNA, 19 nt, Artificial Sequence
  Description of Artificial Sequence: Synthetic oligonucleotide
  Sense strand starting at position 3889 of SEQ ID NO: 1883092
caugauugguuacgacacu

SEQ ID NO: 2168989 - RNA, 19 nt, Artificial Sequence
  Description of Artificial Sequence: Synthetic oligonucleotide
  Antisense strand to SEQ ID NO: 2168988
agugucguaaccaaucaug

SEQ ID NO: 2168990 - RNA, 19 nt, Artificial Sequence
  Description of Artificial Sequence: Synthetic oligonucleotide
  Sense strand starting at position 3923 of SEQ ID NO: 1883092
uggugagagugugauccuu

SEQ ID NO: 2168991 - RNA, 19 nt, Artificial Sequence
  Description of Artificial Sequence: Synthetic oligonucleotide
  Antisense strand to SEQ ID NO: 2168990
aaggaucacacucucacca

SEQ ID NO: 2168992 - RNA, 19 nt, Artificial Sequence
  Description of Artificial Sequence: Synthetic oligonucleotide
  Sense strand starting at position 3925 of SEQ ID NO: 1883092
gugagagugugauccuuuc

SEQ ID NO: 2168993 - RNA, 19 nt, Artificial Sequence
  Description of Artificial Sequence: Synthetic oligonucleotide
  Antisense strand to SEQ ID NO: 2168992
gaaaggaucacacucucac

SEQ ID NO: 2168994 - RNA, 19 nt, Artificial Sequence
  Description of Artificial Sequence: Synthetic oligonucleotide
  Sense strand starting at position 3931 of SEQ ID NO: 1883092
gugugauccuuucuccaaa

SEQ ID NO: 2168995 - RNA, 19 nt, Artificial Sequence
  Description of Artificial Sequence: Synthetic oligonucleotide
  Antisense strand to SEQ ID NO: 2168994
uuuggagaaaggaucacac

SEQ ID NO: 2168996 - RNA, 19 nt, Artificial Sequence
  Description of Artificial Sequence: Synthetic oligonucleotide
  Sense strand starting at position 203 of SEQ ID NO: 1883093
gagacuguccuaugggaga

SEQ ID NO: 2168997 - RNA, 19 nt, Artificial Sequence
  Description of Artificial Sequence: Synthetic oligonucleotide
  Antisense strand to SEQ ID NO: 2168996
ucucccauaggacagucuc

SEQ ID NO: 2168998 - RNA, 19 nt, Artificial Sequence
  Description of Artificial Sequence: Synthetic oligonucleotide
  Sense strand starting at position 395 of SEQ ID NO: 1883093
ugguaagaucucugugccu

SEQ ID NO: 2168999 - RNA, 19 nt, Artificial Sequence
  Description of Artificial Sequence: Synthetic oligonucleotide
  Antisense strand to SEQ ID NO: 2168998
aggcacagagaucuuacca

SEQ ID NO: 2169000 - RNA, 19 nt, Artificial Sequence
  Description of Artificial Sequence: Synthetic oligonucleotide
  Sense strand starting at position 397 of SEQ ID NO: 1883093
guaagaucucugugccuag

SEQ ID NO: 2169001 - RNA, 19 nt, Artificial Sequence
  Description of Artificial Sequence: Synthetic oligonucleotide
  Antisense strand to SEQ ID NO: 2169000
cuaggcacagagaucuuac

SEQ ID NO: 2169002 - RNA, 19 nt, Artificial Sequence
  Description of Artificial Sequence: Synthetic oligonucleotide
  Sense strand starting at position 408 of SEQ ID NO: 1883093
gugccuagggaagauuauu

SEQ ID NO: 2169003 - RNA, 19 nt, Artificial Sequence
  Description of Artificial Sequence: Synthetic oligonucleotide
  Antisense strand to SEQ ID NO: 2169002
aauaaucuucccuaggcac

SEQ ID NO: 2169004 - RNA, 19 nt, Artificial Sequence
  Description of Artificial Sequence: Synthetic oligonucleotide
  Sense strand starting at position 469 of SEQ ID NO: 1883093
ggaugauucuuugcuuucu

SEQ ID NO: 2169005 - RNA, 19 nt, Artificial Sequence
  Description of Artificial Sequence: Synthetic oligonucleotide
  Antisense strand to SEQ ID NO: 2169004
agaaagcaaagaaucaucc

SEQ ID NO: 2169006 - RNA, 19 nt, Artificial Sequence
  Description of Artificial Sequence: Synthetic oligonucleotide
  Sense strand starting at position 482 of SEQ ID NO: 1883093
cuuucuucuccugggaaau

SEQ ID NO: 2169007 - RNA, 19 nt, Artificial Sequence
  Description of Artificial Sequence: Synthetic oligonucleotide
  Antisense strand to SEQ ID NO: 2169006
auuucccaggagaagaaag

SEQ ID NO: 2169008 - RNA, 19 nt, Artificial Sequence
  Description of Artificial Sequence: Synthetic oligonucleotide
  Sense strand starting at position 483 of SEQ ID NO: 1883093
uuucuucuccugggaaaua

SEQ ID NO: 2169009 - RNA, 19 nt, Artificial Sequence
  Description of Artificial Sequence: Synthetic oligonucleotide
  Antisense strand to SEQ ID NO: 2169008
uauuucccaggagaagaaa

SEQ ID NO: 2169010 - RNA, 19 nt, Artificial Sequence
  Description of Artificial Sequence: Synthetic oligonucleotide
  Sense strand starting at position 607 of SEQ ID NO: 1883093
ggaugaggaaguuggcauu

SEQ ID NO: 2169011 - RNA, 19 nt, Artificial Sequence
  Description of Artificial Sequence: Synthetic oligonucleotide
  Antisense strand to SEQ ID NO: 2169010
aaugccaacuuccucaucc

SEQ ID NO: 2169012 - RNA, 19 nt, Artificial Sequence
  Description of Artificial Sequence: Synthetic oligonucleotide
  Sense strand starting at position 699 of SEQ ID NO: 1883093
gggaguagucuugagacuc

SEQ ID NO: 2169013 - RNA, 19 nt, Artificial Sequence
  Description of Artificial Sequence: Synthetic oligonucleotide
  Antisense strand to SEQ ID NO: 2169012
gagucucaagacuacuccc

SEQ ID NO: 2169014 - RNA, 19 nt, Artificial Sequence
  Description of Artificial Sequence: Synthetic oligonucleotide
  Sense strand starting at position 1392 of SEQ ID NO: 1883093
ggugcucuauaauuuguga

SEQ ID NO: 2169015 - RNA, 19 nt, Artificial Sequence
  Description of Artificial Sequence: Synthetic oligonucleotide
  Antisense strand to SEQ ID NO: 2169014
ucacaaauuauagagcacc

SEQ ID NO: 2169016 - RNA, 19 nt, Artificial Sequence
  Description of Artificial Sequence: Synthetic oligonucleotide
  Sense strand starting at position 1396 of SEQ ID NO: 1883093
cucuauaauuugugaauga

SEQ ID NO: 2169017 - RNA, 19 nt, Artificial Sequence
  Description of Artificial Sequence: Synthetic oligonucleotide
  Antisense strand to SEQ ID NO: 2169016
ucauucacaaauuauagag

SEQ ID NO: 2169018 - RNA, 19 nt, Artificial Sequence
  Description of Artificial Sequence: Synthetic oligonucleotide
  Sense strand starting at position 1397 of SEQ ID NO: 1883093
ucuauaauuugugaaugac

SEQ ID NO: 2169019 - RNA, 19 nt, Artificial Sequence
  Description of Artificial Sequence: Synthetic oligonucleotide
  Antisense strand to SEQ ID NO: 2169018
gucauucacaaauuauaga

SEQ ID NO: 2169020 - RNA, 19 nt, Artificial Sequence
  Description of Artificial Sequence: Synthetic oligonucleotide
  Sense strand starting at position 1407 of SEQ ID NO: 1883093
gugaaugacugucugauua

SEQ ID NO: 2169021 - RNA, 19 nt, Artificial Sequence
  Description of Artificial Sequence: Synthetic oligonucleotide
  Antisense strand to SEQ ID NO: 2169020
uaaucagacagucauucac

SEQ ID NO: 2169022 - RNA, 19 nt, Artificial Sequence
  Description of Artificial Sequence: Synthetic oligonucleotide
  Sense strand starting at position 1411 of SEQ ID NO: 1883093
augacugucugauuaaauu

SEQ ID NO: 2169023 - RNA, 19 nt, Artificial Sequence
  Description of Artificial Sequence: Synthetic oligonucleotide
  Antisense strand to SEQ ID NO: 2169022
aauuuaaucagacagucau

SEQ ID NO: 2169024 - RNA, 19 nt, Artificial Sequence
  Description of Artificial Sequence: Synthetic oligonucleotide
  Sense strand starting at position 1503 of SEQ ID NO: 1883093
agcucuuccuagucaugaa

SEQ ID NO: 2169025 - RNA, 19 nt, Artificial Sequence
  Description of Artificial Sequence: Synthetic oligonucleotide
  Antisense strand to SEQ ID NO: 2169024
uucaugacuaggaagagcu

SEQ ID NO: 2169026 - RNA, 19 nt, Artificial Sequence
  Description of Artificial Sequence: Synthetic oligonucleotide
  Sense strand starting at position 1529 of SEQ ID NO: 1883093
ucccgagucaucgaggaga

SEQ ID NO: 2169027 - RNA, 19 nt, Artificial Sequence
  Description of Artificial Sequence: Synthetic oligonucleotide
  Antisense strand to SEQ ID NO: 2169026
ucuccucgaugacucggga

SEQ ID NO: 2169028 - RNA, 19 nt, Artificial Sequence
  Description of Artificial Sequence: Synthetic oligonucleotide
  Sense strand starting at position 1531 of SEQ ID NO: 1883093
ccgagucaucgaggagaga

SEQ ID NO: 2169029 - RNA, 19 nt, Artificial Sequence
  Description of Artificial Sequence: Synthetic oligonucleotide
  Antisense strand to SEQ ID NO: 2169028
ucucuccucgaugacucgg

SEQ ID NO: 2169030 - RNA, 19 nt, Artificial Sequence
  Description of Artificial Sequence: Synthetic oligonucleotide
  Sense strand starting at position 1532 of SEQ ID NO: 1883093
cgagucaucgaggagagau

SEQ ID NO: 2169031 - RNA, 19 nt, Artificial Sequence
  Description of Artificial Sequence: Synthetic oligonucleotide
  Antisense strand to SEQ ID NO: 2169030
aucucuccucgaugacucg

SEQ ID NO: 2169032 - RNA, 19 nt, Artificial Sequence
  Description of Artificial Sequence: Synthetic oligonucleotide
  Sense strand starting at position 2050 of SEQ ID NO: 1883093
cugauuggaggauguuuaa

SEQ ID NO: 2169033 - RNA, 19 nt, Artificial Sequence
  Description of Artificial Sequence: Synthetic oligonucleotide
  Antisense strand to SEQ ID NO: 2169032
uuaaacauccuccaaucag

SEQ ID NO: 2169034 - RNA, 19 nt, Artificial Sequence
  Description of Artificial Sequence: Synthetic oligonucleotide
  Sense strand starting at position 2094 of SEQ ID NO: 1883093
gacagaaggugugcucagu

SEQ ID NO: 2169035 - RNA, 19 nt, Artificial Sequence
  Description of Artificial Sequence: Synthetic oligonucleotide
  Antisense strand to SEQ ID NO: 2169034
acugagcacaccuucuguc

SEQ ID NO: 2169036 - RNA, 19 nt, Artificial Sequence
  Description of Artificial Sequence: Synthetic oligonucleotide
  Sense strand starting at position 2107 of SEQ ID NO: 1883093
cucaguugcugggcugaaa

SEQ ID NO: 2169037 - RNA, 19 nt, Artificial Sequence
  Description of Artificial Sequence: Synthetic oligonucleotide
  Antisense strand to SEQ ID NO: 2169036
uuucagcccagcaacugag

SEQ ID NO: 2169038 - RNA, 19 nt, Artificial Sequence
  Description of Artificial Sequence: Synthetic oligonucleotide
  Sense strand starting at position 2164 of SEQ ID NO: 1883093
agggcuuccucccugaacu

SEQ ID NO: 2169039 - RNA, 19 nt, Artificial Sequence
  Description of Artificial Sequence: Synthetic oligonucleotide
  Antisense strand to SEQ ID NO: 2169038
aguucagggaggaagcccu

SEQ ID NO: 2169040 - RNA, 19 nt, Artificial Sequence
  Description of Artificial Sequence: Synthetic oligonucleotide
  Sense strand starting at position 2252 of SEQ ID NO: 1883093
aauaguauagugugugaaa

SEQ ID NO: 2169041 - RNA, 19 nt, Artificial Sequence
  Description of Artificial Sequence: Synthetic oligonucleotide
  Antisense strand to SEQ ID NO: 2169040
uuucacacacuauacuauu

SEQ ID NO: 2169042 - RNA, 19 nt, Artificial Sequence
  Description of Artificial Sequence: Synthetic oligonucleotide
  Sense strand starting at position 2253 of SEQ ID NO: 1883093
auaguauagugugugaaag

SEQ ID NO: 2169043 - RNA, 19 nt, Artificial Sequence
  Description of Artificial Sequence: Synthetic oligonucleotide
  Antisense strand to SEQ ID NO: 2169042
cuuucacacacuauacuau

SEQ ID NO: 2169044 - RNA, 19 nt, Artificial Sequence
  Description of Artificial Sequence: Synthetic oligonucleotide
  Sense strand starting at position 2380 of SEQ ID NO: 1883093
cacugagaugauugcauau

SEQ ID NO: 2169045 - RNA, 19 nt, Artificial Sequence
  Description of Artificial Sequence: Synthetic oligonucleotide
  Antisense strand to SEQ ID NO: 2169044
auaugcaaucaucucagug

SEQ ID NO: 2169046 - RNA, 19 nt, Artificial Sequence
  Description of Artificial Sequence: Synthetic oligonucleotide
  Sense strand starting at position 2645 of SEQ ID NO: 1883093
uccagaguagcuggcuaau

SEQ ID NO: 2169047 - RNA, 19 nt, Artificial Sequence
  Description of Artificial Sequence: Synthetic oligonucleotide
  Antisense strand to SEQ ID NO: 2169046
auuagccagcuacucugga

SEQ ID NO: 2169048 - RNA, 19 nt, Artificial Sequence
  Description of Artificial Sequence: Synthetic oligonucleotide
  Sense strand starting at position 2647 of SEQ ID NO: 1883093
cagaguagcuggcuaauuu

SEQ ID NO: 2169049 - RNA, 19 nt, Artificial Sequence
  Description of Artificial Sequence: Synthetic oligonucleotide
  Antisense strand to SEQ ID NO: 2169048
aaauuagccagcuacucug

SEQ ID NO: 2169050 - RNA, 19 nt, Artificial Sequence
  Description of Artificial Sequence: Synthetic oligonucleotide
  Sense strand starting at position 2960 of SEQ ID NO: 1883093
cggaguuaauucucugaaa

SEQ ID NO: 2169051 - RNA, 19 nt, Artificial Sequence
  Description of Artificial Sequence: Synthetic oligonucleotide
  Antisense strand to SEQ ID NO: 2169050
uuucagagaauuaacuccg

SEQ ID NO: 2169052 - RNA, 19 nt, Artificial Sequence
  Description of Artificial Sequence: Synthetic oligonucleotide
  Sense strand starting at position 2961 of SEQ ID NO: 1883093
ggaguuaauucucugaaau

SEQ ID NO: 2169053 - RNA, 19 nt, Artificial Sequence
  Description of Artificial Sequence: Synthetic oligonucleotide
  Antisense strand to SEQ ID NO: 2169052
auuucagagaauuaacucc

SEQ ID NO: 2169054 - RNA, 19 nt, Artificial Sequence
  Description of Artificial Sequence: Synthetic oligonucleotide
  Sense strand starting at position 2981 of SEQ ID NO: 1883093
aaauguaagccacauguga

SEQ ID NO: 2169055 - RNA, 19 nt, Artificial Sequence
  Description of Artificial Sequence: Synthetic oligonucleotide
  Antisense strand to SEQ ID NO: 2169054
ucacauguggcuuacauuu

SEQ ID NO: 2169056 - RNA, 19 nt, Artificial Sequence
  Description of Artificial Sequence: Synthetic oligonucleotide
  Sense strand starting at position 3047 of SEQ ID NO: 1883093
gguggaauuuauuguaaca

SEQ ID NO: 2169057 - RNA, 19 nt, Artificial Sequence
  Description of Artificial Sequence: Synthetic oligonucleotide
  Antisense strand to SEQ ID NO: 2169056
uguuacaauaaauuccacc

SEQ ID NO: 2169058 - RNA, 19 nt, Artificial Sequence
  Description of Artificial Sequence: Synthetic oligonucleotide
  Sense strand starting at position 3125 of SEQ ID NO: 1883093
uuuaauaugugagcaguau

SEQ ID NO: 2169059 - RNA, 19 nt, Artificial Sequence
  Description of Artificial Sequence: Synthetic oligonucleotide
  Antisense strand to SEQ ID NO: 2169058
auacugcucacauauuaaa

SEQ ID NO: 2169060 - RNA, 19 nt, Artificial Sequence
  Description of Artificial Sequence: Synthetic oligonucleotide
  Sense strand starting at position 3126 of SEQ ID NO: 1883093
uuaauaugugagcaguaug

SEQ ID NO: 2169061 - RNA, 19 nt, Artificial Sequence
  Description of Artificial Sequence: Synthetic oligonucleotide
  Antisense strand to SEQ ID NO: 2169060
cauacugcucacauauuaa

SEQ ID NO: 2169062 - RNA, 19 nt, Artificial Sequence
  Description of Artificial Sequence: Synthetic oligonucleotide
  Sense strand starting at position 3129 of SEQ ID NO: 1883093
auaugugagcaguauguaa

SEQ ID NO: 2169063 - RNA, 19 nt, Artificial Sequence
  Description of Artificial Sequence: Synthetic oligonucleotide
  Antisense strand to SEQ ID NO: 2169062
uuacauacugcucacauau

SEQ ID NO: 2169064 - RNA, 19 nt, Artificial Sequence
  Description of Artificial Sequence: Synthetic oligonucleotide
  Sense strand starting at position 3131 of SEQ ID NO: 1883093
augugagcaguauguaauu

SEQ ID NO: 2169065 - RNA, 19 nt, Artificial Sequence
  Description of Artificial Sequence: Synthetic oligonucleotide
  Antisense strand to SEQ ID NO: 2169064
aauuacauacugcucacau

SEQ ID NO: 2169066 - RNA, 19 nt, Artificial Sequence
  Description of Artificial Sequence: Synthetic oligonucleotide
  Sense strand starting at position 3610 of SEQ ID NO: 1883093
gagggucucacuuacggaa

SEQ ID NO: 2169067 - RNA, 19 nt, Artificial Sequence
  Description of Artificial Sequence: Synthetic oligonucleotide
  Antisense strand to SEQ ID NO: 2169066
uuccguaagugagacccuc

SEQ ID NO: 2169068 - RNA, 19 nt, Artificial Sequence
  Description of Artificial Sequence: Synthetic oligonucleotide
  Sense strand starting at position 3687 of SEQ ID NO: 1883093
cuacaucaaugagaagaaa

SEQ ID NO: 2169069 - RNA, 19 nt, Artificial Sequence
  Description of Artificial Sequence: Synthetic oligonucleotide
  Antisense strand to SEQ ID NO: 2169068
uuucuucucauugauguag

SEQ ID NO: 2169070 - RNA, 19 nt, Artificial Sequence
  Description of Artificial Sequence: Synthetic oligonucleotide
  Sense strand starting at position 3849 of SEQ ID NO: 1883093
guggcauaggguuacagua

SEQ ID NO: 2169071 - RNA, 19 nt, Artificial Sequence
  Description of Artificial Sequence: Synthetic oligonucleotide
  Antisense strand to SEQ ID NO: 2169070
uacuguaacccuaugccac

SEQ ID NO: 2169072 - RNA, 19 nt, Artificial Sequence
  Description of Artificial Sequence: Synthetic oligonucleotide
  Sense strand starting at position 3858 of SEQ ID NO: 1883093
gguuacaguauccguuaca

SEQ ID NO: 2169073 - RNA, 19 nt, Artificial Sequence
  Description of Artificial Sequence: Synthetic oligonucleotide
  Antisense strand to SEQ ID NO: 2169072
uguaacggauacuguaacc

SEQ ID NO: 2169074 - RNA, 19 nt, Artificial Sequence
  Description of Artificial Sequence: Synthetic oligonucleotide
  Sense strand starting at position 3861 of SEQ ID NO: 1883093
uacaguauccguuacagaa

SEQ ID NO: 2169075 - RNA, 19 nt, Artificial Sequence
  Description of Artificial Sequence: Synthetic oligonucleotide
  Antisense strand to SEQ ID NO: 2169074
uucuguaacggauacugua

SEQ ID NO: 2169076 - RNA, 19 nt, Artificial Sequence
  Description of Artificial Sequence: Synthetic oligonucleotide
  Sense strand starting at position 59 of SEQ ID NO: 1883094
ccagccugcguguaagagu

SEQ ID NO: 2169077 - RNA, 19 nt, Artificial Sequence
  Description of Artificial Sequence: Synthetic oligonucleotide
  Antisense strand to SEQ ID NO: 2169076
acucuuacacgcaggcugg

SEQ ID NO: 2169078 - RNA, 19 nt, Artificial Sequence
  Description of Artificial Sequence: Synthetic oligonucleotide
  Sense strand starting at position 151 of SEQ ID NO: 1883094
acacuagacugaugggaaa

SEQ ID NO: 2169079 - RNA, 19 nt, Artificial Sequence
  Description of Artificial Sequence: Synthetic oligonucleotide
  Antisense strand to SEQ ID NO: 2169078
uuucccaucagucuagugu

SEQ ID NO: 2169080 - RNA, 19 nt, Artificial Sequence
  Description of Artificial Sequence: Synthetic oligonucleotide
  Sense strand starting at position 260 of SEQ ID NO: 1883094
cuuauaugcugcuggugaa

SEQ ID NO: 2169081 - RNA, 19 nt, Artificial Sequence
  Description of Artificial Sequence: Synthetic oligonucleotide
  Antisense strand to SEQ ID NO: 2169080
uucaccagcagcauauaag

SEQ ID NO: 2169082 - RNA, 19 nt, Artificial Sequence
  Description of Artificial Sequence: Synthetic oligonucleotide
  Sense strand starting at position 261 of SEQ ID NO: 1883094
uuauaugcugcuggugaaa

SEQ ID NO: 2169083 - RNA, 19 nt, Artificial Sequence
  Description of Artificial Sequence: Synthetic oligonucleotide
  Antisense strand to SEQ ID NO: 2169082
uuucaccagcagcauauaa

SEQ ID NO: 2169084 - RNA, 19 nt, Artificial Sequence
  Description of Artificial Sequence: Synthetic oligonucleotide
  Sense strand starting at position 263 of SEQ ID NO: 1883094
auaugcugcuggugaaagu

SEQ ID NO: 2169085 - RNA, 19 nt, Artificial Sequence
  Description of Artificial Sequence: Synthetic oligonucleotide
  Antisense strand to SEQ ID NO: 2169084
acuuucaccagcagcauau

SEQ ID NO: 2169086 - RNA, 19 nt, Artificial Sequence
  Description of Artificial Sequence: Synthetic oligonucleotide
  Sense strand starting at position 357 of SEQ ID NO: 1883094
ucccgcaauugggaacaua

SEQ ID NO: 2169087 - RNA, 19 nt, Artificial Sequence
  Description of Artificial Sequence: Synthetic oligonucleotide
  Antisense strand to SEQ ID NO: 2169086
uauguucccaauugcggga

SEQ ID NO: 2169088 - RNA, 19 nt, Artificial Sequence
  Description of Artificial Sequence: Synthetic oligonucleotide
  Sense strand starting at position 369 of SEQ ID NO: 1883094
gaacauacccagugaaugu

SEQ ID NO: 2169089 - RNA, 19 nt, Artificial Sequence
  Description of Artificial Sequence: Synthetic oligonucleotide
  Antisense strand to SEQ ID NO: 2169088
acauucacuggguauguuc

SEQ ID NO: 2169090 - RNA, 19 nt, Artificial Sequence
  Description of Artificial Sequence: Synthetic oligonucleotide
  Sense strand starting at position 417 of SEQ ID NO: 1883094
gcguauguuuauuacagca

SEQ ID NO: 2169091 - RNA, 19 nt, Artificial Sequence
  Description of Artificial Sequence: Synthetic oligonucleotide
  Antisense strand to SEQ ID NO: 2169090
ugcuguaauaaacauacgc

SEQ ID NO: 2169092 - RNA, 19 nt, Artificial Sequence
  Description of Artificial Sequence: Synthetic oligonucleotide
  Sense strand starting at position 578 of SEQ ID NO: 1883094
ggaacuagagaccguuauu

SEQ ID NO: 2169093 - RNA, 19 nt, Artificial Sequence
  Description of Artificial Sequence: Synthetic oligonucleotide
  Antisense strand to SEQ ID NO: 2169092
aauaacggucucuaguucc

SEQ ID NO: 2169094 - RNA, 19 nt, Artificial Sequence
  Description of Artificial Sequence: Synthetic oligonucleotide
  Sense strand starting at position 1112 of SEQ ID NO: 1883094
ggagguuguaaugagguga

SEQ ID NO: 2169095 - RNA, 19 nt, Artificial Sequence
  Description of Artificial Sequence: Synthetic oligonucleotide
  Antisense strand to SEQ ID NO: 2169094
ucaccucauuacaaccucc

SEQ ID NO: 2169096 - RNA, 19 nt, Artificial Sequence
  Description of Artificial Sequence: Synthetic oligonucleotide
  Sense strand starting at position 1354 of SEQ ID NO: 1883094
cugguuugcuucgucauga

SEQ ID NO: 2169097 - RNA, 19 nt, Artificial Sequence
  Description of Artificial Sequence: Synthetic oligonucleotide
  Antisense strand to SEQ ID NO: 2169096
ucaugacgaagcaaaccag

SEQ ID NO: 2169098 - RNA, 19 nt, Artificial Sequence
  Description of Artificial Sequence: Synthetic oligonucleotide
  Sense strand starting at position 1355 of SEQ ID NO: 1883094
ugguuugcuucgucaugaa

SEQ ID NO: 2169099 - RNA, 19 nt, Artificial Sequence
  Description of Artificial Sequence: Synthetic oligonucleotide
  Antisense strand to SEQ ID NO: 2169098
uucaugacgaagcaaacca

SEQ ID NO: 2169100 - RNA, 19 nt, Artificial Sequence
  Description of Artificial Sequence: Synthetic oligonucleotide
  Sense strand starting at position 1358 of SEQ ID NO: 1883094
uuugcuucgucaugaaacu

SEQ ID NO: 2169101 - RNA, 19 nt, Artificial Sequence
  Description of Artificial Sequence: Synthetic oligonucleotide
  Antisense strand to SEQ ID NO: 2169100
aguuucaugacgaagcaaa

SEQ ID NO: 2169102 - RNA, 19 nt, Artificial Sequence
  Description of Artificial Sequence: Synthetic oligonucleotide
  Sense strand starting at position 1359 of SEQ ID NO: 1883094
uugcuucgucaugaaacuu

SEQ ID NO: 2169103 - RNA, 19 nt, Artificial Sequence
  Description of Artificial Sequence: Synthetic oligonucleotide
  Antisense strand to SEQ ID NO: 2169102
aaguuucaugacgaagcaa

SEQ ID NO: 2169104 - RNA, 19 nt, Artificial Sequence
  Description of Artificial Sequence: Synthetic oligonucleotide
  Sense strand starting at position 1434 of SEQ ID NO: 1883094
ggcacucuaugauucuuga

SEQ ID NO: 2169105 - RNA, 19 nt, Artificial Sequence
  Description of Artificial Sequence: Synthetic oligonucleotide
  Antisense strand to SEQ ID NO: 2169104
ucaagaaucauagagugcc

SEQ ID NO: 2169106 - RNA, 19 nt, Artificial Sequence
  Description of Artificial Sequence: Synthetic oligonucleotide
  Sense strand starting at position 1480 of SEQ ID NO: 1883094
uagagugacucccguacau

SEQ ID NO: 2169107 - RNA, 19 nt, Artificial Sequence
  Description of Artificial Sequence: Synthetic oligonucleotide
  Antisense strand to SEQ ID NO: 2169106
auguacgggagucacucua

SEQ ID NO: 2169108 - RNA, 19 nt, Artificial Sequence
  Description of Artificial Sequence: Synthetic oligonucleotide
  Sense strand starting at position 1482 of SEQ ID NO: 1883094
gagugacucccguacaucu

SEQ ID NO: 2169109 - RNA, 19 nt, Artificial Sequence
  Description of Artificial Sequence: Synthetic oligonucleotide
  Antisense strand to SEQ ID NO: 2169108
agauguacgggagucacuc

SEQ ID NO: 2169110 - RNA, 19 nt, Artificial Sequence
  Description of Artificial Sequence: Synthetic oligonucleotide
  Sense strand starting at position 1794 of SEQ ID NO: 1883094
uggagcugacugcgagaaa

SEQ ID NO: 2169111 - RNA, 19 nt, Artificial Sequence
  Description of Artificial Sequence: Synthetic oligonucleotide
  Antisense strand to SEQ ID NO: 2169110
uuucucgcagucagcucca

SEQ ID NO: 2169112 - RNA, 19 nt, Artificial Sequence
  Description of Artificial Sequence: Synthetic oligonucleotide
  Sense strand starting at position 2235 of SEQ ID NO: 1883094
ggcuucuuccuugaucuga

SEQ ID NO: 2169113 - RNA, 19 nt, Artificial Sequence
  Description of Artificial Sequence: Synthetic oligonucleotide
  Antisense strand to SEQ ID NO: 2169112
ucagaucaaggaagaagcc

SEQ ID NO: 2169114 - RNA, 19 nt, Artificial Sequence
  Description of Artificial Sequence: Synthetic oligonucleotide
  Sense strand starting at position 2394 of SEQ ID NO: 1883094
gcggauccuuugcagugau

SEQ ID NO: 2169115 - RNA, 19 nt, Artificial Sequence
  Description of Artificial Sequence: Synthetic oligonucleotide
  Antisense strand to SEQ ID NO: 2169114
aucacugcaaaggauccgc

SEQ ID NO: 2169116 - RNA, 19 nt, Artificial Sequence
  Description of Artificial Sequence: Synthetic oligonucleotide
  Sense strand starting at position 2397 of SEQ ID NO: 1883094
gauccuuugcagugauaug

SEQ ID NO: 2169117 - RNA, 19 nt, Artificial Sequence
  Description of Artificial Sequence: Synthetic oligonucleotide
  Antisense strand to SEQ ID NO: 2169116
cauaucacugcaaaggauc

SEQ ID NO: 2169118 - RNA, 19 nt, Artificial Sequence
  Description of Artificial Sequence: Synthetic oligonucleotide
  Sense strand starting at position 2407 of SEQ ID NO: 1883094
agugauauggugugacuuu

SEQ ID NO: 2169119 - RNA, 19 nt, Artificial Sequence
  Description of Artificial Sequence: Synthetic oligonucleotide
  Antisense strand to SEQ ID NO: 2169118
aaagucacaccauaucacu

SEQ ID NO: 2169120 - RNA, 19 nt, Artificial Sequence
  Description of Artificial Sequence: Synthetic oligonucleotide
  Sense strand starting at position 2824 of SEQ ID NO: 1883094
ucaugcuguucugguagua

SEQ ID NO: 2169121 - RNA, 19 nt, Artificial Sequence
  Description of Artificial Sequence: Synthetic oligonucleotide
  Antisense strand to SEQ ID NO: 2169120
uacuaccagaacagcauga

SEQ ID NO: 2169122 - RNA, 19 nt, Artificial Sequence
  Description of Artificial Sequence: Synthetic oligonucleotide
  Sense strand starting at position 2857 of SEQ ID NO: 1883094
aagacaccugaugguuuaa

SEQ ID NO: 2169123 - RNA, 19 nt, Artificial Sequence
  Description of Artificial Sequence: Synthetic oligonucleotide
  Antisense strand to SEQ ID NO: 2169122
uuaaaccaucaggugucuu

SEQ ID NO: 2169124 - RNA, 19 nt, Artificial Sequence
  Description of Artificial Sequence: Synthetic oligonucleotide
  Sense strand starting at position 3032 of SEQ ID NO: 1883094
cgcgguuugagcuauuugu

SEQ ID NO: 2169125 - RNA, 19 nt, Artificial Sequence
  Description of Artificial Sequence: Synthetic oligonucleotide
  Antisense strand to SEQ ID NO: 2169124
acaaauagcucaaaccgcg

SEQ ID NO: 2169126 - RNA, 19 nt, Artificial Sequence
  Description of Artificial Sequence: Synthetic oligonucleotide
  Sense strand starting at position 3036 of SEQ ID NO: 1883094
guuugagcuauuugucugu

SEQ ID NO: 2169127 - RNA, 19 nt, Artificial Sequence
  Description of Artificial Sequence: Synthetic oligonucleotide
  Antisense strand to SEQ ID NO: 2169126
acagacaaauagcucaaac

SEQ ID NO: 2169128 - RNA, 19 nt, Artificial Sequence
  Description of Artificial Sequence: Synthetic oligonucleotide
  Sense strand starting at position 3040 of SEQ ID NO: 1883094
gagcuauuugucuguagca

SEQ ID NO: 2169129 - RNA, 19 nt, Artificial Sequence
  Description of Artificial Sequence: Synthetic oligonucleotide
  Antisense strand to SEQ ID NO: 2169128
ugcuacagacaaauagcuc

SEQ ID NO: 2169130 - RNA, 19 nt, Artificial Sequence
  Description of Artificial Sequence: Synthetic oligonucleotide
  Sense strand starting at position 3042 of SEQ ID NO: 1883094
gcuauuugucuguagcagu

SEQ ID NO: 2169131 - RNA, 19 nt, Artificial Sequence
  Description of Artificial Sequence: Synthetic oligonucleotide
  Antisense strand to SEQ ID NO: 2169130
acugcuacagacaaauagc

SEQ ID NO: 2169132 - RNA, 19 nt, Artificial Sequence
  Description of Artificial Sequence: Synthetic oligonucleotide
  Sense strand starting at position 3106 of SEQ ID NO: 1883094
gaggcaauccucugcagua

SEQ ID NO: 2169133 - RNA, 19 nt, Artificial Sequence
  Description of Artificial Sequence: Synthetic oligonucleotide
  Antisense strand to SEQ ID NO: 2169132
uacugcagaggauugccuc

SEQ ID NO: 2169134 - RNA, 19 nt, Artificial Sequence
  Description of Artificial Sequence: Synthetic oligonucleotide
  Sense strand starting at position 3107 of SEQ ID NO: 1883094
aggcaauccucugcaguaa

SEQ ID NO: 2169135 - RNA, 19 nt, Artificial Sequence
  Description of Artificial Sequence: Synthetic oligonucleotide
  Antisense strand to SEQ ID NO: 2169134
uuacugcagaggauugccu

SEQ ID NO: 2169136 - RNA, 19 nt, Artificial Sequence
  Description of Artificial Sequence: Synthetic oligonucleotide
  Sense strand starting at position 3108 of SEQ ID NO: 1883094
ggcaauccucugcaguaaa

SEQ ID NO: 2169137 - RNA, 19 nt, Artificial Sequence
  Description of Artificial Sequence: Synthetic oligonucleotide
  Antisense strand to SEQ ID NO: 2169136
uuuacugcagaggauugcc

SEQ ID NO: 2169138 - RNA, 19 nt, Artificial Sequence
  Description of Artificial Sequence: Synthetic oligonucleotide
  Sense strand starting at position 3341 of SEQ ID NO: 1883094
gugacaggcauuugugauc

SEQ ID NO: 2169139 - RNA, 19 nt, Artificial Sequence
  Description of Artificial Sequence: Synthetic oligonucleotide
  Antisense strand to SEQ ID NO: 2169138
gaucacaaaugccugucac

SEQ ID NO: 2169140 - RNA, 19 nt, Artificial Sequence
  Description of Artificial Sequence: Synthetic oligonucleotide
  Sense strand starting at position 3567 of SEQ ID NO: 1883094
augugauuacuauguaaug

SEQ ID NO: 2169141 - RNA, 19 nt, Artificial Sequence
  Description of Artificial Sequence: Synthetic oligonucleotide
  Antisense strand to SEQ ID NO: 2169140
cauuacauaguaaucacau

SEQ ID NO: 2169142 - RNA, 19 nt, Artificial Sequence
  Description of Artificial Sequence: Synthetic oligonucleotide
  Sense strand starting at position 3569 of SEQ ID NO: 1883094
gugauuacuauguaauggu

SEQ ID NO: 2169143 - RNA, 19 nt, Artificial Sequence
  Description of Artificial Sequence: Synthetic oligonucleotide
  Antisense strand to SEQ ID NO: 2169142
accauuacauaguaaucac

SEQ ID NO: 2169144 - RNA, 19 nt, Artificial Sequence
  Description of Artificial Sequence: Synthetic oligonucleotide
  Sense strand starting at position 3611 of SEQ ID NO: 1883094
agcuaaaucucugaaugua

SEQ ID NO: 2169145 - RNA, 19 nt, Artificial Sequence
  Description of Artificial Sequence: Synthetic oligonucleotide
  Antisense strand to SEQ ID NO: 2169144
uacauucagagauuuagcu

SEQ ID NO: 2169146 - RNA, 19 nt, Artificial Sequence
  Description of Artificial Sequence: Synthetic oligonucleotide
  Sense strand starting at position 3619 of SEQ ID NO: 1883094
cucugaauguaaucuugua

SEQ ID NO: 2169147 - RNA, 19 nt, Artificial Sequence
  Description of Artificial Sequence: Synthetic oligonucleotide
  Antisense strand to SEQ ID NO: 2169146
uacaagauuacauucagag

SEQ ID NO: 2169148 - RNA, 19 nt, Artificial Sequence
  Description of Artificial Sequence: Synthetic oligonucleotide
  Sense strand starting at position 3919 of SEQ ID NO: 1883094
ucugguuguccucaggaau

SEQ ID NO: 2169149 - RNA, 19 nt, Artificial Sequence
  Description of Artificial Sequence: Synthetic oligonucleotide
  Antisense strand to SEQ ID NO: 2169148
auuccugaggacaaccaga

SEQ ID NO: 2169150 - RNA, 19 nt, Artificial Sequence
  Description of Artificial Sequence: Synthetic oligonucleotide
  Sense strand starting at position 3955 of SEQ ID NO: 1883094
aaugcauuagcaugugaaa

SEQ ID NO: 2169151 - RNA, 19 nt, Artificial Sequence
  Description of Artificial Sequence: Synthetic oligonucleotide
  Antisense strand to SEQ ID NO: 2169150
uuucacaugcuaaugcauu

SEQ ID NO: 2169152 - RNA, 19 nt, Artificial Sequence
  Description of Artificial Sequence: Synthetic oligonucleotide
  Sense strand starting at position 3957 of SEQ ID NO: 1883094
ugcauuagcaugugaaaga

SEQ ID NO: 2169153 - RNA, 19 nt, Artificial Sequence
  Description of Artificial Sequence: Synthetic oligonucleotide
  Antisense strand to SEQ ID NO: 2169152
ucuuucacaugcuaaugca

SEQ ID NO: 2169154 - RNA, 19 nt, Artificial Sequence
  Description of Artificial Sequence: Synthetic oligonucleotide
  Sense strand starting at position 3958 of SEQ ID NO: 1883094
gcauuagcaugugaaagac

SEQ ID NO: 2169155 - RNA, 19 nt, Artificial Sequence
  Description of Artificial Sequence: Synthetic oligonucleotide
  Antisense strand to SEQ ID NO: 2169154
gucuuucacaugcuaaugc

SEQ ID NO: 2169156 - RNA, 19 nt, Artificial Sequence
  Description of Artificial Sequence: Synthetic oligonucleotide
  Sense strand starting at position 53 of SEQ ID NO: 1883095
cuggcuguuuggagggaaa

SEQ ID NO: 2169157 - RNA, 19 nt, Artificial Sequence
  Description of Artificial Sequence: Synthetic oligonucleotide
  Antisense strand to SEQ ID NO: 2169156
uuucccuccaaacagccag

SEQ ID NO: 2169158 - RNA, 19 nt, Artificial Sequence
  Description of Artificial Sequence: Synthetic oligonucleotide
  Sense strand starting at position 55 of SEQ ID NO: 1883095
ggcuguuuggagggaaaca

SEQ ID NO: 2169159 - RNA, 19 nt, Artificial Sequence
  Description of Artificial Sequence: Synthetic oligonucleotide
  Antisense strand to SEQ ID NO: 2169158
uguuucccuccaaacagcc

SEQ ID NO: 2169160 - RNA, 19 nt, Artificial Sequence
  Description of Artificial Sequence: Synthetic oligonucleotide
  Sense strand starting at position 305 of SEQ ID NO: 1883095
gucgaacgccaagaguuua

SEQ ID NO: 2169161 - RNA, 19 nt, Artificial Sequence
  Description of Artificial Sequence: Synthetic oligonucleotide
  Antisense strand to SEQ ID NO: 2169160
uaaacucuuggcguucgac

SEQ ID NO: 2169162 - RNA, 19 nt, Artificial Sequence
  Description of Artificial Sequence: Synthetic oligonucleotide
  Sense strand starting at position 466 of SEQ ID NO: 1883095
acucauggauaauaaagua

SEQ ID NO: 2169163 - RNA, 19 nt, Artificial Sequence
  Description of Artificial Sequence: Synthetic oligonucleotide
  Antisense strand to SEQ ID NO: 2169162
uacuuuauuauccaugagu

SEQ ID NO: 2169164 - RNA, 19 nt, Artificial Sequence
  Description of Artificial Sequence: Synthetic oligonucleotide
  Sense strand starting at position 645 of SEQ ID NO: 1883095
cgaaacucuuugcuugaga

SEQ ID NO: 2169165 - RNA, 19 nt, Artificial Sequence
  Description of Artificial Sequence: Synthetic oligonucleotide
  Antisense strand to SEQ ID NO: 2169164
ucucaagcaaagaguuucg

SEQ ID NO: 2169166 - RNA, 19 nt, Artificial Sequence
  Description of Artificial Sequence: Synthetic oligonucleotide
  Sense strand starting at position 2191 of SEQ ID NO: 1883095
gagggacucgguuaccgaa

SEQ ID NO: 2169167 - RNA, 19 nt, Artificial Sequence
  Description of Artificial Sequence: Synthetic oligonucleotide
  Antisense strand to SEQ ID NO: 2169166
uucgguaaccgagucccuc

SEQ ID NO: 2169168 - RNA, 19 nt, Artificial Sequence
  Description of Artificial Sequence: Synthetic oligonucleotide
  Sense strand starting at position 2412 of SEQ ID NO: 1883095
cuguguuugaaguggaaua

SEQ ID NO: 2169169 - RNA, 19 nt, Artificial Sequence
  Description of Artificial Sequence: Synthetic oligonucleotide
  Antisense strand to SEQ ID NO: 2169168
uauuccacuucaaacacag

SEQ ID NO: 2169170 - RNA, 19 nt, Artificial Sequence
  Description of Artificial Sequence: Synthetic oligonucleotide
  Sense strand starting at position 2413 of SEQ ID NO: 1883095
uguguuugaaguggaauaa

SEQ ID NO: 2169171 - RNA, 19 nt, Artificial Sequence
  Description of Artificial Sequence: Synthetic oligonucleotide
  Antisense strand to SEQ ID NO: 2169170
uuauuccacuucaaacaca

SEQ ID NO: 2169172 - RNA, 19 nt, Artificial Sequence
  Description of Artificial Sequence: Synthetic oligonucleotide
  Sense strand starting at position 2414 of SEQ ID NO: 1883095
guguuugaaguggaauaaa

SEQ ID NO: 2169173 - RNA, 19 nt, Artificial Sequence
  Description of Artificial Sequence: Synthetic oligonucleotide
  Antisense strand to SEQ ID NO: 2169172
uuuauuccacuucaaacac

SEQ ID NO: 2169174 - RNA, 19 nt, Artificial Sequence
  Description of Artificial Sequence: Synthetic oligonucleotide
  Sense strand starting at position 2436 of SEQ ID NO: 1883095
uucgaacaauaggaauaua

SEQ ID NO: 2169175 - RNA, 19 nt, Artificial Sequence
  Description of Artificial Sequence: Synthetic oligonucleotide
  Antisense strand to SEQ ID NO: 2169174
uauauuccuauuguucgaa

SEQ ID NO: 2169176 - RNA, 19 nt, Artificial Sequence
  Description of Artificial Sequence: Synthetic oligonucleotide
  Sense strand starting at position 2447 of SEQ ID NO: 1883095
ggaauauaccgguagaugc

SEQ ID NO: 2169177 - RNA, 19 nt, Artificial Sequence
  Description of Artificial Sequence: Synthetic oligonucleotide
  Antisense strand to SEQ ID NO: 2169176
gcaucuaccgguauauucc

SEQ ID NO: 2169178 - RNA, 19 nt, Artificial Sequence
  Description of Artificial Sequence: Synthetic oligonucleotide
  Sense strand starting at position 2457 of SEQ ID NO: 1883095
gguagaugcuacuuagcau

SEQ ID NO: 2169179 - RNA, 19 nt, Artificial Sequence
  Description of Artificial Sequence: Synthetic oligonucleotide
  Antisense strand to SEQ ID NO: 2169178
augcuaaguagcaucuacc

SEQ ID NO: 2169180 - RNA, 19 nt, Artificial Sequence
  Description of Artificial Sequence: Synthetic oligonucleotide
  Sense strand starting at position 2479 of SEQ ID NO: 1883095
cuaccauguguuuauuaca

SEQ ID NO: 2169181 - RNA, 19 nt, Artificial Sequence
  Description of Artificial Sequence: Synthetic oligonucleotide
  Antisense strand to SEQ ID NO: 2169180
uguaauaaacacaugguag

SEQ ID NO: 2169182 - RNA, 19 nt, Artificial Sequence
  Description of Artificial Sequence: Synthetic oligonucleotide
  Sense strand starting at position 2529 of SEQ ID NO: 1883095
acgcaauaccaucauugaa

SEQ ID NO: 2169183 - RNA, 19 nt, Artificial Sequence
  Description of Artificial Sequence: Synthetic oligonucleotide
  Antisense strand to SEQ ID NO: 2169182
uucaaugaugguauugcgu

SEQ ID NO: 2169184 - RNA, 19 nt, Artificial Sequence
  Description of Artificial Sequence: Synthetic oligonucleotide
  Sense strand starting at position 2559 of SEQ ID NO: 1883095
ggaagaaauugguauggac

SEQ ID NO: 2169185 - RNA, 19 nt, Artificial Sequence
  Description of Artificial Sequence: Synthetic oligonucleotide
  Antisense strand to SEQ ID NO: 2169184
guccauaccaauuucuucc

SEQ ID NO: 2169186 - RNA, 19 nt, Artificial Sequence
  Description of Artificial Sequence: Synthetic oligonucleotide
  Sense strand starting at position 2603 of SEQ ID NO: 1883095
aaagccuguccagaacgau

SEQ ID NO: 2169187 - RNA, 19 nt, Artificial Sequence
  Description of Artificial Sequence: Synthetic oligonucleotide
  Antisense strand to SEQ ID NO: 2169186
aucguucuggacaggcuuu

SEQ ID NO: 2169188 - RNA, 19 nt, Artificial Sequence
  Description of Artificial Sequence: Synthetic oligonucleotide
  Sense strand starting at position 2615 of SEQ ID NO: 1883095
gaacgauccugucuuuguu

SEQ ID NO: 2169189 - RNA, 19 nt, Artificial Sequence
  Description of Artificial Sequence: Synthetic oligonucleotide
  Antisense strand to SEQ ID NO: 2169188
aacaaagacaggaucguuc

SEQ ID NO: 2169190 - RNA, 19 nt, Artificial Sequence
  Description of Artificial Sequence: Synthetic oligonucleotide
  Sense strand starting at position 2660 of SEQ ID NO: 1883095
augacaucauauguaguau

SEQ ID NO: 2169191 - RNA, 19 nt, Artificial Sequence
  Description of Artificial Sequence: Synthetic oligonucleotide
  Antisense strand to SEQ ID NO: 2169190
auacuacauaugaugucau

SEQ ID NO: 2169192 - RNA, 19 nt, Artificial Sequence
  Description of Artificial Sequence: Synthetic oligonucleotide
  Sense strand starting at position 2678 of SEQ ID NO: 1883095
uuauauaccguguauaugu

SEQ ID NO: 2169193 - RNA, 19 nt, Artificial Sequence
  Description of Artificial Sequence: Synthetic oligonucleotide
  Antisense strand to SEQ ID NO: 2169192
acauauacacgguauauaa

SEQ ID NO: 2169194 - RNA, 19 nt, Artificial Sequence
  Description of Artificial Sequence: Synthetic oligonucleotide
  Sense strand starting at position 2689 of SEQ ID NO: 1883095
guauauguguaucuauagu

SEQ ID NO: 2169195 - RNA, 19 nt, Artificial Sequence
  Description of Artificial Sequence: Synthetic oligonucleotide
  Antisense strand to SEQ ID NO: 2169194
acuauagauacacauauac

SEQ ID NO: 2169196 - RNA, 19 nt, Artificial Sequence
  Description of Artificial Sequence: Synthetic oligonucleotide
  Sense strand starting at position 2938 of SEQ ID NO: 1883095
ucagauuccugggcugagu

SEQ ID NO: 2169197 - RNA, 19 nt, Artificial Sequence
  Description of Artificial Sequence: Synthetic oligonucleotide
  Antisense strand to SEQ ID NO: 2169196
acucagcccaggaaucuga

SEQ ID NO: 2169198 - RNA, 19 nt, Artificial Sequence
  Description of Artificial Sequence: Synthetic oligonucleotide
  Sense strand starting at position 3116 of SEQ ID NO: 1883095
gggcgaagaccuuacucau

SEQ ID NO: 2169199 - RNA, 19 nt, Artificial Sequence
  Description of Artificial Sequence: Synthetic oligonucleotide
  Antisense strand to SEQ ID NO: 2169198
augaguaaggucuucgccc

SEQ ID NO: 2169200 - RNA, 19 nt, Artificial Sequence
  Description of Artificial Sequence: Synthetic oligonucleotide
  Sense strand starting at position 3119 of SEQ ID NO: 1883095
cgaagaccuuacucauagu

SEQ ID NO: 2169201 - RNA, 19 nt, Artificial Sequence
  Description of Artificial Sequence: Synthetic oligonucleotide
  Antisense strand to SEQ ID NO: 2169200
acuaugaguaaggucuucg

SEQ ID NO: 2169202 - RNA, 19 nt, Artificial Sequence
  Description of Artificial Sequence: Synthetic oligonucleotide
  Sense strand starting at position 3217 of SEQ ID NO: 1883095
gggcgauugucccucaaau

SEQ ID NO: 2169203 - RNA, 19 nt, Artificial Sequence
  Description of Artificial Sequence: Synthetic oligonucleotide
  Antisense strand to SEQ ID NO: 2169202
auuugagggacaaucgccc

SEQ ID NO: 2169204 - RNA, 19 nt, Artificial Sequence
  Description of Artificial Sequence: Synthetic oligonucleotide
  Sense strand starting at position 3219 of SEQ ID NO: 1883095
gcgauugucccucaaauga

SEQ ID NO: 2169205 - RNA, 19 nt, Artificial Sequence
  Description of Artificial Sequence: Synthetic oligonucleotide
  Antisense strand to SEQ ID NO: 2169204
ucauuugagggacaaucgc

SEQ ID NO: 2169206 - RNA, 19 nt, Artificial Sequence
  Description of Artificial Sequence: Synthetic oligonucleotide
  Sense strand starting at position 3327 of SEQ ID NO: 1883095
ccgugagcuguaggagaau

SEQ ID NO: 2169207 - RNA, 19 nt, Artificial Sequence
  Description of Artificial Sequence: Synthetic oligonucleotide
  Antisense strand to SEQ ID NO: 2169206
auucuccuacagcucacgg

SEQ ID NO: 2169208 - RNA, 19 nt, Artificial Sequence
  Description of Artificial Sequence: Synthetic oligonucleotide
  Sense strand starting at position 3339 of SEQ ID NO: 1883095
ggagaaugucccuggaccu

SEQ ID NO: 2169209 - RNA, 19 nt, Artificial Sequence
  Description of Artificial Sequence: Synthetic oligonucleotide
  Antisense strand to SEQ ID NO: 2169208
agguccagggacauucucc

SEQ ID NO: 2169210 - RNA, 19 nt, Artificial Sequence
  Description of Artificial Sequence: Synthetic oligonucleotide
  Sense strand starting at position 3474 of SEQ ID NO: 1883095
cagcuuguguaaucaggaa

SEQ ID NO: 2169211 - RNA, 19 nt, Artificial Sequence
  Description of Artificial Sequence: Synthetic oligonucleotide
  Antisense strand to SEQ ID NO: 2169210
uuccugauuacacaagcug

SEQ ID NO: 2169212 - RNA, 19 nt, Artificial Sequence
  Description of Artificial Sequence: Synthetic oligonucleotide
  Sense strand starting at position 3587 of SEQ ID NO: 1883095
cuguaauguccuggauuaa

SEQ ID NO: 2169213 - RNA, 19 nt, Artificial Sequence
  Description of Artificial Sequence: Synthetic oligonucleotide
  Antisense strand to SEQ ID NO: 2169212
uuaauccaggacauuacag

SEQ ID NO: 2169214 - RNA, 19 nt, Artificial Sequence
  Description of Artificial Sequence: Synthetic oligonucleotide
  Sense strand starting at position 3588 of SEQ ID NO: 1883095
uguaauguccuggauuaaa

SEQ ID NO: 2169215 - RNA, 19 nt, Artificial Sequence
  Description of Artificial Sequence: Synthetic oligonucleotide
  Antisense strand to SEQ ID NO: 2169214
uuuaauccaggacauuaca

SEQ ID NO: 2169216 - RNA, 19 nt, Artificial Sequence
  Description of Artificial Sequence: Synthetic oligonucleotide
  Sense strand starting at position 3688 of SEQ ID NO: 1883095
ucaguucugucauuaacca

SEQ ID NO: 2169217 - RNA, 19 nt, Artificial Sequence
  Description of Artificial Sequence: Synthetic oligonucleotide
  Antisense strand to SEQ ID NO: 2169216
ugguuaaugacagaacuga

SEQ ID NO: 2169218 - RNA, 19 nt, Artificial Sequence
  Description of Artificial Sequence: Synthetic oligonucleotide
  Sense strand starting at position 3763 of SEQ ID NO: 1883095
uggaguagaucauucugca

SEQ ID NO: 2169219 - RNA, 19 nt, Artificial Sequence
  Description of Artificial Sequence: Synthetic oligonucleotide
  Antisense strand to SEQ ID NO: 2169218
ugcagaaugaucuacucca

SEQ ID NO: 2169220 - RNA, 19 nt, Artificial Sequence
  Description of Artificial Sequence: Synthetic oligonucleotide
  Sense strand starting at position 3767 of SEQ ID NO: 1883095
guagaucauucugcaaaug

SEQ ID NO: 2169221 - RNA, 19 nt, Artificial Sequence
  Description of Artificial Sequence: Synthetic oligonucleotide
  Antisense strand to SEQ ID NO: 2169220
cauuugcagaaugaucuac

SEQ ID NO: 2169222 - RNA, 19 nt, Artificial Sequence
  Description of Artificial Sequence: Synthetic oligonucleotide
  Sense strand starting at position 3779 of SEQ ID NO: 1883095
gcaaaugucccugagucca

SEQ ID NO: 2169223 - RNA, 19 nt, Artificial Sequence
  Description of Artificial Sequence: Synthetic oligonucleotide
  Antisense strand to SEQ ID NO: 2169222
uggacucagggacauuugc

SEQ ID NO: 2169224 - RNA, 19 nt, Artificial Sequence
  Description of Artificial Sequence: Synthetic oligonucleotide
  Sense strand starting at position 3869 of SEQ ID NO: 1883095
cgggucacccugcaugaua

SEQ ID NO: 2169225 - RNA, 19 nt, Artificial Sequence
  Description of Artificial Sequence: Synthetic oligonucleotide
  Antisense strand to SEQ ID NO: 2169224
uaucaugcagggugacccg

SEQ ID NO: 2169226 - RNA, 19 nt, Artificial Sequence
  Description of Artificial Sequence: Synthetic oligonucleotide
  Sense strand starting at position 3871 of SEQ ID NO: 1883095
ggucacccugcaugauaau

SEQ ID NO: 2169227 - RNA, 19 nt, Artificial Sequence
  Description of Artificial Sequence: Synthetic oligonucleotide
  Antisense strand to SEQ ID NO: 2169226
auuaucaugcagggugacc

SEQ ID NO: 2169228 - RNA, 19 nt, Artificial Sequence
  Description of Artificial Sequence: Synthetic oligonucleotide
  Sense strand starting at position 3872 of SEQ ID NO: 1883095
gucacccugcaugauaauu

SEQ ID NO: 2169229 - RNA, 19 nt, Artificial Sequence
  Description of Artificial Sequence: Synthetic oligonucleotide
  Antisense strand to SEQ ID NO: 2169228
aauuaucaugcagggugac

SEQ ID NO: 2169230 - RNA, 19 nt, Artificial Sequence
  Description of Artificial Sequence: Synthetic oligonucleotide
  Sense strand starting at position 3908 of SEQ ID NO: 1883095
caacaauguguuggcaagu

SEQ ID NO: 2169231 - RNA, 19 nt, Artificial Sequence
  Description of Artificial Sequence: Synthetic oligonucleotide
  Antisense strand to SEQ ID NO: 2169230
acuugccaacacauuguug

SEQ ID NO: 2169232 - RNA, 19 nt, Artificial Sequence
  Description of Artificial Sequence: Synthetic oligonucleotide
  Sense strand starting at position 3930 of SEQ ID NO: 1883095
ugccauguugccuggaaga

SEQ ID NO: 2169233 - RNA, 19 nt, Artificial Sequence
  Description of Artificial Sequence: Synthetic oligonucleotide
  Antisense strand to SEQ ID NO: 2169232
ucuuccaggcaacauggca

SEQ ID NO: 2169234 - RNA, 19 nt, Artificial Sequence
  Description of Artificial Sequence: Synthetic oligonucleotide
  Sense strand starting at position 3977 of SEQ ID NO: 1883095
ccuuauuccuguuugagga

SEQ ID NO: 2169235 - RNA, 19 nt, Artificial Sequence
  Description of Artificial Sequence: Synthetic oligonucleotide
  Antisense strand to SEQ ID NO: 2169234
uccucaaacaggaauaagg

SEQ ID NO: 2169236 - RNA, 19 nt, Artificial Sequence
  Description of Artificial Sequence: Synthetic oligonucleotide
  Sense strand starting at position 10 of SEQ ID NO: 1883096
auccauucggcucagaaug

SEQ ID NO: 2169237 - RNA, 19 nt, Artificial Sequence
  Description of Artificial Sequence: Synthetic oligonucleotide
  Antisense strand to SEQ ID NO: 2169236
cauucugagccgaauggau

SEQ ID NO: 2169238 - RNA, 19 nt, Artificial Sequence
  Description of Artificial Sequence: Synthetic oligonucleotide
  Sense strand starting at position 12 of SEQ ID NO: 1883096
ccauucggcucagaaugaa

SEQ ID NO: 2169239 - RNA, 19 nt, Artificial Sequence
  Description of Artificial Sequence: Synthetic oligonucleotide
  Antisense strand to SEQ ID NO: 2169238
uucauucugagccgaaugg

SEQ ID NO: 2169240 - RNA, 19 nt, Artificial Sequence
  Description of Artificial Sequence: Synthetic oligonucleotide
  Sense strand starting at position 51 of SEQ ID NO: 1883096
caauuuggaucaugaguac

SEQ ID NO: 2169241 - RNA, 19 nt, Artificial Sequence
  Description of Artificial Sequence: Synthetic oligonucleotide
  Antisense strand to SEQ ID NO: 2169240
guacucaugauccaaauug

SEQ ID NO: 2169242 - RNA, 19 nt, Artificial Sequence
  Description of Artificial Sequence: Synthetic oligonucleotide
  Sense strand starting at position 54 of SEQ ID NO: 1883096
uuuggaucaugaguacaaa

SEQ ID NO: 2169243 - RNA, 19 nt, Artificial Sequence
  Description of Artificial Sequence: Synthetic oligonucleotide
  Antisense strand to SEQ ID NO: 2169242
uuuguacucaugauccaaa

SEQ ID NO: 2169244 - RNA, 19 nt, Artificial Sequence
  Description of Artificial Sequence: Synthetic oligonucleotide
  Sense strand starting at position 91 of SEQ ID NO: 1883096
uuugcuauguauuuagauc

SEQ ID NO: 2169245 - RNA, 19 nt, Artificial Sequence
  Description of Artificial Sequence: Synthetic oligonucleotide
  Antisense strand to SEQ ID NO: 2169244
gaucuaaauacauagcaaa

SEQ ID NO: 2169246 - RNA, 19 nt, Artificial Sequence
  Description of Artificial Sequence: Synthetic oligonucleotide
  Sense strand starting at position 149 of SEQ ID NO: 1883096
auggacaugucauaggaaa

SEQ ID NO: 2169247 - RNA, 19 nt, Artificial Sequence
  Description of Artificial Sequence: Synthetic oligonucleotide
  Antisense strand to SEQ ID NO: 2169246
uuuccuaugacauguccau

SEQ ID NO: 2169248 - RNA, 19 nt, Artificial Sequence
  Description of Artificial Sequence: Synthetic oligonucleotide
  Sense strand starting at position 502 of SEQ ID NO: 1883096
ccaagugcaagucgugaua

SEQ ID NO: 2169249 - RNA, 19 nt, Artificial Sequence
  Description of Artificial Sequence: Synthetic oligonucleotide
  Antisense strand to SEQ ID NO: 2169248
uaucacgacuugcacuugg

SEQ ID NO: 2169250 - RNA, 19 nt, Artificial Sequence
  Description of Artificial Sequence: Synthetic oligonucleotide
  Sense strand starting at position 505 of SEQ ID NO: 1883096
agugcaagucgugauagaa

SEQ ID NO: 2169251 - RNA, 19 nt, Artificial Sequence
  Description of Artificial Sequence: Synthetic oligonucleotide
  Antisense strand to SEQ ID NO: 2169250
uucuaucacgacuugcacu

SEQ ID NO: 2169252 - RNA, 19 nt, Artificial Sequence
  Description of Artificial Sequence: Synthetic oligonucleotide
  Sense strand starting at position 543 of SEQ ID NO: 1883096
auuugcuccuaucacgauu

SEQ ID NO: 2169253 - RNA, 19 nt, Artificial Sequence
  Description of Artificial Sequence: Synthetic oligonucleotide
  Antisense strand to SEQ ID NO: 2169252
aaucgugauaggagcaaau

SEQ ID NO: 2169254 - RNA, 19 nt, Artificial Sequence
  Description of Artificial Sequence: Synthetic oligonucleotide
  Sense strand starting at position 545 of SEQ ID NO: 1883096
uugcuccuaucacgauuua

SEQ ID NO: 2169255 - RNA, 19 nt, Artificial Sequence
  Description of Artificial Sequence: Synthetic oligonucleotide
  Antisense strand to SEQ ID NO: 2169254
uaaaucgugauaggagcaa

SEQ ID NO: 2169256 - RNA, 19 nt, Artificial Sequence
  Description of Artificial Sequence: Synthetic oligonucleotide
  Sense strand starting at position 678 of SEQ ID NO: 1883096
ccaaguguugcucaccuuu

SEQ ID NO: 2169257 - RNA, 19 nt, Artificial Sequence
  Description of Artificial Sequence: Synthetic oligonucleotide
  Antisense strand to SEQ ID NO: 2169256
aaaggugagcaacacuugg

SEQ ID NO: 2169258 - RNA, 19 nt, Artificial Sequence
  Description of Artificial Sequence: Synthetic oligonucleotide
  Sense strand starting at position 894 of SEQ ID NO: 1883096
augccucugccuugaagua

SEQ ID NO: 2169259 - RNA, 19 nt, Artificial Sequence
  Description of Artificial Sequence: Synthetic oligonucleotide
  Antisense strand to SEQ ID NO: 2169258
uacuucaaggcagaggcau

SEQ ID NO: 2169260 - RNA, 19 nt, Artificial Sequence
  Description of Artificial Sequence: Synthetic oligonucleotide
  Sense strand starting at position 1103 of SEQ ID NO: 1883096
uuauuuaagucugaccuga

SEQ ID NO: 2169261 - RNA, 19 nt, Artificial Sequence
  Description of Artificial Sequence: Synthetic oligonucleotide
  Antisense strand to SEQ ID NO: 2169260
ucaggucagacuuaaauaa

SEQ ID NO: 2169262 - RNA, 19 nt, Artificial Sequence
  Description of Artificial Sequence: Synthetic oligonucleotide
  Sense strand starting at position 1169 of SEQ ID NO: 1883096
caugcauccugauaguuga

SEQ ID NO: 2169263 - RNA, 19 nt, Artificial Sequence
  Description of Artificial Sequence: Synthetic oligonucleotide
  Antisense strand to SEQ ID NO: 2169262
ucaacuaucaggaugcaug

SEQ ID NO: 2169264 - RNA, 19 nt, Artificial Sequence
  Description of Artificial Sequence: Synthetic oligonucleotide
  Sense strand starting at position 1328 of SEQ ID NO: 1883096
agcccagacgccugaaaua

SEQ ID NO: 2169265 - RNA, 19 nt, Artificial Sequence
  Description of Artificial Sequence: Synthetic oligonucleotide
  Antisense strand to SEQ ID NO: 2169264
uauuucaggcgucugggcu

SEQ ID NO: 2169266 - RNA, 19 nt, Artificial Sequence
  Description of Artificial Sequence: Synthetic oligonucleotide
  Sense strand starting at position 1445 of SEQ ID NO: 1883096
ggguuacccucugcaagag

SEQ ID NO: 2169267 - RNA, 19 nt, Artificial Sequence
  Description of Artificial Sequence: Synthetic oligonucleotide
  Antisense strand to SEQ ID NO: 2169266
cucuugcagaggguaaccc

SEQ ID NO: 2169268 - RNA, 19 nt, Artificial Sequence
  Description of Artificial Sequence: Synthetic oligonucleotide
  Sense strand starting at position 2133 of SEQ ID NO: 1883096
cgggcuucugguugacaca

SEQ ID NO: 2169269 - RNA, 19 nt, Artificial Sequence
  Description of Artificial Sequence: Synthetic oligonucleotide
  Antisense strand to SEQ ID NO: 2169268
ugugucaaccagaagcccg

SEQ ID NO: 2169270 - RNA, 19 nt, Artificial Sequence
  Description of Artificial Sequence: Synthetic oligonucleotide
  Sense strand starting at position 2254 of SEQ ID NO: 1883096
agguuugcacaucaggaau

SEQ ID NO: 2169271 - RNA, 19 nt, Artificial Sequence
  Description of Artificial Sequence: Synthetic oligonucleotide
  Antisense strand to SEQ ID NO: 2169270
auuccugaugugcaaaccu

SEQ ID NO: 2169272 - RNA, 19 nt, Artificial Sequence
  Description of Artificial Sequence: Synthetic oligonucleotide
  Sense strand starting at position 2271 of SEQ ID NO: 1883096
auuggaguccuuugcacau

SEQ ID NO: 2169273 - RNA, 19 nt, Artificial Sequence
  Description of Artificial Sequence: Synthetic oligonucleotide
  Antisense strand to SEQ ID NO: 2169272
augugcaaaggacuccaau

SEQ ID NO: 2169274 - RNA, 19 nt, Artificial Sequence
  Description of Artificial Sequence: Synthetic oligonucleotide
  Sense strand starting at position 2315 of SEQ ID NO: 1883096
gguagauucuaccuguggu

SEQ ID NO: 2169275 - RNA, 19 nt, Artificial Sequence
  Description of Artificial Sequence: Synthetic oligonucleotide
  Antisense strand to SEQ ID NO: 2169274
accacagguagaaucuacc

SEQ ID NO: 2169276 - RNA, 19 nt, Artificial Sequence
  Description of Artificial Sequence: Synthetic oligonucleotide
  Sense strand starting at position 2316 of SEQ ID NO: 1883096
guagauucuaccugugguu

SEQ ID NO: 2169277 - RNA, 19 nt, Artificial Sequence
  Description of Artificial Sequence: Synthetic oligonucleotide
  Antisense strand to SEQ ID NO: 2169276
aaccacagguagaaucuac

SEQ ID NO: 2169278 - RNA, 19 nt, Artificial Sequence
  Description of Artificial Sequence: Synthetic oligonucleotide
  Sense strand starting at position 2340 of SEQ ID NO: 1883096
cgcgugguucuagagugaa

SEQ ID NO: 2169279 - RNA, 19 nt, Artificial Sequence
  Description of Artificial Sequence: Synthetic oligonucleotide
  Antisense strand to SEQ ID NO: 2169278
uucacucuagaaccacgcg

SEQ ID NO: 2169280 - RNA, 19 nt, Artificial Sequence
  Description of Artificial Sequence: Synthetic oligonucleotide
  Sense strand starting at position 2343 of SEQ ID NO: 1883096
gugguucuagagugaauua

SEQ ID NO: 2169281 - RNA, 19 nt, Artificial Sequence
  Description of Artificial Sequence: Synthetic oligonucleotide
  Antisense strand to SEQ ID NO: 2169280
uaauucacucuagaaccac

SEQ ID NO: 2169282 - RNA, 19 nt, Artificial Sequence
  Description of Artificial Sequence: Synthetic oligonucleotide
  Sense strand starting at position 2344 of SEQ ID NO: 1883096
ugguucuagagugaauuau

SEQ ID NO: 2169283 - RNA, 19 nt, Artificial Sequence
  Description of Artificial Sequence: Synthetic oligonucleotide
  Antisense strand to SEQ ID NO: 2169282
auaauucacucuagaacca

SEQ ID NO: 2169284 - RNA, 19 nt, Artificial Sequence
  Description of Artificial Sequence: Synthetic oligonucleotide
  Sense strand starting at position 2500 of SEQ ID NO: 1883096
aaauuagcucggugucaug

SEQ ID NO: 2169285 - RNA, 19 nt, Artificial Sequence
  Description of Artificial Sequence: Synthetic oligonucleotide
  Antisense strand to SEQ ID NO: 2169284
caugacaccgagcuaauuu

SEQ ID NO: 2169286 - RNA, 19 nt, Artificial Sequence
  Description of Artificial Sequence: Synthetic oligonucleotide
  Sense strand starting at position 2730 of SEQ ID NO: 1883096
caaaucuuguggguguaga

SEQ ID NO: 2169287 - RNA, 19 nt, Artificial Sequence
  Description of Artificial Sequence: Synthetic oligonucleotide
  Antisense strand to SEQ ID NO: 2169286
ucuacacccacaagauuug

SEQ ID NO: 2169288 - RNA, 19 nt, Artificial Sequence
  Description of Artificial Sequence: Synthetic oligonucleotide
  Sense strand starting at position 3279 of SEQ ID NO: 1883096
gaggcacaauuguuugaau

SEQ ID NO: 2169289 - RNA, 19 nt, Artificial Sequence
  Description of Artificial Sequence: Synthetic oligonucleotide
  Antisense strand to SEQ ID NO: 2169288
auucaaacaauugugccuc

SEQ ID NO: 2169290 - RNA, 19 nt, Artificial Sequence
  Description of Artificial Sequence: Synthetic oligonucleotide
  Sense strand starting at position 3281 of SEQ ID NO: 1883096
ggcacaauuguuugaauca

SEQ ID NO: 2169291 - RNA, 19 nt, Artificial Sequence
  Description of Artificial Sequence: Synthetic oligonucleotide
  Antisense strand to SEQ ID NO: 2169290
ugauucaaacaauugugcc

SEQ ID NO: 2169292 - RNA, 19 nt, Artificial Sequence
  Description of Artificial Sequence: Synthetic oligonucleotide
  Sense strand starting at position 3282 of SEQ ID NO: 1883096
gcacaauuguuugaaucac

SEQ ID NO: 2169293 - RNA, 19 nt, Artificial Sequence
  Description of Artificial Sequence: Synthetic oligonucleotide
  Antisense strand to SEQ ID NO: 2169292
gugauucaaacaauugugc

SEQ ID NO: 2169294 - RNA, 19 nt, Artificial Sequence
  Description of Artificial Sequence: Synthetic oligonucleotide
  Sense strand starting at position 3288 of SEQ ID NO: 1883096
uuguuugaaucacuugaac

SEQ ID NO: 2169295 - RNA, 19 nt, Artificial Sequence
  Description of Artificial Sequence: Synthetic oligonucleotide
  Antisense strand to SEQ ID NO: 2169294
guucaagugauucaaacaa

SEQ ID NO: 2169296 - RNA, 19 nt, Artificial Sequence
  Description of Artificial Sequence: Synthetic oligonucleotide
  Sense strand starting at position 3604 of SEQ ID NO: 1883096
guccuuuaaucaggacaua

SEQ ID NO: 2169297 - RNA, 19 nt, Artificial Sequence
  Description of Artificial Sequence: Synthetic oligonucleotide
  Antisense strand to SEQ ID NO: 2169296
uauguccugauuaaaggac

SEQ ID NO: 2169298 - RNA, 19 nt, Artificial Sequence
  Description of Artificial Sequence: Synthetic oligonucleotide
  Sense strand starting at position 3631 of SEQ ID NO: 1883096
ucagauauuuguuaugccu

SEQ ID NO: 2169299 - RNA, 19 nt, Artificial Sequence
  Description of Artificial Sequence: Synthetic oligonucleotide
  Antisense strand to SEQ ID NO: 2169298
aggcauaacaaauaucuga

SEQ ID NO: 2169300 - RNA, 19 nt, Artificial Sequence
  Description of Artificial Sequence: Synthetic oligonucleotide
  Sense strand starting at position 3633 of SEQ ID NO: 1883096
agauauuuguuaugccuau

SEQ ID NO: 2169301 - RNA, 19 nt, Artificial Sequence
  Description of Artificial Sequence: Synthetic oligonucleotide
  Antisense strand to SEQ ID NO: 2169300
auaggcauaacaaauaucu

SEQ ID NO: 2169302 - RNA, 19 nt, Artificial Sequence
  Description of Artificial Sequence: Synthetic oligonucleotide
  Sense strand starting at position 3732 of SEQ ID NO: 1883096
ggguuugaacuucgaaggu

SEQ ID NO: 2169303 - RNA, 19 nt, Artificial Sequence
  Description of Artificial Sequence: Synthetic oligonucleotide
  Antisense strand to SEQ ID NO: 2169302
accuucgaaguucaaaccc

SEQ ID NO: 2169304 - RNA, 19 nt, Artificial Sequence
  Description of Artificial Sequence: Synthetic oligonucleotide
  Sense strand starting at position 3868 of SEQ ID NO: 1883096
gggacuugaguauggcaga

SEQ ID NO: 2169305 - RNA, 19 nt, Artificial Sequence
  Description of Artificial Sequence: Synthetic oligonucleotide
  Antisense strand to SEQ ID NO: 2169304
ucugccauacucaaguccc

SEQ ID NO: 2169306 - RNA, 19 nt, Artificial Sequence
  Description of Artificial Sequence: Synthetic oligonucleotide
  Sense strand starting at position 3871 of SEQ ID NO: 1883096
acuugaguauggcagauuu

SEQ ID NO: 2169307 - RNA, 19 nt, Artificial Sequence
  Description of Artificial Sequence: Synthetic oligonucleotide
  Antisense strand to SEQ ID NO: 2169306
aaaucugccauacucaagu

SEQ ID NO: 2169308 - RNA, 19 nt, Artificial Sequence
  Description of Artificial Sequence: Synthetic oligonucleotide
  Sense strand starting at position 3889 of SEQ ID NO: 1883096
uggguaugagggugauuau

SEQ ID NO: 2169309 - RNA, 19 nt, Artificial Sequence
  Description of Artificial Sequence: Synthetic oligonucleotide
  Antisense strand to SEQ ID NO: 2169308
auaaucacccucauaccca

SEQ ID NO: 2169310 - RNA, 19 nt, Artificial Sequence
  Description of Artificial Sequence: Synthetic oligonucleotide
  Sense strand starting at position 3892 of SEQ ID NO: 1883096
guaugagggugauuauggu

SEQ ID NO: 2169311 - RNA, 19 nt, Artificial Sequence
  Description of Artificial Sequence: Synthetic oligonucleotide
  Antisense strand to SEQ ID NO: 2169310
accauaaucacccucauac

SEQ ID NO: 2169312 - RNA, 19 nt, Artificial Sequence
  Description of Artificial Sequence: Synthetic oligonucleotide
  Sense strand starting at position 3898 of SEQ ID NO: 1883096
gggugauuaugguuugggu

SEQ ID NO: 2169313 - RNA, 19 nt, Artificial Sequence
  Description of Artificial Sequence: Synthetic oligonucleotide
  Antisense strand to SEQ ID NO: 2169312
acccaaaccauaaucaccc

SEQ ID NO: 2169314 - RNA, 19 nt, Artificial Sequence
  Description of Artificial Sequence: Synthetic oligonucleotide
  Sense strand starting at position 3900 of SEQ ID NO: 1883096
gugauuaugguuuggguca

SEQ ID NO: 2169315 - RNA, 19 nt, Artificial Sequence
  Description of Artificial Sequence: Synthetic oligonucleotide
  Antisense strand to SEQ ID NO: 2169314
ugacccaaaccauaaucac

SEQ ID NO: 2169316 - RNA, 19 nt, Artificial Sequence
  Description of Artificial Sequence: Synthetic oligonucleotide
  Sense strand starting at position 229 of SEQ ID NO: 1883097
auuguaagauuacucuaag

SEQ ID NO: 2169317 - RNA, 19 nt, Artificial Sequence
  Description of Artificial Sequence: Synthetic oligonucleotide
  Antisense strand to SEQ ID NO: 2169316
cuuagaguaaucuuacaau

SEQ ID NO: 2169318 - RNA, 19 nt, Artificial Sequence
  Description of Artificial Sequence: Synthetic oligonucleotide
  Sense strand starting at position 230 of SEQ ID NO: 1883097
uuguaagauuacucuaagc

SEQ ID NO: 2169319 - RNA, 19 nt, Artificial Sequence
  Description of Artificial Sequence: Synthetic oligonucleotide
  Antisense strand to SEQ ID NO: 2169318
gcuuagaguaaucuuacaa

SEQ ID NO: 2169320 - RNA, 19 nt, Artificial Sequence
  Description of Artificial Sequence: Synthetic oligonucleotide
  Sense strand starting at position 232 of SEQ ID NO: 1883097
guaagauuacucuaagccu

SEQ ID NO: 2169321 - RNA, 19 nt, Artificial Sequence
  Description of Artificial Sequence: Synthetic oligonucleotide
  Antisense strand to SEQ ID NO: 2169320
aggcuuagaguaaucuuac

SEQ ID NO: 2169322 - RNA, 19 nt, Artificial Sequence
  Description of Artificial Sequence: Synthetic oligonucleotide
  Sense strand starting at position 575 of SEQ ID NO: 1883097
aagcgcaagugugauagaa

SEQ ID NO: 2169323 - RNA, 19 nt, Artificial Sequence
  Description of Artificial Sequence: Synthetic oligonucleotide
  Antisense strand to SEQ ID NO: 2169322
uucuaucacacuugcgcuu

SEQ ID NO: 2169324 - RNA, 19 nt, Artificial Sequence
  Description of Artificial Sequence: Synthetic oligonucleotide
  Sense strand starting at position 734 of SEQ ID NO: 1883097
ccgaguguugcucaccuuu

SEQ ID NO: 2169325 - RNA, 19 nt, Artificial Sequence
  Description of Artificial Sequence: Synthetic oligonucleotide
  Antisense strand to SEQ ID NO: 2169324
aaaggugagcaacacucgg

SEQ ID NO: 2169326 - RNA, 19 nt, Artificial Sequence
  Description of Artificial Sequence: Synthetic oligonucleotide
  Sense strand starting at position 736 of SEQ ID NO: 1883097
gaguguugcucaccuuucu

SEQ ID NO: 2169327 - RNA, 19 nt, Artificial Sequence
  Description of Artificial Sequence: Synthetic oligonucleotide
  Antisense strand to SEQ ID NO: 2169326
agaaaggugagcaacacuc

SEQ ID NO: 2169328 - RNA, 19 nt, Artificial Sequence
  Description of Artificial Sequence: Synthetic oligonucleotide
  Sense strand starting at position 956 of SEQ ID NO: 1883097
augccucugccuugaagua

SEQ ID NO: 2169329 - RNA, 19 nt, Artificial Sequence
  Description of Artificial Sequence: Synthetic oligonucleotide
  Antisense strand to SEQ ID NO: 2169328
uacuucaaggcagaggcau

SEQ ID NO: 2169330 - RNA, 19 nt, Artificial Sequence
  Description of Artificial Sequence: Synthetic oligonucleotide
  Sense strand starting at position 1068 of SEQ ID NO: 1883097
ugugccgaguccucaguau

SEQ ID NO: 2169331 - RNA, 19 nt, Artificial Sequence
  Description of Artificial Sequence: Synthetic oligonucleotide
  Antisense strand to SEQ ID NO: 2169330
auacugaggacucggcaca

SEQ ID NO: 2169332 - RNA, 19 nt, Artificial Sequence
  Description of Artificial Sequence: Synthetic oligonucleotide
  Sense strand starting at position 1166 of SEQ ID NO: 1883097
uucuuuaagucugaccuga

SEQ ID NO: 2169333 - RNA, 19 nt, Artificial Sequence
  Description of Artificial Sequence: Synthetic oligonucleotide
  Antisense strand to SEQ ID NO: 2169332
ucaggucagacuuaaagaa

SEQ ID NO: 2169334 - RNA, 19 nt, Artificial Sequence
  Description of Artificial Sequence: Synthetic oligonucleotide
  Sense strand starting at position 1168 of SEQ ID NO: 1883097
cuuuaagucugaccugaag

SEQ ID NO: 2169335 - RNA, 19 nt, Artificial Sequence
  Description of Artificial Sequence: Synthetic oligonucleotide
  Antisense strand to SEQ ID NO: 2169334
cuucaggucagacuuaaag

SEQ ID NO: 2169336 - RNA, 19 nt, Artificial Sequence
  Description of Artificial Sequence: Synthetic oligonucleotide
  Sense strand starting at position 1232 of SEQ ID NO: 1883097
guccaugcauccugacagu

SEQ ID NO: 2169337 - RNA, 19 nt, Artificial Sequence
  Description of Artificial Sequence: Synthetic oligonucleotide
  Antisense strand to SEQ ID NO: 2169336
acugucaggaugcauggac

SEQ ID NO: 2169338 - RNA, 19 nt, Artificial Sequence
  Description of Artificial Sequence: Synthetic oligonucleotide
  Sense strand starting at position 1235 of SEQ ID NO: 1883097
caugcauccugacaguuga

SEQ ID NO: 2169339 - RNA, 19 nt, Artificial Sequence
  Description of Artificial Sequence: Synthetic oligonucleotide
  Antisense strand to SEQ ID NO: 2169338
ucaacugucaggaugcaug

SEQ ID NO: 2169340 - RNA, 19 nt, Artificial Sequence
  Description of Artificial Sequence: Synthetic oligonucleotide
  Sense strand starting at position 1394 of SEQ ID NO: 1883097
agcccagacgccugaaaua

SEQ ID NO: 2169341 - RNA, 19 nt, Artificial Sequence
  Description of Artificial Sequence: Synthetic oligonucleotide
  Antisense strand to SEQ ID NO: 2169340
uauuucaggcgucugggcu

SEQ ID NO: 2169342 - RNA, 19 nt, Artificial Sequence
  Description of Artificial Sequence: Synthetic oligonucleotide
  Sense strand starting at position 1474 of SEQ ID NO: 1883097
caggguucugcaugagcca

SEQ ID NO: 2169343 - RNA, 19 nt, Artificial Sequence
  Description of Artificial Sequence: Synthetic oligonucleotide
  Antisense strand to SEQ ID NO: 2169342
uggcucaugcagaacccug

SEQ ID NO: 2169344 - RNA, 19 nt, Artificial Sequence
  Description of Artificial Sequence: Synthetic oligonucleotide
  Sense strand starting at position 1511 of SEQ ID NO: 1883097
ggguuacccucugcaagag

SEQ ID NO: 2169345 - RNA, 19 nt, Artificial Sequence
  Description of Artificial Sequence: Synthetic oligonucleotide
  Antisense strand to SEQ ID NO: 2169344
cucuugcagaggguaaccc

SEQ ID NO: 2169346 - RNA, 19 nt, Artificial Sequence
  Description of Artificial Sequence: Synthetic oligonucleotide
  Sense strand starting at position 1993 of SEQ ID NO: 1883097
acgugucugaggugucagu

SEQ ID NO: 2169347 - RNA, 19 nt, Artificial Sequence
  Description of Artificial Sequence: Synthetic oligonucleotide
  Antisense strand to SEQ ID NO: 2169346
acugacaccucagacacgu

SEQ ID NO: 2169348 - RNA, 19 nt, Artificial Sequence
  Description of Artificial Sequence: Synthetic oligonucleotide
  Sense strand starting at position 2210 of SEQ ID NO: 1883097
gcgcuauggcucuggcuga

SEQ ID NO: 2169349 - RNA, 19 nt, Artificial Sequence
  Description of Artificial Sequence: Synthetic oligonucleotide
  Antisense strand to SEQ ID NO: 2169348
ucagccagagccauagcgc

SEQ ID NO: 2169350 - RNA, 19 nt, Artificial Sequence
  Description of Artificial Sequence: Synthetic oligonucleotide
  Sense strand starting at position 2295 of SEQ ID NO: 1883097
ccacgugucugaucugauc

SEQ ID NO: 2169351 - RNA, 19 nt, Artificial Sequence
  Description of Artificial Sequence: Synthetic oligonucleotide
  Antisense strand to SEQ ID NO: 2169350
gaucagaucagacacgugg

SEQ ID NO: 2169352 - RNA, 19 nt, Artificial Sequence
  Description of Artificial Sequence: Synthetic oligonucleotide
  Sense strand starting at position 2400 of SEQ ID NO: 1883097
ccuagagagucuguuaccu

SEQ ID NO: 2169353 - RNA, 19 nt, Artificial Sequence
  Description of Artificial Sequence: Synthetic oligonucleotide
  Antisense strand to SEQ ID NO: 2169352
agguaacagacucucuagg

SEQ ID NO: 2169354 - RNA, 19 nt, Artificial Sequence
  Description of Artificial Sequence: Synthetic oligonucleotide
  Sense strand starting at position 2965 of SEQ ID NO: 1883097
gaauccuccugcugggauu

SEQ ID NO: 2169355 - RNA, 19 nt, Artificial Sequence
  Description of Artificial Sequence: Synthetic oligonucleotide
  Antisense strand to SEQ ID NO: 2169354
aaucccagcaggaggauuc

SEQ ID NO: 2169356 - RNA, 19 nt, Artificial Sequence
  Description of Artificial Sequence: Synthetic oligonucleotide
  Sense strand starting at position 3106 of SEQ ID NO: 1883097
gguagcccaucucaauauu

SEQ ID NO: 2169357 - RNA, 19 nt, Artificial Sequence
  Description of Artificial Sequence: Synthetic oligonucleotide
  Antisense strand to SEQ ID NO: 2169356
aauauugagaugggcuacc

SEQ ID NO: 2169358 - RNA, 19 nt, Artificial Sequence
  Description of Artificial Sequence: Synthetic oligonucleotide
  Sense strand starting at position 3120 of SEQ ID NO: 1883097
auauuuaccuuggaggaac

SEQ ID NO: 2169359 - RNA, 19 nt, Artificial Sequence
  Description of Artificial Sequence: Synthetic oligonucleotide
  Antisense strand to SEQ ID NO: 2169358
guuccuccaagguaaauau

SEQ ID NO: 2169360 - RNA, 19 nt, Artificial Sequence
  Description of Artificial Sequence: Synthetic oligonucleotide
  Sense strand starting at position 3173 of SEQ ID NO: 1883097
gguggcuugcucguguaau

SEQ ID NO: 2169361 - RNA, 19 nt, Artificial Sequence
  Description of Artificial Sequence: Synthetic oligonucleotide
  Antisense strand to SEQ ID NO: 2169360
auuacacgagcaagccacc

SEQ ID NO: 2169362 - RNA, 19 nt, Artificial Sequence
  Description of Artificial Sequence: Synthetic oligonucleotide
  Sense strand starting at position 3174 of SEQ ID NO: 1883097
guggcuugcucguguaauc

SEQ ID NO: 2169363 - RNA, 19 nt, Artificial Sequence
  Description of Artificial Sequence: Synthetic oligonucleotide
  Antisense strand to SEQ ID NO: 2169362
gauuacacgagcaagccac

SEQ ID NO: 2169364 - RNA, 19 nt, Artificial Sequence
  Description of Artificial Sequence: Synthetic oligonucleotide
  Sense strand starting at position 3222 of SEQ ID NO: 1883097
cucaguugaggucagaagu

SEQ ID NO: 2169365 - RNA, 19 nt, Artificial Sequence
  Description of Artificial Sequence: Synthetic oligonucleotide
  Antisense strand to SEQ ID NO: 2169364
acuucugaccucaacugag

SEQ ID NO: 2169366 - RNA, 19 nt, Artificial Sequence
  Description of Artificial Sequence: Synthetic oligonucleotide
  Sense strand starting at position 3424 of SEQ ID NO: 1883097
ggcuaagucucgucucuuc

SEQ ID NO: 2169367 - RNA, 19 nt, Artificial Sequence
  Description of Artificial Sequence: Synthetic oligonucleotide
  Antisense strand to SEQ ID NO: 2169366
gaagagacgagacuuagcc

SEQ ID NO: 2169368 - RNA, 19 nt, Artificial Sequence
  Description of Artificial Sequence: Synthetic oligonucleotide
  Sense strand starting at position 3543 of SEQ ID NO: 1883097
gugaguagagaucguacua

SEQ ID NO: 2169369 - RNA, 19 nt, Artificial Sequence
  Description of Artificial Sequence: Synthetic oligonucleotide
  Antisense strand to SEQ ID NO: 2169368
uaguacgaucucuacucac

SEQ ID NO: 2169370 - RNA, 19 nt, Artificial Sequence
  Description of Artificial Sequence: Synthetic oligonucleotide
  Sense strand starting at position 3548 of SEQ ID NO: 1883097
uagagaucguacuauugca

SEQ ID NO: 2169371 - RNA, 19 nt, Artificial Sequence
  Description of Artificial Sequence: Synthetic oligonucleotide
  Antisense strand to SEQ ID NO: 2169370
ugcaauaguacgaucucua

SEQ ID NO: 2169372 - RNA, 19 nt, Artificial Sequence
  Description of Artificial Sequence: Synthetic oligonucleotide
  Sense strand starting at position 3925 of SEQ ID NO: 1883097
cuuacaaagugagaguaaa

SEQ ID NO: 2169373 - RNA, 19 nt, Artificial Sequence
  Description of Artificial Sequence: Synthetic oligonucleotide
  Antisense strand to SEQ ID NO: 2169372
uuuacucucacuuuguaag

SEQ ID NO: 2169374 - RNA, 19 nt, Artificial Sequence
  Description of Artificial Sequence: Synthetic oligonucleotide
  Sense strand starting at position 2132 of SEQ ID NO: 1883098
gcacuauacuuaggacaua

SEQ ID NO: 2169375 - RNA, 19 nt, Artificial Sequence
  Description of Artificial Sequence: Synthetic oligonucleotide
  Antisense strand to SEQ ID NO: 2169374
uauguccuaaguauagugc

SEQ ID NO: 2169376 - RNA, 19 nt, Artificial Sequence
  Description of Artificial Sequence: Synthetic oligonucleotide
  Sense strand starting at position 2154 of SEQ ID NO: 1883098
gacauauacgacuguauau

SEQ ID NO: 2169377 - RNA, 19 nt, Artificial Sequence
  Description of Artificial Sequence: Synthetic oligonucleotide
  Antisense strand to SEQ ID NO: 2169376
auauacagucguauauguc

SEQ ID NO: 2169378 - RNA, 19 nt, Artificial Sequence
  Description of Artificial Sequence: Synthetic oligonucleotide
  Sense strand starting at position 2165 of SEQ ID NO: 1883098
cuguauaugugagcgcuua

SEQ ID NO: 2169379 - RNA, 19 nt, Artificial Sequence
  Description of Artificial Sequence: Synthetic oligonucleotide
  Antisense strand to SEQ ID NO: 2169378
uaagcgcucacauauacag

SEQ ID NO: 2169380 - RNA, 19 nt, Artificial Sequence
  Description of Artificial Sequence: Synthetic oligonucleotide
  Sense strand starting at position 2166 of SEQ ID NO: 1883098
uguauaugugagcgcuuau

SEQ ID NO: 2169381 - RNA, 19 nt, Artificial Sequence
  Description of Artificial Sequence: Synthetic oligonucleotide
  Antisense strand to SEQ ID NO: 2169380
auaagcgcucacauauaca

SEQ ID NO: 2169382 - RNA, 19 nt, Artificial Sequence
  Description of Artificial Sequence: Synthetic oligonucleotide
  Sense strand starting at position 2167 of SEQ ID NO: 1883098
guauaugugagcgcuuauc

SEQ ID NO: 2169383 - RNA, 19 nt, Artificial Sequence
  Description of Artificial Sequence: Synthetic oligonucleotide
  Antisense strand to SEQ ID NO: 2169382
gauaagcgcucacauauac

SEQ ID NO: 2169384 - RNA, 19 nt, Artificial Sequence
  Description of Artificial Sequence: Synthetic oligonucleotide
  Sense strand starting at position 2186 of SEQ ID NO: 1883098
ucacuucucuuguagaaug

SEQ ID NO: 2169385 - RNA, 19 nt, Artificial Sequence
  Description of Artificial Sequence: Synthetic oligonucleotide
  Antisense strand to SEQ ID NO: 2169384
cauucuacaagagaaguga

SEQ ID NO: 2169386 - RNA, 19 nt, Artificial Sequence
  Description of Artificial Sequence: Synthetic oligonucleotide
  Sense strand starting at position 2191 of SEQ ID NO: 1883098
ucucuuguagaaugguuau

SEQ ID NO: 2169387 - RNA, 19 nt, Artificial Sequence
  Description of Artificial Sequence: Synthetic oligonucleotide
  Antisense strand to SEQ ID NO: 2169386
auaaccauucuacaagaga

SEQ ID NO: 2169388 - RNA, 19 nt, Artificial Sequence
  Description of Artificial Sequence: Synthetic oligonucleotide
  Sense strand starting at position 2194 of SEQ ID NO: 1883098
cuuguagaaugguuauuau

SEQ ID NO: 2169389 - RNA, 19 nt, Artificial Sequence
  Description of Artificial Sequence: Synthetic oligonucleotide
  Antisense strand to SEQ ID NO: 2169388
auaauaaccauucuacaag

SEQ ID NO: 2169390 - RNA, 19 nt, Artificial Sequence
  Description of Artificial Sequence: Synthetic oligonucleotide
  Sense strand starting at position 2214 of SEQ ID NO: 1883098
aaacuuauuugagagguga

SEQ ID NO: 2169391 - RNA, 19 nt, Artificial Sequence
  Description of Artificial Sequence: Synthetic oligonucleotide
  Antisense strand to SEQ ID NO: 2169390
ucaccucucaaauaaguuu

SEQ ID NO: 2169392 - RNA, 19 nt, Artificial Sequence
  Description of Artificial Sequence: Synthetic oligonucleotide
  Sense strand starting at position 2234 of SEQ ID NO: 1883098
gugauugacagccguugaa

SEQ ID NO: 2169393 - RNA, 19 nt, Artificial Sequence
  Description of Artificial Sequence: Synthetic oligonucleotide
  Antisense strand to SEQ ID NO: 2169392
uucaacggcugucaaucac

SEQ ID NO: 2169394 - RNA, 19 nt, Artificial Sequence
  Description of Artificial Sequence: Synthetic oligonucleotide
  Sense strand starting at position 2360 of SEQ ID NO: 1883098
acgcuucugagacgaggaa

SEQ ID NO: 2169395 - RNA, 19 nt, Artificial Sequence
  Description of Artificial Sequence: Synthetic oligonucleotide
  Antisense strand to SEQ ID NO: 2169394
uuccucgucucagaagcgu

SEQ ID NO: 2169396 - RNA, 19 nt, Artificial Sequence
  Description of Artificial Sequence: Synthetic oligonucleotide
  Sense strand starting at position 2377 of SEQ ID NO: 1883098
aaagauguuucugauguuu

SEQ ID NO: 2169397 - RNA, 19 nt, Artificial Sequence
  Description of Artificial Sequence: Synthetic oligonucleotide
  Antisense strand to SEQ ID NO: 2169396
aaacaucagaaacaucuuu

SEQ ID NO: 2169398 - RNA, 19 nt, Artificial Sequence
  Description of Artificial Sequence: Synthetic oligonucleotide
  Sense strand starting at position 2382 of SEQ ID NO: 1883098
uguuucugauguuuaguga

SEQ ID NO: 2169399 - RNA, 19 nt, Artificial Sequence
  Description of Artificial Sequence: Synthetic oligonucleotide
  Antisense strand to SEQ ID NO: 2169398
ucacuaaacaucagaaaca

SEQ ID NO: 2169400 - RNA, 19 nt, Artificial Sequence
  Description of Artificial Sequence: Synthetic oligonucleotide
  Sense strand starting at position 2383 of SEQ ID NO: 1883098
guuucugauguuuagugau

SEQ ID NO: 2169401 - RNA, 19 nt, Artificial Sequence
  Description of Artificial Sequence: Synthetic oligonucleotide
  Antisense strand to SEQ ID NO: 2169400
aucacuaaacaucagaaac

SEQ ID NO: 2169402 - RNA, 19 nt, Artificial Sequence
  Description of Artificial Sequence: Synthetic oligonucleotide
  Sense strand starting at position 2385 of SEQ ID NO: 1883098
uucugauguuuagugaugu

SEQ ID NO: 2169403 - RNA, 19 nt, Artificial Sequence
  Description of Artificial Sequence: Synthetic oligonucleotide
  Antisense strand to SEQ ID NO: 2169402
acaucacuaaacaucagaa

SEQ ID NO: 2169404 - RNA, 19 nt, Artificial Sequence
  Description of Artificial Sequence: Synthetic oligonucleotide
  Sense strand starting at position 2410 of SEQ ID NO: 1883098
cauuaacguugauaauaug

SEQ ID NO: 2169405 - RNA, 19 nt, Artificial Sequence
  Description of Artificial Sequence: Synthetic oligonucleotide
  Antisense strand to SEQ ID NO: 2169404
cauauuaucaacguuaaug

SEQ ID NO: 2169406 - RNA, 19 nt, Artificial Sequence
  Description of Artificial Sequence: Synthetic oligonucleotide
  Sense strand starting at position 2416 of SEQ ID NO: 1883098
cguugauaauaugaucuca

SEQ ID NO: 2169407 - RNA, 19 nt, Artificial Sequence
  Description of Artificial Sequence: Synthetic oligonucleotide
  Antisense strand to SEQ ID NO: 2169406
ugagaucauauuaucaacg

SEQ ID NO: 2169408 - RNA, 19 nt, Artificial Sequence
  Description of Artificial Sequence: Synthetic oligonucleotide
  Sense strand starting at position 2427 of SEQ ID NO: 1883098
ugaucucauuagguaguau

SEQ ID NO: 2169409 - RNA, 19 nt, Artificial Sequence
  Description of Artificial Sequence: Synthetic oligonucleotide
  Antisense strand to SEQ ID NO: 2169408
auacuaccuaaugagauca

SEQ ID NO: 2169410 - RNA, 19 nt, Artificial Sequence
  Description of Artificial Sequence: Synthetic oligonucleotide
  Sense strand starting at position 2431 of SEQ ID NO: 1883098
cucauuagguaguauugaa

SEQ ID NO: 2169411 - RNA, 19 nt, Artificial Sequence
  Description of Artificial Sequence: Synthetic oligonucleotide
  Antisense strand to SEQ ID NO: 2169410
uucaauacuaccuaaugag

SEQ ID NO: 2169412 - RNA, 19 nt, Artificial Sequence
  Description of Artificial Sequence: Synthetic oligonucleotide
  Sense strand starting at position 2438 of SEQ ID NO: 1883098
gguaguauugaauaacucu

SEQ ID NO: 2169413 - RNA, 19 nt, Artificial Sequence
  Description of Artificial Sequence: Synthetic oligonucleotide
  Antisense strand to SEQ ID NO: 2169412
agaguuauucaauacuacc

SEQ ID NO: 2169414 - RNA, 19 nt, Artificial Sequence
  Description of Artificial Sequence: Synthetic oligonucleotide
  Sense strand starting at position 2913 of SEQ ID NO: 1883098
acauuaguuucccagaaug

SEQ ID NO: 2169415 - RNA, 19 nt, Artificial Sequence
  Description of Artificial Sequence: Synthetic oligonucleotide
  Antisense strand to SEQ ID NO: 2169414
cauucugggaaacuaaugu

SEQ ID NO: 2169416 - RNA, 19 nt, Artificial Sequence
  Description of Artificial Sequence: Synthetic oligonucleotide
  Sense strand starting at position 2915 of SEQ ID NO: 1883098
auuaguuucccagaaugua

SEQ ID NO: 2169417 - RNA, 19 nt, Artificial Sequence
  Description of Artificial Sequence: Synthetic oligonucleotide
  Antisense strand to SEQ ID NO: 2169416
uacauucugggaaacuaau

SEQ ID NO: 2169418 - RNA, 19 nt, Artificial Sequence
  Description of Artificial Sequence: Synthetic oligonucleotide
  Sense strand starting at position 2961 of SEQ ID NO: 1883098
acaugaacauucuguugga

SEQ ID NO: 2169419 - RNA, 19 nt, Artificial Sequence
  Description of Artificial Sequence: Synthetic oligonucleotide
  Antisense strand to SEQ ID NO: 2169418
uccaacagaauguucaugu

SEQ ID NO: 2169420 - RNA, 19 nt, Artificial Sequence
  Description of Artificial Sequence: Synthetic oligonucleotide
  Sense strand starting at position 2962 of SEQ ID NO: 1883098
caugaacauucuguuggaa

SEQ ID NO: 2169421 - RNA, 19 nt, Artificial Sequence
  Description of Artificial Sequence: Synthetic oligonucleotide
  Antisense strand to SEQ ID NO: 2169420
uuccaacagaauguucaug

SEQ ID NO: 2169422 - RNA, 19 nt, Artificial Sequence
  Description of Artificial Sequence: Synthetic oligonucleotide
  Sense strand starting at position 2964 of SEQ ID NO: 1883098
ugaacauucuguuggaaau

SEQ ID NO: 2169423 - RNA, 19 nt, Artificial Sequence
  Description of Artificial Sequence: Synthetic oligonucleotide
  Antisense strand to SEQ ID NO: 2169422
auuuccaacagaauguuca

SEQ ID NO: 2169424 - RNA, 19 nt, Artificial Sequence
  Description of Artificial Sequence: Synthetic oligonucleotide
  Sense strand starting at position 2965 of SEQ ID NO: 1883098
gaacauucuguuggaaauu

SEQ ID NO: 2169425 - RNA, 19 nt, Artificial Sequence
  Description of Artificial Sequence: Synthetic oligonucleotide
  Antisense strand to SEQ ID NO: 2169424
aauuuccaacagaauguuc

SEQ ID NO: 2169426 - RNA, 19 nt, Artificial Sequence
  Description of Artificial Sequence: Synthetic oligonucleotide
  Sense strand starting at position 3036 of SEQ ID NO: 1883098
uggaaacaauuggucaauu

SEQ ID NO: 2169427 - RNA, 19 nt, Artificial Sequence
  Description of Artificial Sequence: Synthetic oligonucleotide
  Antisense strand to SEQ ID NO: 2169426
aauugaccaauuguuucca

SEQ ID NO: 2169428 - RNA, 19 nt, Artificial Sequence
  Description of Artificial Sequence: Synthetic oligonucleotide
  Sense strand starting at position 3169 of SEQ ID NO: 1883098
ugaagugaauuaugaaaug

SEQ ID NO: 2169429 - RNA, 19 nt, Artificial Sequence
  Description of Artificial Sequence: Synthetic oligonucleotide
  Antisense strand to SEQ ID NO: 2169428
cauuucauaauucacuuca

SEQ ID NO: 2169430 - RNA, 19 nt, Artificial Sequence
  Description of Artificial Sequence: Synthetic oligonucleotide
  Sense strand starting at position 3271 of SEQ ID NO: 1883098
agaauuggcuaucacauau

SEQ ID NO: 2169431 - RNA, 19 nt, Artificial Sequence
  Description of Artificial Sequence: Synthetic oligonucleotide
  Antisense strand to SEQ ID NO: 2169430
auaugugauagccaauucu

SEQ ID NO: 2169432 - RNA, 19 nt, Artificial Sequence
  Description of Artificial Sequence: Synthetic oligonucleotide
  Sense strand starting at position 3307 of SEQ ID NO: 1883098
agaggcauaauguguaauu

SEQ ID NO: 2169433 - RNA, 19 nt, Artificial Sequence
  Description of Artificial Sequence: Synthetic oligonucleotide
  Antisense strand to SEQ ID NO: 2169432
aauuacacauuaugccucu

SEQ ID NO: 2169434 - RNA, 19 nt, Artificial Sequence
  Description of Artificial Sequence: Synthetic oligonucleotide
  Sense strand starting at position 3327 of SEQ ID NO: 1883098
ugaagugacugauuccuaa

SEQ ID NO: 2169435 - RNA, 19 nt, Artificial Sequence
  Description of Artificial Sequence: Synthetic oligonucleotide
  Antisense strand to SEQ ID NO: 2169434
uuaggaaucagucacuuca

SEQ ID NO: 2169436 - RNA, 19 nt, Artificial Sequence
  Description of Artificial Sequence: Synthetic oligonucleotide
  Sense strand starting at position 3331 of SEQ ID NO: 1883098
gugacugauuccuaaguga

SEQ ID NO: 2169437 - RNA, 19 nt, Artificial Sequence
  Description of Artificial Sequence: Synthetic oligonucleotide
  Antisense strand to SEQ ID NO: 2169436
ucacuuaggaaucagucac

SEQ ID NO: 2169438 - RNA, 19 nt, Artificial Sequence
  Description of Artificial Sequence: Synthetic oligonucleotide
  Sense strand starting at position 3334 of SEQ ID NO: 1883098
acugauuccuaagugaaau

SEQ ID NO: 2169439 - RNA, 19 nt, Artificial Sequence
  Description of Artificial Sequence: Synthetic oligonucleotide
  Antisense strand to SEQ ID NO: 2169438
auuucacuuaggaaucagu

SEQ ID NO: 2169440 - RNA, 19 nt, Artificial Sequence
  Description of Artificial Sequence: Synthetic oligonucleotide
  Sense strand starting at position 3500 of SEQ ID NO: 1883098
gucgcacauccaugggaau

SEQ ID NO: 2169441 - RNA, 19 nt, Artificial Sequence
  Description of Artificial Sequence: Synthetic oligonucleotide
  Antisense strand to SEQ ID NO: 2169440
auucccauggaugugcgac

SEQ ID NO: 2169442 - RNA, 19 nt, Artificial Sequence
  Description of Artificial Sequence: Synthetic oligonucleotide
  Sense strand starting at position 3501 of SEQ ID NO: 1883098
ucgcacauccaugggaaua

SEQ ID NO: 2169443 - RNA, 19 nt, Artificial Sequence
  Description of Artificial Sequence: Synthetic oligonucleotide
  Antisense strand to SEQ ID NO: 2169442
uauucccauggaugugcga

SEQ ID NO: 2169444 - RNA, 19 nt, Artificial Sequence
  Description of Artificial Sequence: Synthetic oligonucleotide
  Sense strand starting at position 3503 of SEQ ID NO: 1883098
gcacauccaugggaauaau

SEQ ID NO: 2169445 - RNA, 19 nt, Artificial Sequence
  Description of Artificial Sequence: Synthetic oligonucleotide
  Antisense strand to SEQ ID NO: 2169444
auuauucccauggaugugc

SEQ ID NO: 2169446 - RNA, 19 nt, Artificial Sequence
  Description of Artificial Sequence: Synthetic oligonucleotide
  Sense strand starting at position 3715 of SEQ ID NO: 1883098
agaacuggcucaccucaau

SEQ ID NO: 2169447 - RNA, 19 nt, Artificial Sequence
  Description of Artificial Sequence: Synthetic oligonucleotide
  Antisense strand to SEQ ID NO: 2169446
auugaggugagccaguucu

SEQ ID NO: 2169448 - RNA, 19 nt, Artificial Sequence
  Description of Artificial Sequence: Synthetic oligonucleotide
  Sense strand starting at position 3721 of SEQ ID NO: 1883098
ggcucaccucaaugaguau

SEQ ID NO: 2169449 - RNA, 19 nt, Artificial Sequence
  Description of Artificial Sequence: Synthetic oligonucleotide
  Antisense strand to SEQ ID NO: 2169448
auacucauugaggugagcc

SEQ ID NO: 2169450 - RNA, 19 nt, Artificial Sequence
  Description of Artificial Sequence: Synthetic oligonucleotide
  Sense strand starting at position 3766 of SEQ ID NO: 1883098
aaggcuguguacuuacaaa

SEQ ID NO: 2169451 - RNA, 19 nt, Artificial Sequence
  Description of Artificial Sequence: Synthetic oligonucleotide
  Antisense strand to SEQ ID NO: 2169450
uuuguaaguacacagccuu

SEQ ID NO: 2169452 - RNA, 19 nt, Artificial Sequence
  Description of Artificial Sequence: Synthetic oligonucleotide
  Sense strand starting at position 3845 of SEQ ID NO: 1883098
auaaguuagucuucuguuu

SEQ ID NO: 2169453 - RNA, 19 nt, Artificial Sequence
  Description of Artificial Sequence: Synthetic oligonucleotide
  Antisense strand to SEQ ID NO: 2169452
aaacagaagacuaacuuau

SEQ ID NO: 2169454 - RNA, 19 nt, Artificial Sequence
  Description of Artificial Sequence: Synthetic oligonucleotide
  Sense strand starting at position 46 of SEQ ID NO: 1883099
ggagguggucuugauucau

SEQ ID NO: 2169455 - RNA, 19 nt, Artificial Sequence
  Description of Artificial Sequence: Synthetic oligonucleotide
  Antisense strand to SEQ ID NO: 2169454
augaaucaagaccaccucc

SEQ ID NO: 2169456 - RNA, 19 nt, Artificial Sequence
  Description of Artificial Sequence: Synthetic oligonucleotide
  Sense strand starting at position 153 of SEQ ID NO: 1883099
cuguuucuacaguaaagca

SEQ ID NO: 2169457 - RNA, 19 nt, Artificial Sequence
  Description of Artificial Sequence: Synthetic oligonucleotide
  Antisense strand to SEQ ID NO: 2169456
ugcuuuacuguagaaacag

SEQ ID NO: 2169458 - RNA, 19 nt, Artificial Sequence
  Description of Artificial Sequence: Synthetic oligonucleotide
  Sense strand starting at position 265 of SEQ ID NO: 1883099
guaccuuguaggcagaguu

SEQ ID NO: 2169459 - RNA, 19 nt, Artificial Sequence
  Description of Artificial Sequence: Synthetic oligonucleotide
  Antisense strand to SEQ ID NO: 2169458
aacucugccuacaagguac

SEQ ID NO: 2169460 - RNA, 19 nt, Artificial Sequence
  Description of Artificial Sequence: Synthetic oligonucleotide
  Sense strand starting at position 358 of SEQ ID NO: 1883099
ugugaucuuaaguagcagu

SEQ ID NO: 2169461 - RNA, 19 nt, Artificial Sequence
  Description of Artificial Sequence: Synthetic oligonucleotide
  Antisense strand to SEQ ID NO: 2169460
acugcuacuuaagaucaca

SEQ ID NO: 2169462 - RNA, 19 nt, Artificial Sequence
  Description of Artificial Sequence: Synthetic oligonucleotide
  Sense strand starting at position 440 of SEQ ID NO: 1883099
ugggacuacugacacagau

SEQ ID NO: 2169463 - RNA, 19 nt, Artificial Sequence
  Description of Artificial Sequence: Synthetic oligonucleotide
  Antisense strand to SEQ ID NO: 2169462
aucugugucaguaguccca

SEQ ID NO: 2169464 - RNA, 19 nt, Artificial Sequence
  Description of Artificial Sequence: Synthetic oligonucleotide
  Sense strand starting at position 463 of SEQ ID NO: 1883099
ggauuacagcuuuauauua

SEQ ID NO: 2169465 - RNA, 19 nt, Artificial Sequence
  Description of Artificial Sequence: Synthetic oligonucleotide
  Antisense strand to SEQ ID NO: 2169464
uaauauaaagcuguaaucc

SEQ ID NO: 2169466 - RNA, 19 nt, Artificial Sequence
  Description of Artificial Sequence: Synthetic oligonucleotide
  Sense strand starting at position 489 of SEQ ID NO: 1883099
guccaaagaugguaacuca

SEQ ID NO: 2169467 - RNA, 19 nt, Artificial Sequence
  Description of Artificial Sequence: Synthetic oligonucleotide
  Antisense strand to SEQ ID NO: 2169466
ugaguuaccaucuuuggac

SEQ ID NO: 2169468 - RNA, 19 nt, Artificial Sequence
  Description of Artificial Sequence: Synthetic oligonucleotide
  Sense strand starting at position 596 of SEQ ID NO: 1883099
uccugacuuccugguacua

SEQ ID NO: 2169469 - RNA, 19 nt, Artificial Sequence
  Description of Artificial Sequence: Synthetic oligonucleotide
  Antisense strand to SEQ ID NO: 2169468
uaguaccaggaagucagga

SEQ ID NO: 2169470 - RNA, 19 nt, Artificial Sequence
  Description of Artificial Sequence: Synthetic oligonucleotide
  Sense strand starting at position 598 of SEQ ID NO: 1883099
cugacuuccugguacuaaa

SEQ ID NO: 2169471 - RNA, 19 nt, Artificial Sequence
  Description of Artificial Sequence: Synthetic oligonucleotide
  Antisense strand to SEQ ID NO: 2169470
uuuaguaccaggaagucag

SEQ ID NO: 2169472 - RNA, 19 nt, Artificial Sequence
  Description of Artificial Sequence: Synthetic oligonucleotide
  Sense strand starting at position 631 of SEQ ID NO: 1883099
gggcuauuucguggguuug

SEQ ID NO: 2169473 - RNA, 19 nt, Artificial Sequence
  Description of Artificial Sequence: Synthetic oligonucleotide
  Antisense strand to SEQ ID NO: 2169472
caaacccacgaaauagccc

SEQ ID NO: 2169474 - RNA, 19 nt, Artificial Sequence
  Description of Artificial Sequence: Synthetic oligonucleotide
  Sense strand starting at position 669 of SEQ ID NO: 1883099
ccagucaacucacuggaaa

SEQ ID NO: 2169475 - RNA, 19 nt, Artificial Sequence
  Description of Artificial Sequence: Synthetic oligonucleotide
  Antisense strand to SEQ ID NO: 2169474
uuuccagugaguugacugg

SEQ ID NO: 2169476 - RNA, 19 nt, Artificial Sequence
  Description of Artificial Sequence: Synthetic oligonucleotide
  Sense strand starting at position 720 of SEQ ID NO: 1883099
gugggugcucacgauguuu

SEQ ID NO: 2169477 - RNA, 19 nt, Artificial Sequence
  Description of Artificial Sequence: Synthetic oligonucleotide
  Antisense strand to SEQ ID NO: 2169476
aaacaucgugagcacccac

SEQ ID NO: 2169478 - RNA, 19 nt, Artificial Sequence
  Description of Artificial Sequence: Synthetic oligonucleotide
  Sense strand starting at position 722 of SEQ ID NO: 1883099
gggugcucacgauguuuaa

SEQ ID NO: 2169479 - RNA, 19 nt, Artificial Sequence
  Description of Artificial Sequence: Synthetic oligonucleotide
  Antisense strand to SEQ ID NO: 2169478
uuaaacaucgugagcaccc

SEQ ID NO: 2169480 - RNA, 19 nt, Artificial Sequence
  Description of Artificial Sequence: Synthetic oligonucleotide
  Sense strand starting at position 789 of SEQ ID NO: 1883099
ccggguuucuucccaggau

SEQ ID NO: 2169481 - RNA, 19 nt, Artificial Sequence
  Description of Artificial Sequence: Synthetic oligonucleotide
  Antisense strand to SEQ ID NO: 2169480
auccugggaagaaacccgg

SEQ ID NO: 2169482 - RNA, 19 nt, Artificial Sequence
  Description of Artificial Sequence: Synthetic oligonucleotide
  Sense strand starting at position 792 of SEQ ID NO: 1883099
gguuucuucccaggaugga

SEQ ID NO: 2169483 - RNA, 19 nt, Artificial Sequence
  Description of Artificial Sequence: Synthetic oligonucleotide
  Antisense strand to SEQ ID NO: 2169482
uccauccugggaagaaacc

SEQ ID NO: 2169484 - RNA, 19 nt, Artificial Sequence
  Description of Artificial Sequence: Synthetic oligonucleotide
  Sense strand starting at position 1102 of SEQ ID NO: 1883099
ugcuguucgggaugcugaa

SEQ ID NO: 2169485 - RNA, 19 nt, Artificial Sequence
  Description of Artificial Sequence: Synthetic oligonucleotide
  Antisense strand to SEQ ID NO: 2169484
uucagcaucccgaacagca

SEQ ID NO: 2169486 - RNA, 19 nt, Artificial Sequence
  Description of Artificial Sequence: Synthetic oligonucleotide
  Sense strand starting at position 2042 of SEQ ID NO: 1883099
aauguaaguuuagaacaga

SEQ ID NO: 2169487 - RNA, 19 nt, Artificial Sequence
  Description of Artificial Sequence: Synthetic oligonucleotide
  Antisense strand to SEQ ID NO: 2169486
ucuguucuaaacuuacauu

SEQ ID NO: 2169488 - RNA, 19 nt, Artificial Sequence
  Description of Artificial Sequence: Synthetic oligonucleotide
  Sense strand starting at position 2104 of SEQ ID NO: 1883099
gcacuauacuuaggacaua

SEQ ID NO: 2169489 - RNA, 19 nt, Artificial Sequence
  Description of Artificial Sequence: Synthetic oligonucleotide
  Antisense strand to SEQ ID NO: 2169488
uauguccuaaguauagugc

SEQ ID NO: 2169490 - RNA, 19 nt, Artificial Sequence
  Description of Artificial Sequence: Synthetic oligonucleotide
  Sense strand starting at position 2126 of SEQ ID NO: 1883099
gacauauacgacuguauau

SEQ ID NO: 2169491 - RNA, 19 nt, Artificial Sequence
  Description of Artificial Sequence: Synthetic oligonucleotide
  Antisense strand to SEQ ID NO: 2169490
auauacagucguauauguc

SEQ ID NO: 2169492 - RNA, 19 nt, Artificial Sequence
  Description of Artificial Sequence: Synthetic oligonucleotide
  Sense strand starting at position 2137 of SEQ ID NO: 1883099
cuguauaugugagcgcuua

SEQ ID NO: 2169493 - RNA, 19 nt, Artificial Sequence
  Description of Artificial Sequence: Synthetic oligonucleotide
  Antisense strand to SEQ ID NO: 2169492
uaagcgcucacauauacag

SEQ ID NO: 2169494 - RNA, 19 nt, Artificial Sequence
  Description of Artificial Sequence: Synthetic oligonucleotide
  Sense strand starting at position 2138 of SEQ ID NO: 1883099
uguauaugugagcgcuuau

SEQ ID NO: 2169495 - RNA, 19 nt, Artificial Sequence
  Description of Artificial Sequence: Synthetic oligonucleotide
  Antisense strand to SEQ ID NO: 2169494
auaagcgcucacauauaca

SEQ ID NO: 2169496 - RNA, 19 nt, Artificial Sequence
  Description of Artificial Sequence: Synthetic oligonucleotide
  Sense strand starting at position 2139 of SEQ ID NO: 1883099
guauaugugagcgcuuauc

SEQ ID NO: 2169497 - RNA, 19 nt, Artificial Sequence
  Description of Artificial Sequence: Synthetic oligonucleotide
  Antisense strand to SEQ ID NO: 2169496
gauaagcgcucacauauac

SEQ ID NO: 2169498 - RNA, 19 nt, Artificial Sequence
  Description of Artificial Sequence: Synthetic oligonucleotide
  Sense strand starting at position 2158 of SEQ ID NO: 1883099
ucacuucucuuguagaaug

SEQ ID NO: 2169499 - RNA, 19 nt, Artificial Sequence
  Description of Artificial Sequence: Synthetic oligonucleotide
  Antisense strand to SEQ ID NO: 2169498
cauucuacaagagaaguga

SEQ ID NO: 2169500 - RNA, 19 nt, Artificial Sequence
  Description of Artificial Sequence: Synthetic oligonucleotide
  Sense strand starting at position 2163 of SEQ ID NO: 1883099
ucucuuguagaaugguuau

SEQ ID NO: 2169501 - RNA, 19 nt, Artificial Sequence
  Description of Artificial Sequence: Synthetic oligonucleotide
  Antisense strand to SEQ ID NO: 2169500
auaaccauucuacaagaga

SEQ ID NO: 2169502 - RNA, 19 nt, Artificial Sequence
  Description of Artificial Sequence: Synthetic oligonucleotide
  Sense strand starting at position 2166 of SEQ ID NO: 1883099
cuuguagaaugguuauuau

SEQ ID NO: 2169503 - RNA, 19 nt, Artificial Sequence
  Description of Artificial Sequence: Synthetic oligonucleotide
  Antisense strand to SEQ ID NO: 2169502
auaauaaccauucuacaag

SEQ ID NO: 2169504 - RNA, 19 nt, Artificial Sequence
  Description of Artificial Sequence: Synthetic oligonucleotide
  Sense strand starting at position 2186 of SEQ ID NO: 1883099
aaacuuauuugagagguga

SEQ ID NO: 2169505 - RNA, 19 nt, Artificial Sequence
  Description of Artificial Sequence: Synthetic oligonucleotide
  Antisense strand to SEQ ID NO: 2169504
ucaccucucaaauaaguuu

SEQ ID NO: 2169506 - RNA, 19 nt, Artificial Sequence
  Description of Artificial Sequence: Synthetic oligonucleotide
  Sense strand starting at position 2206 of SEQ ID NO: 1883099
gugauugacagccguugaa

SEQ ID NO: 2169507 - RNA, 19 nt, Artificial Sequence
  Description of Artificial Sequence: Synthetic oligonucleotide
  Antisense strand to SEQ ID NO: 2169506
uucaacggcugucaaucac

SEQ ID NO: 2169508 - RNA, 19 nt, Artificial Sequence
  Description of Artificial Sequence: Synthetic oligonucleotide
  Sense strand starting at position 2308 of SEQ ID NO: 1883099
ugugucaaccugcauaaua

SEQ ID NO: 2169509 - RNA, 19 nt, Artificial Sequence
  Description of Artificial Sequence: Synthetic oligonucleotide
  Antisense strand to SEQ ID NO: 2169508
uauuaugcagguugacaca

SEQ ID NO: 2169510 - RNA, 19 nt, Artificial Sequence
  Description of Artificial Sequence: Synthetic oligonucleotide
  Sense strand starting at position 2398 of SEQ ID NO: 1883099
augaucucauuagguagua

SEQ ID NO: 2169511 - RNA, 19 nt, Artificial Sequence
  Description of Artificial Sequence: Synthetic oligonucleotide
  Antisense strand to SEQ ID NO: 2169510
uacuaccuaaugagaucau

SEQ ID NO: 2169512 - RNA, 19 nt, Artificial Sequence
  Description of Artificial Sequence: Synthetic oligonucleotide
  Sense strand starting at position 2399 of SEQ ID NO: 1883099
ugaucucauuagguaguau

SEQ ID NO: 2169513 - RNA, 19 nt, Artificial Sequence
  Description of Artificial Sequence: Synthetic oligonucleotide
  Antisense strand to SEQ ID NO: 2169512
auacuaccuaaugagauca

SEQ ID NO: 2169514 - RNA, 19 nt, Artificial Sequence
  Description of Artificial Sequence: Synthetic oligonucleotide
  Sense strand starting at position 2410 of SEQ ID NO: 1883099
gguaguauugaguaacucu

SEQ ID NO: 2169515 - RNA, 19 nt, Artificial Sequence
  Description of Artificial Sequence: Synthetic oligonucleotide
  Antisense strand to SEQ ID NO: 2169514
agaguuacucaauacuacc

SEQ ID NO: 2169516 - RNA, 19 nt, Artificial Sequence
  Description of Artificial Sequence: Synthetic oligonucleotide
  Sense strand starting at position 2413 of SEQ ID NO: 1883099
aguauugaguaacucuaau

SEQ ID NO: 2169517 - RNA, 19 nt, Artificial Sequence
  Description of Artificial Sequence: Synthetic oligonucleotide
  Antisense strand to SEQ ID NO: 2169516
auuagaguuacucaauacu

SEQ ID NO: 2169518 - RNA, 19 nt, Artificial Sequence
  Description of Artificial Sequence: Synthetic oligonucleotide
  Sense strand starting at position 2888 of SEQ ID NO: 1883099
acauuaguuucccagaaug

SEQ ID NO: 2169519 - RNA, 19 nt, Artificial Sequence
  Description of Artificial Sequence: Synthetic oligonucleotide
  Antisense strand to SEQ ID NO: 2169518
cauucugggaaacuaaugu

SEQ ID NO: 2169520 - RNA, 19 nt, Artificial Sequence
  Description of Artificial Sequence: Synthetic oligonucleotide
  Sense strand starting at position 2936 of SEQ ID NO: 1883099
acaugaacauucuguugga

SEQ ID NO: 2169521 - RNA, 19 nt, Artificial Sequence
  Description of Artificial Sequence: Synthetic oligonucleotide
  Antisense strand to SEQ ID NO: 2169520
uccaacagaauguucaugu

SEQ ID NO: 2169522 - RNA, 19 nt, Artificial Sequence
  Description of Artificial Sequence: Synthetic oligonucleotide
  Sense strand starting at position 2937 of SEQ ID NO: 1883099
caugaacauucuguuggaa

SEQ ID NO: 2169523 - RNA, 19 nt, Artificial Sequence
  Description of Artificial Sequence: Synthetic oligonucleotide
  Antisense strand to SEQ ID NO: 2169522
uuccaacagaauguucaug

SEQ ID NO: 2169524 - RNA, 19 nt, Artificial Sequence
  Description of Artificial Sequence: Synthetic oligonucleotide
  Sense strand starting at position 2939 of SEQ ID NO: 1883099
ugaacauucuguuggaaau

SEQ ID NO: 2169525 - RNA, 19 nt, Artificial Sequence
  Description of Artificial Sequence: Synthetic oligonucleotide
  Antisense strand to SEQ ID NO: 2169524
auuuccaacagaauguuca

SEQ ID NO: 2169526 - RNA, 19 nt, Artificial Sequence
  Description of Artificial Sequence: Synthetic oligonucleotide
  Sense strand starting at position 2940 of SEQ ID NO: 1883099
gaacauucuguuggaaauu

SEQ ID NO: 2169527 - RNA, 19 nt, Artificial Sequence
  Description of Artificial Sequence: Synthetic oligonucleotide
  Antisense strand to SEQ ID NO: 2169526
aauuuccaacagaauguuc

SEQ ID NO: 2169528 - RNA, 19 nt, Artificial Sequence
  Description of Artificial Sequence: Synthetic oligonucleotide
  Sense strand starting at position 3147 of SEQ ID NO: 1883099
ugaagugaauuaugaaaug

SEQ ID NO: 2169529 - RNA, 19 nt, Artificial Sequence
  Description of Artificial Sequence: Synthetic oligonucleotide
  Antisense strand to SEQ ID NO: 2169528
cauuucauaauucacuuca

SEQ ID NO: 2169530 - RNA, 19 nt, Artificial Sequence
  Description of Artificial Sequence: Synthetic oligonucleotide
  Sense strand starting at position 3304 of SEQ ID NO: 1883099
ugaagugacugauuccuaa

SEQ ID NO: 2169531 - RNA, 19 nt, Artificial Sequence
  Description of Artificial Sequence: Synthetic oligonucleotide
  Antisense strand to SEQ ID NO: 2169530
uuaggaaucagucacuuca

SEQ ID NO: 2169532 - RNA, 19 nt, Artificial Sequence
  Description of Artificial Sequence: Synthetic oligonucleotide
  Sense strand starting at position 3308 of SEQ ID NO: 1883099
gugacugauuccuaaguga

SEQ ID NO: 2169533 - RNA, 19 nt, Artificial Sequence
  Description of Artificial Sequence: Synthetic oligonucleotide
  Antisense strand to SEQ ID NO: 2169532
ucacuuaggaaucagucac

SEQ ID NO: 2169534 - RNA, 19 nt, Artificial Sequence
  Description of Artificial Sequence: Synthetic oligonucleotide
  Sense strand starting at position 150 of SEQ ID NO: 1883100
uuaagaucucgcuauggaa

SEQ ID NO: 2169535 - RNA, 19 nt, Artificial Sequence
  Description of Artificial Sequence: Synthetic oligonucleotide
  Antisense strand to SEQ ID NO: 2169534
uuccauagcgagaucuuaa

SEQ ID NO: 2169536 - RNA, 19 nt, Artificial Sequence
  Description of Artificial Sequence: Synthetic oligonucleotide
  Sense strand starting at position 152 of SEQ ID NO: 1883100
aagaucucgcuauggaaau

SEQ ID NO: 2169537 - RNA, 19 nt, Artificial Sequence
  Description of Artificial Sequence: Synthetic oligonucleotide
  Antisense strand to SEQ ID NO: 2169536
auuuccauagcgagaucuu

SEQ ID NO: 2169538 - RNA, 19 nt, Artificial Sequence
  Description of Artificial Sequence: Synthetic oligonucleotide
  Sense strand starting at position 404 of SEQ ID NO: 1883100
ucacuauuguuuguuaaug

SEQ ID NO: 2169539 - RNA, 19 nt, Artificial Sequence
  Description of Artificial Sequence: Synthetic oligonucleotide
  Antisense strand to SEQ ID NO: 2169538
cauuaacaaacaauaguga

SEQ ID NO: 2169540 - RNA, 19 nt, Artificial Sequence
  Description of Artificial Sequence: Synthetic oligonucleotide
  Sense strand starting at position 416 of SEQ ID NO: 1883100
guuaaugagagucaaaugu

SEQ ID NO: 2169541 - RNA, 19 nt, Artificial Sequence
  Description of Artificial Sequence: Synthetic oligonucleotide
  Antisense strand to SEQ ID NO: 2169540
acauuugacucucauuaac

SEQ ID NO: 2169542 - RNA, 19 nt, Artificial Sequence
  Description of Artificial Sequence: Synthetic oligonucleotide
  Sense strand starting at position 420 of SEQ ID NO: 1883100
augagagucaaauguaaug

SEQ ID NO: 2169543 - RNA, 19 nt, Artificial Sequence
  Description of Artificial Sequence: Synthetic oligonucleotide
  Antisense strand to SEQ ID NO: 2169542
cauuacauuugacucucau

SEQ ID NO: 2169544 - RNA, 19 nt, Artificial Sequence
  Description of Artificial Sequence: Synthetic oligonucleotide
  Sense strand starting at position 446 of SEQ ID NO: 1883100
ucuggaagauauucugcaa

SEQ ID NO: 2169545 - RNA, 19 nt, Artificial Sequence
  Description of Artificial Sequence: Synthetic oligonucleotide
  Antisense strand to SEQ ID NO: 2169544
uugcagaauaucuuccaga

SEQ ID NO: 2169546 - RNA, 19 nt, Artificial Sequence
  Description of Artificial Sequence: Synthetic oligonucleotide
  Sense strand starting at position 449 of SEQ ID NO: 1883100
ggaagauauucugcaaugu

SEQ ID NO: 2169547 - RNA, 19 nt, Artificial Sequence
  Description of Artificial Sequence: Synthetic oligonucleotide
  Antisense strand to SEQ ID NO: 2169546
acauugcagaauaucuucc

SEQ ID NO: 2169548 - RNA, 19 nt, Artificial Sequence
  Description of Artificial Sequence: Synthetic oligonucleotide
  Sense strand starting at position 880 of SEQ ID NO: 1883100
cauguauaggcaugaagau

SEQ ID NO: 2169549 - RNA, 19 nt, Artificial Sequence
  Description of Artificial Sequence: Synthetic oligonucleotide
  Antisense strand to SEQ ID NO: 2169548
aucuucaugccuauacaug

SEQ ID NO: 2169550 - RNA, 19 nt, Artificial Sequence
  Description of Artificial Sequence: Synthetic oligonucleotide
  Sense strand starting at position 889 of SEQ ID NO: 1883100
gcaugaagauagucuuuau

SEQ ID NO: 2169551 - RNA, 19 nt, Artificial Sequence
  Description of Artificial Sequence: Synthetic oligonucleotide
  Antisense strand to SEQ ID NO: 2169550
auaaagacuaucuucaugc

SEQ ID NO: 2169552 - RNA, 19 nt, Artificial Sequence
  Description of Artificial Sequence: Synthetic oligonucleotide
  Sense strand starting at position 923 of SEQ ID NO: 1883100
aaacauguugcuugguaaa

SEQ ID NO: 2169553 - RNA, 19 nt, Artificial Sequence
  Description of Artificial Sequence: Synthetic oligonucleotide
  Antisense strand to SEQ ID NO: 2169552
uuuaccaagcaacauguuu

SEQ ID NO: 2169554 - RNA, 19 nt, Artificial Sequence
  Description of Artificial Sequence: Synthetic oligonucleotide
  Sense strand starting at position 925 of SEQ ID NO: 1883100
acauguugcuugguaaaua

SEQ ID NO: 2169555 - RNA, 19 nt, Artificial Sequence
  Description of Artificial Sequence: Synthetic oligonucleotide
  Antisense strand to SEQ ID NO: 2169554
uauuuaccaagcaacaugu

SEQ ID NO: 2169556 - RNA, 19 nt, Artificial Sequence
  Description of Artificial Sequence: Synthetic oligonucleotide
  Sense strand starting at position 1010 of SEQ ID NO: 1883100
gacugaauaugguuccuuu

SEQ ID NO: 2169557 - RNA, 19 nt, Artificial Sequence
  Description of Artificial Sequence: Synthetic oligonucleotide
  Antisense strand to SEQ ID NO: 2169556
aaaggaaccauauucaguc

SEQ ID NO: 2169558 - RNA, 19 nt, Artificial Sequence
  Description of Artificial Sequence: Synthetic oligonucleotide
  Sense strand starting at position 1148 of SEQ ID NO: 1883100
uccuuagcacgguaaauua

SEQ ID NO: 2169559 - RNA, 19 nt, Artificial Sequence
  Description of Artificial Sequence: Synthetic oligonucleotide
  Antisense strand to SEQ ID NO: 2169558
uaauuuaccgugcuaagga

SEQ ID NO: 2169560 - RNA, 19 nt, Artificial Sequence
  Description of Artificial Sequence: Synthetic oligonucleotide
  Sense strand starting at position 1255 of SEQ ID NO: 1883100
gugaucucuuaauuacaug

SEQ ID NO: 2169561 - RNA, 19 nt, Artificial Sequence
  Description of Artificial Sequence: Synthetic oligonucleotide
  Antisense strand to SEQ ID NO: 2169560
cauguaauuaagagaucac

SEQ ID NO: 2169562 - RNA, 19 nt, Artificial Sequence
  Description of Artificial Sequence: Synthetic oligonucleotide
  Sense strand starting at position 1347 of SEQ ID NO: 1883100
ucagaaucugcaugaggaa

SEQ ID NO: 2169563 - RNA, 19 nt, Artificial Sequence
  Description of Artificial Sequence: Synthetic oligonucleotide
  Antisense strand to SEQ ID NO: 2169562
uuccucaugcagauucuga

SEQ ID NO: 2169564 - RNA, 19 nt, Artificial Sequence
  Description of Artificial Sequence: Synthetic oligonucleotide
  Sense strand starting at position 1523 of SEQ ID NO: 1883100
ggagguuuacccuagcucu

SEQ ID NO: 2169565 - RNA, 19 nt, Artificial Sequence
  Description of Artificial Sequence: Synthetic oligonucleotide
  Antisense strand to SEQ ID NO: 2169564
agagcuaggguaaaccucc

SEQ ID NO: 2169566 - RNA, 19 nt, Artificial Sequence
  Description of Artificial Sequence: Synthetic oligonucleotide
  Sense strand starting at position 2139 of SEQ ID NO: 1883100
ugaugaagccuuggcaaua

SEQ ID NO: 2169567 - RNA, 19 nt, Artificial Sequence
  Description of Artificial Sequence: Synthetic oligonucleotide
  Antisense strand to SEQ ID NO: 2169566
uauugccaaggcuucauca

SEQ ID NO: 2169568 - RNA, 19 nt, Artificial Sequence
  Description of Artificial Sequence: Synthetic oligonucleotide
  Sense strand starting at position 2140 of SEQ ID NO: 1883100
gaugaagccuuggcaauau

SEQ ID NO: 2169569 - RNA, 19 nt, Artificial Sequence
  Description of Artificial Sequence: Synthetic oligonucleotide
  Antisense strand to SEQ ID NO: 2169568
auauugccaaggcuucauc

SEQ ID NO: 2169570 - RNA, 19 nt, Artificial Sequence
  Description of Artificial Sequence: Synthetic oligonucleotide
  Sense strand starting at position 2192 of SEQ ID NO: 1883100
guugaauuacuguagugaa

SEQ ID NO: 2169571 - RNA, 19 nt, Artificial Sequence
  Description of Artificial Sequence: Synthetic oligonucleotide
  Antisense strand to SEQ ID NO: 2169570
uucacuacaguaauucaac

SEQ ID NO: 2169572 - RNA, 19 nt, Artificial Sequence
  Description of Artificial Sequence: Synthetic oligonucleotide
  Sense strand starting at position 2274 of SEQ ID NO: 1883100
aguaauaucuacuucuagu

SEQ ID NO: 2169573 - RNA, 19 nt, Artificial Sequence
  Description of Artificial Sequence: Synthetic oligonucleotide
  Antisense strand to SEQ ID NO: 2169572
acuagaaguagauauuacu

SEQ ID NO: 2169574 - RNA, 19 nt, Artificial Sequence
  Description of Artificial Sequence: Synthetic oligonucleotide
  Sense strand starting at position 2298 of SEQ ID NO: 1883100
gcucuuaagacucagguga

SEQ ID NO: 2169575 - RNA, 19 nt, Artificial Sequence
  Description of Artificial Sequence: Synthetic oligonucleotide
  Antisense strand to SEQ ID NO: 2169574
ucaccugagucuuaagagc

SEQ ID NO: 2169576 - RNA, 19 nt, Artificial Sequence
  Description of Artificial Sequence: Synthetic oligonucleotide
  Sense strand starting at position 2365 of SEQ ID NO: 1883100
gucuaaggaguuuaaguaa

SEQ ID NO: 2169577 - RNA, 19 nt, Artificial Sequence
  Description of Artificial Sequence: Synthetic oligonucleotide
  Antisense strand to SEQ ID NO: 2169576
uuacuuaaacuccuuagac

SEQ ID NO: 2169578 - RNA, 19 nt, Artificial Sequence
  Description of Artificial Sequence: Synthetic oligonucleotide
  Sense strand starting at position 2429 of SEQ ID NO: 1883100
auuuauaaguaucaggcaa

SEQ ID NO: 2169579 - RNA, 19 nt, Artificial Sequence
  Description of Artificial Sequence: Synthetic oligonucleotide
  Antisense strand to SEQ ID NO: 2169578
uugccugauacuuauaaau

SEQ ID NO: 2169580 - RNA, 19 nt, Artificial Sequence
  Description of Artificial Sequence: Synthetic oligonucleotide
  Sense strand starting at position 2793 of SEQ ID NO: 1883100
ccauauugcugggcaacca

SEQ ID NO: 2169581 - RNA, 19 nt, Artificial Sequence
  Description of Artificial Sequence: Synthetic oligonucleotide
  Antisense strand to SEQ ID NO: 2169580
ugguugcccagcaauaugg

SEQ ID NO: 2169582 - RNA, 19 nt, Artificial Sequence
  Description of Artificial Sequence: Synthetic oligonucleotide
  Sense strand starting at position 2803 of SEQ ID NO: 1883100
gggcaaccaucacuaucau

SEQ ID NO: 2169583 - RNA, 19 nt, Artificial Sequence
  Description of Artificial Sequence: Synthetic oligonucleotide
  Antisense strand to SEQ ID NO: 2169582
augauagugaugguugccc

SEQ ID NO: 2169584 - RNA, 19 nt, Artificial Sequence
  Description of Artificial Sequence: Synthetic oligonucleotide
  Sense strand starting at position 2858 of SEQ ID NO: 1883100
uaaacugacuuguuuguga

SEQ ID NO: 2169585 - RNA, 19 nt, Artificial Sequence
  Description of Artificial Sequence: Synthetic oligonucleotide
  Antisense strand to SEQ ID NO: 2169584
ucacaaacaagucaguuua

SEQ ID NO: 2169586 - RNA, 19 nt, Artificial Sequence
  Description of Artificial Sequence: Synthetic oligonucleotide
  Sense strand starting at position 2860 of SEQ ID NO: 1883100
aacugacuuguuugugauu

SEQ ID NO: 2169587 - RNA, 19 nt, Artificial Sequence
  Description of Artificial Sequence: Synthetic oligonucleotide
  Antisense strand to SEQ ID NO: 2169586
aaucacaaacaagucaguu

SEQ ID NO: 2169588 - RNA, 19 nt, Artificial Sequence
  Description of Artificial Sequence: Synthetic oligonucleotide
  Sense strand starting at position 2869 of SEQ ID NO: 1883100
guuugugauuucguguauu

SEQ ID NO: 2169589 - RNA, 19 nt, Artificial Sequence
  Description of Artificial Sequence: Synthetic oligonucleotide
  Antisense strand to SEQ ID NO: 2169588
aauacacgaaaucacaaac

SEQ ID NO: 2169590 - RNA, 19 nt, Artificial Sequence
  Description of Artificial Sequence: Synthetic oligonucleotide
  Sense strand starting at position 2872 of SEQ ID NO: 1883100
ugugauuucguguauugau

SEQ ID NO: 2169591 - RNA, 19 nt, Artificial Sequence
  Description of Artificial Sequence: Synthetic oligonucleotide
  Antisense strand to SEQ ID NO: 2169590
aucaauacacgaaaucaca

SEQ ID NO: 2169592 - RNA, 19 nt, Artificial Sequence
  Description of Artificial Sequence: Synthetic oligonucleotide
  Sense strand starting at position 2880 of SEQ ID NO: 1883100
cguguauugauuuguguac

SEQ ID NO: 2169593 - RNA, 19 nt, Artificial Sequence
  Description of Artificial Sequence: Synthetic oligonucleotide
  Antisense strand to SEQ ID NO: 2169592
guacacaaaucaauacacg

SEQ ID NO: 2169594 - RNA, 19 nt, Artificial Sequence
  Description of Artificial Sequence: Synthetic oligonucleotide
  Sense strand starting at position 2962 of SEQ ID NO: 1883100
auacuacggcuauagagua

SEQ ID NO: 2169595 - RNA, 19 nt, Artificial Sequence
  Description of Artificial Sequence: Synthetic oligonucleotide
  Antisense strand to SEQ ID NO: 2169594
uacucuauagccguaguau

SEQ ID NO: 2169596 - RNA, 19 nt, Artificial Sequence
  Description of Artificial Sequence: Synthetic oligonucleotide
  Sense strand starting at position 2984 of SEQ ID NO: 1883100
ugaccuaccuuacucguaa

SEQ ID NO: 2169597 - RNA, 19 nt, Artificial Sequence
  Description of Artificial Sequence: Synthetic oligonucleotide
  Antisense strand to SEQ ID NO: 2169596
uuacgaguaagguagguca

SEQ ID NO: 2169598 - RNA, 19 nt, Artificial Sequence
  Description of Artificial Sequence: Synthetic oligonucleotide
  Sense strand starting at position 3002 of SEQ ID NO: 1883100
auuccuagucacuggcaaa

SEQ ID NO: 2169599 - RNA, 19 nt, Artificial Sequence
  Description of Artificial Sequence: Synthetic oligonucleotide
  Antisense strand to SEQ ID NO: 2169598
uuugccagugacuaggaau

SEQ ID NO: 2169600 - RNA, 19 nt, Artificial Sequence
  Description of Artificial Sequence: Synthetic oligonucleotide
  Sense strand starting at position 3173 of SEQ ID NO: 1883100
guuacuucugaguaguaua

SEQ ID NO: 2169601 - RNA, 19 nt, Artificial Sequence
  Description of Artificial Sequence: Synthetic oligonucleotide
  Antisense strand to SEQ ID NO: 2169600
uauacuacucagaaguaac

SEQ ID NO: 2169602 - RNA, 19 nt, Artificial Sequence
  Description of Artificial Sequence: Synthetic oligonucleotide
  Sense strand starting at position 3178 of SEQ ID NO: 1883100
uucugaguaguauacauaa

SEQ ID NO: 2169603 - RNA, 19 nt, Artificial Sequence
  Description of Artificial Sequence: Synthetic oligonucleotide
  Antisense strand to SEQ ID NO: 2169602
uuauguauacuacucagaa

SEQ ID NO: 2169604 - RNA, 19 nt, Artificial Sequence
  Description of Artificial Sequence: Synthetic oligonucleotide
  Sense strand starting at position 3198 of SEQ ID NO: 1883100
acaaauguuccacagguua

SEQ ID NO: 2169605 - RNA, 19 nt, Artificial Sequence
  Description of Artificial Sequence: Synthetic oligonucleotide
  Antisense strand to SEQ ID NO: 2169604
uaaccuguggaacauuugu

SEQ ID NO: 2169606 - RNA, 19 nt, Artificial Sequence
  Description of Artificial Sequence: Synthetic oligonucleotide
  Sense strand starting at position 3331 of SEQ ID NO: 1883100
uaguuagacuaagugagaa

SEQ ID NO: 2169607 - RNA, 19 nt, Artificial Sequence
  Description of Artificial Sequence: Synthetic oligonucleotide
  Antisense strand to SEQ ID NO: 2169606
uucucacuuagucuaacua

SEQ ID NO: 2169608 - RNA, 19 nt, Artificial Sequence
  Description of Artificial Sequence: Synthetic oligonucleotide
  Sense strand starting at position 3453 of SEQ ID NO: 1883100
augccaagagguuggauaa

SEQ ID NO: 2169609 - RNA, 19 nt, Artificial Sequence
  Description of Artificial Sequence: Synthetic oligonucleotide
  Antisense strand to SEQ ID NO: 2169608
uuauccaaccucuuggcau

SEQ ID NO: 2169610 - RNA, 19 nt, Artificial Sequence
  Description of Artificial Sequence: Synthetic oligonucleotide
  Sense strand starting at position 3454 of SEQ ID NO: 1883100
ugccaagagguuggauaaa

SEQ ID NO: 2169611 - RNA, 19 nt, Artificial Sequence
  Description of Artificial Sequence: Synthetic oligonucleotide
  Antisense strand to SEQ ID NO: 2169610
uuuauccaaccucuuggca

SEQ ID NO: 2169612 - RNA, 19 nt, Artificial Sequence
  Description of Artificial Sequence: Synthetic oligonucleotide
  Sense strand starting at position 3604 of SEQ ID NO: 1883100
agugcaagacuuuauagcu

SEQ ID NO: 2169613 - RNA, 19 nt, Artificial Sequence
  Description of Artificial Sequence: Synthetic oligonucleotide
  Antisense strand to SEQ ID NO: 2169612
agcuauaaagucuugcacu

SEQ ID NO: 2169614 - RNA, 19 nt, Artificial Sequence
  Description of Artificial Sequence: Synthetic oligonucleotide
  Sense strand starting at position 124 of SEQ ID NO: 1883101
gagaguuggcauuacugau

SEQ ID NO: 2169615 - RNA, 19 nt, Artificial Sequence
  Description of Artificial Sequence: Synthetic oligonucleotide
  Antisense strand to SEQ ID NO: 2169614
aucaguaaugccaacucuc

SEQ ID NO: 2169616 - RNA, 19 nt, Artificial Sequence
  Description of Artificial Sequence: Synthetic oligonucleotide
  Sense strand starting at position 286 of SEQ ID NO: 1883101
auaagcauguugguaaaua

SEQ ID NO: 2169617 - RNA, 19 nt, Artificial Sequence
  Description of Artificial Sequence: Synthetic oligonucleotide
  Antisense strand to SEQ ID NO: 2169616
uauuuaccaacaugcuuau

SEQ ID NO: 2169618 - RNA, 19 nt, Artificial Sequence
  Description of Artificial Sequence: Synthetic oligonucleotide
  Sense strand starting at position 369 of SEQ ID NO: 1883101
auaguauauccuuauguga

SEQ ID NO: 2169619 - RNA, 19 nt, Artificial Sequence
  Description of Artificial Sequence: Synthetic oligonucleotide
  Antisense strand to SEQ ID NO: 2169618
ucacauaaggauauacuau

SEQ ID NO: 2169620 - RNA, 19 nt, Artificial Sequence
  Description of Artificial Sequence: Synthetic oligonucleotide
  Sense strand starting at position 372 of SEQ ID NO: 1883101
guauauccuuaugugaaac

SEQ ID NO: 2169621 - RNA, 19 nt, Artificial Sequence
  Description of Artificial Sequence: Synthetic oligonucleotide
  Antisense strand to SEQ ID NO: 2169620
guuucacauaaggauauac

SEQ ID NO: 2169622 - RNA, 19 nt, Artificial Sequence
  Description of Artificial Sequence: Synthetic oligonucleotide
  Sense strand starting at position 395 of SEQ ID NO: 1883101
aggaaagauuucugaaacc

SEQ ID NO: 2169623 - RNA, 19 nt, Artificial Sequence
  Description of Artificial Sequence: Synthetic oligonucleotide
  Antisense strand to SEQ ID NO: 2169622
gguuucagaaaucuuuccu

SEQ ID NO: 2169624 - RNA, 19 nt, Artificial Sequence
  Description of Artificial Sequence: Synthetic oligonucleotide
  Sense strand starting at position 432 of SEQ ID NO: 1883101
uuuggaggccuauaauuac

SEQ ID NO: 2169625 - RNA, 19 nt, Artificial Sequence
  Description of Artificial Sequence: Synthetic oligonucleotide
  Antisense strand to SEQ ID NO: 2169624
guaauuauaggccuccaaa

SEQ ID NO: 2169626 - RNA, 19 nt, Artificial Sequence
  Description of Artificial Sequence: Synthetic oligonucleotide
  Sense strand starting at position 435 of SEQ ID NO: 1883101
ggaggccuauaauuacuaa

SEQ ID NO: 2169627 - RNA, 19 nt, Artificial Sequence
  Description of Artificial Sequence: Synthetic oligonucleotide
  Antisense strand to SEQ ID NO: 2169626
uuaguaauuauaggccucc

SEQ ID NO: 2169628 - RNA, 19 nt, Artificial Sequence
  Description of Artificial Sequence: Synthetic oligonucleotide
  Sense strand starting at position 503 of SEQ ID NO: 1883101
ccugcugaauuauuagaga

SEQ ID NO: 2169629 - RNA, 19 nt, Artificial Sequence
  Description of Artificial Sequence: Synthetic oligonucleotide
  Antisense strand to SEQ ID NO: 2169628
ucucuaauaauucagcagg

SEQ ID NO: 2169630 - RNA, 19 nt, Artificial Sequence
  Description of Artificial Sequence: Synthetic oligonucleotide
  Sense strand starting at position 540 of SEQ ID NO: 1883101
ccaaucucggacugugaaa

SEQ ID NO: 2169631 - RNA, 19 nt, Artificial Sequence
  Description of Artificial Sequence: Synthetic oligonucleotide
  Antisense strand to SEQ ID NO: 2169630
uuucacaguccgagauugg

SEQ ID NO: 2169632 - RNA, 19 nt, Artificial Sequence
  Description of Artificial Sequence: Synthetic oligonucleotide
  Sense strand starting at position 542 of SEQ ID NO: 1883101
aaucucggacugugaaauu

SEQ ID NO: 2169633 - RNA, 19 nt, Artificial Sequence
  Description of Artificial Sequence: Synthetic oligonucleotide
  Antisense strand to SEQ ID NO: 2169632
aauuucacaguccgagauu

SEQ ID NO: 2169634 - RNA, 19 nt, Artificial Sequence
  Description of Artificial Sequence: Synthetic oligonucleotide
  Sense strand starting at position 553 of SEQ ID NO: 1883101
gugaaauugaugugaucau

SEQ ID NO: 2169635 - RNA, 19 nt, Artificial Sequence
  Description of Artificial Sequence: Synthetic oligonucleotide
  Antisense strand to SEQ ID NO: 2169634
augaucacaucaauuucac

SEQ ID NO: 2169636 - RNA, 19 nt, Artificial Sequence
  Description of Artificial Sequence: Synthetic oligonucleotide
  Sense strand starting at position 587 of SEQ ID NO: 1883101
cccagaggucaucacuauu

SEQ ID NO: 2169637 - RNA, 19 nt, Artificial Sequence
  Description of Artificial Sequence: Synthetic oligonucleotide
  Antisense strand to SEQ ID NO: 2169636
aauagugaugaccucuggg

SEQ ID NO: 2169638 - RNA, 19 nt, Artificial Sequence
  Description of Artificial Sequence: Synthetic oligonucleotide
  Sense strand starting at position 1064 of SEQ ID NO: 1883101
accuuuggucuugacauua

SEQ ID NO: 2169639 - RNA, 19 nt, Artificial Sequence
  Description of Artificial Sequence: Synthetic oligonucleotide
  Antisense strand to SEQ ID NO: 2169638
uaaugucaagaccaaaggu

SEQ ID NO: 2169640 - RNA, 19 nt, Artificial Sequence
  Description of Artificial Sequence: Synthetic oligonucleotide
  Sense strand starting at position 1279 of SEQ ID NO: 1883101
cugcauuuguuucucuaca

SEQ ID NO: 2169641 - RNA, 19 nt, Artificial Sequence
  Description of Artificial Sequence: Synthetic oligonucleotide
  Antisense strand to SEQ ID NO: 2169640
uguagagaaacaaaugcag

SEQ ID NO: 2169642 - RNA, 19 nt, Artificial Sequence
  Description of Artificial Sequence: Synthetic oligonucleotide
  Sense strand starting at position 1280 of SEQ ID NO: 1883101
ugcauuuguuucucuacau

SEQ ID NO: 2169643 - RNA, 19 nt, Artificial Sequence
  Description of Artificial Sequence: Synthetic oligonucleotide
  Antisense strand to SEQ ID NO: 2169642
auguagagaaacaaaugca

SEQ ID NO: 2169644 - RNA, 19 nt, Artificial Sequence
  Description of Artificial Sequence: Synthetic oligonucleotide
  Sense strand starting at position 1281 of SEQ ID NO: 1883101
gcauuuguuucucuacauu

SEQ ID NO: 2169645 - RNA, 19 nt, Artificial Sequence
  Description of Artificial Sequence: Synthetic oligonucleotide
  Antisense strand to SEQ ID NO: 2169644
aauguagagaaacaaaugc

SEQ ID NO: 2169646 - RNA, 19 nt, Artificial Sequence
  Description of Artificial Sequence: Synthetic oligonucleotide
  Sense strand starting at position 1382 of SEQ ID NO: 1883101
uggucaagaucucaaauuu

SEQ ID NO: 2169647 - RNA, 19 nt, Artificial Sequence
  Description of Artificial Sequence: Synthetic oligonucleotide
  Antisense strand to SEQ ID NO: 2169646
aaauuugagaucuugacca

SEQ ID NO: 2169648 - RNA, 19 nt, Artificial Sequence
  Description of Artificial Sequence: Synthetic oligonucleotide
  Sense strand starting at position 1511 of SEQ ID NO: 1883101
guuauaaacagauguggaa

SEQ ID NO: 2169649 - RNA, 19 nt, Artificial Sequence
  Description of Artificial Sequence: Synthetic oligonucleotide
  Antisense strand to SEQ ID NO: 2169648
uuccacaucuguuuauaac

SEQ ID NO: 2169650 - RNA, 19 nt, Artificial Sequence
  Description of Artificial Sequence: Synthetic oligonucleotide
  Sense strand starting at position 1626 of SEQ ID NO: 1883101
ggauaacaguugccaaauc

SEQ ID NO: 2169651 - RNA, 19 nt, Artificial Sequence
  Description of Artificial Sequence: Synthetic oligonucleotide
  Antisense strand to SEQ ID NO: 2169650
gauuuggcaacuguuaucc

SEQ ID NO: 2169652 - RNA, 19 nt, Artificial Sequence
  Description of Artificial Sequence: Synthetic oligonucleotide
  Sense strand starting at position 1642 of SEQ ID NO: 1883101
aucaguaaauccuugauag

SEQ ID NO: 2169653 - RNA, 19 nt, Artificial Sequence
  Description of Artificial Sequence: Synthetic oligonucleotide
  Antisense strand to SEQ ID NO: 2169652
cuaucaaggauuuacugau

SEQ ID NO: 2169654 - RNA, 19 nt, Artificial Sequence
  Description of Artificial Sequence: Synthetic oligonucleotide
  Sense strand starting at position 1643 of SEQ ID NO: 1883101
ucaguaaauccuugauaga

SEQ ID NO: 2169655 - RNA, 19 nt, Artificial Sequence
  Description of Artificial Sequence: Synthetic oligonucleotide
  Antisense strand to SEQ ID NO: 2169654
ucuaucaaggauuuacuga

SEQ ID NO: 2169656 - RNA, 19 nt, Artificial Sequence
  Description of Artificial Sequence: Synthetic oligonucleotide
  Sense strand starting at position 1682 of SEQ ID NO: 1883101
caauuauucguagaguagc

SEQ ID NO: 2169657 - RNA, 19 nt, Artificial Sequence
  Description of Artificial Sequence: Synthetic oligonucleotide
  Antisense strand to SEQ ID NO: 2169656
gcuacucuacgaauaauug

SEQ ID NO: 2169658 - RNA, 19 nt, Artificial Sequence
  Description of Artificial Sequence: Synthetic oligonucleotide
  Sense strand starting at position 2374 of SEQ ID NO: 1883101
gguuacugacagcaaucaa

SEQ ID NO: 2169659 - RNA, 19 nt, Artificial Sequence
  Description of Artificial Sequence: Synthetic oligonucleotide
  Antisense strand to SEQ ID NO: 2169658
uugauugcugucaguaacc

SEQ ID NO: 2169660 - RNA, 19 nt, Artificial Sequence
  Description of Artificial Sequence: Synthetic oligonucleotide
  Sense strand starting at position 2421 of SEQ ID NO: 1883101
gcaaacaguuuagcuagaa

SEQ ID NO: 2169661 - RNA, 19 nt, Artificial Sequence
  Description of Artificial Sequence: Synthetic oligonucleotide
  Antisense strand to SEQ ID NO: 2169660
uucuagcuaaacuguuugc

SEQ ID NO: 2169662 - RNA, 19 nt, Artificial Sequence
  Description of Artificial Sequence: Synthetic oligonucleotide
  Sense strand starting at position 2447 of SEQ ID NO: 1883101
aaaugcauguuugcagaaa

SEQ ID NO: 2169663 - RNA, 19 nt, Artificial Sequence
  Description of Artificial Sequence: Synthetic oligonucleotide
  Antisense strand to SEQ ID NO: 2169662
uuucugcaaacaugcauuu

SEQ ID NO: 2169664 - RNA, 19 nt, Artificial Sequence
  Description of Artificial Sequence: Synthetic oligonucleotide
  Sense strand starting at position 2605 of SEQ ID NO: 1883101
cuacauucuguguaauccu

SEQ ID NO: 2169665 - RNA, 19 nt, Artificial Sequence
  Description of Artificial Sequence: Synthetic oligonucleotide
  Antisense strand to SEQ ID NO: 2169664
aggauuacacagaauguag

SEQ ID NO: 2169666 - RNA, 19 nt, Artificial Sequence
  Description of Artificial Sequence: Synthetic oligonucleotide
  Sense strand starting at position 2682 of SEQ ID NO: 1883101
gcagaaacaguuuaguuua

SEQ ID NO: 2169667 - RNA, 19 nt, Artificial Sequence
  Description of Artificial Sequence: Synthetic oligonucleotide
  Antisense strand to SEQ ID NO: 2169666
uaaacuaaacuguuucugc

SEQ ID NO: 2169668 - RNA, 19 nt, Artificial Sequence
  Description of Artificial Sequence: Synthetic oligonucleotide
  Sense strand starting at position 2685 of SEQ ID NO: 1883101
gaaacaguuuaguuuauug

SEQ ID NO: 2169669 - RNA, 19 nt, Artificial Sequence
  Description of Artificial Sequence: Synthetic oligonucleotide
  Antisense strand to SEQ ID NO: 2169668
caauaaacuaaacuguuuc

SEQ ID NO: 2169670 - RNA, 19 nt, Artificial Sequence
  Description of Artificial Sequence: Synthetic oligonucleotide
  Sense strand starting at position 2831 of SEQ ID NO: 1883101
cuuugaaauuacuuggaug

SEQ ID NO: 2169671 - RNA, 19 nt, Artificial Sequence
  Description of Artificial Sequence: Synthetic oligonucleotide
  Antisense strand to SEQ ID NO: 2169670
cauccaaguaauuucaaag

SEQ ID NO: 2169672 - RNA, 19 nt, Artificial Sequence
  Description of Artificial Sequence: Synthetic oligonucleotide
  Sense strand starting at position 2833 of SEQ ID NO: 1883101
uugaaauuacuuggaugca

SEQ ID NO: 2169673 - RNA, 19 nt, Artificial Sequence
  Description of Artificial Sequence: Synthetic oligonucleotide
  Antisense strand to SEQ ID NO: 2169672
ugcauccaaguaauuucaa

SEQ ID NO: 2169674 - RNA, 19 nt, Artificial Sequence
  Description of Artificial Sequence: Synthetic oligonucleotide
  Sense strand starting at position 2849 of SEQ ID NO: 1883101
gcaaaucuaagggacguua

SEQ ID NO: 2169675 - RNA, 19 nt, Artificial Sequence
  Description of Artificial Sequence: Synthetic oligonucleotide
  Antisense strand to SEQ ID NO: 2169674
uaacgucccuuagauuugc

SEQ ID NO: 2169676 - RNA, 19 nt, Artificial Sequence
  Description of Artificial Sequence: Synthetic oligonucleotide
  Sense strand starting at position 2860 of SEQ ID NO: 1883101
ggacguuaucagcagaaca

SEQ ID NO: 2169677 - RNA, 19 nt, Artificial Sequence
  Description of Artificial Sequence: Synthetic oligonucleotide
  Antisense strand to SEQ ID NO: 2169676
uguucugcugauaacgucc

SEQ ID NO: 2169678 - RNA, 19 nt, Artificial Sequence
  Description of Artificial Sequence: Synthetic oligonucleotide
  Sense strand starting at position 2862 of SEQ ID NO: 1883101
acguuaucagcagaacaau

SEQ ID NO: 2169679 - RNA, 19 nt, Artificial Sequence
  Description of Artificial Sequence: Synthetic oligonucleotide
  Antisense strand to SEQ ID NO: 2169678
auuguucugcugauaacgu

SEQ ID NO: 2169680 - RNA, 19 nt, Artificial Sequence
  Description of Artificial Sequence: Synthetic oligonucleotide
  Sense strand starting at position 2953 of SEQ ID NO: 1883101
ggauacaauugcuuaauga

SEQ ID NO: 2169681 - RNA, 19 nt, Artificial Sequence
  Description of Artificial Sequence: Synthetic oligonucleotide
  Antisense strand to SEQ ID NO: 2169680
ucauuaagcaauuguaucc

SEQ ID NO: 2169682 - RNA, 19 nt, Artificial Sequence
  Description of Artificial Sequence: Synthetic oligonucleotide
  Sense strand starting at position 2972 of SEQ ID NO: 1883101
agcagaaauuuggaauauc

SEQ ID NO: 2169683 - RNA, 19 nt, Artificial Sequence
  Description of Artificial Sequence: Synthetic oligonucleotide
  Antisense strand to SEQ ID NO: 2169682
gauauuccaaauuucugcu

SEQ ID NO: 2169684 - RNA, 19 nt, Artificial Sequence
  Description of Artificial Sequence: Synthetic oligonucleotide
  Sense strand starting at position 2983 of SEQ ID NO: 1883101
ggaauaucagguuggcaaa

SEQ ID NO: 2169685 - RNA, 19 nt, Artificial Sequence
  Description of Artificial Sequence: Synthetic oligonucleotide
  Antisense strand to SEQ ID NO: 2169684
uuugccaaccugauauucc

SEQ ID NO: 2169686 - RNA, 19 nt, Artificial Sequence
  Description of Artificial Sequence: Synthetic oligonucleotide
  Sense strand starting at position 2993 of SEQ ID NO: 1883101
guuggcaaacucugacaga

SEQ ID NO: 2169687 - RNA, 19 nt, Artificial Sequence
  Description of Artificial Sequence: Synthetic oligonucleotide
  Antisense strand to SEQ ID NO: 2169686
ucugucagaguuugccaac

SEQ ID NO: 2169688 - RNA, 19 nt, Artificial Sequence
  Description of Artificial Sequence: Synthetic oligonucleotide
  Sense strand starting at position 3088 of SEQ ID NO: 1883101
guaucuagagaauagcauu

SEQ ID NO: 2169689 - RNA, 19 nt, Artificial Sequence
  Description of Artificial Sequence: Synthetic oligonucleotide
  Antisense strand to SEQ ID NO: 2169688
aaugcuauucucuagauac

SEQ ID NO: 2169690 - RNA, 19 nt, Artificial Sequence
  Description of Artificial Sequence: Synthetic oligonucleotide
  Sense strand starting at position 3625 of SEQ ID NO: 1883101
uccagaguuuguuuauaug

SEQ ID NO: 2169691 - RNA, 19 nt, Artificial Sequence
  Description of Artificial Sequence: Synthetic oligonucleotide
  Antisense strand to SEQ ID NO: 2169690
cauauaaacaaacucugga

SEQ ID NO: 2169692 - RNA, 19 nt, Artificial Sequence
  Description of Artificial Sequence: Synthetic oligonucleotide
  Sense strand starting at position 3632 of SEQ ID NO: 1883101
uuuguuuauaugugagaga

SEQ ID NO: 2169693 - RNA, 19 nt, Artificial Sequence
  Description of Artificial Sequence: Synthetic oligonucleotide
  Antisense strand to SEQ ID NO: 2169692
ucucucacauauaaacaaa

SEQ ID NO: 2169694 - RNA, 19 nt, Artificial Sequence
  Description of Artificial Sequence: Synthetic oligonucleotide
  Sense strand starting at position 119 of SEQ ID NO: 1883102
accuuaguuugaucuucca

SEQ ID NO: 2169695 - RNA, 19 nt, Artificial Sequence
  Description of Artificial Sequence: Synthetic oligonucleotide
  Antisense strand to SEQ ID NO: 2169694
uggaagaucaaacuaaggu

SEQ ID NO: 2169696 - RNA, 19 nt, Artificial Sequence
  Description of Artificial Sequence: Synthetic oligonucleotide
  Sense strand starting at position 149 of SEQ ID NO: 1883102
uauagucugcaugaagaca

SEQ ID NO: 2169697 - RNA, 19 nt, Artificial Sequence
  Description of Artificial Sequence: Synthetic oligonucleotide
  Antisense strand to SEQ ID NO: 2169696
ugucuucaugcagacuaua

SEQ ID NO: 2169698 - RNA, 19 nt, Artificial Sequence
  Description of Artificial Sequence: Synthetic oligonucleotide
  Sense strand starting at position 517 of SEQ ID NO: 1883102
gucgguaaugacugacaau

SEQ ID NO: 2169699 - RNA, 19 nt, Artificial Sequence
  Description of Artificial Sequence: Synthetic oligonucleotide
  Antisense strand to SEQ ID NO: 2169698
auugucagucauuaccgac

SEQ ID NO: 2169700 - RNA, 19 nt, Artificial Sequence
  Description of Artificial Sequence: Synthetic oligonucleotide
  Sense strand starting at position 518 of SEQ ID NO: 1883102
ucgguaaugacugacaauu

SEQ ID NO: 2169701 - RNA, 19 nt, Artificial Sequence
  Description of Artificial Sequence: Synthetic oligonucleotide
  Antisense strand to SEQ ID NO: 2169700
aauugucagucauuaccga

SEQ ID NO: 2169702 - RNA, 19 nt, Artificial Sequence
  Description of Artificial Sequence: Synthetic oligonucleotide
  Sense strand starting at position 520 of SEQ ID NO: 1883102
gguaaugacugacaauuua

SEQ ID NO: 2169703 - RNA, 19 nt, Artificial Sequence
  Description of Artificial Sequence: Synthetic oligonucleotide
  Antisense strand to SEQ ID NO: 2169702
uaaauugucagucauuacc

SEQ ID NO: 2169704 - RNA, 19 nt, Artificial Sequence
  Description of Artificial Sequence: Synthetic oligonucleotide
  Sense strand starting at position 642 of SEQ ID NO: 1883102
gugaguguuaaccaucuag

SEQ ID NO: 2169705 - RNA, 19 nt, Artificial Sequence
  Description of Artificial Sequence: Synthetic oligonucleotide
  Antisense strand to SEQ ID NO: 2169704
cuagaugguuaacacucac

SEQ ID NO: 2169706 - RNA, 19 nt, Artificial Sequence
  Description of Artificial Sequence: Synthetic oligonucleotide
  Sense strand starting at position 797 of SEQ ID NO: 1883102
aguaauuaguuuccugaag

SEQ ID NO: 2169707 - RNA, 19 nt, Artificial Sequence
  Description of Artificial Sequence: Synthetic oligonucleotide
  Antisense strand to SEQ ID NO: 2169706
cuucaggaaacuaauuacu

SEQ ID NO: 2169708 - RNA, 19 nt, Artificial Sequence
  Description of Artificial Sequence: Synthetic oligonucleotide
  Sense strand starting at position 1022 of SEQ ID NO: 1883102
gggcaucuccaauacaagu

SEQ ID NO: 2169709 - RNA, 19 nt, Artificial Sequence
  Description of Artificial Sequence: Synthetic oligonucleotide
  Antisense strand to SEQ ID NO: 2169708
acuuguauuggagaugccc

SEQ ID NO: 2169710 - RNA, 19 nt, Artificial Sequence
  Description of Artificial Sequence: Synthetic oligonucleotide
  Sense strand starting at position 1105 of SEQ ID NO: 1883102
acaauaauccugugaguuc

SEQ ID NO: 2169711 - RNA, 19 nt, Artificial Sequence
  Description of Artificial Sequence: Synthetic oligonucleotide
  Antisense strand to SEQ ID NO: 2169710
gaacucacaggauuauugu

SEQ ID NO: 2169712 - RNA, 19 nt, Artificial Sequence
  Description of Artificial Sequence: Synthetic oligonucleotide
  Sense strand starting at position 1131 of SEQ ID NO: 1883102
cagggauuaucuguccgga

SEQ ID NO: 2169713 - RNA, 19 nt, Artificial Sequence
  Description of Artificial Sequence: Synthetic oligonucleotide
  Antisense strand to SEQ ID NO: 2169712
uccggacagauaaucccug

SEQ ID NO: 2169714 - RNA, 19 nt, Artificial Sequence
  Description of Artificial Sequence: Synthetic oligonucleotide
  Sense strand starting at position 1187 of SEQ ID NO: 1883102
uuaagaaugguuuggcuau

SEQ ID NO: 2169715 - RNA, 19 nt, Artificial Sequence
  Description of Artificial Sequence: Synthetic oligonucleotide
  Antisense strand to SEQ ID NO: 2169714
auagccaaaccauucuuaa

SEQ ID NO: 2169716 - RNA, 19 nt, Artificial Sequence
  Description of Artificial Sequence: Synthetic oligonucleotide
  Sense strand starting at position 1296 of SEQ ID NO: 1883102
uaaauuuagcuguguugac

SEQ ID NO: 2169717 - RNA, 19 nt, Artificial Sequence
  Description of Artificial Sequence: Synthetic oligonucleotide
  Antisense strand to SEQ ID NO: 2169716
gucaacacagcuaaauuua

SEQ ID NO: 2169718 - RNA, 19 nt, Artificial Sequence
  Description of Artificial Sequence: Synthetic oligonucleotide
  Sense strand starting at position 1430 of SEQ ID NO: 1883102
aggcguuuggaggacugaa

SEQ ID NO: 2169719 - RNA, 19 nt, Artificial Sequence
  Description of Artificial Sequence: Synthetic oligonucleotide
  Antisense strand to SEQ ID NO: 2169718
uucaguccuccaaacgccu

SEQ ID NO: 2169720 - RNA, 19 nt, Artificial Sequence
  Description of Artificial Sequence: Synthetic oligonucleotide
  Sense strand starting at position 2260 of SEQ ID NO: 1883102
gacggauccgauuggagaa

SEQ ID NO: 2169721 - RNA, 19 nt, Artificial Sequence
  Description of Artificial Sequence: Synthetic oligonucleotide
  Antisense strand to SEQ ID NO: 2169720
uucuccaaucggauccguc

SEQ ID NO: 2169722 - RNA, 19 nt, Artificial Sequence
  Description of Artificial Sequence: Synthetic oligonucleotide
  Sense strand starting at position 2557 of SEQ ID NO: 1883102
ggugguugcccgguuaguu

SEQ ID NO: 2169723 - RNA, 19 nt, Artificial Sequence
  Description of Artificial Sequence: Synthetic oligonucleotide
  Antisense strand to SEQ ID NO: 2169722
aacuaaccgggcaaccacc

SEQ ID NO: 2169724 - RNA, 19 nt, Artificial Sequence
  Description of Artificial Sequence: Synthetic oligonucleotide
  Sense strand starting at position 2558 of SEQ ID NO: 1883102
gugguugcccgguuaguua

SEQ ID NO: 2169725 - RNA, 19 nt, Artificial Sequence
  Description of Artificial Sequence: Synthetic oligonucleotide
  Antisense strand to SEQ ID NO: 2169724
uaacuaaccgggcaaccac

SEQ ID NO: 2169726 - RNA, 19 nt, Artificial Sequence
  Description of Artificial Sequence: Synthetic oligonucleotide
  Sense strand starting at position 2808 of SEQ ID NO: 1883102
gagggugugccaggaauau

SEQ ID NO: 2169727 - RNA, 19 nt, Artificial Sequence
  Description of Artificial Sequence: Synthetic oligonucleotide
  Antisense strand to SEQ ID NO: 2169726
auauuccuggcacacccuc

SEQ ID NO: 2169728 - RNA, 19 nt, Artificial Sequence
  Description of Artificial Sequence: Synthetic oligonucleotide
  Sense strand starting at position 2818 of SEQ ID NO: 1883102
caggaauauauggguguua

SEQ ID NO: 2169729 - RNA, 19 nt, Artificial Sequence
  Description of Artificial Sequence: Synthetic oligonucleotide
  Antisense strand to SEQ ID NO: 2169728
uaacacccauauauuccug

SEQ ID NO: 2169730 - RNA, 19 nt, Artificial Sequence
  Description of Artificial Sequence: Synthetic oligonucleotide
  Sense strand starting at position 2819 of SEQ ID NO: 1883102
aggaauauauggguguuaa

SEQ ID NO: 2169731 - RNA, 19 nt, Artificial Sequence
  Description of Artificial Sequence: Synthetic oligonucleotide
  Antisense strand to SEQ ID NO: 2169730
uuaacacccauauauuccu

SEQ ID NO: 2169732 - RNA, 19 nt, Artificial Sequence
  Description of Artificial Sequence: Synthetic oligonucleotide
  Sense strand starting at position 2820 of SEQ ID NO: 1883102
ggaauauauggguguuaag

SEQ ID NO: 2169733 - RNA, 19 nt, Artificial Sequence
  Description of Artificial Sequence: Synthetic oligonucleotide
  Antisense strand to SEQ ID NO: 2169732
cuuaacacccauauauucc

SEQ ID NO: 2169734 - RNA, 19 nt, Artificial Sequence
  Description of Artificial Sequence: Synthetic oligonucleotide
  Sense strand starting at position 3010 of SEQ ID NO: 1883102
ucauauagccucuggaaga

SEQ ID NO: 2169735 - RNA, 19 nt, Artificial Sequence
  Description of Artificial Sequence: Synthetic oligonucleotide
  Antisense strand to SEQ ID NO: 2169734
ucuuccagaggcuauauga

SEQ ID NO: 2169736 - RNA, 19 nt, Artificial Sequence
  Description of Artificial Sequence: Synthetic oligonucleotide
  Sense strand starting at position 3023 of SEQ ID NO: 1883102
ggaagaagggcguaagguu

SEQ ID NO: 2169737 - RNA, 19 nt, Artificial Sequence
  Description of Artificial Sequence: Synthetic oligonucleotide
  Antisense strand to SEQ ID NO: 2169736
aaccuuacgcccuucuucc

SEQ ID NO: 2169738 - RNA, 19 nt, Artificial Sequence
  Description of Artificial Sequence: Synthetic oligonucleotide
  Sense strand starting at position 3068 of SEQ ID NO: 1883102
gcccaaggagaguauuagu

SEQ ID NO: 2169739 - RNA, 19 nt, Artificial Sequence
  Description of Artificial Sequence: Synthetic oligonucleotide
  Antisense strand to SEQ ID NO: 2169738
acuaauacucuccuugggc

SEQ ID NO: 2169740 - RNA, 19 nt, Artificial Sequence
  Description of Artificial Sequence: Synthetic oligonucleotide
  Sense strand starting at position 3088 of SEQ ID NO: 1883102
ggucgauucggugccagua

SEQ ID NO: 2169741 - RNA, 19 nt, Artificial Sequence
  Description of Artificial Sequence: Synthetic oligonucleotide
  Antisense strand to SEQ ID NO: 2169740
uacuggcaccgaaucgacc

SEQ ID NO: 2169742 - RNA, 19 nt, Artificial Sequence
  Description of Artificial Sequence: Synthetic oligonucleotide
  Sense strand starting at position 3261 of SEQ ID NO: 1883102
cugagaauacuuuggcuua

SEQ ID NO: 2169743 - RNA, 19 nt, Artificial Sequence
  Description of Artificial Sequence: Synthetic oligonucleotide
  Antisense strand to SEQ ID NO: 2169742
uaagccaaaguauucucag

SEQ ID NO: 2169744 - RNA, 19 nt, Artificial Sequence
  Description of Artificial Sequence: Synthetic oligonucleotide
  Sense strand starting at position 3264 of SEQ ID NO: 1883102
agaauacuuuggcuuaaau

SEQ ID NO: 2169745 - RNA, 19 nt, Artificial Sequence
  Description of Artificial Sequence: Synthetic oligonucleotide
  Antisense strand to SEQ ID NO: 2169744
auuuaagccaaaguauucu

SEQ ID NO: 2169746 - RNA, 19 nt, Artificial Sequence
  Description of Artificial Sequence: Synthetic oligonucleotide
  Sense strand starting at position 3427 of SEQ ID NO: 1883102
caguuuaauuggcuuggaa

SEQ ID NO: 2169747 - RNA, 19 nt, Artificial Sequence
  Description of Artificial Sequence: Synthetic oligonucleotide
  Antisense strand to SEQ ID NO: 2169746
uuccaagccaauuaaacug

SEQ ID NO: 2169748 - RNA, 19 nt, Artificial Sequence
  Description of Artificial Sequence: Synthetic oligonucleotide
  Sense strand starting at position 3429 of SEQ ID NO: 1883102
guuuaauuggcuuggaaag

SEQ ID NO: 2169749 - RNA, 19 nt, Artificial Sequence
  Description of Artificial Sequence: Synthetic oligonucleotide
  Antisense strand to SEQ ID NO: 2169748
cuuuccaagccaauuaaac

SEQ ID NO: 2169750 - RNA, 19 nt, Artificial Sequence
  Description of Artificial Sequence: Synthetic oligonucleotide
  Sense strand starting at position 3529 of SEQ ID NO: 1883102
gcgauuugcaaagaccgua

SEQ ID NO: 2169751 - RNA, 19 nt, Artificial Sequence
  Description of Artificial Sequence: Synthetic oligonucleotide
  Antisense strand to SEQ ID NO: 2169750
uacggucuuugcaaaucgc

SEQ ID NO: 2169752 - RNA, 19 nt, Artificial Sequence
  Description of Artificial Sequence: Synthetic oligonucleotide
  Sense strand starting at position 3534 of SEQ ID NO: 1883102
uugcaaagaccguaugaug

SEQ ID NO: 2169753 - RNA, 19 nt, Artificial Sequence
  Description of Artificial Sequence: Synthetic oligonucleotide
  Antisense strand to SEQ ID NO: 2169752
caucauacggucuuugcaa

SEQ ID NO: 2169754 - RNA, 19 nt, Artificial Sequence
  Description of Artificial Sequence: Synthetic oligonucleotide
  Sense strand starting at position 3545 of SEQ ID NO: 1883102
guaugaugaugaucaugau

SEQ ID NO: 2169755 - RNA, 19 nt, Artificial Sequence
  Description of Artificial Sequence: Synthetic oligonucleotide
  Antisense strand to SEQ ID NO: 2169754
aucaugaucaucaucauac

SEQ ID NO: 2169756 - RNA, 19 nt, Artificial Sequence
  Description of Artificial Sequence: Synthetic oligonucleotide
  Sense strand starting at position 3551 of SEQ ID NO: 1883102
ugaugaucaugaucuuacu

SEQ ID NO: 2169757 - RNA, 19 nt, Artificial Sequence
  Description of Artificial Sequence: Synthetic oligonucleotide
  Antisense strand to SEQ ID NO: 2169756
aguaagaucaugaucauca

SEQ ID NO: 2169758 - RNA, 19 nt, Artificial Sequence
  Description of Artificial Sequence: Synthetic oligonucleotide
  Sense strand starting at position 3613 of SEQ ID NO: 1883102
guggaucauguuggaaaug

SEQ ID NO: 2169759 - RNA, 19 nt, Artificial Sequence
  Description of Artificial Sequence: Synthetic oligonucleotide
  Antisense strand to SEQ ID NO: 2169758
cauuuccaacaugauccac

SEQ ID NO: 2169760 - RNA, 19 nt, Artificial Sequence
  Description of Artificial Sequence: Synthetic oligonucleotide
  Sense strand starting at position 3642 of SEQ ID NO: 1883102
ccaggaacuugguuauggu

SEQ ID NO: 2169761 - RNA, 19 nt, Artificial Sequence
  Description of Artificial Sequence: Synthetic oligonucleotide
  Antisense strand to SEQ ID NO: 2169760
accauaaccaaguuccugg

SEQ ID NO: 2169762 - RNA, 19 nt, Artificial Sequence
  Description of Artificial Sequence: Synthetic oligonucleotide
  Sense strand starting at position 3709 of SEQ ID NO: 1883102
acgaaauaggaaugucuga

SEQ ID NO: 2169763 - RNA, 19 nt, Artificial Sequence
  Description of Artificial Sequence: Synthetic oligonucleotide
  Antisense strand to SEQ ID NO: 2169762
ucagacauuccuauuucgu

SEQ ID NO: 2169764 - RNA, 19 nt, Artificial Sequence
  Description of Artificial Sequence: Synthetic oligonucleotide
  Sense strand starting at position 3769 of SEQ ID NO: 1883102
agaauuuccucagaaagac

SEQ ID NO: 2169765 - RNA, 19 nt, Artificial Sequence
  Description of Artificial Sequence: Synthetic oligonucleotide
  Antisense strand to SEQ ID NO: 2169764
gucuuucugaggaaauucu

SEQ ID NO: 2169766 - RNA, 19 nt, Artificial Sequence
  Description of Artificial Sequence: Synthetic oligonucleotide
  Sense strand starting at position 3781 of SEQ ID NO: 1883102
gaaagaccguuacuggaaa

SEQ ID NO: 2169767 - RNA, 19 nt, Artificial Sequence
  Description of Artificial Sequence: Synthetic oligonucleotide
  Antisense strand to SEQ ID NO: 2169766
uuuccaguaacggucuuuc

SEQ ID NO: 2169768 - RNA, 19 nt, Artificial Sequence
  Description of Artificial Sequence: Synthetic oligonucleotide
  Sense strand starting at position 3792 of SEQ ID NO: 1883102
acuggaaauuuccaguaug

SEQ ID NO: 2169769 - RNA, 19 nt, Artificial Sequence
  Description of Artificial Sequence: Synthetic oligonucleotide
  Antisense strand to SEQ ID NO: 2169768
cauacuggaaauuuccagu

SEQ ID NO: 2169770 - RNA, 19 nt, Artificial Sequence
  Description of Artificial Sequence: Synthetic oligonucleotide
  Sense strand starting at position 3814 of SEQ ID NO: 1883102
agggucagugacugaacaa

SEQ ID NO: 2169771 - RNA, 19 nt, Artificial Sequence
  Description of Artificial Sequence: Synthetic oligonucleotide
  Antisense strand to SEQ ID NO: 2169770
uuguucagucacugacccu

SEQ ID NO: 2169772 - RNA, 19 nt, Artificial Sequence
  Description of Artificial Sequence: Synthetic oligonucleotide
  Sense strand starting at position 3965 of SEQ ID NO: 1883102
gcaugaaccuuuccugaaa

SEQ ID NO: 2169773 - RNA, 19 nt, Artificial Sequence
  Description of Artificial Sequence: Synthetic oligonucleotide
  Antisense strand to SEQ ID NO: 2169772
uuucaggaaagguucaugc

SEQ ID NO: 2169774 - RNA, 19 nt, Artificial Sequence
  Description of Artificial Sequence: Synthetic oligonucleotide
  Sense strand starting at position 58 of SEQ ID NO: 1883103
uguuuaaguguccaacaca

SEQ ID NO: 2169775 - RNA, 19 nt, Artificial Sequence
  Description of Artificial Sequence: Synthetic oligonucleotide
  Antisense strand to SEQ ID NO: 2169774
uguguuggacacuuaaaca

SEQ ID NO: 2169776 - RNA, 19 nt, Artificial Sequence
  Description of Artificial Sequence: Synthetic oligonucleotide
  Sense strand starting at position 167 of SEQ ID NO: 1883103
cuuucucuuggcuaaugaa

SEQ ID NO: 2169777 - RNA, 19 nt, Artificial Sequence
  Description of Artificial Sequence: Synthetic oligonucleotide
  Antisense strand to SEQ ID NO: 2169776
uucauuagccaagagaaag

SEQ ID NO: 2169778 - RNA, 19 nt, Artificial Sequence
  Description of Artificial Sequence: Synthetic oligonucleotide
  Sense strand starting at position 275 of SEQ ID NO: 1883103
acaaaugacucuuugguuu

SEQ ID NO: 2169779 - RNA, 19 nt, Artificial Sequence
  Description of Artificial Sequence: Synthetic oligonucleotide
  Antisense strand to SEQ ID NO: 2169778
aaaccaaagagucauuugu

SEQ ID NO: 2169780 - RNA, 19 nt, Artificial Sequence
  Description of Artificial Sequence: Synthetic oligonucleotide
  Sense strand starting at position 279 of SEQ ID NO: 1883103
augacucuuugguuuaacu

SEQ ID NO: 2169781 - RNA, 19 nt, Artificial Sequence
  Description of Artificial Sequence: Synthetic oligonucleotide
  Antisense strand to SEQ ID NO: 2169780
aguuaaaccaaagagucau

SEQ ID NO: 2169782 - RNA, 19 nt, Artificial Sequence
  Description of Artificial Sequence: Synthetic oligonucleotide
  Sense strand starting at position 286 of SEQ ID NO: 1883103
uuugguuuaacuuggaaga

SEQ ID NO: 2169783 - RNA, 19 nt, Artificial Sequence
  Description of Artificial Sequence: Synthetic oligonucleotide
  Antisense strand to SEQ ID NO: 2169782
ucuuccaaguuaaaccaaa

SEQ ID NO: 2169784 - RNA, 19 nt, Artificial Sequence
  Description of Artificial Sequence: Synthetic oligonucleotide
  Sense strand starting at position 287 of SEQ ID NO: 1883103
uugguuuaacuuggaagaa

SEQ ID NO: 2169785 - RNA, 19 nt, Artificial Sequence
  Description of Artificial Sequence: Synthetic oligonucleotide
  Antisense strand to SEQ ID NO: 2169784
uucuuccaaguuaaaccaa

SEQ ID NO: 2169786 - RNA, 19 nt, Artificial Sequence
  Description of Artificial Sequence: Synthetic oligonucleotide
  Sense strand starting at position 348 of SEQ ID NO: 1883103
aauuaacaugucuggaagu

SEQ ID NO: 2169787 - RNA, 19 nt, Artificial Sequence
  Description of Artificial Sequence: Synthetic oligonucleotide
  Antisense strand to SEQ ID NO: 2169786
acuuccagacauguuaauu

SEQ ID NO: 2169788 - RNA, 19 nt, Artificial Sequence
  Description of Artificial Sequence: Synthetic oligonucleotide
  Sense strand starting at position 866 of SEQ ID NO: 1883103
gcaguaguuccugaaucaa

SEQ ID NO: 2169789 - RNA, 19 nt, Artificial Sequence
  Description of Artificial Sequence: Synthetic oligonucleotide
  Antisense strand to SEQ ID NO: 2169788
uugauucaggaacuacugc

SEQ ID NO: 2169790 - RNA, 19 nt, Artificial Sequence
  Description of Artificial Sequence: Synthetic oligonucleotide
  Sense strand starting at position 1154 of SEQ ID NO: 1883103
gugcaugagguggacuuaa

SEQ ID NO: 2169791 - RNA, 19 nt, Artificial Sequence
  Description of Artificial Sequence: Synthetic oligonucleotide
  Antisense strand to SEQ ID NO: 2169790
uuaaguccaccucaugcac

SEQ ID NO: 2169792 - RNA, 19 nt, Artificial Sequence
  Description of Artificial Sequence: Synthetic oligonucleotide
  Sense strand starting at position 1229 of SEQ ID NO: 1883103
gaagcuguggcacaagauu

SEQ ID NO: 2169793 - RNA, 19 nt, Artificial Sequence
  Description of Artificial Sequence: Synthetic oligonucleotide
  Antisense strand to SEQ ID NO: 2169792
aaucuugugccacagcuuc

SEQ ID NO: 2169794 - RNA, 19 nt, Artificial Sequence
  Description of Artificial Sequence: Synthetic oligonucleotide
  Sense strand starting at position 1463 of SEQ ID NO: 1883103
cuagauucuuguguaauga

SEQ ID NO: 2169795 - RNA, 19 nt, Artificial Sequence
  Description of Artificial Sequence: Synthetic oligonucleotide
  Antisense strand to SEQ ID NO: 2169794
ucauuacacaagaaucuag

SEQ ID NO: 2169796 - RNA, 19 nt, Artificial Sequence
  Description of Artificial Sequence: Synthetic oligonucleotide
  Sense strand starting at position 1464 of SEQ ID NO: 1883103
uagauucuuguguaaugag

SEQ ID NO: 2169797 - RNA, 19 nt, Artificial Sequence
  Description of Artificial Sequence: Synthetic oligonucleotide
  Antisense strand to SEQ ID NO: 2169796
cucauuacacaagaaucua

SEQ ID NO: 2169798 - RNA, 19 nt, Artificial Sequence
  Description of Artificial Sequence: Synthetic oligonucleotide
  Sense strand starting at position 1627 of SEQ ID NO: 1883103
cccgaccuuccuuaugagu

SEQ ID NO: 2169799 - RNA, 19 nt, Artificial Sequence
  Description of Artificial Sequence: Synthetic oligonucleotide
  Antisense strand to SEQ ID NO: 2169798
acucauaaggaaggucggg

SEQ ID NO: 2169800 - RNA, 19 nt, Artificial Sequence
  Description of Artificial Sequence: Synthetic oligonucleotide
  Sense strand starting at position 1640 of SEQ ID NO: 1883103
augagucuugcuuagggua

SEQ ID NO: 2169801 - RNA, 19 nt, Artificial Sequence
  Description of Artificial Sequence: Synthetic oligonucleotide
  Antisense strand to SEQ ID NO: 2169800
uacccuaagcaagacucau

SEQ ID NO: 2169802 - RNA, 19 nt, Artificial Sequence
  Description of Artificial Sequence: Synthetic oligonucleotide
  Sense strand starting at position 1716 of SEQ ID NO: 1883103
agagguuuaccugguugaa

SEQ ID NO: 2169803 - RNA, 19 nt, Artificial Sequence
  Description of Artificial Sequence: Synthetic oligonucleotide
  Antisense strand to SEQ ID NO: 2169802
uucaaccagguaaaccucu

SEQ ID NO: 2169804 - RNA, 19 nt, Artificial Sequence
  Description of Artificial Sequence: Synthetic oligonucleotide
  Sense strand starting at position 1718 of SEQ ID NO: 1883103
agguuuaccugguugaaca

SEQ ID NO: 2169805 - RNA, 19 nt, Artificial Sequence
  Description of Artificial Sequence: Synthetic oligonucleotide
  Antisense strand to SEQ ID NO: 2169804
uguucaaccagguaaaccu

SEQ ID NO: 2169806 - RNA, 19 nt, Artificial Sequence
  Description of Artificial Sequence: Synthetic oligonucleotide
  Sense strand starting at position 1883 of SEQ ID NO: 1883103
ugaugucaugcuuacucca

SEQ ID NO: 2169807 - RNA, 19 nt, Artificial Sequence
  Description of Artificial Sequence: Synthetic oligonucleotide
  Antisense strand to SEQ ID NO: 2169806
uggaguaagcaugacauca

SEQ ID NO: 2169808 - RNA, 19 nt, Artificial Sequence
  Description of Artificial Sequence: Synthetic oligonucleotide
  Sense strand starting at position 2410 of SEQ ID NO: 1883103
gggcuaaguggaugagaga

SEQ ID NO: 2169809 - RNA, 19 nt, Artificial Sequence
  Description of Artificial Sequence: Synthetic oligonucleotide
  Antisense strand to SEQ ID NO: 2169808
ucucucauccacuuagccc

SEQ ID NO: 2169810 - RNA, 19 nt, Artificial Sequence
  Description of Artificial Sequence: Synthetic oligonucleotide
  Sense strand starting at position 2428 of SEQ ID NO: 1883103
agguaagaguucccaccua

SEQ ID NO: 2169811 - RNA, 19 nt, Artificial Sequence
  Description of Artificial Sequence: Synthetic oligonucleotide
  Antisense strand to SEQ ID NO: 2169810
uaggugggaacucuuaccu

SEQ ID NO: 2169812 - RNA, 19 nt, Artificial Sequence
  Description of Artificial Sequence: Synthetic oligonucleotide
  Sense strand starting at position 2536 of SEQ ID NO: 1883103
ggguuaaaucuaugguuug

SEQ ID NO: 2169813 - RNA, 19 nt, Artificial Sequence
  Description of Artificial Sequence: Synthetic oligonucleotide
  Antisense strand to SEQ ID NO: 2169812
caaaccauagauuuaaccc

SEQ ID NO: 2169814 - RNA, 19 nt, Artificial Sequence
  Description of Artificial Sequence: Synthetic oligonucleotide
  Sense strand starting at position 2539 of SEQ ID NO: 1883103
uuaaaucuaugguuuggga

SEQ ID NO: 2169815 - RNA, 19 nt, Artificial Sequence
  Description of Artificial Sequence: Synthetic oligonucleotide
  Antisense strand to SEQ ID NO: 2169814
ucccaaaccauagauuuaa

SEQ ID NO: 2169816 - RNA, 19 nt, Artificial Sequence
  Description of Artificial Sequence: Synthetic oligonucleotide
  Sense strand starting at position 2786 of SEQ ID NO: 1883103
gucaaccuuccuuauaagu

SEQ ID NO: 2169817 - RNA, 19 nt, Artificial Sequence
  Description of Artificial Sequence: Synthetic oligonucleotide
  Antisense strand to SEQ ID NO: 2169816
acuuauaaggaagguugac

SEQ ID NO: 2169818 - RNA, 19 nt, Artificial Sequence
  Description of Artificial Sequence: Synthetic oligonucleotide
  Sense strand starting at position 2839 of SEQ ID NO: 1883103
ccacguuuggcugaagaaa

SEQ ID NO: 2169819 - RNA, 19 nt, Artificial Sequence
  Description of Artificial Sequence: Synthetic oligonucleotide
  Antisense strand to SEQ ID NO: 2169818
uuucuucagccaaacgugg

SEQ ID NO: 2169820 - RNA, 19 nt, Artificial Sequence
  Description of Artificial Sequence: Synthetic oligonucleotide
  Sense strand starting at position 3033 of SEQ ID NO: 1883103
gccuguaaucuacagaagu

SEQ ID NO: 2169821 - RNA, 19 nt, Artificial Sequence
  Description of Artificial Sequence: Synthetic oligonucleotide
  Antisense strand to SEQ ID NO: 2169820
acuucuguagauuacaggc

SEQ ID NO: 2169822 - RNA, 19 nt, Artificial Sequence
  Description of Artificial Sequence: Synthetic oligonucleotide
  Sense strand starting at position 3380 of SEQ ID NO: 1883103
uagcuaaauuggccagaga

SEQ ID NO: 2169823 - RNA, 19 nt, Artificial Sequence
  Description of Artificial Sequence: Synthetic oligonucleotide
  Antisense strand to SEQ ID NO: 2169822
ucucuggccaauuuagcua

SEQ ID NO: 2169824 - RNA, 19 nt, Artificial Sequence
  Description of Artificial Sequence: Synthetic oligonucleotide
  Sense strand starting at position 3402 of SEQ ID NO: 1883103
cauugucuggcccaaagaa

SEQ ID NO: 2169825 - RNA, 19 nt, Artificial Sequence
  Description of Artificial Sequence: Synthetic oligonucleotide
  Antisense strand to SEQ ID NO: 2169824
uucuuugggccagacaaug

SEQ ID NO: 2169826 - RNA, 19 nt, Artificial Sequence
  Description of Artificial Sequence: Synthetic oligonucleotide
  Sense strand starting at position 3436 of SEQ ID NO: 1883103
cugaaacaucuggguucca

SEQ ID NO: 2169827 - RNA, 19 nt, Artificial Sequence
  Description of Artificial Sequence: Synthetic oligonucleotide
  Antisense strand to SEQ ID NO: 2169826
uggaacccagauguuucag

SEQ ID NO: 2169828 - RNA, 19 nt, Artificial Sequence
  Description of Artificial Sequence: Synthetic oligonucleotide
  Sense strand starting at position 3526 of SEQ ID NO: 1883103
auggguguuggaugggaua

SEQ ID NO: 2169829 - RNA, 19 nt, Artificial Sequence
  Description of Artificial Sequence: Synthetic oligonucleotide
  Antisense strand to SEQ ID NO: 2169828
uaucccauccaacacccau

SEQ ID NO: 2169830 - RNA, 19 nt, Artificial Sequence
  Description of Artificial Sequence: Synthetic oligonucleotide
  Sense strand starting at position 3527 of SEQ ID NO: 1883103
uggguguuggaugggauaa

SEQ ID NO: 2169831 - RNA, 19 nt, Artificial Sequence
  Description of Artificial Sequence: Synthetic oligonucleotide
  Antisense strand to SEQ ID NO: 2169830
uuaucccauccaacaccca

SEQ ID NO: 2169832 - RNA, 19 nt, Artificial Sequence
  Description of Artificial Sequence: Synthetic oligonucleotide
  Sense strand starting at position 3528 of SEQ ID NO: 1883103
ggguguuggaugggauaaa

SEQ ID NO: 2169833 - RNA, 19 nt, Artificial Sequence
  Description of Artificial Sequence: Synthetic oligonucleotide
  Antisense strand to SEQ ID NO: 2169832
uuuaucccauccaacaccc

SEQ ID NO: 2169834 - RNA, 19 nt, Artificial Sequence
  Description of Artificial Sequence: Synthetic oligonucleotide
  Sense strand starting at position 3552 of SEQ ID NO: 1883103
aggaaucauucugcucuaa

SEQ ID NO: 2169835 - RNA, 19 nt, Artificial Sequence
  Description of Artificial Sequence: Synthetic oligonucleotide
  Antisense strand to SEQ ID NO: 2169834
uuagagcagaaugauuccu

SEQ ID NO: 2169836 - RNA, 19 nt, Artificial Sequence
  Description of Artificial Sequence: Synthetic oligonucleotide
  Sense strand starting at position 3602 of SEQ ID NO: 1883103
acaaauagcuaguugacaa

SEQ ID NO: 2169837 - RNA, 19 nt, Artificial Sequence
  Description of Artificial Sequence: Synthetic oligonucleotide
  Antisense strand to SEQ ID NO: 2169836
uugucaacuagcuauuugu

SEQ ID NO: 2169838 - RNA, 19 nt, Artificial Sequence
  Description of Artificial Sequence: Synthetic oligonucleotide
  Sense strand starting at position 3679 of SEQ ID NO: 1883103
gcaugagaaaccuguaaug

SEQ ID NO: 2169839 - RNA, 19 nt, Artificial Sequence
  Description of Artificial Sequence: Synthetic oligonucleotide
  Antisense strand to SEQ ID NO: 2169838
cauuacagguuucucaugc

SEQ ID NO: 2169840 - RNA, 19 nt, Artificial Sequence
  Description of Artificial Sequence: Synthetic oligonucleotide
  Sense strand starting at position 3696 of SEQ ID NO: 1883103
ugguguccauauccacaaa

SEQ ID NO: 2169841 - RNA, 19 nt, Artificial Sequence
  Description of Artificial Sequence: Synthetic oligonucleotide
  Antisense strand to SEQ ID NO: 2169840
uuuguggauauggacacca

SEQ ID NO: 2169842 - RNA, 19 nt, Artificial Sequence
  Description of Artificial Sequence: Synthetic oligonucleotide
  Sense strand starting at position 3716 of SEQ ID NO: 1883103
augcuuugauuaguaggaa

SEQ ID NO: 2169843 - RNA, 19 nt, Artificial Sequence
  Description of Artificial Sequence: Synthetic oligonucleotide
  Antisense strand to SEQ ID NO: 2169842
uuccuacuaaucaaagcau

SEQ ID NO: 2169844 - RNA, 19 nt, Artificial Sequence
  Description of Artificial Sequence: Synthetic oligonucleotide
  Sense strand starting at position 3719 of SEQ ID NO: 1883103
cuuugauuaguaggaagcu

SEQ ID NO: 2169845 - RNA, 19 nt, Artificial Sequence
  Description of Artificial Sequence: Synthetic oligonucleotide
  Antisense strand to SEQ ID NO: 2169844
agcuuccuacuaaucaaag

SEQ ID NO: 2169846 - RNA, 19 nt, Artificial Sequence
  Description of Artificial Sequence: Synthetic oligonucleotide
  Sense strand starting at position 3844 of SEQ ID NO: 1883103
gacagaaggcauggguuaa

SEQ ID NO: 2169847 - RNA, 19 nt, Artificial Sequence
  Description of Artificial Sequence: Synthetic oligonucleotide
  Antisense strand to SEQ ID NO: 2169846
uuaacccaugccuucuguc

SEQ ID NO: 2169848 - RNA, 19 nt, Artificial Sequence
  Description of Artificial Sequence: Synthetic oligonucleotide
  Sense strand starting at position 3845 of SEQ ID NO: 1883103
acagaaggcauggguuaaa

SEQ ID NO: 2169849 - RNA, 19 nt, Artificial Sequence
  Description of Artificial Sequence: Synthetic oligonucleotide
  Antisense strand to SEQ ID NO: 2169848
uuuaacccaugccuucugu

SEQ ID NO: 2169850 - RNA, 19 nt, Artificial Sequence
  Description of Artificial Sequence: Synthetic oligonucleotide
  Sense strand starting at position 3936 of SEQ ID NO: 1883103
cugggucaugucuacaaac

SEQ ID NO: 2169851 - RNA, 19 nt, Artificial Sequence
  Description of Artificial Sequence: Synthetic oligonucleotide
  Antisense strand to SEQ ID NO: 2169850
guuuguagacaugacccag

SEQ ID NO: 2169852 - RNA, 19 nt, Artificial Sequence
  Description of Artificial Sequence: Synthetic oligonucleotide
  Sense strand starting at position 3938 of SEQ ID NO: 1883103
gggucaugucuacaaacac

SEQ ID NO: 2169853 - RNA, 19 nt, Artificial Sequence
  Description of Artificial Sequence: Synthetic oligonucleotide
  Antisense strand to SEQ ID NO: 2169852
guguuuguagacaugaccc

SEQ ID NO: 2169854 - RNA, 19 nt, Artificial Sequence
  Description of Artificial Sequence: Synthetic oligonucleotide
  Sense strand starting at position 124 of SEQ ID NO: 1883104
augagucuucagggcuaga

SEQ ID NO: 2169855 - RNA, 19 nt, Artificial Sequence
  Description of Artificial Sequence: Synthetic oligonucleotide
  Antisense strand to SEQ ID NO: 2169854
ucuagcccugaagacucau

SEQ ID NO: 2169856 - RNA, 19 nt, Artificial Sequence
  Description of Artificial Sequence: Synthetic oligonucleotide
  Sense strand starting at position 237 of SEQ ID NO: 1883104
auucccuuuccagguagaa

SEQ ID NO: 2169857 - RNA, 19 nt, Artificial Sequence
  Description of Artificial Sequence: Synthetic oligonucleotide
  Antisense strand to SEQ ID NO: 2169856
uucuaccuggaaagggaau

SEQ ID NO: 2169858 - RNA, 19 nt, Artificial Sequence
  Description of Artificial Sequence: Synthetic oligonucleotide
  Sense strand starting at position 292 of SEQ ID NO: 1883104
ugugcuauacaugaguaaa

SEQ ID NO: 2169859 - RNA, 19 nt, Artificial Sequence
  Description of Artificial Sequence: Synthetic oligonucleotide
  Antisense strand to SEQ ID NO: 2169858
uuuacucauguauagcaca

SEQ ID NO: 2169860 - RNA, 19 nt, Artificial Sequence
  Description of Artificial Sequence: Synthetic oligonucleotide
  Sense strand starting at position 294 of SEQ ID NO: 1883104
ugcuauacaugaguaaauu

SEQ ID NO: 2169861 - RNA, 19 nt, Artificial Sequence
  Description of Artificial Sequence: Synthetic oligonucleotide
  Antisense strand to SEQ ID NO: 2169860
aauuuacucauguauagca

SEQ ID NO: 2169862 - RNA, 19 nt, Artificial Sequence
  Description of Artificial Sequence: Synthetic oligonucleotide
  Sense strand starting at position 302 of SEQ ID NO: 1883104
augaguaaauuugagacca

SEQ ID NO: 2169863 - RNA, 19 nt, Artificial Sequence
  Description of Artificial Sequence: Synthetic oligonucleotide
  Antisense strand to SEQ ID NO: 2169862
uggucucaaauuuacucau

SEQ ID NO: 2169864 - RNA, 19 nt, Artificial Sequence
  Description of Artificial Sequence: Synthetic oligonucleotide
  Sense strand starting at position 304 of SEQ ID NO: 1883104
gaguaaauuugagaccaac

SEQ ID NO: 2169865 - RNA, 19 nt, Artificial Sequence
  Description of Artificial Sequence: Synthetic oligonucleotide
  Antisense strand to SEQ ID NO: 2169864
guuggucucaaauuuacuc

SEQ ID NO: 2169866 - RNA, 19 nt, Artificial Sequence
  Description of Artificial Sequence: Synthetic oligonucleotide
  Sense strand starting at position 417 of SEQ ID NO: 1883104
ggcccaaauguccagaguu

SEQ ID NO: 2169867 - RNA, 19 nt, Artificial Sequence
  Description of Artificial Sequence: Synthetic oligonucleotide
  Antisense strand to SEQ ID NO: 2169866
aacucuggacauuugggcc

SEQ ID NO: 2169868 - RNA, 19 nt, Artificial Sequence
  Description of Artificial Sequence: Synthetic oligonucleotide
  Sense strand starting at position 419 of SEQ ID NO: 1883104
cccaaauguccagaguucu

SEQ ID NO: 2169869 - RNA, 19 nt, Artificial Sequence
  Description of Artificial Sequence: Synthetic oligonucleotide
  Antisense strand to SEQ ID NO: 2169868
agaacucuggacauuuggg

SEQ ID NO: 2169870 - RNA, 19 nt, Artificial Sequence
  Description of Artificial Sequence: Synthetic oligonucleotide
  Sense strand starting at position 567 of SEQ ID NO: 1883104
uuuggugaauuccuacaca

SEQ ID NO: 2169871 - RNA, 19 nt, Artificial Sequence
  Description of Artificial Sequence: Synthetic oligonucleotide
  Antisense strand to SEQ ID NO: 2169870
uguguaggaauucaccaaa

SEQ ID NO: 2169872 - RNA, 19 nt, Artificial Sequence
  Description of Artificial Sequence: Synthetic oligonucleotide
  Sense strand starting at position 604 of SEQ ID NO: 1883104
uagagucacuuucugagaa

SEQ ID NO: 2169873 - RNA, 19 nt, Artificial Sequence
  Description of Artificial Sequence: Synthetic oligonucleotide
  Antisense strand to SEQ ID NO: 2169872
uucucagaaagugacucua

SEQ ID NO: 2169874 - RNA, 19 nt, Artificial Sequence
  Description of Artificial Sequence: Synthetic oligonucleotide
  Sense strand starting at position 619 of SEQ ID NO: 1883104
agaauucuuccauagcuga

SEQ ID NO: 2169875 - RNA, 19 nt, Artificial Sequence
  Description of Artificial Sequence: Synthetic oligonucleotide
  Antisense strand to SEQ ID NO: 2169874
ucagcuauggaagaauucu

SEQ ID NO: 2169876 - RNA, 19 nt, Artificial Sequence
  Description of Artificial Sequence: Synthetic oligonucleotide
  Sense strand starting at position 663 of SEQ ID NO: 1883104
cuuaccaggagugguuaau

SEQ ID NO: 2169877 - RNA, 19 nt, Artificial Sequence
  Description of Artificial Sequence: Synthetic oligonucleotide
  Antisense strand to SEQ ID NO: 2169876
auuaaccacuccugguaag

SEQ ID NO: 2169878 - RNA, 19 nt, Artificial Sequence
  Description of Artificial Sequence: Synthetic oligonucleotide
  Sense strand starting at position 829 of SEQ ID NO: 1883104
ccuagaugggcaugaguau

SEQ ID NO: 2169879 - RNA, 19 nt, Artificial Sequence
  Description of Artificial Sequence: Synthetic oligonucleotide
  Antisense strand to SEQ ID NO: 2169878
auacucaugcccaucuagg

SEQ ID NO: 2169880 - RNA, 19 nt, Artificial Sequence
  Description of Artificial Sequence: Synthetic oligonucleotide
  Sense strand starting at position 830 of SEQ ID NO: 1883104
cuagaugggcaugaguauu

SEQ ID NO: 2169881 - RNA, 19 nt, Artificial Sequence
  Description of Artificial Sequence: Synthetic oligonucleotide
  Antisense strand to SEQ ID NO: 2169880
aauacucaugcccaucuag

SEQ ID NO: 2169882 - RNA, 19 nt, Artificial Sequence
  Description of Artificial Sequence: Synthetic oligonucleotide
  Sense strand starting at position 897 of SEQ ID NO: 1883104
gccugacacaaggguauua

SEQ ID NO: 2169883 - RNA, 19 nt, Artificial Sequence
  Description of Artificial Sequence: Synthetic oligonucleotide
  Antisense strand to SEQ ID NO: 2169882
uaauacccuugugucaggc

SEQ ID NO: 2169884 - RNA, 19 nt, Artificial Sequence
  Description of Artificial Sequence: Synthetic oligonucleotide
  Sense strand starting at position 1462 of SEQ ID NO: 1883104
uauggucugguugacaaga

SEQ ID NO: 2169885 - RNA, 19 nt, Artificial Sequence
  Description of Artificial Sequence: Synthetic oligonucleotide
  Antisense strand to SEQ ID NO: 2169884
ucuugucaaccagaccaua

SEQ ID NO: 2169886 - RNA, 19 nt, Artificial Sequence
  Description of Artificial Sequence: Synthetic oligonucleotide
  Sense strand starting at position 1645 of SEQ ID NO: 1883104
aaggucuuaguguaucaua

SEQ ID NO: 2169887 - RNA, 19 nt, Artificial Sequence
  Description of Artificial Sequence: Synthetic oligonucleotide
  Antisense strand to SEQ ID NO: 2169886
uaugauacacuaagaccuu

SEQ ID NO: 2169888 - RNA, 19 nt, Artificial Sequence
  Description of Artificial Sequence: Synthetic oligonucleotide
  Sense strand starting at position 1660 of SEQ ID NO: 1883104
cauacagauguguguaaga

SEQ ID NO: 2169889 - RNA, 19 nt, Artificial Sequence
  Description of Artificial Sequence: Synthetic oligonucleotide
  Antisense strand to SEQ ID NO: 2169888
ucuuacacacaucuguaug

SEQ ID NO: 2169890 - RNA, 19 nt, Artificial Sequence
  Description of Artificial Sequence: Synthetic oligonucleotide
  Sense strand starting at position 1662 of SEQ ID NO: 1883104
uacagauguguguaagaga

SEQ ID NO: 2169891 - RNA, 19 nt, Artificial Sequence
  Description of Artificial Sequence: Synthetic oligonucleotide
  Antisense strand to SEQ ID NO: 2169890
ucucuuacacacaucugua

SEQ ID NO: 2169892 - RNA, 19 nt, Artificial Sequence
  Description of Artificial Sequence: Synthetic oligonucleotide
  Sense strand starting at position 1667 of SEQ ID NO: 1883104
auguguguaagagaaaguu

SEQ ID NO: 2169893 - RNA, 19 nt, Artificial Sequence
  Description of Artificial Sequence: Synthetic oligonucleotide
  Antisense strand to SEQ ID NO: 2169892
aacuuucucuuacacacau

SEQ ID NO: 2169894 - RNA, 19 nt, Artificial Sequence
  Description of Artificial Sequence: Synthetic oligonucleotide
  Sense strand starting at position 1854 of SEQ ID NO: 1883104
aggccuuggaguuggaaau

SEQ ID NO: 2169895 - RNA, 19 nt, Artificial Sequence
  Description of Artificial Sequence: Synthetic oligonucleotide
  Antisense strand to SEQ ID NO: 2169894
auuuccaacuccaaggccu

SEQ ID NO: 2169896 - RNA, 19 nt, Artificial Sequence
  Description of Artificial Sequence: Synthetic oligonucleotide
  Sense strand starting at position 1905 of SEQ ID NO: 1883104
uugagaucuuaagcaaguc

SEQ ID NO: 2169897 - RNA, 19 nt, Artificial Sequence
  Description of Artificial Sequence: Synthetic oligonucleotide
  Antisense strand to SEQ ID NO: 2169896
gacuugcuuaagaucucaa

SEQ ID NO: 2169898 - RNA, 19 nt, Artificial Sequence
  Description of Artificial Sequence: Synthetic oligonucleotide
  Sense strand starting at position 2108 of SEQ ID NO: 1883104
aagucccaggccugaaaua

SEQ ID NO: 2169899 - RNA, 19 nt, Artificial Sequence
  Description of Artificial Sequence: Synthetic oligonucleotide
  Antisense strand to SEQ ID NO: 2169898
uauuucaggccugggacuu

SEQ ID NO: 2169900 - RNA, 19 nt, Artificial Sequence
  Description of Artificial Sequence: Synthetic oligonucleotide
  Sense strand starting at position 2109 of SEQ ID NO: 1883104
agucccaggccugaaauau

SEQ ID NO: 2169901 - RNA, 19 nt, Artificial Sequence
  Description of Artificial Sequence: Synthetic oligonucleotide
  Antisense strand to SEQ ID NO: 2169900
auauuucaggccugggacu

SEQ ID NO: 2169902 - RNA, 19 nt, Artificial Sequence
  Description of Artificial Sequence: Synthetic oligonucleotide
  Sense strand starting at position 2118 of SEQ ID NO: 1883104
ccugaaauauaagcaguaa

SEQ ID NO: 2169903 - RNA, 19 nt, Artificial Sequence
  Description of Artificial Sequence: Synthetic oligonucleotide
  Antisense strand to SEQ ID NO: 2169902
uuacugcuuauauuucagg

SEQ ID NO: 2169904 - RNA, 19 nt, Artificial Sequence
  Description of Artificial Sequence: Synthetic oligonucleotide
  Sense strand starting at position 2218 of SEQ ID NO: 1883104
ugaggaauguaagugauuc

SEQ ID NO: 2169905 - RNA, 19 nt, Artificial Sequence
  Description of Artificial Sequence: Synthetic oligonucleotide
  Antisense strand to SEQ ID NO: 2169904
gaaucacuuacauuccuca

SEQ ID NO: 2169906 - RNA, 19 nt, Artificial Sequence
  Description of Artificial Sequence: Synthetic oligonucleotide
  Sense strand starting at position 2240 of SEQ ID NO: 1883104
gaggucacuuugucaggga

SEQ ID NO: 2169907 - RNA, 19 nt, Artificial Sequence
  Description of Artificial Sequence: Synthetic oligonucleotide
  Antisense strand to SEQ ID NO: 2169906
ucccugacaaagugaccuc

SEQ ID NO: 2169908 - RNA, 19 nt, Artificial Sequence
  Description of Artificial Sequence: Synthetic oligonucleotide
  Sense strand starting at position 2245 of SEQ ID NO: 1883104
cacuuugucagggauuggu

SEQ ID NO: 2169909 - RNA, 19 nt, Artificial Sequence
  Description of Artificial Sequence: Synthetic oligonucleotide
  Antisense strand to SEQ ID NO: 2169908
accaaucccugacaaagug

SEQ ID NO: 2169910 - RNA, 19 nt, Artificial Sequence
  Description of Artificial Sequence: Synthetic oligonucleotide
  Sense strand starting at position 2248 of SEQ ID NO: 1883104
uuugucagggauugguaga

SEQ ID NO: 2169911 - RNA, 19 nt, Artificial Sequence
  Description of Artificial Sequence: Synthetic oligonucleotide
  Antisense strand to SEQ ID NO: 2169910
ucuaccaaucccugacaaa

SEQ ID NO: 2169912 - RNA, 19 nt, Artificial Sequence
  Description of Artificial Sequence: Synthetic oligonucleotide
  Sense strand starting at position 2249 of SEQ ID NO: 1883104
uugucagggauugguagaa

SEQ ID NO: 2169913 - RNA, 19 nt, Artificial Sequence
  Description of Artificial Sequence: Synthetic oligonucleotide
  Antisense strand to SEQ ID NO: 2169912
uucuaccaaucccugacaa

SEQ ID NO: 2169914 - RNA, 19 nt, Artificial Sequence
  Description of Artificial Sequence: Synthetic oligonucleotide
  Sense strand starting at position 2258 of SEQ ID NO: 1883104
auugguagaaccuggauca

SEQ ID NO: 2169915 - RNA, 19 nt, Artificial Sequence
  Description of Artificial Sequence: Synthetic oligonucleotide
  Antisense strand to SEQ ID NO: 2169914
ugauccagguucuaccaau

SEQ ID NO: 2169916 - RNA, 19 nt, Artificial Sequence
  Description of Artificial Sequence: Synthetic oligonucleotide
  Sense strand starting at position 2333 of SEQ ID NO: 1883104
gcagacacuucucuaaaug

SEQ ID NO: 2169917 - RNA, 19 nt, Artificial Sequence
  Description of Artificial Sequence: Synthetic oligonucleotide
  Antisense strand to SEQ ID NO: 2169916
cauuuagagaagugucugc

SEQ ID NO: 2169918 - RNA, 19 nt, Artificial Sequence
  Description of Artificial Sequence: Synthetic oligonucleotide
  Sense strand starting at position 2378 of SEQ ID NO: 1883104
gggaaauuguuauuaggua

SEQ ID NO: 2169919 - RNA, 19 nt, Artificial Sequence
  Description of Artificial Sequence: Synthetic oligonucleotide
  Antisense strand to SEQ ID NO: 2169918
uaccuaauaacaauuuccc

SEQ ID NO: 2169920 - RNA, 19 nt, Artificial Sequence
  Description of Artificial Sequence: Synthetic oligonucleotide
  Sense strand starting at position 2651 of SEQ ID NO: 1883104
ucuguuauaaaguagguua

SEQ ID NO: 2169921 - RNA, 19 nt, Artificial Sequence
  Description of Artificial Sequence: Synthetic oligonucleotide
  Antisense strand to SEQ ID NO: 2169920
uaaccuacuuuauaacaga

SEQ ID NO: 2169922 - RNA, 19 nt, Artificial Sequence
  Description of Artificial Sequence: Synthetic oligonucleotide
  Sense strand starting at position 2955 of SEQ ID NO: 1883104
agacguugucuuuaagaaa

SEQ ID NO: 2169923 - RNA, 19 nt, Artificial Sequence
  Description of Artificial Sequence: Synthetic oligonucleotide
  Antisense strand to SEQ ID NO: 2169922
uuucuuaaagacaacgucu

SEQ ID NO: 2169924 - RNA, 19 nt, Artificial Sequence
  Description of Artificial Sequence: Synthetic oligonucleotide
  Sense strand starting at position 3559 of SEQ ID NO: 1883104
guguaaccaugguuaagaa

SEQ ID NO: 2169925 - RNA, 19 nt, Artificial Sequence
  Description of Artificial Sequence: Synthetic oligonucleotide
  Antisense strand to SEQ ID NO: 2169924
uucuuaaccaugguuacac

SEQ ID NO: 2169926 - RNA, 19 nt, Artificial Sequence
  Description of Artificial Sequence: Synthetic oligonucleotide
  Sense strand starting at position 3566 of SEQ ID NO: 1883104
caugguuaagaaugaggua

SEQ ID NO: 2169927 - RNA, 19 nt, Artificial Sequence
  Description of Artificial Sequence: Synthetic oligonucleotide
  Antisense strand to SEQ ID NO: 2169926
uaccucauucuuaaccaug

SEQ ID NO: 2169928 - RNA, 19 nt, Artificial Sequence
  Description of Artificial Sequence: Synthetic oligonucleotide
  Sense strand starting at position 3571 of SEQ ID NO: 1883104
uuaagaaugagguacguua

SEQ ID NO: 2169929 - RNA, 19 nt, Artificial Sequence
  Description of Artificial Sequence: Synthetic oligonucleotide
  Antisense strand to SEQ ID NO: 2169928
uaacguaccucauucuuaa

SEQ ID NO: 2169930 - RNA, 19 nt, Artificial Sequence
  Description of Artificial Sequence: Synthetic oligonucleotide
  Sense strand starting at position 3625 of SEQ ID NO: 1883104
cugugaggcacuuacaagu

SEQ ID NO: 2169931 - RNA, 19 nt, Artificial Sequence
  Description of Artificial Sequence: Synthetic oligonucleotide
  Antisense strand to SEQ ID NO: 2169930
acuuguaagugccucacag

SEQ ID NO: 2169932 - RNA, 19 nt, Artificial Sequence
  Description of Artificial Sequence: Synthetic oligonucleotide
  Sense strand starting at position 3727 of SEQ ID NO: 1883104
gccauaaaccuguauuaag

SEQ ID NO: 2169933 - RNA, 19 nt, Artificial Sequence
  Description of Artificial Sequence: Synthetic oligonucleotide
  Antisense strand to SEQ ID NO: 2169932
cuuaauacagguuuauggc

SEQ ID NO: 2169934 - RNA, 19 nt, Artificial Sequence
  Description of Artificial Sequence: Synthetic oligonucleotide
  Sense strand starting at position 267 of SEQ ID NO: 1883105
agauguuaucaagguaaga

SEQ ID NO: 2169935 - RNA, 19 nt, Artificial Sequence
  Description of Artificial Sequence: Synthetic oligonucleotide
  Antisense strand to SEQ ID NO: 2169934
ucuuaccuugauaacaucu

SEQ ID NO: 2169936 - RNA, 19 nt, Artificial Sequence
  Description of Artificial Sequence: Synthetic oligonucleotide
  Sense strand starting at position 277 of SEQ ID NO: 1883105
aagguaagaugagauuaua

SEQ ID NO: 2169937 - RNA, 19 nt, Artificial Sequence
  Description of Artificial Sequence: Synthetic oligonucleotide
  Antisense strand to SEQ ID NO: 2169936
uauaaucucaucuuaccuu

SEQ ID NO: 2169938 - RNA, 19 nt, Artificial Sequence
  Description of Artificial Sequence: Synthetic oligonucleotide
  Sense strand starting at position 305 of SEQ ID NO: 1883105
ggugaaccuuaauccaaug

SEQ ID NO: 2169939 - RNA, 19 nt, Artificial Sequence
  Description of Artificial Sequence: Synthetic oligonucleotide
  Antisense strand to SEQ ID NO: 2169938
cauuggauuaagguucacc

SEQ ID NO: 2169940 - RNA, 19 nt, Artificial Sequence
  Description of Artificial Sequence: Synthetic oligonucleotide
  Sense strand starting at position 604 of SEQ ID NO: 1883105
acagcagucccaugaaacu

SEQ ID NO: 2169941 - RNA, 19 nt, Artificial Sequence
  Description of Artificial Sequence: Synthetic oligonucleotide
  Antisense strand to SEQ ID NO: 2169940
aguuucaugggacugcugu

SEQ ID NO: 2169942 - RNA, 19 nt, Artificial Sequence
  Description of Artificial Sequence: Synthetic oligonucleotide
  Sense strand starting at position 631 of SEQ ID NO: 1883105
uagguauuaaguuacguga

SEQ ID NO: 2169943 - RNA, 19 nt, Artificial Sequence
  Description of Artificial Sequence: Synthetic oligonucleotide
  Antisense strand to SEQ ID NO: 2169942
ucacguaacuuaauaccua

SEQ ID NO: 2169944 - RNA, 19 nt, Artificial Sequence
  Description of Artificial Sequence: Synthetic oligonucleotide
  Sense strand starting at position 634 of SEQ ID NO: 1883105
guauuaaguuacgugauuu

SEQ ID NO: 2169945 - RNA, 19 nt, Artificial Sequence
  Description of Artificial Sequence: Synthetic oligonucleotide
  Antisense strand to SEQ ID NO: 2169944
aaaucacguaacuuaauac

SEQ ID NO: 2169946 - RNA, 19 nt, Artificial Sequence
  Description of Artificial Sequence: Synthetic oligonucleotide
  Sense strand starting at position 638 of SEQ ID NO: 1883105
uaaguuacgugauuuagug

SEQ ID NO: 2169947 - RNA, 19 nt, Artificial Sequence
  Description of Artificial Sequence: Synthetic oligonucleotide
  Antisense strand to SEQ ID NO: 2169946
cacuaaaucacguaacuua

SEQ ID NO: 2169948 - RNA, 19 nt, Artificial Sequence
  Description of Artificial Sequence: Synthetic oligonucleotide
  Sense strand starting at position 640 of SEQ ID NO: 1883105
aguuacgugauuuaguguu

SEQ ID NO: 2169949 - RNA, 19 nt, Artificial Sequence
  Description of Artificial Sequence: Synthetic oligonucleotide
  Antisense strand to SEQ ID NO: 2169948
aacacuaaaucacguaacu

SEQ ID NO: 2169950 - RNA, 19 nt, Artificial Sequence
  Description of Artificial Sequence: Synthetic oligonucleotide
  Sense strand starting at position 846 of SEQ ID NO: 1883105
ucugaugugucuucuuaua

SEQ ID NO: 2169951 - RNA, 19 nt, Artificial Sequence
  Description of Artificial Sequence: Synthetic oligonucleotide
  Antisense strand to SEQ ID NO: 2169950
uauaagaagacacaucaga

SEQ ID NO: 2169952 - RNA, 19 nt, Artificial Sequence
  Description of Artificial Sequence: Synthetic oligonucleotide
  Sense strand starting at position 848 of SEQ ID NO: 1883105
ugaugugucuucuuauauc

SEQ ID NO: 2169953 - RNA, 19 nt, Artificial Sequence
  Description of Artificial Sequence: Synthetic oligonucleotide
  Antisense strand to SEQ ID NO: 2169952
gauauaagaagacacauca

SEQ ID NO: 2169954 - RNA, 19 nt, Artificial Sequence
  Description of Artificial Sequence: Synthetic oligonucleotide
  Sense strand starting at position 925 of SEQ ID NO: 1883105
ccagcugaacacugagaaa

SEQ ID NO: 2169955 - RNA, 19 nt, Artificial Sequence
  Description of Artificial Sequence: Synthetic oligonucleotide
  Antisense strand to SEQ ID NO: 2169954
uuucucaguguucagcugg

SEQ ID NO: 2169956 - RNA, 19 nt, Artificial Sequence
  Description of Artificial Sequence: Synthetic oligonucleotide
  Sense strand starting at position 1434 of SEQ ID NO: 1883105
cagauuccucuagggacuu

SEQ ID NO: 2169957 - RNA, 19 nt, Artificial Sequence
  Description of Artificial Sequence: Synthetic oligonucleotide
  Antisense strand to SEQ ID NO: 2169956
aagucccuagaggaaucug

SEQ ID NO: 2169958 - RNA, 19 nt, Artificial Sequence
  Description of Artificial Sequence: Synthetic oligonucleotide
  Sense strand starting at position 1593 of SEQ ID NO: 1883105
agaccucacuagcagauuu

SEQ ID NO: 2169959 - RNA, 19 nt, Artificial Sequence
  Description of Artificial Sequence: Synthetic oligonucleotide
  Antisense strand to SEQ ID NO: 2169958
aaaucugcuagugaggucu

SEQ ID NO: 2169960 - RNA, 19 nt, Artificial Sequence
  Description of Artificial Sequence: Synthetic oligonucleotide
  Sense strand starting at position 1686 of SEQ ID NO: 1883105
ucugcuucccaguagaguu

SEQ ID NO: 2169961 - RNA, 19 nt, Artificial Sequence
  Description of Artificial Sequence: Synthetic oligonucleotide
  Antisense strand to SEQ ID NO: 2169960
aacucuacugggaagcaga

SEQ ID NO: 2169962 - RNA, 19 nt, Artificial Sequence
  Description of Artificial Sequence: Synthetic oligonucleotide
  Sense strand starting at position 1861 of SEQ ID NO: 1883105
uagaauuguuaguccagga

SEQ ID NO: 2169963 - RNA, 19 nt, Artificial Sequence
  Description of Artificial Sequence: Synthetic oligonucleotide
  Antisense strand to SEQ ID NO: 2169962
uccuggacuaacaauucua

SEQ ID NO: 2169964 - RNA, 19 nt, Artificial Sequence
  Description of Artificial Sequence: Synthetic oligonucleotide
  Sense strand starting at position 1865 of SEQ ID NO: 1883105
auuguuaguccaggaauuc

SEQ ID NO: 2169965 - RNA, 19 nt, Artificial Sequence
  Description of Artificial Sequence: Synthetic oligonucleotide
  Antisense strand to SEQ ID NO: 2169964
gaauuccuggacuaacaau

SEQ ID NO: 2169966 - RNA, 19 nt, Artificial Sequence
  Description of Artificial Sequence: Synthetic oligonucleotide
  Sense strand starting at position 1866 of SEQ ID NO: 1883105
uuguuaguccaggaauucu

SEQ ID NO: 2169967 - RNA, 19 nt, Artificial Sequence
  Description of Artificial Sequence: Synthetic oligonucleotide
  Antisense strand to SEQ ID NO: 2169966
agaauuccuggacuaacaa

SEQ ID NO: 2169968 - RNA, 19 nt, Artificial Sequence
  Description of Artificial Sequence: Synthetic oligonucleotide
  Sense strand starting at position 1878 of SEQ ID NO: 1883105
gaauucuucuaagugugaa

SEQ ID NO: 2169969 - RNA, 19 nt, Artificial Sequence
  Description of Artificial Sequence: Synthetic oligonucleotide
  Antisense strand to SEQ ID NO: 2169968
uucacacuuagaagaauuc

SEQ ID NO: 2169970 - RNA, 19 nt, Artificial Sequence
  Description of Artificial Sequence: Synthetic oligonucleotide
  Sense strand starting at position 2114 of SEQ ID NO: 1883105
gugaaaugguuguugguga

SEQ ID NO: 2169971 - RNA, 19 nt, Artificial Sequence
  Description of Artificial Sequence: Synthetic oligonucleotide
  Antisense strand to SEQ ID NO: 2169970
ucaccaacaaccauuucac

SEQ ID NO: 2169972 - RNA, 19 nt, Artificial Sequence
  Description of Artificial Sequence: Synthetic oligonucleotide
  Sense strand starting at position 2189 of SEQ ID NO: 1883105
uugcuuuaggaaggcaaua

SEQ ID NO: 2169973 - RNA, 19 nt, Artificial Sequence
  Description of Artificial Sequence: Synthetic oligonucleotide
  Antisense strand to SEQ ID NO: 2169972
uauugccuuccuaaagcaa

SEQ ID NO: 2169974 - RNA, 19 nt, Artificial Sequence
  Description of Artificial Sequence: Synthetic oligonucleotide
  Sense strand starting at position 2728 of SEQ ID NO: 1883105
agguaaaguuacuccuuau

SEQ ID NO: 2169975 - RNA, 19 nt, Artificial Sequence
  Description of Artificial Sequence: Synthetic oligonucleotide
  Antisense strand to SEQ ID NO: 2169974
auaaggaguaacuuuaccu

SEQ ID NO: 2169976 - RNA, 19 nt, Artificial Sequence
  Description of Artificial Sequence: Synthetic oligonucleotide
  Sense strand starting at position 3338 of SEQ ID NO: 1883105
uugagaucauuuggaugau

SEQ ID NO: 2169977 - RNA, 19 nt, Artificial Sequence
  Description of Artificial Sequence: Synthetic oligonucleotide
  Antisense strand to SEQ ID NO: 2169976
aucauccaaaugaucucaa

SEQ ID NO: 2169978 - RNA, 19 nt, Artificial Sequence
  Description of Artificial Sequence: Synthetic oligonucleotide
  Sense strand starting at position 3339 of SEQ ID NO: 1883105
ugagaucauuuggaugauu

SEQ ID NO: 2169979 - RNA, 19 nt, Artificial Sequence
  Description of Artificial Sequence: Synthetic oligonucleotide
  Antisense strand to SEQ ID NO: 2169978
aaucauccaaaugaucuca

SEQ ID NO: 2169980 - RNA, 19 nt, Artificial Sequence
  Description of Artificial Sequence: Synthetic oligonucleotide
  Sense strand starting at position 3400 of SEQ ID NO: 1883105
acagaagaaugauaguaua

SEQ ID NO: 2169981 - RNA, 19 nt, Artificial Sequence
  Description of Artificial Sequence: Synthetic oligonucleotide
  Antisense strand to SEQ ID NO: 2169980
uauacuaucauucuucugu

SEQ ID NO: 2169982 - RNA, 19 nt, Artificial Sequence
  Description of Artificial Sequence: Synthetic oligonucleotide
  Sense strand starting at position 3408 of SEQ ID NO: 1883105
augauaguauauccucaga

SEQ ID NO: 2169983 - RNA, 19 nt, Artificial Sequence
  Description of Artificial Sequence: Synthetic oligonucleotide
  Antisense strand to SEQ ID NO: 2169982
ucugaggauauacuaucau

SEQ ID NO: 2169984 - RNA, 19 nt, Artificial Sequence
  Description of Artificial Sequence: Synthetic oligonucleotide
  Sense strand starting at position 3558 of SEQ ID NO: 1883105
gccagagauuuccaaacuu

SEQ ID NO: 2169985 - RNA, 19 nt, Artificial Sequence
  Description of Artificial Sequence: Synthetic oligonucleotide
  Antisense strand to SEQ ID NO: 2169984
aaguuuggaaaucucuggc

SEQ ID NO: 2169986 - RNA, 19 nt, Artificial Sequence
  Description of Artificial Sequence: Synthetic oligonucleotide
  Sense strand starting at position 3711 of SEQ ID NO: 1883105
gccagaagugaguaaaguu

SEQ ID NO: 2169987 - RNA, 19 nt, Artificial Sequence
  Description of Artificial Sequence: Synthetic oligonucleotide
  Antisense strand to SEQ ID NO: 2169986
aacuuuacucacuucuggc

SEQ ID NO: 2169988 - RNA, 19 nt, Artificial Sequence
  Description of Artificial Sequence: Synthetic oligonucleotide
  Sense strand starting at position 3719 of SEQ ID NO: 1883105
ugaguaaaguuaucugcag

SEQ ID NO: 2169989 - RNA, 19 nt, Artificial Sequence
  Description of Artificial Sequence: Synthetic oligonucleotide
  Antisense strand to SEQ ID NO: 2169988
cugcagauaacuuuacuca

SEQ ID NO: 2169990 - RNA, 19 nt, Artificial Sequence
  Description of Artificial Sequence: Synthetic oligonucleotide
  Sense strand starting at position 3720 of SEQ ID NO: 1883105
gaguaaaguuaucugcaga

SEQ ID NO: 2169991 - RNA, 19 nt, Artificial Sequence
  Description of Artificial Sequence: Synthetic oligonucleotide
  Antisense strand to SEQ ID NO: 2169990
ucugcagauaacuuuacuc

SEQ ID NO: 2169992 - RNA, 19 nt, Artificial Sequence
  Description of Artificial Sequence: Synthetic oligonucleotide
  Sense strand starting at position 3721 of SEQ ID NO: 1883105
aguaaaguuaucugcagag

SEQ ID NO: 2169993 - RNA, 19 nt, Artificial Sequence
  Description of Artificial Sequence: Synthetic oligonucleotide
  Antisense strand to SEQ ID NO: 2169992
cucugcagauaacuuuacu

SEQ ID NO: 2169994 - RNA, 19 nt, Artificial Sequence
  Description of Artificial Sequence: Synthetic oligonucleotide
  Sense strand starting at position 3723 of SEQ ID NO: 1883105
uaaaguuaucugcagagug

SEQ ID NO: 2169995 - RNA, 19 nt, Artificial Sequence
  Description of Artificial Sequence: Synthetic oligonucleotide
  Antisense strand to SEQ ID NO: 2169994
cacucugcagauaacuuua

SEQ ID NO: 2169996 - RNA, 19 nt, Artificial Sequence
  Description of Artificial Sequence: Synthetic oligonucleotide
  Sense strand starting at position 3725 of SEQ ID NO: 1883105
aaguuaucugcagagugca

SEQ ID NO: 2169997 - RNA, 19 nt, Artificial Sequence
  Description of Artificial Sequence: Synthetic oligonucleotide
  Antisense strand to SEQ ID NO: 2169996
ugcacucugcagauaacuu

SEQ ID NO: 2169998 - RNA, 19 nt, Artificial Sequence
  Description of Artificial Sequence: Synthetic oligonucleotide
  Sense strand starting at position 3766 of SEQ ID NO: 1883105
acagacuuguagucuacau

SEQ ID NO: 2169999 - RNA, 19 nt, Artificial Sequence
  Description of Artificial Sequence: Synthetic oligonucleotide
  Antisense strand to SEQ ID NO: 2169998
auguagacuacaagucugu

SEQ ID NO: 2170000 - RNA, 19 nt, Artificial Sequence
  Description of Artificial Sequence: Synthetic oligonucleotide
  Sense strand starting at position 3768 of SEQ ID NO: 1883105
agacuuguagucuacauaa

SEQ ID NO: 2170001 - RNA, 19 nt, Artificial Sequence
  Description of Artificial Sequence: Synthetic oligonucleotide
  Antisense strand to SEQ ID NO: 2170000
uuauguagacuacaagucu

SEQ ID NO: 2170002 - RNA, 19 nt, Artificial Sequence
  Description of Artificial Sequence: Synthetic oligonucleotide
  Sense strand starting at position 3770 of SEQ ID NO: 1883105
acuuguagucuacauaaga

SEQ ID NO: 2170003 - RNA, 19 nt, Artificial Sequence
  Description of Artificial Sequence: Synthetic oligonucleotide
  Antisense strand to SEQ ID NO: 2170002
ucuuauguagacuacaagu

SEQ ID NO: 2170004 - RNA, 19 nt, Artificial Sequence
  Description of Artificial Sequence: Synthetic oligonucleotide
  Sense strand starting at position 3798 of SEQ ID NO: 1883105
gcgugaagaaauuacugua

SEQ ID NO: 2170005 - RNA, 19 nt, Artificial Sequence
  Description of Artificial Sequence: Synthetic oligonucleotide
  Antisense strand to SEQ ID NO: 2170004
uacaguaauuucuucacgc

SEQ ID NO: 2170006 - RNA, 19 nt, Artificial Sequence
  Description of Artificial Sequence: Synthetic oligonucleotide
  Sense strand starting at position 3871 of SEQ ID NO: 1883105
ugagaaagguuguccuugu

SEQ ID NO: 2170007 - RNA, 19 nt, Artificial Sequence
  Description of Artificial Sequence: Synthetic oligonucleotide
  Antisense strand to SEQ ID NO: 2170006
acaaggacaaccuuucuca

SEQ ID NO: 2170008 - RNA, 19 nt, Artificial Sequence
  Description of Artificial Sequence: Synthetic oligonucleotide
  Sense strand starting at position 3872 of SEQ ID NO: 1883105
gagaaagguuguccuugua

SEQ ID NO: 2170009 - RNA, 19 nt, Artificial Sequence
  Description of Artificial Sequence: Synthetic oligonucleotide
  Antisense strand to SEQ ID NO: 2170008
uacaaggacaaccuuucuc

SEQ ID NO: 2170010 - RNA, 19 nt, Artificial Sequence
  Description of Artificial Sequence: Synthetic oligonucleotide
  Sense strand starting at position 3875 of SEQ ID NO: 1883105
aaagguuguccuuguagag

SEQ ID NO: 2170011 - RNA, 19 nt, Artificial Sequence
  Description of Artificial Sequence: Synthetic oligonucleotide
  Antisense strand to SEQ ID NO: 2170010
cucuacaaggacaaccuuu

SEQ ID NO: 2170012 - RNA, 19 nt, Artificial Sequence
  Description of Artificial Sequence: Synthetic oligonucleotide
  Sense strand starting at position 3916 of SEQ ID NO: 1883105
gacgauccagagugugaaa

SEQ ID NO: 2170013 - RNA, 19 nt, Artificial Sequence
  Description of Artificial Sequence: Synthetic oligonucleotide
  Antisense strand to SEQ ID NO: 2170012
uuucacacucuggaucguc

SEQ ID NO: 2170014 - RNA, 19 nt, Artificial Sequence
  Description of Artificial Sequence: Synthetic oligonucleotide
  Sense strand starting at position 29 of SEQ ID NO: 1883106
gagugccugccagaggaau

SEQ ID NO: 2170015 - RNA, 19 nt, Artificial Sequence
  Description of Artificial Sequence: Synthetic oligonucleotide
  Antisense strand to SEQ ID NO: 2170014
auuccucuggcaggcacuc

SEQ ID NO: 2170016 - RNA, 19 nt, Artificial Sequence
  Description of Artificial Sequence: Synthetic oligonucleotide
  Sense strand starting at position 71 of SEQ ID NO: 1883106
ggaucaucuuuagcccaaa

SEQ ID NO: 2170017 - RNA, 19 nt, Artificial Sequence
  Description of Artificial Sequence: Synthetic oligonucleotide
  Antisense strand to SEQ ID NO: 2170016
uuugggcuaaagaugaucc

SEQ ID NO: 2170018 - RNA, 19 nt, Artificial Sequence
  Description of Artificial Sequence: Synthetic oligonucleotide
  Sense strand starting at position 274 of SEQ ID NO: 1883106
ugaguacuauauucucuau

SEQ ID NO: 2170019 - RNA, 19 nt, Artificial Sequence
  Description of Artificial Sequence: Synthetic oligonucleotide
  Antisense strand to SEQ ID NO: 2170018
auagagaauauaguacuca

SEQ ID NO: 2170020 - RNA, 19 nt, Artificial Sequence
  Description of Artificial Sequence: Synthetic oligonucleotide
  Sense strand starting at position 365 of SEQ ID NO: 1883106
auguauuaugucuacuaga

SEQ ID NO: 2170021 - RNA, 19 nt, Artificial Sequence
  Description of Artificial Sequence: Synthetic oligonucleotide
  Antisense strand to SEQ ID NO: 2170020
ucuaguagacauaauacau

SEQ ID NO: 2170022 - RNA, 19 nt, Artificial Sequence
  Description of Artificial Sequence: Synthetic oligonucleotide
  Sense strand starting at position 370 of SEQ ID NO: 1883106
uuaugucuacuagaacagu

SEQ ID NO: 2170023 - RNA, 19 nt, Artificial Sequence
  Description of Artificial Sequence: Synthetic oligonucleotide
  Antisense strand to SEQ ID NO: 2170022
acuguucuaguagacauaa

SEQ ID NO: 2170024 - RNA, 19 nt, Artificial Sequence
  Description of Artificial Sequence: Synthetic oligonucleotide
  Sense strand starting at position 470 of SEQ ID NO: 1883106
gagcuuggucauugaagag

SEQ ID NO: 2170025 - RNA, 19 nt, Artificial Sequence
  Description of Artificial Sequence: Synthetic oligonucleotide
  Antisense strand to SEQ ID NO: 2170024
cucuucaaugaccaagcuc

SEQ ID NO: 2170026 - RNA, 19 nt, Artificial Sequence
  Description of Artificial Sequence: Synthetic oligonucleotide
  Sense strand starting at position 474 of SEQ ID NO: 1883106
uuggucauugaagaguuau

SEQ ID NO: 2170027 - RNA, 19 nt, Artificial Sequence
  Description of Artificial Sequence: Synthetic oligonucleotide
  Antisense strand to SEQ ID NO: 2170026
auaacucuucaaugaccaa

SEQ ID NO: 2170028 - RNA, 19 nt, Artificial Sequence
  Description of Artificial Sequence: Synthetic oligonucleotide
  Sense strand starting at position 554 of SEQ ID NO: 1883106
ccaccuguucuggauucuu

SEQ ID NO: 2170029 - RNA, 19 nt, Artificial Sequence
  Description of Artificial Sequence: Synthetic oligonucleotide
  Antisense strand to SEQ ID NO: 2170028
aagaauccagaacaggugg

SEQ ID NO: 2170030 - RNA, 19 nt, Artificial Sequence
  Description of Artificial Sequence: Synthetic oligonucleotide
  Sense strand starting at position 936 of SEQ ID NO: 1883106
uggcaauacucccugacca

SEQ ID NO: 2170031 - RNA, 19 nt, Artificial Sequence
  Description of Artificial Sequence: Synthetic oligonucleotide
  Antisense strand to SEQ ID NO: 2170030
uggucagggaguauugcca

SEQ ID NO: 2170032 - RNA, 19 nt, Artificial Sequence
  Description of Artificial Sequence: Synthetic oligonucleotide
  Sense strand starting at position 938 of SEQ ID NO: 1883106
gcaauacucccugaccagu

SEQ ID NO: 2170033 - RNA, 19 nt, Artificial Sequence
  Description of Artificial Sequence: Synthetic oligonucleotide
  Antisense strand to SEQ ID NO: 2170032
acuggucagggaguauugc

SEQ ID NO: 2170034 - RNA, 19 nt, Artificial Sequence
  Description of Artificial Sequence: Synthetic oligonucleotide
  Sense strand starting at position 1032 of SEQ ID NO: 1883106
caguucuuuccaggaugga

SEQ ID NO: 2170035 - RNA, 19 nt, Artificial Sequence
  Description of Artificial Sequence: Synthetic oligonucleotide
  Antisense strand to SEQ ID NO: 2170034
uccauccuggaaagaacug

SEQ ID NO: 2170036 - RNA, 19 nt, Artificial Sequence
  Description of Artificial Sequence: Synthetic oligonucleotide
  Sense strand starting at position 1792 of SEQ ID NO: 1883106
cgguucccugaggaauuga

SEQ ID NO: 2170037 - RNA, 19 nt, Artificial Sequence
  Description of Artificial Sequence: Synthetic oligonucleotide
  Antisense strand to SEQ ID NO: 2170036
ucaauuccucagggaaccg

SEQ ID NO: 2170038 - RNA, 19 nt, Artificial Sequence
  Description of Artificial Sequence: Synthetic oligonucleotide
  Sense strand starting at position 2206 of SEQ ID NO: 1883106
ggagucuuucuugucgcuu

SEQ ID NO: 2170039 - RNA, 19 nt, Artificial Sequence
  Description of Artificial Sequence: Synthetic oligonucleotide
  Antisense strand to SEQ ID NO: 2170038
aagcgacaagaaagacucc

SEQ ID NO: 2170040 - RNA, 19 nt, Artificial Sequence
  Description of Artificial Sequence: Synthetic oligonucleotide
  Sense strand starting at position 2497 of SEQ ID NO: 1883106
caaagaauugucuggucag

SEQ ID NO: 2170041 - RNA, 19 nt, Artificial Sequence
  Description of Artificial Sequence: Synthetic oligonucleotide
  Antisense strand to SEQ ID NO: 2170040
cugaccagacaauucuuug

SEQ ID NO: 2170042 - RNA, 19 nt, Artificial Sequence
  Description of Artificial Sequence: Synthetic oligonucleotide
  Sense strand starting at position 2598 of SEQ ID NO: 1883106
gccacagacugaccuuuaa

SEQ ID NO: 2170043 - RNA, 19 nt, Artificial Sequence
  Description of Artificial Sequence: Synthetic oligonucleotide
  Antisense strand to SEQ ID NO: 2170042
uuaaaggucagucuguggc

SEQ ID NO: 2170044 - RNA, 19 nt, Artificial Sequence
  Description of Artificial Sequence: Synthetic oligonucleotide
  Sense strand starting at position 2667 of SEQ ID NO: 1883106
auggauguuguccaaagca

SEQ ID NO: 2170045 - RNA, 19 nt, Artificial Sequence
  Description of Artificial Sequence: Synthetic oligonucleotide
  Antisense strand to SEQ ID NO: 2170044
ugcuuuggacaacauccau

SEQ ID NO: 2170046 - RNA, 19 nt, Artificial Sequence
  Description of Artificial Sequence: Synthetic oligonucleotide
  Sense strand starting at position 2972 of SEQ ID NO: 1883106
ugaggacugucugugaaag

SEQ ID NO: 2170047 - RNA, 19 nt, Artificial Sequence
  Description of Artificial Sequence: Synthetic oligonucleotide
  Antisense strand to SEQ ID NO: 2170046
cuuucacagacaguccuca

SEQ ID NO: 2170048 - RNA, 19 nt, Artificial Sequence
  Description of Artificial Sequence: Synthetic oligonucleotide
  Sense strand starting at position 2982 of SEQ ID NO: 1883106
cugugaaagcuguacaaua

SEQ ID NO: 2170049 - RNA, 19 nt, Artificial Sequence
  Description of Artificial Sequence: Synthetic oligonucleotide
  Antisense strand to SEQ ID NO: 2170048
uauuguacagcuuucacag

SEQ ID NO: 2170050 - RNA, 19 nt, Artificial Sequence
  Description of Artificial Sequence: Synthetic oligonucleotide
  Sense strand starting at position 2984 of SEQ ID NO: 1883106
gugaaagcuguacaauaca

SEQ ID NO: 2170051 - RNA, 19 nt, Artificial Sequence
  Description of Artificial Sequence: Synthetic oligonucleotide
  Antisense strand to SEQ ID NO: 2170050
uguauuguacagcuuucac

SEQ ID NO: 2170052 - RNA, 19 nt, Artificial Sequence
  Description of Artificial Sequence: Synthetic oligonucleotide
  Sense strand starting at position 3008 of SEQ ID NO: 1883106
cuauauuugucuccaguuu

SEQ ID NO: 2170053 - RNA, 19 nt, Artificial Sequence
  Description of Artificial Sequence: Synthetic oligonucleotide
  Antisense strand to SEQ ID NO: 2170052
aaacuggagacaaauauag

SEQ ID NO: 2170054 - RNA, 19 nt, Artificial Sequence
  Description of Artificial Sequence: Synthetic oligonucleotide
  Sense strand starting at position 3040 of SEQ ID NO: 1883106
uggcaaucagaaugguuau

SEQ ID NO: 2170055 - RNA, 19 nt, Artificial Sequence
  Description of Artificial Sequence: Synthetic oligonucleotide
  Antisense strand to SEQ ID NO: 2170054
auaaccauucugauugcca

SEQ ID NO: 2170056 - RNA, 19 nt, Artificial Sequence
  Description of Artificial Sequence: Synthetic oligonucleotide
  Sense strand starting at position 3041 of SEQ ID NO: 1883106
ggcaaucagaaugguuauu

SEQ ID NO: 2170057 - RNA, 19 nt, Artificial Sequence
  Description of Artificial Sequence: Synthetic oligonucleotide
  Antisense strand to SEQ ID NO: 2170056
aauaaccauucugauugcc

SEQ ID NO: 2170058 - RNA, 19 nt, Artificial Sequence
  Description of Artificial Sequence: Synthetic oligonucleotide
  Sense strand starting at position 3111 of SEQ ID NO: 1883106
cagugucagcaugaggaua

SEQ ID NO: 2170059 - RNA, 19 nt, Artificial Sequence
  Description of Artificial Sequence: Synthetic oligonucleotide
  Antisense strand to SEQ ID NO: 2170058
uauccucaugcugacacug

SEQ ID NO: 2170060 - RNA, 19 nt, Artificial Sequence
  Description of Artificial Sequence: Synthetic oligonucleotide
  Sense strand starting at position 3148 of SEQ ID NO: 1883106
ggaccugguaaauguuaga

SEQ ID NO: 2170061 - RNA, 19 nt, Artificial Sequence
  Description of Artificial Sequence: Synthetic oligonucleotide
  Antisense strand to SEQ ID NO: 2170060
ucuaacauuuaccaggucc

SEQ ID NO: 2170062 - RNA, 19 nt, Artificial Sequence
  Description of Artificial Sequence: Synthetic oligonucleotide
  Sense strand starting at position 3155 of SEQ ID NO: 1883106
guaaauguuagaugugaca

SEQ ID NO: 2170063 - RNA, 19 nt, Artificial Sequence
  Description of Artificial Sequence: Synthetic oligonucleotide
  Antisense strand to SEQ ID NO: 2170062
ugucacaucuaacauuuac

SEQ ID NO: 2170064 - RNA, 19 nt, Artificial Sequence
  Description of Artificial Sequence: Synthetic oligonucleotide
  Sense strand starting at position 3173 of SEQ ID NO: 1883106
aggguuucccaaggaggua

SEQ ID NO: 2170065 - RNA, 19 nt, Artificial Sequence
  Description of Artificial Sequence: Synthetic oligonucleotide
  Antisense strand to SEQ ID NO: 2170064
uaccuccuugggaaacccu

SEQ ID NO: 2170066 - RNA, 19 nt, Artificial Sequence
  Description of Artificial Sequence: Synthetic oligonucleotide
  Sense strand starting at position 3174 of SEQ ID NO: 1883106
ggguuucccaaggagguau

SEQ ID NO: 2170067 - RNA, 19 nt, Artificial Sequence
  Description of Artificial Sequence: Synthetic oligonucleotide
  Antisense strand to SEQ ID NO: 2170066
auaccuccuugggaaaccc

SEQ ID NO: 2170068 - RNA, 19 nt, Artificial Sequence
  Description of Artificial Sequence: Synthetic oligonucleotide
  Sense strand starting at position 3193 of SEQ ID NO: 1883106
gguacuucucagcagagag

SEQ ID NO: 2170069 - RNA, 19 nt, Artificial Sequence
  Description of Artificial Sequence: Synthetic oligonucleotide
  Antisense strand to SEQ ID NO: 2170068
cucucugcugagaaguacc

SEQ ID NO: 2170070 - RNA, 19 nt, Artificial Sequence
  Description of Artificial Sequence: Synthetic oligonucleotide
  Sense strand starting at position 3210 of SEQ ID NO: 1883106
agucaaaggccagagaugu

SEQ ID NO: 2170071 - RNA, 19 nt, Artificial Sequence
  Description of Artificial Sequence: Synthetic oligonucleotide
  Antisense strand to SEQ ID NO: 2170070
acaucucuggccuuugacu

SEQ ID NO: 2170072 - RNA, 19 nt, Artificial Sequence
  Description of Artificial Sequence: Synthetic oligonucleotide
  Sense strand starting at position 3221 of SEQ ID NO: 1883106
agagauguacuccgaagaa

SEQ ID NO: 2170073 - RNA, 19 nt, Artificial Sequence
  Description of Artificial Sequence: Synthetic oligonucleotide
  Antisense strand to SEQ ID NO: 2170072
uucuucggaguacaucucu

SEQ ID NO: 2170074 - RNA, 19 nt, Artificial Sequence
  Description of Artificial Sequence: Synthetic oligonucleotide
  Sense strand starting at position 3372 of SEQ ID NO: 1883106
uauguauggguaugaaaga

SEQ ID NO: 2170075 - RNA, 19 nt, Artificial Sequence
  Description of Artificial Sequence: Synthetic oligonucleotide
  Antisense strand to SEQ ID NO: 2170074
ucuuucauacccauacaua

SEQ ID NO: 2170076 - RNA, 19 nt, Artificial Sequence
  Description of Artificial Sequence: Synthetic oligonucleotide
  Sense strand starting at position 3392 of SEQ ID NO: 1883106
uuauuaugggauggcucua

SEQ ID NO: 2170077 - RNA, 19 nt, Artificial Sequence
  Description of Artificial Sequence: Synthetic oligonucleotide
  Antisense strand to SEQ ID NO: 2170076
uagagccaucccauaauaa

SEQ ID NO: 2170078 - RNA, 19 nt, Artificial Sequence
  Description of Artificial Sequence: Synthetic oligonucleotide
  Sense strand starting at position 3397 of SEQ ID NO: 1883106
augggauggcucuauaugu

SEQ ID NO: 2170079 - RNA, 19 nt, Artificial Sequence
  Description of Artificial Sequence: Synthetic oligonucleotide
  Antisense strand to SEQ ID NO: 2170078
acauauagagccaucccau

SEQ ID NO: 2170080 - RNA, 19 nt, Artificial Sequence
  Description of Artificial Sequence: Synthetic oligonucleotide
  Sense strand starting at position 3405 of SEQ ID NO: 1883106
gcucuauauguacauacau

SEQ ID NO: 2170081 - RNA, 19 nt, Artificial Sequence
  Description of Artificial Sequence: Synthetic oligonucleotide
  Antisense strand to SEQ ID NO: 2170080
auguauguacauauagagc

SEQ ID NO: 2170082 - RNA, 19 nt, Artificial Sequence
  Description of Artificial Sequence: Synthetic oligonucleotide
  Sense strand starting at position 3492 of SEQ ID NO: 1883106
augagaucuggucacugca

SEQ ID NO: 2170083 - RNA, 19 nt, Artificial Sequence
  Description of Artificial Sequence: Synthetic oligonucleotide
  Antisense strand to SEQ ID NO: 2170082
ugcagugaccagaucucau

SEQ ID NO: 2170084 - RNA, 19 nt, Artificial Sequence
  Description of Artificial Sequence: Synthetic oligonucleotide
  Sense strand starting at position 3632 of SEQ ID NO: 1883106
aggacagcacccugaaauu

SEQ ID NO: 2170085 - RNA, 19 nt, Artificial Sequence
  Description of Artificial Sequence: Synthetic oligonucleotide
  Antisense strand to SEQ ID NO: 2170084
aauuucagggugcuguccu

SEQ ID NO: 2170086 - RNA, 19 nt, Artificial Sequence
  Description of Artificial Sequence: Synthetic oligonucleotide
  Sense strand starting at position 3715 of SEQ ID NO: 1883106
gagggauauuucugaagac

SEQ ID NO: 2170087 - RNA, 19 nt, Artificial Sequence
  Description of Artificial Sequence: Synthetic oligonucleotide
  Antisense strand to SEQ ID NO: 2170086
gucuucagaaauaucccuc

SEQ ID NO: 2170088 - RNA, 19 nt, Artificial Sequence
  Description of Artificial Sequence: Synthetic oligonucleotide
  Sense strand starting at position 3829 of SEQ ID NO: 1883106
ggucaucuuuagucagaau

SEQ ID NO: 2170089 - RNA, 19 nt, Artificial Sequence
  Description of Artificial Sequence: Synthetic oligonucleotide
  Antisense strand to SEQ ID NO: 2170088
auucugacuaaagaugacc

SEQ ID NO: 2170090 - RNA, 19 nt, Artificial Sequence
  Description of Artificial Sequence: Synthetic oligonucleotide
  Sense strand starting at position 3853 of SEQ ID NO: 1883106
auccgugaaagcuacagau

SEQ ID NO: 2170091 - RNA, 19 nt, Artificial Sequence
  Description of Artificial Sequence: Synthetic oligonucleotide
  Antisense strand to SEQ ID NO: 2170090
aucuguagcuuucacggau

SEQ ID NO: 2170092 - RNA, 19 nt, Artificial Sequence
  Description of Artificial Sequence: Synthetic oligonucleotide
  Sense strand starting at position 3855 of SEQ ID NO: 1883106
ccgugaaagcuacagaucu

SEQ ID NO: 2170093 - RNA, 19 nt, Artificial Sequence
  Description of Artificial Sequence: Synthetic oligonucleotide
  Antisense strand to SEQ ID NO: 2170092
agaucuguagcuuucacgg

SEQ ID NO: 2170094 - RNA, 19 nt, Artificial Sequence
  Description of Artificial Sequence: Synthetic oligonucleotide
  Sense strand starting at position 315 of SEQ ID NO: 1883107
ugagcagcaucuuuacuua

SEQ ID NO: 2170095 - RNA, 19 nt, Artificial Sequence
  Description of Artificial Sequence: Synthetic oligonucleotide
  Antisense strand to SEQ ID NO: 2170094
uaaguaaagaugcugcuca

SEQ ID NO: 2170096 - RNA, 19 nt, Artificial Sequence
  Description of Artificial Sequence: Synthetic oligonucleotide
  Sense strand starting at position 569 of SEQ ID NO: 1883107
ggacuuguaccgggaggga

SEQ ID NO: 2170097 - RNA, 19 nt, Artificial Sequence
  Description of Artificial Sequence: Synthetic oligonucleotide
  Antisense strand to SEQ ID NO: 2170096
ucccucccgguacaagucc

SEQ ID NO: 2170098 - RNA, 19 nt, Artificial Sequence
  Description of Artificial Sequence: Synthetic oligonucleotide
  Sense strand starting at position 780 of SEQ ID NO: 1883107
agcucacugguccgagagu

SEQ ID NO: 2170099 - RNA, 19 nt, Artificial Sequence
  Description of Artificial Sequence: Synthetic oligonucleotide
  Antisense strand to SEQ ID NO: 2170098
acucucggaccagugagcu

SEQ ID NO: 2170100 - RNA, 19 nt, Artificial Sequence
  Description of Artificial Sequence: Synthetic oligonucleotide
  Sense strand starting at position 1196 of SEQ ID NO: 1883107
cucaguaugaagugaauga

SEQ ID NO: 2170101 - RNA, 19 nt, Artificial Sequence
  Description of Artificial Sequence: Synthetic oligonucleotide
  Antisense strand to SEQ ID NO: 2170100
ucauucacuucauacugag

SEQ ID NO: 2170102 - RNA, 19 nt, Artificial Sequence
  Description of Artificial Sequence: Synthetic oligonucleotide
  Sense strand starting at position 1367 of SEQ ID NO: 1883107
agggaugcucugcguggaa

SEQ ID NO: 2170103 - RNA, 19 nt, Artificial Sequence
  Description of Artificial Sequence: Synthetic oligonucleotide
  Antisense strand to SEQ ID NO: 2170102
uuccacgcagagcaucccu

SEQ ID NO: 2170104 - RNA, 19 nt, Artificial Sequence
  Description of Artificial Sequence: Synthetic oligonucleotide
  Sense strand starting at position 1369 of SEQ ID NO: 1883107
ggaugcucugcguggaaag

SEQ ID NO: 2170105 - RNA, 19 nt, Artificial Sequence
  Description of Artificial Sequence: Synthetic oligonucleotide
  Antisense strand to SEQ ID NO: 2170104
cuuuccacgcagagcaucc

SEQ ID NO: 2170106 - RNA, 19 nt, Artificial Sequence
  Description of Artificial Sequence: Synthetic oligonucleotide
  Sense strand starting at position 1387 of SEQ ID NO: 1883107
gugggcucccuguagguau

SEQ ID NO: 2170107 - RNA, 19 nt, Artificial Sequence
  Description of Artificial Sequence: Synthetic oligonucleotide
  Antisense strand to SEQ ID NO: 2170106
auaccuacagggagcccac

SEQ ID NO: 2170108 - RNA, 19 nt, Artificial Sequence
  Description of Artificial Sequence: Synthetic oligonucleotide
  Sense strand starting at position 1403 of SEQ ID NO: 1883107
uauguucuagcaggauuaa

SEQ ID NO: 2170109 - RNA, 19 nt, Artificial Sequence
  Description of Artificial Sequence: Synthetic oligonucleotide
  Antisense strand to SEQ ID NO: 2170108
uuaauccugcuagaacaua

SEQ ID NO: 2170110 - RNA, 19 nt, Artificial Sequence
  Description of Artificial Sequence: Synthetic oligonucleotide
  Sense strand starting at position 1404 of SEQ ID NO: 1883107
auguucuagcaggauuaag

SEQ ID NO: 2170111 - RNA, 19 nt, Artificial Sequence
  Description of Artificial Sequence: Synthetic oligonucleotide
  Antisense strand to SEQ ID NO: 2170110
cuuaauccugcuagaacau

SEQ ID NO: 2170112 - RNA, 19 nt, Artificial Sequence
  Description of Artificial Sequence: Synthetic oligonucleotide
  Sense strand starting at position 1557 of SEQ ID NO: 1883107
guuccuugugugcaagacu

SEQ ID NO: 2170113 - RNA, 19 nt, Artificial Sequence
  Description of Artificial Sequence: Synthetic oligonucleotide
  Antisense strand to SEQ ID NO: 2170112
agucuugcacacaaggaac

SEQ ID NO: 2170114 - RNA, 19 nt, Artificial Sequence
  Description of Artificial Sequence: Synthetic oligonucleotide
  Sense strand starting at position 1564 of SEQ ID NO: 1883107
gugugcaagacucacagua

SEQ ID NO: 2170115 - RNA, 19 nt, Artificial Sequence
  Description of Artificial Sequence: Synthetic oligonucleotide
  Antisense strand to SEQ ID NO: 2170114
uacugugagucuugcacac

SEQ ID NO: 2170116 - RNA, 19 nt, Artificial Sequence
  Description of Artificial Sequence: Synthetic oligonucleotide
  Sense strand starting at position 1811 of SEQ ID NO: 1883107
agccaaagccuugacaaua

SEQ ID NO: 2170117 - RNA, 19 nt, Artificial Sequence
  Description of Artificial Sequence: Synthetic oligonucleotide
  Antisense strand to SEQ ID NO: 2170116
uauugucaaggcuuuggcu

SEQ ID NO: 2170118 - RNA, 19 nt, Artificial Sequence
  Description of Artificial Sequence: Synthetic oligonucleotide
  Sense strand starting at position 1831 of SEQ ID NO: 1883107
uggaauuuguguuaauaac

SEQ ID NO: 2170119 - RNA, 19 nt, Artificial Sequence
  Description of Artificial Sequence: Synthetic oligonucleotide
  Antisense strand to SEQ ID NO: 2170118
guuauuaacacaaauucca

SEQ ID NO: 2170120 - RNA, 19 nt, Artificial Sequence
  Description of Artificial Sequence: Synthetic oligonucleotide
  Sense strand starting at position 1840 of SEQ ID NO: 1883107
uguuaauaaccugggcaca

SEQ ID NO: 2170121 - RNA, 19 nt, Artificial Sequence
  Description of Artificial Sequence: Synthetic oligonucleotide
  Antisense strand to SEQ ID NO: 2170120
ugugcccagguuauuaaca

SEQ ID NO: 2170122 - RNA, 19 nt, Artificial Sequence
  Description of Artificial Sequence: Synthetic oligonucleotide
  Sense strand starting at position 1876 of SEQ ID NO: 1883107
gggacacaaugcuuucuuu

SEQ ID NO: 2170123 - RNA, 19 nt, Artificial Sequence
  Description of Artificial Sequence: Synthetic oligonucleotide
  Antisense strand to SEQ ID NO: 2170122
aaagaaagcauuguguccc

SEQ ID NO: 2170124 - RNA, 19 nt, Artificial Sequence
  Description of Artificial Sequence: Synthetic oligonucleotide
  Sense strand starting at position 1889 of SEQ ID NO: 1883107
uucuuugugccugacaguu

SEQ ID NO: 2170125 - RNA, 19 nt, Artificial Sequence
  Description of Artificial Sequence: Synthetic oligonucleotide
  Antisense strand to SEQ ID NO: 2170124
aacugucaggcacaaagaa

SEQ ID NO: 2170126 - RNA, 19 nt, Artificial Sequence
  Description of Artificial Sequence: Synthetic oligonucleotide
  Sense strand starting at position 1942 of SEQ ID NO: 1883107
ugaagauaacgugagcauu

SEQ ID NO: 2170127 - RNA, 19 nt, Artificial Sequence
  Description of Artificial Sequence: Synthetic oligonucleotide
  Antisense strand to SEQ ID NO: 2170126
aaugcucacguuaucuuca

SEQ ID NO: 2170128 - RNA, 19 nt, Artificial Sequence
  Description of Artificial Sequence: Synthetic oligonucleotide
  Sense strand starting at position 2025 of SEQ ID NO: 1883107
gaaagugccugggcaagaa

SEQ ID NO: 2170129 - RNA, 19 nt, Artificial Sequence
  Description of Artificial Sequence: Synthetic oligonucleotide
  Antisense strand to SEQ ID NO: 2170128
uucuugcccaggcacuuuc

SEQ ID NO: 2170130 - RNA, 19 nt, Artificial Sequence
  Description of Artificial Sequence: Synthetic oligonucleotide
  Sense strand starting at position 2165 of SEQ ID NO: 1883107
gggucuuacuacuucuacu

SEQ ID NO: 2170131 - RNA, 19 nt, Artificial Sequence
  Description of Artificial Sequence: Synthetic oligonucleotide
  Antisense strand to SEQ ID NO: 2170130
aguagaaguaguaagaccc

SEQ ID NO: 2170132 - RNA, 19 nt, Artificial Sequence
  Description of Artificial Sequence: Synthetic oligonucleotide
  Sense strand starting at position 2240 of SEQ ID NO: 1883107
gcuguagcucagcugugau

SEQ ID NO: 2170133 - RNA, 19 nt, Artificial Sequence
  Description of Artificial Sequence: Synthetic oligonucleotide
  Antisense strand to SEQ ID NO: 2170132
aucacagcugagcuacagc

SEQ ID NO: 2170134 - RNA, 19 nt, Artificial Sequence
  Description of Artificial Sequence: Synthetic oligonucleotide
  Sense strand starting at position 2250 of SEQ ID NO: 1883107
agcugugauuccuugugag

SEQ ID NO: 2170135 - RNA, 19 nt, Artificial Sequence
  Description of Artificial Sequence: Synthetic oligonucleotide
  Antisense strand to SEQ ID NO: 2170134
cucacaaggaaucacagcu

SEQ ID NO: 2170136 - RNA, 19 nt, Artificial Sequence
  Description of Artificial Sequence: Synthetic oligonucleotide
  Sense strand starting at position 2324 of SEQ ID NO: 1883107
ggcugagucccugaugguu

SEQ ID NO: 2170137 - RNA, 19 nt, Artificial Sequence
  Description of Artificial Sequence: Synthetic oligonucleotide
  Antisense strand to SEQ ID NO: 2170136
aaccaucagggacucagcc

SEQ ID NO: 2170138 - RNA, 19 nt, Artificial Sequence
  Description of Artificial Sequence: Synthetic oligonucleotide
  Sense strand starting at position 2362 of SEQ ID NO: 1883107
accagcuuccugugaugua

SEQ ID NO: 2170139 - RNA, 19 nt, Artificial Sequence
  Description of Artificial Sequence: Synthetic oligonucleotide
  Antisense strand to SEQ ID NO: 2170138
uacaucacaggaagcuggu

SEQ ID NO: 2170140 - RNA, 19 nt, Artificial Sequence
  Description of Artificial Sequence: Synthetic oligonucleotide
  Sense strand starting at position 2367 of SEQ ID NO: 1883107
cuuccugugauguaguuaa

SEQ ID NO: 2170141 - RNA, 19 nt, Artificial Sequence
  Description of Artificial Sequence: Synthetic oligonucleotide
  Antisense strand to SEQ ID NO: 2170140
uuaacuacaucacaggaag

SEQ ID NO: 2170142 - RNA, 19 nt, Artificial Sequence
  Description of Artificial Sequence: Synthetic oligonucleotide
  Sense strand starting at position 2439 of SEQ ID NO: 1883107
uugugugagccucaaagua

SEQ ID NO: 2170143 - RNA, 19 nt, Artificial Sequence
  Description of Artificial Sequence: Synthetic oligonucleotide
  Antisense strand to SEQ ID NO: 2170142
uacuuugaggcucacacaa

SEQ ID NO: 2170144 - RNA, 19 nt, Artificial Sequence
  Description of Artificial Sequence: Synthetic oligonucleotide
  Sense strand starting at position 2808 of SEQ ID NO: 1883107
ucuacacuuucuguggaga

SEQ ID NO: 2170145 - RNA, 19 nt, Artificial Sequence
  Description of Artificial Sequence: Synthetic oligonucleotide
  Antisense strand to SEQ ID NO: 2170144
ucuccacagaaaguguaga

SEQ ID NO: 2170146 - RNA, 19 nt, Artificial Sequence
  Description of Artificial Sequence: Synthetic oligonucleotide
  Sense strand starting at position 2809 of SEQ ID NO: 1883107
cuacacuuucuguggagaa

SEQ ID NO: 2170147 - RNA, 19 nt, Artificial Sequence
  Description of Artificial Sequence: Synthetic oligonucleotide
  Antisense strand to SEQ ID NO: 2170146
uucuccacagaaaguguag

SEQ ID NO: 2170148 - RNA, 19 nt, Artificial Sequence
  Description of Artificial Sequence: Synthetic oligonucleotide
  Sense strand starting at position 2868 of SEQ ID NO: 1883107
uuuguuuguagugagcauu

SEQ ID NO: 2170149 - RNA, 19 nt, Artificial Sequence
  Description of Artificial Sequence: Synthetic oligonucleotide
  Antisense strand to SEQ ID NO: 2170148
aaugcucacuacaaacaaa

SEQ ID NO: 2170150 - RNA, 19 nt, Artificial Sequence
  Description of Artificial Sequence: Synthetic oligonucleotide
  Sense strand starting at position 2923 of SEQ ID NO: 1883107
cagaucugucauggauuaa

SEQ ID NO: 2170151 - RNA, 19 nt, Artificial Sequence
  Description of Artificial Sequence: Synthetic oligonucleotide
  Antisense strand to SEQ ID NO: 2170150
uuaauccaugacagaucug

SEQ ID NO: 2170152 - RNA, 19 nt, Artificial Sequence
  Description of Artificial Sequence: Synthetic oligonucleotide
  Sense strand starting at position 3256 of SEQ ID NO: 1883107
ggacuacaggcgugcauau

SEQ ID NO: 2170153 - RNA, 19 nt, Artificial Sequence
  Description of Artificial Sequence: Synthetic oligonucleotide
  Antisense strand to SEQ ID NO: 2170152
auaugcacgccuguagucc

SEQ ID NO: 2170154 - RNA, 19 nt, Artificial Sequence
  Description of Artificial Sequence: Synthetic oligonucleotide
  Sense strand starting at position 3415 of SEQ ID NO: 1883107
gggccuguuuccucucaag

SEQ ID NO: 2170155 - RNA, 19 nt, Artificial Sequence
  Description of Artificial Sequence: Synthetic oligonucleotide
  Antisense strand to SEQ ID NO: 2170154
cuugagaggaaacaggccc

SEQ ID NO: 2170156 - RNA, 19 nt, Artificial Sequence
  Description of Artificial Sequence: Synthetic oligonucleotide
  Sense strand starting at position 3431 of SEQ ID NO: 1883107
aagugaccuuacucuggau

SEQ ID NO: 2170157 - RNA, 19 nt, Artificial Sequence
  Description of Artificial Sequence: Synthetic oligonucleotide
  Antisense strand to SEQ ID NO: 2170156
auccagaguaaggucacuu

SEQ ID NO: 2170158 - RNA, 19 nt, Artificial Sequence
  Description of Artificial Sequence: Synthetic oligonucleotide
  Sense strand starting at position 3458 of SEQ ID NO: 1883107
gauggagccauuggucaga

SEQ ID NO: 2170159 - RNA, 19 nt, Artificial Sequence
  Description of Artificial Sequence: Synthetic oligonucleotide
  Antisense strand to SEQ ID NO: 2170158
ucugaccaauggcuccauc

SEQ ID NO: 2170160 - RNA, 19 nt, Artificial Sequence
  Description of Artificial Sequence: Synthetic oligonucleotide
  Sense strand starting at position 3461 of SEQ ID NO: 1883107
ggagccauuggucagaugu

SEQ ID NO: 2170161 - RNA, 19 nt, Artificial Sequence
  Description of Artificial Sequence: Synthetic oligonucleotide
  Antisense strand to SEQ ID NO: 2170160
acaucugaccaauggcucc

SEQ ID NO: 2170162 - RNA, 19 nt, Artificial Sequence
  Description of Artificial Sequence: Synthetic oligonucleotide
  Sense strand starting at position 3469 of SEQ ID NO: 1883107
uggucagaugugugccaaa

SEQ ID NO: 2170163 - RNA, 19 nt, Artificial Sequence
  Description of Artificial Sequence: Synthetic oligonucleotide
  Antisense strand to SEQ ID NO: 2170162
uuuggcacacaucugacca

SEQ ID NO: 2170164 - RNA, 19 nt, Artificial Sequence
  Description of Artificial Sequence: Synthetic oligonucleotide
  Sense strand starting at position 3545 of SEQ ID NO: 1883107
gggagaagcuaguaagaca

SEQ ID NO: 2170165 - RNA, 19 nt, Artificial Sequence
  Description of Artificial Sequence: Synthetic oligonucleotide
  Antisense strand to SEQ ID NO: 2170164
ugucuuacuagcuucuccc

SEQ ID NO: 2170166 - RNA, 19 nt, Artificial Sequence
  Description of Artificial Sequence: Synthetic oligonucleotide
  Sense strand starting at position 3661 of SEQ ID NO: 1883107
uguggucucccauguuaaa

SEQ ID NO: 2170167 - RNA, 19 nt, Artificial Sequence
  Description of Artificial Sequence: Synthetic oligonucleotide
  Antisense strand to SEQ ID NO: 2170166
uuuaacaugggagaccaca

SEQ ID NO: 2170168 - RNA, 19 nt, Artificial Sequence
  Description of Artificial Sequence: Synthetic oligonucleotide
  Sense strand starting at position 3860 of SEQ ID NO: 1883107
ugaggaagucauugcaacu

SEQ ID NO: 2170169 - RNA, 19 nt, Artificial Sequence
  Description of Artificial Sequence: Synthetic oligonucleotide
  Antisense strand to SEQ ID NO: 2170168
aguugcaaugacuuccuca

SEQ ID NO: 2170170 - RNA, 19 nt, Artificial Sequence
  Description of Artificial Sequence: Synthetic oligonucleotide
  Sense strand starting at position 3921 of SEQ ID NO: 1883107
uggacuagauggucucuau

SEQ ID NO: 2170171 - RNA, 19 nt, Artificial Sequence
  Description of Artificial Sequence: Synthetic oligonucleotide
  Antisense strand to SEQ ID NO: 2170170
auagagaccaucuagucca

SEQ ID NO: 2170172 - RNA, 19 nt, Artificial Sequence
  Description of Artificial Sequence: Synthetic oligonucleotide
  Sense strand starting at position 3924 of SEQ ID NO: 1883107
acuagauggucucuaugag

SEQ ID NO: 2170173 - RNA, 19 nt, Artificial Sequence
  Description of Artificial Sequence: Synthetic oligonucleotide
  Antisense strand to SEQ ID NO: 2170172
cucauagagaccaucuagu

SEQ ID NO: 2170174 - RNA, 19 nt, Artificial Sequence
  Description of Artificial Sequence: Synthetic oligonucleotide
  Sense strand starting at position 40 of SEQ ID NO: 1883108
uuuauuuagcgcugacugu

SEQ ID NO: 2170175 - RNA, 19 nt, Artificial Sequence
  Description of Artificial Sequence: Synthetic oligonucleotide
  Antisense strand to SEQ ID NO: 2170174
acagucagcgcuaaauaaa

SEQ ID NO: 2170176 - RNA, 19 nt, Artificial Sequence
  Description of Artificial Sequence: Synthetic oligonucleotide
  Sense strand starting at position 46 of SEQ ID NO: 1883108
uagcgcugacuguguguua

SEQ ID NO: 2170177 - RNA, 19 nt, Artificial Sequence
  Description of Artificial Sequence: Synthetic oligonucleotide
  Antisense strand to SEQ ID NO: 2170176
uaacacacagucagcgcua

SEQ ID NO: 2170178 - RNA, 19 nt, Artificial Sequence
  Description of Artificial Sequence: Synthetic oligonucleotide
  Sense strand starting at position 47 of SEQ ID NO: 1883108
agcgcugacuguguguuaa

SEQ ID NO: 2170179 - RNA, 19 nt, Artificial Sequence
  Description of Artificial Sequence: Synthetic oligonucleotide
  Antisense strand to SEQ ID NO: 2170178
uuaacacacagucagcgcu

SEQ ID NO: 2170180 - RNA, 19 nt, Artificial Sequence
  Description of Artificial Sequence: Synthetic oligonucleotide
  Sense strand starting at position 55 of SEQ ID NO: 1883108
cuguguguuaagcacuauu

SEQ ID NO: 2170181 - RNA, 19 nt, Artificial Sequence
  Description of Artificial Sequence: Synthetic oligonucleotide
  Antisense strand to SEQ ID NO: 2170180
aauagugcuuaacacacag

SEQ ID NO: 2170182 - RNA, 19 nt, Artificial Sequence
  Description of Artificial Sequence: Synthetic oligonucleotide
  Sense strand starting at position 58 of SEQ ID NO: 1883108
uguguuaagcacuauuaag

SEQ ID NO: 2170183 - RNA, 19 nt, Artificial Sequence
  Description of Artificial Sequence: Synthetic oligonucleotide
  Antisense strand to SEQ ID NO: 2170182
cuuaauagugcuuaacaca

SEQ ID NO: 2170184 - RNA, 19 nt, Artificial Sequence
  Description of Artificial Sequence: Synthetic oligonucleotide
  Sense strand starting at position 127 of SEQ ID NO: 1883108
gaugcaugaucaguuccau

SEQ ID NO: 2170185 - RNA, 19 nt, Artificial Sequence
  Description of Artificial Sequence: Synthetic oligonucleotide
  Antisense strand to SEQ ID NO: 2170184
auggaacugaucaugcauc

SEQ ID NO: 2170186 - RNA, 19 nt, Artificial Sequence
  Description of Artificial Sequence: Synthetic oligonucleotide
  Sense strand starting at position 182 of SEQ ID NO: 1883108
uuaccauucugagguggua

SEQ ID NO: 2170187 - RNA, 19 nt, Artificial Sequence
  Description of Artificial Sequence: Synthetic oligonucleotide
  Antisense strand to SEQ ID NO: 2170186
uaccaccucagaaugguaa

SEQ ID NO: 2170188 - RNA, 19 nt, Artificial Sequence
  Description of Artificial Sequence: Synthetic oligonucleotide
  Sense strand starting at position 184 of SEQ ID NO: 1883108
accauucugaggugguaca

SEQ ID NO: 2170189 - RNA, 19 nt, Artificial Sequence
  Description of Artificial Sequence: Synthetic oligonucleotide
  Antisense strand to SEQ ID NO: 2170188
uguaccaccucagaauggu

SEQ ID NO: 2170190 - RNA, 19 nt, Artificial Sequence
  Description of Artificial Sequence: Synthetic oligonucleotide
  Sense strand starting at position 314 of SEQ ID NO: 1883108
cagcaaauguccugguuua

SEQ ID NO: 2170191 - RNA, 19 nt, Artificial Sequence
  Description of Artificial Sequence: Synthetic oligonucleotide
  Antisense strand to SEQ ID NO: 2170190
uaaaccaggacauuugcug

SEQ ID NO: 2170192 - RNA, 19 nt, Artificial Sequence
  Description of Artificial Sequence: Synthetic oligonucleotide
  Sense strand starting at position 315 of SEQ ID NO: 1883108
agcaaauguccugguuuac

SEQ ID NO: 2170193 - RNA, 19 nt, Artificial Sequence
  Description of Artificial Sequence: Synthetic oligonucleotide
  Antisense strand to SEQ ID NO: 2170192
guaaaccaggacauuugcu

SEQ ID NO: 2170194 - RNA, 19 nt, Artificial Sequence
  Description of Artificial Sequence: Synthetic oligonucleotide
  Sense strand starting at position 388 of SEQ ID NO: 1883108
uccauuggauggucucuua

SEQ ID NO: 2170195 - RNA, 19 nt, Artificial Sequence
  Description of Artificial Sequence: Synthetic oligonucleotide
  Antisense strand to SEQ ID NO: 2170194
uaagagaccauccaaugga

SEQ ID NO: 2170196 - RNA, 19 nt, Artificial Sequence
  Description of Artificial Sequence: Synthetic oligonucleotide
  Sense strand starting at position 391 of SEQ ID NO: 1883108
auuggauggucucuuauuc

SEQ ID NO: 2170197 - RNA, 19 nt, Artificial Sequence
  Description of Artificial Sequence: Synthetic oligonucleotide
  Antisense strand to SEQ ID NO: 2170196
gaauaagagaccauccaau

SEQ ID NO: 2170198 - RNA, 19 nt, Artificial Sequence
  Description of Artificial Sequence: Synthetic oligonucleotide
  Sense strand starting at position 429 of SEQ ID NO: 1883108
ccaggagagucccugaaca

SEQ ID NO: 2170199 - RNA, 19 nt, Artificial Sequence
  Description of Artificial Sequence: Synthetic oligonucleotide
  Antisense strand to SEQ ID NO: 2170198
uguucagggacucuccugg

SEQ ID NO: 2170200 - RNA, 19 nt, Artificial Sequence
  Description of Artificial Sequence: Synthetic oligonucleotide
  Sense strand starting at position 597 of SEQ ID NO: 1883108
ucugauaucuugucccugu

SEQ ID NO: 2170201 - RNA, 19 nt, Artificial Sequence
  Description of Artificial Sequence: Synthetic oligonucleotide
  Antisense strand to SEQ ID NO: 2170200
acagggacaagauaucaga

SEQ ID NO: 2170202 - RNA, 19 nt, Artificial Sequence
  Description of Artificial Sequence: Synthetic oligonucleotide
  Sense strand starting at position 601 of SEQ ID NO: 1883108
auaucuugucccugugugu

SEQ ID NO: 2170203 - RNA, 19 nt, Artificial Sequence
  Description of Artificial Sequence: Synthetic oligonucleotide
  Antisense strand to SEQ ID NO: 2170202
acacacagggacaagauau

SEQ ID NO: 2170204 - RNA, 19 nt, Artificial Sequence
  Description of Artificial Sequence: Synthetic oligonucleotide
  Sense strand starting at position 638 of SEQ ID NO: 1883108
gggucauccaaucaggcaa

SEQ ID NO: 2170205 - RNA, 19 nt, Artificial Sequence
  Description of Artificial Sequence: Synthetic oligonucleotide
  Antisense strand to SEQ ID NO: 2170204
uugccugauuggaugaccc

SEQ ID NO: 2170206 - RNA, 19 nt, Artificial Sequence
  Description of Artificial Sequence: Synthetic oligonucleotide
  Sense strand starting at position 824 of SEQ ID NO: 1883108
gggugacagagcugauaua

SEQ ID NO: 2170207 - RNA, 19 nt, Artificial Sequence
  Description of Artificial Sequence: Synthetic oligonucleotide
  Antisense strand to SEQ ID NO: 2170206
uauaucagcucugucaccc

SEQ ID NO: 2170208 - RNA, 19 nt, Artificial Sequence
  Description of Artificial Sequence: Synthetic oligonucleotide
  Sense strand starting at position 849 of SEQ ID NO: 1883108
cuggguucucuuuguauuu

SEQ ID NO: 2170209 - RNA, 19 nt, Artificial Sequence
  Description of Artificial Sequence: Synthetic oligonucleotide
  Antisense strand to SEQ ID NO: 2170208
aaauacaaagagaacccag

SEQ ID NO: 2170210 - RNA, 19 nt, Artificial Sequence
  Description of Artificial Sequence: Synthetic oligonucleotide
  Sense strand starting at position 971 of SEQ ID NO: 1883108
uccuaagucccagaaagcu

SEQ ID NO: 2170211 - RNA, 19 nt, Artificial Sequence
  Description of Artificial Sequence: Synthetic oligonucleotide
  Antisense strand to SEQ ID NO: 2170210
agcuuucugggacuuagga

SEQ ID NO: 2170212 - RNA, 19 nt, Artificial Sequence
  Description of Artificial Sequence: Synthetic oligonucleotide
  Sense strand starting at position 990 of SEQ ID NO: 1883108
ucagcuacugguuaaacua

SEQ ID NO: 2170213 - RNA, 19 nt, Artificial Sequence
  Description of Artificial Sequence: Synthetic oligonucleotide
  Antisense strand to SEQ ID NO: 2170212
uaguuuaaccaguagcuga

SEQ ID NO: 2170214 - RNA, 19 nt, Artificial Sequence
  Description of Artificial Sequence: Synthetic oligonucleotide
  Sense strand starting at position 997 of SEQ ID NO: 1883108
cugguuaaacuacgggaua

SEQ ID NO: 2170215 - RNA, 19 nt, Artificial Sequence
  Description of Artificial Sequence: Synthetic oligonucleotide
  Antisense strand to SEQ ID NO: 2170214
uaucccguaguuuaaccag

SEQ ID NO: 2170216 - RNA, 19 nt, Artificial Sequence
  Description of Artificial Sequence: Synthetic oligonucleotide
  Sense strand starting at position 1086 of SEQ ID NO: 1883108
gggaccugcuccuuggaga

SEQ ID NO: 2170217 - RNA, 19 nt, Artificial Sequence
  Description of Artificial Sequence: Synthetic oligonucleotide
  Antisense strand to SEQ ID NO: 2170216
ucuccaaggagcagguccc

SEQ ID NO: 2170218 - RNA, 19 nt, Artificial Sequence
  Description of Artificial Sequence: Synthetic oligonucleotide
  Sense strand starting at position 1265 of SEQ ID NO: 1883108
acaggaguuuggccagaaa

SEQ ID NO: 2170219 - RNA, 19 nt, Artificial Sequence
  Description of Artificial Sequence: Synthetic oligonucleotide
  Antisense strand to SEQ ID NO: 2170218
uuucuggccaaacuccugu

SEQ ID NO: 2170220 - RNA, 19 nt, Artificial Sequence
  Description of Artificial Sequence: Synthetic oligonucleotide
  Sense strand starting at position 1337 of SEQ ID NO: 1883108
ggagacuuccucuggaauc

SEQ ID NO: 2170221 - RNA, 19 nt, Artificial Sequence
  Description of Artificial Sequence: Synthetic oligonucleotide
  Antisense strand to SEQ ID NO: 2170220
gauuccagaggaagucucc

SEQ ID NO: 2170222 - RNA, 19 nt, Artificial Sequence
  Description of Artificial Sequence: Synthetic oligonucleotide
  Sense strand starting at position 1348 of SEQ ID NO: 1883108
cuggaauccucugggaaga

SEQ ID NO: 2170223 - RNA, 19 nt, Artificial Sequence
  Description of Artificial Sequence: Synthetic oligonucleotide
  Antisense strand to SEQ ID NO: 2170222
ucuucccagaggauuccag

SEQ ID NO: 2170224 - RNA, 19 nt, Artificial Sequence
  Description of Artificial Sequence: Synthetic oligonucleotide
  Sense strand starting at position 1350 of SEQ ID NO: 1883108
ggaauccucugggaagaug

SEQ ID NO: 2170225 - RNA, 19 nt, Artificial Sequence
  Description of Artificial Sequence: Synthetic oligonucleotide
  Antisense strand to SEQ ID NO: 2170224
caucuucccagaggauucc

SEQ ID NO: 2170226 - RNA, 19 nt, Artificial Sequence
  Description of Artificial Sequence: Synthetic oligonucleotide
  Sense strand starting at position 2019 of SEQ ID NO: 1883108
gggaaaugagcucgcugga

SEQ ID NO: 2170227 - RNA, 19 nt, Artificial Sequence
  Description of Artificial Sequence: Synthetic oligonucleotide
  Antisense strand to SEQ ID NO: 2170226
uccagcgagcucauuuccc

SEQ ID NO: 2170228 - RNA, 19 nt, Artificial Sequence
  Description of Artificial Sequence: Synthetic oligonucleotide
  Sense strand starting at position 3250 of SEQ ID NO: 1883108
gcauuccaucuggaaugua

SEQ ID NO: 2170229 - RNA, 19 nt, Artificial Sequence
  Description of Artificial Sequence: Synthetic oligonucleotide
  Antisense strand to SEQ ID NO: 2170228
uacauuccagauggaaugc

SEQ ID NO: 2170230 - RNA, 19 nt, Artificial Sequence
  Description of Artificial Sequence: Synthetic oligonucleotide
  Sense strand starting at position 3262 of SEQ ID NO: 1883108
gaauguaggaagugaguuu

SEQ ID NO: 2170231 - RNA, 19 nt, Artificial Sequence
  Description of Artificial Sequence: Synthetic oligonucleotide
  Antisense strand to SEQ ID NO: 2170230
aaacucacuuccuacauuc

SEQ ID NO: 2170232 - RNA, 19 nt, Artificial Sequence
  Description of Artificial Sequence: Synthetic oligonucleotide
  Sense strand starting at position 3273 of SEQ ID NO: 1883108
gugaguuucuaucccaugu

SEQ ID NO: 2170233 - RNA, 19 nt, Artificial Sequence
  Description of Artificial Sequence: Synthetic oligonucleotide
  Antisense strand to SEQ ID NO: 2170232
acaugggauagaaacucac

SEQ ID NO: 2170234 - RNA, 19 nt, Artificial Sequence
  Description of Artificial Sequence: Synthetic oligonucleotide
  Sense strand starting at position 3312 of SEQ ID NO: 1883108
ucagguauaucaggcaauc

SEQ ID NO: 2170235 - RNA, 19 nt, Artificial Sequence
  Description of Artificial Sequence: Synthetic oligonucleotide
  Antisense strand to SEQ ID NO: 2170234
gauugccugauauaccuga

SEQ ID NO: 2170236 - RNA, 19 nt, Artificial Sequence
  Description of Artificial Sequence: Synthetic oligonucleotide
  Sense strand starting at position 3495 of SEQ ID NO: 1883108
ggaacagugcuuuacaggu

SEQ ID NO: 2170237 - RNA, 19 nt, Artificial Sequence
  Description of Artificial Sequence: Synthetic oligonucleotide
  Antisense strand to SEQ ID NO: 2170236
accuguaaagcacuguucc

SEQ ID NO: 2170238 - RNA, 19 nt, Artificial Sequence
  Description of Artificial Sequence: Synthetic oligonucleotide
  Sense strand starting at position 3501 of SEQ ID NO: 1883108
gugcuuuacaggugacaaa

SEQ ID NO: 2170239 - RNA, 19 nt, Artificial Sequence
  Description of Artificial Sequence: Synthetic oligonucleotide
  Antisense strand to SEQ ID NO: 2170238
uuugucaccuguaaagcac

SEQ ID NO: 2170240 - RNA, 19 nt, Artificial Sequence
  Description of Artificial Sequence: Synthetic oligonucleotide
  Sense strand starting at position 3502 of SEQ ID NO: 1883108
ugcuuuacaggugacaaau

SEQ ID NO: 2170241 - RNA, 19 nt, Artificial Sequence
  Description of Artificial Sequence: Synthetic oligonucleotide
  Antisense strand to SEQ ID NO: 2170240
auuugucaccuguaaagca

SEQ ID NO: 2170242 - RNA, 19 nt, Artificial Sequence
  Description of Artificial Sequence: Synthetic oligonucleotide
  Sense strand starting at position 3709 of SEQ ID NO: 1883108
ggcacagaaugcuggagau

SEQ ID NO: 2170243 - RNA, 19 nt, Artificial Sequence
  Description of Artificial Sequence: Synthetic oligonucleotide
  Antisense strand to SEQ ID NO: 2170242
aucuccagcauucugugcc

SEQ ID NO: 2170244 - RNA, 19 nt, Artificial Sequence
  Description of Artificial Sequence: Synthetic oligonucleotide
  Sense strand starting at position 3849 of SEQ ID NO: 1883108
agagauggauguggaugaa

SEQ ID NO: 2170245 - RNA, 19 nt, Artificial Sequence
  Description of Artificial Sequence: Synthetic oligonucleotide
  Antisense strand to SEQ ID NO: 2170244
uucauccacauccaucucu

SEQ ID NO: 2170246 - RNA, 19 nt, Artificial Sequence
  Description of Artificial Sequence: Synthetic oligonucleotide
  Sense strand starting at position 3887 of SEQ ID NO: 1883108
cuagcagagccuugucauu

SEQ ID NO: 2170247 - RNA, 19 nt, Artificial Sequence
  Description of Artificial Sequence: Synthetic oligonucleotide
  Antisense strand to SEQ ID NO: 2170246
aaugacaaggcucugcuag

SEQ ID NO: 2170248 - RNA, 19 nt, Artificial Sequence
  Description of Artificial Sequence: Synthetic oligonucleotide
  Sense strand starting at position 8 of SEQ ID NO: 1883109
uuugaaguagugugaucag

SEQ ID NO: 2170249 - RNA, 19 nt, Artificial Sequence
  Description of Artificial Sequence: Synthetic oligonucleotide
  Antisense strand to SEQ ID NO: 2170248
cugaucacacuacuucaaa

SEQ ID NO: 2170250 - RNA, 19 nt, Artificial Sequence
  Description of Artificial Sequence: Synthetic oligonucleotide
  Sense strand starting at position 11 of SEQ ID NO: 1883109
gaaguagugugaucagaag

SEQ ID NO: 2170251 - RNA, 19 nt, Artificial Sequence
  Description of Artificial Sequence: Synthetic oligonucleotide
  Antisense strand to SEQ ID NO: 2170250
cuucugaucacacuacuuc

SEQ ID NO: 2170252 - RNA, 19 nt, Artificial Sequence
  Description of Artificial Sequence: Synthetic oligonucleotide
  Sense strand starting at position 229 of SEQ ID NO: 1883109
gagugauucugggugcuca

SEQ ID NO: 2170253 - RNA, 19 nt, Artificial Sequence
  Description of Artificial Sequence: Synthetic oligonucleotide
  Antisense strand to SEQ ID NO: 2170252
ugagcacccagaaucacuc

SEQ ID NO: 2170254 - RNA, 19 nt, Artificial Sequence
  Description of Artificial Sequence: Synthetic oligonucleotide
  Sense strand starting at position 274 of SEQ ID NO: 1883109
uggaguuaccacuguaacc

SEQ ID NO: 2170255 - RNA, 19 nt, Artificial Sequence
  Description of Artificial Sequence: Synthetic oligonucleotide
  Antisense strand to SEQ ID NO: 2170254
gguuacagugguaacucca

SEQ ID NO: 2170256 - RNA, 19 nt, Artificial Sequence
  Description of Artificial Sequence: Synthetic oligonucleotide
  Sense strand starting at position 351 of SEQ ID NO: 1883109
aaaggagccucugaaguuu

SEQ ID NO: 2170257 - RNA, 19 nt, Artificial Sequence
  Description of Artificial Sequence: Synthetic oligonucleotide
  Antisense strand to SEQ ID NO: 2170256
aaacuucagaggcuccuuu

SEQ ID NO: 2170258 - RNA, 19 nt, Artificial Sequence
  Description of Artificial Sequence: Synthetic oligonucleotide
  Sense strand starting at position 511 of SEQ ID NO: 1883109
agcuauuagggcuggacau

SEQ ID NO: 2170259 - RNA, 19 nt, Artificial Sequence
  Description of Artificial Sequence: Synthetic oligonucleotide
  Antisense strand to SEQ ID NO: 2170258
auguccagcccuaauagcu

SEQ ID NO: 2170260 - RNA, 19 nt, Artificial Sequence
  Description of Artificial Sequence: Synthetic oligonucleotide
  Sense strand starting at position 590 of SEQ ID NO: 1883109
cgcacacucuucguuugaa

SEQ ID NO: 2170261 - RNA, 19 nt, Artificial Sequence
  Description of Artificial Sequence: Synthetic oligonucleotide
  Antisense strand to SEQ ID NO: 2170260
uucaaacgaagagugugcg

SEQ ID NO: 2170262 - RNA, 19 nt, Artificial Sequence
  Description of Artificial Sequence: Synthetic oligonucleotide
  Sense strand starting at position 591 of SEQ ID NO: 1883109
gcacacucuucguuugaag

SEQ ID NO: 2170263 - RNA, 19 nt, Artificial Sequence
  Description of Artificial Sequence: Synthetic oligonucleotide
  Antisense strand to SEQ ID NO: 2170262
cuucaaacgaagagugugc

SEQ ID NO: 2170264 - RNA, 19 nt, Artificial Sequence
  Description of Artificial Sequence: Synthetic oligonucleotide
  Sense strand starting at position 679 of SEQ ID NO: 1883109
gugaguagaguuuaugaua

SEQ ID NO: 2170265 - RNA, 19 nt, Artificial Sequence
  Description of Artificial Sequence: Synthetic oligonucleotide
  Antisense strand to SEQ ID NO: 2170264
uaucauaaacucuacucac

SEQ ID NO: 2170266 - RNA, 19 nt, Artificial Sequence
  Description of Artificial Sequence: Synthetic oligonucleotide
  Sense strand starting at position 686 of SEQ ID NO: 1883109
gaguuuaugauacguugua

SEQ ID NO: 2170267 - RNA, 19 nt, Artificial Sequence
  Description of Artificial Sequence: Synthetic oligonucleotide
  Antisense strand to SEQ ID NO: 2170266
uacaacguaucauaaacuc

SEQ ID NO: 2170268 - RNA, 19 nt, Artificial Sequence
  Description of Artificial Sequence: Synthetic oligonucleotide
  Sense strand starting at position 687 of SEQ ID NO: 1883109
aguuuaugauacguuguaa

SEQ ID NO: 2170269 - RNA, 19 nt, Artificial Sequence
  Description of Artificial Sequence: Synthetic oligonucleotide
  Antisense strand to SEQ ID NO: 2170268
uuacaacguaucauaaacu

SEQ ID NO: 2170270 - RNA, 19 nt, Artificial Sequence
  Description of Artificial Sequence: Synthetic oligonucleotide
  Sense strand starting at position 695 of SEQ ID NO: 1883109
auacguuguaacuagaaug

SEQ ID NO: 2170271 - RNA, 19 nt, Artificial Sequence
  Description of Artificial Sequence: Synthetic oligonucleotide
  Antisense strand to SEQ ID NO: 2170270
cauucuaguuacaacguau

SEQ ID NO: 2170272 - RNA, 19 nt, Artificial Sequence
  Description of Artificial Sequence: Synthetic oligonucleotide
  Sense strand starting at position 1241 of SEQ ID NO: 1883109
ccauucuggccgcgaagua

SEQ ID NO: 2170273 - RNA, 19 nt, Artificial Sequence
  Description of Artificial Sequence: Synthetic oligonucleotide
  Antisense strand to SEQ ID NO: 2170272
uacuucgcggccagaaugg

SEQ ID NO: 2170274 - RNA, 19 nt, Artificial Sequence
  Description of Artificial Sequence: Synthetic oligonucleotide
  Sense strand starting at position 1266 of SEQ ID NO: 1883109
ugcauucucugcccaagau

SEQ ID NO: 2170275 - RNA, 19 nt, Artificial Sequence
  Description of Artificial Sequence: Synthetic oligonucleotide
  Antisense strand to SEQ ID NO: 2170274
aucuugggcagagaaugca

SEQ ID NO: 2170276 - RNA, 19 nt, Artificial Sequence
  Description of Artificial Sequence: Synthetic oligonucleotide
  Sense strand starting at position 1267 of SEQ ID NO: 1883109
gcauucucugcccaagaua

SEQ ID NO: 2170277 - RNA, 19 nt, Artificial Sequence
  Description of Artificial Sequence: Synthetic oligonucleotide
  Antisense strand to SEQ ID NO: 2170276
uaucuugggcagagaaugc

SEQ ID NO: 2170278 - RNA, 19 nt, Artificial Sequence
  Description of Artificial Sequence: Synthetic oligonucleotide
  Sense strand starting at position 1347 of SEQ ID NO: 1883109
gaagaugcuccuuacggga

SEQ ID NO: 2170279 - RNA, 19 nt, Artificial Sequence
  Description of Artificial Sequence: Synthetic oligonucleotide
  Antisense strand to SEQ ID NO: 2170278
ucccguaaggagcaucuuc

SEQ ID NO: 2170280 - RNA, 19 nt, Artificial Sequence
  Description of Artificial Sequence: Synthetic oligonucleotide
  Sense strand starting at position 2084 of SEQ ID NO: 1883109
cagccuggacucuguaaga

SEQ ID NO: 2170281 - RNA, 19 nt, Artificial Sequence
  Description of Artificial Sequence: Synthetic oligonucleotide
  Antisense strand to SEQ ID NO: 2170280
ucuuacagaguccaggcug

SEQ ID NO: 2170282 - RNA, 19 nt, Artificial Sequence
  Description of Artificial Sequence: Synthetic oligonucleotide
  Sense strand starting at position 2261 of SEQ ID NO: 1883109
gcugaauggucacucugaa

SEQ ID NO: 2170283 - RNA, 19 nt, Artificial Sequence
  Description of Artificial Sequence: Synthetic oligonucleotide
  Antisense strand to SEQ ID NO: 2170282
uucagagugaccauucagc

SEQ ID NO: 2170284 - RNA, 19 nt, Artificial Sequence
  Description of Artificial Sequence: Synthetic oligonucleotide
  Sense strand starting at position 2275 of SEQ ID NO: 1883109
cugaaauucccauguggaa

SEQ ID NO: 2170285 - RNA, 19 nt, Artificial Sequence
  Description of Artificial Sequence: Synthetic oligonucleotide
  Antisense strand to SEQ ID NO: 2170284
uuccacaugggaauuucag

SEQ ID NO: 2170286 - RNA, 19 nt, Artificial Sequence
  Description of Artificial Sequence: Synthetic oligonucleotide
  Sense strand starting at position 2418 of SEQ ID NO: 1883109
ugaggaugccucugaacca

SEQ ID NO: 2170287 - RNA, 19 nt, Artificial Sequence
  Description of Artificial Sequence: Synthetic oligonucleotide
  Antisense strand to SEQ ID NO: 2170286
ugguucagaggcauccuca

SEQ ID NO: 2170288 - RNA, 19 nt, Artificial Sequence
  Description of Artificial Sequence: Synthetic oligonucleotide
  Sense strand starting at position 2503 of SEQ ID NO: 1883109
agagaauaaaccuguguug

SEQ ID NO: 2170289 - RNA, 19 nt, Artificial Sequence
  Description of Artificial Sequence: Synthetic oligonucleotide
  Antisense strand to SEQ ID NO: 2170288
caacacagguuuauucucu

SEQ ID NO: 2170290 - RNA, 19 nt, Artificial Sequence
  Description of Artificial Sequence: Synthetic oligonucleotide
  Sense strand starting at position 2505 of SEQ ID NO: 1883109
agaauaaaccuguguuguc

SEQ ID NO: 2170291 - RNA, 19 nt, Artificial Sequence
  Description of Artificial Sequence: Synthetic oligonucleotide
  Antisense strand to SEQ ID NO: 2170290
gacaacacagguuuauucu

SEQ ID NO: 2170292 - RNA, 19 nt, Artificial Sequence
  Description of Artificial Sequence: Synthetic oligonucleotide
  Sense strand starting at position 2506 of SEQ ID NO: 1883109
gaauaaaccuguguugucu

SEQ ID NO: 2170293 - RNA, 19 nt, Artificial Sequence
  Description of Artificial Sequence: Synthetic oligonucleotide
  Antisense strand to SEQ ID NO: 2170292
agacaacacagguuuauuc

SEQ ID NO: 2170294 - RNA, 19 nt, Artificial Sequence
  Description of Artificial Sequence: Synthetic oligonucleotide
  Sense strand starting at position 2533 of SEQ ID NO: 1883109
gccggugguguccugguaa

SEQ ID NO: 2170295 - RNA, 19 nt, Artificial Sequence
  Description of Artificial Sequence: Synthetic oligonucleotide
  Antisense strand to SEQ ID NO: 2170294
uuaccaggacaccaccggc

SEQ ID NO: 2170296 - RNA, 19 nt, Artificial Sequence
  Description of Artificial Sequence: Synthetic oligonucleotide
  Sense strand starting at position 2587 of SEQ ID NO: 1883109
cuacaaucuuccgugagca

SEQ ID NO: 2170297 - RNA, 19 nt, Artificial Sequence
  Description of Artificial Sequence: Synthetic oligonucleotide
  Antisense strand to SEQ ID NO: 2170296
ugcucacggaagauuguag

SEQ ID NO: 2170298 - RNA, 19 nt, Artificial Sequence
  Description of Artificial Sequence: Synthetic oligonucleotide
  Sense strand starting at position 2588 of SEQ ID NO: 1883109
uacaaucuuccgugagcac

SEQ ID NO: 2170299 - RNA, 19 nt, Artificial Sequence
  Description of Artificial Sequence: Synthetic oligonucleotide
  Antisense strand to SEQ ID NO: 2170298
gugcucacggaagauugua

SEQ ID NO: 2170300 - RNA, 19 nt, Artificial Sequence
  Description of Artificial Sequence: Synthetic oligonucleotide
  Sense strand starting at position 2595 of SEQ ID NO: 1883109
uuccgugagcacgaagaaa

SEQ ID NO: 2170301 - RNA, 19 nt, Artificial Sequence
  Description of Artificial Sequence: Synthetic oligonucleotide
  Antisense strand to SEQ ID NO: 2170300
uuucuucgugcucacggaa

SEQ ID NO: 2170302 - RNA, 19 nt, Artificial Sequence
  Description of Artificial Sequence: Synthetic oligonucleotide
  Sense strand starting at position 2606 of SEQ ID NO: 1883109
cgaagaaacucauacucau

SEQ ID NO: 2170303 - RNA, 19 nt, Artificial Sequence
  Description of Artificial Sequence: Synthetic oligonucleotide
  Antisense strand to SEQ ID NO: 2170302
augaguaugaguuucuucg

SEQ ID NO: 2170304 - RNA, 19 nt, Artificial Sequence
  Description of Artificial Sequence: Synthetic oligonucleotide
  Sense strand starting at position 2707 of SEQ ID NO: 1883109
gugucuuucuccucuuuau

SEQ ID NO: 2170305 - RNA, 19 nt, Artificial Sequence
  Description of Artificial Sequence: Synthetic oligonucleotide
  Antisense strand to SEQ ID NO: 2170304
auaaagaggagaaagacac

SEQ ID NO: 2170306 - RNA, 19 nt, Artificial Sequence
  Description of Artificial Sequence: Synthetic oligonucleotide
  Sense strand starting at position 2779 of SEQ ID NO: 1883109
aaaugcaucugagugagga

SEQ ID NO: 2170307 - RNA, 19 nt, Artificial Sequence
  Description of Artificial Sequence: Synthetic oligonucleotide
  Antisense strand to SEQ ID NO: 2170306
uccucacucagaugcauuu

SEQ ID NO: 2170308 - RNA, 19 nt, Artificial Sequence
  Description of Artificial Sequence: Synthetic oligonucleotide
  Sense strand starting at position 2780 of SEQ ID NO: 1883109
aaugcaucugagugaggau

SEQ ID NO: 2170309 - RNA, 19 nt, Artificial Sequence
  Description of Artificial Sequence: Synthetic oligonucleotide
  Antisense strand to SEQ ID NO: 2170308
auccucacucagaugcauu

SEQ ID NO: 2170310 - RNA, 19 nt, Artificial Sequence
  Description of Artificial Sequence: Synthetic oligonucleotide
  Sense strand starting at position 2781 of SEQ ID NO: 1883109
augcaucugagugaggauu

SEQ ID NO: 2170311 - RNA, 19 nt, Artificial Sequence
  Description of Artificial Sequence: Synthetic oligonucleotide
  Antisense strand to SEQ ID NO: 2170310
aauccucacucagaugcau

SEQ ID NO: 2170312 - RNA, 19 nt, Artificial Sequence
  Description of Artificial Sequence: Synthetic oligonucleotide
  Sense strand starting at position 2789 of SEQ ID NO: 1883109
gagugaggauuccuccgua

SEQ ID NO: 2170313 - RNA, 19 nt, Artificial Sequence
  Description of Artificial Sequence: Synthetic oligonucleotide
  Antisense strand to SEQ ID NO: 2170312
uacggaggaauccucacuc

SEQ ID NO: 2170314 - RNA, 19 nt, Artificial Sequence
  Description of Artificial Sequence: Synthetic oligonucleotide
  Sense strand starting at position 2792 of SEQ ID NO: 1883109
ugaggauuccuccguaacc

SEQ ID NO: 2170315 - RNA, 19 nt, Artificial Sequence
  Description of Artificial Sequence: Synthetic oligonucleotide
  Antisense strand to SEQ ID NO: 2170314
gguuacggaggaauccuca

SEQ ID NO: 2170316 - RNA, 19 nt, Artificial Sequence
  Description of Artificial Sequence: Synthetic oligonucleotide
  Sense strand starting at position 2794 of SEQ ID NO: 1883109
aggauuccuccguaacccu

SEQ ID NO: 2170317 - RNA, 19 nt, Artificial Sequence
  Description of Artificial Sequence: Synthetic oligonucleotide
  Antisense strand to SEQ ID NO: 2170316
aggguuacggaggaauccu

SEQ ID NO: 2170318 - RNA, 19 nt, Artificial Sequence
  Description of Artificial Sequence: Synthetic oligonucleotide
  Sense strand starting at position 3482 of SEQ ID NO: 1883109
cuuguaaacucguuucuga

SEQ ID NO: 2170319 - RNA, 19 nt, Artificial Sequence
  Description of Artificial Sequence: Synthetic oligonucleotide
  Antisense strand to SEQ ID NO: 2170318
ucagaaacgaguuuacaag

SEQ ID NO: 2170320 - RNA, 19 nt, Artificial Sequence
  Description of Artificial Sequence: Synthetic oligonucleotide
  Sense strand starting at position 3489 of SEQ ID NO: 1883109
acucguuucugauuccaac

SEQ ID NO: 2170321 - RNA, 19 nt, Artificial Sequence
  Description of Artificial Sequence: Synthetic oligonucleotide
  Antisense strand to SEQ ID NO: 2170320
guuggaaucagaaacgagu

SEQ ID NO: 2170322 - RNA, 19 nt, Artificial Sequence
  Description of Artificial Sequence: Synthetic oligonucleotide
  Sense strand starting at position 3516 of SEQ ID NO: 1883109
ugcaucuguuggcuggaau

SEQ ID NO: 2170323 - RNA, 19 nt, Artificial Sequence
  Description of Artificial Sequence: Synthetic oligonucleotide
  Antisense strand to SEQ ID NO: 2170322
auuccagccaacagaugca

SEQ ID NO: 2170324 - RNA, 19 nt, Artificial Sequence
  Description of Artificial Sequence: Synthetic oligonucleotide
  Sense strand starting at position 3517 of SEQ ID NO: 1883109
gcaucuguuggcuggaauu

SEQ ID NO: 2170325 - RNA, 19 nt, Artificial Sequence
  Description of Artificial Sequence: Synthetic oligonucleotide
  Antisense strand to SEQ ID NO: 2170324
aauuccagccaacagaugc

SEQ ID NO: 2170326 - RNA, 19 nt, Artificial Sequence
  Description of Artificial Sequence: Synthetic oligonucleotide
  Sense strand starting at position 3693 of SEQ ID NO: 1883109
ggcugcaauucuuaaagaa

SEQ ID NO: 2170327 - RNA, 19 nt, Artificial Sequence
  Description of Artificial Sequence: Synthetic oligonucleotide
  Antisense strand to SEQ ID NO: 2170326
uucuuuaagaauugcagcc

SEQ ID NO: 2170328 - RNA, 19 nt, Artificial Sequence
  Description of Artificial Sequence: Synthetic oligonucleotide
  Sense strand starting at position 351 of SEQ ID NO: 1883110
gacgcccagcuuugaaauu

SEQ ID NO: 2170329 - RNA, 19 nt, Artificial Sequence
  Description of Artificial Sequence: Synthetic oligonucleotide
  Antisense strand to SEQ ID NO: 2170328
aauuucaaagcugggcguc

SEQ ID NO: 2170330 - RNA, 19 nt, Artificial Sequence
  Description of Artificial Sequence: Synthetic oligonucleotide
  Sense strand starting at position 505 of SEQ ID NO: 1883110
ucagaauggucugggugga

SEQ ID NO: 2170331 - RNA, 19 nt, Artificial Sequence
  Description of Artificial Sequence: Synthetic oligonucleotide
  Antisense strand to SEQ ID NO: 2170330
uccacccagaccauucuga

SEQ ID NO: 2170332 - RNA, 19 nt, Artificial Sequence
  Description of Artificial Sequence: Synthetic oligonucleotide
  Sense strand starting at position 552 of SEQ ID NO: 1883110
ggcucaaggucugggugaa

SEQ ID NO: 2170333 - RNA, 19 nt, Artificial Sequence
  Description of Artificial Sequence: Synthetic oligonucleotide
  Antisense strand to SEQ ID NO: 2170332
uucacccagaccuugagcc

SEQ ID NO: 2170334 - RNA, 19 nt, Artificial Sequence
  Description of Artificial Sequence: Synthetic oligonucleotide
  Sense strand starting at position 553 of SEQ ID NO: 1883110
gcucaaggucugggugaau

SEQ ID NO: 2170335 - RNA, 19 nt, Artificial Sequence
  Description of Artificial Sequence: Synthetic oligonucleotide
  Antisense strand to SEQ ID NO: 2170334
auucacccagaccuugagc

SEQ ID NO: 2170336 - RNA, 19 nt, Artificial Sequence
  Description of Artificial Sequence: Synthetic oligonucleotide
  Sense strand starting at position 747 of SEQ ID NO: 1883110
ccuguacuccuggauguga

SEQ ID NO: 2170337 - RNA, 19 nt, Artificial Sequence
  Description of Artificial Sequence: Synthetic oligonucleotide
  Antisense strand to SEQ ID NO: 2170336
ucacauccaggaguacagg

SEQ ID NO: 2170338 - RNA, 19 nt, Artificial Sequence
  Description of Artificial Sequence: Synthetic oligonucleotide
  Sense strand starting at position 749 of SEQ ID NO: 1883110
uguacuccuggaugugauu

SEQ ID NO: 2170339 - RNA, 19 nt, Artificial Sequence
  Description of Artificial Sequence: Synthetic oligonucleotide
  Antisense strand to SEQ ID NO: 2170338
aaucacauccaggaguaca

SEQ ID NO: 2170340 - RNA, 19 nt, Artificial Sequence
  Description of Artificial Sequence: Synthetic oligonucleotide
  Sense strand starting at position 766 of SEQ ID NO: 1883110
uuugcuaauuagggucaau

SEQ ID NO: 2170341 - RNA, 19 nt, Artificial Sequence
  Description of Artificial Sequence: Synthetic oligonucleotide
  Antisense strand to SEQ ID NO: 2170340
auugacccuaauuagcaaa

SEQ ID NO: 2170342 - RNA, 19 nt, Artificial Sequence
  Description of Artificial Sequence: Synthetic oligonucleotide
  Sense strand starting at position 841 of SEQ ID NO: 1883110
ugucccaaacauugguaaa

SEQ ID NO: 2170343 - RNA, 19 nt, Artificial Sequence
  Description of Artificial Sequence: Synthetic oligonucleotide
  Antisense strand to SEQ ID NO: 2170342
uuuaccaauguuugggaca

SEQ ID NO: 2170344 - RNA, 19 nt, Artificial Sequence
  Description of Artificial Sequence: Synthetic oligonucleotide
  Sense strand starting at position 870 of SEQ ID NO: 1883110
uguuguuuaucugagauuc

SEQ ID NO: 2170345 - RNA, 19 nt, Artificial Sequence
  Description of Artificial Sequence: Synthetic oligonucleotide
  Antisense strand to SEQ ID NO: 2170344
gaaucucagauaaacaaca

SEQ ID NO: 2170346 - RNA, 19 nt, Artificial Sequence
  Description of Artificial Sequence: Synthetic oligonucleotide
  Sense strand starting at position 976 of SEQ ID NO: 1883110
caaaucugugucggacaca

SEQ ID NO: 2170347 - RNA, 19 nt, Artificial Sequence
  Description of Artificial Sequence: Synthetic oligonucleotide
  Antisense strand to SEQ ID NO: 2170346
uguguccgacacagauuug

SEQ ID NO: 2170348 - RNA, 19 nt, Artificial Sequence
  Description of Artificial Sequence: Synthetic oligonucleotide
  Sense strand starting at position 1019 of SEQ ID NO: 1883110
gguuguaccuggugacuca

SEQ ID NO: 2170349 - RNA, 19 nt, Artificial Sequence
  Description of Artificial Sequence: Synthetic oligonucleotide
  Antisense strand to SEQ ID NO: 2170348
ugagucaccagguacaacc

SEQ ID NO: 2170350 - RNA, 19 nt, Artificial Sequence
  Description of Artificial Sequence: Synthetic oligonucleotide
  Sense strand starting at position 1026 of SEQ ID NO: 1883110
ccuggugacucaggacauu

SEQ ID NO: 2170351 - RNA, 19 nt, Artificial Sequence
  Description of Artificial Sequence: Synthetic oligonucleotide
  Antisense strand to SEQ ID NO: 2170350
aauguccugagucaccagg

SEQ ID NO: 2170352 - RNA, 19 nt, Artificial Sequence
  Description of Artificial Sequence: Synthetic oligonucleotide
  Sense strand starting at position 1317 of SEQ ID NO: 1883110
cuucccugguucugggaaa

SEQ ID NO: 2170353 - RNA, 19 nt, Artificial Sequence
  Description of Artificial Sequence: Synthetic oligonucleotide
  Antisense strand to SEQ ID NO: 2170352
uuucccagaaccagggaag

SEQ ID NO: 2170354 - RNA, 19 nt, Artificial Sequence
  Description of Artificial Sequence: Synthetic oligonucleotide
  Sense strand starting at position 1507 of SEQ ID NO: 1883110
gagggagccuuuggagaaa

SEQ ID NO: 2170355 - RNA, 19 nt, Artificial Sequence
  Description of Artificial Sequence: Synthetic oligonucleotide
  Antisense strand to SEQ ID NO: 2170354
uuucuccaaaggcucccuc

SEQ ID NO: 2170356 - RNA, 19 nt, Artificial Sequence
  Description of Artificial Sequence: Synthetic oligonucleotide
  Sense strand starting at position 1510 of SEQ ID NO: 1883110
ggagccuuuggagaaaugu

SEQ ID NO: 2170357 - RNA, 19 nt, Artificial Sequence
  Description of Artificial Sequence: Synthetic oligonucleotide
  Antisense strand to SEQ ID NO: 2170356
acauuucuccaaaggcucc

SEQ ID NO: 2170358 - RNA, 19 nt, Artificial Sequence
  Description of Artificial Sequence: Synthetic oligonucleotide
  Sense strand starting at position 1520 of SEQ ID NO: 1883110
gagaaauguugccugacgu

SEQ ID NO: 2170359 - RNA, 19 nt, Artificial Sequence
  Description of Artificial Sequence: Synthetic oligonucleotide
  Antisense strand to SEQ ID NO: 2170358
acgucaggcaacauuucuc

SEQ ID NO: 2170360 - RNA, 19 nt, Artificial Sequence
  Description of Artificial Sequence: Synthetic oligonucleotide
  Sense strand starting at position 1521 of SEQ ID NO: 1883110
agaaauguugccugacguc

SEQ ID NO: 2170361 - RNA, 19 nt, Artificial Sequence
  Description of Artificial Sequence: Synthetic oligonucleotide
  Antisense strand to SEQ ID NO: 2170360
gacgucaggcaacauuucu

SEQ ID NO: 2170362 - RNA, 19 nt, Artificial Sequence
  Description of Artificial Sequence: Synthetic oligonucleotide
  Sense strand starting at position 1984 of SEQ ID NO: 1883110
ggacuuccgccuuguaaug

SEQ ID NO: 2170363 - RNA, 19 nt, Artificial Sequence
  Description of Artificial Sequence: Synthetic oligonucleotide
  Antisense strand to SEQ ID NO: 2170362
cauuacaaggcggaagucc

SEQ ID NO: 2170364 - RNA, 19 nt, Artificial Sequence
  Description of Artificial Sequence: Synthetic oligonucleotide
  Sense strand starting at position 1994 of SEQ ID NO: 1883110
cuuguaaugacaugucgcu

SEQ ID NO: 2170365 - RNA, 19 nt, Artificial Sequence
  Description of Artificial Sequence: Synthetic oligonucleotide
  Antisense strand to SEQ ID NO: 2170364
agcgacaugucauuacaag

SEQ ID NO: 2170366 - RNA, 19 nt, Artificial Sequence
  Description of Artificial Sequence: Synthetic oligonucleotide
  Sense strand starting at position 1999 of SEQ ID NO: 1883110
aaugacaugucgcugauuu

SEQ ID NO: 2170367 - RNA, 19 nt, Artificial Sequence
  Description of Artificial Sequence: Synthetic oligonucleotide
  Antisense strand to SEQ ID NO: 2170366
aaaucagcgacaugucauu

SEQ ID NO: 2170368 - RNA, 19 nt, Artificial Sequence
  Description of Artificial Sequence: Synthetic oligonucleotide
  Sense strand starting at position 2000 of SEQ ID NO: 1883110
augacaugucgcugauuua

SEQ ID NO: 2170369 - RNA, 19 nt, Artificial Sequence
  Description of Artificial Sequence: Synthetic oligonucleotide
  Antisense strand to SEQ ID NO: 2170368
uaaaucagcgacaugucau

SEQ ID NO: 2170370 - RNA, 19 nt, Artificial Sequence
  Description of Artificial Sequence: Synthetic oligonucleotide
  Sense strand starting at position 2036 of SEQ ID NO: 1883110
ccagcucugguuugugcaa

SEQ ID NO: 2170371 - RNA, 19 nt, Artificial Sequence
  Description of Artificial Sequence: Synthetic oligonucleotide
  Antisense strand to SEQ ID NO: 2170370
uugcacaaaccagagcugg

SEQ ID NO: 2170372 - RNA, 19 nt, Artificial Sequence
  Description of Artificial Sequence: Synthetic oligonucleotide
  Sense strand starting at position 2053 of SEQ ID NO: 1883110
aagucuggugcguucuuau

SEQ ID NO: 2170373 - RNA, 19 nt, Artificial Sequence
  Description of Artificial Sequence: Synthetic oligonucleotide
  Antisense strand to SEQ ID NO: 2170372
auaagaacgcaccagacuu

SEQ ID NO: 2170374 - RNA, 19 nt, Artificial Sequence
  Description of Artificial Sequence: Synthetic oligonucleotide
  Sense strand starting at position 2064 of SEQ ID NO: 1883110
guucuuaucucccuuguau

SEQ ID NO: 2170375 - RNA, 19 nt, Artificial Sequence
  Description of Artificial Sequence: Synthetic oligonucleotide
  Antisense strand to SEQ ID NO: 2170374
auacaagggagauaagaac

SEQ ID NO: 2170376 - RNA, 19 nt, Artificial Sequence
  Description of Artificial Sequence: Synthetic oligonucleotide
  Sense strand starting at position 2107 of SEQ ID NO: 1883110
cugguauguugagacaucu

SEQ ID NO: 2170377 - RNA, 19 nt, Artificial Sequence
  Description of Artificial Sequence: Synthetic oligonucleotide
  Antisense strand to SEQ ID NO: 2170376
agaugucucaacauaccag

SEQ ID NO: 2170378 - RNA, 19 nt, Artificial Sequence
  Description of Artificial Sequence: Synthetic oligonucleotide
  Sense strand starting at position 2113 of SEQ ID NO: 1883110
uguugagacaucuggagcu

SEQ ID NO: 2170379 - RNA, 19 nt, Artificial Sequence
  Description of Artificial Sequence: Synthetic oligonucleotide
  Antisense strand to SEQ ID NO: 2170378
agcuccagaugucucaaca

SEQ ID NO: 2170380 - RNA, 19 nt, Artificial Sequence
  Description of Artificial Sequence: Synthetic oligonucleotide
  Sense strand starting at position 2551 of SEQ ID NO: 1883110
ggagcauccuaaucacaaa

SEQ ID NO: 2170381 - RNA, 19 nt, Artificial Sequence
  Description of Artificial Sequence: Synthetic oligonucleotide
  Antisense strand to SEQ ID NO: 2170380
uuugugauuaggaugcucc

SEQ ID NO: 2170382 - RNA, 19 nt, Artificial Sequence
  Description of Artificial Sequence: Synthetic oligonucleotide
  Sense strand starting at position 2819 of SEQ ID NO: 1883110
cugugugucucucaaguag

SEQ ID NO: 2170383 - RNA, 19 nt, Artificial Sequence
  Description of Artificial Sequence: Synthetic oligonucleotide
  Antisense strand to SEQ ID NO: 2170382
cuacuugagagacacacag

SEQ ID NO: 2170384 - RNA, 19 nt, Artificial Sequence
  Description of Artificial Sequence: Synthetic oligonucleotide
  Sense strand starting at position 2823 of SEQ ID NO: 1883110
gugucucucaaguagaagu

SEQ ID NO: 2170385 - RNA, 19 nt, Artificial Sequence
  Description of Artificial Sequence: Synthetic oligonucleotide
  Antisense strand to SEQ ID NO: 2170384
acuucuacuugagagacac

SEQ ID NO: 2170386 - RNA, 19 nt, Artificial Sequence
  Description of Artificial Sequence: Synthetic oligonucleotide
  Sense strand starting at position 2920 of SEQ ID NO: 1883110
cgauuacaggugugaacua

SEQ ID NO: 2170387 - RNA, 19 nt, Artificial Sequence
  Description of Artificial Sequence: Synthetic oligonucleotide
  Antisense strand to SEQ ID NO: 2170386
uaguucacaccuguaaucg

SEQ ID NO: 2170388 - RNA, 19 nt, Artificial Sequence
  Description of Artificial Sequence: Synthetic oligonucleotide
  Sense strand starting at position 2969 of SEQ ID NO: 1883110
gugggcugccuagaaacau

SEQ ID NO: 2170389 - RNA, 19 nt, Artificial Sequence
  Description of Artificial Sequence: Synthetic oligonucleotide
  Antisense strand to SEQ ID NO: 2170388
auguuucuaggcagcccac

SEQ ID NO: 2170390 - RNA, 19 nt, Artificial Sequence
  Description of Artificial Sequence: Synthetic oligonucleotide
  Sense strand starting at position 3416 of SEQ ID NO: 1883110
ucaugucuccuccagaaug

SEQ ID NO: 2170391 - RNA, 19 nt, Artificial Sequence
  Description of Artificial Sequence: Synthetic oligonucleotide
  Antisense strand to SEQ ID NO: 2170390
cauucuggaggagacauga

SEQ ID NO: 2170392 - RNA, 19 nt, Artificial Sequence
  Description of Artificial Sequence: Synthetic oligonucleotide
  Sense strand starting at position 3418 of SEQ ID NO: 1883110
augucuccuccagaaugau

SEQ ID NO: 2170393 - RNA, 19 nt, Artificial Sequence
  Description of Artificial Sequence: Synthetic oligonucleotide
  Antisense strand to SEQ ID NO: 2170392
aucauucuggaggagacau

SEQ ID NO: 2170394 - RNA, 19 nt, Artificial Sequence
  Description of Artificial Sequence: Synthetic oligonucleotide
  Sense strand starting at position 3427 of SEQ ID NO: 1883110
ccagaaugaugcucuuaac

SEQ ID NO: 2170395 - RNA, 19 nt, Artificial Sequence
  Description of Artificial Sequence: Synthetic oligonucleotide
  Antisense strand to SEQ ID NO: 2170394
guuaagagcaucauucugg

SEQ ID NO: 2170396 - RNA, 19 nt, Artificial Sequence
  Description of Artificial Sequence: Synthetic oligonucleotide
  Sense strand starting at position 3562 of SEQ ID NO: 1883110
ugaagucacucacauuugu

SEQ ID NO: 2170397 - RNA, 19 nt, Artificial Sequence
  Description of Artificial Sequence: Synthetic oligonucleotide
  Antisense strand to SEQ ID NO: 2170396
acaaaugugagugacuuca

SEQ ID NO: 2170398 - RNA, 19 nt, Artificial Sequence
  Description of Artificial Sequence: Synthetic oligonucleotide
  Sense strand starting at position 3706 of SEQ ID NO: 1883110
agccauucucuccggcuua

SEQ ID NO: 2170399 - RNA, 19 nt, Artificial Sequence
  Description of Artificial Sequence: Synthetic oligonucleotide
  Antisense strand to SEQ ID NO: 2170398
uaagccggagagaauggcu

SEQ ID NO: 2170400 - RNA, 19 nt, Artificial Sequence
  Description of Artificial Sequence: Synthetic oligonucleotide
  Sense strand starting at position 3737 of SEQ ID NO: 1883110
caggaugggauguguugau

SEQ ID NO: 2170401 - RNA, 19 nt, Artificial Sequence
  Description of Artificial Sequence: Synthetic oligonucleotide
  Antisense strand to SEQ ID NO: 2170400
aucaacacaucccauccug

SEQ ID NO: 2170402 - RNA, 19 nt, Artificial Sequence
  Description of Artificial Sequence: Synthetic oligonucleotide
  Sense strand starting at position 235 of SEQ ID NO: 1883111
ugaguaucauauuugcuuu

SEQ ID NO: 2170403 - RNA, 19 nt, Artificial Sequence
  Description of Artificial Sequence: Synthetic oligonucleotide
  Antisense strand to SEQ ID NO: 2170402
aaagcaaauaugauacuca

SEQ ID NO: 2170404 - RNA, 19 nt, Artificial Sequence
  Description of Artificial Sequence: Synthetic oligonucleotide
  Sense strand starting at position 512 of SEQ ID NO: 1883111
agguuaaacuaugcacagu

SEQ ID NO: 2170405 - RNA, 19 nt, Artificial Sequence
  Description of Artificial Sequence: Synthetic oligonucleotide
  Antisense strand to SEQ ID NO: 2170404
acugugcauaguuuaaccu

SEQ ID NO: 2170406 - RNA, 19 nt, Artificial Sequence
  Description of Artificial Sequence: Synthetic oligonucleotide
  Sense strand starting at position 638 of SEQ ID NO: 1883111
uuuaaaucgcuggguaaua

SEQ ID NO: 2170407 - RNA, 19 nt, Artificial Sequence
  Description of Artificial Sequence: Synthetic oligonucleotide
  Antisense strand to SEQ ID NO: 2170406
uauuacccagcgauuuaaa

SEQ ID NO: 2170408 - RNA, 19 nt, Artificial Sequence
  Description of Artificial Sequence: Synthetic oligonucleotide
  Sense strand starting at position 692 of SEQ ID NO: 1883111
gggagccguuugucaaaga

SEQ ID NO: 2170409 - RNA, 19 nt, Artificial Sequence
  Description of Artificial Sequence: Synthetic oligonucleotide
  Antisense strand to SEQ ID NO: 2170408
ucuuugacaaacggcuccc

SEQ ID NO: 2170410 - RNA, 19 nt, Artificial Sequence
  Description of Artificial Sequence: Synthetic oligonucleotide
  Sense strand starting at position 697 of SEQ ID NO: 1883111
ccguuugucaaagagaaag

SEQ ID NO: 2170411 - RNA, 19 nt, Artificial Sequence
  Description of Artificial Sequence: Synthetic oligonucleotide
  Antisense strand to SEQ ID NO: 2170410
cuuucucuuugacaaacgg

SEQ ID NO: 2170412 - RNA, 19 nt, Artificial Sequence
  Description of Artificial Sequence: Synthetic oligonucleotide
  Sense strand starting at position 781 of SEQ ID NO: 1883111
ugguucucuccuggaaaug

SEQ ID NO: 2170413 - RNA, 19 nt, Artificial Sequence
  Description of Artificial Sequence: Synthetic oligonucleotide
  Antisense strand to SEQ ID NO: 2170412
cauuuccaggagagaacca

SEQ ID NO: 2170414 - RNA, 19 nt, Artificial Sequence
  Description of Artificial Sequence: Synthetic oligonucleotide
  Sense strand starting at position 911 of SEQ ID NO: 1883111
caaagaguuggacgggaua

SEQ ID NO: 2170415 - RNA, 19 nt, Artificial Sequence
  Description of Artificial Sequence: Synthetic oligonucleotide
  Antisense strand to SEQ ID NO: 2170414
uaucccguccaacucuuug

SEQ ID NO: 2170416 - RNA, 19 nt, Artificial Sequence
  Description of Artificial Sequence: Synthetic oligonucleotide
  Sense strand starting at position 956 of SEQ ID NO: 1883111
aaugaugagcgagguaaca

SEQ ID NO: 2170417 - RNA, 19 nt, Artificial Sequence
  Description of Artificial Sequence: Synthetic oligonucleotide
  Antisense strand to SEQ ID NO: 2170416
uguuaccucgcucaucauu

SEQ ID NO: 2170418 - RNA, 19 nt, Artificial Sequence
  Description of Artificial Sequence: Synthetic oligonucleotide
  Sense strand starting at position 958 of SEQ ID NO: 1883111
ugaugagcgagguaacauu

SEQ ID NO: 2170419 - RNA, 19 nt, Artificial Sequence
  Description of Artificial Sequence: Synthetic oligonucleotide
  Antisense strand to SEQ ID NO: 2170418
aauguuaccucgcucauca

SEQ ID NO: 2170420 - RNA, 19 nt, Artificial Sequence
  Description of Artificial Sequence: Synthetic oligonucleotide
  Sense strand starting at position 993 of SEQ ID NO: 1883111
agaacagcucaguaauggu

SEQ ID NO: 2170421 - RNA, 19 nt, Artificial Sequence
  Description of Artificial Sequence: Synthetic oligonucleotide
  Antisense strand to SEQ ID NO: 2170420
accauuacugagcuguucu

SEQ ID NO: 2170422 - RNA, 19 nt, Artificial Sequence
  Description of Artificial Sequence: Synthetic oligonucleotide
  Sense strand starting at position 1003 of SEQ ID NO: 1883111
aguaaugguuuccuccaca

SEQ ID NO: 2170423 - RNA, 19 nt, Artificial Sequence
  Description of Artificial Sequence: Synthetic oligonucleotide
  Antisense strand to SEQ ID NO: 2170422
uguggaggaaaccauuacu

SEQ ID NO: 2170424 - RNA, 19 nt, Artificial Sequence
  Description of Artificial Sequence: Synthetic oligonucleotide
  Sense strand starting at position 1047 of SEQ ID NO: 1883111
gacgcuuaugcagagucua

SEQ ID NO: 2170425 - RNA, 19 nt, Artificial Sequence
  Description of Artificial Sequence: Synthetic oligonucleotide
  Antisense strand to SEQ ID NO: 2170424
uagacucugcauaagcguc

SEQ ID NO: 2170426 - RNA, 19 nt, Artificial Sequence
  Description of Artificial Sequence: Synthetic oligonucleotide
  Sense strand starting at position 1317 of SEQ ID NO: 1883111
gcgagaaugcgugcuugug

SEQ ID NO: 2170427 - RNA, 19 nt, Artificial Sequence
  Description of Artificial Sequence: Synthetic oligonucleotide
  Antisense strand to SEQ ID NO: 2170426
cacaagcacgcauucucgc

SEQ ID NO: 2170428 - RNA, 19 nt, Artificial Sequence
  Description of Artificial Sequence: Synthetic oligonucleotide
  Sense strand starting at position 1321 of SEQ ID NO: 1883111
gaaugcgugcuugugguua

SEQ ID NO: 2170429 - RNA, 19 nt, Artificial Sequence
  Description of Artificial Sequence: Synthetic oligonucleotide
  Antisense strand to SEQ ID NO: 2170428
uaaccacaagcacgcauuc

SEQ ID NO: 2170430 - RNA, 19 nt, Artificial Sequence
  Description of Artificial Sequence: Synthetic oligonucleotide
  Sense strand starting at position 1585 of SEQ ID NO: 1883111
ucguuacuccuggaaacca

SEQ ID NO: 2170431 - RNA, 19 nt, Artificial Sequence
  Description of Artificial Sequence: Synthetic oligonucleotide
  Antisense strand to SEQ ID NO: 2170430
ugguuuccaggaguaacga

SEQ ID NO: 2170432 - RNA, 19 nt, Artificial Sequence
  Description of Artificial Sequence: Synthetic oligonucleotide
  Sense strand starting at position 1662 of SEQ ID NO: 1883111
ggacgagcucuuggaugaa

SEQ ID NO: 2170433 - RNA, 19 nt, Artificial Sequence
  Description of Artificial Sequence: Synthetic oligonucleotide
  Antisense strand to SEQ ID NO: 2170432
uucauccaagagcucgucc

SEQ ID NO: 2170434 - RNA, 19 nt, Artificial Sequence
  Description of Artificial Sequence: Synthetic oligonucleotide
  Sense strand starting at position 1677 of SEQ ID NO: 1883111
ugaagucgaguccaaguuu

SEQ ID NO: 2170435 - RNA, 19 nt, Artificial Sequence
  Description of Artificial Sequence: Synthetic oligonucleotide
  Antisense strand to SEQ ID NO: 2170434
aaacuuggacucgacuuca

SEQ ID NO: 2170436 - RNA, 19 nt, Artificial Sequence
  Description of Artificial Sequence: Synthetic oligonucleotide
  Sense strand starting at position 1788 of SEQ ID NO: 1883111
gaaagagacgcucagguua

SEQ ID NO: 2170437 - RNA, 19 nt, Artificial Sequence
  Description of Artificial Sequence: Synthetic oligonucleotide
  Antisense strand to SEQ ID NO: 2170436
uaaccugagcgucucuuuc

SEQ ID NO: 2170438 - RNA, 19 nt, Artificial Sequence
  Description of Artificial Sequence: Synthetic oligonucleotide
  Sense strand starting at position 2313 of SEQ ID NO: 1883111
ggucaauccuauuugucuu

SEQ ID NO: 2170439 - RNA, 19 nt, Artificial Sequence
  Description of Artificial Sequence: Synthetic oligonucleotide
  Antisense strand to SEQ ID NO: 2170438
aagacaaauaggauugacc

SEQ ID NO: 2170440 - RNA, 19 nt, Artificial Sequence
  Description of Artificial Sequence: Synthetic oligonucleotide
  Sense strand starting at position 2495 of SEQ ID NO: 1883111
guaaucugggauuacguaa

SEQ ID NO: 2170441 - RNA, 19 nt, Artificial Sequence
  Description of Artificial Sequence: Synthetic oligonucleotide
  Antisense strand to SEQ ID NO: 2170440
uuacguaaucccagauuac

SEQ ID NO: 2170442 - RNA, 19 nt, Artificial Sequence
  Description of Artificial Sequence: Synthetic oligonucleotide
  Sense strand starting at position 2700 of SEQ ID NO: 1883111
gaguuaagaugagauuaaa

SEQ ID NO: 2170443 - RNA, 19 nt, Artificial Sequence
  Description of Artificial Sequence: Synthetic oligonucleotide
  Antisense strand to SEQ ID NO: 2170442
uuuaaucucaucuuaacuc

SEQ ID NO: 2170444 - RNA, 19 nt, Artificial Sequence
  Description of Artificial Sequence: Synthetic oligonucleotide
  Sense strand starting at position 2783 of SEQ ID NO: 1883111
ccuaguuaagggugccaga

SEQ ID NO: 2170445 - RNA, 19 nt, Artificial Sequence
  Description of Artificial Sequence: Synthetic oligonucleotide
  Antisense strand to SEQ ID NO: 2170444
ucuggcacccuuaacuagg

SEQ ID NO: 2170446 - RNA, 19 nt, Artificial Sequence
  Description of Artificial Sequence: Synthetic oligonucleotide
  Sense strand starting at position 2792 of SEQ ID NO: 1883111
gggugccagacauacauau

SEQ ID NO: 2170447 - RNA, 19 nt, Artificial Sequence
  Description of Artificial Sequence: Synthetic oligonucleotide
  Antisense strand to SEQ ID NO: 2170446
auauguaugucuggcaccc

SEQ ID NO: 2170448 - RNA, 19 nt, Artificial Sequence
  Description of Artificial Sequence: Synthetic oligonucleotide
  Sense strand starting at position 2809 of SEQ ID NO: 1883111
auggaaauuuaaggacauu

SEQ ID NO: 2170449 - RNA, 19 nt, Artificial Sequence
  Description of Artificial Sequence: Synthetic oligonucleotide
  Antisense strand to SEQ ID NO: 2170448
aauguccuuaaauuuccau

SEQ ID NO: 2170450 - RNA, 19 nt, Artificial Sequence
  Description of Artificial Sequence: Synthetic oligonucleotide
  Sense strand starting at position 3019 of SEQ ID NO: 1883111
uugccucuugccuagaaua

SEQ ID NO: 2170451 - RNA, 19 nt, Artificial Sequence
  Description of Artificial Sequence: Synthetic oligonucleotide
  Antisense strand to SEQ ID NO: 2170450
uauucuaggcaagaggcaa

SEQ ID NO: 2170452 - RNA, 19 nt, Artificial Sequence
  Description of Artificial Sequence: Synthetic oligonucleotide
  Sense strand starting at position 3021 of SEQ ID NO: 1883111
gccucuugccuagaauauu

SEQ ID NO: 2170453 - RNA, 19 nt, Artificial Sequence
  Description of Artificial Sequence: Synthetic oligonucleotide
  Antisense strand to SEQ ID NO: 2170452
aauauucuaggcaagaggc

SEQ ID NO: 2170454 - RNA, 19 nt, Artificial Sequence
  Description of Artificial Sequence: Synthetic oligonucleotide
  Sense strand starting at position 3039 of SEQ ID NO: 1883111
uuuggaaacgcuugugaaa

SEQ ID NO: 2170455 - RNA, 19 nt, Artificial Sequence
  Description of Artificial Sequence: Synthetic oligonucleotide
  Antisense strand to SEQ ID NO: 2170454
uuucacaagcguuuccaaa

SEQ ID NO: 2170456 - RNA, 19 nt, Artificial Sequence
  Description of Artificial Sequence: Synthetic oligonucleotide
  Sense strand starting at position 3068 of SEQ ID NO: 1883111
gcaacuuuggaucaaucua

SEQ ID NO: 2170457 - RNA, 19 nt, Artificial Sequence
  Description of Artificial Sequence: Synthetic oligonucleotide
  Antisense strand to SEQ ID NO: 2170456
uagauugauccaaaguugc

SEQ ID NO: 2170458 - RNA, 19 nt, Artificial Sequence
  Description of Artificial Sequence: Synthetic oligonucleotide
  Sense strand starting at position 3148 of SEQ ID NO: 1883111
guguaugugugauuuccca

SEQ ID NO: 2170459 - RNA, 19 nt, Artificial Sequence
  Description of Artificial Sequence: Synthetic oligonucleotide
  Antisense strand to SEQ ID NO: 2170458
ugggaaaucacacauacac

SEQ ID NO: 2170460 - RNA, 19 nt, Artificial Sequence
  Description of Artificial Sequence: Synthetic oligonucleotide
  Sense strand starting at position 3201 of SEQ ID NO: 1883111
cuggcuuaccuccagugau

SEQ ID NO: 2170461 - RNA, 19 nt, Artificial Sequence
  Description of Artificial Sequence: Synthetic oligonucleotide
  Antisense strand to SEQ ID NO: 2170460
aucacuggagguaagccag

SEQ ID NO: 2170462 - RNA, 19 nt, Artificial Sequence
  Description of Artificial Sequence: Synthetic oligonucleotide
  Sense strand starting at position 3204 of SEQ ID NO: 1883111
gcuuaccuccagugauauu

SEQ ID NO: 2170463 - RNA, 19 nt, Artificial Sequence
  Description of Artificial Sequence: Synthetic oligonucleotide
  Antisense strand to SEQ ID NO: 2170462
aauaucacuggagguaagc

SEQ ID NO: 2170464 - RNA, 19 nt, Artificial Sequence
  Description of Artificial Sequence: Synthetic oligonucleotide
  Sense strand starting at position 3511 of SEQ ID NO: 1883111
cccagucagugacauuuau

SEQ ID NO: 2170465 - RNA, 19 nt, Artificial Sequence
  Description of Artificial Sequence: Synthetic oligonucleotide
  Antisense strand to SEQ ID NO: 2170464
auaaaugucacugacuggg

SEQ ID NO: 2170466 - RNA, 19 nt, Artificial Sequence
  Description of Artificial Sequence: Synthetic oligonucleotide
  Sense strand starting at position 3609 of SEQ ID NO: 1883111
uugaguucugagcagcauu

SEQ ID NO: 2170467 - RNA, 19 nt, Artificial Sequence
  Description of Artificial Sequence: Synthetic oligonucleotide
  Antisense strand to SEQ ID NO: 2170466
aaugcugcucagaacucaa

SEQ ID NO: 2170468 - RNA, 19 nt, Artificial Sequence
  Description of Artificial Sequence: Synthetic oligonucleotide
  Sense strand starting at position 3731 of SEQ ID NO: 1883111
acuggaauuccuuauguau

SEQ ID NO: 2170469 - RNA, 19 nt, Artificial Sequence
  Description of Artificial Sequence: Synthetic oligonucleotide
  Antisense strand to SEQ ID NO: 2170468
auacauaaggaauuccagu

SEQ ID NO: 2170470 - RNA, 19 nt, Artificial Sequence
  Description of Artificial Sequence: Synthetic oligonucleotide
  Sense strand starting at position 3734 of SEQ ID NO: 1883111
ggaauuccuuauguaucua

SEQ ID NO: 2170471 - RNA, 19 nt, Artificial Sequence
  Description of Artificial Sequence: Synthetic oligonucleotide
  Antisense strand to SEQ ID NO: 2170470
uagauacauaaggaauucc

SEQ ID NO: 2170472 - RNA, 19 nt, Artificial Sequence
  Description of Artificial Sequence: Synthetic oligonucleotide
  Sense strand starting at position 3782 of SEQ ID NO: 1883111
caguguugcuuugcaauuu

SEQ ID NO: 2170473 - RNA, 19 nt, Artificial Sequence
  Description of Artificial Sequence: Synthetic oligonucleotide
  Antisense strand to SEQ ID NO: 2170472
aaauugcaaagcaacacug

SEQ ID NO: 2170474 - RNA, 19 nt, Artificial Sequence
  Description of Artificial Sequence: Synthetic oligonucleotide
  Sense strand starting at position 3838 of SEQ ID NO: 1883111
cuagucuaucaaggagcuu

SEQ ID NO: 2170475 - RNA, 19 nt, Artificial Sequence
  Description of Artificial Sequence: Synthetic oligonucleotide
  Antisense strand to SEQ ID NO: 2170474
aagcuccuugauagacuag

SEQ ID NO: 2170476 - RNA, 19 nt, Artificial Sequence
  Description of Artificial Sequence: Synthetic oligonucleotide
  Sense strand starting at position 3931 of SEQ ID NO: 1883111
aaggacuauuuauguggau

SEQ ID NO: 2170477 - RNA, 19 nt, Artificial Sequence
  Description of Artificial Sequence: Synthetic oligonucleotide
  Antisense strand to SEQ ID NO: 2170476
auccacauaaauaguccuu

SEQ ID NO: 2170478 - RNA, 19 nt, Artificial Sequence
  Description of Artificial Sequence: Synthetic oligonucleotide
  Sense strand starting at position 3940 of SEQ ID NO: 1883111
uuauguggaucuucuccaa

SEQ ID NO: 2170479 - RNA, 19 nt, Artificial Sequence
  Description of Artificial Sequence: Synthetic oligonucleotide
  Antisense strand to SEQ ID NO: 2170478
uuggagaagauccacauaa

SEQ ID NO: 2170480 - RNA, 19 nt, Artificial Sequence
  Description of Artificial Sequence: Synthetic oligonucleotide
  Sense strand starting at position 3943 of SEQ ID NO: 1883111
uguggaucuucuccaacca

SEQ ID NO: 2170481 - RNA, 19 nt, Artificial Sequence
  Description of Artificial Sequence: Synthetic oligonucleotide
  Antisense strand to SEQ ID NO: 2170480
ugguuggagaagauccaca

SEQ ID NO: 2170482 - RNA, 19 nt, Artificial Sequence
  Description of Artificial Sequence: Synthetic oligonucleotide
  Sense strand starting at position 6 of SEQ ID NO: 1883112
guuugagaucaucaagagc

SEQ ID NO: 2170483 - RNA, 19 nt, Artificial Sequence
  Description of Artificial Sequence: Synthetic oligonucleotide
  Antisense strand to SEQ ID NO: 2170482
gcucuugaugaucucaaac

SEQ ID NO: 2170484 - RNA, 19 nt, Artificial Sequence
  Description of Artificial Sequence: Synthetic oligonucleotide
  Sense strand starting at position 2005 of SEQ ID NO: 1883112
uuuguuacugcucaccuau

SEQ ID NO: 2170485 - RNA, 19 nt, Artificial Sequence
  Description of Artificial Sequence: Synthetic oligonucleotide
  Antisense strand to SEQ ID NO: 2170484
auaggugagcaguaacaaa

SEQ ID NO: 2170486 - RNA, 19 nt, Artificial Sequence
  Description of Artificial Sequence: Synthetic oligonucleotide
  Sense strand starting at position 2016 of SEQ ID NO: 1883112
ucaccuaucuuagaggcau

SEQ ID NO: 2170487 - RNA, 19 nt, Artificial Sequence
  Description of Artificial Sequence: Synthetic oligonucleotide
  Antisense strand to SEQ ID NO: 2170486
augccucuaagauagguga

SEQ ID NO: 2170488 - RNA, 19 nt, Artificial Sequence
  Description of Artificial Sequence: Synthetic oligonucleotide
  Sense strand starting at position 2022 of SEQ ID NO: 1883112
aucuuagaggcauauaagu

SEQ ID NO: 2170489 - RNA, 19 nt, Artificial Sequence
  Description of Artificial Sequence: Synthetic oligonucleotide
  Antisense strand to SEQ ID NO: 2170488
acuuauaugccucuaagau

SEQ ID NO: 2170490 - RNA, 19 nt, Artificial Sequence
  Description of Artificial Sequence: Synthetic oligonucleotide
  Sense strand starting at position 2027 of SEQ ID NO: 1883112
agaggcauauaagucuaau

SEQ ID NO: 2170491 - RNA, 19 nt, Artificial Sequence
  Description of Artificial Sequence: Synthetic oligonucleotide
  Antisense strand to SEQ ID NO: 2170490
auuagacuuauaugccucu

SEQ ID NO: 2170492 - RNA, 19 nt, Artificial Sequence
  Description of Artificial Sequence: Synthetic oligonucleotide
  Sense strand starting at position 2062 of SEQ ID NO: 1883112
cuccuuaauuguuaaagga

SEQ ID NO: 2170493 - RNA, 19 nt, Artificial Sequence
  Description of Artificial Sequence: Synthetic oligonucleotide
  Antisense strand to SEQ ID NO: 2170492
uccuuuaacaauuaaggag

SEQ ID NO: 2170494 - RNA, 19 nt, Artificial Sequence
  Description of Artificial Sequence: Synthetic oligonucleotide
  Sense strand starting at position 2498 of SEQ ID NO: 1883112
cucucucauucuuguggga

SEQ ID NO: 2170495 - RNA, 19 nt, Artificial Sequence
  Description of Artificial Sequence: Synthetic oligonucleotide
  Antisense strand to SEQ ID NO: 2170494
ucccacaagaaugagagag

SEQ ID NO: 2170496 - RNA, 19 nt, Artificial Sequence
  Description of Artificial Sequence: Synthetic oligonucleotide
  Sense strand starting at position 2500 of SEQ ID NO: 1883112
cucucauucuugugggaca

SEQ ID NO: 2170497 - RNA, 19 nt, Artificial Sequence
  Description of Artificial Sequence: Synthetic oligonucleotide
  Antisense strand to SEQ ID NO: 2170496
ugucccacaagaaugagag

SEQ ID NO: 2170498 - RNA, 19 nt, Artificial Sequence
  Description of Artificial Sequence: Synthetic oligonucleotide
  Sense strand starting at position 2501 of SEQ ID NO: 1883112
ucucauucuugugggacau

SEQ ID NO: 2170499 - RNA, 19 nt, Artificial Sequence
  Description of Artificial Sequence: Synthetic oligonucleotide
  Antisense strand to SEQ ID NO: 2170498
augucccacaagaaugaga

SEQ ID NO: 2170500 - RNA, 19 nt, Artificial Sequence
  Description of Artificial Sequence: Synthetic oligonucleotide
  Sense strand starting at position 2502 of SEQ ID NO: 1883112
cucauucuugugggacaua

SEQ ID NO: 2170501 - RNA, 19 nt, Artificial Sequence
  Description of Artificial Sequence: Synthetic oligonucleotide
  Antisense strand to SEQ ID NO: 2170500
uaugucccacaagaaugag

SEQ ID NO: 2170502 - RNA, 19 nt, Artificial Sequence
  Description of Artificial Sequence: Synthetic oligonucleotide
  Sense strand starting at position 2503 of SEQ ID NO: 1883112
ucauucuugugggacauaa

SEQ ID NO: 2170503 - RNA, 19 nt, Artificial Sequence
  Description of Artificial Sequence: Synthetic oligonucleotide
  Antisense strand to SEQ ID NO: 2170502
uuaugucccacaagaauga

SEQ ID NO: 2170504 - RNA, 19 nt, Artificial Sequence
  Description of Artificial Sequence: Synthetic oligonucleotide
  Sense strand starting at position 2530 of SEQ ID NO: 1883112
uuagccuguuuggaucaaa

SEQ ID NO: 2170505 - RNA, 19 nt, Artificial Sequence
  Description of Artificial Sequence: Synthetic oligonucleotide
  Antisense strand to SEQ ID NO: 2170504
uuugauccaaacaggcuaa

SEQ ID NO: 2170506 - RNA, 19 nt, Artificial Sequence
  Description of Artificial Sequence: Synthetic oligonucleotide
  Sense strand starting at position 2533 of SEQ ID NO: 1883112
gccuguuuggaucaaacca

SEQ ID NO: 2170507 - RNA, 19 nt, Artificial Sequence
  Description of Artificial Sequence: Synthetic oligonucleotide
  Antisense strand to SEQ ID NO: 2170506
ugguuugauccaaacaggc

SEQ ID NO: 2170508 - RNA, 19 nt, Artificial Sequence
  Description of Artificial Sequence: Synthetic oligonucleotide
  Sense strand starting at position 2632 of SEQ ID NO: 1883112
gauggagucucuugcucca

SEQ ID NO: 2170509 - RNA, 19 nt, Artificial Sequence
  Description of Artificial Sequence: Synthetic oligonucleotide
  Antisense strand to SEQ ID NO: 2170508
uggagcaagagacuccauc

SEQ ID NO: 2170510 - RNA, 19 nt, Artificial Sequence
  Description of Artificial Sequence: Synthetic oligonucleotide
  Sense strand starting at position 2634 of SEQ ID NO: 1883112
uggagucucuugcuccaga

SEQ ID NO: 2170511 - RNA, 19 nt, Artificial Sequence
  Description of Artificial Sequence: Synthetic oligonucleotide
  Antisense strand to SEQ ID NO: 2170510
ucuggagcaagagacucca

SEQ ID NO: 2170512 - RNA, 19 nt, Artificial Sequence
  Description of Artificial Sequence: Synthetic oligonucleotide
  Sense strand starting at position 2700 of SEQ ID NO: 1883112
agcggugauccaugccuau

SEQ ID NO: 2170513 - RNA, 19 nt, Artificial Sequence
  Description of Artificial Sequence: Synthetic oligonucleotide
  Antisense strand to SEQ ID NO: 2170512
auaggcauggaucaccgcu

SEQ ID NO: 2170514 - RNA, 19 nt, Artificial Sequence
  Description of Artificial Sequence: Synthetic oligonucleotide
  Sense strand starting at position 2995 of SEQ ID NO: 1883112
aaggaacucuguuuaugga

SEQ ID NO: 2170515 - RNA, 19 nt, Artificial Sequence
  Description of Artificial Sequence: Synthetic oligonucleotide
  Antisense strand to SEQ ID NO: 2170514
uccauaaacagaguuccuu

SEQ ID NO: 2170516 - RNA, 19 nt, Artificial Sequence
  Description of Artificial Sequence: Synthetic oligonucleotide
  Sense strand starting at position 3004 of SEQ ID NO: 1883112
uguuuauggauagguacaa

SEQ ID NO: 2170517 - RNA, 19 nt, Artificial Sequence
  Description of Artificial Sequence: Synthetic oligonucleotide
  Antisense strand to SEQ ID NO: 2170516
uuguaccuauccauaaaca

SEQ ID NO: 2170518 - RNA, 19 nt, Artificial Sequence
  Description of Artificial Sequence: Synthetic oligonucleotide
  Sense strand starting at position 3180 of SEQ ID NO: 1883112
ccuacacggccucaagauu

SEQ ID NO: 2170519 - RNA, 19 nt, Artificial Sequence
  Description of Artificial Sequence: Synthetic oligonucleotide
  Antisense strand to SEQ ID NO: 2170518
aaucuugaggccguguagg

SEQ ID NO: 2170520 - RNA, 19 nt, Artificial Sequence
  Description of Artificial Sequence: Synthetic oligonucleotide
  Sense strand starting at position 3218 of SEQ ID NO: 1883112
cgcugaaccucccagugaa

SEQ ID NO: 2170521 - RNA, 19 nt, Artificial Sequence
  Description of Artificial Sequence: Synthetic oligonucleotide
  Antisense strand to SEQ ID NO: 2170520
uucacugggagguucagcg

SEQ ID NO: 2170522 - RNA, 19 nt, Artificial Sequence
  Description of Artificial Sequence: Synthetic oligonucleotide
  Sense strand starting at position 216 of SEQ ID NO: 1883113
cagccucaccauggugaaa

SEQ ID NO: 2170523 - RNA, 19 nt, Artificial Sequence
  Description of Artificial Sequence: Synthetic oligonucleotide
  Antisense strand to SEQ ID NO: 2170522
uuucaccauggugaggcug

SEQ ID NO: 2170524 - RNA, 19 nt, Artificial Sequence
  Description of Artificial Sequence: Synthetic oligonucleotide
  Sense strand starting at position 437 of SEQ ID NO: 1883113
guuuaauuggaauacaguu

SEQ ID NO: 2170525 - RNA, 19 nt, Artificial Sequence
  Description of Artificial Sequence: Synthetic oligonucleotide
  Antisense strand to SEQ ID NO: 2170524
aacuguauuccaauuaaac

SEQ ID NO: 2170526 - RNA, 19 nt, Artificial Sequence
  Description of Artificial Sequence: Synthetic oligonucleotide
  Sense strand starting at position 522 of SEQ ID NO: 1883113
auauuuaguguccgaccuu

SEQ ID NO: 2170527 - RNA, 19 nt, Artificial Sequence
  Description of Artificial Sequence: Synthetic oligonucleotide
  Antisense strand to SEQ ID NO: 2170526
aaggucggacacuaaauau

SEQ ID NO: 2170528 - RNA, 19 nt, Artificial Sequence
  Description of Artificial Sequence: Synthetic oligonucleotide
  Sense strand starting at position 529 of SEQ ID NO: 1883113
guguccgaccuuuaacaga

SEQ ID NO: 2170529 - RNA, 19 nt, Artificial Sequence
  Description of Artificial Sequence: Synthetic oligonucleotide
  Antisense strand to SEQ ID NO: 2170528
ucuguuaaaggucggacac

SEQ ID NO: 2170530 - RNA, 19 nt, Artificial Sequence
  Description of Artificial Sequence: Synthetic oligonucleotide
  Sense strand starting at position 611 of SEQ ID NO: 1883113
cgaccuucccaauguuaaa

SEQ ID NO: 2170531 - RNA, 19 nt, Artificial Sequence
  Description of Artificial Sequence: Synthetic oligonucleotide
  Antisense strand to SEQ ID NO: 2170530
uuuaacauugggaaggucg

SEQ ID NO: 2170532 - RNA, 19 nt, Artificial Sequence
  Description of Artificial Sequence: Synthetic oligonucleotide
  Sense strand starting at position 727 of SEQ ID NO: 1883113
ccuguuacgucccuauaaa

SEQ ID NO: 2170533 - RNA, 19 nt, Artificial Sequence
  Description of Artificial Sequence: Synthetic oligonucleotide
  Antisense strand to SEQ ID NO: 2170532
uuuauagggacguaacagg

SEQ ID NO: 2170534 - RNA, 19 nt, Artificial Sequence
  Description of Artificial Sequence: Synthetic oligonucleotide
  Sense strand starting at position 728 of SEQ ID NO: 1883113
cuguuacgucccuauaaac

SEQ ID NO: 2170535 - RNA, 19 nt, Artificial Sequence
  Description of Artificial Sequence: Synthetic oligonucleotide
  Antisense strand to SEQ ID NO: 2170534
guuuauagggacguaacag

SEQ ID NO: 2170536 - RNA, 19 nt, Artificial Sequence
  Description of Artificial Sequence: Synthetic oligonucleotide
  Sense strand starting at position 812 of SEQ ID NO: 1883113
accuuugcucagucguagu

SEQ ID NO: 2170537 - RNA, 19 nt, Artificial Sequence
  Description of Artificial Sequence: Synthetic oligonucleotide
  Antisense strand to SEQ ID NO: 2170536
acuacgacugagcaaaggu

SEQ ID NO: 2170538 - RNA, 19 nt, Artificial Sequence
  Description of Artificial Sequence: Synthetic oligonucleotide
  Sense strand starting at position 822 of SEQ ID NO: 1883113
agucguagucuugacugaa

SEQ ID NO: 2170539 - RNA, 19 nt, Artificial Sequence
  Description of Artificial Sequence: Synthetic oligonucleotide
  Antisense strand to SEQ ID NO: 2170538
uucagucaagacuacgacu

SEQ ID NO: 2170540 - RNA, 19 nt, Artificial Sequence
  Description of Artificial Sequence: Synthetic oligonucleotide
  Sense strand starting at position 825 of SEQ ID NO: 1883113
cguagucuugacugaaauu

SEQ ID NO: 2170541 - RNA, 19 nt, Artificial Sequence
  Description of Artificial Sequence: Synthetic oligonucleotide
  Antisense strand to SEQ ID NO: 2170540
aauuucagucaagacuacg

SEQ ID NO: 2170542 - RNA, 19 nt, Artificial Sequence
  Description of Artificial Sequence: Synthetic oligonucleotide
  Sense strand starting at position 872 of SEQ ID NO: 1883113
cauuguaaguaauuaagga

SEQ ID NO: 2170543 - RNA, 19 nt, Artificial Sequence
  Description of Artificial Sequence: Synthetic oligonucleotide
  Antisense strand to SEQ ID NO: 2170542
uccuuaauuacuuacaaug

SEQ ID NO: 2170544 - RNA, 19 nt, Artificial Sequence
  Description of Artificial Sequence: Synthetic oligonucleotide
  Sense strand starting at position 1403 of SEQ ID NO: 1883113
acgugugguagagaaccua

SEQ ID NO: 2170545 - RNA, 19 nt, Artificial Sequence
  Description of Artificial Sequence: Synthetic oligonucleotide
  Antisense strand to SEQ ID NO: 2170544
uagguucucuaccacacgu

SEQ ID NO: 2170546 - RNA, 19 nt, Artificial Sequence
  Description of Artificial Sequence: Synthetic oligonucleotide
  Sense strand starting at position 1590 of SEQ ID NO: 1883113
aagguucguggagaaagua

SEQ ID NO: 2170547 - RNA, 19 nt, Artificial Sequence
  Description of Artificial Sequence: Synthetic oligonucleotide
  Antisense strand to SEQ ID NO: 2170546
uacuuucuccacgaaccuu

SEQ ID NO: 2170548 - RNA, 19 nt, Artificial Sequence
  Description of Artificial Sequence: Synthetic oligonucleotide
  Sense strand starting at position 1598 of SEQ ID NO: 1883113
uggagaaaguaauacacua

SEQ ID NO: 2170549 - RNA, 19 nt, Artificial Sequence
  Description of Artificial Sequence: Synthetic oligonucleotide
  Antisense strand to SEQ ID NO: 2170548
uaguguauuacuuucucca

SEQ ID NO: 2170550 - RNA, 19 nt, Artificial Sequence
  Description of Artificial Sequence: Synthetic oligonucleotide
  Sense strand starting at position 1625 of SEQ ID NO: 1883113
gugcgaguggagggaaauu

SEQ ID NO: 2170551 - RNA, 19 nt, Artificial Sequence
  Description of Artificial Sequence: Synthetic oligonucleotide
  Antisense strand to SEQ ID NO: 2170550
aauuucccuccacucgcac

SEQ ID NO: 2170552 - RNA, 19 nt, Artificial Sequence
  Description of Artificial Sequence: Synthetic oligonucleotide
  Sense strand starting at position 1656 of SEQ ID NO: 1883113
cguagaaacugaucaugaa

SEQ ID NO: 2170553 - RNA, 19 nt, Artificial Sequence
  Description of Artificial Sequence: Synthetic oligonucleotide
  Antisense strand to SEQ ID NO: 2170552
uucaugaucaguuucuacg

SEQ ID NO: 2170554 - RNA, 19 nt, Artificial Sequence
  Description of Artificial Sequence: Synthetic oligonucleotide
  Sense strand starting at position 1659 of SEQ ID NO: 1883113
agaaacugaucaugaaaga

SEQ ID NO: 2170555 - RNA, 19 nt, Artificial Sequence
  Description of Artificial Sequence: Synthetic oligonucleotide
  Antisense strand to SEQ ID NO: 2170554
ucuuucaugaucaguuucu

SEQ ID NO: 2170556 - RNA, 19 nt, Artificial Sequence
  Description of Artificial Sequence: Synthetic oligonucleotide
  Sense strand starting at position 2070 of SEQ ID NO: 1883113
uggcguagucccgcccaua

SEQ ID NO: 2170557 - RNA, 19 nt, Artificial Sequence
  Description of Artificial Sequence: Synthetic oligonucleotide
  Antisense strand to SEQ ID NO: 2170556
uaugggcgggacuacgcca

SEQ ID NO: 2170558 - RNA, 19 nt, Artificial Sequence
  Description of Artificial Sequence: Synthetic oligonucleotide
  Sense strand starting at position 2260 of SEQ ID NO: 1883113
guggguacuugugcagaaa

SEQ ID NO: 2170559 - RNA, 19 nt, Artificial Sequence
  Description of Artificial Sequence: Synthetic oligonucleotide
  Antisense strand to SEQ ID NO: 2170558
uuucugcacaaguacccac

SEQ ID NO: 2170560 - RNA, 19 nt, Artificial Sequence
  Description of Artificial Sequence: Synthetic oligonucleotide
  Sense strand starting at position 2261 of SEQ ID NO: 1883113
uggguacuugugcagaaac

SEQ ID NO: 2170561 - RNA, 19 nt, Artificial Sequence
  Description of Artificial Sequence: Synthetic oligonucleotide
  Antisense strand to SEQ ID NO: 2170560
guuucugcacaaguaccca

SEQ ID NO: 2170562 - RNA, 19 nt, Artificial Sequence
  Description of Artificial Sequence: Synthetic oligonucleotide
  Sense strand starting at position 2263 of SEQ ID NO: 1883113
gguacuugugcagaaacuu

SEQ ID NO: 2170563 - RNA, 19 nt, Artificial Sequence
  Description of Artificial Sequence: Synthetic oligonucleotide
  Antisense strand to SEQ ID NO: 2170562
aaguuucugcacaaguacc

SEQ ID NO: 2170564 - RNA, 19 nt, Artificial Sequence
  Description of Artificial Sequence: Synthetic oligonucleotide
  Sense strand starting at position 2454 of SEQ ID NO: 1883113
gagcuauaaucuccgaaag

SEQ ID NO: 2170565 - RNA, 19 nt, Artificial Sequence
  Description of Artificial Sequence: Synthetic oligonucleotide
  Antisense strand to SEQ ID NO: 2170564
cuuucggagauuauagcuc

SEQ ID NO: 2170566 - RNA, 19 nt, Artificial Sequence
  Description of Artificial Sequence: Synthetic oligonucleotide
  Sense strand starting at position 2470 of SEQ ID NO: 1883113
aaggaagauuuguaaugca

SEQ ID NO: 2170567 - RNA, 19 nt, Artificial Sequence
  Description of Artificial Sequence: Synthetic oligonucleotide
  Antisense strand to SEQ ID NO: 2170566
ugcauuacaaaucuuccuu

SEQ ID NO: 2170568 - RNA, 19 nt, Artificial Sequence
  Description of Artificial Sequence: Synthetic oligonucleotide
  Sense strand starting at position 2479 of SEQ ID NO: 1883113
uuguaaugcacugcgaguu

SEQ ID NO: 2170569 - RNA, 19 nt, Artificial Sequence
  Description of Artificial Sequence: Synthetic oligonucleotide
  Antisense strand to SEQ ID NO: 2170568
aacucgcagugcauuacaa

SEQ ID NO: 2170570 - RNA, 19 nt, Artificial Sequence
  Description of Artificial Sequence: Synthetic oligonucleotide
  Sense strand starting at position 2485 of SEQ ID NO: 1883113
ugcacugcgaguuagaaau

SEQ ID NO: 2170571 - RNA, 19 nt, Artificial Sequence
  Description of Artificial Sequence: Synthetic oligonucleotide
  Antisense strand to SEQ ID NO: 2170570
auuucuaacucgcagugca

SEQ ID NO: 2170572 - RNA, 19 nt, Artificial Sequence
  Description of Artificial Sequence: Synthetic oligonucleotide
  Sense strand starting at position 2802 of SEQ ID NO: 1883113
cacgaaggguggcuuuaua

SEQ ID NO: 2170573 - RNA, 19 nt, Artificial Sequence
  Description of Artificial Sequence: Synthetic oligonucleotide
  Antisense strand to SEQ ID NO: 2170572
uauaaagccacccuucgug

SEQ ID NO: 2170574 - RNA, 19 nt, Artificial Sequence
  Description of Artificial Sequence: Synthetic oligonucleotide
  Sense strand starting at position 3137 of SEQ ID NO: 1883113
gagggugagguuugguagu

SEQ ID NO: 2170575 - RNA, 19 nt, Artificial Sequence
  Description of Artificial Sequence: Synthetic oligonucleotide
  Antisense strand to SEQ ID NO: 2170574
acuaccaaaccucacccuc

SEQ ID NO: 2170576 - RNA, 19 nt, Artificial Sequence
  Description of Artificial Sequence: Synthetic oligonucleotide
  Sense strand starting at position 3139 of SEQ ID NO: 1883113
gggugagguuugguaguua

SEQ ID NO: 2170577 - RNA, 19 nt, Artificial Sequence
  Description of Artificial Sequence: Synthetic oligonucleotide
  Antisense strand to SEQ ID NO: 2170576
uaacuaccaaaccucaccc

SEQ ID NO: 2170578 - RNA, 19 nt, Artificial Sequence
  Description of Artificial Sequence: Synthetic oligonucleotide
  Sense strand starting at position 3144 of SEQ ID NO: 1883113
agguuugguaguuagccaa

SEQ ID NO: 2170579 - RNA, 19 nt, Artificial Sequence
  Description of Artificial Sequence: Synthetic oligonucleotide
  Antisense strand to SEQ ID NO: 2170578
uuggcuaacuaccaaaccu

SEQ ID NO: 2170580 - RNA, 19 nt, Artificial Sequence
  Description of Artificial Sequence: Synthetic oligonucleotide
  Sense strand starting at position 3148 of SEQ ID NO: 1883113
uugguaguuagccaagaga

SEQ ID NO: 2170581 - RNA, 19 nt, Artificial Sequence
  Description of Artificial Sequence: Synthetic oligonucleotide
  Antisense strand to SEQ ID NO: 2170580
ucucuuggcuaacuaccaa

SEQ ID NO: 2170582 - RNA, 19 nt, Artificial Sequence
  Description of Artificial Sequence: Synthetic oligonucleotide
  Sense strand starting at position 3327 of SEQ ID NO: 1883113
gcuccugcucugucaguaa

SEQ ID NO: 2170583 - RNA, 19 nt, Artificial Sequence
  Description of Artificial Sequence: Synthetic oligonucleotide
  Antisense strand to SEQ ID NO: 2170582
uuacugacagagcaggagc

SEQ ID NO: 2170584 - RNA, 19 nt, Artificial Sequence
  Description of Artificial Sequence: Synthetic oligonucleotide
  Sense strand starting at position 3431 of SEQ ID NO: 1883113
uuugcaagugaugauacua

SEQ ID NO: 2170585 - RNA, 19 nt, Artificial Sequence
  Description of Artificial Sequence: Synthetic oligonucleotide
  Antisense strand to SEQ ID NO: 2170584
uaguaucaucacuugcaaa

SEQ ID NO: 2170586 - RNA, 19 nt, Artificial Sequence
  Description of Artificial Sequence: Synthetic oligonucleotide
  Sense strand starting at position 3570 of SEQ ID NO: 1883113
acuugauaauucgcaaauc

SEQ ID NO: 2170587 - RNA, 19 nt, Artificial Sequence
  Description of Artificial Sequence: Synthetic oligonucleotide
  Antisense strand to SEQ ID NO: 2170586
gauuugcgaauuaucaagu

SEQ ID NO: 2170588 - RNA, 19 nt, Artificial Sequence
  Description of Artificial Sequence: Synthetic oligonucleotide
  Sense strand starting at position 3731 of SEQ ID NO: 1883113
gaggaauaauugcuugcca

SEQ ID NO: 2170589 - RNA, 19 nt, Artificial Sequence
  Description of Artificial Sequence: Synthetic oligonucleotide
  Antisense strand to SEQ ID NO: 2170588
uggcaagcaauuauuccuc

SEQ ID NO: 2170590 - RNA, 19 nt, Artificial Sequence
  Description of Artificial Sequence: Synthetic oligonucleotide
  Sense strand starting at position 3732 of SEQ ID NO: 1883113
aggaauaauugcuugccaa

SEQ ID NO: 2170591 - RNA, 19 nt, Artificial Sequence
  Description of Artificial Sequence: Synthetic oligonucleotide
  Antisense strand to SEQ ID NO: 2170590
uuggcaagcaauuauuccu

SEQ ID NO: 2170592 - RNA, 19 nt, Artificial Sequence
  Description of Artificial Sequence: Synthetic oligonucleotide
  Sense strand starting at position 3733 of SEQ ID NO: 1883113
ggaauaauugcuugccaau

SEQ ID NO: 2170593 - RNA, 19 nt, Artificial Sequence
  Description of Artificial Sequence: Synthetic oligonucleotide
  Antisense strand to SEQ ID NO: 2170592
auuggcaagcaauuauucc

SEQ ID NO: 2170594 - RNA, 19 nt, Artificial Sequence
  Description of Artificial Sequence: Synthetic oligonucleotide
  Sense strand starting at position 3769 of SEQ ID NO: 1883113
uuuguauucuuucugacga

SEQ ID NO: 2170595 - RNA, 19 nt, Artificial Sequence
  Description of Artificial Sequence: Synthetic oligonucleotide
  Antisense strand to SEQ ID NO: 2170594
ucgucagaaagaauacaaa

SEQ ID NO: 2170596 - RNA, 19 nt, Artificial Sequence
  Description of Artificial Sequence: Synthetic oligonucleotide
  Sense strand starting at position 3875 of SEQ ID NO: 1883113
uuuauaaggccagaguuau

SEQ ID NO: 2170597 - RNA, 19 nt, Artificial Sequence
  Description of Artificial Sequence: Synthetic oligonucleotide
  Antisense strand to SEQ ID NO: 2170596
auaacucuggccuuauaaa

SEQ ID NO: 2170598 - RNA, 19 nt, Artificial Sequence
  Description of Artificial Sequence: Synthetic oligonucleotide
  Sense strand starting at position 3907 of SEQ ID NO: 1883113
ggugaauaaguuggguaca

SEQ ID NO: 2170599 - RNA, 19 nt, Artificial Sequence
  Description of Artificial Sequence: Synthetic oligonucleotide
  Antisense strand to SEQ ID NO: 2170598
uguacccaacuuauucacc

SEQ ID NO: 2170600 - RNA, 19 nt, Artificial Sequence
  Description of Artificial Sequence: Synthetic oligonucleotide
  Sense strand starting at position 3909 of SEQ ID NO: 1883113
ugaauaaguuggguacaau

SEQ ID NO: 2170601 - RNA, 19 nt, Artificial Sequence
  Description of Artificial Sequence: Synthetic oligonucleotide
  Antisense strand to SEQ ID NO: 2170600
auuguacccaacuuauuca

SEQ ID NO: 2170602 - RNA, 19 nt, Artificial Sequence
  Description of Artificial Sequence: Synthetic oligonucleotide
  Sense strand starting at position 8 of SEQ ID NO: 1883114
gcaggagaaucaccagagu

SEQ ID NO: 2170603 - RNA, 19 nt, Artificial Sequence
  Description of Artificial Sequence: Synthetic oligonucleotide
  Antisense strand to SEQ ID NO: 2170602
acucuggugauucuccugc

SEQ ID NO: 2170604 - RNA, 19 nt, Artificial Sequence
  Description of Artificial Sequence: Synthetic oligonucleotide
  Sense strand starting at position 187 of SEQ ID NO: 1883114
gugagucaugauuauucca

SEQ ID NO: 2170605 - RNA, 19 nt, Artificial Sequence
  Description of Artificial Sequence: Synthetic oligonucleotide
  Antisense strand to SEQ ID NO: 2170604
uggaauaaucaugacucac

SEQ ID NO: 2170606 - RNA, 19 nt, Artificial Sequence
  Description of Artificial Sequence: Synthetic oligonucleotide
  Sense strand starting at position 500 of SEQ ID NO: 1883114
ucacuuugguaguuauaca

SEQ ID NO: 2170607 - RNA, 19 nt, Artificial Sequence
  Description of Artificial Sequence: Synthetic oligonucleotide
  Antisense strand to SEQ ID NO: 2170606
uguauaacuaccaaaguga

SEQ ID NO: 2170608 - RNA, 19 nt, Artificial Sequence
  Description of Artificial Sequence: Synthetic oligonucleotide
  Sense strand starting at position 508 of SEQ ID NO: 1883114
guaguuauacaugauacua

SEQ ID NO: 2170609 - RNA, 19 nt, Artificial Sequence
  Description of Artificial Sequence: Synthetic oligonucleotide
  Antisense strand to SEQ ID NO: 2170608
uaguaucauguauaacuac

SEQ ID NO: 2170610 - RNA, 19 nt, Artificial Sequence
  Description of Artificial Sequence: Synthetic oligonucleotide
  Sense strand starting at position 516 of SEQ ID NO: 1883114
acaugauacuaguuguaau

SEQ ID NO: 2170611 - RNA, 19 nt, Artificial Sequence
  Description of Artificial Sequence: Synthetic oligonucleotide
  Antisense strand to SEQ ID NO: 2170610
auuacaacuaguaucaugu

SEQ ID NO: 2170612 - RNA, 19 nt, Artificial Sequence
  Description of Artificial Sequence: Synthetic oligonucleotide
  Sense strand starting at position 527 of SEQ ID NO: 1883114
guuguaaucucagccauuu

SEQ ID NO: 2170613 - RNA, 19 nt, Artificial Sequence
  Description of Artificial Sequence: Synthetic oligonucleotide
  Antisense strand to SEQ ID NO: 2170612
aaauggcugagauuacaac

SEQ ID NO: 2170614 - RNA, 19 nt, Artificial Sequence
  Description of Artificial Sequence: Synthetic oligonucleotide
  Sense strand starting at position 559 of SEQ ID NO: 1883114
augucuauucuaggucaaa

SEQ ID NO: 2170615 - RNA, 19 nt, Artificial Sequence
  Description of Artificial Sequence: Synthetic oligonucleotide
  Antisense strand to SEQ ID NO: 2170614
uuugaccuagaauagacau

SEQ ID NO: 2170616 - RNA, 19 nt, Artificial Sequence
  Description of Artificial Sequence: Synthetic oligonucleotide
  Sense strand starting at position 560 of SEQ ID NO: 1883114
ugucuauucuaggucaaau

SEQ ID NO: 2170617 - RNA, 19 nt, Artificial Sequence
  Description of Artificial Sequence: Synthetic oligonucleotide
  Antisense strand to SEQ ID NO: 2170616
auuugaccuagaauagaca

SEQ ID NO: 2170618 - RNA, 19 nt, Artificial Sequence
  Description of Artificial Sequence: Synthetic oligonucleotide
  Sense strand starting at position 605 of SEQ ID NO: 1883114
ucaguuauguccuuuaacc

SEQ ID NO: 2170619 - RNA, 19 nt, Artificial Sequence
  Description of Artificial Sequence: Synthetic oligonucleotide
  Antisense strand to SEQ ID NO: 2170618
gguuaaaggacauaacuga

SEQ ID NO: 2170620 - RNA, 19 nt, Artificial Sequence
  Description of Artificial Sequence: Synthetic oligonucleotide
  Sense strand starting at position 607 of SEQ ID NO: 1883114
aguuauguccuuuaaccug

SEQ ID NO: 2170621 - RNA, 19 nt, Artificial Sequence
  Description of Artificial Sequence: Synthetic oligonucleotide
  Antisense strand to SEQ ID NO: 2170620
cagguuaaaggacauaacu

SEQ ID NO: 2170622 - RNA, 19 nt, Artificial Sequence
  Description of Artificial Sequence: Synthetic oligonucleotide
  Sense strand starting at position 734 of SEQ ID NO: 1883114
gagugagguuaaguucuga

SEQ ID NO: 2170623 - RNA, 19 nt, Artificial Sequence
  Description of Artificial Sequence: Synthetic oligonucleotide
  Antisense strand to SEQ ID NO: 2170622
ucagaacuuaaccucacuc

SEQ ID NO: 2170624 - RNA, 19 nt, Artificial Sequence
  Description of Artificial Sequence: Synthetic oligonucleotide
  Sense strand starting at position 802 of SEQ ID NO: 1883114
ggcauaauuugagagucag

SEQ ID NO: 2170625 - RNA, 19 nt, Artificial Sequence
  Description of Artificial Sequence: Synthetic oligonucleotide
  Antisense strand to SEQ ID NO: 2170624
cugacucucaaauuaugcc

SEQ ID NO: 2170626 - RNA, 19 nt, Artificial Sequence
  Description of Artificial Sequence: Synthetic oligonucleotide
  Sense strand starting at position 812 of SEQ ID NO: 1883114
gagagucagauccgaagau

SEQ ID NO: 2170627 - RNA, 19 nt, Artificial Sequence
  Description of Artificial Sequence: Synthetic oligonucleotide
  Antisense strand to SEQ ID NO: 2170626
aucuucggaucugacucuc

SEQ ID NO: 2170628 - RNA, 19 nt, Artificial Sequence
  Description of Artificial Sequence: Synthetic oligonucleotide
  Sense strand starting at position 1008 of SEQ ID NO: 1883114
gccagauuccugggaaauc

SEQ ID NO: 2170629 - RNA, 19 nt, Artificial Sequence
  Description of Artificial Sequence: Synthetic oligonucleotide
  Antisense strand to SEQ ID NO: 2170628
gauuucccaggaaucuggc

SEQ ID NO: 2170630 - RNA, 19 nt, Artificial Sequence
  Description of Artificial Sequence: Synthetic oligonucleotide
  Sense strand starting at position 1062 of SEQ ID NO: 1883114
gccagaaguccuuagggca

SEQ ID NO: 2170631 - RNA, 19 nt, Artificial Sequence
  Description of Artificial Sequence: Synthetic oligonucleotide
  Antisense strand to SEQ ID NO: 2170630
ugcccuaaggacuucuggc

SEQ ID NO: 2170632 - RNA, 19 nt, Artificial Sequence
  Description of Artificial Sequence: Synthetic oligonucleotide
  Sense strand starting at position 1078 of SEQ ID NO: 1883114
gcaucuaagugaucagaca

SEQ ID NO: 2170633 - RNA, 19 nt, Artificial Sequence
  Description of Artificial Sequence: Synthetic oligonucleotide
  Antisense strand to SEQ ID NO: 2170632
ugucugaucacuuagaugc

SEQ ID NO: 2170634 - RNA, 19 nt, Artificial Sequence
  Description of Artificial Sequence: Synthetic oligonucleotide
  Sense strand starting at position 1390 of SEQ ID NO: 1883114
gaaggaucgcuuuaaccga

SEQ ID NO: 2170635 - RNA, 19 nt, Artificial Sequence
  Description of Artificial Sequence: Synthetic oligonucleotide
  Antisense strand to SEQ ID NO: 2170634
ucgguuaaagcgauccuuc

SEQ ID NO: 2170636 - RNA, 19 nt, Artificial Sequence
  Description of Artificial Sequence: Synthetic oligonucleotide
  Sense strand starting at position 1398 of SEQ ID NO: 1883114
gcuuuaaccgaggaguuug

SEQ ID NO: 2170637 - RNA, 19 nt, Artificial Sequence
  Description of Artificial Sequence: Synthetic oligonucleotide
  Antisense strand to SEQ ID NO: 2170636
caaacuccucgguuaaagc

SEQ ID NO: 2170638 - RNA, 19 nt, Artificial Sequence
  Description of Artificial Sequence: Synthetic oligonucleotide
  Sense strand starting at position 1748 of SEQ ID NO: 1883114
gaugaugaguuucuaagac

SEQ ID NO: 2170639 - RNA, 19 nt, Artificial Sequence
  Description of Artificial Sequence: Synthetic oligonucleotide
  Antisense strand to SEQ ID NO: 2170638
gucuuagaaacucaucauc

SEQ ID NO: 2170640 - RNA, 19 nt, Artificial Sequence
  Description of Artificial Sequence: Synthetic oligonucleotide
  Sense strand starting at position 1870 of SEQ ID NO: 1883114
gggugauguucauuagcag

SEQ ID NO: 2170641 - RNA, 19 nt, Artificial Sequence
  Description of Artificial Sequence: Synthetic oligonucleotide
  Antisense strand to SEQ ID NO: 2170640
cugcuaaugaacaucaccc

SEQ ID NO: 2170642 - RNA, 19 nt, Artificial Sequence
  Description of Artificial Sequence: Synthetic oligonucleotide
  Sense strand starting at position 1871 of SEQ ID NO: 1883114
ggugauguucauuagcagu

SEQ ID NO: 2170643 - RNA, 19 nt, Artificial Sequence
  Description of Artificial Sequence: Synthetic oligonucleotide
  Antisense strand to SEQ ID NO: 2170642
acugcuaaugaacaucacc

SEQ ID NO: 2170644 - RNA, 19 nt, Artificial Sequence
  Description of Artificial Sequence: Synthetic oligonucleotide
  Sense strand starting at position 1923 of SEQ ID NO: 1883114
guugaauagucaccucuga

SEQ ID NO: 2170645 - RNA, 19 nt, Artificial Sequence
  Description of Artificial Sequence: Synthetic oligonucleotide
  Antisense strand to SEQ ID NO: 2170644
ucagaggugacuauucaac

SEQ ID NO: 2170646 - RNA, 19 nt, Artificial Sequence
  Description of Artificial Sequence: Synthetic oligonucleotide
  Sense strand starting at position 2284 of SEQ ID NO: 1883114
aggaguaauuugcaauccu

SEQ ID NO: 2170647 - RNA, 19 nt, Artificial Sequence
  Description of Artificial Sequence: Synthetic oligonucleotide
  Antisense strand to SEQ ID NO: 2170646
aggauugcaaauuacuccu

SEQ ID NO: 2170648 - RNA, 19 nt, Artificial Sequence
  Description of Artificial Sequence: Synthetic oligonucleotide
  Sense strand starting at position 2371 of SEQ ID NO: 1883114
ugcaaacucaacggguaau

SEQ ID NO: 2170649 - RNA, 19 nt, Artificial Sequence
  Description of Artificial Sequence: Synthetic oligonucleotide
  Antisense strand to SEQ ID NO: 2170648
auuacccguugaguuugca

SEQ ID NO: 2170650 - RNA, 19 nt, Artificial Sequence
  Description of Artificial Sequence: Synthetic oligonucleotide
  Sense strand starting at position 2372 of SEQ ID NO: 1883114
gcaaacucaacggguaaua

SEQ ID NO: 2170651 - RNA, 19 nt, Artificial Sequence
  Description of Artificial Sequence: Synthetic oligonucleotide
  Antisense strand to SEQ ID NO: 2170650
uauuacccguugaguuugc

SEQ ID NO: 2170652 - RNA, 19 nt, Artificial Sequence
  Description of Artificial Sequence: Synthetic oligonucleotide
  Sense strand starting at position 2646 of SEQ ID NO: 1883114
uaagucgaagcguaaauaa

SEQ ID NO: 2170653 - RNA, 19 nt, Artificial Sequence
  Description of Artificial Sequence: Synthetic oligonucleotide
  Antisense strand to SEQ ID NO: 2170652
uuauuuacgcuucgacuua

SEQ ID NO: 2170654 - RNA, 19 nt, Artificial Sequence
  Description of Artificial Sequence: Synthetic oligonucleotide
  Sense strand starting at position 2722 of SEQ ID NO: 1883114
aauugugagucagugaacu

SEQ ID NO: 2170655 - RNA, 19 nt, Artificial Sequence
  Description of Artificial Sequence: Synthetic oligonucleotide
  Antisense strand to SEQ ID NO: 2170654
aguucacugacucacaauu

SEQ ID NO: 2170656 - RNA, 19 nt, Artificial Sequence
  Description of Artificial Sequence: Synthetic oligonucleotide
  Sense strand starting at position 2724 of SEQ ID NO: 1883114
uugugagucagugaacuag

SEQ ID NO: 2170657 - RNA, 19 nt, Artificial Sequence
  Description of Artificial Sequence: Synthetic oligonucleotide
  Antisense strand to SEQ ID NO: 2170656
cuaguucacugacucacaa

SEQ ID NO: 2170658 - RNA, 19 nt, Artificial Sequence
  Description of Artificial Sequence: Synthetic oligonucleotide
  Sense strand starting at position 2730 of SEQ ID NO: 1883114
gucagugaacuaggaaauu

SEQ ID NO: 2170659 - RNA, 19 nt, Artificial Sequence
  Description of Artificial Sequence: Synthetic oligonucleotide
  Antisense strand to SEQ ID NO: 2170658
aauuuccuaguucacugac

SEQ ID NO: 2170660 - RNA, 19 nt, Artificial Sequence
  Description of Artificial Sequence: Synthetic oligonucleotide
  Sense strand starting at position 2745 of SEQ ID NO: 1883114
aauuaaugccuggaaggca

SEQ ID NO: 2170661 - RNA, 19 nt, Artificial Sequence
  Description of Artificial Sequence: Synthetic oligonucleotide
  Antisense strand to SEQ ID NO: 2170660
ugccuuccaggcauuaauu

SEQ ID NO: 2170662 - RNA, 19 nt, Artificial Sequence
  Description of Artificial Sequence: Synthetic oligonucleotide
  Sense strand starting at position 3165 of SEQ ID NO: 1883114
ggcugagaaauugggaacu

SEQ ID NO: 2170663 - RNA, 19 nt, Artificial Sequence
  Description of Artificial Sequence: Synthetic oligonucleotide
  Antisense strand to SEQ ID NO: 2170662
aguucccaauuucucagcc

SEQ ID NO: 2170664 - RNA, 19 nt, Artificial Sequence
  Description of Artificial Sequence: Synthetic oligonucleotide
  Sense strand starting at position 3175 of SEQ ID NO: 1883114
uugggaacuccguguggga

SEQ ID NO: 2170665 - RNA, 19 nt, Artificial Sequence
  Description of Artificial Sequence: Synthetic oligonucleotide
  Antisense strand to SEQ ID NO: 2170664
ucccacacggaguucccaa

SEQ ID NO: 2170666 - RNA, 19 nt, Artificial Sequence
  Description of Artificial Sequence: Synthetic oligonucleotide
  Sense strand starting at position 3359 of SEQ ID NO: 1883114
gcugcuuuggcagcaaauu

SEQ ID NO: 2170667 - RNA, 19 nt, Artificial Sequence
  Description of Artificial Sequence: Synthetic oligonucleotide
  Antisense strand to SEQ ID NO: 2170666
aauuugcugccaaagcagc

SEQ ID NO: 2170668 - RNA, 19 nt, Artificial Sequence
  Description of Artificial Sequence: Synthetic oligonucleotide
  Sense strand starting at position 3381 of SEQ ID NO: 1883114
ggacucagucuggguggaa

SEQ ID NO: 2170669 - RNA, 19 nt, Artificial Sequence
  Description of Artificial Sequence: Synthetic oligonucleotide
  Antisense strand to SEQ ID NO: 2170668
uuccacccagacugagucc

SEQ ID NO: 2170670 - RNA, 19 nt, Artificial Sequence
  Description of Artificial Sequence: Synthetic oligonucleotide
  Sense strand starting at position 3401 of SEQ ID NO: 1883114
guauccaauccagauagcu

SEQ ID NO: 2170671 - RNA, 19 nt, Artificial Sequence
  Description of Artificial Sequence: Synthetic oligonucleotide
  Antisense strand to SEQ ID NO: 2170670
agcuaucuggauuggauac

SEQ ID NO: 2170672 - RNA, 19 nt, Artificial Sequence
  Description of Artificial Sequence: Synthetic oligonucleotide
  Sense strand starting at position 3410 of SEQ ID NO: 1883114
ccagauagcugugcauaca

SEQ ID NO: 2170673 - RNA, 19 nt, Artificial Sequence
  Description of Artificial Sequence: Synthetic oligonucleotide
  Antisense strand to SEQ ID NO: 2170672
uguaugcacagcuaucugg

SEQ ID NO: 2170674 - RNA, 19 nt, Artificial Sequence
  Description of Artificial Sequence: Synthetic oligonucleotide
  Sense strand starting at position 3411 of SEQ ID NO: 1883114
cagauagcugugcauacau

SEQ ID NO: 2170675 - RNA, 19 nt, Artificial Sequence
  Description of Artificial Sequence: Synthetic oligonucleotide
  Antisense strand to SEQ ID NO: 2170674
auguaugcacagcuaucug

SEQ ID NO: 2170676 - RNA, 19 nt, Artificial Sequence
  Description of Artificial Sequence: Synthetic oligonucleotide
  Sense strand starting at position 3413 of SEQ ID NO: 1883114
gauagcugugcauacauaa

SEQ ID NO: 2170677 - RNA, 19 nt, Artificial Sequence
  Description of Artificial Sequence: Synthetic oligonucleotide
  Antisense strand to SEQ ID NO: 2170676
uuauguaugcacagcuauc

SEQ ID NO: 2170678 - RNA, 19 nt, Artificial Sequence
  Description of Artificial Sequence: Synthetic oligonucleotide
  Sense strand starting at position 3757 of SEQ ID NO: 1883114
uuccgccugcgaugauuua

SEQ ID NO: 2170679 - RNA, 19 nt, Artificial Sequence
  Description of Artificial Sequence: Synthetic oligonucleotide
  Antisense strand to SEQ ID NO: 2170678
uaaaucaucgcaggcggaa

SEQ ID NO: 2170680 - RNA, 19 nt, Artificial Sequence
  Description of Artificial Sequence: Synthetic oligonucleotide
  Sense strand starting at position 3795 of SEQ ID NO: 1883114
cgguuugucaaacaguacu

SEQ ID NO: 2170681 - RNA, 19 nt, Artificial Sequence
  Description of Artificial Sequence: Synthetic oligonucleotide
  Antisense strand to SEQ ID NO: 2170680
aguacuguuugacaaaccg

SEQ ID NO: 2170682 - RNA, 19 nt, Artificial Sequence
  Description of Artificial Sequence: Synthetic oligonucleotide
  Sense strand starting at position 5 of SEQ ID NO: 1883115
ugccgugagacugaugaca

SEQ ID NO: 2170683 - RNA, 19 nt, Artificial Sequence
  Description of Artificial Sequence: Synthetic oligonucleotide
  Antisense strand to SEQ ID NO: 2170682
ugucaucagucucacggca

SEQ ID NO: 2170684 - RNA, 19 nt, Artificial Sequence
  Description of Artificial Sequence: Synthetic oligonucleotide
  Sense strand starting at position 148 of SEQ ID NO: 1883115
gaaucaucgagauggguaa

SEQ ID NO: 2170685 - RNA, 19 nt, Artificial Sequence
  Description of Artificial Sequence: Synthetic oligonucleotide
  Antisense strand to SEQ ID NO: 2170684
uuacccaucucgaugauuc

SEQ ID NO: 2170686 - RNA, 19 nt, Artificial Sequence
  Description of Artificial Sequence: Synthetic oligonucleotide
  Sense strand starting at position 149 of SEQ ID NO: 1883115
aaucaucgagauggguaaa

SEQ ID NO: 2170687 - RNA, 19 nt, Artificial Sequence
  Description of Artificial Sequence: Synthetic oligonucleotide
  Antisense strand to SEQ ID NO: 2170686
uuuacccaucucgaugauu

SEQ ID NO: 2170688 - RNA, 19 nt, Artificial Sequence
  Description of Artificial Sequence: Synthetic oligonucleotide
  Sense strand starting at position 202 of SEQ ID NO: 1883115
ucaguagagaagugaguua

SEQ ID NO: 2170689 - RNA, 19 nt, Artificial Sequence
  Description of Artificial Sequence: Synthetic oligonucleotide
  Antisense strand to SEQ ID NO: 2170688
uaacucacuucucuacuga

SEQ ID NO: 2170690 - RNA, 19 nt, Artificial Sequence
  Description of Artificial Sequence: Synthetic oligonucleotide
  Sense strand starting at position 323 of SEQ ID NO: 1883115
guaguagccagaggaauag

SEQ ID NO: 2170691 - RNA, 19 nt, Artificial Sequence
  Description of Artificial Sequence: Synthetic oligonucleotide
  Antisense strand to SEQ ID NO: 2170690
cuauuccucuggcuacuac

SEQ ID NO: 2170692 - RNA, 19 nt, Artificial Sequence
  Description of Artificial Sequence: Synthetic oligonucleotide
  Sense strand starting at position 349 of SEQ ID NO: 1883115
aagaaugaguggucaacca

SEQ ID NO: 2170693 - RNA, 19 nt, Artificial Sequence
  Description of Artificial Sequence: Synthetic oligonucleotide
  Antisense strand to SEQ ID NO: 2170692
ugguugaccacucauucuu

SEQ ID NO: 2170694 - RNA, 19 nt, Artificial Sequence
  Description of Artificial Sequence: Synthetic oligonucleotide
  Sense strand starting at position 429 of SEQ ID NO: 1883115
ugaaguuauugaguccaug

SEQ ID NO: 2170695 - RNA, 19 nt, Artificial Sequence
  Description of Artificial Sequence: Synthetic oligonucleotide
  Antisense strand to SEQ ID NO: 2170694
cauggacucaauaacuuca

SEQ ID NO: 2170696 - RNA, 19 nt, Artificial Sequence
  Description of Artificial Sequence: Synthetic oligonucleotide
  Sense strand starting at position 575 of SEQ ID NO: 1883115
ggaauucgagugcaagaug

SEQ ID NO: 2170697 - RNA, 19 nt, Artificial Sequence
  Description of Artificial Sequence: Synthetic oligonucleotide
  Antisense strand to SEQ ID NO: 2170696
caucuugcacucgaauucc

SEQ ID NO: 2170698 - RNA, 19 nt, Artificial Sequence
  Description of Artificial Sequence: Synthetic oligonucleotide
  Sense strand starting at position 991 of SEQ ID NO: 1883115
aggacugauccaugacuuc

SEQ ID NO: 2170699 - RNA, 19 nt, Artificial Sequence
  Description of Artificial Sequence: Synthetic oligonucleotide
  Antisense strand to SEQ ID NO: 2170698
gaagucauggaucaguccu

SEQ ID NO: 2170700 - RNA, 19 nt, Artificial Sequence
  Description of Artificial Sequence: Synthetic oligonucleotide
  Sense strand starting at position 1003 of SEQ ID NO: 1883115
ugacuucuauuaguagaga

SEQ ID NO: 2170701 - RNA, 19 nt, Artificial Sequence
  Description of Artificial Sequence: Synthetic oligonucleotide
  Antisense strand to SEQ ID NO: 2170700
ucucuacuaauagaaguca

SEQ ID NO: 2170702 - RNA, 19 nt, Artificial Sequence
  Description of Artificial Sequence: Synthetic oligonucleotide
  Sense strand starting at position 1349 of SEQ ID NO: 1883115
gugcuaagaagugaaaguu

SEQ ID NO: 2170703 - RNA, 19 nt, Artificial Sequence
  Description of Artificial Sequence: Synthetic oligonucleotide
  Antisense strand to SEQ ID NO: 2170702
aacuuucacuucuuagcac

SEQ ID NO: 2170704 - RNA, 19 nt, Artificial Sequence
  Description of Artificial Sequence: Synthetic oligonucleotide
  Sense strand starting at position 1355 of SEQ ID NO: 1883115
agaagugaaaguugaacuu

SEQ ID NO: 2170705 - RNA, 19 nt, Artificial Sequence
  Description of Artificial Sequence: Synthetic oligonucleotide
  Antisense strand to SEQ ID NO: 2170704
aaguucaacuuucacuucu

SEQ ID NO: 2170706 - RNA, 19 nt, Artificial Sequence
  Description of Artificial Sequence: Synthetic oligonucleotide
  Sense strand starting at position 1364 of SEQ ID NO: 1883115
aguugaacuugacuaucaa

SEQ ID NO: 2170707 - RNA, 19 nt, Artificial Sequence
  Description of Artificial Sequence: Synthetic oligonucleotide
  Antisense strand to SEQ ID NO: 2170706
uugauagucaaguucaacu

SEQ ID NO: 2170708 - RNA, 19 nt, Artificial Sequence
  Description of Artificial Sequence: Synthetic oligonucleotide
  Sense strand starting at position 1528 of SEQ ID NO: 1883115
ccaagaguaggugagucua

SEQ ID NO: 2170709 - RNA, 19 nt, Artificial Sequence
  Description of Artificial Sequence: Synthetic oligonucleotide
  Antisense strand to SEQ ID NO: 2170708
uagacucaccuacucuugg

SEQ ID NO: 2170710 - RNA, 19 nt, Artificial Sequence
  Description of Artificial Sequence: Synthetic oligonucleotide
  Sense strand starting at position 1575 of SEQ ID NO: 1883115
aagaaaucagcauguagug

SEQ ID NO: 2170711 - RNA, 19 nt, Artificial Sequence
  Description of Artificial Sequence: Synthetic oligonucleotide
  Antisense strand to SEQ ID NO: 2170710
cacuacaugcugauuucuu

SEQ ID NO: 2170712 - RNA, 19 nt, Artificial Sequence
  Description of Artificial Sequence: Synthetic oligonucleotide
  Sense strand starting at position 1771 of SEQ ID NO: 1883115
uuagauguaucccuagaua

SEQ ID NO: 2170713 - RNA, 19 nt, Artificial Sequence
  Description of Artificial Sequence: Synthetic oligonucleotide
  Antisense strand to SEQ ID NO: 2170712
uaucuagggauacaucuaa

SEQ ID NO: 2170714 - RNA, 19 nt, Artificial Sequence
  Description of Artificial Sequence: Synthetic oligonucleotide
  Sense strand starting at position 1774 of SEQ ID NO: 1883115
gauguaucccuagauaguc

SEQ ID NO: 2170715 - RNA, 19 nt, Artificial Sequence
  Description of Artificial Sequence: Synthetic oligonucleotide
  Antisense strand to SEQ ID NO: 2170714
gacuaucuagggauacauc

SEQ ID NO: 2170716 - RNA, 19 nt, Artificial Sequence
  Description of Artificial Sequence: Synthetic oligonucleotide
  Sense strand starting at position 1806 of SEQ ID NO: 1883115
augagucucccaugaaagg

SEQ ID NO: 2170717 - RNA, 19 nt, Artificial Sequence
  Description of Artificial Sequence: Synthetic oligonucleotide
  Antisense strand to SEQ ID NO: 2170716
ccuuucaugggagacucau

SEQ ID NO: 2170718 - RNA, 19 nt, Artificial Sequence
  Description of Artificial Sequence: Synthetic oligonucleotide
  Sense strand starting at position 1999 of SEQ ID NO: 1883115
agauaaaugcgcgaaugac

SEQ ID NO: 2170719 - RNA, 19 nt, Artificial Sequence
  Description of Artificial Sequence: Synthetic oligonucleotide
  Antisense strand to SEQ ID NO: 2170718
gucauucgcgcauuuaucu

SEQ ID NO: 2170720 - RNA, 19 nt, Artificial Sequence
  Description of Artificial Sequence: Synthetic oligonucleotide
  Sense strand starting at position 2008 of SEQ ID NO: 1883115
cgcgaaugacuaugaagaa

SEQ ID NO: 2170721 - RNA, 19 nt, Artificial Sequence
  Description of Artificial Sequence: Synthetic oligonucleotide
  Antisense strand to SEQ ID NO: 2170720
uucuucauagucauucgcg

SEQ ID NO: 2170722 - RNA, 19 nt, Artificial Sequence
  Description of Artificial Sequence: Synthetic oligonucleotide
  Sense strand starting at position 2086 of SEQ ID NO: 1883115
cucugaguccuagagagug

SEQ ID NO: 2170723 - RNA, 19 nt, Artificial Sequence
  Description of Artificial Sequence: Synthetic oligonucleotide
  Antisense strand to SEQ ID NO: 2170722
cacucucuaggacucagag

SEQ ID NO: 2170724 - RNA, 19 nt, Artificial Sequence
  Description of Artificial Sequence: Synthetic oligonucleotide
  Sense strand starting at position 2091 of SEQ ID NO: 1883115
aguccuagagagugagaau

SEQ ID NO: 2170725 - RNA, 19 nt, Artificial Sequence
  Description of Artificial Sequence: Synthetic oligonucleotide
  Antisense strand to SEQ ID NO: 2170724
auucucacucucuaggacu

SEQ ID NO: 2170726 - RNA, 19 nt, Artificial Sequence
  Description of Artificial Sequence: Synthetic oligonucleotide
  Sense strand starting at position 2100 of SEQ ID NO: 1883115
gagugagaauuggccagaa

SEQ ID NO: 2170727 - RNA, 19 nt, Artificial Sequence
  Description of Artificial Sequence: Synthetic oligonucleotide
  Antisense strand to SEQ ID NO: 2170726
uucuggccaauucucacuc

SEQ ID NO: 2170728 - RNA, 19 nt, Artificial Sequence
  Description of Artificial Sequence: Synthetic oligonucleotide
  Sense strand starting at position 2205 of SEQ ID NO: 1883115
uuacaaucaguuggaagua

SEQ ID NO: 2170729 - RNA, 19 nt, Artificial Sequence
  Description of Artificial Sequence: Synthetic oligonucleotide
  Antisense strand to SEQ ID NO: 2170728
uacuuccaacugauuguaa

SEQ ID NO: 2170730 - RNA, 19 nt, Artificial Sequence
  Description of Artificial Sequence: Synthetic oligonucleotide
  Sense strand starting at position 2210 of SEQ ID NO: 1883115
aucaguuggaaguaguaga

SEQ ID NO: 2170731 - RNA, 19 nt, Artificial Sequence
  Description of Artificial Sequence: Synthetic oligonucleotide
  Antisense strand to SEQ ID NO: 2170730
ucuacuacuuccaacugau

SEQ ID NO: 2170732 - RNA, 19 nt, Artificial Sequence
  Description of Artificial Sequence: Synthetic oligonucleotide
  Sense strand starting at position 2308 of SEQ ID NO: 1883115
ggcuaaauuccagaugcug

SEQ ID NO: 2170733 - RNA, 19 nt, Artificial Sequence
  Description of Artificial Sequence: Synthetic oligonucleotide
  Antisense strand to SEQ ID NO: 2170732
cagcaucuggaauuuagcc

SEQ ID NO: 2170734 - RNA, 19 nt, Artificial Sequence
  Description of Artificial Sequence: Synthetic oligonucleotide
  Sense strand starting at position 2461 of SEQ ID NO: 1883115
aggucuguacaucaaacau

SEQ ID NO: 2170735 - RNA, 19 nt, Artificial Sequence
  Description of Artificial Sequence: Synthetic oligonucleotide
  Antisense strand to SEQ ID NO: 2170734
auguuugauguacagaccu

SEQ ID NO: 2170736 - RNA, 19 nt, Artificial Sequence
  Description of Artificial Sequence: Synthetic oligonucleotide
  Sense strand starting at position 2680 of SEQ ID NO: 1883115
agugucaugagaggaauua

SEQ ID NO: 2170737 - RNA, 19 nt, Artificial Sequence
  Description of Artificial Sequence: Synthetic oligonucleotide
  Antisense strand to SEQ ID NO: 2170736
uaauuccucucaugacacu

SEQ ID NO: 2170738 - RNA, 19 nt, Artificial Sequence
  Description of Artificial Sequence: Synthetic oligonucleotide
  Sense strand starting at position 2765 of SEQ ID NO: 1883115
gagggaguuggcuaaguug

SEQ ID NO: 2170739 - RNA, 19 nt, Artificial Sequence
  Description of Artificial Sequence: Synthetic oligonucleotide
  Antisense strand to SEQ ID NO: 2170738
caacuuagccaacucccuc

SEQ ID NO: 2170740 - RNA, 19 nt, Artificial Sequence
  Description of Artificial Sequence: Synthetic oligonucleotide
  Sense strand starting at position 3008 of SEQ ID NO: 1883115
acgagaaagcucugagaug

SEQ ID NO: 2170741 - RNA, 19 nt, Artificial Sequence
  Description of Artificial Sequence: Synthetic oligonucleotide
  Antisense strand to SEQ ID NO: 2170740
caucucagagcuuucucgu

SEQ ID NO: 2170742 - RNA, 19 nt, Artificial Sequence
  Description of Artificial Sequence: Synthetic oligonucleotide
  Sense strand starting at position 3103 of SEQ ID NO: 1883115
uguggcaauaaucacgaaa

SEQ ID NO: 2170743 - RNA, 19 nt, Artificial Sequence
  Description of Artificial Sequence: Synthetic oligonucleotide
  Antisense strand to SEQ ID NO: 2170742
uuucgugauuauugccaca

SEQ ID NO: 2170744 - RNA, 19 nt, Artificial Sequence
  Description of Artificial Sequence: Synthetic oligonucleotide
  Sense strand starting at position 3345 of SEQ ID NO: 1883115
ugaguacguaacuaguaau

SEQ ID NO: 2170745 - RNA, 19 nt, Artificial Sequence
  Description of Artificial Sequence: Synthetic oligonucleotide
  Antisense strand to SEQ ID NO: 2170744
auuacuaguuacguacuca

SEQ ID NO: 2170746 - RNA, 19 nt, Artificial Sequence
  Description of Artificial Sequence: Synthetic oligonucleotide
  Sense strand starting at position 3405 of SEQ ID NO: 1883115
gagaaauugccacagugcu

SEQ ID NO: 2170747 - RNA, 19 nt, Artificial Sequence
  Description of Artificial Sequence: Synthetic oligonucleotide
  Antisense strand to SEQ ID NO: 2170746
agcacuguggcaauuucuc

SEQ ID NO: 2170748 - RNA, 19 nt, Artificial Sequence
  Description of Artificial Sequence: Synthetic oligonucleotide
  Sense strand starting at position 3614 of SEQ ID NO: 1883115
gggugaugaaaguaucugu

SEQ ID NO: 2170749 - RNA, 19 nt, Artificial Sequence
  Description of Artificial Sequence: Synthetic oligonucleotide
  Antisense strand to SEQ ID NO: 2170748
acagauacuuucaucaccc

SEQ ID NO: 2170750 - RNA, 19 nt, Artificial Sequence
  Description of Artificial Sequence: Synthetic oligonucleotide
  Sense strand starting at position 3617 of SEQ ID NO: 1883115
ugaugaaaguaucuguaua

SEQ ID NO: 2170751 - RNA, 19 nt, Artificial Sequence
  Description of Artificial Sequence: Synthetic oligonucleotide
  Antisense strand to SEQ ID NO: 2170750
uauacagauacuuucauca

SEQ ID NO: 2170752 - RNA, 19 nt, Artificial Sequence
  Description of Artificial Sequence: Synthetic oligonucleotide
  Sense strand starting at position 3619 of SEQ ID NO: 1883115
augaaaguaucuguauaac

SEQ ID NO: 2170753 - RNA, 19 nt, Artificial Sequence
  Description of Artificial Sequence: Synthetic oligonucleotide
  Antisense strand to SEQ ID NO: 2170752
guuauacagauacuuucau

SEQ ID NO: 2170754 - RNA, 19 nt, Artificial Sequence
  Description of Artificial Sequence: Synthetic oligonucleotide
  Sense strand starting at position 3653 of SEQ ID NO: 1883115
gaguuucccuagguaacaa

SEQ ID NO: 2170755 - RNA, 19 nt, Artificial Sequence
  Description of Artificial Sequence: Synthetic oligonucleotide
  Antisense strand to SEQ ID NO: 2170754
uuguuaccuagggaaacuc

SEQ ID NO: 2170756 - RNA, 19 nt, Artificial Sequence
  Description of Artificial Sequence: Synthetic oligonucleotide
  Sense strand starting at position 3808 of SEQ ID NO: 1883115
acaauuaagaguugaguug

SEQ ID NO: 2170757 - RNA, 19 nt, Artificial Sequence
  Description of Artificial Sequence: Synthetic oligonucleotide
  Antisense strand to SEQ ID NO: 2170756
caacucaacucuuaauugu

SEQ ID NO: 2170758 - RNA, 19 nt, Artificial Sequence
  Description of Artificial Sequence: Synthetic oligonucleotide
  Sense strand starting at position 3819 of SEQ ID NO: 1883115
uugaguugaccuugauauu

SEQ ID NO: 2170759 - RNA, 19 nt, Artificial Sequence
  Description of Artificial Sequence: Synthetic oligonucleotide
  Antisense strand to SEQ ID NO: 2170758
aauaucaaggucaacucaa

SEQ ID NO: 2170760 - RNA, 19 nt, Artificial Sequence
  Description of Artificial Sequence: Synthetic oligonucleotide
  Sense strand starting at position 3967 of SEQ ID NO: 1883115
ccuguaaugcuuuaugaau

SEQ ID NO: 2170761 - RNA, 19 nt, Artificial Sequence
  Description of Artificial Sequence: Synthetic oligonucleotide
  Antisense strand to SEQ ID NO: 2170760
auucauaaagcauuacagg

SEQ ID NO: 2170762 - RNA, 19 nt, Artificial Sequence
  Description of Artificial Sequence: Synthetic oligonucleotide
  Sense strand starting at position 114 of SEQ ID NO: 1883116
uuugguauacucuaggauu

SEQ ID NO: 2170763 - RNA, 19 nt, Artificial Sequence
  Description of Artificial Sequence: Synthetic oligonucleotide
  Antisense strand to SEQ ID NO: 2170762
aauccuagaguauaccaaa

SEQ ID NO: 2170764 - RNA, 19 nt, Artificial Sequence
  Description of Artificial Sequence: Synthetic oligonucleotide
  Sense strand starting at position 268 of SEQ ID NO: 1883116
ucauuugacgucugcacuu

SEQ ID NO: 2170765 - RNA, 19 nt, Artificial Sequence
  Description of Artificial Sequence: Synthetic oligonucleotide
  Antisense strand to SEQ ID NO: 2170764
aagugcagacgucaaauga

SEQ ID NO: 2170766 - RNA, 19 nt, Artificial Sequence
  Description of Artificial Sequence: Synthetic oligonucleotide
  Sense strand starting at position 281 of SEQ ID NO: 1883116
gcacuugaaugucuuuaaa

SEQ ID NO: 2170767 - RNA, 19 nt, Artificial Sequence
  Description of Artificial Sequence: Synthetic oligonucleotide
  Antisense strand to SEQ ID NO: 2170766
uuuaaagacauucaagugc

SEQ ID NO: 2170768 - RNA, 19 nt, Artificial Sequence
  Description of Artificial Sequence: Synthetic oligonucleotide
  Sense strand starting at position 661 of SEQ ID NO: 1883116
cuuuguuguguacauccua

SEQ ID NO: 2170769 - RNA, 19 nt, Artificial Sequence
  Description of Artificial Sequence: Synthetic oligonucleotide
  Antisense strand to SEQ ID NO: 2170768
uaggauguacacaacaaag

SEQ ID NO: 2170770 - RNA, 19 nt, Artificial Sequence
  Description of Artificial Sequence: Synthetic oligonucleotide
  Sense strand starting at position 879 of SEQ ID NO: 1883116
gaacauguuucucucaggu

SEQ ID NO: 2170771 - RNA, 19 nt, Artificial Sequence
  Description of Artificial Sequence: Synthetic oligonucleotide
  Antisense strand to SEQ ID NO: 2170770
accugagagaaacauguuc

SEQ ID NO: 2170772 - RNA, 19 nt, Artificial Sequence
  Description of Artificial Sequence: Synthetic oligonucleotide
  Sense strand starting at position 1075 of SEQ ID NO: 1883116
auuuaaugccuguguucuc

SEQ ID NO: 2170773 - RNA, 19 nt, Artificial Sequence
  Description of Artificial Sequence: Synthetic oligonucleotide
  Antisense strand to SEQ ID NO: 2170772
gagaacacaggcauuaaau

SEQ ID NO: 2170774 - RNA, 19 nt, Artificial Sequence
  Description of Artificial Sequence: Synthetic oligonucleotide
  Sense strand starting at position 1106 of SEQ ID NO: 1883116
gggacauuugucugcuuug

SEQ ID NO: 2170775 - RNA, 19 nt, Artificial Sequence
  Description of Artificial Sequence: Synthetic oligonucleotide
  Antisense strand to SEQ ID NO: 2170774
caaagcagacaaauguccc

SEQ ID NO: 2170776 - RNA, 19 nt, Artificial Sequence
  Description of Artificial Sequence: Synthetic oligonucleotide
  Sense strand starting at position 1174 of SEQ ID NO: 1883116
ugcugagucacugaaugaa

SEQ ID NO: 2170777 - RNA, 19 nt, Artificial Sequence
  Description of Artificial Sequence: Synthetic oligonucleotide
  Antisense strand to SEQ ID NO: 2170776
uucauucagugacucagca

SEQ ID NO: 2170778 - RNA, 19 nt, Artificial Sequence
  Description of Artificial Sequence: Synthetic oligonucleotide
  Sense strand starting at position 1190 of SEQ ID NO: 1883116
gaaugaaucuacguauuac

SEQ ID NO: 2170779 - RNA, 19 nt, Artificial Sequence
  Description of Artificial Sequence: Synthetic oligonucleotide
  Antisense strand to SEQ ID NO: 2170778
guaauacguagauucauuc

SEQ ID NO: 2170780 - RNA, 19 nt, Artificial Sequence
  Description of Artificial Sequence: Synthetic oligonucleotide
  Sense strand starting at position 1215 of SEQ ID NO: 1883116
gcuguuguggauugggaua

SEQ ID NO: 2170781 - RNA, 19 nt, Artificial Sequence
  Description of Artificial Sequence: Synthetic oligonucleotide
  Antisense strand to SEQ ID NO: 2170780
uaucccaauccacaacagc

SEQ ID NO: 2170782 - RNA, 19 nt, Artificial Sequence
  Description of Artificial Sequence: Synthetic oligonucleotide
  Sense strand starting at position 1220 of SEQ ID NO: 1883116
uguggauugggauauguau

SEQ ID NO: 2170783 - RNA, 19 nt, Artificial Sequence
  Description of Artificial Sequence: Synthetic oligonucleotide
  Antisense strand to SEQ ID NO: 2170782
auacauaucccaauccaca

SEQ ID NO: 2170784 - RNA, 19 nt, Artificial Sequence
  Description of Artificial Sequence: Synthetic oligonucleotide
  Sense strand starting at position 1222 of SEQ ID NO: 1883116
uggauugggauauguauga

SEQ ID NO: 2170785 - RNA, 19 nt, Artificial Sequence
  Description of Artificial Sequence: Synthetic oligonucleotide
  Antisense strand to SEQ ID NO: 2170784
ucauacauaucccaaucca

SEQ ID NO: 2170786 - RNA, 19 nt, Artificial Sequence
  Description of Artificial Sequence: Synthetic oligonucleotide
  Sense strand starting at position 1229 of SEQ ID NO: 1883116
ggauauguaugagaagaga

SEQ ID NO: 2170787 - RNA, 19 nt, Artificial Sequence
  Description of Artificial Sequence: Synthetic oligonucleotide
  Antisense strand to SEQ ID NO: 2170786
ucucuucucauacauaucc

SEQ ID NO: 2170788 - RNA, 19 nt, Artificial Sequence
  Description of Artificial Sequence: Synthetic oligonucleotide
  Sense strand starting at position 1269 of SEQ ID NO: 1883116
ggagaugcuuuaucacucu

SEQ ID NO: 2170789 - RNA, 19 nt, Artificial Sequence
  Description of Artificial Sequence: Synthetic oligonucleotide
  Antisense strand to SEQ ID NO: 2170788
agagugauaaagcaucucc

SEQ ID NO: 2170790 - RNA, 19 nt, Artificial Sequence
  Description of Artificial Sequence: Synthetic oligonucleotide
  Sense strand starting at position 1619 of SEQ ID NO: 1883116
uccuguucugugcaggaaa

SEQ ID NO: 2170791 - RNA, 19 nt, Artificial Sequence
  Description of Artificial Sequence: Synthetic oligonucleotide
  Antisense strand to SEQ ID NO: 2170790
uuuccugcacagaacagga

SEQ ID NO: 2170792 - RNA, 19 nt, Artificial Sequence
  Description of Artificial Sequence: Synthetic oligonucleotide
  Sense strand starting at position 1705 of SEQ ID NO: 1883116
aauggcgaugcagauauaa

SEQ ID NO: 2170793 - RNA, 19 nt, Artificial Sequence
  Description of Artificial Sequence: Synthetic oligonucleotide
  Antisense strand to SEQ ID NO: 2170792
uuauaucugcaucgccauu

SEQ ID NO: 2170794 - RNA, 19 nt, Artificial Sequence
  Description of Artificial Sequence: Synthetic oligonucleotide
  Sense strand starting at position 1707 of SEQ ID NO: 1883116
uggcgaugcagauauaaua

SEQ ID NO: 2170795 - RNA, 19 nt, Artificial Sequence
  Description of Artificial Sequence: Synthetic oligonucleotide
  Antisense strand to SEQ ID NO: 2170794
uauuauaucugcaucgcca

SEQ ID NO: 2170796 - RNA, 19 nt, Artificial Sequence
  Description of Artificial Sequence: Synthetic oligonucleotide
  Sense strand starting at position 2018 of SEQ ID NO: 1883116
ggcccuuuggcucaaggaa

SEQ ID NO: 2170797 - RNA, 19 nt, Artificial Sequence
  Description of Artificial Sequence: Synthetic oligonucleotide
  Antisense strand to SEQ ID NO: 2170796
uuccuugagccaaagggcc

SEQ ID NO: 2170798 - RNA, 19 nt, Artificial Sequence
  Description of Artificial Sequence: Synthetic oligonucleotide
  Sense strand starting at position 2111 of SEQ ID NO: 1883116
agggauuucucugaaacag

SEQ ID NO: 2170799 - RNA, 19 nt, Artificial Sequence
  Description of Artificial Sequence: Synthetic oligonucleotide
  Antisense strand to SEQ ID NO: 2170798
cuguuucagagaaaucccu

SEQ ID NO: 2170800 - RNA, 19 nt, Artificial Sequence
  Description of Artificial Sequence: Synthetic oligonucleotide
  Sense strand starting at position 2427 of SEQ ID NO: 1883116
uguccucuguuauuagaau

SEQ ID NO: 2170801 - RNA, 19 nt, Artificial Sequence
  Description of Artificial Sequence: Synthetic oligonucleotide
  Antisense strand to SEQ ID NO: 2170800
auucuaauaacagaggaca

SEQ ID NO: 2170802 - RNA, 19 nt, Artificial Sequence
  Description of Artificial Sequence: Synthetic oligonucleotide
  Sense strand starting at position 2528 of SEQ ID NO: 1883116
ccacucugguuccugaauu

SEQ ID NO: 2170803 - RNA, 19 nt, Artificial Sequence
  Description of Artificial Sequence: Synthetic oligonucleotide
  Antisense strand to SEQ ID NO: 2170802
aauucaggaaccagagugg

SEQ ID NO: 2170804 - RNA, 19 nt, Artificial Sequence
  Description of Artificial Sequence: Synthetic oligonucleotide
  Sense strand starting at position 2567 of SEQ ID NO: 1883116
gucaaauuucuuuguaagu

SEQ ID NO: 2170805 - RNA, 19 nt, Artificial Sequence
  Description of Artificial Sequence: Synthetic oligonucleotide
  Antisense strand to SEQ ID NO: 2170804
acuuacaaagaaauuugac

SEQ ID NO: 2170806 - RNA, 19 nt, Artificial Sequence
  Description of Artificial Sequence: Synthetic oligonucleotide
  Sense strand starting at position 2690 of SEQ ID NO: 1883116
aaccuuuaguucccgaagu

SEQ ID NO: 2170807 - RNA, 19 nt, Artificial Sequence
  Description of Artificial Sequence: Synthetic oligonucleotide
  Antisense strand to SEQ ID NO: 2170806
acuucgggaacuaaagguu

SEQ ID NO: 2170808 - RNA, 19 nt, Artificial Sequence
  Description of Artificial Sequence: Synthetic oligonucleotide
  Sense strand starting at position 2757 of SEQ ID NO: 1883116
cuuuguuuacgagaagaac

SEQ ID NO: 2170809 - RNA, 19 nt, Artificial Sequence
  Description of Artificial Sequence: Synthetic oligonucleotide
  Antisense strand to SEQ ID NO: 2170808
guucuucucguaaacaaag

SEQ ID NO: 2170810 - RNA, 19 nt, Artificial Sequence
  Description of Artificial Sequence: Synthetic oligonucleotide
  Sense strand starting at position 2801 of SEQ ID NO: 1883116
cuuugaguucuggaauacu

SEQ ID NO: 2170811 - RNA, 19 nt, Artificial Sequence
  Description of Artificial Sequence: Synthetic oligonucleotide
  Antisense strand to SEQ ID NO: 2170810
aguauuccagaacucaaag

SEQ ID NO: 2170812 - RNA, 19 nt, Artificial Sequence
  Description of Artificial Sequence: Synthetic oligonucleotide
  Sense strand starting at position 2804 of SEQ ID NO: 1883116
ugaguucuggaauacuguu

SEQ ID NO: 2170813 - RNA, 19 nt, Artificial Sequence
  Description of Artificial Sequence: Synthetic oligonucleotide
  Antisense strand to SEQ ID NO: 2170812
aacaguauuccagaacuca

SEQ ID NO: 2170814 - RNA, 19 nt, Artificial Sequence
  Description of Artificial Sequence: Synthetic oligonucleotide
  Sense strand starting at position 2810 of SEQ ID NO: 1883116
cuggaauacuguucuaaga

SEQ ID NO: 2170815 - RNA, 19 nt, Artificial Sequence
  Description of Artificial Sequence: Synthetic oligonucleotide
  Antisense strand to SEQ ID NO: 2170814
ucuuagaacaguauuccag

SEQ ID NO: 2170816 - RNA, 19 nt, Artificial Sequence
  Description of Artificial Sequence: Synthetic oligonucleotide
  Sense strand starting at position 2818 of SEQ ID NO: 1883116
cuguucuaagaauacagua

SEQ ID NO: 2170817 - RNA, 19 nt, Artificial Sequence
  Description of Artificial Sequence: Synthetic oligonucleotide
  Antisense strand to SEQ ID NO: 2170816
uacuguauucuuagaacag

SEQ ID NO: 2170818 - RNA, 19 nt, Artificial Sequence
  Description of Artificial Sequence: Synthetic oligonucleotide
  Sense strand starting at position 2924 of SEQ ID NO: 1883116
ugugacuuccauugaggca

SEQ ID NO: 2170819 - RNA, 19 nt, Artificial Sequence
  Description of Artificial Sequence: Synthetic oligonucleotide
  Antisense strand to SEQ ID NO: 2170818
ugccucaauggaagucaca

SEQ ID NO: 2170820 - RNA, 19 nt, Artificial Sequence
  Description of Artificial Sequence: Synthetic oligonucleotide
  Sense strand starting at position 2953 of SEQ ID NO: 1883116
gcacuuacagagcagauua

SEQ ID NO: 2170821 - RNA, 19 nt, Artificial Sequence
  Description of Artificial Sequence: Synthetic oligonucleotide
  Antisense strand to SEQ ID NO: 2170820
uaaucugcucuguaagugc

SEQ ID NO: 2170822 - RNA, 19 nt, Artificial Sequence
  Description of Artificial Sequence: Synthetic oligonucleotide
  Sense strand starting at position 2980 of SEQ ID NO: 1883116
gugagaacugacugaugca

SEQ ID NO: 2170823 - RNA, 19 nt, Artificial Sequence
  Description of Artificial Sequence: Synthetic oligonucleotide
  Antisense strand to SEQ ID NO: 2170822
ugcaucagucaguucucac

SEQ ID NO: 2170824 - RNA, 19 nt, Artificial Sequence
  Description of Artificial Sequence: Synthetic oligonucleotide
  Sense strand starting at position 3052 of SEQ ID NO: 1883116
ggaggagucugaguguuaa

SEQ ID NO: 2170825 - RNA, 19 nt, Artificial Sequence
  Description of Artificial Sequence: Synthetic oligonucleotide
  Antisense strand to SEQ ID NO: 2170824
uuaacacucagacuccucc

SEQ ID NO: 2170826 - RNA, 19 nt, Artificial Sequence
  Description of Artificial Sequence: Synthetic oligonucleotide
  Sense strand starting at position 3261 of SEQ ID NO: 1883116
guuccauagucaucaugga

SEQ ID NO: 2170827 - RNA, 19 nt, Artificial Sequence
  Description of Artificial Sequence: Synthetic oligonucleotide
  Antisense strand to SEQ ID NO: 2170826
uccaugaugacuauggaac

SEQ ID NO: 2170828 - RNA, 19 nt, Artificial Sequence
  Description of Artificial Sequence: Synthetic oligonucleotide
  Sense strand starting at position 3405 of SEQ ID NO: 1883116
uggaaauccugagcuugga

SEQ ID NO: 2170829 - RNA, 19 nt, Artificial Sequence
  Description of Artificial Sequence: Synthetic oligonucleotide
  Antisense strand to SEQ ID NO: 2170828
uccaagcucaggauuucca

SEQ ID NO: 2170830 - RNA, 19 nt, Artificial Sequence
  Description of Artificial Sequence: Synthetic oligonucleotide
  Sense strand starting at position 3649 of SEQ ID NO: 1883116
agguguccucuugagaugu

SEQ ID NO: 2170831 - RNA, 19 nt, Artificial Sequence
  Description of Artificial Sequence: Synthetic oligonucleotide
  Antisense strand to SEQ ID NO: 2170830
acaucucaagaggacaccu

SEQ ID NO: 2170832 - RNA, 19 nt, Artificial Sequence
  Description of Artificial Sequence: Synthetic oligonucleotide
  Sense strand starting at position 3653 of SEQ ID NO: 1883116
guccucuugagaugucgaa

SEQ ID NO: 2170833 - RNA, 19 nt, Artificial Sequence
  Description of Artificial Sequence: Synthetic oligonucleotide
  Antisense strand to SEQ ID NO: 2170832
uucgacaucucaagaggac

SEQ ID NO: 2170834 - RNA, 19 nt, Artificial Sequence
  Description of Artificial Sequence: Synthetic oligonucleotide
  Sense strand starting at position 3729 of SEQ ID NO: 1883116
cccgaaagagacugcuuua

SEQ ID NO: 2170835 - RNA, 19 nt, Artificial Sequence
  Description of Artificial Sequence: Synthetic oligonucleotide
  Antisense strand to SEQ ID NO: 2170834
uaaagcagucucuuucggg

SEQ ID NO: 2170836 - RNA, 19 nt, Artificial Sequence
  Description of Artificial Sequence: Synthetic oligonucleotide
  Sense strand starting at position 3859 of SEQ ID NO: 1883116
guagaagaccacugaguga

SEQ ID NO: 2170837 - RNA, 19 nt, Artificial Sequence
  Description of Artificial Sequence: Synthetic oligonucleotide
  Antisense strand to SEQ ID NO: 2170836
ucacucaguggucuucuac

SEQ ID NO: 2170838 - RNA, 19 nt, Artificial Sequence
  Description of Artificial Sequence: Synthetic oligonucleotide
  Sense strand starting at position 3962 of SEQ ID NO: 1883116
aggagaaagucagaugaug

SEQ ID NO: 2170839 - RNA, 19 nt, Artificial Sequence
  Description of Artificial Sequence: Synthetic oligonucleotide
  Antisense strand to SEQ ID NO: 2170838
caucaucugacuuucuccu

SEQ ID NO: 2170840 - RNA, 19 nt, Artificial Sequence
  Description of Artificial Sequence: Synthetic oligonucleotide
  Sense strand starting at position 3981 of SEQ ID NO: 1883116
ccucuccuuugguucgaaa

SEQ ID NO: 2170841 - RNA, 19 nt, Artificial Sequence
  Description of Artificial Sequence: Synthetic oligonucleotide
  Antisense strand to SEQ ID NO: 2170840
uuucgaaccaaaggagagg

SEQ ID NO: 2170842 - RNA, 19 nt, Artificial Sequence
  Description of Artificial Sequence: Synthetic oligonucleotide
  Sense strand starting at position 70 of SEQ ID NO: 1883117
cagggagcauuauuacacu

SEQ ID NO: 2170843 - RNA, 19 nt, Artificial Sequence
  Description of Artificial Sequence: Synthetic oligonucleotide
  Antisense strand to SEQ ID NO: 2170842
aguguaauaaugcucccug

SEQ ID NO: 2170844 - RNA, 19 nt, Artificial Sequence
  Description of Artificial Sequence: Synthetic oligonucleotide
  Sense strand starting at position 100 of SEQ ID NO: 1883117
agagauaacugagucguaa

SEQ ID NO: 2170845 - RNA, 19 nt, Artificial Sequence
  Description of Artificial Sequence: Synthetic oligonucleotide
  Antisense strand to SEQ ID NO: 2170844
uuacgacucaguuaucucu

SEQ ID NO: 2170846 - RNA, 19 nt, Artificial Sequence
  Description of Artificial Sequence: Synthetic oligonucleotide
  Sense strand starting at position 213 of SEQ ID NO: 1883117
ugaccuccacccuguaaga

SEQ ID NO: 2170847 - RNA, 19 nt, Artificial Sequence
  Description of Artificial Sequence: Synthetic oligonucleotide
  Antisense strand to SEQ ID NO: 2170846
ucuuacaggguggagguca

SEQ ID NO: 2170848 - RNA, 19 nt, Artificial Sequence
  Description of Artificial Sequence: Synthetic oligonucleotide
  Sense strand starting at position 239 of SEQ ID NO: 1883117
uuaccaagcgauugagaag

SEQ ID NO: 2170849 - RNA, 19 nt, Artificial Sequence
  Description of Artificial Sequence: Synthetic oligonucleotide
  Antisense strand to SEQ ID NO: 2170848
cuucucaaucgcuugguaa

SEQ ID NO: 2170850 - RNA, 19 nt, Artificial Sequence
  Description of Artificial Sequence: Synthetic oligonucleotide
  Sense strand starting at position 438 of SEQ ID NO: 1883117
ugcuguugucuggaaauaa

SEQ ID NO: 2170851 - RNA, 19 nt, Artificial Sequence
  Description of Artificial Sequence: Synthetic oligonucleotide
  Antisense strand to SEQ ID NO: 2170850
uuauuuccagacaacagca

SEQ ID NO: 2170852 - RNA, 19 nt, Artificial Sequence
  Description of Artificial Sequence: Synthetic oligonucleotide
  Sense strand starting at position 442 of SEQ ID NO: 1883117
guugucuggaaauaaugca

SEQ ID NO: 2170853 - RNA, 19 nt, Artificial Sequence
  Description of Artificial Sequence: Synthetic oligonucleotide
  Antisense strand to SEQ ID NO: 2170852
ugcauuauuuccagacaac

SEQ ID NO: 2170854 - RNA, 19 nt, Artificial Sequence
  Description of Artificial Sequence: Synthetic oligonucleotide
  Sense strand starting at position 485 of SEQ ID NO: 1883117
ugugcuucccuggaaggau

SEQ ID NO: 2170855 - RNA, 19 nt, Artificial Sequence
  Description of Artificial Sequence: Synthetic oligonucleotide
  Antisense strand to SEQ ID NO: 2170854
auccuuccagggaagcaca

SEQ ID NO: 2170856 - RNA, 19 nt, Artificial Sequence
  Description of Artificial Sequence: Synthetic oligonucleotide
  Sense strand starting at position 547 of SEQ ID NO: 1883117
ccucuuacucaggagcuuu

SEQ ID NO: 2170857 - RNA, 19 nt, Artificial Sequence
  Description of Artificial Sequence: Synthetic oligonucleotide
  Antisense strand to SEQ ID NO: 2170856
aaagcuccugaguaagagg

SEQ ID NO: 2170858 - RNA, 19 nt, Artificial Sequence
  Description of Artificial Sequence: Synthetic oligonucleotide
  Sense strand starting at position 712 of SEQ ID NO: 1883117
aggacuugccgguaaccua

SEQ ID NO: 2170859 - RNA, 19 nt, Artificial Sequence
  Description of Artificial Sequence: Synthetic oligonucleotide
  Antisense strand to SEQ ID NO: 2170858
uagguuaccggcaaguccu

SEQ ID NO: 2170860 - RNA, 19 nt, Artificial Sequence
  Description of Artificial Sequence: Synthetic oligonucleotide
  Sense strand starting at position 766 of SEQ ID NO: 1883117
auguuaugcauuuguaugu

SEQ ID NO: 2170861 - RNA, 19 nt, Artificial Sequence
  Description of Artificial Sequence: Synthetic oligonucleotide
  Antisense strand to SEQ ID NO: 2170860
acauacaaaugcauaacau

SEQ ID NO: 2170862 - RNA, 19 nt, Artificial Sequence
  Description of Artificial Sequence: Synthetic oligonucleotide
  Sense strand starting at position 798 of SEQ ID NO: 1883117
ugcucagaagcugaagaua

SEQ ID NO: 2170863 - RNA, 19 nt, Artificial Sequence
  Description of Artificial Sequence: Synthetic oligonucleotide
  Antisense strand to SEQ ID NO: 2170862
uaucuucagcuucugagca

SEQ ID NO: 2170864 - RNA, 19 nt, Artificial Sequence
  Description of Artificial Sequence: Synthetic oligonucleotide
  Sense strand starting at position 926 of SEQ ID NO: 1883117
uuguuugcuagaggaagaa

SEQ ID NO: 2170865 - RNA, 19 nt, Artificial Sequence
  Description of Artificial Sequence: Synthetic oligonucleotide
  Antisense strand to SEQ ID NO: 2170864
uucuuccucuagcaaacaa

SEQ ID NO: 2170866 - RNA, 19 nt, Artificial Sequence
  Description of Artificial Sequence: Synthetic oligonucleotide
  Sense strand starting at position 1192 of SEQ ID NO: 1883117
gugaccuaguuauccaaga

SEQ ID NO: 2170867 - RNA, 19 nt, Artificial Sequence
  Description of Artificial Sequence: Synthetic oligonucleotide
  Antisense strand to SEQ ID NO: 2170866
ucuuggauaacuaggucac

SEQ ID NO: 2170868 - RNA, 19 nt, Artificial Sequence
  Description of Artificial Sequence: Synthetic oligonucleotide
  Sense strand starting at position 1193 of SEQ ID NO: 1883117
ugaccuaguuauccaagaa

SEQ ID NO: 2170869 - RNA, 19 nt, Artificial Sequence
  Description of Artificial Sequence: Synthetic oligonucleotide
  Antisense strand to SEQ ID NO: 2170868
uucuuggauaacuagguca

SEQ ID NO: 2170870 - RNA, 19 nt, Artificial Sequence
  Description of Artificial Sequence: Synthetic oligonucleotide
  Sense strand starting at position 1237 of SEQ ID NO: 1883117
aacuguuugcuacaugaga

SEQ ID NO: 2170871 - RNA, 19 nt, Artificial Sequence
  Description of Artificial Sequence: Synthetic oligonucleotide
  Antisense strand to SEQ ID NO: 2170870
ucucauguagcaaacaguu

SEQ ID NO: 2170872 - RNA, 19 nt, Artificial Sequence
  Description of Artificial Sequence: Synthetic oligonucleotide
  Sense strand starting at position 1267 of SEQ ID NO: 1883117
caaagacaugcuggauguu

SEQ ID NO: 2170873 - RNA, 19 nt, Artificial Sequence
  Description of Artificial Sequence: Synthetic oligonucleotide
  Antisense strand to SEQ ID NO: 2170872
aacauccagcaugucuuug

SEQ ID NO: 2170874 - RNA, 19 nt, Artificial Sequence
  Description of Artificial Sequence: Synthetic oligonucleotide
  Sense strand starting at position 1768 of SEQ ID NO: 1883117
aaagauacagugugcaaga

SEQ ID NO: 2170875 - RNA, 19 nt, Artificial Sequence
  Description of Artificial Sequence: Synthetic oligonucleotide
  Antisense strand to SEQ ID NO: 2170874
ucuugcacacuguaucuuu

SEQ ID NO: 2170876 - RNA, 19 nt, Artificial Sequence
  Description of Artificial Sequence: Synthetic oligonucleotide
  Sense strand starting at position 1790 of SEQ ID NO: 1883117
cagugagugcuuggaagaa

SEQ ID NO: 2170877 - RNA, 19 nt, Artificial Sequence
  Description of Artificial Sequence: Synthetic oligonucleotide
  Antisense strand to SEQ ID NO: 2170876
uucuuccaagcacucacug

SEQ ID NO: 2170878 - RNA, 19 nt, Artificial Sequence
  Description of Artificial Sequence: Synthetic oligonucleotide
  Sense strand starting at position 1837 of SEQ ID NO: 1883117
ggcaaaguaguugaaaucu

SEQ ID NO: 2170879 - RNA, 19 nt, Artificial Sequence
  Description of Artificial Sequence: Synthetic oligonucleotide
  Antisense strand to SEQ ID NO: 2170878
agauuucaacuacuuugcc

SEQ ID NO: 2170880 - RNA, 19 nt, Artificial Sequence
  Description of Artificial Sequence: Synthetic oligonucleotide
  Sense strand starting at position 2049 of SEQ ID NO: 1883117
ggauuaguuagaggugaag

SEQ ID NO: 2170881 - RNA, 19 nt, Artificial Sequence
  Description of Artificial Sequence: Synthetic oligonucleotide
  Antisense strand to SEQ ID NO: 2170880
cuucaccucuaacuaaucc

SEQ ID NO: 2170882 - RNA, 19 nt, Artificial Sequence
  Description of Artificial Sequence: Synthetic oligonucleotide
  Sense strand starting at position 2051 of SEQ ID NO: 1883117
auuaguuagaggugaaguc

SEQ ID NO: 2170883 - RNA, 19 nt, Artificial Sequence
  Description of Artificial Sequence: Synthetic oligonucleotide
  Antisense strand to SEQ ID NO: 2170882
gacuucaccucuaacuaau

SEQ ID NO: 2170884 - RNA, 19 nt, Artificial Sequence
  Description of Artificial Sequence: Synthetic oligonucleotide
  Sense strand starting at position 2287 of SEQ ID NO: 1883117
gucggcuucgagagucauc

SEQ ID NO: 2170885 - RNA, 19 nt, Artificial Sequence
  Description of Artificial Sequence: Synthetic oligonucleotide
  Antisense strand to SEQ ID NO: 2170884
gaugacucucgaagccgac

SEQ ID NO: 2170886 - RNA, 19 nt, Artificial Sequence
  Description of Artificial Sequence: Synthetic oligonucleotide
  Sense strand starting at position 2347 of SEQ ID NO: 1883117
aguccaccuguguaaauau

SEQ ID NO: 2170887 - RNA, 19 nt, Artificial Sequence
  Description of Artificial Sequence: Synthetic oligonucleotide
  Antisense strand to SEQ ID NO: 2170886
auauuuacacagguggacu

SEQ ID NO: 2170888 - RNA, 19 nt, Artificial Sequence
  Description of Artificial Sequence: Synthetic oligonucleotide
  Sense strand starting at position 2369 of SEQ ID NO: 1883117
gggaauaguggaugguuaa

SEQ ID NO: 2170889 - RNA, 19 nt, Artificial Sequence
  Description of Artificial Sequence: Synthetic oligonucleotide
  Antisense strand to SEQ ID NO: 2170888
uuaaccauccacuauuccc

SEQ ID NO: 2170890 - RNA, 19 nt, Artificial Sequence
  Description of Artificial Sequence: Synthetic oligonucleotide
  Sense strand starting at position 2370 of SEQ ID NO: 1883117
ggaauaguggaugguuaag

SEQ ID NO: 2170891 - RNA, 19 nt, Artificial Sequence
  Description of Artificial Sequence: Synthetic oligonucleotide
  Antisense strand to SEQ ID NO: 2170890
cuuaaccauccacuauucc

SEQ ID NO: 2170892 - RNA, 19 nt, Artificial Sequence
  Description of Artificial Sequence: Synthetic oligonucleotide
  Sense strand starting at position 2375 of SEQ ID NO: 1883117
aguggaugguuaaggaaga

SEQ ID NO: 2170893 - RNA, 19 nt, Artificial Sequence
  Description of Artificial Sequence: Synthetic oligonucleotide
  Antisense strand to SEQ ID NO: 2170892
ucuuccuuaaccauccacu

SEQ ID NO: 2170894 - RNA, 19 nt, Artificial Sequence
  Description of Artificial Sequence: Synthetic oligonucleotide
  Sense strand starting at position 2429 of SEQ ID NO: 1883117
acauuugggucucacagaa

SEQ ID NO: 2170895 - RNA, 19 nt, Artificial Sequence
  Description of Artificial Sequence: Synthetic oligonucleotide
  Antisense strand to SEQ ID NO: 2170894
uucugugagacccaaaugu

SEQ ID NO: 2170896 - RNA, 19 nt, Artificial Sequence
  Description of Artificial Sequence: Synthetic oligonucleotide
  Sense strand starting at position 2582 of SEQ ID NO: 1883117
ucuccuuauccagagaguc

SEQ ID NO: 2170897 - RNA, 19 nt, Artificial Sequence
  Description of Artificial Sequence: Synthetic oligonucleotide
  Antisense strand to SEQ ID NO: 2170896
gacucucuggauaaggaga

SEQ ID NO: 2170898 - RNA, 19 nt, Artificial Sequence
  Description of Artificial Sequence: Synthetic oligonucleotide
  Sense strand starting at position 2590 of SEQ ID NO: 1883117
uccagagaguccuuagaug

SEQ ID NO: 2170899 - RNA, 19 nt, Artificial Sequence
  Description of Artificial Sequence: Synthetic oligonucleotide
  Antisense strand to SEQ ID NO: 2170898
caucuaaggacucucugga

SEQ ID NO: 2170900 - RNA, 19 nt, Artificial Sequence
  Description of Artificial Sequence: Synthetic oligonucleotide
  Sense strand starting at position 2684 of SEQ ID NO: 1883117
ugagaaguuagacacguuu

SEQ ID NO: 2170901 - RNA, 19 nt, Artificial Sequence
  Description of Artificial Sequence: Synthetic oligonucleotide
  Antisense strand to SEQ ID NO: 2170900
aaacgugucuaacuucuca

SEQ ID NO: 2170902 - RNA, 19 nt, Artificial Sequence
  Description of Artificial Sequence: Synthetic oligonucleotide
  Sense strand starting at position 2769 of SEQ ID NO: 1883117
cuaugcuuuccugacagag

SEQ ID NO: 2170903 - RNA, 19 nt, Artificial Sequence
  Description of Artificial Sequence: Synthetic oligonucleotide
  Antisense strand to SEQ ID NO: 2170902
cucugucaggaaagcauag

SEQ ID NO: 2170904 - RNA, 19 nt, Artificial Sequence
  Description of Artificial Sequence: Synthetic oligonucleotide
  Sense strand starting at position 2865 of SEQ ID NO: 1883117
uugugacccuugguggaaa

SEQ ID NO: 2170905 - RNA, 19 nt, Artificial Sequence
  Description of Artificial Sequence: Synthetic oligonucleotide
  Antisense strand to SEQ ID NO: 2170904
uuuccaccaagggucacaa

SEQ ID NO: 2170906 - RNA, 19 nt, Artificial Sequence
  Description of Artificial Sequence: Synthetic oligonucleotide
  Sense strand starting at position 2884 of SEQ ID NO: 1883117
aaguaugagagccacguau

SEQ ID NO: 2170907 - RNA, 19 nt, Artificial Sequence
  Description of Artificial Sequence: Synthetic oligonucleotide
  Antisense strand to SEQ ID NO: 2170906
auacguggcucucauacuu

SEQ ID NO: 2170908 - RNA, 19 nt, Artificial Sequence
  Description of Artificial Sequence: Synthetic oligonucleotide
  Sense strand starting at position 2888 of SEQ ID NO: 1883117
augagagccacguaucuua

SEQ ID NO: 2170909 - RNA, 19 nt, Artificial Sequence
  Description of Artificial Sequence: Synthetic oligonucleotide
  Antisense strand to SEQ ID NO: 2170908
uaagauacguggcucucau

SEQ ID NO: 2170910 - RNA, 19 nt, Artificial Sequence
  Description of Artificial Sequence: Synthetic oligonucleotide
  Sense strand starting at position 2987 of SEQ ID NO: 1883117
cacugaacucaugguaaug

SEQ ID NO: 2170911 - RNA, 19 nt, Artificial Sequence
  Description of Artificial Sequence: Synthetic oligonucleotide
  Antisense strand to SEQ ID NO: 2170910
cauuaccaugaguucagug

SEQ ID NO: 2170912 - RNA, 19 nt, Artificial Sequence
  Description of Artificial Sequence: Synthetic oligonucleotide
  Sense strand starting at position 3148 of SEQ ID NO: 1883117
agcucucaugaauaugcau

SEQ ID NO: 2170913 - RNA, 19 nt, Artificial Sequence
  Description of Artificial Sequence: Synthetic oligonucleotide
  Antisense strand to SEQ ID NO: 2170912
augcauauucaugagagcu

SEQ ID NO: 2170914 - RNA, 19 nt, Artificial Sequence
  Description of Artificial Sequence: Synthetic oligonucleotide
  Sense strand starting at position 3783 of SEQ ID NO: 1883117
acauuuaugcuuuguaguc

SEQ ID NO: 2170915 - RNA, 19 nt, Artificial Sequence
  Description of Artificial Sequence: Synthetic oligonucleotide
  Antisense strand to SEQ ID NO: 2170914
gacuacaaagcauaaaugu

SEQ ID NO: 2170916 - RNA, 19 nt, Artificial Sequence
  Description of Artificial Sequence: Synthetic oligonucleotide
  Sense strand starting at position 3807 of SEQ ID NO: 1883117
guguccacucacuagaauu

SEQ ID NO: 2170917 - RNA, 19 nt, Artificial Sequence
  Description of Artificial Sequence: Synthetic oligonucleotide
  Antisense strand to SEQ ID NO: 2170916
aauucuagugaguggacac

SEQ ID NO: 2170918 - RNA, 19 nt, Artificial Sequence
  Description of Artificial Sequence: Synthetic oligonucleotide
  Sense strand starting at position 3893 of SEQ ID NO: 1883117
ggcauuuaauaugugcuca

SEQ ID NO: 2170919 - RNA, 19 nt, Artificial Sequence
  Description of Artificial Sequence: Synthetic oligonucleotide
  Antisense strand to SEQ ID NO: 2170918
ugagcacauauuaaaugcc

SEQ ID NO: 2170920 - RNA, 19 nt, Artificial Sequence
  Description of Artificial Sequence: Synthetic oligonucleotide
  Sense strand starting at position 3898 of SEQ ID NO: 1883117
uuaauaugugcucaauaga

SEQ ID NO: 2170921 - RNA, 19 nt, Artificial Sequence
  Description of Artificial Sequence: Synthetic oligonucleotide
  Antisense strand to SEQ ID NO: 2170920
ucuauugagcacauauuaa

SEQ ID NO: 2170922 - RNA, 19 nt, Artificial Sequence
  Description of Artificial Sequence: Synthetic oligonucleotide
  Sense strand starting at position 28 of SEQ ID NO: 1883118
gggcauaagucuggcugga

SEQ ID NO: 2170923 - RNA, 19 nt, Artificial Sequence
  Description of Artificial Sequence: Synthetic oligonucleotide
  Antisense strand to SEQ ID NO: 2170922
uccagccagacuuaugccc

SEQ ID NO: 2170924 - RNA, 19 nt, Artificial Sequence
  Description of Artificial Sequence: Synthetic oligonucleotide
  Sense strand starting at position 30 of SEQ ID NO: 1883118
gcauaagucuggcuggacu

SEQ ID NO: 2170925 - RNA, 19 nt, Artificial Sequence
  Description of Artificial Sequence: Synthetic oligonucleotide
  Antisense strand to SEQ ID NO: 2170924
aguccagccagacuuaugc

SEQ ID NO: 2170926 - RNA, 19 nt, Artificial Sequence
  Description of Artificial Sequence: Synthetic oligonucleotide
  Sense strand starting at position 73 of SEQ ID NO: 1883118
uuagucauuucuugaguga

SEQ ID NO: 2170927 - RNA, 19 nt, Artificial Sequence
  Description of Artificial Sequence: Synthetic oligonucleotide
  Antisense strand to SEQ ID NO: 2170926
ucacucaagaaaugacuaa

SEQ ID NO: 2170928 - RNA, 19 nt, Artificial Sequence
  Description of Artificial Sequence: Synthetic oligonucleotide
  Sense strand starting at position 177 of SEQ ID NO: 1883118
accaguggugguggucaua

SEQ ID NO: 2170929 - RNA, 19 nt, Artificial Sequence
  Description of Artificial Sequence: Synthetic oligonucleotide
  Antisense strand to SEQ ID NO: 2170928
uaugaccaccaccacuggu

SEQ ID NO: 2170930 - RNA, 19 nt, Artificial Sequence
  Description of Artificial Sequence: Synthetic oligonucleotide
  Sense strand starting at position 248 of SEQ ID NO: 1883118
gagagacucucuuuguuug

SEQ ID NO: 2170931 - RNA, 19 nt, Artificial Sequence
  Description of Artificial Sequence: Synthetic oligonucleotide
  Antisense strand to SEQ ID NO: 2170930
caaacaaagagagucucuc

SEQ ID NO: 2170932 - RNA, 19 nt, Artificial Sequence
  Description of Artificial Sequence: Synthetic oligonucleotide
  Sense strand starting at position 267 of SEQ ID NO: 1883118
ggguaaaguacggguaaug

SEQ ID NO: 2170933 - RNA, 19 nt, Artificial Sequence
  Description of Artificial Sequence: Synthetic oligonucleotide
  Antisense strand to SEQ ID NO: 2170932
cauuacccguacuuuaccc

SEQ ID NO: 2170934 - RNA, 19 nt, Artificial Sequence
  Description of Artificial Sequence: Synthetic oligonucleotide
  Sense strand starting at position 329 of SEQ ID NO: 1883118
ccucuagaagucugccaga

SEQ ID NO: 2170935 - RNA, 19 nt, Artificial Sequence
  Description of Artificial Sequence: Synthetic oligonucleotide
  Antisense strand to SEQ ID NO: 2170934
ucuggcagacuucuagagg

SEQ ID NO: 2170936 - RNA, 19 nt, Artificial Sequence
  Description of Artificial Sequence: Synthetic oligonucleotide
  Sense strand starting at position 350 of SEQ ID NO: 1883118
cagcauuacuggucuugga

SEQ ID NO: 2170937 - RNA, 19 nt, Artificial Sequence
  Description of Artificial Sequence: Synthetic oligonucleotide
  Antisense strand to SEQ ID NO: 2170936
uccaagaccaguaaugcug

SEQ ID NO: 2170938 - RNA, 19 nt, Artificial Sequence
  Description of Artificial Sequence: Synthetic oligonucleotide
  Sense strand starting at position 353 of SEQ ID NO: 1883118
cauuacuggucuuggagua

SEQ ID NO: 2170939 - RNA, 19 nt, Artificial Sequence
  Description of Artificial Sequence: Synthetic oligonucleotide
  Antisense strand to SEQ ID NO: 2170938
uacuccaagaccaguaaug

SEQ ID NO: 2170940 - RNA, 19 nt, Artificial Sequence
  Description of Artificial Sequence: Synthetic oligonucleotide
  Sense strand starting at position 354 of SEQ ID NO: 1883118
auuacuggucuuggaguau

SEQ ID NO: 2170941 - RNA, 19 nt, Artificial Sequence
  Description of Artificial Sequence: Synthetic oligonucleotide
  Antisense strand to SEQ ID NO: 2170940
auacuccaagaccaguaau

SEQ ID NO: 2170942 - RNA, 19 nt, Artificial Sequence
  Description of Artificial Sequence: Synthetic oligonucleotide
  Sense strand starting at position 517 of SEQ ID NO: 1883118
augcccugacauugaugaa

SEQ ID NO: 2170943 - RNA, 19 nt, Artificial Sequence
  Description of Artificial Sequence: Synthetic oligonucleotide
  Antisense strand to SEQ ID NO: 2170942
uucaucaaugucagggcau

SEQ ID NO: 2170944 - RNA, 19 nt, Artificial Sequence
  Description of Artificial Sequence: Synthetic oligonucleotide
  Sense strand starting at position 520 of SEQ ID NO: 1883118
cccugacauugaugaacau

SEQ ID NO: 2170945 - RNA, 19 nt, Artificial Sequence
  Description of Artificial Sequence: Synthetic oligonucleotide
  Antisense strand to SEQ ID NO: 2170944
auguucaucaaugucaggg

SEQ ID NO: 2170946 - RNA, 19 nt, Artificial Sequence
  Description of Artificial Sequence: Synthetic oligonucleotide
  Sense strand starting at position 621 of SEQ ID NO: 1883118
agagauaugugucucagag

SEQ ID NO: 2170947 - RNA, 19 nt, Artificial Sequence
  Description of Artificial Sequence: Synthetic oligonucleotide
  Antisense strand to SEQ ID NO: 2170946
cucugagacacauaucucu

SEQ ID NO: 2170948 - RNA, 19 nt, Artificial Sequence
  Description of Artificial Sequence: Synthetic oligonucleotide
  Sense strand starting at position 623 of SEQ ID NO: 1883118
agauaugugucucagagaa

SEQ ID NO: 2170949 - RNA, 19 nt, Artificial Sequence
  Description of Artificial Sequence: Synthetic oligonucleotide
  Antisense strand to SEQ ID NO: 2170948
uucucugagacacauaucu

SEQ ID NO: 2170950 - RNA, 19 nt, Artificial Sequence
  Description of Artificial Sequence: Synthetic oligonucleotide
  Sense strand starting at position 625 of SEQ ID NO: 1883118
auaugugucucagagaacu

SEQ ID NO: 2170951 - RNA, 19 nt, Artificial Sequence
  Description of Artificial Sequence: Synthetic oligonucleotide
  Antisense strand to SEQ ID NO: 2170950
aguucucugagacacauau

SEQ ID NO: 2170952 - RNA, 19 nt, Artificial Sequence
  Description of Artificial Sequence: Synthetic oligonucleotide
  Sense strand starting at position 799 of SEQ ID NO: 1883118
uacugaagagugcaucaua

SEQ ID NO: 2170953 - RNA, 19 nt, Artificial Sequence
  Description of Artificial Sequence: Synthetic oligonucleotide
  Antisense strand to SEQ ID NO: 2170952
uaugaugcacucuucagua

SEQ ID NO: 2170954 - RNA, 19 nt, Artificial Sequence
  Description of Artificial Sequence: Synthetic oligonucleotide
  Sense strand starting at position 802 of SEQ ID NO: 1883118
ugaagagugcaucauaguc

SEQ ID NO: 2170955 - RNA, 19 nt, Artificial Sequence
  Description of Artificial Sequence: Synthetic oligonucleotide
  Antisense strand to SEQ ID NO: 2170954
gacuaugaugcacucuuca

SEQ ID NO: 2170956 - RNA, 19 nt, Artificial Sequence
  Description of Artificial Sequence: Synthetic oligonucleotide
  Sense strand starting at position 807 of SEQ ID NO: 1883118
agugcaucauagucucuua

SEQ ID NO: 2170957 - RNA, 19 nt, Artificial Sequence
  Description of Artificial Sequence: Synthetic oligonucleotide
  Antisense strand to SEQ ID NO: 2170956
uaagagacuaugaugcacu

SEQ ID NO: 2170958 - RNA, 19 nt, Artificial Sequence
  Description of Artificial Sequence: Synthetic oligonucleotide
  Sense strand starting at position 946 of SEQ ID NO: 1883118
gggcaauccuaagaguuac

SEQ ID NO: 2170959 - RNA, 19 nt, Artificial Sequence
  Description of Artificial Sequence: Synthetic oligonucleotide
  Antisense strand to SEQ ID NO: 2170958
guaacucuuaggauugccc

SEQ ID NO: 2170960 - RNA, 19 nt, Artificial Sequence
  Description of Artificial Sequence: Synthetic oligonucleotide
  Sense strand starting at position 1126 of SEQ ID NO: 1883118
ugaucaauaucccaaaggu

SEQ ID NO: 2170961 - RNA, 19 nt, Artificial Sequence
  Description of Artificial Sequence: Synthetic oligonucleotide
  Antisense strand to SEQ ID NO: 2170960
accuuugggauauugauca

SEQ ID NO: 2170962 - RNA, 19 nt, Artificial Sequence
  Description of Artificial Sequence: Synthetic oligonucleotide
  Sense strand starting at position 1301 of SEQ ID NO: 1883118
acucuucuuguagaauagu

SEQ ID NO: 2170963 - RNA, 19 nt, Artificial Sequence
  Description of Artificial Sequence: Synthetic oligonucleotide
  Antisense strand to SEQ ID NO: 2170962
acuauucuacaagaagagu

SEQ ID NO: 2170964 - RNA, 19 nt, Artificial Sequence
  Description of Artificial Sequence: Synthetic oligonucleotide
  Sense strand starting at position 1304 of SEQ ID NO: 1883118
cuucuuguagaauaguaua

SEQ ID NO: 2170965 - RNA, 19 nt, Artificial Sequence
  Description of Artificial Sequence: Synthetic oligonucleotide
  Antisense strand to SEQ ID NO: 2170964
uauacuauucuacaagaag

SEQ ID NO: 2170966 - RNA, 19 nt, Artificial Sequence
  Description of Artificial Sequence: Synthetic oligonucleotide
  Sense strand starting at position 1405 of SEQ ID NO: 1883118
aggccuguccuacgagaaa

SEQ ID NO: 2170967 - RNA, 19 nt, Artificial Sequence
  Description of Artificial Sequence: Synthetic oligonucleotide
  Antisense strand to SEQ ID NO: 2170966
uuucucguaggacaggccu

SEQ ID NO: 2170968 - RNA, 19 nt, Artificial Sequence
  Description of Artificial Sequence: Synthetic oligonucleotide
  Sense strand starting at position 1540 of SEQ ID NO: 1883118
cuguuauugugguuuguaa

SEQ ID NO: 2170969 - RNA, 19 nt, Artificial Sequence
  Description of Artificial Sequence: Synthetic oligonucleotide
  Antisense strand to SEQ ID NO: 2170968
uuacaaaccacaauaacag

SEQ ID NO: 2170970 - RNA, 19 nt, Artificial Sequence
  Description of Artificial Sequence: Synthetic oligonucleotide
  Sense strand starting at position 1542 of SEQ ID NO: 1883118
guuauugugguuuguaaac

SEQ ID NO: 2170971 - RNA, 19 nt, Artificial Sequence
  Description of Artificial Sequence: Synthetic oligonucleotide
  Antisense strand to SEQ ID NO: 2170970
guuuacaaaccacaauaac

SEQ ID NO: 2170972 - RNA, 19 nt, Artificial Sequence
  Description of Artificial Sequence: Synthetic oligonucleotide
  Sense strand starting at position 1544 of SEQ ID NO: 1883118
uauugugguuuguaaacua

SEQ ID NO: 2170973 - RNA, 19 nt, Artificial Sequence
  Description of Artificial Sequence: Synthetic oligonucleotide
  Antisense strand to SEQ ID NO: 2170972
uaguuuacaaaccacaaua

SEQ ID NO: 2170974 - RNA, 19 nt, Artificial Sequence
  Description of Artificial Sequence: Synthetic oligonucleotide
  Sense strand starting at position 1637 of SEQ ID NO: 1883118
gcaguacaaugagauguaa

SEQ ID NO: 2170975 - RNA, 19 nt, Artificial Sequence
  Description of Artificial Sequence: Synthetic oligonucleotide
  Antisense strand to SEQ ID NO: 2170974
uuacaucucauuguacugc

SEQ ID NO: 2170976 - RNA, 19 nt, Artificial Sequence
  Description of Artificial Sequence: Synthetic oligonucleotide
  Sense strand starting at position 1724 of SEQ ID NO: 1883118
uugcuucuuuguuaguuua

SEQ ID NO: 2170977 - RNA, 19 nt, Artificial Sequence
  Description of Artificial Sequence: Synthetic oligonucleotide
  Antisense strand to SEQ ID NO: 2170976
uaaacuaacaaagaagcaa

SEQ ID NO: 2170978 - RNA, 19 nt, Artificial Sequence
  Description of Artificial Sequence: Synthetic oligonucleotide
  Sense strand starting at position 2470 of SEQ ID NO: 1883118
gcaguaaccuuugccgacu

SEQ ID NO: 2170979 - RNA, 19 nt, Artificial Sequence
  Description of Artificial Sequence: Synthetic oligonucleotide
  Antisense strand to SEQ ID NO: 2170978
agucggcaaagguuacugc

SEQ ID NO: 2170980 - RNA, 19 nt, Artificial Sequence
  Description of Artificial Sequence: Synthetic oligonucleotide
  Sense strand starting at position 2472 of SEQ ID NO: 1883118
aguaaccuuugccgacuua

SEQ ID NO: 2170981 - RNA, 19 nt, Artificial Sequence
  Description of Artificial Sequence: Synthetic oligonucleotide
  Antisense strand to SEQ ID NO: 2170980
uaagucggcaaagguuacu

SEQ ID NO: 2170982 - RNA, 19 nt, Artificial Sequence
  Description of Artificial Sequence: Synthetic oligonucleotide
  Sense strand starting at position 2473 of SEQ ID NO: 1883118
guaaccuuugccgacuuaa

SEQ ID NO: 2170983 - RNA, 19 nt, Artificial Sequence
  Description of Artificial Sequence: Synthetic oligonucleotide
  Antisense strand to SEQ ID NO: 2170982
uuaagucggcaaagguuac

SEQ ID NO: 2170984 - RNA, 19 nt, Artificial Sequence
  Description of Artificial Sequence: Synthetic oligonucleotide
  Sense strand starting at position 109 of SEQ ID NO: 1883119
augcccugacauugaugaa

SEQ ID NO: 2170985 - RNA, 19 nt, Artificial Sequence
  Description of Artificial Sequence: Synthetic oligonucleotide
  Antisense strand to SEQ ID NO: 2170984
uucaucaaugucagggcau

SEQ ID NO: 2170986 - RNA, 19 nt, Artificial Sequence
  Description of Artificial Sequence: Synthetic oligonucleotide
  Sense strand starting at position 112 of SEQ ID NO: 1883119
cccugacauugaugaacau

SEQ ID NO: 2170987 - RNA, 19 nt, Artificial Sequence
  Description of Artificial Sequence: Synthetic oligonucleotide
  Antisense strand to SEQ ID NO: 2170986
auguucaucaaugucaggg

SEQ ID NO: 2170988 - RNA, 19 nt, Artificial Sequence
  Description of Artificial Sequence: Synthetic oligonucleotide
  Sense strand starting at position 213 of SEQ ID NO: 1883119
agagauaugugucucagag

SEQ ID NO: 2170989 - RNA, 19 nt, Artificial Sequence
  Description of Artificial Sequence: Synthetic oligonucleotide
  Antisense strand to SEQ ID NO: 2170988
cucugagacacauaucucu

SEQ ID NO: 2170990 - RNA, 19 nt, Artificial Sequence
  Description of Artificial Sequence: Synthetic oligonucleotide
  Sense strand starting at position 215 of SEQ ID NO: 1883119
agauaugugucucagagaa

SEQ ID NO: 2170991 - RNA, 19 nt, Artificial Sequence
  Description of Artificial Sequence: Synthetic oligonucleotide
  Antisense strand to SEQ ID NO: 2170990
uucucugagacacauaucu

SEQ ID NO: 2170992 - RNA, 19 nt, Artificial Sequence
  Description of Artificial Sequence: Synthetic oligonucleotide
  Sense strand starting at position 217 of SEQ ID NO: 1883119
auaugugucucagagaacu

SEQ ID NO: 2170993 - RNA, 19 nt, Artificial Sequence
  Description of Artificial Sequence: Synthetic oligonucleotide
  Antisense strand to SEQ ID NO: 2170992
aguucucugagacacauau

SEQ ID NO: 2170994 - RNA, 19 nt, Artificial Sequence
  Description of Artificial Sequence: Synthetic oligonucleotide
  Sense strand starting at position 391 of SEQ ID NO: 1883119
uacugaagagugcaucaua

SEQ ID NO: 2170995 - RNA, 19 nt, Artificial Sequence
  Description of Artificial Sequence: Synthetic oligonucleotide
  Antisense strand to SEQ ID NO: 2170994
uaugaugcacucuucagua

SEQ ID NO: 2170996 - RNA, 19 nt, Artificial Sequence
  Description of Artificial Sequence: Synthetic oligonucleotide
  Sense strand starting at position 394 of SEQ ID NO: 1883119
ugaagagugcaucauaguc

SEQ ID NO: 2170997 - RNA, 19 nt, Artificial Sequence
  Description of Artificial Sequence: Synthetic oligonucleotide
  Antisense strand to SEQ ID NO: 2170996
gacuaugaugcacucuuca

SEQ ID NO: 2170998 - RNA, 19 nt, Artificial Sequence
  Description of Artificial Sequence: Synthetic oligonucleotide
  Sense strand starting at position 399 of SEQ ID NO: 1883119
agugcaucauagucucuua

SEQ ID NO: 2170999 - RNA, 19 nt, Artificial Sequence
  Description of Artificial Sequence: Synthetic oligonucleotide
  Antisense strand to SEQ ID NO: 2170998
uaagagacuaugaugcacu

SEQ ID NO: 2171000 - RNA, 19 nt, Artificial Sequence
  Description of Artificial Sequence: Synthetic oligonucleotide
  Sense strand starting at position 538 of SEQ ID NO: 1883119
gggcaauccuaagaguuac

SEQ ID NO: 2171001 - RNA, 19 nt, Artificial Sequence
  Description of Artificial Sequence: Synthetic oligonucleotide
  Antisense strand to SEQ ID NO: 2171000
guaacucuuaggauugccc

SEQ ID NO: 2171002 - RNA, 19 nt, Artificial Sequence
  Description of Artificial Sequence: Synthetic oligonucleotide
  Sense strand starting at position 718 of SEQ ID NO: 1883119
ugaucaauaucccaaaggu

SEQ ID NO: 2171003 - RNA, 19 nt, Artificial Sequence
  Description of Artificial Sequence: Synthetic oligonucleotide
  Antisense strand to SEQ ID NO: 2171002
accuuugggauauugauca

SEQ ID NO: 2171004 - RNA, 19 nt, Artificial Sequence
  Description of Artificial Sequence: Synthetic oligonucleotide
  Sense strand starting at position 893 of SEQ ID NO: 1883119
acucuucuuguagaauagu

SEQ ID NO: 2171005 - RNA, 19 nt, Artificial Sequence
  Description of Artificial Sequence: Synthetic oligonucleotide
  Antisense strand to SEQ ID NO: 2171004
acuauucuacaagaagagu

SEQ ID NO: 2171006 - RNA, 19 nt, Artificial Sequence
  Description of Artificial Sequence: Synthetic oligonucleotide
  Sense strand starting at position 896 of SEQ ID NO: 1883119
cuucuuguagaauaguaua

SEQ ID NO: 2171007 - RNA, 19 nt, Artificial Sequence
  Description of Artificial Sequence: Synthetic oligonucleotide
  Antisense strand to SEQ ID NO: 2171006
uauacuauucuacaagaag

SEQ ID NO: 2171008 - RNA, 19 nt, Artificial Sequence
  Description of Artificial Sequence: Synthetic oligonucleotide
  Sense strand starting at position 997 of SEQ ID NO: 1883119
aggccuguccuacgagaaa

SEQ ID NO: 2171009 - RNA, 19 nt, Artificial Sequence
  Description of Artificial Sequence: Synthetic oligonucleotide
  Antisense strand to SEQ ID NO: 2171008
uuucucguaggacaggccu

SEQ ID NO: 2171010 - RNA, 19 nt, Artificial Sequence
  Description of Artificial Sequence: Synthetic oligonucleotide
  Sense strand starting at position 1132 of SEQ ID NO: 1883119
cuguuauugugguuuguaa

SEQ ID NO: 2171011 - RNA, 19 nt, Artificial Sequence
  Description of Artificial Sequence: Synthetic oligonucleotide
  Antisense strand to SEQ ID NO: 2171010
uuacaaaccacaauaacag

SEQ ID NO: 2171012 - RNA, 19 nt, Artificial Sequence
  Description of Artificial Sequence: Synthetic oligonucleotide
  Sense strand starting at position 1134 of SEQ ID NO: 1883119
guuauugugguuuguaaac

SEQ ID NO: 2171013 - RNA, 19 nt, Artificial Sequence
  Description of Artificial Sequence: Synthetic oligonucleotide
  Antisense strand to SEQ ID NO: 2171012
guuuacaaaccacaauaac

SEQ ID NO: 2171014 - RNA, 19 nt, Artificial Sequence
  Description of Artificial Sequence: Synthetic oligonucleotide
  Sense strand starting at position 1136 of SEQ ID NO: 1883119
uauugugguuuguaaacua

SEQ ID NO: 2171015 - RNA, 19 nt, Artificial Sequence
  Description of Artificial Sequence: Synthetic oligonucleotide
  Antisense strand to SEQ ID NO: 2171014
uaguuuacaaaccacaaua

SEQ ID NO: 2171016 - RNA, 19 nt, Artificial Sequence
  Description of Artificial Sequence: Synthetic oligonucleotide
  Sense strand starting at position 1229 of SEQ ID NO: 1883119
gcaguacaaugagauguaa

SEQ ID NO: 2171017 - RNA, 19 nt, Artificial Sequence
  Description of Artificial Sequence: Synthetic oligonucleotide
  Antisense strand to SEQ ID NO: 2171016
uuacaucucauuguacugc

SEQ ID NO: 2171018 - RNA, 19 nt, Artificial Sequence
  Description of Artificial Sequence: Synthetic oligonucleotide
  Sense strand starting at position 1316 of SEQ ID NO: 1883119
uugcuucuuuguuaguuua

SEQ ID NO: 2171019 - RNA, 19 nt, Artificial Sequence
  Description of Artificial Sequence: Synthetic oligonucleotide
  Antisense strand to SEQ ID NO: 2171018
uaaacuaacaaagaagcaa

SEQ ID NO: 2171020 - RNA, 19 nt, Artificial Sequence
  Description of Artificial Sequence: Synthetic oligonucleotide
  Sense strand starting at position 2062 of SEQ ID NO: 1883119
gcaguaaccuuugccgacu

SEQ ID NO: 2171021 - RNA, 19 nt, Artificial Sequence
  Description of Artificial Sequence: Synthetic oligonucleotide
  Antisense strand to SEQ ID NO: 2171020
agucggcaaagguuacugc

SEQ ID NO: 2171022 - RNA, 19 nt, Artificial Sequence
  Description of Artificial Sequence: Synthetic oligonucleotide
  Sense strand starting at position 2064 of SEQ ID NO: 1883119
aguaaccuuugccgacuua

SEQ ID NO: 2171023 - RNA, 19 nt, Artificial Sequence
  Description of Artificial Sequence: Synthetic oligonucleotide
  Antisense strand to SEQ ID NO: 2171022
uaagucggcaaagguuacu

SEQ ID NO: 2171024 - RNA, 19 nt, Artificial Sequence
  Description of Artificial Sequence: Synthetic oligonucleotide
  Sense strand starting at position 2065 of SEQ ID NO: 1883119
guaaccuuugccgacuuaa

SEQ ID NO: 2171025 - RNA, 19 nt, Artificial Sequence
  Description of Artificial Sequence: Synthetic oligonucleotide
  Antisense strand to SEQ ID NO: 2171024
uuaagucggcaaagguuac

SEQ ID NO: 2171026 - RNA, 19 nt, Artificial Sequence
  Description of Artificial Sequence: Synthetic oligonucleotide
  Sense strand starting at position 123 of SEQ ID NO: 1883120
agcguacugcaucaagagu

SEQ ID NO: 2171027 - RNA, 19 nt, Artificial Sequence
  Description of Artificial Sequence: Synthetic oligonucleotide
  Antisense strand to SEQ ID NO: 2171026
acucuugaugcaguacgcu

SEQ ID NO: 2171028 - RNA, 19 nt, Artificial Sequence
  Description of Artificial Sequence: Synthetic oligonucleotide
  Sense strand starting at position 132 of SEQ ID NO: 1883120
caucaagaguucgcacaga

SEQ ID NO: 2171029 - RNA, 19 nt, Artificial Sequence
  Description of Artificial Sequence: Synthetic oligonucleotide
  Antisense strand to SEQ ID NO: 2171028
ucugugcgaacucuugaug

SEQ ID NO: 2171030 - RNA, 19 nt, Artificial Sequence
  Description of Artificial Sequence: Synthetic oligonucleotide
  Sense strand starting at position 137 of SEQ ID NO: 1883120
agaguucgcacagagugaa

SEQ ID NO: 2171031 - RNA, 19 nt, Artificial Sequence
  Description of Artificial Sequence: Synthetic oligonucleotide
  Antisense strand to SEQ ID NO: 2171030
uucacucugugcgaacucu

SEQ ID NO: 2171032 - RNA, 19 nt, Artificial Sequence
  Description of Artificial Sequence: Synthetic oligonucleotide
  Sense strand starting at position 167 of SEQ ID NO: 1883120
gugggcauacuccaucauu

SEQ ID NO: 2171033 - RNA, 19 nt, Artificial Sequence
  Description of Artificial Sequence: Synthetic oligonucleotide
  Antisense strand to SEQ ID NO: 2171032
aaugauggaguaugcccac

SEQ ID NO: 2171034 - RNA, 19 nt, Artificial Sequence
  Description of Artificial Sequence: Synthetic oligonucleotide
  Sense strand starting at position 194 of SEQ ID NO: 1883120
gggcauguuugagcugguu

SEQ ID NO: 2171035 - RNA, 19 nt, Artificial Sequence
  Description of Artificial Sequence: Synthetic oligonucleotide
  Antisense strand to SEQ ID NO: 2171034
aaccagcucaaacaugccc

SEQ ID NO: 2171036 - RNA, 19 nt, Artificial Sequence
  Description of Artificial Sequence: Synthetic oligonucleotide
  Sense strand starting at position 196 of SEQ ID NO: 1883120
gcauguuugagcugguucu

SEQ ID NO: 2171037 - RNA, 19 nt, Artificial Sequence
  Description of Artificial Sequence: Synthetic oligonucleotide
  Antisense strand to SEQ ID NO: 2171036
agaaccagcucaaacaugc

SEQ ID NO: 2171038 - RNA, 19 nt, Artificial Sequence
  Description of Artificial Sequence: Synthetic oligonucleotide
  Sense strand starting at position 206 of SEQ ID NO: 1883120
gcugguucuugacccacaa

SEQ ID NO: 2171039 - RNA, 19 nt, Artificial Sequence
  Description of Artificial Sequence: Synthetic oligonucleotide
  Antisense strand to SEQ ID NO: 2171038
uugugggucaagaaccagc

SEQ ID NO: 2171040 - RNA, 19 nt, Artificial Sequence
  Description of Artificial Sequence: Synthetic oligonucleotide
  Sense strand starting at position 210 of SEQ ID NO: 1883120
guucuugacccacaagcuu

SEQ ID NO: 2171041 - RNA, 19 nt, Artificial Sequence
  Description of Artificial Sequence: Synthetic oligonucleotide
  Antisense strand to SEQ ID NO: 2171040
aagcuugugggucaagaac

SEQ ID NO: 2171042 - RNA, 19 nt, Artificial Sequence
  Description of Artificial Sequence: Synthetic oligonucleotide
  Sense strand starting at position 274 of SEQ ID NO: 1883120
uuucccuggagcgagaaau

SEQ ID NO: 2171043 - RNA, 19 nt, Artificial Sequence
  Description of Artificial Sequence: Synthetic oligonucleotide
  Antisense strand to SEQ ID NO: 2171042
auuucucgcuccagggaaa

SEQ ID NO: 2171044 - RNA, 19 nt, Artificial Sequence
  Description of Artificial Sequence: Synthetic oligonucleotide
  Sense strand starting at position 423 of SEQ ID NO: 1883120
ggcugaaacuuacuacaag

SEQ ID NO: 2171045 - RNA, 19 nt, Artificial Sequence
  Description of Artificial Sequence: Synthetic oligonucleotide
  Antisense strand to SEQ ID NO: 2171044
cuuguaguaaguuucagcc

SEQ ID NO: 2171046 - RNA, 19 nt, Artificial Sequence
  Description of Artificial Sequence: Synthetic oligonucleotide
  Sense strand starting at position 597 of SEQ ID NO: 1883120
gcacgagucaaccaaagga

SEQ ID NO: 2171047 - RNA, 19 nt, Artificial Sequence
  Description of Artificial Sequence: Synthetic oligonucleotide
  Antisense strand to SEQ ID NO: 2171046
uccuuugguugacucgugc

SEQ ID NO: 2171048 - RNA, 19 nt, Artificial Sequence
  Description of Artificial Sequence: Synthetic oligonucleotide
  Sense strand starting at position 755 of SEQ ID NO: 1883120
agcacauacuucccaggau

SEQ ID NO: 2171049 - RNA, 19 nt, Artificial Sequence
  Description of Artificial Sequence: Synthetic oligonucleotide
  Antisense strand to SEQ ID NO: 2171048
auccugggaaguaugugcu

SEQ ID NO: 2171050 - RNA, 19 nt, Artificial Sequence
  Description of Artificial Sequence: Synthetic oligonucleotide
  Sense strand starting at position 941 of SEQ ID NO: 1883120
uuccaucuauacccggaaa

SEQ ID NO: 2171051 - RNA, 19 nt, Artificial Sequence
  Description of Artificial Sequence: Synthetic oligonucleotide
  Antisense strand to SEQ ID NO: 2171050
uuuccggguauagauggaa

SEQ ID NO: 2171052 - RNA, 19 nt, Artificial Sequence
  Description of Artificial Sequence: Synthetic oligonucleotide
  Sense strand starting at position 960 of SEQ ID NO: 1883120
aguggagaaucuuaaguaa

SEQ ID NO: 2171053 - RNA, 19 nt, Artificial Sequence
  Description of Artificial Sequence: Synthetic oligonucleotide
  Antisense strand to SEQ ID NO: 2171052
uuacuuaagauucuccacu

SEQ ID NO: 2171054 - RNA, 19 nt, Artificial Sequence
  Description of Artificial Sequence: Synthetic oligonucleotide
  Sense strand starting at position 997 of SEQ ID NO: 1883120
ggagguggguaauaagaau

SEQ ID NO: 2171055 - RNA, 19 nt, Artificial Sequence
  Description of Artificial Sequence: Synthetic oligonucleotide
  Antisense strand to SEQ ID NO: 2171054
auucuuauuacccaccucc

SEQ ID NO: 2171056 - RNA, 19 nt, Artificial Sequence
  Description of Artificial Sequence: Synthetic oligonucleotide
  Sense strand starting at position 1079 of SEQ ID NO: 1883120
uccaguuugcccugacaau

SEQ ID NO: 2171057 - RNA, 19 nt, Artificial Sequence
  Description of Artificial Sequence: Synthetic oligonucleotide
  Antisense strand to SEQ ID NO: 2171056
auugucagggcaaacugga

SEQ ID NO: 2171058 - RNA, 19 nt, Artificial Sequence
  Description of Artificial Sequence: Synthetic oligonucleotide
  Sense strand starting at position 1080 of SEQ ID NO: 1883120
ccaguuugcccugacaaua

SEQ ID NO: 2171059 - RNA, 19 nt, Artificial Sequence
  Description of Artificial Sequence: Synthetic oligonucleotide
  Antisense strand to SEQ ID NO: 2171058
uauugucagggcaaacugg

SEQ ID NO: 2171060 - RNA, 19 nt, Artificial Sequence
  Description of Artificial Sequence: Synthetic oligonucleotide
  Sense strand starting at position 1098 of SEQ ID NO: 1883120
aaccuaguggugcaugaua

SEQ ID NO: 2171061 - RNA, 19 nt, Artificial Sequence
  Description of Artificial Sequence: Synthetic oligonucleotide
  Antisense strand to SEQ ID NO: 2171060
uaucaugcaccacuagguu

SEQ ID NO: 2171062 - RNA, 19 nt, Artificial Sequence
  Description of Artificial Sequence: Synthetic oligonucleotide
  Sense strand starting at position 1100 of SEQ ID NO: 1883120
ccuaguggugcaugauacu

SEQ ID NO: 2171063 - RNA, 19 nt, Artificial Sequence
  Description of Artificial Sequence: Synthetic oligonucleotide
  Antisense strand to SEQ ID NO: 2171062
aguaucaugcaccacuagg

SEQ ID NO: 2171064 - RNA, 19 nt, Artificial Sequence
  Description of Artificial Sequence: Synthetic oligonucleotide
  Sense strand starting at position 2043 of SEQ ID NO: 1883120
uaguguccucgcuaaagaa

SEQ ID NO: 2171065 - RNA, 19 nt, Artificial Sequence
  Description of Artificial Sequence: Synthetic oligonucleotide
  Antisense strand to SEQ ID NO: 2171064
uucuuuagcgaggacacua

SEQ ID NO: 2171066 - RNA, 19 nt, Artificial Sequence
  Description of Artificial Sequence: Synthetic oligonucleotide
  Sense strand starting at position 2071 of SEQ ID NO: 1883120
gaaagaaggcuucggauca

SEQ ID NO: 2171067 - RNA, 19 nt, Artificial Sequence
  Description of Artificial Sequence: Synthetic oligonucleotide
  Antisense strand to SEQ ID NO: 2171066
ugauccgaagccuucuuuc

SEQ ID NO: 2171068 - RNA, 19 nt, Artificial Sequence
  Description of Artificial Sequence: Synthetic oligonucleotide
  Sense strand starting at position 2228 of SEQ ID NO: 1883120
gaugccuaucagugaccau

SEQ ID NO: 2171069 - RNA, 19 nt, Artificial Sequence
  Description of Artificial Sequence: Synthetic oligonucleotide
  Antisense strand to SEQ ID NO: 2171068
auggucacugauaggcauc

SEQ ID NO: 2171070 - RNA, 19 nt, Artificial Sequence
  Description of Artificial Sequence: Synthetic oligonucleotide
  Sense strand starting at position 2238 of SEQ ID NO: 1883120
agugaccauuucuaagaga

SEQ ID NO: 2171071 - RNA, 19 nt, Artificial Sequence
  Description of Artificial Sequence: Synthetic oligonucleotide
  Antisense strand to SEQ ID NO: 2171070
ucucuuagaaauggucacu

SEQ ID NO: 2171072 - RNA, 19 nt, Artificial Sequence
  Description of Artificial Sequence: Synthetic oligonucleotide
  Sense strand starting at position 2252 of SEQ ID NO: 1883120
agagacauuccuggucuga

SEQ ID NO: 2171073 - RNA, 19 nt, Artificial Sequence
  Description of Artificial Sequence: Synthetic oligonucleotide
  Antisense strand to SEQ ID NO: 2171072
ucagaccaggaaugucucu

SEQ ID NO: 2171074 - RNA, 19 nt, Artificial Sequence
  Description of Artificial Sequence: Synthetic oligonucleotide
  Sense strand starting at position 2254 of SEQ ID NO: 1883120
agacauuccuggucugacu

SEQ ID NO: 2171075 - RNA, 19 nt, Artificial Sequence
  Description of Artificial Sequence: Synthetic oligonucleotide
  Antisense strand to SEQ ID NO: 2171074
agucagaccaggaaugucu

SEQ ID NO: 2171076 - RNA, 19 nt, Artificial Sequence
  Description of Artificial Sequence: Synthetic oligonucleotide
  Sense strand starting at position 2290 of SEQ ID NO: 1883120
ugccuagccagucaggaau

SEQ ID NO: 2171077 - RNA, 19 nt, Artificial Sequence
  Description of Artificial Sequence: Synthetic oligonucleotide
  Antisense strand to SEQ ID NO: 2171076
auuccugacuggcuaggca

SEQ ID NO: 2171078 - RNA, 19 nt, Artificial Sequence
  Description of Artificial Sequence: Synthetic oligonucleotide
  Sense strand starting at position 2303 of SEQ ID NO: 1883120
aggaaucagugcccuaauu

SEQ ID NO: 2171079 - RNA, 19 nt, Artificial Sequence
  Description of Artificial Sequence: Synthetic oligonucleotide
  Antisense strand to SEQ ID NO: 2171078
aauuagggcacugauuccu

SEQ ID NO: 2171080 - RNA, 19 nt, Artificial Sequence
  Description of Artificial Sequence: Synthetic oligonucleotide
  Sense strand starting at position 3432 of SEQ ID NO: 1883120
cucgauccuguggaaugaa

SEQ ID NO: 2171081 - RNA, 19 nt, Artificial Sequence
  Description of Artificial Sequence: Synthetic oligonucleotide
  Antisense strand to SEQ ID NO: 2171080
uucauuccacaggaucgag

SEQ ID NO: 2171082 - RNA, 19 nt, Artificial Sequence
  Description of Artificial Sequence: Synthetic oligonucleotide
  Sense strand starting at position 3485 of SEQ ID NO: 1883120
uaacaauggcccuagaguu

SEQ ID NO: 2171083 - RNA, 19 nt, Artificial Sequence
  Description of Artificial Sequence: Synthetic oligonucleotide
  Antisense strand to SEQ ID NO: 2171082
aacucuagggccauuguua

SEQ ID NO: 2171084 - RNA, 19 nt, Artificial Sequence
  Description of Artificial Sequence: Synthetic oligonucleotide
  Sense strand starting at position 3491 of SEQ ID NO: 1883120
uggcccuagaguugagaga

SEQ ID NO: 2171085 - RNA, 19 nt, Artificial Sequence
  Description of Artificial Sequence: Synthetic oligonucleotide
  Antisense strand to SEQ ID NO: 2171084
ucucucaacucuagggcca

SEQ ID NO: 2171086 - RNA, 19 nt, Artificial Sequence
  Description of Artificial Sequence: Synthetic oligonucleotide
  Sense strand starting at position 3502 of SEQ ID NO: 1883120
uugagagaacgugguuuau

SEQ ID NO: 2171087 - RNA, 19 nt, Artificial Sequence
  Description of Artificial Sequence: Synthetic oligonucleotide
  Antisense strand to SEQ ID NO: 2171086
auaaaccacguucucucaa

SEQ ID NO: 2171088 - RNA, 19 nt, Artificial Sequence
  Description of Artificial Sequence: Synthetic oligonucleotide
  Sense strand starting at position 3504 of SEQ ID NO: 1883120
gagagaacgugguuuaucu

SEQ ID NO: 2171089 - RNA, 19 nt, Artificial Sequence
  Description of Artificial Sequence: Synthetic oligonucleotide
  Antisense strand to SEQ ID NO: 2171088
agauaaaccacguucucuc

SEQ ID NO: 2171090 - RNA, 19 nt, Artificial Sequence
  Description of Artificial Sequence: Synthetic oligonucleotide
  Sense strand starting at position 3557 of SEQ ID NO: 1883120
gcuguuaaaugacuuggua

SEQ ID NO: 2171091 - RNA, 19 nt, Artificial Sequence
  Description of Artificial Sequence: Synthetic oligonucleotide
  Antisense strand to SEQ ID NO: 2171090
uaccaagucauuuaacagc

SEQ ID NO: 2171092 - RNA, 19 nt, Artificial Sequence
  Description of Artificial Sequence: Synthetic oligonucleotide
  Sense strand starting at position 3635 of SEQ ID NO: 1883120
ugugaaauccuuugugcuc

SEQ ID NO: 2171093 - RNA, 19 nt, Artificial Sequence
  Description of Artificial Sequence: Synthetic oligonucleotide
  Antisense strand to SEQ ID NO: 2171092
gagcacaaaggauuucaca

SEQ ID NO: 2171094 - RNA, 19 nt, Artificial Sequence
  Description of Artificial Sequence: Synthetic oligonucleotide
  Sense strand starting at position 3674 of SEQ ID NO: 1883120
ccuggaagguggccuaaau

SEQ ID NO: 2171095 - RNA, 19 nt, Artificial Sequence
  Description of Artificial Sequence: Synthetic oligonucleotide
  Antisense strand to SEQ ID NO: 2171094
auuuaggccaccuuccagg

SEQ ID NO: 2171096 - RNA, 19 nt, Artificial Sequence
  Description of Artificial Sequence: Synthetic oligonucleotide
  Sense strand starting at position 3685 of SEQ ID NO: 1883120
gccuaaaugucagcauuga

SEQ ID NO: 2171097 - RNA, 19 nt, Artificial Sequence
  Description of Artificial Sequence: Synthetic oligonucleotide
  Antisense strand to SEQ ID NO: 2171096
ucaaugcugacauuuaggc

SEQ ID NO: 2171098 - RNA, 19 nt, Artificial Sequence
  Description of Artificial Sequence: Synthetic oligonucleotide
  Sense strand starting at position 3686 of SEQ ID NO: 1883120
ccuaaaugucagcauugag

SEQ ID NO: 2171099 - RNA, 19 nt, Artificial Sequence
  Description of Artificial Sequence: Synthetic oligonucleotide
  Antisense strand to SEQ ID NO: 2171098
cucaaugcugacauuuagg

SEQ ID NO: 2171100 - RNA, 19 nt, Artificial Sequence
  Description of Artificial Sequence: Synthetic oligonucleotide
  Sense strand starting at position 3819 of SEQ ID NO: 1883120
gccuccuuaucuguaaaug

SEQ ID NO: 2171101 - RNA, 19 nt, Artificial Sequence
  Description of Artificial Sequence: Synthetic oligonucleotide
  Antisense strand to SEQ ID NO: 2171100
cauuuacagauaaggaggc

SEQ ID NO: 2171102 - RNA, 19 nt, Artificial Sequence
  Description of Artificial Sequence: Synthetic oligonucleotide
  Sense strand starting at position 3848 of SEQ ID NO: 1883120
acuacuguuucuucuagca

SEQ ID NO: 2171103 - RNA, 19 nt, Artificial Sequence
  Description of Artificial Sequence: Synthetic oligonucleotide
  Antisense strand to SEQ ID NO: 2171102
ugcuagaagaaacaguagu

SEQ ID NO: 2171104 - RNA, 19 nt, Artificial Sequence
  Description of Artificial Sequence: Synthetic oligonucleotide
  Sense strand starting at position 3908 of SEQ ID NO: 1883120
ugacaacuggcaugacaau

SEQ ID NO: 2171105 - RNA, 19 nt, Artificial Sequence
  Description of Artificial Sequence: Synthetic oligonucleotide
  Antisense strand to SEQ ID NO: 2171104
auugucaugccaguuguca

SEQ ID NO: 2171106 - RNA, 19 nt, Artificial Sequence
  Description of Artificial Sequence: Synthetic oligonucleotide
  Sense strand starting at position 5 of SEQ ID NO: 1883121
agaagucugagauguuucu

SEQ ID NO: 2171107 - RNA, 19 nt, Artificial Sequence
  Description of Artificial Sequence: Synthetic oligonucleotide
  Antisense strand to SEQ ID NO: 2171106
agaaacaucucagacuucu

SEQ ID NO: 2171108 - RNA, 19 nt, Artificial Sequence
  Description of Artificial Sequence: Synthetic oligonucleotide
  Sense strand starting at position 105 of SEQ ID NO: 1883121
gucuaaacaguuugauaca

SEQ ID NO: 2171109 - RNA, 19 nt, Artificial Sequence
  Description of Artificial Sequence: Synthetic oligonucleotide
  Antisense strand to SEQ ID NO: 2171108
uguaucaaacuguuuagac

SEQ ID NO: 2171110 - RNA, 19 nt, Artificial Sequence
  Description of Artificial Sequence: Synthetic oligonucleotide
  Sense strand starting at position 196 of SEQ ID NO: 1883121
uaggcaauuguuuauaaug

SEQ ID NO: 2171111 - RNA, 19 nt, Artificial Sequence
  Description of Artificial Sequence: Synthetic oligonucleotide
  Antisense strand to SEQ ID NO: 2171110
cauuauaaacaauugccua

SEQ ID NO: 2171112 - RNA, 19 nt, Artificial Sequence
  Description of Artificial Sequence: Synthetic oligonucleotide
  Sense strand starting at position 460 of SEQ ID NO: 1883121
ccugauaugucccugagga

SEQ ID NO: 2171113 - RNA, 19 nt, Artificial Sequence
  Description of Artificial Sequence: Synthetic oligonucleotide
  Antisense strand to SEQ ID NO: 2171112
uccucagggacauaucagg

SEQ ID NO: 2171114 - RNA, 19 nt, Artificial Sequence
  Description of Artificial Sequence: Synthetic oligonucleotide
  Sense strand starting at position 461 of SEQ ID NO: 1883121
cugauaugucccugaggac

SEQ ID NO: 2171115 - RNA, 19 nt, Artificial Sequence
  Description of Artificial Sequence: Synthetic oligonucleotide
  Antisense strand to SEQ ID NO: 2171114
guccucagggacauaucag

SEQ ID NO: 2171116 - RNA, 19 nt, Artificial Sequence
  Description of Artificial Sequence: Synthetic oligonucleotide
  Sense strand starting at position 479 of SEQ ID NO: 1883121
cugaauggcacaugguaau

SEQ ID NO: 2171117 - RNA, 19 nt, Artificial Sequence
  Description of Artificial Sequence: Synthetic oligonucleotide
  Antisense strand to SEQ ID NO: 2171116
auuaccaugugccauucag

SEQ ID NO: 2171118 - RNA, 19 nt, Artificial Sequence
  Description of Artificial Sequence: Synthetic oligonucleotide
  Sense strand starting at position 610 of SEQ ID NO: 1883121
uggcaauaugacugcagaa

SEQ ID NO: 2171119 - RNA, 19 nt, Artificial Sequence
  Description of Artificial Sequence: Synthetic oligonucleotide
  Antisense strand to SEQ ID NO: 2171118
uucugcagucauauugcca

SEQ ID NO: 2171120 - RNA, 19 nt, Artificial Sequence
  Description of Artificial Sequence: Synthetic oligonucleotide
  Sense strand starting at position 788 of SEQ ID NO: 1883121
acuagaaauaggugaaugu

SEQ ID NO: 2171121 - RNA, 19 nt, Artificial Sequence
  Description of Artificial Sequence: Synthetic oligonucleotide
  Antisense strand to SEQ ID NO: 2171120
acauucaccuauuucuagu

SEQ ID NO: 2171122 - RNA, 19 nt, Artificial Sequence
  Description of Artificial Sequence: Synthetic oligonucleotide
  Sense strand starting at position 792 of SEQ ID NO: 1883121
gaaauaggugaauguuuaa

SEQ ID NO: 2171123 - RNA, 19 nt, Artificial Sequence
  Description of Artificial Sequence: Synthetic oligonucleotide
  Antisense strand to SEQ ID NO: 2171122
uuaaacauucaccuauuuc

SEQ ID NO: 2171124 - RNA, 19 nt, Artificial Sequence
  Description of Artificial Sequence: Synthetic oligonucleotide
  Sense strand starting at position 973 of SEQ ID NO: 1883121
aaccaugauguuugaaagu

SEQ ID NO: 2171125 - RNA, 19 nt, Artificial Sequence
  Description of Artificial Sequence: Synthetic oligonucleotide
  Antisense strand to SEQ ID NO: 2171124
acuuucaaacaucaugguu

SEQ ID NO: 2171126 - RNA, 19 nt, Artificial Sequence
  Description of Artificial Sequence: Synthetic oligonucleotide
  Sense strand starting at position 986 of SEQ ID NO: 1883121
gaaaguauauguguuaaag

SEQ ID NO: 2171127 - RNA, 19 nt, Artificial Sequence
  Description of Artificial Sequence: Synthetic oligonucleotide
  Antisense strand to SEQ ID NO: 2171126
cuuuaacacauauacuuuc

SEQ ID NO: 2171128 - RNA, 19 nt, Artificial Sequence
  Description of Artificial Sequence: Synthetic oligonucleotide
  Sense strand starting at position 1030 of SEQ ID NO: 1883121
ggacaugagauaugagugu

SEQ ID NO: 2171129 - RNA, 19 nt, Artificial Sequence
  Description of Artificial Sequence: Synthetic oligonucleotide
  Antisense strand to SEQ ID NO: 2171128
acacucauaucucaugucc

SEQ ID NO: 2171130 - RNA, 19 nt, Artificial Sequence
  Description of Artificial Sequence: Synthetic oligonucleotide
  Sense strand starting at position 1332 of SEQ ID NO: 1883121
uccaauucugguuaaauug

SEQ ID NO: 2171131 - RNA, 19 nt, Artificial Sequence
  Description of Artificial Sequence: Synthetic oligonucleotide
  Antisense strand to SEQ ID NO: 2171130
caauuuaaccagaauugga

SEQ ID NO: 2171132 - RNA, 19 nt, Artificial Sequence
  Description of Artificial Sequence: Synthetic oligonucleotide
  Sense strand starting at position 1359 of SEQ ID NO: 1883121
cugaguucucauuacuuua

SEQ ID NO: 2171133 - RNA, 19 nt, Artificial Sequence
  Description of Artificial Sequence: Synthetic oligonucleotide
  Antisense strand to SEQ ID NO: 2171132
uaaaguaaugagaacucag

SEQ ID NO: 2171134 - RNA, 19 nt, Artificial Sequence
  Description of Artificial Sequence: Synthetic oligonucleotide
  Sense strand starting at position 1588 of SEQ ID NO: 1883121
gucgauguugucagugaau

SEQ ID NO: 2171135 - RNA, 19 nt, Artificial Sequence
  Description of Artificial Sequence: Synthetic oligonucleotide
  Antisense strand to SEQ ID NO: 2171134
auucacugacaacaucgac

SEQ ID NO: 2171136 - RNA, 19 nt, Artificial Sequence
  Description of Artificial Sequence: Synthetic oligonucleotide
  Sense strand starting at position 1601 of SEQ ID NO: 1883121
gugaaugcuccagauggau

SEQ ID NO: 2171137 - RNA, 19 nt, Artificial Sequence
  Description of Artificial Sequence: Synthetic oligonucleotide
  Antisense strand to SEQ ID NO: 2171136
auccaucuggagcauucac

SEQ ID NO: 2171138 - RNA, 19 nt, Artificial Sequence
  Description of Artificial Sequence: Synthetic oligonucleotide
  Sense strand starting at position 1804 of SEQ ID NO: 1883121
gcagcugguaaugaugauu

SEQ ID NO: 2171139 - RNA, 19 nt, Artificial Sequence
  Description of Artificial Sequence: Synthetic oligonucleotide
  Antisense strand to SEQ ID NO: 2171138
aaucaucauuaccagcugc

SEQ ID NO: 2171140 - RNA, 19 nt, Artificial Sequence
  Description of Artificial Sequence: Synthetic oligonucleotide
  Sense strand starting at position 1842 of SEQ ID NO: 1883121
uuucguguucguuuacuua

SEQ ID NO: 2171141 - RNA, 19 nt, Artificial Sequence
  Description of Artificial Sequence: Synthetic oligonucleotide
  Antisense strand to SEQ ID NO: 2171140
uaaguaaacgaacacgaaa

SEQ ID NO: 2171142 - RNA, 19 nt, Artificial Sequence
  Description of Artificial Sequence: Synthetic oligonucleotide
  Sense strand starting at position 1942 of SEQ ID NO: 1883121
agagguaugcguaggugau

SEQ ID NO: 2171143 - RNA, 19 nt, Artificial Sequence
  Description of Artificial Sequence: Synthetic oligonucleotide
  Antisense strand to SEQ ID NO: 2171142
aucaccuacgcauaccucu

SEQ ID NO: 2171144 - RNA, 19 nt, Artificial Sequence
  Description of Artificial Sequence: Synthetic oligonucleotide
  Sense strand starting at position 2098 of SEQ ID NO: 1883121
gggcucccuggauacuuaa

SEQ ID NO: 2171145 - RNA, 19 nt, Artificial Sequence
  Description of Artificial Sequence: Synthetic oligonucleotide
  Antisense strand to SEQ ID NO: 2171144
uuaaguauccagggagccc

SEQ ID NO: 2171146 - RNA, 19 nt, Artificial Sequence
  Description of Artificial Sequence: Synthetic oligonucleotide
  Sense strand starting at position 2101 of SEQ ID NO: 1883121
cucccuggauacuuaagau

SEQ ID NO: 2171147 - RNA, 19 nt, Artificial Sequence
  Description of Artificial Sequence: Synthetic oligonucleotide
  Antisense strand to SEQ ID NO: 2171146
aucuuaaguauccagggag

SEQ ID NO: 2171148 - RNA, 19 nt, Artificial Sequence
  Description of Artificial Sequence: Synthetic oligonucleotide
  Sense strand starting at position 2214 of SEQ ID NO: 1883121
aucucauagucugcaagaa

SEQ ID NO: 2171149 - RNA, 19 nt, Artificial Sequence
  Description of Artificial Sequence: Synthetic oligonucleotide
  Antisense strand to SEQ ID NO: 2171148
uucuugcagacuaugagau

SEQ ID NO: 2171150 - RNA, 19 nt, Artificial Sequence
  Description of Artificial Sequence: Synthetic oligonucleotide
  Sense strand starting at position 2215 of SEQ ID NO: 1883121
ucucauagucugcaagaac

SEQ ID NO: 2171151 - RNA, 19 nt, Artificial Sequence
  Description of Artificial Sequence: Synthetic oligonucleotide
  Antisense strand to SEQ ID NO: 2171150
guucuugcagacuaugaga

SEQ ID NO: 2171152 - RNA, 19 nt, Artificial Sequence
  Description of Artificial Sequence: Synthetic oligonucleotide
  Sense strand starting at position 2462 of SEQ ID NO: 1883121
ccauguaaaugacugcaau

SEQ ID NO: 2171153 - RNA, 19 nt, Artificial Sequence
  Description of Artificial Sequence: Synthetic oligonucleotide
  Antisense strand to SEQ ID NO: 2171152
auugcagucauuuacaugg

SEQ ID NO: 2171154 - RNA, 19 nt, Artificial Sequence
  Description of Artificial Sequence: Synthetic oligonucleotide
  Sense strand starting at position 2465 of SEQ ID NO: 1883121
uguaaaugacugcaauuaa

SEQ ID NO: 2171155 - RNA, 19 nt, Artificial Sequence
  Description of Artificial Sequence: Synthetic oligonucleotide
  Antisense strand to SEQ ID NO: 2171154
uuaauugcagucauuuaca

SEQ ID NO: 2171156 - RNA, 19 nt, Artificial Sequence
  Description of Artificial Sequence: Synthetic oligonucleotide
  Sense strand starting at position 2523 of SEQ ID NO: 1883121
gggacaaacucuccauggu

SEQ ID NO: 2171157 - RNA, 19 nt, Artificial Sequence
  Description of Artificial Sequence: Synthetic oligonucleotide
  Antisense strand to SEQ ID NO: 2171156
accauggagaguuuguccc

SEQ ID NO: 2171158 - RNA, 19 nt, Artificial Sequence
  Description of Artificial Sequence: Synthetic oligonucleotide
  Sense strand starting at position 2620 of SEQ ID NO: 1883121
uauguaccuggccaagauu

SEQ ID NO: 2171159 - RNA, 19 nt, Artificial Sequence
  Description of Artificial Sequence: Synthetic oligonucleotide
  Antisense strand to SEQ ID NO: 2171158
aaucuuggccagguacaua

SEQ ID NO: 2171160 - RNA, 19 nt, Artificial Sequence
  Description of Artificial Sequence: Synthetic oligonucleotide
  Sense strand starting at position 2623 of SEQ ID NO: 1883121
guaccuggccaagauuaau

SEQ ID NO: 2171161 - RNA, 19 nt, Artificial Sequence
  Description of Artificial Sequence: Synthetic oligonucleotide
  Antisense strand to SEQ ID NO: 2171160
auuaaucuuggccagguac

SEQ ID NO: 2171162 - RNA, 19 nt, Artificial Sequence
  Description of Artificial Sequence: Synthetic oligonucleotide
  Sense strand starting at position 2760 of SEQ ID NO: 1883121
ugcacauuccaagaaguuc

SEQ ID NO: 2171163 - RNA, 19 nt, Artificial Sequence
  Description of Artificial Sequence: Synthetic oligonucleotide
  Antisense strand to SEQ ID NO: 2171162
gaacuucuuggaaugugca

SEQ ID NO: 2171164 - RNA, 19 nt, Artificial Sequence
  Description of Artificial Sequence: Synthetic oligonucleotide
  Sense strand starting at position 2941 of SEQ ID NO: 1883121
ggagaauauggcugucuca

SEQ ID NO: 2171165 - RNA, 19 nt, Artificial Sequence
  Description of Artificial Sequence: Synthetic oligonucleotide
  Antisense strand to SEQ ID NO: 2171164
ugagacagccauauucucc

SEQ ID NO: 2171166 - RNA, 19 nt, Artificial Sequence
  Description of Artificial Sequence: Synthetic oligonucleotide
  Sense strand starting at position 2950 of SEQ ID NO: 1883121
ggcugucucauggauucua

SEQ ID NO: 2171167 - RNA, 19 nt, Artificial Sequence
  Description of Artificial Sequence: Synthetic oligonucleotide
  Antisense strand to SEQ ID NO: 2171166
uagaauccaugagacagcc

SEQ ID NO: 2171168 - RNA, 19 nt, Artificial Sequence
  Description of Artificial Sequence: Synthetic oligonucleotide
  Sense strand starting at position 2969 of SEQ ID NO: 1883121
agcaaucagguagaguauu

SEQ ID NO: 2171169 - RNA, 19 nt, Artificial Sequence
  Description of Artificial Sequence: Synthetic oligonucleotide
  Antisense strand to SEQ ID NO: 2171168
aauacucuaccugauugcu

SEQ ID NO: 2171170 - RNA, 19 nt, Artificial Sequence
  Description of Artificial Sequence: Synthetic oligonucleotide
  Sense strand starting at position 2995 of SEQ ID NO: 1883121
guuauugaaacaggaaguu

SEQ ID NO: 2171171 - RNA, 19 nt, Artificial Sequence
  Description of Artificial Sequence: Synthetic oligonucleotide
  Antisense strand to SEQ ID NO: 2171170
aacuuccuguuucaauaac

SEQ ID NO: 2171172 - RNA, 19 nt, Artificial Sequence
  Description of Artificial Sequence: Synthetic oligonucleotide
  Sense strand starting at position 3048 of SEQ ID NO: 1883121
ugcagagugacacaguauu

SEQ ID NO: 2171173 - RNA, 19 nt, Artificial Sequence
  Description of Artificial Sequence: Synthetic oligonucleotide
  Antisense strand to SEQ ID NO: 2171172
aauacugugucacucugca

SEQ ID NO: 2171174 - RNA, 19 nt, Artificial Sequence
  Description of Artificial Sequence: Synthetic oligonucleotide
  Sense strand starting at position 3083 of SEQ ID NO: 1883121
acacgaaagugucugaauc

SEQ ID NO: 2171175 - RNA, 19 nt, Artificial Sequence
  Description of Artificial Sequence: Synthetic oligonucleotide
  Antisense strand to SEQ ID NO: 2171174
gauucagacacuuucgugu

SEQ ID NO: 2171176 - RNA, 19 nt, Artificial Sequence
  Description of Artificial Sequence: Synthetic oligonucleotide
  Sense strand starting at position 3127 of SEQ ID NO: 1883121
gccauuaaauccuugagaa

SEQ ID NO: 2171177 - RNA, 19 nt, Artificial Sequence
  Description of Artificial Sequence: Synthetic oligonucleotide
  Antisense strand to SEQ ID NO: 2171176
uucucaaggauuuaauggc

SEQ ID NO: 2171178 - RNA, 19 nt, Artificial Sequence
  Description of Artificial Sequence: Synthetic oligonucleotide
  Sense strand starting at position 3369 of SEQ ID NO: 1883121
cuaauuaaauccuuacgga

SEQ ID NO: 2171179 - RNA, 19 nt, Artificial Sequence
  Description of Artificial Sequence: Synthetic oligonucleotide
  Antisense strand to SEQ ID NO: 2171178
uccguaaggauuuaauuag

SEQ ID NO: 2171180 - RNA, 19 nt, Artificial Sequence
  Description of Artificial Sequence: Synthetic oligonucleotide
  Sense strand starting at position 3525 of SEQ ID NO: 1883121
gcuagaagccaguaucaca

SEQ ID NO: 2171181 - RNA, 19 nt, Artificial Sequence
  Description of Artificial Sequence: Synthetic oligonucleotide
  Antisense strand to SEQ ID NO: 2171180
ugugauacuggcuucuagc

SEQ ID NO: 2171182 - RNA, 19 nt, Artificial Sequence
  Description of Artificial Sequence: Synthetic oligonucleotide
  Sense strand starting at position 3685 of SEQ ID NO: 1883121
ggugaugaguuaccagaug

SEQ ID NO: 2171183 - RNA, 19 nt, Artificial Sequence
  Description of Artificial Sequence: Synthetic oligonucleotide
  Antisense strand to SEQ ID NO: 2171182
caucugguaacucaucacc

SEQ ID NO: 2171184 - RNA, 19 nt, Artificial Sequence
  Description of Artificial Sequence: Synthetic oligonucleotide
  Sense strand starting at position 3886 of SEQ ID NO: 1883121
gagucuagugucuauagag

SEQ ID NO: 2171185 - RNA, 19 nt, Artificial Sequence
  Description of Artificial Sequence: Synthetic oligonucleotide
  Antisense strand to SEQ ID NO: 2171184
cucuauagacacuagacuc

SEQ ID NO: 2171186 - RNA, 19 nt, Artificial Sequence
  Description of Artificial Sequence: Synthetic oligonucleotide
  Sense strand starting at position 22 of SEQ ID NO: 1883122
ccuggaauauuacugucaa

SEQ ID NO: 2171187 - RNA, 19 nt, Artificial Sequence
  Description of Artificial Sequence: Synthetic oligonucleotide
  Antisense strand to SEQ ID NO: 2171186
uugacaguaauauuccagg

SEQ ID NO: 2171188 - RNA, 19 nt, Artificial Sequence
  Description of Artificial Sequence: Synthetic oligonucleotide
  Sense strand starting at position 222 of SEQ ID NO: 1883122
ugggaaugcucugucaaga

SEQ ID NO: 2171189 - RNA, 19 nt, Artificial Sequence
  Description of Artificial Sequence: Synthetic oligonucleotide
  Antisense strand to SEQ ID NO: 2171188
ucuugacagagcauuccca

SEQ ID NO: 2171190 - RNA, 19 nt, Artificial Sequence
  Description of Artificial Sequence: Synthetic oligonucleotide
  Sense strand starting at position 1987 of SEQ ID NO: 1883122
accugaucaccucggaauu

SEQ ID NO: 2171191 - RNA, 19 nt, Artificial Sequence
  Description of Artificial Sequence: Synthetic oligonucleotide
  Antisense strand to SEQ ID NO: 2171190
aauuccgaggugaucaggu

SEQ ID NO: 2171192 - RNA, 19 nt, Artificial Sequence
  Description of Artificial Sequence: Synthetic oligonucleotide
  Sense strand starting at position 2051 of SEQ ID NO: 1883122
gggauuauuuccuacuaca

SEQ ID NO: 2171193 - RNA, 19 nt, Artificial Sequence
  Description of Artificial Sequence: Synthetic oligonucleotide
  Antisense strand to SEQ ID NO: 2171192
uguaguaggaaauaauccc

SEQ ID NO: 2171194 - RNA, 19 nt, Artificial Sequence
  Description of Artificial Sequence: Synthetic oligonucleotide
  Sense strand starting at position 2140 of SEQ ID NO: 1883122
ucuguuccagcauaagaaa

SEQ ID NO: 2171195 - RNA, 19 nt, Artificial Sequence
  Description of Artificial Sequence: Synthetic oligonucleotide
  Antisense strand to SEQ ID NO: 2171194
uuucuuaugcuggaacaga

SEQ ID NO: 2171196 - RNA, 19 nt, Artificial Sequence
  Description of Artificial Sequence: Synthetic oligonucleotide
  Sense strand starting at position 2165 of SEQ ID NO: 1883122
gcuauaauccuugauguac

SEQ ID NO: 2171197 - RNA, 19 nt, Artificial Sequence
  Description of Artificial Sequence: Synthetic oligonucleotide
  Antisense strand to SEQ ID NO: 2171196
guacaucaaggauuauagc

SEQ ID NO: 2171198 - RNA, 19 nt, Artificial Sequence
  Description of Artificial Sequence: Synthetic oligonucleotide
  Sense strand starting at position 2428 of SEQ ID NO: 1883122
gaaugauggugaucacuua

SEQ ID NO: 2171199 - RNA, 19 nt, Artificial Sequence
  Description of Artificial Sequence: Synthetic oligonucleotide
  Antisense strand to SEQ ID NO: 2171198
uaagugaucaccaucauuc

SEQ ID NO: 2171200 - RNA, 19 nt, Artificial Sequence
  Description of Artificial Sequence: Synthetic oligonucleotide
  Sense strand starting at position 2454 of SEQ ID NO: 1883122
gugguugguuugaaaggaa

SEQ ID NO: 2171201 - RNA, 19 nt, Artificial Sequence
  Description of Artificial Sequence: Synthetic oligonucleotide
  Antisense strand to SEQ ID NO: 2171200
uuccuuucaaaccaaccac

SEQ ID NO: 2171202 - RNA, 19 nt, Artificial Sequence
  Description of Artificial Sequence: Synthetic oligonucleotide
  Sense strand starting at position 2494 of SEQ ID NO: 1883122
gccacuauuggugaugaac

SEQ ID NO: 2171203 - RNA, 19 nt, Artificial Sequence
  Description of Artificial Sequence: Synthetic oligonucleotide
  Antisense strand to SEQ ID NO: 2171202
guucaucaccaauaguggc

SEQ ID NO: 2171204 - RNA, 19 nt, Artificial Sequence
  Description of Artificial Sequence: Synthetic oligonucleotide
  Sense strand starting at position 2532 of SEQ ID NO: 1883122
gccuucuauguccacacau

SEQ ID NO: 2171205 - RNA, 19 nt, Artificial Sequence
  Description of Artificial Sequence: Synthetic oligonucleotide
  Antisense strand to SEQ ID NO: 2171204
auguguggacauagaaggc

SEQ ID NO: 2171206 - RNA, 19 nt, Artificial Sequence
  Description of Artificial Sequence: Synthetic oligonucleotide
  Sense strand starting at position 2534 of SEQ ID NO: 1883122
cuucuauguccacacaugu

SEQ ID NO: 2171207 - RNA, 19 nt, Artificial Sequence
  Description of Artificial Sequence: Synthetic oligonucleotide
  Antisense strand to SEQ ID NO: 2171206
acauguguggacauagaag

SEQ ID NO: 2171208 - RNA, 19 nt, Artificial Sequence
  Description of Artificial Sequence: Synthetic oligonucleotide
  Sense strand starting at position 2542 of SEQ ID NO: 1883122
uccacacaugugggugaau

SEQ ID NO: 2171209 - RNA, 19 nt, Artificial Sequence
  Description of Artificial Sequence: Synthetic oligonucleotide
  Antisense strand to SEQ ID NO: 2171208
auucacccacaugugugga

SEQ ID NO: 2171210 - RNA, 19 nt, Artificial Sequence
  Description of Artificial Sequence: Synthetic oligonucleotide
  Sense strand starting at position 2594 of SEQ ID NO: 1883122
cuagucaaauaugucuuua

SEQ ID NO: 2171211 - RNA, 19 nt, Artificial Sequence
  Description of Artificial Sequence: Synthetic oligonucleotide
  Antisense strand to SEQ ID NO: 2171210
uaaagacauauuugacuag

SEQ ID NO: 2171212 - RNA, 19 nt, Artificial Sequence
  Description of Artificial Sequence: Synthetic oligonucleotide
  Sense strand starting at position 2608 of SEQ ID NO: 1883122
cuuuaaauuucugcguuua

SEQ ID NO: 2171213 - RNA, 19 nt, Artificial Sequence
  Description of Artificial Sequence: Synthetic oligonucleotide
  Antisense strand to SEQ ID NO: 2171212
uaaacgcagaaauuuaaag

SEQ ID NO: 2171214 - RNA, 19 nt, Artificial Sequence
  Description of Artificial Sequence: Synthetic oligonucleotide
  Sense strand starting at position 2613 of SEQ ID NO: 1883122
aauuucugcguuuauugua

SEQ ID NO: 2171215 - RNA, 19 nt, Artificial Sequence
  Description of Artificial Sequence: Synthetic oligonucleotide
  Antisense strand to SEQ ID NO: 2171214
uacaauaaacgcagaaauu

SEQ ID NO: 2171216 - RNA, 19 nt, Artificial Sequence
  Description of Artificial Sequence: Synthetic oligonucleotide
  Sense strand starting at position 2644 of SEQ ID NO: 1883122
cagugauuauacuucggaa

SEQ ID NO: 2171217 - RNA, 19 nt, Artificial Sequence
  Description of Artificial Sequence: Synthetic oligonucleotide
  Antisense strand to SEQ ID NO: 2171216
uuccgaaguauaaucacug

SEQ ID NO: 2171218 - RNA, 19 nt, Artificial Sequence
  Description of Artificial Sequence: Synthetic oligonucleotide
  Sense strand starting at position 2646 of SEQ ID NO: 1883122
gugauuauacuucggaaga

SEQ ID NO: 2171219 - RNA, 19 nt, Artificial Sequence
  Description of Artificial Sequence: Synthetic oligonucleotide
  Antisense strand to SEQ ID NO: 2171218
ucuuccgaaguauaaucac

SEQ ID NO: 2171220 - RNA, 19 nt, Artificial Sequence
  Description of Artificial Sequence: Synthetic oligonucleotide
  Sense strand starting at position 2800 of SEQ ID NO: 1883122
ggcucacacuuaucagaaa

SEQ ID NO: 2171221 - RNA, 19 nt, Artificial Sequence
  Description of Artificial Sequence: Synthetic oligonucleotide
  Antisense strand to SEQ ID NO: 2171220
uuucugauaagugugagcc

SEQ ID NO: 2171222 - RNA, 19 nt, Artificial Sequence
  Description of Artificial Sequence: Synthetic oligonucleotide
  Sense strand starting at position 2843 of SEQ ID NO: 1883122
uucugaagauggcugaaua

SEQ ID NO: 2171223 - RNA, 19 nt, Artificial Sequence
  Description of Artificial Sequence: Synthetic oligonucleotide
  Antisense strand to SEQ ID NO: 2171222
uauucagccaucuucagaa

SEQ ID NO: 2171224 - RNA, 19 nt, Artificial Sequence
  Description of Artificial Sequence: Synthetic oligonucleotide
  Sense strand starting at position 2844 of SEQ ID NO: 1883122
ucugaagauggcugaauau

SEQ ID NO: 2171225 - RNA, 19 nt, Artificial Sequence
  Description of Artificial Sequence: Synthetic oligonucleotide
  Antisense strand to SEQ ID NO: 2171224
auauucagccaucuucaga

SEQ ID NO: 2171226 - RNA, 19 nt, Artificial Sequence
  Description of Artificial Sequence: Synthetic oligonucleotide
  Sense strand starting at position 2882 of SEQ ID NO: 1883122
ccaugugcucauugaggga

SEQ ID NO: 2171227 - RNA, 19 nt, Artificial Sequence
  Description of Artificial Sequence: Synthetic oligonucleotide
  Antisense strand to SEQ ID NO: 2171226
ucccucaaugagcacaugg

SEQ ID NO: 2171228 - RNA, 19 nt, Artificial Sequence
  Description of Artificial Sequence: Synthetic oligonucleotide
  Sense strand starting at position 2940 of SEQ ID NO: 1883122
cuaagauugcuauggugau

SEQ ID NO: 2171229 - RNA, 19 nt, Artificial Sequence
  Description of Artificial Sequence: Synthetic oligonucleotide
  Antisense strand to SEQ ID NO: 2171228
aucaccauagcaaucuuag

SEQ ID NO: 2171230 - RNA, 19 nt, Artificial Sequence
  Description of Artificial Sequence: Synthetic oligonucleotide
  Sense strand starting at position 2997 of SEQ ID NO: 1883122
gaagcacauguuggagauu

SEQ ID NO: 2171231 - RNA, 19 nt, Artificial Sequence
  Description of Artificial Sequence: Synthetic oligonucleotide
  Antisense strand to SEQ ID NO: 2171230
aaucuccaacaugugcuuc

SEQ ID NO: 2171232 - RNA, 19 nt, Artificial Sequence
  Description of Artificial Sequence: Synthetic oligonucleotide
  Sense strand starting at position 3000 of SEQ ID NO: 1883122
gcacauguuggagauucca

SEQ ID NO: 2171233 - RNA, 19 nt, Artificial Sequence
  Description of Artificial Sequence: Synthetic oligonucleotide
  Antisense strand to SEQ ID NO: 2171232
uggaaucuccaacaugugc

SEQ ID NO: 2171234 - RNA, 19 nt, Artificial Sequence
  Description of Artificial Sequence: Synthetic oligonucleotide
  Sense strand starting at position 3008 of SEQ ID NO: 1883122
uggagauuccagggccaga

SEQ ID NO: 2171235 - RNA, 19 nt, Artificial Sequence
  Description of Artificial Sequence: Synthetic oligonucleotide
  Antisense strand to SEQ ID NO: 2171234
ucuggcccuggaaucucca

SEQ ID NO: 2171236 - RNA, 19 nt, Artificial Sequence
  Description of Artificial Sequence: Synthetic oligonucleotide
  Sense strand starting at position 3073 of SEQ ID NO: 1883122
uaaggagauugggaaauaa

SEQ ID NO: 2171237 - RNA, 19 nt, Artificial Sequence
  Description of Artificial Sequence: Synthetic oligonucleotide
  Antisense strand to SEQ ID NO: 2171236
uuauuucccaaucuccuua

SEQ ID NO: 2171238 - RNA, 19 nt, Artificial Sequence
  Description of Artificial Sequence: Synthetic oligonucleotide
  Sense strand starting at position 3098 of SEQ ID NO: 1883122
ucagguauguacccaggaa

SEQ ID NO: 2171239 - RNA, 19 nt, Artificial Sequence
  Description of Artificial Sequence: Synthetic oligonucleotide
  Antisense strand to SEQ ID NO: 2171238
uuccuggguacauaccuga

SEQ ID NO: 2171240 - RNA, 19 nt, Artificial Sequence
  Description of Artificial Sequence: Synthetic oligonucleotide
  Sense strand starting at position 3137 of SEQ ID NO: 1883122
gagcucagaucacugauau

SEQ ID NO: 2171241 - RNA, 19 nt, Artificial Sequence
  Description of Artificial Sequence: Synthetic oligonucleotide
  Antisense strand to SEQ ID NO: 2171240
auaucagugaucugagcuc

SEQ ID NO: 2171242 - RNA, 19 nt, Artificial Sequence
  Description of Artificial Sequence: Synthetic oligonucleotide
  Sense strand starting at position 3138 of SEQ ID NO: 1883122
agcucagaucacugauauc

SEQ ID NO: 2171243 - RNA, 19 nt, Artificial Sequence
  Description of Artificial Sequence: Synthetic oligonucleotide
  Antisense strand to SEQ ID NO: 2171242
gauaucagugaucugagcu

SEQ ID NO: 2171244 - RNA, 19 nt, Artificial Sequence
  Description of Artificial Sequence: Synthetic oligonucleotide
  Sense strand starting at position 3235 of SEQ ID NO: 1883122
uggcuauuaauugagaggu

SEQ ID NO: 2171245 - RNA, 19 nt, Artificial Sequence
  Description of Artificial Sequence: Synthetic oligonucleotide
  Antisense strand to SEQ ID NO: 2171244
accucucaauuaauagcca

SEQ ID NO: 2171246 - RNA, 19 nt, Artificial Sequence
  Description of Artificial Sequence: Synthetic oligonucleotide
  Sense strand starting at position 3264 of SEQ ID NO: 1883122
uaggcaugauaguuaugaa

SEQ ID NO: 2171247 - RNA, 19 nt, Artificial Sequence
  Description of Artificial Sequence: Synthetic oligonucleotide
  Antisense strand to SEQ ID NO: 2171246
uucauaacuaucaugccua

SEQ ID NO: 2171248 - RNA, 19 nt, Artificial Sequence
  Description of Artificial Sequence: Synthetic oligonucleotide
  Sense strand starting at position 3313 of SEQ ID NO: 1883122
cagggagcucauggacaua

SEQ ID NO: 2171249 - RNA, 19 nt, Artificial Sequence
  Description of Artificial Sequence: Synthetic oligonucleotide
  Antisense strand to SEQ ID NO: 2171248
uauguccaugagcucccug

SEQ ID NO: 2171250 - RNA, 19 nt, Artificial Sequence
  Description of Artificial Sequence: Synthetic oligonucleotide
  Sense strand starting at position 3589 of SEQ ID NO: 1883122
gugucuaacacgcaagaca

SEQ ID NO: 2171251 - RNA, 19 nt, Artificial Sequence
  Description of Artificial Sequence: Synthetic oligonucleotide
  Antisense strand to SEQ ID NO: 2171250
ugucuugcguguuagacac

SEQ ID NO: 2171252 - RNA, 19 nt, Artificial Sequence
  Description of Artificial Sequence: Synthetic oligonucleotide
  Sense strand starting at position 3735 of SEQ ID NO: 1883122
gggaugaggucguccagau

SEQ ID NO: 2171253 - RNA, 19 nt, Artificial Sequence
  Description of Artificial Sequence: Synthetic oligonucleotide
  Antisense strand to SEQ ID NO: 2171252
aucuggacgaccucauccc

SEQ ID NO: 2171254 - RNA, 19 nt, Artificial Sequence
  Description of Artificial Sequence: Synthetic oligonucleotide
  Sense strand starting at position 3767 of SEQ ID NO: 1883122
cugaguuaggaguggauga

SEQ ID NO: 2171255 - RNA, 19 nt, Artificial Sequence
  Description of Artificial Sequence: Synthetic oligonucleotide
  Antisense strand to SEQ ID NO: 2171254
ucauccacuccuaacucag

SEQ ID NO: 2171256 - RNA, 19 nt, Artificial Sequence
  Description of Artificial Sequence: Synthetic oligonucleotide
  Sense strand starting at position 3815 of SEQ ID NO: 1883122
gcaugaugucaauagaccu

SEQ ID NO: 2171257 - RNA, 19 nt, Artificial Sequence
  Description of Artificial Sequence: Synthetic oligonucleotide
  Antisense strand to SEQ ID NO: 2171256
aggucuauugacaucaugc

SEQ ID NO: 2171258 - RNA, 19 nt, Artificial Sequence
  Description of Artificial Sequence: Synthetic oligonucleotide
  Sense strand starting at position 3867 of SEQ ID NO: 1883122
agcaauaaugcucagcuga

SEQ ID NO: 2171259 - RNA, 19 nt, Artificial Sequence
  Description of Artificial Sequence: Synthetic oligonucleotide
  Antisense strand to SEQ ID NO: 2171258
ucagcugagcauuauugcu

SEQ ID NO: 2171260 - RNA, 19 nt, Artificial Sequence
  Description of Artificial Sequence: Synthetic oligonucleotide
  Sense strand starting at position 3872 of SEQ ID NO: 1883122
uaaugcucagcugaggauu

SEQ ID NO: 2171261 - RNA, 19 nt, Artificial Sequence
  Description of Artificial Sequence: Synthetic oligonucleotide
  Antisense strand to SEQ ID NO: 2171260
aauccucagcugagcauua

SEQ ID NO: 2171262 - RNA, 19 nt, Artificial Sequence
  Description of Artificial Sequence: Synthetic oligonucleotide
  Sense strand starting at position 3880 of SEQ ID NO: 1883122
agcugaggauuguuaggaa

SEQ ID NO: 2171263 - RNA, 19 nt, Artificial Sequence
  Description of Artificial Sequence: Synthetic oligonucleotide
  Antisense strand to SEQ ID NO: 2171262
uuccuaacaauccucagcu

SEQ ID NO: 2171264 - RNA, 19 nt, Artificial Sequence
  Description of Artificial Sequence: Synthetic oligonucleotide
  Sense strand starting at position 3903 of SEQ ID NO: 1883122
ugguauacugaagguuaau

SEQ ID NO: 2171265 - RNA, 19 nt, Artificial Sequence
  Description of Artificial Sequence: Synthetic oligonucleotide
  Antisense strand to SEQ ID NO: 2171264
auuaaccuucaguauacca

SEQ ID NO: 2171266 - RNA, 19 nt, Artificial Sequence
  Description of Artificial Sequence: Synthetic oligonucleotide
  Sense strand starting at position 2024 of SEQ ID NO: 1883123
aaaguacccuccugugagu

SEQ ID NO: 2171267 - RNA, 19 nt, Artificial Sequence
  Description of Artificial Sequence: Synthetic oligonucleotide
  Antisense strand to SEQ ID NO: 2171266
acucacaggaggguacuuu

SEQ ID NO: 2171268 - RNA, 19 nt, Artificial Sequence
  Description of Artificial Sequence: Synthetic oligonucleotide
  Sense strand starting at position 2026 of SEQ ID NO: 1883123
aguacccuccugugaguaa

SEQ ID NO: 2171269 - RNA, 19 nt, Artificial Sequence
  Description of Artificial Sequence: Synthetic oligonucleotide
  Antisense strand to SEQ ID NO: 2171268
uuacucacaggaggguacu

SEQ ID NO: 2171270 - RNA, 19 nt, Artificial Sequence
  Description of Artificial Sequence: Synthetic oligonucleotide
  Sense strand starting at position 2027 of SEQ ID NO: 1883123
guacccuccugugaguaaa

SEQ ID NO: 2171271 - RNA, 19 nt, Artificial Sequence
  Description of Artificial Sequence: Synthetic oligonucleotide
  Antisense strand to SEQ ID NO: 2171270
uuuacucacaggaggguac

SEQ ID NO: 2171272 - RNA, 19 nt, Artificial Sequence
  Description of Artificial Sequence: Synthetic oligonucleotide
  Sense strand starting at position 2037 of SEQ ID NO: 1883123
gugaguaaacucugaagua

SEQ ID NO: 2171273 - RNA, 19 nt, Artificial Sequence
  Description of Artificial Sequence: Synthetic oligonucleotide
  Antisense strand to SEQ ID NO: 2171272
uacuucagaguuuacucac

SEQ ID NO: 2171274 - RNA, 19 nt, Artificial Sequence
  Description of Artificial Sequence: Synthetic oligonucleotide
  Sense strand starting at position 2038 of SEQ ID NO: 1883123
ugaguaaacucugaaguac

SEQ ID NO: 2171275 - RNA, 19 nt, Artificial Sequence
  Description of Artificial Sequence: Synthetic oligonucleotide
  Antisense strand to SEQ ID NO: 2171274
guacuucagaguuuacuca

SEQ ID NO: 2171276 - RNA, 19 nt, Artificial Sequence
  Description of Artificial Sequence: Synthetic oligonucleotide
  Sense strand starting at position 2065 of SEQ ID NO: 1883123
cuaccugauuucuguagaa

SEQ ID NO: 2171277 - RNA, 19 nt, Artificial Sequence
  Description of Artificial Sequence: Synthetic oligonucleotide
  Antisense strand to SEQ ID NO: 2171276
uucuacagaaaucagguag

SEQ ID NO: 2171278 - RNA, 19 nt, Artificial Sequence
  Description of Artificial Sequence: Synthetic oligonucleotide
  Sense strand starting at position 2106 of SEQ ID NO: 1883123
uacuuaauuuacggcagua

SEQ ID NO: 2171279 - RNA, 19 nt, Artificial Sequence
  Description of Artificial Sequence: Synthetic oligonucleotide
  Antisense strand to SEQ ID NO: 2171278
uacugccguaaauuaagua

SEQ ID NO: 2171280 - RNA, 19 nt, Artificial Sequence
  Description of Artificial Sequence: Synthetic oligonucleotide
  Sense strand starting at position 2202 of SEQ ID NO: 1883123
aaagcuuugaccggaagga

SEQ ID NO: 2171281 - RNA, 19 nt, Artificial Sequence
  Description of Artificial Sequence: Synthetic oligonucleotide
  Antisense strand to SEQ ID NO: 2171280
uccuuccggucaaagcuuu

SEQ ID NO: 2171282 - RNA, 19 nt, Artificial Sequence
  Description of Artificial Sequence: Synthetic oligonucleotide
  Sense strand starting at position 2245 of SEQ ID NO: 1883123
gcuuuaaggagucaaagcu

SEQ ID NO: 2171283 - RNA, 19 nt, Artificial Sequence
  Description of Artificial Sequence: Synthetic oligonucleotide
  Antisense strand to SEQ ID NO: 2171282
agcuuugacuccuuaaagc

SEQ ID NO: 2171284 - RNA, 19 nt, Artificial Sequence
  Description of Artificial Sequence: Synthetic oligonucleotide
  Sense strand starting at position 2251 of SEQ ID NO: 1883123
aggagucaaagcugacuua

SEQ ID NO: 2171285 - RNA, 19 nt, Artificial Sequence
  Description of Artificial Sequence: Synthetic oligonucleotide
  Antisense strand to SEQ ID NO: 2171284
uaagucagcuuugacuccu

SEQ ID NO: 2171286 - RNA, 19 nt, Artificial Sequence
  Description of Artificial Sequence: Synthetic oligonucleotide
  Sense strand starting at position 2252 of SEQ ID NO: 1883123
ggagucaaagcugacuuau

SEQ ID NO: 2171287 - RNA, 19 nt, Artificial Sequence
  Description of Artificial Sequence: Synthetic oligonucleotide
  Antisense strand to SEQ ID NO: 2171286
auaagucagcuuugacucc

SEQ ID NO: 2171288 - RNA, 19 nt, Artificial Sequence
  Description of Artificial Sequence: Synthetic oligonucleotide
  Sense strand starting at position 2254 of SEQ ID NO: 1883123
agucaaagcugacuuauga

SEQ ID NO: 2171289 - RNA, 19 nt, Artificial Sequence
  Description of Artificial Sequence: Synthetic oligonucleotide
  Antisense strand to SEQ ID NO: 2171288
ucauaagucagcuuugacu

SEQ ID NO: 2171290 - RNA, 19 nt, Artificial Sequence
  Description of Artificial Sequence: Synthetic oligonucleotide
  Sense strand starting at position 2258 of SEQ ID NO: 1883123
aaagcugacuuaugaaguu

SEQ ID NO: 2171291 - RNA, 19 nt, Artificial Sequence
  Description of Artificial Sequence: Synthetic oligonucleotide
  Antisense strand to SEQ ID NO: 2171290
aacuucauaagucagcuuu

SEQ ID NO: 2171292 - RNA, 19 nt, Artificial Sequence
  Description of Artificial Sequence: Synthetic oligonucleotide
  Sense strand starting at position 2306 of SEQ ID NO: 1883123
uacagaguuccuugccugu

SEQ ID NO: 2171293 - RNA, 19 nt, Artificial Sequence
  Description of Artificial Sequence: Synthetic oligonucleotide
  Antisense strand to SEQ ID NO: 2171292
acaggcaaggaacucugua

SEQ ID NO: 2171294 - RNA, 19 nt, Artificial Sequence
  Description of Artificial Sequence: Synthetic oligonucleotide
  Sense strand starting at position 2310 of SEQ ID NO: 1883123
gaguuccuugccuguagua

SEQ ID NO: 2171295 - RNA, 19 nt, Artificial Sequence
  Description of Artificial Sequence: Synthetic oligonucleotide
  Antisense strand to SEQ ID NO: 2171294
uacuacaggcaaggaacuc

SEQ ID NO: 2171296 - RNA, 19 nt, Artificial Sequence
  Description of Artificial Sequence: Synthetic oligonucleotide
  Sense strand starting at position 2315 of SEQ ID NO: 1883123
ccuugccuguaguauguaa

SEQ ID NO: 2171297 - RNA, 19 nt, Artificial Sequence
  Description of Artificial Sequence: Synthetic oligonucleotide
  Antisense strand to SEQ ID NO: 2171296
uuacauacuacaggcaagg

SEQ ID NO: 2171298 - RNA, 19 nt, Artificial Sequence
  Description of Artificial Sequence: Synthetic oligonucleotide
  Sense strand starting at position 2319 of SEQ ID NO: 1883123
gccuguaguauguaaagaa

SEQ ID NO: 2171299 - RNA, 19 nt, Artificial Sequence
  Description of Artificial Sequence: Synthetic oligonucleotide
  Antisense strand to SEQ ID NO: 2171298
uucuuuacauacuacaggc

SEQ ID NO: 2171300 - RNA, 19 nt, Artificial Sequence
  Description of Artificial Sequence: Synthetic oligonucleotide
  Sense strand starting at position 2365 of SEQ ID NO: 1883123
ccaaauuauccugggaccu

SEQ ID NO: 2171301 - RNA, 19 nt, Artificial Sequence
  Description of Artificial Sequence: Synthetic oligonucleotide
  Antisense strand to SEQ ID NO: 2171300
aggucccaggauaauuugg

SEQ ID NO: 2171302 - RNA, 19 nt, Artificial Sequence
  Description of Artificial Sequence: Synthetic oligonucleotide
  Sense strand starting at position 2463 of SEQ ID NO: 1883123
agucaaaucugggauucgu

SEQ ID NO: 2171303 - RNA, 19 nt, Artificial Sequence
  Description of Artificial Sequence: Synthetic oligonucleotide
  Antisense strand to SEQ ID NO: 2171302
acgaaucccagauuugacu

SEQ ID NO: 2171304 - RNA, 19 nt, Artificial Sequence
  Description of Artificial Sequence: Synthetic oligonucleotide
  Sense strand starting at position 2472 of SEQ ID NO: 1883123
ugggauucguuauagaaua

SEQ ID NO: 2171305 - RNA, 19 nt, Artificial Sequence
  Description of Artificial Sequence: Synthetic oligonucleotide
  Antisense strand to SEQ ID NO: 2171304
uauucuauaacgaauccca

SEQ ID NO: 2171306 - RNA, 19 nt, Artificial Sequence
  Description of Artificial Sequence: Synthetic oligonucleotide
  Sense strand starting at position 2485 of SEQ ID NO: 1883123
agaauaaaguuccagcaaa

SEQ ID NO: 2171307 - RNA, 19 nt, Artificial Sequence
  Description of Artificial Sequence: Synthetic oligonucleotide
  Antisense strand to SEQ ID NO: 2171306
uuugcuggaacuuuauucu

SEQ ID NO: 2171308 - RNA, 19 nt, Artificial Sequence
  Description of Artificial Sequence: Synthetic oligonucleotide
  Sense strand starting at position 2518 of SEQ ID NO: 1883123
aggccuauauggcaaauaa

SEQ ID NO: 2171309 - RNA, 19 nt, Artificial Sequence
  Description of Artificial Sequence: Synthetic oligonucleotide
  Antisense strand to SEQ ID NO: 2171308
uuauuugccauauaggccu

SEQ ID NO: 2171310 - RNA, 19 nt, Artificial Sequence
  Description of Artificial Sequence: Synthetic oligonucleotide
  Sense strand starting at position 2532 of SEQ ID NO: 1883123
aauaauuauucgugcugac

SEQ ID NO: 2171311 - RNA, 19 nt, Artificial Sequence
  Description of Artificial Sequence: Synthetic oligonucleotide
  Antisense strand to SEQ ID NO: 2171310
gucagcacgaauaauuauu

SEQ ID NO: 2171312 - RNA, 19 nt, Artificial Sequence
  Description of Artificial Sequence: Synthetic oligonucleotide
  Sense strand starting at position 2535 of SEQ ID NO: 1883123
aauuauucgugcugacauu

SEQ ID NO: 2171313 - RNA, 19 nt, Artificial Sequence
  Description of Artificial Sequence: Synthetic oligonucleotide
  Antisense strand to SEQ ID NO: 2171312
aaugucagcacgaauaauu

SEQ ID NO: 2171314 - RNA, 19 nt, Artificial Sequence
  Description of Artificial Sequence: Synthetic oligonucleotide
  Sense strand starting at position 2536 of SEQ ID NO: 1883123
auuauucgugcugacauua

SEQ ID NO: 2171315 - RNA, 19 nt, Artificial Sequence
  Description of Artificial Sequence: Synthetic oligonucleotide
  Antisense strand to SEQ ID NO: 2171314
uaaugucagcacgaauaau

SEQ ID NO: 2171316 - RNA, 19 nt, Artificial Sequence
  Description of Artificial Sequence: Synthetic oligonucleotide
  Sense strand starting at position 2541 of SEQ ID NO: 1883123
ucgugcugacauuaugcaa

SEQ ID NO: 2171317 - RNA, 19 nt, Artificial Sequence
  Description of Artificial Sequence: Synthetic oligonucleotide
  Antisense strand to SEQ ID NO: 2171316
uugcauaaugucagcacga

SEQ ID NO: 2171318 - RNA, 19 nt, Artificial Sequence
  Description of Artificial Sequence: Synthetic oligonucleotide
  Sense strand starting at position 2567 of SEQ ID NO: 1883123
ggccaaguauaagaugaaa

SEQ ID NO: 2171319 - RNA, 19 nt, Artificial Sequence
  Description of Artificial Sequence: Synthetic oligonucleotide
  Antisense strand to SEQ ID NO: 2171318
uuucaucuuauacuuggcc

SEQ ID NO: 2171320 - RNA, 19 nt, Artificial Sequence
  Description of Artificial Sequence: Synthetic oligonucleotide
  Sense strand starting at position 2736 of SEQ ID NO: 1883123
ccaacaugguggugaaaca

SEQ ID NO: 2171321 - RNA, 19 nt, Artificial Sequence
  Description of Artificial Sequence: Synthetic oligonucleotide
  Antisense strand to SEQ ID NO: 2171320
uguuucaccaccauguugg

SEQ ID NO: 2171322 - RNA, 19 nt, Artificial Sequence
  Description of Artificial Sequence: Synthetic oligonucleotide
  Sense strand starting at position 2866 of SEQ ID NO: 1883123
uugccugaguccugguaag

SEQ ID NO: 2171323 - RNA, 19 nt, Artificial Sequence
  Description of Artificial Sequence: Synthetic oligonucleotide
  Antisense strand to SEQ ID NO: 2171322
cuuaccaggacucaggcaa

SEQ ID NO: 2171324 - RNA, 19 nt, Artificial Sequence
  Description of Artificial Sequence: Synthetic oligonucleotide
  Sense strand starting at position 3075 of SEQ ID NO: 1883123
agaagugacucaguccuua

SEQ ID NO: 2171325 - RNA, 19 nt, Artificial Sequence
  Description of Artificial Sequence: Synthetic oligonucleotide
  Antisense strand to SEQ ID NO: 2171324
uaaggacugagucacuucu

SEQ ID NO: 2171326 - RNA, 19 nt, Artificial Sequence
  Description of Artificial Sequence: Synthetic oligonucleotide
  Sense strand starting at position 3080 of SEQ ID NO: 1883123
ugacucaguccuuaggacu

SEQ ID NO: 2171327 - RNA, 19 nt, Artificial Sequence
  Description of Artificial Sequence: Synthetic oligonucleotide
  Antisense strand to SEQ ID NO: 2171326
aguccuaaggacugaguca

SEQ ID NO: 2171328 - RNA, 19 nt, Artificial Sequence
  Description of Artificial Sequence: Synthetic oligonucleotide
  Sense strand starting at position 3225 of SEQ ID NO: 1883123
gagguuguuugagugcuaa

SEQ ID NO: 2171329 - RNA, 19 nt, Artificial Sequence
  Description of Artificial Sequence: Synthetic oligonucleotide
  Antisense strand to SEQ ID NO: 2171328
uuagcacucaaacaaccuc

SEQ ID NO: 2171330 - RNA, 19 nt, Artificial Sequence
  Description of Artificial Sequence: Synthetic oligonucleotide
  Sense strand starting at position 3413 of SEQ ID NO: 1883123
accguuguugauggucaau

SEQ ID NO: 2171331 - RNA, 19 nt, Artificial Sequence
  Description of Artificial Sequence: Synthetic oligonucleotide
  Antisense strand to SEQ ID NO: 2171330
auugaccaucaacaacggu

SEQ ID NO: 2171332 - RNA, 19 nt, Artificial Sequence
  Description of Artificial Sequence: Synthetic oligonucleotide
  Sense strand starting at position 3415 of SEQ ID NO: 1883123
cguuguugauggucaauga

SEQ ID NO: 2171333 - RNA, 19 nt, Artificial Sequence
  Description of Artificial Sequence: Synthetic oligonucleotide
  Antisense strand to SEQ ID NO: 2171332
ucauugaccaucaacaacg

SEQ ID NO: 2171334 - RNA, 19 nt, Artificial Sequence
  Description of Artificial Sequence: Synthetic oligonucleotide
  Sense strand starting at position 3419 of SEQ ID NO: 1883123
guugauggucaaugagaca

SEQ ID NO: 2171335 - RNA, 19 nt, Artificial Sequence
  Description of Artificial Sequence: Synthetic oligonucleotide
  Antisense strand to SEQ ID NO: 2171334
ugucucauugaccaucaac

SEQ ID NO: 2171336 - RNA, 19 nt, Artificial Sequence
  Description of Artificial Sequence: Synthetic oligonucleotide
  Sense strand starting at position 3697 of SEQ ID NO: 1883123
uggucaccugucugagcau

SEQ ID NO: 2171337 - RNA, 19 nt, Artificial Sequence
  Description of Artificial Sequence: Synthetic oligonucleotide
  Antisense strand to SEQ ID NO: 2171336
augcucagacaggugacca

SEQ ID NO: 2171338 - RNA, 19 nt, Artificial Sequence
  Description of Artificial Sequence: Synthetic oligonucleotide
  Sense strand starting at position 3703 of SEQ ID NO: 1883123
ccugucugagcauggguua

SEQ ID NO: 2171339 - RNA, 19 nt, Artificial Sequence
  Description of Artificial Sequence: Synthetic oligonucleotide
  Antisense strand to SEQ ID NO: 2171338
uaacccaugcucagacagg

SEQ ID NO: 2171340 - RNA, 19 nt, Artificial Sequence
  Description of Artificial Sequence: Synthetic oligonucleotide
  Sense strand starting at position 3881 of SEQ ID NO: 1883123
cagcguucugaggacuaaa

SEQ ID NO: 2171341 - RNA, 19 nt, Artificial Sequence
  Description of Artificial Sequence: Synthetic oligonucleotide
  Antisense strand to SEQ ID NO: 2171340
uuuaguccucagaacgcug

SEQ ID NO: 2171342 - RNA, 19 nt, Artificial Sequence
  Description of Artificial Sequence: Synthetic oligonucleotide
  Sense strand starting at position 3949 of SEQ ID NO: 1883123
gggagugugcccuacagac

SEQ ID NO: 2171343 - RNA, 19 nt, Artificial Sequence
  Description of Artificial Sequence: Synthetic oligonucleotide
  Antisense strand to SEQ ID NO: 2171342
gucuguagggcacacuccc

SEQ ID NO: 2171344 - RNA, 19 nt, Artificial Sequence
  Description of Artificial Sequence: Synthetic oligonucleotide
  Sense strand starting at position 3966 of SEQ ID NO: 1883123
accguagagucucucaaau

SEQ ID NO: 2171345 - RNA, 19 nt, Artificial Sequence
  Description of Artificial Sequence: Synthetic oligonucleotide
  Antisense strand to SEQ ID NO: 2171344
auuugagagacucuacggu

SEQ ID NO: 2171346 - RNA, 19 nt, Artificial Sequence
  Description of Artificial Sequence: Synthetic oligonucleotide
  Sense strand starting at position 471 of SEQ ID NO: 1883124
gucagaagugccugcauaa

SEQ ID NO: 2171347 - RNA, 19 nt, Artificial Sequence
  Description of Artificial Sequence: Synthetic oligonucleotide
  Antisense strand to SEQ ID NO: 2171346
uuaugcaggcacuucugac

SEQ ID NO: 2171348 - RNA, 19 nt, Artificial Sequence
  Description of Artificial Sequence: Synthetic oligonucleotide
  Sense strand starting at position 550 of SEQ ID NO: 1883124
ugaaaugcugaauaugcaa

SEQ ID NO: 2171349 - RNA, 19 nt, Artificial Sequence
  Description of Artificial Sequence: Synthetic oligonucleotide
  Antisense strand to SEQ ID NO: 2171348
uugcauauucagcauuuca

SEQ ID NO: 2171350 - RNA, 19 nt, Artificial Sequence
  Description of Artificial Sequence: Synthetic oligonucleotide
  Sense strand starting at position 565 of SEQ ID NO: 1883124
gcaauuauuucccugggcu

SEQ ID NO: 2171351 - RNA, 19 nt, Artificial Sequence
  Description of Artificial Sequence: Synthetic oligonucleotide
  Antisense strand to SEQ ID NO: 2171350
agcccagggaaauaauugc

SEQ ID NO: 2171352 - RNA, 19 nt, Artificial Sequence
  Description of Artificial Sequence: Synthetic oligonucleotide
  Sense strand starting at position 573 of SEQ ID NO: 1883124
uucccugggcucuaggaaa

SEQ ID NO: 2171353 - RNA, 19 nt, Artificial Sequence
  Description of Artificial Sequence: Synthetic oligonucleotide
  Antisense strand to SEQ ID NO: 2171352
uuuccuagagcccagggaa

SEQ ID NO: 2171354 - RNA, 19 nt, Artificial Sequence
  Description of Artificial Sequence: Synthetic oligonucleotide
  Sense strand starting at position 612 of SEQ ID NO: 1883124
gggcaagaaaccuguaauu

SEQ ID NO: 2171355 - RNA, 19 nt, Artificial Sequence
  Description of Artificial Sequence: Synthetic oligonucleotide
  Antisense strand to SEQ ID NO: 2171354
aauuacagguuucuugccc

SEQ ID NO: 2171356 - RNA, 19 nt, Artificial Sequence
  Description of Artificial Sequence: Synthetic oligonucleotide
  Sense strand starting at position 642 of SEQ ID NO: 1883124
uuaguucuaguccaacacu

SEQ ID NO: 2171357 - RNA, 19 nt, Artificial Sequence
  Description of Artificial Sequence: Synthetic oligonucleotide
  Antisense strand to SEQ ID NO: 2171356
aguguuggacuagaacuaa

SEQ ID NO: 2171358 - RNA, 19 nt, Artificial Sequence
  Description of Artificial Sequence: Synthetic oligonucleotide
  Sense strand starting at position 723 of SEQ ID NO: 1883124
agcauuuaacuguguagcu

SEQ ID NO: 2171359 - RNA, 19 nt, Artificial Sequence
  Description of Artificial Sequence: Synthetic oligonucleotide
  Antisense strand to SEQ ID NO: 2171358
agcuacacaguuaaaugcu

SEQ ID NO: 2171360 - RNA, 19 nt, Artificial Sequence
  Description of Artificial Sequence: Synthetic oligonucleotide
  Sense strand starting at position 730 of SEQ ID NO: 1883124
aacuguguagcugaaacau

SEQ ID NO: 2171361 - RNA, 19 nt, Artificial Sequence
  Description of Artificial Sequence: Synthetic oligonucleotide
  Antisense strand to SEQ ID NO: 2171360
auguuucagcuacacaguu

SEQ ID NO: 2171362 - RNA, 19 nt, Artificial Sequence
  Description of Artificial Sequence: Synthetic oligonucleotide
  Sense strand starting at position 783 of SEQ ID NO: 1883124
acacuaucgagacgcaauu

SEQ ID NO: 2171363 - RNA, 19 nt, Artificial Sequence
  Description of Artificial Sequence: Synthetic oligonucleotide
  Antisense strand to SEQ ID NO: 2171362
aauugcgucucgauagugu

SEQ ID NO: 2171364 - RNA, 19 nt, Artificial Sequence
  Description of Artificial Sequence: Synthetic oligonucleotide
  Sense strand starting at position 873 of SEQ ID NO: 1883124
cccggacuuccuuaaauuc

SEQ ID NO: 2171365 - RNA, 19 nt, Artificial Sequence
  Description of Artificial Sequence: Synthetic oligonucleotide
  Antisense strand to SEQ ID NO: 2171364
gaauuuaaggaaguccggg

SEQ ID NO: 2171366 - RNA, 19 nt, Artificial Sequence
  Description of Artificial Sequence: Synthetic oligonucleotide
  Sense strand starting at position 1072 of SEQ ID NO: 1883124
gaagcaguccagugacaag

SEQ ID NO: 2171367 - RNA, 19 nt, Artificial Sequence
  Description of Artificial Sequence: Synthetic oligonucleotide
  Antisense strand to SEQ ID NO: 2171366
cuugucacuggacugcuuc

SEQ ID NO: 2171368 - RNA, 19 nt, Artificial Sequence
  Description of Artificial Sequence: Synthetic oligonucleotide
  Sense strand starting at position 1075 of SEQ ID NO: 1883124
gcaguccagugacaagaaa

SEQ ID NO: 2171369 - RNA, 19 nt, Artificial Sequence
  Description of Artificial Sequence: Synthetic oligonucleotide
  Antisense strand to SEQ ID NO: 2171368
uuucuugucacuggacugc

SEQ ID NO: 2171370 - RNA, 19 nt, Artificial Sequence
  Description of Artificial Sequence: Synthetic oligonucleotide
  Sense strand starting at position 1109 of SEQ ID NO: 1883124
uagggagucgcgggugaaa

SEQ ID NO: 2171371 - RNA, 19 nt, Artificial Sequence
  Description of Artificial Sequence: Synthetic oligonucleotide
  Antisense strand to SEQ ID NO: 2171370
uuucacccgcgacucccua

SEQ ID NO: 2171372 - RNA, 19 nt, Artificial Sequence
  Description of Artificial Sequence: Synthetic oligonucleotide
  Sense strand starting at position 1111 of SEQ ID NO: 1883124
gggagucgcgggugaaaga

SEQ ID NO: 2171373 - RNA, 19 nt, Artificial Sequence
  Description of Artificial Sequence: Synthetic oligonucleotide
  Antisense strand to SEQ ID NO: 2171372
ucuuucacccgcgacuccc

SEQ ID NO: 2171374 - RNA, 19 nt, Artificial Sequence
  Description of Artificial Sequence: Synthetic oligonucleotide
  Sense strand starting at position 2126 of SEQ ID NO: 1883124
gacuuugauccgcggguga

SEQ ID NO: 2171375 - RNA, 19 nt, Artificial Sequence
  Description of Artificial Sequence: Synthetic oligonucleotide
  Antisense strand to SEQ ID NO: 2171374
ucacccgcggaucaaaguc

SEQ ID NO: 2171376 - RNA, 19 nt, Artificial Sequence
  Description of Artificial Sequence: Synthetic oligonucleotide
  Sense strand starting at position 2139 of SEQ ID NO: 1883124
gggugagggcucugugaau

SEQ ID NO: 2171377 - RNA, 19 nt, Artificial Sequence
  Description of Artificial Sequence: Synthetic oligonucleotide
  Antisense strand to SEQ ID NO: 2171376
auucacagagcccucaccc

SEQ ID NO: 2171378 - RNA, 19 nt, Artificial Sequence
  Description of Artificial Sequence: Synthetic oligonucleotide
  Sense strand starting at position 2140 of SEQ ID NO: 1883124
ggugagggcucugugaaug

SEQ ID NO: 2171379 - RNA, 19 nt, Artificial Sequence
  Description of Artificial Sequence: Synthetic oligonucleotide
  Antisense strand to SEQ ID NO: 2171378
cauucacagagcccucacc

SEQ ID NO: 2171380 - RNA, 19 nt, Artificial Sequence
  Description of Artificial Sequence: Synthetic oligonucleotide
  Sense strand starting at position 2254 of SEQ ID NO: 1883124
aagugacgcuuucuugaag

SEQ ID NO: 2171381 - RNA, 19 nt, Artificial Sequence
  Description of Artificial Sequence: Synthetic oligonucleotide
  Antisense strand to SEQ ID NO: 2171380
cuucaagaaagcgucacuu

SEQ ID NO: 2171382 - RNA, 19 nt, Artificial Sequence
  Description of Artificial Sequence: Synthetic oligonucleotide
  Sense strand starting at position 2482 of SEQ ID NO: 1883124
ucgggacugcuccgagaga

SEQ ID NO: 2171383 - RNA, 19 nt, Artificial Sequence
  Description of Artificial Sequence: Synthetic oligonucleotide
  Antisense strand to SEQ ID NO: 2171382
ucucucggagcagucccga

SEQ ID NO: 2171384 - RNA, 19 nt, Artificial Sequence
  Description of Artificial Sequence: Synthetic oligonucleotide
  Sense strand starting at position 2701 of SEQ ID NO: 1883124
agaagaugauuacgagaac

SEQ ID NO: 2171385 - RNA, 19 nt, Artificial Sequence
  Description of Artificial Sequence: Synthetic oligonucleotide
  Antisense strand to SEQ ID NO: 2171384
guucucguaaucaucuucu

SEQ ID NO: 2171386 - RNA, 19 nt, Artificial Sequence
  Description of Artificial Sequence: Synthetic oligonucleotide
  Sense strand starting at position 2826 of SEQ ID NO: 1883124
cagaauucgcucugaauga

SEQ ID NO: 2171387 - RNA, 19 nt, Artificial Sequence
  Description of Artificial Sequence: Synthetic oligonucleotide
  Antisense strand to SEQ ID NO: 2171386
ucauucagagcgaauucug

SEQ ID NO: 2171388 - RNA, 19 nt, Artificial Sequence
  Description of Artificial Sequence: Synthetic oligonucleotide
  Sense strand starting at position 2827 of SEQ ID NO: 1883124
agaauucgcucugaaugag

SEQ ID NO: 2171389 - RNA, 19 nt, Artificial Sequence
  Description of Artificial Sequence: Synthetic oligonucleotide
  Antisense strand to SEQ ID NO: 2171388
cucauucagagcgaauucu

SEQ ID NO: 2171390 - RNA, 19 nt, Artificial Sequence
  Description of Artificial Sequence: Synthetic oligonucleotide
  Sense strand starting at position 3135 of SEQ ID NO: 1883124
accagagugcugcgauuac

SEQ ID NO: 2171391 - RNA, 19 nt, Artificial Sequence
  Description of Artificial Sequence: Synthetic oligonucleotide
  Antisense strand to SEQ ID NO: 2171390
guaaucgcagcacucuggu

SEQ ID NO: 2171392 - RNA, 19 nt, Artificial Sequence
  Description of Artificial Sequence: Synthetic oligonucleotide
  Sense strand starting at position 3250 of SEQ ID NO: 1883124
ggaguaucagcacagcuua

SEQ ID NO: 2171393 - RNA, 19 nt, Artificial Sequence
  Description of Artificial Sequence: Synthetic oligonucleotide
  Antisense strand to SEQ ID NO: 2171392
uaagcugugcugauacucc

SEQ ID NO: 2171394 - RNA, 19 nt, Artificial Sequence
  Description of Artificial Sequence: Synthetic oligonucleotide
  Sense strand starting at position 3261 of SEQ ID NO: 1883124
acagcuuacugagauauca

SEQ ID NO: 2171395 - RNA, 19 nt, Artificial Sequence
  Description of Artificial Sequence: Synthetic oligonucleotide
  Antisense strand to SEQ ID NO: 2171394
ugauaucucaguaagcugu

SEQ ID NO: 2171396 - RNA, 19 nt, Artificial Sequence
  Description of Artificial Sequence: Synthetic oligonucleotide
  Sense strand starting at position 3277 of SEQ ID NO: 1883124
ucagaaaggccuugguaaa

SEQ ID NO: 2171397 - RNA, 19 nt, Artificial Sequence
  Description of Artificial Sequence: Synthetic oligonucleotide
  Antisense strand to SEQ ID NO: 2171396
uuuaccaaggccuuucuga

SEQ ID NO: 2171398 - RNA, 19 nt, Artificial Sequence
  Description of Artificial Sequence: Synthetic oligonucleotide
  Sense strand starting at position 3278 of SEQ ID NO: 1883124
cagaaaggccuugguaaag

SEQ ID NO: 2171399 - RNA, 19 nt, Artificial Sequence
  Description of Artificial Sequence: Synthetic oligonucleotide
  Antisense strand to SEQ ID NO: 2171398
cuuuaccaaggccuuucug

SEQ ID NO: 2171400 - RNA, 19 nt, Artificial Sequence
  Description of Artificial Sequence: Synthetic oligonucleotide
  Sense strand starting at position 3327 of SEQ ID NO: 1883124
ggcagagguuugaauugga

SEQ ID NO: 2171401 - RNA, 19 nt, Artificial Sequence
  Description of Artificial Sequence: Synthetic oligonucleotide
  Antisense strand to SEQ ID NO: 2171400
uccaauucaaaccucugcc

SEQ ID NO: 2171402 - RNA, 19 nt, Artificial Sequence
  Description of Artificial Sequence: Synthetic oligonucleotide
  Sense strand starting at position 3335 of SEQ ID NO: 1883124
uuugaauuggagcguguua

SEQ ID NO: 2171403 - RNA, 19 nt, Artificial Sequence
  Description of Artificial Sequence: Synthetic oligonucleotide
  Antisense strand to SEQ ID NO: 2171402
uaacacgcuccaauucaaa

SEQ ID NO: 2171404 - RNA, 19 nt, Artificial Sequence
  Description of Artificial Sequence: Synthetic oligonucleotide
  Sense strand starting at position 3337 of SEQ ID NO: 1883124
ugaauuggagcguguuaag

SEQ ID NO: 2171405 - RNA, 19 nt, Artificial Sequence
  Description of Artificial Sequence: Synthetic oligonucleotide
  Antisense strand to SEQ ID NO: 2171404
cuuaacacgcuccaauuca

SEQ ID NO: 2171406 - RNA, 19 nt, Artificial Sequence
  Description of Artificial Sequence: Synthetic oligonucleotide
  Sense strand starting at position 3348 of SEQ ID NO: 1883124
guguuaaguguagugucuu

SEQ ID NO: 2171407 - RNA, 19 nt, Artificial Sequence
  Description of Artificial Sequence: Synthetic oligonucleotide
  Antisense strand to SEQ ID NO: 2171406
aagacacuacacuuaacac

SEQ ID NO: 2171408 - RNA, 19 nt, Artificial Sequence
  Description of Artificial Sequence: Synthetic oligonucleotide
  Sense strand starting at position 3381 of SEQ ID NO: 1883124
cgugagguccuggcgcaaa

SEQ ID NO: 2171409 - RNA, 19 nt, Artificial Sequence
  Description of Artificial Sequence: Synthetic oligonucleotide
  Antisense strand to SEQ ID NO: 2171408
uuugcgccaggaccucacg

SEQ ID NO: 2171410 - RNA, 19 nt, Artificial Sequence
  Description of Artificial Sequence: Synthetic oligonucleotide
  Sense strand starting at position 3384 of SEQ ID NO: 1883124
gagguccuggcgcaaauaa

SEQ ID NO: 2171411 - RNA, 19 nt, Artificial Sequence
  Description of Artificial Sequence: Synthetic oligonucleotide
  Antisense strand to SEQ ID NO: 2171410
uuauuugcgccaggaccuc

SEQ ID NO: 2171412 - RNA, 19 nt, Artificial Sequence
  Description of Artificial Sequence: Synthetic oligonucleotide
  Sense strand starting at position 3395 of SEQ ID NO: 1883124
gcaaauaauugagcacaga

SEQ ID NO: 2171413 - RNA, 19 nt, Artificial Sequence
  Description of Artificial Sequence: Synthetic oligonucleotide
  Antisense strand to SEQ ID NO: 2171412
ucugugcucaauuauuugc

SEQ ID NO: 2171414 - RNA, 19 nt, Artificial Sequence
  Description of Artificial Sequence: Synthetic oligonucleotide
  Sense strand starting at position 3411 of SEQ ID NO: 1883124
agaaauacaugucaggcau

SEQ ID NO: 2171415 - RNA, 19 nt, Artificial Sequence
  Description of Artificial Sequence: Synthetic oligonucleotide
  Antisense strand to SEQ ID NO: 2171414
augccugacauguauuucu

SEQ ID NO: 2171416 - RNA, 19 nt, Artificial Sequence
  Description of Artificial Sequence: Synthetic oligonucleotide
  Sense strand starting at position 3423 of SEQ ID NO: 1883124
caggcauugcuaggcacaa

SEQ ID NO: 2171417 - RNA, 19 nt, Artificial Sequence
  Description of Artificial Sequence: Synthetic oligonucleotide
  Antisense strand to SEQ ID NO: 2171416
uugugccuagcaaugccug

SEQ ID NO: 2171418 - RNA, 19 nt, Artificial Sequence
  Description of Artificial Sequence: Synthetic oligonucleotide
  Sense strand starting at position 3755 of SEQ ID NO: 1883124
guuacagugauccgggauc

SEQ ID NO: 2171419 - RNA, 19 nt, Artificial Sequence
  Description of Artificial Sequence: Synthetic oligonucleotide
  Antisense strand to SEQ ID NO: 2171418
gaucccggaucacuguaac

SEQ ID NO: 2171420 - RNA, 19 nt, Artificial Sequence
  Description of Artificial Sequence: Synthetic oligonucleotide
  Sense strand starting at position 3924 of SEQ ID NO: 1883124
gugcccagaucugaagaaa

SEQ ID NO: 2171421 - RNA, 19 nt, Artificial Sequence
  Description of Artificial Sequence: Synthetic oligonucleotide
  Antisense strand to SEQ ID NO: 2171420
uuucuucagaucugggcac

SEQ ID NO: 2171422 - RNA, 19 nt, Artificial Sequence
  Description of Artificial Sequence: Synthetic oligonucleotide
  Sense strand starting at position 3979 of SEQ ID NO: 1883124
augagcuuucgggacaagu

SEQ ID NO: 2171423 - RNA, 19 nt, Artificial Sequence
  Description of Artificial Sequence: Synthetic oligonucleotide
  Antisense strand to SEQ ID NO: 2171422
acuugucccgaaagcucau

SEQ ID NO: 2171424 - RNA, 19 nt, Artificial Sequence
  Description of Artificial Sequence: Synthetic oligonucleotide
  Sense strand starting at position 3981 of SEQ ID NO: 1883124
gagcuuucgggacaaguca

SEQ ID NO: 2171425 - RNA, 19 nt, Artificial Sequence
  Description of Artificial Sequence: Synthetic oligonucleotide
  Antisense strand to SEQ ID NO: 2171424
ugacuugucccgaaagcuc

SEQ ID NO: 2171426 - RNA, 19 nt, Artificial Sequence
  Description of Artificial Sequence: Synthetic oligonucleotide
  Sense strand starting at position 164 of SEQ ID NO: 1883125
uuagaugucuaacuuacga

SEQ ID NO: 2171427 - RNA, 19 nt, Artificial Sequence
  Description of Artificial Sequence: Synthetic oligonucleotide
  Antisense strand to SEQ ID NO: 2171426
ucguaaguuagacaucuaa

SEQ ID NO: 2171428 - RNA, 19 nt, Artificial Sequence
  Description of Artificial Sequence: Synthetic oligonucleotide
  Sense strand starting at position 184 of SEQ ID NO: 1883125
aaagaugaaucguaacugu

SEQ ID NO: 2171429 - RNA, 19 nt, Artificial Sequence
  Description of Artificial Sequence: Synthetic oligonucleotide
  Antisense strand to SEQ ID NO: 2171428
acaguuacgauucaucuuu

SEQ ID NO: 2171430 - RNA, 19 nt, Artificial Sequence
  Description of Artificial Sequence: Synthetic oligonucleotide
  Sense strand starting at position 187 of SEQ ID NO: 1883125
gaugaaucguaacuguuua

SEQ ID NO: 2171431 - RNA, 19 nt, Artificial Sequence
  Description of Artificial Sequence: Synthetic oligonucleotide
  Antisense strand to SEQ ID NO: 2171430
uaaacaguuacgauucauc

SEQ ID NO: 2171432 - RNA, 19 nt, Artificial Sequence
  Description of Artificial Sequence: Synthetic oligonucleotide
  Sense strand starting at position 191 of SEQ ID NO: 1883125
aaucguaacuguuuaauga

SEQ ID NO: 2171433 - RNA, 19 nt, Artificial Sequence
  Description of Artificial Sequence: Synthetic oligonucleotide
  Antisense strand to SEQ ID NO: 2171432
ucauuaaacaguuacgauu

SEQ ID NO: 2171434 - RNA, 19 nt, Artificial Sequence
  Description of Artificial Sequence: Synthetic oligonucleotide
  Sense strand starting at position 195 of SEQ ID NO: 1883125
guaacuguuuaaugaccaa

SEQ ID NO: 2171435 - RNA, 19 nt, Artificial Sequence
  Description of Artificial Sequence: Synthetic oligonucleotide
  Antisense strand to SEQ ID NO: 2171434
uuggucauuaaacaguuac

SEQ ID NO: 2171436 - RNA, 19 nt, Artificial Sequence
  Description of Artificial Sequence: Synthetic oligonucleotide
  Sense strand starting at position 298 of SEQ ID NO: 1883125
caaggauggucaggagauc

SEQ ID NO: 2171437 - RNA, 19 nt, Artificial Sequence
  Description of Artificial Sequence: Synthetic oligonucleotide
  Antisense strand to SEQ ID NO: 2171436
gaucuccugaccauccuug

SEQ ID NO: 2171438 - RNA, 19 nt, Artificial Sequence
  Description of Artificial Sequence: Synthetic oligonucleotide
  Sense strand starting at position 579 of SEQ ID NO: 1883125
cuauuuggcucaggaauac

SEQ ID NO: 2171439 - RNA, 19 nt, Artificial Sequence
  Description of Artificial Sequence: Synthetic oligonucleotide
  Antisense strand to SEQ ID NO: 2171438
guauuccugagccaaauag

SEQ ID NO: 2171440 - RNA, 19 nt, Artificial Sequence
  Description of Artificial Sequence: Synthetic oligonucleotide
  Sense strand starting at position 602 of SEQ ID NO: 1883125
uuagucuucuauuugcaua

SEQ ID NO: 2171441 - RNA, 19 nt, Artificial Sequence
  Description of Artificial Sequence: Synthetic oligonucleotide
  Antisense strand to SEQ ID NO: 2171440
uaugcaaauagaagacuaa

SEQ ID NO: 2171442 - RNA, 19 nt, Artificial Sequence
  Description of Artificial Sequence: Synthetic oligonucleotide
  Sense strand starting at position 683 of SEQ ID NO: 1883125
uuucuauucuaggaacuga

SEQ ID NO: 2171443 - RNA, 19 nt, Artificial Sequence
  Description of Artificial Sequence: Synthetic oligonucleotide
  Antisense strand to SEQ ID NO: 2171442
ucaguuccuagaauagaaa

SEQ ID NO: 2171444 - RNA, 19 nt, Artificial Sequence
  Description of Artificial Sequence: Synthetic oligonucleotide
  Sense strand starting at position 806 of SEQ ID NO: 1883125
gagccucuuucucaagguu

SEQ ID NO: 2171445 - RNA, 19 nt, Artificial Sequence
  Description of Artificial Sequence: Synthetic oligonucleotide
  Antisense strand to SEQ ID NO: 2171444
aaccuugagaaagaggcuc

SEQ ID NO: 2171446 - RNA, 19 nt, Artificial Sequence
  Description of Artificial Sequence: Synthetic oligonucleotide
  Sense strand starting at position 1155 of SEQ ID NO: 1883125
gucagaagugccugcauaa

SEQ ID NO: 2171447 - RNA, 19 nt, Artificial Sequence
  Description of Artificial Sequence: Synthetic oligonucleotide
  Antisense strand to SEQ ID NO: 2171446
uuaugcaggcacuucugac

SEQ ID NO: 2171448 - RNA, 19 nt, Artificial Sequence
  Description of Artificial Sequence: Synthetic oligonucleotide
  Sense strand starting at position 1234 of SEQ ID NO: 1883125
ugaaaugcugaauaugcaa

SEQ ID NO: 2171449 - RNA, 19 nt, Artificial Sequence
  Description of Artificial Sequence: Synthetic oligonucleotide
  Antisense strand to SEQ ID NO: 2171448
uugcauauucagcauuuca

SEQ ID NO: 2171450 - RNA, 19 nt, Artificial Sequence
  Description of Artificial Sequence: Synthetic oligonucleotide
  Sense strand starting at position 1249 of SEQ ID NO: 1883125
gcaauuauuucccugggcu

SEQ ID NO: 2171451 - RNA, 19 nt, Artificial Sequence
  Description of Artificial Sequence: Synthetic oligonucleotide
  Antisense strand to SEQ ID NO: 2171450
agcccagggaaauaauugc

SEQ ID NO: 2171452 - RNA, 19 nt, Artificial Sequence
  Description of Artificial Sequence: Synthetic oligonucleotide
  Sense strand starting at position 1257 of SEQ ID NO: 1883125
uucccugggcucuaggaaa

SEQ ID NO: 2171453 - RNA, 19 nt, Artificial Sequence
  Description of Artificial Sequence: Synthetic oligonucleotide
  Antisense strand to SEQ ID NO: 2171452
uuuccuagagcccagggaa

SEQ ID NO: 2171454 - RNA, 19 nt, Artificial Sequence
  Description of Artificial Sequence: Synthetic oligonucleotide
  Sense strand starting at position 1296 of SEQ ID NO: 1883125
gggcaagaaaccuguaauu

SEQ ID NO: 2171455 - RNA, 19 nt, Artificial Sequence
  Description of Artificial Sequence: Synthetic oligonucleotide
  Antisense strand to SEQ ID NO: 2171454
aauuacagguuucuugccc

SEQ ID NO: 2171456 - RNA, 19 nt, Artificial Sequence
  Description of Artificial Sequence: Synthetic oligonucleotide
  Sense strand starting at position 1326 of SEQ ID NO: 1883125
uuaguucuaguccaacacu

SEQ ID NO: 2171457 - RNA, 19 nt, Artificial Sequence
  Description of Artificial Sequence: Synthetic oligonucleotide
  Antisense strand to SEQ ID NO: 2171456
aguguuggacuagaacuaa

SEQ ID NO: 2171458 - RNA, 19 nt, Artificial Sequence
  Description of Artificial Sequence: Synthetic oligonucleotide
  Sense strand starting at position 1407 of SEQ ID NO: 1883125
agcauuuaacuguguagcu

SEQ ID NO: 2171459 - RNA, 19 nt, Artificial Sequence
  Description of Artificial Sequence: Synthetic oligonucleotide
  Antisense strand to SEQ ID NO: 2171458
agcuacacaguuaaaugcu

SEQ ID NO: 2171460 - RNA, 19 nt, Artificial Sequence
  Description of Artificial Sequence: Synthetic oligonucleotide
  Sense strand starting at position 1414 of SEQ ID NO: 1883125
aacuguguagcugaaacau

SEQ ID NO: 2171461 - RNA, 19 nt, Artificial Sequence
  Description of Artificial Sequence: Synthetic oligonucleotide
  Antisense strand to SEQ ID NO: 2171460
auguuucagcuacacaguu

SEQ ID NO: 2171462 - RNA, 19 nt, Artificial Sequence
  Description of Artificial Sequence: Synthetic oligonucleotide
  Sense strand starting at position 1467 of SEQ ID NO: 1883125
acacuaucgagacgcaauu

SEQ ID NO: 2171463 - RNA, 19 nt, Artificial Sequence
  Description of Artificial Sequence: Synthetic oligonucleotide
  Antisense strand to SEQ ID NO: 2171462
aauugcgucucgauagugu

SEQ ID NO: 2171464 - RNA, 19 nt, Artificial Sequence
  Description of Artificial Sequence: Synthetic oligonucleotide
  Sense strand starting at position 1557 of SEQ ID NO: 1883125
cccggacuuccuuaaauuc

SEQ ID NO: 2171465 - RNA, 19 nt, Artificial Sequence
  Description of Artificial Sequence: Synthetic oligonucleotide
  Antisense strand to SEQ ID NO: 2171464
gaauuuaaggaaguccggg

SEQ ID NO: 2171466 - RNA, 19 nt, Artificial Sequence
  Description of Artificial Sequence: Synthetic oligonucleotide
  Sense strand starting at position 1756 of SEQ ID NO: 1883125
gaagcaguccagugacaag

SEQ ID NO: 2171467 - RNA, 19 nt, Artificial Sequence
  Description of Artificial Sequence: Synthetic oligonucleotide
  Antisense strand to SEQ ID NO: 2171466
cuugucacuggacugcuuc

SEQ ID NO: 2171468 - RNA, 19 nt, Artificial Sequence
  Description of Artificial Sequence: Synthetic oligonucleotide
  Sense strand starting at position 1759 of SEQ ID NO: 1883125
gcaguccagugacaagaaa

SEQ ID NO: 2171469 - RNA, 19 nt, Artificial Sequence
  Description of Artificial Sequence: Synthetic oligonucleotide
  Antisense strand to SEQ ID NO: 2171468
uuucuugucacuggacugc

SEQ ID NO: 2171470 - RNA, 19 nt, Artificial Sequence
  Description of Artificial Sequence: Synthetic oligonucleotide
  Sense strand starting at position 1793 of SEQ ID NO: 1883125
uagggagucgcgggugaaa

SEQ ID NO: 2171471 - RNA, 19 nt, Artificial Sequence
  Description of Artificial Sequence: Synthetic oligonucleotide
  Antisense strand to SEQ ID NO: 2171470
uuucacccgcgacucccua

SEQ ID NO: 2171472 - RNA, 19 nt, Artificial Sequence
  Description of Artificial Sequence: Synthetic oligonucleotide
  Sense strand starting at position 1795 of SEQ ID NO: 1883125
gggagucgcgggugaaaga

SEQ ID NO: 2171473 - RNA, 19 nt, Artificial Sequence
  Description of Artificial Sequence: Synthetic oligonucleotide
  Antisense strand to SEQ ID NO: 2171472
ucuuucacccgcgacuccc

SEQ ID NO: 2171474 - RNA, 19 nt, Artificial Sequence
  Description of Artificial Sequence: Synthetic oligonucleotide
  Sense strand starting at position 2810 of SEQ ID NO: 1883125
gacuuugauccgcggguga

SEQ ID NO: 2171475 - RNA, 19 nt, Artificial Sequence
  Description of Artificial Sequence: Synthetic oligonucleotide
  Antisense strand to SEQ ID NO: 2171474
ucacccgcggaucaaaguc

SEQ ID NO: 2171476 - RNA, 19 nt, Artificial Sequence
  Description of Artificial Sequence: Synthetic oligonucleotide
  Sense strand starting at position 2823 of SEQ ID NO: 1883125
gggugagggcucugugaau

SEQ ID NO: 2171477 - RNA, 19 nt, Artificial Sequence
  Description of Artificial Sequence: Synthetic oligonucleotide
  Antisense strand to SEQ ID NO: 2171476
auucacagagcccucaccc

SEQ ID NO: 2171478 - RNA, 19 nt, Artificial Sequence
  Description of Artificial Sequence: Synthetic oligonucleotide
  Sense strand starting at position 2824 of SEQ ID NO: 1883125
ggugagggcucugugaaug

SEQ ID NO: 2171479 - RNA, 19 nt, Artificial Sequence
  Description of Artificial Sequence: Synthetic oligonucleotide
  Antisense strand to SEQ ID NO: 2171478
cauucacagagcccucacc

SEQ ID NO: 2171480 - RNA, 19 nt, Artificial Sequence
  Description of Artificial Sequence: Synthetic oligonucleotide
  Sense strand starting at position 2875 of SEQ ID NO: 1883125
ggcugggugcuguguguua

SEQ ID NO: 2171481 - RNA, 19 nt, Artificial Sequence
  Description of Artificial Sequence: Synthetic oligonucleotide
  Antisense strand to SEQ ID NO: 2171480
uaacacacagcacccagcc

SEQ ID NO: 2171482 - RNA, 19 nt, Artificial Sequence
  Description of Artificial Sequence: Synthetic oligonucleotide
  Sense strand starting at position 2938 of SEQ ID NO: 1883125
aagugacgcuuucuugaag

SEQ ID NO: 2171483 - RNA, 19 nt, Artificial Sequence
  Description of Artificial Sequence: Synthetic oligonucleotide
  Antisense strand to SEQ ID NO: 2171482
cuucaagaaagcgucacuu

SEQ ID NO: 2171484 - RNA, 19 nt, Artificial Sequence
  Description of Artificial Sequence: Synthetic oligonucleotide
  Sense strand starting at position 3166 of SEQ ID NO: 1883125
ucgggacugcuccgagaga

SEQ ID NO: 2171485 - RNA, 19 nt, Artificial Sequence
  Description of Artificial Sequence: Synthetic oligonucleotide
  Antisense strand to SEQ ID NO: 2171484
ucucucggagcagucccga

SEQ ID NO: 2171486 - RNA, 19 nt, Artificial Sequence
  Description of Artificial Sequence: Synthetic oligonucleotide
  Sense strand starting at position 3385 of SEQ ID NO: 1883125
agaagaugauuacgagaac

SEQ ID NO: 2171487 - RNA, 19 nt, Artificial Sequence
  Description of Artificial Sequence: Synthetic oligonucleotide
  Antisense strand to SEQ ID NO: 2171486
guucucguaaucaucuucu

SEQ ID NO: 2171488 - RNA, 19 nt, Artificial Sequence
  Description of Artificial Sequence: Synthetic oligonucleotide
  Sense strand starting at position 3510 of SEQ ID NO: 1883125
cagaauucgcucugaauga

SEQ ID NO: 2171489 - RNA, 19 nt, Artificial Sequence
  Description of Artificial Sequence: Synthetic oligonucleotide
  Antisense strand to SEQ ID NO: 2171488
ucauucagagcgaauucug

SEQ ID NO: 2171490 - RNA, 19 nt, Artificial Sequence
  Description of Artificial Sequence: Synthetic oligonucleotide
  Sense strand starting at position 3511 of SEQ ID NO: 1883125
agaauucgcucugaaugag

SEQ ID NO: 2171491 - RNA, 19 nt, Artificial Sequence
  Description of Artificial Sequence: Synthetic oligonucleotide
  Antisense strand to SEQ ID NO: 2171490
cucauucagagcgaauucu

SEQ ID NO: 2171492 - RNA, 19 nt, Artificial Sequence
  Description of Artificial Sequence: Synthetic oligonucleotide
  Sense strand starting at position 3819 of SEQ ID NO: 1883125
accagagugcugcgauuac

SEQ ID NO: 2171493 - RNA, 19 nt, Artificial Sequence
  Description of Artificial Sequence: Synthetic oligonucleotide
  Antisense strand to SEQ ID NO: 2171492
guaaucgcagcacucuggu

SEQ ID NO: 2171494 - RNA, 19 nt, Artificial Sequence
  Description of Artificial Sequence: Synthetic oligonucleotide
  Sense strand starting at position 3934 of SEQ ID NO: 1883125
ggaguaucagcacagcuua

SEQ ID NO: 2171495 - RNA, 19 nt, Artificial Sequence
  Description of Artificial Sequence: Synthetic oligonucleotide
  Antisense strand to SEQ ID NO: 2171494
uaagcugugcugauacucc

SEQ ID NO: 2171496 - RNA, 19 nt, Artificial Sequence
  Description of Artificial Sequence: Synthetic oligonucleotide
  Sense strand starting at position 3942 of SEQ ID NO: 1883125
agcacagcuuacugagaua

SEQ ID NO: 2171497 - RNA, 19 nt, Artificial Sequence
  Description of Artificial Sequence: Synthetic oligonucleotide
  Antisense strand to SEQ ID NO: 2171496
uaucucaguaagcugugcu

SEQ ID NO: 2171498 - RNA, 19 nt, Artificial Sequence
  Description of Artificial Sequence: Synthetic oligonucleotide
  Sense strand starting at position 3945 of SEQ ID NO: 1883125
acagcuuacugagauauca

SEQ ID NO: 2171499 - RNA, 19 nt, Artificial Sequence
  Description of Artificial Sequence: Synthetic oligonucleotide
  Antisense strand to SEQ ID NO: 2171498
ugauaucucaguaagcugu

SEQ ID NO: 2171500 - RNA, 19 nt, Artificial Sequence
  Description of Artificial Sequence: Synthetic oligonucleotide
  Sense strand starting at position 3961 of SEQ ID NO: 1883125
ucagaaaggccuugguaaa

SEQ ID NO: 2171501 - RNA, 19 nt, Artificial Sequence
  Description of Artificial Sequence: Synthetic oligonucleotide
  Antisense strand to SEQ ID NO: 2171500
uuuaccaaggccuuucuga

SEQ ID NO: 2171502 - RNA, 19 nt, Artificial Sequence
  Description of Artificial Sequence: Synthetic oligonucleotide
  Sense strand starting at position 3962 of SEQ ID NO: 1883125
cagaaaggccuugguaaag

SEQ ID NO: 2171503 - RNA, 19 nt, Artificial Sequence
  Description of Artificial Sequence: Synthetic oligonucleotide
  Antisense strand to SEQ ID NO: 2171502
cuuuaccaaggccuuucug

SEQ ID NO: 2171504 - RNA, 19 nt, Artificial Sequence
  Description of Artificial Sequence: Synthetic oligonucleotide
  Sense strand starting at position 3979 of SEQ ID NO: 1883125
agagcccuuuacugagaca

SEQ ID NO: 2171505 - RNA, 19 nt, Artificial Sequence
  Description of Artificial Sequence: Synthetic oligonucleotide
  Antisense strand to SEQ ID NO: 2171504
ugucucaguaaagggcucu

SEQ ID NO: 2171506 - RNA, 19 nt, Artificial Sequence
  Description of Artificial Sequence: Synthetic oligonucleotide
  Sense strand starting at position 42 of SEQ ID NO: 1883126
aguuuaaacagauaugugu

SEQ ID NO: 2171507 - RNA, 19 nt, Artificial Sequence
  Description of Artificial Sequence: Synthetic oligonucleotide
  Antisense strand to SEQ ID NO: 2171506
acacauaucuguuuaaacu

SEQ ID NO: 2171508 - RNA, 19 nt, Artificial Sequence
  Description of Artificial Sequence: Synthetic oligonucleotide
  Sense strand starting at position 59 of SEQ ID NO: 1883126
guauuucuuuguuccaaug

SEQ ID NO: 2171509 - RNA, 19 nt, Artificial Sequence
  Description of Artificial Sequence: Synthetic oligonucleotide
  Antisense strand to SEQ ID NO: 2171508
cauuggaacaaagaaauac

SEQ ID NO: 2171510 - RNA, 19 nt, Artificial Sequence
  Description of Artificial Sequence: Synthetic oligonucleotide
  Sense strand starting at position 119 of SEQ ID NO: 1883126
agguauagcacuggugaca

SEQ ID NO: 2171511 - RNA, 19 nt, Artificial Sequence
  Description of Artificial Sequence: Synthetic oligonucleotide
  Antisense strand to SEQ ID NO: 2171510
ugucaccagugcuauaccu

SEQ ID NO: 2171512 - RNA, 19 nt, Artificial Sequence
  Description of Artificial Sequence: Synthetic oligonucleotide
  Sense strand starting at position 122 of SEQ ID NO: 1883126
uauagcacuggugacaaau

SEQ ID NO: 2171513 - RNA, 19 nt, Artificial Sequence
  Description of Artificial Sequence: Synthetic oligonucleotide
  Antisense strand to SEQ ID NO: 2171512
auuugucaccagugcuaua

SEQ ID NO: 2171514 - RNA, 19 nt, Artificial Sequence
  Description of Artificial Sequence: Synthetic oligonucleotide
  Sense strand starting at position 133 of SEQ ID NO: 1883126
ugacaaaugcagcgaaaca

SEQ ID NO: 2171515 - RNA, 19 nt, Artificial Sequence
  Description of Artificial Sequence: Synthetic oligonucleotide
  Antisense strand to SEQ ID NO: 2171514
uguuucgcugcauuuguca

SEQ ID NO: 2171516 - RNA, 19 nt, Artificial Sequence
  Description of Artificial Sequence: Synthetic oligonucleotide
  Sense strand starting at position 214 of SEQ ID NO: 1883126
ucaugugcaguuuacauaa

SEQ ID NO: 2171517 - RNA, 19 nt, Artificial Sequence
  Description of Artificial Sequence: Synthetic oligonucleotide
  Antisense strand to SEQ ID NO: 2171516
uuauguaaacugcacauga

SEQ ID NO: 2171518 - RNA, 19 nt, Artificial Sequence
  Description of Artificial Sequence: Synthetic oligonucleotide
  Sense strand starting at position 295 of SEQ ID NO: 1883126
gggucaaaguguucaucag

SEQ ID NO: 2171519 - RNA, 19 nt, Artificial Sequence
  Description of Artificial Sequence: Synthetic oligonucleotide
  Antisense strand to SEQ ID NO: 2171518
cugaugaacacuuugaccc

SEQ ID NO: 2171520 - RNA, 19 nt, Artificial Sequence
  Description of Artificial Sequence: Synthetic oligonucleotide
  Sense strand starting at position 321 of SEQ ID NO: 1883126
gaguauguucuggaggucu

SEQ ID NO: 2171521 - RNA, 19 nt, Artificial Sequence
  Description of Artificial Sequence: Synthetic oligonucleotide
  Antisense strand to SEQ ID NO: 2171520
agaccuccagaacauacuc

SEQ ID NO: 2171522 - RNA, 19 nt, Artificial Sequence
  Description of Artificial Sequence: Synthetic oligonucleotide
  Sense strand starting at position 323 of SEQ ID NO: 1883126
guauguucuggaggucuaa

SEQ ID NO: 2171523 - RNA, 19 nt, Artificial Sequence
  Description of Artificial Sequence: Synthetic oligonucleotide
  Antisense strand to SEQ ID NO: 2171522
uuagaccuccagaacauac

SEQ ID NO: 2171524 - RNA, 19 nt, Artificial Sequence
  Description of Artificial Sequence: Synthetic oligonucleotide
  Sense strand starting at position 345 of SEQ ID NO: 1883126
acagguggugcuuauaguu

SEQ ID NO: 2171525 - RNA, 19 nt, Artificial Sequence
  Description of Artificial Sequence: Synthetic oligonucleotide
  Antisense strand to SEQ ID NO: 2171524
aacuauaagcaccaccugu

SEQ ID NO: 2171526 - RNA, 19 nt, Artificial Sequence
  Description of Artificial Sequence: Synthetic oligonucleotide
  Sense strand starting at position 798 of SEQ ID NO: 1883126
ccgaaagugcuugggaaau

SEQ ID NO: 2171527 - RNA, 19 nt, Artificial Sequence
  Description of Artificial Sequence: Synthetic oligonucleotide
  Antisense strand to SEQ ID NO: 2171526
auuucccaagcacuuucgg

SEQ ID NO: 2171528 - RNA, 19 nt, Artificial Sequence
  Description of Artificial Sequence: Synthetic oligonucleotide
  Sense strand starting at position 808 of SEQ ID NO: 1883126
uugggaaaugccugcaaau

SEQ ID NO: 2171529 - RNA, 19 nt, Artificial Sequence
  Description of Artificial Sequence: Synthetic oligonucleotide
  Antisense strand to SEQ ID NO: 2171528
auuugcaggcauuucccaa

SEQ ID NO: 2171530 - RNA, 19 nt, Artificial Sequence
  Description of Artificial Sequence: Synthetic oligonucleotide
  Sense strand starting at position 1014 of SEQ ID NO: 1883126
gaacaucaugcuuggucua

SEQ ID NO: 2171531 - RNA, 19 nt, Artificial Sequence
  Description of Artificial Sequence: Synthetic oligonucleotide
  Antisense strand to SEQ ID NO: 2171530
uagaccaagcaugauguuc

SEQ ID NO: 2171532 - RNA, 19 nt, Artificial Sequence
  Description of Artificial Sequence: Synthetic oligonucleotide
  Sense strand starting at position 1040 of SEQ ID NO: 1883126
uggagcucauugucugaga

SEQ ID NO: 2171533 - RNA, 19 nt, Artificial Sequence
  Description of Artificial Sequence: Synthetic oligonucleotide
  Antisense strand to SEQ ID NO: 2171532
ucucagacaaugagcucca

SEQ ID NO: 2171534 - RNA, 19 nt, Artificial Sequence
  Description of Artificial Sequence: Synthetic oligonucleotide
  Sense strand starting at position 1136 of SEQ ID NO: 1883126
ccuccaauucuggagucuu

SEQ ID NO: 2171535 - RNA, 19 nt, Artificial Sequence
  Description of Artificial Sequence: Synthetic oligonucleotide
  Antisense strand to SEQ ID NO: 2171534
aagacuccagaauuggagg

SEQ ID NO: 2171536 - RNA, 19 nt, Artificial Sequence
  Description of Artificial Sequence: Synthetic oligonucleotide
  Sense strand starting at position 1391 of SEQ ID NO: 1883126
agcaauguugaguggaaga

SEQ ID NO: 2171537 - RNA, 19 nt, Artificial Sequence
  Description of Artificial Sequence: Synthetic oligonucleotide
  Antisense strand to SEQ ID NO: 2171536
ucuuccacucaacauugcu

SEQ ID NO: 2171538 - RNA, 19 nt, Artificial Sequence
  Description of Artificial Sequence: Synthetic oligonucleotide
  Sense strand starting at position 1512 of SEQ ID NO: 1883126
cagagugguaucgaucaug

SEQ ID NO: 2171539 - RNA, 19 nt, Artificial Sequence
  Description of Artificial Sequence: Synthetic oligonucleotide
  Antisense strand to SEQ ID NO: 2171538
caugaucgauaccacucug

SEQ ID NO: 2171540 - RNA, 19 nt, Artificial Sequence
  Description of Artificial Sequence: Synthetic oligonucleotide
  Sense strand starting at position 1515 of SEQ ID NO: 1883126
agugguaucgaucauguca

SEQ ID NO: 2171541 - RNA, 19 nt, Artificial Sequence
  Description of Artificial Sequence: Synthetic oligonucleotide
  Antisense strand to SEQ ID NO: 2171540
ugacaugaucgauaccacu

SEQ ID NO: 2171542 - RNA, 19 nt, Artificial Sequence
  Description of Artificial Sequence: Synthetic oligonucleotide
  Sense strand starting at position 1840 of SEQ ID NO: 1883126
gacaauucccuucggagag

SEQ ID NO: 2171543 - RNA, 19 nt, Artificial Sequence
  Description of Artificial Sequence: Synthetic oligonucleotide
  Antisense strand to SEQ ID NO: 2171542
cucuccgaagggaauuguc

SEQ ID NO: 2171544 - RNA, 19 nt, Artificial Sequence
  Description of Artificial Sequence: Synthetic oligonucleotide
  Sense strand starting at position 1883 of SEQ ID NO: 1883126
ggagcaggcuucccagaga

SEQ ID NO: 2171545 - RNA, 19 nt, Artificial Sequence
  Description of Artificial Sequence: Synthetic oligonucleotide
  Antisense strand to SEQ ID NO: 2171544
ucucugggaagccugcucc

SEQ ID NO: 2171546 - RNA, 19 nt, Artificial Sequence
  Description of Artificial Sequence: Synthetic oligonucleotide
  Sense strand starting at position 1886 of SEQ ID NO: 1883126
gcaggcuucccagagaaag

SEQ ID NO: 2171547 - RNA, 19 nt, Artificial Sequence
  Description of Artificial Sequence: Synthetic oligonucleotide
  Antisense strand to SEQ ID NO: 2171546
cuuucucugggaagccugc

SEQ ID NO: 2171548 - RNA, 19 nt, Artificial Sequence
  Description of Artificial Sequence: Synthetic oligonucleotide
  Sense strand starting at position 1896 of SEQ ID NO: 1883126
cagagaaagucccuuugga

SEQ ID NO: 2171549 - RNA, 19 nt, Artificial Sequence
  Description of Artificial Sequence: Synthetic oligonucleotide
  Antisense strand to SEQ ID NO: 2171548
uccaaagggacuuucucug

SEQ ID NO: 2171550 - RNA, 19 nt, Artificial Sequence
  Description of Artificial Sequence: Synthetic oligonucleotide
  Sense strand starting at position 2139 of SEQ ID NO: 1883126
ccaagaacugcuuaucuga

SEQ ID NO: 2171551 - RNA, 19 nt, Artificial Sequence
  Description of Artificial Sequence: Synthetic oligonucleotide
  Antisense strand to SEQ ID NO: 2171550
ucagauaagcaguucuugg

SEQ ID NO: 2171552 - RNA, 19 nt, Artificial Sequence
  Description of Artificial Sequence: Synthetic oligonucleotide
  Sense strand starting at position 2281 of SEQ ID NO: 1883126
agugccucucaugagaagu

SEQ ID NO: 2171553 - RNA, 19 nt, Artificial Sequence
  Description of Artificial Sequence: Synthetic oligonucleotide
  Antisense strand to SEQ ID NO: 2171552
acuucucaugagaggcacu

SEQ ID NO: 2171554 - RNA, 19 nt, Artificial Sequence
  Description of Artificial Sequence: Synthetic oligonucleotide
  Sense strand starting at position 2295 of SEQ ID NO: 1883126
gaaguaaucaggcgcaaag

SEQ ID NO: 2171555 - RNA, 19 nt, Artificial Sequence
  Description of Artificial Sequence: Synthetic oligonucleotide
  Antisense strand to SEQ ID NO: 2171554
cuuugcgccugauuacuuc

SEQ ID NO: 2171556 - RNA, 19 nt, Artificial Sequence
  Description of Artificial Sequence: Synthetic oligonucleotide
  Sense strand starting at position 2430 of SEQ ID NO: 1883126
cccacugagcccugaaaug

SEQ ID NO: 2171557 - RNA, 19 nt, Artificial Sequence
  Description of Artificial Sequence: Synthetic oligonucleotide
  Antisense strand to SEQ ID NO: 2171556
cauuucagggcucaguggg

SEQ ID NO: 2171558 - RNA, 19 nt, Artificial Sequence
  Description of Artificial Sequence: Synthetic oligonucleotide
  Sense strand starting at position 2581 of SEQ ID NO: 1883126
ggugcugggccaugaagaa

SEQ ID NO: 2171559 - RNA, 19 nt, Artificial Sequence
  Description of Artificial Sequence: Synthetic oligonucleotide
  Antisense strand to SEQ ID NO: 2171558
uucuucauggcccagcacc

SEQ ID NO: 2171560 - RNA, 19 nt, Artificial Sequence
  Description of Artificial Sequence: Synthetic oligonucleotide
  Sense strand starting at position 2803 of SEQ ID NO: 1883126
caugguaacccugggauga

SEQ ID NO: 2171561 - RNA, 19 nt, Artificial Sequence
  Description of Artificial Sequence: Synthetic oligonucleotide
  Antisense strand to SEQ ID NO: 2171560
ucaucccaggguuaccaug

SEQ ID NO: 2171562 - RNA, 19 nt, Artificial Sequence
  Description of Artificial Sequence: Synthetic oligonucleotide
  Sense strand starting at position 2847 of SEQ ID NO: 1883126
ccaguauucuuuccuugau

SEQ ID NO: 2171563 - RNA, 19 nt, Artificial Sequence
  Description of Artificial Sequence: Synthetic oligonucleotide
  Antisense strand to SEQ ID NO: 2171562
aucaaggaaagaauacugg

SEQ ID NO: 2171564 - RNA, 19 nt, Artificial Sequence
  Description of Artificial Sequence: Synthetic oligonucleotide
  Sense strand starting at position 2849 of SEQ ID NO: 1883126
aguauucuuuccuugauuc

SEQ ID NO: 2171565 - RNA, 19 nt, Artificial Sequence
  Description of Artificial Sequence: Synthetic oligonucleotide
  Antisense strand to SEQ ID NO: 2171564
gaaucaaggaaagaauacu

SEQ ID NO: 2171566 - RNA, 19 nt, Artificial Sequence
  Description of Artificial Sequence: Synthetic oligonucleotide
  Sense strand starting at position 2939 of SEQ ID NO: 1883126
gaauguguucuguaaacac

SEQ ID NO: 2171567 - RNA, 19 nt, Artificial Sequence
  Description of Artificial Sequence: Synthetic oligonucleotide
  Antisense strand to SEQ ID NO: 2171566
guguuuacagaacacauuc

SEQ ID NO: 2171568 - RNA, 19 nt, Artificial Sequence
  Description of Artificial Sequence: Synthetic oligonucleotide
  Sense strand starting at position 2961 of SEQ ID NO: 1883126
ggucuuauguaaucauagu

SEQ ID NO: 2171569 - RNA, 19 nt, Artificial Sequence
  Description of Artificial Sequence: Synthetic oligonucleotide
  Antisense strand to SEQ ID NO: 2171568
acuaugauuacauaagacc

SEQ ID NO: 2171570 - RNA, 19 nt, Artificial Sequence
  Description of Artificial Sequence: Synthetic oligonucleotide
  Sense strand starting at position 3024 of SEQ ID NO: 1883126
auuggcagugucuaaucaa

SEQ ID NO: 2171571 - RNA, 19 nt, Artificial Sequence
  Description of Artificial Sequence: Synthetic oligonucleotide
  Antisense strand to SEQ ID NO: 2171570
uugauuagacacugccaau

SEQ ID NO: 2171572 - RNA, 19 nt, Artificial Sequence
  Description of Artificial Sequence: Synthetic oligonucleotide
  Sense strand starting at position 3027 of SEQ ID NO: 1883126
ggcagugucuaaucaacau

SEQ ID NO: 2171573 - RNA, 19 nt, Artificial Sequence
  Description of Artificial Sequence: Synthetic oligonucleotide
  Antisense strand to SEQ ID NO: 2171572
auguugauuagacacugcc

SEQ ID NO: 2171574 - RNA, 19 nt, Artificial Sequence
  Description of Artificial Sequence: Synthetic oligonucleotide
  Sense strand starting at position 3031 of SEQ ID NO: 1883126
gugucuaaucaacaugucu

SEQ ID NO: 2171575 - RNA, 19 nt, Artificial Sequence
  Description of Artificial Sequence: Synthetic oligonucleotide
  Antisense strand to SEQ ID NO: 2171574
agacauguugauuagacac

SEQ ID NO: 2171576 - RNA, 19 nt, Artificial Sequence
  Description of Artificial Sequence: Synthetic oligonucleotide
  Sense strand starting at position 3036 of SEQ ID NO: 1883126
uaaucaacaugucuggaga

SEQ ID NO: 2171577 - RNA, 19 nt, Artificial Sequence
  Description of Artificial Sequence: Synthetic oligonucleotide
  Antisense strand to SEQ ID NO: 2171576
ucuccagacauguugauua

SEQ ID NO: 2171578 - RNA, 19 nt, Artificial Sequence
  Description of Artificial Sequence: Synthetic oligonucleotide
  Sense strand starting at position 3114 of SEQ ID NO: 1883126
cucugcuuugcugaaauga

SEQ ID NO: 2171579 - RNA, 19 nt, Artificial Sequence
  Description of Artificial Sequence: Synthetic oligonucleotide
  Antisense strand to SEQ ID NO: 2171578
ucauuucagcaaagcagag

SEQ ID NO: 2171580 - RNA, 19 nt, Artificial Sequence
  Description of Artificial Sequence: Synthetic oligonucleotide
  Sense strand starting at position 3231 of SEQ ID NO: 1883126
ugcugauccaaggaauguu

SEQ ID NO: 2171581 - RNA, 19 nt, Artificial Sequence
  Description of Artificial Sequence: Synthetic oligonucleotide
  Antisense strand to SEQ ID NO: 2171580
aacauuccuuggaucagca

SEQ ID NO: 2171582 - RNA, 19 nt, Artificial Sequence
  Description of Artificial Sequence: Synthetic oligonucleotide
  Sense strand starting at position 3234 of SEQ ID NO: 1883126
ugauccaaggaauguucua

SEQ ID NO: 2171583 - RNA, 19 nt, Artificial Sequence
  Description of Artificial Sequence: Synthetic oligonucleotide
  Antisense strand to SEQ ID NO: 2171582
uagaacauuccuuggauca

SEQ ID NO: 2171584 - RNA, 19 nt, Artificial Sequence
  Description of Artificial Sequence: Synthetic oligonucleotide
  Sense strand starting at position 3241 of SEQ ID NO: 1883126
aggaauguucuagaaccgu

SEQ ID NO: 2171585 - RNA, 19 nt, Artificial Sequence
  Description of Artificial Sequence: Synthetic oligonucleotide
  Antisense strand to SEQ ID NO: 2171584
acgguucuagaacauuccu

SEQ ID NO: 2171586 - RNA, 19 nt, Artificial Sequence
  Description of Artificial Sequence: Synthetic oligonucleotide
  Sense strand starting at position 7 of SEQ ID NO: 1883127
gaguauguucuggaggucu

SEQ ID NO: 2171587 - RNA, 19 nt, Artificial Sequence
  Description of Artificial Sequence: Synthetic oligonucleotide
  Antisense strand to SEQ ID NO: 2171586
agaccuccagaacauacuc

SEQ ID NO: 2171588 - RNA, 19 nt, Artificial Sequence
  Description of Artificial Sequence: Synthetic oligonucleotide
  Sense strand starting at position 9 of SEQ ID NO: 1883127
guauguucuggaggucuaa

SEQ ID NO: 2171589 - RNA, 19 nt, Artificial Sequence
  Description of Artificial Sequence: Synthetic oligonucleotide
  Antisense strand to SEQ ID NO: 2171588
uuagaccuccagaacauac

SEQ ID NO: 2171590 - RNA, 19 nt, Artificial Sequence
  Description of Artificial Sequence: Synthetic oligonucleotide
  Sense strand starting at position 31 of SEQ ID NO: 1883127
acagguggugcuuauaguu

SEQ ID NO: 2171591 - RNA, 19 nt, Artificial Sequence
  Description of Artificial Sequence: Synthetic oligonucleotide
  Antisense strand to SEQ ID NO: 2171590
aacuauaagcaccaccugu

SEQ ID NO: 2171592 - RNA, 19 nt, Artificial Sequence
  Description of Artificial Sequence: Synthetic oligonucleotide
  Sense strand starting at position 482 of SEQ ID NO: 1883127
agccgaaagugcuugggaa

SEQ ID NO: 2171593 - RNA, 19 nt, Artificial Sequence
  Description of Artificial Sequence: Synthetic oligonucleotide
  Antisense strand to SEQ ID NO: 2171592
uucccaagcacuuucggcu

SEQ ID NO: 2171594 - RNA, 19 nt, Artificial Sequence
  Description of Artificial Sequence: Synthetic oligonucleotide
  Sense strand starting at position 483 of SEQ ID NO: 1883127
gccgaaagugcuugggaaa

SEQ ID NO: 2171595 - RNA, 19 nt, Artificial Sequence
  Description of Artificial Sequence: Synthetic oligonucleotide
  Antisense strand to SEQ ID NO: 2171594
uuucccaagcacuuucggc

SEQ ID NO: 2171596 - RNA, 19 nt, Artificial Sequence
  Description of Artificial Sequence: Synthetic oligonucleotide
  Sense strand starting at position 484 of SEQ ID NO: 1883127
ccgaaagugcuugggaaau

SEQ ID NO: 2171597 - RNA, 19 nt, Artificial Sequence
  Description of Artificial Sequence: Synthetic oligonucleotide
  Antisense strand to SEQ ID NO: 2171596
auuucccaagcacuuucgg

SEQ ID NO: 2171598 - RNA, 19 nt, Artificial Sequence
  Description of Artificial Sequence: Synthetic oligonucleotide
  Sense strand starting at position 494 of SEQ ID NO: 1883127
uugggaaaugccugcaaau

SEQ ID NO: 2171599 - RNA, 19 nt, Artificial Sequence
  Description of Artificial Sequence: Synthetic oligonucleotide
  Antisense strand to SEQ ID NO: 2171598
auuugcaggcauuucccaa

SEQ ID NO: 2171600 - RNA, 19 nt, Artificial Sequence
  Description of Artificial Sequence: Synthetic oligonucleotide
  Sense strand starting at position 700 of SEQ ID NO: 1883127
gaacaucaugcuuggucua

SEQ ID NO: 2171601 - RNA, 19 nt, Artificial Sequence
  Description of Artificial Sequence: Synthetic oligonucleotide
  Antisense strand to SEQ ID NO: 2171600
uagaccaagcaugauguuc

SEQ ID NO: 2171602 - RNA, 19 nt, Artificial Sequence
  Description of Artificial Sequence: Synthetic oligonucleotide
  Sense strand starting at position 702 of SEQ ID NO: 1883127
acaucaugcuuggucuacu

SEQ ID NO: 2171603 - RNA, 19 nt, Artificial Sequence
  Description of Artificial Sequence: Synthetic oligonucleotide
  Antisense strand to SEQ ID NO: 2171602
aguagaccaagcaugaugu

SEQ ID NO: 2171604 - RNA, 19 nt, Artificial Sequence
  Description of Artificial Sequence: Synthetic oligonucleotide
  Sense strand starting at position 726 of SEQ ID NO: 1883127
uggagcucauugucugaga

SEQ ID NO: 2171605 - RNA, 19 nt, Artificial Sequence
  Description of Artificial Sequence: Synthetic oligonucleotide
  Antisense strand to SEQ ID NO: 2171604
ucucagacaaugagcucca

SEQ ID NO: 2171606 - RNA, 19 nt, Artificial Sequence
  Description of Artificial Sequence: Synthetic oligonucleotide
  Sense strand starting at position 822 of SEQ ID NO: 1883127
ccuccaauucuggagucuu

SEQ ID NO: 2171607 - RNA, 19 nt, Artificial Sequence
  Description of Artificial Sequence: Synthetic oligonucleotide
  Antisense strand to SEQ ID NO: 2171606
aagacuccagaauuggagg

SEQ ID NO: 2171608 - RNA, 19 nt, Artificial Sequence
  Description of Artificial Sequence: Synthetic oligonucleotide
  Sense strand starting at position 1077 of SEQ ID NO: 1883127
agcaauguugaguggaaga

SEQ ID NO: 2171609 - RNA, 19 nt, Artificial Sequence
  Description of Artificial Sequence: Synthetic oligonucleotide
  Antisense strand to SEQ ID NO: 2171608
ucuuccacucaacauugcu

SEQ ID NO: 2171610 - RNA, 19 nt, Artificial Sequence
  Description of Artificial Sequence: Synthetic oligonucleotide
  Sense strand starting at position 1198 of SEQ ID NO: 1883127
cagagugguaucgaucaug

SEQ ID NO: 2171611 - RNA, 19 nt, Artificial Sequence
  Description of Artificial Sequence: Synthetic oligonucleotide
  Antisense strand to SEQ ID NO: 2171610
caugaucgauaccacucug

SEQ ID NO: 2171612 - RNA, 19 nt, Artificial Sequence
  Description of Artificial Sequence: Synthetic oligonucleotide
  Sense strand starting at position 1201 of SEQ ID NO: 1883127
agugguaucgaucauguca

SEQ ID NO: 2171613 - RNA, 19 nt, Artificial Sequence
  Description of Artificial Sequence: Synthetic oligonucleotide
  Antisense strand to SEQ ID NO: 2171612
ugacaugaucgauaccacu

SEQ ID NO: 2171614 - RNA, 19 nt, Artificial Sequence
  Description of Artificial Sequence: Synthetic oligonucleotide
  Sense strand starting at position 1526 of SEQ ID NO: 1883127
gacaauucccuucggagag

SEQ ID NO: 2171615 - RNA, 19 nt, Artificial Sequence
  Description of Artificial Sequence: Synthetic oligonucleotide
  Antisense strand to SEQ ID NO: 2171614
cucuccgaagggaauuguc

SEQ ID NO: 2171616 - RNA, 19 nt, Artificial Sequence
  Description of Artificial Sequence: Synthetic oligonucleotide
  Sense strand starting at position 1569 of SEQ ID NO: 1883127
ggagcaggcuucccagaga

SEQ ID NO: 2171617 - RNA, 19 nt, Artificial Sequence
  Description of Artificial Sequence: Synthetic oligonucleotide
  Antisense strand to SEQ ID NO: 2171616
ucucugggaagccugcucc

SEQ ID NO: 2171618 - RNA, 19 nt, Artificial Sequence
  Description of Artificial Sequence: Synthetic oligonucleotide
  Sense strand starting at position 1572 of SEQ ID NO: 1883127
gcaggcuucccagagaaag

SEQ ID NO: 2171619 - RNA, 19 nt, Artificial Sequence
  Description of Artificial Sequence: Synthetic oligonucleotide
  Antisense strand to SEQ ID NO: 2171618
cuuucucugggaagccugc

SEQ ID NO: 2171620 - RNA, 19 nt, Artificial Sequence
  Description of Artificial Sequence: Synthetic oligonucleotide
  Sense strand starting at position 1582 of SEQ ID NO: 1883127
cagagaaagucccuuugga

SEQ ID NO: 2171621 - RNA, 19 nt, Artificial Sequence
  Description of Artificial Sequence: Synthetic oligonucleotide
  Antisense strand to SEQ ID NO: 2171620
uccaaagggacuuucucug

SEQ ID NO: 2171622 - RNA, 19 nt, Artificial Sequence
  Description of Artificial Sequence: Synthetic oligonucleotide
  Sense strand starting at position 1825 of SEQ ID NO: 1883127
ccaagaacugcuuaucuga

SEQ ID NO: 2171623 - RNA, 19 nt, Artificial Sequence
  Description of Artificial Sequence: Synthetic oligonucleotide
  Antisense strand to SEQ ID NO: 2171622
ucagauaagcaguucuugg

SEQ ID NO: 2171624 - RNA, 19 nt, Artificial Sequence
  Description of Artificial Sequence: Synthetic oligonucleotide
  Sense strand starting at position 1967 of SEQ ID NO: 1883127
agugccucucaugagaagu

SEQ ID NO: 2171625 - RNA, 19 nt, Artificial Sequence
  Description of Artificial Sequence: Synthetic oligonucleotide
  Antisense strand to SEQ ID NO: 2171624
acuucucaugagaggcacu

SEQ ID NO: 2171626 - RNA, 19 nt, Artificial Sequence
  Description of Artificial Sequence: Synthetic oligonucleotide
  Sense strand starting at position 1981 of SEQ ID NO: 1883127
gaaguaaucaggcgcaaag

SEQ ID NO: 2171627 - RNA, 19 nt, Artificial Sequence
  Description of Artificial Sequence: Synthetic oligonucleotide
  Antisense strand to SEQ ID NO: 2171626
cuuugcgccugauuacuuc

SEQ ID NO: 2171628 - RNA, 19 nt, Artificial Sequence
  Description of Artificial Sequence: Synthetic oligonucleotide
  Sense strand starting at position 2116 of SEQ ID NO: 1883127
cccacugagcccugaaaug

SEQ ID NO: 2171629 - RNA, 19 nt, Artificial Sequence
  Description of Artificial Sequence: Synthetic oligonucleotide
  Antisense strand to SEQ ID NO: 2171628
cauuucagggcucaguggg

SEQ ID NO: 2171630 - RNA, 19 nt, Artificial Sequence
  Description of Artificial Sequence: Synthetic oligonucleotide
  Sense strand starting at position 2267 of SEQ ID NO: 1883127
ggugcugggccaugaagaa

SEQ ID NO: 2171631 - RNA, 19 nt, Artificial Sequence
  Description of Artificial Sequence: Synthetic oligonucleotide
  Antisense strand to SEQ ID NO: 2171630
uucuucauggcccagcacc

SEQ ID NO: 2171632 - RNA, 19 nt, Artificial Sequence
  Description of Artificial Sequence: Synthetic oligonucleotide
  Sense strand starting at position 2489 of SEQ ID NO: 1883127
caugguaacccugggauga

SEQ ID NO: 2171633 - RNA, 19 nt, Artificial Sequence
  Description of Artificial Sequence: Synthetic oligonucleotide
  Antisense strand to SEQ ID NO: 2171632
ucaucccaggguuaccaug

SEQ ID NO: 2171634 - RNA, 19 nt, Artificial Sequence
  Description of Artificial Sequence: Synthetic oligonucleotide
  Sense strand starting at position 2533 of SEQ ID NO: 1883127
ccaguauucuuuccuugau

SEQ ID NO: 2171635 - RNA, 19 nt, Artificial Sequence
  Description of Artificial Sequence: Synthetic oligonucleotide
  Antisense strand to SEQ ID NO: 2171634
aucaaggaaagaauacugg

SEQ ID NO: 2171636 - RNA, 19 nt, Artificial Sequence
  Description of Artificial Sequence: Synthetic oligonucleotide
  Sense strand starting at position 2535 of SEQ ID NO: 1883127
aguauucuuuccuugauuc

SEQ ID NO: 2171637 - RNA, 19 nt, Artificial Sequence
  Description of Artificial Sequence: Synthetic oligonucleotide
  Antisense strand to SEQ ID NO: 2171636
gaaucaaggaaagaauacu

SEQ ID NO: 2171638 - RNA, 19 nt, Artificial Sequence
  Description of Artificial Sequence: Synthetic oligonucleotide
  Sense strand starting at position 2625 of SEQ ID NO: 1883127
gaauguguucuguaaacac

SEQ ID NO: 2171639 - RNA, 19 nt, Artificial Sequence
  Description of Artificial Sequence: Synthetic oligonucleotide
  Antisense strand to SEQ ID NO: 2171638
guguuuacagaacacauuc

SEQ ID NO: 2171640 - RNA, 19 nt, Artificial Sequence
  Description of Artificial Sequence: Synthetic oligonucleotide
  Sense strand starting at position 2647 of SEQ ID NO: 1883127
ggucuuauguaaucauagu

SEQ ID NO: 2171641 - RNA, 19 nt, Artificial Sequence
  Description of Artificial Sequence: Synthetic oligonucleotide
  Antisense strand to SEQ ID NO: 2171640
acuaugauuacauaagacc

SEQ ID NO: 2171642 - RNA, 19 nt, Artificial Sequence
  Description of Artificial Sequence: Synthetic oligonucleotide
  Sense strand starting at position 2710 of SEQ ID NO: 1883127
auuggcagugucuaaucaa

SEQ ID NO: 2171643 - RNA, 19 nt, Artificial Sequence
  Description of Artificial Sequence: Synthetic oligonucleotide
  Antisense strand to SEQ ID NO: 2171642
uugauuagacacugccaau

SEQ ID NO: 2171644 - RNA, 19 nt, Artificial Sequence
  Description of Artificial Sequence: Synthetic oligonucleotide
  Sense strand starting at position 2713 of SEQ ID NO: 1883127
ggcagugucuaaucaacau

SEQ ID NO: 2171645 - RNA, 19 nt, Artificial Sequence
  Description of Artificial Sequence: Synthetic oligonucleotide
  Antisense strand to SEQ ID NO: 2171644
auguugauuagacacugcc

SEQ ID NO: 2171646 - RNA, 19 nt, Artificial Sequence
  Description of Artificial Sequence: Synthetic oligonucleotide
  Sense strand starting at position 2717 of SEQ ID NO: 1883127
gugucuaaucaacaugucu

SEQ ID NO: 2171647 - RNA, 19 nt, Artificial Sequence
  Description of Artificial Sequence: Synthetic oligonucleotide
  Antisense strand to SEQ ID NO: 2171646
agacauguugauuagacac

SEQ ID NO: 2171648 - RNA, 19 nt, Artificial Sequence
  Description of Artificial Sequence: Synthetic oligonucleotide
  Sense strand starting at position 2722 of SEQ ID NO: 1883127
uaaucaacaugucuggaga

SEQ ID NO: 2171649 - RNA, 19 nt, Artificial Sequence
  Description of Artificial Sequence: Synthetic oligonucleotide
  Antisense strand to SEQ ID NO: 2171648
ucuccagacauguugauua

SEQ ID NO: 2171650 - RNA, 19 nt, Artificial Sequence
  Description of Artificial Sequence: Synthetic oligonucleotide
  Sense strand starting at position 2800 of SEQ ID NO: 1883127
cucugcuuugcugaaauga

SEQ ID NO: 2171651 - RNA, 19 nt, Artificial Sequence
  Description of Artificial Sequence: Synthetic oligonucleotide
  Antisense strand to SEQ ID NO: 2171650
ucauuucagcaaagcagag

SEQ ID NO: 2171652 - RNA, 19 nt, Artificial Sequence
  Description of Artificial Sequence: Synthetic oligonucleotide
  Sense strand starting at position 2860 of SEQ ID NO: 1883127
guuauaauguugguucuga

SEQ ID NO: 2171653 - RNA, 19 nt, Artificial Sequence
  Description of Artificial Sequence: Synthetic oligonucleotide
  Antisense strand to SEQ ID NO: 2171652
ucagaaccaacauuauaac

SEQ ID NO: 2171654 - RNA, 19 nt, Artificial Sequence
  Description of Artificial Sequence: Synthetic oligonucleotide
  Sense strand starting at position 2917 of SEQ ID NO: 1883127
ugcugauccaaggaauguu

SEQ ID NO: 2171655 - RNA, 19 nt, Artificial Sequence
  Description of Artificial Sequence: Synthetic oligonucleotide
  Antisense strand to SEQ ID NO: 2171654
aacauuccuuggaucagca

SEQ ID NO: 2171656 - RNA, 19 nt, Artificial Sequence
  Description of Artificial Sequence: Synthetic oligonucleotide
  Sense strand starting at position 2920 of SEQ ID NO: 1883127
ugauccaaggaauguucua

SEQ ID NO: 2171657 - RNA, 19 nt, Artificial Sequence
  Description of Artificial Sequence: Synthetic oligonucleotide
  Antisense strand to SEQ ID NO: 2171656
uagaacauuccuuggauca

SEQ ID NO: 2171658 - RNA, 19 nt, Artificial Sequence
  Description of Artificial Sequence: Synthetic oligonucleotide
  Sense strand starting at position 2927 of SEQ ID NO: 1883127
aggaauguucuagaaccgu

SEQ ID NO: 2171659 - RNA, 19 nt, Artificial Sequence
  Description of Artificial Sequence: Synthetic oligonucleotide
  Antisense strand to SEQ ID NO: 2171658
acgguucuagaacauuccu

SEQ ID NO: 2171660 - RNA, 19 nt, Artificial Sequence
  Description of Artificial Sequence: Synthetic oligonucleotide
  Sense strand starting at position 3582 of SEQ ID NO: 1883127
ccgagauggcgcuacucua

SEQ ID NO: 2171661 - RNA, 19 nt, Artificial Sequence
  Description of Artificial Sequence: Synthetic oligonucleotide
  Antisense strand to SEQ ID NO: 2171660
uagaguagcgccaucucgg

SEQ ID NO: 2171662 - RNA, 19 nt, Artificial Sequence
  Description of Artificial Sequence: Synthetic oligonucleotide
  Sense strand starting at position 3851 of SEQ ID NO: 1883127
aaagguuagcacuguggua

SEQ ID NO: 2171663 - RNA, 19 nt, Artificial Sequence
  Description of Artificial Sequence: Synthetic oligonucleotide
  Antisense strand to SEQ ID NO: 2171662
uaccacagugcuaaccuuu

SEQ ID NO: 2171664 - RNA, 19 nt, Artificial Sequence
  Description of Artificial Sequence: Synthetic oligonucleotide
  Sense strand starting at position 3864 of SEQ ID NO: 1883127
gugguauauuuccuucugu

SEQ ID NO: 2171665 - RNA, 19 nt, Artificial Sequence
  Description of Artificial Sequence: Synthetic oligonucleotide
  Antisense strand to SEQ ID NO: 2171664
acagaaggaaauauaccac

SEQ ID NO: 2171666 - RNA, 19 nt, Artificial Sequence
  Description of Artificial Sequence: Synthetic oligonucleotide
  Sense strand starting at position 205 of SEQ ID NO: 1883128
uggucccuuguugaugaaa

SEQ ID NO: 2171667 - RNA, 19 nt, Artificial Sequence
  Description of Artificial Sequence: Synthetic oligonucleotide
  Antisense strand to SEQ ID NO: 2171666
uuucaucaacaagggacca

SEQ ID NO: 2171668 - RNA, 19 nt, Artificial Sequence
  Description of Artificial Sequence: Synthetic oligonucleotide
  Sense strand starting at position 253 of SEQ ID NO: 1883128
agacgauguguguagguua

SEQ ID NO: 2171669 - RNA, 19 nt, Artificial Sequence
  Description of Artificial Sequence: Synthetic oligonucleotide
  Antisense strand to SEQ ID NO: 2171668
uaaccuacacacaucgucu

SEQ ID NO: 2171670 - RNA, 19 nt, Artificial Sequence
  Description of Artificial Sequence: Synthetic oligonucleotide
  Sense strand starting at position 392 of SEQ ID NO: 1883128
cauagaagcucauugggau

SEQ ID NO: 2171671 - RNA, 19 nt, Artificial Sequence
  Description of Artificial Sequence: Synthetic oligonucleotide
  Antisense strand to SEQ ID NO: 2171670
aucccaaugagcuucuaug

SEQ ID NO: 2171672 - RNA, 19 nt, Artificial Sequence
  Description of Artificial Sequence: Synthetic oligonucleotide
  Sense strand starting at position 393 of SEQ ID NO: 1883128
auagaagcucauugggaua

SEQ ID NO: 2171673 - RNA, 19 nt, Artificial Sequence
  Description of Artificial Sequence: Synthetic oligonucleotide
  Antisense strand to SEQ ID NO: 2171672
uaucccaaugagcuucuau

SEQ ID NO: 2171674 - RNA, 19 nt, Artificial Sequence
  Description of Artificial Sequence: Synthetic oligonucleotide
  Sense strand starting at position 536 of SEQ ID NO: 1883128
gcaggaauuggauaugugu

SEQ ID NO: 2171675 - RNA, 19 nt, Artificial Sequence
  Description of Artificial Sequence: Synthetic oligonucleotide
  Antisense strand to SEQ ID NO: 2171674
acacauauccaauuccugc

SEQ ID NO: 2171676 - RNA, 19 nt, Artificial Sequence
  Description of Artificial Sequence: Synthetic oligonucleotide
  Sense strand starting at position 538 of SEQ ID NO: 1883128
aggaauuggauauguguaa

SEQ ID NO: 2171677 - RNA, 19 nt, Artificial Sequence
  Description of Artificial Sequence: Synthetic oligonucleotide
  Antisense strand to SEQ ID NO: 2171676
uuacacauauccaauuccu

SEQ ID NO: 2171678 - RNA, 19 nt, Artificial Sequence
  Description of Artificial Sequence: Synthetic oligonucleotide
  Sense strand starting at position 788 of SEQ ID NO: 1883128
gcaucagguaagugguaaa

SEQ ID NO: 2171679 - RNA, 19 nt, Artificial Sequence
  Description of Artificial Sequence: Synthetic oligonucleotide
  Antisense strand to SEQ ID NO: 2171678
uuuaccacuuaccugaugc

SEQ ID NO: 2171680 - RNA, 19 nt, Artificial Sequence
  Description of Artificial Sequence: Synthetic oligonucleotide
  Sense strand starting at position 815 of SEQ ID NO: 1883128
cgacauacugcccaaaucu

SEQ ID NO: 2171681 - RNA, 19 nt, Artificial Sequence
  Description of Artificial Sequence: Synthetic oligonucleotide
  Antisense strand to SEQ ID NO: 2171680
agauuugggcaguaugucg

SEQ ID NO: 2171682 - RNA, 19 nt, Artificial Sequence
  Description of Artificial Sequence: Synthetic oligonucleotide
  Sense strand starting at position 879 of SEQ ID NO: 1883128
aaggguuccuacgcuugaa

SEQ ID NO: 2171683 - RNA, 19 nt, Artificial Sequence
  Description of Artificial Sequence: Synthetic oligonucleotide
  Antisense strand to SEQ ID NO: 2171682
uucaagcguaggaacccuu

SEQ ID NO: 2171684 - RNA, 19 nt, Artificial Sequence
  Description of Artificial Sequence: Synthetic oligonucleotide
  Sense strand starting at position 1232 of SEQ ID NO: 1883128
aagagagguugucugcaga

SEQ ID NO: 2171685 - RNA, 19 nt, Artificial Sequence
  Description of Artificial Sequence: Synthetic oligonucleotide
  Antisense strand to SEQ ID NO: 2171684
ucugcagacaaccucucuu

SEQ ID NO: 2171686 - RNA, 19 nt, Artificial Sequence
  Description of Artificial Sequence: Synthetic oligonucleotide
  Sense strand starting at position 1235 of SEQ ID NO: 1883128
agagguugucugcagaggu

SEQ ID NO: 2171687 - RNA, 19 nt, Artificial Sequence
  Description of Artificial Sequence: Synthetic oligonucleotide
  Antisense strand to SEQ ID NO: 2171686
accucugcagacaaccucu

SEQ ID NO: 2171688 - RNA, 19 nt, Artificial Sequence
  Description of Artificial Sequence: Synthetic oligonucleotide
  Sense strand starting at position 1238 of SEQ ID NO: 1883128
gguugucugcagaggugua

SEQ ID NO: 2171689 - RNA, 19 nt, Artificial Sequence
  Description of Artificial Sequence: Synthetic oligonucleotide
  Antisense strand to SEQ ID NO: 2171688
uacaccucugcagacaacc

SEQ ID NO: 2171690 - RNA, 19 nt, Artificial Sequence
  Description of Artificial Sequence: Synthetic oligonucleotide
  Sense strand starting at position 1366 of SEQ ID NO: 1883128
guugugaaggucguguuua

SEQ ID NO: 2171691 - RNA, 19 nt, Artificial Sequence
  Description of Artificial Sequence: Synthetic oligonucleotide
  Antisense strand to SEQ ID NO: 2171690
uaaacacgaccuucacaac

SEQ ID NO: 2171692 - RNA, 19 nt, Artificial Sequence
  Description of Artificial Sequence: Synthetic oligonucleotide
  Sense strand starting at position 1377 of SEQ ID NO: 1883128
cguguuuauuuaccaggau

SEQ ID NO: 2171693 - RNA, 19 nt, Artificial Sequence
  Description of Artificial Sequence: Synthetic oligonucleotide
  Antisense strand to SEQ ID NO: 2171692
auccugguaaauaaacacg

SEQ ID NO: 2171694 - RNA, 19 nt, Artificial Sequence
  Description of Artificial Sequence: Synthetic oligonucleotide
  Sense strand starting at position 1417 of SEQ ID NO: 1883128
uagagagcuugacuuagaa

SEQ ID NO: 2171695 - RNA, 19 nt, Artificial Sequence
  Description of Artificial Sequence: Synthetic oligonucleotide
  Antisense strand to SEQ ID NO: 2171694
uucuaagucaagcucucua

SEQ ID NO: 2171696 - RNA, 19 nt, Artificial Sequence
  Description of Artificial Sequence: Synthetic oligonucleotide
  Sense strand starting at position 1570 of SEQ ID NO: 1883128
uaaucagaguguuugcuaa

SEQ ID NO: 2171697 - RNA, 19 nt, Artificial Sequence
  Description of Artificial Sequence: Synthetic oligonucleotide
  Antisense strand to SEQ ID NO: 2171696
uuagcaaacacucugauua

SEQ ID NO: 2171698 - RNA, 19 nt, Artificial Sequence
  Description of Artificial Sequence: Synthetic oligonucleotide
  Sense strand starting at position 1572 of SEQ ID NO: 1883128
aucagaguguuugcuaaug

SEQ ID NO: 2171699 - RNA, 19 nt, Artificial Sequence
  Description of Artificial Sequence: Synthetic oligonucleotide
  Antisense strand to SEQ ID NO: 2171698
cauuagcaaacacucugau

SEQ ID NO: 2171700 - RNA, 19 nt, Artificial Sequence
  Description of Artificial Sequence: Synthetic oligonucleotide
  Sense strand starting at position 1582 of SEQ ID NO: 1883128
uugcuaaugaguuggcaag

SEQ ID NO: 2171701 - RNA, 19 nt, Artificial Sequence
  Description of Artificial Sequence: Synthetic oligonucleotide
  Antisense strand to SEQ ID NO: 2171700
cuugccaacucauuagcaa

SEQ ID NO: 2171702 - RNA, 19 nt, Artificial Sequence
  Description of Artificial Sequence: Synthetic oligonucleotide
  Sense strand starting at position 1786 of SEQ ID NO: 1883128
ccggucuuugcugucagua

SEQ ID NO: 2171703 - RNA, 19 nt, Artificial Sequence
  Description of Artificial Sequence: Synthetic oligonucleotide
  Antisense strand to SEQ ID NO: 2171702
uacugacagcaaagaccgg

SEQ ID NO: 2171704 - RNA, 19 nt, Artificial Sequence
  Description of Artificial Sequence: Synthetic oligonucleotide
  Sense strand starting at position 1787 of SEQ ID NO: 1883128
cggucuuugcugucaguac

SEQ ID NO: 2171705 - RNA, 19 nt, Artificial Sequence
  Description of Artificial Sequence: Synthetic oligonucleotide
  Antisense strand to SEQ ID NO: 2171704
guacugacagcaaagaccg

SEQ ID NO: 2171706 - RNA, 19 nt, Artificial Sequence
  Description of Artificial Sequence: Synthetic oligonucleotide
  Sense strand starting at position 1863 of SEQ ID NO: 1883128
gagcccaaagauuguguaa

SEQ ID NO: 2171707 - RNA, 19 nt, Artificial Sequence
  Description of Artificial Sequence: Synthetic oligonucleotide
  Antisense strand to SEQ ID NO: 2171706
uuacacaaucuuugggcuc

SEQ ID NO: 2171708 - RNA, 19 nt, Artificial Sequence
  Description of Artificial Sequence: Synthetic oligonucleotide
  Sense strand starting at position 2205 of SEQ ID NO: 1883128
cgcugcaguccuucguaaa

SEQ ID NO: 2171709 - RNA, 19 nt, Artificial Sequence
  Description of Artificial Sequence: Synthetic oligonucleotide
  Antisense strand to SEQ ID NO: 2171708
uuuacgaaggacugcagcg

SEQ ID NO: 2171710 - RNA, 19 nt, Artificial Sequence
  Description of Artificial Sequence: Synthetic oligonucleotide
  Sense strand starting at position 2287 of SEQ ID NO: 1883128
gugauuugccauugccaga

SEQ ID NO: 2171711 - RNA, 19 nt, Artificial Sequence
  Description of Artificial Sequence: Synthetic oligonucleotide
  Antisense strand to SEQ ID NO: 2171710
ucuggcaauggcaaaucac

SEQ ID NO: 2171712 - RNA, 19 nt, Artificial Sequence
  Description of Artificial Sequence: Synthetic oligonucleotide
  Sense strand starting at position 2336 of SEQ ID NO: 1883128
gugcgaucacaggacauaa

SEQ ID NO: 2171713 - RNA, 19 nt, Artificial Sequence
  Description of Artificial Sequence: Synthetic oligonucleotide
  Antisense strand to SEQ ID NO: 2171712
uuauguccugugaucgcac

SEQ ID NO: 2171714 - RNA, 19 nt, Artificial Sequence
  Description of Artificial Sequence: Synthetic oligonucleotide
  Sense strand starting at position 2404 of SEQ ID NO: 1883128
caaucugugcuacagaguu

SEQ ID NO: 2171715 - RNA, 19 nt, Artificial Sequence
  Description of Artificial Sequence: Synthetic oligonucleotide
  Antisense strand to SEQ ID NO: 2171714
aacucuguagcacagauug

SEQ ID NO: 2171716 - RNA, 19 nt, Artificial Sequence
  Description of Artificial Sequence: Synthetic oligonucleotide
  Sense strand starting at position 2473 of SEQ ID NO: 1883128
cggcaucaccuuuacucua

SEQ ID NO: 2171717 - RNA, 19 nt, Artificial Sequence
  Description of Artificial Sequence: Synthetic oligonucleotide
  Antisense strand to SEQ ID NO: 2171716
uagaguaaaggugaugccg

SEQ ID NO: 2171718 - RNA, 19 nt, Artificial Sequence
  Description of Artificial Sequence: Synthetic oligonucleotide
  Sense strand starting at position 2500 of SEQ ID NO: 1883128
aaccacgaucacugugauu

SEQ ID NO: 2171719 - RNA, 19 nt, Artificial Sequence
  Description of Artificial Sequence: Synthetic oligonucleotide
  Antisense strand to SEQ ID NO: 2171718
aaucacagugaucgugguu

SEQ ID NO: 2171720 - RNA, 19 nt, Artificial Sequence
  Description of Artificial Sequence: Synthetic oligonucleotide
  Sense strand starting at position 2502 of SEQ ID NO: 1883128
ccacgaucacugugauuag

SEQ ID NO: 2171721 - RNA, 19 nt, Artificial Sequence
  Description of Artificial Sequence: Synthetic oligonucleotide
  Antisense strand to SEQ ID NO: 2171720
cuaaucacagugaucgugg

SEQ ID NO: 2171722 - RNA, 19 nt, Artificial Sequence
  Description of Artificial Sequence: Synthetic oligonucleotide
  Sense strand starting at position 2505 of SEQ ID NO: 1883128
cgaucacugugauuaggaa

SEQ ID NO: 2171723 - RNA, 19 nt, Artificial Sequence
  Description of Artificial Sequence: Synthetic oligonucleotide
  Antisense strand to SEQ ID NO: 2171722
uuccuaaucacagugaucg

SEQ ID NO: 2171724 - RNA, 19 nt, Artificial Sequence
  Description of Artificial Sequence: Synthetic oligonucleotide
  Sense strand starting at position 2570 of SEQ ID NO: 1883128
gccaguugucauggcauuu

SEQ ID NO: 2171725 - RNA, 19 nt, Artificial Sequence
  Description of Artificial Sequence: Synthetic oligonucleotide
  Antisense strand to SEQ ID NO: 2171724
aaaugccaugacaacuggc

SEQ ID NO: 2171726 - RNA, 19 nt, Artificial Sequence
  Description of Artificial Sequence: Synthetic oligonucleotide
  Sense strand starting at position 2685 of SEQ ID NO: 1883128
uuacuaagaguuugguaag

SEQ ID NO: 2171727 - RNA, 19 nt, Artificial Sequence
  Description of Artificial Sequence: Synthetic oligonucleotide
  Antisense strand to SEQ ID NO: 2171726
cuuaccaaacucuuaguaa

SEQ ID NO: 2171728 - RNA, 19 nt, Artificial Sequence
  Description of Artificial Sequence: Synthetic oligonucleotide
  Sense strand starting at position 2784 of SEQ ID NO: 1883128
ucccuuucguaacugauau

SEQ ID NO: 2171729 - RNA, 19 nt, Artificial Sequence
  Description of Artificial Sequence: Synthetic oligonucleotide
  Antisense strand to SEQ ID NO: 2171728
auaucaguuacgaaaggga

SEQ ID NO: 2171730 - RNA, 19 nt, Artificial Sequence
  Description of Artificial Sequence: Synthetic oligonucleotide
  Sense strand starting at position 2891 of SEQ ID NO: 1883128
gaccauauaccuggaaagu

SEQ ID NO: 2171731 - RNA, 19 nt, Artificial Sequence
  Description of Artificial Sequence: Synthetic oligonucleotide
  Antisense strand to SEQ ID NO: 2171730
acuuuccagguauaugguc

SEQ ID NO: 2171732 - RNA, 19 nt, Artificial Sequence
  Description of Artificial Sequence: Synthetic oligonucleotide
  Sense strand starting at position 3322 of SEQ ID NO: 1883128
aggagaaucguaugagccu

SEQ ID NO: 2171733 - RNA, 19 nt, Artificial Sequence
  Description of Artificial Sequence: Synthetic oligonucleotide
  Antisense strand to SEQ ID NO: 2171732
aggcucauacgauucuccu

SEQ ID NO: 2171734 - RNA, 19 nt, Artificial Sequence
  Description of Artificial Sequence: Synthetic oligonucleotide
  Sense strand starting at position 3469 of SEQ ID NO: 1883128
caggcagaucaaugcaaga

SEQ ID NO: 2171735 - RNA, 19 nt, Artificial Sequence
  Description of Artificial Sequence: Synthetic oligonucleotide
  Antisense strand to SEQ ID NO: 2171734
ucuugcauugaucugccug

SEQ ID NO: 2171736 - RNA, 19 nt, Artificial Sequence
  Description of Artificial Sequence: Synthetic oligonucleotide
  Sense strand starting at position 3591 of SEQ ID NO: 1883128
gaagcaacggguuaagauu

SEQ ID NO: 2171737 - RNA, 19 nt, Artificial Sequence
  Description of Artificial Sequence: Synthetic oligonucleotide
  Antisense strand to SEQ ID NO: 2171736
aaucuuaacccguugcuuc

SEQ ID NO: 2171738 - RNA, 19 nt, Artificial Sequence
  Description of Artificial Sequence: Synthetic oligonucleotide
  Sense strand starting at position 3714 of SEQ ID NO: 1883128
acuaucuugcagugggaua

SEQ ID NO: 2171739 - RNA, 19 nt, Artificial Sequence
  Description of Artificial Sequence: Synthetic oligonucleotide
  Antisense strand to SEQ ID NO: 2171738
uaucccacugcaagauagu

SEQ ID NO: 2171740 - RNA, 19 nt, Artificial Sequence
  Description of Artificial Sequence: Synthetic oligonucleotide
  Sense strand starting at position 3719 of SEQ ID NO: 1883128
cuugcagugggauaggaau

SEQ ID NO: 2171741 - RNA, 19 nt, Artificial Sequence
  Description of Artificial Sequence: Synthetic oligonucleotide
  Antisense strand to SEQ ID NO: 2171740
auuccuaucccacugcaag

SEQ ID NO: 2171742 - RNA, 19 nt, Artificial Sequence
  Description of Artificial Sequence: Synthetic oligonucleotide
  Sense strand starting at position 3726 of SEQ ID NO: 1883128
ugggauaggaauugucuca

SEQ ID NO: 2171743 - RNA, 19 nt, Artificial Sequence
  Description of Artificial Sequence: Synthetic oligonucleotide
  Antisense strand to SEQ ID NO: 2171742
ugagacaauuccuauccca

SEQ ID NO: 2171744 - RNA, 19 nt, Artificial Sequence
  Description of Artificial Sequence: Synthetic oligonucleotide
  Sense strand starting at position 3842 of SEQ ID NO: 1883128
gggauugcucccugaaggu

SEQ ID NO: 2171745 - RNA, 19 nt, Artificial Sequence
  Description of Artificial Sequence: Synthetic oligonucleotide
  Antisense strand to SEQ ID NO: 2171744
accuucagggagcaauccc

SEQ ID NO: 2171746 - RNA, 19 nt, Artificial Sequence
  Description of Artificial Sequence: Synthetic oligonucleotide
  Sense strand starting at position 15 of SEQ ID NO: 1883129
ccgagaccugcucagaauc

SEQ ID NO: 2171747 - RNA, 19 nt, Artificial Sequence
  Description of Artificial Sequence: Synthetic oligonucleotide
  Antisense strand to SEQ ID NO: 2171746
gauucugagcaggucucgg

SEQ ID NO: 2171748 - RNA, 19 nt, Artificial Sequence
  Description of Artificial Sequence: Synthetic oligonucleotide
  Sense strand starting at position 348 of SEQ ID NO: 1883129
agaguuuauggaugugaaa

SEQ ID NO: 2171749 - RNA, 19 nt, Artificial Sequence
  Description of Artificial Sequence: Synthetic oligonucleotide
  Antisense strand to SEQ ID NO: 2171748
uuucacauccauaaacucu

SEQ ID NO: 2171750 - RNA, 19 nt, Artificial Sequence
  Description of Artificial Sequence: Synthetic oligonucleotide
  Sense strand starting at position 350 of SEQ ID NO: 1883129
aguuuauggaugugaaauc

SEQ ID NO: 2171751 - RNA, 19 nt, Artificial Sequence
  Description of Artificial Sequence: Synthetic oligonucleotide
  Antisense strand to SEQ ID NO: 2171750
gauuucacauccauaaacu

SEQ ID NO: 2171752 - RNA, 19 nt, Artificial Sequence
  Description of Artificial Sequence: Synthetic oligonucleotide
  Sense strand starting at position 357 of SEQ ID NO: 1883129
ggaugugaaauccaggucu

SEQ ID NO: 2171753 - RNA, 19 nt, Artificial Sequence
  Description of Artificial Sequence: Synthetic oligonucleotide
  Antisense strand to SEQ ID NO: 2171752
agaccuggauuucacaucc

SEQ ID NO: 2171754 - RNA, 19 nt, Artificial Sequence
  Description of Artificial Sequence: Synthetic oligonucleotide
  Sense strand starting at position 359 of SEQ ID NO: 1883129
augugaaauccaggucuua

SEQ ID NO: 2171755 - RNA, 19 nt, Artificial Sequence
  Description of Artificial Sequence: Synthetic oligonucleotide
  Antisense strand to SEQ ID NO: 2171754
uaagaccuggauuucacau

SEQ ID NO: 2171756 - RNA, 19 nt, Artificial Sequence
  Description of Artificial Sequence: Synthetic oligonucleotide
  Sense strand starting at position 611 of SEQ ID NO: 1883129
uugugacugcaugaacuuu

SEQ ID NO: 2171757 - RNA, 19 nt, Artificial Sequence
  Description of Artificial Sequence: Synthetic oligonucleotide
  Antisense strand to SEQ ID NO: 2171756
aaaguucaugcagucacaa

SEQ ID NO: 2171758 - RNA, 19 nt, Artificial Sequence
  Description of Artificial Sequence: Synthetic oligonucleotide
  Sense strand starting at position 903 of SEQ ID NO: 1883129
gaaaucuugcgauaaggua

SEQ ID NO: 2171759 - RNA, 19 nt, Artificial Sequence
  Description of Artificial Sequence: Synthetic oligonucleotide
  Antisense strand to SEQ ID NO: 2171758
uaccuuaucgcaagauuuc

SEQ ID NO: 2171760 - RNA, 19 nt, Artificial Sequence
  Description of Artificial Sequence: Synthetic oligonucleotide
  Sense strand starting at position 1037 of SEQ ID NO: 1883129
gcagauccgguauaaucua

SEQ ID NO: 2171761 - RNA, 19 nt, Artificial Sequence
  Description of Artificial Sequence: Synthetic oligonucleotide
  Antisense strand to SEQ ID NO: 2171760
uagauuauaccggaucugc

SEQ ID NO: 2171762 - RNA, 19 nt, Artificial Sequence
  Description of Artificial Sequence: Synthetic oligonucleotide
  Sense strand starting at position 1083 of SEQ ID NO: 1883129
cguugaaagaaauggcaaa

SEQ ID NO: 2171763 - RNA, 19 nt, Artificial Sequence
  Description of Artificial Sequence: Synthetic oligonucleotide
  Antisense strand to SEQ ID NO: 2171762
uuugccauuucuuucaacg

SEQ ID NO: 2171764 - RNA, 19 nt, Artificial Sequence
  Description of Artificial Sequence: Synthetic oligonucleotide
  Sense strand starting at position 1084 of SEQ ID NO: 1883129
guugaaagaaauggcaaau

SEQ ID NO: 2171765 - RNA, 19 nt, Artificial Sequence
  Description of Artificial Sequence: Synthetic oligonucleotide
  Antisense strand to SEQ ID NO: 2171764
auuugccauuucuuucaac

SEQ ID NO: 2171766 - RNA, 19 nt, Artificial Sequence
  Description of Artificial Sequence: Synthetic oligonucleotide
  Sense strand starting at position 1181 of SEQ ID NO: 1883129
ucaacaguggguuguaaag

SEQ ID NO: 2171767 - RNA, 19 nt, Artificial Sequence
  Description of Artificial Sequence: Synthetic oligonucleotide
  Antisense strand to SEQ ID NO: 2171766
cuuuacaacccacuguuga

SEQ ID NO: 2171768 - RNA, 19 nt, Artificial Sequence
  Description of Artificial Sequence: Synthetic oligonucleotide
  Sense strand starting at position 1535 of SEQ ID NO: 1883129
ggaaucaagucuuuccuuu

SEQ ID NO: 2171769 - RNA, 19 nt, Artificial Sequence
  Description of Artificial Sequence: Synthetic oligonucleotide
  Antisense strand to SEQ ID NO: 2171768
aaaggaaagacuugauucc

SEQ ID NO: 2171770 - RNA, 19 nt, Artificial Sequence
  Description of Artificial Sequence: Synthetic oligonucleotide
  Sense strand starting at position 1630 of SEQ ID NO: 1883129
agccuuaagucuuuaaaga

SEQ ID NO: 2171771 - RNA, 19 nt, Artificial Sequence
  Description of Artificial Sequence: Synthetic oligonucleotide
  Antisense strand to SEQ ID NO: 2171770
ucuuuaaagacuuaaggcu

SEQ ID NO: 2171772 - RNA, 19 nt, Artificial Sequence
  Description of Artificial Sequence: Synthetic oligonucleotide
  Sense strand starting at position 1631 of SEQ ID NO: 1883129
gccuuaagucuuuaaagac

SEQ ID NO: 2171773 - RNA, 19 nt, Artificial Sequence
  Description of Artificial Sequence: Synthetic oligonucleotide
  Antisense strand to SEQ ID NO: 2171772
gucuuuaaagacuuaaggc

SEQ ID NO: 2171774 - RNA, 19 nt, Artificial Sequence
  Description of Artificial Sequence: Synthetic oligonucleotide
  Sense strand starting at position 1834 of SEQ ID NO: 1883129
ggaagugcagcgcuuucau

SEQ ID NO: 2171775 - RNA, 19 nt, Artificial Sequence
  Description of Artificial Sequence: Synthetic oligonucleotide
  Antisense strand to SEQ ID NO: 2171774
augaaagcgcugcacuucc

SEQ ID NO: 2171776 - RNA, 19 nt, Artificial Sequence
  Description of Artificial Sequence: Synthetic oligonucleotide
  Sense strand starting at position 2104 of SEQ ID NO: 1883129
cuuugaaacuucucaguga

SEQ ID NO: 2171777 - RNA, 19 nt, Artificial Sequence
  Description of Artificial Sequence: Synthetic oligonucleotide
  Antisense strand to SEQ ID NO: 2171776
ucacugagaaguuucaaag

SEQ ID NO: 2171778 - RNA, 19 nt, Artificial Sequence
  Description of Artificial Sequence: Synthetic oligonucleotide
  Sense strand starting at position 2107 of SEQ ID NO: 1883129
ugaaacuucucagugagag

SEQ ID NO: 2171779 - RNA, 19 nt, Artificial Sequence
  Description of Artificial Sequence: Synthetic oligonucleotide
  Antisense strand to SEQ ID NO: 2171778
cucucacugagaaguuuca

SEQ ID NO: 2171780 - RNA, 19 nt, Artificial Sequence
  Description of Artificial Sequence: Synthetic oligonucleotide
  Sense strand starting at position 2234 of SEQ ID NO: 1883129
uagaaagugugaguagaug

SEQ ID NO: 2171781 - RNA, 19 nt, Artificial Sequence
  Description of Artificial Sequence: Synthetic oligonucleotide
  Antisense strand to SEQ ID NO: 2171780
caucuacucacacuuucua

SEQ ID NO: 2171782 - RNA, 19 nt, Artificial Sequence
  Description of Artificial Sequence: Synthetic oligonucleotide
  Sense strand starting at position 2251 of SEQ ID NO: 1883129
uggaucagguguuuggaga

SEQ ID NO: 2171783 - RNA, 19 nt, Artificial Sequence
  Description of Artificial Sequence: Synthetic oligonucleotide
  Antisense strand to SEQ ID NO: 2171782
ucuccaaacaccugaucca

SEQ ID NO: 2171784 - RNA, 19 nt, Artificial Sequence
  Description of Artificial Sequence: Synthetic oligonucleotide
  Sense strand starting at position 2252 of SEQ ID NO: 1883129
ggaucagguguuuggagaa

SEQ ID NO: 2171785 - RNA, 19 nt, Artificial Sequence
  Description of Artificial Sequence: Synthetic oligonucleotide
  Antisense strand to SEQ ID NO: 2171784
uucuccaaacaccugaucc

SEQ ID NO: 2171786 - RNA, 19 nt, Artificial Sequence
  Description of Artificial Sequence: Synthetic oligonucleotide
  Sense strand starting at position 2561 of SEQ ID NO: 1883129
acccuaucacgugauaggu

SEQ ID NO: 2171787 - RNA, 19 nt, Artificial Sequence
  Description of Artificial Sequence: Synthetic oligonucleotide
  Antisense strand to SEQ ID NO: 2171786
accuaucacgugauagggu

SEQ ID NO: 2171788 - RNA, 19 nt, Artificial Sequence
  Description of Artificial Sequence: Synthetic oligonucleotide
  Sense strand starting at position 2565 of SEQ ID NO: 1883129
uaucacgugauaggugaaa

SEQ ID NO: 2171789 - RNA, 19 nt, Artificial Sequence
  Description of Artificial Sequence: Synthetic oligonucleotide
  Antisense strand to SEQ ID NO: 2171788
uuucaccuaucacgugaua

SEQ ID NO: 2171790 - RNA, 19 nt, Artificial Sequence
  Description of Artificial Sequence: Synthetic oligonucleotide
  Sense strand starting at position 2567 of SEQ ID NO: 1883129
ucacgugauaggugaaaug

SEQ ID NO: 2171791 - RNA, 19 nt, Artificial Sequence
  Description of Artificial Sequence: Synthetic oligonucleotide
  Antisense strand to SEQ ID NO: 2171790
cauuucaccuaucacguga

SEQ ID NO: 2171792 - RNA, 19 nt, Artificial Sequence
  Description of Artificial Sequence: Synthetic oligonucleotide
  Sense strand starting at position 2588 of SEQ ID NO: 1883129
cacagugacaucgagguaa

SEQ ID NO: 2171793 - RNA, 19 nt, Artificial Sequence
  Description of Artificial Sequence: Synthetic oligonucleotide
  Antisense strand to SEQ ID NO: 2171792
uuaccucgaugucacugug

SEQ ID NO: 2171794 - RNA, 19 nt, Artificial Sequence
  Description of Artificial Sequence: Synthetic oligonucleotide
  Sense strand starting at position 2692 of SEQ ID NO: 1883129
ugcguuaggauuugauguu

SEQ ID NO: 2171795 - RNA, 19 nt, Artificial Sequence
  Description of Artificial Sequence: Synthetic oligonucleotide
  Antisense strand to SEQ ID NO: 2171794
aacaucaaauccuaacgca

SEQ ID NO: 2171796 - RNA, 19 nt, Artificial Sequence
  Description of Artificial Sequence: Synthetic oligonucleotide
  Sense strand starting at position 2906 of SEQ ID NO: 1883129
ggcugcauugaacauuaaa

SEQ ID NO: 2171797 - RNA, 19 nt, Artificial Sequence
  Description of Artificial Sequence: Synthetic oligonucleotide
  Antisense strand to SEQ ID NO: 2171796
uuuaauguucaaugcagcc

SEQ ID NO: 2171798 - RNA, 19 nt, Artificial Sequence
  Description of Artificial Sequence: Synthetic oligonucleotide
  Sense strand starting at position 2909 of SEQ ID NO: 1883129
ugcauugaacauuaaagca

SEQ ID NO: 2171799 - RNA, 19 nt, Artificial Sequence
  Description of Artificial Sequence: Synthetic oligonucleotide
  Antisense strand to SEQ ID NO: 2171798
ugcuuuaauguucaaugca

SEQ ID NO: 2171800 - RNA, 19 nt, Artificial Sequence
  Description of Artificial Sequence: Synthetic oligonucleotide
  Sense strand starting at position 3103 of SEQ ID NO: 1883129
aggauaggcuccucucaaa

SEQ ID NO: 2171801 - RNA, 19 nt, Artificial Sequence
  Description of Artificial Sequence: Synthetic oligonucleotide
  Antisense strand to SEQ ID NO: 2171800
uuugagaggagccuauccu

SEQ ID NO: 2171802 - RNA, 19 nt, Artificial Sequence
  Description of Artificial Sequence: Synthetic oligonucleotide
  Sense strand starting at position 3178 of SEQ ID NO: 1883129
acgcguauuucgaaggaaa

SEQ ID NO: 2171803 - RNA, 19 nt, Artificial Sequence
  Description of Artificial Sequence: Synthetic oligonucleotide
  Antisense strand to SEQ ID NO: 2171802
uuuccuucgaaauacgcgu

SEQ ID NO: 2171804 - RNA, 19 nt, Artificial Sequence
  Description of Artificial Sequence: Synthetic oligonucleotide
  Sense strand starting at position 3180 of SEQ ID NO: 1883129
gcguauuucgaaggaaauu

SEQ ID NO: 2171805 - RNA, 19 nt, Artificial Sequence
  Description of Artificial Sequence: Synthetic oligonucleotide
  Antisense strand to SEQ ID NO: 2171804
aauuuccuucgaaauacgc

SEQ ID NO: 2171806 - RNA, 19 nt, Artificial Sequence
  Description of Artificial Sequence: Synthetic oligonucleotide
  Sense strand starting at position 3310 of SEQ ID NO: 1883129
ccaggagucacaggucaga

SEQ ID NO: 2171807 - RNA, 19 nt, Artificial Sequence
  Description of Artificial Sequence: Synthetic oligonucleotide
  Antisense strand to SEQ ID NO: 2171806
ucugaccugugacuccugg

SEQ ID NO: 2171808 - RNA, 19 nt, Artificial Sequence
  Description of Artificial Sequence: Synthetic oligonucleotide
  Sense strand starting at position 3349 of SEQ ID NO: 1883129
uugaaaccucaaugugaga

SEQ ID NO: 2171809 - RNA, 19 nt, Artificial Sequence
  Description of Artificial Sequence: Synthetic oligonucleotide
  Antisense strand to SEQ ID NO: 2171808
ucucacauugagguuucaa

SEQ ID NO: 2171810 - RNA, 19 nt, Artificial Sequence
  Description of Artificial Sequence: Synthetic oligonucleotide
  Sense strand starting at position 3385 of SEQ ID NO: 1883129
auuacagcuccugaaguua

SEQ ID NO: 2171811 - RNA, 19 nt, Artificial Sequence
  Description of Artificial Sequence: Synthetic oligonucleotide
  Antisense strand to SEQ ID NO: 2171810
uaacuucaggagcuguaau

SEQ ID NO: 2171812 - RNA, 19 nt, Artificial Sequence
  Description of Artificial Sequence: Synthetic oligonucleotide
  Sense strand starting at position 3510 of SEQ ID NO: 1883129
gggaucagguauccuaaua

SEQ ID NO: 2171813 - RNA, 19 nt, Artificial Sequence
  Description of Artificial Sequence: Synthetic oligonucleotide
  Antisense strand to SEQ ID NO: 2171812
uauuaggauaccugauccc

SEQ ID NO: 2171814 - RNA, 19 nt, Artificial Sequence
  Description of Artificial Sequence: Synthetic oligonucleotide
  Sense strand starting at position 3523 of SEQ ID NO: 1883129
cuaauauccuggguuacuu

SEQ ID NO: 2171815 - RNA, 19 nt, Artificial Sequence
  Description of Artificial Sequence: Synthetic oligonucleotide
  Antisense strand to SEQ ID NO: 2171814
aaguaacccaggauauuag

SEQ ID NO: 2171816 - RNA, 19 nt, Artificial Sequence
  Description of Artificial Sequence: Synthetic oligonucleotide
  Sense strand starting at position 3666 of SEQ ID NO: 1883129
ggcagcaaccaaugauaga

SEQ ID NO: 2171817 - RNA, 19 nt, Artificial Sequence
  Description of Artificial Sequence: Synthetic oligonucleotide
  Antisense strand to SEQ ID NO: 2171816
ucuaucauugguugcugcc

SEQ ID NO: 2171818 - RNA, 19 nt, Artificial Sequence
  Description of Artificial Sequence: Synthetic oligonucleotide
  Sense strand starting at position 3807 of SEQ ID NO: 1883129
cucuguuagggagacaagu

SEQ ID NO: 2171819 - RNA, 19 nt, Artificial Sequence
  Description of Artificial Sequence: Synthetic oligonucleotide
  Antisense strand to SEQ ID NO: 2171818
acuugucucccuaacagag

SEQ ID NO: 2171820 - RNA, 19 nt, Artificial Sequence
  Description of Artificial Sequence: Synthetic oligonucleotide
  Sense strand starting at position 3855 of SEQ ID NO: 1883129
ugaggaaucuugccugaac

SEQ ID NO: 2171821 - RNA, 19 nt, Artificial Sequence
  Description of Artificial Sequence: Synthetic oligonucleotide
  Antisense strand to SEQ ID NO: 2171820
guucaggcaagauuccuca

SEQ ID NO: 2171822 - RNA, 19 nt, Artificial Sequence
  Description of Artificial Sequence: Synthetic oligonucleotide
  Sense strand starting at position 3856 of SEQ ID NO: 1883129
gaggaaucuugccugaacc

SEQ ID NO: 2171823 - RNA, 19 nt, Artificial Sequence
  Description of Artificial Sequence: Synthetic oligonucleotide
  Antisense strand to SEQ ID NO: 2171822
gguucaggcaagauuccuc

SEQ ID NO: 2171824 - RNA, 19 nt, Artificial Sequence
  Description of Artificial Sequence: Synthetic oligonucleotide
  Sense strand starting at position 3857 of SEQ ID NO: 1883129
aggaaucuugccugaacca

SEQ ID NO: 2171825 - RNA, 19 nt, Artificial Sequence
  Description of Artificial Sequence: Synthetic oligonucleotide
  Antisense strand to SEQ ID NO: 2171824
ugguucaggcaagauuccu

SEQ ID NO: 2171826 - RNA, 19 nt, Artificial Sequence
  Description of Artificial Sequence: Synthetic oligonucleotide
  Sense strand starting at position 194 of SEQ ID NO: 1883130
cguuguacucauuacagga

SEQ ID NO: 2171827 - RNA, 19 nt, Artificial Sequence
  Description of Artificial Sequence: Synthetic oligonucleotide
  Antisense strand to SEQ ID NO: 2171826
uccuguaaugaguacaacg

SEQ ID NO: 2171828 - RNA, 19 nt, Artificial Sequence
  Description of Artificial Sequence: Synthetic oligonucleotide
  Sense strand starting at position 615 of SEQ ID NO: 1883130
ucaauagagcugugacaac

SEQ ID NO: 2171829 - RNA, 19 nt, Artificial Sequence
  Description of Artificial Sequence: Synthetic oligonucleotide
  Antisense strand to SEQ ID NO: 2171828
guugucacagcucuauuga

SEQ ID NO: 2171830 - RNA, 19 nt, Artificial Sequence
  Description of Artificial Sequence: Synthetic oligonucleotide
  Sense strand starting at position 718 of SEQ ID NO: 1883130
cuaagaaguagcgauguua

SEQ ID NO: 2171831 - RNA, 19 nt, Artificial Sequence
  Description of Artificial Sequence: Synthetic oligonucleotide
  Antisense strand to SEQ ID NO: 2171830
uaacaucgcuacuucuuag

SEQ ID NO: 2171832 - RNA, 19 nt, Artificial Sequence
  Description of Artificial Sequence: Synthetic oligonucleotide
  Sense strand starting at position 789 of SEQ ID NO: 1883130
uuacguuugagugaaucca

SEQ ID NO: 2171833 - RNA, 19 nt, Artificial Sequence
  Description of Artificial Sequence: Synthetic oligonucleotide
  Antisense strand to SEQ ID NO: 2171832
uggauucacucaaacguaa

SEQ ID NO: 2171834 - RNA, 19 nt, Artificial Sequence
  Description of Artificial Sequence: Synthetic oligonucleotide
  Sense strand starting at position 848 of SEQ ID NO: 1883130
agaaauuggcagcauaauu

SEQ ID NO: 2171835 - RNA, 19 nt, Artificial Sequence
  Description of Artificial Sequence: Synthetic oligonucleotide
  Antisense strand to SEQ ID NO: 2171834
aauuaugcugccaauuucu

SEQ ID NO: 2171836 - RNA, 19 nt, Artificial Sequence
  Description of Artificial Sequence: Synthetic oligonucleotide
  Sense strand starting at position 858 of SEQ ID NO: 1883130
agcauaauuugugcuugua

SEQ ID NO: 2171837 - RNA, 19 nt, Artificial Sequence
  Description of Artificial Sequence: Synthetic oligonucleotide
  Antisense strand to SEQ ID NO: 2171836
uacaagcacaaauuaugcu

SEQ ID NO: 2171838 - RNA, 19 nt, Artificial Sequence
  Description of Artificial Sequence: Synthetic oligonucleotide
  Sense strand starting at position 899 of SEQ ID NO: 1883130
auguuuguccuugauauuc

SEQ ID NO: 2171839 - RNA, 19 nt, Artificial Sequence
  Description of Artificial Sequence: Synthetic oligonucleotide
  Antisense strand to SEQ ID NO: 2171838
gaauaucaaggacaaacau

SEQ ID NO: 2171840 - RNA, 19 nt, Artificial Sequence
  Description of Artificial Sequence: Synthetic oligonucleotide
  Sense strand starting at position 904 of SEQ ID NO: 1883130
uguccuugauauucuuaga

SEQ ID NO: 2171841 - RNA, 19 nt, Artificial Sequence
  Description of Artificial Sequence: Synthetic oligonucleotide
  Antisense strand to SEQ ID NO: 2171840
ucuaagaauaucaaggaca

SEQ ID NO: 2171842 - RNA, 19 nt, Artificial Sequence
  Description of Artificial Sequence: Synthetic oligonucleotide
  Sense strand starting at position 988 of SEQ ID NO: 1883130
uugacuaagaggugcauua

SEQ ID NO: 2171843 - RNA, 19 nt, Artificial Sequence
  Description of Artificial Sequence: Synthetic oligonucleotide
  Antisense strand to SEQ ID NO: 2171842
uaaugcaccucuuagucaa

SEQ ID NO: 2171844 - RNA, 19 nt, Artificial Sequence
  Description of Artificial Sequence: Synthetic oligonucleotide
  Sense strand starting at position 1147 of SEQ ID NO: 1883130
ccaugaucccacuauuggu

SEQ ID NO: 2171845 - RNA, 19 nt, Artificial Sequence
  Description of Artificial Sequence: Synthetic oligonucleotide
  Antisense strand to SEQ ID NO: 2171844
accaauagugggaucaugg

SEQ ID NO: 2171846 - RNA, 19 nt, Artificial Sequence
  Description of Artificial Sequence: Synthetic oligonucleotide
  Sense strand starting at position 1203 of SEQ ID NO: 1883130
gauauucugccauagcaga

SEQ ID NO: 2171847 - RNA, 19 nt, Artificial Sequence
  Description of Artificial Sequence: Synthetic oligonucleotide
  Antisense strand to SEQ ID NO: 2171846
ucugcuauggcagaauauc

SEQ ID NO: 2171848 - RNA, 19 nt, Artificial Sequence
  Description of Artificial Sequence: Synthetic oligonucleotide
  Sense strand starting at position 1363 of SEQ ID NO: 1883130
gcaagaucagcucaaucaa

SEQ ID NO: 2171849 - RNA, 19 nt, Artificial Sequence
  Description of Artificial Sequence: Synthetic oligonucleotide
  Antisense strand to SEQ ID NO: 2171848
uugauugagcugaucuugc

SEQ ID NO: 2171850 - RNA, 19 nt, Artificial Sequence
  Description of Artificial Sequence: Synthetic oligonucleotide
  Sense strand starting at position 1658 of SEQ ID NO: 1883130
agcaauguccauugaauau

SEQ ID NO: 2171851 - RNA, 19 nt, Artificial Sequence
  Description of Artificial Sequence: Synthetic oligonucleotide
  Antisense strand to SEQ ID NO: 2171850
auauucaauggacauugcu

SEQ ID NO: 2171852 - RNA, 19 nt, Artificial Sequence
  Description of Artificial Sequence: Synthetic oligonucleotide
  Sense strand starting at position 2114 of SEQ ID NO: 1883130
ggagguggagcaugugauu

SEQ ID NO: 2171853 - RNA, 19 nt, Artificial Sequence
  Description of Artificial Sequence: Synthetic oligonucleotide
  Antisense strand to SEQ ID NO: 2171852
aaucacaugcuccaccucc

SEQ ID NO: 2171854 - RNA, 19 nt, Artificial Sequence
  Description of Artificial Sequence: Synthetic oligonucleotide
  Sense strand starting at position 2213 of SEQ ID NO: 1883130
ugcuuaucgagugucuguu

SEQ ID NO: 2171855 - RNA, 19 nt, Artificial Sequence
  Description of Artificial Sequence: Synthetic oligonucleotide
  Antisense strand to SEQ ID NO: 2171854
aacagacacucgauaagca

SEQ ID NO: 2171856 - RNA, 19 nt, Artificial Sequence
  Description of Artificial Sequence: Synthetic oligonucleotide
  Sense strand starting at position 2235 of SEQ ID NO: 1883130
gguccaagccaauagugau

SEQ ID NO: 2171857 - RNA, 19 nt, Artificial Sequence
  Description of Artificial Sequence: Synthetic oligonucleotide
  Antisense strand to SEQ ID NO: 2171856
aucacuauuggcuuggacc

SEQ ID NO: 2171858 - RNA, 19 nt, Artificial Sequence
  Description of Artificial Sequence: Synthetic oligonucleotide
  Sense strand starting at position 2282 of SEQ ID NO: 1883130
ucucaucugcuggaacauu

SEQ ID NO: 2171859 - RNA, 19 nt, Artificial Sequence
  Description of Artificial Sequence: Synthetic oligonucleotide
  Antisense strand to SEQ ID NO: 2171858
aauguuccagcagaugaga

SEQ ID NO: 2171860 - RNA, 19 nt, Artificial Sequence
  Description of Artificial Sequence: Synthetic oligonucleotide
  Sense strand starting at position 2568 of SEQ ID NO: 1883130
caaauaagcucagugggau

SEQ ID NO: 2171861 - RNA, 19 nt, Artificial Sequence
  Description of Artificial Sequence: Synthetic oligonucleotide
  Antisense strand to SEQ ID NO: 2171860
aucccacugagcuuauuug

SEQ ID NO: 2171862 - RNA, 19 nt, Artificial Sequence
  Description of Artificial Sequence: Synthetic oligonucleotide
  Sense strand starting at position 2569 of SEQ ID NO: 1883130
aaauaagcucagugggaua

SEQ ID NO: 2171863 - RNA, 19 nt, Artificial Sequence
  Description of Artificial Sequence: Synthetic oligonucleotide
  Antisense strand to SEQ ID NO: 2171862
uaucccacugagcuuauuu

SEQ ID NO: 2171864 - RNA, 19 nt, Artificial Sequence
  Description of Artificial Sequence: Synthetic oligonucleotide
  Sense strand starting at position 2580 of SEQ ID NO: 1883130
gugggauacuaguuaaaga

SEQ ID NO: 2171865 - RNA, 19 nt, Artificial Sequence
  Description of Artificial Sequence: Synthetic oligonucleotide
  Antisense strand to SEQ ID NO: 2171864
ucuuuaacuaguaucccac

SEQ ID NO: 2171866 - RNA, 19 nt, Artificial Sequence
  Description of Artificial Sequence: Synthetic oligonucleotide
  Sense strand starting at position 2591 of SEQ ID NO: 1883130
guuaaagaguuggucugaa

SEQ ID NO: 2171867 - RNA, 19 nt, Artificial Sequence
  Description of Artificial Sequence: Synthetic oligonucleotide
  Antisense strand to SEQ ID NO: 2171866
uucagaccaacucuuuaac

SEQ ID NO: 2171868 - RNA, 19 nt, Artificial Sequence
  Description of Artificial Sequence: Synthetic oligonucleotide
  Sense strand starting at position 2638 of SEQ ID NO: 1883130
accguauugagaggaguga

SEQ ID NO: 2171869 - RNA, 19 nt, Artificial Sequence
  Description of Artificial Sequence: Synthetic oligonucleotide
  Antisense strand to SEQ ID NO: 2171868
ucacuccucucaauacggu

SEQ ID NO: 2171870 - RNA, 19 nt, Artificial Sequence
  Description of Artificial Sequence: Synthetic oligonucleotide
  Sense strand starting at position 2662 of SEQ ID NO: 1883130
agaaauuauaucgguugaa

SEQ ID NO: 2171871 - RNA, 19 nt, Artificial Sequence
  Description of Artificial Sequence: Synthetic oligonucleotide
  Antisense strand to SEQ ID NO: 2171870
uucaaccgauauaauuucu

SEQ ID NO: 2171872 - RNA, 19 nt, Artificial Sequence
  Description of Artificial Sequence: Synthetic oligonucleotide
  Sense strand starting at position 2663 of SEQ ID NO: 1883130
gaaauuauaucgguugaaa

SEQ ID NO: 2171873 - RNA, 19 nt, Artificial Sequence
  Description of Artificial Sequence: Synthetic oligonucleotide
  Antisense strand to SEQ ID NO: 2171872
uuucaaccgauauaauuuc

SEQ ID NO: 2171874 - RNA, 19 nt, Artificial Sequence
  Description of Artificial Sequence: Synthetic oligonucleotide
  Sense strand starting at position 2665 of SEQ ID NO: 1883130
aauuauaucgguugaaagu

SEQ ID NO: 2171875 - RNA, 19 nt, Artificial Sequence
  Description of Artificial Sequence: Synthetic oligonucleotide
  Antisense strand to SEQ ID NO: 2171874
acuuucaaccgauauaauu

SEQ ID NO: 2171876 - RNA, 19 nt, Artificial Sequence
  Description of Artificial Sequence: Synthetic oligonucleotide
  Sense strand starting at position 2666 of SEQ ID NO: 1883130
auuauaucgguugaaagua

SEQ ID NO: 2171877 - RNA, 19 nt, Artificial Sequence
  Description of Artificial Sequence: Synthetic oligonucleotide
  Antisense strand to SEQ ID NO: 2171876
uacuuucaaccgauauaau

SEQ ID NO: 2171878 - RNA, 19 nt, Artificial Sequence
  Description of Artificial Sequence: Synthetic oligonucleotide
  Sense strand starting at position 2830 of SEQ ID NO: 1883130
uaacguugaacugggagau

SEQ ID NO: 2171879 - RNA, 19 nt, Artificial Sequence
  Description of Artificial Sequence: Synthetic oligonucleotide
  Antisense strand to SEQ ID NO: 2171878
aucucccaguucaacguua

SEQ ID NO: 2171880 - RNA, 19 nt, Artificial Sequence
  Description of Artificial Sequence: Synthetic oligonucleotide
  Sense strand starting at position 2831 of SEQ ID NO: 1883130
aacguugaacugggagauu

SEQ ID NO: 2171881 - RNA, 19 nt, Artificial Sequence
  Description of Artificial Sequence: Synthetic oligonucleotide
  Antisense strand to SEQ ID NO: 2171880
aaucucccaguucaacguu

SEQ ID NO: 2171882 - RNA, 19 nt, Artificial Sequence
  Description of Artificial Sequence: Synthetic oligonucleotide
  Sense strand starting at position 2941 of SEQ ID NO: 1883130
ggaagucauuaacugagca

SEQ ID NO: 2171883 - RNA, 19 nt, Artificial Sequence
  Description of Artificial Sequence: Synthetic oligonucleotide
  Antisense strand to SEQ ID NO: 2171882
ugcucaguuaaugacuucc

SEQ ID NO: 2171884 - RNA, 19 nt, Artificial Sequence
  Description of Artificial Sequence: Synthetic oligonucleotide
  Sense strand starting at position 2945 of SEQ ID NO: 1883130
gucauuaacugagcaaaca

SEQ ID NO: 2171885 - RNA, 19 nt, Artificial Sequence
  Description of Artificial Sequence: Synthetic oligonucleotide
  Antisense strand to SEQ ID NO: 2171884
uguuugcucaguuaaugac

SEQ ID NO: 2171886 - RNA, 19 nt, Artificial Sequence
  Description of Artificial Sequence: Synthetic oligonucleotide
  Sense strand starting at position 2981 of SEQ ID NO: 1883130
gagaaauauuuguaaacga

SEQ ID NO: 2171887 - RNA, 19 nt, Artificial Sequence
  Description of Artificial Sequence: Synthetic oligonucleotide
  Antisense strand to SEQ ID NO: 2171886
ucguuuacaaauauuucuc

SEQ ID NO: 2171888 - RNA, 19 nt, Artificial Sequence
  Description of Artificial Sequence: Synthetic oligonucleotide
  Sense strand starting at position 2992 of SEQ ID NO: 1883130
guaaacgauacauguaaug

SEQ ID NO: 2171889 - RNA, 19 nt, Artificial Sequence
  Description of Artificial Sequence: Synthetic oligonucleotide
  Antisense strand to SEQ ID NO: 2171888
cauuacauguaucguuuac

SEQ ID NO: 2171890 - RNA, 19 nt, Artificial Sequence
  Description of Artificial Sequence: Synthetic oligonucleotide
  Sense strand starting at position 3268 of SEQ ID NO: 1883130
uuaggaaauguguguacag

SEQ ID NO: 2171891 - RNA, 19 nt, Artificial Sequence
  Description of Artificial Sequence: Synthetic oligonucleotide
  Antisense strand to SEQ ID NO: 2171890
cuguacacacauuuccuaa

SEQ ID NO: 2171892 - RNA, 19 nt, Artificial Sequence
  Description of Artificial Sequence: Synthetic oligonucleotide
  Sense strand starting at position 3269 of SEQ ID NO: 1883130
uaggaaauguguguacaga

SEQ ID NO: 2171893 - RNA, 19 nt, Artificial Sequence
  Description of Artificial Sequence: Synthetic oligonucleotide
  Antisense strand to SEQ ID NO: 2171892
ucuguacacacauuuccua

SEQ ID NO: 2171894 - RNA, 19 nt, Artificial Sequence
  Description of Artificial Sequence: Synthetic oligonucleotide
  Sense strand starting at position 3270 of SEQ ID NO: 1883130
aggaaauguguguacagau

SEQ ID NO: 2171895 - RNA, 19 nt, Artificial Sequence
  Description of Artificial Sequence: Synthetic oligonucleotide
  Antisense strand to SEQ ID NO: 2171894
aucuguacacacauuuccu

SEQ ID NO: 2171896 - RNA, 19 nt, Artificial Sequence
  Description of Artificial Sequence: Synthetic oligonucleotide
  Sense strand starting at position 3661 of SEQ ID NO: 1883130
uugcaaagacaugaucuuu

SEQ ID NO: 2171897 - RNA, 19 nt, Artificial Sequence
  Description of Artificial Sequence: Synthetic oligonucleotide
  Antisense strand to SEQ ID NO: 2171896
aaagaucaugucuuugcaa

SEQ ID NO: 2171898 - RNA, 19 nt, Artificial Sequence
  Description of Artificial Sequence: Synthetic oligonucleotide
  Sense strand starting at position 3855 of SEQ ID NO: 1883130
auagcuagucguugaauuu

SEQ ID NO: 2171899 - RNA, 19 nt, Artificial Sequence
  Description of Artificial Sequence: Synthetic oligonucleotide
  Antisense strand to SEQ ID NO: 2171898
aaauucaacgacuagcuau

SEQ ID NO: 2171900 - RNA, 19 nt, Artificial Sequence
  Description of Artificial Sequence: Synthetic oligonucleotide
  Sense strand starting at position 3948 of SEQ ID NO: 1883130
gagaucuuaugcucaggga

SEQ ID NO: 2171901 - RNA, 19 nt, Artificial Sequence
  Description of Artificial Sequence: Synthetic oligonucleotide
  Antisense strand to SEQ ID NO: 2171900
ucccugagcauaagaucuc

SEQ ID NO: 2171902 - RNA, 19 nt, Artificial Sequence
  Description of Artificial Sequence: Synthetic oligonucleotide
  Sense strand starting at position 3965 of SEQ ID NO: 1883130
gauugugagguuuaaugug

SEQ ID NO: 2171903 - RNA, 19 nt, Artificial Sequence
  Description of Artificial Sequence: Synthetic oligonucleotide
  Antisense strand to SEQ ID NO: 2171902
cacauuaaaccucacaauc

SEQ ID NO: 2171904 - RNA, 19 nt, Artificial Sequence
  Description of Artificial Sequence: Synthetic oligonucleotide
  Sense strand starting at position 3970 of SEQ ID NO: 1883130
ugagguuuaaugugagaug

SEQ ID NO: 2171905 - RNA, 19 nt, Artificial Sequence
  Description of Artificial Sequence: Synthetic oligonucleotide
  Antisense strand to SEQ ID NO: 2171904
caucucacauuaaaccuca

SEQ ID NO: 2171906 - RNA, 19 nt, Artificial Sequence
  Description of Artificial Sequence: Synthetic oligonucleotide
  Sense strand starting at position 294 of SEQ ID NO: 1883131
cgccaagcuccugaugaaa

SEQ ID NO: 2171907 - RNA, 19 nt, Artificial Sequence
  Description of Artificial Sequence: Synthetic oligonucleotide
  Antisense strand to SEQ ID NO: 2171906
uuucaucaggagcuuggcg

SEQ ID NO: 2171908 - RNA, 19 nt, Artificial Sequence
  Description of Artificial Sequence: Synthetic oligonucleotide
  Sense strand starting at position 459 of SEQ ID NO: 1883131
acaacuuugugggugugaa

SEQ ID NO: 2171909 - RNA, 19 nt, Artificial Sequence
  Description of Artificial Sequence: Synthetic oligonucleotide
  Antisense strand to SEQ ID NO: 2171908
uucacacccacaaaguugu

SEQ ID NO: 2171910 - RNA, 19 nt, Artificial Sequence
  Description of Artificial Sequence: Synthetic oligonucleotide
  Sense strand starting at position 460 of SEQ ID NO: 1883131
caacuuugugggugugaaa

SEQ ID NO: 2171911 - RNA, 19 nt, Artificial Sequence
  Description of Artificial Sequence: Synthetic oligonucleotide
  Antisense strand to SEQ ID NO: 2171910
uuucacacccacaaaguug

SEQ ID NO: 2171912 - RNA, 19 nt, Artificial Sequence
  Description of Artificial Sequence: Synthetic oligonucleotide
  Sense strand starting at position 506 of SEQ ID NO: 1883131
ggugcucuuaaugaggaua

SEQ ID NO: 2171913 - RNA, 19 nt, Artificial Sequence
  Description of Artificial Sequence: Synthetic oligonucleotide
  Antisense strand to SEQ ID NO: 2171912
uauccucauuaagagcacc

SEQ ID NO: 2171914 - RNA, 19 nt, Artificial Sequence
  Description of Artificial Sequence: Synthetic oligonucleotide
  Sense strand starting at position 509 of SEQ ID NO: 1883131
gcucuuaaugaggauaucu

SEQ ID NO: 2171915 - RNA, 19 nt, Artificial Sequence
  Description of Artificial Sequence: Synthetic oligonucleotide
  Antisense strand to SEQ ID NO: 2171914
agauauccucauuaagagc

SEQ ID NO: 2171916 - RNA, 19 nt, Artificial Sequence
  Description of Artificial Sequence: Synthetic oligonucleotide
  Sense strand starting at position 640 of SEQ ID NO: 1883131
gcaaaugugugaccugaag

SEQ ID NO: 2171917 - RNA, 19 nt, Artificial Sequence
  Description of Artificial Sequence: Synthetic oligonucleotide
  Antisense strand to SEQ ID NO: 2171916
cuucaggucacacauuugc

SEQ ID NO: 2171918 - RNA, 19 nt, Artificial Sequence
  Description of Artificial Sequence: Synthetic oligonucleotide
  Sense strand starting at position 810 of SEQ ID NO: 1883131
aacagugaacagugagauu

SEQ ID NO: 2171919 - RNA, 19 nt, Artificial Sequence
  Description of Artificial Sequence: Synthetic oligonucleotide
  Antisense strand to SEQ ID NO: 2171918
aaucucacuguucacuguu

SEQ ID NO: 2171920 - RNA, 19 nt, Artificial Sequence
  Description of Artificial Sequence: Synthetic oligonucleotide
  Sense strand starting at position 977 of SEQ ID NO: 1883131
acacguuaaagagguguaa

SEQ ID NO: 2171921 - RNA, 19 nt, Artificial Sequence
  Description of Artificial Sequence: Synthetic oligonucleotide
  Antisense strand to SEQ ID NO: 2171920
uuacaccucuuuaacgugu

SEQ ID NO: 2171922 - RNA, 19 nt, Artificial Sequence
  Description of Artificial Sequence: Synthetic oligonucleotide
  Sense strand starting at position 979 of SEQ ID NO: 1883131
acguuaaagagguguaaac

SEQ ID NO: 2171923 - RNA, 19 nt, Artificial Sequence
  Description of Artificial Sequence: Synthetic oligonucleotide
  Antisense strand to SEQ ID NO: 2171922
guuuacaccucuuuaacgu

SEQ ID NO: 2171924 - RNA, 19 nt, Artificial Sequence
  Description of Artificial Sequence: Synthetic oligonucleotide
  Sense strand starting at position 1078 of SEQ ID NO: 1883131
uguagcucugaagacaaau

SEQ ID NO: 2171925 - RNA, 19 nt, Artificial Sequence
  Description of Artificial Sequence: Synthetic oligonucleotide
  Antisense strand to SEQ ID NO: 2171924
auuugucuucagagcuaca

SEQ ID NO: 2171926 - RNA, 19 nt, Artificial Sequence
  Description of Artificial Sequence: Synthetic oligonucleotide
  Sense strand starting at position 1180 of SEQ ID NO: 1883131
gguguucuccaggacugua

SEQ ID NO: 2171927 - RNA, 19 nt, Artificial Sequence
  Description of Artificial Sequence: Synthetic oligonucleotide
  Antisense strand to SEQ ID NO: 2171926
uacaguccuggagaacacc

SEQ ID NO: 2171928 - RNA, 19 nt, Artificial Sequence
  Description of Artificial Sequence: Synthetic oligonucleotide
  Sense strand starting at position 1196 of SEQ ID NO: 1883131
guaggaaucucaucugcag

SEQ ID NO: 2171929 - RNA, 19 nt, Artificial Sequence
  Description of Artificial Sequence: Synthetic oligonucleotide
  Antisense strand to SEQ ID NO: 2171928
cugcagaugagauuccuac

SEQ ID NO: 2171930 - RNA, 19 nt, Artificial Sequence
  Description of Artificial Sequence: Synthetic oligonucleotide
  Sense strand starting at position 1307 of SEQ ID NO: 1883131
ggagaagucacaugcugag

SEQ ID NO: 2171931 - RNA, 19 nt, Artificial Sequence
  Description of Artificial Sequence: Synthetic oligonucleotide
  Antisense strand to SEQ ID NO: 2171930
cucagcaugugacuucucc

SEQ ID NO: 2171932 - RNA, 19 nt, Artificial Sequence
  Description of Artificial Sequence: Synthetic oligonucleotide
  Sense strand starting at position 1311 of SEQ ID NO: 1883131
aagucacaugcugagugau

SEQ ID NO: 2171933 - RNA, 19 nt, Artificial Sequence
  Description of Artificial Sequence: Synthetic oligonucleotide
  Antisense strand to SEQ ID NO: 2171932
aucacucagcaugugacuu

SEQ ID NO: 2171934 - RNA, 19 nt, Artificial Sequence
  Description of Artificial Sequence: Synthetic oligonucleotide
  Sense strand starting at position 1628 of SEQ ID NO: 1883131
cauaucuuggaaugaaguu

SEQ ID NO: 2171935 - RNA, 19 nt, Artificial Sequence
  Description of Artificial Sequence: Synthetic oligonucleotide
  Antisense strand to SEQ ID NO: 2171934
aacuucauuccaagauaug

SEQ ID NO: 2171936 - RNA, 19 nt, Artificial Sequence
  Description of Artificial Sequence: Synthetic oligonucleotide
  Sense strand starting at position 1662 of SEQ ID NO: 1883131
cucuuagauuucuuuggcu

SEQ ID NO: 2171937 - RNA, 19 nt, Artificial Sequence
  Description of Artificial Sequence: Synthetic oligonucleotide
  Antisense strand to SEQ ID NO: 2171936
agccaaagaaaucuaagag

SEQ ID NO: 2171938 - RNA, 19 nt, Artificial Sequence
  Description of Artificial Sequence: Synthetic oligonucleotide
  Sense strand starting at position 1664 of SEQ ID NO: 1883131
cuuagauuucuuuggcucu

SEQ ID NO: 2171939 - RNA, 19 nt, Artificial Sequence
  Description of Artificial Sequence: Synthetic oligonucleotide
  Antisense strand to SEQ ID NO: 2171938
agagccaaagaaaucuaag

SEQ ID NO: 2171940 - RNA, 19 nt, Artificial Sequence
  Description of Artificial Sequence: Synthetic oligonucleotide
  Sense strand starting at position 2049 of SEQ ID NO: 1883131
ggaggagucugccuagauu

SEQ ID NO: 2171941 - RNA, 19 nt, Artificial Sequence
  Description of Artificial Sequence: Synthetic oligonucleotide
  Antisense strand to SEQ ID NO: 2171940
aaucuaggcagacuccucc

SEQ ID NO: 2171942 - RNA, 19 nt, Artificial Sequence
  Description of Artificial Sequence: Synthetic oligonucleotide
  Sense strand starting at position 2099 of SEQ ID NO: 1883131
ucuugaaccuucucaguga

SEQ ID NO: 2171943 - RNA, 19 nt, Artificial Sequence
  Description of Artificial Sequence: Synthetic oligonucleotide
  Antisense strand to SEQ ID NO: 2171942
ucacugagaagguucaaga

SEQ ID NO: 2171944 - RNA, 19 nt, Artificial Sequence
  Description of Artificial Sequence: Synthetic oligonucleotide
  Sense strand starting at position 2102 of SEQ ID NO: 1883131
ugaaccuucucagugagag

SEQ ID NO: 2171945 - RNA, 19 nt, Artificial Sequence
  Description of Artificial Sequence: Synthetic oligonucleotide
  Antisense strand to SEQ ID NO: 2171944
cucucacugagaagguuca

SEQ ID NO: 2171946 - RNA, 19 nt, Artificial Sequence
  Description of Artificial Sequence: Synthetic oligonucleotide
  Sense strand starting at position 2123 of SEQ ID NO: 1883131
gguggagauucguuggaga

SEQ ID NO: 2171947 - RNA, 19 nt, Artificial Sequence
  Description of Artificial Sequence: Synthetic oligonucleotide
  Antisense strand to SEQ ID NO: 2171946
ucuccaacgaaucuccacc

SEQ ID NO: 2171948 - RNA, 19 nt, Artificial Sequence
  Description of Artificial Sequence: Synthetic oligonucleotide
  Sense strand starting at position 2124 of SEQ ID NO: 1883131
guggagauucguuggagag

SEQ ID NO: 2171949 - RNA, 19 nt, Artificial Sequence
  Description of Artificial Sequence: Synthetic oligonucleotide
  Antisense strand to SEQ ID NO: 2171948
cucuccaacgaaucuccac

SEQ ID NO: 2171950 - RNA, 19 nt, Artificial Sequence
  Description of Artificial Sequence: Synthetic oligonucleotide
  Sense strand starting at position 2313 of SEQ ID NO: 1883131
gccucuuacuuucugaaga

SEQ ID NO: 2171951 - RNA, 19 nt, Artificial Sequence
  Description of Artificial Sequence: Synthetic oligonucleotide
  Antisense strand to SEQ ID NO: 2171950
ucuucagaaaguaagaggc

SEQ ID NO: 2171952 - RNA, 19 nt, Artificial Sequence
  Description of Artificial Sequence: Synthetic oligonucleotide
  Sense strand starting at position 2327 of SEQ ID NO: 1883131
gaagaugggcucuacuguu

SEQ ID NO: 2171953 - RNA, 19 nt, Artificial Sequence
  Description of Artificial Sequence: Synthetic oligonucleotide
  Antisense strand to SEQ ID NO: 2171952
aacaguagagcccaucuuc

SEQ ID NO: 2171954 - RNA, 19 nt, Artificial Sequence
  Description of Artificial Sequence: Synthetic oligonucleotide
  Sense strand starting at position 2339 of SEQ ID NO: 1883131
uacuguucucuggaagucu

SEQ ID NO: 2171955 - RNA, 19 nt, Artificial Sequence
  Description of Artificial Sequence: Synthetic oligonucleotide
  Antisense strand to SEQ ID NO: 2171954
agacuuccagagaacagua

SEQ ID NO: 2171956 - RNA, 19 nt, Artificial Sequence
  Description of Artificial Sequence: Synthetic oligonucleotide
  Sense strand starting at position 2522 of SEQ ID NO: 1883131
cauaaagaguugucuaagg

SEQ ID NO: 2171957 - RNA, 19 nt, Artificial Sequence
  Description of Artificial Sequence: Synthetic oligonucleotide
  Antisense strand to SEQ ID NO: 2171956
ccuuagacaacucuuuaug

SEQ ID NO: 2171958 - RNA, 19 nt, Artificial Sequence
  Description of Artificial Sequence: Synthetic oligonucleotide
  Sense strand starting at position 2524 of SEQ ID NO: 1883131
uaaagaguugucuaaggcu

SEQ ID NO: 2171959 - RNA, 19 nt, Artificial Sequence
  Description of Artificial Sequence: Synthetic oligonucleotide
  Antisense strand to SEQ ID NO: 2171958
agccuuagacaacucuuua

SEQ ID NO: 2171960 - RNA, 19 nt, Artificial Sequence
  Description of Artificial Sequence: Synthetic oligonucleotide
  Sense strand starting at position 2563 of SEQ ID NO: 1883131
ucucuauuuaggugugagu

SEQ ID NO: 2171961 - RNA, 19 nt, Artificial Sequence
  Description of Artificial Sequence: Synthetic oligonucleotide
  Antisense strand to SEQ ID NO: 2171960
acucacaccuaaauagaga

SEQ ID NO: 2171962 - RNA, 19 nt, Artificial Sequence
  Description of Artificial Sequence: Synthetic oligonucleotide
  Sense strand starting at position 2604 of SEQ ID NO: 1883131
uguauacuaccuuaugagu

SEQ ID NO: 2171963 - RNA, 19 nt, Artificial Sequence
  Description of Artificial Sequence: Synthetic oligonucleotide
  Antisense strand to SEQ ID NO: 2171962
acucauaagguaguauaca

SEQ ID NO: 2171964 - RNA, 19 nt, Artificial Sequence
  Description of Artificial Sequence: Synthetic oligonucleotide
  Sense strand starting at position 2609 of SEQ ID NO: 1883131
acuaccuuaugaguugaua

SEQ ID NO: 2171965 - RNA, 19 nt, Artificial Sequence
  Description of Artificial Sequence: Synthetic oligonucleotide
  Antisense strand to SEQ ID NO: 2171964
uaucaacucauaagguagu

SEQ ID NO: 2171966 - RNA, 19 nt, Artificial Sequence
  Description of Artificial Sequence: Synthetic oligonucleotide
  Sense strand starting at position 2737 of SEQ ID NO: 1883131
aagauaaagcuuugacguu

SEQ ID NO: 2171967 - RNA, 19 nt, Artificial Sequence
  Description of Artificial Sequence: Synthetic oligonucleotide
  Antisense strand to SEQ ID NO: 2171966
aacgucaaagcuuuaucuu

SEQ ID NO: 2171968 - RNA, 19 nt, Artificial Sequence
  Description of Artificial Sequence: Synthetic oligonucleotide
  Sense strand starting at position 2752 of SEQ ID NO: 1883131
cguugauguggguaaugau

SEQ ID NO: 2171969 - RNA, 19 nt, Artificial Sequence
  Description of Artificial Sequence: Synthetic oligonucleotide
  Antisense strand to SEQ ID NO: 2171968
aucauuacccacaucaacg

SEQ ID NO: 2171970 - RNA, 19 nt, Artificial Sequence
  Description of Artificial Sequence: Synthetic oligonucleotide
  Sense strand starting at position 2841 of SEQ ID NO: 1883131
aaaggaucugcacgucaga

SEQ ID NO: 2171971 - RNA, 19 nt, Artificial Sequence
  Description of Artificial Sequence: Synthetic oligonucleotide
  Antisense strand to SEQ ID NO: 2171970
ucugacgugcagauccuuu

SEQ ID NO: 2171972 - RNA, 19 nt, Artificial Sequence
  Description of Artificial Sequence: Synthetic oligonucleotide
  Sense strand starting at position 3048 of SEQ ID NO: 1883131
ucuaaagagcuaugaucau

SEQ ID NO: 2171973 - RNA, 19 nt, Artificial Sequence
  Description of Artificial Sequence: Synthetic oligonucleotide
  Antisense strand to SEQ ID NO: 2171972
augaucauagcucuuuaga

SEQ ID NO: 2171974 - RNA, 19 nt, Artificial Sequence
  Description of Artificial Sequence: Synthetic oligonucleotide
  Sense strand starting at position 3425 of SEQ ID NO: 1883131
gggaucagguguccuaauu

SEQ ID NO: 2171975 - RNA, 19 nt, Artificial Sequence
  Description of Artificial Sequence: Synthetic oligonucleotide
  Antisense strand to SEQ ID NO: 2171974
aauuaggacaccugauccc

SEQ ID NO: 2171976 - RNA, 19 nt, Artificial Sequence
  Description of Artificial Sequence: Synthetic oligonucleotide
  Sense strand starting at position 3592 of SEQ ID NO: 1883131
accuauggauucuccauga

SEQ ID NO: 2171977 - RNA, 19 nt, Artificial Sequence
  Description of Artificial Sequence: Synthetic oligonucleotide
  Antisense strand to SEQ ID NO: 2171976
ucauggagaauccauaggu

SEQ ID NO: 2171978 - RNA, 19 nt, Artificial Sequence
  Description of Artificial Sequence: Synthetic oligonucleotide
  Sense strand starting at position 3706 of SEQ ID NO: 1883131
gugcauagcguaguauaca

SEQ ID NO: 2171979 - RNA, 19 nt, Artificial Sequence
  Description of Artificial Sequence: Synthetic oligonucleotide
  Antisense strand to SEQ ID NO: 2171978
uguauacuacgcuaugcac

SEQ ID NO: 2171980 - RNA, 19 nt, Artificial Sequence
  Description of Artificial Sequence: Synthetic oligonucleotide
  Sense strand starting at position 3717 of SEQ ID NO: 1883131
aguauacacucuguaagga

SEQ ID NO: 2171981 - RNA, 19 nt, Artificial Sequence
  Description of Artificial Sequence: Synthetic oligonucleotide
  Antisense strand to SEQ ID NO: 2171980
uccuuacagaguguauacu

SEQ ID NO: 2171982 - RNA, 19 nt, Artificial Sequence
  Description of Artificial Sequence: Synthetic oligonucleotide
  Sense strand starting at position 3927 of SEQ ID NO: 1883131
cuggacucuccugaguuaa

SEQ ID NO: 2171983 - RNA, 19 nt, Artificial Sequence
  Description of Artificial Sequence: Synthetic oligonucleotide
  Antisense strand to SEQ ID NO: 2171982
uuaacucaggagaguccag

SEQ ID NO: 2171984 - RNA, 19 nt, Artificial Sequence
  Description of Artificial Sequence: Synthetic oligonucleotide
  Sense strand starting at position 3975 of SEQ ID NO: 1883131
aggagauaguuaucuccuu

SEQ ID NO: 2171985 - RNA, 19 nt, Artificial Sequence
  Description of Artificial Sequence: Synthetic oligonucleotide
  Antisense strand to SEQ ID NO: 2171984
aaggagauaacuaucuccu

SEQ ID NO: 2171986 - RNA, 19 nt, Artificial Sequence
  Description of Artificial Sequence: Synthetic oligonucleotide
  Sense strand starting at position 275 of SEQ ID NO: 1883132
gacucagguuacuuggaga

SEQ ID NO: 2171987 - RNA, 19 nt, Artificial Sequence
  Description of Artificial Sequence: Synthetic oligonucleotide
  Antisense strand to SEQ ID NO: 2171986
ucuccaaguaaccugaguc

SEQ ID NO: 2171988 - RNA, 19 nt, Artificial Sequence
  Description of Artificial Sequence: Synthetic oligonucleotide
  Sense strand starting at position 430 of SEQ ID NO: 1883132
uuucuaugugugcagacaa

SEQ ID NO: 2171989 - RNA, 19 nt, Artificial Sequence
  Description of Artificial Sequence: Synthetic oligonucleotide
  Antisense strand to SEQ ID NO: 2171988
uugucugcacacauagaaa

SEQ ID NO: 2171990 - RNA, 19 nt, Artificial Sequence
  Description of Artificial Sequence: Synthetic oligonucleotide
  Sense strand starting at position 446 of SEQ ID NO: 1883132
caacuuuguguguaugaaa

SEQ ID NO: 2171991 - RNA, 19 nt, Artificial Sequence
  Description of Artificial Sequence: Synthetic oligonucleotide
  Antisense strand to SEQ ID NO: 2171990
uuucauacacacaaaguug

SEQ ID NO: 2171992 - RNA, 19 nt, Artificial Sequence
  Description of Artificial Sequence: Synthetic oligonucleotide
  Sense strand starting at position 466 of SEQ ID NO: 1883132
cuagauucugguggauaug

SEQ ID NO: 2171993 - RNA, 19 nt, Artificial Sequence
  Description of Artificial Sequence: Synthetic oligonucleotide
  Antisense strand to SEQ ID NO: 2171992
cauauccaccagaaucuag

SEQ ID NO: 2171994 - RNA, 19 nt, Artificial Sequence
  Description of Artificial Sequence: Synthetic oligonucleotide
  Sense strand starting at position 643 of SEQ ID NO: 1883132
agaacugcucagggaaacu

SEQ ID NO: 2171995 - RNA, 19 nt, Artificial Sequence
  Description of Artificial Sequence: Synthetic oligonucleotide
  Antisense strand to SEQ ID NO: 2171994
aguuucccugagcaguucu

SEQ ID NO: 2171996 - RNA, 19 nt, Artificial Sequence
  Description of Artificial Sequence: Synthetic oligonucleotide
  Sense strand starting at position 732 of SEQ ID NO: 1883132
gcugacaaugaugguuuau

SEQ ID NO: 2171997 - RNA, 19 nt, Artificial Sequence
  Description of Artificial Sequence: Synthetic oligonucleotide
  Antisense strand to SEQ ID NO: 2171996
auaaaccaucauugucagc

SEQ ID NO: 2171998 - RNA, 19 nt, Artificial Sequence
  Description of Artificial Sequence: Synthetic oligonucleotide
  Sense strand starting at position 743 of SEQ ID NO: 1883132
ugguuuauggaacacguaa

SEQ ID NO: 2171999 - RNA, 19 nt, Artificial Sequence
  Description of Artificial Sequence: Synthetic oligonucleotide
  Antisense strand to SEQ ID NO: 2171998
uuacguguuccauaaacca

SEQ ID NO: 2172000 - RNA, 19 nt, Artificial Sequence
  Description of Artificial Sequence: Synthetic oligonucleotide
  Sense strand starting at position 754 of SEQ ID NO: 1883132
acacguaagcauuaucuuu

SEQ ID NO: 2172001 - RNA, 19 nt, Artificial Sequence
  Description of Artificial Sequence: Synthetic oligonucleotide
  Antisense strand to SEQ ID NO: 2172000
aaagauaaugcuuacgugu

SEQ ID NO: 2172002 - RNA, 19 nt, Artificial Sequence
  Description of Artificial Sequence: Synthetic oligonucleotide
  Sense strand starting at position 824 of SEQ ID NO: 1883132
ggagaugagcagcaucauu

SEQ ID NO: 2172003 - RNA, 19 nt, Artificial Sequence
  Description of Artificial Sequence: Synthetic oligonucleotide
  Antisense strand to SEQ ID NO: 2172002
aaugaugcugcucaucucc

SEQ ID NO: 2172004 - RNA, 19 nt, Artificial Sequence
  Description of Artificial Sequence: Synthetic oligonucleotide
  Sense strand starting at position 852 of SEQ ID NO: 1883132
cuaacaaugugugucugaa

SEQ ID NO: 2172005 - RNA, 19 nt, Artificial Sequence
  Description of Artificial Sequence: Synthetic oligonucleotide
  Antisense strand to SEQ ID NO: 2172004
uucagacacacauuguuag

SEQ ID NO: 2172006 - RNA, 19 nt, Artificial Sequence
  Description of Artificial Sequence: Synthetic oligonucleotide
  Sense strand starting at position 1085 of SEQ ID NO: 1883132
ucugaaagcuaguuaugaa

SEQ ID NO: 2172007 - RNA, 19 nt, Artificial Sequence
  Description of Artificial Sequence: Synthetic oligonucleotide
  Antisense strand to SEQ ID NO: 2172006
uucauaacuagcuuucaga

SEQ ID NO: 2172008 - RNA, 19 nt, Artificial Sequence
  Description of Artificial Sequence: Synthetic oligonucleotide
  Sense strand starting at position 1148 of SEQ ID NO: 1883132
agugaaucucaccggaggu

SEQ ID NO: 2172009 - RNA, 19 nt, Artificial Sequence
  Description of Artificial Sequence: Synthetic oligonucleotide
  Antisense strand to SEQ ID NO: 2172008
accuccggugagauucacu

SEQ ID NO: 2172010 - RNA, 19 nt, Artificial Sequence
  Description of Artificial Sequence: Synthetic oligonucleotide
  Sense strand starting at position 1181 of SEQ ID NO: 1883132
ugcguucuugaagaugaua

SEQ ID NO: 2172011 - RNA, 19 nt, Artificial Sequence
  Description of Artificial Sequence: Synthetic oligonucleotide
  Antisense strand to SEQ ID NO: 2172010
uaucaucuucaagaacgca

SEQ ID NO: 2172012 - RNA, 19 nt, Artificial Sequence
  Description of Artificial Sequence: Synthetic oligonucleotide
  Sense strand starting at position 1183 of SEQ ID NO: 1883132
cguucuugaagaugauaau

SEQ ID NO: 2172013 - RNA, 19 nt, Artificial Sequence
  Description of Artificial Sequence: Synthetic oligonucleotide
  Antisense strand to SEQ ID NO: 2172012
auuaucaucuucaagaacg

SEQ ID NO: 2172014 - RNA, 19 nt, Artificial Sequence
  Description of Artificial Sequence: Synthetic oligonucleotide
  Sense strand starting at position 1362 of SEQ ID NO: 1883132
gcaagaucagcugaaucag

SEQ ID NO: 2172015 - RNA, 19 nt, Artificial Sequence
  Description of Artificial Sequence: Synthetic oligonucleotide
  Antisense strand to SEQ ID NO: 2172014
cugauucagcugaucuugc

SEQ ID NO: 2172016 - RNA, 19 nt, Artificial Sequence
  Description of Artificial Sequence: Synthetic oligonucleotide
  Sense strand starting at position 1368 of SEQ ID NO: 1883132
ucagcugaaucaguaggaa

SEQ ID NO: 2172017 - RNA, 19 nt, Artificial Sequence
  Description of Artificial Sequence: Synthetic oligonucleotide
  Antisense strand to SEQ ID NO: 2172016
uuccuacugauucagcuga

SEQ ID NO: 2172018 - RNA, 19 nt, Artificial Sequence
  Description of Artificial Sequence: Synthetic oligonucleotide
  Sense strand starting at position 1371 of SEQ ID NO: 1883132
gcugaaucaguaggaauca

SEQ ID NO: 2172019 - RNA, 19 nt, Artificial Sequence
  Description of Artificial Sequence: Synthetic oligonucleotide
  Antisense strand to SEQ ID NO: 2172018
ugauuccuacugauucagc

SEQ ID NO: 2172020 - RNA, 19 nt, Artificial Sequence
  Description of Artificial Sequence: Synthetic oligonucleotide
  Sense strand starting at position 1418 of SEQ ID NO: 1883132
ggauuagagacgcauucuc

SEQ ID NO: 2172021 - RNA, 19 nt, Artificial Sequence
  Description of Artificial Sequence: Synthetic oligonucleotide
  Antisense strand to SEQ ID NO: 2172020
gagaaugcgucucuaaucc

SEQ ID NO: 2172022 - RNA, 19 nt, Artificial Sequence
  Description of Artificial Sequence: Synthetic oligonucleotide
  Sense strand starting at position 1554 of SEQ ID NO: 1883132
gugggcucucaucaaugau

SEQ ID NO: 2172023 - RNA, 19 nt, Artificial Sequence
  Description of Artificial Sequence: Synthetic oligonucleotide
  Antisense strand to SEQ ID NO: 2172022
aucauugaugagagcccac

SEQ ID NO: 2172024 - RNA, 19 nt, Artificial Sequence
  Description of Artificial Sequence: Synthetic oligonucleotide
  Sense strand starting at position 1591 of SEQ ID NO: 1883132
uauguuucugcagagcaua

SEQ ID NO: 2172025 - RNA, 19 nt, Artificial Sequence
  Description of Artificial Sequence: Synthetic oligonucleotide
  Antisense strand to SEQ ID NO: 2172024
uaugcucugcagaaacaua

SEQ ID NO: 2172026 - RNA, 19 nt, Artificial Sequence
  Description of Artificial Sequence: Synthetic oligonucleotide
  Sense strand starting at position 1659 of SEQ ID NO: 1883132
aaagucaucccuggaguau

SEQ ID NO: 2172027 - RNA, 19 nt, Artificial Sequence
  Description of Artificial Sequence: Synthetic oligonucleotide
  Antisense strand to SEQ ID NO: 2172026
auacuccagggaugacuuu

SEQ ID NO: 2172028 - RNA, 19 nt, Artificial Sequence
  Description of Artificial Sequence: Synthetic oligonucleotide
  Sense strand starting at position 1660 of SEQ ID NO: 1883132
aagucaucccuggaguauc

SEQ ID NO: 2172029 - RNA, 19 nt, Artificial Sequence
  Description of Artificial Sequence: Synthetic oligonucleotide
  Antisense strand to SEQ ID NO: 2172028
gauacuccagggaugacuu

SEQ ID NO: 2172030 - RNA, 19 nt, Artificial Sequence
  Description of Artificial Sequence: Synthetic oligonucleotide
  Sense strand starting at position 2194 of SEQ ID NO: 1883132
ucaucauagcuugaggcuu

SEQ ID NO: 2172031 - RNA, 19 nt, Artificial Sequence
  Description of Artificial Sequence: Synthetic oligonucleotide
  Antisense strand to SEQ ID NO: 2172030
aagccucaagcuaugauga

SEQ ID NO: 2172032 - RNA, 19 nt, Artificial Sequence
  Description of Artificial Sequence: Synthetic oligonucleotide
  Sense strand starting at position 2318 of SEQ ID NO: 1883132
auguaaagaaaccgugauu

SEQ ID NO: 2172033 - RNA, 19 nt, Artificial Sequence
  Description of Artificial Sequence: Synthetic oligonucleotide
  Antisense strand to SEQ ID NO: 2172032
aaucacgguuucuuuacau

SEQ ID NO: 2172034 - RNA, 19 nt, Artificial Sequence
  Description of Artificial Sequence: Synthetic oligonucleotide
  Sense strand starting at position 2352 of SEQ ID NO: 1883132
gggaacaaaugccucuuau

SEQ ID NO: 2172035 - RNA, 19 nt, Artificial Sequence
  Description of Artificial Sequence: Synthetic oligonucleotide
  Antisense strand to SEQ ID NO: 2172034
auaagaggcauuuguuccc

SEQ ID NO: 2172036 - RNA, 19 nt, Artificial Sequence
  Description of Artificial Sequence: Synthetic oligonucleotide
  Sense strand starting at position 2409 of SEQ ID NO: 1883132
aucugaacccaguggcaua

SEQ ID NO: 2172037 - RNA, 19 nt, Artificial Sequence
  Description of Artificial Sequence: Synthetic oligonucleotide
  Antisense strand to SEQ ID NO: 2172036
uaugccacuggguucagau

SEQ ID NO: 2172038 - RNA, 19 nt, Artificial Sequence
  Description of Artificial Sequence: Synthetic oligonucleotide
  Sense strand starting at position 2589 of SEQ ID NO: 1883132
aagccaaaugguggguuaa

SEQ ID NO: 2172039 - RNA, 19 nt, Artificial Sequence
  Description of Artificial Sequence: Synthetic oligonucleotide
  Antisense strand to SEQ ID NO: 2172038
uuaacccaccauuuggcuu

SEQ ID NO: 2172040 - RNA, 19 nt, Artificial Sequence
  Description of Artificial Sequence: Synthetic oligonucleotide
  Sense strand starting at position 2590 of SEQ ID NO: 1883132
agccaaaugguggguuaau

SEQ ID NO: 2172041 - RNA, 19 nt, Artificial Sequence
  Description of Artificial Sequence: Synthetic oligonucleotide
  Antisense strand to SEQ ID NO: 2172040
auuaacccaccauuuggcu

SEQ ID NO: 2172042 - RNA, 19 nt, Artificial Sequence
  Description of Artificial Sequence: Synthetic oligonucleotide
  Sense strand starting at position 2619 of SEQ ID NO: 1883132
aaaugucauuuggacagau

SEQ ID NO: 2172043 - RNA, 19 nt, Artificial Sequence
  Description of Artificial Sequence: Synthetic oligonucleotide
  Antisense strand to SEQ ID NO: 2172042
aucuguccaaaugacauuu

SEQ ID NO: 2172044 - RNA, 19 nt, Artificial Sequence
  Description of Artificial Sequence: Synthetic oligonucleotide
  Sense strand starting at position 2710 of SEQ ID NO: 1883132
cuucuaggaucuuugugau

SEQ ID NO: 2172045 - RNA, 19 nt, Artificial Sequence
  Description of Artificial Sequence: Synthetic oligonucleotide
  Antisense strand to SEQ ID NO: 2172044
aucacaaagauccuagaag

SEQ ID NO: 2172046 - RNA, 19 nt, Artificial Sequence
  Description of Artificial Sequence: Synthetic oligonucleotide
  Sense strand starting at position 2893 of SEQ ID NO: 1883132
guacacuuuguauaucaaa

SEQ ID NO: 2172047 - RNA, 19 nt, Artificial Sequence
  Description of Artificial Sequence: Synthetic oligonucleotide
  Antisense strand to SEQ ID NO: 2172046
uuugauauacaaaguguac

SEQ ID NO: 2172048 - RNA, 19 nt, Artificial Sequence
  Description of Artificial Sequence: Synthetic oligonucleotide
  Sense strand starting at position 3076 of SEQ ID NO: 1883132
agacaucaguuugcccaua

SEQ ID NO: 2172049 - RNA, 19 nt, Artificial Sequence
  Description of Artificial Sequence: Synthetic oligonucleotide
  Antisense strand to SEQ ID NO: 2172048
uaugggcaaacugaugucu

SEQ ID NO: 2172050 - RNA, 19 nt, Artificial Sequence
  Description of Artificial Sequence: Synthetic oligonucleotide
  Sense strand starting at position 3078 of SEQ ID NO: 1883132
acaucaguuugcccauaag

SEQ ID NO: 2172051 - RNA, 19 nt, Artificial Sequence
  Description of Artificial Sequence: Synthetic oligonucleotide
  Antisense strand to SEQ ID NO: 2172050
cuuaugggcaaacugaugu

SEQ ID NO: 2172052 - RNA, 19 nt, Artificial Sequence
  Description of Artificial Sequence: Synthetic oligonucleotide
  Sense strand starting at position 3081 of SEQ ID NO: 1883132
ucaguuugcccauaaguga

SEQ ID NO: 2172053 - RNA, 19 nt, Artificial Sequence
  Description of Artificial Sequence: Synthetic oligonucleotide
  Antisense strand to SEQ ID NO: 2172052
ucacuuaugggcaaacuga

SEQ ID NO: 2172054 - RNA, 19 nt, Artificial Sequence
  Description of Artificial Sequence: Synthetic oligonucleotide
  Sense strand starting at position 3109 of SEQ ID NO: 1883132
uugaauaugucuuuagaag

SEQ ID NO: 2172055 - RNA, 19 nt, Artificial Sequence
  Description of Artificial Sequence: Synthetic oligonucleotide
  Antisense strand to SEQ ID NO: 2172054
cuucuaaagacauauucaa

SEQ ID NO: 2172056 - RNA, 19 nt, Artificial Sequence
  Description of Artificial Sequence: Synthetic oligonucleotide
  Sense strand starting at position 3110 of SEQ ID NO: 1883132
ugaauaugucuuuagaagu

SEQ ID NO: 2172057 - RNA, 19 nt, Artificial Sequence
  Description of Artificial Sequence: Synthetic oligonucleotide
  Antisense strand to SEQ ID NO: 2172056
acuucuaaagacauauuca

SEQ ID NO: 2172058 - RNA, 19 nt, Artificial Sequence
  Description of Artificial Sequence: Synthetic oligonucleotide
  Sense strand starting at position 3127 of SEQ ID NO: 1883132
guagaauucuggguuaaag

SEQ ID NO: 2172059 - RNA, 19 nt, Artificial Sequence
  Description of Artificial Sequence: Synthetic oligonucleotide
  Antisense strand to SEQ ID NO: 2172058
cuuuaacccagaauucuac

SEQ ID NO: 2172060 - RNA, 19 nt, Artificial Sequence
  Description of Artificial Sequence: Synthetic oligonucleotide
  Sense strand starting at position 3542 of SEQ ID NO: 1883132
augccuuugguccaggaca

SEQ ID NO: 2172061 - RNA, 19 nt, Artificial Sequence
  Description of Artificial Sequence: Synthetic oligonucleotide
  Antisense strand to SEQ ID NO: 2172060
uguccuggaccaaaggcau

SEQ ID NO: 2172062 - RNA, 19 nt, Artificial Sequence
  Description of Artificial Sequence: Synthetic oligonucleotide
  Sense strand starting at position 3705 of SEQ ID NO: 1883132
agcugaucugcuuacaacu

SEQ ID NO: 2172063 - RNA, 19 nt, Artificial Sequence
  Description of Artificial Sequence: Synthetic oligonucleotide
  Antisense strand to SEQ ID NO: 2172062
aguuguaagcagaucagcu

SEQ ID NO: 2172064 - RNA, 19 nt, Artificial Sequence
  Description of Artificial Sequence: Synthetic oligonucleotide
  Sense strand starting at position 3763 of SEQ ID NO: 1883132
gcaguugugcagcauuuga

SEQ ID NO: 2172065 - RNA, 19 nt, Artificial Sequence
  Description of Artificial Sequence: Synthetic oligonucleotide
  Antisense strand to SEQ ID NO: 2172064
ucaaaugcugcacaacugc

SEQ ID NO: 2172066 - RNA, 19 nt, Artificial Sequence
  Description of Artificial Sequence: Synthetic oligonucleotide
  Sense strand starting at position 1426 of SEQ ID NO: 1883133
uuccguuugucucuucgaa

SEQ ID NO: 2172067 - RNA, 19 nt, Artificial Sequence
  Description of Artificial Sequence: Synthetic oligonucleotide
  Antisense strand to SEQ ID NO: 2172066
uucgaagagacaaacggaa

SEQ ID NO: 2172068 - RNA, 19 nt, Artificial Sequence
  Description of Artificial Sequence: Synthetic oligonucleotide
  Sense strand starting at position 1427 of SEQ ID NO: 1883133
uccguuugucucuucgaau

SEQ ID NO: 2172069 - RNA, 19 nt, Artificial Sequence
  Description of Artificial Sequence: Synthetic oligonucleotide
  Antisense strand to SEQ ID NO: 2172068
auucgaagagacaaacgga

SEQ ID NO: 2172070 - RNA, 19 nt, Artificial Sequence
  Description of Artificial Sequence: Synthetic oligonucleotide
  Sense strand starting at position 1428 of SEQ ID NO: 1883133
ccguuugucucuucgaaua

SEQ ID NO: 2172071 - RNA, 19 nt, Artificial Sequence
  Description of Artificial Sequence: Synthetic oligonucleotide
  Antisense strand to SEQ ID NO: 2172070
uauucgaagagacaaacgg

SEQ ID NO: 2172072 - RNA, 19 nt, Artificial Sequence
  Description of Artificial Sequence: Synthetic oligonucleotide
  Sense strand starting at position 1430 of SEQ ID NO: 1883133
guuugucucuucgaauaaa

SEQ ID NO: 2172073 - RNA, 19 nt, Artificial Sequence
  Description of Artificial Sequence: Synthetic oligonucleotide
  Antisense strand to SEQ ID NO: 2172072
uuuauucgaagagacaaac

SEQ ID NO: 2172074 - RNA, 19 nt, Artificial Sequence
  Description of Artificial Sequence: Synthetic oligonucleotide
  Sense strand starting at position 3629 of SEQ ID NO: 1883133
ucagcaaugccacaaggau

SEQ ID NO: 2172075 - RNA, 19 nt, Artificial Sequence
  Description of Artificial Sequence: Synthetic oligonucleotide
  Antisense strand to SEQ ID NO: 2172074
auccuuguggcauugcuga

SEQ ID NO: 2172076 - RNA, 19 nt, Artificial Sequence
  Description of Artificial Sequence: Synthetic oligonucleotide
  Sense strand starting at position 166 of SEQ ID NO: 1883134
aguuaugcaguuggauaau

SEQ ID NO: 2172077 - RNA, 19 nt, Artificial Sequence
  Description of Artificial Sequence: Synthetic oligonucleotide
  Antisense strand to SEQ ID NO: 2172076
auuauccaacugcauaacu

SEQ ID NO: 2172078 - RNA, 19 nt, Artificial Sequence
  Description of Artificial Sequence: Synthetic oligonucleotide
  Sense strand starting at position 471 of SEQ ID NO: 1883134
cugcuaauaggucgauuaa

SEQ ID NO: 2172079 - RNA, 19 nt, Artificial Sequence
  Description of Artificial Sequence: Synthetic oligonucleotide
  Antisense strand to SEQ ID NO: 2172078
uuaaucgaccuauuagcag

SEQ ID NO: 2172080 - RNA, 19 nt, Artificial Sequence
  Description of Artificial Sequence: Synthetic oligonucleotide
  Sense strand starting at position 472 of SEQ ID NO: 1883134
ugcuaauaggucgauuaaa

SEQ ID NO: 2172081 - RNA, 19 nt, Artificial Sequence
  Description of Artificial Sequence: Synthetic oligonucleotide
  Antisense strand to SEQ ID NO: 2172080
uuuaaucgaccuauuagca

SEQ ID NO: 2172082 - RNA, 19 nt, Artificial Sequence
  Description of Artificial Sequence: Synthetic oligonucleotide
  Sense strand starting at position 516 of SEQ ID NO: 1883134
ucuagcaauguggagauua

SEQ ID NO: 2172083 - RNA, 19 nt, Artificial Sequence
  Description of Artificial Sequence: Synthetic oligonucleotide
  Antisense strand to SEQ ID NO: 2172082
uaaucuccacauugcuaga

SEQ ID NO: 2172084 - RNA, 19 nt, Artificial Sequence
  Description of Artificial Sequence: Synthetic oligonucleotide
  Sense strand starting at position 518 of SEQ ID NO: 1883134
uagcaauguggagauuauu

SEQ ID NO: 2172085 - RNA, 19 nt, Artificial Sequence
  Description of Artificial Sequence: Synthetic oligonucleotide
  Antisense strand to SEQ ID NO: 2172084
aauaaucuccacauugcua

SEQ ID NO: 2172086 - RNA, 19 nt, Artificial Sequence
  Description of Artificial Sequence: Synthetic oligonucleotide
  Sense strand starting at position 616 of SEQ ID NO: 1883134
augagagcuugauugggau

SEQ ID NO: 2172087 - RNA, 19 nt, Artificial Sequence
  Description of Artificial Sequence: Synthetic oligonucleotide
  Antisense strand to SEQ ID NO: 2172086
aucccaaucaagcucucau

SEQ ID NO: 2172088 - RNA, 19 nt, Artificial Sequence
  Description of Artificial Sequence: Synthetic oligonucleotide
  Sense strand starting at position 618 of SEQ ID NO: 1883134
gagagcuugauugggauau

SEQ ID NO: 2172089 - RNA, 19 nt, Artificial Sequence
  Description of Artificial Sequence: Synthetic oligonucleotide
  Antisense strand to SEQ ID NO: 2172088
auaucccaaucaagcucuc

SEQ ID NO: 2172090 - RNA, 19 nt, Artificial Sequence
  Description of Artificial Sequence: Synthetic oligonucleotide
  Sense strand starting at position 681 of SEQ ID NO: 1883134
ggacaacuauucuaagaug

SEQ ID NO: 2172091 - RNA, 19 nt, Artificial Sequence
  Description of Artificial Sequence: Synthetic oligonucleotide
  Antisense strand to SEQ ID NO: 2172090
caucuuagaauaguugucc

SEQ ID NO: 2172092 - RNA, 19 nt, Artificial Sequence
  Description of Artificial Sequence: Synthetic oligonucleotide
  Sense strand starting at position 796 of SEQ ID NO: 1883134
uuguaugcugaugguaaua

SEQ ID NO: 2172093 - RNA, 19 nt, Artificial Sequence
  Description of Artificial Sequence: Synthetic oligonucleotide
  Antisense strand to SEQ ID NO: 2172092
uauuaccaucagcauacaa

SEQ ID NO: 2172094 - RNA, 19 nt, Artificial Sequence
  Description of Artificial Sequence: Synthetic oligonucleotide
  Sense strand starting at position 801 of SEQ ID NO: 1883134
ugcugaugguaauaauuua

SEQ ID NO: 2172095 - RNA, 19 nt, Artificial Sequence
  Description of Artificial Sequence: Synthetic oligonucleotide
  Antisense strand to SEQ ID NO: 2172094
uaaauuauuaccaucagca

SEQ ID NO: 2172096 - RNA, 19 nt, Artificial Sequence
  Description of Artificial Sequence: Synthetic oligonucleotide
  Sense strand starting at position 1113 of SEQ ID NO: 1883134
cccuuuaucuucuuuaggu

SEQ ID NO: 2172097 - RNA, 19 nt, Artificial Sequence
  Description of Artificial Sequence: Synthetic oligonucleotide
  Antisense strand to SEQ ID NO: 2172096
accuaaagaagauaaaggg

SEQ ID NO: 2172098 - RNA, 19 nt, Artificial Sequence
  Description of Artificial Sequence: Synthetic oligonucleotide
  Sense strand starting at position 1114 of SEQ ID NO: 1883134
ccuuuaucuucuuuagguu

SEQ ID NO: 2172099 - RNA, 19 nt, Artificial Sequence
  Description of Artificial Sequence: Synthetic oligonucleotide
  Antisense strand to SEQ ID NO: 2172098
aaccuaaagaagauaaagg

SEQ ID NO: 2172100 - RNA, 19 nt, Artificial Sequence
  Description of Artificial Sequence: Synthetic oligonucleotide
  Sense strand starting at position 1170 of SEQ ID NO: 1883134
gcaugcuuagcccaguaaa

SEQ ID NO: 2172101 - RNA, 19 nt, Artificial Sequence
  Description of Artificial Sequence: Synthetic oligonucleotide
  Antisense strand to SEQ ID NO: 2172100
uuuacugggcuaagcaugc

SEQ ID NO: 2172102 - RNA, 19 nt, Artificial Sequence
  Description of Artificial Sequence: Synthetic oligonucleotide
  Sense strand starting at position 1219 of SEQ ID NO: 1883134
uacccauuucugugugguu

SEQ ID NO: 2172103 - RNA, 19 nt, Artificial Sequence
  Description of Artificial Sequence: Synthetic oligonucleotide
  Antisense strand to SEQ ID NO: 2172102
aaccacacagaaaugggua

SEQ ID NO: 2172104 - RNA, 19 nt, Artificial Sequence
  Description of Artificial Sequence: Synthetic oligonucleotide
  Sense strand starting at position 1220 of SEQ ID NO: 1883134
acccauuucugugugguua

SEQ ID NO: 2172105 - RNA, 19 nt, Artificial Sequence
  Description of Artificial Sequence: Synthetic oligonucleotide
  Antisense strand to SEQ ID NO: 2172104
uaaccacacagaaaugggu

SEQ ID NO: 2172106 - RNA, 19 nt, Artificial Sequence
  Description of Artificial Sequence: Synthetic oligonucleotide
  Sense strand starting at position 1241 of SEQ ID NO: 1883134
uguaauauaccuugagcag

SEQ ID NO: 2172107 - RNA, 19 nt, Artificial Sequence
  Description of Artificial Sequence: Synthetic oligonucleotide
  Antisense strand to SEQ ID NO: 2172106
cugcucaagguauauuaca

SEQ ID NO: 2172108 - RNA, 19 nt, Artificial Sequence
  Description of Artificial Sequence: Synthetic oligonucleotide
  Sense strand starting at position 1514 of SEQ ID NO: 1883134
uugaccuauuaagugaaua

SEQ ID NO: 2172109 - RNA, 19 nt, Artificial Sequence
  Description of Artificial Sequence: Synthetic oligonucleotide
  Antisense strand to SEQ ID NO: 2172108
uauucacuuaauaggucaa

SEQ ID NO: 2172110 - RNA, 19 nt, Artificial Sequence
  Description of Artificial Sequence: Synthetic oligonucleotide
  Sense strand starting at position 1566 of SEQ ID NO: 1883134
agaucuaacugccugcaua

SEQ ID NO: 2172111 - RNA, 19 nt, Artificial Sequence
  Description of Artificial Sequence: Synthetic oligonucleotide
  Antisense strand to SEQ ID NO: 2172110
uaugcaggcaguuagaucu

SEQ ID NO: 2172112 - RNA, 19 nt, Artificial Sequence
  Description of Artificial Sequence: Synthetic oligonucleotide
  Sense strand starting at position 1777 of SEQ ID NO: 1883134
aggacauacugcuaaauga

SEQ ID NO: 2172113 - RNA, 19 nt, Artificial Sequence
  Description of Artificial Sequence: Synthetic oligonucleotide
  Antisense strand to SEQ ID NO: 2172112
ucauuuagcaguauguccu

SEQ ID NO: 2172114 - RNA, 19 nt, Artificial Sequence
  Description of Artificial Sequence: Synthetic oligonucleotide
  Sense strand starting at position 1864 of SEQ ID NO: 1883134
gacugauucuagguucuug

SEQ ID NO: 2172115 - RNA, 19 nt, Artificial Sequence
  Description of Artificial Sequence: Synthetic oligonucleotide
  Antisense strand to SEQ ID NO: 2172114
caagaaccuagaaucaguc

SEQ ID NO: 2172116 - RNA, 19 nt, Artificial Sequence
  Description of Artificial Sequence: Synthetic oligonucleotide
  Sense strand starting at position 1876 of SEQ ID NO: 1883134
guucuugucuggccaggga

SEQ ID NO: 2172117 - RNA, 19 nt, Artificial Sequence
  Description of Artificial Sequence: Synthetic oligonucleotide
  Antisense strand to SEQ ID NO: 2172116
ucccuggccagacaagaac

SEQ ID NO: 2172118 - RNA, 19 nt, Artificial Sequence
  Description of Artificial Sequence: Synthetic oligonucleotide
  Sense strand starting at position 1899 of SEQ ID NO: 1883134
gcauucucaucugcagaac

SEQ ID NO: 2172119 - RNA, 19 nt, Artificial Sequence
  Description of Artificial Sequence: Synthetic oligonucleotide
  Antisense strand to SEQ ID NO: 2172118
guucugcagaugagaaugc

SEQ ID NO: 2172120 - RNA, 19 nt, Artificial Sequence
  Description of Artificial Sequence: Synthetic oligonucleotide
  Sense strand starting at position 2131 of SEQ ID NO: 1883134
cuaaaucucccacgggaaa

SEQ ID NO: 2172121 - RNA, 19 nt, Artificial Sequence
  Description of Artificial Sequence: Synthetic oligonucleotide
  Antisense strand to SEQ ID NO: 2172120
uuucccgugggagauuuag

SEQ ID NO: 2172122 - RNA, 19 nt, Artificial Sequence
  Description of Artificial Sequence: Synthetic oligonucleotide
  Sense strand starting at position 2167 of SEQ ID NO: 1883134
guacauaaagguggugaua

SEQ ID NO: 2172123 - RNA, 19 nt, Artificial Sequence
  Description of Artificial Sequence: Synthetic oligonucleotide
  Antisense strand to SEQ ID NO: 2172122
uaucaccaccuuuauguac

SEQ ID NO: 2172124 - RNA, 19 nt, Artificial Sequence
  Description of Artificial Sequence: Synthetic oligonucleotide
  Sense strand starting at position 2273 of SEQ ID NO: 1883134
ugacaugcauaugcaauaa

SEQ ID NO: 2172125 - RNA, 19 nt, Artificial Sequence
  Description of Artificial Sequence: Synthetic oligonucleotide
  Antisense strand to SEQ ID NO: 2172124
uuauugcauaugcauguca

SEQ ID NO: 2172126 - RNA, 19 nt, Artificial Sequence
  Description of Artificial Sequence: Synthetic oligonucleotide
  Sense strand starting at position 2383 of SEQ ID NO: 1883134
ggauauaguuuggcaaguu

SEQ ID NO: 2172127 - RNA, 19 nt, Artificial Sequence
  Description of Artificial Sequence: Synthetic oligonucleotide
  Antisense strand to SEQ ID NO: 2172126
aacuugccaaacuauaucc

SEQ ID NO: 2172128 - RNA, 19 nt, Artificial Sequence
  Description of Artificial Sequence: Synthetic oligonucleotide
  Sense strand starting at position 2410 of SEQ ID NO: 1883134
aguauuaucuuguuaccac

SEQ ID NO: 2172129 - RNA, 19 nt, Artificial Sequence
  Description of Artificial Sequence: Synthetic oligonucleotide
  Antisense strand to SEQ ID NO: 2172128
gugguaacaagauaauacu

SEQ ID NO: 2172130 - RNA, 19 nt, Artificial Sequence
  Description of Artificial Sequence: Synthetic oligonucleotide
  Sense strand starting at position 2582 of SEQ ID NO: 1883134
uggagccuaucucuguaau

SEQ ID NO: 2172131 - RNA, 19 nt, Artificial Sequence
  Description of Artificial Sequence: Synthetic oligonucleotide
  Antisense strand to SEQ ID NO: 2172130
auuacagagauaggcucca

SEQ ID NO: 2172132 - RNA, 19 nt, Artificial Sequence
  Description of Artificial Sequence: Synthetic oligonucleotide
  Sense strand starting at position 2583 of SEQ ID NO: 1883134
ggagccuaucucuguaauu

SEQ ID NO: 2172133 - RNA, 19 nt, Artificial Sequence
  Description of Artificial Sequence: Synthetic oligonucleotide
  Antisense strand to SEQ ID NO: 2172132
aauuacagagauaggcucc

SEQ ID NO: 2172134 - RNA, 19 nt, Artificial Sequence
  Description of Artificial Sequence: Synthetic oligonucleotide
  Sense strand starting at position 2584 of SEQ ID NO: 1883134
gagccuaucucuguaauug

SEQ ID NO: 2172135 - RNA, 19 nt, Artificial Sequence
  Description of Artificial Sequence: Synthetic oligonucleotide
  Antisense strand to SEQ ID NO: 2172134
caauuacagagauaggcuc

SEQ ID NO: 2172136 - RNA, 19 nt, Artificial Sequence
  Description of Artificial Sequence: Synthetic oligonucleotide
  Sense strand starting at position 2585 of SEQ ID NO: 1883134
agccuaucucuguaauuga

SEQ ID NO: 2172137 - RNA, 19 nt, Artificial Sequence
  Description of Artificial Sequence: Synthetic oligonucleotide
  Antisense strand to SEQ ID NO: 2172136
ucaauuacagagauaggcu

SEQ ID NO: 2172138 - RNA, 19 nt, Artificial Sequence
  Description of Artificial Sequence: Synthetic oligonucleotide
  Sense strand starting at position 3025 of SEQ ID NO: 1883134
ccagcuauuugcuuuggga

SEQ ID NO: 2172139 - RNA, 19 nt, Artificial Sequence
  Description of Artificial Sequence: Synthetic oligonucleotide
  Antisense strand to SEQ ID NO: 2172138
ucccaaagcaaauagcugg

SEQ ID NO: 2172140 - RNA, 19 nt, Artificial Sequence
  Description of Artificial Sequence: Synthetic oligonucleotide
  Sense strand starting at position 3049 of SEQ ID NO: 1883134
aaguuagaguuacaaugaa

SEQ ID NO: 2172141 - RNA, 19 nt, Artificial Sequence
  Description of Artificial Sequence: Synthetic oligonucleotide
  Antisense strand to SEQ ID NO: 2172140
uucauuguaacucuaacuu

SEQ ID NO: 2172142 - RNA, 19 nt, Artificial Sequence
  Description of Artificial Sequence: Synthetic oligonucleotide
  Sense strand starting at position 3152 of SEQ ID NO: 1883134
cagugaucuagcgaggaag

SEQ ID NO: 2172143 - RNA, 19 nt, Artificial Sequence
  Description of Artificial Sequence: Synthetic oligonucleotide
  Antisense strand to SEQ ID NO: 2172142
cuuccucgcuagaucacug

SEQ ID NO: 2172144 - RNA, 19 nt, Artificial Sequence
  Description of Artificial Sequence: Synthetic oligonucleotide
  Sense strand starting at position 3287 of SEQ ID NO: 1883134
ugcagugucuaccuaagga

SEQ ID NO: 2172145 - RNA, 19 nt, Artificial Sequence
  Description of Artificial Sequence: Synthetic oligonucleotide
  Antisense strand to SEQ ID NO: 2172144
uccuuagguagacacugca

SEQ ID NO: 2172146 - RNA, 19 nt, Artificial Sequence
  Description of Artificial Sequence: Synthetic oligonucleotide
  Sense strand starting at position 3638 of SEQ ID NO: 1883134
ucagcaacgccacaagaau

SEQ ID NO: 2172147 - RNA, 19 nt, Artificial Sequence
  Description of Artificial Sequence: Synthetic oligonucleotide
  Antisense strand to SEQ ID NO: 2172146
auucuuguggcguugcuga

SEQ ID NO: 2172148 - RNA, 19 nt, Artificial Sequence
  Description of Artificial Sequence: Synthetic oligonucleotide
  Sense strand starting at position 3687 of SEQ ID NO: 1883134
augugcuacugaguuaaua

SEQ ID NO: 2172149 - RNA, 19 nt, Artificial Sequence
  Description of Artificial Sequence: Synthetic oligonucleotide
  Antisense strand to SEQ ID NO: 2172148
uauuaacucaguagcacau

SEQ ID NO: 2172150 - RNA, 19 nt, Artificial Sequence
  Description of Artificial Sequence: Synthetic oligonucleotide
  Sense strand starting at position 3921 of SEQ ID NO: 1883134
ugucaaaucuuguugcuga

SEQ ID NO: 2172151 - RNA, 19 nt, Artificial Sequence
  Description of Artificial Sequence: Synthetic oligonucleotide
  Antisense strand to SEQ ID NO: 2172150
ucagcaacaagauuugaca

SEQ ID NO: 2172152 - RNA, 19 nt, Artificial Sequence
  Description of Artificial Sequence: Synthetic oligonucleotide
  Sense strand starting at position 3926 of SEQ ID NO: 1883134
aaucuuguugcugagugau

SEQ ID NO: 2172153 - RNA, 19 nt, Artificial Sequence
  Description of Artificial Sequence: Synthetic oligonucleotide
  Antisense strand to SEQ ID NO: 2172152
aucacucagcaacaagauu

SEQ ID NO: 2172154 - RNA, 19 nt, Artificial Sequence
  Description of Artificial Sequence: Synthetic oligonucleotide
  Sense strand starting at position 3928 of SEQ ID NO: 1883134
ucuuguugcugagugauuu

SEQ ID NO: 2172155 - RNA, 19 nt, Artificial Sequence
  Description of Artificial Sequence: Synthetic oligonucleotide
  Antisense strand to SEQ ID NO: 2172154
aaaucacucagcaacaaga

SEQ ID NO: 2172156 - RNA, 19 nt, Artificial Sequence
  Description of Artificial Sequence: Synthetic oligonucleotide
  Sense strand starting at position 166 of SEQ ID NO: 1883135
aguuaugcaguuggauaau

SEQ ID NO: 2172157 - RNA, 19 nt, Artificial Sequence
  Description of Artificial Sequence: Synthetic oligonucleotide
  Antisense strand to SEQ ID NO: 2172156
auuauccaacugcauaacu

SEQ ID NO: 2172158 - RNA, 19 nt, Artificial Sequence
  Description of Artificial Sequence: Synthetic oligonucleotide
  Sense strand starting at position 471 of SEQ ID NO: 1883135
cugcuaauaggucgauuaa

SEQ ID NO: 2172159 - RNA, 19 nt, Artificial Sequence
  Description of Artificial Sequence: Synthetic oligonucleotide
  Antisense strand to SEQ ID NO: 2172158
uuaaucgaccuauuagcag

SEQ ID NO: 2172160 - RNA, 19 nt, Artificial Sequence
  Description of Artificial Sequence: Synthetic oligonucleotide
  Sense strand starting at position 472 of SEQ ID NO: 1883135
ugcuaauaggucgauuaaa

SEQ ID NO: 2172161 - RNA, 19 nt, Artificial Sequence
  Description of Artificial Sequence: Synthetic oligonucleotide
  Antisense strand to SEQ ID NO: 2172160
uuuaaucgaccuauuagca

SEQ ID NO: 2172162 - RNA, 19 nt, Artificial Sequence
  Description of Artificial Sequence: Synthetic oligonucleotide
  Sense strand starting at position 516 of SEQ ID NO: 1883135
ucuagcaauguggagauua

SEQ ID NO: 2172163 - RNA, 19 nt, Artificial Sequence
  Description of Artificial Sequence: Synthetic oligonucleotide
  Antisense strand to SEQ ID NO: 2172162
uaaucuccacauugcuaga

SEQ ID NO: 2172164 - RNA, 19 nt, Artificial Sequence
  Description of Artificial Sequence: Synthetic oligonucleotide
  Sense strand starting at position 518 of SEQ ID NO: 1883135
uagcaauguggagauuauu

SEQ ID NO: 2172165 - RNA, 19 nt, Artificial Sequence
  Description of Artificial Sequence: Synthetic oligonucleotide
  Antisense strand to SEQ ID NO: 2172164
aauaaucuccacauugcua

SEQ ID NO: 2172166 - RNA, 19 nt, Artificial Sequence
  Description of Artificial Sequence: Synthetic oligonucleotide
  Sense strand starting at position 616 of SEQ ID NO: 1883135
augagagcuugauugggau

SEQ ID NO: 2172167 - RNA, 19 nt, Artificial Sequence
  Description of Artificial Sequence: Synthetic oligonucleotide
  Antisense strand to SEQ ID NO: 2172166
aucccaaucaagcucucau

SEQ ID NO: 2172168 - RNA, 19 nt, Artificial Sequence
  Description of Artificial Sequence: Synthetic oligonucleotide
  Sense strand starting at position 618 of SEQ ID NO: 1883135
gagagcuugauugggauau

SEQ ID NO: 2172169 - RNA, 19 nt, Artificial Sequence
  Description of Artificial Sequence: Synthetic oligonucleotide
  Antisense strand to SEQ ID NO: 2172168
auaucccaaucaagcucuc

SEQ ID NO: 2172170 - RNA, 19 nt, Artificial Sequence
  Description of Artificial Sequence: Synthetic oligonucleotide
  Sense strand starting at position 681 of SEQ ID NO: 1883135
ggacaacuauucuaagaug

SEQ ID NO: 2172171 - RNA, 19 nt, Artificial Sequence
  Description of Artificial Sequence: Synthetic oligonucleotide
  Antisense strand to SEQ ID NO: 2172170
caucuuagaauaguugucc

SEQ ID NO: 2172172 - RNA, 19 nt, Artificial Sequence
  Description of Artificial Sequence: Synthetic oligonucleotide
  Sense strand starting at position 796 of SEQ ID NO: 1883135
uuguaugcugaugguaaua

SEQ ID NO: 2172173 - RNA, 19 nt, Artificial Sequence
  Description of Artificial Sequence: Synthetic oligonucleotide
  Antisense strand to SEQ ID NO: 2172172
uauuaccaucagcauacaa

SEQ ID NO: 2172174 - RNA, 19 nt, Artificial Sequence
  Description of Artificial Sequence: Synthetic oligonucleotide
  Sense strand starting at position 801 of SEQ ID NO: 1883135
ugcugaugguaauaauuua

SEQ ID NO: 2172175 - RNA, 19 nt, Artificial Sequence
  Description of Artificial Sequence: Synthetic oligonucleotide
  Antisense strand to SEQ ID NO: 2172174
uaaauuauuaccaucagca

SEQ ID NO: 2172176 - RNA, 19 nt, Artificial Sequence
  Description of Artificial Sequence: Synthetic oligonucleotide
  Sense strand starting at position 1113 of SEQ ID NO: 1883135
cccuuuaucuucuuuaggu

SEQ ID NO: 2172177 - RNA, 19 nt, Artificial Sequence
  Description of Artificial Sequence: Synthetic oligonucleotide
  Antisense strand to SEQ ID NO: 2172176
accuaaagaagauaaaggg

SEQ ID NO: 2172178 - RNA, 19 nt, Artificial Sequence
  Description of Artificial Sequence: Synthetic oligonucleotide
  Sense strand starting at position 1114 of SEQ ID NO: 1883135
ccuuuaucuucuuuagguu

SEQ ID NO: 2172179 - RNA, 19 nt, Artificial Sequence
  Description of Artificial Sequence: Synthetic oligonucleotide
  Antisense strand to SEQ ID NO: 2172178
aaccuaaagaagauaaagg

SEQ ID NO: 2172180 - RNA, 19 nt, Artificial Sequence
  Description of Artificial Sequence: Synthetic oligonucleotide
  Sense strand starting at position 1170 of SEQ ID NO: 1883135
gcaugcuuagcccaguaaa

SEQ ID NO: 2172181 - RNA, 19 nt, Artificial Sequence
  Description of Artificial Sequence: Synthetic oligonucleotide
  Antisense strand to SEQ ID NO: 2172180
uuuacugggcuaagcaugc

SEQ ID NO: 2172182 - RNA, 19 nt, Artificial Sequence
  Description of Artificial Sequence: Synthetic oligonucleotide
  Sense strand starting at position 1219 of SEQ ID NO: 1883135
uacccauuucugugugguu

SEQ ID NO: 2172183 - RNA, 19 nt, Artificial Sequence
  Description of Artificial Sequence: Synthetic oligonucleotide
  Antisense strand to SEQ ID NO: 2172182
aaccacacagaaaugggua

SEQ ID NO: 2172184 - RNA, 19 nt, Artificial Sequence
  Description of Artificial Sequence: Synthetic oligonucleotide
  Sense strand starting at position 1220 of SEQ ID NO: 1883135
acccauuucugugugguua

SEQ ID NO: 2172185 - RNA, 19 nt, Artificial Sequence
  Description of Artificial Sequence: Synthetic oligonucleotide
  Antisense strand to SEQ ID NO: 2172184
uaaccacacagaaaugggu

SEQ ID NO: 2172186 - RNA, 19 nt, Artificial Sequence
  Description of Artificial Sequence: Synthetic oligonucleotide
  Sense strand starting at position 1241 of SEQ ID NO: 1883135
uguaauauaccuugagcag

SEQ ID NO: 2172187 - RNA, 19 nt, Artificial Sequence
  Description of Artificial Sequence: Synthetic oligonucleotide
  Antisense strand to SEQ ID NO: 2172186
cugcucaagguauauuaca

SEQ ID NO: 2172188 - RNA, 19 nt, Artificial Sequence
  Description of Artificial Sequence: Synthetic oligonucleotide
  Sense strand starting at position 1514 of SEQ ID NO: 1883135
uugaccuauuaagugaaua

SEQ ID NO: 2172189 - RNA, 19 nt, Artificial Sequence
  Description of Artificial Sequence: Synthetic oligonucleotide
  Antisense strand to SEQ ID NO: 2172188
uauucacuuaauaggucaa

SEQ ID NO: 2172190 - RNA, 19 nt, Artificial Sequence
  Description of Artificial Sequence: Synthetic oligonucleotide
  Sense strand starting at position 1566 of SEQ ID NO: 1883135
agaucuaacugccugcaua

SEQ ID NO: 2172191 - RNA, 19 nt, Artificial Sequence
  Description of Artificial Sequence: Synthetic oligonucleotide
  Antisense strand to SEQ ID NO: 2172190
uaugcaggcaguuagaucu

SEQ ID NO: 2172192 - RNA, 19 nt, Artificial Sequence
  Description of Artificial Sequence: Synthetic oligonucleotide
  Sense strand starting at position 1777 of SEQ ID NO: 1883135
aggacauacugcuaaauga

SEQ ID NO: 2172193 - RNA, 19 nt, Artificial Sequence
  Description of Artificial Sequence: Synthetic oligonucleotide
  Antisense strand to SEQ ID NO: 2172192
ucauuuagcaguauguccu

SEQ ID NO: 2172194 - RNA, 19 nt, Artificial Sequence
  Description of Artificial Sequence: Synthetic oligonucleotide
  Sense strand starting at position 1864 of SEQ ID NO: 1883135
gacugauucuagguucuug

SEQ ID NO: 2172195 - RNA, 19 nt, Artificial Sequence
  Description of Artificial Sequence: Synthetic oligonucleotide
  Antisense strand to SEQ ID NO: 2172194
caagaaccuagaaucaguc

SEQ ID NO: 2172196 - RNA, 19 nt, Artificial Sequence
  Description of Artificial Sequence: Synthetic oligonucleotide
  Sense strand starting at position 1876 of SEQ ID NO: 1883135
guucuugucuggccaggga

SEQ ID NO: 2172197 - RNA, 19 nt, Artificial Sequence
  Description of Artificial Sequence: Synthetic oligonucleotide
  Antisense strand to SEQ ID NO: 2172196
ucccuggccagacaagaac

SEQ ID NO: 2172198 - RNA, 19 nt, Artificial Sequence
  Description of Artificial Sequence: Synthetic oligonucleotide
  Sense strand starting at position 1899 of SEQ ID NO: 1883135
gcauucucaucugcagaac

SEQ ID NO: 2172199 - RNA, 19 nt, Artificial Sequence
  Description of Artificial Sequence: Synthetic oligonucleotide
  Antisense strand to SEQ ID NO: 2172198
guucugcagaugagaaugc

SEQ ID NO: 2172200 - RNA, 19 nt, Artificial Sequence
  Description of Artificial Sequence: Synthetic oligonucleotide
  Sense strand starting at position 2131 of SEQ ID NO: 1883135
cuaaaucucccacgggaaa

SEQ ID NO: 2172201 - RNA, 19 nt, Artificial Sequence
  Description of Artificial Sequence: Synthetic oligonucleotide
  Antisense strand to SEQ ID NO: 2172200
uuucccgugggagauuuag

SEQ ID NO: 2172202 - RNA, 19 nt, Artificial Sequence
  Description of Artificial Sequence: Synthetic oligonucleotide
  Sense strand starting at position 2167 of SEQ ID NO: 1883135
guacauaaagguggugaua

SEQ ID NO: 2172203 - RNA, 19 nt, Artificial Sequence
  Description of Artificial Sequence: Synthetic oligonucleotide
  Antisense strand to SEQ ID NO: 2172202
uaucaccaccuuuauguac

SEQ ID NO: 2172204 - RNA, 19 nt, Artificial Sequence
  Description of Artificial Sequence: Synthetic oligonucleotide
  Sense strand starting at position 2273 of SEQ ID NO: 1883135
ugacaugcauaugcaauaa

SEQ ID NO: 2172205 - RNA, 19 nt, Artificial Sequence
  Description of Artificial Sequence: Synthetic oligonucleotide
  Antisense strand to SEQ ID NO: 2172204
uuauugcauaugcauguca

SEQ ID NO: 2172206 - RNA, 19 nt, Artificial Sequence
  Description of Artificial Sequence: Synthetic oligonucleotide
  Sense strand starting at position 2383 of SEQ ID NO: 1883135
ggauauaguuuggcaaguu

SEQ ID NO: 2172207 - RNA, 19 nt, Artificial Sequence
  Description of Artificial Sequence: Synthetic oligonucleotide
  Antisense strand to SEQ ID NO: 2172206
aacuugccaaacuauaucc

SEQ ID NO: 2172208 - RNA, 19 nt, Artificial Sequence
  Description of Artificial Sequence: Synthetic oligonucleotide
  Sense strand starting at position 2410 of SEQ ID NO: 1883135
aguauuaucuuguuaccac

SEQ ID NO: 2172209 - RNA, 19 nt, Artificial Sequence
  Description of Artificial Sequence: Synthetic oligonucleotide
  Antisense strand to SEQ ID NO: 2172208
gugguaacaagauaauacu

SEQ ID NO: 2172210 - RNA, 19 nt, Artificial Sequence
  Description of Artificial Sequence: Synthetic oligonucleotide
  Sense strand starting at position 2582 of SEQ ID NO: 1883135
uggagccuaucucuguaau

SEQ ID NO: 2172211 - RNA, 19 nt, Artificial Sequence
  Description of Artificial Sequence: Synthetic oligonucleotide
  Antisense strand to SEQ ID NO: 2172210
auuacagagauaggcucca

SEQ ID NO: 2172212 - RNA, 19 nt, Artificial Sequence
  Description of Artificial Sequence: Synthetic oligonucleotide
  Sense strand starting at position 2583 of SEQ ID NO: 1883135
ggagccuaucucuguaauu

SEQ ID NO: 2172213 - RNA, 19 nt, Artificial Sequence
  Description of Artificial Sequence: Synthetic oligonucleotide
  Antisense strand to SEQ ID NO: 2172212
aauuacagagauaggcucc

SEQ ID NO: 2172214 - RNA, 19 nt, Artificial Sequence
  Description of Artificial Sequence: Synthetic oligonucleotide
  Sense strand starting at position 2584 of SEQ ID NO: 1883135
gagccuaucucuguaauug

SEQ ID NO: 2172215 - RNA, 19 nt, Artificial Sequence
  Description of Artificial Sequence: Synthetic oligonucleotide
  Antisense strand to SEQ ID NO: 2172214
caauuacagagauaggcuc

SEQ ID NO: 2172216 - RNA, 19 nt, Artificial Sequence
  Description of Artificial Sequence: Synthetic oligonucleotide
  Sense strand starting at position 2585 of SEQ ID NO: 1883135
agccuaucucuguaauuga

SEQ ID NO: 2172217 - RNA, 19 nt, Artificial Sequence
  Description of Artificial Sequence: Synthetic oligonucleotide
  Antisense strand to SEQ ID NO: 2172216
ucaauuacagagauaggcu

SEQ ID NO: 2172218 - RNA, 19 nt, Artificial Sequence
  Description of Artificial Sequence: Synthetic oligonucleotide
  Sense strand starting at position 3025 of SEQ ID NO: 1883135
ccagcuauuugcuuuggga

SEQ ID NO: 2172219 - RNA, 19 nt, Artificial Sequence
  Description of Artificial Sequence: Synthetic oligonucleotide
  Antisense strand to SEQ ID NO: 2172218
ucccaaagcaaauagcugg

SEQ ID NO: 2172220 - RNA, 19 nt, Artificial Sequence
  Description of Artificial Sequence: Synthetic oligonucleotide
  Sense strand starting at position 3049 of SEQ ID NO: 1883135
aaguuagaguuacaaugaa

SEQ ID NO: 2172221 - RNA, 19 nt, Artificial Sequence
  Description of Artificial Sequence: Synthetic oligonucleotide
  Antisense strand to SEQ ID NO: 2172220
uucauuguaacucuaacuu

SEQ ID NO: 2172222 - RNA, 19 nt, Artificial Sequence
  Description of Artificial Sequence: Synthetic oligonucleotide
  Sense strand starting at position 3152 of SEQ ID NO: 1883135
cagugaucuagcgaggaag

SEQ ID NO: 2172223 - RNA, 19 nt, Artificial Sequence
  Description of Artificial Sequence: Synthetic oligonucleotide
  Antisense strand to SEQ ID NO: 2172222
cuuccucgcuagaucacug

SEQ ID NO: 2172224 - RNA, 19 nt, Artificial Sequence
  Description of Artificial Sequence: Synthetic oligonucleotide
  Sense strand starting at position 3287 of SEQ ID NO: 1883135
ugcagugucuaccuaagga

SEQ ID NO: 2172225 - RNA, 19 nt, Artificial Sequence
  Description of Artificial Sequence: Synthetic oligonucleotide
  Antisense strand to SEQ ID NO: 2172224
uccuuagguagacacugca

SEQ ID NO: 2172226 - RNA, 19 nt, Artificial Sequence
  Description of Artificial Sequence: Synthetic oligonucleotide
  Sense strand starting at position 3638 of SEQ ID NO: 1883135
ucagcaacgccacaagaau

SEQ ID NO: 2172227 - RNA, 19 nt, Artificial Sequence
  Description of Artificial Sequence: Synthetic oligonucleotide
  Antisense strand to SEQ ID NO: 2172226
auucuuguggcguugcuga

SEQ ID NO: 2172228 - RNA, 19 nt, Artificial Sequence
  Description of Artificial Sequence: Synthetic oligonucleotide
  Sense strand starting at position 3687 of SEQ ID NO: 1883135
augugcuacugaguuaaua

SEQ ID NO: 2172229 - RNA, 19 nt, Artificial Sequence
  Description of Artificial Sequence: Synthetic oligonucleotide
  Antisense strand to SEQ ID NO: 2172228
uauuaacucaguagcacau

SEQ ID NO: 2172230 - RNA, 19 nt, Artificial Sequence
  Description of Artificial Sequence: Synthetic oligonucleotide
  Sense strand starting at position 3921 of SEQ ID NO: 1883135
ugucaaaucuuguugcuga

SEQ ID NO: 2172231 - RNA, 19 nt, Artificial Sequence
  Description of Artificial Sequence: Synthetic oligonucleotide
  Antisense strand to SEQ ID NO: 2172230
ucagcaacaagauuugaca

SEQ ID NO: 2172232 - RNA, 19 nt, Artificial Sequence
  Description of Artificial Sequence: Synthetic oligonucleotide
  Sense strand starting at position 3926 of SEQ ID NO: 1883135
aaucuuguugcugagugau

SEQ ID NO: 2172233 - RNA, 19 nt, Artificial Sequence
  Description of Artificial Sequence: Synthetic oligonucleotide
  Antisense strand to SEQ ID NO: 2172232
aucacucagcaacaagauu

SEQ ID NO: 2172234 - RNA, 19 nt, Artificial Sequence
  Description of Artificial Sequence: Synthetic oligonucleotide
  Sense strand starting at position 3928 of SEQ ID NO: 1883135
ucuuguugcugagugauuu

SEQ ID NO: 2172235 - RNA, 19 nt, Artificial Sequence
  Description of Artificial Sequence: Synthetic oligonucleotide
  Antisense strand to SEQ ID NO: 2172234
aaaucacucagcaacaaga

SEQ ID NO: 2172236 - RNA, 19 nt, Artificial Sequence
  Description of Artificial Sequence: Synthetic oligonucleotide
  Sense strand starting at position 470 of SEQ ID NO: 1883136
cugcuaauaggucgauuaa

SEQ ID NO: 2172237 - RNA, 19 nt, Artificial Sequence
  Description of Artificial Sequence: Synthetic oligonucleotide
  Antisense strand to SEQ ID NO: 2172236
uuaaucgaccuauuagcag

SEQ ID NO: 2172238 - RNA, 19 nt, Artificial Sequence
  Description of Artificial Sequence: Synthetic oligonucleotide
  Sense strand starting at position 471 of SEQ ID NO: 1883136
ugcuaauaggucgauuaaa

SEQ ID NO: 2172239 - RNA, 19 nt, Artificial Sequence
  Description of Artificial Sequence: Synthetic oligonucleotide
  Antisense strand to SEQ ID NO: 2172238
uuuaaucgaccuauuagca

SEQ ID NO: 2172240 - RNA, 19 nt, Artificial Sequence
  Description of Artificial Sequence: Synthetic oligonucleotide
  Sense strand starting at position 555 of SEQ ID NO: 1883136
gugucaauagcaugaucga

SEQ ID NO: 2172241 - RNA, 19 nt, Artificial Sequence
  Description of Artificial Sequence: Synthetic oligonucleotide
  Antisense strand to SEQ ID NO: 2172240
ucgaucaugcuauugacac

SEQ ID NO: 2172242 - RNA, 19 nt, Artificial Sequence
  Description of Artificial Sequence: Synthetic oligonucleotide
  Sense strand starting at position 556 of SEQ ID NO: 1883136
ugucaauagcaugaucgaa

SEQ ID NO: 2172243 - RNA, 19 nt, Artificial Sequence
  Description of Artificial Sequence: Synthetic oligonucleotide
  Antisense strand to SEQ ID NO: 2172242
uucgaucaugcuauugaca

SEQ ID NO: 2172244 - RNA, 19 nt, Artificial Sequence
  Description of Artificial Sequence: Synthetic oligonucleotide
  Sense strand starting at position 615 of SEQ ID NO: 1883136
augagagcuugauugggau

SEQ ID NO: 2172245 - RNA, 19 nt, Artificial Sequence
  Description of Artificial Sequence: Synthetic oligonucleotide
  Antisense strand to SEQ ID NO: 2172244
aucccaaucaagcucucau

SEQ ID NO: 2172246 - RNA, 19 nt, Artificial Sequence
  Description of Artificial Sequence: Synthetic oligonucleotide
  Sense strand starting at position 617 of SEQ ID NO: 1883136
gagagcuugauugggauau

SEQ ID NO: 2172247 - RNA, 19 nt, Artificial Sequence
  Description of Artificial Sequence: Synthetic oligonucleotide
  Antisense strand to SEQ ID NO: 2172246
auaucccaaucaagcucuc

SEQ ID NO: 2172248 - RNA, 19 nt, Artificial Sequence
  Description of Artificial Sequence: Synthetic oligonucleotide
  Sense strand starting at position 618 of SEQ ID NO: 1883136
agagcuugauugggauaua

SEQ ID NO: 2172249 - RNA, 19 nt, Artificial Sequence
  Description of Artificial Sequence: Synthetic oligonucleotide
  Antisense strand to SEQ ID NO: 2172248
uauaucccaaucaagcucu

SEQ ID NO: 2172250 - RNA, 19 nt, Artificial Sequence
  Description of Artificial Sequence: Synthetic oligonucleotide
  Sense strand starting at position 619 of SEQ ID NO: 1883136
gagcuugauugggauauau

SEQ ID NO: 2172251 - RNA, 19 nt, Artificial Sequence
  Description of Artificial Sequence: Synthetic oligonucleotide
  Antisense strand to SEQ ID NO: 2172250
auauaucccaaucaagcuc

SEQ ID NO: 2172252 - RNA, 19 nt, Artificial Sequence
  Description of Artificial Sequence: Synthetic oligonucleotide
  Sense strand starting at position 834 of SEQ ID NO: 1883136
augacacagucaugauaua

SEQ ID NO: 2172253 - RNA, 19 nt, Artificial Sequence
  Description of Artificial Sequence: Synthetic oligonucleotide
  Antisense strand to SEQ ID NO: 2172252
uauaucaugacugugucau

SEQ ID NO: 2172254 - RNA, 19 nt, Artificial Sequence
  Description of Artificial Sequence: Synthetic oligonucleotide
  Sense strand starting at position 1113 of SEQ ID NO: 1883136
ccuuuaucuucuuuagguu

SEQ ID NO: 2172255 - RNA, 19 nt, Artificial Sequence
  Description of Artificial Sequence: Synthetic oligonucleotide
  Antisense strand to SEQ ID NO: 2172254
aaccuaaagaagauaaagg

SEQ ID NO: 2172256 - RNA, 19 nt, Artificial Sequence
  Description of Artificial Sequence: Synthetic oligonucleotide
  Sense strand starting at position 1114 of SEQ ID NO: 1883136
cuuuaucuucuuuagguuu

SEQ ID NO: 2172257 - RNA, 19 nt, Artificial Sequence
  Description of Artificial Sequence: Synthetic oligonucleotide
  Antisense strand to SEQ ID NO: 2172256
aaaccuaaagaagauaaag

SEQ ID NO: 2172258 - RNA, 19 nt, Artificial Sequence
  Description of Artificial Sequence: Synthetic oligonucleotide
  Sense strand starting at position 1169 of SEQ ID NO: 1883136
gcaugcuuagcccaguaaa

SEQ ID NO: 2172259 - RNA, 19 nt, Artificial Sequence
  Description of Artificial Sequence: Synthetic oligonucleotide
  Antisense strand to SEQ ID NO: 2172258
uuuacugggcuaagcaugc

SEQ ID NO: 2172260 - RNA, 19 nt, Artificial Sequence
  Description of Artificial Sequence: Synthetic oligonucleotide
  Sense strand starting at position 1219 of SEQ ID NO: 1883136
acccacuucugugugguua

SEQ ID NO: 2172261 - RNA, 19 nt, Artificial Sequence
  Description of Artificial Sequence: Synthetic oligonucleotide
  Antisense strand to SEQ ID NO: 2172260
uaaccacacagaagugggu

SEQ ID NO: 2172262 - RNA, 19 nt, Artificial Sequence
  Description of Artificial Sequence: Synthetic oligonucleotide
  Sense strand starting at position 1240 of SEQ ID NO: 1883136
uguaauauaccuugagcag

SEQ ID NO: 2172263 - RNA, 19 nt, Artificial Sequence
  Description of Artificial Sequence: Synthetic oligonucleotide
  Antisense strand to SEQ ID NO: 2172262
cugcucaagguauauuaca

SEQ ID NO: 2172264 - RNA, 19 nt, Artificial Sequence
  Description of Artificial Sequence: Synthetic oligonucleotide
  Sense strand starting at position 1431 of SEQ ID NO: 1883136
uucuguuucuucgaauaaa

SEQ ID NO: 2172265 - RNA, 19 nt, Artificial Sequence
  Description of Artificial Sequence: Synthetic oligonucleotide
  Antisense strand to SEQ ID NO: 2172264
uuuauucgaagaaacagaa

SEQ ID NO: 2172266 - RNA, 19 nt, Artificial Sequence
  Description of Artificial Sequence: Synthetic oligonucleotide
  Sense strand starting at position 1475 of SEQ ID NO: 1883136
uagaguagcuccuauugau

SEQ ID NO: 2172267 - RNA, 19 nt, Artificial Sequence
  Description of Artificial Sequence: Synthetic oligonucleotide
  Antisense strand to SEQ ID NO: 2172266
aucaauaggagcuacucua

SEQ ID NO: 2172268 - RNA, 19 nt, Artificial Sequence
  Description of Artificial Sequence: Synthetic oligonucleotide
  Sense strand starting at position 1481 of SEQ ID NO: 1883136
agcuccuauugauaggaua

SEQ ID NO: 2172269 - RNA, 19 nt, Artificial Sequence
  Description of Artificial Sequence: Synthetic oligonucleotide
  Antisense strand to SEQ ID NO: 2172268
uauccuaucaauaggagcu

SEQ ID NO: 2172270 - RNA, 19 nt, Artificial Sequence
  Description of Artificial Sequence: Synthetic oligonucleotide
  Sense strand starting at position 1513 of SEQ ID NO: 1883136
uugaccuauuaagugaaua

SEQ ID NO: 2172271 - RNA, 19 nt, Artificial Sequence
  Description of Artificial Sequence: Synthetic oligonucleotide
  Antisense strand to SEQ ID NO: 2172270
uauucacuuaauaggucaa

SEQ ID NO: 2172272 - RNA, 19 nt, Artificial Sequence
  Description of Artificial Sequence: Synthetic oligonucleotide
  Sense strand starting at position 1565 of SEQ ID NO: 1883136
agaucuaacugccugcaaa

SEQ ID NO: 2172273 - RNA, 19 nt, Artificial Sequence
  Description of Artificial Sequence: Synthetic oligonucleotide
  Antisense strand to SEQ ID NO: 2172272
uuugcaggcaguuagaucu

SEQ ID NO: 2172274 - RNA, 19 nt, Artificial Sequence
  Description of Artificial Sequence: Synthetic oligonucleotide
  Sense strand starting at position 1776 of SEQ ID NO: 1883136
aggacauacugcuaaauga

SEQ ID NO: 2172275 - RNA, 19 nt, Artificial Sequence
  Description of Artificial Sequence: Synthetic oligonucleotide
  Antisense strand to SEQ ID NO: 2172274
ucauuuagcaguauguccu

SEQ ID NO: 2172276 - RNA, 19 nt, Artificial Sequence
  Description of Artificial Sequence: Synthetic oligonucleotide
  Sense strand starting at position 1863 of SEQ ID NO: 1883136
gacugauucuagguucuug

SEQ ID NO: 2172277 - RNA, 19 nt, Artificial Sequence
  Description of Artificial Sequence: Synthetic oligonucleotide
  Antisense strand to SEQ ID NO: 2172276
caagaaccuagaaucaguc

SEQ ID NO: 2172278 - RNA, 19 nt, Artificial Sequence
  Description of Artificial Sequence: Synthetic oligonucleotide
  Sense strand starting at position 1875 of SEQ ID NO: 1883136
guucuugucuggccaggga

SEQ ID NO: 2172279 - RNA, 19 nt, Artificial Sequence
  Description of Artificial Sequence: Synthetic oligonucleotide
  Antisense strand to SEQ ID NO: 2172278
ucccuggccagacaagaac

SEQ ID NO: 2172280 - RNA, 19 nt, Artificial Sequence
  Description of Artificial Sequence: Synthetic oligonucleotide
  Sense strand starting at position 1915 of SEQ ID NO: 1883136
accuuauaguaaugagcua

SEQ ID NO: 2172281 - RNA, 19 nt, Artificial Sequence
  Description of Artificial Sequence: Synthetic oligonucleotide
  Antisense strand to SEQ ID NO: 2172280
uagcucauuacuauaaggu

SEQ ID NO: 2172282 - RNA, 19 nt, Artificial Sequence
  Description of Artificial Sequence: Synthetic oligonucleotide
  Sense strand starting at position 2130 of SEQ ID NO: 1883136
cuaaaucucccacgggaaa

SEQ ID NO: 2172283 - RNA, 19 nt, Artificial Sequence
  Description of Artificial Sequence: Synthetic oligonucleotide
  Antisense strand to SEQ ID NO: 2172282
uuucccgugggagauuuag

SEQ ID NO: 2172284 - RNA, 19 nt, Artificial Sequence
  Description of Artificial Sequence: Synthetic oligonucleotide
  Sense strand starting at position 2272 of SEQ ID NO: 1883136
ugacaugcauaugcaauaa

SEQ ID NO: 2172285 - RNA, 19 nt, Artificial Sequence
  Description of Artificial Sequence: Synthetic oligonucleotide
  Antisense strand to SEQ ID NO: 2172284
uuauugcauaugcauguca

SEQ ID NO: 2172286 - RNA, 19 nt, Artificial Sequence
  Description of Artificial Sequence: Synthetic oligonucleotide
  Sense strand starting at position 2311 of SEQ ID NO: 1883136
aucuauuguuugucaggca

SEQ ID NO: 2172287 - RNA, 19 nt, Artificial Sequence
  Description of Artificial Sequence: Synthetic oligonucleotide
  Antisense strand to SEQ ID NO: 2172286
ugccugacaaacaauagau

SEQ ID NO: 2172288 - RNA, 19 nt, Artificial Sequence
  Description of Artificial Sequence: Synthetic oligonucleotide
  Sense strand starting at position 2312 of SEQ ID NO: 1883136
ucuauuguuugucaggcaa

SEQ ID NO: 2172289 - RNA, 19 nt, Artificial Sequence
  Description of Artificial Sequence: Synthetic oligonucleotide
  Antisense strand to SEQ ID NO: 2172288
uugccugacaaacaauaga

SEQ ID NO: 2172290 - RNA, 19 nt, Artificial Sequence
  Description of Artificial Sequence: Synthetic oligonucleotide
  Sense strand starting at position 2314 of SEQ ID NO: 1883136
uauuguuugucaggcaaua

SEQ ID NO: 2172291 - RNA, 19 nt, Artificial Sequence
  Description of Artificial Sequence: Synthetic oligonucleotide
  Antisense strand to SEQ ID NO: 2172290
uauugccugacaaacaaua

SEQ ID NO: 2172292 - RNA, 19 nt, Artificial Sequence
  Description of Artificial Sequence: Synthetic oligonucleotide
  Sense strand starting at position 2319 of SEQ ID NO: 1883136
uuugucaggcaauauagua

SEQ ID NO: 2172293 - RNA, 19 nt, Artificial Sequence
  Description of Artificial Sequence: Synthetic oligonucleotide
  Antisense strand to SEQ ID NO: 2172292
uacuauauugccugacaaa

SEQ ID NO: 2172294 - RNA, 19 nt, Artificial Sequence
  Description of Artificial Sequence: Synthetic oligonucleotide
  Sense strand starting at position 2391 of SEQ ID NO: 1883136
uuggcaaguuugcacauaa

SEQ ID NO: 2172295 - RNA, 19 nt, Artificial Sequence
  Description of Artificial Sequence: Synthetic oligonucleotide
  Antisense strand to SEQ ID NO: 2172294
uuaugugcaaacuugccaa

SEQ ID NO: 2172296 - RNA, 19 nt, Artificial Sequence
  Description of Artificial Sequence: Synthetic oligonucleotide
  Sense strand starting at position 2409 of SEQ ID NO: 1883136
aguauuaucuuguuaccac

SEQ ID NO: 2172297 - RNA, 19 nt, Artificial Sequence
  Description of Artificial Sequence: Synthetic oligonucleotide
  Antisense strand to SEQ ID NO: 2172296
gugguaacaagauaauacu

SEQ ID NO: 2172298 - RNA, 19 nt, Artificial Sequence
  Description of Artificial Sequence: Synthetic oligonucleotide
  Sense strand starting at position 2410 of SEQ ID NO: 1883136
guauuaucuuguuaccaca

SEQ ID NO: 2172299 - RNA, 19 nt, Artificial Sequence
  Description of Artificial Sequence: Synthetic oligonucleotide
  Antisense strand to SEQ ID NO: 2172298
ugugguaacaagauaauac

SEQ ID NO: 2172300 - RNA, 19 nt, Artificial Sequence
  Description of Artificial Sequence: Synthetic oligonucleotide
  Sense strand starting at position 2791 of SEQ ID NO: 1883136
uuuggauuauugcaucuuu

SEQ ID NO: 2172301 - RNA, 19 nt, Artificial Sequence
  Description of Artificial Sequence: Synthetic oligonucleotide
  Antisense strand to SEQ ID NO: 2172300
aaagaugcaauaauccaaa

SEQ ID NO: 2172302 - RNA, 19 nt, Artificial Sequence
  Description of Artificial Sequence: Synthetic oligonucleotide
  Sense strand starting at position 3029 of SEQ ID NO: 1883136
cuauuugcuuugggaagga

SEQ ID NO: 2172303 - RNA, 19 nt, Artificial Sequence
  Description of Artificial Sequence: Synthetic oligonucleotide
  Antisense strand to SEQ ID NO: 2172302
uccuucccaaagcaaauag

SEQ ID NO: 2172304 - RNA, 19 nt, Artificial Sequence
  Description of Artificial Sequence: Synthetic oligonucleotide
  Sense strand starting at position 3287 of SEQ ID NO: 1883136
ugcagugucuaccuaagga

SEQ ID NO: 2172305 - RNA, 19 nt, Artificial Sequence
  Description of Artificial Sequence: Synthetic oligonucleotide
  Antisense strand to SEQ ID NO: 2172304
uccuuagguagacacugca

SEQ ID NO: 2172306 - RNA, 19 nt, Artificial Sequence
  Description of Artificial Sequence: Synthetic oligonucleotide
  Sense strand starting at position 3638 of SEQ ID NO: 1883136
ucagcaacgccacaagaau

SEQ ID NO: 2172307 - RNA, 19 nt, Artificial Sequence
  Description of Artificial Sequence: Synthetic oligonucleotide
  Antisense strand to SEQ ID NO: 2172306
auucuuguggcguugcuga

SEQ ID NO: 2172308 - RNA, 19 nt, Artificial Sequence
  Description of Artificial Sequence: Synthetic oligonucleotide
  Sense strand starting at position 2563 of SEQ ID NO: 1883137
ucguuaaggaugugcacau

SEQ ID NO: 2172309 - RNA, 19 nt, Artificial Sequence
  Description of Artificial Sequence: Synthetic oligonucleotide
  Antisense strand to SEQ ID NO: 2172308
augugcacauccuuaacga

SEQ ID NO: 2172310 - RNA, 19 nt, Artificial Sequence
  Description of Artificial Sequence: Synthetic oligonucleotide
  Sense strand starting at position 2564 of SEQ ID NO: 1883137
cguuaaggaugugcacaua

SEQ ID NO: 2172311 - RNA, 19 nt, Artificial Sequence
  Description of Artificial Sequence: Synthetic oligonucleotide
  Antisense strand to SEQ ID NO: 2172310
uaugugcacauccuuaacg

SEQ ID NO: 2172312 - RNA, 19 nt, Artificial Sequence
  Description of Artificial Sequence: Synthetic oligonucleotide
  Sense strand starting at position 2567 of SEQ ID NO: 1883137
uaaggaugugcacauagua

SEQ ID NO: 2172313 - RNA, 19 nt, Artificial Sequence
  Description of Artificial Sequence: Synthetic oligonucleotide
  Antisense strand to SEQ ID NO: 2172312
uacuaugugcacauccuua

SEQ ID NO: 2172314 - RNA, 19 nt, Artificial Sequence
  Description of Artificial Sequence: Synthetic oligonucleotide
  Sense strand starting at position 2133 of SEQ ID NO: 1883138
gaaauuugaugggaaguug

SEQ ID NO: 2172315 - RNA, 19 nt, Artificial Sequence
  Description of Artificial Sequence: Synthetic oligonucleotide
  Antisense strand to SEQ ID NO: 2172314
caacuucccaucaaauuuc

SEQ ID NO: 2172316 - RNA, 19 nt, Artificial Sequence
  Description of Artificial Sequence: Synthetic oligonucleotide
  Sense strand starting at position 2567 of SEQ ID NO: 1883138
uaaggaugugcacacagua

SEQ ID NO: 2172317 - RNA, 19 nt, Artificial Sequence
  Description of Artificial Sequence: Synthetic oligonucleotide
  Antisense strand to SEQ ID NO: 2172316
uacugugugcacauccuua

SEQ ID NO: 2172318 - RNA, 19 nt, Artificial Sequence
  Description of Artificial Sequence: Synthetic oligonucleotide
  Sense strand starting at position 2563 of SEQ ID NO: 1883139
ucguuaaggaugugcacau

SEQ ID NO: 2172319 - RNA, 19 nt, Artificial Sequence
  Description of Artificial Sequence: Synthetic oligonucleotide
  Antisense strand to SEQ ID NO: 2172318
augugcacauccuuaacga

SEQ ID NO: 2172320 - RNA, 19 nt, Artificial Sequence
  Description of Artificial Sequence: Synthetic oligonucleotide
  Sense strand starting at position 2564 of SEQ ID NO: 1883139
cguuaaggaugugcacaua

SEQ ID NO: 2172321 - RNA, 19 nt, Artificial Sequence
  Description of Artificial Sequence: Synthetic oligonucleotide
  Antisense strand to SEQ ID NO: 2172320
uaugugcacauccuuaacg

SEQ ID NO: 2172322 - RNA, 19 nt, Artificial Sequence
  Description of Artificial Sequence: Synthetic oligonucleotide
  Sense strand starting at position 2567 of SEQ ID NO: 1883139
uaaggaugugcacauagua

SEQ ID NO: 2172323 - RNA, 19 nt, Artificial Sequence
  Description of Artificial Sequence: Synthetic oligonucleotide
  Antisense strand to SEQ ID NO: 2172322
uacuaugugcacauccuua

SEQ ID NO: 2172324 - RNA, 19 nt, Artificial Sequence
  Description of Artificial Sequence: Synthetic oligonucleotide
  Sense strand starting at position 2133 of SEQ ID NO: 1883140
gaaauuugaugggaaguug

SEQ ID NO: 2172325 - RNA, 19 nt, Artificial Sequence
  Description of Artificial Sequence: Synthetic oligonucleotide
  Antisense strand to SEQ ID NO: 2172324
caacuucccaucaaauuuc

SEQ ID NO: 2172326 - RNA, 19 nt, Artificial Sequence
  Description of Artificial Sequence: Synthetic oligonucleotide
  Sense strand starting at position 2567 of SEQ ID NO: 1883140
uaaggaugugcacacagua

SEQ ID NO: 2172327 - RNA, 19 nt, Artificial Sequence
  Description of Artificial Sequence: Synthetic oligonucleotide
  Antisense strand to SEQ ID NO: 2172326
uacugugugcacauccuua

SEQ ID NO: 2172328 - RNA, 19 nt, Artificial Sequence
  Description of Artificial Sequence: Synthetic oligonucleotide
  Sense strand starting at position 9 of SEQ ID NO: 1883141
acuuguauugcauguaaca

SEQ ID NO: 2172329 - RNA, 19 nt, Artificial Sequence
  Description of Artificial Sequence: Synthetic oligonucleotide
  Antisense strand to SEQ ID NO: 2172328
uguuacaugcaauacaagu

SEQ ID NO: 2172330 - RNA, 19 nt, Artificial Sequence
  Description of Artificial Sequence: Synthetic oligonucleotide
  Sense strand starting at position 57 of SEQ ID NO: 1883141
aguuauguccugugacuac

SEQ ID NO: 2172331 - RNA, 19 nt, Artificial Sequence
  Description of Artificial Sequence: Synthetic oligonucleotide
  Antisense strand to SEQ ID NO: 2172330
guagucacaggacauaacu

SEQ ID NO: 2172332 - RNA, 19 nt, Artificial Sequence
  Description of Artificial Sequence: Synthetic oligonucleotide
  Sense strand starting at position 69 of SEQ ID NO: 1883141
ugacuacuguccucauugu

SEQ ID NO: 2172333 - RNA, 19 nt, Artificial Sequence
  Description of Artificial Sequence: Synthetic oligonucleotide
  Antisense strand to SEQ ID NO: 2172332
acaaugaggacaguaguca

SEQ ID NO: 2172334 - RNA, 19 nt, Artificial Sequence
  Description of Artificial Sequence: Synthetic oligonucleotide
  Sense strand starting at position 84 of SEQ ID NO: 1883141
uuguacguugcauagauua

SEQ ID NO: 2172335 - RNA, 19 nt, Artificial Sequence
  Description of Artificial Sequence: Synthetic oligonucleotide
  Antisense strand to SEQ ID NO: 2172334
uaaucuaugcaacguacaa

SEQ ID NO: 2172336 - RNA, 19 nt, Artificial Sequence
  Description of Artificial Sequence: Synthetic oligonucleotide
  Sense strand starting at position 86 of SEQ ID NO: 1883141
guacguugcauagauuaag

SEQ ID NO: 2172337 - RNA, 19 nt, Artificial Sequence
  Description of Artificial Sequence: Synthetic oligonucleotide
  Antisense strand to SEQ ID NO: 2172336
cuuaaucuaugcaacguac

SEQ ID NO: 2172338 - RNA, 19 nt, Artificial Sequence
  Description of Artificial Sequence: Synthetic oligonucleotide
  Sense strand starting at position 89 of SEQ ID NO: 1883141
cguugcauagauuaagaga

SEQ ID NO: 2172339 - RNA, 19 nt, Artificial Sequence
  Description of Artificial Sequence: Synthetic oligonucleotide
  Antisense strand to SEQ ID NO: 2172338
ucucuuaaucuaugcaacg

SEQ ID NO: 2172340 - RNA, 19 nt, Artificial Sequence
  Description of Artificial Sequence: Synthetic oligonucleotide
  Sense strand starting at position 257 of SEQ ID NO: 1883141
cacuguuggccucagcaua

SEQ ID NO: 2172341 - RNA, 19 nt, Artificial Sequence
  Description of Artificial Sequence: Synthetic oligonucleotide
  Antisense strand to SEQ ID NO: 2172340
uaugcugaggccaacagug

SEQ ID NO: 2172342 - RNA, 19 nt, Artificial Sequence
  Description of Artificial Sequence: Synthetic oligonucleotide
  Sense strand starting at position 269 of SEQ ID NO: 1883141
cagcauagcguuuccugua

SEQ ID NO: 2172343 - RNA, 19 nt, Artificial Sequence
  Description of Artificial Sequence: Synthetic oligonucleotide
  Antisense strand to SEQ ID NO: 2172342
uacaggaaacgcuaugcug

SEQ ID NO: 2172344 - RNA, 19 nt, Artificial Sequence
  Description of Artificial Sequence: Synthetic oligonucleotide
  Sense strand starting at position 274 of SEQ ID NO: 1883141
uagcguuuccuguagacag

SEQ ID NO: 2172345 - RNA, 19 nt, Artificial Sequence
  Description of Artificial Sequence: Synthetic oligonucleotide
  Antisense strand to SEQ ID NO: 2172344
cugucuacaggaaacgcua

SEQ ID NO: 2172346 - RNA, 19 nt, Artificial Sequence
  Description of Artificial Sequence: Synthetic oligonucleotide
  Sense strand starting at position 276 of SEQ ID NO: 1883141
gcguuuccuguagacagga

SEQ ID NO: 2172347 - RNA, 19 nt, Artificial Sequence
  Description of Artificial Sequence: Synthetic oligonucleotide
  Antisense strand to SEQ ID NO: 2172346
uccugucuacaggaaacgc

SEQ ID NO: 2172348 - RNA, 19 nt, Artificial Sequence
  Description of Artificial Sequence: Synthetic oligonucleotide
  Sense strand starting at position 328 of SEQ ID NO: 1883141
uucccauggugucuuauuu

SEQ ID NO: 2172349 - RNA, 19 nt, Artificial Sequence
  Description of Artificial Sequence: Synthetic oligonucleotide
  Antisense strand to SEQ ID NO: 2172348
aaauaagacaccaugggaa

SEQ ID NO: 2172350 - RNA, 19 nt, Artificial Sequence
  Description of Artificial Sequence: Synthetic oligonucleotide
  Sense strand starting at position 429 of SEQ ID NO: 1883141
ucugcuguuccugacaagu

SEQ ID NO: 2172351 - RNA, 19 nt, Artificial Sequence
  Description of Artificial Sequence: Synthetic oligonucleotide
  Antisense strand to SEQ ID NO: 2172350
acuugucaggaacagcaga

SEQ ID NO: 2172352 - RNA, 19 nt, Artificial Sequence
  Description of Artificial Sequence: Synthetic oligonucleotide
  Sense strand starting at position 829 of SEQ ID NO: 1883141
cacagacuucuuggaagug

SEQ ID NO: 2172353 - RNA, 19 nt, Artificial Sequence
  Description of Artificial Sequence: Synthetic oligonucleotide
  Antisense strand to SEQ ID NO: 2172352
cacuuccaagaagucugug

SEQ ID NO: 2172354 - RNA, 19 nt, Artificial Sequence
  Description of Artificial Sequence: Synthetic oligonucleotide
  Sense strand starting at position 839 of SEQ ID NO: 1883141
uuggaagugcccuagaauc

SEQ ID NO: 2172355 - RNA, 19 nt, Artificial Sequence
  Description of Artificial Sequence: Synthetic oligonucleotide
  Antisense strand to SEQ ID NO: 2172354
gauucuagggcacuuccaa

SEQ ID NO: 2172356 - RNA, 19 nt, Artificial Sequence
  Description of Artificial Sequence: Synthetic oligonucleotide
  Sense strand starting at position 1143 of SEQ ID NO: 1883141
gcucacaagucccugauua

SEQ ID NO: 2172357 - RNA, 19 nt, Artificial Sequence
  Description of Artificial Sequence: Synthetic oligonucleotide
  Antisense strand to SEQ ID NO: 2172356
uaaucagggacuugugagc

SEQ ID NO: 2172358 - RNA, 19 nt, Artificial Sequence
  Description of Artificial Sequence: Synthetic oligonucleotide
  Sense strand starting at position 1183 of SEQ ID NO: 1883141
uugccuguggcauaaacau

SEQ ID NO: 2172359 - RNA, 19 nt, Artificial Sequence
  Description of Artificial Sequence: Synthetic oligonucleotide
  Antisense strand to SEQ ID NO: 2172358
auguuuaugccacaggcaa

SEQ ID NO: 2172360 - RNA, 19 nt, Artificial Sequence
  Description of Artificial Sequence: Synthetic oligonucleotide
  Sense strand starting at position 1475 of SEQ ID NO: 1883141
ggaggugccuuauuaagau

SEQ ID NO: 2172361 - RNA, 19 nt, Artificial Sequence
  Description of Artificial Sequence: Synthetic oligonucleotide
  Antisense strand to SEQ ID NO: 2172360
aucuuaauaaggcaccucc

SEQ ID NO: 2172362 - RNA, 19 nt, Artificial Sequence
  Description of Artificial Sequence: Synthetic oligonucleotide
  Sense strand starting at position 1932 of SEQ ID NO: 1883141
gccggacucugcucagaag

SEQ ID NO: 2172363 - RNA, 19 nt, Artificial Sequence
  Description of Artificial Sequence: Synthetic oligonucleotide
  Antisense strand to SEQ ID NO: 2172362
cuucugagcagaguccggc

SEQ ID NO: 2172364 - RNA, 19 nt, Artificial Sequence
  Description of Artificial Sequence: Synthetic oligonucleotide
  Sense strand starting at position 2221 of SEQ ID NO: 1883141
gugagaugcaaauguggau

SEQ ID NO: 2172365 - RNA, 19 nt, Artificial Sequence
  Description of Artificial Sequence: Synthetic oligonucleotide
  Antisense strand to SEQ ID NO: 2172364
auccacauuugcaucucac

SEQ ID NO: 2172366 - RNA, 19 nt, Artificial Sequence
  Description of Artificial Sequence: Synthetic oligonucleotide
  Sense strand starting at position 2329 of SEQ ID NO: 1883141
uggaaaugaucuggaaaga

SEQ ID NO: 2172367 - RNA, 19 nt, Artificial Sequence
  Description of Artificial Sequence: Synthetic oligonucleotide
  Antisense strand to SEQ ID NO: 2172366
ucuuuccagaucauuucca

SEQ ID NO: 2172368 - RNA, 19 nt, Artificial Sequence
  Description of Artificial Sequence: Synthetic oligonucleotide
  Sense strand starting at position 2363 of SEQ ID NO: 1883141
uccagucauuaauugugau

SEQ ID NO: 2172369 - RNA, 19 nt, Artificial Sequence
  Description of Artificial Sequence: Synthetic oligonucleotide
  Antisense strand to SEQ ID NO: 2172368
aucacaauuaaugacugga

SEQ ID NO: 2172370 - RNA, 19 nt, Artificial Sequence
  Description of Artificial Sequence: Synthetic oligonucleotide
  Sense strand starting at position 2398 of SEQ ID NO: 1883141
acugaaagguguucuaaga

SEQ ID NO: 2172371 - RNA, 19 nt, Artificial Sequence
  Description of Artificial Sequence: Synthetic oligonucleotide
  Antisense strand to SEQ ID NO: 2172370
ucuuagaacaccuuucagu

SEQ ID NO: 2172372 - RNA, 19 nt, Artificial Sequence
  Description of Artificial Sequence: Synthetic oligonucleotide
  Sense strand starting at position 2525 of SEQ ID NO: 1883141
cauugaaugcaguggaaga

SEQ ID NO: 2172373 - RNA, 19 nt, Artificial Sequence
  Description of Artificial Sequence: Synthetic oligonucleotide
  Antisense strand to SEQ ID NO: 2172372
ucuuccacugcauucaaug

SEQ ID NO: 2172374 - RNA, 19 nt, Artificial Sequence
  Description of Artificial Sequence: Synthetic oligonucleotide
  Sense strand starting at position 2526 of SEQ ID NO: 1883141
auugaaugcaguggaagaa

SEQ ID NO: 2172375 - RNA, 19 nt, Artificial Sequence
  Description of Artificial Sequence: Synthetic oligonucleotide
  Antisense strand to SEQ ID NO: 2172374
uucuuccacugcauucaau

SEQ ID NO: 2172376 - RNA, 19 nt, Artificial Sequence
  Description of Artificial Sequence: Synthetic oligonucleotide
  Sense strand starting at position 2570 of SEQ ID NO: 1883141
ccugucagaucccauuuau

SEQ ID NO: 2172377 - RNA, 19 nt, Artificial Sequence
  Description of Artificial Sequence: Synthetic oligonucleotide
  Antisense strand to SEQ ID NO: 2172376
auaaaugggaucugacagg

SEQ ID NO: 2172378 - RNA, 19 nt, Artificial Sequence
  Description of Artificial Sequence: Synthetic oligonucleotide
  Sense strand starting at position 2593 of SEQ ID NO: 1883141
augagaagaugaucucugu

SEQ ID NO: 2172379 - RNA, 19 nt, Artificial Sequence
  Description of Artificial Sequence: Synthetic oligonucleotide
  Antisense strand to SEQ ID NO: 2172378
acagagaucaucuucucau

SEQ ID NO: 2172380 - RNA, 19 nt, Artificial Sequence
  Description of Artificial Sequence: Synthetic oligonucleotide
  Sense strand starting at position 2621 of SEQ ID NO: 1883141
gaacacauuuaguauggaa

SEQ ID NO: 2172381 - RNA, 19 nt, Artificial Sequence
  Description of Artificial Sequence: Synthetic oligonucleotide
  Antisense strand to SEQ ID NO: 2172380
uuccauacuaaauguguuc

SEQ ID NO: 2172382 - RNA, 19 nt, Artificial Sequence
  Description of Artificial Sequence: Synthetic oligonucleotide
  Sense strand starting at position 2687 of SEQ ID NO: 1883141
acugcuuuccaagguaaca

SEQ ID NO: 2172383 - RNA, 19 nt, Artificial Sequence
  Description of Artificial Sequence: Synthetic oligonucleotide
  Antisense strand to SEQ ID NO: 2172382
uguuaccuuggaaagcagu

SEQ ID NO: 2172384 - RNA, 19 nt, Artificial Sequence
  Description of Artificial Sequence: Synthetic oligonucleotide
  Sense strand starting at position 2736 of SEQ ID NO: 1883141
gcauguuuagauggaucua

SEQ ID NO: 2172385 - RNA, 19 nt, Artificial Sequence
  Description of Artificial Sequence: Synthetic oligonucleotide
  Antisense strand to SEQ ID NO: 2172384
uagauccaucuaaacaugc

SEQ ID NO: 2172386 - RNA, 19 nt, Artificial Sequence
  Description of Artificial Sequence: Synthetic oligonucleotide
  Sense strand starting at position 2782 of SEQ ID NO: 1883141
ggguacccuuuguuaugua

SEQ ID NO: 2172387 - RNA, 19 nt, Artificial Sequence
  Description of Artificial Sequence: Synthetic oligonucleotide
  Antisense strand to SEQ ID NO: 2172386
uacauaacaaaggguaccc

SEQ ID NO: 2172388 - RNA, 19 nt, Artificial Sequence
  Description of Artificial Sequence: Synthetic oligonucleotide
  Sense strand starting at position 2786 of SEQ ID NO: 1883141
acccuuuguuauguauauu

SEQ ID NO: 2172389 - RNA, 19 nt, Artificial Sequence
  Description of Artificial Sequence: Synthetic oligonucleotide
  Antisense strand to SEQ ID NO: 2172388
aauauacauaacaaagggu

SEQ ID NO: 2172390 - RNA, 19 nt, Artificial Sequence
  Description of Artificial Sequence: Synthetic oligonucleotide
  Sense strand starting at position 2798 of SEQ ID NO: 1883141
guauauucguucucauaau

SEQ ID NO: 2172391 - RNA, 19 nt, Artificial Sequence
  Description of Artificial Sequence: Synthetic oligonucleotide
  Antisense strand to SEQ ID NO: 2172390
auuaugagaacgaauauac

SEQ ID NO: 2172392 - RNA, 19 nt, Artificial Sequence
  Description of Artificial Sequence: Synthetic oligonucleotide
  Sense strand starting at position 2834 of SEQ ID NO: 1883141
agguucugagcccaggauu

SEQ ID NO: 2172393 - RNA, 19 nt, Artificial Sequence
  Description of Artificial Sequence: Synthetic oligonucleotide
  Antisense strand to SEQ ID NO: 2172392
aauccugggcucagaaccu

SEQ ID NO: 2172394 - RNA, 19 nt, Artificial Sequence
  Description of Artificial Sequence: Synthetic oligonucleotide
  Sense strand starting at position 2963 of SEQ ID NO: 1883141
ccuguuuguggaugacaau

SEQ ID NO: 2172395 - RNA, 19 nt, Artificial Sequence
  Description of Artificial Sequence: Synthetic oligonucleotide
  Antisense strand to SEQ ID NO: 2172394
auugucauccacaaacagg

SEQ ID NO: 2172396 - RNA, 19 nt, Artificial Sequence
  Description of Artificial Sequence: Synthetic oligonucleotide
  Sense strand starting at position 3118 of SEQ ID NO: 1883141
ugggaugccgcaggaauua

SEQ ID NO: 2172397 - RNA, 19 nt, Artificial Sequence
  Description of Artificial Sequence: Synthetic oligonucleotide
  Antisense strand to SEQ ID NO: 2172396
uaauuccugcggcauccca

SEQ ID NO: 2172398 - RNA, 19 nt, Artificial Sequence
  Description of Artificial Sequence: Synthetic oligonucleotide
  Sense strand starting at position 3428 of SEQ ID NO: 1883141
gccaaaugaggcugagguu

SEQ ID NO: 2172399 - RNA, 19 nt, Artificial Sequence
  Description of Artificial Sequence: Synthetic oligonucleotide
  Antisense strand to SEQ ID NO: 2172398
aaccucagccucauuuggc

SEQ ID NO: 2172400 - RNA, 19 nt, Artificial Sequence
  Description of Artificial Sequence: Synthetic oligonucleotide
  Sense strand starting at position 3692 of SEQ ID NO: 1883141
gcgugaugaccuggaacca

SEQ ID NO: 2172401 - RNA, 19 nt, Artificial Sequence
  Description of Artificial Sequence: Synthetic oligonucleotide
  Antisense strand to SEQ ID NO: 2172400
ugguuccaggucaucacgc

SEQ ID NO: 2172402 - RNA, 19 nt, Artificial Sequence
  Description of Artificial Sequence: Synthetic oligonucleotide
  Sense strand starting at position 3713 of SEQ ID NO: 1883141
gcgugaugaccugacacca

SEQ ID NO: 2172403 - RNA, 19 nt, Artificial Sequence
  Description of Artificial Sequence: Synthetic oligonucleotide
  Antisense strand to SEQ ID NO: 2172402
uggugucaggucaucacgc

SEQ ID NO: 2172404 - RNA, 19 nt, Artificial Sequence
  Description of Artificial Sequence: Synthetic oligonucleotide
  Sense strand starting at position 3752 of SEQ ID NO: 1883141
agugcuugaugaccugaca

SEQ ID NO: 2172405 - RNA, 19 nt, Artificial Sequence
  Description of Artificial Sequence: Synthetic oligonucleotide
  Antisense strand to SEQ ID NO: 2172404
ugucaggucaucaagcacu

SEQ ID NO: 2172406 - RNA, 19 nt, Artificial Sequence
  Description of Artificial Sequence: Synthetic oligonucleotide
  Sense strand starting at position 3755 of SEQ ID NO: 1883141
gcuugaugaccugacacca

SEQ ID NO: 2172407 - RNA, 19 nt, Artificial Sequence
  Description of Artificial Sequence: Synthetic oligonucleotide
  Antisense strand to SEQ ID NO: 2172406
uggugucaggucaucaagc

SEQ ID NO: 2172408 - RNA, 19 nt, Artificial Sequence
  Description of Artificial Sequence: Synthetic oligonucleotide
  Sense strand starting at position 111 of SEQ ID NO: 1883142
gaauguguccugcagaaca

SEQ ID NO: 2172409 - RNA, 19 nt, Artificial Sequence
  Description of Artificial Sequence: Synthetic oligonucleotide
  Antisense strand to SEQ ID NO: 2172408
uguucugcaggacacauuc

SEQ ID NO: 2172410 - RNA, 19 nt, Artificial Sequence
  Description of Artificial Sequence: Synthetic oligonucleotide
  Sense strand starting at position 113 of SEQ ID NO: 1883142
auguguccugcagaacaua

SEQ ID NO: 2172411 - RNA, 19 nt, Artificial Sequence
  Description of Artificial Sequence: Synthetic oligonucleotide
  Antisense strand to SEQ ID NO: 2172410
uauguucugcaggacacau

SEQ ID NO: 2172412 - RNA, 19 nt, Artificial Sequence
  Description of Artificial Sequence: Synthetic oligonucleotide
  Sense strand starting at position 121 of SEQ ID NO: 1883142
ugcagaacauaucuguaga

SEQ ID NO: 2172413 - RNA, 19 nt, Artificial Sequence
  Description of Artificial Sequence: Synthetic oligonucleotide
  Antisense strand to SEQ ID NO: 2172412
ucuacagauauguucugca

SEQ ID NO: 2172414 - RNA, 19 nt, Artificial Sequence
  Description of Artificial Sequence: Synthetic oligonucleotide
  Sense strand starting at position 136 of SEQ ID NO: 1883142
uagaacagugcaugaacua

SEQ ID NO: 2172415 - RNA, 19 nt, Artificial Sequence
  Description of Artificial Sequence: Synthetic oligonucleotide
  Antisense strand to SEQ ID NO: 2172414
uaguucaugcacuguucua

SEQ ID NO: 2172416 - RNA, 19 nt, Artificial Sequence
  Description of Artificial Sequence: Synthetic oligonucleotide
  Sense strand starting at position 148 of SEQ ID NO: 1883142
ugaacuagauguucucuua

SEQ ID NO: 2172417 - RNA, 19 nt, Artificial Sequence
  Description of Artificial Sequence: Synthetic oligonucleotide
  Antisense strand to SEQ ID NO: 2172416
uaagagaacaucuaguuca

SEQ ID NO: 2172418 - RNA, 19 nt, Artificial Sequence
  Description of Artificial Sequence: Synthetic oligonucleotide
  Sense strand starting at position 151 of SEQ ID NO: 1883142
acuagauguucucuuaaga

SEQ ID NO: 2172419 - RNA, 19 nt, Artificial Sequence
  Description of Artificial Sequence: Synthetic oligonucleotide
  Antisense strand to SEQ ID NO: 2172418
ucuuaagagaacaucuagu

SEQ ID NO: 2172420 - RNA, 19 nt, Artificial Sequence
  Description of Artificial Sequence: Synthetic oligonucleotide
  Sense strand starting at position 262 of SEQ ID NO: 1883142
aaguucuuccguuaaagaa

SEQ ID NO: 2172421 - RNA, 19 nt, Artificial Sequence
  Description of Artificial Sequence: Synthetic oligonucleotide
  Antisense strand to SEQ ID NO: 2172420
uucuuuaacggaagaacuu

SEQ ID NO: 2172422 - RNA, 19 nt, Artificial Sequence
  Description of Artificial Sequence: Synthetic oligonucleotide
  Sense strand starting at position 294 of SEQ ID NO: 1883142
uauaauguccaugacguau

SEQ ID NO: 2172423 - RNA, 19 nt, Artificial Sequence
  Description of Artificial Sequence: Synthetic oligonucleotide
  Antisense strand to SEQ ID NO: 2172422
auacgucauggacauuaua

SEQ ID NO: 2172424 - RNA, 19 nt, Artificial Sequence
  Description of Artificial Sequence: Synthetic oligonucleotide
  Sense strand starting at position 300 of SEQ ID NO: 1883142
guccaugacguauaacuau

SEQ ID NO: 2172425 - RNA, 19 nt, Artificial Sequence
  Description of Artificial Sequence: Synthetic oligonucleotide
  Antisense strand to SEQ ID NO: 2172424
auaguuauacgucauggac

SEQ ID NO: 2172426 - RNA, 19 nt, Artificial Sequence
  Description of Artificial Sequence: Synthetic oligonucleotide
  Sense strand starting at position 340 of SEQ ID NO: 1883142
aucaucuaaguuuguaaga

SEQ ID NO: 2172427 - RNA, 19 nt, Artificial Sequence
  Description of Artificial Sequence: Synthetic oligonucleotide
  Antisense strand to SEQ ID NO: 2172426
ucuuacaaacuuagaugau

SEQ ID NO: 2172428 - RNA, 19 nt, Artificial Sequence
  Description of Artificial Sequence: Synthetic oligonucleotide
  Sense strand starting at position 460 of SEQ ID NO: 1883142
acagaaugauugucugcaa

SEQ ID NO: 2172429 - RNA, 19 nt, Artificial Sequence
  Description of Artificial Sequence: Synthetic oligonucleotide
  Antisense strand to SEQ ID NO: 2172428
uugcagacaaucauucugu

SEQ ID NO: 2172430 - RNA, 19 nt, Artificial Sequence
  Description of Artificial Sequence: Synthetic oligonucleotide
  Sense strand starting at position 595 of SEQ ID NO: 1883142
acuagauguuuacuagaag

SEQ ID NO: 2172431 - RNA, 19 nt, Artificial Sequence
  Description of Artificial Sequence: Synthetic oligonucleotide
  Antisense strand to SEQ ID NO: 2172430
cuucuaguaaacaucuagu

SEQ ID NO: 2172432 - RNA, 19 nt, Artificial Sequence
  Description of Artificial Sequence: Synthetic oligonucleotide
  Sense strand starting at position 670 of SEQ ID NO: 1883142
cccucaucagaguauagua

SEQ ID NO: 2172433 - RNA, 19 nt, Artificial Sequence
  Description of Artificial Sequence: Synthetic oligonucleotide
  Antisense strand to SEQ ID NO: 2172432
uacuauacucugaugaggg

SEQ ID NO: 2172434 - RNA, 19 nt, Artificial Sequence
  Description of Artificial Sequence: Synthetic oligonucleotide
  Sense strand starting at position 678 of SEQ ID NO: 1883142
agaguauaguagucauaau

SEQ ID NO: 2172435 - RNA, 19 nt, Artificial Sequence
  Description of Artificial Sequence: Synthetic oligonucleotide
  Antisense strand to SEQ ID NO: 2172434
auuaugacuacuauacucu

SEQ ID NO: 2172436 - RNA, 19 nt, Artificial Sequence
  Description of Artificial Sequence: Synthetic oligonucleotide
  Sense strand starting at position 820 of SEQ ID NO: 1883142
ugauaauuagaaugcacua

SEQ ID NO: 2172437 - RNA, 19 nt, Artificial Sequence
  Description of Artificial Sequence: Synthetic oligonucleotide
  Antisense strand to SEQ ID NO: 2172436
uagugcauucuaauuauca

SEQ ID NO: 2172438 - RNA, 19 nt, Artificial Sequence
  Description of Artificial Sequence: Synthetic oligonucleotide
  Sense strand starting at position 969 of SEQ ID NO: 1883142
aaguuugcucgacaggaaa

SEQ ID NO: 2172439 - RNA, 19 nt, Artificial Sequence
  Description of Artificial Sequence: Synthetic oligonucleotide
  Antisense strand to SEQ ID NO: 2172438
uuuccugucgagcaaacuu

SEQ ID NO: 2172440 - RNA, 19 nt, Artificial Sequence
  Description of Artificial Sequence: Synthetic oligonucleotide
  Sense strand starting at position 972 of SEQ ID NO: 1883142
uuugcucgacaggaaauua

SEQ ID NO: 2172441 - RNA, 19 nt, Artificial Sequence
  Description of Artificial Sequence: Synthetic oligonucleotide
  Antisense strand to SEQ ID NO: 2172440
uaauuuccugucgagcaaa

SEQ ID NO: 2172442 - RNA, 19 nt, Artificial Sequence
  Description of Artificial Sequence: Synthetic oligonucleotide
  Sense strand starting at position 1225 of SEQ ID NO: 1883142
acguguuuaguugugcuga

SEQ ID NO: 2172443 - RNA, 19 nt, Artificial Sequence
  Description of Artificial Sequence: Synthetic oligonucleotide
  Antisense strand to SEQ ID NO: 2172442
ucagcacaacuaaacacgu

SEQ ID NO: 2172444 - RNA, 19 nt, Artificial Sequence
  Description of Artificial Sequence: Synthetic oligonucleotide
  Sense strand starting at position 1264 of SEQ ID NO: 1883142
auuguucugaggcacagau

SEQ ID NO: 2172445 - RNA, 19 nt, Artificial Sequence
  Description of Artificial Sequence: Synthetic oligonucleotide
  Antisense strand to SEQ ID NO: 2172444
aucugugccucagaacaau

SEQ ID NO: 2172446 - RNA, 19 nt, Artificial Sequence
  Description of Artificial Sequence: Synthetic oligonucleotide
  Sense strand starting at position 1304 of SEQ ID NO: 1883142
ccgaaagauguugagaagu

SEQ ID NO: 2172447 - RNA, 19 nt, Artificial Sequence
  Description of Artificial Sequence: Synthetic oligonucleotide
  Antisense strand to SEQ ID NO: 2172446
acuucucaacaucuuucgg

SEQ ID NO: 2172448 - RNA, 19 nt, Artificial Sequence
  Description of Artificial Sequence: Synthetic oligonucleotide
  Sense strand starting at position 1380 of SEQ ID NO: 1883142
guguaugugcgagcuauaa

SEQ ID NO: 2172449 - RNA, 19 nt, Artificial Sequence
  Description of Artificial Sequence: Synthetic oligonucleotide
  Antisense strand to SEQ ID NO: 2172448
uuauagcucgcacauacac

SEQ ID NO: 2172450 - RNA, 19 nt, Artificial Sequence
  Description of Artificial Sequence: Synthetic oligonucleotide
  Sense strand starting at position 1937 of SEQ ID NO: 1883142
cgcggugaggucucaguua

SEQ ID NO: 2172451 - RNA, 19 nt, Artificial Sequence
  Description of Artificial Sequence: Synthetic oligonucleotide
  Antisense strand to SEQ ID NO: 2172450
uaacugagaccucaccgcg

SEQ ID NO: 2172452 - RNA, 19 nt, Artificial Sequence
  Description of Artificial Sequence: Synthetic oligonucleotide
  Sense strand starting at position 1942 of SEQ ID NO: 1883142
ugaggucucaguuacugau

SEQ ID NO: 2172453 - RNA, 19 nt, Artificial Sequence
  Description of Artificial Sequence: Synthetic oligonucleotide
  Antisense strand to SEQ ID NO: 2172452
aucaguaacugagaccuca

SEQ ID NO: 2172454 - RNA, 19 nt, Artificial Sequence
  Description of Artificial Sequence: Synthetic oligonucleotide
  Sense strand starting at position 2220 of SEQ ID NO: 1883142
uugauugcaguguaaauca

SEQ ID NO: 2172455 - RNA, 19 nt, Artificial Sequence
  Description of Artificial Sequence: Synthetic oligonucleotide
  Antisense strand to SEQ ID NO: 2172454
ugauuuacacugcaaucaa

SEQ ID NO: 2172456 - RNA, 19 nt, Artificial Sequence
  Description of Artificial Sequence: Synthetic oligonucleotide
  Sense strand starting at position 2312 of SEQ ID NO: 1883142
gcccaagaucuuggacauc

SEQ ID NO: 2172457 - RNA, 19 nt, Artificial Sequence
  Description of Artificial Sequence: Synthetic oligonucleotide
  Antisense strand to SEQ ID NO: 2172456
gauguccaagaucuugggc

SEQ ID NO: 2172458 - RNA, 19 nt, Artificial Sequence
  Description of Artificial Sequence: Synthetic oligonucleotide
  Sense strand starting at position 2446 of SEQ ID NO: 1883142
uucagucuuggugagguaa

SEQ ID NO: 2172459 - RNA, 19 nt, Artificial Sequence
  Description of Artificial Sequence: Synthetic oligonucleotide
  Antisense strand to SEQ ID NO: 2172458
uuaccucaccaagacugaa

SEQ ID NO: 2172460 - RNA, 19 nt, Artificial Sequence
  Description of Artificial Sequence: Synthetic oligonucleotide
  Sense strand starting at position 2810 of SEQ ID NO: 1883142
uugucugauguugacuuaa

SEQ ID NO: 2172461 - RNA, 19 nt, Artificial Sequence
  Description of Artificial Sequence: Synthetic oligonucleotide
  Antisense strand to SEQ ID NO: 2172460
uuaagucaacaucagacaa

SEQ ID NO: 2172462 - RNA, 19 nt, Artificial Sequence
  Description of Artificial Sequence: Synthetic oligonucleotide
  Sense strand starting at position 2905 of SEQ ID NO: 1883142
gucuguggaaucugaggaa

SEQ ID NO: 2172463 - RNA, 19 nt, Artificial Sequence
  Description of Artificial Sequence: Synthetic oligonucleotide
  Antisense strand to SEQ ID NO: 2172462
uuccucagauuccacagac

SEQ ID NO: 2172464 - RNA, 19 nt, Artificial Sequence
  Description of Artificial Sequence: Synthetic oligonucleotide
  Sense strand starting at position 3080 of SEQ ID NO: 1883142
ccggcagacaaaggauauu

SEQ ID NO: 2172465 - RNA, 19 nt, Artificial Sequence
  Description of Artificial Sequence: Synthetic oligonucleotide
  Antisense strand to SEQ ID NO: 2172464
aauauccuuugucugccgg

SEQ ID NO: 2172466 - RNA, 19 nt, Artificial Sequence
  Description of Artificial Sequence: Synthetic oligonucleotide
  Sense strand starting at position 3211 of SEQ ID NO: 1883142
uacaguauucuccagagug

SEQ ID NO: 2172467 - RNA, 19 nt, Artificial Sequence
  Description of Artificial Sequence: Synthetic oligonucleotide
  Antisense strand to SEQ ID NO: 2172466
cacucuggagaauacugua

SEQ ID NO: 2172468 - RNA, 19 nt, Artificial Sequence
  Description of Artificial Sequence: Synthetic oligonucleotide
  Sense strand starting at position 3227 of SEQ ID NO: 1883142
gugccugcucguuuaacuu

SEQ ID NO: 2172469 - RNA, 19 nt, Artificial Sequence
  Description of Artificial Sequence: Synthetic oligonucleotide
  Antisense strand to SEQ ID NO: 2172468
aaguuaaacgagcaggcac

SEQ ID NO: 2172470 - RNA, 19 nt, Artificial Sequence
  Description of Artificial Sequence: Synthetic oligonucleotide
  Sense strand starting at position 3390 of SEQ ID NO: 1883142
uuguuuguggaaugaagga

SEQ ID NO: 2172471 - RNA, 19 nt, Artificial Sequence
  Description of Artificial Sequence: Synthetic oligonucleotide
  Antisense strand to SEQ ID NO: 2172470
uccuucauuccacaaacaa

SEQ ID NO: 2172472 - RNA, 19 nt, Artificial Sequence
  Description of Artificial Sequence: Synthetic oligonucleotide
  Sense strand starting at position 3489 of SEQ ID NO: 1883142
acaguuacccgauaugaau

SEQ ID NO: 2172473 - RNA, 19 nt, Artificial Sequence
  Description of Artificial Sequence: Synthetic oligonucleotide
  Antisense strand to SEQ ID NO: 2172472
auucauaucggguaacugu

SEQ ID NO: 2172474 - RNA, 19 nt, Artificial Sequence
  Description of Artificial Sequence: Synthetic oligonucleotide
  Sense strand starting at position 3500 of SEQ ID NO: 1883142
auaugaauugauggugauu

SEQ ID NO: 2172475 - RNA, 19 nt, Artificial Sequence
  Description of Artificial Sequence: Synthetic oligonucleotide
  Antisense strand to SEQ ID NO: 2172474
aaucaccaucaauucauau

SEQ ID NO: 2172476 - RNA, 19 nt, Artificial Sequence
  Description of Artificial Sequence: Synthetic oligonucleotide
  Sense strand starting at position 3506 of SEQ ID NO: 1883142
auugauggugauuaugagu

SEQ ID NO: 2172477 - RNA, 19 nt, Artificial Sequence
  Description of Artificial Sequence: Synthetic oligonucleotide
  Antisense strand to SEQ ID NO: 2172476
acucauaaucaccaucaau

SEQ ID NO: 2172478 - RNA, 19 nt, Artificial Sequence
  Description of Artificial Sequence: Synthetic oligonucleotide
  Sense strand starting at position 3514 of SEQ ID NO: 1883142
ugauuaugaguuuguaaca

SEQ ID NO: 2172479 - RNA, 19 nt, Artificial Sequence
  Description of Artificial Sequence: Synthetic oligonucleotide
  Antisense strand to SEQ ID NO: 2172478
uguuacaaacucauaauca

SEQ ID NO: 2172480 - RNA, 19 nt, Artificial Sequence
  Description of Artificial Sequence: Synthetic oligonucleotide
  Sense strand starting at position 3515 of SEQ ID NO: 1883142
gauuaugaguuuguaacag

SEQ ID NO: 2172481 - RNA, 19 nt, Artificial Sequence
  Description of Artificial Sequence: Synthetic oligonucleotide
  Antisense strand to SEQ ID NO: 2172480
cuguuacaaacucauaauc

SEQ ID NO: 2172482 - RNA, 19 nt, Artificial Sequence
  Description of Artificial Sequence: Synthetic oligonucleotide
  Sense strand starting at position 3568 of SEQ ID NO: 1883142
ugucuagaagagugaaauu

SEQ ID NO: 2172483 - RNA, 19 nt, Artificial Sequence
  Description of Artificial Sequence: Synthetic oligonucleotide
  Antisense strand to SEQ ID NO: 2172482
aauuucacucuucuagaca

SEQ ID NO: 2172484 - RNA, 19 nt, Artificial Sequence
  Description of Artificial Sequence: Synthetic oligonucleotide
  Sense strand starting at position 3617 of SEQ ID NO: 1883142
cuggacauauuugaauuau

SEQ ID NO: 2172485 - RNA, 19 nt, Artificial Sequence
  Description of Artificial Sequence: Synthetic oligonucleotide
  Antisense strand to SEQ ID NO: 2172484
auaauucaaauauguccag

SEQ ID NO: 2172486 - RNA, 19 nt, Artificial Sequence
  Description of Artificial Sequence: Synthetic oligonucleotide
  Sense strand starting at position 3669 of SEQ ID NO: 1883142
aucacagagcuguagcaaa

SEQ ID NO: 2172487 - RNA, 19 nt, Artificial Sequence
  Description of Artificial Sequence: Synthetic oligonucleotide
  Antisense strand to SEQ ID NO: 2172486
uuugcuacagcucugugau

SEQ ID NO: 2172488 - RNA, 19 nt, Artificial Sequence
  Description of Artificial Sequence: Synthetic oligonucleotide
  Sense strand starting at position 41 of SEQ ID NO: 1883143
ggugguauaaauggaauau

SEQ ID NO: 2172489 - RNA, 19 nt, Artificial Sequence
  Description of Artificial Sequence: Synthetic oligonucleotide
  Antisense strand to SEQ ID NO: 2172488
auauuccauuuauaccacc

SEQ ID NO: 2172490 - RNA, 19 nt, Artificial Sequence
  Description of Artificial Sequence: Synthetic oligonucleotide
  Sense strand starting at position 112 of SEQ ID NO: 1883143
uccugucuugaguacauaa

SEQ ID NO: 2172491 - RNA, 19 nt, Artificial Sequence
  Description of Artificial Sequence: Synthetic oligonucleotide
  Antisense strand to SEQ ID NO: 2172490
uuauguacucaagacagga

SEQ ID NO: 2172492 - RNA, 19 nt, Artificial Sequence
  Description of Artificial Sequence: Synthetic oligonucleotide
  Sense strand starting at position 114 of SEQ ID NO: 1883143
cugucuugaguacauaauc

SEQ ID NO: 2172493 - RNA, 19 nt, Artificial Sequence
  Description of Artificial Sequence: Synthetic oligonucleotide
  Antisense strand to SEQ ID NO: 2172492
gauuauguacucaagacag

SEQ ID NO: 2172494 - RNA, 19 nt, Artificial Sequence
  Description of Artificial Sequence: Synthetic oligonucleotide
  Sense strand starting at position 493 of SEQ ID NO: 1883143
augagaugaccuggaacgu

SEQ ID NO: 2172495 - RNA, 19 nt, Artificial Sequence
  Description of Artificial Sequence: Synthetic oligonucleotide
  Antisense strand to SEQ ID NO: 2172494
acguuccaggucaucucau

SEQ ID NO: 2172496 - RNA, 19 nt, Artificial Sequence
  Description of Artificial Sequence: Synthetic oligonucleotide
  Sense strand starting at position 494 of SEQ ID NO: 1883143
ugagaugaccuggaacguu

SEQ ID NO: 2172497 - RNA, 19 nt, Artificial Sequence
  Description of Artificial Sequence: Synthetic oligonucleotide
  Antisense strand to SEQ ID NO: 2172496
aacguuccaggucaucuca

SEQ ID NO: 2172498 - RNA, 19 nt, Artificial Sequence
  Description of Artificial Sequence: Synthetic oligonucleotide
  Sense strand starting at position 573 of SEQ ID NO: 1883143
guuggagaauacucauaua

SEQ ID NO: 2172499 - RNA, 19 nt, Artificial Sequence
  Description of Artificial Sequence: Synthetic oligonucleotide
  Antisense strand to SEQ ID NO: 2172498
uauaugaguauucuccaac

SEQ ID NO: 2172500 - RNA, 19 nt, Artificial Sequence
  Description of Artificial Sequence: Synthetic oligonucleotide
  Sense strand starting at position 576 of SEQ ID NO: 1883143
ggagaauacucauauauuu

SEQ ID NO: 2172501 - RNA, 19 nt, Artificial Sequence
  Description of Artificial Sequence: Synthetic oligonucleotide
  Antisense strand to SEQ ID NO: 2172500
aaauauaugaguauucucc

SEQ ID NO: 2172502 - RNA, 19 nt, Artificial Sequence
  Description of Artificial Sequence: Synthetic oligonucleotide
  Sense strand starting at position 871 of SEQ ID NO: 1883143
ccuauuaauagagggcuga

SEQ ID NO: 2172503 - RNA, 19 nt, Artificial Sequence
  Description of Artificial Sequence: Synthetic oligonucleotide
  Antisense strand to SEQ ID NO: 2172502
ucagcccucuauuaauagg

SEQ ID NO: 2172504 - RNA, 19 nt, Artificial Sequence
  Description of Artificial Sequence: Synthetic oligonucleotide
  Sense strand starting at position 872 of SEQ ID NO: 1883143
cuauuaauagagggcugaa

SEQ ID NO: 2172505 - RNA, 19 nt, Artificial Sequence
  Description of Artificial Sequence: Synthetic oligonucleotide
  Antisense strand to SEQ ID NO: 2172504
uucagcccucuauuaauag

SEQ ID NO: 2172506 - RNA, 19 nt, Artificial Sequence
  Description of Artificial Sequence: Synthetic oligonucleotide
  Sense strand starting at position 875 of SEQ ID NO: 1883143
uuaauagagggcugaaagu

SEQ ID NO: 2172507 - RNA, 19 nt, Artificial Sequence
  Description of Artificial Sequence: Synthetic oligonucleotide
  Antisense strand to SEQ ID NO: 2172506
acuuucagcccucuauuaa

SEQ ID NO: 2172508 - RNA, 19 nt, Artificial Sequence
  Description of Artificial Sequence: Synthetic oligonucleotide
  Sense strand starting at position 1046 of SEQ ID NO: 1883143
auguucucaccugacagau

SEQ ID NO: 2172509 - RNA, 19 nt, Artificial Sequence
  Description of Artificial Sequence: Synthetic oligonucleotide
  Antisense strand to SEQ ID NO: 2172508
aucugucaggugagaacau

SEQ ID NO: 2172510 - RNA, 19 nt, Artificial Sequence
  Description of Artificial Sequence: Synthetic oligonucleotide
  Sense strand starting at position 1432 of SEQ ID NO: 1883143
uccaucuugggcgaugaga

SEQ ID NO: 2172511 - RNA, 19 nt, Artificial Sequence
  Description of Artificial Sequence: Synthetic oligonucleotide
  Antisense strand to SEQ ID NO: 2172510
ucucaucgcccaagaugga

SEQ ID NO: 2172512 - RNA, 19 nt, Artificial Sequence
  Description of Artificial Sequence: Synthetic oligonucleotide
  Sense strand starting at position 1526 of SEQ ID NO: 1883143
uggaucuacucaucuugga

SEQ ID NO: 2172513 - RNA, 19 nt, Artificial Sequence
  Description of Artificial Sequence: Synthetic oligonucleotide
  Antisense strand to SEQ ID NO: 2172512
uccaagaugaguagaucca

SEQ ID NO: 2172514 - RNA, 19 nt, Artificial Sequence
  Description of Artificial Sequence: Synthetic oligonucleotide
  Sense strand starting at position 1615 of SEQ ID NO: 1883143
ggacccuucuacuuagaug

SEQ ID NO: 2172515 - RNA, 19 nt, Artificial Sequence
  Description of Artificial Sequence: Synthetic oligonucleotide
  Antisense strand to SEQ ID NO: 2172514
caucuaaguagaagggucc

SEQ ID NO: 2172516 - RNA, 19 nt, Artificial Sequence
  Description of Artificial Sequence: Synthetic oligonucleotide
  Sense strand starting at position 1681 of SEQ ID NO: 1883143
uaaauugaaucagcuguga

SEQ ID NO: 2172517 - RNA, 19 nt, Artificial Sequence
  Description of Artificial Sequence: Synthetic oligonucleotide
  Antisense strand to SEQ ID NO: 2172516
ucacagcugauucaauuua

SEQ ID NO: 2172518 - RNA, 19 nt, Artificial Sequence
  Description of Artificial Sequence: Synthetic oligonucleotide
  Sense strand starting at position 1796 of SEQ ID NO: 1883143
ggagaaagcuaaucccuuu

SEQ ID NO: 2172519 - RNA, 19 nt, Artificial Sequence
  Description of Artificial Sequence: Synthetic oligonucleotide
  Antisense strand to SEQ ID NO: 2172518
aaagggauuagcuuucucc

SEQ ID NO: 2172520 - RNA, 19 nt, Artificial Sequence
  Description of Artificial Sequence: Synthetic oligonucleotide
  Sense strand starting at position 1852 of SEQ ID NO: 1883143
ucucauagaucuucuagga

SEQ ID NO: 2172521 - RNA, 19 nt, Artificial Sequence
  Description of Artificial Sequence: Synthetic oligonucleotide
  Antisense strand to SEQ ID NO: 2172520
uccuagaagaucuaugaga

SEQ ID NO: 2172522 - RNA, 19 nt, Artificial Sequence
  Description of Artificial Sequence: Synthetic oligonucleotide
  Sense strand starting at position 1856 of SEQ ID NO: 1883143
auagaucuucuaggacauu

SEQ ID NO: 2172523 - RNA, 19 nt, Artificial Sequence
  Description of Artificial Sequence: Synthetic oligonucleotide
  Antisense strand to SEQ ID NO: 2172522
aauguccuagaagaucuau

SEQ ID NO: 2172524 - RNA, 19 nt, Artificial Sequence
  Description of Artificial Sequence: Synthetic oligonucleotide
  Sense strand starting at position 2012 of SEQ ID NO: 1883143
cuaauaguuccggaauaca

SEQ ID NO: 2172525 - RNA, 19 nt, Artificial Sequence
  Description of Artificial Sequence: Synthetic oligonucleotide
  Antisense strand to SEQ ID NO: 2172524
uguauuccggaacuauuag

SEQ ID NO: 2172526 - RNA, 19 nt, Artificial Sequence
  Description of Artificial Sequence: Synthetic oligonucleotide
  Sense strand starting at position 2271 of SEQ ID NO: 1883143
gggaaaugauuugacuuac

SEQ ID NO: 2172527 - RNA, 19 nt, Artificial Sequence
  Description of Artificial Sequence: Synthetic oligonucleotide
  Antisense strand to SEQ ID NO: 2172526
guaagucaaaucauuuccc

SEQ ID NO: 2172528 - RNA, 19 nt, Artificial Sequence
  Description of Artificial Sequence: Synthetic oligonucleotide
  Sense strand starting at position 2501 of SEQ ID NO: 1883143
aggucuuuccugcaaauaa

SEQ ID NO: 2172529 - RNA, 19 nt, Artificial Sequence
  Description of Artificial Sequence: Synthetic oligonucleotide
  Antisense strand to SEQ ID NO: 2172528
uuauuugcaggaaagaccu

SEQ ID NO: 2172530 - RNA, 19 nt, Artificial Sequence
  Description of Artificial Sequence: Synthetic oligonucleotide
  Sense strand starting at position 2741 of SEQ ID NO: 1883143
uaccauggucuccgacaaa

SEQ ID NO: 2172531 - RNA, 19 nt, Artificial Sequence
  Description of Artificial Sequence: Synthetic oligonucleotide
  Antisense strand to SEQ ID NO: 2172530
uuugucggagaccauggua

SEQ ID NO: 2172532 - RNA, 19 nt, Artificial Sequence
  Description of Artificial Sequence: Synthetic oligonucleotide
  Sense strand starting at position 2744 of SEQ ID NO: 1883143
cauggucuccgacaaagau

SEQ ID NO: 2172533 - RNA, 19 nt, Artificial Sequence
  Description of Artificial Sequence: Synthetic oligonucleotide
  Antisense strand to SEQ ID NO: 2172532
aucuuugucggagaccaug

SEQ ID NO: 2172534 - RNA, 19 nt, Artificial Sequence
  Description of Artificial Sequence: Synthetic oligonucleotide
  Sense strand starting at position 2756 of SEQ ID NO: 1883143
caaagaugacguugacaca

SEQ ID NO: 2172535 - RNA, 19 nt, Artificial Sequence
  Description of Artificial Sequence: Synthetic oligonucleotide
  Antisense strand to SEQ ID NO: 2172534
ugugucaacgucaucuuug

SEQ ID NO: 2172536 - RNA, 19 nt, Artificial Sequence
  Description of Artificial Sequence: Synthetic oligonucleotide
  Sense strand starting at position 2979 of SEQ ID NO: 1883143
gggagauuugccugccauu

SEQ ID NO: 2172537 - RNA, 19 nt, Artificial Sequence
  Description of Artificial Sequence: Synthetic oligonucleotide
  Antisense strand to SEQ ID NO: 2172536
aauggcaggcaaaucuccc

SEQ ID NO: 2172538 - RNA, 19 nt, Artificial Sequence
  Description of Artificial Sequence: Synthetic oligonucleotide
  Sense strand starting at position 3003 of SEQ ID NO: 1883143
ugaaaucuggucuaagcac

SEQ ID NO: 2172539 - RNA, 19 nt, Artificial Sequence
  Description of Artificial Sequence: Synthetic oligonucleotide
  Antisense strand to SEQ ID NO: 2172538
gugcuuagaccagauuuca

SEQ ID NO: 2172540 - RNA, 19 nt, Artificial Sequence
  Description of Artificial Sequence: Synthetic oligonucleotide
  Sense strand starting at position 3012 of SEQ ID NO: 1883143
gucuaagcacguuauauuu

SEQ ID NO: 2172541 - RNA, 19 nt, Artificial Sequence
  Description of Artificial Sequence: Synthetic oligonucleotide
  Antisense strand to SEQ ID NO: 2172540
aaauauaacgugcuuagac

SEQ ID NO: 2172542 - RNA, 19 nt, Artificial Sequence
  Description of Artificial Sequence: Synthetic oligonucleotide
  Sense strand starting at position 3194 of SEQ ID NO: 1883143
gaaagucccuaagugaaau

SEQ ID NO: 2172543 - RNA, 19 nt, Artificial Sequence
  Description of Artificial Sequence: Synthetic oligonucleotide
  Antisense strand to SEQ ID NO: 2172542
auuucacuuagggacuuuc

SEQ ID NO: 2172544 - RNA, 19 nt, Artificial Sequence
  Description of Artificial Sequence: Synthetic oligonucleotide
  Sense strand starting at position 3286 of SEQ ID NO: 1883143
aacguugcacuggauaaua

SEQ ID NO: 2172545 - RNA, 19 nt, Artificial Sequence
  Description of Artificial Sequence: Synthetic oligonucleotide
  Antisense strand to SEQ ID NO: 2172544
uauuauccagugcaacguu

SEQ ID NO: 2172546 - RNA, 19 nt, Artificial Sequence
  Description of Artificial Sequence: Synthetic oligonucleotide
  Sense strand starting at position 3288 of SEQ ID NO: 1883143
cguugcacuggauaauaaa

SEQ ID NO: 2172547 - RNA, 19 nt, Artificial Sequence
  Description of Artificial Sequence: Synthetic oligonucleotide
  Antisense strand to SEQ ID NO: 2172546
uuuauuauccagugcaacg

SEQ ID NO: 2172548 - RNA, 19 nt, Artificial Sequence
  Description of Artificial Sequence: Synthetic oligonucleotide
  Sense strand starting at position 3329 of SEQ ID NO: 1883143
agauccaucuuguucuaag

SEQ ID NO: 2172549 - RNA, 19 nt, Artificial Sequence
  Description of Artificial Sequence: Synthetic oligonucleotide
  Antisense strand to SEQ ID NO: 2172548
cuuagaacaagauggaucu

SEQ ID NO: 2172550 - RNA, 19 nt, Artificial Sequence
  Description of Artificial Sequence: Synthetic oligonucleotide
  Sense strand starting at position 3371 of SEQ ID NO: 1883143
agcaauagauucuuaacag

SEQ ID NO: 2172551 - RNA, 19 nt, Artificial Sequence
  Description of Artificial Sequence: Synthetic oligonucleotide
  Antisense strand to SEQ ID NO: 2172550
cuguuaagaaucuauugcu

SEQ ID NO: 2172552 - RNA, 19 nt, Artificial Sequence
  Description of Artificial Sequence: Synthetic oligonucleotide
  Sense strand starting at position 3488 of SEQ ID NO: 1883143
agaagugaaccaugaguuu

SEQ ID NO: 2172553 - RNA, 19 nt, Artificial Sequence
  Description of Artificial Sequence: Synthetic oligonucleotide
  Antisense strand to SEQ ID NO: 2172552
aaacucaugguucacuucu

SEQ ID NO: 2172554 - RNA, 19 nt, Artificial Sequence
  Description of Artificial Sequence: Synthetic oligonucleotide
  Sense strand starting at position 3497 of SEQ ID NO: 1883143
ccaugaguuuguucuagaa

SEQ ID NO: 2172555 - RNA, 19 nt, Artificial Sequence
  Description of Artificial Sequence: Synthetic oligonucleotide
  Antisense strand to SEQ ID NO: 2172554
uucuagaacaaacucaugg

SEQ ID NO: 2172556 - RNA, 19 nt, Artificial Sequence
  Description of Artificial Sequence: Synthetic oligonucleotide
  Sense strand starting at position 3501 of SEQ ID NO: 1883143
gaguuuguucuagaagguu

SEQ ID NO: 2172557 - RNA, 19 nt, Artificial Sequence
  Description of Artificial Sequence: Synthetic oligonucleotide
  Antisense strand to SEQ ID NO: 2172556
aaccuucuagaacaaacuc

SEQ ID NO: 2172558 - RNA, 19 nt, Artificial Sequence
  Description of Artificial Sequence: Synthetic oligonucleotide
  Sense strand starting at position 3510 of SEQ ID NO: 1883143
cuagaagguuucuucuuua

SEQ ID NO: 2172559 - RNA, 19 nt, Artificial Sequence
  Description of Artificial Sequence: Synthetic oligonucleotide
  Antisense strand to SEQ ID NO: 2172558
uaaagaagaaaccuucuag

SEQ ID NO: 2172560 - RNA, 19 nt, Artificial Sequence
  Description of Artificial Sequence: Synthetic oligonucleotide
  Sense strand starting at position 3618 of SEQ ID NO: 1883143
aguuucuaacagcaugaau

SEQ ID NO: 2172561 - RNA, 19 nt, Artificial Sequence
  Description of Artificial Sequence: Synthetic oligonucleotide
  Antisense strand to SEQ ID NO: 2172560
auucaugcuguuagaaacu

SEQ ID NO: 2172562 - RNA, 19 nt, Artificial Sequence
  Description of Artificial Sequence: Synthetic oligonucleotide
  Sense strand starting at position 3678 of SEQ ID NO: 1883143
agcugugcaauggaaagau

SEQ ID NO: 2172563 - RNA, 19 nt, Artificial Sequence
  Description of Artificial Sequence: Synthetic oligonucleotide
  Antisense strand to SEQ ID NO: 2172562
aucuuuccauugcacagcu

SEQ ID NO: 2172564 - RNA, 19 nt, Artificial Sequence
  Description of Artificial Sequence: Synthetic oligonucleotide
  Sense strand starting at position 3910 of SEQ ID NO: 1883143
ugggaaaucagguguaaac

SEQ ID NO: 2172565 - RNA, 19 nt, Artificial Sequence
  Description of Artificial Sequence: Synthetic oligonucleotide
  Antisense strand to SEQ ID NO: 2172564
guuuacaccugauuuccca

SEQ ID NO: 2172566 - RNA, 19 nt, Artificial Sequence
  Description of Artificial Sequence: Synthetic oligonucleotide
  Sense strand starting at position 3967 of SEQ ID NO: 1883143
guccuaucccaaggaggaa

SEQ ID NO: 2172567 - RNA, 19 nt, Artificial Sequence
  Description of Artificial Sequence: Synthetic oligonucleotide
  Antisense strand to SEQ ID NO: 2172566
uuccuccuugggauaggac

SEQ ID NO: 2172568 - RNA, 19 nt, Artificial Sequence
  Description of Artificial Sequence: Synthetic oligonucleotide
  Sense strand starting at position 49 of SEQ ID NO: 1883144
uuguuuagauucuuacaag

SEQ ID NO: 2172569 - RNA, 19 nt, Artificial Sequence
  Description of Artificial Sequence: Synthetic oligonucleotide
  Antisense strand to SEQ ID NO: 2172568
cuuguaagaaucuaaacaa

SEQ ID NO: 2172570 - RNA, 19 nt, Artificial Sequence
  Description of Artificial Sequence: Synthetic oligonucleotide
  Sense strand starting at position 71 of SEQ ID NO: 1883144
acuauuaaaggcggugaaa

SEQ ID NO: 2172571 - RNA, 19 nt, Artificial Sequence
  Description of Artificial Sequence: Synthetic oligonucleotide
  Antisense strand to SEQ ID NO: 2172570
uuucaccgccuuuaauagu

SEQ ID NO: 2172572 - RNA, 19 nt, Artificial Sequence
  Description of Artificial Sequence: Synthetic oligonucleotide
  Sense strand starting at position 73 of SEQ ID NO: 1883144
uauuaaaggcggugaaaug

SEQ ID NO: 2172573 - RNA, 19 nt, Artificial Sequence
  Description of Artificial Sequence: Synthetic oligonucleotide
  Antisense strand to SEQ ID NO: 2172572
cauuucaccgccuuuaaua

SEQ ID NO: 2172574 - RNA, 19 nt, Artificial Sequence
  Description of Artificial Sequence: Synthetic oligonucleotide
  Sense strand starting at position 988 of SEQ ID NO: 1883144
uagauaaggcucuaagugu

SEQ ID NO: 2172575 - RNA, 19 nt, Artificial Sequence
  Description of Artificial Sequence: Synthetic oligonucleotide
  Antisense strand to SEQ ID NO: 2172574
acacuuagagccuuaucua

SEQ ID NO: 2172576 - RNA, 19 nt, Artificial Sequence
  Description of Artificial Sequence: Synthetic oligonucleotide
  Sense strand starting at position 1134 of SEQ ID NO: 1883144
uuacaaaguccucaauugu

SEQ ID NO: 2172577 - RNA, 19 nt, Artificial Sequence
  Description of Artificial Sequence: Synthetic oligonucleotide
  Antisense strand to SEQ ID NO: 2172576
acaauugaggacuuuguaa

SEQ ID NO: 2172578 - RNA, 19 nt, Artificial Sequence
  Description of Artificial Sequence: Synthetic oligonucleotide
  Sense strand starting at position 1281 of SEQ ID NO: 1883144
aucugucacuaacuugaga

SEQ ID NO: 2172579 - RNA, 19 nt, Artificial Sequence
  Description of Artificial Sequence: Synthetic oligonucleotide
  Antisense strand to SEQ ID NO: 2172578
ucucaaguuagugacagau

SEQ ID NO: 2172580 - RNA, 19 nt, Artificial Sequence
  Description of Artificial Sequence: Synthetic oligonucleotide
  Sense strand starting at position 1314 of SEQ ID NO: 1883144
uuccaucuggccuauugaa

SEQ ID NO: 2172581 - RNA, 19 nt, Artificial Sequence
  Description of Artificial Sequence: Synthetic oligonucleotide
  Antisense strand to SEQ ID NO: 2172580
uucaauaggccagauggaa

SEQ ID NO: 2172582 - RNA, 19 nt, Artificial Sequence
  Description of Artificial Sequence: Synthetic oligonucleotide
  Sense strand starting at position 1336 of SEQ ID NO: 1883144
ucagacuggcaaugaguua

SEQ ID NO: 2172583 - RNA, 19 nt, Artificial Sequence
  Description of Artificial Sequence: Synthetic oligonucleotide
  Antisense strand to SEQ ID NO: 2172582
uaacucauugccagucuga

SEQ ID NO: 2172584 - RNA, 19 nt, Artificial Sequence
  Description of Artificial Sequence: Synthetic oligonucleotide
  Sense strand starting at position 1341 of SEQ ID NO: 1883144
cuggcaaugaguuaccaga

SEQ ID NO: 2172585 - RNA, 19 nt, Artificial Sequence
  Description of Artificial Sequence: Synthetic oligonucleotide
  Antisense strand to SEQ ID NO: 2172584
ucugguaacucauugccag

SEQ ID NO: 2172586 - RNA, 19 nt, Artificial Sequence
  Description of Artificial Sequence: Synthetic oligonucleotide
  Sense strand starting at position 1343 of SEQ ID NO: 1883144
ggcaaugaguuaccagagu

SEQ ID NO: 2172587 - RNA, 19 nt, Artificial Sequence
  Description of Artificial Sequence: Synthetic oligonucleotide
  Antisense strand to SEQ ID NO: 2172586
acucugguaacucauugcc

SEQ ID NO: 2172588 - RNA, 19 nt, Artificial Sequence
  Description of Artificial Sequence: Synthetic oligonucleotide
  Sense strand starting at position 1436 of SEQ ID NO: 1883144
guaauuggaggcuaacauu

SEQ ID NO: 2172589 - RNA, 19 nt, Artificial Sequence
  Description of Artificial Sequence: Synthetic oligonucleotide
  Antisense strand to SEQ ID NO: 2172588
aauguuagccuccaauuac

SEQ ID NO: 2172590 - RNA, 19 nt, Artificial Sequence
  Description of Artificial Sequence: Synthetic oligonucleotide
  Sense strand starting at position 1480 of SEQ ID NO: 1883144
aguaccacuccuggaauau

SEQ ID NO: 2172591 - RNA, 19 nt, Artificial Sequence
  Description of Artificial Sequence: Synthetic oligonucleotide
  Antisense strand to SEQ ID NO: 2172590
auauuccaggagugguacu

SEQ ID NO: 2172592 - RNA, 19 nt, Artificial Sequence
  Description of Artificial Sequence: Synthetic oligonucleotide
  Sense strand starting at position 1481 of SEQ ID NO: 1883144
guaccacuccuggaauauu

SEQ ID NO: 2172593 - RNA, 19 nt, Artificial Sequence
  Description of Artificial Sequence: Synthetic oligonucleotide
  Antisense strand to SEQ ID NO: 2172592
aauauuccaggagugguac

SEQ ID NO: 2172594 - RNA, 19 nt, Artificial Sequence
  Description of Artificial Sequence: Synthetic oligonucleotide
  Sense strand starting at position 2023 of SEQ ID NO: 1883144
ccuauaaugugagaauuua

SEQ ID NO: 2172595 - RNA, 19 nt, Artificial Sequence
  Description of Artificial Sequence: Synthetic oligonucleotide
  Antisense strand to SEQ ID NO: 2172594
uaaauucucacauuauagg

SEQ ID NO: 2172596 - RNA, 19 nt, Artificial Sequence
  Description of Artificial Sequence: Synthetic oligonucleotide
  Sense strand starting at position 2345 of SEQ ID NO: 1883144
ugaagagaccucuguugga

SEQ ID NO: 2172597 - RNA, 19 nt, Artificial Sequence
  Description of Artificial Sequence: Synthetic oligonucleotide
  Antisense strand to SEQ ID NO: 2172596
uccaacagaggucucuuca

SEQ ID NO: 2172598 - RNA, 19 nt, Artificial Sequence
  Description of Artificial Sequence: Synthetic oligonucleotide
  Sense strand starting at position 2926 of SEQ ID NO: 1883144
cauuaagaacucugguaga

SEQ ID NO: 2172599 - RNA, 19 nt, Artificial Sequence
  Description of Artificial Sequence: Synthetic oligonucleotide
  Antisense strand to SEQ ID NO: 2172598
ucuaccagaguucuuaaug

SEQ ID NO: 2172600 - RNA, 19 nt, Artificial Sequence
  Description of Artificial Sequence: Synthetic oligonucleotide
  Sense strand starting at position 3015 of SEQ ID NO: 1883144
cugguagaauauccuuacu

SEQ ID NO: 2172601 - RNA, 19 nt, Artificial Sequence
  Description of Artificial Sequence: Synthetic oligonucleotide
  Antisense strand to SEQ ID NO: 2172600
aguaaggauauucuaccag

SEQ ID NO: 2172602 - RNA, 19 nt, Artificial Sequence
  Description of Artificial Sequence: Synthetic oligonucleotide
  Sense strand starting at position 3017 of SEQ ID NO: 1883144
gguagaauauccuuacucu

SEQ ID NO: 2172603 - RNA, 19 nt, Artificial Sequence
  Description of Artificial Sequence: Synthetic oligonucleotide
  Antisense strand to SEQ ID NO: 2172602
agaguaaggauauucuacc

SEQ ID NO: 2172604 - RNA, 19 nt, Artificial Sequence
  Description of Artificial Sequence: Synthetic oligonucleotide
  Sense strand starting at position 3300 of SEQ ID NO: 1883144
agaggacuauuagcuaguu

SEQ ID NO: 2172605 - RNA, 19 nt, Artificial Sequence
  Description of Artificial Sequence: Synthetic oligonucleotide
  Antisense strand to SEQ ID NO: 2172604
aacuagcuaauaguccucu

SEQ ID NO: 2172606 - RNA, 19 nt, Artificial Sequence
  Description of Artificial Sequence: Synthetic oligonucleotide
  Sense strand starting at position 3301 of SEQ ID NO: 1883144
gaggacuauuagcuaguua

SEQ ID NO: 2172607 - RNA, 19 nt, Artificial Sequence
  Description of Artificial Sequence: Synthetic oligonucleotide
  Antisense strand to SEQ ID NO: 2172606
uaacuagcuaauaguccuc

SEQ ID NO: 2172608 - RNA, 19 nt, Artificial Sequence
  Description of Artificial Sequence: Synthetic oligonucleotide
  Sense strand starting at position 3305 of SEQ ID NO: 1883144
acuauuagcuaguuaggaa

SEQ ID NO: 2172609 - RNA, 19 nt, Artificial Sequence
  Description of Artificial Sequence: Synthetic oligonucleotide
  Antisense strand to SEQ ID NO: 2172608
uuccuaacuagcuaauagu

SEQ ID NO: 2172610 - RNA, 19 nt, Artificial Sequence
  Description of Artificial Sequence: Synthetic oligonucleotide
  Sense strand starting at position 3360 of SEQ ID NO: 1883144
aaggcagugauagggauau

SEQ ID NO: 2172611 - RNA, 19 nt, Artificial Sequence
  Description of Artificial Sequence: Synthetic oligonucleotide
  Antisense strand to SEQ ID NO: 2172610
auaucccuaucacugccuu

SEQ ID NO: 2172612 - RNA, 19 nt, Artificial Sequence
  Description of Artificial Sequence: Synthetic oligonucleotide
  Sense strand starting at position 3362 of SEQ ID NO: 1883144
ggcagugauagggauaugu

SEQ ID NO: 2172613 - RNA, 19 nt, Artificial Sequence
  Description of Artificial Sequence: Synthetic oligonucleotide
  Antisense strand to SEQ ID NO: 2172612
acauaucccuaucacugcc

SEQ ID NO: 2172614 - RNA, 19 nt, Artificial Sequence
  Description of Artificial Sequence: Synthetic oligonucleotide
  Sense strand starting at position 3366 of SEQ ID NO: 1883144
gugauagggauauguacaa

SEQ ID NO: 2172615 - RNA, 19 nt, Artificial Sequence
  Description of Artificial Sequence: Synthetic oligonucleotide
  Antisense strand to SEQ ID NO: 2172614
uuguacauaucccuaucac

SEQ ID NO: 2172616 - RNA, 19 nt, Artificial Sequence
  Description of Artificial Sequence: Synthetic oligonucleotide
  Sense strand starting at position 3391 of SEQ ID NO: 1883144
augguaguacuugaauauc

SEQ ID NO: 2172617 - RNA, 19 nt, Artificial Sequence
  Description of Artificial Sequence: Synthetic oligonucleotide
  Antisense strand to SEQ ID NO: 2172616
gauauucaaguacuaccau

SEQ ID NO: 2172618 - RNA, 19 nt, Artificial Sequence
  Description of Artificial Sequence: Synthetic oligonucleotide
  Sense strand starting at position 3394 of SEQ ID NO: 1883144
guaguacuugaauaucuuu

SEQ ID NO: 2172619 - RNA, 19 nt, Artificial Sequence
  Description of Artificial Sequence: Synthetic oligonucleotide
  Antisense strand to SEQ ID NO: 2172618
aaagauauucaaguacuac

SEQ ID NO: 2172620 - RNA, 19 nt, Artificial Sequence
  Description of Artificial Sequence: Synthetic oligonucleotide
  Sense strand starting at position 3449 of SEQ ID NO: 1883144
aggaguuaauaucuaaguu

SEQ ID NO: 2172621 - RNA, 19 nt, Artificial Sequence
  Description of Artificial Sequence: Synthetic oligonucleotide
  Antisense strand to SEQ ID NO: 2172620
aacuuagauauuaacuccu

SEQ ID NO: 2172622 - RNA, 19 nt, Artificial Sequence
  Description of Artificial Sequence: Synthetic oligonucleotide
  Sense strand starting at position 3469 of SEQ ID NO: 1883144
agcuuugaaggguagguua

SEQ ID NO: 2172623 - RNA, 19 nt, Artificial Sequence
  Description of Artificial Sequence: Synthetic oligonucleotide
  Antisense strand to SEQ ID NO: 2172622
uaaccuacccuucaaagcu

SEQ ID NO: 2172624 - RNA, 19 nt, Artificial Sequence
  Description of Artificial Sequence: Synthetic oligonucleotide
  Sense strand starting at position 3481 of SEQ ID NO: 1883144
uagguuaagaguugacuag

SEQ ID NO: 2172625 - RNA, 19 nt, Artificial Sequence
  Description of Artificial Sequence: Synthetic oligonucleotide
  Antisense strand to SEQ ID NO: 2172624
cuagucaacucuuaaccua

SEQ ID NO: 2172626 - RNA, 19 nt, Artificial Sequence
  Description of Artificial Sequence: Synthetic oligonucleotide
  Sense strand starting at position 3589 of SEQ ID NO: 1883144
augguaucaccauguuuag

SEQ ID NO: 2172627 - RNA, 19 nt, Artificial Sequence
  Description of Artificial Sequence: Synthetic oligonucleotide
  Antisense strand to SEQ ID NO: 2172626
cuaaacauggugauaccau

SEQ ID NO: 2172628 - RNA, 19 nt, Artificial Sequence
  Description of Artificial Sequence: Synthetic oligonucleotide
  Sense strand starting at position 3605 of SEQ ID NO: 1883144
uaguuagugcauuagaaag

SEQ ID NO: 2172629 - RNA, 19 nt, Artificial Sequence
  Description of Artificial Sequence: Synthetic oligonucleotide
  Antisense strand to SEQ ID NO: 2172628
cuuucuaaugcacuaacua

SEQ ID NO: 2172630 - RNA, 19 nt, Artificial Sequence
  Description of Artificial Sequence: Synthetic oligonucleotide
  Sense strand starting at position 3707 of SEQ ID NO: 1883144
ccuaguugggcucauugau

SEQ ID NO: 2172631 - RNA, 19 nt, Artificial Sequence
  Description of Artificial Sequence: Synthetic oligonucleotide
  Antisense strand to SEQ ID NO: 2172630
aucaaugagcccaacuagg

SEQ ID NO: 2172632 - RNA, 19 nt, Artificial Sequence
  Description of Artificial Sequence: Synthetic oligonucleotide
  Sense strand starting at position 3772 of SEQ ID NO: 1883144
gcuggacuuccucauaugu

SEQ ID NO: 2172633 - RNA, 19 nt, Artificial Sequence
  Description of Artificial Sequence: Synthetic oligonucleotide
  Antisense strand to SEQ ID NO: 2172632
acauaugaggaaguccagc

SEQ ID NO: 2172634 - RNA, 19 nt, Artificial Sequence
  Description of Artificial Sequence: Synthetic oligonucleotide
  Sense strand starting at position 3808 of SEQ ID NO: 1883144
ggucucagacuauaagcuu

SEQ ID NO: 2172635 - RNA, 19 nt, Artificial Sequence
  Description of Artificial Sequence: Synthetic oligonucleotide
  Antisense strand to SEQ ID NO: 2172634
aagcuuauagucugagacc

SEQ ID NO: 2172636 - RNA, 19 nt, Artificial Sequence
  Description of Artificial Sequence: Synthetic oligonucleotide
  Sense strand starting at position 3814 of SEQ ID NO: 1883144
agacuauaagcuuguuuaa

SEQ ID NO: 2172637 - RNA, 19 nt, Artificial Sequence
  Description of Artificial Sequence: Synthetic oligonucleotide
  Antisense strand to SEQ ID NO: 2172636
uuaaacaagcuuauagucu

SEQ ID NO: 2172638 - RNA, 19 nt, Artificial Sequence
  Description of Artificial Sequence: Synthetic oligonucleotide
  Sense strand starting at position 3816 of SEQ ID NO: 1883144
acuauaagcuuguuuaaga

SEQ ID NO: 2172639 - RNA, 19 nt, Artificial Sequence
  Description of Artificial Sequence: Synthetic oligonucleotide
  Antisense strand to SEQ ID NO: 2172638
ucuuaaacaagcuuauagu

SEQ ID NO: 2172640 - RNA, 19 nt, Artificial Sequence
  Description of Artificial Sequence: Synthetic oligonucleotide
  Sense strand starting at position 3866 of SEQ ID NO: 1883144
ccguguggucucuuauccu

SEQ ID NO: 2172641 - RNA, 19 nt, Artificial Sequence
  Description of Artificial Sequence: Synthetic oligonucleotide
  Antisense strand to SEQ ID NO: 2172640
aggauaagagaccacacgg

SEQ ID NO: 2172642 - RNA, 19 nt, Artificial Sequence
  Description of Artificial Sequence: Synthetic oligonucleotide
  Sense strand starting at position 3879 of SEQ ID NO: 1883144
uauccuuuagccgacuaga

SEQ ID NO: 2172643 - RNA, 19 nt, Artificial Sequence
  Description of Artificial Sequence: Synthetic oligonucleotide
  Antisense strand to SEQ ID NO: 2172642
ucuagucggcuaaaggaua

SEQ ID NO: 2172644 - RNA, 19 nt, Artificial Sequence
  Description of Artificial Sequence: Synthetic oligonucleotide
  Sense strand starting at position 3882 of SEQ ID NO: 1883144
ccuuuagccgacuagacua

SEQ ID NO: 2172645 - RNA, 19 nt, Artificial Sequence
  Description of Artificial Sequence: Synthetic oligonucleotide
  Antisense strand to SEQ ID NO: 2172644
uagucuagucggcuaaagg

SEQ ID NO: 2172646 - RNA, 19 nt, Artificial Sequence
  Description of Artificial Sequence: Synthetic oligonucleotide
  Sense strand starting at position 3921 of SEQ ID NO: 1883144
acacuugugccagagucau

SEQ ID NO: 2172647 - RNA, 19 nt, Artificial Sequence
  Description of Artificial Sequence: Synthetic oligonucleotide
  Antisense strand to SEQ ID NO: 2172646
augacucuggcacaagugu

SEQ ID NO: 2172648 - RNA, 19 nt, Artificial Sequence
  Description of Artificial Sequence: Synthetic oligonucleotide
  Sense strand starting at position 26 of SEQ ID NO: 1883145
uggccuugguuaucuauua

SEQ ID NO: 2172649 - RNA, 19 nt, Artificial Sequence
  Description of Artificial Sequence: Synthetic oligonucleotide
  Antisense strand to SEQ ID NO: 2172648
uaauagauaaccaaggcca

SEQ ID NO: 2172650 - RNA, 19 nt, Artificial Sequence
  Description of Artificial Sequence: Synthetic oligonucleotide
  Sense strand starting at position 31 of SEQ ID NO: 1883145
uugguuaucuauuaccuuu

SEQ ID NO: 2172651 - RNA, 19 nt, Artificial Sequence
  Description of Artificial Sequence: Synthetic oligonucleotide
  Antisense strand to SEQ ID NO: 2172650
aaagguaauagauaaccaa

SEQ ID NO: 2172652 - RNA, 19 nt, Artificial Sequence
  Description of Artificial Sequence: Synthetic oligonucleotide
  Sense strand starting at position 203 of SEQ ID NO: 1883145
gccgagguaccggguuauu

SEQ ID NO: 2172653 - RNA, 19 nt, Artificial Sequence
  Description of Artificial Sequence: Synthetic oligonucleotide
  Antisense strand to SEQ ID NO: 2172652
aauaacccgguaccucggc

SEQ ID NO: 2172654 - RNA, 19 nt, Artificial Sequence
  Description of Artificial Sequence: Synthetic oligonucleotide
  Sense strand starting at position 247 of SEQ ID NO: 1883145
acgggcuguugaugagauu

SEQ ID NO: 2172655 - RNA, 19 nt, Artificial Sequence
  Description of Artificial Sequence: Synthetic oligonucleotide
  Antisense strand to SEQ ID NO: 2172654
aaucucaucaacagcccgu

SEQ ID NO: 2172656 - RNA, 19 nt, Artificial Sequence
  Description of Artificial Sequence: Synthetic oligonucleotide
  Sense strand starting at position 250 of SEQ ID NO: 1883145
ggcuguugaugagauuccu

SEQ ID NO: 2172657 - RNA, 19 nt, Artificial Sequence
  Description of Artificial Sequence: Synthetic oligonucleotide
  Antisense strand to SEQ ID NO: 2172656
aggaaucucaucaacagcc

SEQ ID NO: 2172658 - RNA, 19 nt, Artificial Sequence
  Description of Artificial Sequence: Synthetic oligonucleotide
  Sense strand starting at position 256 of SEQ ID NO: 1883145
ugaugagauuccuccugac

SEQ ID NO: 2172659 - RNA, 19 nt, Artificial Sequence
  Description of Artificial Sequence: Synthetic oligonucleotide
  Antisense strand to SEQ ID NO: 2172658
gucaggaggaaucucauca

SEQ ID NO: 2172660 - RNA, 19 nt, Artificial Sequence
  Description of Artificial Sequence: Synthetic oligonucleotide
  Sense strand starting at position 259 of SEQ ID NO: 1883145
ugagauuccuccugacagg

SEQ ID NO: 2172661 - RNA, 19 nt, Artificial Sequence
  Description of Artificial Sequence: Synthetic oligonucleotide
  Antisense strand to SEQ ID NO: 2172660
ccugucaggaggaaucuca

SEQ ID NO: 2172662 - RNA, 19 nt, Artificial Sequence
  Description of Artificial Sequence: Synthetic oligonucleotide
  Sense strand starting at position 416 of SEQ ID NO: 1883145
cggcgcuuuggagaauauu

SEQ ID NO: 2172663 - RNA, 19 nt, Artificial Sequence
  Description of Artificial Sequence: Synthetic oligonucleotide
  Antisense strand to SEQ ID NO: 2172662
aauauucuccaaagcgccg

SEQ ID NO: 2172664 - RNA, 19 nt, Artificial Sequence
  Description of Artificial Sequence: Synthetic oligonucleotide
  Sense strand starting at position 499 of SEQ ID NO: 1883145
ugcugaucgcuuuaucuuu

SEQ ID NO: 2172665 - RNA, 19 nt, Artificial Sequence
  Description of Artificial Sequence: Synthetic oligonucleotide
  Antisense strand to SEQ ID NO: 2172664
aaagauaaagcgaucagca

SEQ ID NO: 2172666 - RNA, 19 nt, Artificial Sequence
  Description of Artificial Sequence: Synthetic oligonucleotide
  Sense strand starting at position 501 of SEQ ID NO: 1883145
cugaucgcuuuaucuuuaa

SEQ ID NO: 2172667 - RNA, 19 nt, Artificial Sequence
  Description of Artificial Sequence: Synthetic oligonucleotide
  Antisense strand to SEQ ID NO: 2172666
uuaaagauaaagcgaucag

SEQ ID NO: 2172668 - RNA, 19 nt, Artificial Sequence
  Description of Artificial Sequence: Synthetic oligonucleotide
  Sense strand starting at position 505 of SEQ ID NO: 1883145
ucgcuuuaucuuuaaucga

SEQ ID NO: 2172669 - RNA, 19 nt, Artificial Sequence
  Description of Artificial Sequence: Synthetic oligonucleotide
  Antisense strand to SEQ ID NO: 2172668
ucgauuaaagauaaagcga

SEQ ID NO: 2172670 - RNA, 19 nt, Artificial Sequence
  Description of Artificial Sequence: Synthetic oligonucleotide
  Sense strand starting at position 508 of SEQ ID NO: 1883145
cuuuaucuuuaaucgauag

SEQ ID NO: 2172671 - RNA, 19 nt, Artificial Sequence
  Description of Artificial Sequence: Synthetic oligonucleotide
  Antisense strand to SEQ ID NO: 2172670
cuaucgauuaaagauaaag

SEQ ID NO: 2172672 - RNA, 19 nt, Artificial Sequence
  Description of Artificial Sequence: Synthetic oligonucleotide
  Sense strand starting at position 539 of SEQ ID NO: 1883145
gccgacaagucacgaauuu

SEQ ID NO: 2172673 - RNA, 19 nt, Artificial Sequence
  Description of Artificial Sequence: Synthetic oligonucleotide
  Antisense strand to SEQ ID NO: 2172672
aaauucgugacuugucggc

SEQ ID NO: 2172674 - RNA, 19 nt, Artificial Sequence
  Description of Artificial Sequence: Synthetic oligonucleotide
  Sense strand starting at position 669 of SEQ ID NO: 1883145
gcgaguuuccgacgcgcau

SEQ ID NO: 2172675 - RNA, 19 nt, Artificial Sequence
  Description of Artificial Sequence: Synthetic oligonucleotide
  Antisense strand to SEQ ID NO: 2172674
augcgcgucggaaacucgc

SEQ ID NO: 2172676 - RNA, 19 nt, Artificial Sequence
  Description of Artificial Sequence: Synthetic oligonucleotide
  Sense strand starting at position 982 of SEQ ID NO: 1883145
cgcgcagggcuguaauaau

SEQ ID NO: 2172677 - RNA, 19 nt, Artificial Sequence
  Description of Artificial Sequence: Synthetic oligonucleotide
  Antisense strand to SEQ ID NO: 2172676
auuauuacagcccugcgcg

SEQ ID NO: 2172678 - RNA, 19 nt, Artificial Sequence
  Description of Artificial Sequence: Synthetic oligonucleotide
  Sense strand starting at position 1011 of SEQ ID NO: 1883145
uuauuucuccugcaaucgu

SEQ ID NO: 2172679 - RNA, 19 nt, Artificial Sequence
  Description of Artificial Sequence: Synthetic oligonucleotide
  Antisense strand to SEQ ID NO: 2172678
acgauugcaggagaaauaa

SEQ ID NO: 2172680 - RNA, 19 nt, Artificial Sequence
  Description of Artificial Sequence: Synthetic oligonucleotide
  Sense strand starting at position 1018 of SEQ ID NO: 1883145
uccugcaaucguuagcgaa

SEQ ID NO: 2172681 - RNA, 19 nt, Artificial Sequence
  Description of Artificial Sequence: Synthetic oligonucleotide
  Antisense strand to SEQ ID NO: 2172680
uucgcuaacgauugcagga

SEQ ID NO: 2172682 - RNA, 19 nt, Artificial Sequence
  Description of Artificial Sequence: Synthetic oligonucleotide
  Sense strand starting at position 1021 of SEQ ID NO: 1883145
ugcaaucguuagcgaagga

SEQ ID NO: 2172683 - RNA, 19 nt, Artificial Sequence
  Description of Artificial Sequence: Synthetic oligonucleotide
  Antisense strand to SEQ ID NO: 2172682
uccuucgcuaacgauugca

SEQ ID NO: 2172684 - RNA, 19 nt, Artificial Sequence
  Description of Artificial Sequence: Synthetic oligonucleotide
  Sense strand starting at position 3010 of SEQ ID NO: 1883145
ccguauaauugaucaccaa

SEQ ID NO: 2172685 - RNA, 19 nt, Artificial Sequence
  Description of Artificial Sequence: Synthetic oligonucleotide
  Antisense strand to SEQ ID NO: 2172684
uuggugaucaauuauacgg

SEQ ID NO: 2172686 - RNA, 19 nt, Artificial Sequence
  Description of Artificial Sequence: Synthetic oligonucleotide
  Sense strand starting at position 3118 of SEQ ID NO: 1883145
guccauuucuucuaaaugu

SEQ ID NO: 2172687 - RNA, 19 nt, Artificial Sequence
  Description of Artificial Sequence: Synthetic oligonucleotide
  Antisense strand to SEQ ID NO: 2172686
acauuuagaagaaauggac

SEQ ID NO: 2172688 - RNA, 19 nt, Artificial Sequence
  Description of Artificial Sequence: Synthetic oligonucleotide
  Sense strand starting at position 3127 of SEQ ID NO: 1883145
uucuaaauguuucccgaau

SEQ ID NO: 2172689 - RNA, 19 nt, Artificial Sequence
  Description of Artificial Sequence: Synthetic oligonucleotide
  Antisense strand to SEQ ID NO: 2172688
auucgggaaacauuuagaa

SEQ ID NO: 2172690 - RNA, 19 nt, Artificial Sequence
  Description of Artificial Sequence: Synthetic oligonucleotide
  Sense strand starting at position 3128 of SEQ ID NO: 1883145
ucuaaauguuucccgaauc

SEQ ID NO: 2172691 - RNA, 19 nt, Artificial Sequence
  Description of Artificial Sequence: Synthetic oligonucleotide
  Antisense strand to SEQ ID NO: 2172690
gauucgggaaacauuuaga

SEQ ID NO: 2172692 - RNA, 19 nt, Artificial Sequence
  Description of Artificial Sequence: Synthetic oligonucleotide
  Sense strand starting at position 3129 of SEQ ID NO: 1883145
cuaaauguuucccgaaucu

SEQ ID NO: 2172693 - RNA, 19 nt, Artificial Sequence
  Description of Artificial Sequence: Synthetic oligonucleotide
  Antisense strand to SEQ ID NO: 2172692
agauucgggaaacauuuag

SEQ ID NO: 2172694 - RNA, 19 nt, Artificial Sequence
  Description of Artificial Sequence: Synthetic oligonucleotide
  Sense strand starting at position 3151 of SEQ ID NO: 1883145
aguggucuccacugucaaa

SEQ ID NO: 2172695 - RNA, 19 nt, Artificial Sequence
  Description of Artificial Sequence: Synthetic oligonucleotide
  Antisense strand to SEQ ID NO: 2172694
uuugacaguggagaccacu

SEQ ID NO: 2172696 - RNA, 19 nt, Artificial Sequence
  Description of Artificial Sequence: Synthetic oligonucleotide
  Sense strand starting at position 3377 of SEQ ID NO: 1883145
cuguguucucagcguguga

SEQ ID NO: 2172697 - RNA, 19 nt, Artificial Sequence
  Description of Artificial Sequence: Synthetic oligonucleotide
  Antisense strand to SEQ ID NO: 2172696
ucacacgcugagaacacag

SEQ ID NO: 2172698 - RNA, 19 nt, Artificial Sequence
  Description of Artificial Sequence: Synthetic oligonucleotide
  Sense strand starting at position 3444 of SEQ ID NO: 1883145
gagggauccgcccagaagu

SEQ ID NO: 2172699 - RNA, 19 nt, Artificial Sequence
  Description of Artificial Sequence: Synthetic oligonucleotide
  Antisense strand to SEQ ID NO: 2172698
acuucugggcggaucccuc

SEQ ID NO: 2172700 - RNA, 19 nt, Artificial Sequence
  Description of Artificial Sequence: Synthetic oligonucleotide
  Sense strand starting at position 3446 of SEQ ID NO: 1883145
gggauccgcccagaaguua

SEQ ID NO: 2172701 - RNA, 19 nt, Artificial Sequence
  Description of Artificial Sequence: Synthetic oligonucleotide
  Antisense strand to SEQ ID NO: 2172700
uaacuucugggcggauccc

SEQ ID NO: 2172702 - RNA, 19 nt, Artificial Sequence
  Description of Artificial Sequence: Synthetic oligonucleotide
  Sense strand starting at position 3486 of SEQ ID NO: 1883145
aguuauaauucucugaagg

SEQ ID NO: 2172703 - RNA, 19 nt, Artificial Sequence
  Description of Artificial Sequence: Synthetic oligonucleotide
  Antisense strand to SEQ ID NO: 2172702
ccuucagagaauuauaacu

SEQ ID NO: 2172704 - RNA, 19 nt, Artificial Sequence
  Description of Artificial Sequence: Synthetic oligonucleotide
  Sense strand starting at position 3487 of SEQ ID NO: 1883145
guuauaauucucugaagga

SEQ ID NO: 2172705 - RNA, 19 nt, Artificial Sequence
  Description of Artificial Sequence: Synthetic oligonucleotide
  Antisense strand to SEQ ID NO: 2172704
uccuucagagaauuauaac

SEQ ID NO: 2172706 - RNA, 19 nt, Artificial Sequence
  Description of Artificial Sequence: Synthetic oligonucleotide
  Sense strand starting at position 3488 of SEQ ID NO: 1883145
uuauaauucucugaaggaa

SEQ ID NO: 2172707 - RNA, 19 nt, Artificial Sequence
  Description of Artificial Sequence: Synthetic oligonucleotide
  Antisense strand to SEQ ID NO: 2172706
uuccuucagagaauuauaa

SEQ ID NO: 2172708 - RNA, 19 nt, Artificial Sequence
  Description of Artificial Sequence: Synthetic oligonucleotide
  Sense strand starting at position 3510 of SEQ ID NO: 1883145
uauggaguguuauugguga

SEQ ID NO: 2172709 - RNA, 19 nt, Artificial Sequence
  Description of Artificial Sequence: Synthetic oligonucleotide
  Antisense strand to SEQ ID NO: 2172708
ucaccaauaacacuccaua

SEQ ID NO: 2172710 - RNA, 19 nt, Artificial Sequence
  Description of Artificial Sequence: Synthetic oligonucleotide
  Sense strand starting at position 3512 of SEQ ID NO: 1883145
uggaguguuauuggugaau

SEQ ID NO: 2172711 - RNA, 19 nt, Artificial Sequence
  Description of Artificial Sequence: Synthetic oligonucleotide
  Antisense strand to SEQ ID NO: 2172710
auucaccaauaacacucca

SEQ ID NO: 2172712 - RNA, 19 nt, Artificial Sequence
  Description of Artificial Sequence: Synthetic oligonucleotide
  Sense strand starting at position 3514 of SEQ ID NO: 1883145
gaguguuauuggugaaugu

SEQ ID NO: 2172713 - RNA, 19 nt, Artificial Sequence
  Description of Artificial Sequence: Synthetic oligonucleotide
  Antisense strand to SEQ ID NO: 2172712
acauucaccaauaacacuc

SEQ ID NO: 2172714 - RNA, 19 nt, Artificial Sequence
  Description of Artificial Sequence: Synthetic oligonucleotide
  Sense strand starting at position 3515 of SEQ ID NO: 1883145
aguguuauuggugaaugug

SEQ ID NO: 2172715 - RNA, 19 nt, Artificial Sequence
  Description of Artificial Sequence: Synthetic oligonucleotide
  Antisense strand to SEQ ID NO: 2172714
cacauucaccaauaacacu

SEQ ID NO: 2172716 - RNA, 19 nt, Artificial Sequence
  Description of Artificial Sequence: Synthetic oligonucleotide
  Sense strand starting at position 3518 of SEQ ID NO: 1883145
guuauuggugaaugugaaa

SEQ ID NO: 2172717 - RNA, 19 nt, Artificial Sequence
  Description of Artificial Sequence: Synthetic oligonucleotide
  Antisense strand to SEQ ID NO: 2172716
uuucacauucaccaauaac

SEQ ID NO: 2172718 - RNA, 19 nt, Artificial Sequence
  Description of Artificial Sequence: Synthetic oligonucleotide
  Sense strand starting at position 3543 of SEQ ID NO: 1883145
acaaauacaguuugugaca

SEQ ID NO: 2172719 - RNA, 19 nt, Artificial Sequence
  Description of Artificial Sequence: Synthetic oligonucleotide
  Antisense strand to SEQ ID NO: 2172718
ugucacaaacuguauuugu

SEQ ID NO: 2172720 - RNA, 19 nt, Artificial Sequence
  Description of Artificial Sequence: Synthetic oligonucleotide
  Sense strand starting at position 3548 of SEQ ID NO: 1883145
uacaguuugugacaucaga

SEQ ID NO: 2172721 - RNA, 19 nt, Artificial Sequence
  Description of Artificial Sequence: Synthetic oligonucleotide
  Antisense strand to SEQ ID NO: 2172720
ucugaugucacaaacugua

SEQ ID NO: 2172722 - RNA, 19 nt, Artificial Sequence
  Description of Artificial Sequence: Synthetic oligonucleotide
  Sense strand starting at position 3578 of SEQ ID NO: 1883145
ugaggacgucguuauuaaa

SEQ ID NO: 2172723 - RNA, 19 nt, Artificial Sequence
  Description of Artificial Sequence: Synthetic oligonucleotide
  Antisense strand to SEQ ID NO: 2172722
uuuaauaacgacguccuca

SEQ ID NO: 2172724 - RNA, 19 nt, Artificial Sequence
  Description of Artificial Sequence: Synthetic oligonucleotide
  Sense strand starting at position 3581 of SEQ ID NO: 1883145
ggacgucguuauuaaaucu

SEQ ID NO: 2172725 - RNA, 19 nt, Artificial Sequence
  Description of Artificial Sequence: Synthetic oligonucleotide
  Antisense strand to SEQ ID NO: 2172724
agauuuaauaacgacgucc

SEQ ID NO: 2172726 - RNA, 19 nt, Artificial Sequence
  Description of Artificial Sequence: Synthetic oligonucleotide
  Sense strand starting at position 3662 of SEQ ID NO: 1883145
ggagaucgaucccaggaaa

SEQ ID NO: 2172727 - RNA, 19 nt, Artificial Sequence
  Description of Artificial Sequence: Synthetic oligonucleotide
  Antisense strand to SEQ ID NO: 2172726
uuuccugggaucgaucucc

SEQ ID NO: 2172728 - RNA, 19 nt, Artificial Sequence
  Description of Artificial Sequence: Synthetic oligonucleotide
  Sense strand starting at position 113 of SEQ ID NO: 1883146
aggccuaaucacugaaaga

SEQ ID NO: 2172729 - RNA, 19 nt, Artificial Sequence
  Description of Artificial Sequence: Synthetic oligonucleotide
  Antisense strand to SEQ ID NO: 2172728
ucuuucagugauuaggccu

SEQ ID NO: 2172730 - RNA, 19 nt, Artificial Sequence
  Description of Artificial Sequence: Synthetic oligonucleotide
  Sense strand starting at position 197 of SEQ ID NO: 1883146
cagacauacgccugucaau

SEQ ID NO: 2172731 - RNA, 19 nt, Artificial Sequence
  Description of Artificial Sequence: Synthetic oligonucleotide
  Antisense strand to SEQ ID NO: 2172730
auugacaggcguaugucug

SEQ ID NO: 2172732 - RNA, 19 nt, Artificial Sequence
  Description of Artificial Sequence: Synthetic oligonucleotide
  Sense strand starting at position 258 of SEQ ID NO: 1883146
gcacguuuccggaagucug

SEQ ID NO: 2172733 - RNA, 19 nt, Artificial Sequence
  Description of Artificial Sequence: Synthetic oligonucleotide
  Antisense strand to SEQ ID NO: 2172732
cagacuuccggaaacgugc

SEQ ID NO: 2172734 - RNA, 19 nt, Artificial Sequence
  Description of Artificial Sequence: Synthetic oligonucleotide
  Sense strand starting at position 288 of SEQ ID NO: 1883146
uucugacucuuccagaaag

SEQ ID NO: 2172735 - RNA, 19 nt, Artificial Sequence
  Description of Artificial Sequence: Synthetic oligonucleotide
  Antisense strand to SEQ ID NO: 2172734
cuuucuggaagagucagaa

SEQ ID NO: 2172736 - RNA, 19 nt, Artificial Sequence
  Description of Artificial Sequence: Synthetic oligonucleotide
  Sense strand starting at position 290 of SEQ ID NO: 1883146
cugacucuuccagaaagca

SEQ ID NO: 2172737 - RNA, 19 nt, Artificial Sequence
  Description of Artificial Sequence: Synthetic oligonucleotide
  Antisense strand to SEQ ID NO: 2172736
ugcuuucuggaagagucag

SEQ ID NO: 2172738 - RNA, 19 nt, Artificial Sequence
  Description of Artificial Sequence: Synthetic oligonucleotide
  Sense strand starting at position 321 of SEQ ID NO: 1883146
ucucucuugcucgugaguu

SEQ ID NO: 2172739 - RNA, 19 nt, Artificial Sequence
  Description of Artificial Sequence: Synthetic oligonucleotide
  Antisense strand to SEQ ID NO: 2172738
aacucacgagcaagagaga

SEQ ID NO: 2172740 - RNA, 19 nt, Artificial Sequence
  Description of Artificial Sequence: Synthetic oligonucleotide
  Sense strand starting at position 326 of SEQ ID NO: 1883146
cuugcucgugaguucuuau

SEQ ID NO: 2172741 - RNA, 19 nt, Artificial Sequence
  Description of Artificial Sequence: Synthetic oligonucleotide
  Antisense strand to SEQ ID NO: 2172740
auaagaacucacgagcaag

SEQ ID NO: 2172742 - RNA, 19 nt, Artificial Sequence
  Description of Artificial Sequence: Synthetic oligonucleotide
  Sense strand starting at position 329 of SEQ ID NO: 1883146
gcucgugaguucuuaugau

SEQ ID NO: 2172743 - RNA, 19 nt, Artificial Sequence
  Description of Artificial Sequence: Synthetic oligonucleotide
  Antisense strand to SEQ ID NO: 2172742
aucauaagaacucacgagc

SEQ ID NO: 2172744 - RNA, 19 nt, Artificial Sequence
  Description of Artificial Sequence: Synthetic oligonucleotide
  Sense strand starting at position 365 of SEQ ID NO: 1883146
agcaaacgaaugggaaauu

SEQ ID NO: 2172745 - RNA, 19 nt, Artificial Sequence
  Description of Artificial Sequence: Synthetic oligonucleotide
  Antisense strand to SEQ ID NO: 2172744
aauuucccauucguuugcu

SEQ ID NO: 2172746 - RNA, 19 nt, Artificial Sequence
  Description of Artificial Sequence: Synthetic oligonucleotide
  Sense strand starting at position 374 of SEQ ID NO: 1883146
augggaaauucccacagga

SEQ ID NO: 2172747 - RNA, 19 nt, Artificial Sequence
  Description of Artificial Sequence: Synthetic oligonucleotide
  Antisense strand to SEQ ID NO: 2172746
uccugugggaauuucccau

SEQ ID NO: 2172748 - RNA, 19 nt, Artificial Sequence
  Description of Artificial Sequence: Synthetic oligonucleotide
  Sense strand starting at position 475 of SEQ ID NO: 1883146
aauagcaagucgcugagaa

SEQ ID NO: 2172749 - RNA, 19 nt, Artificial Sequence
  Description of Artificial Sequence: Synthetic oligonucleotide
  Antisense strand to SEQ ID NO: 2172748
uucucagcgacuugcuauu

SEQ ID NO: 2172750 - RNA, 19 nt, Artificial Sequence
  Description of Artificial Sequence: Synthetic oligonucleotide
  Sense strand starting at position 476 of SEQ ID NO: 1883146
auagcaagucgcugagaag

SEQ ID NO: 2172751 - RNA, 19 nt, Artificial Sequence
  Description of Artificial Sequence: Synthetic oligonucleotide
  Antisense strand to SEQ ID NO: 2172750
cuucucagcgacuugcuau

SEQ ID NO: 2172752 - RNA, 19 nt, Artificial Sequence
  Description of Artificial Sequence: Synthetic oligonucleotide
  Sense strand starting at position 551 of SEQ ID NO: 1883146
cagcgauagucacuguauc

SEQ ID NO: 2172753 - RNA, 19 nt, Artificial Sequence
  Description of Artificial Sequence: Synthetic oligonucleotide
  Antisense strand to SEQ ID NO: 2172752
gauacagugacuaucgcug

SEQ ID NO: 2172754 - RNA, 19 nt, Artificial Sequence
  Description of Artificial Sequence: Synthetic oligonucleotide
  Sense strand starting at position 552 of SEQ ID NO: 1883146
agcgauagucacuguauca

SEQ ID NO: 2172755 - RNA, 19 nt, Artificial Sequence
  Description of Artificial Sequence: Synthetic oligonucleotide
  Antisense strand to SEQ ID NO: 2172754
ugauacagugacuaucgcu

SEQ ID NO: 2172756 - RNA, 19 nt, Artificial Sequence
  Description of Artificial Sequence: Synthetic oligonucleotide
  Sense strand starting at position 736 of SEQ ID NO: 1883146
gacgacucuuaaguaaauc

SEQ ID NO: 2172757 - RNA, 19 nt, Artificial Sequence
  Description of Artificial Sequence: Synthetic oligonucleotide
  Antisense strand to SEQ ID NO: 2172756
gauuuacuuaagagucguc

SEQ ID NO: 2172758 - RNA, 19 nt, Artificial Sequence
  Description of Artificial Sequence: Synthetic oligonucleotide
  Sense strand starting at position 936 of SEQ ID NO: 1883146
auuuaagucuucugagagc

SEQ ID NO: 2172759 - RNA, 19 nt, Artificial Sequence
  Description of Artificial Sequence: Synthetic oligonucleotide
  Antisense strand to SEQ ID NO: 2172758
gcucucagaagacuuaaau

SEQ ID NO: 2172760 - RNA, 19 nt, Artificial Sequence
  Description of Artificial Sequence: Synthetic oligonucleotide
  Sense strand starting at position 980 of SEQ ID NO: 1883146
gccgaagcucucgcucaau

SEQ ID NO: 2172761 - RNA, 19 nt, Artificial Sequence
  Description of Artificial Sequence: Synthetic oligonucleotide
  Antisense strand to SEQ ID NO: 2172760
auugagcgagagcuucggc

SEQ ID NO: 2172762 - RNA, 19 nt, Artificial Sequence
  Description of Artificial Sequence: Synthetic oligonucleotide
  Sense strand starting at position 982 of SEQ ID NO: 1883146
cgaagcucucgcucaaugu

SEQ ID NO: 2172763 - RNA, 19 nt, Artificial Sequence
  Description of Artificial Sequence: Synthetic oligonucleotide
  Antisense strand to SEQ ID NO: 2172762
acauugagcgagagcuucg

SEQ ID NO: 2172764 - RNA, 19 nt, Artificial Sequence
  Description of Artificial Sequence: Synthetic oligonucleotide
  Sense strand starting at position 1320 of SEQ ID NO: 1883146
gggaaggugugcucgggaa

SEQ ID NO: 2172765 - RNA, 19 nt, Artificial Sequence
  Description of Artificial Sequence: Synthetic oligonucleotide
  Antisense strand to SEQ ID NO: 2172764
uucccgagcacaccuuccc

SEQ ID NO: 2172766 - RNA, 19 nt, Artificial Sequence
  Description of Artificial Sequence: Synthetic oligonucleotide
  Sense strand starting at position 2418 of SEQ ID NO: 1883146
uuugaagcccuuugacuau

SEQ ID NO: 2172767 - RNA, 19 nt, Artificial Sequence
  Description of Artificial Sequence: Synthetic oligonucleotide
  Antisense strand to SEQ ID NO: 2172766
auagucaaagggcuucaaa

SEQ ID NO: 2172768 - RNA, 19 nt, Artificial Sequence
  Description of Artificial Sequence: Synthetic oligonucleotide
  Sense strand starting at position 2504 of SEQ ID NO: 1883146
agguuaaucuagucgugug

SEQ ID NO: 2172769 - RNA, 19 nt, Artificial Sequence
  Description of Artificial Sequence: Synthetic oligonucleotide
  Antisense strand to SEQ ID NO: 2172768
cacacgacuagauuaaccu

SEQ ID NO: 2172770 - RNA, 19 nt, Artificial Sequence
  Description of Artificial Sequence: Synthetic oligonucleotide
  Sense strand starting at position 2509 of SEQ ID NO: 1883146
aaucuagucgugugggaug

SEQ ID NO: 2172771 - RNA, 19 nt, Artificial Sequence
  Description of Artificial Sequence: Synthetic oligonucleotide
  Antisense strand to SEQ ID NO: 2172770
caucccacacgacuagauu

SEQ ID NO: 2172772 - RNA, 19 nt, Artificial Sequence
  Description of Artificial Sequence: Synthetic oligonucleotide
  Sense strand starting at position 2511 of SEQ ID NO: 1883146
ucuagucgugugggaugau

SEQ ID NO: 2172773 - RNA, 19 nt, Artificial Sequence
  Description of Artificial Sequence: Synthetic oligonucleotide
  Antisense strand to SEQ ID NO: 2172772
aucaucccacacgacuaga

SEQ ID NO: 2172774 - RNA, 19 nt, Artificial Sequence
  Description of Artificial Sequence: Synthetic oligonucleotide
  Sense strand starting at position 2549 of SEQ ID NO: 1883146
agaagaacaccgugucaau

SEQ ID NO: 2172775 - RNA, 19 nt, Artificial Sequence
  Description of Artificial Sequence: Synthetic oligonucleotide
  Antisense strand to SEQ ID NO: 2172774
auugacacgguguucuucu

SEQ ID NO: 2172776 - RNA, 19 nt, Artificial Sequence
  Description of Artificial Sequence: Synthetic oligonucleotide
  Sense strand starting at position 2628 of SEQ ID NO: 1883146
gugacuguguguuuccaca

SEQ ID NO: 2172777 - RNA, 19 nt, Artificial Sequence
  Description of Artificial Sequence: Synthetic oligonucleotide
  Antisense strand to SEQ ID NO: 2172776
uguggaaacacacagucac

SEQ ID NO: 2172778 - RNA, 19 nt, Artificial Sequence
  Description of Artificial Sequence: Synthetic oligonucleotide
  Sense strand starting at position 2630 of SEQ ID NO: 1883146
gacuguguguuuccacacu

SEQ ID NO: 2172779 - RNA, 19 nt, Artificial Sequence
  Description of Artificial Sequence: Synthetic oligonucleotide
  Antisense strand to SEQ ID NO: 2172778
aguguggaaacacacaguc

SEQ ID NO: 2172780 - RNA, 19 nt, Artificial Sequence
  Description of Artificial Sequence: Synthetic oligonucleotide
  Sense strand starting at position 2716 of SEQ ID NO: 1883146
uggucaccugcuuaacuua

SEQ ID NO: 2172781 - RNA, 19 nt, Artificial Sequence
  Description of Artificial Sequence: Synthetic oligonucleotide
  Antisense strand to SEQ ID NO: 2172780
uaaguuaagcaggugacca

SEQ ID NO: 2172782 - RNA, 19 nt, Artificial Sequence
  Description of Artificial Sequence: Synthetic oligonucleotide
  Sense strand starting at position 2762 of SEQ ID NO: 1883146
caguaugagcuacgaucaa

SEQ ID NO: 2172783 - RNA, 19 nt, Artificial Sequence
  Description of Artificial Sequence: Synthetic oligonucleotide
  Antisense strand to SEQ ID NO: 2172782
uugaucguagcucauacug

SEQ ID NO: 2172784 - RNA, 19 nt, Artificial Sequence
  Description of Artificial Sequence: Synthetic oligonucleotide
  Sense strand starting at position 2777 of SEQ ID NO: 1883146
ucaaauuugucuuaacgua

SEQ ID NO: 2172785 - RNA, 19 nt, Artificial Sequence
  Description of Artificial Sequence: Synthetic oligonucleotide
  Antisense strand to SEQ ID NO: 2172784
uacguuaagacaaauuuga

SEQ ID NO: 2172786 - RNA, 19 nt, Artificial Sequence
  Description of Artificial Sequence: Synthetic oligonucleotide
  Sense strand starting at position 2841 of SEQ ID NO: 1883146
aggguuuccucgccaggga

SEQ ID NO: 2172787 - RNA, 19 nt, Artificial Sequence
  Description of Artificial Sequence: Synthetic oligonucleotide
  Antisense strand to SEQ ID NO: 2172786
ucccuggcgaggaaacccu

SEQ ID NO: 2172788 - RNA, 19 nt, Artificial Sequence
  Description of Artificial Sequence: Synthetic oligonucleotide
  Sense strand starting at position 2842 of SEQ ID NO: 1883146
ggguuuccucgccagggaa

SEQ ID NO: 2172789 - RNA, 19 nt, Artificial Sequence
  Description of Artificial Sequence: Synthetic oligonucleotide
  Antisense strand to SEQ ID NO: 2172788
uucccuggcgaggaaaccc

SEQ ID NO: 2172790 - RNA, 19 nt, Artificial Sequence
  Description of Artificial Sequence: Synthetic oligonucleotide
  Sense strand starting at position 3063 of SEQ ID NO: 1883146
gacagcuugggcuaaggau

SEQ ID NO: 2172791 - RNA, 19 nt, Artificial Sequence
  Description of Artificial Sequence: Synthetic oligonucleotide
  Antisense strand to SEQ ID NO: 2172790
auccuuagcccaagcuguc

SEQ ID NO: 2172792 - RNA, 19 nt, Artificial Sequence
  Description of Artificial Sequence: Synthetic oligonucleotide
  Sense strand starting at position 3118 of SEQ ID NO: 1883146
accuguuuccuagagcaca

SEQ ID NO: 2172793 - RNA, 19 nt, Artificial Sequence
  Description of Artificial Sequence: Synthetic oligonucleotide
  Antisense strand to SEQ ID NO: 2172792
ugugcucuaggaaacaggu

SEQ ID NO: 2172794 - RNA, 19 nt, Artificial Sequence
  Description of Artificial Sequence: Synthetic oligonucleotide
  Sense strand starting at position 3276 of SEQ ID NO: 1883146
ccgccaucauauguguaca

SEQ ID NO: 2172795 - RNA, 19 nt, Artificial Sequence
  Description of Artificial Sequence: Synthetic oligonucleotide
  Antisense strand to SEQ ID NO: 2172794
uguacacauaugauggcgg

SEQ ID NO: 2172796 - RNA, 19 nt, Artificial Sequence
  Description of Artificial Sequence: Synthetic oligonucleotide
  Sense strand starting at position 3278 of SEQ ID NO: 1883146
gccaucauauguguacaua

SEQ ID NO: 2172797 - RNA, 19 nt, Artificial Sequence
  Description of Artificial Sequence: Synthetic oligonucleotide
  Antisense strand to SEQ ID NO: 2172796
uauguacacauaugauggc

SEQ ID NO: 2172798 - RNA, 19 nt, Artificial Sequence
  Description of Artificial Sequence: Synthetic oligonucleotide
  Sense strand starting at position 3279 of SEQ ID NO: 1883146
ccaucauauguguacauau

SEQ ID NO: 2172799 - RNA, 19 nt, Artificial Sequence
  Description of Artificial Sequence: Synthetic oligonucleotide
  Antisense strand to SEQ ID NO: 2172798
auauguacacauaugaugg

SEQ ID NO: 2172800 - RNA, 19 nt, Artificial Sequence
  Description of Artificial Sequence: Synthetic oligonucleotide
  Sense strand starting at position 3357 of SEQ ID NO: 1883146
ucagaaguauugcaggaaa

SEQ ID NO: 2172801 - RNA, 19 nt, Artificial Sequence
  Description of Artificial Sequence: Synthetic oligonucleotide
  Antisense strand to SEQ ID NO: 2172800
uuuccugcaauacuucuga

SEQ ID NO: 2172802 - RNA, 19 nt, Artificial Sequence
  Description of Artificial Sequence: Synthetic oligonucleotide
  Sense strand starting at position 3359 of SEQ ID NO: 1883146
agaaguauugcaggaaaug

SEQ ID NO: 2172803 - RNA, 19 nt, Artificial Sequence
  Description of Artificial Sequence: Synthetic oligonucleotide
  Antisense strand to SEQ ID NO: 2172802
cauuuccugcaauacuucu

SEQ ID NO: 2172804 - RNA, 19 nt, Artificial Sequence
  Description of Artificial Sequence: Synthetic oligonucleotide
  Sense strand starting at position 3389 of SEQ ID NO: 1883146
aguguugccuggguaucau

SEQ ID NO: 2172805 - RNA, 19 nt, Artificial Sequence
  Description of Artificial Sequence: Synthetic oligonucleotide
  Antisense strand to SEQ ID NO: 2172804
augauacccaggcaacacu

SEQ ID NO: 2172806 - RNA, 19 nt, Artificial Sequence
  Description of Artificial Sequence: Synthetic oligonucleotide
  Sense strand starting at position 3971 of SEQ ID NO: 1883146
uaugaagccuuaggaagaa

SEQ ID NO: 2172807 - RNA, 19 nt, Artificial Sequence
  Description of Artificial Sequence: Synthetic oligonucleotide
  Antisense strand to SEQ ID NO: 2172806
uucuuccuaaggcuucaua

SEQ ID NO: 2172808 - RNA, 19 nt, Artificial Sequence
  Description of Artificial Sequence: Synthetic oligonucleotide
  Sense strand starting at position 6 of SEQ ID NO: 1883147
aggugaauaucccuguucu

SEQ ID NO: 2172809 - RNA, 19 nt, Artificial Sequence
  Description of Artificial Sequence: Synthetic oligonucleotide
  Antisense strand to SEQ ID NO: 2172808
agaacagggauauucaccu

SEQ ID NO: 2172810 - RNA, 19 nt, Artificial Sequence
  Description of Artificial Sequence: Synthetic oligonucleotide
  Sense strand starting at position 7 of SEQ ID NO: 1883147
ggugaauaucccuguucuu

SEQ ID NO: 2172811 - RNA, 19 nt, Artificial Sequence
  Description of Artificial Sequence: Synthetic oligonucleotide
  Antisense strand to SEQ ID NO: 2172810
aagaacagggauauucacc

SEQ ID NO: 2172812 - RNA, 19 nt, Artificial Sequence
  Description of Artificial Sequence: Synthetic oligonucleotide
  Sense strand starting at position 50 of SEQ ID NO: 1883147
uguuguuguucccuagaug

SEQ ID NO: 2172813 - RNA, 19 nt, Artificial Sequence
  Description of Artificial Sequence: Synthetic oligonucleotide
  Antisense strand to SEQ ID NO: 2172812
caucuagggaacaacaaca

SEQ ID NO: 2172814 - RNA, 19 nt, Artificial Sequence
  Description of Artificial Sequence: Synthetic oligonucleotide
  Sense strand starting at position 601 of SEQ ID NO: 1883147
uuaugauacccaggcaaca

SEQ ID NO: 2172815 - RNA, 19 nt, Artificial Sequence
  Description of Artificial Sequence: Synthetic oligonucleotide
  Antisense strand to SEQ ID NO: 2172814
uguugccuggguaucauaa

SEQ ID NO: 2172816 - RNA, 19 nt, Artificial Sequence
  Description of Artificial Sequence: Synthetic oligonucleotide
  Sense strand starting at position 698 of SEQ ID NO: 1883147
aacaguaaggguugcauau

SEQ ID NO: 2172817 - RNA, 19 nt, Artificial Sequence
  Description of Artificial Sequence: Synthetic oligonucleotide
  Antisense strand to SEQ ID NO: 2172816
auaugcaacccuuacuguu

SEQ ID NO: 2172818 - RNA, 19 nt, Artificial Sequence
  Description of Artificial Sequence: Synthetic oligonucleotide
  Sense strand starting at position 708 of SEQ ID NO: 1883147
guugcauauguacacauau

SEQ ID NO: 2172819 - RNA, 19 nt, Artificial Sequence
  Description of Artificial Sequence: Synthetic oligonucleotide
  Antisense strand to SEQ ID NO: 2172818
auauguguacauaugcaac

SEQ ID NO: 2172820 - RNA, 19 nt, Artificial Sequence
  Description of Artificial Sequence: Synthetic oligonucleotide
  Sense strand starting at position 721 of SEQ ID NO: 1883147
acauaugauggcgguaaga

SEQ ID NO: 2172821 - RNA, 19 nt, Artificial Sequence
  Description of Artificial Sequence: Synthetic oligonucleotide
  Antisense strand to SEQ ID NO: 2172820
ucuuaccgccaucauaugu

SEQ ID NO: 2172822 - RNA, 19 nt, Artificial Sequence
  Description of Artificial Sequence: Synthetic oligonucleotide
  Sense strand starting at position 723 of SEQ ID NO: 1883147
auaugauggcgguaagacu

SEQ ID NO: 2172823 - RNA, 19 nt, Artificial Sequence
  Description of Artificial Sequence: Synthetic oligonucleotide
  Antisense strand to SEQ ID NO: 2172822
agucuuaccgccaucauau

SEQ ID NO: 2172824 - RNA, 19 nt, Artificial Sequence
  Description of Artificial Sequence: Synthetic oligonucleotide
  Sense strand starting at position 730 of SEQ ID NO: 1883147
ggcgguaagacuuggaaag

SEQ ID NO: 2172825 - RNA, 19 nt, Artificial Sequence
  Description of Artificial Sequence: Synthetic oligonucleotide
  Antisense strand to SEQ ID NO: 2172824
cuuuccaagucuuaccgcc

SEQ ID NO: 2172826 - RNA, 19 nt, Artificial Sequence
  Description of Artificial Sequence: Synthetic oligonucleotide
  Sense strand starting at position 864 of SEQ ID NO: 1883147
agaugaagagugugcucua

SEQ ID NO: 2172827 - RNA, 19 nt, Artificial Sequence
  Description of Artificial Sequence: Synthetic oligonucleotide
  Antisense strand to SEQ ID NO: 2172826
uagagcacacucuucaucu

SEQ ID NO: 2172828 - RNA, 19 nt, Artificial Sequence
  Description of Artificial Sequence: Synthetic oligonucleotide
  Sense strand starting at position 867 of SEQ ID NO: 1883147
ugaagagugugcucuagga

SEQ ID NO: 2172829 - RNA, 19 nt, Artificial Sequence
  Description of Artificial Sequence: Synthetic oligonucleotide
  Antisense strand to SEQ ID NO: 2172828
uccuagagcacacucuuca

SEQ ID NO: 2172830 - RNA, 19 nt, Artificial Sequence
  Description of Artificial Sequence: Synthetic oligonucleotide
  Sense strand starting at position 869 of SEQ ID NO: 1883147
aagagugugcucuaggaaa

SEQ ID NO: 2172831 - RNA, 19 nt, Artificial Sequence
  Description of Artificial Sequence: Synthetic oligonucleotide
  Antisense strand to SEQ ID NO: 2172830
uuuccuagagcacacucuu

SEQ ID NO: 2172832 - RNA, 19 nt, Artificial Sequence
  Description of Artificial Sequence: Synthetic oligonucleotide
  Sense strand starting at position 871 of SEQ ID NO: 1883147
gagugugcucuaggaaaca

SEQ ID NO: 2172833 - RNA, 19 nt, Artificial Sequence
  Description of Artificial Sequence: Synthetic oligonucleotide
  Antisense strand to SEQ ID NO: 2172832
uguuuccuagagcacacuc

SEQ ID NO: 2172834 - RNA, 19 nt, Artificial Sequence
  Description of Artificial Sequence: Synthetic oligonucleotide
  Sense strand starting at position 1060 of SEQ ID NO: 1883147
gggugcaguucuucuuaag

SEQ ID NO: 2172835 - RNA, 19 nt, Artificial Sequence
  Description of Artificial Sequence: Synthetic oligonucleotide
  Antisense strand to SEQ ID NO: 2172834
cuuaagaagaacugcaccc

SEQ ID NO: 2172836 - RNA, 19 nt, Artificial Sequence
  Description of Artificial Sequence: Synthetic oligonucleotide
  Sense strand starting at position 1182 of SEQ ID NO: 1883147
cuguguucuggguauuaaa

SEQ ID NO: 2172837 - RNA, 19 nt, Artificial Sequence
  Description of Artificial Sequence: Synthetic oligonucleotide
  Antisense strand to SEQ ID NO: 2172836
uuuaauacccagaacacag

SEQ ID NO: 2172838 - RNA, 19 nt, Artificial Sequence
  Description of Artificial Sequence: Synthetic oligonucleotide
  Sense strand starting at position 1220 of SEQ ID NO: 1883147
uaagacaaauuugaucgua

SEQ ID NO: 2172839 - RNA, 19 nt, Artificial Sequence
  Description of Artificial Sequence: Synthetic oligonucleotide
  Antisense strand to SEQ ID NO: 2172838
uacgaucaaauuugucuua

SEQ ID NO: 2172840 - RNA, 19 nt, Artificial Sequence
  Description of Artificial Sequence: Synthetic oligonucleotide
  Sense strand starting at position 1341 of SEQ ID NO: 1883147
gggucuuauccugacuucu

SEQ ID NO: 2172841 - RNA, 19 nt, Artificial Sequence
  Description of Artificial Sequence: Synthetic oligonucleotide
  Antisense strand to SEQ ID NO: 2172840
agaagucaggauaagaccc

SEQ ID NO: 2172842 - RNA, 19 nt, Artificial Sequence
  Description of Artificial Sequence: Synthetic oligonucleotide
  Sense strand starting at position 1343 of SEQ ID NO: 1883147
gucuuauccugacuucuca

SEQ ID NO: 2172843 - RNA, 19 nt, Artificial Sequence
  Description of Artificial Sequence: Synthetic oligonucleotide
  Antisense strand to SEQ ID NO: 2172842
ugagaagucaggauaagac

SEQ ID NO: 2172844 - RNA, 19 nt, Artificial Sequence
  Description of Artificial Sequence: Synthetic oligonucleotide
  Sense strand starting at position 1352 of SEQ ID NO: 1883147
ugacuucucaaguguggaa

SEQ ID NO: 2172845 - RNA, 19 nt, Artificial Sequence
  Description of Artificial Sequence: Synthetic oligonucleotide
  Antisense strand to SEQ ID NO: 2172844
uuccacacuugagaaguca

SEQ ID NO: 2172846 - RNA, 19 nt, Artificial Sequence
  Description of Artificial Sequence: Synthetic oligonucleotide
  Sense strand starting at position 1478 of SEQ ID NO: 1883147
gugaucaucccacacgacu

SEQ ID NO: 2172847 - RNA, 19 nt, Artificial Sequence
  Description of Artificial Sequence: Synthetic oligonucleotide
  Antisense strand to SEQ ID NO: 2172846
agucgugugggaugaucac

SEQ ID NO: 2172848 - RNA, 19 nt, Artificial Sequence
  Description of Artificial Sequence: Synthetic oligonucleotide
  Sense strand starting at position 1637 of SEQ ID NO: 1883147
uucucugagaauggaguuu

SEQ ID NO: 2172849 - RNA, 19 nt, Artificial Sequence
  Description of Artificial Sequence: Synthetic oligonucleotide
  Antisense strand to SEQ ID NO: 2172848
aaacuccauucucagagaa

SEQ ID NO: 2172850 - RNA, 19 nt, Artificial Sequence
  Description of Artificial Sequence: Synthetic oligonucleotide
  Sense strand starting at position 3189 of SEQ ID NO: 1883147
guucgacuccuuuggugga

SEQ ID NO: 2172851 - RNA, 19 nt, Artificial Sequence
  Description of Artificial Sequence: Synthetic oligonucleotide
  Antisense strand to SEQ ID NO: 2172850
uccaccaaaggagucgaac

SEQ ID NO: 2172852 - RNA, 19 nt, Artificial Sequence
  Description of Artificial Sequence: Synthetic oligonucleotide
  Sense strand starting at position 3255 of SEQ ID NO: 1883147
ugauuuacuuaagagucgu

SEQ ID NO: 2172853 - RNA, 19 nt, Artificial Sequence
  Description of Artificial Sequence: Synthetic oligonucleotide
  Antisense strand to SEQ ID NO: 2172852
acgacucuuaaguaaauca

SEQ ID NO: 2172854 - RNA, 19 nt, Artificial Sequence
  Description of Artificial Sequence: Synthetic oligonucleotide
  Sense strand starting at position 3261 of SEQ ID NO: 1883147
acuuaagagucgucuuuag

SEQ ID NO: 2172855 - RNA, 19 nt, Artificial Sequence
  Description of Artificial Sequence: Synthetic oligonucleotide
  Antisense strand to SEQ ID NO: 2172854
cuaaagacgacucuuaagu

SEQ ID NO: 2172856 - RNA, 19 nt, Artificial Sequence
  Description of Artificial Sequence: Synthetic oligonucleotide
  Sense strand starting at position 3265 of SEQ ID NO: 1883147
aagagucgucuuuagcauu

SEQ ID NO: 2172857 - RNA, 19 nt, Artificial Sequence
  Description of Artificial Sequence: Synthetic oligonucleotide
  Antisense strand to SEQ ID NO: 2172856
aaugcuaaagacgacucuu

SEQ ID NO: 2172858 - RNA, 19 nt, Artificial Sequence
  Description of Artificial Sequence: Synthetic oligonucleotide
  Sense strand starting at position 3285 of SEQ ID NO: 1883147
cuugucacuuuguccuauu

SEQ ID NO: 2172859 - RNA, 19 nt, Artificial Sequence
  Description of Artificial Sequence: Synthetic oligonucleotide
  Antisense strand to SEQ ID NO: 2172858
aauaggacaaagugacaag

SEQ ID NO: 2172860 - RNA, 19 nt, Artificial Sequence
  Description of Artificial Sequence: Synthetic oligonucleotide
  Sense strand starting at position 3296 of SEQ ID NO: 1883147
guccuauucuuuguccaau

SEQ ID NO: 2172861 - RNA, 19 nt, Artificial Sequence
  Description of Artificial Sequence: Synthetic oligonucleotide
  Antisense strand to SEQ ID NO: 2172860
auuggacaaagaauaggac

SEQ ID NO: 2172862 - RNA, 19 nt, Artificial Sequence
  Description of Artificial Sequence: Synthetic oligonucleotide
  Sense strand starting at position 3423 of SEQ ID NO: 1883147
cagugaguccugcauucug

SEQ ID NO: 2172863 - RNA, 19 nt, Artificial Sequence
  Description of Artificial Sequence: Synthetic oligonucleotide
  Antisense strand to SEQ ID NO: 2172862
cagaaugcaggacucacug

SEQ ID NO: 2172864 - RNA, 19 nt, Artificial Sequence
  Description of Artificial Sequence: Synthetic oligonucleotide
  Sense strand starting at position 3519 of SEQ ID NO: 1883147
cucagcgacuugcuauuua

SEQ ID NO: 2172865 - RNA, 19 nt, Artificial Sequence
  Description of Artificial Sequence: Synthetic oligonucleotide
  Antisense strand to SEQ ID NO: 2172864
uaaauagcaagucgcugag

SEQ ID NO: 2172866 - RNA, 19 nt, Artificial Sequence
  Description of Artificial Sequence: Synthetic oligonucleotide
  Sense strand starting at position 3611 of SEQ ID NO: 1883147
uaccuuauccugugggaau

SEQ ID NO: 2172867 - RNA, 19 nt, Artificial Sequence
  Description of Artificial Sequence: Synthetic oligonucleotide
  Antisense strand to SEQ ID NO: 2172866
auucccacaggauaaggua

SEQ ID NO: 2172868 - RNA, 19 nt, Artificial Sequence
  Description of Artificial Sequence: Synthetic oligonucleotide
  Sense strand starting at position 3732 of SEQ ID NO: 1883147
uucagacuuccggaaacgu

SEQ ID NO: 2172869 - RNA, 19 nt, Artificial Sequence
  Description of Artificial Sequence: Synthetic oligonucleotide
  Antisense strand to SEQ ID NO: 2172868
acguuuccggaagucugaa

SEQ ID NO: 2172870 - RNA, 19 nt, Artificial Sequence
  Description of Artificial Sequence: Synthetic oligonucleotide
  Sense strand starting at position 3742 of SEQ ID NO: 1883147
cggaaacgugcuuaauguc

SEQ ID NO: 2172871 - RNA, 19 nt, Artificial Sequence
  Description of Artificial Sequence: Synthetic oligonucleotide
  Antisense strand to SEQ ID NO: 2172870
gacauuaagcacguuuccg

SEQ ID NO: 2172872 - RNA, 19 nt, Artificial Sequence
  Description of Artificial Sequence: Synthetic oligonucleotide
  Sense strand starting at position 3748 of SEQ ID NO: 1883147
cgugcuuaauguccagaga

SEQ ID NO: 2172873 - RNA, 19 nt, Artificial Sequence
  Description of Artificial Sequence: Synthetic oligonucleotide
  Antisense strand to SEQ ID NO: 2172872
ucucuggacauuaagcacg

SEQ ID NO: 2172874 - RNA, 19 nt, Artificial Sequence
  Description of Artificial Sequence: Synthetic oligonucleotide
  Sense strand starting at position 3749 of SEQ ID NO: 1883147
gugcuuaauguccagagau

SEQ ID NO: 2172875 - RNA, 19 nt, Artificial Sequence
  Description of Artificial Sequence: Synthetic oligonucleotide
  Antisense strand to SEQ ID NO: 2172874
aucucuggacauuaagcac

SEQ ID NO: 2172876 - RNA, 19 nt, Artificial Sequence
  Description of Artificial Sequence: Synthetic oligonucleotide
  Sense strand starting at position 3751 of SEQ ID NO: 1883147
gcuuaauguccagagaugu

SEQ ID NO: 2172877 - RNA, 19 nt, Artificial Sequence
  Description of Artificial Sequence: Synthetic oligonucleotide
  Antisense strand to SEQ ID NO: 2172876
acaucucuggacauuaagc

SEQ ID NO: 2172878 - RNA, 19 nt, Artificial Sequence
  Description of Artificial Sequence: Synthetic oligonucleotide
  Sense strand starting at position 3853 of SEQ ID NO: 1883147
uguuaauacuuggugugua

SEQ ID NO: 2172879 - RNA, 19 nt, Artificial Sequence
  Description of Artificial Sequence: Synthetic oligonucleotide
  Antisense strand to SEQ ID NO: 2172878
uacacaccaaguauuaaca

SEQ ID NO: 2172880 - RNA, 19 nt, Artificial Sequence
  Description of Artificial Sequence: Synthetic oligonucleotide
  Sense strand starting at position 3875 of SEQ ID NO: 1883147
gggaucuuucagugauuag

SEQ ID NO: 2172881 - RNA, 19 nt, Artificial Sequence
  Description of Artificial Sequence: Synthetic oligonucleotide
  Antisense strand to SEQ ID NO: 2172880
cuaaucacugaaagauccc

SEQ ID NO: 2172882 - RNA, 19 nt, Artificial Sequence
  Description of Artificial Sequence: Synthetic oligonucleotide
  Sense strand starting at position 3886 of SEQ ID NO: 1883147
gugauuaggccucaagagu

SEQ ID NO: 2172883 - RNA, 19 nt, Artificial Sequence
  Description of Artificial Sequence: Synthetic oligonucleotide
  Antisense strand to SEQ ID NO: 2172882
acucuugaggccuaaucac

SEQ ID NO: 2172884 - RNA, 19 nt, Artificial Sequence
  Description of Artificial Sequence: Synthetic oligonucleotide
  Sense strand starting at position 3932 of SEQ ID NO: 1883147
gggaacaguuuggagagaa

SEQ ID NO: 2172885 - RNA, 19 nt, Artificial Sequence
  Description of Artificial Sequence: Synthetic oligonucleotide
  Antisense strand to SEQ ID NO: 2172884
uucucuccaaacuguuccc

SEQ ID NO: 2172886 - RNA, 19 nt, Artificial Sequence
  Description of Artificial Sequence: Synthetic oligonucleotide
  Sense strand starting at position 3979 of SEQ ID NO: 1883147
auguauuucuaggagagag

SEQ ID NO: 2172887 - RNA, 19 nt, Artificial Sequence
  Description of Artificial Sequence: Synthetic oligonucleotide
  Antisense strand to SEQ ID NO: 2172886
cucucuccuagaaauacau

SEQ ID NO: 2172888 - RNA, 19 nt, Artificial Sequence
  Description of Artificial Sequence: Synthetic oligonucleotide
  Sense strand starting at position 50 of SEQ ID NO: 1883148
uauuguucuguggaaacau

SEQ ID NO: 2172889 - RNA, 19 nt, Artificial Sequence
  Description of Artificial Sequence: Synthetic oligonucleotide
  Antisense strand to SEQ ID NO: 2172888
auguuuccacagaacaaua

SEQ ID NO: 2172890 - RNA, 19 nt, Artificial Sequence
  Description of Artificial Sequence: Synthetic oligonucleotide
  Sense strand starting at position 109 of SEQ ID NO: 1883148
cugguaggauaaguuguaa

SEQ ID NO: 2172891 - RNA, 19 nt, Artificial Sequence
  Description of Artificial Sequence: Synthetic oligonucleotide
  Antisense strand to SEQ ID NO: 2172890
uuacaacuuauccuaccag

SEQ ID NO: 2172892 - RNA, 19 nt, Artificial Sequence
  Description of Artificial Sequence: Synthetic oligonucleotide
  Sense strand starting at position 183 of SEQ ID NO: 1883148
uuuggugucacuggaaaga

SEQ ID NO: 2172893 - RNA, 19 nt, Artificial Sequence
  Description of Artificial Sequence: Synthetic oligonucleotide
  Antisense strand to SEQ ID NO: 2172892
ucuuuccagugacaccaaa

SEQ ID NO: 2172894 - RNA, 19 nt, Artificial Sequence
  Description of Artificial Sequence: Synthetic oligonucleotide
  Sense strand starting at position 194 of SEQ ID NO: 1883148
uggaaagaagccuguuaaa

SEQ ID NO: 2172895 - RNA, 19 nt, Artificial Sequence
  Description of Artificial Sequence: Synthetic oligonucleotide
  Antisense strand to SEQ ID NO: 2172894
uuuaacaggcuucuuucca

SEQ ID NO: 2172896 - RNA, 19 nt, Artificial Sequence
  Description of Artificial Sequence: Synthetic oligonucleotide
  Sense strand starting at position 281 of SEQ ID NO: 1883148
uguggcuugggauaaaugu

SEQ ID NO: 2172897 - RNA, 19 nt, Artificial Sequence
  Description of Artificial Sequence: Synthetic oligonucleotide
  Antisense strand to SEQ ID NO: 2172896
acauuuaucccaagccaca

SEQ ID NO: 2172898 - RNA, 19 nt, Artificial Sequence
  Description of Artificial Sequence: Synthetic oligonucleotide
  Sense strand starting at position 288 of SEQ ID NO: 1883148
ugggauaaauguccaccaa

SEQ ID NO: 2172899 - RNA, 19 nt, Artificial Sequence
  Description of Artificial Sequence: Synthetic oligonucleotide
  Antisense strand to SEQ ID NO: 2172898
uugguggacauuuauccca

SEQ ID NO: 2172900 - RNA, 19 nt, Artificial Sequence
  Description of Artificial Sequence: Synthetic oligonucleotide
  Sense strand starting at position 427 of SEQ ID NO: 1883148
gagugacaugccugaaaug

SEQ ID NO: 2172901 - RNA, 19 nt, Artificial Sequence
  Description of Artificial Sequence: Synthetic oligonucleotide
  Antisense strand to SEQ ID NO: 2172900
cauuucaggcaugucacuc

SEQ ID NO: 2172902 - RNA, 19 nt, Artificial Sequence
  Description of Artificial Sequence: Synthetic oligonucleotide
  Sense strand starting at position 466 of SEQ ID NO: 1883148
ccacaugcugguuaauaga

SEQ ID NO: 2172903 - RNA, 19 nt, Artificial Sequence
  Description of Artificial Sequence: Synthetic oligonucleotide
  Antisense strand to SEQ ID NO: 2172902
ucuauuaaccagcaugugg

SEQ ID NO: 2172904 - RNA, 19 nt, Artificial Sequence
  Description of Artificial Sequence: Synthetic oligonucleotide
  Sense strand starting at position 823 of SEQ ID NO: 1883148
cuuguauuagaauguuaag

SEQ ID NO: 2172905 - RNA, 19 nt, Artificial Sequence
  Description of Artificial Sequence: Synthetic oligonucleotide
  Antisense strand to SEQ ID NO: 2172904
cuuaacauucuaauacaag

SEQ ID NO: 2172906 - RNA, 19 nt, Artificial Sequence
  Description of Artificial Sequence: Synthetic oligonucleotide
  Sense strand starting at position 1001 of SEQ ID NO: 1883148
uacugagguccaugaauau

SEQ ID NO: 2172907 - RNA, 19 nt, Artificial Sequence
  Description of Artificial Sequence: Synthetic oligonucleotide
  Antisense strand to SEQ ID NO: 2172906
auauucauggaccucagua

SEQ ID NO: 2172908 - RNA, 19 nt, Artificial Sequence
  Description of Artificial Sequence: Synthetic oligonucleotide
  Sense strand starting at position 1010 of SEQ ID NO: 1883148
ccaugaauaugugccaaga

SEQ ID NO: 2172909 - RNA, 19 nt, Artificial Sequence
  Description of Artificial Sequence: Synthetic oligonucleotide
  Antisense strand to SEQ ID NO: 2172908
ucuuggcacauauucaugg

SEQ ID NO: 2172910 - RNA, 19 nt, Artificial Sequence
  Description of Artificial Sequence: Synthetic oligonucleotide
  Sense strand starting at position 1023 of SEQ ID NO: 1883148
ccaagaggaagguguugau

SEQ ID NO: 2172911 - RNA, 19 nt, Artificial Sequence
  Description of Artificial Sequence: Synthetic oligonucleotide
  Antisense strand to SEQ ID NO: 2172910
aucaacaccuuccucuugg

SEQ ID NO: 2172912 - RNA, 19 nt, Artificial Sequence
  Description of Artificial Sequence: Synthetic oligonucleotide
  Sense strand starting at position 1071 of SEQ ID NO: 1883148
acucguuccgaagauaaau

SEQ ID NO: 2172913 - RNA, 19 nt, Artificial Sequence
  Description of Artificial Sequence: Synthetic oligonucleotide
  Antisense strand to SEQ ID NO: 2172912
auuuaucuucggaacgagu

SEQ ID NO: 2172914 - RNA, 19 nt, Artificial Sequence
  Description of Artificial Sequence: Synthetic oligonucleotide
  Sense strand starting at position 1253 of SEQ ID NO: 1883148
cuuuguaacgcauagagga

SEQ ID NO: 2172915 - RNA, 19 nt, Artificial Sequence
  Description of Artificial Sequence: Synthetic oligonucleotide
  Antisense strand to SEQ ID NO: 2172914
uccucuaugcguuacaaag

SEQ ID NO: 2172916 - RNA, 19 nt, Artificial Sequence
  Description of Artificial Sequence: Synthetic oligonucleotide
  Sense strand starting at position 1397 of SEQ ID NO: 1883148
cuuccacuccuagauugua

SEQ ID NO: 2172917 - RNA, 19 nt, Artificial Sequence
  Description of Artificial Sequence: Synthetic oligonucleotide
  Antisense strand to SEQ ID NO: 2172916
uacaaucuaggaguggaag

SEQ ID NO: 2172918 - RNA, 19 nt, Artificial Sequence
  Description of Artificial Sequence: Synthetic oligonucleotide
  Sense strand starting at position 1412 of SEQ ID NO: 1883148
uguauaagcacaggagaaa

SEQ ID NO: 2172919 - RNA, 19 nt, Artificial Sequence
  Description of Artificial Sequence: Synthetic oligonucleotide
  Antisense strand to SEQ ID NO: 2172918
uuucuccugugcuuauaca

SEQ ID NO: 2172920 - RNA, 19 nt, Artificial Sequence
  Description of Artificial Sequence: Synthetic oligonucleotide
  Sense strand starting at position 2355 of SEQ ID NO: 1883148
ggacaacucuaauucuagu

SEQ ID NO: 2172921 - RNA, 19 nt, Artificial Sequence
  Description of Artificial Sequence: Synthetic oligonucleotide
  Antisense strand to SEQ ID NO: 2172920
acuagaauuagaguugucc

SEQ ID NO: 2172922 - RNA, 19 nt, Artificial Sequence
  Description of Artificial Sequence: Synthetic oligonucleotide
  Sense strand starting at position 2377 of SEQ ID NO: 1883148
ggaguacaaagaugucagu

SEQ ID NO: 2172923 - RNA, 19 nt, Artificial Sequence
  Description of Artificial Sequence: Synthetic oligonucleotide
  Antisense strand to SEQ ID NO: 2172922
acugacaucuuuguacucc

SEQ ID NO: 2172924 - RNA, 19 nt, Artificial Sequence
  Description of Artificial Sequence: Synthetic oligonucleotide
  Sense strand starting at position 2448 of SEQ ID NO: 1883148
uugagaucuccuggaggug

SEQ ID NO: 2172925 - RNA, 19 nt, Artificial Sequence
  Description of Artificial Sequence: Synthetic oligonucleotide
  Antisense strand to SEQ ID NO: 2172924
caccuccaggagaucucaa

SEQ ID NO: 2172926 - RNA, 19 nt, Artificial Sequence
  Description of Artificial Sequence: Synthetic oligonucleotide
  Sense strand starting at position 2449 of SEQ ID NO: 1883148
ugagaucuccuggaggugu

SEQ ID NO: 2172927 - RNA, 19 nt, Artificial Sequence
  Description of Artificial Sequence: Synthetic oligonucleotide
  Antisense strand to SEQ ID NO: 2172926
acaccuccaggagaucuca

SEQ ID NO: 2172928 - RNA, 19 nt, Artificial Sequence
  Description of Artificial Sequence: Synthetic oligonucleotide
  Sense strand starting at position 2466 of SEQ ID NO: 1883148
guguuuacagauugggaaa

SEQ ID NO: 2172929 - RNA, 19 nt, Artificial Sequence
  Description of Artificial Sequence: Synthetic oligonucleotide
  Antisense strand to SEQ ID NO: 2172928
uuucccaaucuguaaacac

SEQ ID NO: 2172930 - RNA, 19 nt, Artificial Sequence
  Description of Artificial Sequence: Synthetic oligonucleotide
  Sense strand starting at position 2526 of SEQ ID NO: 1883148
cgaauuaaaggucauucua

SEQ ID NO: 2172931 - RNA, 19 nt, Artificial Sequence
  Description of Artificial Sequence: Synthetic oligonucleotide
  Antisense strand to SEQ ID NO: 2172930
uagaaugaccuuuaauucg

SEQ ID NO: 2172932 - RNA, 19 nt, Artificial Sequence
  Description of Artificial Sequence: Synthetic oligonucleotide
  Sense strand starting at position 2552 of SEQ ID NO: 1883148
gguagaaaugcuggaaggu

SEQ ID NO: 2172933 - RNA, 19 nt, Artificial Sequence
  Description of Artificial Sequence: Synthetic oligonucleotide
  Antisense strand to SEQ ID NO: 2172932
accuuccagcauuucuacc

SEQ ID NO: 2172934 - RNA, 19 nt, Artificial Sequence
  Description of Artificial Sequence: Synthetic oligonucleotide
  Sense strand starting at position 2553 of SEQ ID NO: 1883148
guagaaaugcuggaagguu

SEQ ID NO: 2172935 - RNA, 19 nt, Artificial Sequence
  Description of Artificial Sequence: Synthetic oligonucleotide
  Antisense strand to SEQ ID NO: 2172934
aaccuuccagcauuucuac

SEQ ID NO: 2172936 - RNA, 19 nt, Artificial Sequence
  Description of Artificial Sequence: Synthetic oligonucleotide
  Sense strand starting at position 2582 of SEQ ID NO: 1883148
agacaaaggucacucgagu

SEQ ID NO: 2172937 - RNA, 19 nt, Artificial Sequence
  Description of Artificial Sequence: Synthetic oligonucleotide
  Antisense strand to SEQ ID NO: 2172936
acucgagugaccuuugucu

SEQ ID NO: 2172938 - RNA, 19 nt, Artificial Sequence
  Description of Artificial Sequence: Synthetic oligonucleotide
  Sense strand starting at position 2907 of SEQ ID NO: 1883148
uggacugcuuaauuaaaga

SEQ ID NO: 2172939 - RNA, 19 nt, Artificial Sequence
  Description of Artificial Sequence: Synthetic oligonucleotide
  Antisense strand to SEQ ID NO: 2172938
ucuuuaauuaagcagucca

SEQ ID NO: 2172940 - RNA, 19 nt, Artificial Sequence
  Description of Artificial Sequence: Synthetic oligonucleotide
  Sense strand starting at position 3051 of SEQ ID NO: 1883148
gggugaugaaauggccuaa

SEQ ID NO: 2172941 - RNA, 19 nt, Artificial Sequence
  Description of Artificial Sequence: Synthetic oligonucleotide
  Antisense strand to SEQ ID NO: 2172940
uuaggccauuucaucaccc

SEQ ID NO: 2172942 - RNA, 19 nt, Artificial Sequence
  Description of Artificial Sequence: Synthetic oligonucleotide
  Sense strand starting at position 3072 of SEQ ID NO: 1883148
uuagauuauagugaugguu

SEQ ID NO: 2172943 - RNA, 19 nt, Artificial Sequence
  Description of Artificial Sequence: Synthetic oligonucleotide
  Antisense strand to SEQ ID NO: 2172942
aaccaucacuauaaucuaa

SEQ ID NO: 2172944 - RNA, 19 nt, Artificial Sequence
  Description of Artificial Sequence: Synthetic oligonucleotide
  Sense strand starting at position 3347 of SEQ ID NO: 1883148
uccaguuaauagucaaaua

SEQ ID NO: 2172945 - RNA, 19 nt, Artificial Sequence
  Description of Artificial Sequence: Synthetic oligonucleotide
  Antisense strand to SEQ ID NO: 2172944
uauuugacuauuaacugga

SEQ ID NO: 2172946 - RNA, 19 nt, Artificial Sequence
  Description of Artificial Sequence: Synthetic oligonucleotide
  Sense strand starting at position 3507 of SEQ ID NO: 1883148
caugauuaaucuguggaac

SEQ ID NO: 2172947 - RNA, 19 nt, Artificial Sequence
  Description of Artificial Sequence: Synthetic oligonucleotide
  Antisense strand to SEQ ID NO: 2172946
guuccacagauuaaucaug

SEQ ID NO: 2172948 - RNA, 19 nt, Artificial Sequence
  Description of Artificial Sequence: Synthetic oligonucleotide
  Sense strand starting at position 3508 of SEQ ID NO: 1883148
augauuaaucuguggaacu

SEQ ID NO: 2172949 - RNA, 19 nt, Artificial Sequence
  Description of Artificial Sequence: Synthetic oligonucleotide
  Antisense strand to SEQ ID NO: 2172948
aguuccacagauuaaucau

SEQ ID NO: 2172950 - RNA, 19 nt, Artificial Sequence
  Description of Artificial Sequence: Synthetic oligonucleotide
  Sense strand starting at position 3605 of SEQ ID NO: 1883148
acaguauugcaccagaaau

SEQ ID NO: 2172951 - RNA, 19 nt, Artificial Sequence
  Description of Artificial Sequence: Synthetic oligonucleotide
  Antisense strand to SEQ ID NO: 2172950
auuucuggugcaauacugu

SEQ ID NO: 2172952 - RNA, 19 nt, Artificial Sequence
  Description of Artificial Sequence: Synthetic oligonucleotide
  Sense strand starting at position 3607 of SEQ ID NO: 1883148
aguauugcaccagaaauau

SEQ ID NO: 2172953 - RNA, 19 nt, Artificial Sequence
  Description of Artificial Sequence: Synthetic oligonucleotide
  Antisense strand to SEQ ID NO: 2172952
auauuucuggugcaauacu

SEQ ID NO: 2172954 - RNA, 19 nt, Artificial Sequence
  Description of Artificial Sequence: Synthetic oligonucleotide
  Sense strand starting at position 3822 of SEQ ID NO: 1883148
acaagaaagugcucuuuag

SEQ ID NO: 2172955 - RNA, 19 nt, Artificial Sequence
  Description of Artificial Sequence: Synthetic oligonucleotide
  Antisense strand to SEQ ID NO: 2172954
cuaaagagcacuuucuugu

SEQ ID NO: 2172956 - RNA, 19 nt, Artificial Sequence
  Description of Artificial Sequence: Synthetic oligonucleotide
  Sense strand starting at position 3844 of SEQ ID NO: 1883148
acugcauuggucuaaacug

SEQ ID NO: 2172957 - RNA, 19 nt, Artificial Sequence
  Description of Artificial Sequence: Synthetic oligonucleotide
  Antisense strand to SEQ ID NO: 2172956
caguuuagaccaaugcagu

SEQ ID NO: 2172958 - RNA, 19 nt, Artificial Sequence
  Description of Artificial Sequence: Synthetic oligonucleotide
  Sense strand starting at position 3909 of SEQ ID NO: 1883148
ggcacuuaaugagugaauc

SEQ ID NO: 2172959 - RNA, 19 nt, Artificial Sequence
  Description of Artificial Sequence: Synthetic oligonucleotide
  Antisense strand to SEQ ID NO: 2172958
gauucacucauuaagugcc

SEQ ID NO: 2172960 - RNA, 19 nt, Artificial Sequence
  Description of Artificial Sequence: Synthetic oligonucleotide
  Sense strand starting at position 3920 of SEQ ID NO: 1883148
agugaaucuaaagggaugu

SEQ ID NO: 2172961 - RNA, 19 nt, Artificial Sequence
  Description of Artificial Sequence: Synthetic oligonucleotide
  Antisense strand to SEQ ID NO: 2172960
acaucccuuuagauucacu

SEQ ID NO: 2172962 - RNA, 19 nt, Artificial Sequence
  Description of Artificial Sequence: Synthetic oligonucleotide
  Sense strand starting at position 3921 of SEQ ID NO: 1883148
gugaaucuaaagggaugua

SEQ ID NO: 2172963 - RNA, 19 nt, Artificial Sequence
  Description of Artificial Sequence: Synthetic oligonucleotide
  Antisense strand to SEQ ID NO: 2172962
uacaucccuuuagauucac

SEQ ID NO: 2172964 - RNA, 19 nt, Artificial Sequence
  Description of Artificial Sequence: Synthetic oligonucleotide
  Sense strand starting at position 3933 of SEQ ID NO: 1883148
ggauguagcccagaaaccu

SEQ ID NO: 2172965 - RNA, 19 nt, Artificial Sequence
  Description of Artificial Sequence: Synthetic oligonucleotide
  Antisense strand to SEQ ID NO: 2172964
agguuucugggcuacaucc

SEQ ID NO: 2172966 - RNA, 19 nt, Artificial Sequence
  Description of Artificial Sequence: Synthetic oligonucleotide
  Sense strand starting at position 3942 of SEQ ID NO: 1883148
ccagaaaccuguguauuag

SEQ ID NO: 2172967 - RNA, 19 nt, Artificial Sequence
  Description of Artificial Sequence: Synthetic oligonucleotide
  Antisense strand to SEQ ID NO: 2172966
cuaauacacagguuucugg

SEQ ID NO: 2172968 - RNA, 19 nt, Artificial Sequence
  Description of Artificial Sequence: Synthetic oligonucleotide
  Sense strand starting at position 62 of SEQ ID NO: 1883149
acuggagauuugcagaauc

SEQ ID NO: 2172969 - RNA, 19 nt, Artificial Sequence
  Description of Artificial Sequence: Synthetic oligonucleotide
  Antisense strand to SEQ ID NO: 2172968
gauucugcaaaucuccagu

SEQ ID NO: 2172970 - RNA, 19 nt, Artificial Sequence
  Description of Artificial Sequence: Synthetic oligonucleotide
  Sense strand starting at position 588 of SEQ ID NO: 1883149
gauauuagauauucccguu

SEQ ID NO: 2172971 - RNA, 19 nt, Artificial Sequence
  Description of Artificial Sequence: Synthetic oligonucleotide
  Antisense strand to SEQ ID NO: 2172970
aacgggaauaucuaauauc

SEQ ID NO: 2172972 - RNA, 19 nt, Artificial Sequence
  Description of Artificial Sequence: Synthetic oligonucleotide
  Sense strand starting at position 646 of SEQ ID NO: 1883149
gguugguggcuuugggaau

SEQ ID NO: 2172973 - RNA, 19 nt, Artificial Sequence
  Description of Artificial Sequence: Synthetic oligonucleotide
  Antisense strand to SEQ ID NO: 2172972
auucccaaagccaccaacc

SEQ ID NO: 2172974 - RNA, 19 nt, Artificial Sequence
  Description of Artificial Sequence: Synthetic oligonucleotide
  Sense strand starting at position 672 of SEQ ID NO: 1883149
gaccaaccucaguggugua

SEQ ID NO: 2172975 - RNA, 19 nt, Artificial Sequence
  Description of Artificial Sequence: Synthetic oligonucleotide
  Antisense strand to SEQ ID NO: 2172974
uacaccacugagguugguc

SEQ ID NO: 2172976 - RNA, 19 nt, Artificial Sequence
  Description of Artificial Sequence: Synthetic oligonucleotide
  Sense strand starting at position 718 of SEQ ID NO: 1883149
guaauauuucugugggcca

SEQ ID NO: 2172977 - RNA, 19 nt, Artificial Sequence
  Description of Artificial Sequence: Synthetic oligonucleotide
  Antisense strand to SEQ ID NO: 2172976
uggcccacagaaauauuac

SEQ ID NO: 2172978 - RNA, 19 nt, Artificial Sequence
  Description of Artificial Sequence: Synthetic oligonucleotide
  Sense strand starting at position 736 of SEQ ID NO: 1883149
augcaaacucaggguauua

SEQ ID NO: 2172979 - RNA, 19 nt, Artificial Sequence
  Description of Artificial Sequence: Synthetic oligonucleotide
  Antisense strand to SEQ ID NO: 2172978
uaauacccugaguuugcau

SEQ ID NO: 2172980 - RNA, 19 nt, Artificial Sequence
  Description of Artificial Sequence: Synthetic oligonucleotide
  Sense strand starting at position 748 of SEQ ID NO: 1883149
gguauuaaauccucuggga

SEQ ID NO: 2172981 - RNA, 19 nt, Artificial Sequence
  Description of Artificial Sequence: Synthetic oligonucleotide
  Antisense strand to SEQ ID NO: 2172980
ucccagaggauuuaauacc

SEQ ID NO: 2172982 - RNA, 19 nt, Artificial Sequence
  Description of Artificial Sequence: Synthetic oligonucleotide
  Sense strand starting at position 771 of SEQ ID NO: 1883149
acucguggucauuaucuuu

SEQ ID NO: 2172983 - RNA, 19 nt, Artificial Sequence
  Description of Artificial Sequence: Synthetic oligonucleotide
  Antisense strand to SEQ ID NO: 2172982
aaagauaaugaccacgagu

SEQ ID NO: 2172984 - RNA, 19 nt, Artificial Sequence
  Description of Artificial Sequence: Synthetic oligonucleotide
  Sense strand starting at position 2054 of SEQ ID NO: 1883149
ccagccugguuacuagaau

SEQ ID NO: 2172985 - RNA, 19 nt, Artificial Sequence
  Description of Artificial Sequence: Synthetic oligonucleotide
  Antisense strand to SEQ ID NO: 2172984
auucuaguaaccaggcugg

SEQ ID NO: 2172986 - RNA, 19 nt, Artificial Sequence
  Description of Artificial Sequence: Synthetic oligonucleotide
  Sense strand starting at position 2120 of SEQ ID NO: 1883149
caggaaguauuggacacau

SEQ ID NO: 2172987 - RNA, 19 nt, Artificial Sequence
  Description of Artificial Sequence: Synthetic oligonucleotide
  Antisense strand to SEQ ID NO: 2172986
auguguccaauacuuccug

SEQ ID NO: 2172988 - RNA, 19 nt, Artificial Sequence
  Description of Artificial Sequence: Synthetic oligonucleotide
  Sense strand starting at position 2211 of SEQ ID NO: 1883149
gcuacuuguccugcaguuu

SEQ ID NO: 2172989 - RNA, 19 nt, Artificial Sequence
  Description of Artificial Sequence: Synthetic oligonucleotide
  Antisense strand to SEQ ID NO: 2172988
aaacugcaggacaaguagc

SEQ ID NO: 2172990 - RNA, 19 nt, Artificial Sequence
  Description of Artificial Sequence: Synthetic oligonucleotide
  Sense strand starting at position 2227 of SEQ ID NO: 1883149
uuugcuaugugguuacaga

SEQ ID NO: 2172991 - RNA, 19 nt, Artificial Sequence
  Description of Artificial Sequence: Synthetic oligonucleotide
  Antisense strand to SEQ ID NO: 2172990
ucuguaaccacauagcaaa

SEQ ID NO: 2172992 - RNA, 19 nt, Artificial Sequence
  Description of Artificial Sequence: Synthetic oligonucleotide
  Sense strand starting at position 2234 of SEQ ID NO: 1883149
ugugguuacagacaaguuu

SEQ ID NO: 2172993 - RNA, 19 nt, Artificial Sequence
  Description of Artificial Sequence: Synthetic oligonucleotide
  Antisense strand to SEQ ID NO: 2172992
aaacuugucuguaaccaca

SEQ ID NO: 2172994 - RNA, 19 nt, Artificial Sequence
  Description of Artificial Sequence: Synthetic oligonucleotide
  Sense strand starting at position 2263 of SEQ ID NO: 1883149
gccaguuccaaauguagag

SEQ ID NO: 2172995 - RNA, 19 nt, Artificial Sequence
  Description of Artificial Sequence: Synthetic oligonucleotide
  Antisense strand to SEQ ID NO: 2172994
cucuacauuuggaacuggc

SEQ ID NO: 2172996 - RNA, 19 nt, Artificial Sequence
  Description of Artificial Sequence: Synthetic oligonucleotide
  Sense strand starting at position 2341 of SEQ ID NO: 1883149
guugguuugccauugucuu

SEQ ID NO: 2172997 - RNA, 19 nt, Artificial Sequence
  Description of Artificial Sequence: Synthetic oligonucleotide
  Antisense strand to SEQ ID NO: 2172996
aagacaauggcaaaccaac

SEQ ID NO: 2172998 - RNA, 19 nt, Artificial Sequence
  Description of Artificial Sequence: Synthetic oligonucleotide
  Sense strand starting at position 2430 of SEQ ID NO: 1883149
agggaaaccaugugucuag

SEQ ID NO: 2172999 - RNA, 19 nt, Artificial Sequence
  Description of Artificial Sequence: Synthetic oligonucleotide
  Antisense strand to SEQ ID NO: 2172998
cuagacacaugguuucccu

SEQ ID NO: 2173000 - RNA, 19 nt, Artificial Sequence
  Description of Artificial Sequence: Synthetic oligonucleotide
  Sense strand starting at position 2433 of SEQ ID NO: 1883149
gaaaccaugugucuaggau

SEQ ID NO: 2173001 - RNA, 19 nt, Artificial Sequence
  Description of Artificial Sequence: Synthetic oligonucleotide
  Antisense strand to SEQ ID NO: 2173000
auccuagacacaugguuuc

SEQ ID NO: 2173002 - RNA, 19 nt, Artificial Sequence
  Description of Artificial Sequence: Synthetic oligonucleotide
  Sense strand starting at position 2439 of SEQ ID NO: 1883149
augugucuaggaugagguu

SEQ ID NO: 2173003 - RNA, 19 nt, Artificial Sequence
  Description of Artificial Sequence: Synthetic oligonucleotide
  Antisense strand to SEQ ID NO: 2173002
aaccucauccuagacacau

SEQ ID NO: 2173004 - RNA, 19 nt, Artificial Sequence
  Description of Artificial Sequence: Synthetic oligonucleotide
  Sense strand starting at position 2473 of SEQ ID NO: 1883149
ggacuaguuaguggugacu

SEQ ID NO: 2173005 - RNA, 19 nt, Artificial Sequence
  Description of Artificial Sequence: Synthetic oligonucleotide
  Antisense strand to SEQ ID NO: 2173004
agucaccacuaacuagucc

SEQ ID NO: 2173006 - RNA, 19 nt, Artificial Sequence
  Description of Artificial Sequence: Synthetic oligonucleotide
  Sense strand starting at position 2561 of SEQ ID NO: 1883149
gaaggcaguaguggaaauu

SEQ ID NO: 2173007 - RNA, 19 nt, Artificial Sequence
  Description of Artificial Sequence: Synthetic oligonucleotide
  Antisense strand to SEQ ID NO: 2173006
aauuuccacuacugccuuc

SEQ ID NO: 2173008 - RNA, 19 nt, Artificial Sequence
  Description of Artificial Sequence: Synthetic oligonucleotide
  Sense strand starting at position 2591 of SEQ ID NO: 1883149
gaauauagugguggcaaau

SEQ ID NO: 2173009 - RNA, 19 nt, Artificial Sequence
  Description of Artificial Sequence: Synthetic oligonucleotide
  Antisense strand to SEQ ID NO: 2173008
auuugccaccacuauauuc

SEQ ID NO: 2173010 - RNA, 19 nt, Artificial Sequence
  Description of Artificial Sequence: Synthetic oligonucleotide
  Sense strand starting at position 2603 of SEQ ID NO: 1883149
ggcaaaugcacagguuaaa

SEQ ID NO: 2173011 - RNA, 19 nt, Artificial Sequence
  Description of Artificial Sequence: Synthetic oligonucleotide
  Antisense strand to SEQ ID NO: 2173010
uuuaaccugugcauuugcc

SEQ ID NO: 2173012 - RNA, 19 nt, Artificial Sequence
  Description of Artificial Sequence: Synthetic oligonucleotide
  Sense strand starting at position 2642 of SEQ ID NO: 1883149
cagggcaauccuuaaggua

SEQ ID NO: 2173013 - RNA, 19 nt, Artificial Sequence
  Description of Artificial Sequence: Synthetic oligonucleotide
  Antisense strand to SEQ ID NO: 2173012
uaccuuaaggauugcccug

SEQ ID NO: 2173014 - RNA, 19 nt, Artificial Sequence
  Description of Artificial Sequence: Synthetic oligonucleotide
  Sense strand starting at position 2726 of SEQ ID NO: 1883149
uagggugcagccugagaau

SEQ ID NO: 2173015 - RNA, 19 nt, Artificial Sequence
  Description of Artificial Sequence: Synthetic oligonucleotide
  Antisense strand to SEQ ID NO: 2173014
auucucaggcugcacccua

SEQ ID NO: 2173016 - RNA, 19 nt, Artificial Sequence
  Description of Artificial Sequence: Synthetic oligonucleotide
  Sense strand starting at position 2829 of SEQ ID NO: 1883149
caagauagcugucuugaca

SEQ ID NO: 2173017 - RNA, 19 nt, Artificial Sequence
  Description of Artificial Sequence: Synthetic oligonucleotide
  Antisense strand to SEQ ID NO: 2173016
ugucaagacagcuaucuug

SEQ ID NO: 2173018 - RNA, 19 nt, Artificial Sequence
  Description of Artificial Sequence: Synthetic oligonucleotide
  Sense strand starting at position 2832 of SEQ ID NO: 1883149
gauagcugucuugacaucu

SEQ ID NO: 2173019 - RNA, 19 nt, Artificial Sequence
  Description of Artificial Sequence: Synthetic oligonucleotide
  Antisense strand to SEQ ID NO: 2173018
agaugucaagacagcuauc

SEQ ID NO: 2173020 - RNA, 19 nt, Artificial Sequence
  Description of Artificial Sequence: Synthetic oligonucleotide
  Sense strand starting at position 2855 of SEQ ID NO: 1883149
acaugagagcucuaguuac

SEQ ID NO: 2173021 - RNA, 19 nt, Artificial Sequence
  Description of Artificial Sequence: Synthetic oligonucleotide
  Antisense strand to SEQ ID NO: 2173020
guaacuagagcucucaugu

SEQ ID NO: 2173022 - RNA, 19 nt, Artificial Sequence
  Description of Artificial Sequence: Synthetic oligonucleotide
  Sense strand starting at position 2873 of SEQ ID NO: 1883149
cucacuuguccacaggagu

SEQ ID NO: 2173023 - RNA, 19 nt, Artificial Sequence
  Description of Artificial Sequence: Synthetic oligonucleotide
  Antisense strand to SEQ ID NO: 2173022
acuccuguggacaagugag

SEQ ID NO: 2173024 - RNA, 19 nt, Artificial Sequence
  Description of Artificial Sequence: Synthetic oligonucleotide
  Sense strand starting at position 2956 of SEQ ID NO: 1883149
cugaaugcccauugugaaa

SEQ ID NO: 2173025 - RNA, 19 nt, Artificial Sequence
  Description of Artificial Sequence: Synthetic oligonucleotide
  Antisense strand to SEQ ID NO: 2173024
uuucacaaugggcauucag

SEQ ID NO: 2173026 - RNA, 19 nt, Artificial Sequence
  Description of Artificial Sequence: Synthetic oligonucleotide
  Sense strand starting at position 3033 of SEQ ID NO: 1883149
cccaguuucuagguuuaag

SEQ ID NO: 2173027 - RNA, 19 nt, Artificial Sequence
  Description of Artificial Sequence: Synthetic oligonucleotide
  Antisense strand to SEQ ID NO: 2173026
cuuaaaccuagaaacuggg

SEQ ID NO: 2173028 - RNA, 19 nt, Artificial Sequence
  Description of Artificial Sequence: Synthetic oligonucleotide
  Sense strand starting at position 3433 of SEQ ID NO: 1883149
guaggcaaauguuuaucaa

SEQ ID NO: 2173029 - RNA, 19 nt, Artificial Sequence
  Description of Artificial Sequence: Synthetic oligonucleotide
  Antisense strand to SEQ ID NO: 2173028
uugauaaacauuugccuac

SEQ ID NO: 2173030 - RNA, 19 nt, Artificial Sequence
  Description of Artificial Sequence: Synthetic oligonucleotide
  Sense strand starting at position 3436 of SEQ ID NO: 1883149
ggcaaauguuuaucaaagg

SEQ ID NO: 2173031 - RNA, 19 nt, Artificial Sequence
  Description of Artificial Sequence: Synthetic oligonucleotide
  Antisense strand to SEQ ID NO: 2173030
ccuuugauaaacauuugcc

SEQ ID NO: 2173032 - RNA, 19 nt, Artificial Sequence
  Description of Artificial Sequence: Synthetic oligonucleotide
  Sense strand starting at position 3442 of SEQ ID NO: 1883149
uguuuaucaaagggcuaga

SEQ ID NO: 2173033 - RNA, 19 nt, Artificial Sequence
  Description of Artificial Sequence: Synthetic oligonucleotide
  Antisense strand to SEQ ID NO: 2173032
ucuagcccuuugauaaaca

SEQ ID NO: 2173034 - RNA, 19 nt, Artificial Sequence
  Description of Artificial Sequence: Synthetic oligonucleotide
  Sense strand starting at position 3490 of SEQ ID NO: 1883149
gcaguucugaagugggacu

SEQ ID NO: 2173035 - RNA, 19 nt, Artificial Sequence
  Description of Artificial Sequence: Synthetic oligonucleotide
  Antisense strand to SEQ ID NO: 2173034
agucccacuucagaacugc

SEQ ID NO: 2173036 - RNA, 19 nt, Artificial Sequence
  Description of Artificial Sequence: Synthetic oligonucleotide
  Sense strand starting at position 3593 of SEQ ID NO: 1883149
augaauauaugggauuaca

SEQ ID NO: 2173037 - RNA, 19 nt, Artificial Sequence
  Description of Artificial Sequence: Synthetic oligonucleotide
  Antisense strand to SEQ ID NO: 2173036
uguaaucccauauauucau

SEQ ID NO: 2173038 - RNA, 19 nt, Artificial Sequence
  Description of Artificial Sequence: Synthetic oligonucleotide
  Sense strand starting at position 3681 of SEQ ID NO: 1883149
gcagguaguagaugacaaa

SEQ ID NO: 2173039 - RNA, 19 nt, Artificial Sequence
  Description of Artificial Sequence: Synthetic oligonucleotide
  Antisense strand to SEQ ID NO: 2173038
uuugucaucuacuaccugc

SEQ ID NO: 2173040 - RNA, 19 nt, Artificial Sequence
  Description of Artificial Sequence: Synthetic oligonucleotide
  Sense strand starting at position 3874 of SEQ ID NO: 1883149
gguccauugguuugaugca

SEQ ID NO: 2173041 - RNA, 19 nt, Artificial Sequence
  Description of Artificial Sequence: Synthetic oligonucleotide
  Antisense strand to SEQ ID NO: 2173040
ugcaucaaaccaauggacc

SEQ ID NO: 2173042 - RNA, 19 nt, Artificial Sequence
  Description of Artificial Sequence: Synthetic oligonucleotide
  Sense strand starting at position 3947 of SEQ ID NO: 1883149
acuccugagugccugaaga

SEQ ID NO: 2173043 - RNA, 19 nt, Artificial Sequence
  Description of Artificial Sequence: Synthetic oligonucleotide
  Antisense strand to SEQ ID NO: 2173042
ucuucaggcacucaggagu

SEQ ID NO: 2173044 - RNA, 19 nt, Artificial Sequence
  Description of Artificial Sequence: Synthetic oligonucleotide
  Sense strand starting at position 3949 of SEQ ID NO: 1883149
uccugagugccugaagacu

SEQ ID NO: 2173045 - RNA, 19 nt, Artificial Sequence
  Description of Artificial Sequence: Synthetic oligonucleotide
  Antisense strand to SEQ ID NO: 2173044
agucuucaggcacucagga

SEQ ID NO: 2173046 - RNA, 19 nt, Artificial Sequence
  Description of Artificial Sequence: Synthetic oligonucleotide
  Sense strand starting at position 3972 of SEQ ID NO: 1883149
uugggcuuccuugaucacu

SEQ ID NO: 2173047 - RNA, 19 nt, Artificial Sequence
  Description of Artificial Sequence: Synthetic oligonucleotide
  Antisense strand to SEQ ID NO: 2173046
agugaucaaggaagcccaa

SEQ ID NO: 2173048 - RNA, 19 nt, Artificial Sequence
  Description of Artificial Sequence: Synthetic oligonucleotide
  Sense strand starting at position 53 of SEQ ID NO: 1883150
uacugaagugguuauccaa

SEQ ID NO: 2173049 - RNA, 19 nt, Artificial Sequence
  Description of Artificial Sequence: Synthetic oligonucleotide
  Antisense strand to SEQ ID NO: 2173048
uuggauaaccacuucagua

SEQ ID NO: 2173050 - RNA, 19 nt, Artificial Sequence
  Description of Artificial Sequence: Synthetic oligonucleotide
  Sense strand starting at position 175 of SEQ ID NO: 1883150
ucauaaugauaugcaggua

SEQ ID NO: 2173051 - RNA, 19 nt, Artificial Sequence
  Description of Artificial Sequence: Synthetic oligonucleotide
  Antisense strand to SEQ ID NO: 2173050
uaccugcauaucauuauga

SEQ ID NO: 2173052 - RNA, 19 nt, Artificial Sequence
  Description of Artificial Sequence: Synthetic oligonucleotide
  Sense strand starting at position 178 of SEQ ID NO: 1883150
uaaugauaugcagguaggu

SEQ ID NO: 2173053 - RNA, 19 nt, Artificial Sequence
  Description of Artificial Sequence: Synthetic oligonucleotide
  Antisense strand to SEQ ID NO: 2173052
accuaccugcauaucauua

SEQ ID NO: 2173054 - RNA, 19 nt, Artificial Sequence
  Description of Artificial Sequence: Synthetic oligonucleotide
  Sense strand starting at position 191 of SEQ ID NO: 1883150
guagguguacuuuaggacu

SEQ ID NO: 2173055 - RNA, 19 nt, Artificial Sequence
  Description of Artificial Sequence: Synthetic oligonucleotide
  Antisense strand to SEQ ID NO: 2173054
aguccuaaaguacaccuac

SEQ ID NO: 2173056 - RNA, 19 nt, Artificial Sequence
  Description of Artificial Sequence: Synthetic oligonucleotide
  Sense strand starting at position 222 of SEQ ID NO: 1883150
uucguuauuauggauauga

SEQ ID NO: 2173057 - RNA, 19 nt, Artificial Sequence
  Description of Artificial Sequence: Synthetic oligonucleotide
  Antisense strand to SEQ ID NO: 2173056
ucauauccauaauaacgaa

SEQ ID NO: 2173058 - RNA, 19 nt, Artificial Sequence
  Description of Artificial Sequence: Synthetic oligonucleotide
  Sense strand starting at position 278 of SEQ ID NO: 1883150
uaugaaugcugauuaggga

SEQ ID NO: 2173059 - RNA, 19 nt, Artificial Sequence
  Description of Artificial Sequence: Synthetic oligonucleotide
  Antisense strand to SEQ ID NO: 2173058
ucccuaaucagcauucaua

SEQ ID NO: 2173060 - RNA, 19 nt, Artificial Sequence
  Description of Artificial Sequence: Synthetic oligonucleotide
  Sense strand starting at position 424 of SEQ ID NO: 1883150
uuucuugagguauauuagu

SEQ ID NO: 2173061 - RNA, 19 nt, Artificial Sequence
  Description of Artificial Sequence: Synthetic oligonucleotide
  Antisense strand to SEQ ID NO: 2173060
acuaauauaccucaagaaa

SEQ ID NO: 2173062 - RNA, 19 nt, Artificial Sequence
  Description of Artificial Sequence: Synthetic oligonucleotide
  Sense strand starting at position 429 of SEQ ID NO: 1883150
ugagguauauuagucuaaa

SEQ ID NO: 2173063 - RNA, 19 nt, Artificial Sequence
  Description of Artificial Sequence: Synthetic oligonucleotide
  Antisense strand to SEQ ID NO: 2173062
uuuagacuaauauaccuca

SEQ ID NO: 2173064 - RNA, 19 nt, Artificial Sequence
  Description of Artificial Sequence: Synthetic oligonucleotide
  Sense strand starting at position 455 of SEQ ID NO: 1883150
gcgauaguaagucaccaaa

SEQ ID NO: 2173065 - RNA, 19 nt, Artificial Sequence
  Description of Artificial Sequence: Synthetic oligonucleotide
  Antisense strand to SEQ ID NO: 2173064
uuuggugacuuacuaucgc

SEQ ID NO: 2173066 - RNA, 19 nt, Artificial Sequence
  Description of Artificial Sequence: Synthetic oligonucleotide
  Sense strand starting at position 475 of SEQ ID NO: 1883150
acccgagugacugaaauuc

SEQ ID NO: 2173067 - RNA, 19 nt, Artificial Sequence
  Description of Artificial Sequence: Synthetic oligonucleotide
  Antisense strand to SEQ ID NO: 2173066
gaauuucagucacucgggu

SEQ ID NO: 2173068 - RNA, 19 nt, Artificial Sequence
  Description of Artificial Sequence: Synthetic oligonucleotide
  Sense strand starting at position 720 of SEQ ID NO: 1883150
aucaguauuccgcacauag

SEQ ID NO: 2173069 - RNA, 19 nt, Artificial Sequence
  Description of Artificial Sequence: Synthetic oligonucleotide
  Antisense strand to SEQ ID NO: 2173068
cuaugugcggaauacugau

SEQ ID NO: 2173070 - RNA, 19 nt, Artificial Sequence
  Description of Artificial Sequence: Synthetic oligonucleotide
  Sense strand starting at position 748 of SEQ ID NO: 1883150
aacaauguugcugacagau

SEQ ID NO: 2173071 - RNA, 19 nt, Artificial Sequence
  Description of Artificial Sequence: Synthetic oligonucleotide
  Antisense strand to SEQ ID NO: 2173070
aucugucagcaacauuguu

SEQ ID NO: 2173072 - RNA, 19 nt, Artificial Sequence
  Description of Artificial Sequence: Synthetic oligonucleotide
  Sense strand starting at position 754 of SEQ ID NO: 1883150
guugcugacagaugagaca

SEQ ID NO: 2173073 - RNA, 19 nt, Artificial Sequence
  Description of Artificial Sequence: Synthetic oligonucleotide
  Antisense strand to SEQ ID NO: 2173072
ugucucaucugucagcaac

SEQ ID NO: 2173074 - RNA, 19 nt, Artificial Sequence
  Description of Artificial Sequence: Synthetic oligonucleotide
  Sense strand starting at position 967 of SEQ ID NO: 1883150
ccagaauagccaugagguu

SEQ ID NO: 2173075 - RNA, 19 nt, Artificial Sequence
  Description of Artificial Sequence: Synthetic oligonucleotide
  Antisense strand to SEQ ID NO: 2173074
aaccucauggcuauucugg

SEQ ID NO: 2173076 - RNA, 19 nt, Artificial Sequence
  Description of Artificial Sequence: Synthetic oligonucleotide
  Sense strand starting at position 1015 of SEQ ID NO: 1883150
ugccacuuccacuagaguu

SEQ ID NO: 2173077 - RNA, 19 nt, Artificial Sequence
  Description of Artificial Sequence: Synthetic oligonucleotide
  Antisense strand to SEQ ID NO: 2173076
aacucuaguggaaguggca

SEQ ID NO: 2173078 - RNA, 19 nt, Artificial Sequence
  Description of Artificial Sequence: Synthetic oligonucleotide
  Sense strand starting at position 1022 of SEQ ID NO: 1883150
uccacuagaguuugacagu

SEQ ID NO: 2173079 - RNA, 19 nt, Artificial Sequence
  Description of Artificial Sequence: Synthetic oligonucleotide
  Antisense strand to SEQ ID NO: 2173078
acugucaaacucuagugga

SEQ ID NO: 2173080 - RNA, 19 nt, Artificial Sequence
  Description of Artificial Sequence: Synthetic oligonucleotide
  Sense strand starting at position 1118 of SEQ ID NO: 1883150
acuuuaaacgcugaucauu

SEQ ID NO: 2173081 - RNA, 19 nt, Artificial Sequence
  Description of Artificial Sequence: Synthetic oligonucleotide
  Antisense strand to SEQ ID NO: 2173080
aaugaucagcguuuaaagu

SEQ ID NO: 2173082 - RNA, 19 nt, Artificial Sequence
  Description of Artificial Sequence: Synthetic oligonucleotide
  Sense strand starting at position 1120 of SEQ ID NO: 1883150
uuuaaacgcugaucauuaa

SEQ ID NO: 2173083 - RNA, 19 nt, Artificial Sequence
  Description of Artificial Sequence: Synthetic oligonucleotide
  Antisense strand to SEQ ID NO: 2173082
uuaaugaucagcguuuaaa

SEQ ID NO: 2173084 - RNA, 19 nt, Artificial Sequence
  Description of Artificial Sequence: Synthetic oligonucleotide
  Sense strand starting at position 1121 of SEQ ID NO: 1883150
uuaaacgcugaucauuaau

SEQ ID NO: 2173085 - RNA, 19 nt, Artificial Sequence
  Description of Artificial Sequence: Synthetic oligonucleotide
  Antisense strand to SEQ ID NO: 2173084
auuaaugaucagcguuuaa

SEQ ID NO: 2173086 - RNA, 19 nt, Artificial Sequence
  Description of Artificial Sequence: Synthetic oligonucleotide
  Sense strand starting at position 1144 of SEQ ID NO: 1883150
aggacaacgcaguaucuaa

SEQ ID NO: 2173087 - RNA, 19 nt, Artificial Sequence
  Description of Artificial Sequence: Synthetic oligonucleotide
  Antisense strand to SEQ ID NO: 2173086
uuagauacugcguuguccu

SEQ ID NO: 2173088 - RNA, 19 nt, Artificial Sequence
  Description of Artificial Sequence: Synthetic oligonucleotide
  Sense strand starting at position 1154 of SEQ ID NO: 1883150
aguaucuaaguuggaagau

SEQ ID NO: 2173089 - RNA, 19 nt, Artificial Sequence
  Description of Artificial Sequence: Synthetic oligonucleotide
  Antisense strand to SEQ ID NO: 2173088
aucuuccaacuuagauacu

SEQ ID NO: 2173090 - RNA, 19 nt, Artificial Sequence
  Description of Artificial Sequence: Synthetic oligonucleotide
  Sense strand starting at position 2201 of SEQ ID NO: 1883150
cgcaaauaucgcgccgaga

SEQ ID NO: 2173091 - RNA, 19 nt, Artificial Sequence
  Description of Artificial Sequence: Synthetic oligonucleotide
  Antisense strand to SEQ ID NO: 2173090
ucucggcgcgauauuugcg

SEQ ID NO: 2173092 - RNA, 19 nt, Artificial Sequence
  Description of Artificial Sequence: Synthetic oligonucleotide
  Sense strand starting at position 2202 of SEQ ID NO: 1883150
gcaaauaucgcgccgagau

SEQ ID NO: 2173093 - RNA, 19 nt, Artificial Sequence
  Description of Artificial Sequence: Synthetic oligonucleotide
  Antisense strand to SEQ ID NO: 2173092
aucucggcgcgauauuugc

SEQ ID NO: 2173094 - RNA, 19 nt, Artificial Sequence
  Description of Artificial Sequence: Synthetic oligonucleotide
  Sense strand starting at position 2637 of SEQ ID NO: 1883150
aaauaucuagugggcagaa

SEQ ID NO: 2173095 - RNA, 19 nt, Artificial Sequence
  Description of Artificial Sequence: Synthetic oligonucleotide
  Antisense strand to SEQ ID NO: 2173094
uucugcccacuagauauuu

SEQ ID NO: 2173096 - RNA, 19 nt, Artificial Sequence
  Description of Artificial Sequence: Synthetic oligonucleotide
  Sense strand starting at position 2638 of SEQ ID NO: 1883150
aauaucuagugggcagaaa

SEQ ID NO: 2173097 - RNA, 19 nt, Artificial Sequence
  Description of Artificial Sequence: Synthetic oligonucleotide
  Antisense strand to SEQ ID NO: 2173096
uuucugcccacuagauauu

SEQ ID NO: 2173098 - RNA, 19 nt, Artificial Sequence
  Description of Artificial Sequence: Synthetic oligonucleotide
  Sense strand starting at position 2874 of SEQ ID NO: 1883150
cugagcagaucacuaagau

SEQ ID NO: 2173099 - RNA, 19 nt, Artificial Sequence
  Description of Artificial Sequence: Synthetic oligonucleotide
  Antisense strand to SEQ ID NO: 2173098
aucuuagugaucugcucag

SEQ ID NO: 2173100 - RNA, 19 nt, Artificial Sequence
  Description of Artificial Sequence: Synthetic oligonucleotide
  Sense strand starting at position 3025 of SEQ ID NO: 1883150
cagggagccuauccaugaa

SEQ ID NO: 2173101 - RNA, 19 nt, Artificial Sequence
  Description of Artificial Sequence: Synthetic oligonucleotide
  Antisense strand to SEQ ID NO: 2173100
uucauggauaggcucccug

SEQ ID NO: 2173102 - RNA, 19 nt, Artificial Sequence
  Description of Artificial Sequence: Synthetic oligonucleotide
  Sense strand starting at position 3028 of SEQ ID NO: 1883150
ggagccuauccaugaaauc

SEQ ID NO: 2173103 - RNA, 19 nt, Artificial Sequence
  Description of Artificial Sequence: Synthetic oligonucleotide
  Antisense strand to SEQ ID NO: 2173102
gauuucauggauaggcucc

SEQ ID NO: 2173104 - RNA, 19 nt, Artificial Sequence
  Description of Artificial Sequence: Synthetic oligonucleotide
  Sense strand starting at position 3192 of SEQ ID NO: 1883150
guagaaaccaaaugguaug

SEQ ID NO: 2173105 - RNA, 19 nt, Artificial Sequence
  Description of Artificial Sequence: Synthetic oligonucleotide
  Antisense strand to SEQ ID NO: 2173104
cauaccauuugguuucuac

SEQ ID NO: 2173106 - RNA, 19 nt, Artificial Sequence
  Description of Artificial Sequence: Synthetic oligonucleotide
  Sense strand starting at position 3198 of SEQ ID NO: 1883150
accaaaugguauguaacau

SEQ ID NO: 2173107 - RNA, 19 nt, Artificial Sequence
  Description of Artificial Sequence: Synthetic oligonucleotide
  Antisense strand to SEQ ID NO: 2173106
auguuacauaccauuuggu

SEQ ID NO: 2173108 - RNA, 19 nt, Artificial Sequence
  Description of Artificial Sequence: Synthetic oligonucleotide
  Sense strand starting at position 3211 of SEQ ID NO: 1883150
uaacauggugggcauauua

SEQ ID NO: 2173109 - RNA, 19 nt, Artificial Sequence
  Description of Artificial Sequence: Synthetic oligonucleotide
  Antisense strand to SEQ ID NO: 2173108
uaauaugcccaccauguua

SEQ ID NO: 2173110 - RNA, 19 nt, Artificial Sequence
  Description of Artificial Sequence: Synthetic oligonucleotide
  Sense strand starting at position 3218 of SEQ ID NO: 1883150
gugggcauauuacuuagaa

SEQ ID NO: 2173111 - RNA, 19 nt, Artificial Sequence
  Description of Artificial Sequence: Synthetic oligonucleotide
  Antisense strand to SEQ ID NO: 2173110
uucuaaguaauaugcccac

SEQ ID NO: 2173112 - RNA, 19 nt, Artificial Sequence
  Description of Artificial Sequence: Synthetic oligonucleotide
  Sense strand starting at position 3219 of SEQ ID NO: 1883150
ugggcauauuacuuagaaa

SEQ ID NO: 2173113 - RNA, 19 nt, Artificial Sequence
  Description of Artificial Sequence: Synthetic oligonucleotide
  Antisense strand to SEQ ID NO: 2173112
uuucuaaguaauaugccca

SEQ ID NO: 2173114 - RNA, 19 nt, Artificial Sequence
  Description of Artificial Sequence: Synthetic oligonucleotide
  Sense strand starting at position 3228 of SEQ ID NO: 1883150
uacuuagaaacguguugag

SEQ ID NO: 2173115 - RNA, 19 nt, Artificial Sequence
  Description of Artificial Sequence: Synthetic oligonucleotide
  Antisense strand to SEQ ID NO: 2173114
cucaacacguuucuaagua

SEQ ID NO: 2173116 - RNA, 19 nt, Artificial Sequence
  Description of Artificial Sequence: Synthetic oligonucleotide
  Sense strand starting at position 3232 of SEQ ID NO: 1883150
uagaaacguguugagucau

SEQ ID NO: 2173117 - RNA, 19 nt, Artificial Sequence
  Description of Artificial Sequence: Synthetic oligonucleotide
  Antisense strand to SEQ ID NO: 2173116
augacucaacacguuucua

SEQ ID NO: 2173118 - RNA, 19 nt, Artificial Sequence
  Description of Artificial Sequence: Synthetic oligonucleotide
  Sense strand starting at position 3751 of SEQ ID NO: 1883150
ccaagaagcuugguccacu

SEQ ID NO: 2173119 - RNA, 19 nt, Artificial Sequence
  Description of Artificial Sequence: Synthetic oligonucleotide
  Antisense strand to SEQ ID NO: 2173118
aguggaccaagcuucuugg

SEQ ID NO: 2173120 - RNA, 19 nt, Artificial Sequence
  Description of Artificial Sequence: Synthetic oligonucleotide
  Sense strand starting at position 3752 of SEQ ID NO: 1883150
caagaagcuugguccacuu

SEQ ID NO: 2173121 - RNA, 19 nt, Artificial Sequence
  Description of Artificial Sequence: Synthetic oligonucleotide
  Antisense strand to SEQ ID NO: 2173120
aaguggaccaagcuucuug

SEQ ID NO: 2173122 - RNA, 19 nt, Artificial Sequence
  Description of Artificial Sequence: Synthetic oligonucleotide
  Sense strand starting at position 3813 of SEQ ID NO: 1883150
auggaucacuguccucaau

SEQ ID NO: 2173123 - RNA, 19 nt, Artificial Sequence
  Description of Artificial Sequence: Synthetic oligonucleotide
  Antisense strand to SEQ ID NO: 2173122
auugaggacagugauccau

SEQ ID NO: 2173124 - RNA, 19 nt, Artificial Sequence
  Description of Artificial Sequence: Synthetic oligonucleotide
  Sense strand starting at position 3859 of SEQ ID NO: 1883150
ugcaaagucccuuagauau

SEQ ID NO: 2173125 - RNA, 19 nt, Artificial Sequence
  Description of Artificial Sequence: Synthetic oligonucleotide
  Antisense strand to SEQ ID NO: 2173124
auaucuaagggacuuugca

SEQ ID NO: 2173126 - RNA, 19 nt, Artificial Sequence
  Description of Artificial Sequence: Synthetic oligonucleotide
  Sense strand starting at position 3872 of SEQ ID NO: 1883150
agauaugagcucugaguaa

SEQ ID NO: 2173127 - RNA, 19 nt, Artificial Sequence
  Description of Artificial Sequence: Synthetic oligonucleotide
  Antisense strand to SEQ ID NO: 2173126
uuacucagagcucauaucu

SEQ ID NO: 2173128 - RNA, 19 nt, Artificial Sequence
  Description of Artificial Sequence: Synthetic oligonucleotide
  Sense strand starting at position 127 of SEQ ID NO: 1883151
aaggaucuagagugcaaau

SEQ ID NO: 2173129 - RNA, 19 nt, Artificial Sequence
  Description of Artificial Sequence: Synthetic oligonucleotide
  Antisense strand to SEQ ID NO: 2173128
auuugcacucuagauccuu

SEQ ID NO: 2173130 - RNA, 19 nt, Artificial Sequence
  Description of Artificial Sequence: Synthetic oligonucleotide
  Sense strand starting at position 148 of SEQ ID NO: 1883151
caaugugccuccucaggaa

SEQ ID NO: 2173131 - RNA, 19 nt, Artificial Sequence
  Description of Artificial Sequence: Synthetic oligonucleotide
  Antisense strand to SEQ ID NO: 2173130
uuccugaggaggcacauug

SEQ ID NO: 2173132 - RNA, 19 nt, Artificial Sequence
  Description of Artificial Sequence: Synthetic oligonucleotide
  Sense strand starting at position 151 of SEQ ID NO: 1883151
ugugccuccucaggaagaa

SEQ ID NO: 2173133 - RNA, 19 nt, Artificial Sequence
  Description of Artificial Sequence: Synthetic oligonucleotide
  Antisense strand to SEQ ID NO: 2173132
uucuuccugaggaggcaca

SEQ ID NO: 2173134 - RNA, 19 nt, Artificial Sequence
  Description of Artificial Sequence: Synthetic oligonucleotide
  Sense strand starting at position 152 of SEQ ID NO: 1883151
gugccuccucaggaagaaa

SEQ ID NO: 2173135 - RNA, 19 nt, Artificial Sequence
  Description of Artificial Sequence: Synthetic oligonucleotide
  Antisense strand to SEQ ID NO: 2173134
uuucuuccugaggaggcac

SEQ ID NO: 2173136 - RNA, 19 nt, Artificial Sequence
  Description of Artificial Sequence: Synthetic oligonucleotide
  Sense strand starting at position 366 of SEQ ID NO: 1883151
agugcaaucuuccaagaau

SEQ ID NO: 2173137 - RNA, 19 nt, Artificial Sequence
  Description of Artificial Sequence: Synthetic oligonucleotide
  Antisense strand to SEQ ID NO: 2173136
auucuuggaagauugcacu

SEQ ID NO: 2173138 - RNA, 19 nt, Artificial Sequence
  Description of Artificial Sequence: Synthetic oligonucleotide
  Sense strand starting at position 391 of SEQ ID NO: 1883151
gucucaaagucagaguuua

SEQ ID NO: 2173139 - RNA, 19 nt, Artificial Sequence
  Description of Artificial Sequence: Synthetic oligonucleotide
  Antisense strand to SEQ ID NO: 2173138
uaaacucugacuuugagac

SEQ ID NO: 2173140 - RNA, 19 nt, Artificial Sequence
  Description of Artificial Sequence: Synthetic oligonucleotide
  Sense strand starting at position 504 of SEQ ID NO: 1883151
ggagauccuggauggaugu

SEQ ID NO: 2173141 - RNA, 19 nt, Artificial Sequence
  Description of Artificial Sequence: Synthetic oligonucleotide
  Antisense strand to SEQ ID NO: 2173140
acauccauccaggaucucc

SEQ ID NO: 2173142 - RNA, 19 nt, Artificial Sequence
  Description of Artificial Sequence: Synthetic oligonucleotide
  Sense strand starting at position 713 of SEQ ID NO: 1883151
caggaaaucuacgcucguu

SEQ ID NO: 2173143 - RNA, 19 nt, Artificial Sequence
  Description of Artificial Sequence: Synthetic oligonucleotide
  Antisense strand to SEQ ID NO: 2173142
aacgagcguagauuuccug

SEQ ID NO: 2173144 - RNA, 19 nt, Artificial Sequence
  Description of Artificial Sequence: Synthetic oligonucleotide
  Sense strand starting at position 852 of SEQ ID NO: 1883151
cugcaaagugcaugugaca

SEQ ID NO: 2173145 - RNA, 19 nt, Artificial Sequence
  Description of Artificial Sequence: Synthetic oligonucleotide
  Antisense strand to SEQ ID NO: 2173144
ugucacaugcacuuugcag

SEQ ID NO: 2173146 - RNA, 19 nt, Artificial Sequence
  Description of Artificial Sequence: Synthetic oligonucleotide
  Sense strand starting at position 961 of SEQ ID NO: 1883151
ugguaagaccucgauuccu

SEQ ID NO: 2173147 - RNA, 19 nt, Artificial Sequence
  Description of Artificial Sequence: Synthetic oligonucleotide
  Antisense strand to SEQ ID NO: 2173146
aggaaucgaggucuuacca

SEQ ID NO: 2173148 - RNA, 19 nt, Artificial Sequence
  Description of Artificial Sequence: Synthetic oligonucleotide
  Sense strand starting at position 1154 of SEQ ID NO: 1883151
ggaagugcucuuuaaacac

SEQ ID NO: 2173149 - RNA, 19 nt, Artificial Sequence
  Description of Artificial Sequence: Synthetic oligonucleotide
  Antisense strand to SEQ ID NO: 2173148
guguuuaaagagcacuucc

SEQ ID NO: 2173150 - RNA, 19 nt, Artificial Sequence
  Description of Artificial Sequence: Synthetic oligonucleotide
  Sense strand starting at position 1947 of SEQ ID NO: 1883151
gcuguuuaccuucgagaag

SEQ ID NO: 2173151 - RNA, 19 nt, Artificial Sequence
  Description of Artificial Sequence: Synthetic oligonucleotide
  Antisense strand to SEQ ID NO: 2173150
cuucucgaagguaaacagc

SEQ ID NO: 2173152 - RNA, 19 nt, Artificial Sequence
  Description of Artificial Sequence: Synthetic oligonucleotide
  Sense strand starting at position 2220 of SEQ ID NO: 1883151
cucauugugcgaggaggaa

SEQ ID NO: 2173153 - RNA, 19 nt, Artificial Sequence
  Description of Artificial Sequence: Synthetic oligonucleotide
  Antisense strand to SEQ ID NO: 2173152
uuccuccucgcacaaugag

SEQ ID NO: 2173154 - RNA, 19 nt, Artificial Sequence
  Description of Artificial Sequence: Synthetic oligonucleotide
  Sense strand starting at position 2425 of SEQ ID NO: 1883151
gaggaaugcuguccacgca

SEQ ID NO: 2173155 - RNA, 19 nt, Artificial Sequence
  Description of Artificial Sequence: Synthetic oligonucleotide
  Antisense strand to SEQ ID NO: 2173154
ugcguggacagcauuccuc

SEQ ID NO: 2173156 - RNA, 19 nt, Artificial Sequence
  Description of Artificial Sequence: Synthetic oligonucleotide
  Sense strand starting at position 2565 of SEQ ID NO: 1883151
ccguaaauaucugaugggu

SEQ ID NO: 2173157 - RNA, 19 nt, Artificial Sequence
  Description of Artificial Sequence: Synthetic oligonucleotide
  Antisense strand to SEQ ID NO: 2173156
acccaucagauauuuacgg

SEQ ID NO: 2173158 - RNA, 19 nt, Artificial Sequence
  Description of Artificial Sequence: Synthetic oligonucleotide
  Sense strand starting at position 2591 of SEQ ID NO: 1883151
ugcuaagugcugugccaga

SEQ ID NO: 2173159 - RNA, 19 nt, Artificial Sequence
  Description of Artificial Sequence: Synthetic oligonucleotide
  Antisense strand to SEQ ID NO: 2173158
ucuggcacagcacuuagca

SEQ ID NO: 2173160 - RNA, 19 nt, Artificial Sequence
  Description of Artificial Sequence: Synthetic oligonucleotide
  Sense strand starting at position 2662 of SEQ ID NO: 1883151
gcgguucuccaaggacuuu

SEQ ID NO: 2173161 - RNA, 19 nt, Artificial Sequence
  Description of Artificial Sequence: Synthetic oligonucleotide
  Antisense strand to SEQ ID NO: 2173160
aaaguccuuggagaaccgc

SEQ ID NO: 2173162 - RNA, 19 nt, Artificial Sequence
  Description of Artificial Sequence: Synthetic oligonucleotide
  Sense strand starting at position 2663 of SEQ ID NO: 1883151
cgguucuccaaggacuuua

SEQ ID NO: 2173163 - RNA, 19 nt, Artificial Sequence
  Description of Artificial Sequence: Synthetic oligonucleotide
  Antisense strand to SEQ ID NO: 2173162
uaaaguccuuggagaaccg

SEQ ID NO: 2173164 - RNA, 19 nt, Artificial Sequence
  Description of Artificial Sequence: Synthetic oligonucleotide
  Sense strand starting at position 2804 of SEQ ID NO: 1883151
aggacaugccuaggaaacu

SEQ ID NO: 2173165 - RNA, 19 nt, Artificial Sequence
  Description of Artificial Sequence: Synthetic oligonucleotide
  Antisense strand to SEQ ID NO: 2173164
aguuuccuaggcauguccu

SEQ ID NO: 2173166 - RNA, 19 nt, Artificial Sequence
  Description of Artificial Sequence: Synthetic oligonucleotide
  Sense strand starting at position 2894 of SEQ ID NO: 1883151
agaaauuucucgggaagau

SEQ ID NO: 2173167 - RNA, 19 nt, Artificial Sequence
  Description of Artificial Sequence: Synthetic oligonucleotide
  Antisense strand to SEQ ID NO: 2173166
aucuucccgagaaauuucu

SEQ ID NO: 2173168 - RNA, 19 nt, Artificial Sequence
  Description of Artificial Sequence: Synthetic oligonucleotide
  Sense strand starting at position 2945 of SEQ ID NO: 1883151
ccucuagcaggguaucaaa

SEQ ID NO: 2173169 - RNA, 19 nt, Artificial Sequence
  Description of Artificial Sequence: Synthetic oligonucleotide
  Antisense strand to SEQ ID NO: 2173168
uuugauacccugcuagagg

SEQ ID NO: 2173170 - RNA, 19 nt, Artificial Sequence
  Description of Artificial Sequence: Synthetic oligonucleotide
  Sense strand starting at position 3020 of SEQ ID NO: 1883151
guuggagugugcucacauc

SEQ ID NO: 2173171 - RNA, 19 nt, Artificial Sequence
  Description of Artificial Sequence: Synthetic oligonucleotide
  Antisense strand to SEQ ID NO: 2173170
gaugugagcacacuccaac

SEQ ID NO: 2173172 - RNA, 19 nt, Artificial Sequence
  Description of Artificial Sequence: Synthetic oligonucleotide
  Sense strand starting at position 3045 of SEQ ID NO: 1883151
agugcugaguuaccugauu

SEQ ID NO: 2173173 - RNA, 19 nt, Artificial Sequence
  Description of Artificial Sequence: Synthetic oligonucleotide
  Antisense strand to SEQ ID NO: 2173172
aaucagguaacucagcacu

SEQ ID NO: 2173174 - RNA, 19 nt, Artificial Sequence
  Description of Artificial Sequence: Synthetic oligonucleotide
  Sense strand starting at position 3047 of SEQ ID NO: 1883151
ugcugaguuaccugauuag

SEQ ID NO: 2173175 - RNA, 19 nt, Artificial Sequence
  Description of Artificial Sequence: Synthetic oligonucleotide
  Antisense strand to SEQ ID NO: 2173174
cuaaucagguaacucagca

SEQ ID NO: 2173176 - RNA, 19 nt, Artificial Sequence
  Description of Artificial Sequence: Synthetic oligonucleotide
  Sense strand starting at position 3050 of SEQ ID NO: 1883151
ugaguuaccugauuaggag

SEQ ID NO: 2173177 - RNA, 19 nt, Artificial Sequence
  Description of Artificial Sequence: Synthetic oligonucleotide
  Antisense strand to SEQ ID NO: 2173176
cuccuaaucagguaacuca

SEQ ID NO: 2173178 - RNA, 19 nt, Artificial Sequence
  Description of Artificial Sequence: Synthetic oligonucleotide
  Sense strand starting at position 3065 of SEQ ID NO: 1883151
ggagccaguuguuccauuu

SEQ ID NO: 2173179 - RNA, 19 nt, Artificial Sequence
  Description of Artificial Sequence: Synthetic oligonucleotide
  Antisense strand to SEQ ID NO: 2173178
aaauggaacaacuggcucc

SEQ ID NO: 2173180 - RNA, 19 nt, Artificial Sequence
  Description of Artificial Sequence: Synthetic oligonucleotide
  Sense strand starting at position 3398 of SEQ ID NO: 1883151
gcccgccaauucuuuaaca

SEQ ID NO: 2173181 - RNA, 19 nt, Artificial Sequence
  Description of Artificial Sequence: Synthetic oligonucleotide
  Antisense strand to SEQ ID NO: 2173180
uguuaaagaauuggcgggc

SEQ ID NO: 2173182 - RNA, 19 nt, Artificial Sequence
  Description of Artificial Sequence: Synthetic oligonucleotide
  Sense strand starting at position 3499 of SEQ ID NO: 1883151
uggacugcucucuaagcuu

SEQ ID NO: 2173183 - RNA, 19 nt, Artificial Sequence
  Description of Artificial Sequence: Synthetic oligonucleotide
  Antisense strand to SEQ ID NO: 2173182
aagcuuagagagcagucca

SEQ ID NO: 2173184 - RNA, 19 nt, Artificial Sequence
  Description of Artificial Sequence: Synthetic oligonucleotide
  Sense strand starting at position 3598 of SEQ ID NO: 1883151
aacacuggguccugaacua

SEQ ID NO: 2173185 - RNA, 19 nt, Artificial Sequence
  Description of Artificial Sequence: Synthetic oligonucleotide
  Antisense strand to SEQ ID NO: 2173184
uaguucaggacccaguguu

SEQ ID NO: 2173186 - RNA, 19 nt, Artificial Sequence
  Description of Artificial Sequence: Synthetic oligonucleotide
  Sense strand starting at position 3763 of SEQ ID NO: 1883151
agugucaugcauuaagaua

SEQ ID NO: 2173187 - RNA, 19 nt, Artificial Sequence
  Description of Artificial Sequence: Synthetic oligonucleotide
  Antisense strand to SEQ ID NO: 2173186
uaucuuaaugcaugacacu

SEQ ID NO: 2173188 - RNA, 19 nt, Artificial Sequence
  Description of Artificial Sequence: Synthetic oligonucleotide
  Sense strand starting at position 3841 of SEQ ID NO: 1883151
cuggguauguaccuagauu

SEQ ID NO: 2173189 - RNA, 19 nt, Artificial Sequence
  Description of Artificial Sequence: Synthetic oligonucleotide
  Antisense strand to SEQ ID NO: 2173188
aaucuagguacauacccag

SEQ ID NO: 2173190 - RNA, 19 nt, Artificial Sequence
  Description of Artificial Sequence: Synthetic oligonucleotide
  Sense strand starting at position 3842 of SEQ ID NO: 1883151
uggguauguaccuagauug

SEQ ID NO: 2173191 - RNA, 19 nt, Artificial Sequence
  Description of Artificial Sequence: Synthetic oligonucleotide
  Antisense strand to SEQ ID NO: 2173190
caaucuagguacauaccca

SEQ ID NO: 2173192 - RNA, 19 nt, Artificial Sequence
  Description of Artificial Sequence: Synthetic oligonucleotide
  Sense strand starting at position 3849 of SEQ ID NO: 1883151
guaccuagauugucugacu

SEQ ID NO: 2173193 - RNA, 19 nt, Artificial Sequence
  Description of Artificial Sequence: Synthetic oligonucleotide
  Antisense strand to SEQ ID NO: 2173192
agucagacaaucuagguac

SEQ ID NO: 2173194 - RNA, 19 nt, Artificial Sequence
  Description of Artificial Sequence: Synthetic oligonucleotide
  Sense strand starting at position 3852 of SEQ ID NO: 1883151
ccuagauugucugacucca

SEQ ID NO: 2173195 - RNA, 19 nt, Artificial Sequence
  Description of Artificial Sequence: Synthetic oligonucleotide
  Antisense strand to SEQ ID NO: 2173194
uggagucagacaaucuagg

SEQ ID NO: 2173196 - RNA, 19 nt, Artificial Sequence
  Description of Artificial Sequence: Synthetic oligonucleotide
  Sense strand starting at position 3854 of SEQ ID NO: 1883151
uagauugucugacuccaga

SEQ ID NO: 2173197 - RNA, 19 nt, Artificial Sequence
  Description of Artificial Sequence: Synthetic oligonucleotide
  Antisense strand to SEQ ID NO: 2173196
ucuggagucagacaaucua

SEQ ID NO: 2173198 - RNA, 19 nt, Artificial Sequence
  Description of Artificial Sequence: Synthetic oligonucleotide
  Sense strand starting at position 3926 of SEQ ID NO: 1883151
ggauaauaaugacuucguu

SEQ ID NO: 2173199 - RNA, 19 nt, Artificial Sequence
  Description of Artificial Sequence: Synthetic oligonucleotide
  Antisense strand to SEQ ID NO: 2173198
aacgaagucauuauuaucc

SEQ ID NO: 2173200 - RNA, 19 nt, Artificial Sequence
  Description of Artificial Sequence: Synthetic oligonucleotide
  Sense strand starting at position 3930 of SEQ ID NO: 1883151
aauaaugacuucguuaggu

SEQ ID NO: 2173201 - RNA, 19 nt, Artificial Sequence
  Description of Artificial Sequence: Synthetic oligonucleotide
  Antisense strand to SEQ ID NO: 2173200
accuaacgaagucauuauu

SEQ ID NO: 2173202 - RNA, 19 nt, Artificial Sequence
  Description of Artificial Sequence: Synthetic oligonucleotide
  Sense strand starting at position 3932 of SEQ ID NO: 1883151
uaaugacuucguuagguua

SEQ ID NO: 2173203 - RNA, 19 nt, Artificial Sequence
  Description of Artificial Sequence: Synthetic oligonucleotide
  Antisense strand to SEQ ID NO: 2173202
uaaccuaacgaagucauua

SEQ ID NO: 2173204 - RNA, 19 nt, Artificial Sequence
  Description of Artificial Sequence: Synthetic oligonucleotide
  Sense strand starting at position 3945 of SEQ ID NO: 1883151
agguuauggugaggguuaa

SEQ ID NO: 2173205 - RNA, 19 nt, Artificial Sequence
  Description of Artificial Sequence: Synthetic oligonucleotide
  Antisense strand to SEQ ID NO: 2173204
uuaacccucaccauaaccu

SEQ ID NO: 2173206 - RNA, 19 nt, Artificial Sequence
  Description of Artificial Sequence: Synthetic oligonucleotide
  Sense strand starting at position 3946 of SEQ ID NO: 1883151
gguuauggugaggguuaaa

SEQ ID NO: 2173207 - RNA, 19 nt, Artificial Sequence
  Description of Artificial Sequence: Synthetic oligonucleotide
  Antisense strand to SEQ ID NO: 2173206
uuuaacccucaccauaacc

SEQ ID NO: 2173208 - RNA, 19 nt, Artificial Sequence
  Description of Artificial Sequence: Synthetic oligonucleotide
  Sense strand starting at position 115 of SEQ ID NO: 1883153
aguccauaggguuaguauu

SEQ ID NO: 2173209 - RNA, 19 nt, Artificial Sequence
  Description of Artificial Sequence: Synthetic oligonucleotide
  Antisense strand to SEQ ID NO: 2173208
aauacuaacccuauggacu

SEQ ID NO: 2173210 - RNA, 19 nt, Artificial Sequence
  Description of Artificial Sequence: Synthetic oligonucleotide
  Sense strand starting at position 117 of SEQ ID NO: 1883153
uccauaggguuaguauuau

SEQ ID NO: 2173211 - RNA, 19 nt, Artificial Sequence
  Description of Artificial Sequence: Synthetic oligonucleotide
  Antisense strand to SEQ ID NO: 2173210
auaauacuaacccuaugga

SEQ ID NO: 2173212 - RNA, 19 nt, Artificial Sequence
  Description of Artificial Sequence: Synthetic oligonucleotide
  Sense strand starting at position 123 of SEQ ID NO: 1883153
ggguuaguauuauuaucac

SEQ ID NO: 2173213 - RNA, 19 nt, Artificial Sequence
  Description of Artificial Sequence: Synthetic oligonucleotide
  Antisense strand to SEQ ID NO: 2173212
gugauaauaauacuaaccc

SEQ ID NO: 2173214 - RNA, 19 nt, Artificial Sequence
  Description of Artificial Sequence: Synthetic oligonucleotide
  Sense strand starting at position 297 of SEQ ID NO: 1883153
gacuacaaggcauguucua

SEQ ID NO: 2173215 - RNA, 19 nt, Artificial Sequence
  Description of Artificial Sequence: Synthetic oligonucleotide
  Antisense strand to SEQ ID NO: 2173214
uagaacaugccuuguaguc

SEQ ID NO: 2173216 - RNA, 19 nt, Artificial Sequence
  Description of Artificial Sequence: Synthetic oligonucleotide
  Sense strand starting at position 597 of SEQ ID NO: 1883153
acuugcagucaugaaauac

SEQ ID NO: 2173217 - RNA, 19 nt, Artificial Sequence
  Description of Artificial Sequence: Synthetic oligonucleotide
  Antisense strand to SEQ ID NO: 2173216
guauuucaugacugcaagu

SEQ ID NO: 2173218 - RNA, 19 nt, Artificial Sequence
  Description of Artificial Sequence: Synthetic oligonucleotide
  Sense strand starting at position 735 of SEQ ID NO: 1883153
gggaauugccauugaacag

SEQ ID NO: 2173219 - RNA, 19 nt, Artificial Sequence
  Description of Artificial Sequence: Synthetic oligonucleotide
  Antisense strand to SEQ ID NO: 2173218
cuguucaauggcaauuccc

SEQ ID NO: 2173220 - RNA, 19 nt, Artificial Sequence
  Description of Artificial Sequence: Synthetic oligonucleotide
  Sense strand starting at position 884 of SEQ ID NO: 1883153
guuuaaagguucccaggaa

SEQ ID NO: 2173221 - RNA, 19 nt, Artificial Sequence
  Description of Artificial Sequence: Synthetic oligonucleotide
  Antisense strand to SEQ ID NO: 2173220
uuccugggaaccuuuaaac

SEQ ID NO: 2173222 - RNA, 19 nt, Artificial Sequence
  Description of Artificial Sequence: Synthetic oligonucleotide
  Sense strand starting at position 951 of SEQ ID NO: 1883153
uaagucuacuugggagaca

SEQ ID NO: 2173223 - RNA, 19 nt, Artificial Sequence
  Description of Artificial Sequence: Synthetic oligonucleotide
  Antisense strand to SEQ ID NO: 2173222
ugucucccaaguagacuua

SEQ ID NO: 2173224 - RNA, 19 nt, Artificial Sequence
  Description of Artificial Sequence: Synthetic oligonucleotide
  Sense strand starting at position 1091 of SEQ ID NO: 1883153
gggaauauucuaggugcuc

SEQ ID NO: 2173225 - RNA, 19 nt, Artificial Sequence
  Description of Artificial Sequence: Synthetic oligonucleotide
  Antisense strand to SEQ ID NO: 2173224
gagcaccuagaauauuccc

SEQ ID NO: 2173226 - RNA, 19 nt, Artificial Sequence
  Description of Artificial Sequence: Synthetic oligonucleotide
  Sense strand starting at position 1092 of SEQ ID NO: 1883153
ggaauauucuaggugcucu

SEQ ID NO: 2173227 - RNA, 19 nt, Artificial Sequence
  Description of Artificial Sequence: Synthetic oligonucleotide
  Antisense strand to SEQ ID NO: 2173226
agagcaccuagaauauucc

SEQ ID NO: 2173228 - RNA, 19 nt, Artificial Sequence
  Description of Artificial Sequence: Synthetic oligonucleotide
  Sense strand starting at position 1149 of SEQ ID NO: 1883153
ggagauguccuccggaaug

SEQ ID NO: 2173229 - RNA, 19 nt, Artificial Sequence
  Description of Artificial Sequence: Synthetic oligonucleotide
  Antisense strand to SEQ ID NO: 2173228
cauuccggaggacaucucc

SEQ ID NO: 2173230 - RNA, 19 nt, Artificial Sequence
  Description of Artificial Sequence: Synthetic oligonucleotide
  Sense strand starting at position 1246 of SEQ ID NO: 1883153
auauaugcauagugagaca

SEQ ID NO: 2173231 - RNA, 19 nt, Artificial Sequence
  Description of Artificial Sequence: Synthetic oligonucleotide
  Antisense strand to SEQ ID NO: 2173230
ugucucacuaugcauauau

SEQ ID NO: 2173232 - RNA, 19 nt, Artificial Sequence
  Description of Artificial Sequence: Synthetic oligonucleotide
  Sense strand starting at position 1414 of SEQ ID NO: 1883153
gcggcaauuucuggccuca

SEQ ID NO: 2173233 - RNA, 19 nt, Artificial Sequence
  Description of Artificial Sequence: Synthetic oligonucleotide
  Antisense strand to SEQ ID NO: 2173232
ugaggccagaaauugccgc

SEQ ID NO: 2173234 - RNA, 19 nt, Artificial Sequence
  Description of Artificial Sequence: Synthetic oligonucleotide
  Sense strand starting at position 1416 of SEQ ID NO: 1883153
ggcaauuucuggccucaca

SEQ ID NO: 2173235 - RNA, 19 nt, Artificial Sequence
  Description of Artificial Sequence: Synthetic oligonucleotide
  Antisense strand to SEQ ID NO: 2173234
ugugaggccagaaauugcc

SEQ ID NO: 2173236 - RNA, 19 nt, Artificial Sequence
  Description of Artificial Sequence: Synthetic oligonucleotide
  Sense strand starting at position 1834 of SEQ ID NO: 1883153
gccgucucggccuugcaaa

SEQ ID NO: 2173237 - RNA, 19 nt, Artificial Sequence
  Description of Artificial Sequence: Synthetic oligonucleotide
  Antisense strand to SEQ ID NO: 2173236
uuugcaaggccgagacggc

SEQ ID NO: 2173238 - RNA, 19 nt, Artificial Sequence
  Description of Artificial Sequence: Synthetic oligonucleotide
  Sense strand starting at position 2151 of SEQ ID NO: 1883153
gaaauugaguaugauaccu

SEQ ID NO: 2173239 - RNA, 19 nt, Artificial Sequence
  Description of Artificial Sequence: Synthetic oligonucleotide
  Antisense strand to SEQ ID NO: 2173238
agguaucauacucaauuuc

SEQ ID NO: 2173240 - RNA, 19 nt, Artificial Sequence
  Description of Artificial Sequence: Synthetic oligonucleotide
  Sense strand starting at position 2161 of SEQ ID NO: 1883153
augauaccuugugcuuuaa

SEQ ID NO: 2173241 - RNA, 19 nt, Artificial Sequence
  Description of Artificial Sequence: Synthetic oligonucleotide
  Antisense strand to SEQ ID NO: 2173240
uuaaagcacaagguaucau

SEQ ID NO: 2173242 - RNA, 19 nt, Artificial Sequence
  Description of Artificial Sequence: Synthetic oligonucleotide
  Sense strand starting at position 2229 of SEQ ID NO: 1883153
gccgauugauucccucuau

SEQ ID NO: 2173243 - RNA, 19 nt, Artificial Sequence
  Description of Artificial Sequence: Synthetic oligonucleotide
  Antisense strand to SEQ ID NO: 2173242
auagagggaaucaaucggc

SEQ ID NO: 2173244 - RNA, 19 nt, Artificial Sequence
  Description of Artificial Sequence: Synthetic oligonucleotide
  Sense strand starting at position 2230 of SEQ ID NO: 1883153
ccgauugauucccucuaug

SEQ ID NO: 2173245 - RNA, 19 nt, Artificial Sequence
  Description of Artificial Sequence: Synthetic oligonucleotide
  Antisense strand to SEQ ID NO: 2173244
cauagagggaaucaaucgg

SEQ ID NO: 2173246 - RNA, 19 nt, Artificial Sequence
  Description of Artificial Sequence: Synthetic oligonucleotide
  Sense strand starting at position 2367 of SEQ ID NO: 1883153
cuuaaugugguucaggagu

SEQ ID NO: 2173247 - RNA, 19 nt, Artificial Sequence
  Description of Artificial Sequence: Synthetic oligonucleotide
  Antisense strand to SEQ ID NO: 2173246
acuccugaaccacauuaag

SEQ ID NO: 2173248 - RNA, 19 nt, Artificial Sequence
  Description of Artificial Sequence: Synthetic oligonucleotide
  Sense strand starting at position 2398 of SEQ ID NO: 1883153
agucacaguuuguggguaa

SEQ ID NO: 2173249 - RNA, 19 nt, Artificial Sequence
  Description of Artificial Sequence: Synthetic oligonucleotide
  Antisense strand to SEQ ID NO: 2173248
uuacccacaaacugugacu

SEQ ID NO: 2173250 - RNA, 19 nt, Artificial Sequence
  Description of Artificial Sequence: Synthetic oligonucleotide
  Sense strand starting at position 2399 of SEQ ID NO: 1883153
gucacaguuuguggguaaa

SEQ ID NO: 2173251 - RNA, 19 nt, Artificial Sequence
  Description of Artificial Sequence: Synthetic oligonucleotide
  Antisense strand to SEQ ID NO: 2173250
uuuacccacaaacugugac

SEQ ID NO: 2173252 - RNA, 19 nt, Artificial Sequence
  Description of Artificial Sequence: Synthetic oligonucleotide
  Sense strand starting at position 2566 of SEQ ID NO: 1883153
aucaaucacuuguagagau

SEQ ID NO: 2173253 - RNA, 19 nt, Artificial Sequence
  Description of Artificial Sequence: Synthetic oligonucleotide
  Antisense strand to SEQ ID NO: 2173252
aucucuacaagugauugau

SEQ ID NO: 2173254 - RNA, 19 nt, Artificial Sequence
  Description of Artificial Sequence: Synthetic oligonucleotide
  Sense strand starting at position 2591 of SEQ ID NO: 1883153
auauaaugaugugucaacu

SEQ ID NO: 2173255 - RNA, 19 nt, Artificial Sequence
  Description of Artificial Sequence: Synthetic oligonucleotide
  Antisense strand to SEQ ID NO: 2173254
aguugacacaucauuauau

SEQ ID NO: 2173256 - RNA, 19 nt, Artificial Sequence
  Description of Artificial Sequence: Synthetic oligonucleotide
  Sense strand starting at position 3042 of SEQ ID NO: 1883153
agagucuucugagggauag

SEQ ID NO: 2173257 - RNA, 19 nt, Artificial Sequence
  Description of Artificial Sequence: Synthetic oligonucleotide
  Antisense strand to SEQ ID NO: 2173256
cuaucccucagaagacucu

SEQ ID NO: 2173258 - RNA, 19 nt, Artificial Sequence
  Description of Artificial Sequence: Synthetic oligonucleotide
  Sense strand starting at position 3043 of SEQ ID NO: 1883153
gagucuucugagggauaga

SEQ ID NO: 2173259 - RNA, 19 nt, Artificial Sequence
  Description of Artificial Sequence: Synthetic oligonucleotide
  Antisense strand to SEQ ID NO: 2173258
ucuaucccucagaagacuc

SEQ ID NO: 2173260 - RNA, 19 nt, Artificial Sequence
  Description of Artificial Sequence: Synthetic oligonucleotide
  Sense strand starting at position 3089 of SEQ ID NO: 1883153
ccaguuaacugccuagaga

SEQ ID NO: 2173261 - RNA, 19 nt, Artificial Sequence
  Description of Artificial Sequence: Synthetic oligonucleotide
  Antisense strand to SEQ ID NO: 2173260
ucucuaggcaguuaacugg

SEQ ID NO: 2173262 - RNA, 19 nt, Artificial Sequence
  Description of Artificial Sequence: Synthetic oligonucleotide
  Sense strand starting at position 3090 of SEQ ID NO: 1883153
caguuaacugccuagagac

SEQ ID NO: 2173263 - RNA, 19 nt, Artificial Sequence
  Description of Artificial Sequence: Synthetic oligonucleotide
  Antisense strand to SEQ ID NO: 2173262
gucucuaggcaguuaacug

SEQ ID NO: 2173264 - RNA, 19 nt, Artificial Sequence
  Description of Artificial Sequence: Synthetic oligonucleotide
  Sense strand starting at position 3143 of SEQ ID NO: 1883153
caaggugucuuugauacag

SEQ ID NO: 2173265 - RNA, 19 nt, Artificial Sequence
  Description of Artificial Sequence: Synthetic oligonucleotide
  Antisense strand to SEQ ID NO: 2173264
cuguaucaaagacaccuug

SEQ ID NO: 2173266 - RNA, 19 nt, Artificial Sequence
  Description of Artificial Sequence: Synthetic oligonucleotide
  Sense strand starting at position 3393 of SEQ ID NO: 1883153
auuuguuagggccgcauaa

SEQ ID NO: 2173267 - RNA, 19 nt, Artificial Sequence
  Description of Artificial Sequence: Synthetic oligonucleotide
  Antisense strand to SEQ ID NO: 2173266
uuaugcggcccuaacaaau

SEQ ID NO: 2173268 - RNA, 19 nt, Artificial Sequence
  Description of Artificial Sequence: Synthetic oligonucleotide
  Sense strand starting at position 3395 of SEQ ID NO: 1883153
uuguuagggccgcauaaau

SEQ ID NO: 2173269 - RNA, 19 nt, Artificial Sequence
  Description of Artificial Sequence: Synthetic oligonucleotide
  Antisense strand to SEQ ID NO: 2173268
auuuaugcggcccuaacaa

SEQ ID NO: 2173270 - RNA, 19 nt, Artificial Sequence
  Description of Artificial Sequence: Synthetic oligonucleotide
  Sense strand starting at position 3515 of SEQ ID NO: 1883153
uuauauaauucugcacgca

SEQ ID NO: 2173271 - RNA, 19 nt, Artificial Sequence
  Description of Artificial Sequence: Synthetic oligonucleotide
  Antisense strand to SEQ ID NO: 2173270
ugcgugcagaauuauauaa

SEQ ID NO: 2173272 - RNA, 19 nt, Artificial Sequence
  Description of Artificial Sequence: Synthetic oligonucleotide
  Sense strand starting at position 3531 of SEQ ID NO: 1883153
gcaauuuauucccugguca

SEQ ID NO: 2173273 - RNA, 19 nt, Artificial Sequence
  Description of Artificial Sequence: Synthetic oligonucleotide
  Antisense strand to SEQ ID NO: 2173272
ugaccagggaauaaauugc

SEQ ID NO: 2173274 - RNA, 19 nt, Artificial Sequence
  Description of Artificial Sequence: Synthetic oligonucleotide
  Sense strand starting at position 3650 of SEQ ID NO: 1883153
gguccaacuucuugacuca

SEQ ID NO: 2173275 - RNA, 19 nt, Artificial Sequence
  Description of Artificial Sequence: Synthetic oligonucleotide
  Antisense strand to SEQ ID NO: 2173274
ugagucaagaaguuggacc

SEQ ID NO: 2173276 - RNA, 19 nt, Artificial Sequence
  Description of Artificial Sequence: Synthetic oligonucleotide
  Sense strand starting at position 3832 of SEQ ID NO: 1883153
gccacauguguugcucuau

SEQ ID NO: 2173277 - RNA, 19 nt, Artificial Sequence
  Description of Artificial Sequence: Synthetic oligonucleotide
  Antisense strand to SEQ ID NO: 2173276
auagagcaacacauguggc

SEQ ID NO: 2173278 - RNA, 19 nt, Artificial Sequence
  Description of Artificial Sequence: Synthetic oligonucleotide
  Sense strand starting at position 3838 of SEQ ID NO: 1883153
uguguugcucuaugaagaa

SEQ ID NO: 2173279 - RNA, 19 nt, Artificial Sequence
  Description of Artificial Sequence: Synthetic oligonucleotide
  Antisense strand to SEQ ID NO: 2173278
uucuucauagagcaacaca

SEQ ID NO: 2173280 - RNA, 19 nt, Artificial Sequence
  Description of Artificial Sequence: Synthetic oligonucleotide
  Sense strand starting at position 3895 of SEQ ID NO: 1883153
uaagaaguauuugguauuc

SEQ ID NO: 2173281 - RNA, 19 nt, Artificial Sequence
  Description of Artificial Sequence: Synthetic oligonucleotide
  Antisense strand to SEQ ID NO: 2173280
gaauaccaaauacuucuua

SEQ ID NO: 2173282 - RNA, 19 nt, Artificial Sequence
  Description of Artificial Sequence: Synthetic oligonucleotide
  Sense strand starting at position 3897 of SEQ ID NO: 1883153
agaaguauuugguauucca

SEQ ID NO: 2173283 - RNA, 19 nt, Artificial Sequence
  Description of Artificial Sequence: Synthetic oligonucleotide
  Antisense strand to SEQ ID NO: 2173282
uggaauaccaaauacuucu

SEQ ID NO: 2173284 - RNA, 19 nt, Artificial Sequence
  Description of Artificial Sequence: Synthetic oligonucleotide
  Sense strand starting at position 124 of SEQ ID NO: 1883154
ggguuaguauuauuaucac

SEQ ID NO: 2173285 - RNA, 19 nt, Artificial Sequence
  Description of Artificial Sequence: Synthetic oligonucleotide
  Antisense strand to SEQ ID NO: 2173284
gugauaauaauacuaaccc

SEQ ID NO: 2173286 - RNA, 19 nt, Artificial Sequence
  Description of Artificial Sequence: Synthetic oligonucleotide
  Sense strand starting at position 298 of SEQ ID NO: 1883154
gacuacaaggcauguucua

SEQ ID NO: 2173287 - RNA, 19 nt, Artificial Sequence
  Description of Artificial Sequence: Synthetic oligonucleotide
  Antisense strand to SEQ ID NO: 2173286
uagaacaugccuuguaguc

SEQ ID NO: 2173288 - RNA, 19 nt, Artificial Sequence
  Description of Artificial Sequence: Synthetic oligonucleotide
  Sense strand starting at position 952 of SEQ ID NO: 1883154
uaagucuacuugggagaca

SEQ ID NO: 2173289 - RNA, 19 nt, Artificial Sequence
  Description of Artificial Sequence: Synthetic oligonucleotide
  Antisense strand to SEQ ID NO: 2173288
ugucucccaaguagacuua

SEQ ID NO: 2173290 - RNA, 19 nt, Artificial Sequence
  Description of Artificial Sequence: Synthetic oligonucleotide
  Sense strand starting at position 1247 of SEQ ID NO: 1883154
auaugugcauagugagaca

SEQ ID NO: 2173291 - RNA, 19 nt, Artificial Sequence
  Description of Artificial Sequence: Synthetic oligonucleotide
  Antisense strand to SEQ ID NO: 2173290
ugucucacuaugcacauau

SEQ ID NO: 2173292 - RNA, 19 nt, Artificial Sequence
  Description of Artificial Sequence: Synthetic oligonucleotide
  Sense strand starting at position 1282 of SEQ ID NO: 1883154
ugcuaauaaucaugaauga

SEQ ID NO: 2173293 - RNA, 19 nt, Artificial Sequence
  Description of Artificial Sequence: Synthetic oligonucleotide
  Antisense strand to SEQ ID NO: 2173292
ucauucaugauuauuagca

SEQ ID NO: 2173294 - RNA, 19 nt, Artificial Sequence
  Description of Artificial Sequence: Synthetic oligonucleotide
  Sense strand starting at position 577 of SEQ ID NO: 1883156
cuccaaucccugugaagcu

SEQ ID NO: 2173295 - RNA, 19 nt, Artificial Sequence
  Description of Artificial Sequence: Synthetic oligonucleotide
  Antisense strand to SEQ ID NO: 2173294
agcuucacagggauuggag

SEQ ID NO: 2173296 - RNA, 19 nt, Artificial Sequence
  Description of Artificial Sequence: Synthetic oligonucleotide
  Sense strand starting at position 672 of SEQ ID NO: 1883156
uguuuacugucauuccuga

SEQ ID NO: 2173297 - RNA, 19 nt, Artificial Sequence
  Description of Artificial Sequence: Synthetic oligonucleotide
  Antisense strand to SEQ ID NO: 2173296
ucaggaaugacaguaaaca

SEQ ID NO: 2173298 - RNA, 19 nt, Artificial Sequence
  Description of Artificial Sequence: Synthetic oligonucleotide
  Sense strand starting at position 677 of SEQ ID NO: 1883156
acugucauuccugagagcu

SEQ ID NO: 2173299 - RNA, 19 nt, Artificial Sequence
  Description of Artificial Sequence: Synthetic oligonucleotide
  Antisense strand to SEQ ID NO: 2173298
agcucucaggaaugacagu

SEQ ID NO: 2173300 - RNA, 19 nt, Artificial Sequence
  Description of Artificial Sequence: Synthetic oligonucleotide
  Sense strand starting at position 937 of SEQ ID NO: 1883156
uguauaugguucucccaaa

SEQ ID NO: 2173301 - RNA, 19 nt, Artificial Sequence
  Description of Artificial Sequence: Synthetic oligonucleotide
  Antisense strand to SEQ ID NO: 2173300
uuugggagaaccauauaca

SEQ ID NO: 2173302 - RNA, 19 nt, Artificial Sequence
  Description of Artificial Sequence: Synthetic oligonucleotide
  Sense strand starting at position 938 of SEQ ID NO: 1883156
guauaugguucucccaaac

SEQ ID NO: 2173303 - RNA, 19 nt, Artificial Sequence
  Description of Artificial Sequence: Synthetic oligonucleotide
  Antisense strand to SEQ ID NO: 2173302
guuugggagaaccauauac

SEQ ID NO: 2173304 - RNA, 19 nt, Artificial Sequence
  Description of Artificial Sequence: Synthetic oligonucleotide
  Sense strand starting at position 1205 of SEQ ID NO: 1883156
ggaguugggccuugaagga

SEQ ID NO: 2173305 - RNA, 19 nt, Artificial Sequence
  Description of Artificial Sequence: Synthetic oligonucleotide
  Antisense strand to SEQ ID NO: 2173304
uccuucaaggcccaacucc

SEQ ID NO: 2173306 - RNA, 19 nt, Artificial Sequence
  Description of Artificial Sequence: Synthetic oligonucleotide
  Sense strand starting at position 1215 of SEQ ID NO: 1883156
cuugaaggaugagaauuau

SEQ ID NO: 2173307 - RNA, 19 nt, Artificial Sequence
  Description of Artificial Sequence: Synthetic oligonucleotide
  Antisense strand to SEQ ID NO: 2173306
auaauucucauccuucaag

SEQ ID NO: 2173308 - RNA, 19 nt, Artificial Sequence
  Description of Artificial Sequence: Synthetic oligonucleotide
  Sense strand starting at position 1469 of SEQ ID NO: 1883156
gccucuaucucaguaggau

SEQ ID NO: 2173309 - RNA, 19 nt, Artificial Sequence
  Description of Artificial Sequence: Synthetic oligonucleotide
  Antisense strand to SEQ ID NO: 2173308
auccuacugagauagaggc

SEQ ID NO: 2173310 - RNA, 19 nt, Artificial Sequence
  Description of Artificial Sequence: Synthetic oligonucleotide
  Sense strand starting at position 1470 of SEQ ID NO: 1883156
ccucuaucucaguaggauc

SEQ ID NO: 2173311 - RNA, 19 nt, Artificial Sequence
  Description of Artificial Sequence: Synthetic oligonucleotide
  Antisense strand to SEQ ID NO: 2173310
gauccuacugagauagagg

SEQ ID NO: 2173312 - RNA, 19 nt, Artificial Sequence
  Description of Artificial Sequence: Synthetic oligonucleotide
  Sense strand starting at position 1650 of SEQ ID NO: 1883156
uccagaucauugccucaga

SEQ ID NO: 2173313 - RNA, 19 nt, Artificial Sequence
  Description of Artificial Sequence: Synthetic oligonucleotide
  Antisense strand to SEQ ID NO: 2173312
ucugaggcaaugaucugga

SEQ ID NO: 2173314 - RNA, 19 nt, Artificial Sequence
  Description of Artificial Sequence: Synthetic oligonucleotide
  Sense strand starting at position 1663 of SEQ ID NO: 1883156
cucagagaccucugaucac

SEQ ID NO: 2173315 - RNA, 19 nt, Artificial Sequence
  Description of Artificial Sequence: Synthetic oligonucleotide
  Antisense strand to SEQ ID NO: 2173314
gugaucagaggucucugag

SEQ ID NO: 2173316 - RNA, 19 nt, Artificial Sequence
  Description of Artificial Sequence: Synthetic oligonucleotide
  Sense strand starting at position 1717 of SEQ ID NO: 1883156
ccaucaugauuuggaauua

SEQ ID NO: 2173317 - RNA, 19 nt, Artificial Sequence
  Description of Artificial Sequence: Synthetic oligonucleotide
  Antisense strand to SEQ ID NO: 2173316
uaauuccaaaucaugaugg

SEQ ID NO: 2173318 - RNA, 19 nt, Artificial Sequence
  Description of Artificial Sequence: Synthetic oligonucleotide
  Sense strand starting at position 1745 of SEQ ID NO: 1883156
gaacuugauuagccgagau

SEQ ID NO: 2173319 - RNA, 19 nt, Artificial Sequence
  Description of Artificial Sequence: Synthetic oligonucleotide
  Antisense strand to SEQ ID NO: 2173318
aucucggcuaaucaaguuc

SEQ ID NO: 2173320 - RNA, 19 nt, Artificial Sequence
  Description of Artificial Sequence: Synthetic oligonucleotide
  Sense strand starting at position 1747 of SEQ ID NO: 1883156
acuugauuagccgagauug

SEQ ID NO: 2173321 - RNA, 19 nt, Artificial Sequence
  Description of Artificial Sequence: Synthetic oligonucleotide
  Antisense strand to SEQ ID NO: 2173320
caaucucggcuaaucaagu

SEQ ID NO: 2173322 - RNA, 19 nt, Artificial Sequence
  Description of Artificial Sequence: Synthetic oligonucleotide
  Sense strand starting at position 1749 of SEQ ID NO: 1883156
uugauuagccgagauugua

SEQ ID NO: 2173323 - RNA, 19 nt, Artificial Sequence
  Description of Artificial Sequence: Synthetic oligonucleotide
  Antisense strand to SEQ ID NO: 2173322
uacaaucucggcuaaucaa

SEQ ID NO: 2173324 - RNA, 19 nt, Artificial Sequence
  Description of Artificial Sequence: Synthetic oligonucleotide
  Sense strand starting at position 1752 of SEQ ID NO: 1883156
auuagccgagauuguaaau

SEQ ID NO: 2173325 - RNA, 19 nt, Artificial Sequence
  Description of Artificial Sequence: Synthetic oligonucleotide
  Antisense strand to SEQ ID NO: 2173324
auuuacaaucucggcuaau

SEQ ID NO: 2173326 - RNA, 19 nt, Artificial Sequence
  Description of Artificial Sequence: Synthetic oligonucleotide
  Sense strand starting at position 1758 of SEQ ID NO: 1883156
cgagauuguaaaugacaug

SEQ ID NO: 2173327 - RNA, 19 nt, Artificial Sequence
  Description of Artificial Sequence: Synthetic oligonucleotide
  Antisense strand to SEQ ID NO: 2173326
caugucauuuacaaucucg

SEQ ID NO: 2173328 - RNA, 19 nt, Artificial Sequence
  Description of Artificial Sequence: Synthetic oligonucleotide
  Sense strand starting at position 1989 of SEQ ID NO: 1883156
aguagaugaugucuagcau

SEQ ID NO: 2173329 - RNA, 19 nt, Artificial Sequence
  Description of Artificial Sequence: Synthetic oligonucleotide
  Antisense strand to SEQ ID NO: 2173328
augcuagacaucaucuacu

SEQ ID NO: 2173330 - RNA, 19 nt, Artificial Sequence
  Description of Artificial Sequence: Synthetic oligonucleotide
  Sense strand starting at position 1990 of SEQ ID NO: 1883156
guagaugaugucuagcauu

SEQ ID NO: 2173331 - RNA, 19 nt, Artificial Sequence
  Description of Artificial Sequence: Synthetic oligonucleotide
  Antisense strand to SEQ ID NO: 2173330
aaugcuagacaucaucuac

SEQ ID NO: 2173332 - RNA, 19 nt, Artificial Sequence
  Description of Artificial Sequence: Synthetic oligonucleotide
  Sense strand starting at position 2056 of SEQ ID NO: 1883156
gguaaaggauguucuggaa

SEQ ID NO: 2173333 - RNA, 19 nt, Artificial Sequence
  Description of Artificial Sequence: Synthetic oligonucleotide
  Antisense strand to SEQ ID NO: 2173332
uuccagaacauccuuuacc

SEQ ID NO: 2173334 - RNA, 19 nt, Artificial Sequence
  Description of Artificial Sequence: Synthetic oligonucleotide
  Sense strand starting at position 2071 of SEQ ID NO: 1883156
ggaaauuauugugugguua

SEQ ID NO: 2173335 - RNA, 19 nt, Artificial Sequence
  Description of Artificial Sequence: Synthetic oligonucleotide
  Antisense strand to SEQ ID NO: 2173334
uaaccacacaauaauuucc

SEQ ID NO: 2173336 - RNA, 19 nt, Artificial Sequence
  Description of Artificial Sequence: Synthetic oligonucleotide
  Sense strand starting at position 2072 of SEQ ID NO: 1883156
gaaauuauugugugguuau

SEQ ID NO: 2173337 - RNA, 19 nt, Artificial Sequence
  Description of Artificial Sequence: Synthetic oligonucleotide
  Antisense strand to SEQ ID NO: 2173336
auaaccacacaauaauuuc

SEQ ID NO: 2173338 - RNA, 19 nt, Artificial Sequence
  Description of Artificial Sequence: Synthetic oligonucleotide
  Sense strand starting at position 2089 of SEQ ID NO: 1883156
auguacuugugggucauga

SEQ ID NO: 2173339 - RNA, 19 nt, Artificial Sequence
  Description of Artificial Sequence: Synthetic oligonucleotide
  Antisense strand to SEQ ID NO: 2173338
ucaugacccacaaguacau

SEQ ID NO: 2173340 - RNA, 19 nt, Artificial Sequence
  Description of Artificial Sequence: Synthetic oligonucleotide
  Sense strand starting at position 2091 of SEQ ID NO: 1883156
guacuugugggucaugaug

SEQ ID NO: 2173341 - RNA, 19 nt, Artificial Sequence
  Description of Artificial Sequence: Synthetic oligonucleotide
  Antisense strand to SEQ ID NO: 2173340
caucaugacccacaaguac

SEQ ID NO: 2173342 - RNA, 19 nt, Artificial Sequence
  Description of Artificial Sequence: Synthetic oligonucleotide
  Sense strand starting at position 2167 of SEQ ID NO: 1883156
gacgacuugcccuaccaga

SEQ ID NO: 2173343 - RNA, 19 nt, Artificial Sequence
  Description of Artificial Sequence: Synthetic oligonucleotide
  Antisense strand to SEQ ID NO: 2173342
ucugguagggcaagucguc

SEQ ID NO: 2173344 - RNA, 19 nt, Artificial Sequence
  Description of Artificial Sequence: Synthetic oligonucleotide
  Sense strand starting at position 2221 of SEQ ID NO: 1883156
caaugugucauuggaggag

SEQ ID NO: 2173345 - RNA, 19 nt, Artificial Sequence
  Description of Artificial Sequence: Synthetic oligonucleotide
  Antisense strand to SEQ ID NO: 2173344
cuccuccaaugacacauug

SEQ ID NO: 2173346 - RNA, 19 nt, Artificial Sequence
  Description of Artificial Sequence: Synthetic oligonucleotide
  Sense strand starting at position 2352 of SEQ ID NO: 1883156
ugggauuacuacccaccau

SEQ ID NO: 2173347 - RNA, 19 nt, Artificial Sequence
  Description of Artificial Sequence: Synthetic oligonucleotide
  Antisense strand to SEQ ID NO: 2173346
augguggguaguaauccca

SEQ ID NO: 2173348 - RNA, 19 nt, Artificial Sequence
  Description of Artificial Sequence: Synthetic oligonucleotide
  Sense strand starting at position 2371 of SEQ ID NO: 1883156
gcacgcauuuguuuacaaa

SEQ ID NO: 2173349 - RNA, 19 nt, Artificial Sequence
  Description of Artificial Sequence: Synthetic oligonucleotide
  Antisense strand to SEQ ID NO: 2173348
uuuguaaacaaaugcgugc

SEQ ID NO: 2173350 - RNA, 19 nt, Artificial Sequence
  Description of Artificial Sequence: Synthetic oligonucleotide
  Sense strand starting at position 2961 of SEQ ID NO: 1883156
gagauuagugcugagacuc

SEQ ID NO: 2173351 - RNA, 19 nt, Artificial Sequence
  Description of Artificial Sequence: Synthetic oligonucleotide
  Antisense strand to SEQ ID NO: 2173350
gagucucagcacuaaucuc

SEQ ID NO: 2173352 - RNA, 19 nt, Artificial Sequence
  Description of Artificial Sequence: Synthetic oligonucleotide
  Sense strand starting at position 3040 of SEQ ID NO: 1883156
agaggcaacauaugguuaa

SEQ ID NO: 2173353 - RNA, 19 nt, Artificial Sequence
  Description of Artificial Sequence: Synthetic oligonucleotide
  Antisense strand to SEQ ID NO: 2173352
uuaaccauauguugccucu

SEQ ID NO: 2173354 - RNA, 19 nt, Artificial Sequence
  Description of Artificial Sequence: Synthetic oligonucleotide
  Sense strand starting at position 3267 of SEQ ID NO: 1883156
aagcaagggcguuaugauc

SEQ ID NO: 2173355 - RNA, 19 nt, Artificial Sequence
  Description of Artificial Sequence: Synthetic oligonucleotide
  Antisense strand to SEQ ID NO: 2173354
gaucauaacgcccuugcuu

SEQ ID NO: 2173356 - RNA, 19 nt, Artificial Sequence
  Description of Artificial Sequence: Synthetic oligonucleotide
  Sense strand starting at position 3273 of SEQ ID NO: 1883156
gggcguuaugaucacagga

SEQ ID NO: 2173357 - RNA, 19 nt, Artificial Sequence
  Description of Artificial Sequence: Synthetic oligonucleotide
  Antisense strand to SEQ ID NO: 2173356
uccugugaucauaacgccc

SEQ ID NO: 2173358 - RNA, 19 nt, Artificial Sequence
  Description of Artificial Sequence: Synthetic oligonucleotide
  Sense strand starting at position 3293 of SEQ ID NO: 1883156
ucaugaugugcugaguucu

SEQ ID NO: 2173359 - RNA, 19 nt, Artificial Sequence
  Description of Artificial Sequence: Synthetic oligonucleotide
  Antisense strand to SEQ ID NO: 2173358
agaacucagcacaucauga

SEQ ID NO: 2173360 - RNA, 19 nt, Artificial Sequence
  Description of Artificial Sequence: Synthetic oligonucleotide
  Sense strand starting at position 3361 of SEQ ID NO: 1883156
uguggacuauccucaagau

SEQ ID NO: 2173361 - RNA, 19 nt, Artificial Sequence
  Description of Artificial Sequence: Synthetic oligonucleotide
  Antisense strand to SEQ ID NO: 2173360
aucuugaggauaguccaca

SEQ ID NO: 2173362 - RNA, 19 nt, Artificial Sequence
  Description of Artificial Sequence: Synthetic oligonucleotide
  Sense strand starting at position 3652 of SEQ ID NO: 1883156
augaguagaguuuggucau

SEQ ID NO: 2173363 - RNA, 19 nt, Artificial Sequence
  Description of Artificial Sequence: Synthetic oligonucleotide
  Antisense strand to SEQ ID NO: 2173362
augaccaaacucuacucau

SEQ ID NO: 2173364 - RNA, 19 nt, Artificial Sequence
  Description of Artificial Sequence: Synthetic oligonucleotide
  Sense strand starting at position 3655 of SEQ ID NO: 1883156
aguagaguuuggucaugag

SEQ ID NO: 2173365 - RNA, 19 nt, Artificial Sequence
  Description of Artificial Sequence: Synthetic oligonucleotide
  Antisense strand to SEQ ID NO: 2173364
cucaugaccaaacucuacu

SEQ ID NO: 2173366 - RNA, 19 nt, Artificial Sequence
  Description of Artificial Sequence: Synthetic oligonucleotide
  Sense strand starting at position 3659 of SEQ ID NO: 1883156
gaguuuggucaugagccaa

SEQ ID NO: 2173367 - RNA, 19 nt, Artificial Sequence
  Description of Artificial Sequence: Synthetic oligonucleotide
  Antisense strand to SEQ ID NO: 2173366
uuggcucaugaccaaacuc

SEQ ID NO: 2173368 - RNA, 19 nt, Artificial Sequence
  Description of Artificial Sequence: Synthetic oligonucleotide
  Sense strand starting at position 3663 of SEQ ID NO: 1883156
uuggucaugagccaaagau

SEQ ID NO: 2173369 - RNA, 19 nt, Artificial Sequence
  Description of Artificial Sequence: Synthetic oligonucleotide
  Antisense strand to SEQ ID NO: 2173368
aucuuuggcucaugaccaa

SEQ ID NO: 2173370 - RNA, 19 nt, Artificial Sequence
  Description of Artificial Sequence: Synthetic oligonucleotide
  Sense strand starting at position 3688 of SEQ ID NO: 1883156
gugaaugcuacguacuuau

SEQ ID NO: 2173371 - RNA, 19 nt, Artificial Sequence
  Description of Artificial Sequence: Synthetic oligonucleotide
  Antisense strand to SEQ ID NO: 2173370
auaaguacguagcauucac

SEQ ID NO: 2173372 - RNA, 19 nt, Artificial Sequence
  Description of Artificial Sequence: Synthetic oligonucleotide
  Sense strand starting at position 3699 of SEQ ID NO: 1883156
guacuuaugggccaaacaa

SEQ ID NO: 2173373 - RNA, 19 nt, Artificial Sequence
  Description of Artificial Sequence: Synthetic oligonucleotide
  Antisense strand to SEQ ID NO: 2173372
uuguuuggcccauaaguac

SEQ ID NO: 2173374 - RNA, 19 nt, Artificial Sequence
  Description of Artificial Sequence: Synthetic oligonucleotide
  Sense strand starting at position 8 of SEQ ID NO: 1883157
ggcucaaggucugagauga

SEQ ID NO: 2173375 - RNA, 19 nt, Artificial Sequence
  Description of Artificial Sequence: Synthetic oligonucleotide
  Antisense strand to SEQ ID NO: 2173374
ucaucucagaccuugagcc

SEQ ID NO: 2173376 - RNA, 19 nt, Artificial Sequence
  Description of Artificial Sequence: Synthetic oligonucleotide
  Sense strand starting at position 143 of SEQ ID NO: 1883157
gaaggucucacaggucagu

SEQ ID NO: 2173377 - RNA, 19 nt, Artificial Sequence
  Description of Artificial Sequence: Synthetic oligonucleotide
  Antisense strand to SEQ ID NO: 2173376
acugaccugugagaccuuc

SEQ ID NO: 2173378 - RNA, 19 nt, Artificial Sequence
  Description of Artificial Sequence: Synthetic oligonucleotide
  Sense strand starting at position 168 of SEQ ID NO: 1883157
gugacagugcucuggaggu

SEQ ID NO: 2173379 - RNA, 19 nt, Artificial Sequence
  Description of Artificial Sequence: Synthetic oligonucleotide
  Antisense strand to SEQ ID NO: 2173378
accuccagagcacugucac

SEQ ID NO: 2173380 - RNA, 19 nt, Artificial Sequence
  Description of Artificial Sequence: Synthetic oligonucleotide
  Sense strand starting at position 170 of SEQ ID NO: 1883157
gacagugcucuggagguca

SEQ ID NO: 2173381 - RNA, 19 nt, Artificial Sequence
  Description of Artificial Sequence: Synthetic oligonucleotide
  Antisense strand to SEQ ID NO: 2173380
ugaccuccagagcacuguc

SEQ ID NO: 2173382 - RNA, 19 nt, Artificial Sequence
  Description of Artificial Sequence: Synthetic oligonucleotide
  Sense strand starting at position 172 of SEQ ID NO: 1883157
cagugcucuggaggucaga

SEQ ID NO: 2173383 - RNA, 19 nt, Artificial Sequence
  Description of Artificial Sequence: Synthetic oligonucleotide
  Antisense strand to SEQ ID NO: 2173382
ucugaccuccagagcacug

SEQ ID NO: 2173384 - RNA, 19 nt, Artificial Sequence
  Description of Artificial Sequence: Synthetic oligonucleotide
  Sense strand starting at position 459 of SEQ ID NO: 1883157
gggugugugcccagaagcu

SEQ ID NO: 2173385 - RNA, 19 nt, Artificial Sequence
  Description of Artificial Sequence: Synthetic oligonucleotide
  Antisense strand to SEQ ID NO: 2173384
agcuucugggcacacaccc

SEQ ID NO: 2173386 - RNA, 19 nt, Artificial Sequence
  Description of Artificial Sequence: Synthetic oligonucleotide
  Sense strand starting at position 636 of SEQ ID NO: 1883157
ggucuuuguucucaccgua

SEQ ID NO: 2173387 - RNA, 19 nt, Artificial Sequence
  Description of Artificial Sequence: Synthetic oligonucleotide
  Antisense strand to SEQ ID NO: 2173386
uacggugagaacaaagacc

SEQ ID NO: 2173388 - RNA, 19 nt, Artificial Sequence
  Description of Artificial Sequence: Synthetic oligonucleotide
  Sense strand starting at position 639 of SEQ ID NO: 1883157
cuuuguucucaccguaauc

SEQ ID NO: 2173389 - RNA, 19 nt, Artificial Sequence
  Description of Artificial Sequence: Synthetic oligonucleotide
  Antisense strand to SEQ ID NO: 2173388
gauuacggugagaacaaag

SEQ ID NO: 2173390 - RNA, 19 nt, Artificial Sequence
  Description of Artificial Sequence: Synthetic oligonucleotide
  Sense strand starting at position 641 of SEQ ID NO: 1883157
uuguucucaccguaaucau

SEQ ID NO: 2173391 - RNA, 19 nt, Artificial Sequence
  Description of Artificial Sequence: Synthetic oligonucleotide
  Antisense strand to SEQ ID NO: 2173390
augauuacggugagaacaa

SEQ ID NO: 2173392 - RNA, 19 nt, Artificial Sequence
  Description of Artificial Sequence: Synthetic oligonucleotide
  Sense strand starting at position 1100 of SEQ ID NO: 1883157
gcgacugaugaccaucaga

SEQ ID NO: 2173393 - RNA, 19 nt, Artificial Sequence
  Description of Artificial Sequence: Synthetic oligonucleotide
  Antisense strand to SEQ ID NO: 2173392
ucugauggucaucagucgc

SEQ ID NO: 2173394 - RNA, 19 nt, Artificial Sequence
  Description of Artificial Sequence: Synthetic oligonucleotide
  Sense strand starting at position 1167 of SEQ ID NO: 1883157
ggguggugguuuggacaga

SEQ ID NO: 2173395 - RNA, 19 nt, Artificial Sequence
  Description of Artificial Sequence: Synthetic oligonucleotide
  Antisense strand to SEQ ID NO: 2173394
ucuguccaaaccaccaccc

SEQ ID NO: 2173396 - RNA, 19 nt, Artificial Sequence
  Description of Artificial Sequence: Synthetic oligonucleotide
  Sense strand starting at position 1168 of SEQ ID NO: 1883157
gguggugguuuggacagau

SEQ ID NO: 2173397 - RNA, 19 nt, Artificial Sequence
  Description of Artificial Sequence: Synthetic oligonucleotide
  Antisense strand to SEQ ID NO: 2173396
aucuguccaaaccaccacc

SEQ ID NO: 2173398 - RNA, 19 nt, Artificial Sequence
  Description of Artificial Sequence: Synthetic oligonucleotide
  Sense strand starting at position 1172 of SEQ ID NO: 1883157
gugguuuggacagaugauc

SEQ ID NO: 2173399 - RNA, 19 nt, Artificial Sequence
  Description of Artificial Sequence: Synthetic oligonucleotide
  Antisense strand to SEQ ID NO: 2173398
gaucaucuguccaaaccac

SEQ ID NO: 2173400 - RNA, 19 nt, Artificial Sequence
  Description of Artificial Sequence: Synthetic oligonucleotide
  Sense strand starting at position 1426 of SEQ ID NO: 1883157
cucucagagucagugugaa

SEQ ID NO: 2173401 - RNA, 19 nt, Artificial Sequence
  Description of Artificial Sequence: Synthetic oligonucleotide
  Antisense strand to SEQ ID NO: 2173400
uucacacugacucugagag

SEQ ID NO: 2173402 - RNA, 19 nt, Artificial Sequence
  Description of Artificial Sequence: Synthetic oligonucleotide
  Sense strand starting at position 1430 of SEQ ID NO: 1883157
cagagucagugugaauaug

SEQ ID NO: 2173403 - RNA, 19 nt, Artificial Sequence
  Description of Artificial Sequence: Synthetic oligonucleotide
  Antisense strand to SEQ ID NO: 2173402
cauauucacacugacucug

SEQ ID NO: 2173404 - RNA, 19 nt, Artificial Sequence
  Description of Artificial Sequence: Synthetic oligonucleotide
  Sense strand starting at position 1480 of SEQ ID NO: 1883157
ugagaaaucucauaugcag

SEQ ID NO: 2173405 - RNA, 19 nt, Artificial Sequence
  Description of Artificial Sequence: Synthetic oligonucleotide
  Antisense strand to SEQ ID NO: 2173404
cugcauaugagauuucuca

SEQ ID NO: 2173406 - RNA, 19 nt, Artificial Sequence
  Description of Artificial Sequence: Synthetic oligonucleotide
  Sense strand starting at position 1573 of SEQ ID NO: 1883157
gcuucugucuuccugagga

SEQ ID NO: 2173407 - RNA, 19 nt, Artificial Sequence
  Description of Artificial Sequence: Synthetic oligonucleotide
  Antisense strand to SEQ ID NO: 2173406
uccucaggaagacagaagc

SEQ ID NO: 2173408 - RNA, 19 nt, Artificial Sequence
  Description of Artificial Sequence: Synthetic oligonucleotide
  Sense strand starting at position 1577 of SEQ ID NO: 1883157
cugucuuccugaggagucu

SEQ ID NO: 2173409 - RNA, 19 nt, Artificial Sequence
  Description of Artificial Sequence: Synthetic oligonucleotide
  Antisense strand to SEQ ID NO: 2173408
agacuccucaggaagacag

SEQ ID NO: 2173410 - RNA, 19 nt, Artificial Sequence
  Description of Artificial Sequence: Synthetic oligonucleotide
  Sense strand starting at position 1586 of SEQ ID NO: 1883157
ugaggagucuccugugcuu

SEQ ID NO: 2173411 - RNA, 19 nt, Artificial Sequence
  Description of Artificial Sequence: Synthetic oligonucleotide
  Antisense strand to SEQ ID NO: 2173410
aagcacaggagacuccuca

SEQ ID NO: 2173412 - RNA, 19 nt, Artificial Sequence
  Description of Artificial Sequence: Synthetic oligonucleotide
  Sense strand starting at position 1617 of SEQ ID NO: 1883157
acaugaggcacaggucauu

SEQ ID NO: 2173413 - RNA, 19 nt, Artificial Sequence
  Description of Artificial Sequence: Synthetic oligonucleotide
  Antisense strand to SEQ ID NO: 2173412
aaugaccugugccucaugu

SEQ ID NO: 2173414 - RNA, 19 nt, Artificial Sequence
  Description of Artificial Sequence: Synthetic oligonucleotide
  Sense strand starting at position 1986 of SEQ ID NO: 1883157
cucguuuccuagcgacuga

SEQ ID NO: 2173415 - RNA, 19 nt, Artificial Sequence
  Description of Artificial Sequence: Synthetic oligonucleotide
  Antisense strand to SEQ ID NO: 2173414
ucagucgcuaggaaacgag

SEQ ID NO: 2173416 - RNA, 19 nt, Artificial Sequence
  Description of Artificial Sequence: Synthetic oligonucleotide
  Sense strand starting at position 2061 of SEQ ID NO: 1883157
aacuuugagccuuggguca

SEQ ID NO: 2173417 - RNA, 19 nt, Artificial Sequence
  Description of Artificial Sequence: Synthetic oligonucleotide
  Antisense strand to SEQ ID NO: 2173416
ugacccaaggcucaaaguu

SEQ ID NO: 2173418 - RNA, 19 nt, Artificial Sequence
  Description of Artificial Sequence: Synthetic oligonucleotide
  Sense strand starting at position 3008 of SEQ ID NO: 1883157
cuccgcaaguuaucacuga

SEQ ID NO: 2173419 - RNA, 19 nt, Artificial Sequence
  Description of Artificial Sequence: Synthetic oligonucleotide
  Antisense strand to SEQ ID NO: 2173418
ucagugauaacuugcggag

SEQ ID NO: 2173420 - RNA, 19 nt, Artificial Sequence
  Description of Artificial Sequence: Synthetic oligonucleotide
  Sense strand starting at position 3012 of SEQ ID NO: 1883157
gcaaguuaucacugagcga

SEQ ID NO: 2173421 - RNA, 19 nt, Artificial Sequence
  Description of Artificial Sequence: Synthetic oligonucleotide
  Antisense strand to SEQ ID NO: 2173420
ucgcucagugauaacuugc

SEQ ID NO: 2173422 - RNA, 19 nt, Artificial Sequence
  Description of Artificial Sequence: Synthetic oligonucleotide
  Sense strand starting at position 3015 of SEQ ID NO: 1883157
aguuaucacugagcgacuu

SEQ ID NO: 2173423 - RNA, 19 nt, Artificial Sequence
  Description of Artificial Sequence: Synthetic oligonucleotide
  Antisense strand to SEQ ID NO: 2173422
aagucgcucagugauaacu

SEQ ID NO: 2173424 - RNA, 19 nt, Artificial Sequence
  Description of Artificial Sequence: Synthetic oligonucleotide
  Sense strand starting at position 3282 of SEQ ID NO: 1883157
guggauucgugcugaguca

SEQ ID NO: 2173425 - RNA, 19 nt, Artificial Sequence
  Description of Artificial Sequence: Synthetic oligonucleotide
  Antisense strand to SEQ ID NO: 2173424
ugacucagcacgaauccac

SEQ ID NO: 2173426 - RNA, 19 nt, Artificial Sequence
  Description of Artificial Sequence: Synthetic oligonucleotide
  Sense strand starting at position 3283 of SEQ ID NO: 1883157
uggauucgugcugagucau

SEQ ID NO: 2173427 - RNA, 19 nt, Artificial Sequence
  Description of Artificial Sequence: Synthetic oligonucleotide
  Antisense strand to SEQ ID NO: 2173426
augacucagcacgaaucca

SEQ ID NO: 2173428 - RNA, 19 nt, Artificial Sequence
  Description of Artificial Sequence: Synthetic oligonucleotide
  Sense strand starting at position 3338 of SEQ ID NO: 1883157
gcagacguuugguaggcaa

SEQ ID NO: 2173429 - RNA, 19 nt, Artificial Sequence
  Description of Artificial Sequence: Synthetic oligonucleotide
  Antisense strand to SEQ ID NO: 2173428
uugccuaccaaacgucugc

SEQ ID NO: 2173430 - RNA, 19 nt, Artificial Sequence
  Description of Artificial Sequence: Synthetic oligonucleotide
  Sense strand starting at position 3340 of SEQ ID NO: 1883157
agacguuugguaggcaaau

SEQ ID NO: 2173431 - RNA, 19 nt, Artificial Sequence
  Description of Artificial Sequence: Synthetic oligonucleotide
  Antisense strand to SEQ ID NO: 2173430
auuugccuaccaaacgucu

SEQ ID NO: 2173432 - RNA, 19 nt, Artificial Sequence
  Description of Artificial Sequence: Synthetic oligonucleotide
  Sense strand starting at position 3689 of SEQ ID NO: 1883157
ugcccuguauggucagaca

SEQ ID NO: 2173433 - RNA, 19 nt, Artificial Sequence
  Description of Artificial Sequence: Synthetic oligonucleotide
  Antisense strand to SEQ ID NO: 2173432
ugucugaccauacagggca

SEQ ID NO: 2173434 - RNA, 19 nt, Artificial Sequence
  Description of Artificial Sequence: Synthetic oligonucleotide
  Sense strand starting at position 3929 of SEQ ID NO: 1883157
ccagguauuucccaugucu

SEQ ID NO: 2173435 - RNA, 19 nt, Artificial Sequence
  Description of Artificial Sequence: Synthetic oligonucleotide
  Antisense strand to SEQ ID NO: 2173434
agacaugggaaauaccugg

SEQ ID NO: 2173436 - RNA, 19 nt, Artificial Sequence
  Description of Artificial Sequence: Synthetic oligonucleotide
  Sense strand starting at position 466 of SEQ ID NO: 1883158
cccugacuuuggugacagu

SEQ ID NO: 2173437 - RNA, 19 nt, Artificial Sequence
  Description of Artificial Sequence: Synthetic oligonucleotide
  Antisense strand to SEQ ID NO: 2173436
acugucaccaaagucaggg

SEQ ID NO: 2173438 - RNA, 19 nt, Artificial Sequence
  Description of Artificial Sequence: Synthetic oligonucleotide
  Sense strand starting at position 728 of SEQ ID NO: 1883158
ggcauuuguacucaacgcu

SEQ ID NO: 2173439 - RNA, 19 nt, Artificial Sequence
  Description of Artificial Sequence: Synthetic oligonucleotide
  Antisense strand to SEQ ID NO: 2173438
agcguugaguacaaaugcc

SEQ ID NO: 2173440 - RNA, 19 nt, Artificial Sequence
  Description of Artificial Sequence: Synthetic oligonucleotide
  Sense strand starting at position 735 of SEQ ID NO: 1883158
guacucaacgcugagaaca

SEQ ID NO: 2173441 - RNA, 19 nt, Artificial Sequence
  Description of Artificial Sequence: Synthetic oligonucleotide
  Antisense strand to SEQ ID NO: 2173440
uguucucagcguugaguac

SEQ ID NO: 2173442 - RNA, 19 nt, Artificial Sequence
  Description of Artificial Sequence: Synthetic oligonucleotide
  Sense strand starting at position 2449 of SEQ ID NO: 1883158
cguugacuaugucguagaa

SEQ ID NO: 2173443 - RNA, 19 nt, Artificial Sequence
  Description of Artificial Sequence: Synthetic oligonucleotide
  Antisense strand to SEQ ID NO: 2173442
uucuacgacauagucaacg

SEQ ID NO: 2173444 - RNA, 19 nt, Artificial Sequence
  Description of Artificial Sequence: Synthetic oligonucleotide
  Sense strand starting at position 2451 of SEQ ID NO: 1883158
uugacuaugucguagaaca

SEQ ID NO: 2173445 - RNA, 19 nt, Artificial Sequence
  Description of Artificial Sequence: Synthetic oligonucleotide
  Antisense strand to SEQ ID NO: 2173444
uguucuacgacauagucaa

SEQ ID NO: 2173446 - RNA, 19 nt, Artificial Sequence
  Description of Artificial Sequence: Synthetic oligonucleotide
  Sense strand starting at position 2453 of SEQ ID NO: 1883158
gacuaugucguagaacaug

SEQ ID NO: 2173447 - RNA, 19 nt, Artificial Sequence
  Description of Artificial Sequence: Synthetic oligonucleotide
  Antisense strand to SEQ ID NO: 2173446
cauguucuacgacauaguc

SEQ ID NO: 2173448 - RNA, 19 nt, Artificial Sequence
  Description of Artificial Sequence: Synthetic oligonucleotide
  Sense strand starting at position 3534 of SEQ ID NO: 1883158
aguacugcuccugaaaucu

SEQ ID NO: 2173449 - RNA, 19 nt, Artificial Sequence
  Description of Artificial Sequence: Synthetic oligonucleotide
  Antisense strand to SEQ ID NO: 2173448
agauuucaggagcaguacu

SEQ ID NO: 2173450 - RNA, 19 nt, Artificial Sequence
  Description of Artificial Sequence: Synthetic oligonucleotide
  Sense strand starting at position 171 of SEQ ID NO: 1883159
guaugugacacauggcaag

SEQ ID NO: 2173451 - RNA, 19 nt, Artificial Sequence
  Description of Artificial Sequence: Synthetic oligonucleotide
  Antisense strand to SEQ ID NO: 2173450
cuugccaugugucacauac

SEQ ID NO: 2173452 - RNA, 19 nt, Artificial Sequence
  Description of Artificial Sequence: Synthetic oligonucleotide
  Sense strand starting at position 1315 of SEQ ID NO: 1883159
acaugugccugugcugaga

SEQ ID NO: 2173453 - RNA, 19 nt, Artificial Sequence
  Description of Artificial Sequence: Synthetic oligonucleotide
  Antisense strand to SEQ ID NO: 2173452
ucucagcacaggcacaugu

SEQ ID NO: 2173454 - RNA, 19 nt, Artificial Sequence
  Description of Artificial Sequence: Synthetic oligonucleotide
  Sense strand starting at position 1404 of SEQ ID NO: 1883159
agcgcaugagcugauucua

SEQ ID NO: 2173455 - RNA, 19 nt, Artificial Sequence
  Description of Artificial Sequence: Synthetic oligonucleotide
  Antisense strand to SEQ ID NO: 2173454
uagaaucagcucaugcgcu

SEQ ID NO: 2173456 - RNA, 19 nt, Artificial Sequence
  Description of Artificial Sequence: Synthetic oligonucleotide
  Sense strand starting at position 1416 of SEQ ID NO: 1883159
gauucuauguagugcucga

SEQ ID NO: 2173457 - RNA, 19 nt, Artificial Sequence
  Description of Artificial Sequence: Synthetic oligonucleotide
  Antisense strand to SEQ ID NO: 2173456
ucgagcacuacauagaauc

SEQ ID NO: 2173458 - RNA, 19 nt, Artificial Sequence
  Description of Artificial Sequence: Synthetic oligonucleotide
  Sense strand starting at position 1420 of SEQ ID NO: 1883159
cuauguagugcucgacaua

SEQ ID NO: 2173459 - RNA, 19 nt, Artificial Sequence
  Description of Artificial Sequence: Synthetic oligonucleotide
  Antisense strand to SEQ ID NO: 2173458
uaugucgagcacuacauag

SEQ ID NO: 2173460 - RNA, 19 nt, Artificial Sequence
  Description of Artificial Sequence: Synthetic oligonucleotide
  Sense strand starting at position 1421 of SEQ ID NO: 1883159
uauguagugcucgacauac

SEQ ID NO: 2173461 - RNA, 19 nt, Artificial Sequence
  Description of Artificial Sequence: Synthetic oligonucleotide
  Antisense strand to SEQ ID NO: 2173460
guaugucgagcacuacaua

SEQ ID NO: 2173462 - RNA, 19 nt, Artificial Sequence
  Description of Artificial Sequence: Synthetic oligonucleotide
  Sense strand starting at position 1423 of SEQ ID NO: 1883159
uguagugcucgacauacag

SEQ ID NO: 2173463 - RNA, 19 nt, Artificial Sequence
  Description of Artificial Sequence: Synthetic oligonucleotide
  Antisense strand to SEQ ID NO: 2173462
cuguaugucgagcacuaca

SEQ ID NO: 2173464 - RNA, 19 nt, Artificial Sequence
  Description of Artificial Sequence: Synthetic oligonucleotide
  Sense strand starting at position 1548 of SEQ ID NO: 1883159
gcagaugugucccagugac

SEQ ID NO: 2173465 - RNA, 19 nt, Artificial Sequence
  Description of Artificial Sequence: Synthetic oligonucleotide
  Antisense strand to SEQ ID NO: 2173464
gucacugggacacaucugc

SEQ ID NO: 2173466 - RNA, 19 nt, Artificial Sequence
  Description of Artificial Sequence: Synthetic oligonucleotide
  Sense strand starting at position 2121 of SEQ ID NO: 1883159
gggccaagaugagcuuaua

SEQ ID NO: 2173467 - RNA, 19 nt, Artificial Sequence
  Description of Artificial Sequence: Synthetic oligonucleotide
  Antisense strand to SEQ ID NO: 2173466
uauaagcucaucuuggccc

SEQ ID NO: 2173468 - RNA, 19 nt, Artificial Sequence
  Description of Artificial Sequence: Synthetic oligonucleotide
  Sense strand starting at position 2500 of SEQ ID NO: 1883159
uugacuaugucguaccaca

SEQ ID NO: 2173469 - RNA, 19 nt, Artificial Sequence
  Description of Artificial Sequence: Synthetic oligonucleotide
  Antisense strand to SEQ ID NO: 2173468
ugugguacgacauagucaa

SEQ ID NO: 2173470 - RNA, 19 nt, Artificial Sequence
  Description of Artificial Sequence: Synthetic oligonucleotide
  Sense strand starting at position 3239 of SEQ ID NO: 1883159
gggagauguaacggugaga

SEQ ID NO: 2173471 - RNA, 19 nt, Artificial Sequence
  Description of Artificial Sequence: Synthetic oligonucleotide
  Antisense strand to SEQ ID NO: 2173470
ucucaccguuacaucuccc

SEQ ID NO: 2173472 - RNA, 19 nt, Artificial Sequence
  Description of Artificial Sequence: Synthetic oligonucleotide
  Sense strand starting at position 3355 of SEQ ID NO: 1883159
agcgauaucugccacgaag

SEQ ID NO: 2173473 - RNA, 19 nt, Artificial Sequence
  Description of Artificial Sequence: Synthetic oligonucleotide
  Antisense strand to SEQ ID NO: 2173472
cuucguggcagauaucgcu

SEQ ID NO: 2173474 - RNA, 19 nt, Artificial Sequence
  Description of Artificial Sequence: Synthetic oligonucleotide
  Sense strand starting at position 3357 of SEQ ID NO: 1883159
cgauaucugccacgaaggu

SEQ ID NO: 2173475 - RNA, 19 nt, Artificial Sequence
  Description of Artificial Sequence: Synthetic oligonucleotide
  Antisense strand to SEQ ID NO: 2173474
accuucguggcagauaucg

SEQ ID NO: 2173476 - RNA, 19 nt, Artificial Sequence
  Description of Artificial Sequence: Synthetic oligonucleotide
  Sense strand starting at position 3558 of SEQ ID NO: 1883159
gacaguuagcaacacaguu

SEQ ID NO: 2173477 - RNA, 19 nt, Artificial Sequence
  Description of Artificial Sequence: Synthetic oligonucleotide
  Antisense strand to SEQ ID NO: 2173476
aacuguguugcuaacuguc

SEQ ID NO: 2173478 - RNA, 19 nt, Artificial Sequence
  Description of Artificial Sequence: Synthetic oligonucleotide
  Sense strand starting at position 3623 of SEQ ID NO: 1883159
aaacguuuaccguagcaaa

SEQ ID NO: 2173479 - RNA, 19 nt, Artificial Sequence
  Description of Artificial Sequence: Synthetic oligonucleotide
  Antisense strand to SEQ ID NO: 2173478
uuugcuacgguaaacguuu

SEQ ID NO: 2173480 - RNA, 19 nt, Artificial Sequence
  Description of Artificial Sequence: Synthetic oligonucleotide
  Sense strand starting at position 3633 of SEQ ID NO: 1883159
cguagcaaauuccucauaa

SEQ ID NO: 2173481 - RNA, 19 nt, Artificial Sequence
  Description of Artificial Sequence: Synthetic oligonucleotide
  Antisense strand to SEQ ID NO: 2173480
uuaugaggaauuugcuacg

SEQ ID NO: 2173482 - RNA, 19 nt, Artificial Sequence
  Description of Artificial Sequence: Synthetic oligonucleotide
  Sense strand starting at position 3955 of SEQ ID NO: 1883159
ggcagaaucaacgguuucu

SEQ ID NO: 2173483 - RNA, 19 nt, Artificial Sequence
  Description of Artificial Sequence: Synthetic oligonucleotide
  Antisense strand to SEQ ID NO: 2173482
agaaaccguugauucugcc

SEQ ID NO: 2173484 - RNA, 19 nt, Artificial Sequence
  Description of Artificial Sequence: Synthetic oligonucleotide
  Sense strand starting at position 3967 of SEQ ID NO: 1883159
gguuucugggucugagaag

SEQ ID NO: 2173485 - RNA, 19 nt, Artificial Sequence
  Description of Artificial Sequence: Synthetic oligonucleotide
  Antisense strand to SEQ ID NO: 2173484
cuucucagacccagaaacc

SEQ ID NO: 2173486 - RNA, 19 nt, Artificial Sequence
  Description of Artificial Sequence: Synthetic oligonucleotide
  Sense strand starting at position 3968 of SEQ ID NO: 1883159
guuucugggucugagaagu

SEQ ID NO: 2173487 - RNA, 19 nt, Artificial Sequence
  Description of Artificial Sequence: Synthetic oligonucleotide
  Antisense strand to SEQ ID NO: 2173486
acuucucagacccagaaac

SEQ ID NO: 2173488 - RNA, 19 nt, Artificial Sequence
  Description of Artificial Sequence: Synthetic oligonucleotide
  Sense strand starting at position 3979 of SEQ ID NO: 1883159
ugagaaguugcauacacac

SEQ ID NO: 2173489 - RNA, 19 nt, Artificial Sequence
  Description of Artificial Sequence: Synthetic oligonucleotide
  Antisense strand to SEQ ID NO: 2173488
guguguaugcaacuucuca

SEQ ID NO: 2173490 - RNA, 19 nt, Artificial Sequence
  Description of Artificial Sequence: Synthetic oligonucleotide
  Sense strand starting at position 142 of SEQ ID NO: 1883160
ugccauauucuagaauguu

SEQ ID NO: 2173491 - RNA, 19 nt, Artificial Sequence
  Description of Artificial Sequence: Synthetic oligonucleotide
  Antisense strand to SEQ ID NO: 2173490
aacauucuagaauauggca

SEQ ID NO: 2173492 - RNA, 19 nt, Artificial Sequence
  Description of Artificial Sequence: Synthetic oligonucleotide
  Sense strand starting at position 516 of SEQ ID NO: 1883160
uccucacuccagugagaga

SEQ ID NO: 2173493 - RNA, 19 nt, Artificial Sequence
  Description of Artificial Sequence: Synthetic oligonucleotide
  Antisense strand to SEQ ID NO: 2173492
ucucucacuggagugagga

SEQ ID NO: 2173494 - RNA, 19 nt, Artificial Sequence
  Description of Artificial Sequence: Synthetic oligonucleotide
  Sense strand starting at position 721 of SEQ ID NO: 1883160
cugaaacuccuccagaugu

SEQ ID NO: 2173495 - RNA, 19 nt, Artificial Sequence
  Description of Artificial Sequence: Synthetic oligonucleotide
  Antisense strand to SEQ ID NO: 2173494
acaucuggaggaguuucag

SEQ ID NO: 2173496 - RNA, 19 nt, Artificial Sequence
  Description of Artificial Sequence: Synthetic oligonucleotide
  Sense strand starting at position 757 of SEQ ID NO: 1883160
aggacaucuucuccuguua

SEQ ID NO: 2173497 - RNA, 19 nt, Artificial Sequence
  Description of Artificial Sequence: Synthetic oligonucleotide
  Antisense strand to SEQ ID NO: 2173496
uaacaggagaagauguccu

SEQ ID NO: 2173498 - RNA, 19 nt, Artificial Sequence
  Description of Artificial Sequence: Synthetic oligonucleotide
  Sense strand starting at position 784 of SEQ ID NO: 1883160
cuuguuacaaccggagaaa

SEQ ID NO: 2173499 - RNA, 19 nt, Artificial Sequence
  Description of Artificial Sequence: Synthetic oligonucleotide
  Antisense strand to SEQ ID NO: 2173498
uuucuccgguuguaacaag

SEQ ID NO: 2173500 - RNA, 19 nt, Artificial Sequence
  Description of Artificial Sequence: Synthetic oligonucleotide
  Sense strand starting at position 1229 of SEQ ID NO: 1883160
acuacuuucucagcacgaa

SEQ ID NO: 2173501 - RNA, 19 nt, Artificial Sequence
  Description of Artificial Sequence: Synthetic oligonucleotide
  Antisense strand to SEQ ID NO: 2173500
uucgugcugagaaaguagu

SEQ ID NO: 2173502 - RNA, 19 nt, Artificial Sequence
  Description of Artificial Sequence: Synthetic oligonucleotide
  Sense strand starting at position 1725 of SEQ ID NO: 1883160
cccacuggugcauaugaaa

SEQ ID NO: 2173503 - RNA, 19 nt, Artificial Sequence
  Description of Artificial Sequence: Synthetic oligonucleotide
  Antisense strand to SEQ ID NO: 2173502
uuucauaugcaccaguggg

SEQ ID NO: 2173504 - RNA, 19 nt, Artificial Sequence
  Description of Artificial Sequence: Synthetic oligonucleotide
  Sense strand starting at position 1732 of SEQ ID NO: 1883160
gugcauaugaaaggucaga

SEQ ID NO: 2173505 - RNA, 19 nt, Artificial Sequence
  Description of Artificial Sequence: Synthetic oligonucleotide
  Antisense strand to SEQ ID NO: 2173504
ucugaccuuucauaugcac

SEQ ID NO: 2173506 - RNA, 19 nt, Artificial Sequence
  Description of Artificial Sequence: Synthetic oligonucleotide
  Sense strand starting at position 1778 of SEQ ID NO: 1883160
gcguuuaccaacuagaaga

SEQ ID NO: 2173507 - RNA, 19 nt, Artificial Sequence
  Description of Artificial Sequence: Synthetic oligonucleotide
  Antisense strand to SEQ ID NO: 2173506
ucuucuaguugguaaacgc

SEQ ID NO: 2173508 - RNA, 19 nt, Artificial Sequence
  Description of Artificial Sequence: Synthetic oligonucleotide
  Sense strand starting at position 1901 of SEQ ID NO: 1883160
gcgaauguucacugagaga

SEQ ID NO: 2173509 - RNA, 19 nt, Artificial Sequence
  Description of Artificial Sequence: Synthetic oligonucleotide
  Antisense strand to SEQ ID NO: 2173508
ucucucagugaacauucgc

SEQ ID NO: 2173510 - RNA, 19 nt, Artificial Sequence
  Description of Artificial Sequence: Synthetic oligonucleotide
  Sense strand starting at position 2267 of SEQ ID NO: 1883160
acuauuagauauguuccau

SEQ ID NO: 2173511 - RNA, 19 nt, Artificial Sequence
  Description of Artificial Sequence: Synthetic oligonucleotide
  Antisense strand to SEQ ID NO: 2173510
auggaacauaucuaauagu

SEQ ID NO: 2173512 - RNA, 19 nt, Artificial Sequence
  Description of Artificial Sequence: Synthetic oligonucleotide
  Sense strand starting at position 2384 of SEQ ID NO: 1883160
uguccagucacugagugau

SEQ ID NO: 2173513 - RNA, 19 nt, Artificial Sequence
  Description of Artificial Sequence: Synthetic oligonucleotide
  Antisense strand to SEQ ID NO: 2173512
aucacucagugacuggaca

SEQ ID NO: 2173514 - RNA, 19 nt, Artificial Sequence
  Description of Artificial Sequence: Synthetic oligonucleotide
  Sense strand starting at position 2386 of SEQ ID NO: 1883160
uccagucacugagugauga

SEQ ID NO: 2173515 - RNA, 19 nt, Artificial Sequence
  Description of Artificial Sequence: Synthetic oligonucleotide
  Antisense strand to SEQ ID NO: 2173514
ucaucacucagugacugga

SEQ ID NO: 2173516 - RNA, 19 nt, Artificial Sequence
  Description of Artificial Sequence: Synthetic oligonucleotide
  Sense strand starting at position 2387 of SEQ ID NO: 1883160
ccagucacugagugaugau

SEQ ID NO: 2173517 - RNA, 19 nt, Artificial Sequence
  Description of Artificial Sequence: Synthetic oligonucleotide
  Antisense strand to SEQ ID NO: 2173516
aucaucacucagugacugg

SEQ ID NO: 2173518 - RNA, 19 nt, Artificial Sequence
  Description of Artificial Sequence: Synthetic oligonucleotide
  Sense strand starting at position 2490 of SEQ ID NO: 1883160
gugcucuucugaucagaag

SEQ ID NO: 2173519 - RNA, 19 nt, Artificial Sequence
  Description of Artificial Sequence: Synthetic oligonucleotide
  Antisense strand to SEQ ID NO: 2173518
cuucugaucagaagagcac

SEQ ID NO: 2173520 - RNA, 19 nt, Artificial Sequence
  Description of Artificial Sequence: Synthetic oligonucleotide
  Sense strand starting at position 2587 of SEQ ID NO: 1883160
uccuuugggagguguagau

SEQ ID NO: 2173521 - RNA, 19 nt, Artificial Sequence
  Description of Artificial Sequence: Synthetic oligonucleotide
  Antisense strand to SEQ ID NO: 2173520
aucuacaccucccaaagga

SEQ ID NO: 2173522 - RNA, 19 nt, Artificial Sequence
  Description of Artificial Sequence: Synthetic oligonucleotide
  Sense strand starting at position 2596 of SEQ ID NO: 1883160
agguguagaucuccagaaa

SEQ ID NO: 2173523 - RNA, 19 nt, Artificial Sequence
  Description of Artificial Sequence: Synthetic oligonucleotide
  Antisense strand to SEQ ID NO: 2173522
uuucuggagaucuacaccu

SEQ ID NO: 2173524 - RNA, 19 nt, Artificial Sequence
  Description of Artificial Sequence: Synthetic oligonucleotide
  Sense strand starting at position 2619 of SEQ ID NO: 1883160
agacuuggagucugaucuu

SEQ ID NO: 2173525 - RNA, 19 nt, Artificial Sequence
  Description of Artificial Sequence: Synthetic oligonucleotide
  Antisense strand to SEQ ID NO: 2173524
aagaucagacuccaagucu

SEQ ID NO: 2173526 - RNA, 19 nt, Artificial Sequence
  Description of Artificial Sequence: Synthetic oligonucleotide
  Sense strand starting at position 2691 of SEQ ID NO: 1883160
cccagagagucaccaaguu

SEQ ID NO: 2173527 - RNA, 19 nt, Artificial Sequence
  Description of Artificial Sequence: Synthetic oligonucleotide
  Antisense strand to SEQ ID NO: 2173526
aacuuggugacucucuggg

SEQ ID NO: 2173528 - RNA, 19 nt, Artificial Sequence
  Description of Artificial Sequence: Synthetic oligonucleotide
  Sense strand starting at position 2764 of SEQ ID NO: 1883160
ugguuuauagagcacagau

SEQ ID NO: 2173529 - RNA, 19 nt, Artificial Sequence
  Description of Artificial Sequence: Synthetic oligonucleotide
  Antisense strand to SEQ ID NO: 2173528
aucugugcucuauaaacca

SEQ ID NO: 2173530 - RNA, 19 nt, Artificial Sequence
  Description of Artificial Sequence: Synthetic oligonucleotide
  Sense strand starting at position 2821 of SEQ ID NO: 1883160
ccaauaucucaguggcuga

SEQ ID NO: 2173531 - RNA, 19 nt, Artificial Sequence
  Description of Artificial Sequence: Synthetic oligonucleotide
  Antisense strand to SEQ ID NO: 2173530
ucagccacugagauauugg

SEQ ID NO: 2173532 - RNA, 19 nt, Artificial Sequence
  Description of Artificial Sequence: Synthetic oligonucleotide
  Sense strand starting at position 2967 of SEQ ID NO: 1883160
gagcaagagucagucacaa

SEQ ID NO: 2173533 - RNA, 19 nt, Artificial Sequence
  Description of Artificial Sequence: Synthetic oligonucleotide
  Antisense strand to SEQ ID NO: 2173532
uugugacugacucuugcuc

SEQ ID NO: 2173534 - RNA, 19 nt, Artificial Sequence
  Description of Artificial Sequence: Synthetic oligonucleotide
  Sense strand starting at position 3024 of SEQ ID NO: 1883160
gugucugugcacgucauau

SEQ ID NO: 2173535 - RNA, 19 nt, Artificial Sequence
  Description of Artificial Sequence: Synthetic oligonucleotide
  Antisense strand to SEQ ID NO: 2173534
auaugacgugcacagacac

SEQ ID NO: 2173536 - RNA, 19 nt, Artificial Sequence
  Description of Artificial Sequence: Synthetic oligonucleotide
  Sense strand starting at position 3138 of SEQ ID NO: 1883160
gaaaccaaguaguuggauu

SEQ ID NO: 2173537 - RNA, 19 nt, Artificial Sequence
  Description of Artificial Sequence: Synthetic oligonucleotide
  Antisense strand to SEQ ID NO: 2173536
aauccaacuacuugguuuc

SEQ ID NO: 2173538 - RNA, 19 nt, Artificial Sequence
  Description of Artificial Sequence: Synthetic oligonucleotide
  Sense strand starting at position 3201 of SEQ ID NO: 1883160
uaguguuuggacuaacuuu

SEQ ID NO: 2173539 - RNA, 19 nt, Artificial Sequence
  Description of Artificial Sequence: Synthetic oligonucleotide
  Antisense strand to SEQ ID NO: 2173538
aaaguuaguccaaacacua

SEQ ID NO: 2173540 - RNA, 19 nt, Artificial Sequence
  Description of Artificial Sequence: Synthetic oligonucleotide
  Sense strand starting at position 3293 of SEQ ID NO: 1883160
uggaacucuugaguugaca

SEQ ID NO: 2173541 - RNA, 19 nt, Artificial Sequence
  Description of Artificial Sequence: Synthetic oligonucleotide
  Antisense strand to SEQ ID NO: 2173540
ugucaacucaagaguucca

SEQ ID NO: 2173542 - RNA, 19 nt, Artificial Sequence
  Description of Artificial Sequence: Synthetic oligonucleotide
  Sense strand starting at position 3362 of SEQ ID NO: 1883160
ugauuuaacuuugaucaug

SEQ ID NO: 2173543 - RNA, 19 nt, Artificial Sequence
  Description of Artificial Sequence: Synthetic oligonucleotide
  Antisense strand to SEQ ID NO: 2173542
caugaucaaaguuaaauca

SEQ ID NO: 2173544 - RNA, 19 nt, Artificial Sequence
  Description of Artificial Sequence: Synthetic oligonucleotide
  Sense strand starting at position 3426 of SEQ ID NO: 1883160
guaggauuccauggaauac

SEQ ID NO: 2173545 - RNA, 19 nt, Artificial Sequence
  Description of Artificial Sequence: Synthetic oligonucleotide
  Antisense strand to SEQ ID NO: 2173544
guauuccauggaauccuac

SEQ ID NO: 2173546 - RNA, 19 nt, Artificial Sequence
  Description of Artificial Sequence: Synthetic oligonucleotide
  Sense strand starting at position 3552 of SEQ ID NO: 1883160
gaaagaggcaguugugauu

SEQ ID NO: 2173547 - RNA, 19 nt, Artificial Sequence
  Description of Artificial Sequence: Synthetic oligonucleotide
  Antisense strand to SEQ ID NO: 2173546
aaucacaacugccucuuuc

SEQ ID NO: 2173548 - RNA, 19 nt, Artificial Sequence
  Description of Artificial Sequence: Synthetic oligonucleotide
  Sense strand starting at position 3734 of SEQ ID NO: 1883160
cuggcuucccucugaaaga

SEQ ID NO: 2173549 - RNA, 19 nt, Artificial Sequence
  Description of Artificial Sequence: Synthetic oligonucleotide
  Antisense strand to SEQ ID NO: 2173548
ucuuucagagggaagccag

SEQ ID NO: 2173550 - RNA, 19 nt, Artificial Sequence
  Description of Artificial Sequence: Synthetic oligonucleotide
  Sense strand starting at position 3851 of SEQ ID NO: 1883160
ugcaacauuuaagaggauu

SEQ ID NO: 2173551 - RNA, 19 nt, Artificial Sequence
  Description of Artificial Sequence: Synthetic oligonucleotide
  Antisense strand to SEQ ID NO: 2173550
aauccucuuaaauguugca

SEQ ID NO: 2173552 - RNA, 19 nt, Artificial Sequence
  Description of Artificial Sequence: Synthetic oligonucleotide
  Sense strand starting at position 3864 of SEQ ID NO: 1883160
aggauuacacgagguuugu

SEQ ID NO: 2173553 - RNA, 19 nt, Artificial Sequence
  Description of Artificial Sequence: Synthetic oligonucleotide
  Antisense strand to SEQ ID NO: 2173552
acaaaccucguguaauccu

SEQ ID NO: 2173554 - RNA, 19 nt, Artificial Sequence
  Description of Artificial Sequence: Synthetic oligonucleotide
  Sense strand starting at position 3894 of SEQ ID NO: 1883160
guauauacggcucaaauaa

SEQ ID NO: 2173555 - RNA, 19 nt, Artificial Sequence
  Description of Artificial Sequence: Synthetic oligonucleotide
  Antisense strand to SEQ ID NO: 2173554
uuauuugagccguauauac

SEQ ID NO: 2173556 - RNA, 19 nt, Artificial Sequence
  Description of Artificial Sequence: Synthetic oligonucleotide
  Sense strand starting at position 3906 of SEQ ID NO: 1883160
caaauaagccguuguauuu

SEQ ID NO: 2173557 - RNA, 19 nt, Artificial Sequence
  Description of Artificial Sequence: Synthetic oligonucleotide
  Antisense strand to SEQ ID NO: 2173556
aaauacaacggcuuauuug

SEQ ID NO: 2173558 - RNA, 19 nt, Artificial Sequence
  Description of Artificial Sequence: Synthetic oligonucleotide
  Sense strand starting at position 3915 of SEQ ID NO: 1883160
cguuguauuugcuuuagac

SEQ ID NO: 2173559 - RNA, 19 nt, Artificial Sequence
  Description of Artificial Sequence: Synthetic oligonucleotide
  Antisense strand to SEQ ID NO: 2173558
gucuaaagcaaauacaacg

SEQ ID NO: 2173560 - RNA, 19 nt, Artificial Sequence
  Description of Artificial Sequence: Synthetic oligonucleotide
  Sense strand starting at position 3941 of SEQ ID NO: 1883160
gaggcuucucgcguguuua

SEQ ID NO: 2173561 - RNA, 19 nt, Artificial Sequence
  Description of Artificial Sequence: Synthetic oligonucleotide
  Antisense strand to SEQ ID NO: 2173560
uaaacacgcgagaagccuc

SEQ ID NO: 2173562 - RNA, 19 nt, Artificial Sequence
  Description of Artificial Sequence: Synthetic oligonucleotide
  Sense strand starting at position 3943 of SEQ ID NO: 1883160
ggcuucucgcguguuuaag

SEQ ID NO: 2173563 - RNA, 19 nt, Artificial Sequence
  Description of Artificial Sequence: Synthetic oligonucleotide
  Antisense strand to SEQ ID NO: 2173562
cuuaaacacgcgagaagcc

SEQ ID NO: 2173564 - RNA, 19 nt, Artificial Sequence
  Description of Artificial Sequence: Synthetic oligonucleotide
  Sense strand starting at position 3952 of SEQ ID NO: 1883160
cguguuuaagcagaugaua

SEQ ID NO: 2173565 - RNA, 19 nt, Artificial Sequence
  Description of Artificial Sequence: Synthetic oligonucleotide
  Antisense strand to SEQ ID NO: 2173564
uaucaucugcuuaaacacg

SEQ ID NO: 2173566 - RNA, 19 nt, Artificial Sequence
  Description of Artificial Sequence: Synthetic oligonucleotide
  Sense strand starting at position 3954 of SEQ ID NO: 1883160
uguuuaagcagaugauagu

SEQ ID NO: 2173567 - RNA, 19 nt, Artificial Sequence
  Description of Artificial Sequence: Synthetic oligonucleotide
  Antisense strand to SEQ ID NO: 2173566
acuaucaucugcuuaaaca

SEQ ID NO: 2173568 - RNA, 19 nt, Artificial Sequence
  Description of Artificial Sequence: Synthetic oligonucleotide
  Sense strand starting at position 3960 of SEQ ID NO: 1883160
agcagaugauaguccaaua

SEQ ID NO: 2173569 - RNA, 19 nt, Artificial Sequence
  Description of Artificial Sequence: Synthetic oligonucleotide
  Antisense strand to SEQ ID NO: 2173568
uauuggacuaucaucugcu

SEQ ID NO: 2173570 - RNA, 19 nt, Artificial Sequence
  Description of Artificial Sequence: Synthetic oligonucleotide
  Sense strand starting at position 1519 of SEQ ID NO: 1883161
ccgacuaaggacugugauu

SEQ ID NO: 2173571 - RNA, 19 nt, Artificial Sequence
  Description of Artificial Sequence: Synthetic oligonucleotide
  Antisense strand to SEQ ID NO: 2173570
aaucacaguccuuagucgg

SEQ ID NO: 2173572 - RNA, 19 nt, Artificial Sequence
  Description of Artificial Sequence: Synthetic oligonucleotide
  Sense strand starting at position 3191 of SEQ ID NO: 1883161
ugaggaucuuuccuguucu

SEQ ID NO: 2173573 - RNA, 19 nt, Artificial Sequence
  Description of Artificial Sequence: Synthetic oligonucleotide
  Antisense strand to SEQ ID NO: 2173572
agaacaggaaagauccuca

SEQ ID NO: 2173574 - RNA, 19 nt, Artificial Sequence
  Description of Artificial Sequence: Synthetic oligonucleotide
  Sense strand starting at position 3192 of SEQ ID NO: 1883161
gaggaucuuuccuguucua

SEQ ID NO: 2173575 - RNA, 19 nt, Artificial Sequence
  Description of Artificial Sequence: Synthetic oligonucleotide
  Antisense strand to SEQ ID NO: 2173574
uagaacaggaaagauccuc

SEQ ID NO: 2173576 - RNA, 19 nt, Artificial Sequence
  Description of Artificial Sequence: Synthetic oligonucleotide
  Sense strand starting at position 1926 of SEQ ID NO: 1883162
cuagacuuacccugggauu

SEQ ID NO: 2173577 - RNA, 19 nt, Artificial Sequence
  Description of Artificial Sequence: Synthetic oligonucleotide
  Antisense strand to SEQ ID NO: 2173576
aaucccaggguaagucuag

SEQ ID NO: 2173578 - RNA, 19 nt, Artificial Sequence
  Description of Artificial Sequence: Synthetic oligonucleotide
  Sense strand starting at position 2260 of SEQ ID NO: 1883162
cugugcgcauccucagaua

SEQ ID NO: 2173579 - RNA, 19 nt, Artificial Sequence
  Description of Artificial Sequence: Synthetic oligonucleotide
  Antisense strand to SEQ ID NO: 2173578
uaucugaggaugcgcacag

SEQ ID NO: 2173580 - RNA, 19 nt, Artificial Sequence
  Description of Artificial Sequence: Synthetic oligonucleotide
  Sense strand starting at position 304 of SEQ ID NO: 1883163
cucugaggaccgugugaua

SEQ ID NO: 2173581 - RNA, 19 nt, Artificial Sequence
  Description of Artificial Sequence: Synthetic oligonucleotide
  Antisense strand to SEQ ID NO: 2173580
uaucacacgguccucagag

SEQ ID NO: 2173582 - RNA, 19 nt, Artificial Sequence
  Description of Artificial Sequence: Synthetic oligonucleotide
  Sense strand starting at position 548 of SEQ ID NO: 1883163
acuguugggucaccugaaa

SEQ ID NO: 2173583 - RNA, 19 nt, Artificial Sequence
  Description of Artificial Sequence: Synthetic oligonucleotide
  Antisense strand to SEQ ID NO: 2173582
uuucaggugacccaacagu

SEQ ID NO: 2173584 - RNA, 19 nt, Artificial Sequence
  Description of Artificial Sequence: Synthetic oligonucleotide
  Sense strand starting at position 1724 of SEQ ID NO: 1883163
ccaauuacaugucccggaa

SEQ ID NO: 2173585 - RNA, 19 nt, Artificial Sequence
  Description of Artificial Sequence: Synthetic oligonucleotide
  Antisense strand to SEQ ID NO: 2173584
uuccgggacauguaauugg

SEQ ID NO: 2173586 - RNA, 19 nt, Artificial Sequence
  Description of Artificial Sequence: Synthetic oligonucleotide
  Sense strand starting at position 1726 of SEQ ID NO: 1883163
aauuacaugucccggaaag

SEQ ID NO: 2173587 - RNA, 19 nt, Artificial Sequence
  Description of Artificial Sequence: Synthetic oligonucleotide
  Antisense strand to SEQ ID NO: 2173586
cuuuccgggacauguaauu

SEQ ID NO: 2173588 - RNA, 19 nt, Artificial Sequence
  Description of Artificial Sequence: Synthetic oligonucleotide
  Sense strand starting at position 1728 of SEQ ID NO: 1883163
uuacaugucccggaaaggu

SEQ ID NO: 2173589 - RNA, 19 nt, Artificial Sequence
  Description of Artificial Sequence: Synthetic oligonucleotide
  Antisense strand to SEQ ID NO: 2173588
accuuuccgggacauguaa

SEQ ID NO: 2173590 - RNA, 19 nt, Artificial Sequence
  Description of Artificial Sequence: Synthetic oligonucleotide
  Sense strand starting at position 2215 of SEQ ID NO: 1883163
cgucuugcgacucuaggua

SEQ ID NO: 2173591 - RNA, 19 nt, Artificial Sequence
  Description of Artificial Sequence: Synthetic oligonucleotide
  Antisense strand to SEQ ID NO: 2173590
uaccuagagucgcaagacg

SEQ ID NO: 2173592 - RNA, 19 nt, Artificial Sequence
  Description of Artificial Sequence: Synthetic oligonucleotide
  Sense strand starting at position 308 of SEQ ID NO: 1883165
cggcuucaccucgagaaga

SEQ ID NO: 2173593 - RNA, 19 nt, Artificial Sequence
  Description of Artificial Sequence: Synthetic oligonucleotide
  Antisense strand to SEQ ID NO: 2173592
ucuucucgaggugaagccg

SEQ ID NO: 2173594 - RNA, 19 nt, Artificial Sequence
  Description of Artificial Sequence: Synthetic oligonucleotide
  Sense strand starting at position 2752 of SEQ ID NO: 1883165
cuguguggucacgaggaga

SEQ ID NO: 2173595 - RNA, 19 nt, Artificial Sequence
  Description of Artificial Sequence: Synthetic oligonucleotide
  Antisense strand to SEQ ID NO: 2173594
ucuccucgugaccacacag

SEQ ID NO: 2173596 - RNA, 19 nt, Artificial Sequence
  Description of Artificial Sequence: Synthetic oligonucleotide
  Sense strand starting at position 116 of SEQ ID NO: 1883166
uaggauuaccugugaauau

SEQ ID NO: 2173597 - RNA, 19 nt, Artificial Sequence
  Description of Artificial Sequence: Synthetic oligonucleotide
  Antisense strand to SEQ ID NO: 2173596
auauucacagguaauccua

SEQ ID NO: 2173598 - RNA, 19 nt, Artificial Sequence
  Description of Artificial Sequence: Synthetic oligonucleotide
  Sense strand starting at position 175 of SEQ ID NO: 1883166
aauugagaguuacuuguuu

SEQ ID NO: 2173599 - RNA, 19 nt, Artificial Sequence
  Description of Artificial Sequence: Synthetic oligonucleotide
  Antisense strand to SEQ ID NO: 2173598
aaacaaguaacucucaauu

SEQ ID NO: 2173600 - RNA, 19 nt, Artificial Sequence
  Description of Artificial Sequence: Synthetic oligonucleotide
  Sense strand starting at position 179 of SEQ ID NO: 1883166
gagaguuacuuguuuauua

SEQ ID NO: 2173601 - RNA, 19 nt, Artificial Sequence
  Description of Artificial Sequence: Synthetic oligonucleotide
  Antisense strand to SEQ ID NO: 2173600
uaauaaacaaguaacucuc

SEQ ID NO: 2173602 - RNA, 19 nt, Artificial Sequence
  Description of Artificial Sequence: Synthetic oligonucleotide
  Sense strand starting at position 180 of SEQ ID NO: 1883166
agaguuacuuguuuauuac

SEQ ID NO: 2173603 - RNA, 19 nt, Artificial Sequence
  Description of Artificial Sequence: Synthetic oligonucleotide
  Antisense strand to SEQ ID NO: 2173602
guaauaaacaaguaacucu

SEQ ID NO: 2173604 - RNA, 19 nt, Artificial Sequence
  Description of Artificial Sequence: Synthetic oligonucleotide
  Sense strand starting at position 183 of SEQ ID NO: 1883166
guuacuuguuuauuacaga

SEQ ID NO: 2173605 - RNA, 19 nt, Artificial Sequence
  Description of Artificial Sequence: Synthetic oligonucleotide
  Antisense strand to SEQ ID NO: 2173604
ucuguaauaaacaaguaac

SEQ ID NO: 2173606 - RNA, 19 nt, Artificial Sequence
  Description of Artificial Sequence: Synthetic oligonucleotide
  Sense strand starting at position 397 of SEQ ID NO: 1883166
aaccuaugccgugaaacug

SEQ ID NO: 2173607 - RNA, 19 nt, Artificial Sequence
  Description of Artificial Sequence: Synthetic oligonucleotide
  Antisense strand to SEQ ID NO: 2173606
caguuucacggcauagguu

SEQ ID NO: 2173608 - RNA, 19 nt, Artificial Sequence
  Description of Artificial Sequence: Synthetic oligonucleotide
  Sense strand starting at position 545 of SEQ ID NO: 1883166
guuugcuuccaugauacaa

SEQ ID NO: 2173609 - RNA, 19 nt, Artificial Sequence
  Description of Artificial Sequence: Synthetic oligonucleotide
  Antisense strand to SEQ ID NO: 2173608
uuguaucauggaagcaaac

SEQ ID NO: 2173610 - RNA, 19 nt, Artificial Sequence
  Description of Artificial Sequence: Synthetic oligonucleotide
  Sense strand starting at position 584 of SEQ ID NO: 1883166
uuaguaaaccauuggucaa

SEQ ID NO: 2173611 - RNA, 19 nt, Artificial Sequence
  Description of Artificial Sequence: Synthetic oligonucleotide
  Antisense strand to SEQ ID NO: 2173610
uugaccaaugguuuacuaa

SEQ ID NO: 2173612 - RNA, 19 nt, Artificial Sequence
  Description of Artificial Sequence: Synthetic oligonucleotide
  Sense strand starting at position 586 of SEQ ID NO: 1883166
aguaaaccauuggucaauu

SEQ ID NO: 2173613 - RNA, 19 nt, Artificial Sequence
  Description of Artificial Sequence: Synthetic oligonucleotide
  Antisense strand to SEQ ID NO: 2173612
aauugaccaaugguuuacu

SEQ ID NO: 2173614 - RNA, 19 nt, Artificial Sequence
  Description of Artificial Sequence: Synthetic oligonucleotide
  Sense strand starting at position 710 of SEQ ID NO: 1883166
acuuaugugccacacaaga

SEQ ID NO: 2173615 - RNA, 19 nt, Artificial Sequence
  Description of Artificial Sequence: Synthetic oligonucleotide
  Antisense strand to SEQ ID NO: 2173614
ucuuguguggcacauaagu

SEQ ID NO: 2173616 - RNA, 19 nt, Artificial Sequence
  Description of Artificial Sequence: Synthetic oligonucleotide
  Sense strand starting at position 846 of SEQ ID NO: 1883166
ccuaaagguuagcuugaaa

SEQ ID NO: 2173617 - RNA, 19 nt, Artificial Sequence
  Description of Artificial Sequence: Synthetic oligonucleotide
  Antisense strand to SEQ ID NO: 2173616
uuucaagcuaaccuuuagg

SEQ ID NO: 2173618 - RNA, 19 nt, Artificial Sequence
  Description of Artificial Sequence: Synthetic oligonucleotide
  Sense strand starting at position 880 of SEQ ID NO: 1883166
acagaacgcuucucuuuaa

SEQ ID NO: 2173619 - RNA, 19 nt, Artificial Sequence
  Description of Artificial Sequence: Synthetic oligonucleotide
  Antisense strand to SEQ ID NO: 2173618
uuaaagagaagcguucugu

SEQ ID NO: 2173620 - RNA, 19 nt, Artificial Sequence
  Description of Artificial Sequence: Synthetic oligonucleotide
  Sense strand starting at position 951 of SEQ ID NO: 1883166
ucugcaguuagguagauua

SEQ ID NO: 2173621 - RNA, 19 nt, Artificial Sequence
  Description of Artificial Sequence: Synthetic oligonucleotide
  Antisense strand to SEQ ID NO: 2173620
uaaucuaccuaacugcaga

SEQ ID NO: 2173622 - RNA, 19 nt, Artificial Sequence
  Description of Artificial Sequence: Synthetic oligonucleotide
  Sense strand starting at position 953 of SEQ ID NO: 1883166
ugcaguuagguagauuaca

SEQ ID NO: 2173623 - RNA, 19 nt, Artificial Sequence
  Description of Artificial Sequence: Synthetic oligonucleotide
  Antisense strand to SEQ ID NO: 2173622
uguaaucuaccuaacugca

SEQ ID NO: 2173624 - RNA, 19 nt, Artificial Sequence
  Description of Artificial Sequence: Synthetic oligonucleotide
  Sense strand starting at position 971 of SEQ ID NO: 1883166
aagugaaaguuuccacggu

SEQ ID NO: 2173625 - RNA, 19 nt, Artificial Sequence
  Description of Artificial Sequence: Synthetic oligonucleotide
  Antisense strand to SEQ ID NO: 2173624
accguggaaacuuucacuu

SEQ ID NO: 2173626 - RNA, 19 nt, Artificial Sequence
  Description of Artificial Sequence: Synthetic oligonucleotide
  Sense strand starting at position 1269 of SEQ ID NO: 1883166
uuucguuugagcguuccua

SEQ ID NO: 2173627 - RNA, 19 nt, Artificial Sequence
  Description of Artificial Sequence: Synthetic oligonucleotide
  Antisense strand to SEQ ID NO: 2173626
uaggaacgcucaaacgaaa

SEQ ID NO: 2173628 - RNA, 19 nt, Artificial Sequence
  Description of Artificial Sequence: Synthetic oligonucleotide
  Sense strand starting at position 1311 of SEQ ID NO: 1883166
aaacauucucguuagagau

SEQ ID NO: 2173629 - RNA, 19 nt, Artificial Sequence
  Description of Artificial Sequence: Synthetic oligonucleotide
  Antisense strand to SEQ ID NO: 2173628
aucucuaacgagaauguuu

SEQ ID NO: 2173630 - RNA, 19 nt, Artificial Sequence
  Description of Artificial Sequence: Synthetic oligonucleotide
  Sense strand starting at position 1317 of SEQ ID NO: 1883166
ucucguuagagaugagaag

SEQ ID NO: 2173631 - RNA, 19 nt, Artificial Sequence
  Description of Artificial Sequence: Synthetic oligonucleotide
  Antisense strand to SEQ ID NO: 2173630
cuucucaucucuaacgaga

SEQ ID NO: 2173632 - RNA, 19 nt, Artificial Sequence
  Description of Artificial Sequence: Synthetic oligonucleotide
  Sense strand starting at position 1328 of SEQ ID NO: 1883166
augagaaggcuucacguua

SEQ ID NO: 2173633 - RNA, 19 nt, Artificial Sequence
  Description of Artificial Sequence: Synthetic oligonucleotide
  Antisense strand to SEQ ID NO: 2173632
uaacgugaagccuucucau

SEQ ID NO: 2173634 - RNA, 19 nt, Artificial Sequence
  Description of Artificial Sequence: Synthetic oligonucleotide
  Sense strand starting at position 1990 of SEQ ID NO: 1883166
ccgggcguuucuauggaaa

SEQ ID NO: 2173635 - RNA, 19 nt, Artificial Sequence
  Description of Artificial Sequence: Synthetic oligonucleotide
  Antisense strand to SEQ ID NO: 2173634
uuuccauagaaacgcccgg

SEQ ID NO: 2173636 - RNA, 19 nt, Artificial Sequence
  Description of Artificial Sequence: Synthetic oligonucleotide
  Sense strand starting at position 2479 of SEQ ID NO: 1883166
uccgacuucguggaagaga

SEQ ID NO: 2173637 - RNA, 19 nt, Artificial Sequence
  Description of Artificial Sequence: Synthetic oligonucleotide
  Antisense strand to SEQ ID NO: 2173636
ucucuuccacgaagucgga

SEQ ID NO: 2173638 - RNA, 19 nt, Artificial Sequence
  Description of Artificial Sequence: Synthetic oligonucleotide
  Sense strand starting at position 2480 of SEQ ID NO: 1883166
ccgacuucguggaagagau

SEQ ID NO: 2173639 - RNA, 19 nt, Artificial Sequence
  Description of Artificial Sequence: Synthetic oligonucleotide
  Antisense strand to SEQ ID NO: 2173638
aucucuuccacgaagucgg

SEQ ID NO: 2173640 - RNA, 19 nt, Artificial Sequence
  Description of Artificial Sequence: Synthetic oligonucleotide
  Sense strand starting at position 2487 of SEQ ID NO: 1883166
cguggaagagauuguguua

SEQ ID NO: 2173641 - RNA, 19 nt, Artificial Sequence
  Description of Artificial Sequence: Synthetic oligonucleotide
  Antisense strand to SEQ ID NO: 2173640
uaacacaaucucuuccacg

SEQ ID NO: 2173642 - RNA, 19 nt, Artificial Sequence
  Description of Artificial Sequence: Synthetic oligonucleotide
  Sense strand starting at position 2490 of SEQ ID NO: 1883166
ggaagagauuguguuagac

SEQ ID NO: 2173643 - RNA, 19 nt, Artificial Sequence
  Description of Artificial Sequence: Synthetic oligonucleotide
  Antisense strand to SEQ ID NO: 2173642
gucuaacacaaucucuucc

SEQ ID NO: 2173644 - RNA, 19 nt, Artificial Sequence
  Description of Artificial Sequence: Synthetic oligonucleotide
  Sense strand starting at position 2500 of SEQ ID NO: 1883166
guguuagacacugggagua

SEQ ID NO: 2173645 - RNA, 19 nt, Artificial Sequence
  Description of Artificial Sequence: Synthetic oligonucleotide
  Antisense strand to SEQ ID NO: 2173644
uacucccagugucuaacac

SEQ ID NO: 2173646 - RNA, 19 nt, Artificial Sequence
  Description of Artificial Sequence: Synthetic oligonucleotide
  Sense strand starting at position 2594 of SEQ ID NO: 1883166
cgaaccugugcugagauaa

SEQ ID NO: 2173647 - RNA, 19 nt, Artificial Sequence
  Description of Artificial Sequence: Synthetic oligonucleotide
  Antisense strand to SEQ ID NO: 2173646
uuaucucagcacagguucg

SEQ ID NO: 2173648 - RNA, 19 nt, Artificial Sequence
  Description of Artificial Sequence: Synthetic oligonucleotide
  Sense strand starting at position 3199 of SEQ ID NO: 1883166
ccuaauacugucugaagga

SEQ ID NO: 2173649 - RNA, 19 nt, Artificial Sequence
  Description of Artificial Sequence: Synthetic oligonucleotide
  Antisense strand to SEQ ID NO: 2173648
uccuucagacaguauuagg

SEQ ID NO: 2173650 - RNA, 19 nt, Artificial Sequence
  Description of Artificial Sequence: Synthetic oligonucleotide
  Sense strand starting at position 3238 of SEQ ID NO: 1883166
aacaguacacuucguugau

SEQ ID NO: 2173651 - RNA, 19 nt, Artificial Sequence
  Description of Artificial Sequence: Synthetic oligonucleotide
  Antisense strand to SEQ ID NO: 2173650
aucaacgaaguguacuguu

SEQ ID NO: 2173652 - RNA, 19 nt, Artificial Sequence
  Description of Artificial Sequence: Synthetic oligonucleotide
  Sense strand starting at position 3239 of SEQ ID NO: 1883166
acaguacacuucguugauu

SEQ ID NO: 2173653 - RNA, 19 nt, Artificial Sequence
  Description of Artificial Sequence: Synthetic oligonucleotide
  Antisense strand to SEQ ID NO: 2173652
aaucaacgaaguguacugu

SEQ ID NO: 2173654 - RNA, 19 nt, Artificial Sequence
  Description of Artificial Sequence: Synthetic oligonucleotide
  Sense strand starting at position 3240 of SEQ ID NO: 1883166
caguacacuucguugauuu

SEQ ID NO: 2173655 - RNA, 19 nt, Artificial Sequence
  Description of Artificial Sequence: Synthetic oligonucleotide
  Antisense strand to SEQ ID NO: 2173654
aaaucaacgaaguguacug

SEQ ID NO: 2173656 - RNA, 19 nt, Artificial Sequence
  Description of Artificial Sequence: Synthetic oligonucleotide
  Sense strand starting at position 3282 of SEQ ID NO: 1883166
cuuugaacccuuugagaca

SEQ ID NO: 2173657 - RNA, 19 nt, Artificial Sequence
  Description of Artificial Sequence: Synthetic oligonucleotide
  Antisense strand to SEQ ID NO: 2173656
ugucucaaaggguucaaag

SEQ ID NO: 2173658 - RNA, 19 nt, Artificial Sequence
  Description of Artificial Sequence: Synthetic oligonucleotide
  Sense strand starting at position 3334 of SEQ ID NO: 1883166
ugccgugugcugcugauua

SEQ ID NO: 2173659 - RNA, 19 nt, Artificial Sequence
  Description of Artificial Sequence: Synthetic oligonucleotide
  Antisense strand to SEQ ID NO: 2173658
uaaucagcagcacacggca

SEQ ID NO: 2173660 - RNA, 19 nt, Artificial Sequence
  Description of Artificial Sequence: Synthetic oligonucleotide
  Sense strand starting at position 3444 of SEQ ID NO: 1883166
ccuugcauucgcucagcau

SEQ ID NO: 2173661 - RNA, 19 nt, Artificial Sequence
  Description of Artificial Sequence: Synthetic oligonucleotide
  Antisense strand to SEQ ID NO: 2173660
augcugagcgaaugcaagg

SEQ ID NO: 2173662 - RNA, 19 nt, Artificial Sequence
  Description of Artificial Sequence: Synthetic oligonucleotide
  Sense strand starting at position 3470 of SEQ ID NO: 1883166
guuggaugccugguguguu

SEQ ID NO: 2173663 - RNA, 19 nt, Artificial Sequence
  Description of Artificial Sequence: Synthetic oligonucleotide
  Antisense strand to SEQ ID NO: 2173662
aacacaccaggcauccaac

SEQ ID NO: 2173664 - RNA, 19 nt, Artificial Sequence
  Description of Artificial Sequence: Synthetic oligonucleotide
  Sense strand starting at position 3482 of SEQ ID NO: 1883166
guguguuccagguauuaug

SEQ ID NO: 2173665 - RNA, 19 nt, Artificial Sequence
  Description of Artificial Sequence: Synthetic oligonucleotide
  Antisense strand to SEQ ID NO: 2173664
cauaauaccuggaacacac

SEQ ID NO: 2173666 - RNA, 19 nt, Artificial Sequence
  Description of Artificial Sequence: Synthetic oligonucleotide
  Sense strand starting at position 3566 of SEQ ID NO: 1883166
uuauguggcagugauagaa

SEQ ID NO: 2173667 - RNA, 19 nt, Artificial Sequence
  Description of Artificial Sequence: Synthetic oligonucleotide
  Antisense strand to SEQ ID NO: 2173666
uucuaucacugccacauaa

SEQ ID NO: 2173668 - RNA, 19 nt, Artificial Sequence
  Description of Artificial Sequence: Synthetic oligonucleotide
  Sense strand starting at position 3570 of SEQ ID NO: 1883166
guggcagugauagaagcua

SEQ ID NO: 2173669 - RNA, 19 nt, Artificial Sequence
  Description of Artificial Sequence: Synthetic oligonucleotide
  Antisense strand to SEQ ID NO: 2173668
uagcuucuaucacugccac

SEQ ID NO: 2173670 - RNA, 19 nt, Artificial Sequence
  Description of Artificial Sequence: Synthetic oligonucleotide
  Sense strand starting at position 3696 of SEQ ID NO: 1883166
uugggauucugagugagcu

SEQ ID NO: 2173671 - RNA, 19 nt, Artificial Sequence
  Description of Artificial Sequence: Synthetic oligonucleotide
  Antisense strand to SEQ ID NO: 2173670
agcucacucagaaucccaa

SEQ ID NO: 2173672 - RNA, 19 nt, Artificial Sequence
  Description of Artificial Sequence: Synthetic oligonucleotide
  Sense strand starting at position 3776 of SEQ ID NO: 1883166
gcggcuggaugaucuaaga

SEQ ID NO: 2173673 - RNA, 19 nt, Artificial Sequence
  Description of Artificial Sequence: Synthetic oligonucleotide
  Antisense strand to SEQ ID NO: 2173672
ucuuagaucauccagccgc

SEQ ID NO: 2173674 - RNA, 19 nt, Artificial Sequence
  Description of Artificial Sequence: Synthetic oligonucleotide
  Sense strand starting at position 3970 of SEQ ID NO: 1883166
acacuauuggcggaugcaa

SEQ ID NO: 2173675 - RNA, 19 nt, Artificial Sequence
  Description of Artificial Sequence: Synthetic oligonucleotide
  Antisense strand to SEQ ID NO: 2173674
uugcauccgccaauagugu

SEQ ID NO: 2173676 - RNA, 19 nt, Artificial Sequence
  Description of Artificial Sequence: Synthetic oligonucleotide
  Sense strand starting at position 254 of SEQ ID NO: 1883167
ggugucucacaaugcuaga

SEQ ID NO: 2173677 - RNA, 19 nt, Artificial Sequence
  Description of Artificial Sequence: Synthetic oligonucleotide
  Antisense strand to SEQ ID NO: 2173676
ucuagcauugugagacacc

SEQ ID NO: 2173678 - RNA, 19 nt, Artificial Sequence
  Description of Artificial Sequence: Synthetic oligonucleotide
  Sense strand starting at position 267 of SEQ ID NO: 1883167
gcuagaauuugggaaacuc

SEQ ID NO: 2173679 - RNA, 19 nt, Artificial Sequence
  Description of Artificial Sequence: Synthetic oligonucleotide
  Antisense strand to SEQ ID NO: 2173678
gaguuucccaaauucuagc

SEQ ID NO: 2173680 - RNA, 19 nt, Artificial Sequence
  Description of Artificial Sequence: Synthetic oligonucleotide
  Sense strand starting at position 563 of SEQ ID NO: 1883167
ccaagacguuggucucaaa

SEQ ID NO: 2173681 - RNA, 19 nt, Artificial Sequence
  Description of Artificial Sequence: Synthetic oligonucleotide
  Antisense strand to SEQ ID NO: 2173680
uuugagaccaacgucuugg

SEQ ID NO: 2173682 - RNA, 19 nt, Artificial Sequence
  Description of Artificial Sequence: Synthetic oligonucleotide
  Sense strand starting at position 625 of SEQ ID NO: 1883167
cauggacugucuguuguau

SEQ ID NO: 2173683 - RNA, 19 nt, Artificial Sequence
  Description of Artificial Sequence: Synthetic oligonucleotide
  Antisense strand to SEQ ID NO: 2173682
auacaacagacaguccaug

SEQ ID NO: 2173684 - RNA, 19 nt, Artificial Sequence
  Description of Artificial Sequence: Synthetic oligonucleotide
  Sense strand starting at position 738 of SEQ ID NO: 1883167
uuccuaaaguguucuuuaa

SEQ ID NO: 2173685 - RNA, 19 nt, Artificial Sequence
  Description of Artificial Sequence: Synthetic oligonucleotide
  Antisense strand to SEQ ID NO: 2173684
uuaaagaacacuuuaggaa

SEQ ID NO: 2173686 - RNA, 19 nt, Artificial Sequence
  Description of Artificial Sequence: Synthetic oligonucleotide
  Sense strand starting at position 740 of SEQ ID NO: 1883167
ccuaaaguguucuuuaaga

SEQ ID NO: 2173687 - RNA, 19 nt, Artificial Sequence
  Description of Artificial Sequence: Synthetic oligonucleotide
  Antisense strand to SEQ ID NO: 2173686
ucuuaaagaacacuuuagg

SEQ ID NO: 2173688 - RNA, 19 nt, Artificial Sequence
  Description of Artificial Sequence: Synthetic oligonucleotide
  Sense strand starting at position 1182 of SEQ ID NO: 1883167
ucaguaaaucuugagcucu

SEQ ID NO: 2173689 - RNA, 19 nt, Artificial Sequence
  Description of Artificial Sequence: Synthetic oligonucleotide
  Antisense strand to SEQ ID NO: 2173688
agagcucaagauuuacuga

SEQ ID NO: 2173690 - RNA, 19 nt, Artificial Sequence
  Description of Artificial Sequence: Synthetic oligonucleotide
  Sense strand starting at position 1184 of SEQ ID NO: 1883167
aguaaaucuugagcucuua

SEQ ID NO: 2173691 - RNA, 19 nt, Artificial Sequence
  Description of Artificial Sequence: Synthetic oligonucleotide
  Antisense strand to SEQ ID NO: 2173690
uaagagcucaagauuuacu

SEQ ID NO: 2173692 - RNA, 19 nt, Artificial Sequence
  Description of Artificial Sequence: Synthetic oligonucleotide
  Sense strand starting at position 1328 of SEQ ID NO: 1883167
gcaucaugauugcucaaag

SEQ ID NO: 2173693 - RNA, 19 nt, Artificial Sequence
  Description of Artificial Sequence: Synthetic oligonucleotide
  Antisense strand to SEQ ID NO: 2173692
cuuugagcaaucaugaugc

SEQ ID NO: 2173694 - RNA, 19 nt, Artificial Sequence
  Description of Artificial Sequence: Synthetic oligonucleotide
  Sense strand starting at position 1362 of SEQ ID NO: 1883167
ggugcaugccgcagggauu

SEQ ID NO: 2173695 - RNA, 19 nt, Artificial Sequence
  Description of Artificial Sequence: Synthetic oligonucleotide
  Antisense strand to SEQ ID NO: 2173694
aaucccugcggcaugcacc

SEQ ID NO: 2173696 - RNA, 19 nt, Artificial Sequence
  Description of Artificial Sequence: Synthetic oligonucleotide
  Sense strand starting at position 1468 of SEQ ID NO: 1883167
gcuggacuuagacaugagu

SEQ ID NO: 2173697 - RNA, 19 nt, Artificial Sequence
  Description of Artificial Sequence: Synthetic oligonucleotide
  Antisense strand to SEQ ID NO: 2173696
acucaugucuaaguccagc

SEQ ID NO: 2173698 - RNA, 19 nt, Artificial Sequence
  Description of Artificial Sequence: Synthetic oligonucleotide
  Sense strand starting at position 1582 of SEQ ID NO: 1883167
ucaccagggcgucaaagau

SEQ ID NO: 2173699 - RNA, 19 nt, Artificial Sequence
  Description of Artificial Sequence: Synthetic oligonucleotide
  Antisense strand to SEQ ID NO: 2173698
aucuuugacgcccugguga

SEQ ID NO: 2173700 - RNA, 19 nt, Artificial Sequence
  Description of Artificial Sequence: Synthetic oligonucleotide
  Sense strand starting at position 2152 of SEQ ID NO: 1883167
ugggaagcauuaccguauu

SEQ ID NO: 2173701 - RNA, 19 nt, Artificial Sequence
  Description of Artificial Sequence: Synthetic oligonucleotide
  Antisense strand to SEQ ID NO: 2173700
aauacgguaaugcuuccca

SEQ ID NO: 2173702 - RNA, 19 nt, Artificial Sequence
  Description of Artificial Sequence: Synthetic oligonucleotide
  Sense strand starting at position 2216 of SEQ ID NO: 1883167
guaugagaauguucccuug

SEQ ID NO: 2173703 - RNA, 19 nt, Artificial Sequence
  Description of Artificial Sequence: Synthetic oligonucleotide
  Antisense strand to SEQ ID NO: 2173702
caagggaacauucucauac

SEQ ID NO: 2173704 - RNA, 19 nt, Artificial Sequence
  Description of Artificial Sequence: Synthetic oligonucleotide
  Sense strand starting at position 2218 of SEQ ID NO: 1883167
augagaauguucccuugga

SEQ ID NO: 2173705 - RNA, 19 nt, Artificial Sequence
  Description of Artificial Sequence: Synthetic oligonucleotide
  Antisense strand to SEQ ID NO: 2173704
uccaagggaacauucucau

SEQ ID NO: 2173706 - RNA, 19 nt, Artificial Sequence
  Description of Artificial Sequence: Synthetic oligonucleotide
  Sense strand starting at position 2219 of SEQ ID NO: 1883167
ugagaauguucccuuggaa

SEQ ID NO: 2173707 - RNA, 19 nt, Artificial Sequence
  Description of Artificial Sequence: Synthetic oligonucleotide
  Antisense strand to SEQ ID NO: 2173706
uuccaagggaacauucuca

SEQ ID NO: 2173708 - RNA, 19 nt, Artificial Sequence
  Description of Artificial Sequence: Synthetic oligonucleotide
  Sense strand starting at position 2222 of SEQ ID NO: 1883167
gaauguucccuuggaaaug

SEQ ID NO: 2173709 - RNA, 19 nt, Artificial Sequence
  Description of Artificial Sequence: Synthetic oligonucleotide
  Antisense strand to SEQ ID NO: 2173708
cauuuccaagggaacauuc

SEQ ID NO: 2173710 - RNA, 19 nt, Artificial Sequence
  Description of Artificial Sequence: Synthetic oligonucleotide
  Sense strand starting at position 2318 of SEQ ID NO: 1883167
ugaggucugaaagguauga

SEQ ID NO: 2173711 - RNA, 19 nt, Artificial Sequence
  Description of Artificial Sequence: Synthetic oligonucleotide
  Antisense strand to SEQ ID NO: 2173710
ucauaccuuucagaccuca

SEQ ID NO: 2173712 - RNA, 19 nt, Artificial Sequence
  Description of Artificial Sequence: Synthetic oligonucleotide
  Sense strand starting at position 2322 of SEQ ID NO: 1883167
gucugaaagguaugaauaa

SEQ ID NO: 2173713 - RNA, 19 nt, Artificial Sequence
  Description of Artificial Sequence: Synthetic oligonucleotide
  Antisense strand to SEQ ID NO: 2173712
uuauucauaccuuucagac

SEQ ID NO: 2173714 - RNA, 19 nt, Artificial Sequence
  Description of Artificial Sequence: Synthetic oligonucleotide
  Sense strand starting at position 2337 of SEQ ID NO: 1883167
auaacuuggauacgguaaa

SEQ ID NO: 2173715 - RNA, 19 nt, Artificial Sequence
  Description of Artificial Sequence: Synthetic oligonucleotide
  Antisense strand to SEQ ID NO: 2173714
uuuaccguauccaaguuau

SEQ ID NO: 2173716 - RNA, 19 nt, Artificial Sequence
  Description of Artificial Sequence: Synthetic oligonucleotide
  Sense strand starting at position 2348 of SEQ ID NO: 1883167
acgguaaauuuguacagga

SEQ ID NO: 2173717 - RNA, 19 nt, Artificial Sequence
  Description of Artificial Sequence: Synthetic oligonucleotide
  Antisense strand to SEQ ID NO: 2173716
uccuguacaaauuuaccgu

SEQ ID NO: 2173718 - RNA, 19 nt, Artificial Sequence
  Description of Artificial Sequence: Synthetic oligonucleotide
  Sense strand starting at position 2361 of SEQ ID NO: 1883167
acaggauuauguuugcuuu

SEQ ID NO: 2173719 - RNA, 19 nt, Artificial Sequence
  Description of Artificial Sequence: Synthetic oligonucleotide
  Antisense strand to SEQ ID NO: 2173718
aaagcaaacauaauccugu

SEQ ID NO: 2173720 - RNA, 19 nt, Artificial Sequence
  Description of Artificial Sequence: Synthetic oligonucleotide
  Sense strand starting at position 2600 of SEQ ID NO: 1883167
agugaaauguguucauugu

SEQ ID NO: 2173721 - RNA, 19 nt, Artificial Sequence
  Description of Artificial Sequence: Synthetic oligonucleotide
  Antisense strand to SEQ ID NO: 2173720
acaaugaacacauuucacu

SEQ ID NO: 2173722 - RNA, 19 nt, Artificial Sequence
  Description of Artificial Sequence: Synthetic oligonucleotide
  Sense strand starting at position 2601 of SEQ ID NO: 1883167
gugaaauguguucauuguu

SEQ ID NO: 2173723 - RNA, 19 nt, Artificial Sequence
  Description of Artificial Sequence: Synthetic oligonucleotide
  Antisense strand to SEQ ID NO: 2173722
aacaaugaacacauuucac

SEQ ID NO: 2173724 - RNA, 19 nt, Artificial Sequence
  Description of Artificial Sequence: Synthetic oligonucleotide
  Sense strand starting at position 2707 of SEQ ID NO: 1883167
aauauuuacugggcgucua

SEQ ID NO: 2173725 - RNA, 19 nt, Artificial Sequence
  Description of Artificial Sequence: Synthetic oligonucleotide
  Antisense strand to SEQ ID NO: 2173724
uagacgcccaguaaauauu

SEQ ID NO: 2173726 - RNA, 19 nt, Artificial Sequence
  Description of Artificial Sequence: Synthetic oligonucleotide
  Sense strand starting at position 2708 of SEQ ID NO: 1883167
auauuuacugggcgucuau

SEQ ID NO: 2173727 - RNA, 19 nt, Artificial Sequence
  Description of Artificial Sequence: Synthetic oligonucleotide
  Antisense strand to SEQ ID NO: 2173726
auagacgcccaguaaauau

SEQ ID NO: 2173728 - RNA, 19 nt, Artificial Sequence
  Description of Artificial Sequence: Synthetic oligonucleotide
  Sense strand starting at position 2725 of SEQ ID NO: 1883167
auuauaugccagggacacu

SEQ ID NO: 2173729 - RNA, 19 nt, Artificial Sequence
  Description of Artificial Sequence: Synthetic oligonucleotide
  Antisense strand to SEQ ID NO: 2173728
agugucccuggcauauaau

SEQ ID NO: 2173730 - RNA, 19 nt, Artificial Sequence
  Description of Artificial Sequence: Synthetic oligonucleotide
  Sense strand starting at position 2797 of SEQ ID NO: 1883167
uggccuacucccuaaauga

SEQ ID NO: 2173731 - RNA, 19 nt, Artificial Sequence
  Description of Artificial Sequence: Synthetic oligonucleotide
  Antisense strand to SEQ ID NO: 2173730
ucauuuagggaguaggcca

SEQ ID NO: 2173732 - RNA, 19 nt, Artificial Sequence
  Description of Artificial Sequence: Synthetic oligonucleotide
  Sense strand starting at position 2920 of SEQ ID NO: 1883167
acucuucucugacuggaca

SEQ ID NO: 2173733 - RNA, 19 nt, Artificial Sequence
  Description of Artificial Sequence: Synthetic oligonucleotide
  Antisense strand to SEQ ID NO: 2173732
uguccagucagagaagagu

SEQ ID NO: 2173734 - RNA, 19 nt, Artificial Sequence
  Description of Artificial Sequence: Synthetic oligonucleotide
  Sense strand starting at position 2948 of SEQ ID NO: 1883167
cuggaugucccucagucau

SEQ ID NO: 2173735 - RNA, 19 nt, Artificial Sequence
  Description of Artificial Sequence: Synthetic oligonucleotide
  Antisense strand to SEQ ID NO: 2173734
augacugagggacauccag

SEQ ID NO: 2173736 - RNA, 19 nt, Artificial Sequence
  Description of Artificial Sequence: Synthetic oligonucleotide
  Sense strand starting at position 3364 of SEQ ID NO: 1883167
uaaggagcucauugguaua

SEQ ID NO: 2173737 - RNA, 19 nt, Artificial Sequence
  Description of Artificial Sequence: Synthetic oligonucleotide
  Antisense strand to SEQ ID NO: 2173736
uauaccaaugagcuccuua

SEQ ID NO: 2173738 - RNA, 19 nt, Artificial Sequence
  Description of Artificial Sequence: Synthetic oligonucleotide
  Sense strand starting at position 3366 of SEQ ID NO: 1883167
aggagcucauugguauaga

SEQ ID NO: 2173739 - RNA, 19 nt, Artificial Sequence
  Description of Artificial Sequence: Synthetic oligonucleotide
  Antisense strand to SEQ ID NO: 2173738
ucuauaccaaugagcuccu

SEQ ID NO: 2173740 - RNA, 19 nt, Artificial Sequence
  Description of Artificial Sequence: Synthetic oligonucleotide
  Sense strand starting at position 3369 of SEQ ID NO: 1883167
agcucauugguauagagca

SEQ ID NO: 2173741 - RNA, 19 nt, Artificial Sequence
  Description of Artificial Sequence: Synthetic oligonucleotide
  Antisense strand to SEQ ID NO: 2173740
ugcucuauaccaaugagcu

SEQ ID NO: 2173742 - RNA, 19 nt, Artificial Sequence
  Description of Artificial Sequence: Synthetic oligonucleotide
  Sense strand starting at position 3383 of SEQ ID NO: 1883167
gagcaagugcuguaacaga

SEQ ID NO: 2173743 - RNA, 19 nt, Artificial Sequence
  Description of Artificial Sequence: Synthetic oligonucleotide
  Antisense strand to SEQ ID NO: 2173742
ucuguuacagcacuugcuc

SEQ ID NO: 2173744 - RNA, 19 nt, Artificial Sequence
  Description of Artificial Sequence: Synthetic oligonucleotide
  Sense strand starting at position 3606 of SEQ ID NO: 1883167
uuguuauaggcagaaacua

SEQ ID NO: 2173745 - RNA, 19 nt, Artificial Sequence
  Description of Artificial Sequence: Synthetic oligonucleotide
  Antisense strand to SEQ ID NO: 2173744
uaguuucugccuauaacaa

SEQ ID NO: 2173746 - RNA, 19 nt, Artificial Sequence
  Description of Artificial Sequence: Synthetic oligonucleotide
  Sense strand starting at position 3671 of SEQ ID NO: 1883167
aagcuaagucuugggaagu

SEQ ID NO: 2173747 - RNA, 19 nt, Artificial Sequence
  Description of Artificial Sequence: Synthetic oligonucleotide
  Antisense strand to SEQ ID NO: 2173746
acuucccaagacuuagcuu

SEQ ID NO: 2173748 - RNA, 19 nt, Artificial Sequence
  Description of Artificial Sequence: Synthetic oligonucleotide
  Sense strand starting at position 3903 of SEQ ID NO: 1883167
agaguauaggcuugggaga

SEQ ID NO: 2173749 - RNA, 19 nt, Artificial Sequence
  Description of Artificial Sequence: Synthetic oligonucleotide
  Antisense strand to SEQ ID NO: 2173748
ucucccaagccuauacucu

SEQ ID NO: 2173750 - RNA, 19 nt, Artificial Sequence
  Description of Artificial Sequence: Synthetic oligonucleotide
  Sense strand starting at position 3904 of SEQ ID NO: 1883167
gaguauaggcuugggagaa

SEQ ID NO: 2173751 - RNA, 19 nt, Artificial Sequence
  Description of Artificial Sequence: Synthetic oligonucleotide
  Antisense strand to SEQ ID NO: 2173750
uucucccaagccuauacuc

SEQ ID NO: 2173752 - RNA, 19 nt, Artificial Sequence
  Description of Artificial Sequence: Synthetic oligonucleotide
  Sense strand starting at position 3929 of SEQ ID NO: 1883167
augcauuuagugugagguu

SEQ ID NO: 2173753 - RNA, 19 nt, Artificial Sequence
  Description of Artificial Sequence: Synthetic oligonucleotide
  Antisense strand to SEQ ID NO: 2173752
aaccucacacuaaaugcau

SEQ ID NO: 2173754 - RNA, 19 nt, Artificial Sequence
  Description of Artificial Sequence: Synthetic oligonucleotide
  Sense strand starting at position 3944 of SEQ ID NO: 1883167
gguuguuaaguuugaggua

SEQ ID NO: 2173755 - RNA, 19 nt, Artificial Sequence
  Description of Artificial Sequence: Synthetic oligonucleotide
  Antisense strand to SEQ ID NO: 2173754
uaccucaaacuuaacaacc

SEQ ID NO: 2173756 - RNA, 19 nt, Artificial Sequence
  Description of Artificial Sequence: Synthetic oligonucleotide
  Sense strand starting at position 121 of SEQ ID NO: 1883168
gggaguccgugaaauggga

SEQ ID NO: 2173757 - RNA, 19 nt, Artificial Sequence
  Description of Artificial Sequence: Synthetic oligonucleotide
  Antisense strand to SEQ ID NO: 2173756
ucccauuucacggacuccc

SEQ ID NO: 2173758 - RNA, 19 nt, Artificial Sequence
  Description of Artificial Sequence: Synthetic oligonucleotide
  Sense strand starting at position 129 of SEQ ID NO: 1883168
gugaaaugggaguggguaa

SEQ ID NO: 2173759 - RNA, 19 nt, Artificial Sequence
  Description of Artificial Sequence: Synthetic oligonucleotide
  Antisense strand to SEQ ID NO: 2173758
uuacccacucccauuucac

SEQ ID NO: 2173760 - RNA, 19 nt, Artificial Sequence
  Description of Artificial Sequence: Synthetic oligonucleotide
  Sense strand starting at position 136 of SEQ ID NO: 1883168
gggaguggguaaagaagua

SEQ ID NO: 2173761 - RNA, 19 nt, Artificial Sequence
  Description of Artificial Sequence: Synthetic oligonucleotide
  Antisense strand to SEQ ID NO: 2173760
uacuucuuuacccacuccc

SEQ ID NO: 2173762 - RNA, 19 nt, Artificial Sequence
  Description of Artificial Sequence: Synthetic oligonucleotide
  Sense strand starting at position 352 of SEQ ID NO: 1883168
gcauucucacaggacacuu

SEQ ID NO: 2173763 - RNA, 19 nt, Artificial Sequence
  Description of Artificial Sequence: Synthetic oligonucleotide
  Antisense strand to SEQ ID NO: 2173762
aaguguccugugagaaugc

SEQ ID NO: 2173764 - RNA, 19 nt, Artificial Sequence
  Description of Artificial Sequence: Synthetic oligonucleotide
  Sense strand starting at position 753 of SEQ ID NO: 1883168
ggguuaauugugcaaacuu

SEQ ID NO: 2173765 - RNA, 19 nt, Artificial Sequence
  Description of Artificial Sequence: Synthetic oligonucleotide
  Antisense strand to SEQ ID NO: 2173764
aaguuugcacaauuaaccc

SEQ ID NO: 2173766 - RNA, 19 nt, Artificial Sequence
  Description of Artificial Sequence: Synthetic oligonucleotide
  Sense strand starting at position 824 of SEQ ID NO: 1883168
agagcaugcuauuucgcau

SEQ ID NO: 2173767 - RNA, 19 nt, Artificial Sequence
  Description of Artificial Sequence: Synthetic oligonucleotide
  Antisense strand to SEQ ID NO: 2173766
augcgaaauagcaugcucu

SEQ ID NO: 2173768 - RNA, 19 nt, Artificial Sequence
  Description of Artificial Sequence: Synthetic oligonucleotide
  Sense strand starting at position 887 of SEQ ID NO: 1883168
ggaagauggcuggguucaa

SEQ ID NO: 2173769 - RNA, 19 nt, Artificial Sequence
  Description of Artificial Sequence: Synthetic oligonucleotide
  Antisense strand to SEQ ID NO: 2173768
uugaacccagccaucuucc

SEQ ID NO: 2173770 - RNA, 19 nt, Artificial Sequence
  Description of Artificial Sequence: Synthetic oligonucleotide
  Sense strand starting at position 1566 of SEQ ID NO: 1883168
ggagguuuaugauccaauc

SEQ ID NO: 2173771 - RNA, 19 nt, Artificial Sequence
  Description of Artificial Sequence: Synthetic oligonucleotide
  Antisense strand to SEQ ID NO: 2173770
gauuggaucauaaaccucc

SEQ ID NO: 2173772 - RNA, 19 nt, Artificial Sequence
  Description of Artificial Sequence: Synthetic oligonucleotide
  Sense strand starting at position 1734 of SEQ ID NO: 1883168
uggauauugugaguauuaa

SEQ ID NO: 2173773 - RNA, 19 nt, Artificial Sequence
  Description of Artificial Sequence: Synthetic oligonucleotide
  Antisense strand to SEQ ID NO: 2173772
uuaauacucacaauaucca

SEQ ID NO: 2173774 - RNA, 19 nt, Artificial Sequence
  Description of Artificial Sequence: Synthetic oligonucleotide
  Sense strand starting at position 1742 of SEQ ID NO: 1883168
gugaguauuaagggagaug

SEQ ID NO: 2173775 - RNA, 19 nt, Artificial Sequence
  Description of Artificial Sequence: Synthetic oligonucleotide
  Antisense strand to SEQ ID NO: 2173774
caucucccuuaauacucac

SEQ ID NO: 2173776 - RNA, 19 nt, Artificial Sequence
  Description of Artificial Sequence: Synthetic oligonucleotide
  Sense strand starting at position 1754 of SEQ ID NO: 1883168
ggagauggguugucuuaau

SEQ ID NO: 2173777 - RNA, 19 nt, Artificial Sequence
  Description of Artificial Sequence: Synthetic oligonucleotide
  Antisense strand to SEQ ID NO: 2173776
auuaagacaacccaucucc

SEQ ID NO: 2173778 - RNA, 19 nt, Artificial Sequence
  Description of Artificial Sequence: Synthetic oligonucleotide
  Sense strand starting at position 2057 of SEQ ID NO: 1883168
gaaggcagauccuuuauga

SEQ ID NO: 2173779 - RNA, 19 nt, Artificial Sequence
  Description of Artificial Sequence: Synthetic oligonucleotide
  Antisense strand to SEQ ID NO: 2173778
ucauaaaggaucugccuuc

SEQ ID NO: 2173780 - RNA, 19 nt, Artificial Sequence
  Description of Artificial Sequence: Synthetic oligonucleotide
  Sense strand starting at position 2232 of SEQ ID NO: 1883168
gugaaaggauuccuaauca

SEQ ID NO: 2173781 - RNA, 19 nt, Artificial Sequence
  Description of Artificial Sequence: Synthetic oligonucleotide
  Antisense strand to SEQ ID NO: 2173780
ugauuaggaauccuuucac

SEQ ID NO: 2173782 - RNA, 19 nt, Artificial Sequence
  Description of Artificial Sequence: Synthetic oligonucleotide
  Sense strand starting at position 2354 of SEQ ID NO: 1883168
gcccaucucagggaguuaa

SEQ ID NO: 2173783 - RNA, 19 nt, Artificial Sequence
  Description of Artificial Sequence: Synthetic oligonucleotide
  Antisense strand to SEQ ID NO: 2173782
uuaacucccugagaugggc

SEQ ID NO: 2173784 - RNA, 19 nt, Artificial Sequence
  Description of Artificial Sequence: Synthetic oligonucleotide
  Sense strand starting at position 2436 of SEQ ID NO: 1883168
caugucuuugggcaaguaa

SEQ ID NO: 2173785 - RNA, 19 nt, Artificial Sequence
  Description of Artificial Sequence: Synthetic oligonucleotide
  Antisense strand to SEQ ID NO: 2173784
uuacuugcccaaagacaug

SEQ ID NO: 2173786 - RNA, 19 nt, Artificial Sequence
  Description of Artificial Sequence: Synthetic oligonucleotide
  Sense strand starting at position 2564 of SEQ ID NO: 1883168
uguugagagggcuaacauu

SEQ ID NO: 2173787 - RNA, 19 nt, Artificial Sequence
  Description of Artificial Sequence: Synthetic oligonucleotide
  Antisense strand to SEQ ID NO: 2173786
aauguuagcccucucaaca

SEQ ID NO: 2173788 - RNA, 19 nt, Artificial Sequence
  Description of Artificial Sequence: Synthetic oligonucleotide
  Sense strand starting at position 2580 of SEQ ID NO: 1883168
auuguucuccagggcaaag

SEQ ID NO: 2173789 - RNA, 19 nt, Artificial Sequence
  Description of Artificial Sequence: Synthetic oligonucleotide
  Antisense strand to SEQ ID NO: 2173788
cuuugcccuggagaacaau

SEQ ID NO: 2173790 - RNA, 19 nt, Artificial Sequence
  Description of Artificial Sequence: Synthetic oligonucleotide
  Sense strand starting at position 2598 of SEQ ID NO: 1883168
gcccaugaccucgaugaua

SEQ ID NO: 2173791 - RNA, 19 nt, Artificial Sequence
  Description of Artificial Sequence: Synthetic oligonucleotide
  Antisense strand to SEQ ID NO: 2173790
uaucaucgaggucaugggc

SEQ ID NO: 2173792 - RNA, 19 nt, Artificial Sequence
  Description of Artificial Sequence: Synthetic oligonucleotide
  Sense strand starting at position 2600 of SEQ ID NO: 1883168
ccaugaccucgaugauaga

SEQ ID NO: 2173793 - RNA, 19 nt, Artificial Sequence
  Description of Artificial Sequence: Synthetic oligonucleotide
  Antisense strand to SEQ ID NO: 2173792
ucuaucaucgaggucaugg

SEQ ID NO: 2173794 - RNA, 19 nt, Artificial Sequence
  Description of Artificial Sequence: Synthetic oligonucleotide
  Sense strand starting at position 2789 of SEQ ID NO: 1883168
ggaugcaggccucaugaca

SEQ ID NO: 2173795 - RNA, 19 nt, Artificial Sequence
  Description of Artificial Sequence: Synthetic oligonucleotide
  Antisense strand to SEQ ID NO: 2173794
ugucaugaggccugcaucc

SEQ ID NO: 2173796 - RNA, 19 nt, Artificial Sequence
  Description of Artificial Sequence: Synthetic oligonucleotide
  Sense strand starting at position 2813 of SEQ ID NO: 1883168
gucacuacacuaugauaag

SEQ ID NO: 2173797 - RNA, 19 nt, Artificial Sequence
  Description of Artificial Sequence: Synthetic oligonucleotide
  Antisense strand to SEQ ID NO: 2173796
cuuaucauaguguagugac

SEQ ID NO: 2173798 - RNA, 19 nt, Artificial Sequence
  Description of Artificial Sequence: Synthetic oligonucleotide
  Sense strand starting at position 2909 of SEQ ID NO: 1883168
ggagacaccucagaagaaa

SEQ ID NO: 2173799 - RNA, 19 nt, Artificial Sequence
  Description of Artificial Sequence: Synthetic oligonucleotide
  Antisense strand to SEQ ID NO: 2173798
uuucuucugaggugucucc

SEQ ID NO: 2173800 - RNA, 19 nt, Artificial Sequence
  Description of Artificial Sequence: Synthetic oligonucleotide
  Sense strand starting at position 3009 of SEQ ID NO: 1883168
uaguauagagcauggugau

SEQ ID NO: 2173801 - RNA, 19 nt, Artificial Sequence
  Description of Artificial Sequence: Synthetic oligonucleotide
  Antisense strand to SEQ ID NO: 2173800
aucaccaugcucuauacua

SEQ ID NO: 2173802 - RNA, 19 nt, Artificial Sequence
  Description of Artificial Sequence: Synthetic oligonucleotide
  Sense strand starting at position 3021 of SEQ ID NO: 1883168
uggugaugaugaguauaga

SEQ ID NO: 2173803 - RNA, 19 nt, Artificial Sequence
  Description of Artificial Sequence: Synthetic oligonucleotide
  Antisense strand to SEQ ID NO: 2173802
ucuauacucaucaucacca

SEQ ID NO: 2173804 - RNA, 19 nt, Artificial Sequence
  Description of Artificial Sequence: Synthetic oligonucleotide
  Sense strand starting at position 3144 of SEQ ID NO: 1883168
uagggaugauaaccuugua

SEQ ID NO: 2173805 - RNA, 19 nt, Artificial Sequence
  Description of Artificial Sequence: Synthetic oligonucleotide
  Antisense strand to SEQ ID NO: 2173804
uacaagguuaucaucccua

SEQ ID NO: 2173806 - RNA, 19 nt, Artificial Sequence
  Description of Artificial Sequence: Synthetic oligonucleotide
  Sense strand starting at position 3147 of SEQ ID NO: 1883168
ggaugauaaccuuguacau

SEQ ID NO: 2173807 - RNA, 19 nt, Artificial Sequence
  Description of Artificial Sequence: Synthetic oligonucleotide
  Antisense strand to SEQ ID NO: 2173806
auguacaagguuaucaucc

SEQ ID NO: 2173808 - RNA, 19 nt, Artificial Sequence
  Description of Artificial Sequence: Synthetic oligonucleotide
  Sense strand starting at position 3157 of SEQ ID NO: 1883168
cuuguacauuccuuccaga

SEQ ID NO: 2173809 - RNA, 19 nt, Artificial Sequence
  Description of Artificial Sequence: Synthetic oligonucleotide
  Antisense strand to SEQ ID NO: 2173808
ucuggaaggaauguacaag

SEQ ID NO: 2173810 - RNA, 19 nt, Artificial Sequence
  Description of Artificial Sequence: Synthetic oligonucleotide
  Sense strand starting at position 3189 of SEQ ID NO: 1883168
aggacaguaccuugcuuaa

SEQ ID NO: 2173811 - RNA, 19 nt, Artificial Sequence
  Description of Artificial Sequence: Synthetic oligonucleotide
  Antisense strand to SEQ ID NO: 2173810
uuaagcaagguacuguccu

SEQ ID NO: 2173812 - RNA, 19 nt, Artificial Sequence
  Description of Artificial Sequence: Synthetic oligonucleotide
  Sense strand starting at position 3208 of SEQ ID NO: 1883168
aacuaaggccuaugugacu

SEQ ID NO: 2173813 - RNA, 19 nt, Artificial Sequence
  Description of Artificial Sequence: Synthetic oligonucleotide
  Antisense strand to SEQ ID NO: 2173812
agucacauaggccuuaguu

SEQ ID NO: 2173814 - RNA, 19 nt, Artificial Sequence
  Description of Artificial Sequence: Synthetic oligonucleotide
  Sense strand starting at position 3215 of SEQ ID NO: 1883168
gccuaugugacugcuuguu

SEQ ID NO: 2173815 - RNA, 19 nt, Artificial Sequence
  Description of Artificial Sequence: Synthetic oligonucleotide
  Antisense strand to SEQ ID NO: 2173814
aacaagcagucacauaggc

SEQ ID NO: 2173816 - RNA, 19 nt, Artificial Sequence
  Description of Artificial Sequence: Synthetic oligonucleotide
  Sense strand starting at position 3268 of SEQ ID NO: 1883168
ggaguucucauaggaugga

SEQ ID NO: 2173817 - RNA, 19 nt, Artificial Sequence
  Description of Artificial Sequence: Synthetic oligonucleotide
  Antisense strand to SEQ ID NO: 2173816
uccauccuaugagaacucc

SEQ ID NO: 2173818 - RNA, 19 nt, Artificial Sequence
  Description of Artificial Sequence: Synthetic oligonucleotide
  Sense strand starting at position 3325 of SEQ ID NO: 1883168
guuccagggccuuagugaa

SEQ ID NO: 2173819 - RNA, 19 nt, Artificial Sequence
  Description of Artificial Sequence: Synthetic oligonucleotide
  Antisense strand to SEQ ID NO: 2173818
uucacuaaggcccuggaac

SEQ ID NO: 2173820 - RNA, 19 nt, Artificial Sequence
  Description of Artificial Sequence: Synthetic oligonucleotide
  Sense strand starting at position 3355 of SEQ ID NO: 1883168
ggacuaaauccuuggucug

SEQ ID NO: 2173821 - RNA, 19 nt, Artificial Sequence
  Description of Artificial Sequence: Synthetic oligonucleotide
  Antisense strand to SEQ ID NO: 2173820
cagaccaaggauuuagucc

SEQ ID NO: 2173822 - RNA, 19 nt, Artificial Sequence
  Description of Artificial Sequence: Synthetic oligonucleotide
  Sense strand starting at position 3394 of SEQ ID NO: 1883168
uuuguaucuccauacagca

SEQ ID NO: 2173823 - RNA, 19 nt, Artificial Sequence
  Description of Artificial Sequence: Synthetic oligonucleotide
  Antisense strand to SEQ ID NO: 2173822
ugcuguauggagauacaaa

SEQ ID NO: 2173824 - RNA, 19 nt, Artificial Sequence
  Description of Artificial Sequence: Synthetic oligonucleotide
  Sense strand starting at position 3506 of SEQ ID NO: 1883168
uggacucugucuccauaau

SEQ ID NO: 2173825 - RNA, 19 nt, Artificial Sequence
  Description of Artificial Sequence: Synthetic oligonucleotide
  Antisense strand to SEQ ID NO: 2173824
auuauggagacagagucca

SEQ ID NO: 2173826 - RNA, 19 nt, Artificial Sequence
  Description of Artificial Sequence: Synthetic oligonucleotide
  Sense strand starting at position 3507 of SEQ ID NO: 1883168
ggacucugucuccauaauu

SEQ ID NO: 2173827 - RNA, 19 nt, Artificial Sequence
  Description of Artificial Sequence: Synthetic oligonucleotide
  Antisense strand to SEQ ID NO: 2173826
aauuauggagacagagucc

SEQ ID NO: 2173828 - RNA, 19 nt, Artificial Sequence
  Description of Artificial Sequence: Synthetic oligonucleotide
  Sense strand starting at position 3641 of SEQ ID NO: 1883168
agcccaaagcuggauguua

SEQ ID NO: 2173829 - RNA, 19 nt, Artificial Sequence
  Description of Artificial Sequence: Synthetic oligonucleotide
  Antisense strand to SEQ ID NO: 2173828
uaacauccagcuuugggcu

SEQ ID NO: 2173830 - RNA, 19 nt, Artificial Sequence
  Description of Artificial Sequence: Synthetic oligonucleotide
  Sense strand starting at position 3702 of SEQ ID NO: 1883168
gcgauauagcuagaagaug

SEQ ID NO: 2173831 - RNA, 19 nt, Artificial Sequence
  Description of Artificial Sequence: Synthetic oligonucleotide
  Antisense strand to SEQ ID NO: 2173830
caucuucuagcuauaucgc

SEQ ID NO: 2173832 - RNA, 19 nt, Artificial Sequence
  Description of Artificial Sequence: Synthetic oligonucleotide
  Sense strand starting at position 3731 of SEQ ID NO: 1883168
gauggaaacccagguuugu

SEQ ID NO: 2173833 - RNA, 19 nt, Artificial Sequence
  Description of Artificial Sequence: Synthetic oligonucleotide
  Antisense strand to SEQ ID NO: 2173832
acaaaccuggguuuccauc

SEQ ID NO: 2173834 - RNA, 19 nt, Artificial Sequence
  Description of Artificial Sequence: Synthetic oligonucleotide
  Sense strand starting at position 3847 of SEQ ID NO: 1883168
gggacuugucugcagguga

SEQ ID NO: 2173835 - RNA, 19 nt, Artificial Sequence
  Description of Artificial Sequence: Synthetic oligonucleotide
  Antisense strand to SEQ ID NO: 2173834
ucaccugcagacaaguccc

SEQ ID NO: 2173836 - RNA, 19 nt, Artificial Sequence
  Description of Artificial Sequence: Synthetic oligonucleotide
  Sense strand starting at position 102 of SEQ ID NO: 1883169
ccuagauugcuuuacaggu

SEQ ID NO: 2173837 - RNA, 19 nt, Artificial Sequence
  Description of Artificial Sequence: Synthetic oligonucleotide
  Antisense strand to SEQ ID NO: 2173836
accuguaaagcaaucuagg

SEQ ID NO: 2173838 - RNA, 19 nt, Artificial Sequence
  Description of Artificial Sequence: Synthetic oligonucleotide
  Sense strand starting at position 216 of SEQ ID NO: 1883169
aguauauuagcagagguau

SEQ ID NO: 2173839 - RNA, 19 nt, Artificial Sequence
  Description of Artificial Sequence: Synthetic oligonucleotide
  Antisense strand to SEQ ID NO: 2173838
auaccucugcuaauauacu

SEQ ID NO: 2173840 - RNA, 19 nt, Artificial Sequence
  Description of Artificial Sequence: Synthetic oligonucleotide
  Sense strand starting at position 340 of SEQ ID NO: 1883169
ggcaccuauccugacuaua

SEQ ID NO: 2173841 - RNA, 19 nt, Artificial Sequence
  Description of Artificial Sequence: Synthetic oligonucleotide
  Antisense strand to SEQ ID NO: 2173840
uauagucaggauaggugcc

SEQ ID NO: 2173842 - RNA, 19 nt, Artificial Sequence
  Description of Artificial Sequence: Synthetic oligonucleotide
  Sense strand starting at position 420 of SEQ ID NO: 1883169
ccuuuauugcuugaaauag

SEQ ID NO: 2173843 - RNA, 19 nt, Artificial Sequence
  Description of Artificial Sequence: Synthetic oligonucleotide
  Antisense strand to SEQ ID NO: 2173842
cuauuucaagcaauaaagg

SEQ ID NO: 2173844 - RNA, 19 nt, Artificial Sequence
  Description of Artificial Sequence: Synthetic oligonucleotide
  Sense strand starting at position 430 of SEQ ID NO: 1883169
uugaaauagcaaggguuua

SEQ ID NO: 2173845 - RNA, 19 nt, Artificial Sequence
  Description of Artificial Sequence: Synthetic oligonucleotide
  Antisense strand to SEQ ID NO: 2173844
uaaacccuugcuauuucaa

SEQ ID NO: 2173846 - RNA, 19 nt, Artificial Sequence
  Description of Artificial Sequence: Synthetic oligonucleotide
  Sense strand starting at position 431 of SEQ ID NO: 1883169
ugaaauagcaaggguuuau

SEQ ID NO: 2173847 - RNA, 19 nt, Artificial Sequence
  Description of Artificial Sequence: Synthetic oligonucleotide
  Antisense strand to SEQ ID NO: 2173846
auaaacccuugcuauuuca

SEQ ID NO: 2173848 - RNA, 19 nt, Artificial Sequence
  Description of Artificial Sequence: Synthetic oligonucleotide
  Sense strand starting at position 477 of SEQ ID NO: 1883169
caauguuaacuggagcuca

SEQ ID NO: 2173849 - RNA, 19 nt, Artificial Sequence
  Description of Artificial Sequence: Synthetic oligonucleotide
  Antisense strand to SEQ ID NO: 2173848
ugagcuccaguuaacauug

SEQ ID NO: 2173850 - RNA, 19 nt, Artificial Sequence
  Description of Artificial Sequence: Synthetic oligonucleotide
  Sense strand starting at position 888 of SEQ ID NO: 1883169
uccuuuccuccagaugagu

SEQ ID NO: 2173851 - RNA, 19 nt, Artificial Sequence
  Description of Artificial Sequence: Synthetic oligonucleotide
  Antisense strand to SEQ ID NO: 2173850
acucaucuggaggaaagga

SEQ ID NO: 2173852 - RNA, 19 nt, Artificial Sequence
  Description of Artificial Sequence: Synthetic oligonucleotide
  Sense strand starting at position 1080 of SEQ ID NO: 1883169
gaacucagauuacugagua

SEQ ID NO: 2173853 - RNA, 19 nt, Artificial Sequence
  Description of Artificial Sequence: Synthetic oligonucleotide
  Antisense strand to SEQ ID NO: 2173852
uacucaguaaucugaguuc

SEQ ID NO: 2173854 - RNA, 19 nt, Artificial Sequence
  Description of Artificial Sequence: Synthetic oligonucleotide
  Sense strand starting at position 1114 of SEQ ID NO: 1883169
gcacaauauuaggcacuuu

SEQ ID NO: 2173855 - RNA, 19 nt, Artificial Sequence
  Description of Artificial Sequence: Synthetic oligonucleotide
  Antisense strand to SEQ ID NO: 2173854
aaagugccuaauauugugc

SEQ ID NO: 2173856 - RNA, 19 nt, Artificial Sequence
  Description of Artificial Sequence: Synthetic oligonucleotide
  Sense strand starting at position 1352 of SEQ ID NO: 1883169
ggcauucuauuugugugga

SEQ ID NO: 2173857 - RNA, 19 nt, Artificial Sequence
  Description of Artificial Sequence: Synthetic oligonucleotide
  Antisense strand to SEQ ID NO: 2173856
uccacacaaauagaaugcc

SEQ ID NO: 2173858 - RNA, 19 nt, Artificial Sequence
  Description of Artificial Sequence: Synthetic oligonucleotide
  Sense strand starting at position 1355 of SEQ ID NO: 1883169
auucuauuuguguggaugu

SEQ ID NO: 2173859 - RNA, 19 nt, Artificial Sequence
  Description of Artificial Sequence: Synthetic oligonucleotide
  Antisense strand to SEQ ID NO: 2173858
acauccacacaaauagaau

SEQ ID NO: 2173860 - RNA, 19 nt, Artificial Sequence
  Description of Artificial Sequence: Synthetic oligonucleotide
  Sense strand starting at position 1396 of SEQ ID NO: 1883169
ggguucuguaucuauggaa

SEQ ID NO: 2173861 - RNA, 19 nt, Artificial Sequence
  Description of Artificial Sequence: Synthetic oligonucleotide
  Antisense strand to SEQ ID NO: 2173860
uuccauagauacagaaccc

SEQ ID NO: 2173862 - RNA, 19 nt, Artificial Sequence
  Description of Artificial Sequence: Synthetic oligonucleotide
  Sense strand starting at position 1537 of SEQ ID NO: 1883169
gauuuaagguaugggaaac

SEQ ID NO: 2173863 - RNA, 19 nt, Artificial Sequence
  Description of Artificial Sequence: Synthetic oligonucleotide
  Antisense strand to SEQ ID NO: 2173862
guuucccauaccuuaaauc

SEQ ID NO: 2173864 - RNA, 19 nt, Artificial Sequence
  Description of Artificial Sequence: Synthetic oligonucleotide
  Sense strand starting at position 1799 of SEQ ID NO: 1883169
gcucacuuggcugaauacu

SEQ ID NO: 2173865 - RNA, 19 nt, Artificial Sequence
  Description of Artificial Sequence: Synthetic oligonucleotide
  Antisense strand to SEQ ID NO: 2173864
aguauucagccaagugagc

SEQ ID NO: 2173866 - RNA, 19 nt, Artificial Sequence
  Description of Artificial Sequence: Synthetic oligonucleotide
  Sense strand starting at position 1813 of SEQ ID NO: 1883169
auacuucuucuguauuagu

SEQ ID NO: 2173867 - RNA, 19 nt, Artificial Sequence
  Description of Artificial Sequence: Synthetic oligonucleotide
  Antisense strand to SEQ ID NO: 2173866
acuaauacagaagaaguau

SEQ ID NO: 2173868 - RNA, 19 nt, Artificial Sequence
  Description of Artificial Sequence: Synthetic oligonucleotide
  Sense strand starting at position 2279 of SEQ ID NO: 1883169
cccugagaguaauaauuua

SEQ ID NO: 2173869 - RNA, 19 nt, Artificial Sequence
  Description of Artificial Sequence: Synthetic oligonucleotide
  Antisense strand to SEQ ID NO: 2173868
uaaauuauuacucucaggg

SEQ ID NO: 2173870 - RNA, 19 nt, Artificial Sequence
  Description of Artificial Sequence: Synthetic oligonucleotide
  Sense strand starting at position 2385 of SEQ ID NO: 1883169
ucauuccuuguuuaugaga

SEQ ID NO: 2173871 - RNA, 19 nt, Artificial Sequence
  Description of Artificial Sequence: Synthetic oligonucleotide
  Antisense strand to SEQ ID NO: 2173870
ucucauaaacaaggaauga

SEQ ID NO: 2173872 - RNA, 19 nt, Artificial Sequence
  Description of Artificial Sequence: Synthetic oligonucleotide
  Sense strand starting at position 2623 of SEQ ID NO: 1883169
caccacuggccuggauaua

SEQ ID NO: 2173873 - RNA, 19 nt, Artificial Sequence
  Description of Artificial Sequence: Synthetic oligonucleotide
  Antisense strand to SEQ ID NO: 2173872
uauauccaggccaguggug

SEQ ID NO: 2173874 - RNA, 19 nt, Artificial Sequence
  Description of Artificial Sequence: Synthetic oligonucleotide
  Sense strand starting at position 2772 of SEQ ID NO: 1883169
aaagguucggcacagcaaa

SEQ ID NO: 2173875 - RNA, 19 nt, Artificial Sequence
  Description of Artificial Sequence: Synthetic oligonucleotide
  Antisense strand to SEQ ID NO: 2173874
uuugcugugccgaaccuuu

SEQ ID NO: 2173876 - RNA, 19 nt, Artificial Sequence
  Description of Artificial Sequence: Synthetic oligonucleotide
  Sense strand starting at position 2799 of SEQ ID NO: 1883169
uguaaauaccuuuaagggu

SEQ ID NO: 2173877 - RNA, 19 nt, Artificial Sequence
  Description of Artificial Sequence: Synthetic oligonucleotide
  Antisense strand to SEQ ID NO: 2173876
acccuuaaagguauuuaca

SEQ ID NO: 2173878 - RNA, 19 nt, Artificial Sequence
  Description of Artificial Sequence: Synthetic oligonucleotide
  Sense strand starting at position 2869 of SEQ ID NO: 1883169
cuacaaguaguauguaaga

SEQ ID NO: 2173879 - RNA, 19 nt, Artificial Sequence
  Description of Artificial Sequence: Synthetic oligonucleotide
  Antisense strand to SEQ ID NO: 2173878
ucuuacauacuacuuguag

SEQ ID NO: 2173880 - RNA, 19 nt, Artificial Sequence
  Description of Artificial Sequence: Synthetic oligonucleotide
  Sense strand starting at position 2971 of SEQ ID NO: 1883169
uuuguaagacuuugauuac

SEQ ID NO: 2173881 - RNA, 19 nt, Artificial Sequence
  Description of Artificial Sequence: Synthetic oligonucleotide
  Antisense strand to SEQ ID NO: 2173880
guaaucaaagucuuacaaa

SEQ ID NO: 2173882 - RNA, 19 nt, Artificial Sequence
  Description of Artificial Sequence: Synthetic oligonucleotide
  Sense strand starting at position 2974 of SEQ ID NO: 1883169
guaagacuuugauuacuaa

SEQ ID NO: 2173883 - RNA, 19 nt, Artificial Sequence
  Description of Artificial Sequence: Synthetic oligonucleotide
  Antisense strand to SEQ ID NO: 2173882
uuaguaaucaaagucuuac

SEQ ID NO: 2173884 - RNA, 19 nt, Artificial Sequence
  Description of Artificial Sequence: Synthetic oligonucleotide
  Sense strand starting at position 3088 of SEQ ID NO: 1883169
uccugaacaccugguauaa

SEQ ID NO: 2173885 - RNA, 19 nt, Artificial Sequence
  Description of Artificial Sequence: Synthetic oligonucleotide
  Antisense strand to SEQ ID NO: 2173884
uuauaccagguguucagga

SEQ ID NO: 2173886 - RNA, 19 nt, Artificial Sequence
  Description of Artificial Sequence: Synthetic oligonucleotide
  Sense strand starting at position 3470 of SEQ ID NO: 1883169
agcaauguccuguagagua

SEQ ID NO: 2173887 - RNA, 19 nt, Artificial Sequence
  Description of Artificial Sequence: Synthetic oligonucleotide
  Antisense strand to SEQ ID NO: 2173886
uacucuacaggacauugcu

SEQ ID NO: 2173888 - RNA, 19 nt, Artificial Sequence
  Description of Artificial Sequence: Synthetic oligonucleotide
  Sense strand starting at position 3472 of SEQ ID NO: 1883169
caauguccuguagaguaaa

SEQ ID NO: 2173889 - RNA, 19 nt, Artificial Sequence
  Description of Artificial Sequence: Synthetic oligonucleotide
  Antisense strand to SEQ ID NO: 2173888
uuuacucuacaggacauug

SEQ ID NO: 2173890 - RNA, 19 nt, Artificial Sequence
  Description of Artificial Sequence: Synthetic oligonucleotide
  Sense strand starting at position 3512 of SEQ ID NO: 1883169
gugacagcccauuacucaa

SEQ ID NO: 2173891 - RNA, 19 nt, Artificial Sequence
  Description of Artificial Sequence: Synthetic oligonucleotide
  Antisense strand to SEQ ID NO: 2173890
uugaguaaugggcugucac

SEQ ID NO: 2173892 - RNA, 19 nt, Artificial Sequence
  Description of Artificial Sequence: Synthetic oligonucleotide
  Sense strand starting at position 3593 of SEQ ID NO: 1883169
cuugucuguaaugggaauu

SEQ ID NO: 2173893 - RNA, 19 nt, Artificial Sequence
  Description of Artificial Sequence: Synthetic oligonucleotide
  Antisense strand to SEQ ID NO: 2173892
aauucccauuacagacaag

SEQ ID NO: 2173894 - RNA, 19 nt, Artificial Sequence
  Description of Artificial Sequence: Synthetic oligonucleotide
  Sense strand starting at position 3624 of SEQ ID NO: 1883169
ugcauaucaccuggacuaa

SEQ ID NO: 2173895 - RNA, 19 nt, Artificial Sequence
  Description of Artificial Sequence: Synthetic oligonucleotide
  Antisense strand to SEQ ID NO: 2173894
uuaguccaggugauaugca

SEQ ID NO: 2173896 - RNA, 19 nt, Artificial Sequence
  Description of Artificial Sequence: Synthetic oligonucleotide
  Sense strand starting at position 3807 of SEQ ID NO: 1883169
ucucauggauccuuccaga

SEQ ID NO: 2173897 - RNA, 19 nt, Artificial Sequence
  Description of Artificial Sequence: Synthetic oligonucleotide
  Antisense strand to SEQ ID NO: 2173896
ucuggaaggauccaugaga

SEQ ID NO: 2173898 - RNA, 19 nt, Artificial Sequence
  Description of Artificial Sequence: Synthetic oligonucleotide
  Sense strand starting at position 3868 of SEQ ID NO: 1883169
gccagaauuucugaaucaa

SEQ ID NO: 2173899 - RNA, 19 nt, Artificial Sequence
  Description of Artificial Sequence: Synthetic oligonucleotide
  Antisense strand to SEQ ID NO: 2173898
uugauucagaaauucuggc

SEQ ID NO: 2173900 - RNA, 19 nt, Artificial Sequence
  Description of Artificial Sequence: Synthetic oligonucleotide
  Sense strand starting at position 3880 of SEQ ID NO: 1883169
gaaucaauuucugggauga

SEQ ID NO: 2173901 - RNA, 19 nt, Artificial Sequence
  Description of Artificial Sequence: Synthetic oligonucleotide
  Antisense strand to SEQ ID NO: 2173900
ucaucccagaaauugauuc

SEQ ID NO: 2173902 - RNA, 19 nt, Artificial Sequence
  Description of Artificial Sequence: Synthetic oligonucleotide
  Sense strand starting at position 3882 of SEQ ID NO: 1883169
aucaauuucugggaugaag

SEQ ID NO: 2173903 - RNA, 19 nt, Artificial Sequence
  Description of Artificial Sequence: Synthetic oligonucleotide
  Antisense strand to SEQ ID NO: 2173902
cuucaucccagaaauugau

SEQ ID NO: 2173904 - RNA, 19 nt, Artificial Sequence
  Description of Artificial Sequence: Synthetic oligonucleotide
  Sense strand starting at position 3930 of SEQ ID NO: 1883169
cccacaguauuguugaauu

SEQ ID NO: 2173905 - RNA, 19 nt, Artificial Sequence
  Description of Artificial Sequence: Synthetic oligonucleotide
  Antisense strand to SEQ ID NO: 2173904
aauucaacaauacuguggg

SEQ ID NO: 2173906 - RNA, 19 nt, Artificial Sequence
  Description of Artificial Sequence: Synthetic oligonucleotide
  Sense strand starting at position 3941 of SEQ ID NO: 1883169
guugaauuauaaucagggu

SEQ ID NO: 2173907 - RNA, 19 nt, Artificial Sequence
  Description of Artificial Sequence: Synthetic oligonucleotide
  Antisense strand to SEQ ID NO: 2173906
acccugauuauaauucaac

SEQ ID NO: 2173908 - RNA, 19 nt, Artificial Sequence
  Description of Artificial Sequence: Synthetic oligonucleotide
  Sense strand starting at position 3961 of SEQ ID NO: 1883169
uagagcaacuucuugagua

SEQ ID NO: 2173909 - RNA, 19 nt, Artificial Sequence
  Description of Artificial Sequence: Synthetic oligonucleotide
  Antisense strand to SEQ ID NO: 2173908
uacucaagaaguugcucua

SEQ ID NO: 2173910 - RNA, 19 nt, Artificial Sequence
  Description of Artificial Sequence: Synthetic oligonucleotide
  Sense strand starting at position 3963 of SEQ ID NO: 1883169
gagcaacuucuugaguaua

SEQ ID NO: 2173911 - RNA, 19 nt, Artificial Sequence
  Description of Artificial Sequence: Synthetic oligonucleotide
  Antisense strand to SEQ ID NO: 2173910
uauacucaagaaguugcuc

SEQ ID NO: 2173912 - RNA, 19 nt, Artificial Sequence
  Description of Artificial Sequence: Synthetic oligonucleotide
  Sense strand starting at position 3965 of SEQ ID NO: 1883169
gcaacuucuugaguauauc

SEQ ID NO: 2173913 - RNA, 19 nt, Artificial Sequence
  Description of Artificial Sequence: Synthetic oligonucleotide
  Antisense strand to SEQ ID NO: 2173912
gauauacucaagaaguugc

SEQ ID NO: 2173914 - RNA, 19 nt, Artificial Sequence
  Description of Artificial Sequence: Synthetic oligonucleotide
  Sense strand starting at position 3968 of SEQ ID NO: 1883169
acuucuugaguauaucauu

SEQ ID NO: 2173915 - RNA, 19 nt, Artificial Sequence
  Description of Artificial Sequence: Synthetic oligonucleotide
  Antisense strand to SEQ ID NO: 2173914
aaugauauacucaagaagu

SEQ ID NO: 2173916 - RNA, 19 nt, Artificial Sequence
  Description of Artificial Sequence: Synthetic oligonucleotide
  Sense strand starting at position 26 of SEQ ID NO: 1883170
uaaugcuccugaguaaugu

SEQ ID NO: 2173917 - RNA, 19 nt, Artificial Sequence
  Description of Artificial Sequence: Synthetic oligonucleotide
  Antisense strand to SEQ ID NO: 2173916
acauuacucaggagcauua

SEQ ID NO: 2173918 - RNA, 19 nt, Artificial Sequence
  Description of Artificial Sequence: Synthetic oligonucleotide
  Sense strand starting at position 27 of SEQ ID NO: 1883170
aaugcuccugaguaaugua

SEQ ID NO: 2173919 - RNA, 19 nt, Artificial Sequence
  Description of Artificial Sequence: Synthetic oligonucleotide
  Antisense strand to SEQ ID NO: 2173918
uacauuacucaggagcauu

SEQ ID NO: 2173920 - RNA, 19 nt, Artificial Sequence
  Description of Artificial Sequence: Synthetic oligonucleotide
  Sense strand starting at position 30 of SEQ ID NO: 1883170
gcuccugaguaauguaaga

SEQ ID NO: 2173921 - RNA, 19 nt, Artificial Sequence
  Description of Artificial Sequence: Synthetic oligonucleotide
  Antisense strand to SEQ ID NO: 2173920
ucuuacauuacucaggagc

SEQ ID NO: 2173922 - RNA, 19 nt, Artificial Sequence
  Description of Artificial Sequence: Synthetic oligonucleotide
  Sense strand starting at position 54 of SEQ ID NO: 1883170
cagucagaaucugguauua

SEQ ID NO: 2173923 - RNA, 19 nt, Artificial Sequence
  Description of Artificial Sequence: Synthetic oligonucleotide
  Antisense strand to SEQ ID NO: 2173922
uaauaccagauucugacug

SEQ ID NO: 2173924 - RNA, 19 nt, Artificial Sequence
  Description of Artificial Sequence: Synthetic oligonucleotide
  Sense strand starting at position 56 of SEQ ID NO: 1883170
gucagaaucugguauuagu

SEQ ID NO: 2173925 - RNA, 19 nt, Artificial Sequence
  Description of Artificial Sequence: Synthetic oligonucleotide
  Antisense strand to SEQ ID NO: 2173924
acuaauaccagauucugac

SEQ ID NO: 2173926 - RNA, 19 nt, Artificial Sequence
  Description of Artificial Sequence: Synthetic oligonucleotide
  Sense strand starting at position 65 of SEQ ID NO: 1883170
ugguauuaguaaguacagu

SEQ ID NO: 2173927 - RNA, 19 nt, Artificial Sequence
  Description of Artificial Sequence: Synthetic oligonucleotide
  Antisense strand to SEQ ID NO: 2173926
acuguacuuacuaauacca

SEQ ID NO: 2173928 - RNA, 19 nt, Artificial Sequence
  Description of Artificial Sequence: Synthetic oligonucleotide
  Sense strand starting at position 235 of SEQ ID NO: 1883170
guacacauauuaggaauua

SEQ ID NO: 2173929 - RNA, 19 nt, Artificial Sequence
  Description of Artificial Sequence: Synthetic oligonucleotide
  Antisense strand to SEQ ID NO: 2173928
uaauuccuaauauguguac

SEQ ID NO: 2173930 - RNA, 19 nt, Artificial Sequence
  Description of Artificial Sequence: Synthetic oligonucleotide
  Sense strand starting at position 314 of SEQ ID NO: 1883170
ccagaagauccuugggcaa

SEQ ID NO: 2173931 - RNA, 19 nt, Artificial Sequence
  Description of Artificial Sequence: Synthetic oligonucleotide
  Antisense strand to SEQ ID NO: 2173930
uugcccaaggaucuucugg

SEQ ID NO: 2173932 - RNA, 19 nt, Artificial Sequence
  Description of Artificial Sequence: Synthetic oligonucleotide
  Sense strand starting at position 316 of SEQ ID NO: 1883170
agaagauccuugggcaaau

SEQ ID NO: 2173933 - RNA, 19 nt, Artificial Sequence
  Description of Artificial Sequence: Synthetic oligonucleotide
  Antisense strand to SEQ ID NO: 2173932
auuugcccaaggaucuucu

SEQ ID NO: 2173934 - RNA, 19 nt, Artificial Sequence
  Description of Artificial Sequence: Synthetic oligonucleotide
  Sense strand starting at position 317 of SEQ ID NO: 1883170
gaagauccuugggcaaaug

SEQ ID NO: 2173935 - RNA, 19 nt, Artificial Sequence
  Description of Artificial Sequence: Synthetic oligonucleotide
  Antisense strand to SEQ ID NO: 2173934
cauuugcccaaggaucuuc

SEQ ID NO: 2173936 - RNA, 19 nt, Artificial Sequence
  Description of Artificial Sequence: Synthetic oligonucleotide
  Sense strand starting at position 437 of SEQ ID NO: 1883170
ucaagcagucucuguagga

SEQ ID NO: 2173937 - RNA, 19 nt, Artificial Sequence
  Description of Artificial Sequence: Synthetic oligonucleotide
  Antisense strand to SEQ ID NO: 2173936
uccuacagagacugcuuga

SEQ ID NO: 2173938 - RNA, 19 nt, Artificial Sequence
  Description of Artificial Sequence: Synthetic oligonucleotide
  Sense strand starting at position 441 of SEQ ID NO: 1883170
gcagucucuguaggagaca

SEQ ID NO: 2173939 - RNA, 19 nt, Artificial Sequence
  Description of Artificial Sequence: Synthetic oligonucleotide
  Antisense strand to SEQ ID NO: 2173938
ugucuccuacagagacugc

SEQ ID NO: 2173940 - RNA, 19 nt, Artificial Sequence
  Description of Artificial Sequence: Synthetic oligonucleotide
  Sense strand starting at position 487 of SEQ ID NO: 1883170
cccuuauguuaugggcaca

SEQ ID NO: 2173941 - RNA, 19 nt, Artificial Sequence
  Description of Artificial Sequence: Synthetic oligonucleotide
  Antisense strand to SEQ ID NO: 2173940
ugugcccauaacauaaggg

SEQ ID NO: 2173942 - RNA, 19 nt, Artificial Sequence
  Description of Artificial Sequence: Synthetic oligonucleotide
  Sense strand starting at position 583 of SEQ ID NO: 1883170
guuggagugcuuugagaca

SEQ ID NO: 2173943 - RNA, 19 nt, Artificial Sequence
  Description of Artificial Sequence: Synthetic oligonucleotide
  Antisense strand to SEQ ID NO: 2173942
ugucucaaagcacuccaac

SEQ ID NO: 2173944 - RNA, 19 nt, Artificial Sequence
  Description of Artificial Sequence: Synthetic oligonucleotide
  Sense strand starting at position 609 of SEQ ID NO: 1883170
uuugauaaagcuugaauga

SEQ ID NO: 2173945 - RNA, 19 nt, Artificial Sequence
  Description of Artificial Sequence: Synthetic oligonucleotide
  Antisense strand to SEQ ID NO: 2173944
ucauucaagcuuuaucaaa

SEQ ID NO: 2173946 - RNA, 19 nt, Artificial Sequence
  Description of Artificial Sequence: Synthetic oligonucleotide
  Sense strand starting at position 619 of SEQ ID NO: 1883170
cuugaaugauuacagacaa

SEQ ID NO: 2173947 - RNA, 19 nt, Artificial Sequence
  Description of Artificial Sequence: Synthetic oligonucleotide
  Antisense strand to SEQ ID NO: 2173946
uugucuguaaucauucaag

SEQ ID NO: 2173948 - RNA, 19 nt, Artificial Sequence
  Description of Artificial Sequence: Synthetic oligonucleotide
  Sense strand starting at position 633 of SEQ ID NO: 1883170
gacaaaugguaguggacua

SEQ ID NO: 2173949 - RNA, 19 nt, Artificial Sequence
  Description of Artificial Sequence: Synthetic oligonucleotide
  Antisense strand to SEQ ID NO: 2173948
uaguccacuaccauuuguc

SEQ ID NO: 2173950 - RNA, 19 nt, Artificial Sequence
  Description of Artificial Sequence: Synthetic oligonucleotide
  Sense strand starting at position 668 of SEQ ID NO: 1883170
agguuuggccucugcagua

SEQ ID NO: 2173951 - RNA, 19 nt, Artificial Sequence
  Description of Artificial Sequence: Synthetic oligonucleotide
  Antisense strand to SEQ ID NO: 2173950
uacugcagaggccaaaccu

SEQ ID NO: 2173952 - RNA, 19 nt, Artificial Sequence
  Description of Artificial Sequence: Synthetic oligonucleotide
  Sense strand starting at position 673 of SEQ ID NO: 1883170
uggccucugcaguaaagau

SEQ ID NO: 2173953 - RNA, 19 nt, Artificial Sequence
  Description of Artificial Sequence: Synthetic oligonucleotide
  Antisense strand to SEQ ID NO: 2173952
aucuuuacugcagaggcca

SEQ ID NO: 2173954 - RNA, 19 nt, Artificial Sequence
  Description of Artificial Sequence: Synthetic oligonucleotide
  Sense strand starting at position 715 of SEQ ID NO: 1883170
agaagaaauugaggaaaga

SEQ ID NO: 2173955 - RNA, 19 nt, Artificial Sequence
  Description of Artificial Sequence: Synthetic oligonucleotide
  Antisense strand to SEQ ID NO: 2173954
ucuuuccucaauuucuucu

SEQ ID NO: 2173956 - RNA, 19 nt, Artificial Sequence
  Description of Artificial Sequence: Synthetic oligonucleotide
  Sense strand starting at position 734 of SEQ ID NO: 1883170
aaacaaauuggcugaguuc

SEQ ID NO: 2173957 - RNA, 19 nt, Artificial Sequence
  Description of Artificial Sequence: Synthetic oligonucleotide
  Antisense strand to SEQ ID NO: 2173956
gaacucagccaauuuguuu

SEQ ID NO: 2173958 - RNA, 19 nt, Artificial Sequence
  Description of Artificial Sequence: Synthetic oligonucleotide
  Sense strand starting at position 887 of SEQ ID NO: 1883170
aaagaauauuguggaaaga

SEQ ID NO: 2173959 - RNA, 19 nt, Artificial Sequence
  Description of Artificial Sequence: Synthetic oligonucleotide
  Antisense strand to SEQ ID NO: 2173958
ucuuuccacaauauucuuu

SEQ ID NO: 2173960 - RNA, 19 nt, Artificial Sequence
  Description of Artificial Sequence: Synthetic oligonucleotide
  Sense strand starting at position 940 of SEQ ID NO: 1883170
ggucucucacucuaccaua

SEQ ID NO: 2173961 - RNA, 19 nt, Artificial Sequence
  Description of Artificial Sequence: Synthetic oligonucleotide
  Antisense strand to SEQ ID NO: 2173960
uaugguagagugagagacc

SEQ ID NO: 2173962 - RNA, 19 nt, Artificial Sequence
  Description of Artificial Sequence: Synthetic oligonucleotide
  Sense strand starting at position 960 of SEQ ID NO: 1883170
accuauacgucacagcauu

SEQ ID NO: 2173963 - RNA, 19 nt, Artificial Sequence
  Description of Artificial Sequence: Synthetic oligonucleotide
  Antisense strand to SEQ ID NO: 2173962
aaugcugugacguauaggu

SEQ ID NO: 2173964 - RNA, 19 nt, Artificial Sequence
  Description of Artificial Sequence: Synthetic oligonucleotide
  Sense strand starting at position 966 of SEQ ID NO: 1883170
acgucacagcauuauuaag

SEQ ID NO: 2173965 - RNA, 19 nt, Artificial Sequence
  Description of Artificial Sequence: Synthetic oligonucleotide
  Antisense strand to SEQ ID NO: 2173964
cuuaauaaugcugugacgu

SEQ ID NO: 2173966 - RNA, 19 nt, Artificial Sequence
  Description of Artificial Sequence: Synthetic oligonucleotide
  Sense strand starting at position 1461 of SEQ ID NO: 1883170
ucuccauguuggucagcua

SEQ ID NO: 2173967 - RNA, 19 nt, Artificial Sequence
  Description of Artificial Sequence: Synthetic oligonucleotide
  Antisense strand to SEQ ID NO: 2173966
uagcugaccaacauggaga

SEQ ID NO: 2173968 - RNA, 19 nt, Artificial Sequence
  Description of Artificial Sequence: Synthetic oligonucleotide
  Sense strand starting at position 1942 of SEQ ID NO: 1883170
gagaguauaucacgcaccu

SEQ ID NO: 2173969 - RNA, 19 nt, Artificial Sequence
  Description of Artificial Sequence: Synthetic oligonucleotide
  Antisense strand to SEQ ID NO: 2173968
aggugcgugauauacucuc

SEQ ID NO: 2173970 - RNA, 19 nt, Artificial Sequence
  Description of Artificial Sequence: Synthetic oligonucleotide
  Sense strand starting at position 3265 of SEQ ID NO: 1883170
agcggauaucuuggcagaa

SEQ ID NO: 2173971 - RNA, 19 nt, Artificial Sequence
  Description of Artificial Sequence: Synthetic oligonucleotide
  Antisense strand to SEQ ID NO: 2173970
uucugccaagauauccgcu

SEQ ID NO: 2173972 - RNA, 19 nt, Artificial Sequence
  Description of Artificial Sequence: Synthetic oligonucleotide
  Sense strand starting at position 3266 of SEQ ID NO: 1883170
gcggauaucuuggcagaaa

SEQ ID NO: 2173973 - RNA, 19 nt, Artificial Sequence
  Description of Artificial Sequence: Synthetic oligonucleotide
  Antisense strand to SEQ ID NO: 2173972
uuucugccaagauauccgc

SEQ ID NO: 2173974 - RNA, 19 nt, Artificial Sequence
  Description of Artificial Sequence: Synthetic oligonucleotide
  Sense strand starting at position 3267 of SEQ ID NO: 1883170
cggauaucuuggcagaaac

SEQ ID NO: 2173975 - RNA, 19 nt, Artificial Sequence
  Description of Artificial Sequence: Synthetic oligonucleotide
  Antisense strand to SEQ ID NO: 2173974
guuucugccaagauauccg

SEQ ID NO: 2173976 - RNA, 19 nt, Artificial Sequence
  Description of Artificial Sequence: Synthetic oligonucleotide
  Sense strand starting at position 509 of SEQ ID NO: 1883171
ucaaauaaugcauggacuu

SEQ ID NO: 2173977 - RNA, 19 nt, Artificial Sequence
  Description of Artificial Sequence: Synthetic oligonucleotide
  Antisense strand to SEQ ID NO: 2173976
aaguccaugcauuauuuga

SEQ ID NO: 2173978 - RNA, 19 nt, Artificial Sequence
  Description of Artificial Sequence: Synthetic oligonucleotide
  Sense strand starting at position 601 of SEQ ID NO: 1883171
aagugugauggaugacuau

SEQ ID NO: 2173979 - RNA, 19 nt, Artificial Sequence
  Description of Artificial Sequence: Synthetic oligonucleotide
  Antisense strand to SEQ ID NO: 2173978
auagucauccaucacacuu

SEQ ID NO: 2173980 - RNA, 19 nt, Artificial Sequence
  Description of Artificial Sequence: Synthetic oligonucleotide
  Sense strand starting at position 664 of SEQ ID NO: 1883171
caggaaagauuuggaaucu

SEQ ID NO: 2173981 - RNA, 19 nt, Artificial Sequence
  Description of Artificial Sequence: Synthetic oligonucleotide
  Antisense strand to SEQ ID NO: 2173980
agauuccaaaucuuuccug

SEQ ID NO: 2173982 - RNA, 19 nt, Artificial Sequence
  Description of Artificial Sequence: Synthetic oligonucleotide
  Sense strand starting at position 709 of SEQ ID NO: 1883171
gugucacuucugggaugga

SEQ ID NO: 2173983 - RNA, 19 nt, Artificial Sequence
  Description of Artificial Sequence: Synthetic oligonucleotide
  Antisense strand to SEQ ID NO: 2173982
uccaucccagaagugacac

SEQ ID NO: 2173984 - RNA, 19 nt, Artificial Sequence
  Description of Artificial Sequence: Synthetic oligonucleotide
  Sense strand starting at position 722 of SEQ ID NO: 1883171
gauggagcccucgagugaa

SEQ ID NO: 2173985 - RNA, 19 nt, Artificial Sequence
  Description of Artificial Sequence: Synthetic oligonucleotide
  Antisense strand to SEQ ID NO: 2173984
uucacucgagggcuccauc

SEQ ID NO: 2173986 - RNA, 19 nt, Artificial Sequence
  Description of Artificial Sequence: Synthetic oligonucleotide
  Sense strand starting at position 741 of SEQ ID NO: 1883171
uccagacguuuccuccaaa

SEQ ID NO: 2173987 - RNA, 19 nt, Artificial Sequence
  Description of Artificial Sequence: Synthetic oligonucleotide
  Antisense strand to SEQ ID NO: 2173986
uuuggaggaaacgucugga

SEQ ID NO: 2173988 - RNA, 19 nt, Artificial Sequence
  Description of Artificial Sequence: Synthetic oligonucleotide
  Sense strand starting at position 742 of SEQ ID NO: 1883171
ccagacguuuccuccaaac

SEQ ID NO: 2173989 - RNA, 19 nt, Artificial Sequence
  Description of Artificial Sequence: Synthetic oligonucleotide
  Antisense strand to SEQ ID NO: 2173988
guuuggaggaaacgucugg

SEQ ID NO: 2173990 - RNA, 19 nt, Artificial Sequence
  Description of Artificial Sequence: Synthetic oligonucleotide
  Sense strand starting at position 744 of SEQ ID NO: 1883171
agacguuuccuccaaacuc

SEQ ID NO: 2173991 - RNA, 19 nt, Artificial Sequence
  Description of Artificial Sequence: Synthetic oligonucleotide
  Antisense strand to SEQ ID NO: 2173990
gaguuuggaggaaacgucu

SEQ ID NO: 2173992 - RNA, 19 nt, Artificial Sequence
  Description of Artificial Sequence: Synthetic oligonucleotide
  Sense strand starting at position 821 of SEQ ID NO: 1883171
ugaggaguuuccuuaagca

SEQ ID NO: 2173993 - RNA, 19 nt, Artificial Sequence
  Description of Artificial Sequence: Synthetic oligonucleotide
  Antisense strand to SEQ ID NO: 2173992
ugcuuaaggaaacuccuca

SEQ ID NO: 2173994 - RNA, 19 nt, Artificial Sequence
  Description of Artificial Sequence: Synthetic oligonucleotide
  Sense strand starting at position 825 of SEQ ID NO: 1883171
gaguuuccuuaagcaggau

SEQ ID NO: 2173995 - RNA, 19 nt, Artificial Sequence
  Description of Artificial Sequence: Synthetic oligonucleotide
  Antisense strand to SEQ ID NO: 2173994
auccugcuuaaggaaacuc

SEQ ID NO: 2173996 - RNA, 19 nt, Artificial Sequence
  Description of Artificial Sequence: Synthetic oligonucleotide
  Sense strand starting at position 959 of SEQ ID NO: 1883171
agagcuggaugacucaaua

SEQ ID NO: 2173997 - RNA, 19 nt, Artificial Sequence
  Description of Artificial Sequence: Synthetic oligonucleotide
  Antisense strand to SEQ ID NO: 2173996
uauugagucauccagcucu

SEQ ID NO: 2173998 - RNA, 19 nt, Artificial Sequence
  Description of Artificial Sequence: Synthetic oligonucleotide
  Sense strand starting at position 971 of SEQ ID NO: 1883171
cucaauagguagcugaaau

SEQ ID NO: 2173999 - RNA, 19 nt, Artificial Sequence
  Description of Artificial Sequence: Synthetic oligonucleotide
  Antisense strand to SEQ ID NO: 2173998
auuucagcuaccuauugag

SEQ ID NO: 2174000 - RNA, 19 nt, Artificial Sequence
  Description of Artificial Sequence: Synthetic oligonucleotide
  Sense strand starting at position 1190 of SEQ ID NO: 1883171
ggcagaagggucuguaaag

SEQ ID NO: 2174001 - RNA, 19 nt, Artificial Sequence
  Description of Artificial Sequence: Synthetic oligonucleotide
  Antisense strand to SEQ ID NO: 2174000
cuuuacagacccuucugcc

SEQ ID NO: 2174002 - RNA, 19 nt, Artificial Sequence
  Description of Artificial Sequence: Synthetic oligonucleotide
  Sense strand starting at position 1199 of SEQ ID NO: 1883171
gucuguaaagccgaacuua

SEQ ID NO: 2174003 - RNA, 19 nt, Artificial Sequence
  Description of Artificial Sequence: Synthetic oligonucleotide
  Antisense strand to SEQ ID NO: 2174002
uaaguucggcuuuacagac

SEQ ID NO: 2174004 - RNA, 19 nt, Artificial Sequence
  Description of Artificial Sequence: Synthetic oligonucleotide
  Sense strand starting at position 2032 of SEQ ID NO: 1883171
ccugaaucugaucgucaca

SEQ ID NO: 2174005 - RNA, 19 nt, Artificial Sequence
  Description of Artificial Sequence: Synthetic oligonucleotide
  Antisense strand to SEQ ID NO: 2174004
ugugacgaucagauucagg

SEQ ID NO: 2174006 - RNA, 19 nt, Artificial Sequence
  Description of Artificial Sequence: Synthetic oligonucleotide
  Sense strand starting at position 2035 of SEQ ID NO: 1883171
gaaucugaucgucacaggu

SEQ ID NO: 2174007 - RNA, 19 nt, Artificial Sequence
  Description of Artificial Sequence: Synthetic oligonucleotide
  Antisense strand to SEQ ID NO: 2174006
accugugacgaucagauuc

SEQ ID NO: 2174008 - RNA, 19 nt, Artificial Sequence
  Description of Artificial Sequence: Synthetic oligonucleotide
  Sense strand starting at position 2114 of SEQ ID NO: 1883171
cgcuaaaggaagugacaua

SEQ ID NO: 2174009 - RNA, 19 nt, Artificial Sequence
  Description of Artificial Sequence: Synthetic oligonucleotide
  Antisense strand to SEQ ID NO: 2174008
uaugucacuuccuuuagcg

SEQ ID NO: 2174010 - RNA, 19 nt, Artificial Sequence
  Description of Artificial Sequence: Synthetic oligonucleotide
  Sense strand starting at position 2121 of SEQ ID NO: 1883171
ggaagugacauaugcaaau

SEQ ID NO: 2174011 - RNA, 19 nt, Artificial Sequence
  Description of Artificial Sequence: Synthetic oligonucleotide
  Antisense strand to SEQ ID NO: 2174010
auuugcauaugucacuucc

SEQ ID NO: 2174012 - RNA, 19 nt, Artificial Sequence
  Description of Artificial Sequence: Synthetic oligonucleotide
  Sense strand starting at position 2167 of SEQ ID NO: 1883171
gacugacagcuuuaucaug

SEQ ID NO: 2174013 - RNA, 19 nt, Artificial Sequence
  Description of Artificial Sequence: Synthetic oligonucleotide
  Antisense strand to SEQ ID NO: 2174012
caugauaaagcugucaguc

SEQ ID NO: 2174014 - RNA, 19 nt, Artificial Sequence
  Description of Artificial Sequence: Synthetic oligonucleotide
  Sense strand starting at position 2216 of SEQ ID NO: 1883171
cagaaaggucuggagucuu

SEQ ID NO: 2174015 - RNA, 19 nt, Artificial Sequence
  Description of Artificial Sequence: Synthetic oligonucleotide
  Antisense strand to SEQ ID NO: 2174014
aagacuccagaccuuucug

SEQ ID NO: 2174016 - RNA, 19 nt, Artificial Sequence
  Description of Artificial Sequence: Synthetic oligonucleotide
  Sense strand starting at position 2267 of SEQ ID NO: 1883171
aggcaugacuucucaugga

SEQ ID NO: 2174017 - RNA, 19 nt, Artificial Sequence
  Description of Artificial Sequence: Synthetic oligonucleotide
  Antisense strand to SEQ ID NO: 2174016
uccaugagaagucaugccu

SEQ ID NO: 2174018 - RNA, 19 nt, Artificial Sequence
  Description of Artificial Sequence: Synthetic oligonucleotide
  Sense strand starting at position 2271 of SEQ ID NO: 1883171
augacuucucauggaaauu

SEQ ID NO: 2174019 - RNA, 19 nt, Artificial Sequence
  Description of Artificial Sequence: Synthetic oligonucleotide
  Antisense strand to SEQ ID NO: 2174018
aauuuccaugagaagucau

SEQ ID NO: 2174020 - RNA, 19 nt, Artificial Sequence
  Description of Artificial Sequence: Synthetic oligonucleotide
  Sense strand starting at position 2280 of SEQ ID NO: 1883171
cauggaaauucgguuugac

SEQ ID NO: 2174021 - RNA, 19 nt, Artificial Sequence
  Description of Artificial Sequence: Synthetic oligonucleotide
  Antisense strand to SEQ ID NO: 2174020
gucaaaccgaauuuccaug

SEQ ID NO: 2174022 - RNA, 19 nt, Artificial Sequence
  Description of Artificial Sequence: Synthetic oligonucleotide
  Sense strand starting at position 2283 of SEQ ID NO: 1883171
ggaaauucgguuugacuuu

SEQ ID NO: 2174023 - RNA, 19 nt, Artificial Sequence
  Description of Artificial Sequence: Synthetic oligonucleotide
  Antisense strand to SEQ ID NO: 2174022
aaagucaaaccgaauuucc

SEQ ID NO: 2174024 - RNA, 19 nt, Artificial Sequence
  Description of Artificial Sequence: Synthetic oligonucleotide
  Sense strand starting at position 2481 of SEQ ID NO: 1883171
gccagauuccagucgugcu

SEQ ID NO: 2174025 - RNA, 19 nt, Artificial Sequence
  Description of Artificial Sequence: Synthetic oligonucleotide
  Antisense strand to SEQ ID NO: 2174024
agcacgacuggaaucuggc

SEQ ID NO: 2174026 - RNA, 19 nt, Artificial Sequence
  Description of Artificial Sequence: Synthetic oligonucleotide
  Sense strand starting at position 2580 of SEQ ID NO: 1883171
ugaugacggugaucuccaa

SEQ ID NO: 2174027 - RNA, 19 nt, Artificial Sequence
  Description of Artificial Sequence: Synthetic oligonucleotide
  Antisense strand to SEQ ID NO: 2174026
uuggagaucaccgucauca

SEQ ID NO: 2174028 - RNA, 19 nt, Artificial Sequence
  Description of Artificial Sequence: Synthetic oligonucleotide
  Sense strand starting at position 2584 of SEQ ID NO: 1883171
gacggugaucuccaagcua

SEQ ID NO: 2174029 - RNA, 19 nt, Artificial Sequence
  Description of Artificial Sequence: Synthetic oligonucleotide
  Antisense strand to SEQ ID NO: 2174028
uagcuuggagaucaccguc

SEQ ID NO: 2174030 - RNA, 19 nt, Artificial Sequence
  Description of Artificial Sequence: Synthetic oligonucleotide
  Sense strand starting at position 2601 of SEQ ID NO: 1883171
uauuguucugaagggauca

SEQ ID NO: 2174031 - RNA, 19 nt, Artificial Sequence
  Description of Artificial Sequence: Synthetic oligonucleotide
  Antisense strand to SEQ ID NO: 2174030
ugaucccuucagaacaaua

SEQ ID NO: 2174032 - RNA, 19 nt, Artificial Sequence
  Description of Artificial Sequence: Synthetic oligonucleotide
  Sense strand starting at position 2602 of SEQ ID NO: 1883171
auuguucugaagggaucau

SEQ ID NO: 2174033 - RNA, 19 nt, Artificial Sequence
  Description of Artificial Sequence: Synthetic oligonucleotide
  Antisense strand to SEQ ID NO: 2174032
augaucccuucagaacaau

SEQ ID NO: 2174034 - RNA, 19 nt, Artificial Sequence
  Description of Artificial Sequence: Synthetic oligonucleotide
  Sense strand starting at position 2780 of SEQ ID NO: 1883171
uugucuauugcgccucuaa

SEQ ID NO: 2174035 - RNA, 19 nt, Artificial Sequence
  Description of Artificial Sequence: Synthetic oligonucleotide
  Antisense strand to SEQ ID NO: 2174034
uuagaggcgcaauagacaa

SEQ ID NO: 2174036 - RNA, 19 nt, Artificial Sequence
  Description of Artificial Sequence: Synthetic oligonucleotide
  Sense strand starting at position 2781 of SEQ ID NO: 1883171
ugucuauugcgccucuaag

SEQ ID NO: 2174037 - RNA, 19 nt, Artificial Sequence
  Description of Artificial Sequence: Synthetic oligonucleotide
  Antisense strand to SEQ ID NO: 2174036
cuuagaggcgcaauagaca

SEQ ID NO: 2174038 - RNA, 19 nt, Artificial Sequence
  Description of Artificial Sequence: Synthetic oligonucleotide
  Sense strand starting at position 2832 of SEQ ID NO: 1883171
cucacuaucccugacuugu

SEQ ID NO: 2174039 - RNA, 19 nt, Artificial Sequence
  Description of Artificial Sequence: Synthetic oligonucleotide
  Antisense strand to SEQ ID NO: 2174038
acaagucagggauagugag

SEQ ID NO: 2174040 - RNA, 19 nt, Artificial Sequence
  Description of Artificial Sequence: Synthetic oligonucleotide
  Sense strand starting at position 2838 of SEQ ID NO: 1883171
aucccugacuuguugaagu

SEQ ID NO: 2174041 - RNA, 19 nt, Artificial Sequence
  Description of Artificial Sequence: Synthetic oligonucleotide
  Antisense strand to SEQ ID NO: 2174040
acuucaacaagucagggau

SEQ ID NO: 2174042 - RNA, 19 nt, Artificial Sequence
  Description of Artificial Sequence: Synthetic oligonucleotide
  Sense strand starting at position 2914 of SEQ ID NO: 1883171
auccuuuggccacaaugau

SEQ ID NO: 2174043 - RNA, 19 nt, Artificial Sequence
  Description of Artificial Sequence: Synthetic oligonucleotide
  Antisense strand to SEQ ID NO: 2174042
aucauuguggccaaaggau

SEQ ID NO: 2174044 - RNA, 19 nt, Artificial Sequence
  Description of Artificial Sequence: Synthetic oligonucleotide
  Sense strand starting at position 3008 of SEQ ID NO: 1883171
guuagucacagacagguau

SEQ ID NO: 2174045 - RNA, 19 nt, Artificial Sequence
  Description of Artificial Sequence: Synthetic oligonucleotide
  Antisense strand to SEQ ID NO: 2174044
auaccugucugugacuaac

SEQ ID NO: 2174046 - RNA, 19 nt, Artificial Sequence
  Description of Artificial Sequence: Synthetic oligonucleotide
  Sense strand starting at position 3479 of SEQ ID NO: 1883171
uuacguguuguacaaucaa

SEQ ID NO: 2174047 - RNA, 19 nt, Artificial Sequence
  Description of Artificial Sequence: Synthetic oligonucleotide
  Antisense strand to SEQ ID NO: 2174046
uugauuguacaacacguaa

SEQ ID NO: 2174048 - RNA, 19 nt, Artificial Sequence
  Description of Artificial Sequence: Synthetic oligonucleotide
  Sense strand starting at position 3625 of SEQ ID NO: 1883171
guaucaggugucuagaaag

SEQ ID NO: 2174049 - RNA, 19 nt, Artificial Sequence
  Description of Artificial Sequence: Synthetic oligonucleotide
  Antisense strand to SEQ ID NO: 2174048
cuuucuagacaccugauac

SEQ ID NO: 2174050 - RNA, 19 nt, Artificial Sequence
  Description of Artificial Sequence: Synthetic oligonucleotide
  Sense strand starting at position 3713 of SEQ ID NO: 1883171
ucucuugacuaccuggaau

SEQ ID NO: 2174051 - RNA, 19 nt, Artificial Sequence
  Description of Artificial Sequence: Synthetic oligonucleotide
  Antisense strand to SEQ ID NO: 2174050
auuccagguagucaagaga

SEQ ID NO: 2174052 - RNA, 19 nt, Artificial Sequence
  Description of Artificial Sequence: Synthetic oligonucleotide
  Sense strand starting at position 3715 of SEQ ID NO: 1883171
ucuugacuaccuggaauau

SEQ ID NO: 2174053 - RNA, 19 nt, Artificial Sequence
  Description of Artificial Sequence: Synthetic oligonucleotide
  Antisense strand to SEQ ID NO: 2174052
auauuccagguagucaaga

SEQ ID NO: 2174054 - RNA, 19 nt, Artificial Sequence
  Description of Artificial Sequence: Synthetic oligonucleotide
  Sense strand starting at position 3727 of SEQ ID NO: 1883171
ggaauauccuaggcaacca

SEQ ID NO: 2174055 - RNA, 19 nt, Artificial Sequence
  Description of Artificial Sequence: Synthetic oligonucleotide
  Antisense strand to SEQ ID NO: 2174054
ugguugccuaggauauucc

SEQ ID NO: 2174056 - RNA, 19 nt, Artificial Sequence
  Description of Artificial Sequence: Synthetic oligonucleotide
  Sense strand starting at position 280 of SEQ ID NO: 1883172
auguuaacacaucgauucu

SEQ ID NO: 2174057 - RNA, 19 nt, Artificial Sequence
  Description of Artificial Sequence: Synthetic oligonucleotide
  Antisense strand to SEQ ID NO: 2174056
agaaucgauguguuaacau

SEQ ID NO: 2174058 - RNA, 19 nt, Artificial Sequence
  Description of Artificial Sequence: Synthetic oligonucleotide
  Sense strand starting at position 291 of SEQ ID NO: 1883172
ucgauucuuccugaauuaa

SEQ ID NO: 2174059 - RNA, 19 nt, Artificial Sequence
  Description of Artificial Sequence: Synthetic oligonucleotide
  Antisense strand to SEQ ID NO: 2174058
uuaauucaggaagaaucga

SEQ ID NO: 2174060 - RNA, 19 nt, Artificial Sequence
  Description of Artificial Sequence: Synthetic oligonucleotide
  Sense strand starting at position 676 of SEQ ID NO: 1883172
uuugaaaugcaucauaguc

SEQ ID NO: 2174061 - RNA, 19 nt, Artificial Sequence
  Description of Artificial Sequence: Synthetic oligonucleotide
  Antisense strand to SEQ ID NO: 2174060
gacuaugaugcauuucaaa

SEQ ID NO: 2174062 - RNA, 19 nt, Artificial Sequence
  Description of Artificial Sequence: Synthetic oligonucleotide
  Sense strand starting at position 754 of SEQ ID NO: 1883172
uaacccuacguuuggcaaa

SEQ ID NO: 2174063 - RNA, 19 nt, Artificial Sequence
  Description of Artificial Sequence: Synthetic oligonucleotide
  Antisense strand to SEQ ID NO: 2174062
uuugccaaacguaggguua

SEQ ID NO: 2174064 - RNA, 19 nt, Artificial Sequence
  Description of Artificial Sequence: Synthetic oligonucleotide
  Sense strand starting at position 1202 of SEQ ID NO: 1883172
gugguagaucugcaauucu

SEQ ID NO: 2174065 - RNA, 19 nt, Artificial Sequence
  Description of Artificial Sequence: Synthetic oligonucleotide
  Antisense strand to SEQ ID NO: 2174064
agaauugcagaucuaccac

SEQ ID NO: 2174066 - RNA, 19 nt, Artificial Sequence
  Description of Artificial Sequence: Synthetic oligonucleotide
  Sense strand starting at position 1387 of SEQ ID NO: 1883172
agaauuguacauggacguu

SEQ ID NO: 2174067 - RNA, 19 nt, Artificial Sequence
  Description of Artificial Sequence: Synthetic oligonucleotide
  Antisense strand to SEQ ID NO: 2174066
aacguccauguacaauucu

SEQ ID NO: 2174068 - RNA, 19 nt, Artificial Sequence
  Description of Artificial Sequence: Synthetic oligonucleotide
  Sense strand starting at position 1601 of SEQ ID NO: 1883172
guuguaguugaguucuguu

SEQ ID NO: 2174069 - RNA, 19 nt, Artificial Sequence
  Description of Artificial Sequence: Synthetic oligonucleotide
  Antisense strand to SEQ ID NO: 2174068
aacagaacucaacuacaac

SEQ ID NO: 2174070 - RNA, 19 nt, Artificial Sequence
  Description of Artificial Sequence: Synthetic oligonucleotide
  Sense strand starting at position 1620 of SEQ ID NO: 1883172
gcuucuagaugccuacaca

SEQ ID NO: 2174071 - RNA, 19 nt, Artificial Sequence
  Description of Artificial Sequence: Synthetic oligonucleotide
  Antisense strand to SEQ ID NO: 2174070
uguguaggcaucuagaagc

SEQ ID NO: 2174072 - RNA, 19 nt, Artificial Sequence
  Description of Artificial Sequence: Synthetic oligonucleotide
  Sense strand starting at position 1695 of SEQ ID NO: 1883172
cugacauggcuccaauugu

SEQ ID NO: 2174073 - RNA, 19 nt, Artificial Sequence
  Description of Artificial Sequence: Synthetic oligonucleotide
  Antisense strand to SEQ ID NO: 2174072
acaauuggagccaugucag

SEQ ID NO: 2174074 - RNA, 19 nt, Artificial Sequence
  Description of Artificial Sequence: Synthetic oligonucleotide
  Sense strand starting at position 1872 of SEQ ID NO: 1883172
uuuguuauacuaggagaag

SEQ ID NO: 2174075 - RNA, 19 nt, Artificial Sequence
  Description of Artificial Sequence: Synthetic oligonucleotide
  Antisense strand to SEQ ID NO: 2174074
cuucuccuaguauaacaaa

SEQ ID NO: 2174076 - RNA, 19 nt, Artificial Sequence
  Description of Artificial Sequence: Synthetic oligonucleotide
  Sense strand starting at position 1881 of SEQ ID NO: 1883172
cuaggagaagaguguuaau

SEQ ID NO: 2174077 - RNA, 19 nt, Artificial Sequence
  Description of Artificial Sequence: Synthetic oligonucleotide
  Antisense strand to SEQ ID NO: 2174076
auuaacacucuucuccuag

SEQ ID NO: 2174078 - RNA, 19 nt, Artificial Sequence
  Description of Artificial Sequence: Synthetic oligonucleotide
  Sense strand starting at position 1968 of SEQ ID NO: 1883172
gaaucugaauuagaggaaa

SEQ ID NO: 2174079 - RNA, 19 nt, Artificial Sequence
  Description of Artificial Sequence: Synthetic oligonucleotide
  Antisense strand to SEQ ID NO: 2174078
uuuccucuaauucagauuc

SEQ ID NO: 2174080 - RNA, 19 nt, Artificial Sequence
  Description of Artificial Sequence: Synthetic oligonucleotide
  Sense strand starting at position 1991 of SEQ ID NO: 1883172
uugcuuacuucugugaaua

SEQ ID NO: 2174081 - RNA, 19 nt, Artificial Sequence
  Description of Artificial Sequence: Synthetic oligonucleotide
  Antisense strand to SEQ ID NO: 2174080
uauucacagaaguaagcaa

SEQ ID NO: 2174082 - RNA, 19 nt, Artificial Sequence
  Description of Artificial Sequence: Synthetic oligonucleotide
  Sense strand starting at position 1992 of SEQ ID NO: 1883172
ugcuuacuucugugaauaa

SEQ ID NO: 2174083 - RNA, 19 nt, Artificial Sequence
  Description of Artificial Sequence: Synthetic oligonucleotide
  Antisense strand to SEQ ID NO: 2174082
uuauucacagaaguaagca

SEQ ID NO: 2174084 - RNA, 19 nt, Artificial Sequence
  Description of Artificial Sequence: Synthetic oligonucleotide
  Sense strand starting at position 2293 of SEQ ID NO: 1883172
agagcacaugcauaucuua

SEQ ID NO: 2174085 - RNA, 19 nt, Artificial Sequence
  Description of Artificial Sequence: Synthetic oligonucleotide
  Antisense strand to SEQ ID NO: 2174084
uaagauaugcaugugcucu

SEQ ID NO: 2174086 - RNA, 19 nt, Artificial Sequence
  Description of Artificial Sequence: Synthetic oligonucleotide
  Sense strand starting at position 2318 of SEQ ID NO: 1883172
ucuagaugaucccaauuug

SEQ ID NO: 2174087 - RNA, 19 nt, Artificial Sequence
  Description of Artificial Sequence: Synthetic oligonucleotide
  Antisense strand to SEQ ID NO: 2174086
caaauugggaucaucuaga

SEQ ID NO: 2174088 - RNA, 19 nt, Artificial Sequence
  Description of Artificial Sequence: Synthetic oligonucleotide
  Sense strand starting at position 2349 of SEQ ID NO: 1883172
gcuuguguucauguguaau

SEQ ID NO: 2174089 - RNA, 19 nt, Artificial Sequence
  Description of Artificial Sequence: Synthetic oligonucleotide
  Antisense strand to SEQ ID NO: 2174088
auuacacaugaacacaagc

SEQ ID NO: 2174090 - RNA, 19 nt, Artificial Sequence
  Description of Artificial Sequence: Synthetic oligonucleotide
  Sense strand starting at position 2359 of SEQ ID NO: 1883172
auguguaauuauguaccau

SEQ ID NO: 2174091 - RNA, 19 nt, Artificial Sequence
  Description of Artificial Sequence: Synthetic oligonucleotide
  Antisense strand to SEQ ID NO: 2174090
augguacauaauuacacau

SEQ ID NO: 2174092 - RNA, 19 nt, Artificial Sequence
  Description of Artificial Sequence: Synthetic oligonucleotide
  Sense strand starting at position 2502 of SEQ ID NO: 1883172
ccauguugcagaugagaau

SEQ ID NO: 2174093 - RNA, 19 nt, Artificial Sequence
  Description of Artificial Sequence: Synthetic oligonucleotide
  Antisense strand to SEQ ID NO: 2174092
auucucaucugcaacaugg

SEQ ID NO: 2174094 - RNA, 19 nt, Artificial Sequence
  Description of Artificial Sequence: Synthetic oligonucleotide
  Sense strand starting at position 2503 of SEQ ID NO: 1883172
cauguugcagaugagaauu

SEQ ID NO: 2174095 - RNA, 19 nt, Artificial Sequence
  Description of Artificial Sequence: Synthetic oligonucleotide
  Antisense strand to SEQ ID NO: 2174094
aauucucaucugcaacaug

SEQ ID NO: 2174096 - RNA, 19 nt, Artificial Sequence
  Description of Artificial Sequence: Synthetic oligonucleotide
  Sense strand starting at position 2577 of SEQ ID NO: 1883172
agagcaggauuugaacuaa

SEQ ID NO: 2174097 - RNA, 19 nt, Artificial Sequence
  Description of Artificial Sequence: Synthetic oligonucleotide
  Antisense strand to SEQ ID NO: 2174096
uuaguucaaauccugcucu

SEQ ID NO: 2174098 - RNA, 19 nt, Artificial Sequence
  Description of Artificial Sequence: Synthetic oligonucleotide
  Sense strand starting at position 2666 of SEQ ID NO: 1883172
acagguuauuaugcauaac

SEQ ID NO: 2174099 - RNA, 19 nt, Artificial Sequence
  Description of Artificial Sequence: Synthetic oligonucleotide
  Antisense strand to SEQ ID NO: 2174098
guuaugcauaauaaccugu

SEQ ID NO: 2174100 - RNA, 19 nt, Artificial Sequence
  Description of Artificial Sequence: Synthetic oligonucleotide
  Sense strand starting at position 2669 of SEQ ID NO: 1883172
gguuauuaugcauaacuaa

SEQ ID NO: 2174101 - RNA, 19 nt, Artificial Sequence
  Description of Artificial Sequence: Synthetic oligonucleotide
  Antisense strand to SEQ ID NO: 2174100
uuaguuaugcauaauaacc

SEQ ID NO: 2174102 - RNA, 19 nt, Artificial Sequence
  Description of Artificial Sequence: Synthetic oligonucleotide
  Sense strand starting at position 2735 of SEQ ID NO: 1883172
agaaacuguccacagcuuu

SEQ ID NO: 2174103 - RNA, 19 nt, Artificial Sequence
  Description of Artificial Sequence: Synthetic oligonucleotide
  Antisense strand to SEQ ID NO: 2174102
aaagcuguggacaguuucu

SEQ ID NO: 2174104 - RNA, 19 nt, Artificial Sequence
  Description of Artificial Sequence: Synthetic oligonucleotide
  Sense strand starting at position 2795 of SEQ ID NO: 1883172
ggcccuaagcaguauaaau

SEQ ID NO: 2174105 - RNA, 19 nt, Artificial Sequence
  Description of Artificial Sequence: Synthetic oligonucleotide
  Antisense strand to SEQ ID NO: 2174104
auuuauacugcuuagggcc

SEQ ID NO: 2174106 - RNA, 19 nt, Artificial Sequence
  Description of Artificial Sequence: Synthetic oligonucleotide
  Sense strand starting at position 2817 of SEQ ID NO: 1883172
gagauuaccucguuguaaa

SEQ ID NO: 2174107 - RNA, 19 nt, Artificial Sequence
  Description of Artificial Sequence: Synthetic oligonucleotide
  Antisense strand to SEQ ID NO: 2174106
uuuacaacgagguaaucuc

SEQ ID NO: 2174108 - RNA, 19 nt, Artificial Sequence
  Description of Artificial Sequence: Synthetic oligonucleotide
  Sense strand starting at position 2818 of SEQ ID NO: 1883172
agauuaccucguuguaaac

SEQ ID NO: 2174109 - RNA, 19 nt, Artificial Sequence
  Description of Artificial Sequence: Synthetic oligonucleotide
  Antisense strand to SEQ ID NO: 2174108
guuuacaacgagguaaucu

SEQ ID NO: 2174110 - RNA, 19 nt, Artificial Sequence
  Description of Artificial Sequence: Synthetic oligonucleotide
  Sense strand starting at position 2923 of SEQ ID NO: 1883172
ucagauggauuauggauuu

SEQ ID NO: 2174111 - RNA, 19 nt, Artificial Sequence
  Description of Artificial Sequence: Synthetic oligonucleotide
  Antisense strand to SEQ ID NO: 2174110
aaauccauaauccaucuga

SEQ ID NO: 2174112 - RNA, 19 nt, Artificial Sequence
  Description of Artificial Sequence: Synthetic oligonucleotide
  Sense strand starting at position 2994 of SEQ ID NO: 1883172
auuaaucuaccagggcaau

SEQ ID NO: 2174113 - RNA, 19 nt, Artificial Sequence
  Description of Artificial Sequence: Synthetic oligonucleotide
  Antisense strand to SEQ ID NO: 2174112
auugcccugguagauuaau

SEQ ID NO: 2174114 - RNA, 19 nt, Artificial Sequence
  Description of Artificial Sequence: Synthetic oligonucleotide
  Sense strand starting at position 2995 of SEQ ID NO: 1883172
uuaaucuaccagggcaaua

SEQ ID NO: 2174115 - RNA, 19 nt, Artificial Sequence
  Description of Artificial Sequence: Synthetic oligonucleotide
  Antisense strand to SEQ ID NO: 2174114
uauugcccugguagauuaa

SEQ ID NO: 2174116 - RNA, 19 nt, Artificial Sequence
  Description of Artificial Sequence: Synthetic oligonucleotide
  Sense strand starting at position 3207 of SEQ ID NO: 1883172
gaguaauauuucuagagag

SEQ ID NO: 2174117 - RNA, 19 nt, Artificial Sequence
  Description of Artificial Sequence: Synthetic oligonucleotide
  Antisense strand to SEQ ID NO: 2174116
cucucuagaaauauuacuc

SEQ ID NO: 2174118 - RNA, 19 nt, Artificial Sequence
  Description of Artificial Sequence: Synthetic oligonucleotide
  Sense strand starting at position 3311 of SEQ ID NO: 1883172
uugacuagcucacuaagua

SEQ ID NO: 2174119 - RNA, 19 nt, Artificial Sequence
  Description of Artificial Sequence: Synthetic oligonucleotide
  Antisense strand to SEQ ID NO: 2174118
uacuuagugagcuagucaa

SEQ ID NO: 2174120 - RNA, 19 nt, Artificial Sequence
  Description of Artificial Sequence: Synthetic oligonucleotide
  Sense strand starting at position 3496 of SEQ ID NO: 1883172
aagacaauguagucagauc

SEQ ID NO: 2174121 - RNA, 19 nt, Artificial Sequence
  Description of Artificial Sequence: Synthetic oligonucleotide
  Antisense strand to SEQ ID NO: 2174120
gaucugacuacauugucuu

SEQ ID NO: 2174122 - RNA, 19 nt, Artificial Sequence
  Description of Artificial Sequence: Synthetic oligonucleotide
  Sense strand starting at position 3584 of SEQ ID NO: 1883172
ugaagauauuugcaagcau

SEQ ID NO: 2174123 - RNA, 19 nt, Artificial Sequence
  Description of Artificial Sequence: Synthetic oligonucleotide
  Antisense strand to SEQ ID NO: 2174122
augcuugcaaauaucuuca

SEQ ID NO: 2174124 - RNA, 19 nt, Artificial Sequence
  Description of Artificial Sequence: Synthetic oligonucleotide
  Sense strand starting at position 3599 of SEQ ID NO: 1883172
gcaugcaaaguauauaaca

SEQ ID NO: 2174125 - RNA, 19 nt, Artificial Sequence
  Description of Artificial Sequence: Synthetic oligonucleotide
  Antisense strand to SEQ ID NO: 2174124
uguuauauacuuugcaugc

SEQ ID NO: 2174126 - RNA, 19 nt, Artificial Sequence
  Description of Artificial Sequence: Synthetic oligonucleotide
  Sense strand starting at position 3739 of SEQ ID NO: 1883172
gguaacaauccaugcuacu

SEQ ID NO: 2174127 - RNA, 19 nt, Artificial Sequence
  Description of Artificial Sequence: Synthetic oligonucleotide
  Antisense strand to SEQ ID NO: 2174126
aguagcauggauuguuacc

SEQ ID NO: 2174128 - RNA, 19 nt, Artificial Sequence
  Description of Artificial Sequence: Synthetic oligonucleotide
  Sense strand starting at position 3891 of SEQ ID NO: 1883172
cuggaaguggcauaucacu

SEQ ID NO: 2174129 - RNA, 19 nt, Artificial Sequence
  Description of Artificial Sequence: Synthetic oligonucleotide
  Antisense strand to SEQ ID NO: 2174128
agugauaugccacuuccag

SEQ ID NO: 2174130 - RNA, 19 nt, Artificial Sequence
  Description of Artificial Sequence: Synthetic oligonucleotide
  Sense strand starting at position 3899 of SEQ ID NO: 1883172
ggcauaucacuuugcacau

SEQ ID NO: 2174131 - RNA, 19 nt, Artificial Sequence
  Description of Artificial Sequence: Synthetic oligonucleotide
  Antisense strand to SEQ ID NO: 2174130
augugcaaagugauaugcc

SEQ ID NO: 2174132 - RNA, 19 nt, Artificial Sequence
  Description of Artificial Sequence: Synthetic oligonucleotide
  Sense strand starting at position 3946 of SEQ ID NO: 1883172
agaugagaauuauaaccau

SEQ ID NO: 2174133 - RNA, 19 nt, Artificial Sequence
  Description of Artificial Sequence: Synthetic oligonucleotide
  Antisense strand to SEQ ID NO: 2174132
augguuauaauucucaucu

SEQ ID NO: 2174134 - RNA, 19 nt, Artificial Sequence
  Description of Artificial Sequence: Synthetic oligonucleotide
  Sense strand starting at position 3981 of SEQ ID NO: 1883172
ggaaauggacuucgguaaa

SEQ ID NO: 2174135 - RNA, 19 nt, Artificial Sequence
  Description of Artificial Sequence: Synthetic oligonucleotide
  Antisense strand to SEQ ID NO: 2174134
uuuaccgaaguccauuucc

SEQ ID NO: 2174136 - RNA, 19 nt, Artificial Sequence
  Description of Artificial Sequence: Synthetic oligonucleotide
  Sense strand starting at position 93 of SEQ ID NO: 1883173
aaaucagggcaguauuauu

SEQ ID NO: 2174137 - RNA, 19 nt, Artificial Sequence
  Description of Artificial Sequence: Synthetic oligonucleotide
  Antisense strand to SEQ ID NO: 2174136
aauaauacugcccugauuu

SEQ ID NO: 2174138 - RNA, 19 nt, Artificial Sequence
  Description of Artificial Sequence: Synthetic oligonucleotide
  Sense strand starting at position 98 of SEQ ID NO: 1883173
agggcaguauuauuaccua

SEQ ID NO: 2174139 - RNA, 19 nt, Artificial Sequence
  Description of Artificial Sequence: Synthetic oligonucleotide
  Antisense strand to SEQ ID NO: 2174138
uagguaauaauacugcccu

SEQ ID NO: 2174140 - RNA, 19 nt, Artificial Sequence
  Description of Artificial Sequence: Synthetic oligonucleotide
  Sense strand starting at position 101 of SEQ ID NO: 1883173
gcaguauuauuaccuacca

SEQ ID NO: 2174141 - RNA, 19 nt, Artificial Sequence
  Description of Artificial Sequence: Synthetic oligonucleotide
  Antisense strand to SEQ ID NO: 2174140
ugguagguaauaauacugc

SEQ ID NO: 2174142 - RNA, 19 nt, Artificial Sequence
  Description of Artificial Sequence: Synthetic oligonucleotide
  Sense strand starting at position 230 of SEQ ID NO: 1883173
ugacaacagugagugcuua

SEQ ID NO: 2174143 - RNA, 19 nt, Artificial Sequence
  Description of Artificial Sequence: Synthetic oligonucleotide
  Antisense strand to SEQ ID NO: 2174142
uaagcacucacuguuguca

SEQ ID NO: 2174144 - RNA, 19 nt, Artificial Sequence
  Description of Artificial Sequence: Synthetic oligonucleotide
  Sense strand starting at position 234 of SEQ ID NO: 1883173
aacagugagugcuuacaga

SEQ ID NO: 2174145 - RNA, 19 nt, Artificial Sequence
  Description of Artificial Sequence: Synthetic oligonucleotide
  Antisense strand to SEQ ID NO: 2174144
ucuguaagcacucacuguu

SEQ ID NO: 2174146 - RNA, 19 nt, Artificial Sequence
  Description of Artificial Sequence: Synthetic oligonucleotide
  Sense strand starting at position 250 of SEQ ID NO: 1883173
agaaauuucugugaacuac

SEQ ID NO: 2174147 - RNA, 19 nt, Artificial Sequence
  Description of Artificial Sequence: Synthetic oligonucleotide
  Antisense strand to SEQ ID NO: 2174146
guaguucacagaaauuucu

SEQ ID NO: 2174148 - RNA, 19 nt, Artificial Sequence
  Description of Artificial Sequence: Synthetic oligonucleotide
  Sense strand starting at position 265 of SEQ ID NO: 1883173
cuaccuacccaguguaaca

SEQ ID NO: 2174149 - RNA, 19 nt, Artificial Sequence
  Description of Artificial Sequence: Synthetic oligonucleotide
  Antisense strand to SEQ ID NO: 2174148
uguuacacuggguagguag

SEQ ID NO: 2174150 - RNA, 19 nt, Artificial Sequence
  Description of Artificial Sequence: Synthetic oligonucleotide
  Sense strand starting at position 657 of SEQ ID NO: 1883173
agcuguugacagcagagau

SEQ ID NO: 2174151 - RNA, 19 nt, Artificial Sequence
  Description of Artificial Sequence: Synthetic oligonucleotide
  Antisense strand to SEQ ID NO: 2174150
aucucugcugucaacagcu

SEQ ID NO: 2174152 - RNA, 19 nt, Artificial Sequence
  Description of Artificial Sequence: Synthetic oligonucleotide
  Sense strand starting at position 667 of SEQ ID NO: 1883173
agcagagauucuguggcau

SEQ ID NO: 2174153 - RNA, 19 nt, Artificial Sequence
  Description of Artificial Sequence: Synthetic oligonucleotide
  Antisense strand to SEQ ID NO: 2174152
augccacagaaucucugcu

SEQ ID NO: 2174154 - RNA, 19 nt, Artificial Sequence
  Description of Artificial Sequence: Synthetic oligonucleotide
  Sense strand starting at position 690 of SEQ ID NO: 1883173
ugcgcaaugcuaguaauug

SEQ ID NO: 2174155 - RNA, 19 nt, Artificial Sequence
  Description of Artificial Sequence: Synthetic oligonucleotide
  Antisense strand to SEQ ID NO: 2174154
caauuacuagcauugcgca

SEQ ID NO: 2174156 - RNA, 19 nt, Artificial Sequence
  Description of Artificial Sequence: Synthetic oligonucleotide
  Sense strand starting at position 698 of SEQ ID NO: 1883173
gcuaguaauuguguccauu

SEQ ID NO: 2174157 - RNA, 19 nt, Artificial Sequence
  Description of Artificial Sequence: Synthetic oligonucleotide
  Antisense strand to SEQ ID NO: 2174156
aauggacacaauuacuagc

SEQ ID NO: 2174158 - RNA, 19 nt, Artificial Sequence
  Description of Artificial Sequence: Synthetic oligonucleotide
  Sense strand starting at position 701 of SEQ ID NO: 1883173
aguaauuguguccauuaua

SEQ ID NO: 2174159 - RNA, 19 nt, Artificial Sequence
  Description of Artificial Sequence: Synthetic oligonucleotide
  Antisense strand to SEQ ID NO: 2174158
uauaauggacacaauuacu

SEQ ID NO: 2174160 - RNA, 19 nt, Artificial Sequence
  Description of Artificial Sequence: Synthetic oligonucleotide
  Sense strand starting at position 830 of SEQ ID NO: 1883173
acgugagaaccugaguauu

SEQ ID NO: 2174161 - RNA, 19 nt, Artificial Sequence
  Description of Artificial Sequence: Synthetic oligonucleotide
  Antisense strand to SEQ ID NO: 2174160
aauacucagguucucacgu

SEQ ID NO: 2174162 - RNA, 19 nt, Artificial Sequence
  Description of Artificial Sequence: Synthetic oligonucleotide
  Sense strand starting at position 1031 of SEQ ID NO: 1883173
gcagguucacagggaauua

SEQ ID NO: 2174163 - RNA, 19 nt, Artificial Sequence
  Description of Artificial Sequence: Synthetic oligonucleotide
  Antisense strand to SEQ ID NO: 2174162
uaauucccugugaaccugc

SEQ ID NO: 2174164 - RNA, 19 nt, Artificial Sequence
  Description of Artificial Sequence: Synthetic oligonucleotide
  Sense strand starting at position 1120 of SEQ ID NO: 1883173
gcaagaaaguuaccgcagu

SEQ ID NO: 2174165 - RNA, 19 nt, Artificial Sequence
  Description of Artificial Sequence: Synthetic oligonucleotide
  Antisense strand to SEQ ID NO: 2174164
acugcgguaacuuucuugc

SEQ ID NO: 2174166 - RNA, 19 nt, Artificial Sequence
  Description of Artificial Sequence: Synthetic oligonucleotide
  Sense strand starting at position 1264 of SEQ ID NO: 1883173
aaaugucucugggcuccaa

SEQ ID NO: 2174167 - RNA, 19 nt, Artificial Sequence
  Description of Artificial Sequence: Synthetic oligonucleotide
  Antisense strand to SEQ ID NO: 2174166
uuggagcccagagacauuu

SEQ ID NO: 2174168 - RNA, 19 nt, Artificial Sequence
  Description of Artificial Sequence: Synthetic oligonucleotide
  Sense strand starting at position 1745 of SEQ ID NO: 1883173
gggcguuaccuguacagga

SEQ ID NO: 2174169 - RNA, 19 nt, Artificial Sequence
  Description of Artificial Sequence: Synthetic oligonucleotide
  Antisense strand to SEQ ID NO: 2174168
uccuguacagguaacgccc

SEQ ID NO: 2174170 - RNA, 19 nt, Artificial Sequence
  Description of Artificial Sequence: Synthetic oligonucleotide
  Sense strand starting at position 2223 of SEQ ID NO: 1883173
gaccguguuagugcuguua

SEQ ID NO: 2174171 - RNA, 19 nt, Artificial Sequence
  Description of Artificial Sequence: Synthetic oligonucleotide
  Antisense strand to SEQ ID NO: 2174170
uaacagcacuaacacgguc

SEQ ID NO: 2174172 - RNA, 19 nt, Artificial Sequence
  Description of Artificial Sequence: Synthetic oligonucleotide
  Sense strand starting at position 2261 of SEQ ID NO: 1883173
ggcgauuccuucuuuggac

SEQ ID NO: 2174173 - RNA, 19 nt, Artificial Sequence
  Description of Artificial Sequence: Synthetic oligonucleotide
  Antisense strand to SEQ ID NO: 2174172
guccaaagaaggaaucgcc

SEQ ID NO: 2174174 - RNA, 19 nt, Artificial Sequence
  Description of Artificial Sequence: Synthetic oligonucleotide
  Sense strand starting at position 2376 of SEQ ID NO: 1883173
ugauuaacgccugauccca

SEQ ID NO: 2174175 - RNA, 19 nt, Artificial Sequence
  Description of Artificial Sequence: Synthetic oligonucleotide
  Antisense strand to SEQ ID NO: 2174174
ugggaucaggcguuaauca

SEQ ID NO: 2174176 - RNA, 19 nt, Artificial Sequence
  Description of Artificial Sequence: Synthetic oligonucleotide
  Sense strand starting at position 2586 of SEQ ID NO: 1883173
agcagaaaucaccacugca

SEQ ID NO: 2174177 - RNA, 19 nt, Artificial Sequence
  Description of Artificial Sequence: Synthetic oligonucleotide
  Antisense strand to SEQ ID NO: 2174176
ugcaguggugauuucugcu

SEQ ID NO: 2174178 - RNA, 19 nt, Artificial Sequence
  Description of Artificial Sequence: Synthetic oligonucleotide
  Sense strand starting at position 2660 of SEQ ID NO: 1883173
aaaguaauauuuggugaag

SEQ ID NO: 2174179 - RNA, 19 nt, Artificial Sequence
  Description of Artificial Sequence: Synthetic oligonucleotide
  Antisense strand to SEQ ID NO: 2174178
cuucaccaaauauuacuuu

SEQ ID NO: 2174180 - RNA, 19 nt, Artificial Sequence
  Description of Artificial Sequence: Synthetic oligonucleotide
  Sense strand starting at position 2662 of SEQ ID NO: 1883173
aguaauauuuggugaaguu

SEQ ID NO: 2174181 - RNA, 19 nt, Artificial Sequence
  Description of Artificial Sequence: Synthetic oligonucleotide
  Antisense strand to SEQ ID NO: 2174180
aacuucaccaaauauuacu

SEQ ID NO: 2174182 - RNA, 19 nt, Artificial Sequence
  Description of Artificial Sequence: Synthetic oligonucleotide
  Sense strand starting at position 2701 of SEQ ID NO: 1883173
aucggauauaaugguguaa

SEQ ID NO: 2174183 - RNA, 19 nt, Artificial Sequence
  Description of Artificial Sequence: Synthetic oligonucleotide
  Antisense strand to SEQ ID NO: 2174182
uuacaccauuauauccgau

SEQ ID NO: 2174184 - RNA, 19 nt, Artificial Sequence
  Description of Artificial Sequence: Synthetic oligonucleotide
  Sense strand starting at position 2842 of SEQ ID NO: 1883173
gagggugggucauuaacau

SEQ ID NO: 2174185 - RNA, 19 nt, Artificial Sequence
  Description of Artificial Sequence: Synthetic oligonucleotide
  Antisense strand to SEQ ID NO: 2174184
auguuaaugacccacccuc

SEQ ID NO: 2174186 - RNA, 19 nt, Artificial Sequence
  Description of Artificial Sequence: Synthetic oligonucleotide
  Sense strand starting at position 3072 of SEQ ID NO: 1883173
guugucuuguccuuccaaa

SEQ ID NO: 2174187 - RNA, 19 nt, Artificial Sequence
  Description of Artificial Sequence: Synthetic oligonucleotide
  Antisense strand to SEQ ID NO: 2174186
uuuggaaggacaagacaac

SEQ ID NO: 2174188 - RNA, 19 nt, Artificial Sequence
  Description of Artificial Sequence: Synthetic oligonucleotide
  Sense strand starting at position 3091 of SEQ ID NO: 1883173
ggaaccaauguguaucuua

SEQ ID NO: 2174189 - RNA, 19 nt, Artificial Sequence
  Description of Artificial Sequence: Synthetic oligonucleotide
  Antisense strand to SEQ ID NO: 2174188
uaagauacacauugguucc

SEQ ID NO: 2174190 - RNA, 19 nt, Artificial Sequence
  Description of Artificial Sequence: Synthetic oligonucleotide
  Sense strand starting at position 3195 of SEQ ID NO: 1883173
ucucuuaagggcuguguca

SEQ ID NO: 2174191 - RNA, 19 nt, Artificial Sequence
  Description of Artificial Sequence: Synthetic oligonucleotide
  Antisense strand to SEQ ID NO: 2174190
ugacacagcccuuaagaga

SEQ ID NO: 2174192 - RNA, 19 nt, Artificial Sequence
  Description of Artificial Sequence: Synthetic oligonucleotide
  Sense strand starting at position 3207 of SEQ ID NO: 1883173
ugugucacaggccauuaau

SEQ ID NO: 2174193 - RNA, 19 nt, Artificial Sequence
  Description of Artificial Sequence: Synthetic oligonucleotide
  Antisense strand to SEQ ID NO: 2174192
auuaauggccugugacaca

SEQ ID NO: 2174194 - RNA, 19 nt, Artificial Sequence
  Description of Artificial Sequence: Synthetic oligonucleotide
  Sense strand starting at position 3294 of SEQ ID NO: 1883173
gggucauaugaauguaugu

SEQ ID NO: 2174195 - RNA, 19 nt, Artificial Sequence
  Description of Artificial Sequence: Synthetic oligonucleotide
  Antisense strand to SEQ ID NO: 2174194
acauacauucauaugaccc

SEQ ID NO: 2174196 - RNA, 19 nt, Artificial Sequence
  Description of Artificial Sequence: Synthetic oligonucleotide
  Sense strand starting at position 3542 of SEQ ID NO: 1883173
ccugccuuucuaugugaca

SEQ ID NO: 2174197 - RNA, 19 nt, Artificial Sequence
  Description of Artificial Sequence: Synthetic oligonucleotide
  Antisense strand to SEQ ID NO: 2174196
ugucacauagaaaggcagg

SEQ ID NO: 2174198 - RNA, 19 nt, Artificial Sequence
  Description of Artificial Sequence: Synthetic oligonucleotide
  Sense strand starting at position 3554 of SEQ ID NO: 1883173
ugugacagcuggcuguaaa

SEQ ID NO: 2174199 - RNA, 19 nt, Artificial Sequence
  Description of Artificial Sequence: Synthetic oligonucleotide
  Antisense strand to SEQ ID NO: 2174198
uuuacagccagcugucaca

SEQ ID NO: 2174200 - RNA, 19 nt, Artificial Sequence
  Description of Artificial Sequence: Synthetic oligonucleotide
  Sense strand starting at position 3557 of SEQ ID NO: 1883173
gacagcuggcuguaaagaa

SEQ ID NO: 2174201 - RNA, 19 nt, Artificial Sequence
  Description of Artificial Sequence: Synthetic oligonucleotide
  Antisense strand to SEQ ID NO: 2174200
uucuuuacagccagcuguc

SEQ ID NO: 2174202 - RNA, 19 nt, Artificial Sequence
  Description of Artificial Sequence: Synthetic oligonucleotide
  Sense strand starting at position 3651 of SEQ ID NO: 1883173
acagacaggccuuguugaa

SEQ ID NO: 2174203 - RNA, 19 nt, Artificial Sequence
  Description of Artificial Sequence: Synthetic oligonucleotide
  Antisense strand to SEQ ID NO: 2174202
uucaacaaggccugucugu

SEQ ID NO: 2174204 - RNA, 19 nt, Artificial Sequence
  Description of Artificial Sequence: Synthetic oligonucleotide
  Sense strand starting at position 3791 of SEQ ID NO: 1883173
ugcauauguggaugcuuga

SEQ ID NO: 2174205 - RNA, 19 nt, Artificial Sequence
  Description of Artificial Sequence: Synthetic oligonucleotide
  Antisense strand to SEQ ID NO: 2174204
ucaagcauccacauaugca

SEQ ID NO: 2174206 - RNA, 19 nt, Artificial Sequence
  Description of Artificial Sequence: Synthetic oligonucleotide
  Sense strand starting at position 3850 of SEQ ID NO: 1883173
cgguguucugaacaauggu

SEQ ID NO: 2174207 - RNA, 19 nt, Artificial Sequence
  Description of Artificial Sequence: Synthetic oligonucleotide
  Antisense strand to SEQ ID NO: 2174206
accauuguucagaacaccg

SEQ ID NO: 2174208 - RNA, 19 nt, Artificial Sequence
  Description of Artificial Sequence: Synthetic oligonucleotide
  Sense strand starting at position 3900 of SEQ ID NO: 1883173
gaaauugcaucccuacguu

SEQ ID NO: 2174209 - RNA, 19 nt, Artificial Sequence
  Description of Artificial Sequence: Synthetic oligonucleotide
  Antisense strand to SEQ ID NO: 2174208
aacguagggaugcaauuuc

SEQ ID NO: 2174210 - RNA, 19 nt, Artificial Sequence
  Description of Artificial Sequence: Synthetic oligonucleotide
  Sense strand starting at position 3903 of SEQ ID NO: 1883173
auugcaucccuacguuaua

SEQ ID NO: 2174211 - RNA, 19 nt, Artificial Sequence
  Description of Artificial Sequence: Synthetic oligonucleotide
  Antisense strand to SEQ ID NO: 2174210
uauaacguagggaugcaau

SEQ ID NO: 2174212 - RNA, 19 nt, Artificial Sequence
  Description of Artificial Sequence: Synthetic oligonucleotide
  Sense strand starting at position 3906 of SEQ ID NO: 1883173
gcaucccuacguuauacua

SEQ ID NO: 2174213 - RNA, 19 nt, Artificial Sequence
  Description of Artificial Sequence: Synthetic oligonucleotide
  Antisense strand to SEQ ID NO: 2174212
uaguauaacguagggaugc

SEQ ID NO: 2174214 - RNA, 19 nt, Artificial Sequence
  Description of Artificial Sequence: Synthetic oligonucleotide
  Sense strand starting at position 3958 of SEQ ID NO: 1883173
gcuuaagauucugcacaaa

SEQ ID NO: 2174215 - RNA, 19 nt, Artificial Sequence
  Description of Artificial Sequence: Synthetic oligonucleotide
  Antisense strand to SEQ ID NO: 2174214
uuugugcagaaucuuaagc

SEQ ID NO: 2174216 - RNA, 19 nt, Artificial Sequence
  Description of Artificial Sequence: Synthetic oligonucleotide
  Sense strand starting at position 72 of SEQ ID NO: 1883174
aucaauguccauugugauc

SEQ ID NO: 2174217 - RNA, 19 nt, Artificial Sequence
  Description of Artificial Sequence: Synthetic oligonucleotide
  Antisense strand to SEQ ID NO: 2174216
gaucacaauggacauugau

SEQ ID NO: 2174218 - RNA, 19 nt, Artificial Sequence
  Description of Artificial Sequence: Synthetic oligonucleotide
  Sense strand starting at position 154 of SEQ ID NO: 1883174
caagcaagacaauguguaa

SEQ ID NO: 2174219 - RNA, 19 nt, Artificial Sequence
  Description of Artificial Sequence: Synthetic oligonucleotide
  Antisense strand to SEQ ID NO: 2174218
uuacacauugucuugcuug

SEQ ID NO: 2174220 - RNA, 19 nt, Artificial Sequence
  Description of Artificial Sequence: Synthetic oligonucleotide
  Sense strand starting at position 188 of SEQ ID NO: 1883174
ggagacagucaguguagua

SEQ ID NO: 2174221 - RNA, 19 nt, Artificial Sequence
  Description of Artificial Sequence: Synthetic oligonucleotide
  Antisense strand to SEQ ID NO: 2174220
uacuacacugacugucucc

SEQ ID NO: 2174222 - RNA, 19 nt, Artificial Sequence
  Description of Artificial Sequence: Synthetic oligonucleotide
  Sense strand starting at position 204 of SEQ ID NO: 1883174
guaugaaggcuuuggagac

SEQ ID NO: 2174223 - RNA, 19 nt, Artificial Sequence
  Description of Artificial Sequence: Synthetic oligonucleotide
  Antisense strand to SEQ ID NO: 2174222
gucuccaaagccuucauac

SEQ ID NO: 2174224 - RNA, 19 nt, Artificial Sequence
  Description of Artificial Sequence: Synthetic oligonucleotide
  Sense strand starting at position 267 of SEQ ID NO: 1883174
guugcuuucuccucauuua

SEQ ID NO: 2174225 - RNA, 19 nt, Artificial Sequence
  Description of Artificial Sequence: Synthetic oligonucleotide
  Antisense strand to SEQ ID NO: 2174224
uaaaugaggagaaagcaac

SEQ ID NO: 2174226 - RNA, 19 nt, Artificial Sequence
  Description of Artificial Sequence: Synthetic oligonucleotide
  Sense strand starting at position 279 of SEQ ID NO: 1883174
ucauuuacauaaugggaau

SEQ ID NO: 2174227 - RNA, 19 nt, Artificial Sequence
  Description of Artificial Sequence: Synthetic oligonucleotide
  Antisense strand to SEQ ID NO: 2174226
auucccauuauguaaauga

SEQ ID NO: 2174228 - RNA, 19 nt, Artificial Sequence
  Description of Artificial Sequence: Synthetic oligonucleotide
  Sense strand starting at position 292 of SEQ ID NO: 1883174
gggaauaacuugucuacca

SEQ ID NO: 2174229 - RNA, 19 nt, Artificial Sequence
  Description of Artificial Sequence: Synthetic oligonucleotide
  Antisense strand to SEQ ID NO: 2174228
ugguagacaaguuauuccc

SEQ ID NO: 2174230 - RNA, 19 nt, Artificial Sequence
  Description of Artificial Sequence: Synthetic oligonucleotide
  Sense strand starting at position 293 of SEQ ID NO: 1883174
ggaauaacuugucuaccau

SEQ ID NO: 2174231 - RNA, 19 nt, Artificial Sequence
  Description of Artificial Sequence: Synthetic oligonucleotide
  Antisense strand to SEQ ID NO: 2174230
augguagacaaguuauucc

SEQ ID NO: 2174232 - RNA, 19 nt, Artificial Sequence
  Description of Artificial Sequence: Synthetic oligonucleotide
  Sense strand starting at position 571 of SEQ ID NO: 1883174
agaugaaaucgucacagug

SEQ ID NO: 2174233 - RNA, 19 nt, Artificial Sequence
  Description of Artificial Sequence: Synthetic oligonucleotide
  Antisense strand to SEQ ID NO: 2174232
cacugugacgauuucaucu

SEQ ID NO: 2174234 - RNA, 19 nt, Artificial Sequence
  Description of Artificial Sequence: Synthetic oligonucleotide
  Sense strand starting at position 759 of SEQ ID NO: 1883174
uuugauauuugugugcuua

SEQ ID NO: 2174235 - RNA, 19 nt, Artificial Sequence
  Description of Artificial Sequence: Synthetic oligonucleotide
  Antisense strand to SEQ ID NO: 2174234
uaagcacacaaauaucaaa

SEQ ID NO: 2174236 - RNA, 19 nt, Artificial Sequence
  Description of Artificial Sequence: Synthetic oligonucleotide
  Sense strand starting at position 760 of SEQ ID NO: 1883174
uugauauuugugugcuuau

SEQ ID NO: 2174237 - RNA, 19 nt, Artificial Sequence
  Description of Artificial Sequence: Synthetic oligonucleotide
  Antisense strand to SEQ ID NO: 2174236
auaagcacacaaauaucaa

SEQ ID NO: 2174238 - RNA, 19 nt, Artificial Sequence
  Description of Artificial Sequence: Synthetic oligonucleotide
  Sense strand starting at position 761 of SEQ ID NO: 1883174
ugauauuugugugcuuaug

SEQ ID NO: 2174239 - RNA, 19 nt, Artificial Sequence
  Description of Artificial Sequence: Synthetic oligonucleotide
  Antisense strand to SEQ ID NO: 2174238
cauaagcacacaaauauca

SEQ ID NO: 2174240 - RNA, 19 nt, Artificial Sequence
  Description of Artificial Sequence: Synthetic oligonucleotide
  Sense strand starting at position 763 of SEQ ID NO: 1883174
auauuugugugcuuaugga

SEQ ID NO: 2174241 - RNA, 19 nt, Artificial Sequence
  Description of Artificial Sequence: Synthetic oligonucleotide
  Antisense strand to SEQ ID NO: 2174240
uccauaagcacacaaauau

SEQ ID NO: 2174242 - RNA, 19 nt, Artificial Sequence
  Description of Artificial Sequence: Synthetic oligonucleotide
  Sense strand starting at position 863 of SEQ ID NO: 1883174
acacauaguuguguugaaa

SEQ ID NO: 2174243 - RNA, 19 nt, Artificial Sequence
  Description of Artificial Sequence: Synthetic oligonucleotide
  Antisense strand to SEQ ID NO: 2174242
uuucaacacaacuaugugu

SEQ ID NO: 2174244 - RNA, 19 nt, Artificial Sequence
  Description of Artificial Sequence: Synthetic oligonucleotide
  Sense strand starting at position 866 of SEQ ID NO: 1883174
cauaguuguguugaaagua

SEQ ID NO: 2174245 - RNA, 19 nt, Artificial Sequence
  Description of Artificial Sequence: Synthetic oligonucleotide
  Antisense strand to SEQ ID NO: 2174244
uacuuucaacacaacuaug

SEQ ID NO: 2174246 - RNA, 19 nt, Artificial Sequence
  Description of Artificial Sequence: Synthetic oligonucleotide
  Sense strand starting at position 1278 of SEQ ID NO: 1883174
ucaacaaauuaagagaaga

SEQ ID NO: 2174247 - RNA, 19 nt, Artificial Sequence
  Description of Artificial Sequence: Synthetic oligonucleotide
  Antisense strand to SEQ ID NO: 2174246
ucuucucuuaauuuguuga

SEQ ID NO: 2174248 - RNA, 19 nt, Artificial Sequence
  Description of Artificial Sequence: Synthetic oligonucleotide
  Sense strand starting at position 1373 of SEQ ID NO: 1883174
uguccuaaaccugauuaug

SEQ ID NO: 2174249 - RNA, 19 nt, Artificial Sequence
  Description of Artificial Sequence: Synthetic oligonucleotide
  Antisense strand to SEQ ID NO: 2174248
cauaaucagguuuaggaca

SEQ ID NO: 2174250 - RNA, 19 nt, Artificial Sequence
  Description of Artificial Sequence: Synthetic oligonucleotide
  Sense strand starting at position 1428 of SEQ ID NO: 1883174
ucagcucuugcugaagaca

SEQ ID NO: 2174251 - RNA, 19 nt, Artificial Sequence
  Description of Artificial Sequence: Synthetic oligonucleotide
  Antisense strand to SEQ ID NO: 2174250
ugucuucagcaagagcuga

SEQ ID NO: 2174252 - RNA, 19 nt, Artificial Sequence
  Description of Artificial Sequence: Synthetic oligonucleotide
  Sense strand starting at position 2196 of SEQ ID NO: 1883174
auaugagacccugguuaug

SEQ ID NO: 2174253 - RNA, 19 nt, Artificial Sequence
  Description of Artificial Sequence: Synthetic oligonucleotide
  Antisense strand to SEQ ID NO: 2174252
cauaaccagggucucauau

SEQ ID NO: 2174254 - RNA, 19 nt, Artificial Sequence
  Description of Artificial Sequence: Synthetic oligonucleotide
  Sense strand starting at position 2198 of SEQ ID NO: 1883174
augagacccugguuaugaa

SEQ ID NO: 2174255 - RNA, 19 nt, Artificial Sequence
  Description of Artificial Sequence: Synthetic oligonucleotide
  Antisense strand to SEQ ID NO: 2174254
uucauaaccagggucucau

SEQ ID NO: 2174256 - RNA, 19 nt, Artificial Sequence
  Description of Artificial Sequence: Synthetic oligonucleotide
  Sense strand starting at position 2206 of SEQ ID NO: 1883174
cugguuaugaagggcagua

SEQ ID NO: 2174257 - RNA, 19 nt, Artificial Sequence
  Description of Artificial Sequence: Synthetic oligonucleotide
  Antisense strand to SEQ ID NO: 2174256
uacugcccuucauaaccag

SEQ ID NO: 2174258 - RNA, 19 nt, Artificial Sequence
  Description of Artificial Sequence: Synthetic oligonucleotide
  Sense strand starting at position 2435 of SEQ ID NO: 1883174
gacuaacugcuguagauua

SEQ ID NO: 2174259 - RNA, 19 nt, Artificial Sequence
  Description of Artificial Sequence: Synthetic oligonucleotide
  Antisense strand to SEQ ID NO: 2174258
uaaucuacagcaguuaguc

SEQ ID NO: 2174260 - RNA, 19 nt, Artificial Sequence
  Description of Artificial Sequence: Synthetic oligonucleotide
  Sense strand starting at position 2437 of SEQ ID NO: 1883174
cuaacugcuguagauuaga

SEQ ID NO: 2174261 - RNA, 19 nt, Artificial Sequence
  Description of Artificial Sequence: Synthetic oligonucleotide
  Antisense strand to SEQ ID NO: 2174260
ucuaaucuacagcaguuag

SEQ ID NO: 2174262 - RNA, 19 nt, Artificial Sequence
  Description of Artificial Sequence: Synthetic oligonucleotide
  Sense strand starting at position 2450 of SEQ ID NO: 1883174
auuagagaauagucuugua

SEQ ID NO: 2174263 - RNA, 19 nt, Artificial Sequence
  Description of Artificial Sequence: Synthetic oligonucleotide
  Antisense strand to SEQ ID NO: 2174262
uacaagacuauucucuaau

SEQ ID NO: 2174264 - RNA, 19 nt, Artificial Sequence
  Description of Artificial Sequence: Synthetic oligonucleotide
  Sense strand starting at position 2805 of SEQ ID NO: 1883174
cuguuauaaccauagucag

SEQ ID NO: 2174265 - RNA, 19 nt, Artificial Sequence
  Description of Artificial Sequence: Synthetic oligonucleotide
  Antisense strand to SEQ ID NO: 2174264
cugacuaugguuauaacag

SEQ ID NO: 2174266 - RNA, 19 nt, Artificial Sequence
  Description of Artificial Sequence: Synthetic oligonucleotide
  Sense strand starting at position 3011 of SEQ ID NO: 1883174
ugguaauauaaagaugugu

SEQ ID NO: 2174267 - RNA, 19 nt, Artificial Sequence
  Description of Artificial Sequence: Synthetic oligonucleotide
  Antisense strand to SEQ ID NO: 2174266
acacaucuuuauauuacca

SEQ ID NO: 2174268 - RNA, 19 nt, Artificial Sequence
  Description of Artificial Sequence: Synthetic oligonucleotide
  Sense strand starting at position 3013 of SEQ ID NO: 1883174
guaauauaaagauguguga

SEQ ID NO: 2174269 - RNA, 19 nt, Artificial Sequence
  Description of Artificial Sequence: Synthetic oligonucleotide
  Antisense strand to SEQ ID NO: 2174268
ucacacaucuuuauauuac

SEQ ID NO: 2174270 - RNA, 19 nt, Artificial Sequence
  Description of Artificial Sequence: Synthetic oligonucleotide
  Sense strand starting at position 3017 of SEQ ID NO: 1883174
uauaaagaugugugaaauc

SEQ ID NO: 2174271 - RNA, 19 nt, Artificial Sequence
  Description of Artificial Sequence: Synthetic oligonucleotide
  Antisense strand to SEQ ID NO: 2174270
gauuucacacaucuuuaua

SEQ ID NO: 2174272 - RNA, 19 nt, Artificial Sequence
  Description of Artificial Sequence: Synthetic oligonucleotide
  Sense strand starting at position 3111 of SEQ ID NO: 1883174
cugucuuagggugaacaca

SEQ ID NO: 2174273 - RNA, 19 nt, Artificial Sequence
  Description of Artificial Sequence: Synthetic oligonucleotide
  Antisense strand to SEQ ID NO: 2174272
uguguucacccuaagacag

SEQ ID NO: 2174274 - RNA, 19 nt, Artificial Sequence
  Description of Artificial Sequence: Synthetic oligonucleotide
  Sense strand starting at position 3236 of SEQ ID NO: 1883174
uguuacucucuguaauucu

SEQ ID NO: 2174275 - RNA, 19 nt, Artificial Sequence
  Description of Artificial Sequence: Synthetic oligonucleotide
  Antisense strand to SEQ ID NO: 2174274
agaauuacagagaguaaca

SEQ ID NO: 2174276 - RNA, 19 nt, Artificial Sequence
  Description of Artificial Sequence: Synthetic oligonucleotide
  Sense strand starting at position 3499 of SEQ ID NO: 1883174
cccagauggcugugggaau

SEQ ID NO: 2174277 - RNA, 19 nt, Artificial Sequence
  Description of Artificial Sequence: Synthetic oligonucleotide
  Antisense strand to SEQ ID NO: 2174276
auucccacagccaucuggg

SEQ ID NO: 2174278 - RNA, 19 nt, Artificial Sequence
  Description of Artificial Sequence: Synthetic oligonucleotide
  Sense strand starting at position 3544 of SEQ ID NO: 1883174
uaggguauugccuggaaug

SEQ ID NO: 2174279 - RNA, 19 nt, Artificial Sequence
  Description of Artificial Sequence: Synthetic oligonucleotide
  Antisense strand to SEQ ID NO: 2174278
cauuccaggcaauacccua

SEQ ID NO: 2174280 - RNA, 19 nt, Artificial Sequence
  Description of Artificial Sequence: Synthetic oligonucleotide
  Sense strand starting at position 3546 of SEQ ID NO: 1883174
ggguauugccuggaaugua

SEQ ID NO: 2174281 - RNA, 19 nt, Artificial Sequence
  Description of Artificial Sequence: Synthetic oligonucleotide
  Antisense strand to SEQ ID NO: 2174280
uacauuccaggcaauaccc

SEQ ID NO: 2174282 - RNA, 19 nt, Artificial Sequence
  Description of Artificial Sequence: Synthetic oligonucleotide
  Sense strand starting at position 3554 of SEQ ID NO: 1883174
ccuggaauguagccauuga

SEQ ID NO: 2174283 - RNA, 19 nt, Artificial Sequence
  Description of Artificial Sequence: Synthetic oligonucleotide
  Antisense strand to SEQ ID NO: 2174282
ucaauggcuacauuccagg

SEQ ID NO: 2174284 - RNA, 19 nt, Artificial Sequence
  Description of Artificial Sequence: Synthetic oligonucleotide
  Sense strand starting at position 3555 of SEQ ID NO: 1883174
cuggaauguagccauugau

SEQ ID NO: 2174285 - RNA, 19 nt, Artificial Sequence
  Description of Artificial Sequence: Synthetic oligonucleotide
  Antisense strand to SEQ ID NO: 2174284
aucaauggcuacauuccag

SEQ ID NO: 2174286 - RNA, 19 nt, Artificial Sequence
  Description of Artificial Sequence: Synthetic oligonucleotide
  Sense strand starting at position 3558 of SEQ ID NO: 1883174
gaauguagccauugauaaa

SEQ ID NO: 2174287 - RNA, 19 nt, Artificial Sequence
  Description of Artificial Sequence: Synthetic oligonucleotide
  Antisense strand to SEQ ID NO: 2174286
uuuaucaauggcuacauuc

SEQ ID NO: 2174288 - RNA, 19 nt, Artificial Sequence
  Description of Artificial Sequence: Synthetic oligonucleotide
  Sense strand starting at position 3602 of SEQ ID NO: 1883174
ugacauuaggagggcauua

SEQ ID NO: 2174289 - RNA, 19 nt, Artificial Sequence
  Description of Artificial Sequence: Synthetic oligonucleotide
  Antisense strand to SEQ ID NO: 2174288
uaaugcccuccuaauguca

SEQ ID NO: 2174290 - RNA, 19 nt, Artificial Sequence
  Description of Artificial Sequence: Synthetic oligonucleotide
  Sense strand starting at position 3612 of SEQ ID NO: 1883174
agggcauuauauuacauuu

SEQ ID NO: 2174291 - RNA, 19 nt, Artificial Sequence
  Description of Artificial Sequence: Synthetic oligonucleotide
  Antisense strand to SEQ ID NO: 2174290
aaauguaauauaaugcccu

SEQ ID NO: 2174292 - RNA, 19 nt, Artificial Sequence
  Description of Artificial Sequence: Synthetic oligonucleotide
  Sense strand starting at position 3965 of SEQ ID NO: 1883174
uuacuugguguuuaguaca

SEQ ID NO: 2174293 - RNA, 19 nt, Artificial Sequence
  Description of Artificial Sequence: Synthetic oligonucleotide
  Antisense strand to SEQ ID NO: 2174292
uguacuaaacaccaaguaa

SEQ ID NO: 2174294 - RNA, 19 nt, Artificial Sequence
  Description of Artificial Sequence: Synthetic oligonucleotide
  Sense strand starting at position 3970 of SEQ ID NO: 1883174
ugguguuuaguacaaagca

SEQ ID NO: 2174295 - RNA, 19 nt, Artificial Sequence
  Description of Artificial Sequence: Synthetic oligonucleotide
  Antisense strand to SEQ ID NO: 2174294
ugcuuuguacuaaacacca

SEQ ID NO: 2174296 - RNA, 19 nt, Artificial Sequence
  Description of Artificial Sequence: Synthetic oligonucleotide
  Sense strand starting at position 54 of SEQ ID NO: 1883175
uugcaucugugcuugucau

SEQ ID NO: 2174297 - RNA, 19 nt, Artificial Sequence
  Description of Artificial Sequence: Synthetic oligonucleotide
  Antisense strand to SEQ ID NO: 2174296
augacaagcacagaugcaa

SEQ ID NO: 2174298 - RNA, 19 nt, Artificial Sequence
  Description of Artificial Sequence: Synthetic oligonucleotide
  Sense strand starting at position 55 of SEQ ID NO: 1883175
ugcaucugugcuugucauu

SEQ ID NO: 2174299 - RNA, 19 nt, Artificial Sequence
  Description of Artificial Sequence: Synthetic oligonucleotide
  Antisense strand to SEQ ID NO: 2174298
aaugacaagcacagaugca

SEQ ID NO: 2174300 - RNA, 19 nt, Artificial Sequence
  Description of Artificial Sequence: Synthetic oligonucleotide
  Sense strand starting at position 56 of SEQ ID NO: 1883175
gcaucugugcuugucauua

SEQ ID NO: 2174301 - RNA, 19 nt, Artificial Sequence
  Description of Artificial Sequence: Synthetic oligonucleotide
  Antisense strand to SEQ ID NO: 2174300
uaaugacaagcacagaugc

SEQ ID NO: 2174302 - RNA, 19 nt, Artificial Sequence
  Description of Artificial Sequence: Synthetic oligonucleotide
  Sense strand starting at position 133 of SEQ ID NO: 1883175
aaauaagcuggguaaaguu

SEQ ID NO: 2174303 - RNA, 19 nt, Artificial Sequence
  Description of Artificial Sequence: Synthetic oligonucleotide
  Antisense strand to SEQ ID NO: 2174302
aacuuuacccagcuuauuu

SEQ ID NO: 2174304 - RNA, 19 nt, Artificial Sequence
  Description of Artificial Sequence: Synthetic oligonucleotide
  Sense strand starting at position 142 of SEQ ID NO: 1883175
ggguaaaguucggucuuug

SEQ ID NO: 2174305 - RNA, 19 nt, Artificial Sequence
  Description of Artificial Sequence: Synthetic oligonucleotide
  Antisense strand to SEQ ID NO: 2174304
caaagaccgaacuuuaccc

SEQ ID NO: 2174306 - RNA, 19 nt, Artificial Sequence
  Description of Artificial Sequence: Synthetic oligonucleotide
  Sense strand starting at position 156 of SEQ ID NO: 1883175
cuuuguuuccuggagcaaa

SEQ ID NO: 2174307 - RNA, 19 nt, Artificial Sequence
  Description of Artificial Sequence: Synthetic oligonucleotide
  Antisense strand to SEQ ID NO: 2174306
uuugcuccaggaaacaaag

SEQ ID NO: 2174308 - RNA, 19 nt, Artificial Sequence
  Description of Artificial Sequence: Synthetic oligonucleotide
  Sense strand starting at position 159 of SEQ ID NO: 1883175
uguuuccuggagcaaauua

SEQ ID NO: 2174309 - RNA, 19 nt, Artificial Sequence
  Description of Artificial Sequence: Synthetic oligonucleotide
  Antisense strand to SEQ ID NO: 2174308
uaauuugcuccaggaaaca

SEQ ID NO: 2174310 - RNA, 19 nt, Artificial Sequence
  Description of Artificial Sequence: Synthetic oligonucleotide
  Sense strand starting at position 201 of SEQ ID NO: 1883175
auugaaacuuuggcagaau

SEQ ID NO: 2174311 - RNA, 19 nt, Artificial Sequence
  Description of Artificial Sequence: Synthetic oligonucleotide
  Antisense strand to SEQ ID NO: 2174310
auucugccaaaguuucaau

SEQ ID NO: 2174312 - RNA, 19 nt, Artificial Sequence
  Description of Artificial Sequence: Synthetic oligonucleotide
  Sense strand starting at position 202 of SEQ ID NO: 1883175
uugaaacuuuggcagaauu

SEQ ID NO: 2174313 - RNA, 19 nt, Artificial Sequence
  Description of Artificial Sequence: Synthetic oligonucleotide
  Antisense strand to SEQ ID NO: 2174312
aauucugccaaaguuucaa

SEQ ID NO: 2174314 - RNA, 19 nt, Artificial Sequence
  Description of Artificial Sequence: Synthetic oligonucleotide
  Sense strand starting at position 232 of SEQ ID NO: 1883175
guaccuagaccugaauagu

SEQ ID NO: 2174315 - RNA, 19 nt, Artificial Sequence
  Description of Artificial Sequence: Synthetic oligonucleotide
  Antisense strand to SEQ ID NO: 2174314
acuauucaggucuagguac

SEQ ID NO: 2174316 - RNA, 19 nt, Artificial Sequence
  Description of Artificial Sequence: Synthetic oligonucleotide
  Sense strand starting at position 238 of SEQ ID NO: 1883175
agaccugaauagucuuuga

SEQ ID NO: 2174317 - RNA, 19 nt, Artificial Sequence
  Description of Artificial Sequence: Synthetic oligonucleotide
  Antisense strand to SEQ ID NO: 2174316
ucaaagacuauucaggucu

SEQ ID NO: 2174318 - RNA, 19 nt, Artificial Sequence
  Description of Artificial Sequence: Synthetic oligonucleotide
  Sense strand starting at position 241 of SEQ ID NO: 1883175
ccugaauagucuuugacua

SEQ ID NO: 2174319 - RNA, 19 nt, Artificial Sequence
  Description of Artificial Sequence: Synthetic oligonucleotide
  Antisense strand to SEQ ID NO: 2174318
uagucaaagacuauucagg

SEQ ID NO: 2174320 - RNA, 19 nt, Artificial Sequence
  Description of Artificial Sequence: Synthetic oligonucleotide
  Sense strand starting at position 242 of SEQ ID NO: 1883175
cugaauagucuuugacuac

SEQ ID NO: 2174321 - RNA, 19 nt, Artificial Sequence
  Description of Artificial Sequence: Synthetic oligonucleotide
  Antisense strand to SEQ ID NO: 2174320
guagucaaagacuauucag

SEQ ID NO: 2174322 - RNA, 19 nt, Artificial Sequence
  Description of Artificial Sequence: Synthetic oligonucleotide
  Sense strand starting at position 246 of SEQ ID NO: 1883175
auagucuuugacuaccagu

SEQ ID NO: 2174323 - RNA, 19 nt, Artificial Sequence
  Description of Artificial Sequence: Synthetic oligonucleotide
  Antisense strand to SEQ ID NO: 2174322
acugguagucaaagacuau

SEQ ID NO: 2174324 - RNA, 19 nt, Artificial Sequence
  Description of Artificial Sequence: Synthetic oligonucleotide
  Sense strand starting at position 618 of SEQ ID NO: 1883175
uggccaaguucucuuucuu

SEQ ID NO: 2174325 - RNA, 19 nt, Artificial Sequence
  Description of Artificial Sequence: Synthetic oligonucleotide
  Antisense strand to SEQ ID NO: 2174324
aagaaagagaacuuggcca

SEQ ID NO: 2174326 - RNA, 19 nt, Artificial Sequence
  Description of Artificial Sequence: Synthetic oligonucleotide
  Sense strand starting at position 652 of SEQ ID NO: 1883175
acaugcuuucgccauggga

SEQ ID NO: 2174327 - RNA, 19 nt, Artificial Sequence
  Description of Artificial Sequence: Synthetic oligonucleotide
  Antisense strand to SEQ ID NO: 2174326
ucccauggcgaaagcaugu

SEQ ID NO: 2174328 - RNA, 19 nt, Artificial Sequence
  Description of Artificial Sequence: Synthetic oligonucleotide
  Sense strand starting at position 654 of SEQ ID NO: 1883175
augcuuucgccaugggaug

SEQ ID NO: 2174329 - RNA, 19 nt, Artificial Sequence
  Description of Artificial Sequence: Synthetic oligonucleotide
  Antisense strand to SEQ ID NO: 2174328
caucccauggcgaaagcau

SEQ ID NO: 2174330 - RNA, 19 nt, Artificial Sequence
  Description of Artificial Sequence: Synthetic oligonucleotide
  Sense strand starting at position 755 of SEQ ID NO: 1883175
uccuguaaauccugaagaa

SEQ ID NO: 2174331 - RNA, 19 nt, Artificial Sequence
  Description of Artificial Sequence: Synthetic oligonucleotide
  Antisense strand to SEQ ID NO: 2174330
uucuucaggauuuacagga

SEQ ID NO: 2174332 - RNA, 19 nt, Artificial Sequence
  Description of Artificial Sequence: Synthetic oligonucleotide
  Sense strand starting at position 869 of SEQ ID NO: 1883175
auacaugaaugacaaagaa

SEQ ID NO: 2174333 - RNA, 19 nt, Artificial Sequence
  Description of Artificial Sequence: Synthetic oligonucleotide
  Antisense strand to SEQ ID NO: 2174332
uucuuugucauucauguau

SEQ ID NO: 2174334 - RNA, 19 nt, Artificial Sequence
  Description of Artificial Sequence: Synthetic oligonucleotide
  Sense strand starting at position 887 of SEQ ID NO: 1883175
augucucccugaucagacu

SEQ ID NO: 2174335 - RNA, 19 nt, Artificial Sequence
  Description of Artificial Sequence: Synthetic oligonucleotide
  Antisense strand to SEQ ID NO: 2174334
agucugaucagggagacau

SEQ ID NO: 2174336 - RNA, 19 nt, Artificial Sequence
  Description of Artificial Sequence: Synthetic oligonucleotide
  Sense strand starting at position 1025 of SEQ ID NO: 1883175
caccucaggugucugaaua

SEQ ID NO: 2174337 - RNA, 19 nt, Artificial Sequence
  Description of Artificial Sequence: Synthetic oligonucleotide
  Antisense strand to SEQ ID NO: 2174336
uauucagacaccugaggug

SEQ ID NO: 2174338 - RNA, 19 nt, Artificial Sequence
  Description of Artificial Sequence: Synthetic oligonucleotide
  Sense strand starting at position 1291 of SEQ ID NO: 1883175
ccuuacaucuaaggaaaug

SEQ ID NO: 2174339 - RNA, 19 nt, Artificial Sequence
  Description of Artificial Sequence: Synthetic oligonucleotide
  Antisense strand to SEQ ID NO: 2174338
cauuuccuuagauguaagg

SEQ ID NO: 2174340 - RNA, 19 nt, Artificial Sequence
  Description of Artificial Sequence: Synthetic oligonucleotide
  Sense strand starting at position 1302 of SEQ ID NO: 1883175
aggaaaugguucugaauaa

SEQ ID NO: 2174341 - RNA, 19 nt, Artificial Sequence
  Description of Artificial Sequence: Synthetic oligonucleotide
  Antisense strand to SEQ ID NO: 2174340
uuauucagaaccauuuccu

SEQ ID NO: 2174342 - RNA, 19 nt, Artificial Sequence
  Description of Artificial Sequence: Synthetic oligonucleotide
  Sense strand starting at position 1303 of SEQ ID NO: 1883175
ggaaaugguucugaauaaa

SEQ ID NO: 2174343 - RNA, 19 nt, Artificial Sequence
  Description of Artificial Sequence: Synthetic oligonucleotide
  Antisense strand to SEQ ID NO: 2174342
uuuauucagaaccauuucc

SEQ ID NO: 2174344 - RNA, 19 nt, Artificial Sequence
  Description of Artificial Sequence: Synthetic oligonucleotide
  Sense strand starting at position 1656 of SEQ ID NO: 1883175
aguauuccucccugacuag

SEQ ID NO: 2174345 - RNA, 19 nt, Artificial Sequence
  Description of Artificial Sequence: Synthetic oligonucleotide
  Antisense strand to SEQ ID NO: 2174344
cuagucagggaggaauacu

SEQ ID NO: 2174346 - RNA, 19 nt, Artificial Sequence
  Description of Artificial Sequence: Synthetic oligonucleotide
  Sense strand starting at position 1657 of SEQ ID NO: 1883175
guauuccucccugacuagu

SEQ ID NO: 2174347 - RNA, 19 nt, Artificial Sequence
  Description of Artificial Sequence: Synthetic oligonucleotide
  Antisense strand to SEQ ID NO: 2174346
acuagucagggaggaauac

SEQ ID NO: 2174348 - RNA, 19 nt, Artificial Sequence
  Description of Artificial Sequence: Synthetic oligonucleotide
  Sense strand starting at position 1667 of SEQ ID NO: 1883175
cugacuagugguuaacgga

SEQ ID NO: 2174349 - RNA, 19 nt, Artificial Sequence
  Description of Artificial Sequence: Synthetic oligonucleotide
  Antisense strand to SEQ ID NO: 2174348
uccguuaaccacuagucag

SEQ ID NO: 2174350 - RNA, 19 nt, Artificial Sequence
  Description of Artificial Sequence: Synthetic oligonucleotide
  Sense strand starting at position 1676 of SEQ ID NO: 1883175
gguuaacggacuugcuuua

SEQ ID NO: 2174351 - RNA, 19 nt, Artificial Sequence
  Description of Artificial Sequence: Synthetic oligonucleotide
  Antisense strand to SEQ ID NO: 2174350
uaaagcaaguccguuaacc

SEQ ID NO: 2174352 - RNA, 19 nt, Artificial Sequence
  Description of Artificial Sequence: Synthetic oligonucleotide
  Sense strand starting at position 2450 of SEQ ID NO: 1883175
gggagauguauccgcccuu

SEQ ID NO: 2174353 - RNA, 19 nt, Artificial Sequence
  Description of Artificial Sequence: Synthetic oligonucleotide
  Antisense strand to SEQ ID NO: 2174352
aagggcggauacaucuccc

SEQ ID NO: 2174354 - RNA, 19 nt, Artificial Sequence
  Description of Artificial Sequence: Synthetic oligonucleotide
  Sense strand starting at position 2776 of SEQ ID NO: 1883175
cugguuugaacgcguaacu

SEQ ID NO: 2174355 - RNA, 19 nt, Artificial Sequence
  Description of Artificial Sequence: Synthetic oligonucleotide
  Antisense strand to SEQ ID NO: 2174354
aguuacgcguucaaaccag

SEQ ID NO: 2174356 - RNA, 19 nt, Artificial Sequence
  Description of Artificial Sequence: Synthetic oligonucleotide
  Sense strand starting at position 3313 of SEQ ID NO: 1883175
uuagaacuuuacuauugga

SEQ ID NO: 2174357 - RNA, 19 nt, Artificial Sequence
  Description of Artificial Sequence: Synthetic oligonucleotide
  Antisense strand to SEQ ID NO: 2174356
uccaauaguaaaguucuaa

SEQ ID NO: 2174358 - RNA, 19 nt, Artificial Sequence
  Description of Artificial Sequence: Synthetic oligonucleotide
  Sense strand starting at position 3336 of SEQ ID NO: 1883175
cuaaguaacaguuguguga

SEQ ID NO: 2174359 - RNA, 19 nt, Artificial Sequence
  Description of Artificial Sequence: Synthetic oligonucleotide
  Antisense strand to SEQ ID NO: 2174358
ucacacaacuguuacuuag

SEQ ID NO: 2174360 - RNA, 19 nt, Artificial Sequence
  Description of Artificial Sequence: Synthetic oligonucleotide
  Sense strand starting at position 3585 of SEQ ID NO: 1883175
cugcguaaccaccaucaaa

SEQ ID NO: 2174361 - RNA, 19 nt, Artificial Sequence
  Description of Artificial Sequence: Synthetic oligonucleotide
  Antisense strand to SEQ ID NO: 2174360
uuugauggugguuacgcag

SEQ ID NO: 2174362 - RNA, 19 nt, Artificial Sequence
  Description of Artificial Sequence: Synthetic oligonucleotide
  Sense strand starting at position 3630 of SEQ ID NO: 1883175
gagguuucaucguucucga

SEQ ID NO: 2174363 - RNA, 19 nt, Artificial Sequence
  Description of Artificial Sequence: Synthetic oligonucleotide
  Antisense strand to SEQ ID NO: 2174362
ucgagaacgaugaaaccuc

SEQ ID NO: 2174364 - RNA, 19 nt, Artificial Sequence
  Description of Artificial Sequence: Synthetic oligonucleotide
  Sense strand starting at position 3633 of SEQ ID NO: 1883175
guuucaucguucucgagga

SEQ ID NO: 2174365 - RNA, 19 nt, Artificial Sequence
  Description of Artificial Sequence: Synthetic oligonucleotide
  Antisense strand to SEQ ID NO: 2174364
uccucgagaacgaugaaac

SEQ ID NO: 2174366 - RNA, 19 nt, Artificial Sequence
  Description of Artificial Sequence: Synthetic oligonucleotide
  Sense strand starting at position 3637 of SEQ ID NO: 1883175
caucguucucgaggaugca

SEQ ID NO: 2174367 - RNA, 19 nt, Artificial Sequence
  Description of Artificial Sequence: Synthetic oligonucleotide
  Antisense strand to SEQ ID NO: 2174366
ugcauccucgagaacgaug

SEQ ID NO: 2174368 - RNA, 19 nt, Artificial Sequence
  Description of Artificial Sequence: Synthetic oligonucleotide
  Sense strand starting at position 3679 of SEQ ID NO: 1883175
ugucguauauugcccaaca

SEQ ID NO: 2174369 - RNA, 19 nt, Artificial Sequence
  Description of Artificial Sequence: Synthetic oligonucleotide
  Antisense strand to SEQ ID NO: 2174368
uguugggcaauauacgaca

SEQ ID NO: 2174370 - RNA, 19 nt, Artificial Sequence
  Description of Artificial Sequence: Synthetic oligonucleotide
  Sense strand starting at position 3700 of SEQ ID NO: 1883175
ucuggaaagcccugacaau

SEQ ID NO: 2174371 - RNA, 19 nt, Artificial Sequence
  Description of Artificial Sequence: Synthetic oligonucleotide
  Antisense strand to SEQ ID NO: 2174370
auugucagggcuuuccaga

SEQ ID NO: 2174372 - RNA, 19 nt, Artificial Sequence
  Description of Artificial Sequence: Synthetic oligonucleotide
  Sense strand starting at position 3779 of SEQ ID NO: 1883175
aggagacucuugcugguga

SEQ ID NO: 2174373 - RNA, 19 nt, Artificial Sequence
  Description of Artificial Sequence: Synthetic oligonucleotide
  Antisense strand to SEQ ID NO: 2174372
ucaccagcaagagucuccu

SEQ ID NO: 2174374 - RNA, 19 nt, Artificial Sequence
  Description of Artificial Sequence: Synthetic oligonucleotide
  Sense strand starting at position 3781 of SEQ ID NO: 1883175
gagacucuugcuggugaug

SEQ ID NO: 2174375 - RNA, 19 nt, Artificial Sequence
  Description of Artificial Sequence: Synthetic oligonucleotide
  Antisense strand to SEQ ID NO: 2174374
caucaccagcaagagucuc

SEQ ID NO: 2174376 - RNA, 19 nt, Artificial Sequence
  Description of Artificial Sequence: Synthetic oligonucleotide
  Sense strand starting at position 523 of SEQ ID NO: 1883176
ggaugaagguccuccaaca

SEQ ID NO: 2174377 - RNA, 19 nt, Artificial Sequence
  Description of Artificial Sequence: Synthetic oligonucleotide
  Antisense strand to SEQ ID NO: 2174376
uguuggaggaccuucaucc

SEQ ID NO: 2174378 - RNA, 19 nt, Artificial Sequence
  Description of Artificial Sequence: Synthetic oligonucleotide
  Sense strand starting at position 991 of SEQ ID NO: 1883176
ugggaaugcaaaggguuaa

SEQ ID NO: 2174379 - RNA, 19 nt, Artificial Sequence
  Description of Artificial Sequence: Synthetic oligonucleotide
  Antisense strand to SEQ ID NO: 2174378
uuaacccuuugcauuccca

SEQ ID NO: 2174380 - RNA, 19 nt, Artificial Sequence
  Description of Artificial Sequence: Synthetic oligonucleotide
  Sense strand starting at position 1050 of SEQ ID NO: 1883176
gaaggaggguccuucucua

SEQ ID NO: 2174381 - RNA, 19 nt, Artificial Sequence
  Description of Artificial Sequence: Synthetic oligonucleotide
  Antisense strand to SEQ ID NO: 2174380
uagagaaggacccuccuuc

SEQ ID NO: 2174382 - RNA, 19 nt, Artificial Sequence
  Description of Artificial Sequence: Synthetic oligonucleotide
  Sense strand starting at position 1992 of SEQ ID NO: 1883176
aggagcaauugcccagaaa

SEQ ID NO: 2174383 - RNA, 19 nt, Artificial Sequence
  Description of Artificial Sequence: Synthetic oligonucleotide
  Antisense strand to SEQ ID NO: 2174382
uuucugggcaauugcuccu

SEQ ID NO: 2174384 - RNA, 19 nt, Artificial Sequence
  Description of Artificial Sequence: Synthetic oligonucleotide
  Sense strand starting at position 1993 of SEQ ID NO: 1883176
ggagcaauugcccagaaac

SEQ ID NO: 2174385 - RNA, 19 nt, Artificial Sequence
  Description of Artificial Sequence: Synthetic oligonucleotide
  Antisense strand to SEQ ID NO: 2174384
guuucugggcaauugcucc

SEQ ID NO: 2174386 - RNA, 19 nt, Artificial Sequence
  Description of Artificial Sequence: Synthetic oligonucleotide
  Sense strand starting at position 2070 of SEQ ID NO: 1883176
ggaggugugacgcaauaga

SEQ ID NO: 2174387 - RNA, 19 nt, Artificial Sequence
  Description of Artificial Sequence: Synthetic oligonucleotide
  Antisense strand to SEQ ID NO: 2174386
ucuauugcgucacaccucc

SEQ ID NO: 2174388 - RNA, 19 nt, Artificial Sequence
  Description of Artificial Sequence: Synthetic oligonucleotide
  Sense strand starting at position 2217 of SEQ ID NO: 1883176
gcuuguuaagagggagaca

SEQ ID NO: 2174389 - RNA, 19 nt, Artificial Sequence
  Description of Artificial Sequence: Synthetic oligonucleotide
  Antisense strand to SEQ ID NO: 2174388
ugucucccucuuaacaagc

SEQ ID NO: 2174390 - RNA, 19 nt, Artificial Sequence
  Description of Artificial Sequence: Synthetic oligonucleotide
  Sense strand starting at position 2271 of SEQ ID NO: 1883176
ucagauuucucacugcggu

SEQ ID NO: 2174391 - RNA, 19 nt, Artificial Sequence
  Description of Artificial Sequence: Synthetic oligonucleotide
  Antisense strand to SEQ ID NO: 2174390
accgcagugagaaaucuga

SEQ ID NO: 2174392 - RNA, 19 nt, Artificial Sequence
  Description of Artificial Sequence: Synthetic oligonucleotide
  Sense strand starting at position 2272 of SEQ ID NO: 1883176
cagauuucucacugcgguu

SEQ ID NO: 2174393 - RNA, 19 nt, Artificial Sequence
  Description of Artificial Sequence: Synthetic oligonucleotide
  Antisense strand to SEQ ID NO: 2174392
aaccgcagugagaaaucug

SEQ ID NO: 2174394 - RNA, 19 nt, Artificial Sequence
  Description of Artificial Sequence: Synthetic oligonucleotide
  Sense strand starting at position 2274 of SEQ ID NO: 1883176
gauuucucacugcgguuaa

SEQ ID NO: 2174395 - RNA, 19 nt, Artificial Sequence
  Description of Artificial Sequence: Synthetic oligonucleotide
  Antisense strand to SEQ ID NO: 2174394
uuaaccgcagugagaaauc

SEQ ID NO: 2174396 - RNA, 19 nt, Artificial Sequence
  Description of Artificial Sequence: Synthetic oligonucleotide
  Sense strand starting at position 2287 of SEQ ID NO: 1883176
gguuaaggcauaugauaag

SEQ ID NO: 2174397 - RNA, 19 nt, Artificial Sequence
  Description of Artificial Sequence: Synthetic oligonucleotide
  Antisense strand to SEQ ID NO: 2174396
cuuaucauaugccuuaacc

SEQ ID NO: 2174398 - RNA, 19 nt, Artificial Sequence
  Description of Artificial Sequence: Synthetic oligonucleotide
  Sense strand starting at position 2306 of SEQ ID NO: 1883176
uacuucuggcgguauuaaa

SEQ ID NO: 2174399 - RNA, 19 nt, Artificial Sequence
  Description of Artificial Sequence: Synthetic oligonucleotide
  Antisense strand to SEQ ID NO: 2174398
uuuaauaccgccagaagua

SEQ ID NO: 2174400 - RNA, 19 nt, Artificial Sequence
  Description of Artificial Sequence: Synthetic oligonucleotide
  Sense strand starting at position 2316 of SEQ ID NO: 1883176
gguauuaaaccagguuauu

SEQ ID NO: 2174401 - RNA, 19 nt, Artificial Sequence
  Description of Artificial Sequence: Synthetic oligonucleotide
  Antisense strand to SEQ ID NO: 2174400
aauaaccugguuuaauacc

SEQ ID NO: 2174402 - RNA, 19 nt, Artificial Sequence
  Description of Artificial Sequence: Synthetic oligonucleotide
  Sense strand starting at position 2460 of SEQ ID NO: 1883176
auaguucuaugacuugaau

SEQ ID NO: 2174403 - RNA, 19 nt, Artificial Sequence
  Description of Artificial Sequence: Synthetic oligonucleotide
  Antisense strand to SEQ ID NO: 2174402
auucaagucauagaacuau

SEQ ID NO: 2174404 - RNA, 19 nt, Artificial Sequence
  Description of Artificial Sequence: Synthetic oligonucleotide
  Sense strand starting at position 2572 of SEQ ID NO: 1883176
gcuuaauaagguuacagua

SEQ ID NO: 2174405 - RNA, 19 nt, Artificial Sequence
  Description of Artificial Sequence: Synthetic oligonucleotide
  Antisense strand to SEQ ID NO: 2174404
uacuguaaccuuauuaagc

SEQ ID NO: 2174406 - RNA, 19 nt, Artificial Sequence
  Description of Artificial Sequence: Synthetic oligonucleotide
  Sense strand starting at position 2730 of SEQ ID NO: 1883176
uuuccaauucugggacaga

SEQ ID NO: 2174407 - RNA, 19 nt, Artificial Sequence
  Description of Artificial Sequence: Synthetic oligonucleotide
  Antisense strand to SEQ ID NO: 2174406
ucugucccagaauuggaaa

SEQ ID NO: 2174408 - RNA, 19 nt, Artificial Sequence
  Description of Artificial Sequence: Synthetic oligonucleotide
  Sense strand starting at position 2764 of SEQ ID NO: 1883176
aguggacauuucuagaaca

SEQ ID NO: 2174409 - RNA, 19 nt, Artificial Sequence
  Description of Artificial Sequence: Synthetic oligonucleotide
  Antisense strand to SEQ ID NO: 2174408
uguucuagaaauguccacu

SEQ ID NO: 2174410 - RNA, 19 nt, Artificial Sequence
  Description of Artificial Sequence: Synthetic oligonucleotide
  Sense strand starting at position 2834 of SEQ ID NO: 1883176
accugagucggguaaauag

SEQ ID NO: 2174411 - RNA, 19 nt, Artificial Sequence
  Description of Artificial Sequence: Synthetic oligonucleotide
  Antisense strand to SEQ ID NO: 2174410
cuauuuacccgacucaggu

SEQ ID NO: 2174412 - RNA, 19 nt, Artificial Sequence
  Description of Artificial Sequence: Synthetic oligonucleotide
  Sense strand starting at position 2916 of SEQ ID NO: 1883176
gucgaaucccuuuaucaaa

SEQ ID NO: 2174413 - RNA, 19 nt, Artificial Sequence
  Description of Artificial Sequence: Synthetic oligonucleotide
  Antisense strand to SEQ ID NO: 2174412
uuugauaaagggauucgac

SEQ ID NO: 2174414 - RNA, 19 nt, Artificial Sequence
  Description of Artificial Sequence: Synthetic oligonucleotide
  Sense strand starting at position 2918 of SEQ ID NO: 1883176
cgaaucccuuuaucaaaga

SEQ ID NO: 2174415 - RNA, 19 nt, Artificial Sequence
  Description of Artificial Sequence: Synthetic oligonucleotide
  Antisense strand to SEQ ID NO: 2174414
ucuuugauaaagggauucg

SEQ ID NO: 2174416 - RNA, 19 nt, Artificial Sequence
  Description of Artificial Sequence: Synthetic oligonucleotide
  Sense strand starting at position 2932 of SEQ ID NO: 1883176
aaagaaaguuaugcaguuu

SEQ ID NO: 2174417 - RNA, 19 nt, Artificial Sequence
  Description of Artificial Sequence: Synthetic oligonucleotide
  Antisense strand to SEQ ID NO: 2174416
aaacugcauaacuuucuuu

SEQ ID NO: 2174418 - RNA, 19 nt, Artificial Sequence
  Description of Artificial Sequence: Synthetic oligonucleotide
  Sense strand starting at position 2999 of SEQ ID NO: 1883176
ggucacuuuccauaaagca

SEQ ID NO: 2174419 - RNA, 19 nt, Artificial Sequence
  Description of Artificial Sequence: Synthetic oligonucleotide
  Antisense strand to SEQ ID NO: 2174418
ugcuuuauggaaagugacc

SEQ ID NO: 2174420 - RNA, 19 nt, Artificial Sequence
  Description of Artificial Sequence: Synthetic oligonucleotide
  Sense strand starting at position 3029 of SEQ ID NO: 1883176
ucagcuaccuuccuggaaa

SEQ ID NO: 2174421 - RNA, 19 nt, Artificial Sequence
  Description of Artificial Sequence: Synthetic oligonucleotide
  Antisense strand to SEQ ID NO: 2174420
uuuccaggaagguagcuga

SEQ ID NO: 2174422 - RNA, 19 nt, Artificial Sequence
  Description of Artificial Sequence: Synthetic oligonucleotide
  Sense strand starting at position 3031 of SEQ ID NO: 1883176
agcuaccuuccuggaaauu

SEQ ID NO: 2174423 - RNA, 19 nt, Artificial Sequence
  Description of Artificial Sequence: Synthetic oligonucleotide
  Antisense strand to SEQ ID NO: 2174422
aauuuccaggaagguagcu

SEQ ID NO: 2174424 - RNA, 19 nt, Artificial Sequence
  Description of Artificial Sequence: Synthetic oligonucleotide
  Sense strand starting at position 3032 of SEQ ID NO: 1883176
gcuaccuuccuggaaauug

SEQ ID NO: 2174425 - RNA, 19 nt, Artificial Sequence
  Description of Artificial Sequence: Synthetic oligonucleotide
  Antisense strand to SEQ ID NO: 2174424
caauuuccaggaagguagc

SEQ ID NO: 2174426 - RNA, 19 nt, Artificial Sequence
  Description of Artificial Sequence: Synthetic oligonucleotide
  Sense strand starting at position 3051 of SEQ ID NO: 1883176
ggaauugugcaacaaguga

SEQ ID NO: 2174427 - RNA, 19 nt, Artificial Sequence
  Description of Artificial Sequence: Synthetic oligonucleotide
  Antisense strand to SEQ ID NO: 2174426
ucacuuguugcacaauucc

SEQ ID NO: 2174428 - RNA, 19 nt, Artificial Sequence
  Description of Artificial Sequence: Synthetic oligonucleotide
  Sense strand starting at position 3083 of SEQ ID NO: 1883176
acuagaaaguaaguuaguu

SEQ ID NO: 2174429 - RNA, 19 nt, Artificial Sequence
  Description of Artificial Sequence: Synthetic oligonucleotide
  Antisense strand to SEQ ID NO: 2174428
aacuaacuuacuuucuagu

SEQ ID NO: 2174430 - RNA, 19 nt, Artificial Sequence
  Description of Artificial Sequence: Synthetic oligonucleotide
  Sense strand starting at position 3087 of SEQ ID NO: 1883176
gaaaguaaguuaguuggaa

SEQ ID NO: 2174431 - RNA, 19 nt, Artificial Sequence
  Description of Artificial Sequence: Synthetic oligonucleotide
  Antisense strand to SEQ ID NO: 2174430
uuccaacuaacuuacuuuc

SEQ ID NO: 2174432 - RNA, 19 nt, Artificial Sequence
  Description of Artificial Sequence: Synthetic oligonucleotide
  Sense strand starting at position 3116 of SEQ ID NO: 1883176
uuguuaggucuguagaaua

SEQ ID NO: 2174433 - RNA, 19 nt, Artificial Sequence
  Description of Artificial Sequence: Synthetic oligonucleotide
  Antisense strand to SEQ ID NO: 2174432
uauucuacagaccuaacaa

SEQ ID NO: 2174434 - RNA, 19 nt, Artificial Sequence
  Description of Artificial Sequence: Synthetic oligonucleotide
  Sense strand starting at position 3171 of SEQ ID NO: 1883176
auacaugguuuccuuacua

SEQ ID NO: 2174435 - RNA, 19 nt, Artificial Sequence
  Description of Artificial Sequence: Synthetic oligonucleotide
  Antisense strand to SEQ ID NO: 2174434
uaguaaggaaaccauguau

SEQ ID NO: 2174436 - RNA, 19 nt, Artificial Sequence
  Description of Artificial Sequence: Synthetic oligonucleotide
  Sense strand starting at position 3178 of SEQ ID NO: 1883176
guuuccuuacuagguaaga

SEQ ID NO: 2174437 - RNA, 19 nt, Artificial Sequence
  Description of Artificial Sequence: Synthetic oligonucleotide
  Antisense strand to SEQ ID NO: 2174436
ucuuaccuaguaaggaaac

SEQ ID NO: 2174438 - RNA, 19 nt, Artificial Sequence
  Description of Artificial Sequence: Synthetic oligonucleotide
  Sense strand starting at position 3179 of SEQ ID NO: 1883176
uuuccuuacuagguaagau

SEQ ID NO: 2174439 - RNA, 19 nt, Artificial Sequence
  Description of Artificial Sequence: Synthetic oligonucleotide
  Antisense strand to SEQ ID NO: 2174438
aucuuaccuaguaaggaaa

SEQ ID NO: 2174440 - RNA, 19 nt, Artificial Sequence
  Description of Artificial Sequence: Synthetic oligonucleotide
  Sense strand starting at position 3280 of SEQ ID NO: 1883176
aaguccuuugucuauggau

SEQ ID NO: 2174441 - RNA, 19 nt, Artificial Sequence
  Description of Artificial Sequence: Synthetic oligonucleotide
  Antisense strand to SEQ ID NO: 2174440
auccauagacaaaggacuu

SEQ ID NO: 2174442 - RNA, 19 nt, Artificial Sequence
  Description of Artificial Sequence: Synthetic oligonucleotide
  Sense strand starting at position 3287 of SEQ ID NO: 1883176
uugucuauggaucaaggua

SEQ ID NO: 2174443 - RNA, 19 nt, Artificial Sequence
  Description of Artificial Sequence: Synthetic oligonucleotide
  Antisense strand to SEQ ID NO: 2174442
uaccuugauccauagacaa

SEQ ID NO: 2174444 - RNA, 19 nt, Artificial Sequence
  Description of Artificial Sequence: Synthetic oligonucleotide
  Sense strand starting at position 3353 of SEQ ID NO: 1883176
aagaacaaguaguuuguua

SEQ ID NO: 2174445 - RNA, 19 nt, Artificial Sequence
  Description of Artificial Sequence: Synthetic oligonucleotide
  Antisense strand to SEQ ID NO: 2174444
uaacaaacuacuuguucuu

SEQ ID NO: 2174446 - RNA, 19 nt, Artificial Sequence
  Description of Artificial Sequence: Synthetic oligonucleotide
  Sense strand starting at position 3355 of SEQ ID NO: 1883176
gaacaaguaguuuguuaca

SEQ ID NO: 2174447 - RNA, 19 nt, Artificial Sequence
  Description of Artificial Sequence: Synthetic oligonucleotide
  Antisense strand to SEQ ID NO: 2174446
uguaacaaacuacuuguuc

SEQ ID NO: 2174448 - RNA, 19 nt, Artificial Sequence
  Description of Artificial Sequence: Synthetic oligonucleotide
  Sense strand starting at position 3395 of SEQ ID NO: 1883176
uaugaagugugaucccuga

SEQ ID NO: 2174449 - RNA, 19 nt, Artificial Sequence
  Description of Artificial Sequence: Synthetic oligonucleotide
  Antisense strand to SEQ ID NO: 2174448
ucagggaucacacuucaua

SEQ ID NO: 2174450 - RNA, 19 nt, Artificial Sequence
  Description of Artificial Sequence: Synthetic oligonucleotide
  Sense strand starting at position 3402 of SEQ ID NO: 1883176
ugugaucccugaguuaaag

SEQ ID NO: 2174451 - RNA, 19 nt, Artificial Sequence
  Description of Artificial Sequence: Synthetic oligonucleotide
  Antisense strand to SEQ ID NO: 2174450
cuuuaacucagggaucaca

SEQ ID NO: 2174452 - RNA, 19 nt, Artificial Sequence
  Description of Artificial Sequence: Synthetic oligonucleotide
  Sense strand starting at position 3610 of SEQ ID NO: 1883176
cagcaaucuguguagagua

SEQ ID NO: 2174453 - RNA, 19 nt, Artificial Sequence
  Description of Artificial Sequence: Synthetic oligonucleotide
  Antisense strand to SEQ ID NO: 2174452
uacucuacacagauugcug

SEQ ID NO: 2174454 - RNA, 19 nt, Artificial Sequence
  Description of Artificial Sequence: Synthetic oligonucleotide
  Sense strand starting at position 3970 of SEQ ID NO: 1883176
gguagucauguggaguuca

SEQ ID NO: 2174455 - RNA, 19 nt, Artificial Sequence
  Description of Artificial Sequence: Synthetic oligonucleotide
  Antisense strand to SEQ ID NO: 2174454
ugaacuccacaugacuacc

SEQ ID NO: 2174456 - RNA, 19 nt, Artificial Sequence
  Description of Artificial Sequence: Synthetic oligonucleotide
  Sense strand starting at position 271 of SEQ ID NO: 1883177
auauuauaacggcauauga

SEQ ID NO: 2174457 - RNA, 19 nt, Artificial Sequence
  Description of Artificial Sequence: Synthetic oligonucleotide
  Antisense strand to SEQ ID NO: 2174456
ucauaugccguuauaauau

SEQ ID NO: 2174458 - RNA, 19 nt, Artificial Sequence
  Description of Artificial Sequence: Synthetic oligonucleotide
  Sense strand starting at position 282 of SEQ ID NO: 1883177
gcauaugaaguguaaugau

SEQ ID NO: 2174459 - RNA, 19 nt, Artificial Sequence
  Description of Artificial Sequence: Synthetic oligonucleotide
  Antisense strand to SEQ ID NO: 2174458
aucauuacacuucauaugc

SEQ ID NO: 2174460 - RNA, 19 nt, Artificial Sequence
  Description of Artificial Sequence: Synthetic oligonucleotide
  Sense strand starting at position 415 of SEQ ID NO: 1883177
auuaguucuuucccaugau

SEQ ID NO: 2174461 - RNA, 19 nt, Artificial Sequence
  Description of Artificial Sequence: Synthetic oligonucleotide
  Antisense strand to SEQ ID NO: 2174460
aucaugggaaagaacuaau

SEQ ID NO: 2174462 - RNA, 19 nt, Artificial Sequence
  Description of Artificial Sequence: Synthetic oligonucleotide
  Sense strand starting at position 419 of SEQ ID NO: 1883177
guucuuucccaugaugcua

SEQ ID NO: 2174463 - RNA, 19 nt, Artificial Sequence
  Description of Artificial Sequence: Synthetic oligonucleotide
  Antisense strand to SEQ ID NO: 2174462
uagcaucaugggaaagaac

SEQ ID NO: 2174464 - RNA, 19 nt, Artificial Sequence
  Description of Artificial Sequence: Synthetic oligonucleotide
  Sense strand starting at position 760 of SEQ ID NO: 1883177
accauaucaccagguguau

SEQ ID NO: 2174465 - RNA, 19 nt, Artificial Sequence
  Description of Artificial Sequence: Synthetic oligonucleotide
  Antisense strand to SEQ ID NO: 2174464
auacaccuggugauauggu

SEQ ID NO: 2174466 - RNA, 19 nt, Artificial Sequence
  Description of Artificial Sequence: Synthetic oligonucleotide
  Sense strand starting at position 874 of SEQ ID NO: 1883177
ccaucaccgcguuugguaa

SEQ ID NO: 2174467 - RNA, 19 nt, Artificial Sequence
  Description of Artificial Sequence: Synthetic oligonucleotide
  Antisense strand to SEQ ID NO: 2174466
uuaccaaacgcggugaugg

SEQ ID NO: 2174468 - RNA, 19 nt, Artificial Sequence
  Description of Artificial Sequence: Synthetic oligonucleotide
  Sense strand starting at position 912 of SEQ ID NO: 1883177
ggacauagccuauagucau

SEQ ID NO: 2174469 - RNA, 19 nt, Artificial Sequence
  Description of Artificial Sequence: Synthetic oligonucleotide
  Antisense strand to SEQ ID NO: 2174468
augacuauaggcuaugucc

SEQ ID NO: 2174470 - RNA, 19 nt, Artificial Sequence
  Description of Artificial Sequence: Synthetic oligonucleotide
  Sense strand starting at position 925 of SEQ ID NO: 1883177
agucauacucauggcaaua

SEQ ID NO: 2174471 - RNA, 19 nt, Artificial Sequence
  Description of Artificial Sequence: Synthetic oligonucleotide
  Antisense strand to SEQ ID NO: 2174470
uauugccaugaguaugacu

SEQ ID NO: 2174472 - RNA, 19 nt, Artificial Sequence
  Description of Artificial Sequence: Synthetic oligonucleotide
  Sense strand starting at position 1021 of SEQ ID NO: 1883177
gaaagcucccaagagucuu

SEQ ID NO: 2174473 - RNA, 19 nt, Artificial Sequence
  Description of Artificial Sequence: Synthetic oligonucleotide
  Antisense strand to SEQ ID NO: 2174472
aagacucuugggagcuuuc

SEQ ID NO: 2174474 - RNA, 19 nt, Artificial Sequence
  Description of Artificial Sequence: Synthetic oligonucleotide
  Sense strand starting at position 1104 of SEQ ID NO: 1883177
ugcugucuaccaggaauac

SEQ ID NO: 2174475 - RNA, 19 nt, Artificial Sequence
  Description of Artificial Sequence: Synthetic oligonucleotide
  Antisense strand to SEQ ID NO: 2174474
guauuccugguagacagca

SEQ ID NO: 2174476 - RNA, 19 nt, Artificial Sequence
  Description of Artificial Sequence: Synthetic oligonucleotide
  Sense strand starting at position 1105 of SEQ ID NO: 1883177
gcugucuaccaggaauacu

SEQ ID NO: 2174477 - RNA, 19 nt, Artificial Sequence
  Description of Artificial Sequence: Synthetic oligonucleotide
  Antisense strand to SEQ ID NO: 2174476
aguauuccugguagacagc

SEQ ID NO: 2174478 - RNA, 19 nt, Artificial Sequence
  Description of Artificial Sequence: Synthetic oligonucleotide
  Sense strand starting at position 1434 of SEQ ID NO: 1883177
uuaaccucccgagaagagu

SEQ ID NO: 2174479 - RNA, 19 nt, Artificial Sequence
  Description of Artificial Sequence: Synthetic oligonucleotide
  Antisense strand to SEQ ID NO: 2174478
acucuucucgggagguuaa

SEQ ID NO: 2174480 - RNA, 19 nt, Artificial Sequence
  Description of Artificial Sequence: Synthetic oligonucleotide
  Sense strand starting at position 1511 of SEQ ID NO: 1883177
gaaacuggcugaguccuaa

SEQ ID NO: 2174481 - RNA, 19 nt, Artificial Sequence
  Description of Artificial Sequence: Synthetic oligonucleotide
  Antisense strand to SEQ ID NO: 2174480
uuaggacucagccaguuuc

SEQ ID NO: 2174482 - RNA, 19 nt, Artificial Sequence
  Description of Artificial Sequence: Synthetic oligonucleotide
  Sense strand starting at position 1533 of SEQ ID NO: 1883177
gagauauggcuuugcauag

SEQ ID NO: 2174483 - RNA, 19 nt, Artificial Sequence
  Description of Artificial Sequence: Synthetic oligonucleotide
  Antisense strand to SEQ ID NO: 2174482
cuaugcaaagccauaucuc

SEQ ID NO: 2174484 - RNA, 19 nt, Artificial Sequence
  Description of Artificial Sequence: Synthetic oligonucleotide
  Sense strand starting at position 1549 of SEQ ID NO: 1883177
uaggguagcuacuuaaaua

SEQ ID NO: 2174485 - RNA, 19 nt, Artificial Sequence
  Description of Artificial Sequence: Synthetic oligonucleotide
  Antisense strand to SEQ ID NO: 2174484
uauuuaaguagcuacccua

SEQ ID NO: 2174486 - RNA, 19 nt, Artificial Sequence
  Description of Artificial Sequence: Synthetic oligonucleotide
  Sense strand starting at position 1594 of SEQ ID NO: 1883177
aggugaauccugggaauuc

SEQ ID NO: 2174487 - RNA, 19 nt, Artificial Sequence
  Description of Artificial Sequence: Synthetic oligonucleotide
  Antisense strand to SEQ ID NO: 2174486
gaauucccaggauucaccu

SEQ ID NO: 2174488 - RNA, 19 nt, Artificial Sequence
  Description of Artificial Sequence: Synthetic oligonucleotide
  Sense strand starting at position 1845 of SEQ ID NO: 1883177
auuuguaucucagaaugga

SEQ ID NO: 2174489 - RNA, 19 nt, Artificial Sequence
  Description of Artificial Sequence: Synthetic oligonucleotide
  Antisense strand to SEQ ID NO: 2174488
uccauucugagauacaaau

SEQ ID NO: 2174490 - RNA, 19 nt, Artificial Sequence
  Description of Artificial Sequence: Synthetic oligonucleotide
  Sense strand starting at position 1900 of SEQ ID NO: 1883177
agagcuuacucuuccagau

SEQ ID NO: 2174491 - RNA, 19 nt, Artificial Sequence
  Description of Artificial Sequence: Synthetic oligonucleotide
  Antisense strand to SEQ ID NO: 2174490
aucuggaagaguaagcucu

SEQ ID NO: 2174492 - RNA, 19 nt, Artificial Sequence
  Description of Artificial Sequence: Synthetic oligonucleotide
  Sense strand starting at position 2054 of SEQ ID NO: 1883177
uauagagaggucugguacu

SEQ ID NO: 2174493 - RNA, 19 nt, Artificial Sequence
  Description of Artificial Sequence: Synthetic oligonucleotide
  Antisense strand to SEQ ID NO: 2174492
aguaccagaccucucuaua

SEQ ID NO: 2174494 - RNA, 19 nt, Artificial Sequence
  Description of Artificial Sequence: Synthetic oligonucleotide
  Sense strand starting at position 2263 of SEQ ID NO: 1883177
guacaaaguugggucaauu

SEQ ID NO: 2174495 - RNA, 19 nt, Artificial Sequence
  Description of Artificial Sequence: Synthetic oligonucleotide
  Antisense strand to SEQ ID NO: 2174494
aauugacccaacuuuguac

SEQ ID NO: 2174496 - RNA, 19 nt, Artificial Sequence
  Description of Artificial Sequence: Synthetic oligonucleotide
  Sense strand starting at position 2305 of SEQ ID NO: 1883177
cccaaagcuuucuuggaga

SEQ ID NO: 2174497 - RNA, 19 nt, Artificial Sequence
  Description of Artificial Sequence: Synthetic oligonucleotide
  Antisense strand to SEQ ID NO: 2174496
ucuccaagaaagcuuuggg

SEQ ID NO: 2174498 - RNA, 19 nt, Artificial Sequence
  Description of Artificial Sequence: Synthetic oligonucleotide
  Sense strand starting at position 2338 of SEQ ID NO: 1883177
guacuuugacgacagguga

SEQ ID NO: 2174499 - RNA, 19 nt, Artificial Sequence
  Description of Artificial Sequence: Synthetic oligonucleotide
  Antisense strand to SEQ ID NO: 2174498
ucaccugucgucaaaguac

SEQ ID NO: 2174500 - RNA, 19 nt, Artificial Sequence
  Description of Artificial Sequence: Synthetic oligonucleotide
  Sense strand starting at position 2382 of SEQ ID NO: 1883177
ucaggaaucucauuaugca

SEQ ID NO: 2174501 - RNA, 19 nt, Artificial Sequence
  Description of Artificial Sequence: Synthetic oligonucleotide
  Antisense strand to SEQ ID NO: 2174500
ugcauaaugagauuccuga

SEQ ID NO: 2174502 - RNA, 19 nt, Artificial Sequence
  Description of Artificial Sequence: Synthetic oligonucleotide
  Sense strand starting at position 2452 of SEQ ID NO: 1883177
gggagacaguauucucacu

SEQ ID NO: 2174503 - RNA, 19 nt, Artificial Sequence
  Description of Artificial Sequence: Synthetic oligonucleotide
  Antisense strand to SEQ ID NO: 2174502
agugagaauacugucuccc

SEQ ID NO: 2174504 - RNA, 19 nt, Artificial Sequence
  Description of Artificial Sequence: Synthetic oligonucleotide
  Sense strand starting at position 2538 of SEQ ID NO: 1883177
aguagucucuucucuaaag

SEQ ID NO: 2174505 - RNA, 19 nt, Artificial Sequence
  Description of Artificial Sequence: Synthetic oligonucleotide
  Antisense strand to SEQ ID NO: 2174504
cuuuagagaagagacuacu

SEQ ID NO: 2174506 - RNA, 19 nt, Artificial Sequence
  Description of Artificial Sequence: Synthetic oligonucleotide
  Sense strand starting at position 2614 of SEQ ID NO: 1883177
cugcaauuccuggacaugu

SEQ ID NO: 2174507 - RNA, 19 nt, Artificial Sequence
  Description of Artificial Sequence: Synthetic oligonucleotide
  Antisense strand to SEQ ID NO: 2174506
acauguccaggaauugcag

SEQ ID NO: 2174508 - RNA, 19 nt, Artificial Sequence
  Description of Artificial Sequence: Synthetic oligonucleotide
  Sense strand starting at position 2655 of SEQ ID NO: 1883177
caugcauagugguccaaag

SEQ ID NO: 2174509 - RNA, 19 nt, Artificial Sequence
  Description of Artificial Sequence: Synthetic oligonucleotide
  Antisense strand to SEQ ID NO: 2174508
cuuuggaccacuaugcaug

SEQ ID NO: 2174510 - RNA, 19 nt, Artificial Sequence
  Description of Artificial Sequence: Synthetic oligonucleotide
  Sense strand starting at position 2657 of SEQ ID NO: 1883177
ugcauagugguccaaagaa

SEQ ID NO: 2174511 - RNA, 19 nt, Artificial Sequence
  Description of Artificial Sequence: Synthetic oligonucleotide
  Antisense strand to SEQ ID NO: 2174510
uucuuuggaccacuaugca

SEQ ID NO: 2174512 - RNA, 19 nt, Artificial Sequence
  Description of Artificial Sequence: Synthetic oligonucleotide
  Sense strand starting at position 2716 of SEQ ID NO: 1883177
gaaggugcuguccaauuga

SEQ ID NO: 2174513 - RNA, 19 nt, Artificial Sequence
  Description of Artificial Sequence: Synthetic oligonucleotide
  Antisense strand to SEQ ID NO: 2174512
ucaauuggacagcaccuuc

SEQ ID NO: 2174514 - RNA, 19 nt, Artificial Sequence
  Description of Artificial Sequence: Synthetic oligonucleotide
  Sense strand starting at position 2721 of SEQ ID NO: 1883177
ugcuguccaauugaguaga

SEQ ID NO: 2174515 - RNA, 19 nt, Artificial Sequence
  Description of Artificial Sequence: Synthetic oligonucleotide
  Antisense strand to SEQ ID NO: 2174514
ucuacucaauuggacagca

SEQ ID NO: 2174516 - RNA, 19 nt, Artificial Sequence
  Description of Artificial Sequence: Synthetic oligonucleotide
  Sense strand starting at position 2723 of SEQ ID NO: 1883177
cuguccaauugaguagaga

SEQ ID NO: 2174517 - RNA, 19 nt, Artificial Sequence
  Description of Artificial Sequence: Synthetic oligonucleotide
  Antisense strand to SEQ ID NO: 2174516
ucucuacucaauuggacag

SEQ ID NO: 2174518 - RNA, 19 nt, Artificial Sequence
  Description of Artificial Sequence: Synthetic oligonucleotide
  Sense strand starting at position 2834 of SEQ ID NO: 1883177
gaaugaaggccauggcaau

SEQ ID NO: 2174519 - RNA, 19 nt, Artificial Sequence
  Description of Artificial Sequence: Synthetic oligonucleotide
  Antisense strand to SEQ ID NO: 2174518
auugccauggccuucauuc

SEQ ID NO: 2174520 - RNA, 19 nt, Artificial Sequence
  Description of Artificial Sequence: Synthetic oligonucleotide
  Sense strand starting at position 3084 of SEQ ID NO: 1883177
cuaaacugccucugaggau

SEQ ID NO: 2174521 - RNA, 19 nt, Artificial Sequence
  Description of Artificial Sequence: Synthetic oligonucleotide
  Antisense strand to SEQ ID NO: 2174520
auccucagaggcaguuuag

SEQ ID NO: 2174522 - RNA, 19 nt, Artificial Sequence
  Description of Artificial Sequence: Synthetic oligonucleotide
  Sense strand starting at position 3305 of SEQ ID NO: 1883177
auugcaaugucaccuaaga

SEQ ID NO: 2174523 - RNA, 19 nt, Artificial Sequence
  Description of Artificial Sequence: Synthetic oligonucleotide
  Antisense strand to SEQ ID NO: 2174522
ucuuaggugacauugcaau

SEQ ID NO: 2174524 - RNA, 19 nt, Artificial Sequence
  Description of Artificial Sequence: Synthetic oligonucleotide
  Sense strand starting at position 3393 of SEQ ID NO: 1883177
uccacaugcucuuugagaa

SEQ ID NO: 2174525 - RNA, 19 nt, Artificial Sequence
  Description of Artificial Sequence: Synthetic oligonucleotide
  Antisense strand to SEQ ID NO: 2174524
uucucaaagagcaugugga

SEQ ID NO: 2174526 - RNA, 19 nt, Artificial Sequence
  Description of Artificial Sequence: Synthetic oligonucleotide
  Sense strand starting at position 3394 of SEQ ID NO: 1883177
ccacaugcucuuugagaac

SEQ ID NO: 2174527 - RNA, 19 nt, Artificial Sequence
  Description of Artificial Sequence: Synthetic oligonucleotide
  Antisense strand to SEQ ID NO: 2174526
guucucaaagagcaugugg

SEQ ID NO: 2174528 - RNA, 19 nt, Artificial Sequence
  Description of Artificial Sequence: Synthetic oligonucleotide
  Sense strand starting at position 3403 of SEQ ID NO: 1883177
cuuugagaaccuuguacuc

SEQ ID NO: 2174529 - RNA, 19 nt, Artificial Sequence
  Description of Artificial Sequence: Synthetic oligonucleotide
  Antisense strand to SEQ ID NO: 2174528
gaguacaagguucucaaag

SEQ ID NO: 2174530 - RNA, 19 nt, Artificial Sequence
  Description of Artificial Sequence: Synthetic oligonucleotide
  Sense strand starting at position 3436 of SEQ ID NO: 1883177
uggagacucuucucccuuu

SEQ ID NO: 2174531 - RNA, 19 nt, Artificial Sequence
  Description of Artificial Sequence: Synthetic oligonucleotide
  Antisense strand to SEQ ID NO: 2174530
aaagggagaagagucucca

SEQ ID NO: 2174532 - RNA, 19 nt, Artificial Sequence
  Description of Artificial Sequence: Synthetic oligonucleotide
  Sense strand starting at position 3501 of SEQ ID NO: 1883177
agaaaugagcuaugcaacu

SEQ ID NO: 2174533 - RNA, 19 nt, Artificial Sequence
  Description of Artificial Sequence: Synthetic oligonucleotide
  Antisense strand to SEQ ID NO: 2174532
aguugcauagcucauuucu

SEQ ID NO: 2174534 - RNA, 19 nt, Artificial Sequence
  Description of Artificial Sequence: Synthetic oligonucleotide
  Sense strand starting at position 3762 of SEQ ID NO: 1883177
ggauguugcagggagucaa

SEQ ID NO: 2174535 - RNA, 19 nt, Artificial Sequence
  Description of Artificial Sequence: Synthetic oligonucleotide
  Antisense strand to SEQ ID NO: 2174534
uugacucccugcaacaucc

SEQ ID NO: 2174536 - RNA, 19 nt, Artificial Sequence
  Description of Artificial Sequence: Synthetic oligonucleotide
  Sense strand starting at position 882 of SEQ ID NO: 1883178
acuauuuauuuaggugaca

SEQ ID NO: 2174537 - RNA, 19 nt, Artificial Sequence
  Description of Artificial Sequence: Synthetic oligonucleotide
  Antisense strand to SEQ ID NO: 2174536
ugucaccuaaauaaauagu

SEQ ID NO: 2174538 - RNA, 19 nt, Artificial Sequence
  Description of Artificial Sequence: Synthetic oligonucleotide
  Sense strand starting at position 1212 of SEQ ID NO: 1883178
gugcuaacucuauaagcaa

SEQ ID NO: 2174539 - RNA, 19 nt, Artificial Sequence
  Description of Artificial Sequence: Synthetic oligonucleotide
  Antisense strand to SEQ ID NO: 2174538
uugcuuauagaguuagcac

SEQ ID NO: 2174540 - RNA, 19 nt, Artificial Sequence
  Description of Artificial Sequence: Synthetic oligonucleotide
  Sense strand starting at position 1297 of SEQ ID NO: 1883178
agauaccacugcucuugaa

SEQ ID NO: 2174541 - RNA, 19 nt, Artificial Sequence
  Description of Artificial Sequence: Synthetic oligonucleotide
  Antisense strand to SEQ ID NO: 2174540
uucaagagcagugguaucu

SEQ ID NO: 2174542 - RNA, 19 nt, Artificial Sequence
  Description of Artificial Sequence: Synthetic oligonucleotide
  Sense strand starting at position 1304 of SEQ ID NO: 1883178
acugcucuugaaugggaga

SEQ ID NO: 2174543 - RNA, 19 nt, Artificial Sequence
  Description of Artificial Sequence: Synthetic oligonucleotide
  Antisense strand to SEQ ID NO: 2174542
ucucccauucaagagcagu

SEQ ID NO: 2174544 - RNA, 19 nt, Artificial Sequence
  Description of Artificial Sequence: Synthetic oligonucleotide
  Sense strand starting at position 1306 of SEQ ID NO: 1883178
ugcucuugaaugggagaga

SEQ ID NO: 2174545 - RNA, 19 nt, Artificial Sequence
  Description of Artificial Sequence: Synthetic oligonucleotide
  Antisense strand to SEQ ID NO: 2174544
ucucucccauucaagagca

SEQ ID NO: 2174546 - RNA, 19 nt, Artificial Sequence
  Description of Artificial Sequence: Synthetic oligonucleotide
  Sense strand starting at position 1307 of SEQ ID NO: 1883178
gcucuugaaugggagagaa

SEQ ID NO: 2174547 - RNA, 19 nt, Artificial Sequence
  Description of Artificial Sequence: Synthetic oligonucleotide
  Antisense strand to SEQ ID NO: 2174546
uucucucccauucaagagc

SEQ ID NO: 2174548 - RNA, 19 nt, Artificial Sequence
  Description of Artificial Sequence: Synthetic oligonucleotide
  Sense strand starting at position 1364 of SEQ ID NO: 1883178
auguguuugguugguccaa

SEQ ID NO: 2174549 - RNA, 19 nt, Artificial Sequence
  Description of Artificial Sequence: Synthetic oligonucleotide
  Antisense strand to SEQ ID NO: 2174548
uuggaccaaccaaacacau

SEQ ID NO: 2174550 - RNA, 19 nt, Artificial Sequence
  Description of Artificial Sequence: Synthetic oligonucleotide
  Sense strand starting at position 1365 of SEQ ID NO: 1883178
uguguuugguugguccaaa

SEQ ID NO: 2174551 - RNA, 19 nt, Artificial Sequence
  Description of Artificial Sequence: Synthetic oligonucleotide
  Antisense strand to SEQ ID NO: 2174550
uuuggaccaaccaaacaca

SEQ ID NO: 2174552 - RNA, 19 nt, Artificial Sequence
  Description of Artificial Sequence: Synthetic oligonucleotide
  Sense strand starting at position 1366 of SEQ ID NO: 1883178
guguuugguugguccaaac

SEQ ID NO: 2174553 - RNA, 19 nt, Artificial Sequence
  Description of Artificial Sequence: Synthetic oligonucleotide
  Antisense strand to SEQ ID NO: 2174552
guuuggaccaaccaaacac

SEQ ID NO: 2174554 - RNA, 19 nt, Artificial Sequence
  Description of Artificial Sequence: Synthetic oligonucleotide
  Sense strand starting at position 1376 of SEQ ID NO: 1883178
gguccaaacuuuguggcaa

SEQ ID NO: 2174555 - RNA, 19 nt, Artificial Sequence
  Description of Artificial Sequence: Synthetic oligonucleotide
  Antisense strand to SEQ ID NO: 2174554
uugccacaaaguuuggacc

SEQ ID NO: 2174556 - RNA, 19 nt, Artificial Sequence
  Description of Artificial Sequence: Synthetic oligonucleotide
  Sense strand starting at position 1583 of SEQ ID NO: 1883178
cgaggucacguguuucuuu

SEQ ID NO: 2174557 - RNA, 19 nt, Artificial Sequence
  Description of Artificial Sequence: Synthetic oligonucleotide
  Antisense strand to SEQ ID NO: 2174556
aaagaaacacgugaccucg

SEQ ID NO: 2174558 - RNA, 19 nt, Artificial Sequence
  Description of Artificial Sequence: Synthetic oligonucleotide
  Sense strand starting at position 1584 of SEQ ID NO: 1883178
gaggucacguguuucuuua

SEQ ID NO: 2174559 - RNA, 19 nt, Artificial Sequence
  Description of Artificial Sequence: Synthetic oligonucleotide
  Antisense strand to SEQ ID NO: 2174558
uaaagaaacacgugaccuc

SEQ ID NO: 2174560 - RNA, 19 nt, Artificial Sequence
  Description of Artificial Sequence: Synthetic oligonucleotide
  Sense strand starting at position 1586 of SEQ ID NO: 1883178
ggucacguguuucuuuaca

SEQ ID NO: 2174561 - RNA, 19 nt, Artificial Sequence
  Description of Artificial Sequence: Synthetic oligonucleotide
  Antisense strand to SEQ ID NO: 2174560
uguaaagaaacacgugacc

SEQ ID NO: 2174562 - RNA, 19 nt, Artificial Sequence
  Description of Artificial Sequence: Synthetic oligonucleotide
  Sense strand starting at position 1588 of SEQ ID NO: 1883178
ucacguguuucuuuacaau

SEQ ID NO: 2174563 - RNA, 19 nt, Artificial Sequence
  Description of Artificial Sequence: Synthetic oligonucleotide
  Antisense strand to SEQ ID NO: 2174562
auuguaaagaaacacguga

SEQ ID NO: 2174564 - RNA, 19 nt, Artificial Sequence
  Description of Artificial Sequence: Synthetic oligonucleotide
  Sense strand starting at position 2126 of SEQ ID NO: 1883178
guggcguguggucucuaga

SEQ ID NO: 2174565 - RNA, 19 nt, Artificial Sequence
  Description of Artificial Sequence: Synthetic oligonucleotide
  Antisense strand to SEQ ID NO: 2174564
ucuagagaccacacgccac

SEQ ID NO: 2174566 - RNA, 19 nt, Artificial Sequence
  Description of Artificial Sequence: Synthetic oligonucleotide
  Sense strand starting at position 2129 of SEQ ID NO: 1883178
gcguguggucucuagacaa

SEQ ID NO: 2174567 - RNA, 19 nt, Artificial Sequence
  Description of Artificial Sequence: Synthetic oligonucleotide
  Antisense strand to SEQ ID NO: 2174566
uugucuagagaccacacgc

SEQ ID NO: 2174568 - RNA, 19 nt, Artificial Sequence
  Description of Artificial Sequence: Synthetic oligonucleotide
  Sense strand starting at position 2133 of SEQ ID NO: 1883178
guggucucuagacaacuga

SEQ ID NO: 2174569 - RNA, 19 nt, Artificial Sequence
  Description of Artificial Sequence: Synthetic oligonucleotide
  Antisense strand to SEQ ID NO: 2174568
ucaguugucuagagaccac

SEQ ID NO: 2174570 - RNA, 19 nt, Artificial Sequence
  Description of Artificial Sequence: Synthetic oligonucleotide
  Sense strand starting at position 2165 of SEQ ID NO: 1883178
gaccgugcucaccgauuua

SEQ ID NO: 2174571 - RNA, 19 nt, Artificial Sequence
  Description of Artificial Sequence: Synthetic oligonucleotide
  Antisense strand to SEQ ID NO: 2174570
uaaaucggugagcacgguc

SEQ ID NO: 2174572 - RNA, 19 nt, Artificial Sequence
  Description of Artificial Sequence: Synthetic oligonucleotide
  Sense strand starting at position 2212 of SEQ ID NO: 1883178
acacccuguucucuuuaga

SEQ ID NO: 2174573 - RNA, 19 nt, Artificial Sequence
  Description of Artificial Sequence: Synthetic oligonucleotide
  Antisense strand to SEQ ID NO: 2174572
ucuaaagagaacagggugu

SEQ ID NO: 2174574 - RNA, 19 nt, Artificial Sequence
  Description of Artificial Sequence: Synthetic oligonucleotide
  Sense strand starting at position 2296 of SEQ ID NO: 1883178
ggcuuucaccucgguggaa

SEQ ID NO: 2174575 - RNA, 19 nt, Artificial Sequence
  Description of Artificial Sequence: Synthetic oligonucleotide
  Antisense strand to SEQ ID NO: 2174574
uuccaccgaggugaaagcc

SEQ ID NO: 2174576 - RNA, 19 nt, Artificial Sequence
  Description of Artificial Sequence: Synthetic oligonucleotide
  Sense strand starting at position 2297 of SEQ ID NO: 1883178
gcuuucaccucgguggaau

SEQ ID NO: 2174577 - RNA, 19 nt, Artificial Sequence
  Description of Artificial Sequence: Synthetic oligonucleotide
  Antisense strand to SEQ ID NO: 2174576
auuccaccgaggugaaagc

SEQ ID NO: 2174578 - RNA, 19 nt, Artificial Sequence
  Description of Artificial Sequence: Synthetic oligonucleotide
  Sense strand starting at position 2341 of SEQ ID NO: 1883178
uagggacuguuggcuagaa

SEQ ID NO: 2174579 - RNA, 19 nt, Artificial Sequence
  Description of Artificial Sequence: Synthetic oligonucleotide
  Antisense strand to SEQ ID NO: 2174578
uucuagccaacagucccua

SEQ ID NO: 2174580 - RNA, 19 nt, Artificial Sequence
  Description of Artificial Sequence: Synthetic oligonucleotide
  Sense strand starting at position 2343 of SEQ ID NO: 1883178
gggacuguuggcuagaacu

SEQ ID NO: 2174581 - RNA, 19 nt, Artificial Sequence
  Description of Artificial Sequence: Synthetic oligonucleotide
  Antisense strand to SEQ ID NO: 2174580
aguucuagccaacaguccc

SEQ ID NO: 2174582 - RNA, 19 nt, Artificial Sequence
  Description of Artificial Sequence: Synthetic oligonucleotide
  Sense strand starting at position 2574 of SEQ ID NO: 1883178
ucuccuuccugcuuggaau

SEQ ID NO: 2174583 - RNA, 19 nt, Artificial Sequence
  Description of Artificial Sequence: Synthetic oligonucleotide
  Antisense strand to SEQ ID NO: 2174582
auuccaagcaggaaggaga

SEQ ID NO: 2174584 - RNA, 19 nt, Artificial Sequence
  Description of Artificial Sequence: Synthetic oligonucleotide
  Sense strand starting at position 2706 of SEQ ID NO: 1883178
accugaagaugauaauaau

SEQ ID NO: 2174585 - RNA, 19 nt, Artificial Sequence
  Description of Artificial Sequence: Synthetic oligonucleotide
  Antisense strand to SEQ ID NO: 2174584
auuauuaucaucuucaggu

SEQ ID NO: 2174586 - RNA, 19 nt, Artificial Sequence
  Description of Artificial Sequence: Synthetic oligonucleotide
  Sense strand starting at position 2733 of SEQ ID NO: 1883178
ucuauagagugcuuacaca

SEQ ID NO: 2174587 - RNA, 19 nt, Artificial Sequence
  Description of Artificial Sequence: Synthetic oligonucleotide
  Antisense strand to SEQ ID NO: 2174586
uguguaagcacucuauaga

SEQ ID NO: 2174588 - RNA, 19 nt, Artificial Sequence
  Description of Artificial Sequence: Synthetic oligonucleotide
  Sense strand starting at position 2764 of SEQ ID NO: 1883178
guucuaaaucucuguacuu

SEQ ID NO: 2174589 - RNA, 19 nt, Artificial Sequence
  Description of Artificial Sequence: Synthetic oligonucleotide
  Antisense strand to SEQ ID NO: 2174588
aaguacagagauuuagaac

SEQ ID NO: 2174590 - RNA, 19 nt, Artificial Sequence
  Description of Artificial Sequence: Synthetic oligonucleotide
  Sense strand starting at position 3083 of SEQ ID NO: 1883178
gcaccuggucugcauuauu

SEQ ID NO: 2174591 - RNA, 19 nt, Artificial Sequence
  Description of Artificial Sequence: Synthetic oligonucleotide
  Antisense strand to SEQ ID NO: 2174590
aauaaugcagaccaggugc

SEQ ID NO: 2174592 - RNA, 19 nt, Artificial Sequence
  Description of Artificial Sequence: Synthetic oligonucleotide
  Sense strand starting at position 3086 of SEQ ID NO: 1883178
ccuggucugcauuauuauu

SEQ ID NO: 2174593 - RNA, 19 nt, Artificial Sequence
  Description of Artificial Sequence: Synthetic oligonucleotide
  Antisense strand to SEQ ID NO: 2174592
aauaauaaugcagaccagg

SEQ ID NO: 2174594 - RNA, 19 nt, Artificial Sequence
  Description of Artificial Sequence: Synthetic oligonucleotide
  Sense strand starting at position 3088 of SEQ ID NO: 1883178
uggucugcauuauuauuau

SEQ ID NO: 2174595 - RNA, 19 nt, Artificial Sequence
  Description of Artificial Sequence: Synthetic oligonucleotide
  Antisense strand to SEQ ID NO: 2174594
auaauaauaaugcagacca

SEQ ID NO: 2174596 - RNA, 19 nt, Artificial Sequence
  Description of Artificial Sequence: Synthetic oligonucleotide
  Sense strand starting at position 3125 of SEQ ID NO: 1883178
cuacguagaugagcugaua

SEQ ID NO: 2174597 - RNA, 19 nt, Artificial Sequence
  Description of Artificial Sequence: Synthetic oligonucleotide
  Antisense strand to SEQ ID NO: 2174596
uaucagcucaucuacguag

SEQ ID NO: 2174598 - RNA, 19 nt, Artificial Sequence
  Description of Artificial Sequence: Synthetic oligonucleotide
  Sense strand starting at position 3170 of SEQ ID NO: 1883178
guucuuaauccguggcuaa

SEQ ID NO: 2174599 - RNA, 19 nt, Artificial Sequence
  Description of Artificial Sequence: Synthetic oligonucleotide
  Antisense strand to SEQ ID NO: 2174598
uuagccacggauuaagaac

SEQ ID NO: 2174600 - RNA, 19 nt, Artificial Sequence
  Description of Artificial Sequence: Synthetic oligonucleotide
  Sense strand starting at position 3171 of SEQ ID NO: 1883178
uucuuaauccguggcuaaa

SEQ ID NO: 2174601 - RNA, 19 nt, Artificial Sequence
  Description of Artificial Sequence: Synthetic oligonucleotide
  Antisense strand to SEQ ID NO: 2174600
uuuagccacggauuaagaa

SEQ ID NO: 2174602 - RNA, 19 nt, Artificial Sequence
  Description of Artificial Sequence: Synthetic oligonucleotide
  Sense strand starting at position 3277 of SEQ ID NO: 1883178
uuacuuaaacacugugaga

SEQ ID NO: 2174603 - RNA, 19 nt, Artificial Sequence
  Description of Artificial Sequence: Synthetic oligonucleotide
  Antisense strand to SEQ ID NO: 2174602
ucucacaguguuuaaguaa

SEQ ID NO: 2174604 - RNA, 19 nt, Artificial Sequence
  Description of Artificial Sequence: Synthetic oligonucleotide
  Sense strand starting at position 3319 of SEQ ID NO: 1883178
aggcaauauuagguugaau

SEQ ID NO: 2174605 - RNA, 19 nt, Artificial Sequence
  Description of Artificial Sequence: Synthetic oligonucleotide
  Antisense strand to SEQ ID NO: 2174604
auucaaccuaauauugccu

SEQ ID NO: 2174606 - RNA, 19 nt, Artificial Sequence
  Description of Artificial Sequence: Synthetic oligonucleotide
  Sense strand starting at position 3321 of SEQ ID NO: 1883178
gcaauauuagguugaauug

SEQ ID NO: 2174607 - RNA, 19 nt, Artificial Sequence
  Description of Artificial Sequence: Synthetic oligonucleotide
  Antisense strand to SEQ ID NO: 2174606
caauucaaccuaauauugc

SEQ ID NO: 2174608 - RNA, 19 nt, Artificial Sequence
  Description of Artificial Sequence: Synthetic oligonucleotide
  Sense strand starting at position 3328 of SEQ ID NO: 1883178
uagguugaauugcauuuaa

SEQ ID NO: 2174609 - RNA, 19 nt, Artificial Sequence
  Description of Artificial Sequence: Synthetic oligonucleotide
  Antisense strand to SEQ ID NO: 2174608
uuaaaugcaauucaaccua

SEQ ID NO: 2174610 - RNA, 19 nt, Artificial Sequence
  Description of Artificial Sequence: Synthetic oligonucleotide
  Sense strand starting at position 3443 of SEQ ID NO: 1883178
cauagaaagucauagaaag

SEQ ID NO: 2174611 - RNA, 19 nt, Artificial Sequence
  Description of Artificial Sequence: Synthetic oligonucleotide
  Antisense strand to SEQ ID NO: 2174610
cuuucuaugacuuucuaug

SEQ ID NO: 2174612 - RNA, 19 nt, Artificial Sequence
  Description of Artificial Sequence: Synthetic oligonucleotide
  Sense strand starting at position 3475 of SEQ ID NO: 1883178
aguuguugugagggacaaa

SEQ ID NO: 2174613 - RNA, 19 nt, Artificial Sequence
  Description of Artificial Sequence: Synthetic oligonucleotide
  Antisense strand to SEQ ID NO: 2174612
uuugucccucacaacaacu

SEQ ID NO: 2174614 - RNA, 19 nt, Artificial Sequence
  Description of Artificial Sequence: Synthetic oligonucleotide
  Sense strand starting at position 3476 of SEQ ID NO: 1883178
guuguugugagggacaaau

SEQ ID NO: 2174615 - RNA, 19 nt, Artificial Sequence
  Description of Artificial Sequence: Synthetic oligonucleotide
  Antisense strand to SEQ ID NO: 2174614
auuugucccucacaacaac

SEQ ID NO: 2174616 - RNA, 19 nt, Artificial Sequence
  Description of Artificial Sequence: Synthetic oligonucleotide
  Sense strand starting at position 566 of SEQ ID NO: 1883179
aaggaauacguauguaaga

SEQ ID NO: 2174617 - RNA, 19 nt, Artificial Sequence
  Description of Artificial Sequence: Synthetic oligonucleotide
  Antisense strand to SEQ ID NO: 2174616
ucuuacauacguauuccuu

SEQ ID NO: 2174618 - RNA, 19 nt, Artificial Sequence
  Description of Artificial Sequence: Synthetic oligonucleotide
  Sense strand starting at position 567 of SEQ ID NO: 1883179
aggaauacguauguaagaa

SEQ ID NO: 2174619 - RNA, 19 nt, Artificial Sequence
  Description of Artificial Sequence: Synthetic oligonucleotide
  Antisense strand to SEQ ID NO: 2174618
uucuuacauacguauuccu

SEQ ID NO: 2174620 - RNA, 19 nt, Artificial Sequence
  Description of Artificial Sequence: Synthetic oligonucleotide
  Sense strand starting at position 626 of SEQ ID NO: 1883179
gaggaaggguaacagauua

SEQ ID NO: 2174621 - RNA, 19 nt, Artificial Sequence
  Description of Artificial Sequence: Synthetic oligonucleotide
  Antisense strand to SEQ ID NO: 2174620
uaaucuguuacccuuccuc

SEQ ID NO: 2174622 - RNA, 19 nt, Artificial Sequence
  Description of Artificial Sequence: Synthetic oligonucleotide
  Sense strand starting at position 678 of SEQ ID NO: 1883179
ggaagaacauaacagucau

SEQ ID NO: 2174623 - RNA, 19 nt, Artificial Sequence
  Description of Artificial Sequence: Synthetic oligonucleotide
  Antisense strand to SEQ ID NO: 2174622
augacuguuauguucuucc

SEQ ID NO: 2174624 - RNA, 19 nt, Artificial Sequence
  Description of Artificial Sequence: Synthetic oligonucleotide
  Sense strand starting at position 865 of SEQ ID NO: 1883179
aacggaugugagcaauuaa

SEQ ID NO: 2174625 - RNA, 19 nt, Artificial Sequence
  Description of Artificial Sequence: Synthetic oligonucleotide
  Antisense strand to SEQ ID NO: 2174624
uuaauugcucacauccguu

SEQ ID NO: 2174626 - RNA, 19 nt, Artificial Sequence
  Description of Artificial Sequence: Synthetic oligonucleotide
  Sense strand starting at position 990 of SEQ ID NO: 1883179
cacaguggucucuaucagu

SEQ ID NO: 2174627 - RNA, 19 nt, Artificial Sequence
  Description of Artificial Sequence: Synthetic oligonucleotide
  Antisense strand to SEQ ID NO: 2174626
acugauagagaccacugug

SEQ ID NO: 2174628 - RNA, 19 nt, Artificial Sequence
  Description of Artificial Sequence: Synthetic oligonucleotide
  Sense strand starting at position 1014 of SEQ ID NO: 1883179
ccagucugagacugaacaa

SEQ ID NO: 2174629 - RNA, 19 nt, Artificial Sequence
  Description of Artificial Sequence: Synthetic oligonucleotide
  Antisense strand to SEQ ID NO: 2174628
uuguucagucucagacugg

SEQ ID NO: 2174630 - RNA, 19 nt, Artificial Sequence
  Description of Artificial Sequence: Synthetic oligonucleotide
  Sense strand starting at position 1055 of SEQ ID NO: 1883179
gagaaaugcuauccgagga

SEQ ID NO: 2174631 - RNA, 19 nt, Artificial Sequence
  Description of Artificial Sequence: Synthetic oligonucleotide
  Antisense strand to SEQ ID NO: 2174630
uccucggauagcauuucuc

SEQ ID NO: 2174632 - RNA, 19 nt, Artificial Sequence
  Description of Artificial Sequence: Synthetic oligonucleotide
  Sense strand starting at position 1056 of SEQ ID NO: 1883179
agaaaugcuauccgaggaa

SEQ ID NO: 2174633 - RNA, 19 nt, Artificial Sequence
  Description of Artificial Sequence: Synthetic oligonucleotide
  Antisense strand to SEQ ID NO: 2174632
uuccucggauagcauuucu

SEQ ID NO: 2174634 - RNA, 19 nt, Artificial Sequence
  Description of Artificial Sequence: Synthetic oligonucleotide
  Sense strand starting at position 1059 of SEQ ID NO: 1883179
aaugcuauccgaggaacuu

SEQ ID NO: 2174635 - RNA, 19 nt, Artificial Sequence
  Description of Artificial Sequence: Synthetic oligonucleotide
  Antisense strand to SEQ ID NO: 2174634
aaguuccucggauagcauu

SEQ ID NO: 2174636 - RNA, 19 nt, Artificial Sequence
  Description of Artificial Sequence: Synthetic oligonucleotide
  Sense strand starting at position 1060 of SEQ ID NO: 1883179
augcuauccgaggaacuua

SEQ ID NO: 2174637 - RNA, 19 nt, Artificial Sequence
  Description of Artificial Sequence: Synthetic oligonucleotide
  Antisense strand to SEQ ID NO: 2174636
uaaguuccucggauagcau

SEQ ID NO: 2174638 - RNA, 19 nt, Artificial Sequence
  Description of Artificial Sequence: Synthetic oligonucleotide
  Sense strand starting at position 1101 of SEQ ID NO: 1883179
uugagaaugccuggaguuu

SEQ ID NO: 2174639 - RNA, 19 nt, Artificial Sequence
  Description of Artificial Sequence: Synthetic oligonucleotide
  Antisense strand to SEQ ID NO: 2174638
aaacuccaggcauucucaa

SEQ ID NO: 2174640 - RNA, 19 nt, Artificial Sequence
  Description of Artificial Sequence: Synthetic oligonucleotide
  Sense strand starting at position 1151 of SEQ ID NO: 1883179
cugggcuauuaaucauuau

SEQ ID NO: 2174641 - RNA, 19 nt, Artificial Sequence
  Description of Artificial Sequence: Synthetic oligonucleotide
  Antisense strand to SEQ ID NO: 2174640
auaaugauuaauagcccag

SEQ ID NO: 2174642 - RNA, 19 nt, Artificial Sequence
  Description of Artificial Sequence: Synthetic oligonucleotide
  Sense strand starting at position 1528 of SEQ ID NO: 1883179
aggagagccuuuguuucga

SEQ ID NO: 2174643 - RNA, 19 nt, Artificial Sequence
  Description of Artificial Sequence: Synthetic oligonucleotide
  Antisense strand to SEQ ID NO: 2174642
ucgaaacaaaggcucuccu

SEQ ID NO: 2174644 - RNA, 19 nt, Artificial Sequence
  Description of Artificial Sequence: Synthetic oligonucleotide
  Sense strand starting at position 1571 of SEQ ID NO: 1883179
gcauguuuaagggaagcga

SEQ ID NO: 2174645 - RNA, 19 nt, Artificial Sequence
  Description of Artificial Sequence: Synthetic oligonucleotide
  Antisense strand to SEQ ID NO: 2174644
ucgcuucccuuaaacaugc

SEQ ID NO: 2174646 - RNA, 19 nt, Artificial Sequence
  Description of Artificial Sequence: Synthetic oligonucleotide
  Sense strand starting at position 2101 of SEQ ID NO: 1883179
gugacuaaccuucgaacca

SEQ ID NO: 2174647 - RNA, 19 nt, Artificial Sequence
  Description of Artificial Sequence: Synthetic oligonucleotide
  Antisense strand to SEQ ID NO: 2174646
ugguucgaagguuagucac

SEQ ID NO: 2174648 - RNA, 19 nt, Artificial Sequence
  Description of Artificial Sequence: Synthetic oligonucleotide
  Sense strand starting at position 2193 of SEQ ID NO: 1883179
acaguucuccagcgagaaa

SEQ ID NO: 2174649 - RNA, 19 nt, Artificial Sequence
  Description of Artificial Sequence: Synthetic oligonucleotide
  Antisense strand to SEQ ID NO: 2174648
uuucucgcuggagaacugu

SEQ ID NO: 2174650 - RNA, 19 nt, Artificial Sequence
  Description of Artificial Sequence: Synthetic oligonucleotide
  Sense strand starting at position 2234 of SEQ ID NO: 1883179
ugcaacgggccucaauauu

SEQ ID NO: 2174651 - RNA, 19 nt, Artificial Sequence
  Description of Artificial Sequence: Synthetic oligonucleotide
  Antisense strand to SEQ ID NO: 2174650
aauauugaggcccguugca

SEQ ID NO: 2174652 - RNA, 19 nt, Artificial Sequence
  Description of Artificial Sequence: Synthetic oligonucleotide
  Sense strand starting at position 2335 of SEQ ID NO: 1883179
cugagauuuccucgcaccu

SEQ ID NO: 2174653 - RNA, 19 nt, Artificial Sequence
  Description of Artificial Sequence: Synthetic oligonucleotide
  Antisense strand to SEQ ID NO: 2174652
aggugcgaggaaaucucag

SEQ ID NO: 2174654 - RNA, 19 nt, Artificial Sequence
  Description of Artificial Sequence: Synthetic oligonucleotide
  Sense strand starting at position 2449 of SEQ ID NO: 1883179
cugcuagcucccgauacuu

SEQ ID NO: 2174655 - RNA, 19 nt, Artificial Sequence
  Description of Artificial Sequence: Synthetic oligonucleotide
  Antisense strand to SEQ ID NO: 2174654
aaguaucgggagcuagcag

SEQ ID NO: 2174656 - RNA, 19 nt, Artificial Sequence
  Description of Artificial Sequence: Synthetic oligonucleotide
  Sense strand starting at position 2462 of SEQ ID NO: 1883179
auacuuagagccuaguuga

SEQ ID NO: 2174657 - RNA, 19 nt, Artificial Sequence
  Description of Artificial Sequence: Synthetic oligonucleotide
  Antisense strand to SEQ ID NO: 2174656
ucaacuaggcucuaaguau

SEQ ID NO: 2174658 - RNA, 19 nt, Artificial Sequence
  Description of Artificial Sequence: Synthetic oligonucleotide
  Sense strand starting at position 2472 of SEQ ID NO: 1883179
ccuaguugauccuuucgau

SEQ ID NO: 2174659 - RNA, 19 nt, Artificial Sequence
  Description of Artificial Sequence: Synthetic oligonucleotide
  Antisense strand to SEQ ID NO: 2174658
aucgaaaggaucaacuagg

SEQ ID NO: 2174660 - RNA, 19 nt, Artificial Sequence
  Description of Artificial Sequence: Synthetic oligonucleotide
  Sense strand starting at position 2505 of SEQ ID NO: 1883179
cgcuguuaacccuauacau

SEQ ID NO: 2174661 - RNA, 19 nt, Artificial Sequence
  Description of Artificial Sequence: Synthetic oligonucleotide
  Antisense strand to SEQ ID NO: 2174660
auguauaggguuaacagcg

SEQ ID NO: 2174662 - RNA, 19 nt, Artificial Sequence
  Description of Artificial Sequence: Synthetic oligonucleotide
  Sense strand starting at position 2894 of SEQ ID NO: 1883179
agccuaagagauugagguu

SEQ ID NO: 2174663 - RNA, 19 nt, Artificial Sequence
  Description of Artificial Sequence: Synthetic oligonucleotide
  Antisense strand to SEQ ID NO: 2174662
aaccucaaucucuuaggcu

SEQ ID NO: 2174664 - RNA, 19 nt, Artificial Sequence
  Description of Artificial Sequence: Synthetic oligonucleotide
  Sense strand starting at position 2923 of SEQ ID NO: 1883179
gugauugugccgcuacacu

SEQ ID NO: 2174665 - RNA, 19 nt, Artificial Sequence
  Description of Artificial Sequence: Synthetic oligonucleotide
  Antisense strand to SEQ ID NO: 2174664
aguguagcggcacaaucac

SEQ ID NO: 2174666 - RNA, 19 nt, Artificial Sequence
  Description of Artificial Sequence: Synthetic oligonucleotide
  Sense strand starting at position 2966 of SEQ ID NO: 1883179
ccugucucacaacgagaaa

SEQ ID NO: 2174667 - RNA, 19 nt, Artificial Sequence
  Description of Artificial Sequence: Synthetic oligonucleotide
  Antisense strand to SEQ ID NO: 2174666
uuucucguugugagacagg

SEQ ID NO: 2174668 - RNA, 19 nt, Artificial Sequence
  Description of Artificial Sequence: Synthetic oligonucleotide
  Sense strand starting at position 3202 of SEQ ID NO: 1883179
cagaguggguaauugaaua

SEQ ID NO: 2174669 - RNA, 19 nt, Artificial Sequence
  Description of Artificial Sequence: Synthetic oligonucleotide
  Antisense strand to SEQ ID NO: 2174668
uauucaauuacccacucug

SEQ ID NO: 2174670 - RNA, 19 nt, Artificial Sequence
  Description of Artificial Sequence: Synthetic oligonucleotide
  Sense strand starting at position 3340 of SEQ ID NO: 1883179
ggacucuugucccucuaau

SEQ ID NO: 2174671 - RNA, 19 nt, Artificial Sequence
  Description of Artificial Sequence: Synthetic oligonucleotide
  Antisense strand to SEQ ID NO: 2174670
auuagagggacaagagucc

SEQ ID NO: 2174672 - RNA, 19 nt, Artificial Sequence
  Description of Artificial Sequence: Synthetic oligonucleotide
  Sense strand starting at position 3391 of SEQ ID NO: 1883179
cccagagaguucuuugcuu

SEQ ID NO: 2174673 - RNA, 19 nt, Artificial Sequence
  Description of Artificial Sequence: Synthetic oligonucleotide
  Antisense strand to SEQ ID NO: 2174672
aagcaaagaacucucuggg

SEQ ID NO: 2174674 - RNA, 19 nt, Artificial Sequence
  Description of Artificial Sequence: Synthetic oligonucleotide
  Sense strand starting at position 3393 of SEQ ID NO: 1883179
cagagaguucuuugcuuug

SEQ ID NO: 2174675 - RNA, 19 nt, Artificial Sequence
  Description of Artificial Sequence: Synthetic oligonucleotide
  Antisense strand to SEQ ID NO: 2174674
caaagcaaagaacucucug

SEQ ID NO: 2174676 - RNA, 19 nt, Artificial Sequence
  Description of Artificial Sequence: Synthetic oligonucleotide
  Sense strand starting at position 3402 of SEQ ID NO: 1883179
cuuugcuuuguccaggaaa

SEQ ID NO: 2174677 - RNA, 19 nt, Artificial Sequence
  Description of Artificial Sequence: Synthetic oligonucleotide
  Antisense strand to SEQ ID NO: 2174676
uuuccuggacaaagcaaag

SEQ ID NO: 2174678 - RNA, 19 nt, Artificial Sequence
  Description of Artificial Sequence: Synthetic oligonucleotide
  Sense strand starting at position 3404 of SEQ ID NO: 1883179
uugcuuuguccaggaaaga

SEQ ID NO: 2174679 - RNA, 19 nt, Artificial Sequence
  Description of Artificial Sequence: Synthetic oligonucleotide
  Antisense strand to SEQ ID NO: 2174678
ucuuuccuggacaaagcaa

SEQ ID NO: 2174680 - RNA, 19 nt, Artificial Sequence
  Description of Artificial Sequence: Synthetic oligonucleotide
  Sense strand starting at position 3405 of SEQ ID NO: 1883179
ugcuuuguccaggaaagaa

SEQ ID NO: 2174681 - RNA, 19 nt, Artificial Sequence
  Description of Artificial Sequence: Synthetic oligonucleotide
  Antisense strand to SEQ ID NO: 2174680
uucuuuccuggacaaagca

SEQ ID NO: 2174682 - RNA, 19 nt, Artificial Sequence
  Description of Artificial Sequence: Synthetic oligonucleotide
  Sense strand starting at position 3545 of SEQ ID NO: 1883179
ggagguucugcaggcauau

SEQ ID NO: 2174683 - RNA, 19 nt, Artificial Sequence
  Description of Artificial Sequence: Synthetic oligonucleotide
  Antisense strand to SEQ ID NO: 2174682
auaugccugcagaaccucc

SEQ ID NO: 2174684 - RNA, 19 nt, Artificial Sequence
  Description of Artificial Sequence: Synthetic oligonucleotide
  Sense strand starting at position 3642 of SEQ ID NO: 1883179
gucaucgggucauuaccau

SEQ ID NO: 2174685 - RNA, 19 nt, Artificial Sequence
  Description of Artificial Sequence: Synthetic oligonucleotide
  Antisense strand to SEQ ID NO: 2174684
augguaaugacccgaugac

SEQ ID NO: 2174686 - RNA, 19 nt, Artificial Sequence
  Description of Artificial Sequence: Synthetic oligonucleotide
  Sense strand starting at position 3813 of SEQ ID NO: 1883179
ccucacuucugagcaguau

SEQ ID NO: 2174687 - RNA, 19 nt, Artificial Sequence
  Description of Artificial Sequence: Synthetic oligonucleotide
  Antisense strand to SEQ ID NO: 2174686
auacugcucagaagugagg

SEQ ID NO: 2174688 - RNA, 19 nt, Artificial Sequence
  Description of Artificial Sequence: Synthetic oligonucleotide
  Sense strand starting at position 3817 of SEQ ID NO: 1883179
acuucugagcaguauguuu

SEQ ID NO: 2174689 - RNA, 19 nt, Artificial Sequence
  Description of Artificial Sequence: Synthetic oligonucleotide
  Antisense strand to SEQ ID NO: 2174688
aaacauacugcucagaagu

SEQ ID NO: 2174690 - RNA, 19 nt, Artificial Sequence
  Description of Artificial Sequence: Synthetic oligonucleotide
  Sense strand starting at position 3950 of SEQ ID NO: 1883179
cccugucagugugugacaa

SEQ ID NO: 2174691 - RNA, 19 nt, Artificial Sequence
  Description of Artificial Sequence: Synthetic oligonucleotide
  Antisense strand to SEQ ID NO: 2174690
uugucacacacugacaggg

SEQ ID NO: 2174692 - RNA, 19 nt, Artificial Sequence
  Description of Artificial Sequence: Synthetic oligonucleotide
  Sense strand starting at position 3977 of SEQ ID NO: 1883179
uggguucaguguucuugaa

SEQ ID NO: 2174693 - RNA, 19 nt, Artificial Sequence
  Description of Artificial Sequence: Synthetic oligonucleotide
  Antisense strand to SEQ ID NO: 2174692
uucaagaacacugaaccca

SEQ ID NO: 2174694 - RNA, 19 nt, Artificial Sequence
  Description of Artificial Sequence: Synthetic oligonucleotide
  Sense strand starting at position 3979 of SEQ ID NO: 1883179
gguucaguguucuugaaag

SEQ ID NO: 2174695 - RNA, 19 nt, Artificial Sequence
  Description of Artificial Sequence: Synthetic oligonucleotide
  Antisense strand to SEQ ID NO: 2174694
cuuucaagaacacugaacc

SEQ ID NO: 2174696 - RNA, 19 nt, Artificial Sequence
  Description of Artificial Sequence: Synthetic oligonucleotide
  Sense strand starting at position 558 of SEQ ID NO: 1883180
gggacaauuucggaauuga

SEQ ID NO: 2174697 - RNA, 19 nt, Artificial Sequence
  Description of Artificial Sequence: Synthetic oligonucleotide
  Antisense strand to SEQ ID NO: 2174696
ucaauuccgaaauuguccc

SEQ ID NO: 2174698 - RNA, 19 nt, Artificial Sequence
  Description of Artificial Sequence: Synthetic oligonucleotide
  Sense strand starting at position 639 of SEQ ID NO: 1883180
guagcacaaugauuaucaa

SEQ ID NO: 2174699 - RNA, 19 nt, Artificial Sequence
  Description of Artificial Sequence: Synthetic oligonucleotide
  Antisense strand to SEQ ID NO: 2174698
uugauaaucauugugcuac

SEQ ID NO: 2174700 - RNA, 19 nt, Artificial Sequence
  Description of Artificial Sequence: Synthetic oligonucleotide
  Sense strand starting at position 642 of SEQ ID NO: 1883180
gcacaaugauuaucaagau

SEQ ID NO: 2174701 - RNA, 19 nt, Artificial Sequence
  Description of Artificial Sequence: Synthetic oligonucleotide
  Antisense strand to SEQ ID NO: 2174700
aucuugauaaucauugugc

SEQ ID NO: 2174702 - RNA, 19 nt, Artificial Sequence
  Description of Artificial Sequence: Synthetic oligonucleotide
  Sense strand starting at position 671 of SEQ ID NO: 1883180
guguugugugguuuggcaa

SEQ ID NO: 2174703 - RNA, 19 nt, Artificial Sequence
  Description of Artificial Sequence: Synthetic oligonucleotide
  Antisense strand to SEQ ID NO: 2174702
uugccaaaccacacaacac

SEQ ID NO: 2174704 - RNA, 19 nt, Artificial Sequence
  Description of Artificial Sequence: Synthetic oligonucleotide
  Sense strand starting at position 838 of SEQ ID NO: 1883180
ucaaguaaagcuugacaau

SEQ ID NO: 2174705 - RNA, 19 nt, Artificial Sequence
  Description of Artificial Sequence: Synthetic oligonucleotide
  Antisense strand to SEQ ID NO: 2174704
auugucaagcuuuacuuga

SEQ ID NO: 2174706 - RNA, 19 nt, Artificial Sequence
  Description of Artificial Sequence: Synthetic oligonucleotide
  Sense strand starting at position 855 of SEQ ID NO: 1883180
auaacuuggcugcacaaau

SEQ ID NO: 2174707 - RNA, 19 nt, Artificial Sequence
  Description of Artificial Sequence: Synthetic oligonucleotide
  Antisense strand to SEQ ID NO: 2174706
auuugugcagccaaguuau

SEQ ID NO: 2174708 - RNA, 19 nt, Artificial Sequence
  Description of Artificial Sequence: Synthetic oligonucleotide
  Sense strand starting at position 938 of SEQ ID NO: 1883180
auugaaucgaguuggaaua

SEQ ID NO: 2174709 - RNA, 19 nt, Artificial Sequence
  Description of Artificial Sequence: Synthetic oligonucleotide
  Antisense strand to SEQ ID NO: 2174708
uauuccaacucgauucaau

SEQ ID NO: 2174710 - RNA, 19 nt, Artificial Sequence
  Description of Artificial Sequence: Synthetic oligonucleotide
  Sense strand starting at position 939 of SEQ ID NO: 1883180
uugaaucgaguuggaauaa

SEQ ID NO: 2174711 - RNA, 19 nt, Artificial Sequence
  Description of Artificial Sequence: Synthetic oligonucleotide
  Antisense strand to SEQ ID NO: 2174710
uuauuccaacucgauucaa

SEQ ID NO: 2174712 - RNA, 19 nt, Artificial Sequence
  Description of Artificial Sequence: Synthetic oligonucleotide
  Sense strand starting at position 981 of SEQ ID NO: 1883180
ugagucaaauggcucaaau

SEQ ID NO: 2174713 - RNA, 19 nt, Artificial Sequence
  Description of Artificial Sequence: Synthetic oligonucleotide
  Antisense strand to SEQ ID NO: 2174712
auuugagccauuugacuca

SEQ ID NO: 2174714 - RNA, 19 nt, Artificial Sequence
  Description of Artificial Sequence: Synthetic oligonucleotide
  Sense strand starting at position 983 of SEQ ID NO: 1883180
agucaaauggcucaaauca

SEQ ID NO: 2174715 - RNA, 19 nt, Artificial Sequence
  Description of Artificial Sequence: Synthetic oligonucleotide
  Antisense strand to SEQ ID NO: 2174714
ugauuugagccauuugacu

SEQ ID NO: 2174716 - RNA, 19 nt, Artificial Sequence
  Description of Artificial Sequence: Synthetic oligonucleotide
  Sense strand starting at position 1028 of SEQ ID NO: 1883180
ggugcuugagcugugugau

SEQ ID NO: 2174717 - RNA, 19 nt, Artificial Sequence
  Description of Artificial Sequence: Synthetic oligonucleotide
  Antisense strand to SEQ ID NO: 2174716
aucacacagcucaagcacc

SEQ ID NO: 2174718 - RNA, 19 nt, Artificial Sequence
  Description of Artificial Sequence: Synthetic oligonucleotide
  Sense strand starting at position 1231 of SEQ ID NO: 1883180
caggauauuuaauaaguga

SEQ ID NO: 2174719 - RNA, 19 nt, Artificial Sequence
  Description of Artificial Sequence: Synthetic oligonucleotide
  Antisense strand to SEQ ID NO: 2174718
ucacuuauuaaauauccug

SEQ ID NO: 2174720 - RNA, 19 nt, Artificial Sequence
  Description of Artificial Sequence: Synthetic oligonucleotide
  Sense strand starting at position 1339 of SEQ ID NO: 1883180
auggaaacggauuguuaac

SEQ ID NO: 2174721 - RNA, 19 nt, Artificial Sequence
  Description of Artificial Sequence: Synthetic oligonucleotide
  Antisense strand to SEQ ID NO: 2174720
guuaacaauccguuuccau

SEQ ID NO: 2174722 - RNA, 19 nt, Artificial Sequence
  Description of Artificial Sequence: Synthetic oligonucleotide
  Sense strand starting at position 1391 of SEQ ID NO: 1883180
guccaaaccugguuaacag

SEQ ID NO: 2174723 - RNA, 19 nt, Artificial Sequence
  Description of Artificial Sequence: Synthetic oligonucleotide
  Antisense strand to SEQ ID NO: 2174722
cuguuaaccagguuuggac

SEQ ID NO: 2174724 - RNA, 19 nt, Artificial Sequence
  Description of Artificial Sequence: Synthetic oligonucleotide
  Sense strand starting at position 1417 of SEQ ID NO: 1883180
agaguucaugggcgaagga

SEQ ID NO: 2174725 - RNA, 19 nt, Artificial Sequence
  Description of Artificial Sequence: Synthetic oligonucleotide
  Antisense strand to SEQ ID NO: 2174724
uccuucgcccaugaacucu

SEQ ID NO: 2174726 - RNA, 19 nt, Artificial Sequence
  Description of Artificial Sequence: Synthetic oligonucleotide
  Sense strand starting at position 1646 of SEQ ID NO: 1883180
agguuauagcaucaccuuu

SEQ ID NO: 2174727 - RNA, 19 nt, Artificial Sequence
  Description of Artificial Sequence: Synthetic oligonucleotide
  Antisense strand to SEQ ID NO: 2174726
aaaggugaugcuauaaccu

SEQ ID NO: 2174728 - RNA, 19 nt, Artificial Sequence
  Description of Artificial Sequence: Synthetic oligonucleotide
  Sense strand starting at position 1752 of SEQ ID NO: 1883180
aagcgucuuccggugcaau

SEQ ID NO: 2174729 - RNA, 19 nt, Artificial Sequence
  Description of Artificial Sequence: Synthetic oligonucleotide
  Antisense strand to SEQ ID NO: 2174728
auugcaccggaagacgcuu

SEQ ID NO: 2174730 - RNA, 19 nt, Artificial Sequence
  Description of Artificial Sequence: Synthetic oligonucleotide
  Sense strand starting at position 2093 of SEQ ID NO: 1883180
gggcuugccggaaguugua

SEQ ID NO: 2174731 - RNA, 19 nt, Artificial Sequence
  Description of Artificial Sequence: Synthetic oligonucleotide
  Antisense strand to SEQ ID NO: 2174730
uacaacuuccggcaagccc

SEQ ID NO: 2174732 - RNA, 19 nt, Artificial Sequence
  Description of Artificial Sequence: Synthetic oligonucleotide
  Sense strand starting at position 3151 of SEQ ID NO: 1883180
gugugauguggagauggau

SEQ ID NO: 2174733 - RNA, 19 nt, Artificial Sequence
  Description of Artificial Sequence: Synthetic oligonucleotide
  Antisense strand to SEQ ID NO: 2174732
auccaucuccacaucacac

SEQ ID NO: 2174734 - RNA, 19 nt, Artificial Sequence
  Description of Artificial Sequence: Synthetic oligonucleotide
  Sense strand starting at position 3186 of SEQ ID NO: 1883180
ucgguagauaggugggaaa

SEQ ID NO: 2174735 - RNA, 19 nt, Artificial Sequence
  Description of Artificial Sequence: Synthetic oligonucleotide
  Antisense strand to SEQ ID NO: 2174734
uuucccaccuaucuaccga

SEQ ID NO: 2174736 - RNA, 19 nt, Artificial Sequence
  Description of Artificial Sequence: Synthetic oligonucleotide
  Sense strand starting at position 3323 of SEQ ID NO: 1883180
cuucgugugaauuagauga

SEQ ID NO: 2174737 - RNA, 19 nt, Artificial Sequence
  Description of Artificial Sequence: Synthetic oligonucleotide
  Antisense strand to SEQ ID NO: 2174736
ucaucuaauucacacgaag

SEQ ID NO: 2174738 - RNA, 19 nt, Artificial Sequence
  Description of Artificial Sequence: Synthetic oligonucleotide
  Sense strand starting at position 3327 of SEQ ID NO: 1883180
gugugaauuagaugaauaa

SEQ ID NO: 2174739 - RNA, 19 nt, Artificial Sequence
  Description of Artificial Sequence: Synthetic oligonucleotide
  Antisense strand to SEQ ID NO: 2174738
uuauucaucuaauucacac

SEQ ID NO: 2174740 - RNA, 19 nt, Artificial Sequence
  Description of Artificial Sequence: Synthetic oligonucleotide
  Sense strand starting at position 3446 of SEQ ID NO: 1883180
uggagauagggcgacuuau

SEQ ID NO: 2174741 - RNA, 19 nt, Artificial Sequence
  Description of Artificial Sequence: Synthetic oligonucleotide
  Antisense strand to SEQ ID NO: 2174740
auaagucgcccuaucucca

SEQ ID NO: 2174742 - RNA, 19 nt, Artificial Sequence
  Description of Artificial Sequence: Synthetic oligonucleotide
  Sense strand starting at position 3550 of SEQ ID NO: 1883180
cccuguucugucuugcauu

SEQ ID NO: 2174743 - RNA, 19 nt, Artificial Sequence
  Description of Artificial Sequence: Synthetic oligonucleotide
  Antisense strand to SEQ ID NO: 2174742
aaugcaagacagaacaggg

SEQ ID NO: 2174744 - RNA, 19 nt, Artificial Sequence
  Description of Artificial Sequence: Synthetic oligonucleotide
  Sense strand starting at position 3561 of SEQ ID NO: 1883180
cuugcauuugccugaaagc

SEQ ID NO: 2174745 - RNA, 19 nt, Artificial Sequence
  Description of Artificial Sequence: Synthetic oligonucleotide
  Antisense strand to SEQ ID NO: 2174744
gcuuucaggcaaaugcaag

SEQ ID NO: 2174746 - RNA, 19 nt, Artificial Sequence
  Description of Artificial Sequence: Synthetic oligonucleotide
  Sense strand starting at position 3562 of SEQ ID NO: 1883180
uugcauuugccugaaagcu

SEQ ID NO: 2174747 - RNA, 19 nt, Artificial Sequence
  Description of Artificial Sequence: Synthetic oligonucleotide
  Antisense strand to SEQ ID NO: 2174746
agcuuucaggcaaaugcaa

SEQ ID NO: 2174748 - RNA, 19 nt, Artificial Sequence
  Description of Artificial Sequence: Synthetic oligonucleotide
  Sense strand starting at position 3599 of SEQ ID NO: 1883180
agaagcauugggugaguaa

SEQ ID NO: 2174749 - RNA, 19 nt, Artificial Sequence
  Description of Artificial Sequence: Synthetic oligonucleotide
  Antisense strand to SEQ ID NO: 2174748
uuacucacccaaugcuucu

SEQ ID NO: 2174750 - RNA, 19 nt, Artificial Sequence
  Description of Artificial Sequence: Synthetic oligonucleotide
  Sense strand starting at position 3600 of SEQ ID NO: 1883180
gaagcauugggugaguaaa

SEQ ID NO: 2174751 - RNA, 19 nt, Artificial Sequence
  Description of Artificial Sequence: Synthetic oligonucleotide
  Antisense strand to SEQ ID NO: 2174750
uuuacucacccaaugcuuc

SEQ ID NO: 2174752 - RNA, 19 nt, Artificial Sequence
  Description of Artificial Sequence: Synthetic oligonucleotide
  Sense strand starting at position 3627 of SEQ ID NO: 1883180
ugcaguuggcauuaaagau

SEQ ID NO: 2174753 - RNA, 19 nt, Artificial Sequence
  Description of Artificial Sequence: Synthetic oligonucleotide
  Antisense strand to SEQ ID NO: 2174752
aucuuuaaugccaacugca

SEQ ID NO: 2174754 - RNA, 19 nt, Artificial Sequence
  Description of Artificial Sequence: Synthetic oligonucleotide
  Sense strand starting at position 3642 of SEQ ID NO: 1883180
agauaacacuauguaaagu

SEQ ID NO: 2174755 - RNA, 19 nt, Artificial Sequence
  Description of Artificial Sequence: Synthetic oligonucleotide
  Antisense strand to SEQ ID NO: 2174754
acuuuacauaguguuaucu

SEQ ID NO: 2174756 - RNA, 19 nt, Artificial Sequence
  Description of Artificial Sequence: Synthetic oligonucleotide
  Sense strand starting at position 3653 of SEQ ID NO: 1883180
uguaaaguugaaugguaua

SEQ ID NO: 2174757 - RNA, 19 nt, Artificial Sequence
  Description of Artificial Sequence: Synthetic oligonucleotide
  Antisense strand to SEQ ID NO: 2174756
uauaccauucaacuuuaca

SEQ ID NO: 2174758 - RNA, 19 nt, Artificial Sequence
  Description of Artificial Sequence: Synthetic oligonucleotide
  Sense strand starting at position 3658 of SEQ ID NO: 1883180
aguugaaugguauaaagug

SEQ ID NO: 2174759 - RNA, 19 nt, Artificial Sequence
  Description of Artificial Sequence: Synthetic oligonucleotide
  Antisense strand to SEQ ID NO: 2174758
cacuuuauaccauucaacu

SEQ ID NO: 2174760 - RNA, 19 nt, Artificial Sequence
  Description of Artificial Sequence: Synthetic oligonucleotide
  Sense strand starting at position 3667 of SEQ ID NO: 1883180
guauaaagugauuacuguu

SEQ ID NO: 2174761 - RNA, 19 nt, Artificial Sequence
  Description of Artificial Sequence: Synthetic oligonucleotide
  Antisense strand to SEQ ID NO: 2174760
aacaguaaucacuuuauac

SEQ ID NO: 2174762 - RNA, 19 nt, Artificial Sequence
  Description of Artificial Sequence: Synthetic oligonucleotide
  Sense strand starting at position 3686 of SEQ ID NO: 1883180
uuuauuuacgcugaagcuu

SEQ ID NO: 2174763 - RNA, 19 nt, Artificial Sequence
  Description of Artificial Sequence: Synthetic oligonucleotide
  Antisense strand to SEQ ID NO: 2174762
aagcuucagcguaaauaaa

SEQ ID NO: 2174764 - RNA, 19 nt, Artificial Sequence
  Description of Artificial Sequence: Synthetic oligonucleotide
  Sense strand starting at position 3732 of SEQ ID NO: 1883180
gguagagugaugugacuag

SEQ ID NO: 2174765 - RNA, 19 nt, Artificial Sequence
  Description of Artificial Sequence: Synthetic oligonucleotide
  Antisense strand to SEQ ID NO: 2174764
cuagucacaucacucuacc

SEQ ID NO: 2174766 - RNA, 19 nt, Artificial Sequence
  Description of Artificial Sequence: Synthetic oligonucleotide
  Sense strand starting at position 3736 of SEQ ID NO: 1883180
gagugaugugacuagcuca

SEQ ID NO: 2174767 - RNA, 19 nt, Artificial Sequence
  Description of Artificial Sequence: Synthetic oligonucleotide
  Antisense strand to SEQ ID NO: 2174766
ugagcuagucacaucacuc

SEQ ID NO: 2174768 - RNA, 19 nt, Artificial Sequence
  Description of Artificial Sequence: Synthetic oligonucleotide
  Sense strand starting at position 3743 of SEQ ID NO: 1883180
gugacuagcucauuucucu

SEQ ID NO: 2174769 - RNA, 19 nt, Artificial Sequence
  Description of Artificial Sequence: Synthetic oligonucleotide
  Antisense strand to SEQ ID NO: 2174768
agagaaaugagcuagucac

SEQ ID NO: 2174770 - RNA, 19 nt, Artificial Sequence
  Description of Artificial Sequence: Synthetic oligonucleotide
  Sense strand starting at position 3747 of SEQ ID NO: 1883180
cuagcucauuucucuggua

SEQ ID NO: 2174771 - RNA, 19 nt, Artificial Sequence
  Description of Artificial Sequence: Synthetic oligonucleotide
  Antisense strand to SEQ ID NO: 2174770
uaccagagaaaugagcuag

SEQ ID NO: 2174772 - RNA, 19 nt, Artificial Sequence
  Description of Artificial Sequence: Synthetic oligonucleotide
  Sense strand starting at position 3749 of SEQ ID NO: 1883180
agcucauuucucugguauc

SEQ ID NO: 2174773 - RNA, 19 nt, Artificial Sequence
  Description of Artificial Sequence: Synthetic oligonucleotide
  Antisense strand to SEQ ID NO: 2174772
gauaccagagaaaugagcu

SEQ ID NO: 2174774 - RNA, 19 nt, Artificial Sequence
  Description of Artificial Sequence: Synthetic oligonucleotide
  Sense strand starting at position 3875 of SEQ ID NO: 1883180
cuuucuguuggacauaaua

SEQ ID NO: 2174775 - RNA, 19 nt, Artificial Sequence
  Description of Artificial Sequence: Synthetic oligonucleotide
  Antisense strand to SEQ ID NO: 2174774
uauuauguccaacagaaag

SEQ ID NO: 2174776 - RNA, 19 nt, Artificial Sequence
  Description of Artificial Sequence: Synthetic oligonucleotide
  Sense strand starting at position 108 of SEQ ID NO: 1883181
ugcucauauccagaaaugu

SEQ ID NO: 2174777 - RNA, 19 nt, Artificial Sequence
  Description of Artificial Sequence: Synthetic oligonucleotide
  Antisense strand to SEQ ID NO: 2174776
acauuucuggauaugagca

SEQ ID NO: 2174778 - RNA, 19 nt, Artificial Sequence
  Description of Artificial Sequence: Synthetic oligonucleotide
  Sense strand starting at position 266 of SEQ ID NO: 1883181
aauggcuuugugcaaauua

SEQ ID NO: 2174779 - RNA, 19 nt, Artificial Sequence
  Description of Artificial Sequence: Synthetic oligonucleotide
  Antisense strand to SEQ ID NO: 2174778
uaauuugcacaaagccauu

SEQ ID NO: 2174780 - RNA, 19 nt, Artificial Sequence
  Description of Artificial Sequence: Synthetic oligonucleotide
  Sense strand starting at position 289 of SEQ ID NO: 1883181
cgaugagauuuccauaagu

SEQ ID NO: 2174781 - RNA, 19 nt, Artificial Sequence
  Description of Artificial Sequence: Synthetic oligonucleotide
  Antisense strand to SEQ ID NO: 2174780
acuuauggaaaucucaucg

SEQ ID NO: 2174782 - RNA, 19 nt, Artificial Sequence
  Description of Artificial Sequence: Synthetic oligonucleotide
  Sense strand starting at position 455 of SEQ ID NO: 1883181
cucuguugccaagaagagu

SEQ ID NO: 2174783 - RNA, 19 nt, Artificial Sequence
  Description of Artificial Sequence: Synthetic oligonucleotide
  Antisense strand to SEQ ID NO: 2174782
acucuucuuggcaacagag

SEQ ID NO: 2174784 - RNA, 19 nt, Artificial Sequence
  Description of Artificial Sequence: Synthetic oligonucleotide
  Sense strand starting at position 477 of SEQ ID NO: 1883181
accugcugucaguacuuga

SEQ ID NO: 2174785 - RNA, 19 nt, Artificial Sequence
  Description of Artificial Sequence: Synthetic oligonucleotide
  Antisense strand to SEQ ID NO: 2174784
ucaaguacugacagcaggu

SEQ ID NO: 2174786 - RNA, 19 nt, Artificial Sequence
  Description of Artificial Sequence: Synthetic oligonucleotide
  Sense strand starting at position 482 of SEQ ID NO: 1883181
cugucaguacuugaauuac

SEQ ID NO: 2174787 - RNA, 19 nt, Artificial Sequence
  Description of Artificial Sequence: Synthetic oligonucleotide
  Antisense strand to SEQ ID NO: 2174786
guaauucaaguacugacag

SEQ ID NO: 2174788 - RNA, 19 nt, Artificial Sequence
  Description of Artificial Sequence: Synthetic oligonucleotide
  Sense strand starting at position 550 of SEQ ID NO: 1883181
uuccguuaacuauagcaga

SEQ ID NO: 2174789 - RNA, 19 nt, Artificial Sequence
  Description of Artificial Sequence: Synthetic oligonucleotide
  Antisense strand to SEQ ID NO: 2174788
ucugcuauaguuaacggaa

SEQ ID NO: 2174790 - RNA, 19 nt, Artificial Sequence
  Description of Artificial Sequence: Synthetic oligonucleotide
  Sense strand starting at position 652 of SEQ ID NO: 1883181
acucuacugugaucuucuu

SEQ ID NO: 2174791 - RNA, 19 nt, Artificial Sequence
  Description of Artificial Sequence: Synthetic oligonucleotide
  Antisense strand to SEQ ID NO: 2174790
aagaagaucacaguagagu

SEQ ID NO: 2174792 - RNA, 19 nt, Artificial Sequence
  Description of Artificial Sequence: Synthetic oligonucleotide
  Sense strand starting at position 1225 of SEQ ID NO: 1883181
acaagcuuggcauacauua

SEQ ID NO: 2174793 - RNA, 19 nt, Artificial Sequence
  Description of Artificial Sequence: Synthetic oligonucleotide
  Antisense strand to SEQ ID NO: 2174792
uaauguaugccaagcuugu

SEQ ID NO: 2174794 - RNA, 19 nt, Artificial Sequence
  Description of Artificial Sequence: Synthetic oligonucleotide
  Sense strand starting at position 1312 of SEQ ID NO: 1883181
caccaucugguagauaagu

SEQ ID NO: 2174795 - RNA, 19 nt, Artificial Sequence
  Description of Artificial Sequence: Synthetic oligonucleotide
  Antisense strand to SEQ ID NO: 2174794
acuuaucuaccagauggug

SEQ ID NO: 2174796 - RNA, 19 nt, Artificial Sequence
  Description of Artificial Sequence: Synthetic oligonucleotide
  Sense strand starting at position 1390 of SEQ ID NO: 1883181
ggcccaauauggucaauga

SEQ ID NO: 2174797 - RNA, 19 nt, Artificial Sequence
  Description of Artificial Sequence: Synthetic oligonucleotide
  Antisense strand to SEQ ID NO: 2174796
ucauugaccauauugggcc

SEQ ID NO: 2174798 - RNA, 19 nt, Artificial Sequence
  Description of Artificial Sequence: Synthetic oligonucleotide
  Sense strand starting at position 1391 of SEQ ID NO: 1883181
gcccaauauggucaaugaa

SEQ ID NO: 2174799 - RNA, 19 nt, Artificial Sequence
  Description of Artificial Sequence: Synthetic oligonucleotide
  Antisense strand to SEQ ID NO: 2174798
uucauugaccauauugggc

SEQ ID NO: 2174800 - RNA, 19 nt, Artificial Sequence
  Description of Artificial Sequence: Synthetic oligonucleotide
  Sense strand starting at position 1462 of SEQ ID NO: 1883181
ccucuagaguuccugaaau

SEQ ID NO: 2174801 - RNA, 19 nt, Artificial Sequence
  Description of Artificial Sequence: Synthetic oligonucleotide
  Antisense strand to SEQ ID NO: 2174800
auuucaggaacucuagagg

SEQ ID NO: 2174802 - RNA, 19 nt, Artificial Sequence
  Description of Artificial Sequence: Synthetic oligonucleotide
  Sense strand starting at position 1476 of SEQ ID NO: 1883181
gaaauugaacuggguugua

SEQ ID NO: 2174803 - RNA, 19 nt, Artificial Sequence
  Description of Artificial Sequence: Synthetic oligonucleotide
  Antisense strand to SEQ ID NO: 2174802
uacaacccaguucaauuuc

SEQ ID NO: 2174804 - RNA, 19 nt, Artificial Sequence
  Description of Artificial Sequence: Synthetic oligonucleotide
  Sense strand starting at position 1479 of SEQ ID NO: 1883181
auugaacuggguuguaaua

SEQ ID NO: 2174805 - RNA, 19 nt, Artificial Sequence
  Description of Artificial Sequence: Synthetic oligonucleotide
  Antisense strand to SEQ ID NO: 2174804
uauuacaacccaguucaau

SEQ ID NO: 2174806 - RNA, 19 nt, Artificial Sequence
  Description of Artificial Sequence: Synthetic oligonucleotide
  Sense strand starting at position 1584 of SEQ ID NO: 1883181
ccugaucaugcaugguaga

SEQ ID NO: 2174807 - RNA, 19 nt, Artificial Sequence
  Description of Artificial Sequence: Synthetic oligonucleotide
  Antisense strand to SEQ ID NO: 2174806
ucuaccaugcaugaucagg

SEQ ID NO: 2174808 - RNA, 19 nt, Artificial Sequence
  Description of Artificial Sequence: Synthetic oligonucleotide
  Sense strand starting at position 1594 of SEQ ID NO: 1883181
caugguagacucgaagcau

SEQ ID NO: 2174809 - RNA, 19 nt, Artificial Sequence
  Description of Artificial Sequence: Synthetic oligonucleotide
  Antisense strand to SEQ ID NO: 2174808
augcuucgagucuaccaug

SEQ ID NO: 2174810 - RNA, 19 nt, Artificial Sequence
  Description of Artificial Sequence: Synthetic oligonucleotide
  Sense strand starting at position 1600 of SEQ ID NO: 1883181
agacucgaagcaugcaaau

SEQ ID NO: 2174811 - RNA, 19 nt, Artificial Sequence
  Description of Artificial Sequence: Synthetic oligonucleotide
  Antisense strand to SEQ ID NO: 2174810
auuugcaugcuucgagucu

SEQ ID NO: 2174812 - RNA, 19 nt, Artificial Sequence
  Description of Artificial Sequence: Synthetic oligonucleotide
  Sense strand starting at position 1660 of SEQ ID NO: 1883181
uauggaguuguccagggua

SEQ ID NO: 2174813 - RNA, 19 nt, Artificial Sequence
  Description of Artificial Sequence: Synthetic oligonucleotide
  Antisense strand to SEQ ID NO: 2174812
uacccuggacaacuccaua

SEQ ID NO: 2174814 - RNA, 19 nt, Artificial Sequence
  Description of Artificial Sequence: Synthetic oligonucleotide
  Sense strand starting at position 1663 of SEQ ID NO: 1883181
ggaguuguccaggguacag

SEQ ID NO: 2174815 - RNA, 19 nt, Artificial Sequence
  Description of Artificial Sequence: Synthetic oligonucleotide
  Antisense strand to SEQ ID NO: 2174814
cuguacccuggacaacucc

SEQ ID NO: 2174816 - RNA, 19 nt, Artificial Sequence
  Description of Artificial Sequence: Synthetic oligonucleotide
  Sense strand starting at position 1896 of SEQ ID NO: 1883181
agaggaucugugcaacuca

SEQ ID NO: 2174817 - RNA, 19 nt, Artificial Sequence
  Description of Artificial Sequence: Synthetic oligonucleotide
  Antisense strand to SEQ ID NO: 2174816
ugaguugcacagauccucu

SEQ ID NO: 2174818 - RNA, 19 nt, Artificial Sequence
  Description of Artificial Sequence: Synthetic oligonucleotide
  Sense strand starting at position 2092 of SEQ ID NO: 1883181
uguauuagcccuuaggagu

SEQ ID NO: 2174819 - RNA, 19 nt, Artificial Sequence
  Description of Artificial Sequence: Synthetic oligonucleotide
  Antisense strand to SEQ ID NO: 2174818
acuccuaagggcuaauaca

SEQ ID NO: 2174820 - RNA, 19 nt, Artificial Sequence
  Description of Artificial Sequence: Synthetic oligonucleotide
  Sense strand starting at position 2166 of SEQ ID NO: 1883181
uggagccaauugcuauaaa

SEQ ID NO: 2174821 - RNA, 19 nt, Artificial Sequence
  Description of Artificial Sequence: Synthetic oligonucleotide
  Antisense strand to SEQ ID NO: 2174820
uuuauagcaauuggcucca

SEQ ID NO: 2174822 - RNA, 19 nt, Artificial Sequence
  Description of Artificial Sequence: Synthetic oligonucleotide
  Sense strand starting at position 2169 of SEQ ID NO: 1883181
agccaauugcuauaaagua

SEQ ID NO: 2174823 - RNA, 19 nt, Artificial Sequence
  Description of Artificial Sequence: Synthetic oligonucleotide
  Antisense strand to SEQ ID NO: 2174822
uacuuuauagcaauuggcu

SEQ ID NO: 2174824 - RNA, 19 nt, Artificial Sequence
  Description of Artificial Sequence: Synthetic oligonucleotide
  Sense strand starting at position 2193 of SEQ ID NO: 1883181
agcuucuuggcaugaagaa

SEQ ID NO: 2174825 - RNA, 19 nt, Artificial Sequence
  Description of Artificial Sequence: Synthetic oligonucleotide
  Antisense strand to SEQ ID NO: 2174824
uucuucaugccaagaagcu

SEQ ID NO: 2174826 - RNA, 19 nt, Artificial Sequence
  Description of Artificial Sequence: Synthetic oligonucleotide
  Sense strand starting at position 2194 of SEQ ID NO: 1883181
gcuucuuggcaugaagaaa

SEQ ID NO: 2174827 - RNA, 19 nt, Artificial Sequence
  Description of Artificial Sequence: Synthetic oligonucleotide
  Antisense strand to SEQ ID NO: 2174826
uuucuucaugccaagaagc

SEQ ID NO: 2174828 - RNA, 19 nt, Artificial Sequence
  Description of Artificial Sequence: Synthetic oligonucleotide
  Sense strand starting at position 2377 of SEQ ID NO: 1883181
aggugaaccuuaccuacuu

SEQ ID NO: 2174829 - RNA, 19 nt, Artificial Sequence
  Description of Artificial Sequence: Synthetic oligonucleotide
  Antisense strand to SEQ ID NO: 2174828
aaguagguaagguucaccu

SEQ ID NO: 2174830 - RNA, 19 nt, Artificial Sequence
  Description of Artificial Sequence: Synthetic oligonucleotide
  Sense strand starting at position 2401 of SEQ ID NO: 1883181
cuuccucagcucugaugaa

SEQ ID NO: 2174831 - RNA, 19 nt, Artificial Sequence
  Description of Artificial Sequence: Synthetic oligonucleotide
  Antisense strand to SEQ ID NO: 2174830
uucaucagagcugaggaag

SEQ ID NO: 2174832 - RNA, 19 nt, Artificial Sequence
  Description of Artificial Sequence: Synthetic oligonucleotide
  Sense strand starting at position 2441 of SEQ ID NO: 1883181
ucgcaagcugcugcuuaaa

SEQ ID NO: 2174833 - RNA, 19 nt, Artificial Sequence
  Description of Artificial Sequence: Synthetic oligonucleotide
  Antisense strand to SEQ ID NO: 2174832
uuuaagcagcagcuugcga

SEQ ID NO: 2174834 - RNA, 19 nt, Artificial Sequence
  Description of Artificial Sequence: Synthetic oligonucleotide
  Sense strand starting at position 2513 of SEQ ID NO: 1883181
gccugagacccucauauua

SEQ ID NO: 2174835 - RNA, 19 nt, Artificial Sequence
  Description of Artificial Sequence: Synthetic oligonucleotide
  Antisense strand to SEQ ID NO: 2174834
uaauaugagggucucaggc

SEQ ID NO: 2174836 - RNA, 19 nt, Artificial Sequence
  Description of Artificial Sequence: Synthetic oligonucleotide
  Sense strand starting at position 2532 of SEQ ID NO: 1883181
aggaaacaguguguuccua

SEQ ID NO: 2174837 - RNA, 19 nt, Artificial Sequence
  Description of Artificial Sequence: Synthetic oligonucleotide
  Antisense strand to SEQ ID NO: 2174836
uaggaacacacuguuuccu

SEQ ID NO: 2174838 - RNA, 19 nt, Artificial Sequence
  Description of Artificial Sequence: Synthetic oligonucleotide
  Sense strand starting at position 2534 of SEQ ID NO: 1883181
gaaacaguguguuccuaag

SEQ ID NO: 2174839 - RNA, 19 nt, Artificial Sequence
  Description of Artificial Sequence: Synthetic oligonucleotide
  Antisense strand to SEQ ID NO: 2174838
cuuaggaacacacuguuuc

SEQ ID NO: 2174840 - RNA, 19 nt, Artificial Sequence
  Description of Artificial Sequence: Synthetic oligonucleotide
  Sense strand starting at position 2557 of SEQ ID NO: 1883181
cuuugauauuguccacuau

SEQ ID NO: 2174841 - RNA, 19 nt, Artificial Sequence
  Description of Artificial Sequence: Synthetic oligonucleotide
  Antisense strand to SEQ ID NO: 2174840
auaguggacaauaucaaag

SEQ ID NO: 2174842 - RNA, 19 nt, Artificial Sequence
  Description of Artificial Sequence: Synthetic oligonucleotide
  Sense strand starting at position 2558 of SEQ ID NO: 1883181
uuugauauuguccacuauu

SEQ ID NO: 2174843 - RNA, 19 nt, Artificial Sequence
  Description of Artificial Sequence: Synthetic oligonucleotide
  Antisense strand to SEQ ID NO: 2174842
aauaguggacaauaucaaa

SEQ ID NO: 2174844 - RNA, 19 nt, Artificial Sequence
  Description of Artificial Sequence: Synthetic oligonucleotide
  Sense strand starting at position 2568 of SEQ ID NO: 1883181
uccacuauugacuaucgau

SEQ ID NO: 2174845 - RNA, 19 nt, Artificial Sequence
  Description of Artificial Sequence: Synthetic oligonucleotide
  Antisense strand to SEQ ID NO: 2174844
aucgauagucaauagugga

SEQ ID NO: 2174846 - RNA, 19 nt, Artificial Sequence
  Description of Artificial Sequence: Synthetic oligonucleotide
  Sense strand starting at position 2574 of SEQ ID NO: 1883181
auugacuaucgauagcaaa

SEQ ID NO: 2174847 - RNA, 19 nt, Artificial Sequence
  Description of Artificial Sequence: Synthetic oligonucleotide
  Antisense strand to SEQ ID NO: 2174846
uuugcuaucgauagucaau

SEQ ID NO: 2174848 - RNA, 19 nt, Artificial Sequence
  Description of Artificial Sequence: Synthetic oligonucleotide
  Sense strand starting at position 2968 of SEQ ID NO: 1883181
ccuaauuguccugauucga

SEQ ID NO: 2174849 - RNA, 19 nt, Artificial Sequence
  Description of Artificial Sequence: Synthetic oligonucleotide
  Antisense strand to SEQ ID NO: 2174848
ucgaaucaggacaauuagg

SEQ ID NO: 2174850 - RNA, 19 nt, Artificial Sequence
  Description of Artificial Sequence: Synthetic oligonucleotide
  Sense strand starting at position 3059 of SEQ ID NO: 1883181
ucgguaauuguugacuaaa

SEQ ID NO: 2174851 - RNA, 19 nt, Artificial Sequence
  Description of Artificial Sequence: Synthetic oligonucleotide
  Antisense strand to SEQ ID NO: 2174850
uuuagucaacaauuaccga

SEQ ID NO: 2174852 - RNA, 19 nt, Artificial Sequence
  Description of Artificial Sequence: Synthetic oligonucleotide
  Sense strand starting at position 3061 of SEQ ID NO: 1883181
gguaauuguugacuaaaug

SEQ ID NO: 2174853 - RNA, 19 nt, Artificial Sequence
  Description of Artificial Sequence: Synthetic oligonucleotide
  Antisense strand to SEQ ID NO: 2174852
cauuuagucaacaauuacc

SEQ ID NO: 2174854 - RNA, 19 nt, Artificial Sequence
  Description of Artificial Sequence: Synthetic oligonucleotide
  Sense strand starting at position 3354 of SEQ ID NO: 1883181
gcaaguuagcugcaauuua

SEQ ID NO: 2174855 - RNA, 19 nt, Artificial Sequence
  Description of Artificial Sequence: Synthetic oligonucleotide
  Antisense strand to SEQ ID NO: 2174854
uaaauugcagcuaacuugc

SEQ ID NO: 2174856 - RNA, 19 nt, Artificial Sequence
  Description of Artificial Sequence: Synthetic oligonucleotide
  Sense strand starting at position 52 of SEQ ID NO: 1883182
gaaucacugcccugugcau

SEQ ID NO: 2174857 - RNA, 19 nt, Artificial Sequence
  Description of Artificial Sequence: Synthetic oligonucleotide
  Antisense strand to SEQ ID NO: 2174856
augcacagggcagugauuc

SEQ ID NO: 2174858 - RNA, 19 nt, Artificial Sequence
  Description of Artificial Sequence: Synthetic oligonucleotide
  Sense strand starting at position 205 of SEQ ID NO: 1883182
gagccaagcugauuaugua

SEQ ID NO: 2174859 - RNA, 19 nt, Artificial Sequence
  Description of Artificial Sequence: Synthetic oligonucleotide
  Antisense strand to SEQ ID NO: 2174858
uacauaaucagcuuggcuc

SEQ ID NO: 2174860 - RNA, 19 nt, Artificial Sequence
  Description of Artificial Sequence: Synthetic oligonucleotide
  Sense strand starting at position 208 of SEQ ID NO: 1883182
ccaagcugauuauguagau

SEQ ID NO: 2174861 - RNA, 19 nt, Artificial Sequence
  Description of Artificial Sequence: Synthetic oligonucleotide
  Antisense strand to SEQ ID NO: 2174860
aucuacauaaucagcuugg

SEQ ID NO: 2174862 - RNA, 19 nt, Artificial Sequence
  Description of Artificial Sequence: Synthetic oligonucleotide
  Sense strand starting at position 212 of SEQ ID NO: 1883182
gcugauuauguagauaaca

SEQ ID NO: 2174863 - RNA, 19 nt, Artificial Sequence
  Description of Artificial Sequence: Synthetic oligonucleotide
  Antisense strand to SEQ ID NO: 2174862
uguuaucuacauaaucagc

SEQ ID NO: 2174864 - RNA, 19 nt, Artificial Sequence
  Description of Artificial Sequence: Synthetic oligonucleotide
  Sense strand starting at position 347 of SEQ ID NO: 1883182
uggcgcuuccuguugcaua

SEQ ID NO: 2174865 - RNA, 19 nt, Artificial Sequence
  Description of Artificial Sequence: Synthetic oligonucleotide
  Antisense strand to SEQ ID NO: 2174864
uaugcaacaggaagcgcca

SEQ ID NO: 2174866 - RNA, 19 nt, Artificial Sequence
  Description of Artificial Sequence: Synthetic oligonucleotide
  Sense strand starting at position 348 of SEQ ID NO: 1883182
ggcgcuuccuguugcauau

SEQ ID NO: 2174867 - RNA, 19 nt, Artificial Sequence
  Description of Artificial Sequence: Synthetic oligonucleotide
  Antisense strand to SEQ ID NO: 2174866
auaugcaacaggaagcgcc

SEQ ID NO: 2174868 - RNA, 19 nt, Artificial Sequence
  Description of Artificial Sequence: Synthetic oligonucleotide
  Sense strand starting at position 361 of SEQ ID NO: 1883182
gcauauggcacugagaaau

SEQ ID NO: 2174869 - RNA, 19 nt, Artificial Sequence
  Description of Artificial Sequence: Synthetic oligonucleotide
  Antisense strand to SEQ ID NO: 2174868
auuucucagugccauaugc

SEQ ID NO: 2174870 - RNA, 19 nt, Artificial Sequence
  Description of Artificial Sequence: Synthetic oligonucleotide
  Sense strand starting at position 396 of SEQ ID NO: 1883182
ugcagagauuuccagacaa

SEQ ID NO: 2174871 - RNA, 19 nt, Artificial Sequence
  Description of Artificial Sequence: Synthetic oligonucleotide
  Antisense strand to SEQ ID NO: 2174870
uugucuggaaaucucugca

SEQ ID NO: 2174872 - RNA, 19 nt, Artificial Sequence
  Description of Artificial Sequence: Synthetic oligonucleotide
  Sense strand starting at position 712 of SEQ ID NO: 1883182
cccacaggucuccaaguau

SEQ ID NO: 2174873 - RNA, 19 nt, Artificial Sequence
  Description of Artificial Sequence: Synthetic oligonucleotide
  Antisense strand to SEQ ID NO: 2174872
auacuuggagaccuguggg

SEQ ID NO: 2174874 - RNA, 19 nt, Artificial Sequence
  Description of Artificial Sequence: Synthetic oligonucleotide
  Sense strand starting at position 725 of SEQ ID NO: 1883182
aaguauaacguccgggagu

SEQ ID NO: 2174875 - RNA, 19 nt, Artificial Sequence
  Description of Artificial Sequence: Synthetic oligonucleotide
  Antisense strand to SEQ ID NO: 2174874
acucccggacguuauacuu

SEQ ID NO: 2174876 - RNA, 19 nt, Artificial Sequence
  Description of Artificial Sequence: Synthetic oligonucleotide
  Sense strand starting at position 792 of SEQ ID NO: 1883182
gagacccugcucugugaau

SEQ ID NO: 2174877 - RNA, 19 nt, Artificial Sequence
  Description of Artificial Sequence: Synthetic oligonucleotide
  Antisense strand to SEQ ID NO: 2174876
auucacagagcagggucuc

SEQ ID NO: 2174878 - RNA, 19 nt, Artificial Sequence
  Description of Artificial Sequence: Synthetic oligonucleotide
  Sense strand starting at position 793 of SEQ ID NO: 1883182
agacccugcucugugaaua

SEQ ID NO: 2174879 - RNA, 19 nt, Artificial Sequence
  Description of Artificial Sequence: Synthetic oligonucleotide
  Antisense strand to SEQ ID NO: 2174878
uauucacagagcagggucu

SEQ ID NO: 2174880 - RNA, 19 nt, Artificial Sequence
  Description of Artificial Sequence: Synthetic oligonucleotide
  Sense strand starting at position 794 of SEQ ID NO: 1883182
gacccugcucugugaauag

SEQ ID NO: 2174881 - RNA, 19 nt, Artificial Sequence
  Description of Artificial Sequence: Synthetic oligonucleotide
  Antisense strand to SEQ ID NO: 2174880
cuauucacagagcaggguc

SEQ ID NO: 2174882 - RNA, 19 nt, Artificial Sequence
  Description of Artificial Sequence: Synthetic oligonucleotide
  Sense strand starting at position 834 of SEQ ID NO: 1883182
cgggcaucccugcaguuua

SEQ ID NO: 2174883 - RNA, 19 nt, Artificial Sequence
  Description of Artificial Sequence: Synthetic oligonucleotide
  Antisense strand to SEQ ID NO: 2174882
uaaacugcagggaugcccg

SEQ ID NO: 2174884 - RNA, 19 nt, Artificial Sequence
  Description of Artificial Sequence: Synthetic oligonucleotide
  Sense strand starting at position 890 of SEQ ID NO: 1883182
ccugguuucugggcaaugu

SEQ ID NO: 2174885 - RNA, 19 nt, Artificial Sequence
  Description of Artificial Sequence: Synthetic oligonucleotide
  Antisense strand to SEQ ID NO: 2174884
acauugcccagaaaccagg

SEQ ID NO: 2174886 - RNA, 19 nt, Artificial Sequence
  Description of Artificial Sequence: Synthetic oligonucleotide
  Sense strand starting at position 916 of SEQ ID NO: 1883182
ggccuuucccagugucaca

SEQ ID NO: 2174887 - RNA, 19 nt, Artificial Sequence
  Description of Artificial Sequence: Synthetic oligonucleotide
  Antisense strand to SEQ ID NO: 2174886
ugugacacugggaaaggcc

SEQ ID NO: 2174888 - RNA, 19 nt, Artificial Sequence
  Description of Artificial Sequence: Synthetic oligonucleotide
  Sense strand starting at position 1115 of SEQ ID NO: 1883182
gaugaaaucugagcucaga

SEQ ID NO: 2174889 - RNA, 19 nt, Artificial Sequence
  Description of Artificial Sequence: Synthetic oligonucleotide
  Antisense strand to SEQ ID NO: 2174888
ucugagcucagauuucauc

SEQ ID NO: 2174890 - RNA, 19 nt, Artificial Sequence
  Description of Artificial Sequence: Synthetic oligonucleotide
  Sense strand starting at position 1321 of SEQ ID NO: 1883182
gugggugucugcuauggga

SEQ ID NO: 2174891 - RNA, 19 nt, Artificial Sequence
  Description of Artificial Sequence: Synthetic oligonucleotide
  Antisense strand to SEQ ID NO: 2174890
ucccauagcagacacccac

SEQ ID NO: 2174892 - RNA, 19 nt, Artificial Sequence
  Description of Artificial Sequence: Synthetic oligonucleotide
  Sense strand starting at position 1323 of SEQ ID NO: 1883182
gggugucugcuaugggauu

SEQ ID NO: 2174893 - RNA, 19 nt, Artificial Sequence
  Description of Artificial Sequence: Synthetic oligonucleotide
  Antisense strand to SEQ ID NO: 2174892
aaucccauagcagacaccc

SEQ ID NO: 2174894 - RNA, 19 nt, Artificial Sequence
  Description of Artificial Sequence: Synthetic oligonucleotide
  Sense strand starting at position 1324 of SEQ ID NO: 1883182
ggugucugcuaugggauua

SEQ ID NO: 2174895 - RNA, 19 nt, Artificial Sequence
  Description of Artificial Sequence: Synthetic oligonucleotide
  Antisense strand to SEQ ID NO: 2174894
uaaucccauagcagacacc

SEQ ID NO: 2174896 - RNA, 19 nt, Artificial Sequence
  Description of Artificial Sequence: Synthetic oligonucleotide
  Sense strand starting at position 1325 of SEQ ID NO: 1883182
gugucugcuaugggauuau

SEQ ID NO: 2174897 - RNA, 19 nt, Artificial Sequence
  Description of Artificial Sequence: Synthetic oligonucleotide
  Antisense strand to SEQ ID NO: 2174896
auaaucccauagcagacac

SEQ ID NO: 2174898 - RNA, 19 nt, Artificial Sequence
  Description of Artificial Sequence: Synthetic oligonucleotide
  Sense strand starting at position 1329 of SEQ ID NO: 1883182
cugcuaugggauuauucuu

SEQ ID NO: 2174899 - RNA, 19 nt, Artificial Sequence
  Description of Artificial Sequence: Synthetic oligonucleotide
  Antisense strand to SEQ ID NO: 2174898
aagaauaaucccauagcag

SEQ ID NO: 2174900 - RNA, 19 nt, Artificial Sequence
  Description of Artificial Sequence: Synthetic oligonucleotide
  Sense strand starting at position 1335 of SEQ ID NO: 1883182
ugggauuauucuuagcgcu

SEQ ID NO: 2174901 - RNA, 19 nt, Artificial Sequence
  Description of Artificial Sequence: Synthetic oligonucleotide
  Antisense strand to SEQ ID NO: 2174900
agcgcuaagaauaauccca

SEQ ID NO: 2174902 - RNA, 19 nt, Artificial Sequence
  Description of Artificial Sequence: Synthetic oligonucleotide
  Sense strand starting at position 1338 of SEQ ID NO: 1883182
gauuauucuuagcgcucca

SEQ ID NO: 2174903 - RNA, 19 nt, Artificial Sequence
  Description of Artificial Sequence: Synthetic oligonucleotide
  Antisense strand to SEQ ID NO: 2174902
uggagcgcuaagaauaauc

SEQ ID NO: 2174904 - RNA, 19 nt, Artificial Sequence
  Description of Artificial Sequence: Synthetic oligonucleotide
  Sense strand starting at position 1351 of SEQ ID NO: 1883182
gcuccacucucuucgcaaa

SEQ ID NO: 2174905 - RNA, 19 nt, Artificial Sequence
  Description of Artificial Sequence: Synthetic oligonucleotide
  Antisense strand to SEQ ID NO: 2174904
uuugcgaagagaguggagc

SEQ ID NO: 2174906 - RNA, 19 nt, Artificial Sequence
  Description of Artificial Sequence: Synthetic oligonucleotide
  Sense strand starting at position 1661 of SEQ ID NO: 1883182
ggugaugaccgugaucgca

SEQ ID NO: 2174907 - RNA, 19 nt, Artificial Sequence
  Description of Artificial Sequence: Synthetic oligonucleotide
  Antisense strand to SEQ ID NO: 2174906
ugcgaucacggucaucacc

SEQ ID NO: 2174908 - RNA, 19 nt, Artificial Sequence
  Description of Artificial Sequence: Synthetic oligonucleotide
  Sense strand starting at position 1663 of SEQ ID NO: 1883182
ugaugaccgugaucgcaaa

SEQ ID NO: 2174909 - RNA, 19 nt, Artificial Sequence
  Description of Artificial Sequence: Synthetic oligonucleotide
  Antisense strand to SEQ ID NO: 2174908
uuugcgaucacggucauca

SEQ ID NO: 2174910 - RNA, 19 nt, Artificial Sequence
  Description of Artificial Sequence: Synthetic oligonucleotide
  Sense strand starting at position 1759 of SEQ ID NO: 1883182
gguaguccucgcugcugau

SEQ ID NO: 2174911 - RNA, 19 nt, Artificial Sequence
  Description of Artificial Sequence: Synthetic oligonucleotide
  Antisense strand to SEQ ID NO: 2174910
aucagcagcgaggacuacc

SEQ ID NO: 2174912 - RNA, 19 nt, Artificial Sequence
  Description of Artificial Sequence: Synthetic oligonucleotide
  Sense strand starting at position 2731 of SEQ ID NO: 1883182
cgaaguuugcucggcucaa

SEQ ID NO: 2174913 - RNA, 19 nt, Artificial Sequence
  Description of Artificial Sequence: Synthetic oligonucleotide
  Antisense strand to SEQ ID NO: 2174912
uugagccgagcaaacuucg

SEQ ID NO: 2174914 - RNA, 19 nt, Artificial Sequence
  Description of Artificial Sequence: Synthetic oligonucleotide
  Sense strand starting at position 2732 of SEQ ID NO: 1883182
gaaguuugcucggcucaac

SEQ ID NO: 2174915 - RNA, 19 nt, Artificial Sequence
  Description of Artificial Sequence: Synthetic oligonucleotide
  Antisense strand to SEQ ID NO: 2174914
guugagccgagcaaacuuc

SEQ ID NO: 2174916 - RNA, 19 nt, Artificial Sequence
  Description of Artificial Sequence: Synthetic oligonucleotide
  Sense strand starting at position 3626 of SEQ ID NO: 1883182
gcgugucauuggccaggga

SEQ ID NO: 2174917 - RNA, 19 nt, Artificial Sequence
  Description of Artificial Sequence: Synthetic oligonucleotide
  Antisense strand to SEQ ID NO: 2174916
ucccuggccaaugacacgc

SEQ ID NO: 2174918 - RNA, 19 nt, Artificial Sequence
  Description of Artificial Sequence: Synthetic oligonucleotide
  Sense strand starting at position 3629 of SEQ ID NO: 1883182
ugucauuggccagggacau

SEQ ID NO: 2174919 - RNA, 19 nt, Artificial Sequence
  Description of Artificial Sequence: Synthetic oligonucleotide
  Antisense strand to SEQ ID NO: 2174918
augucccuggccaaugaca

SEQ ID NO: 2174920 - RNA, 19 nt, Artificial Sequence
  Description of Artificial Sequence: Synthetic oligonucleotide
  Sense strand starting at position 3736 of SEQ ID NO: 1883182
cgagucguuucccuggaga

SEQ ID NO: 2174921 - RNA, 19 nt, Artificial Sequence
  Description of Artificial Sequence: Synthetic oligonucleotide
  Antisense strand to SEQ ID NO: 2174920
ucuccagggaaacgacucg

SEQ ID NO: 2174922 - RNA, 19 nt, Artificial Sequence
  Description of Artificial Sequence: Synthetic oligonucleotide
  Sense strand starting at position 3838 of SEQ ID NO: 1883182
uguugcuuuacugaaggaa

SEQ ID NO: 2174923 - RNA, 19 nt, Artificial Sequence
  Description of Artificial Sequence: Synthetic oligonucleotide
  Antisense strand to SEQ ID NO: 2174922
uuccuucaguaaagcaaca

SEQ ID NO: 2174924 - RNA, 19 nt, Artificial Sequence
  Description of Artificial Sequence: Synthetic oligonucleotide
  Sense strand starting at position 712 of SEQ ID NO: 1883183
uuaacaucgccuugugugu

SEQ ID NO: 2174925 - RNA, 19 nt, Artificial Sequence
  Description of Artificial Sequence: Synthetic oligonucleotide
  Antisense strand to SEQ ID NO: 2174924
acacacaaggcgauguuaa

SEQ ID NO: 2174926 - RNA, 19 nt, Artificial Sequence
  Description of Artificial Sequence: Synthetic oligonucleotide
  Sense strand starting at position 3000 of SEQ ID NO: 1883183
ggaaguuguaucggcccaa

SEQ ID NO: 2174927 - RNA, 19 nt, Artificial Sequence
  Description of Artificial Sequence: Synthetic oligonucleotide
  Antisense strand to SEQ ID NO: 2174926
uugggccgauacaacuucc

SEQ ID NO: 2174928 - RNA, 19 nt, Artificial Sequence
  Description of Artificial Sequence: Synthetic oligonucleotide
  Sense strand starting at position 3848 of SEQ ID NO: 1883183
agcucucaauccuauagga

SEQ ID NO: 2174929 - RNA, 19 nt, Artificial Sequence
  Description of Artificial Sequence: Synthetic oligonucleotide
  Antisense strand to SEQ ID NO: 2174928
uccuauaggauugagagcu

SEQ ID NO: 2174930 - RNA, 19 nt, Artificial Sequence
  Description of Artificial Sequence: Synthetic oligonucleotide
  Sense strand starting at position 3919 of SEQ ID NO: 1883183
cagugugaccuccgagaug

SEQ ID NO: 2174931 - RNA, 19 nt, Artificial Sequence
  Description of Artificial Sequence: Synthetic oligonucleotide
  Antisense strand to SEQ ID NO: 2174930
caucucggaggucacacug

SEQ ID NO: 2174932 - RNA, 19 nt, Artificial Sequence
  Description of Artificial Sequence: Synthetic oligonucleotide
  Sense strand starting at position 5 of SEQ ID NO: 1883184
ugacuugaaguguacagua

SEQ ID NO: 2174933 - RNA, 19 nt, Artificial Sequence
  Description of Artificial Sequence: Synthetic oligonucleotide
  Antisense strand to SEQ ID NO: 2174932
uacuguacacuucaaguca

SEQ ID NO: 2174934 - RNA, 19 nt, Artificial Sequence
  Description of Artificial Sequence: Synthetic oligonucleotide
  Sense strand starting at position 7 of SEQ ID NO: 1883184
acuugaaguguacaguaga

SEQ ID NO: 2174935 - RNA, 19 nt, Artificial Sequence
  Description of Artificial Sequence: Synthetic oligonucleotide
  Antisense strand to SEQ ID NO: 2174934
ucuacuguacacuucaagu

SEQ ID NO: 2174936 - RNA, 19 nt, Artificial Sequence
  Description of Artificial Sequence: Synthetic oligonucleotide
  Sense strand starting at position 36 of SEQ ID NO: 1883184
gccaucagauuugacacuu

SEQ ID NO: 2174937 - RNA, 19 nt, Artificial Sequence
  Description of Artificial Sequence: Synthetic oligonucleotide
  Antisense strand to SEQ ID NO: 2174936
aagugucaaaucugauggc

SEQ ID NO: 2174938 - RNA, 19 nt, Artificial Sequence
  Description of Artificial Sequence: Synthetic oligonucleotide
  Sense strand starting at position 109 of SEQ ID NO: 1883184
ggaaauacauagcaugaga

SEQ ID NO: 2174939 - RNA, 19 nt, Artificial Sequence
  Description of Artificial Sequence: Synthetic oligonucleotide
  Antisense strand to SEQ ID NO: 2174938
ucucaugcuauguauuucc

SEQ ID NO: 2174940 - RNA, 19 nt, Artificial Sequence
  Description of Artificial Sequence: Synthetic oligonucleotide
  Sense strand starting at position 196 of SEQ ID NO: 1883184
uuacaaaugcugggauugu

SEQ ID NO: 2174941 - RNA, 19 nt, Artificial Sequence
  Description of Artificial Sequence: Synthetic oligonucleotide
  Antisense strand to SEQ ID NO: 2174940
acaaucccagcauuuguaa

SEQ ID NO: 2174942 - RNA, 19 nt, Artificial Sequence
  Description of Artificial Sequence: Synthetic oligonucleotide
  Sense strand starting at position 200 of SEQ ID NO: 1883184
aaaugcugggauuguauga

SEQ ID NO: 2174943 - RNA, 19 nt, Artificial Sequence
  Description of Artificial Sequence: Synthetic oligonucleotide
  Antisense strand to SEQ ID NO: 2174942
ucauacaaucccagcauuu

SEQ ID NO: 2174944 - RNA, 19 nt, Artificial Sequence
  Description of Artificial Sequence: Synthetic oligonucleotide
  Sense strand starting at position 317 of SEQ ID NO: 1883184
acugcagcucauugacaua

SEQ ID NO: 2174945 - RNA, 19 nt, Artificial Sequence
  Description of Artificial Sequence: Synthetic oligonucleotide
  Antisense strand to SEQ ID NO: 2174944
uaugucaaugagcugcagu

SEQ ID NO: 2174946 - RNA, 19 nt, Artificial Sequence
  Description of Artificial Sequence: Synthetic oligonucleotide
  Sense strand starting at position 579 of SEQ ID NO: 1883184
uuacuaugauacuaaggaa

SEQ ID NO: 2174947 - RNA, 19 nt, Artificial Sequence
  Description of Artificial Sequence: Synthetic oligonucleotide
  Antisense strand to SEQ ID NO: 2174946
uuccuuaguaucauaguaa

SEQ ID NO: 2174948 - RNA, 19 nt, Artificial Sequence
  Description of Artificial Sequence: Synthetic oligonucleotide
  Sense strand starting at position 601 of SEQ ID NO: 1883184
cagcuacacuuguuaggua

SEQ ID NO: 2174949 - RNA, 19 nt, Artificial Sequence
  Description of Artificial Sequence: Synthetic oligonucleotide
  Antisense strand to SEQ ID NO: 2174948
uaccuaacaaguguagcug

SEQ ID NO: 2174950 - RNA, 19 nt, Artificial Sequence
  Description of Artificial Sequence: Synthetic oligonucleotide
  Sense strand starting at position 605 of SEQ ID NO: 1883184
uacacuuguuagguaggua

SEQ ID NO: 2174951 - RNA, 19 nt, Artificial Sequence
  Description of Artificial Sequence: Synthetic oligonucleotide
  Antisense strand to SEQ ID NO: 2174950
uaccuaccuaacaagugua

SEQ ID NO: 2174952 - RNA, 19 nt, Artificial Sequence
  Description of Artificial Sequence: Synthetic oligonucleotide
  Sense strand starting at position 606 of SEQ ID NO: 1883184
acacuuguuagguagguaa

SEQ ID NO: 2174953 - RNA, 19 nt, Artificial Sequence
  Description of Artificial Sequence: Synthetic oligonucleotide
  Antisense strand to SEQ ID NO: 2174952
uuaccuaccuaacaagugu

SEQ ID NO: 2174954 - RNA, 19 nt, Artificial Sequence
  Description of Artificial Sequence: Synthetic oligonucleotide
  Sense strand starting at position 691 of SEQ ID NO: 1883184
cugauaaagcgauauccgu

SEQ ID NO: 2174955 - RNA, 19 nt, Artificial Sequence
  Description of Artificial Sequence: Synthetic oligonucleotide
  Antisense strand to SEQ ID NO: 2174954
acggauaucgcuuuaucag

SEQ ID NO: 2174956 - RNA, 19 nt, Artificial Sequence
  Description of Artificial Sequence: Synthetic oligonucleotide
  Sense strand starting at position 699 of SEQ ID NO: 1883184
gcgauauccguucauggga

SEQ ID NO: 2174957 - RNA, 19 nt, Artificial Sequence
  Description of Artificial Sequence: Synthetic oligonucleotide
  Antisense strand to SEQ ID NO: 2174956
ucccaugaacggauaucgc

SEQ ID NO: 2174958 - RNA, 19 nt, Artificial Sequence
  Description of Artificial Sequence: Synthetic oligonucleotide
  Sense strand starting at position 784 of SEQ ID NO: 1883184
ggagaaguauuuggcuaag

SEQ ID NO: 2174959 - RNA, 19 nt, Artificial Sequence
  Description of Artificial Sequence: Synthetic oligonucleotide
  Antisense strand to SEQ ID NO: 2174958
cuuagccaaauacuucucc

SEQ ID NO: 2174960 - RNA, 19 nt, Artificial Sequence
  Description of Artificial Sequence: Synthetic oligonucleotide
  Sense strand starting at position 995 of SEQ ID NO: 1883184
agcucuggccuguuguuau

SEQ ID NO: 2174961 - RNA, 19 nt, Artificial Sequence
  Description of Artificial Sequence: Synthetic oligonucleotide
  Antisense strand to SEQ ID NO: 2174960
auaacaacaggccagagcu

SEQ ID NO: 2174962 - RNA, 19 nt, Artificial Sequence
  Description of Artificial Sequence: Synthetic oligonucleotide
  Sense strand starting at position 1003 of SEQ ID NO: 1883184
ccuguuguuaugggucuga

SEQ ID NO: 2174963 - RNA, 19 nt, Artificial Sequence
  Description of Artificial Sequence: Synthetic oligonucleotide
  Antisense strand to SEQ ID NO: 2174962
ucagacccauaacaacagg

SEQ ID NO: 2174964 - RNA, 19 nt, Artificial Sequence
  Description of Artificial Sequence: Synthetic oligonucleotide
  Sense strand starting at position 1007 of SEQ ID NO: 1883184
uuguuaugggucugaccuu

SEQ ID NO: 2174965 - RNA, 19 nt, Artificial Sequence
  Description of Artificial Sequence: Synthetic oligonucleotide
  Antisense strand to SEQ ID NO: 2174964
aaggucagacccauaacaa

SEQ ID NO: 2174966 - RNA, 19 nt, Artificial Sequence
  Description of Artificial Sequence: Synthetic oligonucleotide
  Sense strand starting at position 1014 of SEQ ID NO: 1883184
gggucugaccuuuggaaag

SEQ ID NO: 2174967 - RNA, 19 nt, Artificial Sequence
  Description of Artificial Sequence: Synthetic oligonucleotide
  Antisense strand to SEQ ID NO: 2174966
cuuuccaaaggucagaccc

SEQ ID NO: 2174968 - RNA, 19 nt, Artificial Sequence
  Description of Artificial Sequence: Synthetic oligonucleotide
  Sense strand starting at position 1024 of SEQ ID NO: 1883184
uuuggaaagucacuuugca

SEQ ID NO: 2174969 - RNA, 19 nt, Artificial Sequence
  Description of Artificial Sequence: Synthetic oligonucleotide
  Antisense strand to SEQ ID NO: 2174968
ugcaaagugacuuuccaaa

SEQ ID NO: 2174970 - RNA, 19 nt, Artificial Sequence
  Description of Artificial Sequence: Synthetic oligonucleotide
  Sense strand starting at position 1034 of SEQ ID NO: 1883184
cacuuugcacuuugggaua

SEQ ID NO: 2174971 - RNA, 19 nt, Artificial Sequence
  Description of Artificial Sequence: Synthetic oligonucleotide
  Antisense strand to SEQ ID NO: 2174970
uaucccaaagugcaaagug

SEQ ID NO: 2174972 - RNA, 19 nt, Artificial Sequence
  Description of Artificial Sequence: Synthetic oligonucleotide
  Sense strand starting at position 1207 of SEQ ID NO: 1883184
ucauauuugugcucccuuu

SEQ ID NO: 2174973 - RNA, 19 nt, Artificial Sequence
  Description of Artificial Sequence: Synthetic oligonucleotide
  Antisense strand to SEQ ID NO: 2174972
aaagggagcacaaauauga

SEQ ID NO: 2174974 - RNA, 19 nt, Artificial Sequence
  Description of Artificial Sequence: Synthetic oligonucleotide
  Sense strand starting at position 1240 of SEQ ID NO: 1883184
gacacaaugguuugccaua

SEQ ID NO: 2174975 - RNA, 19 nt, Artificial Sequence
  Description of Artificial Sequence: Synthetic oligonucleotide
  Antisense strand to SEQ ID NO: 2174974
uauggcaaaccauuguguc

SEQ ID NO: 2174976 - RNA, 19 nt, Artificial Sequence
  Description of Artificial Sequence: Synthetic oligonucleotide
  Sense strand starting at position 1428 of SEQ ID NO: 1883184
ugcacuuauuuguagaacu

SEQ ID NO: 2174977 - RNA, 19 nt, Artificial Sequence
  Description of Artificial Sequence: Synthetic oligonucleotide
  Antisense strand to SEQ ID NO: 2174976
aguucuacaaauaagugca

SEQ ID NO: 2174978 - RNA, 19 nt, Artificial Sequence
  Description of Artificial Sequence: Synthetic oligonucleotide
  Sense strand starting at position 1459 of SEQ ID NO: 1883184
auaguaaaguucuuugaac

SEQ ID NO: 2174979 - RNA, 19 nt, Artificial Sequence
  Description of Artificial Sequence: Synthetic oligonucleotide
  Antisense strand to SEQ ID NO: 2174978
guucaaagaacuuuacuau

SEQ ID NO: 2174980 - RNA, 19 nt, Artificial Sequence
  Description of Artificial Sequence: Synthetic oligonucleotide
  Sense strand starting at position 1461 of SEQ ID NO: 1883184
aguaaaguucuuugaacua

SEQ ID NO: 2174981 - RNA, 19 nt, Artificial Sequence
  Description of Artificial Sequence: Synthetic oligonucleotide
  Antisense strand to SEQ ID NO: 2174980
uaguucaaagaacuuuacu

SEQ ID NO: 2174982 - RNA, 19 nt, Artificial Sequence
  Description of Artificial Sequence: Synthetic oligonucleotide
  Sense strand starting at position 1468 of SEQ ID NO: 1883184
uucuuugaacuacgcuaaa

SEQ ID NO: 2174983 - RNA, 19 nt, Artificial Sequence
  Description of Artificial Sequence: Synthetic oligonucleotide
  Antisense strand to SEQ ID NO: 2174982
uuuagcguaguucaaagaa

SEQ ID NO: 2174984 - RNA, 19 nt, Artificial Sequence
  Description of Artificial Sequence: Synthetic oligonucleotide
  Sense strand starting at position 1538 of SEQ ID NO: 1883184
uccagacucguuuggucaa

SEQ ID NO: 2174985 - RNA, 19 nt, Artificial Sequence
  Description of Artificial Sequence: Synthetic oligonucleotide
  Antisense strand to SEQ ID NO: 2174984
uugaccaaacgagucugga

SEQ ID NO: 2174986 - RNA, 19 nt, Artificial Sequence
  Description of Artificial Sequence: Synthetic oligonucleotide
  Sense strand starting at position 1541 of SEQ ID NO: 1883184
agacucguuuggucaaagu

SEQ ID NO: 2174987 - RNA, 19 nt, Artificial Sequence
  Description of Artificial Sequence: Synthetic oligonucleotide
  Antisense strand to SEQ ID NO: 2174986
acuuugaccaaacgagucu

SEQ ID NO: 2174988 - RNA, 19 nt, Artificial Sequence
  Description of Artificial Sequence: Synthetic oligonucleotide
  Sense strand starting at position 1554 of SEQ ID NO: 1883184
caaaguagagauuguguaa

SEQ ID NO: 2174989 - RNA, 19 nt, Artificial Sequence
  Description of Artificial Sequence: Synthetic oligonucleotide
  Antisense strand to SEQ ID NO: 2174988
uuacacaaucucuacuuug

SEQ ID NO: 2174990 - RNA, 19 nt, Artificial Sequence
  Description of Artificial Sequence: Synthetic oligonucleotide
  Sense strand starting at position 1667 of SEQ ID NO: 1883184
acgagccauugcucuugaa

SEQ ID NO: 2174991 - RNA, 19 nt, Artificial Sequence
  Description of Artificial Sequence: Synthetic oligonucleotide
  Antisense strand to SEQ ID NO: 2174990
uucaagagcaauggcucgu

SEQ ID NO: 2174992 - RNA, 19 nt, Artificial Sequence
  Description of Artificial Sequence: Synthetic oligonucleotide
  Sense strand starting at position 1671 of SEQ ID NO: 1883184
gccauugcucuugaaauau

SEQ ID NO: 2174993 - RNA, 19 nt, Artificial Sequence
  Description of Artificial Sequence: Synthetic oligonucleotide
  Antisense strand to SEQ ID NO: 2174992
auauuucaagagcaauggc

SEQ ID NO: 2174994 - RNA, 19 nt, Artificial Sequence
  Description of Artificial Sequence: Synthetic oligonucleotide
  Sense strand starting at position 1680 of SEQ ID NO: 1883184
cuugaaauaucgcuaacaa

SEQ ID NO: 2174995 - RNA, 19 nt, Artificial Sequence
  Description of Artificial Sequence: Synthetic oligonucleotide
  Antisense strand to SEQ ID NO: 2174994
uuguuagcgauauuucaag

SEQ ID NO: 2174996 - RNA, 19 nt, Artificial Sequence
  Description of Artificial Sequence: Synthetic oligonucleotide
  Sense strand starting at position 1681 of SEQ ID NO: 1883184
uugaaauaucgcuaacaau

SEQ ID NO: 2174997 - RNA, 19 nt, Artificial Sequence
  Description of Artificial Sequence: Synthetic oligonucleotide
  Antisense strand to SEQ ID NO: 2174996
auuguuagcgauauuucaa

SEQ ID NO: 2174998 - RNA, 19 nt, Artificial Sequence
  Description of Artificial Sequence: Synthetic oligonucleotide
  Sense strand starting at position 1724 of SEQ ID NO: 1883184
uuauguaagcugcaaugga

SEQ ID NO: 2174999 - RNA, 19 nt, Artificial Sequence
  Description of Artificial Sequence: Synthetic oligonucleotide
  Antisense strand to SEQ ID NO: 2174998
uccauugcagcuuacauaa

SEQ ID NO: 2175000 - RNA, 19 nt, Artificial Sequence
  Description of Artificial Sequence: Synthetic oligonucleotide
  Sense strand starting at position 2010 of SEQ ID NO: 1883184
gggugagucacugggaaca

SEQ ID NO: 2175001 - RNA, 19 nt, Artificial Sequence
  Description of Artificial Sequence: Synthetic oligonucleotide
  Antisense strand to SEQ ID NO: 2175000
uguucccagugacucaccc

SEQ ID NO: 2175002 - RNA, 19 nt, Artificial Sequence
  Description of Artificial Sequence: Synthetic oligonucleotide
  Sense strand starting at position 2141 of SEQ ID NO: 1883184
gggcgaggcaugugaacaa

SEQ ID NO: 2175003 - RNA, 19 nt, Artificial Sequence
  Description of Artificial Sequence: Synthetic oligonucleotide
  Antisense strand to SEQ ID NO: 2175002
uuguucacaugccucgccc

SEQ ID NO: 2175004 - RNA, 19 nt, Artificial Sequence
  Description of Artificial Sequence: Synthetic oligonucleotide
  Sense strand starting at position 2191 of SEQ ID NO: 1883184
ggaaacgugaacugggaau

SEQ ID NO: 2175005 - RNA, 19 nt, Artificial Sequence
  Description of Artificial Sequence: Synthetic oligonucleotide
  Antisense strand to SEQ ID NO: 2175004
auucccaguucacguuucc

SEQ ID NO: 2175006 - RNA, 19 nt, Artificial Sequence
  Description of Artificial Sequence: Synthetic oligonucleotide
  Sense strand starting at position 2878 of SEQ ID NO: 1883184
cuuccaaggagucgucaga

SEQ ID NO: 2175007 - RNA, 19 nt, Artificial Sequence
  Description of Artificial Sequence: Synthetic oligonucleotide
  Antisense strand to SEQ ID NO: 2175006
ucugacgacuccuuggaag

SEQ ID NO: 2175008 - RNA, 19 nt, Artificial Sequence
  Description of Artificial Sequence: Synthetic oligonucleotide
  Sense strand starting at position 3373 of SEQ ID NO: 1883184
cccugucccugucugaaga

SEQ ID NO: 2175009 - RNA, 19 nt, Artificial Sequence
  Description of Artificial Sequence: Synthetic oligonucleotide
  Antisense strand to SEQ ID NO: 2175008
ucuucagacagggacaggg

SEQ ID NO: 2175010 - RNA, 19 nt, Artificial Sequence
  Description of Artificial Sequence: Synthetic oligonucleotide
  Sense strand starting at position 3374 of SEQ ID NO: 1883184
ccugucccugucugaagau

SEQ ID NO: 2175011 - RNA, 19 nt, Artificial Sequence
  Description of Artificial Sequence: Synthetic oligonucleotide
  Antisense strand to SEQ ID NO: 2175010
aucuucagacagggacagg

SEQ ID NO: 2175012 - RNA, 19 nt, Artificial Sequence
  Description of Artificial Sequence: Synthetic oligonucleotide
  Sense strand starting at position 18 of SEQ ID NO: 1883185
acaggaacuccuuguaaac

SEQ ID NO: 2175013 - RNA, 19 nt, Artificial Sequence
  Description of Artificial Sequence: Synthetic oligonucleotide
  Antisense strand to SEQ ID NO: 2175012
guuuacaaggaguuccugu

SEQ ID NO: 2175014 - RNA, 19 nt, Artificial Sequence
  Description of Artificial Sequence: Synthetic oligonucleotide
  Sense strand starting at position 57 of SEQ ID NO: 1883185
uuguaugcaucuuaaagga

SEQ ID NO: 2175015 - RNA, 19 nt, Artificial Sequence
  Description of Artificial Sequence: Synthetic oligonucleotide
  Antisense strand to SEQ ID NO: 2175014
uccuuuaagaugcauacaa

SEQ ID NO: 2175016 - RNA, 19 nt, Artificial Sequence
  Description of Artificial Sequence: Synthetic oligonucleotide
  Sense strand starting at position 208 of SEQ ID NO: 1883185
cucacaauucggcaaacga

SEQ ID NO: 2175017 - RNA, 19 nt, Artificial Sequence
  Description of Artificial Sequence: Synthetic oligonucleotide
  Antisense strand to SEQ ID NO: 2175016
ucguuugccgaauugugag

SEQ ID NO: 2175018 - RNA, 19 nt, Artificial Sequence
  Description of Artificial Sequence: Synthetic oligonucleotide
  Sense strand starting at position 524 of SEQ ID NO: 1883185
ugagauguuucgaguggug

SEQ ID NO: 2175019 - RNA, 19 nt, Artificial Sequence
  Description of Artificial Sequence: Synthetic oligonucleotide
  Antisense strand to SEQ ID NO: 2175018
caccacucgaaacaucuca

SEQ ID NO: 2175020 - RNA, 19 nt, Artificial Sequence
  Description of Artificial Sequence: Synthetic oligonucleotide
  Sense strand starting at position 526 of SEQ ID NO: 1883185
agauguuucgagugguguc

SEQ ID NO: 2175021 - RNA, 19 nt, Artificial Sequence
  Description of Artificial Sequence: Synthetic oligonucleotide
  Antisense strand to SEQ ID NO: 2175020
gacaccacucgaaacaucu

SEQ ID NO: 2175022 - RNA, 19 nt, Artificial Sequence
  Description of Artificial Sequence: Synthetic oligonucleotide
  Sense strand starting at position 527 of SEQ ID NO: 1883185
gauguuucgagugguguca

SEQ ID NO: 2175023 - RNA, 19 nt, Artificial Sequence
  Description of Artificial Sequence: Synthetic oligonucleotide
  Antisense strand to SEQ ID NO: 2175022
ugacaccacucgaaacauc

SEQ ID NO: 2175024 - RNA, 19 nt, Artificial Sequence
  Description of Artificial Sequence: Synthetic oligonucleotide
  Sense strand starting at position 800 of SEQ ID NO: 1883185
ugccaauuagacugaaaga

SEQ ID NO: 2175025 - RNA, 19 nt, Artificial Sequence
  Description of Artificial Sequence: Synthetic oligonucleotide
  Antisense strand to SEQ ID NO: 2175024
ucuuucagucuaauuggca

SEQ ID NO: 2175026 - RNA, 19 nt, Artificial Sequence
  Description of Artificial Sequence: Synthetic oligonucleotide
  Sense strand starting at position 923 of SEQ ID NO: 1883185
aggccacugccagaaauaa

SEQ ID NO: 2175027 - RNA, 19 nt, Artificial Sequence
  Description of Artificial Sequence: Synthetic oligonucleotide
  Antisense strand to SEQ ID NO: 2175026
uuauuucuggcaguggccu

SEQ ID NO: 2175028 - RNA, 19 nt, Artificial Sequence
  Description of Artificial Sequence: Synthetic oligonucleotide
  Sense strand starting at position 1300 of SEQ ID NO: 1883185
cagagucuuuagccagaca

SEQ ID NO: 2175029 - RNA, 19 nt, Artificial Sequence
  Description of Artificial Sequence: Synthetic oligonucleotide
  Antisense strand to SEQ ID NO: 2175028
ugucuggcuaaagacucug

SEQ ID NO: 2175030 - RNA, 19 nt, Artificial Sequence
  Description of Artificial Sequence: Synthetic oligonucleotide
  Sense strand starting at position 1438 of SEQ ID NO: 1883185
ggaggugagucuagaaugu

SEQ ID NO: 2175031 - RNA, 19 nt, Artificial Sequence
  Description of Artificial Sequence: Synthetic oligonucleotide
  Antisense strand to SEQ ID NO: 2175030
acauucuagacucaccucc

SEQ ID NO: 2175032 - RNA, 19 nt, Artificial Sequence
  Description of Artificial Sequence: Synthetic oligonucleotide
  Sense strand starting at position 1445 of SEQ ID NO: 1883185
agucuagaauguucucuga

SEQ ID NO: 2175033 - RNA, 19 nt, Artificial Sequence
  Description of Artificial Sequence: Synthetic oligonucleotide
  Antisense strand to SEQ ID NO: 2175032
ucagagaacauucuagacu

SEQ ID NO: 2175034 - RNA, 19 nt, Artificial Sequence
  Description of Artificial Sequence: Synthetic oligonucleotide
  Sense strand starting at position 1449 of SEQ ID NO: 1883185
uagaauguucucugacaga

SEQ ID NO: 2175035 - RNA, 19 nt, Artificial Sequence
  Description of Artificial Sequence: Synthetic oligonucleotide
  Antisense strand to SEQ ID NO: 2175034
ucugucagagaacauucua

SEQ ID NO: 2175036 - RNA, 19 nt, Artificial Sequence
  Description of Artificial Sequence: Synthetic oligonucleotide
  Sense strand starting at position 1452 of SEQ ID NO: 1883185
aauguucucugacagagug

SEQ ID NO: 2175037 - RNA, 19 nt, Artificial Sequence
  Description of Artificial Sequence: Synthetic oligonucleotide
  Antisense strand to SEQ ID NO: 2175036
cacucugucagagaacauu

SEQ ID NO: 2175038 - RNA, 19 nt, Artificial Sequence
  Description of Artificial Sequence: Synthetic oligonucleotide
  Sense strand starting at position 2155 of SEQ ID NO: 1883185
gaaagaggugcccaguuua

SEQ ID NO: 2175039 - RNA, 19 nt, Artificial Sequence
  Description of Artificial Sequence: Synthetic oligonucleotide
  Antisense strand to SEQ ID NO: 2175038
uaaacugggcaccucuuuc

SEQ ID NO: 2175040 - RNA, 19 nt, Artificial Sequence
  Description of Artificial Sequence: Synthetic oligonucleotide
  Sense strand starting at position 2282 of SEQ ID NO: 1883185
agucgacuccuuuggguga

SEQ ID NO: 2175041 - RNA, 19 nt, Artificial Sequence
  Description of Artificial Sequence: Synthetic oligonucleotide
  Antisense strand to SEQ ID NO: 2175040
ucacccaaaggagucgacu

SEQ ID NO: 2175042 - RNA, 19 nt, Artificial Sequence
  Description of Artificial Sequence: Synthetic oligonucleotide
  Sense strand starting at position 2286 of SEQ ID NO: 1883185
gacuccuuugggugaugga

SEQ ID NO: 2175043 - RNA, 19 nt, Artificial Sequence
  Description of Artificial Sequence: Synthetic oligonucleotide
  Antisense strand to SEQ ID NO: 2175042
uccaucacccaaaggaguc

SEQ ID NO: 2175044 - RNA, 19 nt, Artificial Sequence
  Description of Artificial Sequence: Synthetic oligonucleotide
  Sense strand starting at position 2417 of SEQ ID NO: 1883185
acaguccucccugagaauc

SEQ ID NO: 2175045 - RNA, 19 nt, Artificial Sequence
  Description of Artificial Sequence: Synthetic oligonucleotide
  Antisense strand to SEQ ID NO: 2175044
gauucucagggaggacugu

SEQ ID NO: 2175046 - RNA, 19 nt, Artificial Sequence
  Description of Artificial Sequence: Synthetic oligonucleotide
  Sense strand starting at position 2495 of SEQ ID NO: 1883185
ugguaugagcucugacuuc

SEQ ID NO: 2175047 - RNA, 19 nt, Artificial Sequence
  Description of Artificial Sequence: Synthetic oligonucleotide
  Antisense strand to SEQ ID NO: 2175046
gaagucagagcucauacca

SEQ ID NO: 2175048 - RNA, 19 nt, Artificial Sequence
  Description of Artificial Sequence: Synthetic oligonucleotide
  Sense strand starting at position 2589 of SEQ ID NO: 1883185
ugcagauguccuugcaaac

SEQ ID NO: 2175049 - RNA, 19 nt, Artificial Sequence
  Description of Artificial Sequence: Synthetic oligonucleotide
  Antisense strand to SEQ ID NO: 2175048
guuugcaaggacaucugca

SEQ ID NO: 2175050 - RNA, 19 nt, Artificial Sequence
  Description of Artificial Sequence: Synthetic oligonucleotide
  Sense strand starting at position 2640 of SEQ ID NO: 1883185
ccucuauuccaucggcaaa

SEQ ID NO: 2175051 - RNA, 19 nt, Artificial Sequence
  Description of Artificial Sequence: Synthetic oligonucleotide
  Antisense strand to SEQ ID NO: 2175050
uuugccgauggaauagagg

SEQ ID NO: 2175052 - RNA, 19 nt, Artificial Sequence
  Description of Artificial Sequence: Synthetic oligonucleotide
  Sense strand starting at position 2642 of SEQ ID NO: 1883185
ucuauuccaucggcaaacu

SEQ ID NO: 2175053 - RNA, 19 nt, Artificial Sequence
  Description of Artificial Sequence: Synthetic oligonucleotide
  Antisense strand to SEQ ID NO: 2175052
aguuugccgauggaauaga

SEQ ID NO: 2175054 - RNA, 19 nt, Artificial Sequence
  Description of Artificial Sequence: Synthetic oligonucleotide
  Sense strand starting at position 2660 of SEQ ID NO: 1883185
uccuguuagugcgucaaga

SEQ ID NO: 2175055 - RNA, 19 nt, Artificial Sequence
  Description of Artificial Sequence: Synthetic oligonucleotide
  Antisense strand to SEQ ID NO: 2175054
ucuugacgcacuaacagga

SEQ ID NO: 2175056 - RNA, 19 nt, Artificial Sequence
  Description of Artificial Sequence: Synthetic oligonucleotide
  Sense strand starting at position 2662 of SEQ ID NO: 1883185
cuguuagugcgucaagaca

SEQ ID NO: 2175057 - RNA, 19 nt, Artificial Sequence
  Description of Artificial Sequence: Synthetic oligonucleotide
  Antisense strand to SEQ ID NO: 2175056
ugucuugacgcacuaacag

SEQ ID NO: 2175058 - RNA, 19 nt, Artificial Sequence
  Description of Artificial Sequence: Synthetic oligonucleotide
  Sense strand starting at position 2675 of SEQ ID NO: 1883185
aagacagaauccugauguc

SEQ ID NO: 2175059 - RNA, 19 nt, Artificial Sequence
  Description of Artificial Sequence: Synthetic oligonucleotide
  Antisense strand to SEQ ID NO: 2175058
gacaucaggauucugucuu

SEQ ID NO: 2175060 - RNA, 19 nt, Artificial Sequence
  Description of Artificial Sequence: Synthetic oligonucleotide
  Sense strand starting at position 2705 of SEQ ID NO: 1883185
gaagcuuucccugguugca

SEQ ID NO: 2175061 - RNA, 19 nt, Artificial Sequence
  Description of Artificial Sequence: Synthetic oligonucleotide
  Antisense strand to SEQ ID NO: 2175060
ugcaaccagggaaagcuuc

SEQ ID NO: 2175062 - RNA, 19 nt, Artificial Sequence
  Description of Artificial Sequence: Synthetic oligonucleotide
  Sense strand starting at position 2769 of SEQ ID NO: 1883185
guuguugccucccuauaag

SEQ ID NO: 2175063 - RNA, 19 nt, Artificial Sequence
  Description of Artificial Sequence: Synthetic oligonucleotide
  Antisense strand to SEQ ID NO: 2175062
cuuauagggaggcaacaac

SEQ ID NO: 2175064 - RNA, 19 nt, Artificial Sequence
  Description of Artificial Sequence: Synthetic oligonucleotide
  Sense strand starting at position 2852 of SEQ ID NO: 1883185
cgggcugguccucaggaaa

SEQ ID NO: 2175065 - RNA, 19 nt, Artificial Sequence
  Description of Artificial Sequence: Synthetic oligonucleotide
  Antisense strand to SEQ ID NO: 2175064
uuuccugaggaccagcccg

SEQ ID NO: 2175066 - RNA, 19 nt, Artificial Sequence
  Description of Artificial Sequence: Synthetic oligonucleotide
  Sense strand starting at position 2866 of SEQ ID NO: 1883185
ggaaauugaugcuucccau

SEQ ID NO: 2175067 - RNA, 19 nt, Artificial Sequence
  Description of Artificial Sequence: Synthetic oligonucleotide
  Antisense strand to SEQ ID NO: 2175066
augggaagcaucaauuucc

SEQ ID NO: 2175068 - RNA, 19 nt, Artificial Sequence
  Description of Artificial Sequence: Synthetic oligonucleotide
  Sense strand starting at position 2890 of SEQ ID NO: 1883185
gccugucuucuuggaacaa

SEQ ID NO: 2175069 - RNA, 19 nt, Artificial Sequence
  Description of Artificial Sequence: Synthetic oligonucleotide
  Antisense strand to SEQ ID NO: 2175068
uuguuccaagaagacaggc

SEQ ID NO: 2175070 - RNA, 19 nt, Artificial Sequence
  Description of Artificial Sequence: Synthetic oligonucleotide
  Sense strand starting at position 2891 of SEQ ID NO: 1883185
ccugucuucuuggaacaac

SEQ ID NO: 2175071 - RNA, 19 nt, Artificial Sequence
  Description of Artificial Sequence: Synthetic oligonucleotide
  Antisense strand to SEQ ID NO: 2175070
guuguuccaagaagacagg

SEQ ID NO: 2175072 - RNA, 19 nt, Artificial Sequence
  Description of Artificial Sequence: Synthetic oligonucleotide
  Sense strand starting at position 2916 of SEQ ID NO: 1883185
guuuauugaaucuggaaag

SEQ ID NO: 2175073 - RNA, 19 nt, Artificial Sequence
  Description of Artificial Sequence: Synthetic oligonucleotide
  Antisense strand to SEQ ID NO: 2175072
cuuuccagauucaauaaac

SEQ ID NO: 2175074 - RNA, 19 nt, Artificial Sequence
  Description of Artificial Sequence: Synthetic oligonucleotide
  Sense strand starting at position 2917 of SEQ ID NO: 1883185
uuuauugaaucuggaaaga

SEQ ID NO: 2175075 - RNA, 19 nt, Artificial Sequence
  Description of Artificial Sequence: Synthetic oligonucleotide
  Antisense strand to SEQ ID NO: 2175074
ucuuuccagauucaauaaa

SEQ ID NO: 2175076 - RNA, 19 nt, Artificial Sequence
  Description of Artificial Sequence: Synthetic oligonucleotide
  Sense strand starting at position 3067 of SEQ ID NO: 1883185
gcuggaauuucuggaagaa

SEQ ID NO: 2175077 - RNA, 19 nt, Artificial Sequence
  Description of Artificial Sequence: Synthetic oligonucleotide
  Antisense strand to SEQ ID NO: 2175076
uucuuccagaaauuccagc

SEQ ID NO: 2175078 - RNA, 19 nt, Artificial Sequence
  Description of Artificial Sequence: Synthetic oligonucleotide
  Sense strand starting at position 3080 of SEQ ID NO: 1883185
gaagaagucuagcaucuuc

SEQ ID NO: 2175079 - RNA, 19 nt, Artificial Sequence
  Description of Artificial Sequence: Synthetic oligonucleotide
  Antisense strand to SEQ ID NO: 2175078
gaagaugcuagacuucuuc

SEQ ID NO: 2175080 - RNA, 19 nt, Artificial Sequence
  Description of Artificial Sequence: Synthetic oligonucleotide
  Sense strand starting at position 3089 of SEQ ID NO: 1883185
uagcaucuuccggaauuga

SEQ ID NO: 2175081 - RNA, 19 nt, Artificial Sequence
  Description of Artificial Sequence: Synthetic oligonucleotide
  Antisense strand to SEQ ID NO: 2175080
ucaauuccggaagaugcua

SEQ ID NO: 2175082 - RNA, 19 nt, Artificial Sequence
  Description of Artificial Sequence: Synthetic oligonucleotide
  Sense strand starting at position 3770 of SEQ ID NO: 1883185
augggaaauaccugugacu

SEQ ID NO: 2175083 - RNA, 19 nt, Artificial Sequence
  Description of Artificial Sequence: Synthetic oligonucleotide
  Antisense strand to SEQ ID NO: 2175082
agucacagguauuucccau

SEQ ID NO: 2175084 - RNA, 19 nt, Artificial Sequence
  Description of Artificial Sequence: Synthetic oligonucleotide
  Sense strand starting at position 3772 of SEQ ID NO: 1883185
gggaaauaccugugacuuc

SEQ ID NO: 2175085 - RNA, 19 nt, Artificial Sequence
  Description of Artificial Sequence: Synthetic oligonucleotide
  Antisense strand to SEQ ID NO: 2175084
gaagucacagguauuuccc

SEQ ID NO: 2175086 - RNA, 19 nt, Artificial Sequence
  Description of Artificial Sequence: Synthetic oligonucleotide
  Sense strand starting at position 3783 of SEQ ID NO: 1883185
gugacuuccugggacagga

SEQ ID NO: 2175087 - RNA, 19 nt, Artificial Sequence
  Description of Artificial Sequence: Synthetic oligonucleotide
  Antisense strand to SEQ ID NO: 2175086
uccugucccaggaagucac

SEQ ID NO: 2175088 - RNA, 19 nt, Artificial Sequence
  Description of Artificial Sequence: Synthetic oligonucleotide
  Sense strand starting at position 3878 of SEQ ID NO: 1883185
gugggugucacuugcuuua

SEQ ID NO: 2175089 - RNA, 19 nt, Artificial Sequence
  Description of Artificial Sequence: Synthetic oligonucleotide
  Antisense strand to SEQ ID NO: 2175088
uaaagcaagugacacccac

SEQ ID NO: 2175090 - RNA, 19 nt, Artificial Sequence
  Description of Artificial Sequence: Synthetic oligonucleotide
  Sense strand starting at position 3880 of SEQ ID NO: 1883185
gggugucacuugcuuuaca

SEQ ID NO: 2175091 - RNA, 19 nt, Artificial Sequence
  Description of Artificial Sequence: Synthetic oligonucleotide
  Antisense strand to SEQ ID NO: 2175090
uguaaagcaagugacaccc

SEQ ID NO: 2175092 - RNA, 19 nt, Artificial Sequence
  Description of Artificial Sequence: Synthetic oligonucleotide
  Sense strand starting at position 158 of SEQ ID NO: 1883186
ugucucauacugcaagaaa

SEQ ID NO: 2175093 - RNA, 19 nt, Artificial Sequence
  Description of Artificial Sequence: Synthetic oligonucleotide
  Antisense strand to SEQ ID NO: 2175092
uuucuugcaguaugagaca

SEQ ID NO: 2175094 - RNA, 19 nt, Artificial Sequence
  Description of Artificial Sequence: Synthetic oligonucleotide
  Sense strand starting at position 223 of SEQ ID NO: 1883186
gggugaacuguaugaaauu

SEQ ID NO: 2175095 - RNA, 19 nt, Artificial Sequence
  Description of Artificial Sequence: Synthetic oligonucleotide
  Antisense strand to SEQ ID NO: 2175094
aauuucauacaguucaccc

SEQ ID NO: 2175096 - RNA, 19 nt, Artificial Sequence
  Description of Artificial Sequence: Synthetic oligonucleotide
  Sense strand starting at position 224 of SEQ ID NO: 1883186
ggugaacuguaugaaauug

SEQ ID NO: 2175097 - RNA, 19 nt, Artificial Sequence
  Description of Artificial Sequence: Synthetic oligonucleotide
  Antisense strand to SEQ ID NO: 2175096
caauuucauacaguucacc

SEQ ID NO: 2175098 - RNA, 19 nt, Artificial Sequence
  Description of Artificial Sequence: Synthetic oligonucleotide
  Sense strand starting at position 287 of SEQ ID NO: 1883186
gguccaaccucauacuuga

SEQ ID NO: 2175099 - RNA, 19 nt, Artificial Sequence
  Description of Artificial Sequence: Synthetic oligonucleotide
  Antisense strand to SEQ ID NO: 2175098
ucaaguaugagguuggacc

SEQ ID NO: 2175100 - RNA, 19 nt, Artificial Sequence
  Description of Artificial Sequence: Synthetic oligonucleotide
  Sense strand starting at position 394 of SEQ ID NO: 1883186
cugacucugucccugcaaa

SEQ ID NO: 2175101 - RNA, 19 nt, Artificial Sequence
  Description of Artificial Sequence: Synthetic oligonucleotide
  Antisense strand to SEQ ID NO: 2175100
uuugcagggacagagucag

SEQ ID NO: 2175102 - RNA, 19 nt, Artificial Sequence
  Description of Artificial Sequence: Synthetic oligonucleotide
  Sense strand starting at position 698 of SEQ ID NO: 1883186
cucagaaagucuccaugaa

SEQ ID NO: 2175103 - RNA, 19 nt, Artificial Sequence
  Description of Artificial Sequence: Synthetic oligonucleotide
  Antisense strand to SEQ ID NO: 2175102
uucauggagacuuucugag

SEQ ID NO: 2175104 - RNA, 19 nt, Artificial Sequence
  Description of Artificial Sequence: Synthetic oligonucleotide
  Sense strand starting at position 770 of SEQ ID NO: 1883186
acugcugggcccuagagau

SEQ ID NO: 2175105 - RNA, 19 nt, Artificial Sequence
  Description of Artificial Sequence: Synthetic oligonucleotide
  Antisense strand to SEQ ID NO: 2175104
aucucuagggcccagcagu

SEQ ID NO: 2175106 - RNA, 19 nt, Artificial Sequence
  Description of Artificial Sequence: Synthetic oligonucleotide
  Sense strand starting at position 782 of SEQ ID NO: 1883186
uagagaugccuaggccacu

SEQ ID NO: 2175107 - RNA, 19 nt, Artificial Sequence
  Description of Artificial Sequence: Synthetic oligonucleotide
  Antisense strand to SEQ ID NO: 2175106
aguggccuaggcaucucua

SEQ ID NO: 2175108 - RNA, 19 nt, Artificial Sequence
  Description of Artificial Sequence: Synthetic oligonucleotide
  Sense strand starting at position 868 of SEQ ID NO: 1883186
ccgucugccuggcuauuau

SEQ ID NO: 2175109 - RNA, 19 nt, Artificial Sequence
  Description of Artificial Sequence: Synthetic oligonucleotide
  Antisense strand to SEQ ID NO: 2175108
auaauagccaggcagacgg

SEQ ID NO: 2175110 - RNA, 19 nt, Artificial Sequence
  Description of Artificial Sequence: Synthetic oligonucleotide
  Sense strand starting at position 932 of SEQ ID NO: 1883186
gugcucuggacuuggaaga

SEQ ID NO: 2175111 - RNA, 19 nt, Artificial Sequence
  Description of Artificial Sequence: Synthetic oligonucleotide
  Antisense strand to SEQ ID NO: 2175110
ucuuccaaguccagagcac

SEQ ID NO: 2175112 - RNA, 19 nt, Artificial Sequence
  Description of Artificial Sequence: Synthetic oligonucleotide
  Sense strand starting at position 933 of SEQ ID NO: 1883186
ugcucuggacuuggaagau

SEQ ID NO: 2175113 - RNA, 19 nt, Artificial Sequence
  Description of Artificial Sequence: Synthetic oligonucleotide
  Antisense strand to SEQ ID NO: 2175112
aucuuccaaguccagagca

SEQ ID NO: 2175114 - RNA, 19 nt, Artificial Sequence
  Description of Artificial Sequence: Synthetic oligonucleotide
  Sense strand starting at position 971 of SEQ ID NO: 1883186
ccuauuccucuuggacaga

SEQ ID NO: 2175115 - RNA, 19 nt, Artificial Sequence
  Description of Artificial Sequence: Synthetic oligonucleotide
  Antisense strand to SEQ ID NO: 2175114
ucuguccaagaggaauagg

SEQ ID NO: 2175116 - RNA, 19 nt, Artificial Sequence
  Description of Artificial Sequence: Synthetic oligonucleotide
  Sense strand starting at position 1214 of SEQ ID NO: 1883186
uuuaccugcccugggaaau

SEQ ID NO: 2175117 - RNA, 19 nt, Artificial Sequence
  Description of Artificial Sequence: Synthetic oligonucleotide
  Antisense strand to SEQ ID NO: 2175116
auuucccagggcagguaaa

SEQ ID NO: 2175118 - RNA, 19 nt, Artificial Sequence
  Description of Artificial Sequence: Synthetic oligonucleotide
  Sense strand starting at position 2063 of SEQ ID NO: 1883186
ccuguuaaugcugaggaag

SEQ ID NO: 2175119 - RNA, 19 nt, Artificial Sequence
  Description of Artificial Sequence: Synthetic oligonucleotide
  Antisense strand to SEQ ID NO: 2175118
cuuccucagcauuaacagg

SEQ ID NO: 2175120 - RNA, 19 nt, Artificial Sequence
  Description of Artificial Sequence: Synthetic oligonucleotide
  Sense strand starting at position 2151 of SEQ ID NO: 1883186
guucgaggugcuuggucua

SEQ ID NO: 2175121 - RNA, 19 nt, Artificial Sequence
  Description of Artificial Sequence: Synthetic oligonucleotide
  Antisense strand to SEQ ID NO: 2175120
uagaccaagcaccucgaac

SEQ ID NO: 2175122 - RNA, 19 nt, Artificial Sequence
  Description of Artificial Sequence: Synthetic oligonucleotide
  Sense strand starting at position 2154 of SEQ ID NO: 1883186
cgaggugcuuggucuacau

SEQ ID NO: 2175123 - RNA, 19 nt, Artificial Sequence
  Description of Artificial Sequence: Synthetic oligonucleotide
  Antisense strand to SEQ ID NO: 2175122
auguagaccaagcaccucg

SEQ ID NO: 2175124 - RNA, 19 nt, Artificial Sequence
  Description of Artificial Sequence: Synthetic oligonucleotide
  Sense strand starting at position 2156 of SEQ ID NO: 1883186
aggugcuuggucuacauga

SEQ ID NO: 2175125 - RNA, 19 nt, Artificial Sequence
  Description of Artificial Sequence: Synthetic oligonucleotide
  Antisense strand to SEQ ID NO: 2175124
ucauguagaccaagcaccu

SEQ ID NO: 2175126 - RNA, 19 nt, Artificial Sequence
  Description of Artificial Sequence: Synthetic oligonucleotide
  Sense strand starting at position 2158 of SEQ ID NO: 1883186
gugcuuggucuacaugaca

SEQ ID NO: 2175127 - RNA, 19 nt, Artificial Sequence
  Description of Artificial Sequence: Synthetic oligonucleotide
  Antisense strand to SEQ ID NO: 2175126
ugucauguagaccaagcac

SEQ ID NO: 2175128 - RNA, 19 nt, Artificial Sequence
  Description of Artificial Sequence: Synthetic oligonucleotide
  Sense strand starting at position 2163 of SEQ ID NO: 1883186
uggucuacaugacaauagu

SEQ ID NO: 2175129 - RNA, 19 nt, Artificial Sequence
  Description of Artificial Sequence: Synthetic oligonucleotide
  Antisense strand to SEQ ID NO: 2175128
acuauugucauguagacca

SEQ ID NO: 2175130 - RNA, 19 nt, Artificial Sequence
  Description of Artificial Sequence: Synthetic oligonucleotide
  Sense strand starting at position 2349 of SEQ ID NO: 1883186
ucauguacuugguaucaca

SEQ ID NO: 2175131 - RNA, 19 nt, Artificial Sequence
  Description of Artificial Sequence: Synthetic oligonucleotide
  Antisense strand to SEQ ID NO: 2175130
ugugauaccaaguacauga

SEQ ID NO: 2175132 - RNA, 19 nt, Artificial Sequence
  Description of Artificial Sequence: Synthetic oligonucleotide
  Sense strand starting at position 2564 of SEQ ID NO: 1883186
uguuacugggcucaaguua

SEQ ID NO: 2175133 - RNA, 19 nt, Artificial Sequence
  Description of Artificial Sequence: Synthetic oligonucleotide
  Antisense strand to SEQ ID NO: 2175132
uaacuugagcccaguaaca

SEQ ID NO: 2175134 - RNA, 19 nt, Artificial Sequence
  Description of Artificial Sequence: Synthetic oligonucleotide
  Sense strand starting at position 2581 of SEQ ID NO: 1883186
uagugaugccuuugugagc

SEQ ID NO: 2175135 - RNA, 19 nt, Artificial Sequence
  Description of Artificial Sequence: Synthetic oligonucleotide
  Antisense strand to SEQ ID NO: 2175134
gcucacaaaggcaucacua

SEQ ID NO: 2175136 - RNA, 19 nt, Artificial Sequence
  Description of Artificial Sequence: Synthetic oligonucleotide
  Sense strand starting at position 2582 of SEQ ID NO: 1883186
agugaugccuuugugagca

SEQ ID NO: 2175137 - RNA, 19 nt, Artificial Sequence
  Description of Artificial Sequence: Synthetic oligonucleotide
  Antisense strand to SEQ ID NO: 2175136
ugcucacaaaggcaucacu

SEQ ID NO: 2175138 - RNA, 19 nt, Artificial Sequence
  Description of Artificial Sequence: Synthetic oligonucleotide
  Sense strand starting at position 2659 of SEQ ID NO: 1883186
cagagugugucaccacuua

SEQ ID NO: 2175139 - RNA, 19 nt, Artificial Sequence
  Description of Artificial Sequence: Synthetic oligonucleotide
  Antisense strand to SEQ ID NO: 2175138
uaaguggugacacacucug

SEQ ID NO: 2175140 - RNA, 19 nt, Artificial Sequence
  Description of Artificial Sequence: Synthetic oligonucleotide
  Sense strand starting at position 2669 of SEQ ID NO: 1883186
caccacuuaucaugaggga

SEQ ID NO: 2175141 - RNA, 19 nt, Artificial Sequence
  Description of Artificial Sequence: Synthetic oligonucleotide
  Antisense strand to SEQ ID NO: 2175140
ucccucaugauaaguggug

SEQ ID NO: 2175142 - RNA, 19 nt, Artificial Sequence
  Description of Artificial Sequence: Synthetic oligonucleotide
  Sense strand starting at position 2732 of SEQ ID NO: 1883186
cccugcuuuccgggcagaa

SEQ ID NO: 2175143 - RNA, 19 nt, Artificial Sequence
  Description of Artificial Sequence: Synthetic oligonucleotide
  Antisense strand to SEQ ID NO: 2175142
uucugcccggaaagcaggg

SEQ ID NO: 2175144 - RNA, 19 nt, Artificial Sequence
  Description of Artificial Sequence: Synthetic oligonucleotide
  Sense strand starting at position 2734 of SEQ ID NO: 1883186
cugcuuuccgggcagaaga

SEQ ID NO: 2175145 - RNA, 19 nt, Artificial Sequence
  Description of Artificial Sequence: Synthetic oligonucleotide
  Antisense strand to SEQ ID NO: 2175144
ucuucugcccggaaagcag

SEQ ID NO: 2175146 - RNA, 19 nt, Artificial Sequence
  Description of Artificial Sequence: Synthetic oligonucleotide
  Sense strand starting at position 2745 of SEQ ID NO: 1883186
gcagaagacucugcaguga

SEQ ID NO: 2175147 - RNA, 19 nt, Artificial Sequence
  Description of Artificial Sequence: Synthetic oligonucleotide
  Antisense strand to SEQ ID NO: 2175146
ucacugcagagucuucugc

SEQ ID NO: 2175148 - RNA, 19 nt, Artificial Sequence
  Description of Artificial Sequence: Synthetic oligonucleotide
  Sense strand starting at position 2852 of SEQ ID NO: 1883186
acuuacuaucucugagugu

SEQ ID NO: 2175149 - RNA, 19 nt, Artificial Sequence
  Description of Artificial Sequence: Synthetic oligonucleotide
  Antisense strand to SEQ ID NO: 2175148
acacucagagauaguaagu

SEQ ID NO: 2175150 - RNA, 19 nt, Artificial Sequence
  Description of Artificial Sequence: Synthetic oligonucleotide
  Sense strand starting at position 2879 of SEQ ID NO: 1883186
cucugaaguuaguuaggau

SEQ ID NO: 2175151 - RNA, 19 nt, Artificial Sequence
  Description of Artificial Sequence: Synthetic oligonucleotide
  Antisense strand to SEQ ID NO: 2175150
auccuaacuaacuucagag

SEQ ID NO: 2175152 - RNA, 19 nt, Artificial Sequence
  Description of Artificial Sequence: Synthetic oligonucleotide
  Sense strand starting at position 2880 of SEQ ID NO: 1883186
ucugaaguuaguuaggauu

SEQ ID NO: 2175153 - RNA, 19 nt, Artificial Sequence
  Description of Artificial Sequence: Synthetic oligonucleotide
  Antisense strand to SEQ ID NO: 2175152
aauccuaacuaacuucaga

SEQ ID NO: 2175154 - RNA, 19 nt, Artificial Sequence
  Description of Artificial Sequence: Synthetic oligonucleotide
  Sense strand starting at position 2886 of SEQ ID NO: 1883186
guuaguuaggauuguguaa

SEQ ID NO: 2175155 - RNA, 19 nt, Artificial Sequence
  Description of Artificial Sequence: Synthetic oligonucleotide
  Antisense strand to SEQ ID NO: 2175154
uuacacaauccuaacuaac

SEQ ID NO: 2175156 - RNA, 19 nt, Artificial Sequence
  Description of Artificial Sequence: Synthetic oligonucleotide
  Sense strand starting at position 2960 of SEQ ID NO: 1883186
ggccgaagucaguggauua

SEQ ID NO: 2175157 - RNA, 19 nt, Artificial Sequence
  Description of Artificial Sequence: Synthetic oligonucleotide
  Antisense strand to SEQ ID NO: 2175156
uaauccacugacuucggcc

SEQ ID NO: 2175158 - RNA, 19 nt, Artificial Sequence
  Description of Artificial Sequence: Synthetic oligonucleotide
  Sense strand starting at position 3340 of SEQ ID NO: 1883186
cccuccuugggaugucaua

SEQ ID NO: 2175159 - RNA, 19 nt, Artificial Sequence
  Description of Artificial Sequence: Synthetic oligonucleotide
  Antisense strand to SEQ ID NO: 2175158
uaugacaucccaaggaggg

SEQ ID NO: 2175160 - RNA, 19 nt, Artificial Sequence
  Description of Artificial Sequence: Synthetic oligonucleotide
  Sense strand starting at position 3351 of SEQ ID NO: 1883186
augucauagccauggaguu

SEQ ID NO: 2175161 - RNA, 19 nt, Artificial Sequence
  Description of Artificial Sequence: Synthetic oligonucleotide
  Antisense strand to SEQ ID NO: 2175160
aacuccauggcuaugacau

SEQ ID NO: 2175162 - RNA, 19 nt, Artificial Sequence
  Description of Artificial Sequence: Synthetic oligonucleotide
  Sense strand starting at position 3499 of SEQ ID NO: 1883186
gacgauaagcggugaugga

SEQ ID NO: 2175163 - RNA, 19 nt, Artificial Sequence
  Description of Artificial Sequence: Synthetic oligonucleotide
  Antisense strand to SEQ ID NO: 2175162
uccaucaccgcuuaucguc

SEQ ID NO: 2175164 - RNA, 19 nt, Artificial Sequence
  Description of Artificial Sequence: Synthetic oligonucleotide
  Sense strand starting at position 3750 of SEQ ID NO: 1883186
uucuucuccgaaugcauua

SEQ ID NO: 2175165 - RNA, 19 nt, Artificial Sequence
  Description of Artificial Sequence: Synthetic oligonucleotide
  Antisense strand to SEQ ID NO: 2175164
uaaugcauucggagaagaa

SEQ ID NO: 2175166 - RNA, 19 nt, Artificial Sequence
  Description of Artificial Sequence: Synthetic oligonucleotide
  Sense strand starting at position 3755 of SEQ ID NO: 1883186
cuccgaaugcauuaaugca

SEQ ID NO: 2175167 - RNA, 19 nt, Artificial Sequence
  Description of Artificial Sequence: Synthetic oligonucleotide
  Antisense strand to SEQ ID NO: 2175166
ugcauuaaugcauucggag

SEQ ID NO: 2175168 - RNA, 19 nt, Artificial Sequence
  Description of Artificial Sequence: Synthetic oligonucleotide
  Sense strand starting at position 3875 of SEQ ID NO: 1883186
ggcucucuuugguugguau

SEQ ID NO: 2175169 - RNA, 19 nt, Artificial Sequence
  Description of Artificial Sequence: Synthetic oligonucleotide
  Antisense strand to SEQ ID NO: 2175168
auaccaaccaaagagagcc

SEQ ID NO: 2175170 - RNA, 19 nt, Artificial Sequence
  Description of Artificial Sequence: Synthetic oligonucleotide
  Sense strand starting at position 3921 of SEQ ID NO: 1883186
cacaaauaugcaugugugu

SEQ ID NO: 2175171 - RNA, 19 nt, Artificial Sequence
  Description of Artificial Sequence: Synthetic oligonucleotide
  Antisense strand to SEQ ID NO: 2175170
acacacaugcauauuugug

SEQ ID NO: 2175172 - RNA, 19 nt, Artificial Sequence
  Description of Artificial Sequence: Synthetic oligonucleotide
  Sense strand starting at position 74 of SEQ ID NO: 1883187
uuuacuaguuagucaguaa

SEQ ID NO: 2175173 - RNA, 19 nt, Artificial Sequence
  Description of Artificial Sequence: Synthetic oligonucleotide
  Antisense strand to SEQ ID NO: 2175172
uuacugacuaacuaguaaa

SEQ ID NO: 2175174 - RNA, 19 nt, Artificial Sequence
  Description of Artificial Sequence: Synthetic oligonucleotide
  Sense strand starting at position 78 of SEQ ID NO: 1883187
cuaguuagucaguaacugu

SEQ ID NO: 2175175 - RNA, 19 nt, Artificial Sequence
  Description of Artificial Sequence: Synthetic oligonucleotide
  Antisense strand to SEQ ID NO: 2175174
acaguuacugacuaacuag

SEQ ID NO: 2175176 - RNA, 19 nt, Artificial Sequence
  Description of Artificial Sequence: Synthetic oligonucleotide
  Sense strand starting at position 296 of SEQ ID NO: 1883187
acuuauguucuagaagcua

SEQ ID NO: 2175177 - RNA, 19 nt, Artificial Sequence
  Description of Artificial Sequence: Synthetic oligonucleotide
  Antisense strand to SEQ ID NO: 2175176
uagcuucuagaacauaagu

SEQ ID NO: 2175178 - RNA, 19 nt, Artificial Sequence
  Description of Artificial Sequence: Synthetic oligonucleotide
  Sense strand starting at position 823 of SEQ ID NO: 1883187
uuaguuauaucugcaauga

SEQ ID NO: 2175179 - RNA, 19 nt, Artificial Sequence
  Description of Artificial Sequence: Synthetic oligonucleotide
  Antisense strand to SEQ ID NO: 2175178
ucauugcagauauaacuaa

SEQ ID NO: 2175180 - RNA, 19 nt, Artificial Sequence
  Description of Artificial Sequence: Synthetic oligonucleotide
  Sense strand starting at position 854 of SEQ ID NO: 1883187
guaagcucauauucugaga

SEQ ID NO: 2175181 - RNA, 19 nt, Artificial Sequence
  Description of Artificial Sequence: Synthetic oligonucleotide
  Antisense strand to SEQ ID NO: 2175180
ucucagaauaugagcuuac

SEQ ID NO: 2175182 - RNA, 19 nt, Artificial Sequence
  Description of Artificial Sequence: Synthetic oligonucleotide
  Sense strand starting at position 935 of SEQ ID NO: 1883187
auuacauucucucuggaga

SEQ ID NO: 2175183 - RNA, 19 nt, Artificial Sequence
  Description of Artificial Sequence: Synthetic oligonucleotide
  Antisense strand to SEQ ID NO: 2175182
ucuccagagagaauguaau

SEQ ID NO: 2175184 - RNA, 19 nt, Artificial Sequence
  Description of Artificial Sequence: Synthetic oligonucleotide
  Sense strand starting at position 1011 of SEQ ID NO: 1883187
accaguauauagucaaauu

SEQ ID NO: 2175185 - RNA, 19 nt, Artificial Sequence
  Description of Artificial Sequence: Synthetic oligonucleotide
  Antisense strand to SEQ ID NO: 2175184
aauuugacuauauacuggu

SEQ ID NO: 2175186 - RNA, 19 nt, Artificial Sequence
  Description of Artificial Sequence: Synthetic oligonucleotide
  Sense strand starting at position 1115 of SEQ ID NO: 1883187
uggugaaguuuguuauuag

SEQ ID NO: 2175187 - RNA, 19 nt, Artificial Sequence
  Description of Artificial Sequence: Synthetic oligonucleotide
  Antisense strand to SEQ ID NO: 2175186
cuaauaacaaacuucacca

SEQ ID NO: 2175188 - RNA, 19 nt, Artificial Sequence
  Description of Artificial Sequence: Synthetic oligonucleotide
  Sense strand starting at position 1125 of SEQ ID NO: 1883187
uguuauuagcucugacuag

SEQ ID NO: 2175189 - RNA, 19 nt, Artificial Sequence
  Description of Artificial Sequence: Synthetic oligonucleotide
  Antisense strand to SEQ ID NO: 2175188
cuagucagagcuaauaaca

SEQ ID NO: 2175190 - RNA, 19 nt, Artificial Sequence
  Description of Artificial Sequence: Synthetic oligonucleotide
  Sense strand starting at position 1170 of SEQ ID NO: 1883187
ugucaucuguaacugugaa

SEQ ID NO: 2175191 - RNA, 19 nt, Artificial Sequence
  Description of Artificial Sequence: Synthetic oligonucleotide
  Antisense strand to SEQ ID NO: 2175190
uucacaguuacagaugaca

SEQ ID NO: 2175192 - RNA, 19 nt, Artificial Sequence
  Description of Artificial Sequence: Synthetic oligonucleotide
  Sense strand starting at position 1559 of SEQ ID NO: 1883187
aaugcuaccugugucaaga

SEQ ID NO: 2175193 - RNA, 19 nt, Artificial Sequence
  Description of Artificial Sequence: Synthetic oligonucleotide
  Antisense strand to SEQ ID NO: 2175192
ucuugacacagguagcauu

SEQ ID NO: 2175194 - RNA, 19 nt, Artificial Sequence
  Description of Artificial Sequence: Synthetic oligonucleotide
  Sense strand starting at position 1639 of SEQ ID NO: 1883187
gaaguaaagugccucuaaa

SEQ ID NO: 2175195 - RNA, 19 nt, Artificial Sequence
  Description of Artificial Sequence: Synthetic oligonucleotide
  Antisense strand to SEQ ID NO: 2175194
uuuagaggcacuuuacuuc

SEQ ID NO: 2175196 - RNA, 19 nt, Artificial Sequence
  Description of Artificial Sequence: Synthetic oligonucleotide
  Sense strand starting at position 1758 of SEQ ID NO: 1883187
uggauaguuuaauugacca

SEQ ID NO: 2175197 - RNA, 19 nt, Artificial Sequence
  Description of Artificial Sequence: Synthetic oligonucleotide
  Antisense strand to SEQ ID NO: 2175196
uggucaauuaaacuaucca

SEQ ID NO: 2175198 - RNA, 19 nt, Artificial Sequence
  Description of Artificial Sequence: Synthetic oligonucleotide
  Sense strand starting at position 1763 of SEQ ID NO: 1883187
aguuuaauugaccaaagcu

SEQ ID NO: 2175199 - RNA, 19 nt, Artificial Sequence
  Description of Artificial Sequence: Synthetic oligonucleotide
  Antisense strand to SEQ ID NO: 2175198
agcuuuggucaauuaaacu

SEQ ID NO: 2175200 - RNA, 19 nt, Artificial Sequence
  Description of Artificial Sequence: Synthetic oligonucleotide
  Sense strand starting at position 1801 of SEQ ID NO: 1883187
agcaauauuuccgugaugu

SEQ ID NO: 2175201 - RNA, 19 nt, Artificial Sequence
  Description of Artificial Sequence: Synthetic oligonucleotide
  Antisense strand to SEQ ID NO: 2175200
acaucacggaaauauugcu

SEQ ID NO: 2175202 - RNA, 19 nt, Artificial Sequence
  Description of Artificial Sequence: Synthetic oligonucleotide
  Sense strand starting at position 1802 of SEQ ID NO: 1883187
gcaauauuuccgugaugua

SEQ ID NO: 2175203 - RNA, 19 nt, Artificial Sequence
  Description of Artificial Sequence: Synthetic oligonucleotide
  Antisense strand to SEQ ID NO: 2175202
uacaucacggaaauauugc

SEQ ID NO: 2175204 - RNA, 19 nt, Artificial Sequence
  Description of Artificial Sequence: Synthetic oligonucleotide
  Sense strand starting at position 1814 of SEQ ID NO: 1883187
ugauguaugguauacaguu

SEQ ID NO: 2175205 - RNA, 19 nt, Artificial Sequence
  Description of Artificial Sequence: Synthetic oligonucleotide
  Antisense strand to SEQ ID NO: 2175204
aacuguauaccauacauca

SEQ ID NO: 2175206 - RNA, 19 nt, Artificial Sequence
  Description of Artificial Sequence: Synthetic oligonucleotide
  Sense strand starting at position 1864 of SEQ ID NO: 1883187
uaagaucagcuguguuaga

SEQ ID NO: 2175207 - RNA, 19 nt, Artificial Sequence
  Description of Artificial Sequence: Synthetic oligonucleotide
  Antisense strand to SEQ ID NO: 2175206
ucuaacacagcugaucuua

SEQ ID NO: 2175208 - RNA, 19 nt, Artificial Sequence
  Description of Artificial Sequence: Synthetic oligonucleotide
  Sense strand starting at position 1865 of SEQ ID NO: 1883187
aagaucagcuguguuagau

SEQ ID NO: 2175209 - RNA, 19 nt, Artificial Sequence
  Description of Artificial Sequence: Synthetic oligonucleotide
  Antisense strand to SEQ ID NO: 2175208
aucuaacacagcugaucuu

SEQ ID NO: 2175210 - RNA, 19 nt, Artificial Sequence
  Description of Artificial Sequence: Synthetic oligonucleotide
  Sense strand starting at position 1873 of SEQ ID NO: 1883187
cuguguuagauaggcagau

SEQ ID NO: 2175211 - RNA, 19 nt, Artificial Sequence
  Description of Artificial Sequence: Synthetic oligonucleotide
  Antisense strand to SEQ ID NO: 2175210
aucugccuaucuaacacag

SEQ ID NO: 2175212 - RNA, 19 nt, Artificial Sequence
  Description of Artificial Sequence: Synthetic oligonucleotide
  Sense strand starting at position 1877 of SEQ ID NO: 1883187
guuagauaggcagaugguu

SEQ ID NO: 2175213 - RNA, 19 nt, Artificial Sequence
  Description of Artificial Sequence: Synthetic oligonucleotide
  Antisense strand to SEQ ID NO: 2175212
aaccaucugccuaucuaac

SEQ ID NO: 2175214 - RNA, 19 nt, Artificial Sequence
  Description of Artificial Sequence: Synthetic oligonucleotide
  Sense strand starting at position 1900 of SEQ ID NO: 1883187
acaucaaguugacuaguaa

SEQ ID NO: 2175215 - RNA, 19 nt, Artificial Sequence
  Description of Artificial Sequence: Synthetic oligonucleotide
  Antisense strand to SEQ ID NO: 2175214
uuacuagucaacuugaugu

SEQ ID NO: 2175216 - RNA, 19 nt, Artificial Sequence
  Description of Artificial Sequence: Synthetic oligonucleotide
  Sense strand starting at position 1914 of SEQ ID NO: 1883187
aguaaacauccauggugaa

SEQ ID NO: 2175217 - RNA, 19 nt, Artificial Sequence
  Description of Artificial Sequence: Synthetic oligonucleotide
  Antisense strand to SEQ ID NO: 2175216
uucaccauggauguuuacu

SEQ ID NO: 2175218 - RNA, 19 nt, Artificial Sequence
  Description of Artificial Sequence: Synthetic oligonucleotide
  Sense strand starting at position 1915 of SEQ ID NO: 1883187
guaaacauccauggugaau

SEQ ID NO: 2175219 - RNA, 19 nt, Artificial Sequence
  Description of Artificial Sequence: Synthetic oligonucleotide
  Antisense strand to SEQ ID NO: 2175218
auucaccauggauguuuac

SEQ ID NO: 2175220 - RNA, 19 nt, Artificial Sequence
  Description of Artificial Sequence: Synthetic oligonucleotide
  Sense strand starting at position 1929 of SEQ ID NO: 1883187
ugaaucuuagagugaauuc

SEQ ID NO: 2175221 - RNA, 19 nt, Artificial Sequence
  Description of Artificial Sequence: Synthetic oligonucleotide
  Antisense strand to SEQ ID NO: 2175220
gaauucacucuaagauuca

SEQ ID NO: 2175222 - RNA, 19 nt, Artificial Sequence
  Description of Artificial Sequence: Synthetic oligonucleotide
  Sense strand starting at position 2143 of SEQ ID NO: 1883187
agguaaacuugugucucau

SEQ ID NO: 2175223 - RNA, 19 nt, Artificial Sequence
  Description of Artificial Sequence: Synthetic oligonucleotide
  Antisense strand to SEQ ID NO: 2175222
augagacacaaguuuaccu

SEQ ID NO: 2175224 - RNA, 19 nt, Artificial Sequence
  Description of Artificial Sequence: Synthetic oligonucleotide
  Sense strand starting at position 2158 of SEQ ID NO: 1883187
ucauguuacuuguuauaca

SEQ ID NO: 2175225 - RNA, 19 nt, Artificial Sequence
  Description of Artificial Sequence: Synthetic oligonucleotide
  Antisense strand to SEQ ID NO: 2175224
uguauaacaaguaacauga

SEQ ID NO: 2175226 - RNA, 19 nt, Artificial Sequence
  Description of Artificial Sequence: Synthetic oligonucleotide
  Sense strand starting at position 2186 of SEQ ID NO: 1883187
gagggugugcuguacagau

SEQ ID NO: 2175227 - RNA, 19 nt, Artificial Sequence
  Description of Artificial Sequence: Synthetic oligonucleotide
  Antisense strand to SEQ ID NO: 2175226
aucuguacagcacacccuc

SEQ ID NO: 2175228 - RNA, 19 nt, Artificial Sequence
  Description of Artificial Sequence: Synthetic oligonucleotide
  Sense strand starting at position 2190 of SEQ ID NO: 1883187
gugugcuguacagaugauu

SEQ ID NO: 2175229 - RNA, 19 nt, Artificial Sequence
  Description of Artificial Sequence: Synthetic oligonucleotide
  Antisense strand to SEQ ID NO: 2175228
aaucaucuguacagcacac

SEQ ID NO: 2175230 - RNA, 19 nt, Artificial Sequence
  Description of Artificial Sequence: Synthetic oligonucleotide
  Sense strand starting at position 2396 of SEQ ID NO: 1883187
uccugugagcucuaaccua

SEQ ID NO: 2175231 - RNA, 19 nt, Artificial Sequence
  Description of Artificial Sequence: Synthetic oligonucleotide
  Antisense strand to SEQ ID NO: 2175230
uagguuagagcucacagga

SEQ ID NO: 2175232 - RNA, 19 nt, Artificial Sequence
  Description of Artificial Sequence: Synthetic oligonucleotide
  Sense strand starting at position 3207 of SEQ ID NO: 1883187
ucugauauaucagucagga

SEQ ID NO: 2175233 - RNA, 19 nt, Artificial Sequence
  Description of Artificial Sequence: Synthetic oligonucleotide
  Antisense strand to SEQ ID NO: 2175232
uccugacugauauaucaga

SEQ ID NO: 2175234 - RNA, 19 nt, Artificial Sequence
  Description of Artificial Sequence: Synthetic oligonucleotide
  Sense strand starting at position 3251 of SEQ ID NO: 1883187
ggaguuuacugacucauaa

SEQ ID NO: 2175235 - RNA, 19 nt, Artificial Sequence
  Description of Artificial Sequence: Synthetic oligonucleotide
  Antisense strand to SEQ ID NO: 2175234
uuaugagucaguaaacucc

SEQ ID NO: 2175236 - RNA, 19 nt, Artificial Sequence
  Description of Artificial Sequence: Synthetic oligonucleotide
  Sense strand starting at position 3509 of SEQ ID NO: 1883187
gcaucuuauuauguugaua

SEQ ID NO: 2175237 - RNA, 19 nt, Artificial Sequence
  Description of Artificial Sequence: Synthetic oligonucleotide
  Antisense strand to SEQ ID NO: 2175236
uaucaacauaauaagaugc

SEQ ID NO: 2175238 - RNA, 19 nt, Artificial Sequence
  Description of Artificial Sequence: Synthetic oligonucleotide
  Sense strand starting at position 3533 of SEQ ID NO: 1883187
gcuucuaagccagauauua

SEQ ID NO: 2175239 - RNA, 19 nt, Artificial Sequence
  Description of Artificial Sequence: Synthetic oligonucleotide
  Antisense strand to SEQ ID NO: 2175238
uaauaucuggcuuagaagc

SEQ ID NO: 2175240 - RNA, 19 nt, Artificial Sequence
  Description of Artificial Sequence: Synthetic oligonucleotide
  Sense strand starting at position 3633 of SEQ ID NO: 1883187
guguguucauuugcuuagu

SEQ ID NO: 2175241 - RNA, 19 nt, Artificial Sequence
  Description of Artificial Sequence: Synthetic oligonucleotide
  Antisense strand to SEQ ID NO: 2175240
acuaagcaaaugaacacac

SEQ ID NO: 2175242 - RNA, 19 nt, Artificial Sequence
  Description of Artificial Sequence: Synthetic oligonucleotide
  Sense strand starting at position 3825 of SEQ ID NO: 1883187
guuucaugugggcagaacu

SEQ ID NO: 2175243 - RNA, 19 nt, Artificial Sequence
  Description of Artificial Sequence: Synthetic oligonucleotide
  Antisense strand to SEQ ID NO: 2175242
aguucugcccacaugaaac

SEQ ID NO: 2175244 - RNA, 19 nt, Artificial Sequence
  Description of Artificial Sequence: Synthetic oligonucleotide
  Sense strand starting at position 3884 of SEQ ID NO: 1883187
aaggaagacuuagcuugau

SEQ ID NO: 2175245 - RNA, 19 nt, Artificial Sequence
  Description of Artificial Sequence: Synthetic oligonucleotide
  Antisense strand to SEQ ID NO: 2175244
aucaagcuaagucuuccuu

SEQ ID NO: 2175246 - RNA, 19 nt, Artificial Sequence
  Description of Artificial Sequence: Synthetic oligonucleotide
  Sense strand starting at position 3887 of SEQ ID NO: 1883187
gaagacuuagcuugauggu

SEQ ID NO: 2175247 - RNA, 19 nt, Artificial Sequence
  Description of Artificial Sequence: Synthetic oligonucleotide
  Antisense strand to SEQ ID NO: 2175246
accaucaagcuaagucuuc

SEQ ID NO: 2175248 - RNA, 19 nt, Artificial Sequence
  Description of Artificial Sequence: Synthetic oligonucleotide
  Sense strand starting at position 3896 of SEQ ID NO: 1883187
gcuugauggugauugggau

SEQ ID NO: 2175249 - RNA, 19 nt, Artificial Sequence
  Description of Artificial Sequence: Synthetic oligonucleotide
  Antisense strand to SEQ ID NO: 2175248
aucccaaucaccaucaagc

SEQ ID NO: 2175250 - RNA, 19 nt, Artificial Sequence
  Description of Artificial Sequence: Synthetic oligonucleotide
  Sense strand starting at position 3967 of SEQ ID NO: 1883187
gugauaaagaguuguacuu

SEQ ID NO: 2175251 - RNA, 19 nt, Artificial Sequence
  Description of Artificial Sequence: Synthetic oligonucleotide
  Antisense strand to SEQ ID NO: 2175250
aaguacaacucuuuaucac

SEQ ID NO: 2175252 - RNA, 19 nt, Artificial Sequence
  Description of Artificial Sequence: Synthetic oligonucleotide
  Sense strand starting at position 112 of SEQ ID NO: 1883188
ccuagaugcuucccuagaa

SEQ ID NO: 2175253 - RNA, 19 nt, Artificial Sequence
  Description of Artificial Sequence: Synthetic oligonucleotide
  Antisense strand to SEQ ID NO: 2175252
uucuagggaagcaucuagg

SEQ ID NO: 2175254 - RNA, 19 nt, Artificial Sequence
  Description of Artificial Sequence: Synthetic oligonucleotide
  Sense strand starting at position 113 of SEQ ID NO: 1883188
cuagaugcuucccuagaaa

SEQ ID NO: 2175255 - RNA, 19 nt, Artificial Sequence
  Description of Artificial Sequence: Synthetic oligonucleotide
  Antisense strand to SEQ ID NO: 2175254
uuucuagggaagcaucuag

SEQ ID NO: 2175256 - RNA, 19 nt, Artificial Sequence
  Description of Artificial Sequence: Synthetic oligonucleotide
  Sense strand starting at position 165 of SEQ ID NO: 1883188
gcagaagagccauaucauu

SEQ ID NO: 2175257 - RNA, 19 nt, Artificial Sequence
  Description of Artificial Sequence: Synthetic oligonucleotide
  Antisense strand to SEQ ID NO: 2175256
aaugauauggcucuucugc

SEQ ID NO: 2175258 - RNA, 19 nt, Artificial Sequence
  Description of Artificial Sequence: Synthetic oligonucleotide
  Sense strand starting at position 314 of SEQ ID NO: 1883188
ucaccucaccuaggugaua

SEQ ID NO: 2175259 - RNA, 19 nt, Artificial Sequence
  Description of Artificial Sequence: Synthetic oligonucleotide
  Antisense strand to SEQ ID NO: 2175258
uaucaccuaggugagguga

SEQ ID NO: 2175260 - RNA, 19 nt, Artificial Sequence
  Description of Artificial Sequence: Synthetic oligonucleotide
  Sense strand starting at position 410 of SEQ ID NO: 1883188
agaaaugugucacucucca

SEQ ID NO: 2175261 - RNA, 19 nt, Artificial Sequence
  Description of Artificial Sequence: Synthetic oligonucleotide
  Antisense strand to SEQ ID NO: 2175260
uggagagugacacauuucu

SEQ ID NO: 2175262 - RNA, 19 nt, Artificial Sequence
  Description of Artificial Sequence: Synthetic oligonucleotide
  Sense strand starting at position 462 of SEQ ID NO: 1883188
ccuagaugauaggcugaga

SEQ ID NO: 2175263 - RNA, 19 nt, Artificial Sequence
  Description of Artificial Sequence: Synthetic oligonucleotide
  Antisense strand to SEQ ID NO: 2175262
ucucagccuaucaucuagg

SEQ ID NO: 2175264 - RNA, 19 nt, Artificial Sequence
  Description of Artificial Sequence: Synthetic oligonucleotide
  Sense strand starting at position 473 of SEQ ID NO: 1883188
ggcugagagauaugucaaa

SEQ ID NO: 2175265 - RNA, 19 nt, Artificial Sequence
  Description of Artificial Sequence: Synthetic oligonucleotide
  Antisense strand to SEQ ID NO: 2175264
uuugacauaucucucagcc

SEQ ID NO: 2175266 - RNA, 19 nt, Artificial Sequence
  Description of Artificial Sequence: Synthetic oligonucleotide
  Sense strand starting at position 684 of SEQ ID NO: 1883188
gaguguuagauccagugau

SEQ ID NO: 2175267 - RNA, 19 nt, Artificial Sequence
  Description of Artificial Sequence: Synthetic oligonucleotide
  Antisense strand to SEQ ID NO: 2175266
aucacuggaucuaacacuc

SEQ ID NO: 2175268 - RNA, 19 nt, Artificial Sequence
  Description of Artificial Sequence: Synthetic oligonucleotide
  Sense strand starting at position 688 of SEQ ID NO: 1883188
guuagauccagugauaugu

SEQ ID NO: 2175269 - RNA, 19 nt, Artificial Sequence
  Description of Artificial Sequence: Synthetic oligonucleotide
  Antisense strand to SEQ ID NO: 2175268
acauaucacuggaucuaac

SEQ ID NO: 2175270 - RNA, 19 nt, Artificial Sequence
  Description of Artificial Sequence: Synthetic oligonucleotide
  Sense strand starting at position 785 of SEQ ID NO: 1883188
cuucuaugggcuggaacaa

SEQ ID NO: 2175271 - RNA, 19 nt, Artificial Sequence
  Description of Artificial Sequence: Synthetic oligonucleotide
  Antisense strand to SEQ ID NO: 2175270
uuguuccagcccauagaag

SEQ ID NO: 2175272 - RNA, 19 nt, Artificial Sequence
  Description of Artificial Sequence: Synthetic oligonucleotide
  Sense strand starting at position 819 of SEQ ID NO: 1883188
uuacacaggugcuuagaaa

SEQ ID NO: 2175273 - RNA, 19 nt, Artificial Sequence
  Description of Artificial Sequence: Synthetic oligonucleotide
  Antisense strand to SEQ ID NO: 2175272
uuucuaagcaccuguguaa

SEQ ID NO: 2175274 - RNA, 19 nt, Artificial Sequence
  Description of Artificial Sequence: Synthetic oligonucleotide
  Sense strand starting at position 1194 of SEQ ID NO: 1883188
acccaugccuagguauaua

SEQ ID NO: 2175275 - RNA, 19 nt, Artificial Sequence
  Description of Artificial Sequence: Synthetic oligonucleotide
  Antisense strand to SEQ ID NO: 2175274
uauauaccuaggcaugggu

SEQ ID NO: 2175276 - RNA, 19 nt, Artificial Sequence
  Description of Artificial Sequence: Synthetic oligonucleotide
  Sense strand starting at position 1219 of SEQ ID NO: 1883188
uucccucugugauuaugaa

SEQ ID NO: 2175277 - RNA, 19 nt, Artificial Sequence
  Description of Artificial Sequence: Synthetic oligonucleotide
  Antisense strand to SEQ ID NO: 2175276
uucauaaucacagagggaa

SEQ ID NO: 2175278 - RNA, 19 nt, Artificial Sequence
  Description of Artificial Sequence: Synthetic oligonucleotide
  Sense strand starting at position 1261 of SEQ ID NO: 1883188
gcuaaauggugggcuagaa

SEQ ID NO: 2175279 - RNA, 19 nt, Artificial Sequence
  Description of Artificial Sequence: Synthetic oligonucleotide
  Antisense strand to SEQ ID NO: 2175278
uucuagcccaccauuuagc

SEQ ID NO: 2175280 - RNA, 19 nt, Artificial Sequence
  Description of Artificial Sequence: Synthetic oligonucleotide
  Sense strand starting at position 1393 of SEQ ID NO: 1883188
aggagagucuugucaucca

SEQ ID NO: 2175281 - RNA, 19 nt, Artificial Sequence
  Description of Artificial Sequence: Synthetic oligonucleotide
  Antisense strand to SEQ ID NO: 2175280
uggaugacaagacucuccu

SEQ ID NO: 2175282 - RNA, 19 nt, Artificial Sequence
  Description of Artificial Sequence: Synthetic oligonucleotide
  Sense strand starting at position 1396 of SEQ ID NO: 1883188
agagucuugucauccaaau

SEQ ID NO: 2175283 - RNA, 19 nt, Artificial Sequence
  Description of Artificial Sequence: Synthetic oligonucleotide
  Antisense strand to SEQ ID NO: 2175282
auuuggaugacaagacucu

SEQ ID NO: 2175284 - RNA, 19 nt, Artificial Sequence
  Description of Artificial Sequence: Synthetic oligonucleotide
  Sense strand starting at position 1588 of SEQ ID NO: 1883188
cucagaggacauuguuaau

SEQ ID NO: 2175285 - RNA, 19 nt, Artificial Sequence
  Description of Artificial Sequence: Synthetic oligonucleotide
  Antisense strand to SEQ ID NO: 2175284
auuaacaauguccucugag

SEQ ID NO: 2175286 - RNA, 19 nt, Artificial Sequence
  Description of Artificial Sequence: Synthetic oligonucleotide
  Sense strand starting at position 1601 of SEQ ID NO: 1883188
guuaauauagcacagucaa

SEQ ID NO: 2175287 - RNA, 19 nt, Artificial Sequence
  Description of Artificial Sequence: Synthetic oligonucleotide
  Antisense strand to SEQ ID NO: 2175286
uugacugugcuauauuaac

SEQ ID NO: 2175288 - RNA, 19 nt, Artificial Sequence
  Description of Artificial Sequence: Synthetic oligonucleotide
  Sense strand starting at position 1712 of SEQ ID NO: 1883188
gguauaugucacuaguaca

SEQ ID NO: 2175289 - RNA, 19 nt, Artificial Sequence
  Description of Artificial Sequence: Synthetic oligonucleotide
  Antisense strand to SEQ ID NO: 2175288
uguacuagugacauauacc

SEQ ID NO: 2175290 - RNA, 19 nt, Artificial Sequence
  Description of Artificial Sequence: Synthetic oligonucleotide
  Sense strand starting at position 1733 of SEQ ID NO: 1883188
uuugcaaagguuuaagaau

SEQ ID NO: 2175291 - RNA, 19 nt, Artificial Sequence
  Description of Artificial Sequence: Synthetic oligonucleotide
  Antisense strand to SEQ ID NO: 2175290
auucuuaaaccuuugcaaa

SEQ ID NO: 2175292 - RNA, 19 nt, Artificial Sequence
  Description of Artificial Sequence: Synthetic oligonucleotide
  Sense strand starting at position 2238 of SEQ ID NO: 1883188
ugugaagugcccaguugug

SEQ ID NO: 2175293 - RNA, 19 nt, Artificial Sequence
  Description of Artificial Sequence: Synthetic oligonucleotide
  Antisense strand to SEQ ID NO: 2175292
cacaacugggcacuucaca

SEQ ID NO: 2175294 - RNA, 19 nt, Artificial Sequence
  Description of Artificial Sequence: Synthetic oligonucleotide
  Sense strand starting at position 2353 of SEQ ID NO: 1883188
gcagguucuaggcagauaa

SEQ ID NO: 2175295 - RNA, 19 nt, Artificial Sequence
  Description of Artificial Sequence: Synthetic oligonucleotide
  Antisense strand to SEQ ID NO: 2175294
uuaucugccuagaaccugc

SEQ ID NO: 2175296 - RNA, 19 nt, Artificial Sequence
  Description of Artificial Sequence: Synthetic oligonucleotide
  Sense strand starting at position 2355 of SEQ ID NO: 1883188
agguucuaggcagauaacu

SEQ ID NO: 2175297 - RNA, 19 nt, Artificial Sequence
  Description of Artificial Sequence: Synthetic oligonucleotide
  Antisense strand to SEQ ID NO: 2175296
aguuaucugccuagaaccu

SEQ ID NO: 2175298 - RNA, 19 nt, Artificial Sequence
  Description of Artificial Sequence: Synthetic oligonucleotide
  Sense strand starting at position 2372 of SEQ ID NO: 1883188
cucacaucaccuggaugau

SEQ ID NO: 2175299 - RNA, 19 nt, Artificial Sequence
  Description of Artificial Sequence: Synthetic oligonucleotide
  Antisense strand to SEQ ID NO: 2175298
aucauccaggugaugugag

SEQ ID NO: 2175300 - RNA, 19 nt, Artificial Sequence
  Description of Artificial Sequence: Synthetic oligonucleotide
  Sense strand starting at position 2609 of SEQ ID NO: 1883188
cuguaugugagucaacacu

SEQ ID NO: 2175301 - RNA, 19 nt, Artificial Sequence
  Description of Artificial Sequence: Synthetic oligonucleotide
  Antisense strand to SEQ ID NO: 2175300
aguguugacucacauacag

SEQ ID NO: 2175302 - RNA, 19 nt, Artificial Sequence
  Description of Artificial Sequence: Synthetic oligonucleotide
  Sense strand starting at position 2887 of SEQ ID NO: 1883188
acaaucaugucagccagau

SEQ ID NO: 2175303 - RNA, 19 nt, Artificial Sequence
  Description of Artificial Sequence: Synthetic oligonucleotide
  Antisense strand to SEQ ID NO: 2175302
aucuggcugacaugauugu

SEQ ID NO: 2175304 - RNA, 19 nt, Artificial Sequence
  Description of Artificial Sequence: Synthetic oligonucleotide
  Sense strand starting at position 2897 of SEQ ID NO: 1883188
cagccagaugugcauagaa

SEQ ID NO: 2175305 - RNA, 19 nt, Artificial Sequence
  Description of Artificial Sequence: Synthetic oligonucleotide
  Antisense strand to SEQ ID NO: 2175304
uucuaugcacaucuggcug

SEQ ID NO: 2175306 - RNA, 19 nt, Artificial Sequence
  Description of Artificial Sequence: Synthetic oligonucleotide
  Sense strand starting at position 2899 of SEQ ID NO: 1883188
gccagaugugcauagaaga

SEQ ID NO: 2175307 - RNA, 19 nt, Artificial Sequence
  Description of Artificial Sequence: Synthetic oligonucleotide
  Antisense strand to SEQ ID NO: 2175306
ucuucuaugcacaucuggc

SEQ ID NO: 2175308 - RNA, 19 nt, Artificial Sequence
  Description of Artificial Sequence: Synthetic oligonucleotide
  Sense strand starting at position 3194 of SEQ ID NO: 1883188
ugggucuagccagaagagu

SEQ ID NO: 2175309 - RNA, 19 nt, Artificial Sequence
  Description of Artificial Sequence: Synthetic oligonucleotide
  Antisense strand to SEQ ID NO: 2175308
acucuucuggcuagaccca

SEQ ID NO: 2175310 - RNA, 19 nt, Artificial Sequence
  Description of Artificial Sequence: Synthetic oligonucleotide
  Sense strand starting at position 3212 of SEQ ID NO: 1883188
ucacaucuccuggguacaa

SEQ ID NO: 2175311 - RNA, 19 nt, Artificial Sequence
  Description of Artificial Sequence: Synthetic oligonucleotide
  Antisense strand to SEQ ID NO: 2175310
uuguacccaggagauguga

SEQ ID NO: 2175312 - RNA, 19 nt, Artificial Sequence
  Description of Artificial Sequence: Synthetic oligonucleotide
  Sense strand starting at position 3330 of SEQ ID NO: 1883188
cuuggcagagucuagaaua

SEQ ID NO: 2175313 - RNA, 19 nt, Artificial Sequence
  Description of Artificial Sequence: Synthetic oligonucleotide
  Antisense strand to SEQ ID NO: 2175312
uauucuagacucugccaag

SEQ ID NO: 2175314 - RNA, 19 nt, Artificial Sequence
  Description of Artificial Sequence: Synthetic oligonucleotide
  Sense strand starting at position 3432 of SEQ ID NO: 1883188
gggucauauuacccuagau

SEQ ID NO: 2175315 - RNA, 19 nt, Artificial Sequence
  Description of Artificial Sequence: Synthetic oligonucleotide
  Antisense strand to SEQ ID NO: 2175314
aucuaggguaauaugaccc

SEQ ID NO: 2175316 - RNA, 19 nt, Artificial Sequence
  Description of Artificial Sequence: Synthetic oligonucleotide
  Sense strand starting at position 3434 of SEQ ID NO: 1883188
gucauauuacccuagaugu

SEQ ID NO: 2175317 - RNA, 19 nt, Artificial Sequence
  Description of Artificial Sequence: Synthetic oligonucleotide
  Antisense strand to SEQ ID NO: 2175316
acaucuaggguaauaugac

SEQ ID NO: 2175318 - RNA, 19 nt, Artificial Sequence
  Description of Artificial Sequence: Synthetic oligonucleotide
  Sense strand starting at position 3512 of SEQ ID NO: 1883188
cccuuauaggcccagauau

SEQ ID NO: 2175319 - RNA, 19 nt, Artificial Sequence
  Description of Artificial Sequence: Synthetic oligonucleotide
  Antisense strand to SEQ ID NO: 2175318
auaucugggccuauaaggg

SEQ ID NO: 2175320 - RNA, 19 nt, Artificial Sequence
  Description of Artificial Sequence: Synthetic oligonucleotide
  Sense strand starting at position 3514 of SEQ ID NO: 1883188
cuuauaggcccagauauau

SEQ ID NO: 2175321 - RNA, 19 nt, Artificial Sequence
  Description of Artificial Sequence: Synthetic oligonucleotide
  Antisense strand to SEQ ID NO: 2175320
auauaucugggccuauaag

SEQ ID NO: 2175322 - RNA, 19 nt, Artificial Sequence
  Description of Artificial Sequence: Synthetic oligonucleotide
  Sense strand starting at position 3520 of SEQ ID NO: 1883188
ggcccagauauaugugaua

SEQ ID NO: 2175323 - RNA, 19 nt, Artificial Sequence
  Description of Artificial Sequence: Synthetic oligonucleotide
  Antisense strand to SEQ ID NO: 2175322
uaucacauauaucugggcc

SEQ ID NO: 2175324 - RNA, 19 nt, Artificial Sequence
  Description of Artificial Sequence: Synthetic oligonucleotide
  Sense strand starting at position 3583 of SEQ ID NO: 1883188
caauucuaacucggugaua

SEQ ID NO: 2175325 - RNA, 19 nt, Artificial Sequence
  Description of Artificial Sequence: Synthetic oligonucleotide
  Antisense strand to SEQ ID NO: 2175324
uaucaccgaguuagaauug

SEQ ID NO: 2175326 - RNA, 19 nt, Artificial Sequence
  Description of Artificial Sequence: Synthetic oligonucleotide
  Sense strand starting at position 3584 of SEQ ID NO: 1883188
aauucuaacucggugauau

SEQ ID NO: 2175327 - RNA, 19 nt, Artificial Sequence
  Description of Artificial Sequence: Synthetic oligonucleotide
  Antisense strand to SEQ ID NO: 2175326
auaucaccgaguuagaauu

SEQ ID NO: 2175328 - RNA, 19 nt, Artificial Sequence
  Description of Artificial Sequence: Synthetic oligonucleotide
  Sense strand starting at position 3585 of SEQ ID NO: 1883188
auucuaacucggugauaug

SEQ ID NO: 2175329 - RNA, 19 nt, Artificial Sequence
  Description of Artificial Sequence: Synthetic oligonucleotide
  Antisense strand to SEQ ID NO: 2175328
cauaucaccgaguuagaau

SEQ ID NO: 2175330 - RNA, 19 nt, Artificial Sequence
  Description of Artificial Sequence: Synthetic oligonucleotide
  Sense strand starting at position 3641 of SEQ ID NO: 1883188
gucucaacaccugaguacu

SEQ ID NO: 2175331 - RNA, 19 nt, Artificial Sequence
  Description of Artificial Sequence: Synthetic oligonucleotide
  Antisense strand to SEQ ID NO: 2175330
aguacucagguguugagac

SEQ ID NO: 2175332 - RNA, 19 nt, Artificial Sequence
  Description of Artificial Sequence: Synthetic oligonucleotide
  Sense strand starting at position 152 of SEQ ID NO: 1883189
aucaaacagcuuuagugau

SEQ ID NO: 2175333 - RNA, 19 nt, Artificial Sequence
  Description of Artificial Sequence: Synthetic oligonucleotide
  Antisense strand to SEQ ID NO: 2175332
aucacuaaagcuguuugau

SEQ ID NO: 2175334 - RNA, 19 nt, Artificial Sequence
  Description of Artificial Sequence: Synthetic oligonucleotide
  Sense strand starting at position 172 of SEQ ID NO: 1883189
auggaagauuuagacucua

SEQ ID NO: 2175335 - RNA, 19 nt, Artificial Sequence
  Description of Artificial Sequence: Synthetic oligonucleotide
  Antisense strand to SEQ ID NO: 2175334
uagagucuaaaucuuccau

SEQ ID NO: 2175336 - RNA, 19 nt, Artificial Sequence
  Description of Artificial Sequence: Synthetic oligonucleotide
  Sense strand starting at position 279 of SEQ ID NO: 1883189
uaagcuaugggcgaagaaa

SEQ ID NO: 2175337 - RNA, 19 nt, Artificial Sequence
  Description of Artificial Sequence: Synthetic oligonucleotide
  Antisense strand to SEQ ID NO: 2175336
uuucuucgcccauagcuua

SEQ ID NO: 2175338 - RNA, 19 nt, Artificial Sequence
  Description of Artificial Sequence: Synthetic oligonucleotide
  Sense strand starting at position 439 of SEQ ID NO: 1883189
cauguauaaggauggugau

SEQ ID NO: 2175339 - RNA, 19 nt, Artificial Sequence
  Description of Artificial Sequence: Synthetic oligonucleotide
  Antisense strand to SEQ ID NO: 2175338
aucaccauccuuauacaug

SEQ ID NO: 2175340 - RNA, 19 nt, Artificial Sequence
  Description of Artificial Sequence: Synthetic oligonucleotide
  Sense strand starting at position 597 of SEQ ID NO: 1883189
auugaaacgaagugugaaa

SEQ ID NO: 2175341 - RNA, 19 nt, Artificial Sequence
  Description of Artificial Sequence: Synthetic oligonucleotide
  Antisense strand to SEQ ID NO: 2175340
uuucacacuucguuucaau

SEQ ID NO: 2175342 - RNA, 19 nt, Artificial Sequence
  Description of Artificial Sequence: Synthetic oligonucleotide
  Sense strand starting at position 759 of SEQ ID NO: 1883189
aggauuaguacaugagcca

SEQ ID NO: 2175343 - RNA, 19 nt, Artificial Sequence
  Description of Artificial Sequence: Synthetic oligonucleotide
  Antisense strand to SEQ ID NO: 2175342
uggcucauguacuaauccu

SEQ ID NO: 2175344 - RNA, 19 nt, Artificial Sequence
  Description of Artificial Sequence: Synthetic oligonucleotide
  Sense strand starting at position 760 of SEQ ID NO: 1883189
ggauuaguacaugagccau

SEQ ID NO: 2175345 - RNA, 19 nt, Artificial Sequence
  Description of Artificial Sequence: Synthetic oligonucleotide
  Antisense strand to SEQ ID NO: 2175344
auggcucauguacuaaucc

SEQ ID NO: 2175346 - RNA, 19 nt, Artificial Sequence
  Description of Artificial Sequence: Synthetic oligonucleotide
  Sense strand starting at position 774 of SEQ ID NO: 1883189
gccauuauuuaucuggcuu

SEQ ID NO: 2175347 - RNA, 19 nt, Artificial Sequence
  Description of Artificial Sequence: Synthetic oligonucleotide
  Antisense strand to SEQ ID NO: 2175346
aagccagauaaauaauggc

SEQ ID NO: 2175348 - RNA, 19 nt, Artificial Sequence
  Description of Artificial Sequence: Synthetic oligonucleotide
  Sense strand starting at position 778 of SEQ ID NO: 1883189
uuauuuaucuggcuuagua

SEQ ID NO: 2175349 - RNA, 19 nt, Artificial Sequence
  Description of Artificial Sequence: Synthetic oligonucleotide
  Antisense strand to SEQ ID NO: 2175348
uacuaagccagauaaauaa

SEQ ID NO: 2175350 - RNA, 19 nt, Artificial Sequence
  Description of Artificial Sequence: Synthetic oligonucleotide
  Sense strand starting at position 841 of SEQ ID NO: 1883189
cuuugauaugagugaauau

SEQ ID NO: 2175351 - RNA, 19 nt, Artificial Sequence
  Description of Artificial Sequence: Synthetic oligonucleotide
  Antisense strand to SEQ ID NO: 2175350
auauucacucauaucaaag

SEQ ID NO: 2175352 - RNA, 19 nt, Artificial Sequence
  Description of Artificial Sequence: Synthetic oligonucleotide
  Sense strand starting at position 875 of SEQ ID NO: 1883189
auuccuauucuaugagaug

SEQ ID NO: 2175353 - RNA, 19 nt, Artificial Sequence
  Description of Artificial Sequence: Synthetic oligonucleotide
  Antisense strand to SEQ ID NO: 2175352
caucucauagaauaggaau

SEQ ID NO: 2175354 - RNA, 19 nt, Artificial Sequence
  Description of Artificial Sequence: Synthetic oligonucleotide
  Sense strand starting at position 1140 of SEQ ID NO: 1883189
acucaagaccugugauaua

SEQ ID NO: 2175355 - RNA, 19 nt, Artificial Sequence
  Description of Artificial Sequence: Synthetic oligonucleotide
  Antisense strand to SEQ ID NO: 2175354
uauaucacaggucuugagu

SEQ ID NO: 2175356 - RNA, 19 nt, Artificial Sequence
  Description of Artificial Sequence: Synthetic oligonucleotide
  Sense strand starting at position 1373 of SEQ ID NO: 1883189
agcuguauccaagaugaua

SEQ ID NO: 2175357 - RNA, 19 nt, Artificial Sequence
  Description of Artificial Sequence: Synthetic oligonucleotide
  Antisense strand to SEQ ID NO: 2175356
uaucaucuuggauacagcu

SEQ ID NO: 2175358 - RNA, 19 nt, Artificial Sequence
  Description of Artificial Sequence: Synthetic oligonucleotide
  Sense strand starting at position 1386 of SEQ ID NO: 1883189
augauagaguucuuaacug

SEQ ID NO: 2175359 - RNA, 19 nt, Artificial Sequence
  Description of Artificial Sequence: Synthetic oligonucleotide
  Antisense strand to SEQ ID NO: 2175358
caguuaagaacucuaucau

SEQ ID NO: 2175360 - RNA, 19 nt, Artificial Sequence
  Description of Artificial Sequence: Synthetic oligonucleotide
  Sense strand starting at position 1466 of SEQ ID NO: 1883189
agaugaaauuucuacuaug

SEQ ID NO: 2175361 - RNA, 19 nt, Artificial Sequence
  Description of Artificial Sequence: Synthetic oligonucleotide
  Antisense strand to SEQ ID NO: 2175360
cauaguagaaauuucaucu

SEQ ID NO: 2175362 - RNA, 19 nt, Artificial Sequence
  Description of Artificial Sequence: Synthetic oligonucleotide
  Sense strand starting at position 2101 of SEQ ID NO: 1883189
ugugcuucugaggagaauc

SEQ ID NO: 2175363 - RNA, 19 nt, Artificial Sequence
  Description of Artificial Sequence: Synthetic oligonucleotide
  Antisense strand to SEQ ID NO: 2175362
gauucuccucagaagcaca

SEQ ID NO: 2175364 - RNA, 19 nt, Artificial Sequence
  Description of Artificial Sequence: Synthetic oligonucleotide
  Sense strand starting at position 2112 of SEQ ID NO: 1883189
ggagaaucuuguccaagau

SEQ ID NO: 2175365 - RNA, 19 nt, Artificial Sequence
  Description of Artificial Sequence: Synthetic oligonucleotide
  Antisense strand to SEQ ID NO: 2175364
aucuuggacaagauucucc

SEQ ID NO: 2175366 - RNA, 19 nt, Artificial Sequence
  Description of Artificial Sequence: Synthetic oligonucleotide
  Sense strand starting at position 2365 of SEQ ID NO: 1883189
acacuuugugaguagcaaa

SEQ ID NO: 2175367 - RNA, 19 nt, Artificial Sequence
  Description of Artificial Sequence: Synthetic oligonucleotide
  Antisense strand to SEQ ID NO: 2175366
uuugcuacucacaaagugu

SEQ ID NO: 2175368 - RNA, 19 nt, Artificial Sequence
  Description of Artificial Sequence: Synthetic oligonucleotide
  Sense strand starting at position 2489 of SEQ ID NO: 1883189
gugugugguaauucuuugu

SEQ ID NO: 2175369 - RNA, 19 nt, Artificial Sequence
  Description of Artificial Sequence: Synthetic oligonucleotide
  Antisense strand to SEQ ID NO: 2175368
acaaagaauuaccacacac

SEQ ID NO: 2175370 - RNA, 19 nt, Artificial Sequence
  Description of Artificial Sequence: Synthetic oligonucleotide
  Sense strand starting at position 2510 of SEQ ID NO: 1883189
acaggucuaucuccaauga

SEQ ID NO: 2175371 - RNA, 19 nt, Artificial Sequence
  Description of Artificial Sequence: Synthetic oligonucleotide
  Antisense strand to SEQ ID NO: 2175370
ucauuggagauagaccugu

SEQ ID NO: 2175372 - RNA, 19 nt, Artificial Sequence
  Description of Artificial Sequence: Synthetic oligonucleotide
  Sense strand starting at position 2533 of SEQ ID NO: 1883189
guuccuuuaagaugaggau

SEQ ID NO: 2175373 - RNA, 19 nt, Artificial Sequence
  Description of Artificial Sequence: Synthetic oligonucleotide
  Antisense strand to SEQ ID NO: 2175372
auccucaucuuaaaggaac

SEQ ID NO: 2175374 - RNA, 19 nt, Artificial Sequence
  Description of Artificial Sequence: Synthetic oligonucleotide
  Sense strand starting at position 2540 of SEQ ID NO: 1883189
uaagaugaggauugucuuu

SEQ ID NO: 2175375 - RNA, 19 nt, Artificial Sequence
  Description of Artificial Sequence: Synthetic oligonucleotide
  Antisense strand to SEQ ID NO: 2175374
aaagacaauccucaucuua

SEQ ID NO: 2175376 - RNA, 19 nt, Artificial Sequence
  Description of Artificial Sequence: Synthetic oligonucleotide
  Sense strand starting at position 2585 of SEQ ID NO: 1883189
agcauauagccugacauau

SEQ ID NO: 2175377 - RNA, 19 nt, Artificial Sequence
  Description of Artificial Sequence: Synthetic oligonucleotide
  Antisense strand to SEQ ID NO: 2175376
auaugucaggcuauaugcu

SEQ ID NO: 2175378 - RNA, 19 nt, Artificial Sequence
  Description of Artificial Sequence: Synthetic oligonucleotide
  Sense strand starting at position 2613 of SEQ ID NO: 1883189
cuaagaaauguuugugaac

SEQ ID NO: 2175379 - RNA, 19 nt, Artificial Sequence
  Description of Artificial Sequence: Synthetic oligonucleotide
  Antisense strand to SEQ ID NO: 2175378
guucacaaacauuucuuag

SEQ ID NO: 2175380 - RNA, 19 nt, Artificial Sequence
  Description of Artificial Sequence: Synthetic oligonucleotide
  Sense strand starting at position 2614 of SEQ ID NO: 1883189
uaagaaauguuugugaacu

SEQ ID NO: 2175381 - RNA, 19 nt, Artificial Sequence
  Description of Artificial Sequence: Synthetic oligonucleotide
  Antisense strand to SEQ ID NO: 2175380
aguucacaaacauuucuua

SEQ ID NO: 2175382 - RNA, 19 nt, Artificial Sequence
  Description of Artificial Sequence: Synthetic oligonucleotide
  Sense strand starting at position 2838 of SEQ ID NO: 1883189
agagauauuuaauaggcua

SEQ ID NO: 2175383 - RNA, 19 nt, Artificial Sequence
  Description of Artificial Sequence: Synthetic oligonucleotide
  Antisense strand to SEQ ID NO: 2175382
uagccuauuaaauaucucu

SEQ ID NO: 2175384 - RNA, 19 nt, Artificial Sequence
  Description of Artificial Sequence: Synthetic oligonucleotide
  Sense strand starting at position 2882 of SEQ ID NO: 1883189
aguuaacuguuaucuaaag

SEQ ID NO: 2175385 - RNA, 19 nt, Artificial Sequence
  Description of Artificial Sequence: Synthetic oligonucleotide
  Antisense strand to SEQ ID NO: 2175384
cuuuagauaacaguuaacu

SEQ ID NO: 2175386 - RNA, 19 nt, Artificial Sequence
  Description of Artificial Sequence: Synthetic oligonucleotide
  Sense strand starting at position 3275 of SEQ ID NO: 1883189
gguauccuuagauggacaa

SEQ ID NO: 2175387 - RNA, 19 nt, Artificial Sequence
  Description of Artificial Sequence: Synthetic oligonucleotide
  Antisense strand to SEQ ID NO: 2175386
uuguccaucuaaggauacc

SEQ ID NO: 2175388 - RNA, 19 nt, Artificial Sequence
  Description of Artificial Sequence: Synthetic oligonucleotide
  Sense strand starting at position 3426 of SEQ ID NO: 1883189
caguguugacuggaaguca

SEQ ID NO: 2175389 - RNA, 19 nt, Artificial Sequence
  Description of Artificial Sequence: Synthetic oligonucleotide
  Antisense strand to SEQ ID NO: 2175388
ugacuuccagucaacacug

SEQ ID NO: 2175390 - RNA, 19 nt, Artificial Sequence
  Description of Artificial Sequence: Synthetic oligonucleotide
  Sense strand starting at position 3481 of SEQ ID NO: 1883189
agaaaucaacccugagcau

SEQ ID NO: 2175391 - RNA, 19 nt, Artificial Sequence
  Description of Artificial Sequence: Synthetic oligonucleotide
  Antisense strand to SEQ ID NO: 2175390
augcucaggguugauuucu

SEQ ID NO: 2175392 - RNA, 19 nt, Artificial Sequence
  Description of Artificial Sequence: Synthetic oligonucleotide
  Sense strand starting at position 3496 of SEQ ID NO: 1883189
gcauguuagaaagauguuc

SEQ ID NO: 2175393 - RNA, 19 nt, Artificial Sequence
  Description of Artificial Sequence: Synthetic oligonucleotide
  Antisense strand to SEQ ID NO: 2175392
gaacaucuuucuaacaugc

SEQ ID NO: 2175394 - RNA, 19 nt, Artificial Sequence
  Description of Artificial Sequence: Synthetic oligonucleotide
  Sense strand starting at position 3501 of SEQ ID NO: 1883189
uuagaaagauguucucaug

SEQ ID NO: 2175395 - RNA, 19 nt, Artificial Sequence
  Description of Artificial Sequence: Synthetic oligonucleotide
  Antisense strand to SEQ ID NO: 2175394
caugagaacaucuuucuaa

SEQ ID NO: 2175396 - RNA, 19 nt, Artificial Sequence
  Description of Artificial Sequence: Synthetic oligonucleotide
  Sense strand starting at position 3535 of SEQ ID NO: 1883189
acugaaagcccuugacaua

SEQ ID NO: 2175397 - RNA, 19 nt, Artificial Sequence
  Description of Artificial Sequence: Synthetic oligonucleotide
  Antisense strand to SEQ ID NO: 2175396
uaugucaagggcuuucagu

SEQ ID NO: 2175398 - RNA, 19 nt, Artificial Sequence
  Description of Artificial Sequence: Synthetic oligonucleotide
  Sense strand starting at position 3536 of SEQ ID NO: 1883189
cugaaagcccuugacauau

SEQ ID NO: 2175399 - RNA, 19 nt, Artificial Sequence
  Description of Artificial Sequence: Synthetic oligonucleotide
  Antisense strand to SEQ ID NO: 2175398
auaugucaagggcuuucag

SEQ ID NO: 2175400 - RNA, 19 nt, Artificial Sequence
  Description of Artificial Sequence: Synthetic oligonucleotide
  Sense strand starting at position 3647 of SEQ ID NO: 1883189
uuccaauuagguuagucaa

SEQ ID NO: 2175401 - RNA, 19 nt, Artificial Sequence
  Description of Artificial Sequence: Synthetic oligonucleotide
  Antisense strand to SEQ ID NO: 2175400
uugacuaaccuaauuggaa

SEQ ID NO: 2175402 - RNA, 19 nt, Artificial Sequence
  Description of Artificial Sequence: Synthetic oligonucleotide
  Sense strand starting at position 3658 of SEQ ID NO: 1883189
uuagucaaguccuugagag

SEQ ID NO: 2175403 - RNA, 19 nt, Artificial Sequence
  Description of Artificial Sequence: Synthetic oligonucleotide
  Antisense strand to SEQ ID NO: 2175402
cucucaaggacuugacuaa

SEQ ID NO: 2175404 - RNA, 19 nt, Artificial Sequence
  Description of Artificial Sequence: Synthetic oligonucleotide
  Sense strand starting at position 3660 of SEQ ID NO: 1883189
agucaaguccuugagagca

SEQ ID NO: 2175405 - RNA, 19 nt, Artificial Sequence
  Description of Artificial Sequence: Synthetic oligonucleotide
  Antisense strand to SEQ ID NO: 2175404
ugcucucaaggacuugacu

SEQ ID NO: 2175406 - RNA, 19 nt, Artificial Sequence
  Description of Artificial Sequence: Synthetic oligonucleotide
  Sense strand starting at position 3709 of SEQ ID NO: 1883189
ggaauaucgcuugaccuau

SEQ ID NO: 2175407 - RNA, 19 nt, Artificial Sequence
  Description of Artificial Sequence: Synthetic oligonucleotide
  Antisense strand to SEQ ID NO: 2175406
auaggucaagcgauauucc

SEQ ID NO: 2175408 - RNA, 19 nt, Artificial Sequence
  Description of Artificial Sequence: Synthetic oligonucleotide
  Sense strand starting at position 3831 of SEQ ID NO: 1883189
ggauuaaagcuuugggagu

SEQ ID NO: 2175409 - RNA, 19 nt, Artificial Sequence
  Description of Artificial Sequence: Synthetic oligonucleotide
  Antisense strand to SEQ ID NO: 2175408
acucccaaagcuuuaaucc

SEQ ID NO: 2175410 - RNA, 19 nt, Artificial Sequence
  Description of Artificial Sequence: Synthetic oligonucleotide
  Sense strand starting at position 3867 of SEQ ID NO: 1883189
agucacaguuucucaaaga

SEQ ID NO: 2175411 - RNA, 19 nt, Artificial Sequence
  Description of Artificial Sequence: Synthetic oligonucleotide
  Antisense strand to SEQ ID NO: 2175410
ucuuugagaaacugugacu

SEQ ID NO: 2175412 - RNA, 19 nt, Artificial Sequence
  Description of Artificial Sequence: Synthetic oligonucleotide
  Sense strand starting at position 57 of SEQ ID NO: 1883190
cucugaucccucuagucua

SEQ ID NO: 2175413 - RNA, 19 nt, Artificial Sequence
  Description of Artificial Sequence: Synthetic oligonucleotide
  Antisense strand to SEQ ID NO: 2175412
uagacuagagggaucagag

SEQ ID NO: 2175414 - RNA, 19 nt, Artificial Sequence
  Description of Artificial Sequence: Synthetic oligonucleotide
  Sense strand starting at position 414 of SEQ ID NO: 1883190
uguggugauuuguuacacu

SEQ ID NO: 2175415 - RNA, 19 nt, Artificial Sequence
  Description of Artificial Sequence: Synthetic oligonucleotide
  Antisense strand to SEQ ID NO: 2175414
aguguaacaaaucaccaca

SEQ ID NO: 2175416 - RNA, 19 nt, Artificial Sequence
  Description of Artificial Sequence: Synthetic oligonucleotide
  Sense strand starting at position 451 of SEQ ID NO: 1883190
gcacauaccucaguggcaa

SEQ ID NO: 2175417 - RNA, 19 nt, Artificial Sequence
  Description of Artificial Sequence: Synthetic oligonucleotide
  Antisense strand to SEQ ID NO: 2175416
uugccacugagguaugugc

SEQ ID NO: 2175418 - RNA, 19 nt, Artificial Sequence
  Description of Artificial Sequence: Synthetic oligonucleotide
  Sense strand starting at position 534 of SEQ ID NO: 1883190
cuauucugaccuuagguua

SEQ ID NO: 2175419 - RNA, 19 nt, Artificial Sequence
  Description of Artificial Sequence: Synthetic oligonucleotide
  Antisense strand to SEQ ID NO: 2175418
uaaccuaaggucagaauag

SEQ ID NO: 2175420 - RNA, 19 nt, Artificial Sequence
  Description of Artificial Sequence: Synthetic oligonucleotide
  Sense strand starting at position 784 of SEQ ID NO: 1883190
ggguucaaagucuagggua

SEQ ID NO: 2175421 - RNA, 19 nt, Artificial Sequence
  Description of Artificial Sequence: Synthetic oligonucleotide
  Antisense strand to SEQ ID NO: 2175420
uacccuagacuuugaaccc

SEQ ID NO: 2175422 - RNA, 19 nt, Artificial Sequence
  Description of Artificial Sequence: Synthetic oligonucleotide
  Sense strand starting at position 826 of SEQ ID NO: 1883190
aaguguacuguuugagcau

SEQ ID NO: 2175423 - RNA, 19 nt, Artificial Sequence
  Description of Artificial Sequence: Synthetic oligonucleotide
  Antisense strand to SEQ ID NO: 2175422
augcucaaacaguacacuu

SEQ ID NO: 2175424 - RNA, 19 nt, Artificial Sequence
  Description of Artificial Sequence: Synthetic oligonucleotide
  Sense strand starting at position 882 of SEQ ID NO: 1883190
gucccaaagcguuaggaca

SEQ ID NO: 2175425 - RNA, 19 nt, Artificial Sequence
  Description of Artificial Sequence: Synthetic oligonucleotide
  Antisense strand to SEQ ID NO: 2175424
uguccuaacgcuuugggac

SEQ ID NO: 2175426 - RNA, 19 nt, Artificial Sequence
  Description of Artificial Sequence: Synthetic oligonucleotide
  Sense strand starting at position 949 of SEQ ID NO: 1883190
gguuucuugaagcagauaa

SEQ ID NO: 2175427 - RNA, 19 nt, Artificial Sequence
  Description of Artificial Sequence: Synthetic oligonucleotide
  Antisense strand to SEQ ID NO: 2175426
uuaucugcuucaagaaacc

SEQ ID NO: 2175428 - RNA, 19 nt, Artificial Sequence
  Description of Artificial Sequence: Synthetic oligonucleotide
  Sense strand starting at position 960 of SEQ ID NO: 1883190
gcagauaaagucugaauug

SEQ ID NO: 2175429 - RNA, 19 nt, Artificial Sequence
  Description of Artificial Sequence: Synthetic oligonucleotide
  Antisense strand to SEQ ID NO: 2175428
caauucagacuuuaucugc

SEQ ID NO: 2175430 - RNA, 19 nt, Artificial Sequence
  Description of Artificial Sequence: Synthetic oligonucleotide
  Sense strand starting at position 961 of SEQ ID NO: 1883190
cagauaaagucugaauuga

SEQ ID NO: 2175431 - RNA, 19 nt, Artificial Sequence
  Description of Artificial Sequence: Synthetic oligonucleotide
  Antisense strand to SEQ ID NO: 2175430
ucaauucagacuuuaucug

SEQ ID NO: 2175432 - RNA, 19 nt, Artificial Sequence
  Description of Artificial Sequence: Synthetic oligonucleotide
  Sense strand starting at position 1290 of SEQ ID NO: 1883190
ugaauagaguccuugcagu

SEQ ID NO: 2175433 - RNA, 19 nt, Artificial Sequence
  Description of Artificial Sequence: Synthetic oligonucleotide
  Antisense strand to SEQ ID NO: 2175432
acugcaaggacucuauuca

SEQ ID NO: 2175434 - RNA, 19 nt, Artificial Sequence
  Description of Artificial Sequence: Synthetic oligonucleotide
  Sense strand starting at position 1303 of SEQ ID NO: 1883190
ugcaguauuuacugggaaa

SEQ ID NO: 2175435 - RNA, 19 nt, Artificial Sequence
  Description of Artificial Sequence: Synthetic oligonucleotide
  Antisense strand to SEQ ID NO: 2175434
uuucccaguaaauacugca

SEQ ID NO: 2175436 - RNA, 19 nt, Artificial Sequence
  Description of Artificial Sequence: Synthetic oligonucleotide
  Sense strand starting at position 1354 of SEQ ID NO: 1883190
gacagaggcguucaaagga

SEQ ID NO: 2175437 - RNA, 19 nt, Artificial Sequence
  Description of Artificial Sequence: Synthetic oligonucleotide
  Antisense strand to SEQ ID NO: 2175436
uccuuugaacgccucuguc

SEQ ID NO: 2175438 - RNA, 19 nt, Artificial Sequence
  Description of Artificial Sequence: Synthetic oligonucleotide
  Sense strand starting at position 1446 of SEQ ID NO: 1883190
ccagaacuguucguuauuu

SEQ ID NO: 2175439 - RNA, 19 nt, Artificial Sequence
  Description of Artificial Sequence: Synthetic oligonucleotide
  Antisense strand to SEQ ID NO: 2175438
aaauaacgaacaguucugg

SEQ ID NO: 2175440 - RNA, 19 nt, Artificial Sequence
  Description of Artificial Sequence: Synthetic oligonucleotide
  Sense strand starting at position 1447 of SEQ ID NO: 1883190
cagaacuguucguuauuua

SEQ ID NO: 2175441 - RNA, 19 nt, Artificial Sequence
  Description of Artificial Sequence: Synthetic oligonucleotide
  Antisense strand to SEQ ID NO: 2175440
uaaauaacgaacaguucug

SEQ ID NO: 2175442 - RNA, 19 nt, Artificial Sequence
  Description of Artificial Sequence: Synthetic oligonucleotide
  Sense strand starting at position 1455 of SEQ ID NO: 1883190
uucguuauuuaucucagca

SEQ ID NO: 2175443 - RNA, 19 nt, Artificial Sequence
  Description of Artificial Sequence: Synthetic oligonucleotide
  Antisense strand to SEQ ID NO: 2175442
ugcugagauaaauaacgaa

SEQ ID NO: 2175444 - RNA, 19 nt, Artificial Sequence
  Description of Artificial Sequence: Synthetic oligonucleotide
  Sense strand starting at position 2299 of SEQ ID NO: 1883190
aguggaagccucuguccau

SEQ ID NO: 2175445 - RNA, 19 nt, Artificial Sequence
  Description of Artificial Sequence: Synthetic oligonucleotide
  Antisense strand to SEQ ID NO: 2175444
auggacagaggcuuccacu

SEQ ID NO: 2175446 - RNA, 19 nt, Artificial Sequence
  Description of Artificial Sequence: Synthetic oligonucleotide
  Sense strand starting at position 2738 of SEQ ID NO: 1883190
gccuucucaucucuaacga

SEQ ID NO: 2175447 - RNA, 19 nt, Artificial Sequence
  Description of Artificial Sequence: Synthetic oligonucleotide
  Antisense strand to SEQ ID NO: 2175446
ucguuagagaugagaaggc

SEQ ID NO: 2175448 - RNA, 19 nt, Artificial Sequence
  Description of Artificial Sequence: Synthetic oligonucleotide
  Sense strand starting at position 2745 of SEQ ID NO: 1883190
caucucuaacgagaauguu

SEQ ID NO: 2175449 - RNA, 19 nt, Artificial Sequence
  Description of Artificial Sequence: Synthetic oligonucleotide
  Antisense strand to SEQ ID NO: 2175448
aacauucucguuagagaug

SEQ ID NO: 2175450 - RNA, 19 nt, Artificial Sequence
  Description of Artificial Sequence: Synthetic oligonucleotide
  Sense strand starting at position 3033 of SEQ ID NO: 1883190
gugagaucacagugucauu

SEQ ID NO: 2175451 - RNA, 19 nt, Artificial Sequence
  Description of Artificial Sequence: Synthetic oligonucleotide
  Antisense strand to SEQ ID NO: 2175450
aaugacacugugaucucac

SEQ ID NO: 2175452 - RNA, 19 nt, Artificial Sequence
  Description of Artificial Sequence: Synthetic oligonucleotide
  Sense strand starting at position 3038 of SEQ ID NO: 1883190
aucacagugucauuguuau

SEQ ID NO: 2175453 - RNA, 19 nt, Artificial Sequence
  Description of Artificial Sequence: Synthetic oligonucleotide
  Antisense strand to SEQ ID NO: 2175452
auaacaaugacacugugau

SEQ ID NO: 2175454 - RNA, 19 nt, Artificial Sequence
  Description of Artificial Sequence: Synthetic oligonucleotide
  Sense strand starting at position 3048 of SEQ ID NO: 1883190
cauuguuaugaaugagcca

SEQ ID NO: 2175455 - RNA, 19 nt, Artificial Sequence
  Description of Artificial Sequence: Synthetic oligonucleotide
  Antisense strand to SEQ ID NO: 2175454
uggcucauucauaacaaug

SEQ ID NO: 2175456 - RNA, 19 nt, Artificial Sequence
  Description of Artificial Sequence: Synthetic oligonucleotide
  Sense strand starting at position 3051 of SEQ ID NO: 1883190
uguuaugaaugagccauga

SEQ ID NO: 2175457 - RNA, 19 nt, Artificial Sequence
  Description of Artificial Sequence: Synthetic oligonucleotide
  Antisense strand to SEQ ID NO: 2175456
ucauggcucauucauaaca

SEQ ID NO: 2175458 - RNA, 19 nt, Artificial Sequence
  Description of Artificial Sequence: Synthetic oligonucleotide
  Sense strand starting at position 3055 of SEQ ID NO: 1883190
augaaugagccaugaagua

SEQ ID NO: 2175459 - RNA, 19 nt, Artificial Sequence
  Description of Artificial Sequence: Synthetic oligonucleotide
  Antisense strand to SEQ ID NO: 2175458
uacuucauggcucauucau

SEQ ID NO: 2175460 - RNA, 19 nt, Artificial Sequence
  Description of Artificial Sequence: Synthetic oligonucleotide
  Sense strand starting at position 3064 of SEQ ID NO: 1883190
ccaugaaguaguggaugaa

SEQ ID NO: 2175461 - RNA, 19 nt, Artificial Sequence
  Description of Artificial Sequence: Synthetic oligonucleotide
  Antisense strand to SEQ ID NO: 2175460
uucauccacuacuucaugg

SEQ ID NO: 2175462 - RNA, 19 nt, Artificial Sequence
  Description of Artificial Sequence: Synthetic oligonucleotide
  Sense strand starting at position 3160 of SEQ ID NO: 1883190
aagacugugugagucuauu

SEQ ID NO: 2175463 - RNA, 19 nt, Artificial Sequence
  Description of Artificial Sequence: Synthetic oligonucleotide
  Antisense strand to SEQ ID NO: 2175462
aauagacucacacagucuu

SEQ ID NO: 2175464 - RNA, 19 nt, Artificial Sequence
  Description of Artificial Sequence: Synthetic oligonucleotide
  Sense strand starting at position 3172 of SEQ ID NO: 1883190
gucuauuaaagagaagcgu

SEQ ID NO: 2175465 - RNA, 19 nt, Artificial Sequence
  Description of Artificial Sequence: Synthetic oligonucleotide
  Antisense strand to SEQ ID NO: 2175464
acgcuucucuuuaauagac

SEQ ID NO: 2175466 - RNA, 19 nt, Artificial Sequence
  Description of Artificial Sequence: Synthetic oligonucleotide
  Sense strand starting at position 3342 of SEQ ID NO: 1883190
uaaugucuuguguggcaca

SEQ ID NO: 2175467 - RNA, 19 nt, Artificial Sequence
  Description of Artificial Sequence: Synthetic oligonucleotide
  Antisense strand to SEQ ID NO: 2175466
ugugccacacaagacauua

SEQ ID NO: 2175468 - RNA, 19 nt, Artificial Sequence
  Description of Artificial Sequence: Synthetic oligonucleotide
  Sense strand starting at position 3347 of SEQ ID NO: 1883190
ucuuguguggcacauaagu

SEQ ID NO: 2175469 - RNA, 19 nt, Artificial Sequence
  Description of Artificial Sequence: Synthetic oligonucleotide
  Antisense strand to SEQ ID NO: 2175468
acuuaugugccacacaaga

SEQ ID NO: 2175470 - RNA, 19 nt, Artificial Sequence
  Description of Artificial Sequence: Synthetic oligonucleotide
  Sense strand starting at position 3404 of SEQ ID NO: 1883190
ugguaauguggauggauaa

SEQ ID NO: 2175471 - RNA, 19 nt, Artificial Sequence
  Description of Artificial Sequence: Synthetic oligonucleotide
  Antisense strand to SEQ ID NO: 2175470
uuauccauccacauuacca

SEQ ID NO: 2175472 - RNA, 19 nt, Artificial Sequence
  Description of Artificial Sequence: Synthetic oligonucleotide
  Sense strand starting at position 3405 of SEQ ID NO: 1883190
gguaauguggauggauaaa

SEQ ID NO: 2175473 - RNA, 19 nt, Artificial Sequence
  Description of Artificial Sequence: Synthetic oligonucleotide
  Antisense strand to SEQ ID NO: 2175472
uuuauccauccacauuacc

SEQ ID NO: 2175474 - RNA, 19 nt, Artificial Sequence
  Description of Artificial Sequence: Synthetic oligonucleotide
  Sense strand starting at position 3435 of SEQ ID NO: 1883190
uggguaagacaucauugcu

SEQ ID NO: 2175475 - RNA, 19 nt, Artificial Sequence
  Description of Artificial Sequence: Synthetic oligonucleotide
  Antisense strand to SEQ ID NO: 2175474
agcaaugaugucuuaccca

SEQ ID NO: 2175476 - RNA, 19 nt, Artificial Sequence
  Description of Artificial Sequence: Synthetic oligonucleotide
  Sense strand starting at position 3438 of SEQ ID NO: 1883190
guaagacaucauugcugca

SEQ ID NO: 2175477 - RNA, 19 nt, Artificial Sequence
  Description of Artificial Sequence: Synthetic oligonucleotide
  Antisense strand to SEQ ID NO: 2175476
ugcagcaaugaugucuuac

SEQ ID NO: 2175478 - RNA, 19 nt, Artificial Sequence
  Description of Artificial Sequence: Synthetic oligonucleotide
  Sense strand starting at position 3506 of SEQ ID NO: 1883190
uaugaauuguaucauggaa

SEQ ID NO: 2175479 - RNA, 19 nt, Artificial Sequence
  Description of Artificial Sequence: Synthetic oligonucleotide
  Antisense strand to SEQ ID NO: 2175478
uuccaugauacaauucaua

SEQ ID NO: 2175480 - RNA, 19 nt, Artificial Sequence
  Description of Artificial Sequence: Synthetic oligonucleotide
  Sense strand starting at position 3572 of SEQ ID NO: 1883190
ggagaaguguccuugugau

SEQ ID NO: 2175481 - RNA, 19 nt, Artificial Sequence
  Description of Artificial Sequence: Synthetic oligonucleotide
  Antisense strand to SEQ ID NO: 2175480
aucacaaggacacuucucc

SEQ ID NO: 2175482 - RNA, 19 nt, Artificial Sequence
  Description of Artificial Sequence: Synthetic oligonucleotide
  Sense strand starting at position 3673 of SEQ ID NO: 1883190
uagguuaacuuaucagaag

SEQ ID NO: 2175483 - RNA, 19 nt, Artificial Sequence
  Description of Artificial Sequence: Synthetic oligonucleotide
  Antisense strand to SEQ ID NO: 2175482
cuucugauaaguuaaccua

SEQ ID NO: 2175484 - RNA, 19 nt, Artificial Sequence
  Description of Artificial Sequence: Synthetic oligonucleotide
  Sense strand starting at position 3684 of SEQ ID NO: 1883190
aucagaaguugcccaguua

SEQ ID NO: 2175485 - RNA, 19 nt, Artificial Sequence
  Description of Artificial Sequence: Synthetic oligonucleotide
  Antisense strand to SEQ ID NO: 2175484
uaacugggcaacuucugau

SEQ ID NO: 2175486 - RNA, 19 nt, Artificial Sequence
  Description of Artificial Sequence: Synthetic oligonucleotide
  Sense strand starting at position 3699 of SEQ ID NO: 1883190
guuagaacugcguugcuuu

SEQ ID NO: 2175487 - RNA, 19 nt, Artificial Sequence
  Description of Artificial Sequence: Synthetic oligonucleotide
  Antisense strand to SEQ ID NO: 2175486
aaagcaacgcaguucuaac

SEQ ID NO: 2175488 - RNA, 19 nt, Artificial Sequence
  Description of Artificial Sequence: Synthetic oligonucleotide
  Sense strand starting at position 3820 of SEQ ID NO: 1883190
guaaucauauuuggaggua

SEQ ID NO: 2175489 - RNA, 19 nt, Artificial Sequence
  Description of Artificial Sequence: Synthetic oligonucleotide
  Antisense strand to SEQ ID NO: 2175488
uaccuccaaauaugauuac

SEQ ID NO: 2175490 - RNA, 19 nt, Artificial Sequence
  Description of Artificial Sequence: Synthetic oligonucleotide
  Sense strand starting at position 3856 of SEQ ID NO: 1883190
aguucuugucaugaaacuu

SEQ ID NO: 2175491 - RNA, 19 nt, Artificial Sequence
  Description of Artificial Sequence: Synthetic oligonucleotide
  Antisense strand to SEQ ID NO: 2175490
aaguuucaugacaagaacu

SEQ ID NO: 2175492 - RNA, 19 nt, Artificial Sequence
  Description of Artificial Sequence: Synthetic oligonucleotide
  Sense strand starting at position 18 of SEQ ID NO: 1883191
caaagaauguaaguaugca

SEQ ID NO: 2175493 - RNA, 19 nt, Artificial Sequence
  Description of Artificial Sequence: Synthetic oligonucleotide
  Antisense strand to SEQ ID NO: 2175492
ugcauacuuacauucuuug

SEQ ID NO: 2175494 - RNA, 19 nt, Artificial Sequence
  Description of Artificial Sequence: Synthetic oligonucleotide
  Sense strand starting at position 125 of SEQ ID NO: 1883191
cuaccagacuuguucuaag

SEQ ID NO: 2175495 - RNA, 19 nt, Artificial Sequence
  Description of Artificial Sequence: Synthetic oligonucleotide
  Antisense strand to SEQ ID NO: 2175494
cuuagaacaagucugguag

SEQ ID NO: 2175496 - RNA, 19 nt, Artificial Sequence
  Description of Artificial Sequence: Synthetic oligonucleotide
  Sense strand starting at position 324 of SEQ ID NO: 1883191
gugacuguuccaugaggaa

SEQ ID NO: 2175497 - RNA, 19 nt, Artificial Sequence
  Description of Artificial Sequence: Synthetic oligonucleotide
  Antisense strand to SEQ ID NO: 2175496
uuccucauggaacagucac

SEQ ID NO: 2175498 - RNA, 19 nt, Artificial Sequence
  Description of Artificial Sequence: Synthetic oligonucleotide
  Sense strand starting at position 409 of SEQ ID NO: 1883191
caagaauaggcuuggaguc

SEQ ID NO: 2175499 - RNA, 19 nt, Artificial Sequence
  Description of Artificial Sequence: Synthetic oligonucleotide
  Antisense strand to SEQ ID NO: 2175498
gacuccaagccuauucuug

SEQ ID NO: 2175500 - RNA, 19 nt, Artificial Sequence
  Description of Artificial Sequence: Synthetic oligonucleotide
  Sense strand starting at position 410 of SEQ ID NO: 1883191
aagaauaggcuuggaguca

SEQ ID NO: 2175501 - RNA, 19 nt, Artificial Sequence
  Description of Artificial Sequence: Synthetic oligonucleotide
  Antisense strand to SEQ ID NO: 2175500
ugacuccaagccuauucuu

SEQ ID NO: 2175502 - RNA, 19 nt, Artificial Sequence
  Description of Artificial Sequence: Synthetic oligonucleotide
  Sense strand starting at position 440 of SEQ ID NO: 1883191
cuccuagguccauagacua

SEQ ID NO: 2175503 - RNA, 19 nt, Artificial Sequence
  Description of Artificial Sequence: Synthetic oligonucleotide
  Antisense strand to SEQ ID NO: 2175502
uagucuauggaccuaggag

SEQ ID NO: 2175504 - RNA, 19 nt, Artificial Sequence
  Description of Artificial Sequence: Synthetic oligonucleotide
  Sense strand starting at position 591 of SEQ ID NO: 1883191
ugagaauccaccugaguga

SEQ ID NO: 2175505 - RNA, 19 nt, Artificial Sequence
  Description of Artificial Sequence: Synthetic oligonucleotide
  Antisense strand to SEQ ID NO: 2175504
ucacucagguggauucuca

SEQ ID NO: 2175506 - RNA, 19 nt, Artificial Sequence
  Description of Artificial Sequence: Synthetic oligonucleotide
  Sense strand starting at position 719 of SEQ ID NO: 1883191
uacgaauagucaucaggac

SEQ ID NO: 2175507 - RNA, 19 nt, Artificial Sequence
  Description of Artificial Sequence: Synthetic oligonucleotide
  Antisense strand to SEQ ID NO: 2175506
guccugaugacuauucgua

SEQ ID NO: 2175508 - RNA, 19 nt, Artificial Sequence
  Description of Artificial Sequence: Synthetic oligonucleotide
  Sense strand starting at position 737 of SEQ ID NO: 1883191
ccaagugaugcugaaugau

SEQ ID NO: 2175509 - RNA, 19 nt, Artificial Sequence
  Description of Artificial Sequence: Synthetic oligonucleotide
  Antisense strand to SEQ ID NO: 2175508
aucauucagcaucacuugg

SEQ ID NO: 2175510 - RNA, 19 nt, Artificial Sequence
  Description of Artificial Sequence: Synthetic oligonucleotide
  Sense strand starting at position 740 of SEQ ID NO: 1883191
agugaugcugaaugauuaa

SEQ ID NO: 2175511 - RNA, 19 nt, Artificial Sequence
  Description of Artificial Sequence: Synthetic oligonucleotide
  Antisense strand to SEQ ID NO: 2175510
uuaaucauucagcaucacu

SEQ ID NO: 2175512 - RNA, 19 nt, Artificial Sequence
  Description of Artificial Sequence: Synthetic oligonucleotide
  Sense strand starting at position 824 of SEQ ID NO: 1883191
agaauugcugguuaacaca

SEQ ID NO: 2175513 - RNA, 19 nt, Artificial Sequence
  Description of Artificial Sequence: Synthetic oligonucleotide
  Antisense strand to SEQ ID NO: 2175512
uguguuaaccagcaauucu

SEQ ID NO: 2175514 - RNA, 19 nt, Artificial Sequence
  Description of Artificial Sequence: Synthetic oligonucleotide
  Sense strand starting at position 916 of SEQ ID NO: 1883191
gagagauuguaaguguaca

SEQ ID NO: 2175515 - RNA, 19 nt, Artificial Sequence
  Description of Artificial Sequence: Synthetic oligonucleotide
  Antisense strand to SEQ ID NO: 2175514
uguacacuuacaaucucuc

SEQ ID NO: 2175516 - RNA, 19 nt, Artificial Sequence
  Description of Artificial Sequence: Synthetic oligonucleotide
  Sense strand starting at position 921 of SEQ ID NO: 1883191
auuguaaguguacaugaca

SEQ ID NO: 2175517 - RNA, 19 nt, Artificial Sequence
  Description of Artificial Sequence: Synthetic oligonucleotide
  Antisense strand to SEQ ID NO: 2175516
ugucauguacacuuacaau

SEQ ID NO: 2175518 - RNA, 19 nt, Artificial Sequence
  Description of Artificial Sequence: Synthetic oligonucleotide
  Sense strand starting at position 947 of SEQ ID NO: 1883191
gaguuuggcagugaaagac

SEQ ID NO: 2175519 - RNA, 19 nt, Artificial Sequence
  Description of Artificial Sequence: Synthetic oligonucleotide
  Antisense strand to SEQ ID NO: 2175518
gucuuucacugccaaacuc

SEQ ID NO: 2175520 - RNA, 19 nt, Artificial Sequence
  Description of Artificial Sequence: Synthetic oligonucleotide
  Sense strand starting at position 978 of SEQ ID NO: 1883191
gaaggugcuguagaaugaa

SEQ ID NO: 2175521 - RNA, 19 nt, Artificial Sequence
  Description of Artificial Sequence: Synthetic oligonucleotide
  Antisense strand to SEQ ID NO: 2175520
uucauucuacagcaccuuc

SEQ ID NO: 2175522 - RNA, 19 nt, Artificial Sequence
  Description of Artificial Sequence: Synthetic oligonucleotide
  Sense strand starting at position 1132 of SEQ ID NO: 1883191
aagaaugguggcgacauua

SEQ ID NO: 2175523 - RNA, 19 nt, Artificial Sequence
  Description of Artificial Sequence: Synthetic oligonucleotide
  Antisense strand to SEQ ID NO: 2175522
uaaugucgccaccauucuu

SEQ ID NO: 2175524 - RNA, 19 nt, Artificial Sequence
  Description of Artificial Sequence: Synthetic oligonucleotide
  Sense strand starting at position 1144 of SEQ ID NO: 1883191
gacauuaggcuuugaugau

SEQ ID NO: 2175525 - RNA, 19 nt, Artificial Sequence
  Description of Artificial Sequence: Synthetic oligonucleotide
  Antisense strand to SEQ ID NO: 2175524
aucaucaaagccuaauguc

SEQ ID NO: 2175526 - RNA, 19 nt, Artificial Sequence
  Description of Artificial Sequence: Synthetic oligonucleotide
  Sense strand starting at position 1299 of SEQ ID NO: 1883191
uuuauuccugaagaaguuu

SEQ ID NO: 2175527 - RNA, 19 nt, Artificial Sequence
  Description of Artificial Sequence: Synthetic oligonucleotide
  Antisense strand to SEQ ID NO: 2175526
aaacuucuucaggaauaaa

SEQ ID NO: 2175528 - RNA, 19 nt, Artificial Sequence
  Description of Artificial Sequence: Synthetic oligonucleotide
  Sense strand starting at position 1401 of SEQ ID NO: 1883191
aauggucaaugguuaaaua

SEQ ID NO: 2175529 - RNA, 19 nt, Artificial Sequence
  Description of Artificial Sequence: Synthetic oligonucleotide
  Antisense strand to SEQ ID NO: 2175528
uauuuaaccauugaccauu

SEQ ID NO: 2175530 - RNA, 19 nt, Artificial Sequence
  Description of Artificial Sequence: Synthetic oligonucleotide
  Sense strand starting at position 1584 of SEQ ID NO: 1883191
uugaguuacaaauggguaa

SEQ ID NO: 2175531 - RNA, 19 nt, Artificial Sequence
  Description of Artificial Sequence: Synthetic oligonucleotide
  Antisense strand to SEQ ID NO: 2175530
uuacccauuuguaacucaa

SEQ ID NO: 2175532 - RNA, 19 nt, Artificial Sequence
  Description of Artificial Sequence: Synthetic oligonucleotide
  Sense strand starting at position 1585 of SEQ ID NO: 1883191
ugaguuacaaauggguaaa

SEQ ID NO: 2175533 - RNA, 19 nt, Artificial Sequence
  Description of Artificial Sequence: Synthetic oligonucleotide
  Antisense strand to SEQ ID NO: 2175532
uuuacccauuuguaacuca

SEQ ID NO: 2175534 - RNA, 19 nt, Artificial Sequence
  Description of Artificial Sequence: Synthetic oligonucleotide
  Sense strand starting at position 1711 of SEQ ID NO: 1883191
cuaagaauguggucauuac

SEQ ID NO: 2175535 - RNA, 19 nt, Artificial Sequence
  Description of Artificial Sequence: Synthetic oligonucleotide
  Antisense strand to SEQ ID NO: 2175534
guaaugaccacauucuuag

SEQ ID NO: 2175536 - RNA, 19 nt, Artificial Sequence
  Description of Artificial Sequence: Synthetic oligonucleotide
  Sense strand starting at position 2392 of SEQ ID NO: 1883191
agaugaaacgcugaguuaa

SEQ ID NO: 2175537 - RNA, 19 nt, Artificial Sequence
  Description of Artificial Sequence: Synthetic oligonucleotide
  Antisense strand to SEQ ID NO: 2175536
uuaacucagcguuucaucu

SEQ ID NO: 2175538 - RNA, 19 nt, Artificial Sequence
  Description of Artificial Sequence: Synthetic oligonucleotide
  Sense strand starting at position 2434 of SEQ ID NO: 1883191
acaugucuuuggguagaau

SEQ ID NO: 2175539 - RNA, 19 nt, Artificial Sequence
  Description of Artificial Sequence: Synthetic oligonucleotide
  Antisense strand to SEQ ID NO: 2175538
auucuacccaaagacaugu

SEQ ID NO: 2175540 - RNA, 19 nt, Artificial Sequence
  Description of Artificial Sequence: Synthetic oligonucleotide
  Sense strand starting at position 2435 of SEQ ID NO: 1883191
caugucuuuggguagaaug

SEQ ID NO: 2175541 - RNA, 19 nt, Artificial Sequence
  Description of Artificial Sequence: Synthetic oligonucleotide
  Antisense strand to SEQ ID NO: 2175540
cauucuacccaaagacaug

SEQ ID NO: 2175542 - RNA, 19 nt, Artificial Sequence
  Description of Artificial Sequence: Synthetic oligonucleotide
  Sense strand starting at position 2587 of SEQ ID NO: 1883191
uucccucuaucaguggaau

SEQ ID NO: 2175543 - RNA, 19 nt, Artificial Sequence
  Description of Artificial Sequence: Synthetic oligonucleotide
  Antisense strand to SEQ ID NO: 2175542
auuccacugauagagggaa

SEQ ID NO: 2175544 - RNA, 19 nt, Artificial Sequence
  Description of Artificial Sequence: Synthetic oligonucleotide
  Sense strand starting at position 2588 of SEQ ID NO: 1883191
ucccucuaucaguggaaua

SEQ ID NO: 2175545 - RNA, 19 nt, Artificial Sequence
  Description of Artificial Sequence: Synthetic oligonucleotide
  Antisense strand to SEQ ID NO: 2175544
uauuccacugauagaggga

SEQ ID NO: 2175546 - RNA, 19 nt, Artificial Sequence
  Description of Artificial Sequence: Synthetic oligonucleotide
  Sense strand starting at position 2640 of SEQ ID NO: 1883191
uuaagucaggucuacacaa

SEQ ID NO: 2175547 - RNA, 19 nt, Artificial Sequence
  Description of Artificial Sequence: Synthetic oligonucleotide
  Antisense strand to SEQ ID NO: 2175546
uuguguagaccugacuuaa

SEQ ID NO: 2175548 - RNA, 19 nt, Artificial Sequence
  Description of Artificial Sequence: Synthetic oligonucleotide
  Sense strand starting at position 2662 of SEQ ID NO: 1883191
aaagauaauugcuugguua

SEQ ID NO: 2175549 - RNA, 19 nt, Artificial Sequence
  Description of Artificial Sequence: Synthetic oligonucleotide
  Antisense strand to SEQ ID NO: 2175548
uaaccaagcaauuaucuuu

SEQ ID NO: 2175550 - RNA, 19 nt, Artificial Sequence
  Description of Artificial Sequence: Synthetic oligonucleotide
  Sense strand starting at position 2722 of SEQ ID NO: 1883191
aguauuucuuugccugaug

SEQ ID NO: 2175551 - RNA, 19 nt, Artificial Sequence
  Description of Artificial Sequence: Synthetic oligonucleotide
  Antisense strand to SEQ ID NO: 2175550
caucaggcaaagaaauacu

SEQ ID NO: 2175552 - RNA, 19 nt, Artificial Sequence
  Description of Artificial Sequence: Synthetic oligonucleotide
  Sense strand starting at position 2723 of SEQ ID NO: 1883191
guauuucuuugccugauga

SEQ ID NO: 2175553 - RNA, 19 nt, Artificial Sequence
  Description of Artificial Sequence: Synthetic oligonucleotide
  Antisense strand to SEQ ID NO: 2175552
ucaucaggcaaagaaauac

SEQ ID NO: 2175554 - RNA, 19 nt, Artificial Sequence
  Description of Artificial Sequence: Synthetic oligonucleotide
  Sense strand starting at position 2973 of SEQ ID NO: 1883191
gaaagugaaucaguuuaac

SEQ ID NO: 2175555 - RNA, 19 nt, Artificial Sequence
  Description of Artificial Sequence: Synthetic oligonucleotide
  Antisense strand to SEQ ID NO: 2175554
guuaaacugauucacuuuc

SEQ ID NO: 2175556 - RNA, 19 nt, Artificial Sequence
  Description of Artificial Sequence: Synthetic oligonucleotide
  Sense strand starting at position 3022 of SEQ ID NO: 1883191
ucucaucugggcugggaaa

SEQ ID NO: 2175557 - RNA, 19 nt, Artificial Sequence
  Description of Artificial Sequence: Synthetic oligonucleotide
  Antisense strand to SEQ ID NO: 2175556
uuucccagcccagaugaga

SEQ ID NO: 2175558 - RNA, 19 nt, Artificial Sequence
  Description of Artificial Sequence: Synthetic oligonucleotide
  Sense strand starting at position 3087 of SEQ ID NO: 1883191
cauagugaauggucuuuaa

SEQ ID NO: 2175559 - RNA, 19 nt, Artificial Sequence
  Description of Artificial Sequence: Synthetic oligonucleotide
  Antisense strand to SEQ ID NO: 2175558
uuaaagaccauucacuaug

SEQ ID NO: 2175560 - RNA, 19 nt, Artificial Sequence
  Description of Artificial Sequence: Synthetic oligonucleotide
  Sense strand starting at position 3090 of SEQ ID NO: 1883191
agugaauggucuuuaaaua

SEQ ID NO: 2175561 - RNA, 19 nt, Artificial Sequence
  Description of Artificial Sequence: Synthetic oligonucleotide
  Antisense strand to SEQ ID NO: 2175560
uauuuaaagaccauucacu

SEQ ID NO: 2175562 - RNA, 19 nt, Artificial Sequence
  Description of Artificial Sequence: Synthetic oligonucleotide
  Sense strand starting at position 3091 of SEQ ID NO: 1883191
gugaauggucuuuaaauau

SEQ ID NO: 2175563 - RNA, 19 nt, Artificial Sequence
  Description of Artificial Sequence: Synthetic oligonucleotide
  Antisense strand to SEQ ID NO: 2175562
auauuuaaagaccauucac

SEQ ID NO: 2175564 - RNA, 19 nt, Artificial Sequence
  Description of Artificial Sequence: Synthetic oligonucleotide
  Sense strand starting at position 3304 of SEQ ID NO: 1883191
aaaugugauguaggauaau

SEQ ID NO: 2175565 - RNA, 19 nt, Artificial Sequence
  Description of Artificial Sequence: Synthetic oligonucleotide
  Antisense strand to SEQ ID NO: 2175564
auuauccuacaucacauuu

SEQ ID NO: 2175566 - RNA, 19 nt, Artificial Sequence
  Description of Artificial Sequence: Synthetic oligonucleotide
  Sense strand starting at position 3342 of SEQ ID NO: 1883191
ccuugaguuaggcaguaca

SEQ ID NO: 2175567 - RNA, 19 nt, Artificial Sequence
  Description of Artificial Sequence: Synthetic oligonucleotide
  Antisense strand to SEQ ID NO: 2175566
uguacugccuaacucaagg

SEQ ID NO: 2175568 - RNA, 19 nt, Artificial Sequence
  Description of Artificial Sequence: Synthetic oligonucleotide
  Sense strand starting at position 3353 of SEQ ID NO: 1883191
gcaguacaaagauguaaga

SEQ ID NO: 2175569 - RNA, 19 nt, Artificial Sequence
  Description of Artificial Sequence: Synthetic oligonucleotide
  Antisense strand to SEQ ID NO: 2175568
ucuuacaucuuuguacugc

SEQ ID NO: 2175570 - RNA, 19 nt, Artificial Sequence
  Description of Artificial Sequence: Synthetic oligonucleotide
  Sense strand starting at position 3595 of SEQ ID NO: 1883191
uggaaugugagcugaagaa

SEQ ID NO: 2175571 - RNA, 19 nt, Artificial Sequence
  Description of Artificial Sequence: Synthetic oligonucleotide
  Antisense strand to SEQ ID NO: 2175570
uucuucagcucacauucca

SEQ ID NO: 2175572 - RNA, 19 nt, Artificial Sequence
  Description of Artificial Sequence: Synthetic oligonucleotide
  Sense strand starting at position 223 of SEQ ID NO: 1883192
cgugaaccuucuuccuacu

SEQ ID NO: 2175573 - RNA, 19 nt, Artificial Sequence
  Description of Artificial Sequence: Synthetic oligonucleotide
  Antisense strand to SEQ ID NO: 2175572
aguaggaagaagguucacg

SEQ ID NO: 2175574 - RNA, 19 nt, Artificial Sequence
  Description of Artificial Sequence: Synthetic oligonucleotide
  Sense strand starting at position 256 of SEQ ID NO: 1883192
uaaggucucucagcaaaga

SEQ ID NO: 2175575 - RNA, 19 nt, Artificial Sequence
  Description of Artificial Sequence: Synthetic oligonucleotide
  Antisense strand to SEQ ID NO: 2175574
ucuuugcugagagaccuua

SEQ ID NO: 2175576 - RNA, 19 nt, Artificial Sequence
  Description of Artificial Sequence: Synthetic oligonucleotide
  Sense strand starting at position 375 of SEQ ID NO: 1883192
uguaccuuuccauaacgua

SEQ ID NO: 2175577 - RNA, 19 nt, Artificial Sequence
  Description of Artificial Sequence: Synthetic oligonucleotide
  Antisense strand to SEQ ID NO: 2175576
uacguuauggaaagguaca

SEQ ID NO: 2175578 - RNA, 19 nt, Artificial Sequence
  Description of Artificial Sequence: Synthetic oligonucleotide
  Sense strand starting at position 774 of SEQ ID NO: 1883192
cgacaccuguucuuguaga

SEQ ID NO: 2175579 - RNA, 19 nt, Artificial Sequence
  Description of Artificial Sequence: Synthetic oligonucleotide
  Antisense strand to SEQ ID NO: 2175578
ucuacaagaacaggugucg

SEQ ID NO: 2175580 - RNA, 19 nt, Artificial Sequence
  Description of Artificial Sequence: Synthetic oligonucleotide
  Sense strand starting at position 775 of SEQ ID NO: 1883192
gacaccuguucuuguagau

SEQ ID NO: 2175581 - RNA, 19 nt, Artificial Sequence
  Description of Artificial Sequence: Synthetic oligonucleotide
  Antisense strand to SEQ ID NO: 2175580
aucuacaagaacagguguc

SEQ ID NO: 2175582 - RNA, 19 nt, Artificial Sequence
  Description of Artificial Sequence: Synthetic oligonucleotide
  Sense strand starting at position 2134 of SEQ ID NO: 1883192
gggugaauuaugcggccga

SEQ ID NO: 2175583 - RNA, 19 nt, Artificial Sequence
  Description of Artificial Sequence: Synthetic oligonucleotide
  Antisense strand to SEQ ID NO: 2175582
ucggccgcauaauucaccc

SEQ ID NO: 2175584 - RNA, 19 nt, Artificial Sequence
  Description of Artificial Sequence: Synthetic oligonucleotide
  Sense strand starting at position 2438 of SEQ ID NO: 1883192
accugaauuaguugaagug

SEQ ID NO: 2175585 - RNA, 19 nt, Artificial Sequence
  Description of Artificial Sequence: Synthetic oligonucleotide
  Antisense strand to SEQ ID NO: 2175584
cacuucaacuaauucaggu

SEQ ID NO: 2175586 - RNA, 19 nt, Artificial Sequence
  Description of Artificial Sequence: Synthetic oligonucleotide
  Sense strand starting at position 2739 of SEQ ID NO: 1883192
cugccaaccgccugaauua

SEQ ID NO: 2175587 - RNA, 19 nt, Artificial Sequence
  Description of Artificial Sequence: Synthetic oligonucleotide
  Antisense strand to SEQ ID NO: 2175586
uaauucaggcgguuggcag

SEQ ID NO: 2175588 - RNA, 19 nt, Artificial Sequence
  Description of Artificial Sequence: Synthetic oligonucleotide
  Sense strand starting at position 2839 of SEQ ID NO: 1883192
gcccuaugugcaggugaca

SEQ ID NO: 2175589 - RNA, 19 nt, Artificial Sequence
  Description of Artificial Sequence: Synthetic oligonucleotide
  Antisense strand to SEQ ID NO: 2175588
ugucaccugcacauagggc

SEQ ID NO: 2175590 - RNA, 19 nt, Artificial Sequence
  Description of Artificial Sequence: Synthetic oligonucleotide
  Sense strand starting at position 3185 of SEQ ID NO: 1883192
cacuucuaucagugcgcaa

SEQ ID NO: 2175591 - RNA, 19 nt, Artificial Sequence
  Description of Artificial Sequence: Synthetic oligonucleotide
  Antisense strand to SEQ ID NO: 2175590
uugcgcacugauagaagug

SEQ ID NO: 2175592 - RNA, 19 nt, Artificial Sequence
  Description of Artificial Sequence: Synthetic oligonucleotide
  Sense strand starting at position 3335 of SEQ ID NO: 1883192
ggcccuguugcuggguaau

SEQ ID NO: 2175593 - RNA, 19 nt, Artificial Sequence
  Description of Artificial Sequence: Synthetic oligonucleotide
  Antisense strand to SEQ ID NO: 2175592
auuacccagcaacagggcc

SEQ ID NO: 2175594 - RNA, 19 nt, Artificial Sequence
  Description of Artificial Sequence: Synthetic oligonucleotide
  Sense strand starting at position 3591 of SEQ ID NO: 1883192
cuuucuuacuaauggguca

SEQ ID NO: 2175595 - RNA, 19 nt, Artificial Sequence
  Description of Artificial Sequence: Synthetic oligonucleotide
  Antisense strand to SEQ ID NO: 2175594
ugacccauuaguaagaaag

SEQ ID NO: 2175596 - RNA, 19 nt, Artificial Sequence
  Description of Artificial Sequence: Synthetic oligonucleotide
  Sense strand starting at position 3604 of SEQ ID NO: 1883192
gggucagagucucaccuuu

SEQ ID NO: 2175597 - RNA, 19 nt, Artificial Sequence
  Description of Artificial Sequence: Synthetic oligonucleotide
  Antisense strand to SEQ ID NO: 2175596
aaaggugagacucugaccc

SEQ ID NO: 2175598 - RNA, 19 nt, Artificial Sequence
  Description of Artificial Sequence: Synthetic oligonucleotide
  Sense strand starting at position 3606 of SEQ ID NO: 1883192
gucagagucucaccuuuag

SEQ ID NO: 2175599 - RNA, 19 nt, Artificial Sequence
  Description of Artificial Sequence: Synthetic oligonucleotide
  Antisense strand to SEQ ID NO: 2175598
cuaaaggugagacucugac

SEQ ID NO: 2175600 - RNA, 19 nt, Artificial Sequence
  Description of Artificial Sequence: Synthetic oligonucleotide
  Sense strand starting at position 3682 of SEQ ID NO: 1883192
aaaggugagaugugugaaa

SEQ ID NO: 2175601 - RNA, 19 nt, Artificial Sequence
  Description of Artificial Sequence: Synthetic oligonucleotide
  Antisense strand to SEQ ID NO: 2175600
uuucacacaucucaccuuu

SEQ ID NO: 2175602 - RNA, 19 nt, Artificial Sequence
  Description of Artificial Sequence: Synthetic oligonucleotide
  Sense strand starting at position 3684 of SEQ ID NO: 1883192
aggugagaugugugaaauu

SEQ ID NO: 2175603 - RNA, 19 nt, Artificial Sequence
  Description of Artificial Sequence: Synthetic oligonucleotide
  Antisense strand to SEQ ID NO: 2175602
aauuucacacaucucaccu

SEQ ID NO: 2175604 - RNA, 19 nt, Artificial Sequence
  Description of Artificial Sequence: Synthetic oligonucleotide
  Sense strand starting at position 3741 of SEQ ID NO: 1883192
uuccucuucgcagauggau

SEQ ID NO: 2175605 - RNA, 19 nt, Artificial Sequence
  Description of Artificial Sequence: Synthetic oligonucleotide
  Antisense strand to SEQ ID NO: 2175604
auccaucugcgaagaggaa

SEQ ID NO: 2175606 - RNA, 19 nt, Artificial Sequence
  Description of Artificial Sequence: Synthetic oligonucleotide
  Sense strand starting at position 3747 of SEQ ID NO: 1883192
uucgcagauggaugugaaa

SEQ ID NO: 2175607 - RNA, 19 nt, Artificial Sequence
  Description of Artificial Sequence: Synthetic oligonucleotide
  Antisense strand to SEQ ID NO: 2175606
uuucacauccaucugcgaa

SEQ ID NO: 2175608 - RNA, 19 nt, Artificial Sequence
  Description of Artificial Sequence: Synthetic oligonucleotide
  Sense strand starting at position 3787 of SEQ ID NO: 1883192
ccaccucuguacugagaag

SEQ ID NO: 2175609 - RNA, 19 nt, Artificial Sequence
  Description of Artificial Sequence: Synthetic oligonucleotide
  Antisense strand to SEQ ID NO: 2175608
cuucucaguacagaggugg

SEQ ID NO: 2175610 - RNA, 19 nt, Artificial Sequence
  Description of Artificial Sequence: Synthetic oligonucleotide
  Sense strand starting at position 3805 of SEQ ID NO: 1883192
guggcuuucuaauggacag

SEQ ID NO: 2175611 - RNA, 19 nt, Artificial Sequence
  Description of Artificial Sequence: Synthetic oligonucleotide
  Antisense strand to SEQ ID NO: 2175610
cuguccauuagaaagccac

SEQ ID NO: 2175612 - RNA, 19 nt, Artificial Sequence
  Description of Artificial Sequence: Synthetic oligonucleotide
  Sense strand starting at position 3818 of SEQ ID NO: 1883192
ggacagguuucggaaaggu

SEQ ID NO: 2175613 - RNA, 19 nt, Artificial Sequence
  Description of Artificial Sequence: Synthetic oligonucleotide
  Antisense strand to SEQ ID NO: 2175612
accuuuccgaaaccugucc

SEQ ID NO: 2175614 - RNA, 19 nt, Artificial Sequence
  Description of Artificial Sequence: Synthetic oligonucleotide
  Sense strand starting at position 3828 of SEQ ID NO: 1883192
cggaaagguucauuauaga

SEQ ID NO: 2175615 - RNA, 19 nt, Artificial Sequence
  Description of Artificial Sequence: Synthetic oligonucleotide
  Antisense strand to SEQ ID NO: 2175614
ucuauaaugaaccuuuccg

SEQ ID NO: 2175616 - RNA, 19 nt, Artificial Sequence
  Description of Artificial Sequence: Synthetic oligonucleotide
  Sense strand starting at position 3842 of SEQ ID NO: 1883192
auagauauguagucucugu

SEQ ID NO: 2175617 - RNA, 19 nt, Artificial Sequence
  Description of Artificial Sequence: Synthetic oligonucleotide
  Antisense strand to SEQ ID NO: 2175616
acagagacuacauaucuau

SEQ ID NO: 2175618 - RNA, 19 nt, Artificial Sequence
  Description of Artificial Sequence: Synthetic oligonucleotide
  Sense strand starting at position 3853 of SEQ ID NO: 1883192
gucucugucucugauguca

SEQ ID NO: 2175619 - RNA, 19 nt, Artificial Sequence
  Description of Artificial Sequence: Synthetic oligonucleotide
  Antisense strand to SEQ ID NO: 2175618
ugacaucagagacagagac

SEQ ID NO: 2175620 - RNA, 19 nt, Artificial Sequence
  Description of Artificial Sequence: Synthetic oligonucleotide
  Sense strand starting at position 3855 of SEQ ID NO: 1883192
cucugucucugaugucaga

SEQ ID NO: 2175621 - RNA, 19 nt, Artificial Sequence
  Description of Artificial Sequence: Synthetic oligonucleotide
  Antisense strand to SEQ ID NO: 2175620
ucugacaucagagacagag

SEQ ID NO: 2175622 - RNA, 19 nt, Artificial Sequence
  Description of Artificial Sequence: Synthetic oligonucleotide
  Sense strand starting at position 3858 of SEQ ID NO: 1883192
ugucucugaugucagagau

SEQ ID NO: 2175623 - RNA, 19 nt, Artificial Sequence
  Description of Artificial Sequence: Synthetic oligonucleotide
  Antisense strand to SEQ ID NO: 2175622
aucucugacaucagagaca

SEQ ID NO: 2175624 - RNA, 19 nt, Artificial Sequence
  Description of Artificial Sequence: Synthetic oligonucleotide
  Sense strand starting at position 3891 of SEQ ID NO: 1883192
guccuuugaucugcagaac

SEQ ID NO: 2175625 - RNA, 19 nt, Artificial Sequence
  Description of Artificial Sequence: Synthetic oligonucleotide
  Antisense strand to SEQ ID NO: 2175624
guucugcagaucaaaggac

SEQ ID NO: 2175626 - RNA, 19 nt, Artificial Sequence
  Description of Artificial Sequence: Synthetic oligonucleotide
  Sense strand starting at position 3973 of SEQ ID NO: 1883192
ggaguugcagcaugagauc

SEQ ID NO: 2175627 - RNA, 19 nt, Artificial Sequence
  Description of Artificial Sequence: Synthetic oligonucleotide
  Antisense strand to SEQ ID NO: 2175626
gaucucaugcugcaacucc

SEQ ID NO: 2175628 - RNA, 19 nt, Artificial Sequence
  Description of Artificial Sequence: Synthetic oligonucleotide
  Sense strand starting at position 208 of SEQ ID NO: 1883193
gggaguauccugggucacu

SEQ ID NO: 2175629 - RNA, 19 nt, Artificial Sequence
  Description of Artificial Sequence: Synthetic oligonucleotide
  Antisense strand to SEQ ID NO: 2175628
agugacccaggauacuccc

SEQ ID NO: 2175630 - RNA, 19 nt, Artificial Sequence
  Description of Artificial Sequence: Synthetic oligonucleotide
  Sense strand starting at position 209 of SEQ ID NO: 1883193
ggaguauccugggucacug

SEQ ID NO: 2175631 - RNA, 19 nt, Artificial Sequence
  Description of Artificial Sequence: Synthetic oligonucleotide
  Antisense strand to SEQ ID NO: 2175630
cagugacccaggauacucc

SEQ ID NO: 2175632 - RNA, 19 nt, Artificial Sequence
  Description of Artificial Sequence: Synthetic oligonucleotide
  Sense strand starting at position 226 of SEQ ID NO: 1883193
uguagucacccugggaaua

SEQ ID NO: 2175633 - RNA, 19 nt, Artificial Sequence
  Description of Artificial Sequence: Synthetic oligonucleotide
  Antisense strand to SEQ ID NO: 2175632
uauucccagggugacuaca

SEQ ID NO: 2175634 - RNA, 19 nt, Artificial Sequence
  Description of Artificial Sequence: Synthetic oligonucleotide
  Sense strand starting at position 227 of SEQ ID NO: 1883193
guagucacccugggaauaa

SEQ ID NO: 2175635 - RNA, 19 nt, Artificial Sequence
  Description of Artificial Sequence: Synthetic oligonucleotide
  Antisense strand to SEQ ID NO: 2175634
uuauucccagggugacuac

SEQ ID NO: 2175636 - RNA, 19 nt, Artificial Sequence
  Description of Artificial Sequence: Synthetic oligonucleotide
  Sense strand starting at position 239 of SEQ ID NO: 1883193
ggaauaaauuuguagucca

SEQ ID NO: 2175637 - RNA, 19 nt, Artificial Sequence
  Description of Artificial Sequence: Synthetic oligonucleotide
  Antisense strand to SEQ ID NO: 2175636
uggacuacaaauuuauucc

SEQ ID NO: 2175638 - RNA, 19 nt, Artificial Sequence
  Description of Artificial Sequence: Synthetic oligonucleotide
  Sense strand starting at position 264 of SEQ ID NO: 1883193
cuagccucuguccaugaga

SEQ ID NO: 2175639 - RNA, 19 nt, Artificial Sequence
  Description of Artificial Sequence: Synthetic oligonucleotide
  Antisense strand to SEQ ID NO: 2175638
ucucauggacagaggcuag

SEQ ID NO: 2175640 - RNA, 19 nt, Artificial Sequence
  Description of Artificial Sequence: Synthetic oligonucleotide
  Sense strand starting at position 266 of SEQ ID NO: 1883193
agccucuguccaugagaag

SEQ ID NO: 2175641 - RNA, 19 nt, Artificial Sequence
  Description of Artificial Sequence: Synthetic oligonucleotide
  Antisense strand to SEQ ID NO: 2175640
cuucucauggacagaggcu

SEQ ID NO: 2175642 - RNA, 19 nt, Artificial Sequence
  Description of Artificial Sequence: Synthetic oligonucleotide
  Sense strand starting at position 376 of SEQ ID NO: 1883193
gggauagaucccugccuca

SEQ ID NO: 2175643 - RNA, 19 nt, Artificial Sequence
  Description of Artificial Sequence: Synthetic oligonucleotide
  Antisense strand to SEQ ID NO: 2175642
ugaggcagggaucuauccc

SEQ ID NO: 2175644 - RNA, 19 nt, Artificial Sequence
  Description of Artificial Sequence: Synthetic oligonucleotide
  Sense strand starting at position 413 of SEQ ID NO: 1883193
gggcuucccagaggaagua

SEQ ID NO: 2175645 - RNA, 19 nt, Artificial Sequence
  Description of Artificial Sequence: Synthetic oligonucleotide
  Antisense strand to SEQ ID NO: 2175644
uacuuccucugggaagccc

SEQ ID NO: 2175646 - RNA, 19 nt, Artificial Sequence
  Description of Artificial Sequence: Synthetic oligonucleotide
  Sense strand starting at position 453 of SEQ ID NO: 1883193
auuggaaaugcuggugcau

SEQ ID NO: 2175647 - RNA, 19 nt, Artificial Sequence
  Description of Artificial Sequence: Synthetic oligonucleotide
  Antisense strand to SEQ ID NO: 2175646
augcaccagcauuuccaau

SEQ ID NO: 2175648 - RNA, 19 nt, Artificial Sequence
  Description of Artificial Sequence: Synthetic oligonucleotide
  Sense strand starting at position 565 of SEQ ID NO: 1883193
gccuuuaagcucuagacaa

SEQ ID NO: 2175649 - RNA, 19 nt, Artificial Sequence
  Description of Artificial Sequence: Synthetic oligonucleotide
  Antisense strand to SEQ ID NO: 2175648
uugucuagagcuuaaaggc

SEQ ID NO: 2175650 - RNA, 19 nt, Artificial Sequence
  Description of Artificial Sequence: Synthetic oligonucleotide
  Sense strand starting at position 627 of SEQ ID NO: 1883193
gugacucaaccauaagucu

SEQ ID NO: 2175651 - RNA, 19 nt, Artificial Sequence
  Description of Artificial Sequence: Synthetic oligonucleotide
  Antisense strand to SEQ ID NO: 2175650
agacuuaugguugagucac

SEQ ID NO: 2175652 - RNA, 19 nt, Artificial Sequence
  Description of Artificial Sequence: Synthetic oligonucleotide
  Sense strand starting at position 856 of SEQ ID NO: 1883193
gcugaaaggugagugaacu

SEQ ID NO: 2175653 - RNA, 19 nt, Artificial Sequence
  Description of Artificial Sequence: Synthetic oligonucleotide
  Antisense strand to SEQ ID NO: 2175652
aguucacucaccuuucagc

SEQ ID NO: 2175654 - RNA, 19 nt, Artificial Sequence
  Description of Artificial Sequence: Synthetic oligonucleotide
  Sense strand starting at position 947 of SEQ ID NO: 1883193
gggccuuauugccucauuu

SEQ ID NO: 2175655 - RNA, 19 nt, Artificial Sequence
  Description of Artificial Sequence: Synthetic oligonucleotide
  Antisense strand to SEQ ID NO: 2175654
aaaugaggcaauaaggccc

SEQ ID NO: 2175656 - RNA, 19 nt, Artificial Sequence
  Description of Artificial Sequence: Synthetic oligonucleotide
  Sense strand starting at position 1017 of SEQ ID NO: 1883193
aggauaagaucacauaaua

SEQ ID NO: 2175657 - RNA, 19 nt, Artificial Sequence
  Description of Artificial Sequence: Synthetic oligonucleotide
  Antisense strand to SEQ ID NO: 2175656
uauuaugugaucuuauccu

SEQ ID NO: 2175658 - RNA, 19 nt, Artificial Sequence
  Description of Artificial Sequence: Synthetic oligonucleotide
  Sense strand starting at position 1112 of SEQ ID NO: 1883193
cugcuuuggaguuagguau

SEQ ID NO: 2175659 - RNA, 19 nt, Artificial Sequence
  Description of Artificial Sequence: Synthetic oligonucleotide
  Antisense strand to SEQ ID NO: 2175658
auaccuaacuccaaagcag

SEQ ID NO: 2175660 - RNA, 19 nt, Artificial Sequence
  Description of Artificial Sequence: Synthetic oligonucleotide
  Sense strand starting at position 1483 of SEQ ID NO: 1883193
augucuuucuucuuccuga

SEQ ID NO: 2175661 - RNA, 19 nt, Artificial Sequence
  Description of Artificial Sequence: Synthetic oligonucleotide
  Antisense strand to SEQ ID NO: 2175660
ucaggaagaagaaagacau

SEQ ID NO: 2175662 - RNA, 19 nt, Artificial Sequence
  Description of Artificial Sequence: Synthetic oligonucleotide
  Sense strand starting at position 1488 of SEQ ID NO: 1883193
uuucuucuuccugaagaug

SEQ ID NO: 2175663 - RNA, 19 nt, Artificial Sequence
  Description of Artificial Sequence: Synthetic oligonucleotide
  Antisense strand to SEQ ID NO: 2175662
caucuucaggaagaagaaa

SEQ ID NO: 2175664 - RNA, 19 nt, Artificial Sequence
  Description of Artificial Sequence: Synthetic oligonucleotide
  Sense strand starting at position 1729 of SEQ ID NO: 1883193
cucaucaugggcugaguua

SEQ ID NO: 2175665 - RNA, 19 nt, Artificial Sequence
  Description of Artificial Sequence: Synthetic oligonucleotide
  Antisense strand to SEQ ID NO: 2175664
uaacucagcccaugaugag

SEQ ID NO: 2175666 - RNA, 19 nt, Artificial Sequence
  Description of Artificial Sequence: Synthetic oligonucleotide
  Sense strand starting at position 1730 of SEQ ID NO: 1883193
ucaucaugggcugaguuau

SEQ ID NO: 2175667 - RNA, 19 nt, Artificial Sequence
  Description of Artificial Sequence: Synthetic oligonucleotide
  Antisense strand to SEQ ID NO: 2175666
auaacucagcccaugauga

SEQ ID NO: 2175668 - RNA, 19 nt, Artificial Sequence
  Description of Artificial Sequence: Synthetic oligonucleotide
  Sense strand starting at position 1741 of SEQ ID NO: 1883193
ugaguuauguccucccaaa

SEQ ID NO: 2175669 - RNA, 19 nt, Artificial Sequence
  Description of Artificial Sequence: Synthetic oligonucleotide
  Antisense strand to SEQ ID NO: 2175668
uuugggaggacauaacuca

SEQ ID NO: 2175670 - RNA, 19 nt, Artificial Sequence
  Description of Artificial Sequence: Synthetic oligonucleotide
  Sense strand starting at position 1786 of SEQ ID NO: 1883193
aguaccucagaauauaguu

SEQ ID NO: 2175671 - RNA, 19 nt, Artificial Sequence
  Description of Artificial Sequence: Synthetic oligonucleotide
  Antisense strand to SEQ ID NO: 2175670
aacuauauucugagguacu

SEQ ID NO: 2175672 - RNA, 19 nt, Artificial Sequence
  Description of Artificial Sequence: Synthetic oligonucleotide
  Sense strand starting at position 1791 of SEQ ID NO: 1883193
cucagaauauaguuguguu

SEQ ID NO: 2175673 - RNA, 19 nt, Artificial Sequence
  Description of Artificial Sequence: Synthetic oligonucleotide
  Antisense strand to SEQ ID NO: 2175672
aacacaacuauauucugag

SEQ ID NO: 2175674 - RNA, 19 nt, Artificial Sequence
  Description of Artificial Sequence: Synthetic oligonucleotide
  Sense strand starting at position 1792 of SEQ ID NO: 1883193
ucagaauauaguuguguuu

SEQ ID NO: 2175675 - RNA, 19 nt, Artificial Sequence
  Description of Artificial Sequence: Synthetic oligonucleotide
  Antisense strand to SEQ ID NO: 2175674
aaacacaacuauauucuga

SEQ ID NO: 2175676 - RNA, 19 nt, Artificial Sequence
  Description of Artificial Sequence: Synthetic oligonucleotide
  Sense strand starting at position 1795 of SEQ ID NO: 1883193
gaauauaguuguguuugga

SEQ ID NO: 2175677 - RNA, 19 nt, Artificial Sequence
  Description of Artificial Sequence: Synthetic oligonucleotide
  Antisense strand to SEQ ID NO: 2175676
uccaaacacaacuauauuc

SEQ ID NO: 2175678 - RNA, 19 nt, Artificial Sequence
  Description of Artificial Sequence: Synthetic oligonucleotide
  Sense strand starting at position 1798 of SEQ ID NO: 1883193
uauaguuguguuuggagau

SEQ ID NO: 2175679 - RNA, 19 nt, Artificial Sequence
  Description of Artificial Sequence: Synthetic oligonucleotide
  Antisense strand to SEQ ID NO: 2175678
aucuccaaacacaacuaua

SEQ ID NO: 2175680 - RNA, 19 nt, Artificial Sequence
  Description of Artificial Sequence: Synthetic oligonucleotide
  Sense strand starting at position 1813 of SEQ ID NO: 1883193
agauaaggucuugguauua

SEQ ID NO: 2175681 - RNA, 19 nt, Artificial Sequence
  Description of Artificial Sequence: Synthetic oligonucleotide
  Antisense strand to SEQ ID NO: 2175680
uaauaccaagaccuuaucu

SEQ ID NO: 2175682 - RNA, 19 nt, Artificial Sequence
  Description of Artificial Sequence: Synthetic oligonucleotide
  Sense strand starting at position 1860 of SEQ ID NO: 1883193
accugagacuggguacuua

SEQ ID NO: 2175683 - RNA, 19 nt, Artificial Sequence
  Description of Artificial Sequence: Synthetic oligonucleotide
  Antisense strand to SEQ ID NO: 2175682
uaaguacccagucucaggu

SEQ ID NO: 2175684 - RNA, 19 nt, Artificial Sequence
  Description of Artificial Sequence: Synthetic oligonucleotide
  Sense strand starting at position 2189 of SEQ ID NO: 1883193
ugcgaauuauaauucgaca

SEQ ID NO: 2175685 - RNA, 19 nt, Artificial Sequence
  Description of Artificial Sequence: Synthetic oligonucleotide
  Antisense strand to SEQ ID NO: 2175684
ugucgaauuauaauucgca

SEQ ID NO: 2175686 - RNA, 19 nt, Artificial Sequence
  Description of Artificial Sequence: Synthetic oligonucleotide
  Sense strand starting at position 2463 of SEQ ID NO: 1883193
cugcaauugugaguaaaua

SEQ ID NO: 2175687 - RNA, 19 nt, Artificial Sequence
  Description of Artificial Sequence: Synthetic oligonucleotide
  Antisense strand to SEQ ID NO: 2175686
uauuuacucacaauugcag

SEQ ID NO: 2175688 - RNA, 19 nt, Artificial Sequence
  Description of Artificial Sequence: Synthetic oligonucleotide
  Sense strand starting at position 2464 of SEQ ID NO: 1883193
ugcaauugugaguaaauau

SEQ ID NO: 2175689 - RNA, 19 nt, Artificial Sequence
  Description of Artificial Sequence: Synthetic oligonucleotide
  Antisense strand to SEQ ID NO: 2175688
auauuuacucacaauugca

SEQ ID NO: 2175690 - RNA, 19 nt, Artificial Sequence
  Description of Artificial Sequence: Synthetic oligonucleotide
  Sense strand starting at position 2974 of SEQ ID NO: 1883193
agucuuaaccaguaaguaa

SEQ ID NO: 2175691 - RNA, 19 nt, Artificial Sequence
  Description of Artificial Sequence: Synthetic oligonucleotide
  Antisense strand to SEQ ID NO: 2175690
uuacuuacugguuaagacu

SEQ ID NO: 2175692 - RNA, 19 nt, Artificial Sequence
  Description of Artificial Sequence: Synthetic oligonucleotide
  Sense strand starting at position 3061 of SEQ ID NO: 1883193
gccagaagcccuuggagau

SEQ ID NO: 2175693 - RNA, 19 nt, Artificial Sequence
  Description of Artificial Sequence: Synthetic oligonucleotide
  Antisense strand to SEQ ID NO: 2175692
aucuccaagggcuucuggc

SEQ ID NO: 2175694 - RNA, 19 nt, Artificial Sequence
  Description of Artificial Sequence: Synthetic oligonucleotide
  Sense strand starting at position 3062 of SEQ ID NO: 1883193
ccagaagcccuuggagaua

SEQ ID NO: 2175695 - RNA, 19 nt, Artificial Sequence
  Description of Artificial Sequence: Synthetic oligonucleotide
  Antisense strand to SEQ ID NO: 2175694
uaucuccaagggcuucugg

SEQ ID NO: 2175696 - RNA, 19 nt, Artificial Sequence
  Description of Artificial Sequence: Synthetic oligonucleotide
  Sense strand starting at position 3140 of SEQ ID NO: 1883193
ggguguuuacgggaucucu

SEQ ID NO: 2175697 - RNA, 19 nt, Artificial Sequence
  Description of Artificial Sequence: Synthetic oligonucleotide
  Antisense strand to SEQ ID NO: 2175696
agagaucccguaaacaccc

SEQ ID NO: 2175698 - RNA, 19 nt, Artificial Sequence
  Description of Artificial Sequence: Synthetic oligonucleotide
  Sense strand starting at position 3150 of SEQ ID NO: 1883193
gggaucucucuguguuaga

SEQ ID NO: 2175699 - RNA, 19 nt, Artificial Sequence
  Description of Artificial Sequence: Synthetic oligonucleotide
  Antisense strand to SEQ ID NO: 2175698
ucuaacacagagagauccc

SEQ ID NO: 2175700 - RNA, 19 nt, Artificial Sequence
  Description of Artificial Sequence: Synthetic oligonucleotide
  Sense strand starting at position 3151 of SEQ ID NO: 1883193
ggaucucucuguguuagau

SEQ ID NO: 2175701 - RNA, 19 nt, Artificial Sequence
  Description of Artificial Sequence: Synthetic oligonucleotide
  Antisense strand to SEQ ID NO: 2175700
aucuaacacagagagaucc

SEQ ID NO: 2175702 - RNA, 19 nt, Artificial Sequence
  Description of Artificial Sequence: Synthetic oligonucleotide
  Sense strand starting at position 3208 of SEQ ID NO: 1883193
uggauucugcaaugaaucu

SEQ ID NO: 2175703 - RNA, 19 nt, Artificial Sequence
  Description of Artificial Sequence: Synthetic oligonucleotide
  Antisense strand to SEQ ID NO: 2175702
agauucauugcagaaucca

SEQ ID NO: 2175704 - RNA, 19 nt, Artificial Sequence
  Description of Artificial Sequence: Synthetic oligonucleotide
  Sense strand starting at position 3215 of SEQ ID NO: 1883193
ugcaaugaaucuguaguaa

SEQ ID NO: 2175705 - RNA, 19 nt, Artificial Sequence
  Description of Artificial Sequence: Synthetic oligonucleotide
  Antisense strand to SEQ ID NO: 2175704
uuacuacagauucauugca

SEQ ID NO: 2175706 - RNA, 19 nt, Artificial Sequence
  Description of Artificial Sequence: Synthetic oligonucleotide
  Sense strand starting at position 3519 of SEQ ID NO: 1883193
agcucuaaagcugaauuaa

SEQ ID NO: 2175707 - RNA, 19 nt, Artificial Sequence
  Description of Artificial Sequence: Synthetic oligonucleotide
  Antisense strand to SEQ ID NO: 2175706
uuaauucagcuuuagagcu

SEQ ID NO: 2175708 - RNA, 19 nt, Artificial Sequence
  Description of Artificial Sequence: Synthetic oligonucleotide
  Sense strand starting at position 63 of SEQ ID NO: 1883194
gcaaccucugaaggaauua

SEQ ID NO: 2175709 - RNA, 19 nt, Artificial Sequence
  Description of Artificial Sequence: Synthetic oligonucleotide
  Antisense strand to SEQ ID NO: 2175708
uaauuccuucagagguugc

SEQ ID NO: 2175710 - RNA, 19 nt, Artificial Sequence
  Description of Artificial Sequence: Synthetic oligonucleotide
  Sense strand starting at position 137 of SEQ ID NO: 1883194
gguuuaguaaucggaggcu

SEQ ID NO: 2175711 - RNA, 19 nt, Artificial Sequence
  Description of Artificial Sequence: Synthetic oligonucleotide
  Antisense strand to SEQ ID NO: 2175710
agccuccgauuacuaaacc

SEQ ID NO: 2175712 - RNA, 19 nt, Artificial Sequence
  Description of Artificial Sequence: Synthetic oligonucleotide
  Sense strand starting at position 140 of SEQ ID NO: 1883194
uuaguaaucggaggcuuaa

SEQ ID NO: 2175713 - RNA, 19 nt, Artificial Sequence
  Description of Artificial Sequence: Synthetic oligonucleotide
  Antisense strand to SEQ ID NO: 2175712
uuaagccuccgauuacuaa

SEQ ID NO: 2175714 - RNA, 19 nt, Artificial Sequence
  Description of Artificial Sequence: Synthetic oligonucleotide
  Sense strand starting at position 151 of SEQ ID NO: 1883194
aggcuuaaaccaugccuaa

SEQ ID NO: 2175715 - RNA, 19 nt, Artificial Sequence
  Description of Artificial Sequence: Synthetic oligonucleotide
  Antisense strand to SEQ ID NO: 2175714
uuaggcaugguuuaagccu

SEQ ID NO: 2175716 - RNA, 19 nt, Artificial Sequence
  Description of Artificial Sequence: Synthetic oligonucleotide
  Sense strand starting at position 380 of SEQ ID NO: 1883194
gagagaagcuguucucccu

SEQ ID NO: 2175717 - RNA, 19 nt, Artificial Sequence
  Description of Artificial Sequence: Synthetic oligonucleotide
  Antisense strand to SEQ ID NO: 2175716
agggagaacagcuucucuc

SEQ ID NO: 2175718 - RNA, 19 nt, Artificial Sequence
  Description of Artificial Sequence: Synthetic oligonucleotide
  Sense strand starting at position 525 of SEQ ID NO: 1883194
agagaagguucuggaagua

SEQ ID NO: 2175719 - RNA, 19 nt, Artificial Sequence
  Description of Artificial Sequence: Synthetic oligonucleotide
  Antisense strand to SEQ ID NO: 2175718
uacuuccagaaccuucucu

SEQ ID NO: 2175720 - RNA, 19 nt, Artificial Sequence
  Description of Artificial Sequence: Synthetic oligonucleotide
  Sense strand starting at position 534 of SEQ ID NO: 1883194
ucuggaaguaucuagguga

SEQ ID NO: 2175721 - RNA, 19 nt, Artificial Sequence
  Description of Artificial Sequence: Synthetic oligonucleotide
  Antisense strand to SEQ ID NO: 2175720
ucaccuagauacuuccaga

SEQ ID NO: 2175722 - RNA, 19 nt, Artificial Sequence
  Description of Artificial Sequence: Synthetic oligonucleotide
  Sense strand starting at position 537 of SEQ ID NO: 1883194
ggaaguaucuaggugaggu

SEQ ID NO: 2175723 - RNA, 19 nt, Artificial Sequence
  Description of Artificial Sequence: Synthetic oligonucleotide
  Antisense strand to SEQ ID NO: 2175722
accucaccuagauacuucc

SEQ ID NO: 2175724 - RNA, 19 nt, Artificial Sequence
  Description of Artificial Sequence: Synthetic oligonucleotide
  Sense strand starting at position 538 of SEQ ID NO: 1883194
gaaguaucuaggugaggug

SEQ ID NO: 2175725 - RNA, 19 nt, Artificial Sequence
  Description of Artificial Sequence: Synthetic oligonucleotide
  Antisense strand to SEQ ID NO: 2175724
caccucaccuagauacuuc

SEQ ID NO: 2175726 - RNA, 19 nt, Artificial Sequence
  Description of Artificial Sequence: Synthetic oligonucleotide
  Sense strand starting at position 589 of SEQ ID NO: 1883194
cugcuuuaggagggcaaau

SEQ ID NO: 2175727 - RNA, 19 nt, Artificial Sequence
  Description of Artificial Sequence: Synthetic oligonucleotide
  Antisense strand to SEQ ID NO: 2175726
auuugcccuccuaaagcag

SEQ ID NO: 2175728 - RNA, 19 nt, Artificial Sequence
  Description of Artificial Sequence: Synthetic oligonucleotide
  Sense strand starting at position 607 of SEQ ID NO: 1883194
ugaagagccuaagaguuaa

SEQ ID NO: 2175729 - RNA, 19 nt, Artificial Sequence
  Description of Artificial Sequence: Synthetic oligonucleotide
  Antisense strand to SEQ ID NO: 2175728
uuaacucuuaggcucuuca

SEQ ID NO: 2175730 - RNA, 19 nt, Artificial Sequence
  Description of Artificial Sequence: Synthetic oligonucleotide
  Sense strand starting at position 760 of SEQ ID NO: 1883194
agaaguccucaguaagcuu

SEQ ID NO: 2175731 - RNA, 19 nt, Artificial Sequence
  Description of Artificial Sequence: Synthetic oligonucleotide
  Antisense strand to SEQ ID NO: 2175730
aagcuuacugaggacuucu

SEQ ID NO: 2175732 - RNA, 19 nt, Artificial Sequence
  Description of Artificial Sequence: Synthetic oligonucleotide
  Sense strand starting at position 787 of SEQ ID NO: 1883194
acucuuagggcuugauuau

SEQ ID NO: 2175733 - RNA, 19 nt, Artificial Sequence
  Description of Artificial Sequence: Synthetic oligonucleotide
  Antisense strand to SEQ ID NO: 2175732
auaaucaagcccuaagagu

SEQ ID NO: 2175734 - RNA, 19 nt, Artificial Sequence
  Description of Artificial Sequence: Synthetic oligonucleotide
  Sense strand starting at position 788 of SEQ ID NO: 1883194
cucuuagggcuugauuauu

SEQ ID NO: 2175735 - RNA, 19 nt, Artificial Sequence
  Description of Artificial Sequence: Synthetic oligonucleotide
  Antisense strand to SEQ ID NO: 2175734
aauaaucaagcccuaagag

SEQ ID NO: 2175736 - RNA, 19 nt, Artificial Sequence
  Description of Artificial Sequence: Synthetic oligonucleotide
  Sense strand starting at position 797 of SEQ ID NO: 1883194
cuugauuauugugucagga

SEQ ID NO: 2175737 - RNA, 19 nt, Artificial Sequence
  Description of Artificial Sequence: Synthetic oligonucleotide
  Antisense strand to SEQ ID NO: 2175736
uccugacacaauaaucaag

SEQ ID NO: 2175738 - RNA, 19 nt, Artificial Sequence
  Description of Artificial Sequence: Synthetic oligonucleotide
  Sense strand starting at position 799 of SEQ ID NO: 1883194
ugauuauugugucaggaau

SEQ ID NO: 2175739 - RNA, 19 nt, Artificial Sequence
  Description of Artificial Sequence: Synthetic oligonucleotide
  Antisense strand to SEQ ID NO: 2175738
auuccugacacaauaauca

SEQ ID NO: 2175740 - RNA, 19 nt, Artificial Sequence
  Description of Artificial Sequence: Synthetic oligonucleotide
  Sense strand starting at position 897 of SEQ ID NO: 1883194
gcaggcuuccugggcagaa

SEQ ID NO: 2175741 - RNA, 19 nt, Artificial Sequence
  Description of Artificial Sequence: Synthetic oligonucleotide
  Antisense strand to SEQ ID NO: 2175740
uucugcccaggaagccugc

SEQ ID NO: 2175742 - RNA, 19 nt, Artificial Sequence
  Description of Artificial Sequence: Synthetic oligonucleotide
  Sense strand starting at position 995 of SEQ ID NO: 1883194
aauuaaugagcuuaggucu

SEQ ID NO: 2175743 - RNA, 19 nt, Artificial Sequence
  Description of Artificial Sequence: Synthetic oligonucleotide
  Antisense strand to SEQ ID NO: 2175742
agaccuaagcucauuaauu

SEQ ID NO: 2175744 - RNA, 19 nt, Artificial Sequence
  Description of Artificial Sequence: Synthetic oligonucleotide
  Sense strand starting at position 1028 of SEQ ID NO: 1883194
cagcuuggugguuaauaca

SEQ ID NO: 2175745 - RNA, 19 nt, Artificial Sequence
  Description of Artificial Sequence: Synthetic oligonucleotide
  Antisense strand to SEQ ID NO: 2175744
uguauuaaccaccaagcug

SEQ ID NO: 2175746 - RNA, 19 nt, Artificial Sequence
  Description of Artificial Sequence: Synthetic oligonucleotide
  Sense strand starting at position 1115 of SEQ ID NO: 1883194
gggucuagugaugggagga

SEQ ID NO: 2175747 - RNA, 19 nt, Artificial Sequence
  Description of Artificial Sequence: Synthetic oligonucleotide
  Antisense strand to SEQ ID NO: 2175746
uccucccaucacuagaccc

SEQ ID NO: 2175748 - RNA, 19 nt, Artificial Sequence
  Description of Artificial Sequence: Synthetic oligonucleotide
  Sense strand starting at position 1116 of SEQ ID NO: 1883194
ggucuagugaugggaggaa

SEQ ID NO: 2175749 - RNA, 19 nt, Artificial Sequence
  Description of Artificial Sequence: Synthetic oligonucleotide
  Antisense strand to SEQ ID NO: 2175748
uuccucccaucacuagacc

SEQ ID NO: 2175750 - RNA, 19 nt, Artificial Sequence
  Description of Artificial Sequence: Synthetic oligonucleotide
  Sense strand starting at position 1134 of SEQ ID NO: 1883194
aggccugauuugggaagca

SEQ ID NO: 2175751 - RNA, 19 nt, Artificial Sequence
  Description of Artificial Sequence: Synthetic oligonucleotide
  Antisense strand to SEQ ID NO: 2175750
ugcuucccaaaucaggccu

SEQ ID NO: 2175752 - RNA, 19 nt, Artificial Sequence
  Description of Artificial Sequence: Synthetic oligonucleotide
  Sense strand starting at position 1332 of SEQ ID NO: 1883194
cuggaucucugccugaaac

SEQ ID NO: 2175753 - RNA, 19 nt, Artificial Sequence
  Description of Artificial Sequence: Synthetic oligonucleotide
  Antisense strand to SEQ ID NO: 2175752
guuucaggcagagauccag

SEQ ID NO: 2175754 - RNA, 19 nt, Artificial Sequence
  Description of Artificial Sequence: Synthetic oligonucleotide
  Sense strand starting at position 1333 of SEQ ID NO: 1883194
uggaucucugccugaaacu

SEQ ID NO: 2175755 - RNA, 19 nt, Artificial Sequence
  Description of Artificial Sequence: Synthetic oligonucleotide
  Antisense strand to SEQ ID NO: 2175754
aguuucaggcagagaucca

SEQ ID NO: 2175756 - RNA, 19 nt, Artificial Sequence
  Description of Artificial Sequence: Synthetic oligonucleotide
  Sense strand starting at position 1412 of SEQ ID NO: 1883194
uccgauagagcuugugaac

SEQ ID NO: 2175757 - RNA, 19 nt, Artificial Sequence
  Description of Artificial Sequence: Synthetic oligonucleotide
  Antisense strand to SEQ ID NO: 2175756
guucacaagcucuaucgga

SEQ ID NO: 2175758 - RNA, 19 nt, Artificial Sequence
  Description of Artificial Sequence: Synthetic oligonucleotide
  Sense strand starting at position 1444 of SEQ ID NO: 1883194
gcuccuucuuguccacaua

SEQ ID NO: 2175759 - RNA, 19 nt, Artificial Sequence
  Description of Artificial Sequence: Synthetic oligonucleotide
  Antisense strand to SEQ ID NO: 2175758
uauguggacaagaaggagc

SEQ ID NO: 2175760 - RNA, 19 nt, Artificial Sequence
  Description of Artificial Sequence: Synthetic oligonucleotide
  Sense strand starting at position 1578 of SEQ ID NO: 1883194
acaauauauccgcagucca

SEQ ID NO: 2175761 - RNA, 19 nt, Artificial Sequence
  Description of Artificial Sequence: Synthetic oligonucleotide
  Antisense strand to SEQ ID NO: 2175760
uggacugcggauauauugu

SEQ ID NO: 2175762 - RNA, 19 nt, Artificial Sequence
  Description of Artificial Sequence: Synthetic oligonucleotide
  Sense strand starting at position 1614 of SEQ ID NO: 1883194
ccagucucuggaugccaaa

SEQ ID NO: 2175763 - RNA, 19 nt, Artificial Sequence
  Description of Artificial Sequence: Synthetic oligonucleotide
  Antisense strand to SEQ ID NO: 2175762
uuuggcauccagagacugg

SEQ ID NO: 2175764 - RNA, 19 nt, Artificial Sequence
  Description of Artificial Sequence: Synthetic oligonucleotide
  Sense strand starting at position 1697 of SEQ ID NO: 1883194
gguguugacccacauacaa

SEQ ID NO: 2175765 - RNA, 19 nt, Artificial Sequence
  Description of Artificial Sequence: Synthetic oligonucleotide
  Antisense strand to SEQ ID NO: 2175764
uuguaugugggucaacacc

SEQ ID NO: 2175766 - RNA, 19 nt, Artificial Sequence
  Description of Artificial Sequence: Synthetic oligonucleotide
  Sense strand starting at position 1850 of SEQ ID NO: 1883194
cccugagucuguuugcauc

SEQ ID NO: 2175767 - RNA, 19 nt, Artificial Sequence
  Description of Artificial Sequence: Synthetic oligonucleotide
  Antisense strand to SEQ ID NO: 2175766
gaugcaaacagacucaggg

SEQ ID NO: 2175768 - RNA, 19 nt, Artificial Sequence
  Description of Artificial Sequence: Synthetic oligonucleotide
  Sense strand starting at position 2086 of SEQ ID NO: 1883194
gccuuaauuguauggacau

SEQ ID NO: 2175769 - RNA, 19 nt, Artificial Sequence
  Description of Artificial Sequence: Synthetic oligonucleotide
  Antisense strand to SEQ ID NO: 2175768
auguccauacaauuaaggc

SEQ ID NO: 2175770 - RNA, 19 nt, Artificial Sequence
  Description of Artificial Sequence: Synthetic oligonucleotide
  Sense strand starting at position 2619 of SEQ ID NO: 1883194
cucugcuucgcccaggaaa

SEQ ID NO: 2175771 - RNA, 19 nt, Artificial Sequence
  Description of Artificial Sequence: Synthetic oligonucleotide
  Antisense strand to SEQ ID NO: 2175770
uuuccugggcgaagcagag

SEQ ID NO: 2175772 - RNA, 19 nt, Artificial Sequence
  Description of Artificial Sequence: Synthetic oligonucleotide
  Sense strand starting at position 2987 of SEQ ID NO: 1883194
ccucaucagcuuugucaag

SEQ ID NO: 2175773 - RNA, 19 nt, Artificial Sequence
  Description of Artificial Sequence: Synthetic oligonucleotide
  Antisense strand to SEQ ID NO: 2175772
cuugacaaagcugaugagg

SEQ ID NO: 2175774 - RNA, 19 nt, Artificial Sequence
  Description of Artificial Sequence: Synthetic oligonucleotide
  Sense strand starting at position 3001 of SEQ ID NO: 1883194
ucaagucuugcauacgcua

SEQ ID NO: 2175775 - RNA, 19 nt, Artificial Sequence
  Description of Artificial Sequence: Synthetic oligonucleotide
  Antisense strand to SEQ ID NO: 2175774
uagcguaugcaagacuuga

SEQ ID NO: 2175776 - RNA, 19 nt, Artificial Sequence
  Description of Artificial Sequence: Synthetic oligonucleotide
  Sense strand starting at position 3024 of SEQ ID NO: 1883194
gcuaaugaccuagauagcu

SEQ ID NO: 2175777 - RNA, 19 nt, Artificial Sequence
  Description of Artificial Sequence: Synthetic oligonucleotide
  Antisense strand to SEQ ID NO: 2175776
agcuaucuaggucauuagc

SEQ ID NO: 2175778 - RNA, 19 nt, Artificial Sequence
  Description of Artificial Sequence: Synthetic oligonucleotide
  Sense strand starting at position 3193 of SEQ ID NO: 1883194
cgggcuuuaccagguaaag

SEQ ID NO: 2175779 - RNA, 19 nt, Artificial Sequence
  Description of Artificial Sequence: Synthetic oligonucleotide
  Antisense strand to SEQ ID NO: 2175778
cuuuaccugguaaagcccg

SEQ ID NO: 2175780 - RNA, 19 nt, Artificial Sequence
  Description of Artificial Sequence: Synthetic oligonucleotide
  Sense strand starting at position 3230 of SEQ ID NO: 1883194
aggucacucguguauaaug

SEQ ID NO: 2175781 - RNA, 19 nt, Artificial Sequence
  Description of Artificial Sequence: Synthetic oligonucleotide
  Antisense strand to SEQ ID NO: 2175780
cauuauacacgagugaccu

SEQ ID NO: 2175782 - RNA, 19 nt, Artificial Sequence
  Description of Artificial Sequence: Synthetic oligonucleotide
  Sense strand starting at position 3404 of SEQ ID NO: 1883194
ugugcacggacaugucaau

SEQ ID NO: 2175783 - RNA, 19 nt, Artificial Sequence
  Description of Artificial Sequence: Synthetic oligonucleotide
  Antisense strand to SEQ ID NO: 2175782
auugacauguccgugcaca

SEQ ID NO: 2175784 - RNA, 19 nt, Artificial Sequence
  Description of Artificial Sequence: Synthetic oligonucleotide
  Sense strand starting at position 3459 of SEQ ID NO: 1883194
cccgaauucucauucccag

SEQ ID NO: 2175785 - RNA, 19 nt, Artificial Sequence
  Description of Artificial Sequence: Synthetic oligonucleotide
  Antisense strand to SEQ ID NO: 2175784
cugggaaugagaauucggg

SEQ ID NO: 2175786 - RNA, 19 nt, Artificial Sequence
  Description of Artificial Sequence: Synthetic oligonucleotide
  Sense strand starting at position 3774 of SEQ ID NO: 1883194
cuacguagacacugugaaa

SEQ ID NO: 2175787 - RNA, 19 nt, Artificial Sequence
  Description of Artificial Sequence: Synthetic oligonucleotide
  Antisense strand to SEQ ID NO: 2175786
uuucacagugucuacguag

SEQ ID NO: 2175788 - RNA, 19 nt, Artificial Sequence
  Description of Artificial Sequence: Synthetic oligonucleotide
  Sense strand starting at position 131 of SEQ ID NO: 1883195
ccagacagguuguuuaaug

SEQ ID NO: 2175789 - RNA, 19 nt, Artificial Sequence
  Description of Artificial Sequence: Synthetic oligonucleotide
  Antisense strand to SEQ ID NO: 2175788
cauuaaacaaccugucugg

SEQ ID NO: 2175790 - RNA, 19 nt, Artificial Sequence
  Description of Artificial Sequence: Synthetic oligonucleotide
  Sense strand starting at position 272 of SEQ ID NO: 1883195
ucugcauuaagguggagau

SEQ ID NO: 2175791 - RNA, 19 nt, Artificial Sequence
  Description of Artificial Sequence: Synthetic oligonucleotide
  Antisense strand to SEQ ID NO: 2175790
aucuccaccuuaaugcaga

SEQ ID NO: 2175792 - RNA, 19 nt, Artificial Sequence
  Description of Artificial Sequence: Synthetic oligonucleotide
  Sense strand starting at position 273 of SEQ ID NO: 1883195
cugcauuaagguggagaua

SEQ ID NO: 2175793 - RNA, 19 nt, Artificial Sequence
  Description of Artificial Sequence: Synthetic oligonucleotide
  Antisense strand to SEQ ID NO: 2175792
uaucuccaccuuaaugcag

SEQ ID NO: 2175794 - RNA, 19 nt, Artificial Sequence
  Description of Artificial Sequence: Synthetic oligonucleotide
  Sense strand starting at position 326 of SEQ ID NO: 1883195
gaaggcugugcuuagaaug

SEQ ID NO: 2175795 - RNA, 19 nt, Artificial Sequence
  Description of Artificial Sequence: Synthetic oligonucleotide
  Antisense strand to SEQ ID NO: 2175794
cauucuaagcacagccuuc

SEQ ID NO: 2175796 - RNA, 19 nt, Artificial Sequence
  Description of Artificial Sequence: Synthetic oligonucleotide
  Sense strand starting at position 463 of SEQ ID NO: 1883195
ucucuuuguccugaagcau

SEQ ID NO: 2175797 - RNA, 19 nt, Artificial Sequence
  Description of Artificial Sequence: Synthetic oligonucleotide
  Antisense strand to SEQ ID NO: 2175796
augcuucaggacaaagaga

SEQ ID NO: 2175798 - RNA, 19 nt, Artificial Sequence
  Description of Artificial Sequence: Synthetic oligonucleotide
  Sense strand starting at position 477 of SEQ ID NO: 1883195
agcauaguggcuuaacuuu

SEQ ID NO: 2175799 - RNA, 19 nt, Artificial Sequence
  Description of Artificial Sequence: Synthetic oligonucleotide
  Antisense strand to SEQ ID NO: 2175798
aaaguuaagccacuaugcu

SEQ ID NO: 2175800 - RNA, 19 nt, Artificial Sequence
  Description of Artificial Sequence: Synthetic oligonucleotide
  Sense strand starting at position 545 of SEQ ID NO: 1883195
ccaguuaauagauguguua

SEQ ID NO: 2175801 - RNA, 19 nt, Artificial Sequence
  Description of Artificial Sequence: Synthetic oligonucleotide
  Antisense strand to SEQ ID NO: 2175800
uaacacaucuauuaacugg

SEQ ID NO: 2175802 - RNA, 19 nt, Artificial Sequence
  Description of Artificial Sequence: Synthetic oligonucleotide
  Sense strand starting at position 557 of SEQ ID NO: 1883195
uguguuagccuucuaugcu

SEQ ID NO: 2175803 - RNA, 19 nt, Artificial Sequence
  Description of Artificial Sequence: Synthetic oligonucleotide
  Antisense strand to SEQ ID NO: 2175802
agcauagaaggcuaacaca

SEQ ID NO: 2175804 - RNA, 19 nt, Artificial Sequence
  Description of Artificial Sequence: Synthetic oligonucleotide
  Sense strand starting at position 565 of SEQ ID NO: 1883195
ccuucuaugcuggaguuau

SEQ ID NO: 2175805 - RNA, 19 nt, Artificial Sequence
  Description of Artificial Sequence: Synthetic oligonucleotide
  Antisense strand to SEQ ID NO: 2175804
auaacuccagcauagaagg

SEQ ID NO: 2175806 - RNA, 19 nt, Artificial Sequence
  Description of Artificial Sequence: Synthetic oligonucleotide
  Sense strand starting at position 761 of SEQ ID NO: 1883195
uggcaaggauguuuauaaa

SEQ ID NO: 2175807 - RNA, 19 nt, Artificial Sequence
  Description of Artificial Sequence: Synthetic oligonucleotide
  Antisense strand to SEQ ID NO: 2175806
uuuauaaacauccuugcca

SEQ ID NO: 2175808 - RNA, 19 nt, Artificial Sequence
  Description of Artificial Sequence: Synthetic oligonucleotide
  Sense strand starting at position 842 of SEQ ID NO: 1883195
augccaugcuuaccaagaa

SEQ ID NO: 2175809 - RNA, 19 nt, Artificial Sequence
  Description of Artificial Sequence: Synthetic oligonucleotide
  Antisense strand to SEQ ID NO: 2175808
uucuugguaagcauggcau

SEQ ID NO: 2175810 - RNA, 19 nt, Artificial Sequence
  Description of Artificial Sequence: Synthetic oligonucleotide
  Sense strand starting at position 869 of SEQ ID NO: 1883195
agcaaagguccuuaaauau

SEQ ID NO: 2175811 - RNA, 19 nt, Artificial Sequence
  Description of Artificial Sequence: Synthetic oligonucleotide
  Antisense strand to SEQ ID NO: 2175810
auauuuaaggaccuuugcu

SEQ ID NO: 2175812 - RNA, 19 nt, Artificial Sequence
  Description of Artificial Sequence: Synthetic oligonucleotide
  Sense strand starting at position 888 of SEQ ID NO: 1883195
cugaauuagcucugacacu

SEQ ID NO: 2175813 - RNA, 19 nt, Artificial Sequence
  Description of Artificial Sequence: Synthetic oligonucleotide
  Antisense strand to SEQ ID NO: 2175812
agugucagagcuaauucag

SEQ ID NO: 2175814 - RNA, 19 nt, Artificial Sequence
  Description of Artificial Sequence: Synthetic oligonucleotide
  Sense strand starting at position 928 of SEQ ID NO: 1883195
acaacucuugcguaagacu

SEQ ID NO: 2175815 - RNA, 19 nt, Artificial Sequence
  Description of Artificial Sequence: Synthetic oligonucleotide
  Antisense strand to SEQ ID NO: 2175814
agucuuacgcaagaguugu

SEQ ID NO: 2175816 - RNA, 19 nt, Artificial Sequence
  Description of Artificial Sequence: Synthetic oligonucleotide
  Sense strand starting at position 935 of SEQ ID NO: 1883195
uugcguaagacuuauguaa

SEQ ID NO: 2175817 - RNA, 19 nt, Artificial Sequence
  Description of Artificial Sequence: Synthetic oligonucleotide
  Antisense strand to SEQ ID NO: 2175816
uuacauaagucuuacgcaa

SEQ ID NO: 2175818 - RNA, 19 nt, Artificial Sequence
  Description of Artificial Sequence: Synthetic oligonucleotide
  Sense strand starting at position 947 of SEQ ID NO: 1883195
uauguaagagcuuagaugu

SEQ ID NO: 2175819 - RNA, 19 nt, Artificial Sequence
  Description of Artificial Sequence: Synthetic oligonucleotide
  Antisense strand to SEQ ID NO: 2175818
acaucuaagcucuuacaua

SEQ ID NO: 2175820 - RNA, 19 nt, Artificial Sequence
  Description of Artificial Sequence: Synthetic oligonucleotide
  Sense strand starting at position 1122 of SEQ ID NO: 1883195
uaguguuugcuacacauag

SEQ ID NO: 2175821 - RNA, 19 nt, Artificial Sequence
  Description of Artificial Sequence: Synthetic oligonucleotide
  Antisense strand to SEQ ID NO: 2175820
cuauguguagcaaacacua

SEQ ID NO: 2175822 - RNA, 19 nt, Artificial Sequence
  Description of Artificial Sequence: Synthetic oligonucleotide
  Sense strand starting at position 1358 of SEQ ID NO: 1883195
ucauuauaugcugaaagug

SEQ ID NO: 2175823 - RNA, 19 nt, Artificial Sequence
  Description of Artificial Sequence: Synthetic oligonucleotide
  Antisense strand to SEQ ID NO: 2175822
cacuuucagcauauaauga

SEQ ID NO: 2175824 - RNA, 19 nt, Artificial Sequence
  Description of Artificial Sequence: Synthetic oligonucleotide
  Sense strand starting at position 1449 of SEQ ID NO: 1883195
uggucucuaccauaagcuu

SEQ ID NO: 2175825 - RNA, 19 nt, Artificial Sequence
  Description of Artificial Sequence: Synthetic oligonucleotide
  Antisense strand to SEQ ID NO: 2175824
aagcuuaugguagagacca

SEQ ID NO: 2175826 - RNA, 19 nt, Artificial Sequence
  Description of Artificial Sequence: Synthetic oligonucleotide
  Sense strand starting at position 1467 of SEQ ID NO: 1883195
uuugcuugguucucauuua

SEQ ID NO: 2175827 - RNA, 19 nt, Artificial Sequence
  Description of Artificial Sequence: Synthetic oligonucleotide
  Antisense strand to SEQ ID NO: 2175826
uaaaugagaaccaagcaaa

SEQ ID NO: 2175828 - RNA, 19 nt, Artificial Sequence
  Description of Artificial Sequence: Synthetic oligonucleotide
  Sense strand starting at position 1527 of SEQ ID NO: 1883195
cacauuccucgugggacua

SEQ ID NO: 2175829 - RNA, 19 nt, Artificial Sequence
  Description of Artificial Sequence: Synthetic oligonucleotide
  Antisense strand to SEQ ID NO: 2175828
uagucccacgaggaaugug

SEQ ID NO: 2175830 - RNA, 19 nt, Artificial Sequence
  Description of Artificial Sequence: Synthetic oligonucleotide
  Sense strand starting at position 1537 of SEQ ID NO: 1883195
gugggacuauuugauauag

SEQ ID NO: 2175831 - RNA, 19 nt, Artificial Sequence
  Description of Artificial Sequence: Synthetic oligonucleotide
  Antisense strand to SEQ ID NO: 2175830
cuauaucaaauagucccac

SEQ ID NO: 2175832 - RNA, 19 nt, Artificial Sequence
  Description of Artificial Sequence: Synthetic oligonucleotide
  Sense strand starting at position 1539 of SEQ ID NO: 1883195
gggacuauuugauauagag

SEQ ID NO: 2175833 - RNA, 19 nt, Artificial Sequence
  Description of Artificial Sequence: Synthetic oligonucleotide
  Antisense strand to SEQ ID NO: 2175832
cucuauaucaaauaguccc

SEQ ID NO: 2175834 - RNA, 19 nt, Artificial Sequence
  Description of Artificial Sequence: Synthetic oligonucleotide
  Sense strand starting at position 1664 of SEQ ID NO: 1883195
ucuauuguaagaugggaau

SEQ ID NO: 2175835 - RNA, 19 nt, Artificial Sequence
  Description of Artificial Sequence: Synthetic oligonucleotide
  Antisense strand to SEQ ID NO: 2175834
auucccaucuuacaauaga

SEQ ID NO: 2175836 - RNA, 19 nt, Artificial Sequence
  Description of Artificial Sequence: Synthetic oligonucleotide
  Sense strand starting at position 1708 of SEQ ID NO: 1883195
ugugaagauuuagauguaa

SEQ ID NO: 2175837 - RNA, 19 nt, Artificial Sequence
  Description of Artificial Sequence: Synthetic oligonucleotide
  Antisense strand to SEQ ID NO: 2175836
uuacaucuaaaucuucaca

SEQ ID NO: 2175838 - RNA, 19 nt, Artificial Sequence
  Description of Artificial Sequence: Synthetic oligonucleotide
  Sense strand starting at position 1801 of SEQ ID NO: 1883195
uaucaagaagcagguauua

SEQ ID NO: 2175839 - RNA, 19 nt, Artificial Sequence
  Description of Artificial Sequence: Synthetic oligonucleotide
  Antisense strand to SEQ ID NO: 2175838
uaauaccugcuucuugaua

SEQ ID NO: 2175840 - RNA, 19 nt, Artificial Sequence
  Description of Artificial Sequence: Synthetic oligonucleotide
  Sense strand starting at position 1814 of SEQ ID NO: 1883195
guauuauuguuaccuggga

SEQ ID NO: 2175841 - RNA, 19 nt, Artificial Sequence
  Description of Artificial Sequence: Synthetic oligonucleotide
  Antisense strand to SEQ ID NO: 2175840
ucccagguaacaauaauac

SEQ ID NO: 2175842 - RNA, 19 nt, Artificial Sequence
  Description of Artificial Sequence: Synthetic oligonucleotide
  Sense strand starting at position 1815 of SEQ ID NO: 1883195
uauuauuguuaccugggau

SEQ ID NO: 2175843 - RNA, 19 nt, Artificial Sequence
  Description of Artificial Sequence: Synthetic oligonucleotide
  Antisense strand to SEQ ID NO: 2175842
aucccagguaacaauaaua

SEQ ID NO: 2175844 - RNA, 19 nt, Artificial Sequence
  Description of Artificial Sequence: Synthetic oligonucleotide
  Sense strand starting at position 1818 of SEQ ID NO: 1883195
uauuguuaccugggaucuu

SEQ ID NO: 2175845 - RNA, 19 nt, Artificial Sequence
  Description of Artificial Sequence: Synthetic oligonucleotide
  Antisense strand to SEQ ID NO: 2175844
aagaucccagguaacaaua

SEQ ID NO: 2175846 - RNA, 19 nt, Artificial Sequence
  Description of Artificial Sequence: Synthetic oligonucleotide
  Sense strand starting at position 2015 of SEQ ID NO: 1883195
aagugaaauuggcucuucu

SEQ ID NO: 2175847 - RNA, 19 nt, Artificial Sequence
  Description of Artificial Sequence: Synthetic oligonucleotide
  Antisense strand to SEQ ID NO: 2175846
agaagagccaauuucacuu

SEQ ID NO: 2175848 - RNA, 19 nt, Artificial Sequence
  Description of Artificial Sequence: Synthetic oligonucleotide
  Sense strand starting at position 2022 of SEQ ID NO: 1883195
auuggcucuucuuuacaga

SEQ ID NO: 2175849 - RNA, 19 nt, Artificial Sequence
  Description of Artificial Sequence: Synthetic oligonucleotide
  Antisense strand to SEQ ID NO: 2175848
ucuguaaagaagagccaau

SEQ ID NO: 2175850 - RNA, 19 nt, Artificial Sequence
  Description of Artificial Sequence: Synthetic oligonucleotide
  Sense strand starting at position 2059 of SEQ ID NO: 1883195
guuuguugggaggaguuga

SEQ ID NO: 2175851 - RNA, 19 nt, Artificial Sequence
  Description of Artificial Sequence: Synthetic oligonucleotide
  Antisense strand to SEQ ID NO: 2175850
ucaacuccucccaacaaac

SEQ ID NO: 2175852 - RNA, 19 nt, Artificial Sequence
  Description of Artificial Sequence: Synthetic oligonucleotide
  Sense strand starting at position 2085 of SEQ ID NO: 1883195
cuguguuugagugacaagu

SEQ ID NO: 2175853 - RNA, 19 nt, Artificial Sequence
  Description of Artificial Sequence: Synthetic oligonucleotide
  Antisense strand to SEQ ID NO: 2175852
acuugucacucaaacacag

SEQ ID NO: 2175854 - RNA, 19 nt, Artificial Sequence
  Description of Artificial Sequence: Synthetic oligonucleotide
  Sense strand starting at position 2093 of SEQ ID NO: 1883195
gagugacaaguugauguua

SEQ ID NO: 2175855 - RNA, 19 nt, Artificial Sequence
  Description of Artificial Sequence: Synthetic oligonucleotide
  Antisense strand to SEQ ID NO: 2175854
uaacaucaacuugucacuc

SEQ ID NO: 2175856 - RNA, 19 nt, Artificial Sequence
  Description of Artificial Sequence: Synthetic oligonucleotide
  Sense strand starting at position 3166 of SEQ ID NO: 1883195
gaaugcuggcaugaguuaa

SEQ ID NO: 2175857 - RNA, 19 nt, Artificial Sequence
  Description of Artificial Sequence: Synthetic oligonucleotide
  Antisense strand to SEQ ID NO: 2175856
uuaacucaugccagcauuc

SEQ ID NO: 2175858 - RNA, 19 nt, Artificial Sequence
  Description of Artificial Sequence: Synthetic oligonucleotide
  Sense strand starting at position 3200 of SEQ ID NO: 1883195
uuugaaaggcaugauugua

SEQ ID NO: 2175859 - RNA, 19 nt, Artificial Sequence
  Description of Artificial Sequence: Synthetic oligonucleotide
  Antisense strand to SEQ ID NO: 2175858
uacaaucaugccuuucaaa

SEQ ID NO: 2175860 - RNA, 19 nt, Artificial Sequence
  Description of Artificial Sequence: Synthetic oligonucleotide
  Sense strand starting at position 3370 of SEQ ID NO: 1883195
guccuuccugaauggauua

SEQ ID NO: 2175861 - RNA, 19 nt, Artificial Sequence
  Description of Artificial Sequence: Synthetic oligonucleotide
  Antisense strand to SEQ ID NO: 2175860
uaauccauucaggaaggac

SEQ ID NO: 2175862 - RNA, 19 nt, Artificial Sequence
  Description of Artificial Sequence: Synthetic oligonucleotide
  Sense strand starting at position 3498 of SEQ ID NO: 1883195
ugugaagugccugcuucuu

SEQ ID NO: 2175863 - RNA, 19 nt, Artificial Sequence
  Description of Artificial Sequence: Synthetic oligonucleotide
  Antisense strand to SEQ ID NO: 2175862
aagaagcaggcacuucaca

SEQ ID NO: 2175864 - RNA, 19 nt, Artificial Sequence
  Description of Artificial Sequence: Synthetic oligonucleotide
  Sense strand starting at position 3535 of SEQ ID NO: 1883195
uguaacuuuccugagguca

SEQ ID NO: 2175865 - RNA, 19 nt, Artificial Sequence
  Description of Artificial Sequence: Synthetic oligonucleotide
  Antisense strand to SEQ ID NO: 2175864
ugaccucaggaaaguuaca

SEQ ID NO: 2175866 - RNA, 19 nt, Artificial Sequence
  Description of Artificial Sequence: Synthetic oligonucleotide
  Sense strand starting at position 3888 of SEQ ID NO: 1883195
gucguaaauuuggccaguu

SEQ ID NO: 2175867 - RNA, 19 nt, Artificial Sequence
  Description of Artificial Sequence: Synthetic oligonucleotide
  Antisense strand to SEQ ID NO: 2175866
aacuggccaaauuuacgac

SEQ ID NO: 2175868 - RNA, 19 nt, Artificial Sequence
  Description of Artificial Sequence: Synthetic oligonucleotide
  Sense strand starting at position 46 of SEQ ID NO: 1883196
agaugacagcacugaguaa

SEQ ID NO: 2175869 - RNA, 19 nt, Artificial Sequence
  Description of Artificial Sequence: Synthetic oligonucleotide
  Antisense strand to SEQ ID NO: 2175868
uuacucagugcugucaucu

SEQ ID NO: 2175870 - RNA, 19 nt, Artificial Sequence
  Description of Artificial Sequence: Synthetic oligonucleotide
  Sense strand starting at position 242 of SEQ ID NO: 1883196
ucagcaucugaguagggau

SEQ ID NO: 2175871 - RNA, 19 nt, Artificial Sequence
  Description of Artificial Sequence: Synthetic oligonucleotide
  Antisense strand to SEQ ID NO: 2175870
aucccuacucagaugcuga

SEQ ID NO: 2175872 - RNA, 19 nt, Artificial Sequence
  Description of Artificial Sequence: Synthetic oligonucleotide
  Sense strand starting at position 244 of SEQ ID NO: 1883196
agcaucugaguagggauua

SEQ ID NO: 2175873 - RNA, 19 nt, Artificial Sequence
  Description of Artificial Sequence: Synthetic oligonucleotide
  Antisense strand to SEQ ID NO: 2175872
uaaucccuacucagaugcu

SEQ ID NO: 2175874 - RNA, 19 nt, Artificial Sequence
  Description of Artificial Sequence: Synthetic oligonucleotide
  Sense strand starting at position 254 of SEQ ID NO: 1883196
uagggauuauaggcuaaac

SEQ ID NO: 2175875 - RNA, 19 nt, Artificial Sequence
  Description of Artificial Sequence: Synthetic oligonucleotide
  Antisense strand to SEQ ID NO: 2175874
guuuagccuauaaucccua

SEQ ID NO: 2175876 - RNA, 19 nt, Artificial Sequence
  Description of Artificial Sequence: Synthetic oligonucleotide
  Sense strand starting at position 385 of SEQ ID NO: 1883196
uugggauuacaaugucuuu

SEQ ID NO: 2175877 - RNA, 19 nt, Artificial Sequence
  Description of Artificial Sequence: Synthetic oligonucleotide
  Antisense strand to SEQ ID NO: 2175876
aaagacauuguaaucccaa

SEQ ID NO: 2175878 - RNA, 19 nt, Artificial Sequence
  Description of Artificial Sequence: Synthetic oligonucleotide
  Sense strand starting at position 475 of SEQ ID NO: 1883196
uugcaaugauugcuacaaa

SEQ ID NO: 2175879 - RNA, 19 nt, Artificial Sequence
  Description of Artificial Sequence: Synthetic oligonucleotide
  Antisense strand to SEQ ID NO: 2175878
uuuguagcaaucauugcaa

SEQ ID NO: 2175880 - RNA, 19 nt, Artificial Sequence
  Description of Artificial Sequence: Synthetic oligonucleotide
  Sense strand starting at position 589 of SEQ ID NO: 1883196
aguuauauacagcagaguu

SEQ ID NO: 2175881 - RNA, 19 nt, Artificial Sequence
  Description of Artificial Sequence: Synthetic oligonucleotide
  Antisense strand to SEQ ID NO: 2175880
aacucugcuguauauaacu

SEQ ID NO: 2175882 - RNA, 19 nt, Artificial Sequence
  Description of Artificial Sequence: Synthetic oligonucleotide
  Sense strand starting at position 821 of SEQ ID NO: 1883196
cagcauucucagcagagga

SEQ ID NO: 2175883 - RNA, 19 nt, Artificial Sequence
  Description of Artificial Sequence: Synthetic oligonucleotide
  Antisense strand to SEQ ID NO: 2175882
uccucugcugagaaugcug

SEQ ID NO: 2175884 - RNA, 19 nt, Artificial Sequence
  Description of Artificial Sequence: Synthetic oligonucleotide
  Sense strand starting at position 892 of SEQ ID NO: 1883196
ggcuacagugucuagauca

SEQ ID NO: 2175885 - RNA, 19 nt, Artificial Sequence
  Description of Artificial Sequence: Synthetic oligonucleotide
  Antisense strand to SEQ ID NO: 2175884
ugaucuagacacuguagcc

SEQ ID NO: 2175886 - RNA, 19 nt, Artificial Sequence
  Description of Artificial Sequence: Synthetic oligonucleotide
  Sense strand starting at position 928 of SEQ ID NO: 1883196
agugguacuaggugacaua

SEQ ID NO: 2175887 - RNA, 19 nt, Artificial Sequence
  Description of Artificial Sequence: Synthetic oligonucleotide
  Antisense strand to SEQ ID NO: 2175886
uaugucaccuaguaccacu

SEQ ID NO: 2175888 - RNA, 19 nt, Artificial Sequence
  Description of Artificial Sequence: Synthetic oligonucleotide
  Sense strand starting at position 929 of SEQ ID NO: 1883196
gugguacuaggugacauaa

SEQ ID NO: 2175889 - RNA, 19 nt, Artificial Sequence
  Description of Artificial Sequence: Synthetic oligonucleotide
  Antisense strand to SEQ ID NO: 2175888
uuaugucaccuaguaccac

SEQ ID NO: 2175890 - RNA, 19 nt, Artificial Sequence
  Description of Artificial Sequence: Synthetic oligonucleotide
  Sense strand starting at position 987 of SEQ ID NO: 1883196
ugugaagauuugggaagaa

SEQ ID NO: 2175891 - RNA, 19 nt, Artificial Sequence
  Description of Artificial Sequence: Synthetic oligonucleotide
  Antisense strand to SEQ ID NO: 2175890
uucuucccaaaucuucaca

SEQ ID NO: 2175892 - RNA, 19 nt, Artificial Sequence
  Description of Artificial Sequence: Synthetic oligonucleotide
  Sense strand starting at position 1010 of SEQ ID NO: 1883196
augaguaauguauacagca

SEQ ID NO: 2175893 - RNA, 19 nt, Artificial Sequence
  Description of Artificial Sequence: Synthetic oligonucleotide
  Antisense strand to SEQ ID NO: 2175892
ugcuguauacauuacucau

SEQ ID NO: 2175894 - RNA, 19 nt, Artificial Sequence
  Description of Artificial Sequence: Synthetic oligonucleotide
  Sense strand starting at position 1093 of SEQ ID NO: 1883196
ccauuuaccuggucauugu

SEQ ID NO: 2175895 - RNA, 19 nt, Artificial Sequence
  Description of Artificial Sequence: Synthetic oligonucleotide
  Antisense strand to SEQ ID NO: 2175894
acaaugaccagguaaaugg

SEQ ID NO: 2175896 - RNA, 19 nt, Artificial Sequence
  Description of Artificial Sequence: Synthetic oligonucleotide
  Sense strand starting at position 1103 of SEQ ID NO: 1883196
ggucauugugauggacuca

SEQ ID NO: 2175897 - RNA, 19 nt, Artificial Sequence
  Description of Artificial Sequence: Synthetic oligonucleotide
  Antisense strand to SEQ ID NO: 2175896
ugaguccaucacaaugacc

SEQ ID NO: 2175898 - RNA, 19 nt, Artificial Sequence
  Description of Artificial Sequence: Synthetic oligonucleotide
  Sense strand starting at position 1554 of SEQ ID NO: 1883196
cucugugauggccaaugua

SEQ ID NO: 2175899 - RNA, 19 nt, Artificial Sequence
  Description of Artificial Sequence: Synthetic oligonucleotide
  Antisense strand to SEQ ID NO: 2175898
uacauuggccaucacagag

SEQ ID NO: 2175900 - RNA, 19 nt, Artificial Sequence
  Description of Artificial Sequence: Synthetic oligonucleotide
  Sense strand starting at position 1604 of SEQ ID NO: 1883196
aaggauaauucuucuucgu

SEQ ID NO: 2175901 - RNA, 19 nt, Artificial Sequence
  Description of Artificial Sequence: Synthetic oligonucleotide
  Antisense strand to SEQ ID NO: 2175900
acgaagaagaauuauccuu

SEQ ID NO: 2175902 - RNA, 19 nt, Artificial Sequence
  Description of Artificial Sequence: Synthetic oligonucleotide
  Sense strand starting at position 1631 of SEQ ID NO: 1883196
uggaucugucuucgagaga

SEQ ID NO: 2175903 - RNA, 19 nt, Artificial Sequence
  Description of Artificial Sequence: Synthetic oligonucleotide
  Antisense strand to SEQ ID NO: 2175902
ucucucgaagacagaucca

SEQ ID NO: 2175904 - RNA, 19 nt, Artificial Sequence
  Description of Artificial Sequence: Synthetic oligonucleotide
  Sense strand starting at position 1826 of SEQ ID NO: 1883196
ugccuauagaucugggauu

SEQ ID NO: 2175905 - RNA, 19 nt, Artificial Sequence
  Description of Artificial Sequence: Synthetic oligonucleotide
  Antisense strand to SEQ ID NO: 2175904
aaucccagaucuauaggca

SEQ ID NO: 2175906 - RNA, 19 nt, Artificial Sequence
  Description of Artificial Sequence: Synthetic oligonucleotide
  Sense strand starting at position 1984 of SEQ ID NO: 1883196
aauguuagggcauguacaa

SEQ ID NO: 2175907 - RNA, 19 nt, Artificial Sequence
  Description of Artificial Sequence: Synthetic oligonucleotide
  Antisense strand to SEQ ID NO: 2175906
uuguacaugcccuaacauu

SEQ ID NO: 2175908 - RNA, 19 nt, Artificial Sequence
  Description of Artificial Sequence: Synthetic oligonucleotide
  Sense strand starting at position 2050 of SEQ ID NO: 1883196
ugugacaggaagugguaua

SEQ ID NO: 2175909 - RNA, 19 nt, Artificial Sequence
  Description of Artificial Sequence: Synthetic oligonucleotide
  Antisense strand to SEQ ID NO: 2175908
uauaccacuuccugucaca

SEQ ID NO: 2175910 - RNA, 19 nt, Artificial Sequence
  Description of Artificial Sequence: Synthetic oligonucleotide
  Sense strand starting at position 2111 of SEQ ID NO: 1883196
ggucuauccuaacuuagag

SEQ ID NO: 2175911 - RNA, 19 nt, Artificial Sequence
  Description of Artificial Sequence: Synthetic oligonucleotide
  Antisense strand to SEQ ID NO: 2175910
cucuaaguuaggauagacc

SEQ ID NO: 2175912 - RNA, 19 nt, Artificial Sequence
  Description of Artificial Sequence: Synthetic oligonucleotide
  Sense strand starting at position 2135 of SEQ ID NO: 1883196
agggaauugcaaugcuaca

SEQ ID NO: 2175913 - RNA, 19 nt, Artificial Sequence
  Description of Artificial Sequence: Synthetic oligonucleotide
  Antisense strand to SEQ ID NO: 2175912
uguagcauugcaauucccu

SEQ ID NO: 2175914 - RNA, 19 nt, Artificial Sequence
  Description of Artificial Sequence: Synthetic oligonucleotide
  Sense strand starting at position 2245 of SEQ ID NO: 1883196
cacauuguccauugggaca

SEQ ID NO: 2175915 - RNA, 19 nt, Artificial Sequence
  Description of Artificial Sequence: Synthetic oligonucleotide
  Antisense strand to SEQ ID NO: 2175914
ugucccaauggacaaugug

SEQ ID NO: 2175916 - RNA, 19 nt, Artificial Sequence
  Description of Artificial Sequence: Synthetic oligonucleotide
  Sense strand starting at position 2273 of SEQ ID NO: 1883196
caaaguacagagugaugau

SEQ ID NO: 2175917 - RNA, 19 nt, Artificial Sequence
  Description of Artificial Sequence: Synthetic oligonucleotide
  Antisense strand to SEQ ID NO: 2175916
aucaucacucuguacuuug

SEQ ID NO: 2175918 - RNA, 19 nt, Artificial Sequence
  Description of Artificial Sequence: Synthetic oligonucleotide
  Sense strand starting at position 2560 of SEQ ID NO: 1883196
ccagaaauguaagcuauga

SEQ ID NO: 2175919 - RNA, 19 nt, Artificial Sequence
  Description of Artificial Sequence: Synthetic oligonucleotide
  Antisense strand to SEQ ID NO: 2175918
ucauagcuuacauuucugg

SEQ ID NO: 2175920 - RNA, 19 nt, Artificial Sequence
  Description of Artificial Sequence: Synthetic oligonucleotide
  Sense strand starting at position 2680 of SEQ ID NO: 1883196
uguauugagcacugaauca

SEQ ID NO: 2175921 - RNA, 19 nt, Artificial Sequence
  Description of Artificial Sequence: Synthetic oligonucleotide
  Antisense strand to SEQ ID NO: 2175920
ugauucagugcucaauaca

SEQ ID NO: 2175922 - RNA, 19 nt, Artificial Sequence
  Description of Artificial Sequence: Synthetic oligonucleotide
  Sense strand starting at position 2703 of SEQ ID NO: 1883196
gucagauguuagcuggaga

SEQ ID NO: 2175923 - RNA, 19 nt, Artificial Sequence
  Description of Artificial Sequence: Synthetic oligonucleotide
  Antisense strand to SEQ ID NO: 2175922
ucuccagcuaacaucugac

SEQ ID NO: 2175924 - RNA, 19 nt, Artificial Sequence
  Description of Artificial Sequence: Synthetic oligonucleotide
  Sense strand starting at position 2813 of SEQ ID NO: 1883196
ccauuuagaugguaaagag

SEQ ID NO: 2175925 - RNA, 19 nt, Artificial Sequence
  Description of Artificial Sequence: Synthetic oligonucleotide
  Antisense strand to SEQ ID NO: 2175924
cucuuuaccaucuaaaugg

SEQ ID NO: 2175926 - RNA, 19 nt, Artificial Sequence
  Description of Artificial Sequence: Synthetic oligonucleotide
  Sense strand starting at position 2843 of SEQ ID NO: 1883196
gggugcuuaccagagaagu

SEQ ID NO: 2175927 - RNA, 19 nt, Artificial Sequence
  Description of Artificial Sequence: Synthetic oligonucleotide
  Antisense strand to SEQ ID NO: 2175926
acuucucugguaagcaccc

SEQ ID NO: 2175928 - RNA, 19 nt, Artificial Sequence
  Description of Artificial Sequence: Synthetic oligonucleotide
  Sense strand starting at position 2845 of SEQ ID NO: 1883196
gugcuuaccagagaagucu

SEQ ID NO: 2175929 - RNA, 19 nt, Artificial Sequence
  Description of Artificial Sequence: Synthetic oligonucleotide
  Antisense strand to SEQ ID NO: 2175928
agacuucucugguaagcac

SEQ ID NO: 2175930 - RNA, 19 nt, Artificial Sequence
  Description of Artificial Sequence: Synthetic oligonucleotide
  Sense strand starting at position 2921 of SEQ ID NO: 1883196
ugcauaucuccugaauguc

SEQ ID NO: 2175931 - RNA, 19 nt, Artificial Sequence
  Description of Artificial Sequence: Synthetic oligonucleotide
  Antisense strand to SEQ ID NO: 2175930
gacauucaggagauaugca

SEQ ID NO: 2175932 - RNA, 19 nt, Artificial Sequence
  Description of Artificial Sequence: Synthetic oligonucleotide
  Sense strand starting at position 2950 of SEQ ID NO: 1883196
ccgcaagagguuuaaaguu

SEQ ID NO: 2175933 - RNA, 19 nt, Artificial Sequence
  Description of Artificial Sequence: Synthetic oligonucleotide
  Antisense strand to SEQ ID NO: 2175932
aacuuuaaaccucuugcgg

SEQ ID NO: 2175934 - RNA, 19 nt, Artificial Sequence
  Description of Artificial Sequence: Synthetic oligonucleotide
  Sense strand starting at position 2984 of SEQ ID NO: 1883196
acaaguuacaaggguagau

SEQ ID NO: 2175935 - RNA, 19 nt, Artificial Sequence
  Description of Artificial Sequence: Synthetic oligonucleotide
  Antisense strand to SEQ ID NO: 2175934
aucuacccuuguaacuugu

SEQ ID NO: 2175936 - RNA, 19 nt, Artificial Sequence
  Description of Artificial Sequence: Synthetic oligonucleotide
  Sense strand starting at position 2994 of SEQ ID NO: 1883196
aggguagaucauggugaag

SEQ ID NO: 2175937 - RNA, 19 nt, Artificial Sequence
  Description of Artificial Sequence: Synthetic oligonucleotide
  Antisense strand to SEQ ID NO: 2175936
cuucaccaugaucuacccu

SEQ ID NO: 2175938 - RNA, 19 nt, Artificial Sequence
  Description of Artificial Sequence: Synthetic oligonucleotide
  Sense strand starting at position 3224 of SEQ ID NO: 1883196
ugcuuaagggcagaguuua

SEQ ID NO: 2175939 - RNA, 19 nt, Artificial Sequence
  Description of Artificial Sequence: Synthetic oligonucleotide
  Antisense strand to SEQ ID NO: 2175938
uaaacucugcccuuaagca

SEQ ID NO: 2175940 - RNA, 19 nt, Artificial Sequence
  Description of Artificial Sequence: Synthetic oligonucleotide
  Sense strand starting at position 3240 of SEQ ID NO: 1883196
uuaugauaaguacgcauuu

SEQ ID NO: 2175941 - RNA, 19 nt, Artificial Sequence
  Description of Artificial Sequence: Synthetic oligonucleotide
  Antisense strand to SEQ ID NO: 2175940
aaaugcguacuuaucauaa

SEQ ID NO: 2175942 - RNA, 19 nt, Artificial Sequence
  Description of Artificial Sequence: Synthetic oligonucleotide
  Sense strand starting at position 3299 of SEQ ID NO: 1883196
acaguaaguaugugaaagu

SEQ ID NO: 2175943 - RNA, 19 nt, Artificial Sequence
  Description of Artificial Sequence: Synthetic oligonucleotide
  Antisense strand to SEQ ID NO: 2175942
acuuucacauacuuacugu

SEQ ID NO: 2175944 - RNA, 19 nt, Artificial Sequence
  Description of Artificial Sequence: Synthetic oligonucleotide
  Sense strand starting at position 3457 of SEQ ID NO: 1883196
ggguuguugguguagauga

SEQ ID NO: 2175945 - RNA, 19 nt, Artificial Sequence
  Description of Artificial Sequence: Synthetic oligonucleotide
  Antisense strand to SEQ ID NO: 2175944
ucaucuacaccaacaaccc

SEQ ID NO: 2175946 - RNA, 19 nt, Artificial Sequence
  Description of Artificial Sequence: Synthetic oligonucleotide
  Sense strand starting at position 3979 of SEQ ID NO: 1883196
auuuguguuuaucuuugca

SEQ ID NO: 2175947 - RNA, 19 nt, Artificial Sequence
  Description of Artificial Sequence: Synthetic oligonucleotide
  Antisense strand to SEQ ID NO: 2175946
ugcaaagauaaacacaaau

SEQ ID NO: 2175948 - RNA, 19 nt, Artificial Sequence
  Description of Artificial Sequence: Synthetic oligonucleotide
  Sense strand starting at position 363 of SEQ ID NO: 1883197
cggucagaucauuaaguca

SEQ ID NO: 2175949 - RNA, 19 nt, Artificial Sequence
  Description of Artificial Sequence: Synthetic oligonucleotide
  Antisense strand to SEQ ID NO: 2175948
ugacuuaaugaucugaccg

SEQ ID NO: 2175950 - RNA, 19 nt, Artificial Sequence
  Description of Artificial Sequence: Synthetic oligonucleotide
  Sense strand starting at position 629 of SEQ ID NO: 1883197
uugccucacguuuauauuu

SEQ ID NO: 2175951 - RNA, 19 nt, Artificial Sequence
  Description of Artificial Sequence: Synthetic oligonucleotide
  Antisense strand to SEQ ID NO: 2175950
aaauauaaacgugaggcaa

SEQ ID NO: 2175952 - RNA, 19 nt, Artificial Sequence
  Description of Artificial Sequence: Synthetic oligonucleotide
  Sense strand starting at position 755 of SEQ ID NO: 1883197
uuggcucugguguauaauu

SEQ ID NO: 2175953 - RNA, 19 nt, Artificial Sequence
  Description of Artificial Sequence: Synthetic oligonucleotide
  Antisense strand to SEQ ID NO: 2175952
aauuauacaccagagccaa

SEQ ID NO: 2175954 - RNA, 19 nt, Artificial Sequence
  Description of Artificial Sequence: Synthetic oligonucleotide
  Sense strand starting at position 765 of SEQ ID NO: 1883197
uguauaauucuagggaagc

SEQ ID NO: 2175955 - RNA, 19 nt, Artificial Sequence
  Description of Artificial Sequence: Synthetic oligonucleotide
  Antisense strand to SEQ ID NO: 2175954
gcuucccuagaauuauaca

SEQ ID NO: 2175956 - RNA, 19 nt, Artificial Sequence
  Description of Artificial Sequence: Synthetic oligonucleotide
  Sense strand starting at position 958 of SEQ ID NO: 1883197
cuuaaagcucaagggauua

SEQ ID NO: 2175957 - RNA, 19 nt, Artificial Sequence
  Description of Artificial Sequence: Synthetic oligonucleotide
  Antisense strand to SEQ ID NO: 2175956
uaaucccuugagcuuuaag

SEQ ID NO: 2175958 - RNA, 19 nt, Artificial Sequence
  Description of Artificial Sequence: Synthetic oligonucleotide
  Sense strand starting at position 1160 of SEQ ID NO: 1883197
aaggaugacugucuuugaa

SEQ ID NO: 2175959 - RNA, 19 nt, Artificial Sequence
  Description of Artificial Sequence: Synthetic oligonucleotide
  Antisense strand to SEQ ID NO: 2175958
uucaaagacagucauccuu

SEQ ID NO: 2175960 - RNA, 19 nt, Artificial Sequence
  Description of Artificial Sequence: Synthetic oligonucleotide
  Sense strand starting at position 1162 of SEQ ID NO: 1883197
ggaugacugucuuugaaag

SEQ ID NO: 2175961 - RNA, 19 nt, Artificial Sequence
  Description of Artificial Sequence: Synthetic oligonucleotide
  Antisense strand to SEQ ID NO: 2175960
cuuucaaagacagucaucc

SEQ ID NO: 2175962 - RNA, 19 nt, Artificial Sequence
  Description of Artificial Sequence: Synthetic oligonucleotide
  Sense strand starting at position 1163 of SEQ ID NO: 1883197
gaugacugucuuugaaaga

SEQ ID NO: 2175963 - RNA, 19 nt, Artificial Sequence
  Description of Artificial Sequence: Synthetic oligonucleotide
  Antisense strand to SEQ ID NO: 2175962
ucuuucaaagacagucauc

SEQ ID NO: 2175964 - RNA, 19 nt, Artificial Sequence
  Description of Artificial Sequence: Synthetic oligonucleotide
  Sense strand starting at position 1266 of SEQ ID NO: 1883197
caucuauugcuuggaugag

SEQ ID NO: 2175965 - RNA, 19 nt, Artificial Sequence
  Description of Artificial Sequence: Synthetic oligonucleotide
  Antisense strand to SEQ ID NO: 2175964
cucauccaagcaauagaug

SEQ ID NO: 2175966 - RNA, 19 nt, Artificial Sequence
  Description of Artificial Sequence: Synthetic oligonucleotide
  Sense strand starting at position 1278 of SEQ ID NO: 1883197
ggaugagaucuugguggca

SEQ ID NO: 2175967 - RNA, 19 nt, Artificial Sequence
  Description of Artificial Sequence: Synthetic oligonucleotide
  Antisense strand to SEQ ID NO: 2175966
ugccaccaagaucucaucc

SEQ ID NO: 2175968 - RNA, 19 nt, Artificial Sequence
  Description of Artificial Sequence: Synthetic oligonucleotide
  Sense strand starting at position 1339 of SEQ ID NO: 1883197
auucuacguucuccaaaga

SEQ ID NO: 2175969 - RNA, 19 nt, Artificial Sequence
  Description of Artificial Sequence: Synthetic oligonucleotide
  Antisense strand to SEQ ID NO: 2175968
ucuuuggagaacguagaau

SEQ ID NO: 2175970 - RNA, 19 nt, Artificial Sequence
  Description of Artificial Sequence: Synthetic oligonucleotide
  Sense strand starting at position 1414 of SEQ ID NO: 1883197
guggaauuauuaccauagu

SEQ ID NO: 2175971 - RNA, 19 nt, Artificial Sequence
  Description of Artificial Sequence: Synthetic oligonucleotide
  Antisense strand to SEQ ID NO: 2175970
acuaugguaauaauuccac

SEQ ID NO: 2175972 - RNA, 19 nt, Artificial Sequence
  Description of Artificial Sequence: Synthetic oligonucleotide
  Sense strand starting at position 1481 of SEQ ID NO: 1883197
auugacgguuucucaugau

SEQ ID NO: 2175973 - RNA, 19 nt, Artificial Sequence
  Description of Artificial Sequence: Synthetic oligonucleotide
  Antisense strand to SEQ ID NO: 2175972
aucaugagaaaccgucaau

SEQ ID NO: 2175974 - RNA, 19 nt, Artificial Sequence
  Description of Artificial Sequence: Synthetic oligonucleotide
  Sense strand starting at position 1485 of SEQ ID NO: 1883197
acgguuucucaugauaaug

SEQ ID NO: 2175975 - RNA, 19 nt, Artificial Sequence
  Description of Artificial Sequence: Synthetic oligonucleotide
  Antisense strand to SEQ ID NO: 2175974
cauuaucaugagaaaccgu

SEQ ID NO: 2175976 - RNA, 19 nt, Artificial Sequence
  Description of Artificial Sequence: Synthetic oligonucleotide
  Sense strand starting at position 1546 of SEQ ID NO: 1883197
cagguaugauucucaggag

SEQ ID NO: 2175977 - RNA, 19 nt, Artificial Sequence
  Description of Artificial Sequence: Synthetic oligonucleotide
  Antisense strand to SEQ ID NO: 2175976
cuccugagaaucauaccug

SEQ ID NO: 2175978 - RNA, 19 nt, Artificial Sequence
  Description of Artificial Sequence: Synthetic oligonucleotide
  Sense strand starting at position 1708 of SEQ ID NO: 1883197
augacuuaccacuguguau

SEQ ID NO: 2175979 - RNA, 19 nt, Artificial Sequence
  Description of Artificial Sequence: Synthetic oligonucleotide
  Antisense strand to SEQ ID NO: 2175978
auacacagugguaagucau

SEQ ID NO: 2175980 - RNA, 19 nt, Artificial Sequence
  Description of Artificial Sequence: Synthetic oligonucleotide
  Sense strand starting at position 1715 of SEQ ID NO: 1883197
accacuguguauucugauu

SEQ ID NO: 2175981 - RNA, 19 nt, Artificial Sequence
  Description of Artificial Sequence: Synthetic oligonucleotide
  Antisense strand to SEQ ID NO: 2175980
aaucagaauacacaguggu

SEQ ID NO: 2175982 - RNA, 19 nt, Artificial Sequence
  Description of Artificial Sequence: Synthetic oligonucleotide
  Sense strand starting at position 1825 of SEQ ID NO: 1883197
auggcaucauuauugucaa

SEQ ID NO: 2175983 - RNA, 19 nt, Artificial Sequence
  Description of Artificial Sequence: Synthetic oligonucleotide
  Antisense strand to SEQ ID NO: 2175982
uugacaauaaugaugccau

SEQ ID NO: 2175984 - RNA, 19 nt, Artificial Sequence
  Description of Artificial Sequence: Synthetic oligonucleotide
  Sense strand starting at position 1828 of SEQ ID NO: 1883197
gcaucauuauugucaaaga

SEQ ID NO: 2175985 - RNA, 19 nt, Artificial Sequence
  Description of Artificial Sequence: Synthetic oligonucleotide
  Antisense strand to SEQ ID NO: 2175984
ucuuugacaauaaugaugc

SEQ ID NO: 2175986 - RNA, 19 nt, Artificial Sequence
  Description of Artificial Sequence: Synthetic oligonucleotide
  Sense strand starting at position 1859 of SEQ ID NO: 1883197
ucuagacauuagucuagaa

SEQ ID NO: 2175987 - RNA, 19 nt, Artificial Sequence
  Description of Artificial Sequence: Synthetic oligonucleotide
  Antisense strand to SEQ ID NO: 2175986
uucuagacuaaugucuaga

SEQ ID NO: 2175988 - RNA, 19 nt, Artificial Sequence
  Description of Artificial Sequence: Synthetic oligonucleotide
  Sense strand starting at position 1895 of SEQ ID NO: 1883197
ggaguauugcaauaggagu

SEQ ID NO: 2175989 - RNA, 19 nt, Artificial Sequence
  Description of Artificial Sequence: Synthetic oligonucleotide
  Antisense strand to SEQ ID NO: 2175988
acuccuauugcaauacucc

SEQ ID NO: 2175990 - RNA, 19 nt, Artificial Sequence
  Description of Artificial Sequence: Synthetic oligonucleotide
  Sense strand starting at position 2067 of SEQ ID NO: 1883197
guccucaaacguuauauga

SEQ ID NO: 2175991 - RNA, 19 nt, Artificial Sequence
  Description of Artificial Sequence: Synthetic oligonucleotide
  Antisense strand to SEQ ID NO: 2175990
ucauauaacguuugaggac

SEQ ID NO: 2175992 - RNA, 19 nt, Artificial Sequence
  Description of Artificial Sequence: Synthetic oligonucleotide
  Sense strand starting at position 2100 of SEQ ID NO: 1883197
acaggaaauguugguuugu

SEQ ID NO: 2175993 - RNA, 19 nt, Artificial Sequence
  Description of Artificial Sequence: Synthetic oligonucleotide
  Antisense strand to SEQ ID NO: 2175992
acaaaccaacauuuccugu

SEQ ID NO: 2175994 - RNA, 19 nt, Artificial Sequence
  Description of Artificial Sequence: Synthetic oligonucleotide
  Sense strand starting at position 2310 of SEQ ID NO: 1883197
gaaaguugcaaagaugugu

SEQ ID NO: 2175995 - RNA, 19 nt, Artificial Sequence
  Description of Artificial Sequence: Synthetic oligonucleotide
  Antisense strand to SEQ ID NO: 2175994
acacaucuuugcaacuuuc

SEQ ID NO: 2175996 - RNA, 19 nt, Artificial Sequence
  Description of Artificial Sequence: Synthetic oligonucleotide
  Sense strand starting at position 2360 of SEQ ID NO: 1883197
aacaguuaggauuguuuga

SEQ ID NO: 2175997 - RNA, 19 nt, Artificial Sequence
  Description of Artificial Sequence: Synthetic oligonucleotide
  Antisense strand to SEQ ID NO: 2175996
ucaaacaauccuaacuguu

SEQ ID NO: 2175998 - RNA, 19 nt, Artificial Sequence
  Description of Artificial Sequence: Synthetic oligonucleotide
  Sense strand starting at position 2362 of SEQ ID NO: 1883197
caguuaggauuguuugaua

SEQ ID NO: 2175999 - RNA, 19 nt, Artificial Sequence
  Description of Artificial Sequence: Synthetic oligonucleotide
  Antisense strand to SEQ ID NO: 2175998
uaucaaacaauccuaacug

SEQ ID NO: 2176000 - RNA, 19 nt, Artificial Sequence
  Description of Artificial Sequence: Synthetic oligonucleotide
  Sense strand starting at position 2378 of SEQ ID NO: 1883197
auauguuaucauugacaag

SEQ ID NO: 2176001 - RNA, 19 nt, Artificial Sequence
  Description of Artificial Sequence: Synthetic oligonucleotide
  Antisense strand to SEQ ID NO: 2176000
cuugucaaugauaacauau

SEQ ID NO: 2176002 - RNA, 19 nt, Artificial Sequence
  Description of Artificial Sequence: Synthetic oligonucleotide
  Sense strand starting at position 2392 of SEQ ID NO: 1883197
acaagaugucuaggaagca

SEQ ID NO: 2176003 - RNA, 19 nt, Artificial Sequence
  Description of Artificial Sequence: Synthetic oligonucleotide
  Antisense strand to SEQ ID NO: 2176002
ugcuuccuagacaucuugu

SEQ ID NO: 2176004 - RNA, 19 nt, Artificial Sequence
  Description of Artificial Sequence: Synthetic oligonucleotide
  Sense strand starting at position 2508 of SEQ ID NO: 1883197
gaaguuucuggagaauugu

SEQ ID NO: 2176005 - RNA, 19 nt, Artificial Sequence
  Description of Artificial Sequence: Synthetic oligonucleotide
  Antisense strand to SEQ ID NO: 2176004
acaauucuccagaaacuuc

SEQ ID NO: 2176006 - RNA, 19 nt, Artificial Sequence
  Description of Artificial Sequence: Synthetic oligonucleotide
  Sense strand starting at position 2571 of SEQ ID NO: 1883197
guguuaaauguuuaucaag

SEQ ID NO: 2176007 - RNA, 19 nt, Artificial Sequence
  Description of Artificial Sequence: Synthetic oligonucleotide
  Antisense strand to SEQ ID NO: 2176006
cuugauaaacauuuaacac

SEQ ID NO: 2176008 - RNA, 19 nt, Artificial Sequence
  Description of Artificial Sequence: Synthetic oligonucleotide
  Sense strand starting at position 2651 of SEQ ID NO: 1883197
gaauguuuacugggaauuc

SEQ ID NO: 2176009 - RNA, 19 nt, Artificial Sequence
  Description of Artificial Sequence: Synthetic oligonucleotide
  Antisense strand to SEQ ID NO: 2176008
gaauucccaguaaacauuc

SEQ ID NO: 2176010 - RNA, 19 nt, Artificial Sequence
  Description of Artificial Sequence: Synthetic oligonucleotide
  Sense strand starting at position 2998 of SEQ ID NO: 1883197
caggcaauccuguaaugug

SEQ ID NO: 2176011 - RNA, 19 nt, Artificial Sequence
  Description of Artificial Sequence: Synthetic oligonucleotide
  Antisense strand to SEQ ID NO: 2176010
cacauuacaggauugccug

SEQ ID NO: 2176012 - RNA, 19 nt, Artificial Sequence
  Description of Artificial Sequence: Synthetic oligonucleotide
  Sense strand starting at position 3057 of SEQ ID NO: 1883197
uggauaauucucgguacca

SEQ ID NO: 2176013 - RNA, 19 nt, Artificial Sequence
  Description of Artificial Sequence: Synthetic oligonucleotide
  Antisense strand to SEQ ID NO: 2176012
ugguaccgagaauuaucca

SEQ ID NO: 2176014 - RNA, 19 nt, Artificial Sequence
  Description of Artificial Sequence: Synthetic oligonucleotide
  Sense strand starting at position 3058 of SEQ ID NO: 1883197
ggauaauucucgguaccag

SEQ ID NO: 2176015 - RNA, 19 nt, Artificial Sequence
  Description of Artificial Sequence: Synthetic oligonucleotide
  Antisense strand to SEQ ID NO: 2176014
cugguaccgagaauuaucc

SEQ ID NO: 2176016 - RNA, 19 nt, Artificial Sequence
  Description of Artificial Sequence: Synthetic oligonucleotide
  Sense strand starting at position 3236 of SEQ ID NO: 1883197
gucgcuuugcuuguuguua

SEQ ID NO: 2176017 - RNA, 19 nt, Artificial Sequence
  Description of Artificial Sequence: Synthetic oligonucleotide
  Antisense strand to SEQ ID NO: 2176016
uaacaacaagcaaagcgac

SEQ ID NO: 2176018 - RNA, 19 nt, Artificial Sequence
  Description of Artificial Sequence: Synthetic oligonucleotide
  Sense strand starting at position 3618 of SEQ ID NO: 1883197
cuaauacauuguguugaua

SEQ ID NO: 2176019 - RNA, 19 nt, Artificial Sequence
  Description of Artificial Sequence: Synthetic oligonucleotide
  Antisense strand to SEQ ID NO: 2176018
uaucaacacaauguauuag

SEQ ID NO: 2176020 - RNA, 19 nt, Artificial Sequence
  Description of Artificial Sequence: Synthetic oligonucleotide
  Sense strand starting at position 3621 of SEQ ID NO: 1883197
auacauuguguugauagau

SEQ ID NO: 2176021 - RNA, 19 nt, Artificial Sequence
  Description of Artificial Sequence: Synthetic oligonucleotide
  Antisense strand to SEQ ID NO: 2176020
aucuaucaacacaauguau

SEQ ID NO: 2176022 - RNA, 19 nt, Artificial Sequence
  Description of Artificial Sequence: Synthetic oligonucleotide
  Sense strand starting at position 3834 of SEQ ID NO: 1883197
uuacacugauguuuccaua

SEQ ID NO: 2176023 - RNA, 19 nt, Artificial Sequence
  Description of Artificial Sequence: Synthetic oligonucleotide
  Antisense strand to SEQ ID NO: 2176022
uauggaaacaucaguguaa

SEQ ID NO: 2176024 - RNA, 19 nt, Artificial Sequence
  Description of Artificial Sequence: Synthetic oligonucleotide
  Sense strand starting at position 3907 of SEQ ID NO: 1883197
aaucuuagagucuggugga

SEQ ID NO: 2176025 - RNA, 19 nt, Artificial Sequence
  Description of Artificial Sequence: Synthetic oligonucleotide
  Antisense strand to SEQ ID NO: 2176024
uccaccagacucuaagauu

SEQ ID NO: 2176026 - RNA, 19 nt, Artificial Sequence
  Description of Artificial Sequence: Synthetic oligonucleotide
  Sense strand starting at position 3963 of SEQ ID NO: 1883197
gauggcauuguuuaaacaa

SEQ ID NO: 2176027 - RNA, 19 nt, Artificial Sequence
  Description of Artificial Sequence: Synthetic oligonucleotide
  Antisense strand to SEQ ID NO: 2176026
uuguuuaaacaaugccauc

SEQ ID NO: 2176028 - RNA, 19 nt, Artificial Sequence
  Description of Artificial Sequence: Synthetic oligonucleotide
  Sense strand starting at position 810 of SEQ ID NO: 1883198
cagauacugcucugugaau

SEQ ID NO: 2176029 - RNA, 19 nt, Artificial Sequence
  Description of Artificial Sequence: Synthetic oligonucleotide
  Antisense strand to SEQ ID NO: 2176028
auucacagagcaguaucug

SEQ ID NO: 2176030 - RNA, 19 nt, Artificial Sequence
  Description of Artificial Sequence: Synthetic oligonucleotide
  Sense strand starting at position 811 of SEQ ID NO: 1883198
agauacugcucugugaauu

SEQ ID NO: 2176031 - RNA, 19 nt, Artificial Sequence
  Description of Artificial Sequence: Synthetic oligonucleotide
  Antisense strand to SEQ ID NO: 2176030
aauucacagagcaguaucu

SEQ ID NO: 2176032 - RNA, 19 nt, Artificial Sequence
  Description of Artificial Sequence: Synthetic oligonucleotide
  Sense strand starting at position 848 of SEQ ID NO: 1883198
gcguguguccaaguucaug

SEQ ID NO: 2176033 - RNA, 19 nt, Artificial Sequence
  Description of Artificial Sequence: Synthetic oligonucleotide
  Antisense strand to SEQ ID NO: 2176032
caugaacuuggacacacgc

SEQ ID NO: 2176034 - RNA, 19 nt, Artificial Sequence
  Description of Artificial Sequence: Synthetic oligonucleotide
  Sense strand starting at position 885 of SEQ ID NO: 1883198
ugcuauuacucugugaaag

SEQ ID NO: 2176035 - RNA, 19 nt, Artificial Sequence
  Description of Artificial Sequence: Synthetic oligonucleotide
  Antisense strand to SEQ ID NO: 2176034
cuuucacagaguaauagca

SEQ ID NO: 2176036 - RNA, 19 nt, Artificial Sequence
  Description of Artificial Sequence: Synthetic oligonucleotide
  Sense strand starting at position 961 of SEQ ID NO: 1883198
uaggucauggcaugaagau

SEQ ID NO: 2176037 - RNA, 19 nt, Artificial Sequence
  Description of Artificial Sequence: Synthetic oligonucleotide
  Antisense strand to SEQ ID NO: 2176036
aucuucaugccaugaccua

SEQ ID NO: 2176038 - RNA, 19 nt, Artificial Sequence
  Description of Artificial Sequence: Synthetic oligonucleotide
  Sense strand starting at position 1085 of SEQ ID NO: 1883198
gacaauugugcugaacaug

SEQ ID NO: 2176039 - RNA, 19 nt, Artificial Sequence
  Description of Artificial Sequence: Synthetic oligonucleotide
  Antisense strand to SEQ ID NO: 2176038
cauguucagcacaauuguc

SEQ ID NO: 2176040 - RNA, 19 nt, Artificial Sequence
  Description of Artificial Sequence: Synthetic oligonucleotide
  Sense strand starting at position 1214 of SEQ ID NO: 1883198
uuugguaagucacuuaauu

SEQ ID NO: 2176041 - RNA, 19 nt, Artificial Sequence
  Description of Artificial Sequence: Synthetic oligonucleotide
  Antisense strand to SEQ ID NO: 2176040
aauuaagugacuuaccaaa

SEQ ID NO: 2176042 - RNA, 19 nt, Artificial Sequence
  Description of Artificial Sequence: Synthetic oligonucleotide
  Sense strand starting at position 1269 of SEQ ID NO: 1883198
agaugauagugcuuaccca

SEQ ID NO: 2176043 - RNA, 19 nt, Artificial Sequence
  Description of Artificial Sequence: Synthetic oligonucleotide
  Antisense strand to SEQ ID NO: 2176042
uggguaagcacuaucaucu

SEQ ID NO: 2176044 - RNA, 19 nt, Artificial Sequence
  Description of Artificial Sequence: Synthetic oligonucleotide
  Sense strand starting at position 2021 of SEQ ID NO: 1883198
gagcaagucauauggucag

SEQ ID NO: 2176045 - RNA, 19 nt, Artificial Sequence
  Description of Artificial Sequence: Synthetic oligonucleotide
  Antisense strand to SEQ ID NO: 2176044
cugaccauaugacuugcuc

SEQ ID NO: 2176046 - RNA, 19 nt, Artificial Sequence
  Description of Artificial Sequence: Synthetic oligonucleotide
  Sense strand starting at position 2025 of SEQ ID NO: 1883198
aagucauauggucaggcau

SEQ ID NO: 2176047 - RNA, 19 nt, Artificial Sequence
  Description of Artificial Sequence: Synthetic oligonucleotide
  Antisense strand to SEQ ID NO: 2176046
augccugaccauaugacuu

SEQ ID NO: 2176048 - RNA, 19 nt, Artificial Sequence
  Description of Artificial Sequence: Synthetic oligonucleotide
  Sense strand starting at position 2080 of SEQ ID NO: 1883198
acaguuggcaguuaacagu

SEQ ID NO: 2176049 - RNA, 19 nt, Artificial Sequence
  Description of Artificial Sequence: Synthetic oligonucleotide
  Antisense strand to SEQ ID NO: 2176048
acuguuaacugccaacugu

SEQ ID NO: 2176050 - RNA, 19 nt, Artificial Sequence
  Description of Artificial Sequence: Synthetic oligonucleotide
  Sense strand starting at position 2260 of SEQ ID NO: 1883198
ggagacaagcucugccaga

SEQ ID NO: 2176051 - RNA, 19 nt, Artificial Sequence
  Description of Artificial Sequence: Synthetic oligonucleotide
  Antisense strand to SEQ ID NO: 2176050
ucuggcagagcuugucucc

SEQ ID NO: 2176052 - RNA, 19 nt, Artificial Sequence
  Description of Artificial Sequence: Synthetic oligonucleotide
  Sense strand starting at position 2279 of SEQ ID NO: 1883198
gcucguauagcagagagaa

SEQ ID NO: 2176053 - RNA, 19 nt, Artificial Sequence
  Description of Artificial Sequence: Synthetic oligonucleotide
  Antisense strand to SEQ ID NO: 2176052
uucucucugcuauacgagc

SEQ ID NO: 2176054 - RNA, 19 nt, Artificial Sequence
  Description of Artificial Sequence: Synthetic oligonucleotide
  Sense strand starting at position 2297 of SEQ ID NO: 1883198
aggucuugagauuagugau

SEQ ID NO: 2176055 - RNA, 19 nt, Artificial Sequence
  Description of Artificial Sequence: Synthetic oligonucleotide
  Antisense strand to SEQ ID NO: 2176054
aucacuaaucucaagaccu

SEQ ID NO: 2176056 - RNA, 19 nt, Artificial Sequence
  Description of Artificial Sequence: Synthetic oligonucleotide
  Sense strand starting at position 2337 of SEQ ID NO: 1883198
agaccugcauaagaauuua

SEQ ID NO: 2176057 - RNA, 19 nt, Artificial Sequence
  Description of Artificial Sequence: Synthetic oligonucleotide
  Antisense strand to SEQ ID NO: 2176056
uaaauucuuaugcaggucu

SEQ ID NO: 2176058 - RNA, 19 nt, Artificial Sequence
  Description of Artificial Sequence: Synthetic oligonucleotide
  Sense strand starting at position 2572 of SEQ ID NO: 1883198
aagggaaauugcucuguaa

SEQ ID NO: 2176059 - RNA, 19 nt, Artificial Sequence
  Description of Artificial Sequence: Synthetic oligonucleotide
  Antisense strand to SEQ ID NO: 2176058
uuacagagcaauuucccuu

SEQ ID NO: 2176060 - RNA, 19 nt, Artificial Sequence
  Description of Artificial Sequence: Synthetic oligonucleotide
  Sense strand starting at position 2574 of SEQ ID NO: 1883198
gggaaauugcucuguaaac

SEQ ID NO: 2176061 - RNA, 19 nt, Artificial Sequence
  Description of Artificial Sequence: Synthetic oligonucleotide
  Antisense strand to SEQ ID NO: 2176060
guuuacagagcaauuuccc

SEQ ID NO: 2176062 - RNA, 19 nt, Artificial Sequence
  Description of Artificial Sequence: Synthetic oligonucleotide
  Sense strand starting at position 2575 of SEQ ID NO: 1883198
ggaaauugcucuguaaaca

SEQ ID NO: 2176063 - RNA, 19 nt, Artificial Sequence
  Description of Artificial Sequence: Synthetic oligonucleotide
  Antisense strand to SEQ ID NO: 2176062
uguuuacagagcaauuucc

SEQ ID NO: 2176064 - RNA, 19 nt, Artificial Sequence
  Description of Artificial Sequence: Synthetic oligonucleotide
  Sense strand starting at position 2576 of SEQ ID NO: 1883198
gaaauugcucuguaaacag

SEQ ID NO: 2176065 - RNA, 19 nt, Artificial Sequence
  Description of Artificial Sequence: Synthetic oligonucleotide
  Antisense strand to SEQ ID NO: 2176064
cuguuuacagagcaauuuc

SEQ ID NO: 2176066 - RNA, 19 nt, Artificial Sequence
  Description of Artificial Sequence: Synthetic oligonucleotide
  Sense strand starting at position 2583 of SEQ ID NO: 1883198
cucuguaaacagugaagca

SEQ ID NO: 2176067 - RNA, 19 nt, Artificial Sequence
  Description of Artificial Sequence: Synthetic oligonucleotide
  Antisense strand to SEQ ID NO: 2176066
ugcuucacuguuuacagag

SEQ ID NO: 2176068 - RNA, 19 nt, Artificial Sequence
  Description of Artificial Sequence: Synthetic oligonucleotide
  Sense strand starting at position 2671 of SEQ ID NO: 1883198
cuuccauugcuauaggaag

SEQ ID NO: 2176069 - RNA, 19 nt, Artificial Sequence
  Description of Artificial Sequence: Synthetic oligonucleotide
  Antisense strand to SEQ ID NO: 2176068
cuuccuauagcaauggaag

SEQ ID NO: 2176070 - RNA, 19 nt, Artificial Sequence
  Description of Artificial Sequence: Synthetic oligonucleotide
  Sense strand starting at position 2767 of SEQ ID NO: 1883198
uuugauuguacguaagggu

SEQ ID NO: 2176071 - RNA, 19 nt, Artificial Sequence
  Description of Artificial Sequence: Synthetic oligonucleotide
  Antisense strand to SEQ ID NO: 2176070
acccuuacguacaaucaaa

SEQ ID NO: 2176072 - RNA, 19 nt, Artificial Sequence
  Description of Artificial Sequence: Synthetic oligonucleotide
  Sense strand starting at position 2806 of SEQ ID NO: 1883198
agacauaugccuugaugua

SEQ ID NO: 2176073 - RNA, 19 nt, Artificial Sequence
  Description of Artificial Sequence: Synthetic oligonucleotide
  Antisense strand to SEQ ID NO: 2176072
uacaucaaggcauaugucu

SEQ ID NO: 2176074 - RNA, 19 nt, Artificial Sequence
  Description of Artificial Sequence: Synthetic oligonucleotide
  Sense strand starting at position 2807 of SEQ ID NO: 1883198
gacauaugccuugauguaa

SEQ ID NO: 2176075 - RNA, 19 nt, Artificial Sequence
  Description of Artificial Sequence: Synthetic oligonucleotide
  Antisense strand to SEQ ID NO: 2176074
uuacaucaaggcauauguc

SEQ ID NO: 2176076 - RNA, 19 nt, Artificial Sequence
  Description of Artificial Sequence: Synthetic oligonucleotide
  Sense strand starting at position 2933 of SEQ ID NO: 1883198
gcgaaagaguuucugaauu

SEQ ID NO: 2176077 - RNA, 19 nt, Artificial Sequence
  Description of Artificial Sequence: Synthetic oligonucleotide
  Antisense strand to SEQ ID NO: 2176076
aauucagaaacucuuucgc

SEQ ID NO: 2176078 - RNA, 19 nt, Artificial Sequence
  Description of Artificial Sequence: Synthetic oligonucleotide
  Sense strand starting at position 3043 of SEQ ID NO: 1883198
auuaaugucugagugguua

SEQ ID NO: 2176079 - RNA, 19 nt, Artificial Sequence
  Description of Artificial Sequence: Synthetic oligonucleotide
  Antisense strand to SEQ ID NO: 2176078
uaaccacucagacauuaau

SEQ ID NO: 2176080 - RNA, 19 nt, Artificial Sequence
  Description of Artificial Sequence: Synthetic oligonucleotide
  Sense strand starting at position 3047 of SEQ ID NO: 1883198
augucugagugguuauuaa

SEQ ID NO: 2176081 - RNA, 19 nt, Artificial Sequence
  Description of Artificial Sequence: Synthetic oligonucleotide
  Antisense strand to SEQ ID NO: 2176080
uuaauaaccacucagacau

SEQ ID NO: 2176082 - RNA, 19 nt, Artificial Sequence
  Description of Artificial Sequence: Synthetic oligonucleotide
  Sense strand starting at position 3360 of SEQ ID NO: 1883198
ugucacuuugauuaccgaa

SEQ ID NO: 2176083 - RNA, 19 nt, Artificial Sequence
  Description of Artificial Sequence: Synthetic oligonucleotide
  Antisense strand to SEQ ID NO: 2176082
uucgguaaucaaagugaca

SEQ ID NO: 2176084 - RNA, 19 nt, Artificial Sequence
  Description of Artificial Sequence: Synthetic oligonucleotide
  Sense strand starting at position 3362 of SEQ ID NO: 1883198
ucacuuugauuaccgaaau

SEQ ID NO: 2176085 - RNA, 19 nt, Artificial Sequence
  Description of Artificial Sequence: Synthetic oligonucleotide
  Antisense strand to SEQ ID NO: 2176084
auuucgguaaucaaaguga

SEQ ID NO: 2176086 - RNA, 19 nt, Artificial Sequence
  Description of Artificial Sequence: Synthetic oligonucleotide
  Sense strand starting at position 3428 of SEQ ID NO: 1883198
agaagauacugcucacaca

SEQ ID NO: 2176087 - RNA, 19 nt, Artificial Sequence
  Description of Artificial Sequence: Synthetic oligonucleotide
  Antisense strand to SEQ ID NO: 2176086
ugugugagcaguaucuucu

SEQ ID NO: 2176088 - RNA, 19 nt, Artificial Sequence
  Description of Artificial Sequence: Synthetic oligonucleotide
  Sense strand starting at position 3471 of SEQ ID NO: 1883198
cuccuccuucuguaugaga

SEQ ID NO: 2176089 - RNA, 19 nt, Artificial Sequence
  Description of Artificial Sequence: Synthetic oligonucleotide
  Antisense strand to SEQ ID NO: 2176088
ucucauacagaaggaggag

SEQ ID NO: 2176090 - RNA, 19 nt, Artificial Sequence
  Description of Artificial Sequence: Synthetic oligonucleotide
  Sense strand starting at position 3473 of SEQ ID NO: 1883198
ccuccuucuguaugagaga

SEQ ID NO: 2176091 - RNA, 19 nt, Artificial Sequence
  Description of Artificial Sequence: Synthetic oligonucleotide
  Antisense strand to SEQ ID NO: 2176090
ucucucauacagaaggagg

SEQ ID NO: 2176092 - RNA, 19 nt, Artificial Sequence
  Description of Artificial Sequence: Synthetic oligonucleotide
  Sense strand starting at position 3522 of SEQ ID NO: 1883198
cgaggaggucuaugagcau

SEQ ID NO: 2176093 - RNA, 19 nt, Artificial Sequence
  Description of Artificial Sequence: Synthetic oligonucleotide
  Antisense strand to SEQ ID NO: 2176092
augcucauagaccuccucg

SEQ ID NO: 2176094 - RNA, 19 nt, Artificial Sequence
  Description of Artificial Sequence: Synthetic oligonucleotide
  Sense strand starting at position 3525 of SEQ ID NO: 1883198
ggaggucuaugagcauauu

SEQ ID NO: 2176095 - RNA, 19 nt, Artificial Sequence
  Description of Artificial Sequence: Synthetic oligonucleotide
  Antisense strand to SEQ ID NO: 2176094
aauaugcucauagaccucc

SEQ ID NO: 2176096 - RNA, 19 nt, Artificial Sequence
  Description of Artificial Sequence: Synthetic oligonucleotide
  Sense strand starting at position 3557 of SEQ ID NO: 1883198
augaguugucggcauaaau

SEQ ID NO: 2176097 - RNA, 19 nt, Artificial Sequence
  Description of Artificial Sequence: Synthetic oligonucleotide
  Antisense strand to SEQ ID NO: 2176096
auuuaugccgacaacucau

SEQ ID NO: 2176098 - RNA, 19 nt, Artificial Sequence
  Description of Artificial Sequence: Synthetic oligonucleotide
  Sense strand starting at position 3567 of SEQ ID NO: 1883198
ggcauaaauucuuucugaa

SEQ ID NO: 2176099 - RNA, 19 nt, Artificial Sequence
  Description of Artificial Sequence: Synthetic oligonucleotide
  Antisense strand to SEQ ID NO: 2176098
uucagaaagaauuuaugcc

SEQ ID NO: 2176100 - RNA, 19 nt, Artificial Sequence
  Description of Artificial Sequence: Synthetic oligonucleotide
  Sense strand starting at position 3628 of SEQ ID NO: 1883198
ggaaaugaguaccuuagcu

SEQ ID NO: 2176101 - RNA, 19 nt, Artificial Sequence
  Description of Artificial Sequence: Synthetic oligonucleotide
  Antisense strand to SEQ ID NO: 2176100
agcuaagguacucauuucc

SEQ ID NO: 2176102 - RNA, 19 nt, Artificial Sequence
  Description of Artificial Sequence: Synthetic oligonucleotide
  Sense strand starting at position 3668 of SEQ ID NO: 1883198
gacuguauuucugaaggga

SEQ ID NO: 2176103 - RNA, 19 nt, Artificial Sequence
  Description of Artificial Sequence: Synthetic oligonucleotide
  Antisense strand to SEQ ID NO: 2176102
ucccuucagaaauacaguc

SEQ ID NO: 2176104 - RNA, 19 nt, Artificial Sequence
  Description of Artificial Sequence: Synthetic oligonucleotide
  Sense strand starting at position 3794 of SEQ ID NO: 1883198
uuggcuaauucucucagga

SEQ ID NO: 2176105 - RNA, 19 nt, Artificial Sequence
  Description of Artificial Sequence: Synthetic oligonucleotide
  Antisense strand to SEQ ID NO: 2176104
uccugagagaauuagccaa

SEQ ID NO: 2176106 - RNA, 19 nt, Artificial Sequence
  Description of Artificial Sequence: Synthetic oligonucleotide
  Sense strand starting at position 3940 of SEQ ID NO: 1883198
gugcuaauacaguacacua

SEQ ID NO: 2176107 - RNA, 19 nt, Artificial Sequence
  Description of Artificial Sequence: Synthetic oligonucleotide
  Antisense strand to SEQ ID NO: 2176106
uaguguacuguauuagcac

SEQ ID NO: 2176108 - RNA, 19 nt, Artificial Sequence
  Description of Artificial Sequence: Synthetic oligonucleotide
  Sense strand starting at position 1521 of SEQ ID NO: 1883199
gagucuccuugaugacauu

SEQ ID NO: 2176109 - RNA, 19 nt, Artificial Sequence
  Description of Artificial Sequence: Synthetic oligonucleotide
  Antisense strand to SEQ ID NO: 2176108
aaugucaucaaggagacuc

SEQ ID NO: 2176110 - RNA, 19 nt, Artificial Sequence
  Description of Artificial Sequence: Synthetic oligonucleotide
  Sense strand starting at position 898 of SEQ ID NO: 1883200
auuaaugaagcguaaauca

SEQ ID NO: 2176111 - RNA, 19 nt, Artificial Sequence
  Description of Artificial Sequence: Synthetic oligonucleotide
  Antisense strand to SEQ ID NO: 2176110
ugauuuacgcuucauuaau

SEQ ID NO: 2176112 - RNA, 19 nt, Artificial Sequence
  Description of Artificial Sequence: Synthetic oligonucleotide
  Sense strand starting at position 2005 of SEQ ID NO: 1883200
uguguaauuucagguuggu

SEQ ID NO: 2176113 - RNA, 19 nt, Artificial Sequence
  Description of Artificial Sequence: Synthetic oligonucleotide
  Antisense strand to SEQ ID NO: 2176112
accaaccugaaauuacaca

SEQ ID NO: 2176114 - RNA, 19 nt, Artificial Sequence
  Description of Artificial Sequence: Synthetic oligonucleotide
  Sense strand starting at position 40 of SEQ ID NO: 1883202
uugucuuguguuggaagaa

SEQ ID NO: 2176115 - RNA, 19 nt, Artificial Sequence
  Description of Artificial Sequence: Synthetic oligonucleotide
  Antisense strand to SEQ ID NO: 2176114
uucuuccaacacaagacaa

SEQ ID NO: 2176116 - RNA, 19 nt, Artificial Sequence
  Description of Artificial Sequence: Synthetic oligonucleotide
  Sense strand starting at position 164 of SEQ ID NO: 1883202
ucaaauagcugaucugaaa

SEQ ID NO: 2176117 - RNA, 19 nt, Artificial Sequence
  Description of Artificial Sequence: Synthetic oligonucleotide
  Antisense strand to SEQ ID NO: 2176116
uuucagaucagcuauuuga

SEQ ID NO: 2176118 - RNA, 19 nt, Artificial Sequence
  Description of Artificial Sequence: Synthetic oligonucleotide
  Sense strand starting at position 357 of SEQ ID NO: 1883202
gcacauuuguuaguagguu

SEQ ID NO: 2176119 - RNA, 19 nt, Artificial Sequence
  Description of Artificial Sequence: Synthetic oligonucleotide
  Antisense strand to SEQ ID NO: 2176118
aaccuacuaacaaaugugc

SEQ ID NO: 2176120 - RNA, 19 nt, Artificial Sequence
  Description of Artificial Sequence: Synthetic oligonucleotide
  Sense strand starting at position 361 of SEQ ID NO: 1883202
auuuguuaguagguuguaa

SEQ ID NO: 2176121 - RNA, 19 nt, Artificial Sequence
  Description of Artificial Sequence: Synthetic oligonucleotide
  Antisense strand to SEQ ID NO: 2176120
uuacaaccuacuaacaaau

SEQ ID NO: 2176122 - RNA, 19 nt, Artificial Sequence
  Description of Artificial Sequence: Synthetic oligonucleotide
  Sense strand starting at position 379 of SEQ ID NO: 1883202
accauugcuccugggaaug

SEQ ID NO: 2176123 - RNA, 19 nt, Artificial Sequence
  Description of Artificial Sequence: Synthetic oligonucleotide
  Antisense strand to SEQ ID NO: 2176122
cauucccaggagcaauggu

SEQ ID NO: 2176124 - RNA, 19 nt, Artificial Sequence
  Description of Artificial Sequence: Synthetic oligonucleotide
  Sense strand starting at position 502 of SEQ ID NO: 1883202
uauggauaaugcucaggua

SEQ ID NO: 2176125 - RNA, 19 nt, Artificial Sequence
  Description of Artificial Sequence: Synthetic oligonucleotide
  Antisense strand to SEQ ID NO: 2176124
uaccugagcauuauccaua

SEQ ID NO: 2176126 - RNA, 19 nt, Artificial Sequence
  Description of Artificial Sequence: Synthetic oligonucleotide
  Sense strand starting at position 514 of SEQ ID NO: 1883202
ucagguaaguuuccaggga

SEQ ID NO: 2176127 - RNA, 19 nt, Artificial Sequence
  Description of Artificial Sequence: Synthetic oligonucleotide
  Antisense strand to SEQ ID NO: 2176126
ucccuggaaacuuaccuga

SEQ ID NO: 2176128 - RNA, 19 nt, Artificial Sequence
  Description of Artificial Sequence: Synthetic oligonucleotide
  Sense strand starting at position 552 of SEQ ID NO: 1883202
gguuuagucuucucuugaa

SEQ ID NO: 2176129 - RNA, 19 nt, Artificial Sequence
  Description of Artificial Sequence: Synthetic oligonucleotide
  Antisense strand to SEQ ID NO: 2176128
uucaagagaagacuaaacc

SEQ ID NO: 2176130 - RNA, 19 nt, Artificial Sequence
  Description of Artificial Sequence: Synthetic oligonucleotide
  Sense strand starting at position 577 of SEQ ID NO: 1883202
gagcauaaacggugaauau

SEQ ID NO: 2176131 - RNA, 19 nt, Artificial Sequence
  Description of Artificial Sequence: Synthetic oligonucleotide
  Antisense strand to SEQ ID NO: 2176130
auauucaccguuuaugcuc

SEQ ID NO: 2176132 - RNA, 19 nt, Artificial Sequence
  Description of Artificial Sequence: Synthetic oligonucleotide
  Sense strand starting at position 578 of SEQ ID NO: 1883202
agcauaaacggugaauauu

SEQ ID NO: 2176133 - RNA, 19 nt, Artificial Sequence
  Description of Artificial Sequence: Synthetic oligonucleotide
  Antisense strand to SEQ ID NO: 2176132
aauauucaccguuuaugcu

SEQ ID NO: 2176134 - RNA, 19 nt, Artificial Sequence
  Description of Artificial Sequence: Synthetic oligonucleotide
  Sense strand starting at position 586 of SEQ ID NO: 1883202
cggugaauauuccucauga

SEQ ID NO: 2176135 - RNA, 19 nt, Artificial Sequence
  Description of Artificial Sequence: Synthetic oligonucleotide
  Antisense strand to SEQ ID NO: 2176134
ucaugaggaauauucaccg

SEQ ID NO: 2176136 - RNA, 19 nt, Artificial Sequence
  Description of Artificial Sequence: Synthetic oligonucleotide
  Sense strand starting at position 587 of SEQ ID NO: 1883202
ggugaauauuccucaugau

SEQ ID NO: 2176137 - RNA, 19 nt, Artificial Sequence
  Description of Artificial Sequence: Synthetic oligonucleotide
  Antisense strand to SEQ ID NO: 2176136
aucaugaggaauauucacc

SEQ ID NO: 2176138 - RNA, 19 nt, Artificial Sequence
  Description of Artificial Sequence: Synthetic oligonucleotide
  Sense strand starting at position 614 of SEQ ID NO: 1883202
guagucagugcugagggaa

SEQ ID NO: 2176139 - RNA, 19 nt, Artificial Sequence
  Description of Artificial Sequence: Synthetic oligonucleotide
  Antisense strand to SEQ ID NO: 2176138
uucccucagcacugacuac

SEQ ID NO: 2176140 - RNA, 19 nt, Artificial Sequence
  Description of Artificial Sequence: Synthetic oligonucleotide
  Sense strand starting at position 643 of SEQ ID NO: 1883202
gguagcauggcauacauau

SEQ ID NO: 2176141 - RNA, 19 nt, Artificial Sequence
  Description of Artificial Sequence: Synthetic oligonucleotide
  Antisense strand to SEQ ID NO: 2176140
auauguaugccaugcuacc

SEQ ID NO: 2176142 - RNA, 19 nt, Artificial Sequence
  Description of Artificial Sequence: Synthetic oligonucleotide
  Sense strand starting at position 766 of SEQ ID NO: 1883202
ccacauaucagcugggaga

SEQ ID NO: 2176143 - RNA, 19 nt, Artificial Sequence
  Description of Artificial Sequence: Synthetic oligonucleotide
  Antisense strand to SEQ ID NO: 2176142
ucucccagcugauaugugg

SEQ ID NO: 2176144 - RNA, 19 nt, Artificial Sequence
  Description of Artificial Sequence: Synthetic oligonucleotide
  Sense strand starting at position 768 of SEQ ID NO: 1883202
acauaucagcugggagaca

SEQ ID NO: 2176145 - RNA, 19 nt, Artificial Sequence
  Description of Artificial Sequence: Synthetic oligonucleotide
  Antisense strand to SEQ ID NO: 2176144
ugucucccagcugauaugu

SEQ ID NO: 2176146 - RNA, 19 nt, Artificial Sequence
  Description of Artificial Sequence: Synthetic oligonucleotide
  Sense strand starting at position 1059 of SEQ ID NO: 1883202
uccuguauuggucaggguu

SEQ ID NO: 2176147 - RNA, 19 nt, Artificial Sequence
  Description of Artificial Sequence: Synthetic oligonucleotide
  Antisense strand to SEQ ID NO: 2176146
aacccugaccaauacagga

SEQ ID NO: 2176148 - RNA, 19 nt, Artificial Sequence
  Description of Artificial Sequence: Synthetic oligonucleotide
  Sense strand starting at position 1097 of SEQ ID NO: 1883202
auaggacagauguguacau

SEQ ID NO: 2176149 - RNA, 19 nt, Artificial Sequence
  Description of Artificial Sequence: Synthetic oligonucleotide
  Antisense strand to SEQ ID NO: 2176148
auguacacaucuguccuau

SEQ ID NO: 2176150 - RNA, 19 nt, Artificial Sequence
  Description of Artificial Sequence: Synthetic oligonucleotide
  Sense strand starting at position 1992 of SEQ ID NO: 1883202
aggagcugccuccaugauu

SEQ ID NO: 2176151 - RNA, 19 nt, Artificial Sequence
  Description of Artificial Sequence: Synthetic oligonucleotide
  Antisense strand to SEQ ID NO: 2176150
aaucauggaggcagcuccu

SEQ ID NO: 2176152 - RNA, 19 nt, Artificial Sequence
  Description of Artificial Sequence: Synthetic oligonucleotide
  Sense strand starting at position 1995 of SEQ ID NO: 1883202
agcugccuccaugauuaga

SEQ ID NO: 2176153 - RNA, 19 nt, Artificial Sequence
  Description of Artificial Sequence: Synthetic oligonucleotide
  Antisense strand to SEQ ID NO: 2176152
ucuaaucauggaggcagcu

SEQ ID NO: 2176154 - RNA, 19 nt, Artificial Sequence
  Description of Artificial Sequence: Synthetic oligonucleotide
  Sense strand starting at position 2199 of SEQ ID NO: 1883202
agaccaguggagugacaua

SEQ ID NO: 2176155 - RNA, 19 nt, Artificial Sequence
  Description of Artificial Sequence: Synthetic oligonucleotide
  Antisense strand to SEQ ID NO: 2176154
uaugucacuccacuggucu

SEQ ID NO: 2176156 - RNA, 19 nt, Artificial Sequence
  Description of Artificial Sequence: Synthetic oligonucleotide
  Sense strand starting at position 2204 of SEQ ID NO: 1883202
aguggagugacauacuguu

SEQ ID NO: 2176157 - RNA, 19 nt, Artificial Sequence
  Description of Artificial Sequence: Synthetic oligonucleotide
  Antisense strand to SEQ ID NO: 2176156
aacaguaugucacuccacu

SEQ ID NO: 2176158 - RNA, 19 nt, Artificial Sequence
  Description of Artificial Sequence: Synthetic oligonucleotide
  Sense strand starting at position 2210 of SEQ ID NO: 1883202
gugacauacuguuuguaag

SEQ ID NO: 2176159 - RNA, 19 nt, Artificial Sequence
  Description of Artificial Sequence: Synthetic oligonucleotide
  Antisense strand to SEQ ID NO: 2176158
cuuacaaacaguaugucac

SEQ ID NO: 2176160 - RNA, 19 nt, Artificial Sequence
  Description of Artificial Sequence: Synthetic oligonucleotide
  Sense strand starting at position 2211 of SEQ ID NO: 1883202
ugacauacuguuuguaagu

SEQ ID NO: 2176161 - RNA, 19 nt, Artificial Sequence
  Description of Artificial Sequence: Synthetic oligonucleotide
  Antisense strand to SEQ ID NO: 2176160
acuuacaaacaguauguca

SEQ ID NO: 2176162 - RNA, 19 nt, Artificial Sequence
  Description of Artificial Sequence: Synthetic oligonucleotide
  Sense strand starting at position 2212 of SEQ ID NO: 1883202
gacauacuguuuguaagug

SEQ ID NO: 2176163 - RNA, 19 nt, Artificial Sequence
  Description of Artificial Sequence: Synthetic oligonucleotide
  Antisense strand to SEQ ID NO: 2176162
cacuuacaaacaguauguc

SEQ ID NO: 2176164 - RNA, 19 nt, Artificial Sequence
  Description of Artificial Sequence: Synthetic oligonucleotide
  Sense strand starting at position 2228 of SEQ ID NO: 1883202
gugcuugaaggguauaaac

SEQ ID NO: 2176165 - RNA, 19 nt, Artificial Sequence
  Description of Artificial Sequence: Synthetic oligonucleotide
  Antisense strand to SEQ ID NO: 2176164
guuuauacccuucaagcac

SEQ ID NO: 2176166 - RNA, 19 nt, Artificial Sequence
  Description of Artificial Sequence: Synthetic oligonucleotide
  Sense strand starting at position 2230 of SEQ ID NO: 1883202
gcuugaaggguauaaacuu

SEQ ID NO: 2176167 - RNA, 19 nt, Artificial Sequence
  Description of Artificial Sequence: Synthetic oligonucleotide
  Antisense strand to SEQ ID NO: 2176166
aaguuuauacccuucaagc

SEQ ID NO: 2176168 - RNA, 19 nt, Artificial Sequence
  Description of Artificial Sequence: Synthetic oligonucleotide
  Sense strand starting at position 2298 of SEQ ID NO: 1883202
agaguaucuaguggaacaa

SEQ ID NO: 2176169 - RNA, 19 nt, Artificial Sequence
  Description of Artificial Sequence: Synthetic oligonucleotide
  Antisense strand to SEQ ID NO: 2176168
uuguuccacuagauacucu

SEQ ID NO: 2176170 - RNA, 19 nt, Artificial Sequence
  Description of Artificial Sequence: Synthetic oligonucleotide
  Sense strand starting at position 2348 of SEQ ID NO: 1883202
cuggaagaggccugcucau

SEQ ID NO: 2176171 - RNA, 19 nt, Artificial Sequence
  Description of Artificial Sequence: Synthetic oligonucleotide
  Antisense strand to SEQ ID NO: 2176170
augagcaggccucuuccag

SEQ ID NO: 2176172 - RNA, 19 nt, Artificial Sequence
  Description of Artificial Sequence: Synthetic oligonucleotide
  Sense strand starting at position 2655 of SEQ ID NO: 1883202
aaacaugaguguuugaaua

SEQ ID NO: 2176173 - RNA, 19 nt, Artificial Sequence
  Description of Artificial Sequence: Synthetic oligonucleotide
  Antisense strand to SEQ ID NO: 2176172
uauucaaacacucauguuu

SEQ ID NO: 2176174 - RNA, 19 nt, Artificial Sequence
  Description of Artificial Sequence: Synthetic oligonucleotide
  Sense strand starting at position 2816 of SEQ ID NO: 1883202
gcaaguaggagagguauca

SEQ ID NO: 2176175 - RNA, 19 nt, Artificial Sequence
  Description of Artificial Sequence: Synthetic oligonucleotide
  Antisense strand to SEQ ID NO: 2176174
ugauaccucuccuacuugc

SEQ ID NO: 2176176 - RNA, 19 nt, Artificial Sequence
  Description of Artificial Sequence: Synthetic oligonucleotide
  Sense strand starting at position 3078 of SEQ ID NO: 1883202
gauguuuaucaaggcaaca

SEQ ID NO: 2176177 - RNA, 19 nt, Artificial Sequence
  Description of Artificial Sequence: Synthetic oligonucleotide
  Antisense strand to SEQ ID NO: 2176176
uguugccuugauaaacauc

SEQ ID NO: 2176178 - RNA, 19 nt, Artificial Sequence
  Description of Artificial Sequence: Synthetic oligonucleotide
  Sense strand starting at position 3568 of SEQ ID NO: 1883202
ccaagaauggagugauagu

SEQ ID NO: 2176179 - RNA, 19 nt, Artificial Sequence
  Description of Artificial Sequence: Synthetic oligonucleotide
  Antisense strand to SEQ ID NO: 2176178
acuaucacuccauucuugg

SEQ ID NO: 2176180 - RNA, 19 nt, Artificial Sequence
  Description of Artificial Sequence: Synthetic oligonucleotide
  Sense strand starting at position 3582 of SEQ ID NO: 1883202
auaguaaggucauccagaa

SEQ ID NO: 2176181 - RNA, 19 nt, Artificial Sequence
  Description of Artificial Sequence: Synthetic oligonucleotide
  Antisense strand to SEQ ID NO: 2176180
uucuggaugaccuuacuau

SEQ ID NO: 2176182 - RNA, 19 nt, Artificial Sequence
  Description of Artificial Sequence: Synthetic oligonucleotide
  Sense strand starting at position 3650 of SEQ ID NO: 1883202
guuugcuaugaguaauaac

SEQ ID NO: 2176183 - RNA, 19 nt, Artificial Sequence
  Description of Artificial Sequence: Synthetic oligonucleotide
  Antisense strand to SEQ ID NO: 2176182
guuauuacucauagcaaac

SEQ ID NO: 2176184 - RNA, 19 nt, Artificial Sequence
  Description of Artificial Sequence: Synthetic oligonucleotide
  Sense strand starting at position 3704 of SEQ ID NO: 1883202
cagccugugguauaaucaa

SEQ ID NO: 2176185 - RNA, 19 nt, Artificial Sequence
  Description of Artificial Sequence: Synthetic oligonucleotide
  Antisense strand to SEQ ID NO: 2176184
uugauuauaccacaggcug

SEQ ID NO: 2176186 - RNA, 19 nt, Artificial Sequence
  Description of Artificial Sequence: Synthetic oligonucleotide
  Sense strand starting at position 3957 of SEQ ID NO: 1883202
acuaguucuuaagugagca

SEQ ID NO: 2176187 - RNA, 19 nt, Artificial Sequence
  Description of Artificial Sequence: Synthetic oligonucleotide
  Antisense strand to SEQ ID NO: 2176186
ugcucacuuaagaacuagu

SEQ ID NO: 2176188 - RNA, 19 nt, Artificial Sequence
  Description of Artificial Sequence: Synthetic oligonucleotide
  Sense strand starting at position 3961 of SEQ ID NO: 1883202
guucuuaagugagcauuua

SEQ ID NO: 2176189 - RNA, 19 nt, Artificial Sequence
  Description of Artificial Sequence: Synthetic oligonucleotide
  Antisense strand to SEQ ID NO: 2176188
uaaaugcucacuuaagaac

SEQ ID NO: 2176190 - RNA, 19 nt, Artificial Sequence
  Description of Artificial Sequence: Synthetic oligonucleotide
  Sense strand starting at position 3969 of SEQ ID NO: 1883202
gugagcauuuacuaagaag

SEQ ID NO: 2176191 - RNA, 19 nt, Artificial Sequence
  Description of Artificial Sequence: Synthetic oligonucleotide
  Antisense strand to SEQ ID NO: 2176190
cuucuuaguaaaugcucac

SEQ ID NO: 2176192 - RNA, 19 nt, Artificial Sequence
  Description of Artificial Sequence: Synthetic oligonucleotide
  Sense strand starting at position 3972 of SEQ ID NO: 1883202
agcauuuacuaagaagaga

SEQ ID NO: 2176193 - RNA, 19 nt, Artificial Sequence
  Description of Artificial Sequence: Synthetic oligonucleotide
  Antisense strand to SEQ ID NO: 2176192
ucucuucuuaguaaaugcu

SEQ ID NO: 2176194 - RNA, 19 nt, Artificial Sequence
  Description of Artificial Sequence: Synthetic oligonucleotide
  Sense strand starting at position 43 of SEQ ID NO: 1883203
agccaauuaagagacguau

SEQ ID NO: 2176195 - RNA, 19 nt, Artificial Sequence
  Description of Artificial Sequence: Synthetic oligonucleotide
  Antisense strand to SEQ ID NO: 2176194
auacgucucuuaauuggcu

SEQ ID NO: 2176196 - RNA, 19 nt, Artificial Sequence
  Description of Artificial Sequence: Synthetic oligonucleotide
  Sense strand starting at position 45 of SEQ ID NO: 1883203
ccaauuaagagacguauag

SEQ ID NO: 2176197 - RNA, 19 nt, Artificial Sequence
  Description of Artificial Sequence: Synthetic oligonucleotide
  Antisense strand to SEQ ID NO: 2176196
cuauacgucucuuaauugg

SEQ ID NO: 2176198 - RNA, 19 nt, Artificial Sequence
  Description of Artificial Sequence: Synthetic oligonucleotide
  Sense strand starting at position 57 of SEQ ID NO: 1883203
cguauagaagacugagagu

SEQ ID NO: 2176199 - RNA, 19 nt, Artificial Sequence
  Description of Artificial Sequence: Synthetic oligonucleotide
  Antisense strand to SEQ ID NO: 2176198
acucucagucuucuauacg

SEQ ID NO: 2176200 - RNA, 19 nt, Artificial Sequence
  Description of Artificial Sequence: Synthetic oligonucleotide
  Sense strand starting at position 92 of SEQ ID NO: 1883203
ggcuuuauggcuuaucaaa

SEQ ID NO: 2176201 - RNA, 19 nt, Artificial Sequence
  Description of Artificial Sequence: Synthetic oligonucleotide
  Antisense strand to SEQ ID NO: 2176200
uuugauaagccauaaagcc

SEQ ID NO: 2176202 - RNA, 19 nt, Artificial Sequence
  Description of Artificial Sequence: Synthetic oligonucleotide
  Sense strand starting at position 318 of SEQ ID NO: 1883203
ugagacaguuuccugggaa

SEQ ID NO: 2176203 - RNA, 19 nt, Artificial Sequence
  Description of Artificial Sequence: Synthetic oligonucleotide
  Antisense strand to SEQ ID NO: 2176202
uucccaggaaacugucuca

SEQ ID NO: 2176204 - RNA, 19 nt, Artificial Sequence
  Description of Artificial Sequence: Synthetic oligonucleotide
  Sense strand starting at position 321 of SEQ ID NO: 1883203
gacaguuuccugggaaguc

SEQ ID NO: 2176205 - RNA, 19 nt, Artificial Sequence
  Description of Artificial Sequence: Synthetic oligonucleotide
  Antisense strand to SEQ ID NO: 2176204
gacuucccaggaaacuguc

SEQ ID NO: 2176206 - RNA, 19 nt, Artificial Sequence
  Description of Artificial Sequence: Synthetic oligonucleotide
  Sense strand starting at position 331 of SEQ ID NO: 1883203
ugggaagucccauguuuaa

SEQ ID NO: 2176207 - RNA, 19 nt, Artificial Sequence
  Description of Artificial Sequence: Synthetic oligonucleotide
  Antisense strand to SEQ ID NO: 2176206
uuaaacaugggacuuccca

SEQ ID NO: 2176208 - RNA, 19 nt, Artificial Sequence
  Description of Artificial Sequence: Synthetic oligonucleotide
  Sense strand starting at position 582 of SEQ ID NO: 1883203
accagaguugcacaaauuc

SEQ ID NO: 2176209 - RNA, 19 nt, Artificial Sequence
  Description of Artificial Sequence: Synthetic oligonucleotide
  Antisense strand to SEQ ID NO: 2176208
gaauuugugcaacucuggu

SEQ ID NO: 2176210 - RNA, 19 nt, Artificial Sequence
  Description of Artificial Sequence: Synthetic oligonucleotide
  Sense strand starting at position 759 of SEQ ID NO: 1883203
ggaggucucacagagcagu

SEQ ID NO: 2176211 - RNA, 19 nt, Artificial Sequence
  Description of Artificial Sequence: Synthetic oligonucleotide
  Antisense strand to SEQ ID NO: 2176210
acugcucugugagaccucc

SEQ ID NO: 2176212 - RNA, 19 nt, Artificial Sequence
  Description of Artificial Sequence: Synthetic oligonucleotide
  Sense strand starting at position 801 of SEQ ID NO: 1883203
uggcuuugaguuuggauuu

SEQ ID NO: 2176213 - RNA, 19 nt, Artificial Sequence
  Description of Artificial Sequence: Synthetic oligonucleotide
  Antisense strand to SEQ ID NO: 2176212
aaauccaaacucaaagcca

SEQ ID NO: 2176214 - RNA, 19 nt, Artificial Sequence
  Description of Artificial Sequence: Synthetic oligonucleotide
  Sense strand starting at position 844 of SEQ ID NO: 1883203
gacuuugagagagguuaug

SEQ ID NO: 2176215 - RNA, 19 nt, Artificial Sequence
  Description of Artificial Sequence: Synthetic oligonucleotide
  Antisense strand to SEQ ID NO: 2176214
cauaaccucucucaaaguc

SEQ ID NO: 2176216 - RNA, 19 nt, Artificial Sequence
  Description of Artificial Sequence: Synthetic oligonucleotide
  Sense strand starting at position 938 of SEQ ID NO: 1883203
augagauuauguguuugaa

SEQ ID NO: 2176217 - RNA, 19 nt, Artificial Sequence
  Description of Artificial Sequence: Synthetic oligonucleotide
  Antisense strand to SEQ ID NO: 2176216
uucaaacacauaaucucau

SEQ ID NO: 2176218 - RNA, 19 nt, Artificial Sequence
  Description of Artificial Sequence: Synthetic oligonucleotide
  Sense strand starting at position 940 of SEQ ID NO: 1883203
gagauuauguguuugaaau

SEQ ID NO: 2176219 - RNA, 19 nt, Artificial Sequence
  Description of Artificial Sequence: Synthetic oligonucleotide
  Antisense strand to SEQ ID NO: 2176218
auuucaaacacauaaucuc

SEQ ID NO: 2176220 - RNA, 19 nt, Artificial Sequence
  Description of Artificial Sequence: Synthetic oligonucleotide
  Sense strand starting at position 941 of SEQ ID NO: 1883203
agauuauguguuugaaaug

SEQ ID NO: 2176221 - RNA, 19 nt, Artificial Sequence
  Description of Artificial Sequence: Synthetic oligonucleotide
  Antisense strand to SEQ ID NO: 2176220
cauuucaaacacauaaucu

SEQ ID NO: 2176222 - RNA, 19 nt, Artificial Sequence
  Description of Artificial Sequence: Synthetic oligonucleotide
  Sense strand starting at position 978 of SEQ ID NO: 1883203
guagcuuagcacuaauaag

SEQ ID NO: 2176223 - RNA, 19 nt, Artificial Sequence
  Description of Artificial Sequence: Synthetic oligonucleotide
  Antisense strand to SEQ ID NO: 2176222
cuuauuagugcuaagcuac

SEQ ID NO: 2176224 - RNA, 19 nt, Artificial Sequence
  Description of Artificial Sequence: Synthetic oligonucleotide
  Sense strand starting at position 1021 of SEQ ID NO: 1883203
ugcacuuacccauaguaug

SEQ ID NO: 2176225 - RNA, 19 nt, Artificial Sequence
  Description of Artificial Sequence: Synthetic oligonucleotide
  Antisense strand to SEQ ID NO: 2176224
cauacuauggguaagugca

SEQ ID NO: 2176226 - RNA, 19 nt, Artificial Sequence
  Description of Artificial Sequence: Synthetic oligonucleotide
  Sense strand starting at position 1129 of SEQ ID NO: 1883203
ggcuucuuccuagaaacca

SEQ ID NO: 2176227 - RNA, 19 nt, Artificial Sequence
  Description of Artificial Sequence: Synthetic oligonucleotide
  Antisense strand to SEQ ID NO: 2176226
ugguuucuaggaagaagcc

SEQ ID NO: 2176228 - RNA, 19 nt, Artificial Sequence
  Description of Artificial Sequence: Synthetic oligonucleotide
  Sense strand starting at position 1187 of SEQ ID NO: 1883203
ucucauuucugguuugguu

SEQ ID NO: 2176229 - RNA, 19 nt, Artificial Sequence
  Description of Artificial Sequence: Synthetic oligonucleotide
  Antisense strand to SEQ ID NO: 2176228
aaccaaaccagaaaugaga

SEQ ID NO: 2176230 - RNA, 19 nt, Artificial Sequence
  Description of Artificial Sequence: Synthetic oligonucleotide
  Sense strand starting at position 1408 of SEQ ID NO: 1883203
uggaguuaauaacucaguu

SEQ ID NO: 2176231 - RNA, 19 nt, Artificial Sequence
  Description of Artificial Sequence: Synthetic oligonucleotide
  Antisense strand to SEQ ID NO: 2176230
aacugaguuauuaacucca

SEQ ID NO: 2176232 - RNA, 19 nt, Artificial Sequence
  Description of Artificial Sequence: Synthetic oligonucleotide
  Sense strand starting at position 1490 of SEQ ID NO: 1883203
ugacaaacacuauguagua

SEQ ID NO: 2176233 - RNA, 19 nt, Artificial Sequence
  Description of Artificial Sequence: Synthetic oligonucleotide
  Antisense strand to SEQ ID NO: 2176232
uacuacauaguguuuguca

SEQ ID NO: 2176234 - RNA, 19 nt, Artificial Sequence
  Description of Artificial Sequence: Synthetic oligonucleotide
  Sense strand starting at position 1618 of SEQ ID NO: 1883203
uuaguaacuuaccugaagu

SEQ ID NO: 2176235 - RNA, 19 nt, Artificial Sequence
  Description of Artificial Sequence: Synthetic oligonucleotide
  Antisense strand to SEQ ID NO: 2176234
acuucagguaaguuacuaa

SEQ ID NO: 2176236 - RNA, 19 nt, Artificial Sequence
  Description of Artificial Sequence: Synthetic oligonucleotide
  Sense strand starting at position 1620 of SEQ ID NO: 1883203
aguaacuuaccugaaguua

SEQ ID NO: 2176237 - RNA, 19 nt, Artificial Sequence
  Description of Artificial Sequence: Synthetic oligonucleotide
  Antisense strand to SEQ ID NO: 2176236
uaacuucagguaaguuacu

SEQ ID NO: 2176238 - RNA, 19 nt, Artificial Sequence
  Description of Artificial Sequence: Synthetic oligonucleotide
  Sense strand starting at position 1771 of SEQ ID NO: 1883203
gcaggaaugccagacuuau

SEQ ID NO: 2176239 - RNA, 19 nt, Artificial Sequence
  Description of Artificial Sequence: Synthetic oligonucleotide
  Antisense strand to SEQ ID NO: 2176238
auaagucuggcauuccugc

SEQ ID NO: 2176240 - RNA, 19 nt, Artificial Sequence
  Description of Artificial Sequence: Synthetic oligonucleotide
  Sense strand starting at position 1777 of SEQ ID NO: 1883203
augccagacuuauuagaaa

SEQ ID NO: 2176241 - RNA, 19 nt, Artificial Sequence
  Description of Artificial Sequence: Synthetic oligonucleotide
  Antisense strand to SEQ ID NO: 2176240
uuucuaauaagucuggcau

SEQ ID NO: 2176242 - RNA, 19 nt, Artificial Sequence
  Description of Artificial Sequence: Synthetic oligonucleotide
  Sense strand starting at position 2247 of SEQ ID NO: 1883203
acaggaaauuuacaaaugu

SEQ ID NO: 2176243 - RNA, 19 nt, Artificial Sequence
  Description of Artificial Sequence: Synthetic oligonucleotide
  Antisense strand to SEQ ID NO: 2176242
acauuuguaaauuuccugu

SEQ ID NO: 2176244 - RNA, 19 nt, Artificial Sequence
  Description of Artificial Sequence: Synthetic oligonucleotide
  Sense strand starting at position 2270 of SEQ ID NO: 1883203
gcugaaguaguagagcaaa

SEQ ID NO: 2176245 - RNA, 19 nt, Artificial Sequence
  Description of Artificial Sequence: Synthetic oligonucleotide
  Antisense strand to SEQ ID NO: 2176244
uuugcucuacuacuucagc

SEQ ID NO: 2176246 - RNA, 19 nt, Artificial Sequence
  Description of Artificial Sequence: Synthetic oligonucleotide
  Sense strand starting at position 2303 of SEQ ID NO: 1883203
uugggcuuacgggaucauu

SEQ ID NO: 2176247 - RNA, 19 nt, Artificial Sequence
  Description of Artificial Sequence: Synthetic oligonucleotide
  Antisense strand to SEQ ID NO: 2176246
aaugaucccguaagcccaa

SEQ ID NO: 2176248 - RNA, 19 nt, Artificial Sequence
  Description of Artificial Sequence: Synthetic oligonucleotide
  Sense strand starting at position 2318 of SEQ ID NO: 1883203
cauuguggaguuuaccauu

SEQ ID NO: 2176249 - RNA, 19 nt, Artificial Sequence
  Description of Artificial Sequence: Synthetic oligonucleotide
  Antisense strand to SEQ ID NO: 2176248
aaugguaaacuccacaaug

SEQ ID NO: 2176250 - RNA, 19 nt, Artificial Sequence
  Description of Artificial Sequence: Synthetic oligonucleotide
  Sense strand starting at position 2382 of SEQ ID NO: 1883203
aggaaagagccucggauaa

SEQ ID NO: 2176251 - RNA, 19 nt, Artificial Sequence
  Description of Artificial Sequence: Synthetic oligonucleotide
  Antisense strand to SEQ ID NO: 2176250
uuauccgaggcucuuuccu

SEQ ID NO: 2176252 - RNA, 19 nt, Artificial Sequence
  Description of Artificial Sequence: Synthetic oligonucleotide
  Sense strand starting at position 2511 of SEQ ID NO: 1883203
agaugugcucuuggaggaa

SEQ ID NO: 2176253 - RNA, 19 nt, Artificial Sequence
  Description of Artificial Sequence: Synthetic oligonucleotide
  Antisense strand to SEQ ID NO: 2176252
uuccuccaagagcacaucu

SEQ ID NO: 2176254 - RNA, 19 nt, Artificial Sequence
  Description of Artificial Sequence: Synthetic oligonucleotide
  Sense strand starting at position 2559 of SEQ ID NO: 1883203
cucaguuaugaaugauccu

SEQ ID NO: 2176255 - RNA, 19 nt, Artificial Sequence
  Description of Artificial Sequence: Synthetic oligonucleotide
  Antisense strand to SEQ ID NO: 2176254
aggaucauucauaacugag

SEQ ID NO: 2176256 - RNA, 19 nt, Artificial Sequence
  Description of Artificial Sequence: Synthetic oligonucleotide
  Sense strand starting at position 2562 of SEQ ID NO: 1883203
aguuaugaaugauccugau

SEQ ID NO: 2176257 - RNA, 19 nt, Artificial Sequence
  Description of Artificial Sequence: Synthetic oligonucleotide
  Antisense strand to SEQ ID NO: 2176256
aucaggaucauucauaacu

SEQ ID NO: 2176258 - RNA, 19 nt, Artificial Sequence
  Description of Artificial Sequence: Synthetic oligonucleotide
  Sense strand starting at position 2641 of SEQ ID NO: 1883203
auugcugagcucgagaaua

SEQ ID NO: 2176259 - RNA, 19 nt, Artificial Sequence
  Description of Artificial Sequence: Synthetic oligonucleotide
  Antisense strand to SEQ ID NO: 2176258
uauucucgagcucagcaau

SEQ ID NO: 2176260 - RNA, 19 nt, Artificial Sequence
  Description of Artificial Sequence: Synthetic oligonucleotide
  Sense strand starting at position 2643 of SEQ ID NO: 1883203
ugcugagcucgagaauaaa

SEQ ID NO: 2176261 - RNA, 19 nt, Artificial Sequence
  Description of Artificial Sequence: Synthetic oligonucleotide
  Antisense strand to SEQ ID NO: 2176260
uuuauucucgagcucagca

SEQ ID NO: 2176262 - RNA, 19 nt, Artificial Sequence
  Description of Artificial Sequence: Synthetic oligonucleotide
  Sense strand starting at position 2927 of SEQ ID NO: 1883203
gaguuagacuuucuuagau

SEQ ID NO: 2176263 - RNA, 19 nt, Artificial Sequence
  Description of Artificial Sequence: Synthetic oligonucleotide
  Antisense strand to SEQ ID NO: 2176262
aucuaagaaagucuaacuc

SEQ ID NO: 2176264 - RNA, 19 nt, Artificial Sequence
  Description of Artificial Sequence: Synthetic oligonucleotide
  Sense strand starting at position 3123 of SEQ ID NO: 1883203
agagauacuuagguugauu

SEQ ID NO: 2176265 - RNA, 19 nt, Artificial Sequence
  Description of Artificial Sequence: Synthetic oligonucleotide
  Antisense strand to SEQ ID NO: 2176264
aaucaaccuaaguaucucu

SEQ ID NO: 2176266 - RNA, 19 nt, Artificial Sequence
  Description of Artificial Sequence: Synthetic oligonucleotide
  Sense strand starting at position 3483 of SEQ ID NO: 1883203
uuucucauguacucauuga

SEQ ID NO: 2176267 - RNA, 19 nt, Artificial Sequence
  Description of Artificial Sequence: Synthetic oligonucleotide
  Antisense strand to SEQ ID NO: 2176266
ucaaugaguacaugagaaa

SEQ ID NO: 2176268 - RNA, 19 nt, Artificial Sequence
  Description of Artificial Sequence: Synthetic oligonucleotide
  Sense strand starting at position 3487 of SEQ ID NO: 1883203
ucauguacucauugaucau

SEQ ID NO: 2176269 - RNA, 19 nt, Artificial Sequence
  Description of Artificial Sequence: Synthetic oligonucleotide
  Antisense strand to SEQ ID NO: 2176268
augaucaaugaguacauga

SEQ ID NO: 2176270 - RNA, 19 nt, Artificial Sequence
  Description of Artificial Sequence: Synthetic oligonucleotide
  Sense strand starting at position 3840 of SEQ ID NO: 1883203
uacagauucuggucuuagg

SEQ ID NO: 2176271 - RNA, 19 nt, Artificial Sequence
  Description of Artificial Sequence: Synthetic oligonucleotide
  Antisense strand to SEQ ID NO: 2176270
ccuaagaccagaaucugua

SEQ ID NO: 2176272 - RNA, 19 nt, Artificial Sequence
  Description of Artificial Sequence: Synthetic oligonucleotide
  Sense strand starting at position 3879 of SEQ ID NO: 1883203
ugauuugagguuuguguau

SEQ ID NO: 2176273 - RNA, 19 nt, Artificial Sequence
  Description of Artificial Sequence: Synthetic oligonucleotide
  Antisense strand to SEQ ID NO: 2176272
auacacaaaccucaaauca

SEQ ID NO: 2176274 - RNA, 19 nt, Artificial Sequence
  Description of Artificial Sequence: Synthetic oligonucleotide
  Sense strand starting at position 120 of SEQ ID NO: 1883204
gagaaagaguuagcugaac

SEQ ID NO: 2176275 - RNA, 19 nt, Artificial Sequence
  Description of Artificial Sequence: Synthetic oligonucleotide
  Antisense strand to SEQ ID NO: 2176274
guucagcuaacucuuucuc

SEQ ID NO: 2176276 - RNA, 19 nt, Artificial Sequence
  Description of Artificial Sequence: Synthetic oligonucleotide
  Sense strand starting at position 380 of SEQ ID NO: 1883204
gaagaugucuaaucuuuga

SEQ ID NO: 2176277 - RNA, 19 nt, Artificial Sequence
  Description of Artificial Sequence: Synthetic oligonucleotide
  Antisense strand to SEQ ID NO: 2176276
ucaaagauuagacaucuuc

SEQ ID NO: 2176278 - RNA, 19 nt, Artificial Sequence
  Description of Artificial Sequence: Synthetic oligonucleotide
  Sense strand starting at position 383 of SEQ ID NO: 1883204
gaugucuaaucuuugaaug

SEQ ID NO: 2176279 - RNA, 19 nt, Artificial Sequence
  Description of Artificial Sequence: Synthetic oligonucleotide
  Antisense strand to SEQ ID NO: 2176278
cauucaaagauuagacauc

SEQ ID NO: 2176280 - RNA, 19 nt, Artificial Sequence
  Description of Artificial Sequence: Synthetic oligonucleotide
  Sense strand starting at position 384 of SEQ ID NO: 1883204
augucuaaucuuugaauga

SEQ ID NO: 2176281 - RNA, 19 nt, Artificial Sequence
  Description of Artificial Sequence: Synthetic oligonucleotide
  Antisense strand to SEQ ID NO: 2176280
ucauucaaagauuagacau

SEQ ID NO: 2176282 - RNA, 19 nt, Artificial Sequence
  Description of Artificial Sequence: Synthetic oligonucleotide
  Sense strand starting at position 420 of SEQ ID NO: 1883204
ucuagauuaccauguugaa

SEQ ID NO: 2176283 - RNA, 19 nt, Artificial Sequence
  Description of Artificial Sequence: Synthetic oligonucleotide
  Antisense strand to SEQ ID NO: 2176282
uucaacaugguaaucuaga

SEQ ID NO: 2176284 - RNA, 19 nt, Artificial Sequence
  Description of Artificial Sequence: Synthetic oligonucleotide
  Sense strand starting at position 575 of SEQ ID NO: 1883204
cucgauaacugaguaacua

SEQ ID NO: 2176285 - RNA, 19 nt, Artificial Sequence
  Description of Artificial Sequence: Synthetic oligonucleotide
  Antisense strand to SEQ ID NO: 2176284
uaguuacucaguuaucgag

SEQ ID NO: 2176286 - RNA, 19 nt, Artificial Sequence
  Description of Artificial Sequence: Synthetic oligonucleotide
  Sense strand starting at position 689 of SEQ ID NO: 1883204
agugacagguacuuuaaau

SEQ ID NO: 2176287 - RNA, 19 nt, Artificial Sequence
  Description of Artificial Sequence: Synthetic oligonucleotide
  Antisense strand to SEQ ID NO: 2176286
auuuaaaguaccugucacu

SEQ ID NO: 2176288 - RNA, 19 nt, Artificial Sequence
  Description of Artificial Sequence: Synthetic oligonucleotide
  Sense strand starting at position 720 of SEQ ID NO: 1883204
uguuuaagaugguccugaa

SEQ ID NO: 2176289 - RNA, 19 nt, Artificial Sequence
  Description of Artificial Sequence: Synthetic oligonucleotide
  Antisense strand to SEQ ID NO: 2176288
uucaggaccaucuuaaaca

SEQ ID NO: 2176290 - RNA, 19 nt, Artificial Sequence
  Description of Artificial Sequence: Synthetic oligonucleotide
  Sense strand starting at position 806 of SEQ ID NO: 1883204
ugcaauacuccaugaguaa

SEQ ID NO: 2176291 - RNA, 19 nt, Artificial Sequence
  Description of Artificial Sequence: Synthetic oligonucleotide
  Antisense strand to SEQ ID NO: 2176290
uuacucauggaguauugca

SEQ ID NO: 2176292 - RNA, 19 nt, Artificial Sequence
  Description of Artificial Sequence: Synthetic oligonucleotide
  Sense strand starting at position 807 of SEQ ID NO: 1883204
gcaauacuccaugaguaac

SEQ ID NO: 2176293 - RNA, 19 nt, Artificial Sequence
  Description of Artificial Sequence: Synthetic oligonucleotide
  Antisense strand to SEQ ID NO: 2176292
guuacucauggaguauugc

SEQ ID NO: 2176294 - RNA, 19 nt, Artificial Sequence
  Description of Artificial Sequence: Synthetic oligonucleotide
  Sense strand starting at position 897 of SEQ ID NO: 1883204
ccuggugucagauaaugau

SEQ ID NO: 2176295 - RNA, 19 nt, Artificial Sequence
  Description of Artificial Sequence: Synthetic oligonucleotide
  Antisense strand to SEQ ID NO: 2176294
aucauuaucugacaccagg

SEQ ID NO: 2176296 - RNA, 19 nt, Artificial Sequence
  Description of Artificial Sequence: Synthetic oligonucleotide
  Sense strand starting at position 957 of SEQ ID NO: 1883204
gugcaaccugaaugaaaug

SEQ ID NO: 2176297 - RNA, 19 nt, Artificial Sequence
  Description of Artificial Sequence: Synthetic oligonucleotide
  Antisense strand to SEQ ID NO: 2176296
cauuucauucagguugcac

SEQ ID NO: 2176298 - RNA, 19 nt, Artificial Sequence
  Description of Artificial Sequence: Synthetic oligonucleotide
  Sense strand starting at position 1567 of SEQ ID NO: 1883204
ucuccuaguccagaugcua

SEQ ID NO: 2176299 - RNA, 19 nt, Artificial Sequence
  Description of Artificial Sequence: Synthetic oligonucleotide
  Antisense strand to SEQ ID NO: 2176298
uagcaucuggacuaggaga

SEQ ID NO: 2176300 - RNA, 19 nt, Artificial Sequence
  Description of Artificial Sequence: Synthetic oligonucleotide
  Sense strand starting at position 1687 of SEQ ID NO: 1883204
guauaagcucuaugagacc

SEQ ID NO: 2176301 - RNA, 19 nt, Artificial Sequence
  Description of Artificial Sequence: Synthetic oligonucleotide
  Antisense strand to SEQ ID NO: 2176300
ggucucauagagcuuauac

SEQ ID NO: 2176302 - RNA, 19 nt, Artificial Sequence
  Description of Artificial Sequence: Synthetic oligonucleotide
  Sense strand starting at position 1699 of SEQ ID NO: 1883204
ugagaccuauaaucaguuu

SEQ ID NO: 2176303 - RNA, 19 nt, Artificial Sequence
  Description of Artificial Sequence: Synthetic oligonucleotide
  Antisense strand to SEQ ID NO: 2176302
aaacugauuauaggucuca

SEQ ID NO: 2176304 - RNA, 19 nt, Artificial Sequence
  Description of Artificial Sequence: Synthetic oligonucleotide
  Sense strand starting at position 2067 of SEQ ID NO: 1883204
gcugcucucccagagaaca

SEQ ID NO: 2176305 - RNA, 19 nt, Artificial Sequence
  Description of Artificial Sequence: Synthetic oligonucleotide
  Antisense strand to SEQ ID NO: 2176304
uguucucugggagagcagc

SEQ ID NO: 2176306 - RNA, 19 nt, Artificial Sequence
  Description of Artificial Sequence: Synthetic oligonucleotide
  Sense strand starting at position 2106 of SEQ ID NO: 1883204
cagugaagacugcaaaguu

SEQ ID NO: 2176307 - RNA, 19 nt, Artificial Sequence
  Description of Artificial Sequence: Synthetic oligonucleotide
  Antisense strand to SEQ ID NO: 2176306
aacuuugcagucuucacug

SEQ ID NO: 2176308 - RNA, 19 nt, Artificial Sequence
  Description of Artificial Sequence: Synthetic oligonucleotide
  Sense strand starting at position 2248 of SEQ ID NO: 1883204
aaagaaaggugagaagaaa

SEQ ID NO: 2176309 - RNA, 19 nt, Artificial Sequence
  Description of Artificial Sequence: Synthetic oligonucleotide
  Antisense strand to SEQ ID NO: 2176308
uuucuucucaccuuucuuu

SEQ ID NO: 2176310 - RNA, 19 nt, Artificial Sequence
  Description of Artificial Sequence: Synthetic oligonucleotide
  Sense strand starting at position 2505 of SEQ ID NO: 1883204
acacaaauuuacugaggaa

SEQ ID NO: 2176311 - RNA, 19 nt, Artificial Sequence
  Description of Artificial Sequence: Synthetic oligonucleotide
  Antisense strand to SEQ ID NO: 2176310
uuccucaguaaauuugugu

SEQ ID NO: 2176312 - RNA, 19 nt, Artificial Sequence
  Description of Artificial Sequence: Synthetic oligonucleotide
  Sense strand starting at position 2534 of SEQ ID NO: 1883204
gacccugcauauucgaaga

SEQ ID NO: 2176313 - RNA, 19 nt, Artificial Sequence
  Description of Artificial Sequence: Synthetic oligonucleotide
  Antisense strand to SEQ ID NO: 2176312
ucuucgaauaugcaggguc

SEQ ID NO: 2176314 - RNA, 19 nt, Artificial Sequence
  Description of Artificial Sequence: Synthetic oligonucleotide
  Sense strand starting at position 2605 of SEQ ID NO: 1883204
gauuaugguauugagugau

SEQ ID NO: 2176315 - RNA, 19 nt, Artificial Sequence
  Description of Artificial Sequence: Synthetic oligonucleotide
  Antisense strand to SEQ ID NO: 2176314
aucacucaauaccauaauc

SEQ ID NO: 2176316 - RNA, 19 nt, Artificial Sequence
  Description of Artificial Sequence: Synthetic oligonucleotide
  Sense strand starting at position 2608 of SEQ ID NO: 1883204
uaugguauugagugauaag

SEQ ID NO: 2176317 - RNA, 19 nt, Artificial Sequence
  Description of Artificial Sequence: Synthetic oligonucleotide
  Antisense strand to SEQ ID NO: 2176316
cuuaucacucaauaccaua

SEQ ID NO: 2176318 - RNA, 19 nt, Artificial Sequence
  Description of Artificial Sequence: Synthetic oligonucleotide
  Sense strand starting at position 2609 of SEQ ID NO: 1883204
augguauugagugauaagc

SEQ ID NO: 2176319 - RNA, 19 nt, Artificial Sequence
  Description of Artificial Sequence: Synthetic oligonucleotide
  Antisense strand to SEQ ID NO: 2176318
gcuuaucacucaauaccau

SEQ ID NO: 2176320 - RNA, 19 nt, Artificial Sequence
  Description of Artificial Sequence: Synthetic oligonucleotide
  Sense strand starting at position 2642 of SEQ ID NO: 1883204
cccaaagugugaucacaug

SEQ ID NO: 2176321 - RNA, 19 nt, Artificial Sequence
  Description of Artificial Sequence: Synthetic oligonucleotide
  Antisense strand to SEQ ID NO: 2176320
caugugaucacacuuuggg

SEQ ID NO: 2176322 - RNA, 19 nt, Artificial Sequence
  Description of Artificial Sequence: Synthetic oligonucleotide
  Sense strand starting at position 2792 of SEQ ID NO: 1883204
ggagaaccaccuugauagu

SEQ ID NO: 2176323 - RNA, 19 nt, Artificial Sequence
  Description of Artificial Sequence: Synthetic oligonucleotide
  Antisense strand to SEQ ID NO: 2176322
acuaucaaggugguucucc

SEQ ID NO: 2176324 - RNA, 19 nt, Artificial Sequence
  Description of Artificial Sequence: Synthetic oligonucleotide
  Sense strand starting at position 2850 of SEQ ID NO: 1883204
cugaacuaaccuugagauc

SEQ ID NO: 2176325 - RNA, 19 nt, Artificial Sequence
  Description of Artificial Sequence: Synthetic oligonucleotide
  Antisense strand to SEQ ID NO: 2176324
gaucucaagguuaguucag

SEQ ID NO: 2176326 - RNA, 19 nt, Artificial Sequence
  Description of Artificial Sequence: Synthetic oligonucleotide
  Sense strand starting at position 2895 of SEQ ID NO: 1883204
aucucuucccgauaagauu

SEQ ID NO: 2176327 - RNA, 19 nt, Artificial Sequence
  Description of Artificial Sequence: Synthetic oligonucleotide
  Antisense strand to SEQ ID NO: 2176326
aaucuuaucgggaagagau

SEQ ID NO: 2176328 - RNA, 19 nt, Artificial Sequence
  Description of Artificial Sequence: Synthetic oligonucleotide
  Sense strand starting at position 3102 of SEQ ID NO: 1883204
cagaaaucaggcuggcaga

SEQ ID NO: 2176329 - RNA, 19 nt, Artificial Sequence
  Description of Artificial Sequence: Synthetic oligonucleotide
  Antisense strand to SEQ ID NO: 2176328
ucugccagccugauuucug

SEQ ID NO: 2176330 - RNA, 19 nt, Artificial Sequence
  Description of Artificial Sequence: Synthetic oligonucleotide
  Sense strand starting at position 3103 of SEQ ID NO: 1883204
agaaaucaggcuggcagaa

SEQ ID NO: 2176331 - RNA, 19 nt, Artificial Sequence
  Description of Artificial Sequence: Synthetic oligonucleotide
  Antisense strand to SEQ ID NO: 2176330
uucugccagccugauuucu

SEQ ID NO: 2176332 - RNA, 19 nt, Artificial Sequence
  Description of Artificial Sequence: Synthetic oligonucleotide
  Sense strand starting at position 3169 of SEQ ID NO: 1883204
aauguuauguauccuggaa

SEQ ID NO: 2176333 - RNA, 19 nt, Artificial Sequence
  Description of Artificial Sequence: Synthetic oligonucleotide
  Antisense strand to SEQ ID NO: 2176332
uuccaggauacauaacauu

SEQ ID NO: 2176334 - RNA, 19 nt, Artificial Sequence
  Description of Artificial Sequence: Synthetic oligonucleotide
  Sense strand starting at position 3173 of SEQ ID NO: 1883204
uuauguauccuggaacuua

SEQ ID NO: 2176335 - RNA, 19 nt, Artificial Sequence
  Description of Artificial Sequence: Synthetic oligonucleotide
  Antisense strand to SEQ ID NO: 2176334
uaaguuccaggauacauaa

SEQ ID NO: 2176336 - RNA, 19 nt, Artificial Sequence
  Description of Artificial Sequence: Synthetic oligonucleotide
  Sense strand starting at position 3309 of SEQ ID NO: 1883204
augagaaucucacuagcuc

SEQ ID NO: 2176337 - RNA, 19 nt, Artificial Sequence
  Description of Artificial Sequence: Synthetic oligonucleotide
  Antisense strand to SEQ ID NO: 2176336
gagcuagugagauucucau

SEQ ID NO: 2176338 - RNA, 19 nt, Artificial Sequence
  Description of Artificial Sequence: Synthetic oligonucleotide
  Sense strand starting at position 3310 of SEQ ID NO: 1883204
ugagaaucucacuagcuca

SEQ ID NO: 2176339 - RNA, 19 nt, Artificial Sequence
  Description of Artificial Sequence: Synthetic oligonucleotide
  Antisense strand to SEQ ID NO: 2176338
ugagcuagugagauucuca

SEQ ID NO: 2176340 - RNA, 19 nt, Artificial Sequence
  Description of Artificial Sequence: Synthetic oligonucleotide
  Sense strand starting at position 3481 of SEQ ID NO: 1883204
gguacuugagguuaguaau

SEQ ID NO: 2176341 - RNA, 19 nt, Artificial Sequence
  Description of Artificial Sequence: Synthetic oligonucleotide
  Antisense strand to SEQ ID NO: 2176340
auuacuaaccucaaguacc

SEQ ID NO: 2176342 - RNA, 19 nt, Artificial Sequence
  Description of Artificial Sequence: Synthetic oligonucleotide
  Sense strand starting at position 3488 of SEQ ID NO: 1883204
gagguuaguaauuauguag

SEQ ID NO: 2176343 - RNA, 19 nt, Artificial Sequence
  Description of Artificial Sequence: Synthetic oligonucleotide
  Antisense strand to SEQ ID NO: 2176342
cuacauaauuacuaaccuc

SEQ ID NO: 2176344 - RNA, 19 nt, Artificial Sequence
  Description of Artificial Sequence: Synthetic oligonucleotide
  Sense strand starting at position 3590 of SEQ ID NO: 1883204
augugaccuccagagaguu

SEQ ID NO: 2176345 - RNA, 19 nt, Artificial Sequence
  Description of Artificial Sequence: Synthetic oligonucleotide
  Antisense strand to SEQ ID NO: 2176344
aacucucuggaggucacau

SEQ ID NO: 2176346 - RNA, 19 nt, Artificial Sequence
  Description of Artificial Sequence: Synthetic oligonucleotide
  Sense strand starting at position 3592 of SEQ ID NO: 1883204
gugaccuccagagaguuau

SEQ ID NO: 2176347 - RNA, 19 nt, Artificial Sequence
  Description of Artificial Sequence: Synthetic oligonucleotide
  Antisense strand to SEQ ID NO: 2176346
auaacucucuggaggucac

SEQ ID NO: 2176348 - RNA, 19 nt, Artificial Sequence
  Description of Artificial Sequence: Synthetic oligonucleotide
  Sense strand starting at position 3915 of SEQ ID NO: 1883204
aaauguaagugaccaguua

SEQ ID NO: 2176349 - RNA, 19 nt, Artificial Sequence
  Description of Artificial Sequence: Synthetic oligonucleotide
  Antisense strand to SEQ ID NO: 2176348
uaacuggucacuuacauuu

SEQ ID NO: 2176350 - RNA, 19 nt, Artificial Sequence
  Description of Artificial Sequence: Synthetic oligonucleotide
  Sense strand starting at position 3916 of SEQ ID NO: 1883204
aauguaagugaccaguuau

SEQ ID NO: 2176351 - RNA, 19 nt, Artificial Sequence
  Description of Artificial Sequence: Synthetic oligonucleotide
  Antisense strand to SEQ ID NO: 2176350
auaacuggucacuuacauu

SEQ ID NO: 2176352 - RNA, 19 nt, Artificial Sequence
  Description of Artificial Sequence: Synthetic oligonucleotide
  Sense strand starting at position 3971 of SEQ ID NO: 1883204
ggaaauggugcauaccacu

SEQ ID NO: 2176353 - RNA, 19 nt, Artificial Sequence
  Description of Artificial Sequence: Synthetic oligonucleotide
  Antisense strand to SEQ ID NO: 2176352
agugguaugcaccauuucc

SEQ ID NO: 2176354 - RNA, 19 nt, Artificial Sequence
  Description of Artificial Sequence: Synthetic oligonucleotide
  Sense strand starting at position 780 of SEQ ID NO: 1883205
uccuaagauugauuagagu

SEQ ID NO: 2176355 - RNA, 19 nt, Artificial Sequence
  Description of Artificial Sequence: Synthetic oligonucleotide
  Antisense strand to SEQ ID NO: 2176354
acucuaaucaaucuuagga

SEQ ID NO: 2176356 - RNA, 19 nt, Artificial Sequence
  Description of Artificial Sequence: Synthetic oligonucleotide
  Sense strand starting at position 787 of SEQ ID NO: 1883205
auugauuagaguuggaauu

SEQ ID NO: 2176357 - RNA, 19 nt, Artificial Sequence
  Description of Artificial Sequence: Synthetic oligonucleotide
  Antisense strand to SEQ ID NO: 2176356
aauuccaacucuaaucaau

SEQ ID NO: 2176358 - RNA, 19 nt, Artificial Sequence
  Description of Artificial Sequence: Synthetic oligonucleotide
  Sense strand starting at position 788 of SEQ ID NO: 1883205
uugauuagaguuggaauua

SEQ ID NO: 2176359 - RNA, 19 nt, Artificial Sequence
  Description of Artificial Sequence: Synthetic oligonucleotide
  Antisense strand to SEQ ID NO: 2176358
uaauuccaacucuaaucaa

SEQ ID NO: 2176360 - RNA, 19 nt, Artificial Sequence
  Description of Artificial Sequence: Synthetic oligonucleotide
  Sense strand starting at position 837 of SEQ ID NO: 1883205
guucuagagagccaugauu

SEQ ID NO: 2176361 - RNA, 19 nt, Artificial Sequence
  Description of Artificial Sequence: Synthetic oligonucleotide
  Antisense strand to SEQ ID NO: 2176360
aaucauggcucucuagaac

SEQ ID NO: 2176362 - RNA, 19 nt, Artificial Sequence
  Description of Artificial Sequence: Synthetic oligonucleotide
  Sense strand starting at position 839 of SEQ ID NO: 1883205
ucuagagagccaugauucu

SEQ ID NO: 2176363 - RNA, 19 nt, Artificial Sequence
  Description of Artificial Sequence: Synthetic oligonucleotide
  Antisense strand to SEQ ID NO: 2176362
agaaucauggcucucuaga

SEQ ID NO: 2176364 - RNA, 19 nt, Artificial Sequence
  Description of Artificial Sequence: Synthetic oligonucleotide
  Sense strand starting at position 1361 of SEQ ID NO: 1883205
ugcugcauuuacuuguaua

SEQ ID NO: 2176365 - RNA, 19 nt, Artificial Sequence
  Description of Artificial Sequence: Synthetic oligonucleotide
  Antisense strand to SEQ ID NO: 2176364
uauacaaguaaaugcagca

SEQ ID NO: 2176366 - RNA, 19 nt, Artificial Sequence
  Description of Artificial Sequence: Synthetic oligonucleotide
  Sense strand starting at position 1375 of SEQ ID NO: 1883205
guauaauaccaguaucuug

SEQ ID NO: 2176367 - RNA, 19 nt, Artificial Sequence
  Description of Artificial Sequence: Synthetic oligonucleotide
  Antisense strand to SEQ ID NO: 2176366
caagauacugguauuauac

SEQ ID NO: 2176368 - RNA, 19 nt, Artificial Sequence
  Description of Artificial Sequence: Synthetic oligonucleotide
  Sense strand starting at position 1392 of SEQ ID NO: 1883205
ugugauauaggcuaaaggu

SEQ ID NO: 2176369 - RNA, 19 nt, Artificial Sequence
  Description of Artificial Sequence: Synthetic oligonucleotide
  Antisense strand to SEQ ID NO: 2176368
accuuuagccuauaucaca

SEQ ID NO: 2176370 - RNA, 19 nt, Artificial Sequence
  Description of Artificial Sequence: Synthetic oligonucleotide
  Sense strand starting at position 1401 of SEQ ID NO: 1883205
ggcuaaagguaucucuaau

SEQ ID NO: 2176371 - RNA, 19 nt, Artificial Sequence
  Description of Artificial Sequence: Synthetic oligonucleotide
  Antisense strand to SEQ ID NO: 2176370
auuagagauaccuuuagcc

SEQ ID NO: 2176372 - RNA, 19 nt, Artificial Sequence
  Description of Artificial Sequence: Synthetic oligonucleotide
  Sense strand starting at position 1407 of SEQ ID NO: 1883205
agguaucucuaaucaauga

SEQ ID NO: 2176373 - RNA, 19 nt, Artificial Sequence
  Description of Artificial Sequence: Synthetic oligonucleotide
  Antisense strand to SEQ ID NO: 2176372
ucauugauuagagauaccu

SEQ ID NO: 2176374 - RNA, 19 nt, Artificial Sequence
  Description of Artificial Sequence: Synthetic oligonucleotide
  Sense strand starting at position 1543 of SEQ ID NO: 1883205
cuuacuaggcaucagaauu

SEQ ID NO: 2176375 - RNA, 19 nt, Artificial Sequence
  Description of Artificial Sequence: Synthetic oligonucleotide
  Antisense strand to SEQ ID NO: 2176374
aauucugaugccuaguaag

SEQ ID NO: 2176376 - RNA, 19 nt, Artificial Sequence
  Description of Artificial Sequence: Synthetic oligonucleotide
  Sense strand starting at position 1553 of SEQ ID NO: 1883205
aucagaauuagcuggagcu

SEQ ID NO: 2176377 - RNA, 19 nt, Artificial Sequence
  Description of Artificial Sequence: Synthetic oligonucleotide
  Antisense strand to SEQ ID NO: 2176376
agcuccagcuaauucugau

SEQ ID NO: 2176378 - RNA, 19 nt, Artificial Sequence
  Description of Artificial Sequence: Synthetic oligonucleotide
  Sense strand starting at position 1566 of SEQ ID NO: 1883205
ggagcucuuacauagaagu

SEQ ID NO: 2176379 - RNA, 19 nt, Artificial Sequence
  Description of Artificial Sequence: Synthetic oligonucleotide
  Antisense strand to SEQ ID NO: 2176378
acuucuauguaagagcucc

SEQ ID NO: 2176380 - RNA, 19 nt, Artificial Sequence
  Description of Artificial Sequence: Synthetic oligonucleotide
  Sense strand starting at position 1614 of SEQ ID NO: 1883205
ugauuaauugaugguaaug

SEQ ID NO: 2176381 - RNA, 19 nt, Artificial Sequence
  Description of Artificial Sequence: Synthetic oligonucleotide
  Antisense strand to SEQ ID NO: 2176380
cauuaccaucaauuaauca

SEQ ID NO: 2176382 - RNA, 19 nt, Artificial Sequence
  Description of Artificial Sequence: Synthetic oligonucleotide
  Sense strand starting at position 1623 of SEQ ID NO: 1883205
gaugguaauggccagguau

SEQ ID NO: 2176383 - RNA, 19 nt, Artificial Sequence
  Description of Artificial Sequence: Synthetic oligonucleotide
  Antisense strand to SEQ ID NO: 2176382
auaccuggccauuaccauc

SEQ ID NO: 2176384 - RNA, 19 nt, Artificial Sequence
  Description of Artificial Sequence: Synthetic oligonucleotide
  Sense strand starting at position 1625 of SEQ ID NO: 1883205
ugguaauggccagguauag

SEQ ID NO: 2176385 - RNA, 19 nt, Artificial Sequence
  Description of Artificial Sequence: Synthetic oligonucleotide
  Antisense strand to SEQ ID NO: 2176384
cuauaccuggccauuacca

SEQ ID NO: 2176386 - RNA, 19 nt, Artificial Sequence
  Description of Artificial Sequence: Synthetic oligonucleotide
  Sense strand starting at position 1970 of SEQ ID NO: 1883205
uccacagcugaguaagaua

SEQ ID NO: 2176387 - RNA, 19 nt, Artificial Sequence
  Description of Artificial Sequence: Synthetic oligonucleotide
  Antisense strand to SEQ ID NO: 2176386
uaucuuacucagcugugga

SEQ ID NO: 2176388 - RNA, 19 nt, Artificial Sequence
  Description of Artificial Sequence: Synthetic oligonucleotide
  Sense strand starting at position 2078 of SEQ ID NO: 1883205
gagaguugauugguccacu

SEQ ID NO: 2176389 - RNA, 19 nt, Artificial Sequence
  Description of Artificial Sequence: Synthetic oligonucleotide
  Antisense strand to SEQ ID NO: 2176388
aguggaccaaucaacucuc

SEQ ID NO: 2176390 - RNA, 19 nt, Artificial Sequence
  Description of Artificial Sequence: Synthetic oligonucleotide
  Sense strand starting at position 2079 of SEQ ID NO: 1883205
agaguugauugguccacuu

SEQ ID NO: 2176391 - RNA, 19 nt, Artificial Sequence
  Description of Artificial Sequence: Synthetic oligonucleotide
  Antisense strand to SEQ ID NO: 2176390
aaguggaccaaucaacucu

SEQ ID NO: 2176392 - RNA, 19 nt, Artificial Sequence
  Description of Artificial Sequence: Synthetic oligonucleotide
  Sense strand starting at position 2081 of SEQ ID NO: 1883205
aguugauugguccacuuua

SEQ ID NO: 2176393 - RNA, 19 nt, Artificial Sequence
  Description of Artificial Sequence: Synthetic oligonucleotide
  Antisense strand to SEQ ID NO: 2176392
uaaaguggaccaaucaacu

SEQ ID NO: 2176394 - RNA, 19 nt, Artificial Sequence
  Description of Artificial Sequence: Synthetic oligonucleotide
  Sense strand starting at position 2129 of SEQ ID NO: 1883205
guacggauuggugcguuua

SEQ ID NO: 2176395 - RNA, 19 nt, Artificial Sequence
  Description of Artificial Sequence: Synthetic oligonucleotide
  Antisense strand to SEQ ID NO: 2176394
uaaacgcaccaauccguac

SEQ ID NO: 2176396 - RNA, 19 nt, Artificial Sequence
  Description of Artificial Sequence: Synthetic oligonucleotide
  Sense strand starting at position 2625 of SEQ ID NO: 1883205
gagcuacugcuuucucguu

SEQ ID NO: 2176397 - RNA, 19 nt, Artificial Sequence
  Description of Artificial Sequence: Synthetic oligonucleotide
  Antisense strand to SEQ ID NO: 2176396
aacgagaaagcaguagcuc

SEQ ID NO: 2176398 - RNA, 19 nt, Artificial Sequence
  Description of Artificial Sequence: Synthetic oligonucleotide
  Sense strand starting at position 2705 of SEQ ID NO: 1883205
aggugaaauuuacaguaaa

SEQ ID NO: 2176399 - RNA, 19 nt, Artificial Sequence
  Description of Artificial Sequence: Synthetic oligonucleotide
  Antisense strand to SEQ ID NO: 2176398
uuuacuguaaauuucaccu

SEQ ID NO: 2176400 - RNA, 19 nt, Artificial Sequence
  Description of Artificial Sequence: Synthetic oligonucleotide
  Sense strand starting at position 2814 of SEQ ID NO: 1883205
uaucuagaguggucuacau

SEQ ID NO: 2176401 - RNA, 19 nt, Artificial Sequence
  Description of Artificial Sequence: Synthetic oligonucleotide
  Antisense strand to SEQ ID NO: 2176400
auguagaccacucuagaua

SEQ ID NO: 2176402 - RNA, 19 nt, Artificial Sequence
  Description of Artificial Sequence: Synthetic oligonucleotide
  Sense strand starting at position 2875 of SEQ ID NO: 1883205
cuguguucccaaguugugu

SEQ ID NO: 2176403 - RNA, 19 nt, Artificial Sequence
  Description of Artificial Sequence: Synthetic oligonucleotide
  Antisense strand to SEQ ID NO: 2176402
acacaacuugggaacacag

SEQ ID NO: 2176404 - RNA, 19 nt, Artificial Sequence
  Description of Artificial Sequence: Synthetic oligonucleotide
  Sense strand starting at position 3030 of SEQ ID NO: 1883205
aucugacuccuuuguggga

SEQ ID NO: 2176405 - RNA, 19 nt, Artificial Sequence
  Description of Artificial Sequence: Synthetic oligonucleotide
  Antisense strand to SEQ ID NO: 2176404
ucccacaaaggagucagau

SEQ ID NO: 2176406 - RNA, 19 nt, Artificial Sequence
  Description of Artificial Sequence: Synthetic oligonucleotide
  Sense strand starting at position 3063 of SEQ ID NO: 1883205
ccuagucuuggucaccauu

SEQ ID NO: 2176407 - RNA, 19 nt, Artificial Sequence
  Description of Artificial Sequence: Synthetic oligonucleotide
  Antisense strand to SEQ ID NO: 2176406
aauggugaccaagacuagg

SEQ ID NO: 2176408 - RNA, 19 nt, Artificial Sequence
  Description of Artificial Sequence: Synthetic oligonucleotide
  Sense strand starting at position 3106 of SEQ ID NO: 1883205
caccaaacgcuugauguau

SEQ ID NO: 2176409 - RNA, 19 nt, Artificial Sequence
  Description of Artificial Sequence: Synthetic oligonucleotide
  Antisense strand to SEQ ID NO: 2176408
auacaucaagcguuuggug

SEQ ID NO: 2176410 - RNA, 19 nt, Artificial Sequence
  Description of Artificial Sequence: Synthetic oligonucleotide
  Sense strand starting at position 3119 of SEQ ID NO: 1883205
auguaucaccuauggaugu

SEQ ID NO: 2176411 - RNA, 19 nt, Artificial Sequence
  Description of Artificial Sequence: Synthetic oligonucleotide
  Antisense strand to SEQ ID NO: 2176410
acauccauaggugauacau

SEQ ID NO: 2176412 - RNA, 19 nt, Artificial Sequence
  Description of Artificial Sequence: Synthetic oligonucleotide
  Sense strand starting at position 3210 of SEQ ID NO: 1883205
agugucucuugauuuccau

SEQ ID NO: 2176413 - RNA, 19 nt, Artificial Sequence
  Description of Artificial Sequence: Synthetic oligonucleotide
  Antisense strand to SEQ ID NO: 2176412
auggaaaucaagagacacu

SEQ ID NO: 2176414 - RNA, 19 nt, Artificial Sequence
  Description of Artificial Sequence: Synthetic oligonucleotide
  Sense strand starting at position 3290 of SEQ ID NO: 1883205
ucccaucugcuauaguuua

SEQ ID NO: 2176415 - RNA, 19 nt, Artificial Sequence
  Description of Artificial Sequence: Synthetic oligonucleotide
  Antisense strand to SEQ ID NO: 2176414
uaaacuauagcagauggga

SEQ ID NO: 2176416 - RNA, 19 nt, Artificial Sequence
  Description of Artificial Sequence: Synthetic oligonucleotide
  Sense strand starting at position 3371 of SEQ ID NO: 1883205
ugggacauuuaacauguga

SEQ ID NO: 2176417 - RNA, 19 nt, Artificial Sequence
  Description of Artificial Sequence: Synthetic oligonucleotide
  Antisense strand to SEQ ID NO: 2176416
ucacauguuaaauguccca

SEQ ID NO: 2176418 - RNA, 19 nt, Artificial Sequence
  Description of Artificial Sequence: Synthetic oligonucleotide
  Sense strand starting at position 3378 of SEQ ID NO: 1883205
uuuaacaugugauugggua

SEQ ID NO: 2176419 - RNA, 19 nt, Artificial Sequence
  Description of Artificial Sequence: Synthetic oligonucleotide
  Antisense strand to SEQ ID NO: 2176418
uacccaaucacauguuaaa

SEQ ID NO: 2176420 - RNA, 19 nt, Artificial Sequence
  Description of Artificial Sequence: Synthetic oligonucleotide
  Sense strand starting at position 3380 of SEQ ID NO: 1883205
uaacaugugauuggguaga

SEQ ID NO: 2176421 - RNA, 19 nt, Artificial Sequence
  Description of Artificial Sequence: Synthetic oligonucleotide
  Antisense strand to SEQ ID NO: 2176420
ucuacccaaucacauguua

SEQ ID NO: 2176422 - RNA, 19 nt, Artificial Sequence
  Description of Artificial Sequence: Synthetic oligonucleotide
  Sense strand starting at position 3382 of SEQ ID NO: 1883205
acaugugauuggguagaau

SEQ ID NO: 2176423 - RNA, 19 nt, Artificial Sequence
  Description of Artificial Sequence: Synthetic oligonucleotide
  Antisense strand to SEQ ID NO: 2176422
auucuacccaaucacaugu

SEQ ID NO: 2176424 - RNA, 19 nt, Artificial Sequence
  Description of Artificial Sequence: Synthetic oligonucleotide
  Sense strand starting at position 3774 of SEQ ID NO: 1883205
ucccuauauuuguugucau

SEQ ID NO: 2176425 - RNA, 19 nt, Artificial Sequence
  Description of Artificial Sequence: Synthetic oligonucleotide
  Antisense strand to SEQ ID NO: 2176424
augacaacaaauauaggga

SEQ ID NO: 2176426 - RNA, 19 nt, Artificial Sequence
  Description of Artificial Sequence: Synthetic oligonucleotide
  Sense strand starting at position 3777 of SEQ ID NO: 1883205
cuauauuuguugucauguc

SEQ ID NO: 2176427 - RNA, 19 nt, Artificial Sequence
  Description of Artificial Sequence: Synthetic oligonucleotide
  Antisense strand to SEQ ID NO: 2176426
gacaugacaacaaauauag

SEQ ID NO: 2176428 - RNA, 19 nt, Artificial Sequence
  Description of Artificial Sequence: Synthetic oligonucleotide
  Sense strand starting at position 3866 of SEQ ID NO: 1883205
uccaaacuucuaugagugu

SEQ ID NO: 2176429 - RNA, 19 nt, Artificial Sequence
  Description of Artificial Sequence: Synthetic oligonucleotide
  Antisense strand to SEQ ID NO: 2176428
acacucauagaaguuugga

SEQ ID NO: 2176430 - RNA, 19 nt, Artificial Sequence
  Description of Artificial Sequence: Synthetic oligonucleotide
  Sense strand starting at position 3869 of SEQ ID NO: 1883205
aaacuucuaugagugugau

SEQ ID NO: 2176431 - RNA, 19 nt, Artificial Sequence
  Description of Artificial Sequence: Synthetic oligonucleotide
  Antisense strand to SEQ ID NO: 2176430
aucacacucauagaaguuu

SEQ ID NO: 2176432 - RNA, 19 nt, Artificial Sequence
  Description of Artificial Sequence: Synthetic oligonucleotide
  Sense strand starting at position 3870 of SEQ ID NO: 1883205
aacuucuaugagugugauu

SEQ ID NO: 2176433 - RNA, 19 nt, Artificial Sequence
  Description of Artificial Sequence: Synthetic oligonucleotide
  Antisense strand to SEQ ID NO: 2176432
aaucacacucauagaaguu

SEQ ID NO: 2176434 - RNA, 19 nt, Artificial Sequence
  Description of Artificial Sequence: Synthetic oligonucleotide
  Sense strand starting at position 6 of SEQ ID NO: 1883206
caaagauauguacaugugu

SEQ ID NO: 2176435 - RNA, 19 nt, Artificial Sequence
  Description of Artificial Sequence: Synthetic oligonucleotide
  Antisense strand to SEQ ID NO: 2176434
acacauguacauaucuuug

SEQ ID NO: 2176436 - RNA, 19 nt, Artificial Sequence
  Description of Artificial Sequence: Synthetic oligonucleotide
  Sense strand starting at position 92 of SEQ ID NO: 1883206
aacagugcuguugaugauu

SEQ ID NO: 2176437 - RNA, 19 nt, Artificial Sequence
  Description of Artificial Sequence: Synthetic oligonucleotide
  Antisense strand to SEQ ID NO: 2176436
aaucaucaacagcacuguu

SEQ ID NO: 2176438 - RNA, 19 nt, Artificial Sequence
  Description of Artificial Sequence: Synthetic oligonucleotide
  Sense strand starting at position 204 of SEQ ID NO: 1883206
uucugagugcuuuauaaac

SEQ ID NO: 2176439 - RNA, 19 nt, Artificial Sequence
  Description of Artificial Sequence: Synthetic oligonucleotide
  Antisense strand to SEQ ID NO: 2176438
guuuauaaagcacucagaa

SEQ ID NO: 2176440 - RNA, 19 nt, Artificial Sequence
  Description of Artificial Sequence: Synthetic oligonucleotide
  Sense strand starting at position 325 of SEQ ID NO: 1883206
ugcucuaaucuauacagga

SEQ ID NO: 2176441 - RNA, 19 nt, Artificial Sequence
  Description of Artificial Sequence: Synthetic oligonucleotide
  Antisense strand to SEQ ID NO: 2176440
uccuguauagauuagagca

SEQ ID NO: 2176442 - RNA, 19 nt, Artificial Sequence
  Description of Artificial Sequence: Synthetic oligonucleotide
  Sense strand starting at position 399 of SEQ ID NO: 1883206
ggcuaacaaccuuacuagu

SEQ ID NO: 2176443 - RNA, 19 nt, Artificial Sequence
  Description of Artificial Sequence: Synthetic oligonucleotide
  Antisense strand to SEQ ID NO: 2176442
acuaguaagguuguuagcc

SEQ ID NO: 2176444 - RNA, 19 nt, Artificial Sequence
  Description of Artificial Sequence: Synthetic oligonucleotide
  Sense strand starting at position 686 of SEQ ID NO: 1883206
guuguauuccuacacagaa

SEQ ID NO: 2176445 - RNA, 19 nt, Artificial Sequence
  Description of Artificial Sequence: Synthetic oligonucleotide
  Antisense strand to SEQ ID NO: 2176444
uucuguguaggaauacaac

SEQ ID NO: 2176446 - RNA, 19 nt, Artificial Sequence
  Description of Artificial Sequence: Synthetic oligonucleotide
  Sense strand starting at position 753 of SEQ ID NO: 1883206
uaagaaaucguacaugcuu

SEQ ID NO: 2176447 - RNA, 19 nt, Artificial Sequence
  Description of Artificial Sequence: Synthetic oligonucleotide
  Antisense strand to SEQ ID NO: 2176446
aagcauguacgauuucuua

SEQ ID NO: 2176448 - RNA, 19 nt, Artificial Sequence
  Description of Artificial Sequence: Synthetic oligonucleotide
  Sense strand starting at position 985 of SEQ ID NO: 1883206
ggcaguucugaagaaacgu

SEQ ID NO: 2176449 - RNA, 19 nt, Artificial Sequence
  Description of Artificial Sequence: Synthetic oligonucleotide
  Antisense strand to SEQ ID NO: 2176448
acguuucuucagaacugcc

SEQ ID NO: 2176450 - RNA, 19 nt, Artificial Sequence
  Description of Artificial Sequence: Synthetic oligonucleotide
  Sense strand starting at position 1196 of SEQ ID NO: 1883206
ugcagucaugucuuuguuu

SEQ ID NO: 2176451 - RNA, 19 nt, Artificial Sequence
  Description of Artificial Sequence: Synthetic oligonucleotide
  Antisense strand to SEQ ID NO: 2176450
aaacaaagacaugacugca

SEQ ID NO: 2176452 - RNA, 19 nt, Artificial Sequence
  Description of Artificial Sequence: Synthetic oligonucleotide
  Sense strand starting at position 1279 of SEQ ID NO: 1883206
uaugaaguugaugguuaua

SEQ ID NO: 2176453 - RNA, 19 nt, Artificial Sequence
  Description of Artificial Sequence: Synthetic oligonucleotide
  Antisense strand to SEQ ID NO: 2176452
uauaaccaucaacuucaua

SEQ ID NO: 2176454 - RNA, 19 nt, Artificial Sequence
  Description of Artificial Sequence: Synthetic oligonucleotide
  Sense strand starting at position 1281 of SEQ ID NO: 1883206
ugaaguugaugguuauacu

SEQ ID NO: 2176455 - RNA, 19 nt, Artificial Sequence
  Description of Artificial Sequence: Synthetic oligonucleotide
  Antisense strand to SEQ ID NO: 2176454
aguauaaccaucaacuuca

SEQ ID NO: 2176456 - RNA, 19 nt, Artificial Sequence
  Description of Artificial Sequence: Synthetic oligonucleotide
  Sense strand starting at position 1295 of SEQ ID NO: 1883206
auacucugucaucagaugu

SEQ ID NO: 2176457 - RNA, 19 nt, Artificial Sequence
  Description of Artificial Sequence: Synthetic oligonucleotide
  Antisense strand to SEQ ID NO: 2176456
acaucugaugacagaguau

SEQ ID NO: 2176458 - RNA, 19 nt, Artificial Sequence
  Description of Artificial Sequence: Synthetic oligonucleotide
  Sense strand starting at position 1362 of SEQ ID NO: 1883206
cucugauaguaaucagauu

SEQ ID NO: 2176459 - RNA, 19 nt, Artificial Sequence
  Description of Artificial Sequence: Synthetic oligonucleotide
  Antisense strand to SEQ ID NO: 2176458
aaucugauuacuaucagag

SEQ ID NO: 2176460 - RNA, 19 nt, Artificial Sequence
  Description of Artificial Sequence: Synthetic oligonucleotide
  Sense strand starting at position 1370 of SEQ ID NO: 1883206
guaaucagauuacuguuau

SEQ ID NO: 2176461 - RNA, 19 nt, Artificial Sequence
  Description of Artificial Sequence: Synthetic oligonucleotide
  Antisense strand to SEQ ID NO: 2176460
auaacaguaaucugauuac

SEQ ID NO: 2176462 - RNA, 19 nt, Artificial Sequence
  Description of Artificial Sequence: Synthetic oligonucleotide
  Sense strand starting at position 1376 of SEQ ID NO: 1883206
agauuacuguuauuacuag

SEQ ID NO: 2176463 - RNA, 19 nt, Artificial Sequence
  Description of Artificial Sequence: Synthetic oligonucleotide
  Antisense strand to SEQ ID NO: 2176462
cuaguaauaacaguaaucu

SEQ ID NO: 2176464 - RNA, 19 nt, Artificial Sequence
  Description of Artificial Sequence: Synthetic oligonucleotide
  Sense strand starting at position 1665 of SEQ ID NO: 1883206
gcuacauugugauuuguua

SEQ ID NO: 2176465 - RNA, 19 nt, Artificial Sequence
  Description of Artificial Sequence: Synthetic oligonucleotide
  Antisense strand to SEQ ID NO: 2176464
uaacaaaucacaauguagc

SEQ ID NO: 2176466 - RNA, 19 nt, Artificial Sequence
  Description of Artificial Sequence: Synthetic oligonucleotide
  Sense strand starting at position 1867 of SEQ ID NO: 1883206
gaguaagacuuaccuguca

SEQ ID NO: 2176467 - RNA, 19 nt, Artificial Sequence
  Description of Artificial Sequence: Synthetic oligonucleotide
  Antisense strand to SEQ ID NO: 2176466
ugacagguaagucuuacuc

SEQ ID NO: 2176468 - RNA, 19 nt, Artificial Sequence
  Description of Artificial Sequence: Synthetic oligonucleotide
  Sense strand starting at position 2112 of SEQ ID NO: 1883206
aagugagaguuuguuaaua

SEQ ID NO: 2176469 - RNA, 19 nt, Artificial Sequence
  Description of Artificial Sequence: Synthetic oligonucleotide
  Antisense strand to SEQ ID NO: 2176468
uauuaacaaacucucacuu

SEQ ID NO: 2176470 - RNA, 19 nt, Artificial Sequence
  Description of Artificial Sequence: Synthetic oligonucleotide
  Sense strand starting at position 2122 of SEQ ID NO: 1883206
uuguuaauaggucauagau

SEQ ID NO: 2176471 - RNA, 19 nt, Artificial Sequence
  Description of Artificial Sequence: Synthetic oligonucleotide
  Antisense strand to SEQ ID NO: 2176470
aucuaugaccuauuaacaa

SEQ ID NO: 2176472 - RNA, 19 nt, Artificial Sequence
  Description of Artificial Sequence: Synthetic oligonucleotide
  Sense strand starting at position 2141 of SEQ ID NO: 1883206
uuaggcucuguuuacagaa

SEQ ID NO: 2176473 - RNA, 19 nt, Artificial Sequence
  Description of Artificial Sequence: Synthetic oligonucleotide
  Antisense strand to SEQ ID NO: 2176472
uucuguaaacagagccuaa

SEQ ID NO: 2176474 - RNA, 19 nt, Artificial Sequence
  Description of Artificial Sequence: Synthetic oligonucleotide
  Sense strand starting at position 2190 of SEQ ID NO: 1883206
uuaaguuaugcacaaaugu

SEQ ID NO: 2176475 - RNA, 19 nt, Artificial Sequence
  Description of Artificial Sequence: Synthetic oligonucleotide
  Antisense strand to SEQ ID NO: 2176474
acauuugugcauaacuuaa

SEQ ID NO: 2176476 - RNA, 19 nt, Artificial Sequence
  Description of Artificial Sequence: Synthetic oligonucleotide
  Sense strand starting at position 2396 of SEQ ID NO: 1883206
aggauuaagucagucaauc

SEQ ID NO: 2176477 - RNA, 19 nt, Artificial Sequence
  Description of Artificial Sequence: Synthetic oligonucleotide
  Antisense strand to SEQ ID NO: 2176476
gauugacugacuuaauccu

SEQ ID NO: 2176478 - RNA, 19 nt, Artificial Sequence
  Description of Artificial Sequence: Synthetic oligonucleotide
  Sense strand starting at position 2421 of SEQ ID NO: 1883206
ggcuuaauagaaugaggca

SEQ ID NO: 2176479 - RNA, 19 nt, Artificial Sequence
  Description of Artificial Sequence: Synthetic oligonucleotide
  Antisense strand to SEQ ID NO: 2176478
ugccucauucuauuaagcc

SEQ ID NO: 2176480 - RNA, 19 nt, Artificial Sequence
  Description of Artificial Sequence: Synthetic oligonucleotide
  Sense strand starting at position 2452 of SEQ ID NO: 1883206
caagaaugggcaugaguag

SEQ ID NO: 2176481 - RNA, 19 nt, Artificial Sequence
  Description of Artificial Sequence: Synthetic oligonucleotide
  Antisense strand to SEQ ID NO: 2176480
cuacucaugcccauucuug

SEQ ID NO: 2176482 - RNA, 19 nt, Artificial Sequence
  Description of Artificial Sequence: Synthetic oligonucleotide
  Sense strand starting at position 2463 of SEQ ID NO: 1883206
augaguagaucagugacga

SEQ ID NO: 2176483 - RNA, 19 nt, Artificial Sequence
  Description of Artificial Sequence: Synthetic oligonucleotide
  Antisense strand to SEQ ID NO: 2176482
ucgucacugaucuacucau

SEQ ID NO: 2176484 - RNA, 19 nt, Artificial Sequence
  Description of Artificial Sequence: Synthetic oligonucleotide
  Sense strand starting at position 2464 of SEQ ID NO: 1883206
ugaguagaucagugacgau

SEQ ID NO: 2176485 - RNA, 19 nt, Artificial Sequence
  Description of Artificial Sequence: Synthetic oligonucleotide
  Antisense strand to SEQ ID NO: 2176484
aucgucacugaucuacuca

SEQ ID NO: 2176486 - RNA, 19 nt, Artificial Sequence
  Description of Artificial Sequence: Synthetic oligonucleotide
  Sense strand starting at position 2480 of SEQ ID NO: 1883206
gaugacucagaauggugua

SEQ ID NO: 2176487 - RNA, 19 nt, Artificial Sequence
  Description of Artificial Sequence: Synthetic oligonucleotide
  Antisense strand to SEQ ID NO: 2176486
uacaccauucugagucauc

SEQ ID NO: 2176488 - RNA, 19 nt, Artificial Sequence
  Description of Artificial Sequence: Synthetic oligonucleotide
  Sense strand starting at position 2481 of SEQ ID NO: 1883206
augacucagaaugguguaa

SEQ ID NO: 2176489 - RNA, 19 nt, Artificial Sequence
  Description of Artificial Sequence: Synthetic oligonucleotide
  Antisense strand to SEQ ID NO: 2176488
uuacaccauucugagucau

SEQ ID NO: 2176490 - RNA, 19 nt, Artificial Sequence
  Description of Artificial Sequence: Synthetic oligonucleotide
  Sense strand starting at position 2824 of SEQ ID NO: 1883206
gcaaguagucaugagacuu

SEQ ID NO: 2176491 - RNA, 19 nt, Artificial Sequence
  Description of Artificial Sequence: Synthetic oligonucleotide
  Antisense strand to SEQ ID NO: 2176490
aagucucaugacuacuugc

SEQ ID NO: 2176492 - RNA, 19 nt, Artificial Sequence
  Description of Artificial Sequence: Synthetic oligonucleotide
  Sense strand starting at position 2902 of SEQ ID NO: 1883206
gccacaauuuaccauggaa

SEQ ID NO: 2176493 - RNA, 19 nt, Artificial Sequence
  Description of Artificial Sequence: Synthetic oligonucleotide
  Antisense strand to SEQ ID NO: 2176492
uuccaugguaaauuguggc

SEQ ID NO: 2176494 - RNA, 19 nt, Artificial Sequence
  Description of Artificial Sequence: Synthetic oligonucleotide
  Sense strand starting at position 2917 of SEQ ID NO: 1883206
ggaagccucuacuuaauau

SEQ ID NO: 2176495 - RNA, 19 nt, Artificial Sequence
  Description of Artificial Sequence: Synthetic oligonucleotide
  Antisense strand to SEQ ID NO: 2176494
auauuaaguagaggcuucc

SEQ ID NO: 2176496 - RNA, 19 nt, Artificial Sequence
  Description of Artificial Sequence: Synthetic oligonucleotide
  Sense strand starting at position 2937 of SEQ ID NO: 1883206
ccgcuugaucugccaaguu

SEQ ID NO: 2176497 - RNA, 19 nt, Artificial Sequence
  Description of Artificial Sequence: Synthetic oligonucleotide
  Antisense strand to SEQ ID NO: 2176496
aacuuggcagaucaagcgg

SEQ ID NO: 2176498 - RNA, 19 nt, Artificial Sequence
  Description of Artificial Sequence: Synthetic oligonucleotide
  Sense strand starting at position 3068 of SEQ ID NO: 1883206
cguagauugcaagacagaa

SEQ ID NO: 2176499 - RNA, 19 nt, Artificial Sequence
  Description of Artificial Sequence: Synthetic oligonucleotide
  Antisense strand to SEQ ID NO: 2176498
uucugucuugcaaucuacg

SEQ ID NO: 2176500 - RNA, 19 nt, Artificial Sequence
  Description of Artificial Sequence: Synthetic oligonucleotide
  Sense strand starting at position 3151 of SEQ ID NO: 1883206
gcacuuuagcuugaaauag

SEQ ID NO: 2176501 - RNA, 19 nt, Artificial Sequence
  Description of Artificial Sequence: Synthetic oligonucleotide
  Antisense strand to SEQ ID NO: 2176500
cuauuucaagcuaaagugc

SEQ ID NO: 2176502 - RNA, 19 nt, Artificial Sequence
  Description of Artificial Sequence: Synthetic oligonucleotide
  Sense strand starting at position 3213 of SEQ ID NO: 1883206
auugccaguccugguauuu

SEQ ID NO: 2176503 - RNA, 19 nt, Artificial Sequence
  Description of Artificial Sequence: Synthetic oligonucleotide
  Antisense strand to SEQ ID NO: 2176502
aaauaccaggacuggcaau

SEQ ID NO: 2176504 - RNA, 19 nt, Artificial Sequence
  Description of Artificial Sequence: Synthetic oligonucleotide
  Sense strand starting at position 3412 of SEQ ID NO: 1883206
acauuccgaucucuaagaa

SEQ ID NO: 2176505 - RNA, 19 nt, Artificial Sequence
  Description of Artificial Sequence: Synthetic oligonucleotide
  Antisense strand to SEQ ID NO: 2176504
uucuuagagaucggaaugu

SEQ ID NO: 2176506 - RNA, 19 nt, Artificial Sequence
  Description of Artificial Sequence: Synthetic oligonucleotide
  Sense strand starting at position 3484 of SEQ ID NO: 1883206
auggauuuauugcaaauac

SEQ ID NO: 2176507 - RNA, 19 nt, Artificial Sequence
  Description of Artificial Sequence: Synthetic oligonucleotide
  Antisense strand to SEQ ID NO: 2176506
guauuugcaauaaauccau

SEQ ID NO: 2176508 - RNA, 19 nt, Artificial Sequence
  Description of Artificial Sequence: Synthetic oligonucleotide
  Sense strand starting at position 3685 of SEQ ID NO: 1883206
uauuguuccgaugaaucuu

SEQ ID NO: 2176509 - RNA, 19 nt, Artificial Sequence
  Description of Artificial Sequence: Synthetic oligonucleotide
  Antisense strand to SEQ ID NO: 2176508
aagauucaucggaacaaua

SEQ ID NO: 2176510 - RNA, 19 nt, Artificial Sequence
  Description of Artificial Sequence: Synthetic oligonucleotide
  Sense strand starting at position 3729 of SEQ ID NO: 1883206
acaaauaccuucuccggaa

SEQ ID NO: 2176511 - RNA, 19 nt, Artificial Sequence
  Description of Artificial Sequence: Synthetic oligonucleotide
  Antisense strand to SEQ ID NO: 2176510
uuccggagaagguauuugu

SEQ ID NO: 2176512 - RNA, 19 nt, Artificial Sequence
  Description of Artificial Sequence: Synthetic oligonucleotide
  Sense strand starting at position 3813 of SEQ ID NO: 1883206
gcaguaaggcuugcuucuu

SEQ ID NO: 2176513 - RNA, 19 nt, Artificial Sequence
  Description of Artificial Sequence: Synthetic oligonucleotide
  Antisense strand to SEQ ID NO: 2176512
aagaagcaagccuuacugc

SEQ ID NO: 2176514 - RNA, 19 nt, Artificial Sequence
  Description of Artificial Sequence: Synthetic oligonucleotide
  Sense strand starting at position 41 of SEQ ID NO: 1883207
ggaucaagguaagauauuu

SEQ ID NO: 2176515 - RNA, 19 nt, Artificial Sequence
  Description of Artificial Sequence: Synthetic oligonucleotide
  Antisense strand to SEQ ID NO: 2176514
aaauaucuuaccuugaucc

SEQ ID NO: 2176516 - RNA, 19 nt, Artificial Sequence
  Description of Artificial Sequence: Synthetic oligonucleotide
  Sense strand starting at position 481 of SEQ ID NO: 1883207
gcaucaagucaagauacau

SEQ ID NO: 2176517 - RNA, 19 nt, Artificial Sequence
  Description of Artificial Sequence: Synthetic oligonucleotide
  Antisense strand to SEQ ID NO: 2176516
auguaucuugacuugaugc

SEQ ID NO: 2176518 - RNA, 19 nt, Artificial Sequence
  Description of Artificial Sequence: Synthetic oligonucleotide
  Sense strand starting at position 487 of SEQ ID NO: 1883207
agucaagauacauggcagu

SEQ ID NO: 2176519 - RNA, 19 nt, Artificial Sequence
  Description of Artificial Sequence: Synthetic oligonucleotide
  Antisense strand to SEQ ID NO: 2176518
acugccauguaucuugacu

SEQ ID NO: 2176520 - RNA, 19 nt, Artificial Sequence
  Description of Artificial Sequence: Synthetic oligonucleotide
  Sense strand starting at position 513 of SEQ ID NO: 1883207
uucugaggauugucuaaau

SEQ ID NO: 2176521 - RNA, 19 nt, Artificial Sequence
  Description of Artificial Sequence: Synthetic oligonucleotide
  Antisense strand to SEQ ID NO: 2176520
auuuagacaauccucagaa

SEQ ID NO: 2176522 - RNA, 19 nt, Artificial Sequence
  Description of Artificial Sequence: Synthetic oligonucleotide
  Sense strand starting at position 527 of SEQ ID NO: 1883207
uaaauucccguuuaugaug

SEQ ID NO: 2176523 - RNA, 19 nt, Artificial Sequence
  Description of Artificial Sequence: Synthetic oligonucleotide
  Antisense strand to SEQ ID NO: 2176522
caucauaaacgggaauuua

SEQ ID NO: 2176524 - RNA, 19 nt, Artificial Sequence
  Description of Artificial Sequence: Synthetic oligonucleotide
  Sense strand starting at position 682 of SEQ ID NO: 1883207
gugauccagcagugaacaa

SEQ ID NO: 2176525 - RNA, 19 nt, Artificial Sequence
  Description of Artificial Sequence: Synthetic oligonucleotide
  Antisense strand to SEQ ID NO: 2176524
uuguucacugcuggaucac

SEQ ID NO: 2176526 - RNA, 19 nt, Artificial Sequence
  Description of Artificial Sequence: Synthetic oligonucleotide
  Sense strand starting at position 712 of SEQ ID NO: 1883207
accugcuuccauggguaau

SEQ ID NO: 2176527 - RNA, 19 nt, Artificial Sequence
  Description of Artificial Sequence: Synthetic oligonucleotide
  Antisense strand to SEQ ID NO: 2176526
auuacccauggaagcaggu

SEQ ID NO: 2176528 - RNA, 19 nt, Artificial Sequence
  Description of Artificial Sequence: Synthetic oligonucleotide
  Sense strand starting at position 714 of SEQ ID NO: 1883207
cugcuuccauggguaauaa

SEQ ID NO: 2176529 - RNA, 19 nt, Artificial Sequence
  Description of Artificial Sequence: Synthetic oligonucleotide
  Antisense strand to SEQ ID NO: 2176528
uuauuacccauggaagcag

SEQ ID NO: 2176530 - RNA, 19 nt, Artificial Sequence
  Description of Artificial Sequence: Synthetic oligonucleotide
  Sense strand starting at position 715 of SEQ ID NO: 1883207
ugcuuccauggguaauaaa

SEQ ID NO: 2176531 - RNA, 19 nt, Artificial Sequence
  Description of Artificial Sequence: Synthetic oligonucleotide
  Antisense strand to SEQ ID NO: 2176530
uuuauuacccauggaagca

SEQ ID NO: 2176532 - RNA, 19 nt, Artificial Sequence
  Description of Artificial Sequence: Synthetic oligonucleotide
  Sense strand starting at position 775 of SEQ ID NO: 1883207
agaccugauccaugcacuu

SEQ ID NO: 2176533 - RNA, 19 nt, Artificial Sequence
  Description of Artificial Sequence: Synthetic oligonucleotide
  Antisense strand to SEQ ID NO: 2176532
aagugcauggaucaggucu

SEQ ID NO: 2176534 - RNA, 19 nt, Artificial Sequence
  Description of Artificial Sequence: Synthetic oligonucleotide
  Sense strand starting at position 863 of SEQ ID NO: 1883207
aaaguuugguucucuggau

SEQ ID NO: 2176535 - RNA, 19 nt, Artificial Sequence
  Description of Artificial Sequence: Synthetic oligonucleotide
  Antisense strand to SEQ ID NO: 2176534
auccagagaaccaaacuuu

SEQ ID NO: 2176536 - RNA, 19 nt, Artificial Sequence
  Description of Artificial Sequence: Synthetic oligonucleotide
  Sense strand starting at position 864 of SEQ ID NO: 1883207
aaguuugguucucuggauu

SEQ ID NO: 2176537 - RNA, 19 nt, Artificial Sequence
  Description of Artificial Sequence: Synthetic oligonucleotide
  Antisense strand to SEQ ID NO: 2176536
aauccagagaaccaaacuu

SEQ ID NO: 2176538 - RNA, 19 nt, Artificial Sequence
  Description of Artificial Sequence: Synthetic oligonucleotide
  Sense strand starting at position 867 of SEQ ID NO: 1883207
uuugguucucuggauuguu

SEQ ID NO: 2176539 - RNA, 19 nt, Artificial Sequence
  Description of Artificial Sequence: Synthetic oligonucleotide
  Antisense strand to SEQ ID NO: 2176538
aacaauccagagaaccaaa

SEQ ID NO: 2176540 - RNA, 19 nt, Artificial Sequence
  Description of Artificial Sequence: Synthetic oligonucleotide
  Sense strand starting at position 872 of SEQ ID NO: 1883207
uucucuggauuguuccaaa

SEQ ID NO: 2176541 - RNA, 19 nt, Artificial Sequence
  Description of Artificial Sequence: Synthetic oligonucleotide
  Antisense strand to SEQ ID NO: 2176540
uuuggaacaauccagagaa

SEQ ID NO: 2176542 - RNA, 19 nt, Artificial Sequence
  Description of Artificial Sequence: Synthetic oligonucleotide
  Sense strand starting at position 1030 of SEQ ID NO: 1883207
ugaagcugccaguagaauu

SEQ ID NO: 2176543 - RNA, 19 nt, Artificial Sequence
  Description of Artificial Sequence: Synthetic oligonucleotide
  Antisense strand to SEQ ID NO: 2176542
aauucuacuggcagcuuca

SEQ ID NO: 2176544 - RNA, 19 nt, Artificial Sequence
  Description of Artificial Sequence: Synthetic oligonucleotide
  Sense strand starting at position 1135 of SEQ ID NO: 1883207
gcuauuaugcuggaaugua

SEQ ID NO: 2176545 - RNA, 19 nt, Artificial Sequence
  Description of Artificial Sequence: Synthetic oligonucleotide
  Antisense strand to SEQ ID NO: 2176544
uacauuccagcauaauagc

SEQ ID NO: 2176546 - RNA, 19 nt, Artificial Sequence
  Description of Artificial Sequence: Synthetic oligonucleotide
  Sense strand starting at position 1143 of SEQ ID NO: 1883207
gcuggaauguaggugaaga

SEQ ID NO: 2176547 - RNA, 19 nt, Artificial Sequence
  Description of Artificial Sequence: Synthetic oligonucleotide
  Antisense strand to SEQ ID NO: 2176546
ucuucaccuacauuccagc

SEQ ID NO: 2176548 - RNA, 19 nt, Artificial Sequence
  Description of Artificial Sequence: Synthetic oligonucleotide
  Sense strand starting at position 1144 of SEQ ID NO: 1883207
cuggaauguaggugaagau

SEQ ID NO: 2176549 - RNA, 19 nt, Artificial Sequence
  Description of Artificial Sequence: Synthetic oligonucleotide
  Antisense strand to SEQ ID NO: 2176548
aucuucaccuacauuccag

SEQ ID NO: 2176550 - RNA, 19 nt, Artificial Sequence
  Description of Artificial Sequence: Synthetic oligonucleotide
  Sense strand starting at position 1399 of SEQ ID NO: 1883207
ucauuaaagugcucagcaa

SEQ ID NO: 2176551 - RNA, 19 nt, Artificial Sequence
  Description of Artificial Sequence: Synthetic oligonucleotide
  Antisense strand to SEQ ID NO: 2176550
uugcugagcacuuuaauga

SEQ ID NO: 2176552 - RNA, 19 nt, Artificial Sequence
  Description of Artificial Sequence: Synthetic oligonucleotide
  Sense strand starting at position 1400 of SEQ ID NO: 1883207
cauuaaagugcucagcaag

SEQ ID NO: 2176553 - RNA, 19 nt, Artificial Sequence
  Description of Artificial Sequence: Synthetic oligonucleotide
  Antisense strand to SEQ ID NO: 2176552
cuugcugagcacuuuaaug

SEQ ID NO: 2176554 - RNA, 19 nt, Artificial Sequence
  Description of Artificial Sequence: Synthetic oligonucleotide
  Sense strand starting at position 1728 of SEQ ID NO: 1883207
acagcuaaagaucgaguuu

SEQ ID NO: 2176555 - RNA, 19 nt, Artificial Sequence
  Description of Artificial Sequence: Synthetic oligonucleotide
  Antisense strand to SEQ ID NO: 2176554
aaacucgaucuuuagcugu

SEQ ID NO: 2176556 - RNA, 19 nt, Artificial Sequence
  Description of Artificial Sequence: Synthetic oligonucleotide
  Sense strand starting at position 1735 of SEQ ID NO: 1883207
aagaucgaguuucugcaaa

SEQ ID NO: 2176557 - RNA, 19 nt, Artificial Sequence
  Description of Artificial Sequence: Synthetic oligonucleotide
  Antisense strand to SEQ ID NO: 2176556
uuugcagaaacucgaucuu

SEQ ID NO: 2176558 - RNA, 19 nt, Artificial Sequence
  Description of Artificial Sequence: Synthetic oligonucleotide
  Sense strand starting at position 1797 of SEQ ID NO: 1883207
ccuucuucuccacgaugga

SEQ ID NO: 2176559 - RNA, 19 nt, Artificial Sequence
  Description of Artificial Sequence: Synthetic oligonucleotide
  Antisense strand to SEQ ID NO: 2176558
uccaucguggagaagaagg

SEQ ID NO: 2176560 - RNA, 19 nt, Artificial Sequence
  Description of Artificial Sequence: Synthetic oligonucleotide
  Sense strand starting at position 2006 of SEQ ID NO: 1883207
cacagagugcauuggacuu

SEQ ID NO: 2176561 - RNA, 19 nt, Artificial Sequence
  Description of Artificial Sequence: Synthetic oligonucleotide
  Antisense strand to SEQ ID NO: 2176560
aaguccaaugcacucugug

SEQ ID NO: 2176562 - RNA, 19 nt, Artificial Sequence
  Description of Artificial Sequence: Synthetic oligonucleotide
  Sense strand starting at position 2034 of SEQ ID NO: 1883207
gagugcaaucaauguagac

SEQ ID NO: 2176563 - RNA, 19 nt, Artificial Sequence
  Description of Artificial Sequence: Synthetic oligonucleotide
  Antisense strand to SEQ ID NO: 2176562
gucuacauugauugcacuc

SEQ ID NO: 2176564 - RNA, 19 nt, Artificial Sequence
  Description of Artificial Sequence: Synthetic oligonucleotide
  Sense strand starting at position 2174 of SEQ ID NO: 1883207
ggugaaauggccugauaag

SEQ ID NO: 2176565 - RNA, 19 nt, Artificial Sequence
  Description of Artificial Sequence: Synthetic oligonucleotide
  Antisense strand to SEQ ID NO: 2176564
cuuaucaggccauuucacc

SEQ ID NO: 2176566 - RNA, 19 nt, Artificial Sequence
  Description of Artificial Sequence: Synthetic oligonucleotide
  Sense strand starting at position 2175 of SEQ ID NO: 1883207
gugaaauggccugauaagc

SEQ ID NO: 2176567 - RNA, 19 nt, Artificial Sequence
  Description of Artificial Sequence: Synthetic oligonucleotide
  Antisense strand to SEQ ID NO: 2176566
gcuuaucaggccauuucac

SEQ ID NO: 2176568 - RNA, 19 nt, Artificial Sequence
  Description of Artificial Sequence: Synthetic oligonucleotide
  Sense strand starting at position 2221 of SEQ ID NO: 1883207
gcucuacaccgaugaugaa

SEQ ID NO: 2176569 - RNA, 19 nt, Artificial Sequence
  Description of Artificial Sequence: Synthetic oligonucleotide
  Antisense strand to SEQ ID NO: 2176568
uucaucaucgguguagagc

SEQ ID NO: 2176570 - RNA, 19 nt, Artificial Sequence
  Description of Artificial Sequence: Synthetic oligonucleotide
  Sense strand starting at position 2261 of SEQ ID NO: 1883207
gggugaugcaacugacuca

SEQ ID NO: 2176571 - RNA, 19 nt, Artificial Sequence
  Description of Artificial Sequence: Synthetic oligonucleotide
  Antisense strand to SEQ ID NO: 2176570
ugagucaguugcaucaccc

SEQ ID NO: 2176572 - RNA, 19 nt, Artificial Sequence
  Description of Artificial Sequence: Synthetic oligonucleotide
  Sense strand starting at position 2427 of SEQ ID NO: 1883207
gcugaauuagcacacccaa

SEQ ID NO: 2176573 - RNA, 19 nt, Artificial Sequence
  Description of Artificial Sequence: Synthetic oligonucleotide
  Antisense strand to SEQ ID NO: 2176572
uugggugugcuaauucagc

SEQ ID NO: 2176574 - RNA, 19 nt, Artificial Sequence
  Description of Artificial Sequence: Synthetic oligonucleotide
  Sense strand starting at position 2579 of SEQ ID NO: 1883207
cucuguuuagagggugaaa

SEQ ID NO: 2176575 - RNA, 19 nt, Artificial Sequence
  Description of Artificial Sequence: Synthetic oligonucleotide
  Antisense strand to SEQ ID NO: 2176574
uuucacccucuaaacagag

SEQ ID NO: 2176576 - RNA, 19 nt, Artificial Sequence
  Description of Artificial Sequence: Synthetic oligonucleotide
  Sense strand starting at position 3011 of SEQ ID NO: 1883207
ggucauacuccuggcauuu

SEQ ID NO: 2176577 - RNA, 19 nt, Artificial Sequence
  Description of Artificial Sequence: Synthetic oligonucleotide
  Antisense strand to SEQ ID NO: 2176576
aaaugccaggaguaugacc

SEQ ID NO: 2176578 - RNA, 19 nt, Artificial Sequence
  Description of Artificial Sequence: Synthetic oligonucleotide
  Sense strand starting at position 3128 of SEQ ID NO: 1883207
gcaaauguccaauaggcaa

SEQ ID NO: 2176579 - RNA, 19 nt, Artificial Sequence
  Description of Artificial Sequence: Synthetic oligonucleotide
  Antisense strand to SEQ ID NO: 2176578
uugccuauuggacauuugc

SEQ ID NO: 2176580 - RNA, 19 nt, Artificial Sequence
  Description of Artificial Sequence: Synthetic oligonucleotide
  Sense strand starting at position 3205 of SEQ ID NO: 1883207
aaugaacucuugguacaug

SEQ ID NO: 2176581 - RNA, 19 nt, Artificial Sequence
  Description of Artificial Sequence: Synthetic oligonucleotide
  Antisense strand to SEQ ID NO: 2176580
cauguaccaagaguucauu

SEQ ID NO: 2176582 - RNA, 19 nt, Artificial Sequence
  Description of Artificial Sequence: Synthetic oligonucleotide
  Sense strand starting at position 3208 of SEQ ID NO: 1883207
gaacucuugguacaugcaa

SEQ ID NO: 2176583 - RNA, 19 nt, Artificial Sequence
  Description of Artificial Sequence: Synthetic oligonucleotide
  Antisense strand to SEQ ID NO: 2176582
uugcauguaccaagaguuc

SEQ ID NO: 2176584 - RNA, 19 nt, Artificial Sequence
  Description of Artificial Sequence: Synthetic oligonucleotide
  Sense strand starting at position 3293 of SEQ ID NO: 1883207
ucggaucuguuuccacuua

SEQ ID NO: 2176585 - RNA, 19 nt, Artificial Sequence
  Description of Artificial Sequence: Synthetic oligonucleotide
  Antisense strand to SEQ ID NO: 2176584
uaaguggaaacagauccga

SEQ ID NO: 2176586 - RNA, 19 nt, Artificial Sequence
  Description of Artificial Sequence: Synthetic oligonucleotide
  Sense strand starting at position 3312 of SEQ ID NO: 1883207
uccaacauucucgaaacga

SEQ ID NO: 2176587 - RNA, 19 nt, Artificial Sequence
  Description of Artificial Sequence: Synthetic oligonucleotide
  Antisense strand to SEQ ID NO: 2176586
ucguuucgagaauguugga

SEQ ID NO: 2176588 - RNA, 19 nt, Artificial Sequence
  Description of Artificial Sequence: Synthetic oligonucleotide
  Sense strand starting at position 3776 of SEQ ID NO: 1883207
aucuauacaugggauaaca

SEQ ID NO: 2176589 - RNA, 19 nt, Artificial Sequence
  Description of Artificial Sequence: Synthetic oligonucleotide
  Antisense strand to SEQ ID NO: 2176588
uguuaucccauguauagau

SEQ ID NO: 2176590 - RNA, 19 nt, Artificial Sequence
  Description of Artificial Sequence: Synthetic oligonucleotide
  Sense strand starting at position 3940 of SEQ ID NO: 1883207
ggguauaugugacccugua

SEQ ID NO: 2176591 - RNA, 19 nt, Artificial Sequence
  Description of Artificial Sequence: Synthetic oligonucleotide
  Antisense strand to SEQ ID NO: 2176590
uacagggucacauauaccc

SEQ ID NO: 2176592 - RNA, 19 nt, Artificial Sequence
  Description of Artificial Sequence: Synthetic oligonucleotide
  Sense strand starting at position 3967 of SEQ ID NO: 1883207
cucuuucugugagucuaua

SEQ ID NO: 2176593 - RNA, 19 nt, Artificial Sequence
  Description of Artificial Sequence: Synthetic oligonucleotide
  Antisense strand to SEQ ID NO: 2176592
uauagacucacagaaagag

SEQ ID NO: 2176594 - RNA, 19 nt, Artificial Sequence
  Description of Artificial Sequence: Synthetic oligonucleotide
  Sense strand starting at position 468 of SEQ ID NO: 1883208
acccuaauugaguggcuaa

SEQ ID NO: 2176595 - RNA, 19 nt, Artificial Sequence
  Description of Artificial Sequence: Synthetic oligonucleotide
  Antisense strand to SEQ ID NO: 2176594
uuagccacucaauuagggu

SEQ ID NO: 2176596 - RNA, 19 nt, Artificial Sequence
  Description of Artificial Sequence: Synthetic oligonucleotide
  Sense strand starting at position 483 of SEQ ID NO: 1883208
cuaagagguuuccugguaa

SEQ ID NO: 2176597 - RNA, 19 nt, Artificial Sequence
  Description of Artificial Sequence: Synthetic oligonucleotide
  Antisense strand to SEQ ID NO: 2176596
uuaccaggaaaccucuuag

SEQ ID NO: 2176598 - RNA, 19 nt, Artificial Sequence
  Description of Artificial Sequence: Synthetic oligonucleotide
  Sense strand starting at position 498 of SEQ ID NO: 1883208
guaacaaggaucuguagag

SEQ ID NO: 2176599 - RNA, 19 nt, Artificial Sequence
  Description of Artificial Sequence: Synthetic oligonucleotide
  Antisense strand to SEQ ID NO: 2176598
cucuacagauccuuguuac

SEQ ID NO: 2176600 - RNA, 19 nt, Artificial Sequence
  Description of Artificial Sequence: Synthetic oligonucleotide
  Sense strand starting at position 499 of SEQ ID NO: 1883208
uaacaaggaucuguagagu

SEQ ID NO: 2176601 - RNA, 19 nt, Artificial Sequence
  Description of Artificial Sequence: Synthetic oligonucleotide
  Antisense strand to SEQ ID NO: 2176600
acucuacagauccuuguua

SEQ ID NO: 2176602 - RNA, 19 nt, Artificial Sequence
  Description of Artificial Sequence: Synthetic oligonucleotide
  Sense strand starting at position 505 of SEQ ID NO: 1883208
ggaucuguagagugacuua

SEQ ID NO: 2176603 - RNA, 19 nt, Artificial Sequence
  Description of Artificial Sequence: Synthetic oligonucleotide
  Antisense strand to SEQ ID NO: 2176602
uaagucacucuacagaucc

SEQ ID NO: 2176604 - RNA, 19 nt, Artificial Sequence
  Description of Artificial Sequence: Synthetic oligonucleotide
  Sense strand starting at position 674 of SEQ ID NO: 1883208
cacauugcggcuuaagaaa

SEQ ID NO: 2176605 - RNA, 19 nt, Artificial Sequence
  Description of Artificial Sequence: Synthetic oligonucleotide
  Antisense strand to SEQ ID NO: 2176604
uuucuuaagccgcaaugug

SEQ ID NO: 2176606 - RNA, 19 nt, Artificial Sequence
  Description of Artificial Sequence: Synthetic oligonucleotide
  Sense strand starting at position 811 of SEQ ID NO: 1883208
ggaauuaaauauguagcua

SEQ ID NO: 2176607 - RNA, 19 nt, Artificial Sequence
  Description of Artificial Sequence: Synthetic oligonucleotide
  Antisense strand to SEQ ID NO: 2176606
uagcuacauauuuaauucc

SEQ ID NO: 2176608 - RNA, 19 nt, Artificial Sequence
  Description of Artificial Sequence: Synthetic oligonucleotide
  Sense strand starting at position 1295 of SEQ ID NO: 1883208
gauggagagcauggugaaa

SEQ ID NO: 2176609 - RNA, 19 nt, Artificial Sequence
  Description of Artificial Sequence: Synthetic oligonucleotide
  Antisense strand to SEQ ID NO: 2176608
uuucaccaugcucuccauc

SEQ ID NO: 2176610 - RNA, 19 nt, Artificial Sequence
  Description of Artificial Sequence: Synthetic oligonucleotide
  Sense strand starting at position 1564 of SEQ ID NO: 1883208
guagaagccuauuucuguu

SEQ ID NO: 2176611 - RNA, 19 nt, Artificial Sequence
  Description of Artificial Sequence: Synthetic oligonucleotide
  Antisense strand to SEQ ID NO: 2176610
aacagaaauaggcuucuac

SEQ ID NO: 2176612 - RNA, 19 nt, Artificial Sequence
  Description of Artificial Sequence: Synthetic oligonucleotide
  Sense strand starting at position 1570 of SEQ ID NO: 1883208
gccuauuucuguuugcaug

SEQ ID NO: 2176613 - RNA, 19 nt, Artificial Sequence
  Description of Artificial Sequence: Synthetic oligonucleotide
  Antisense strand to SEQ ID NO: 2176612
caugcaaacagaaauaggc

SEQ ID NO: 2176614 - RNA, 19 nt, Artificial Sequence
  Description of Artificial Sequence: Synthetic oligonucleotide
  Sense strand starting at position 1760 of SEQ ID NO: 1883208
ugaugaucauggcucuuau

SEQ ID NO: 2176615 - RNA, 19 nt, Artificial Sequence
  Description of Artificial Sequence: Synthetic oligonucleotide
  Antisense strand to SEQ ID NO: 2176614
auaagagccaugaucauca

SEQ ID NO: 2176616 - RNA, 19 nt, Artificial Sequence
  Description of Artificial Sequence: Synthetic oligonucleotide
  Sense strand starting at position 2028 of SEQ ID NO: 1883208
ggcaaagauuaacuaaguu

SEQ ID NO: 2176617 - RNA, 19 nt, Artificial Sequence
  Description of Artificial Sequence: Synthetic oligonucleotide
  Antisense strand to SEQ ID NO: 2176616
aacuuaguuaaucuuugcc

SEQ ID NO: 2176618 - RNA, 19 nt, Artificial Sequence
  Description of Artificial Sequence: Synthetic oligonucleotide
  Sense strand starting at position 2126 of SEQ ID NO: 1883208
cauuauguguuacugagac

SEQ ID NO: 2176619 - RNA, 19 nt, Artificial Sequence
  Description of Artificial Sequence: Synthetic oligonucleotide
  Antisense strand to SEQ ID NO: 2176618
gucucaguaacacauaaug

SEQ ID NO: 2176620 - RNA, 19 nt, Artificial Sequence
  Description of Artificial Sequence: Synthetic oligonucleotide
  Sense strand starting at position 2258 of SEQ ID NO: 1883208
caugauaacggcuagcauu

SEQ ID NO: 2176621 - RNA, 19 nt, Artificial Sequence
  Description of Artificial Sequence: Synthetic oligonucleotide
  Antisense strand to SEQ ID NO: 2176620
aaugcuagccguuaucaug

SEQ ID NO: 2176622 - RNA, 19 nt, Artificial Sequence
  Description of Artificial Sequence: Synthetic oligonucleotide
  Sense strand starting at position 2285 of SEQ ID NO: 1883208
accuguaacaccgauaggu

SEQ ID NO: 2176623 - RNA, 19 nt, Artificial Sequence
  Description of Artificial Sequence: Synthetic oligonucleotide
  Antisense strand to SEQ ID NO: 2176622
accuaucgguguuacaggu

SEQ ID NO: 2176624 - RNA, 19 nt, Artificial Sequence
  Description of Artificial Sequence: Synthetic oligonucleotide
  Sense strand starting at position 2307 of SEQ ID NO: 1883208
uggguaguuccagaauggu

SEQ ID NO: 2176625 - RNA, 19 nt, Artificial Sequence
  Description of Artificial Sequence: Synthetic oligonucleotide
  Antisense strand to SEQ ID NO: 2176624
accauucuggaacuaccca

SEQ ID NO: 2176626 - RNA, 19 nt, Artificial Sequence
  Description of Artificial Sequence: Synthetic oligonucleotide
  Sense strand starting at position 2310 of SEQ ID NO: 1883208
guaguuccagaaugguaca

SEQ ID NO: 2176627 - RNA, 19 nt, Artificial Sequence
  Description of Artificial Sequence: Synthetic oligonucleotide
  Antisense strand to SEQ ID NO: 2176626
uguaccauucuggaacuac

SEQ ID NO: 2176628 - RNA, 19 nt, Artificial Sequence
  Description of Artificial Sequence: Synthetic oligonucleotide
  Sense strand starting at position 2418 of SEQ ID NO: 1883208
auuuaauacgcuuggcaag

SEQ ID NO: 2176629 - RNA, 19 nt, Artificial Sequence
  Description of Artificial Sequence: Synthetic oligonucleotide
  Antisense strand to SEQ ID NO: 2176628
cuugccaagcguauuaaau

SEQ ID NO: 2176630 - RNA, 19 nt, Artificial Sequence
  Description of Artificial Sequence: Synthetic oligonucleotide
  Sense strand starting at position 2467 of SEQ ID NO: 1883208
cucauaauagagugcuuga

SEQ ID NO: 2176631 - RNA, 19 nt, Artificial Sequence
  Description of Artificial Sequence: Synthetic oligonucleotide
  Antisense strand to SEQ ID NO: 2176630
ucaagcacucuauuaugag

SEQ ID NO: 2176632 - RNA, 19 nt, Artificial Sequence
  Description of Artificial Sequence: Synthetic oligonucleotide
  Sense strand starting at position 2501 of SEQ ID NO: 1883208
ccuuccuauggauguuaau

SEQ ID NO: 2176633 - RNA, 19 nt, Artificial Sequence
  Description of Artificial Sequence: Synthetic oligonucleotide
  Antisense strand to SEQ ID NO: 2176632
auuaacauccauaggaagg

SEQ ID NO: 2176634 - RNA, 19 nt, Artificial Sequence
  Description of Artificial Sequence: Synthetic oligonucleotide
  Sense strand starting at position 2528 of SEQ ID NO: 1883208
caggaauuaccugguggca

SEQ ID NO: 2176635 - RNA, 19 nt, Artificial Sequence
  Description of Artificial Sequence: Synthetic oligonucleotide
  Antisense strand to SEQ ID NO: 2176634
ugccaccagguaauuccug

SEQ ID NO: 2176636 - RNA, 19 nt, Artificial Sequence
  Description of Artificial Sequence: Synthetic oligonucleotide
  Sense strand starting at position 2531 of SEQ ID NO: 1883208
gaauuaccugguggcagau

SEQ ID NO: 2176637 - RNA, 19 nt, Artificial Sequence
  Description of Artificial Sequence: Synthetic oligonucleotide
  Antisense strand to SEQ ID NO: 2176636
aucugccaccagguaauuc

SEQ ID NO: 2176638 - RNA, 19 nt, Artificial Sequence
  Description of Artificial Sequence: Synthetic oligonucleotide
  Sense strand starting at position 2576 of SEQ ID NO: 1883208
ugagguuuagcugaguuca

SEQ ID NO: 2176639 - RNA, 19 nt, Artificial Sequence
  Description of Artificial Sequence: Synthetic oligonucleotide
  Antisense strand to SEQ ID NO: 2176638
ugaacucagcuaaaccuca

SEQ ID NO: 2176640 - RNA, 19 nt, Artificial Sequence
  Description of Artificial Sequence: Synthetic oligonucleotide
  Sense strand starting at position 2628 of SEQ ID NO: 1883208
ggcacuaagugaucuugaa

SEQ ID NO: 2176641 - RNA, 19 nt, Artificial Sequence
  Description of Artificial Sequence: Synthetic oligonucleotide
  Antisense strand to SEQ ID NO: 2176640
uucaagaucacuuagugcc

SEQ ID NO: 2176642 - RNA, 19 nt, Artificial Sequence
  Description of Artificial Sequence: Synthetic oligonucleotide
  Sense strand starting at position 2632 of SEQ ID NO: 1883208
cuaagugaucuugaagcag

SEQ ID NO: 2176643 - RNA, 19 nt, Artificial Sequence
  Description of Artificial Sequence: Synthetic oligonucleotide
  Antisense strand to SEQ ID NO: 2176642
cugcuucaagaucacuuag

SEQ ID NO: 2176644 - RNA, 19 nt, Artificial Sequence
  Description of Artificial Sequence: Synthetic oligonucleotide
  Sense strand starting at position 2636 of SEQ ID NO: 1883208
gugaucuugaagcagugaa

SEQ ID NO: 2176645 - RNA, 19 nt, Artificial Sequence
  Description of Artificial Sequence: Synthetic oligonucleotide
  Antisense strand to SEQ ID NO: 2176644
uucacugcuucaagaucac

SEQ ID NO: 2176646 - RNA, 19 nt, Artificial Sequence
  Description of Artificial Sequence: Synthetic oligonucleotide
  Sense strand starting at position 2740 of SEQ ID NO: 1883208
uguccuuaacucugaaaug

SEQ ID NO: 2176647 - RNA, 19 nt, Artificial Sequence
  Description of Artificial Sequence: Synthetic oligonucleotide
  Antisense strand to SEQ ID NO: 2176646
cauuucagaguuaaggaca

SEQ ID NO: 2176648 - RNA, 19 nt, Artificial Sequence
  Description of Artificial Sequence: Synthetic oligonucleotide
  Sense strand starting at position 2796 of SEQ ID NO: 1883208
uuacacagguggucaauaa

SEQ ID NO: 2176649 - RNA, 19 nt, Artificial Sequence
  Description of Artificial Sequence: Synthetic oligonucleotide
  Antisense strand to SEQ ID NO: 2176648
uuauugaccaccuguguaa

SEQ ID NO: 2176650 - RNA, 19 nt, Artificial Sequence
  Description of Artificial Sequence: Synthetic oligonucleotide
  Sense strand starting at position 2980 of SEQ ID NO: 1883208
gcauguuugcauccuugua

SEQ ID NO: 2176651 - RNA, 19 nt, Artificial Sequence
  Description of Artificial Sequence: Synthetic oligonucleotide
  Antisense strand to SEQ ID NO: 2176650
uacaaggaugcaaacaugc

SEQ ID NO: 2176652 - RNA, 19 nt, Artificial Sequence
  Description of Artificial Sequence: Synthetic oligonucleotide
  Sense strand starting at position 3015 of SEQ ID NO: 1883208
gucacauaguaaguaauau

SEQ ID NO: 2176653 - RNA, 19 nt, Artificial Sequence
  Description of Artificial Sequence: Synthetic oligonucleotide
  Antisense strand to SEQ ID NO: 2176652
auauuacuuacuaugugac

SEQ ID NO: 2176654 - RNA, 19 nt, Artificial Sequence
  Description of Artificial Sequence: Synthetic oligonucleotide
  Sense strand starting at position 3168 of SEQ ID NO: 1883208
aagaauugaugggaauaua

SEQ ID NO: 2176655 - RNA, 19 nt, Artificial Sequence
  Description of Artificial Sequence: Synthetic oligonucleotide
  Antisense strand to SEQ ID NO: 2176654
uauauucccaucaauucuu

SEQ ID NO: 2176656 - RNA, 19 nt, Artificial Sequence
  Description of Artificial Sequence: Synthetic oligonucleotide
  Sense strand starting at position 3351 of SEQ ID NO: 1883208
ccugauauaguuuggacau

SEQ ID NO: 2176657 - RNA, 19 nt, Artificial Sequence
  Description of Artificial Sequence: Synthetic oligonucleotide
  Antisense strand to SEQ ID NO: 2176656
auguccaaacuauaucagg

SEQ ID NO: 2176658 - RNA, 19 nt, Artificial Sequence
  Description of Artificial Sequence: Synthetic oligonucleotide
  Sense strand starting at position 3492 of SEQ ID NO: 1883208
gugaguucucuccagaucu

SEQ ID NO: 2176659 - RNA, 19 nt, Artificial Sequence
  Description of Artificial Sequence: Synthetic oligonucleotide
  Antisense strand to SEQ ID NO: 2176658
agaucuggagagaacucac

SEQ ID NO: 2176660 - RNA, 19 nt, Artificial Sequence
  Description of Artificial Sequence: Synthetic oligonucleotide
  Sense strand starting at position 3587 of SEQ ID NO: 1883208
accuacagccaugaguaaa

SEQ ID NO: 2176661 - RNA, 19 nt, Artificial Sequence
  Description of Artificial Sequence: Synthetic oligonucleotide
  Antisense strand to SEQ ID NO: 2176660
uuuacucauggcuguaggu

SEQ ID NO: 2176662 - RNA, 19 nt, Artificial Sequence
  Description of Artificial Sequence: Synthetic oligonucleotide
  Sense strand starting at position 3710 of SEQ ID NO: 1883208
cucaaauaguucuuuguag

SEQ ID NO: 2176663 - RNA, 19 nt, Artificial Sequence
  Description of Artificial Sequence: Synthetic oligonucleotide
  Antisense strand to SEQ ID NO: 2176662
cuacaaagaacuauuugag

SEQ ID NO: 2176664 - RNA, 19 nt, Artificial Sequence
  Description of Artificial Sequence: Synthetic oligonucleotide
  Sense strand starting at position 3877 of SEQ ID NO: 1883208
cauauagagcuauggguuu

SEQ ID NO: 2176665 - RNA, 19 nt, Artificial Sequence
  Description of Artificial Sequence: Synthetic oligonucleotide
  Antisense strand to SEQ ID NO: 2176664
aaacccauagcucuauaug

SEQ ID NO: 2176666 - RNA, 19 nt, Artificial Sequence
  Description of Artificial Sequence: Synthetic oligonucleotide
  Sense strand starting at position 3911 of SEQ ID NO: 1883208
caggguagccucuaacaaa

SEQ ID NO: 2176667 - RNA, 19 nt, Artificial Sequence
  Description of Artificial Sequence: Synthetic oligonucleotide
  Antisense strand to SEQ ID NO: 2176666
uuuguuagaggcuacccug

SEQ ID NO: 2176668 - RNA, 19 nt, Artificial Sequence
  Description of Artificial Sequence: Synthetic oligonucleotide
  Sense strand starting at position 3932 of SEQ ID NO: 1883208
ccaugauauauggguguua

SEQ ID NO: 2176669 - RNA, 19 nt, Artificial Sequence
  Description of Artificial Sequence: Synthetic oligonucleotide
  Antisense strand to SEQ ID NO: 2176668
uaacacccauauaucaugg

SEQ ID NO: 2176670 - RNA, 19 nt, Artificial Sequence
  Description of Artificial Sequence: Synthetic oligonucleotide
  Sense strand starting at position 3933 of SEQ ID NO: 1883208
caugauauauggguguuau

SEQ ID NO: 2176671 - RNA, 19 nt, Artificial Sequence
  Description of Artificial Sequence: Synthetic oligonucleotide
  Antisense strand to SEQ ID NO: 2176670
auaacacccauauaucaug

SEQ ID NO: 2176672 - RNA, 19 nt, Artificial Sequence
  Description of Artificial Sequence: Synthetic oligonucleotide
  Sense strand starting at position 3934 of SEQ ID NO: 1883208
augauauauggguguuauu

SEQ ID NO: 2176673 - RNA, 19 nt, Artificial Sequence
  Description of Artificial Sequence: Synthetic oligonucleotide
  Antisense strand to SEQ ID NO: 2176672
aauaacacccauauaucau

SEQ ID NO: 2176674 - RNA, 19 nt, Artificial Sequence
  Description of Artificial Sequence: Synthetic oligonucleotide
  Sense strand starting at position 194 of SEQ ID NO: 1883209
gaaguaguuccagacugca

SEQ ID NO: 2176675 - RNA, 19 nt, Artificial Sequence
  Description of Artificial Sequence: Synthetic oligonucleotide
  Antisense strand to SEQ ID NO: 2176674
ugcagucuggaacuacuuc

SEQ ID NO: 2176676 - RNA, 19 nt, Artificial Sequence
  Description of Artificial Sequence: Synthetic oligonucleotide
  Sense strand starting at position 197 of SEQ ID NO: 1883209
guaguuccagacugcaaga

SEQ ID NO: 2176677 - RNA, 19 nt, Artificial Sequence
  Description of Artificial Sequence: Synthetic oligonucleotide
  Antisense strand to SEQ ID NO: 2176676
ucuugcagucuggaacuac

SEQ ID NO: 2176678 - RNA, 19 nt, Artificial Sequence
  Description of Artificial Sequence: Synthetic oligonucleotide
  Sense strand starting at position 341 of SEQ ID NO: 1883209
acuagauuauuguuacgug

SEQ ID NO: 2176679 - RNA, 19 nt, Artificial Sequence
  Description of Artificial Sequence: Synthetic oligonucleotide
  Antisense strand to SEQ ID NO: 2176678
cacguaacaauaaucuagu

SEQ ID NO: 2176680 - RNA, 19 nt, Artificial Sequence
  Description of Artificial Sequence: Synthetic oligonucleotide
  Sense strand starting at position 498 of SEQ ID NO: 1883209
aaacguauauuugagcaaa

SEQ ID NO: 2176681 - RNA, 19 nt, Artificial Sequence
  Description of Artificial Sequence: Synthetic oligonucleotide
  Antisense strand to SEQ ID NO: 2176680
uuugcucaaauauacguuu

SEQ ID NO: 2176682 - RNA, 19 nt, Artificial Sequence
  Description of Artificial Sequence: Synthetic oligonucleotide
  Sense strand starting at position 624 of SEQ ID NO: 1883209
ggaaauuacagcugccaga

SEQ ID NO: 2176683 - RNA, 19 nt, Artificial Sequence
  Description of Artificial Sequence: Synthetic oligonucleotide
  Antisense strand to SEQ ID NO: 2176682
ucuggcagcuguaauuucc

SEQ ID NO: 2176684 - RNA, 19 nt, Artificial Sequence
  Description of Artificial Sequence: Synthetic oligonucleotide
  Sense strand starting at position 942 of SEQ ID NO: 1883209
agucacagagcuuggauua

SEQ ID NO: 2176685 - RNA, 19 nt, Artificial Sequence
  Description of Artificial Sequence: Synthetic oligonucleotide
  Antisense strand to SEQ ID NO: 2176684
uaauccaagcucugugacu

SEQ ID NO: 2176686 - RNA, 19 nt, Artificial Sequence
  Description of Artificial Sequence: Synthetic oligonucleotide
  Sense strand starting at position 1035 of SEQ ID NO: 1883209
cuuuaacucucuguguaca

SEQ ID NO: 2176687 - RNA, 19 nt, Artificial Sequence
  Description of Artificial Sequence: Synthetic oligonucleotide
  Antisense strand to SEQ ID NO: 2176686
uguacacagagaguuaaag

SEQ ID NO: 2176688 - RNA, 19 nt, Artificial Sequence
  Description of Artificial Sequence: Synthetic oligonucleotide
  Sense strand starting at position 1036 of SEQ ID NO: 1883209
uuuaacucucuguguacaa

SEQ ID NO: 2176689 - RNA, 19 nt, Artificial Sequence
  Description of Artificial Sequence: Synthetic oligonucleotide
  Antisense strand to SEQ ID NO: 2176688
uuguacacagagaguuaaa

SEQ ID NO: 2176690 - RNA, 19 nt, Artificial Sequence
  Description of Artificial Sequence: Synthetic oligonucleotide
  Sense strand starting at position 1057 of SEQ ID NO: 1883209
gcaucacauugucuacaua

SEQ ID NO: 2176691 - RNA, 19 nt, Artificial Sequence
  Description of Artificial Sequence: Synthetic oligonucleotide
  Antisense strand to SEQ ID NO: 2176690
uauguagacaaugugaugc

SEQ ID NO: 2176692 - RNA, 19 nt, Artificial Sequence
  Description of Artificial Sequence: Synthetic oligonucleotide
  Sense strand starting at position 1163 of SEQ ID NO: 1883209
ggauuuacuuaaggacacu

SEQ ID NO: 2176693 - RNA, 19 nt, Artificial Sequence
  Description of Artificial Sequence: Synthetic oligonucleotide
  Antisense strand to SEQ ID NO: 2176692
aguguccuuaaguaaaucc

SEQ ID NO: 2176694 - RNA, 19 nt, Artificial Sequence
  Description of Artificial Sequence: Synthetic oligonucleotide
  Sense strand starting at position 1331 of SEQ ID NO: 1883209
cagguuuccuggucugaau

SEQ ID NO: 2176695 - RNA, 19 nt, Artificial Sequence
  Description of Artificial Sequence: Synthetic oligonucleotide
  Antisense strand to SEQ ID NO: 2176694
auucagaccaggaaaccug

SEQ ID NO: 2176696 - RNA, 19 nt, Artificial Sequence
  Description of Artificial Sequence: Synthetic oligonucleotide
  Sense strand starting at position 1438 of SEQ ID NO: 1883209
gcaaaugauucuguaauaa

SEQ ID NO: 2176697 - RNA, 19 nt, Artificial Sequence
  Description of Artificial Sequence: Synthetic oligonucleotide
  Antisense strand to SEQ ID NO: 2176696
uuauuacagaaucauuugc

SEQ ID NO: 2176698 - RNA, 19 nt, Artificial Sequence
  Description of Artificial Sequence: Synthetic oligonucleotide
  Sense strand starting at position 1453 of SEQ ID NO: 1883209
auaagauagaguugcaaga

SEQ ID NO: 2176699 - RNA, 19 nt, Artificial Sequence
  Description of Artificial Sequence: Synthetic oligonucleotide
  Antisense strand to SEQ ID NO: 2176698
ucuugcaacucuaucuuau

SEQ ID NO: 2176700 - RNA, 19 nt, Artificial Sequence
  Description of Artificial Sequence: Synthetic oligonucleotide
  Sense strand starting at position 1531 of SEQ ID NO: 1883209
ggaacuauguacuuaagca

SEQ ID NO: 2176701 - RNA, 19 nt, Artificial Sequence
  Description of Artificial Sequence: Synthetic oligonucleotide
  Antisense strand to SEQ ID NO: 2176700
ugcuuaaguacauaguucc

SEQ ID NO: 2176702 - RNA, 19 nt, Artificial Sequence
  Description of Artificial Sequence: Synthetic oligonucleotide
  Sense strand starting at position 1989 of SEQ ID NO: 1883209
ugccaugaucgucauagga

SEQ ID NO: 2176703 - RNA, 19 nt, Artificial Sequence
  Description of Artificial Sequence: Synthetic oligonucleotide
  Antisense strand to SEQ ID NO: 2176702
uccuaugacgaucauggca

SEQ ID NO: 2176704 - RNA, 19 nt, Artificial Sequence
  Description of Artificial Sequence: Synthetic oligonucleotide
  Sense strand starting at position 1993 of SEQ ID NO: 1883209
augaucgucauaggauaga

SEQ ID NO: 2176705 - RNA, 19 nt, Artificial Sequence
  Description of Artificial Sequence: Synthetic oligonucleotide
  Antisense strand to SEQ ID NO: 2176704
ucuauccuaugacgaucau

SEQ ID NO: 2176706 - RNA, 19 nt, Artificial Sequence
  Description of Artificial Sequence: Synthetic oligonucleotide
  Sense strand starting at position 2044 of SEQ ID NO: 1883209
uccauuguccaguaguaga

SEQ ID NO: 2176707 - RNA, 19 nt, Artificial Sequence
  Description of Artificial Sequence: Synthetic oligonucleotide
  Antisense strand to SEQ ID NO: 2176706
ucuacuacuggacaaugga

SEQ ID NO: 2176708 - RNA, 19 nt, Artificial Sequence
  Description of Artificial Sequence: Synthetic oligonucleotide
  Sense strand starting at position 2058 of SEQ ID NO: 1883209
guagaacaggcuuggucua

SEQ ID NO: 2176709 - RNA, 19 nt, Artificial Sequence
  Description of Artificial Sequence: Synthetic oligonucleotide
  Antisense strand to SEQ ID NO: 2176708
uagaccaagccuguucuac

SEQ ID NO: 2176710 - RNA, 19 nt, Artificial Sequence
  Description of Artificial Sequence: Synthetic oligonucleotide
  Sense strand starting at position 2063 of SEQ ID NO: 1883209
acaggcuuggucuaucuua

SEQ ID NO: 2176711 - RNA, 19 nt, Artificial Sequence
  Description of Artificial Sequence: Synthetic oligonucleotide
  Antisense strand to SEQ ID NO: 2176710
uaagauagaccaagccugu

SEQ ID NO: 2176712 - RNA, 19 nt, Artificial Sequence
  Description of Artificial Sequence: Synthetic oligonucleotide
  Sense strand starting at position 2091 of SEQ ID NO: 1883209
auccaaauuuaguagaagu

SEQ ID NO: 2176713 - RNA, 19 nt, Artificial Sequence
  Description of Artificial Sequence: Synthetic oligonucleotide
  Antisense strand to SEQ ID NO: 2176712
acuucuacuaaauuuggau

SEQ ID NO: 2176714 - RNA, 19 nt, Artificial Sequence
  Description of Artificial Sequence: Synthetic oligonucleotide
  Sense strand starting at position 2115 of SEQ ID NO: 1883209
ugacaauuccucuagaagc

SEQ ID NO: 2176715 - RNA, 19 nt, Artificial Sequence
  Description of Artificial Sequence: Synthetic oligonucleotide
  Antisense strand to SEQ ID NO: 2176714
gcuucuagaggaauuguca

SEQ ID NO: 2176716 - RNA, 19 nt, Artificial Sequence
  Description of Artificial Sequence: Synthetic oligonucleotide
  Sense strand starting at position 2281 of SEQ ID NO: 1883209
gcacauugguggcuugaaa

SEQ ID NO: 2176717 - RNA, 19 nt, Artificial Sequence
  Description of Artificial Sequence: Synthetic oligonucleotide
  Antisense strand to SEQ ID NO: 2176716
uuucaagccaccaaugugc

SEQ ID NO: 2176718 - RNA, 19 nt, Artificial Sequence
  Description of Artificial Sequence: Synthetic oligonucleotide
  Sense strand starting at position 2295 of SEQ ID NO: 1883209
ugaaaucagccaugauaag

SEQ ID NO: 2176719 - RNA, 19 nt, Artificial Sequence
  Description of Artificial Sequence: Synthetic oligonucleotide
  Antisense strand to SEQ ID NO: 2176718
cuuaucauggcugauuuca

SEQ ID NO: 2176720 - RNA, 19 nt, Artificial Sequence
  Description of Artificial Sequence: Synthetic oligonucleotide
  Sense strand starting at position 2490 of SEQ ID NO: 1883209
gugguuacgggugaacaua

SEQ ID NO: 2176721 - RNA, 19 nt, Artificial Sequence
  Description of Artificial Sequence: Synthetic oligonucleotide
  Antisense strand to SEQ ID NO: 2176720
uauguucacccguaaccac

SEQ ID NO: 2176722 - RNA, 19 nt, Artificial Sequence
  Description of Artificial Sequence: Synthetic oligonucleotide
  Sense strand starting at position 2552 of SEQ ID NO: 1883209
cugcaauccuucuuggacu

SEQ ID NO: 2176723 - RNA, 19 nt, Artificial Sequence
  Description of Artificial Sequence: Synthetic oligonucleotide
  Antisense strand to SEQ ID NO: 2176722
aguccaagaaggauugcag

SEQ ID NO: 2176724 - RNA, 19 nt, Artificial Sequence
  Description of Artificial Sequence: Synthetic oligonucleotide
  Sense strand starting at position 2554 of SEQ ID NO: 1883209
gcaauccuucuuggacuau

SEQ ID NO: 2176725 - RNA, 19 nt, Artificial Sequence
  Description of Artificial Sequence: Synthetic oligonucleotide
  Antisense strand to SEQ ID NO: 2176724
auaguccaagaaggauugc

SEQ ID NO: 2176726 - RNA, 19 nt, Artificial Sequence
  Description of Artificial Sequence: Synthetic oligonucleotide
  Sense strand starting at position 2592 of SEQ ID NO: 1883209
guucuuaaugaggaugagu

SEQ ID NO: 2176727 - RNA, 19 nt, Artificial Sequence
  Description of Artificial Sequence: Synthetic oligonucleotide
  Antisense strand to SEQ ID NO: 2176726
acucauccucauuaagaac

SEQ ID NO: 2176728 - RNA, 19 nt, Artificial Sequence
  Description of Artificial Sequence: Synthetic oligonucleotide
  Sense strand starting at position 2758 of SEQ ID NO: 1883209
uuuagaaacucauuagagu

SEQ ID NO: 2176729 - RNA, 19 nt, Artificial Sequence
  Description of Artificial Sequence: Synthetic oligonucleotide
  Antisense strand to SEQ ID NO: 2176728
acucuaaugaguuucuaaa

SEQ ID NO: 2176730 - RNA, 19 nt, Artificial Sequence
  Description of Artificial Sequence: Synthetic oligonucleotide
  Sense strand starting at position 2764 of SEQ ID NO: 1883209
aacucauuagaguggucuu

SEQ ID NO: 2176731 - RNA, 19 nt, Artificial Sequence
  Description of Artificial Sequence: Synthetic oligonucleotide
  Antisense strand to SEQ ID NO: 2176730
aagaccacucuaaugaguu

SEQ ID NO: 2176732 - RNA, 19 nt, Artificial Sequence
  Description of Artificial Sequence: Synthetic oligonucleotide
  Sense strand starting at position 2767 of SEQ ID NO: 1883209
ucauuagaguggucuucuu

SEQ ID NO: 2176733 - RNA, 19 nt, Artificial Sequence
  Description of Artificial Sequence: Synthetic oligonucleotide
  Antisense strand to SEQ ID NO: 2176732
aagaagaccacucuaauga

SEQ ID NO: 2176734 - RNA, 19 nt, Artificial Sequence
  Description of Artificial Sequence: Synthetic oligonucleotide
  Sense strand starting at position 2940 of SEQ ID NO: 1883209
uggacauuauauguuaagu

SEQ ID NO: 2176735 - RNA, 19 nt, Artificial Sequence
  Description of Artificial Sequence: Synthetic oligonucleotide
  Antisense strand to SEQ ID NO: 2176734
acuuaacauauaaugucca

SEQ ID NO: 2176736 - RNA, 19 nt, Artificial Sequence
  Description of Artificial Sequence: Synthetic oligonucleotide
  Sense strand starting at position 3029 of SEQ ID NO: 1883209
aauaaugaguucccuggga

SEQ ID NO: 2176737 - RNA, 19 nt, Artificial Sequence
  Description of Artificial Sequence: Synthetic oligonucleotide
  Antisense strand to SEQ ID NO: 2176736
ucccagggaacucauuauu

SEQ ID NO: 2176738 - RNA, 19 nt, Artificial Sequence
  Description of Artificial Sequence: Synthetic oligonucleotide
  Sense strand starting at position 3031 of SEQ ID NO: 1883209
uaaugaguucccugggauu

SEQ ID NO: 2176739 - RNA, 19 nt, Artificial Sequence
  Description of Artificial Sequence: Synthetic oligonucleotide
  Antisense strand to SEQ ID NO: 2176738
aaucccagggaacucauua

SEQ ID NO: 2176740 - RNA, 19 nt, Artificial Sequence
  Description of Artificial Sequence: Synthetic oligonucleotide
  Sense strand starting at position 3065 of SEQ ID NO: 1883209
ugaaauagucagcaaucca

SEQ ID NO: 2176741 - RNA, 19 nt, Artificial Sequence
  Description of Artificial Sequence: Synthetic oligonucleotide
  Antisense strand to SEQ ID NO: 2176740
uggauugcugacuauuuca

SEQ ID NO: 2176742 - RNA, 19 nt, Artificial Sequence
  Description of Artificial Sequence: Synthetic oligonucleotide
  Sense strand starting at position 3265 of SEQ ID NO: 1883209
agcaccacccgugauagua

SEQ ID NO: 2176743 - RNA, 19 nt, Artificial Sequence
  Description of Artificial Sequence: Synthetic oligonucleotide
  Antisense strand to SEQ ID NO: 2176742
uacuaucacggguggugcu

SEQ ID NO: 2176744 - RNA, 19 nt, Artificial Sequence
  Description of Artificial Sequence: Synthetic oligonucleotide
  Sense strand starting at position 3274 of SEQ ID NO: 1883209
cgugauaguaaaggcuaaa

SEQ ID NO: 2176745 - RNA, 19 nt, Artificial Sequence
  Description of Artificial Sequence: Synthetic oligonucleotide
  Antisense strand to SEQ ID NO: 2176744
uuuagccuuuacuaucacg

SEQ ID NO: 2176746 - RNA, 19 nt, Artificial Sequence
  Description of Artificial Sequence: Synthetic oligonucleotide
  Sense strand starting at position 3350 of SEQ ID NO: 1883209
ugcguuggugucagagaag

SEQ ID NO: 2176747 - RNA, 19 nt, Artificial Sequence
  Description of Artificial Sequence: Synthetic oligonucleotide
  Antisense strand to SEQ ID NO: 2176746
cuucucugacaccaacgca

SEQ ID NO: 2176748 - RNA, 19 nt, Artificial Sequence
  Description of Artificial Sequence: Synthetic oligonucleotide
  Sense strand starting at position 3353 of SEQ ID NO: 1883209
guuggugucagagaaggca

SEQ ID NO: 2176749 - RNA, 19 nt, Artificial Sequence
  Description of Artificial Sequence: Synthetic oligonucleotide
  Antisense strand to SEQ ID NO: 2176748
ugccuucucugacaccaac

SEQ ID NO: 2176750 - RNA, 19 nt, Artificial Sequence
  Description of Artificial Sequence: Synthetic oligonucleotide
  Sense strand starting at position 3514 of SEQ ID NO: 1883209
uggagaacaguuggaaagu

SEQ ID NO: 2176751 - RNA, 19 nt, Artificial Sequence
  Description of Artificial Sequence: Synthetic oligonucleotide
  Antisense strand to SEQ ID NO: 2176750
acuuuccaacuguucucca

SEQ ID NO: 2176752 - RNA, 19 nt, Artificial Sequence
  Description of Artificial Sequence: Synthetic oligonucleotide
  Sense strand starting at position 3621 of SEQ ID NO: 1883209
ugaagaaccugggcuucua

SEQ ID NO: 2176753 - RNA, 19 nt, Artificial Sequence
  Description of Artificial Sequence: Synthetic oligonucleotide
  Antisense strand to SEQ ID NO: 2176752
uagaagcccagguucuuca

SEQ ID NO: 2176754 - RNA, 19 nt, Artificial Sequence
  Description of Artificial Sequence: Synthetic oligonucleotide
  Sense strand starting at position 194 of SEQ ID NO: 1883210
ccucgaggugaauaaguua

SEQ ID NO: 2176755 - RNA, 19 nt, Artificial Sequence
  Description of Artificial Sequence: Synthetic oligonucleotide
  Antisense strand to SEQ ID NO: 2176754
uaacuuauucaccucgagg

SEQ ID NO: 2176756 - RNA, 19 nt, Artificial Sequence
  Description of Artificial Sequence: Synthetic oligonucleotide
  Sense strand starting at position 314 of SEQ ID NO: 1883210
uuuaaaggucuauggaauu

SEQ ID NO: 2176757 - RNA, 19 nt, Artificial Sequence
  Description of Artificial Sequence: Synthetic oligonucleotide
  Antisense strand to SEQ ID NO: 2176756
aauuccauagaccuuuaaa

SEQ ID NO: 2176758 - RNA, 19 nt, Artificial Sequence
  Description of Artificial Sequence: Synthetic oligonucleotide
  Sense strand starting at position 335 of SEQ ID NO: 1883210
ugaggugaaugcuuccuga

SEQ ID NO: 2176759 - RNA, 19 nt, Artificial Sequence
  Description of Artificial Sequence: Synthetic oligonucleotide
  Antisense strand to SEQ ID NO: 2176758
ucaggaagcauucaccuca

SEQ ID NO: 2176760 - RNA, 19 nt, Artificial Sequence
  Description of Artificial Sequence: Synthetic oligonucleotide
  Sense strand starting at position 656 of SEQ ID NO: 1883210
guggcuaggaccuagauau

SEQ ID NO: 2176761 - RNA, 19 nt, Artificial Sequence
  Description of Artificial Sequence: Synthetic oligonucleotide
  Antisense strand to SEQ ID NO: 2176760
auaucuagguccuagccac

SEQ ID NO: 2176762 - RNA, 19 nt, Artificial Sequence
  Description of Artificial Sequence: Synthetic oligonucleotide
  Sense strand starting at position 694 of SEQ ID NO: 1883210
ccagaugaugcugauguau

SEQ ID NO: 2176763 - RNA, 19 nt, Artificial Sequence
  Description of Artificial Sequence: Synthetic oligonucleotide
  Antisense strand to SEQ ID NO: 2176762
auacaucagcaucaucugg

SEQ ID NO: 2176764 - RNA, 19 nt, Artificial Sequence
  Description of Artificial Sequence: Synthetic oligonucleotide
  Sense strand starting at position 706 of SEQ ID NO: 1883210
gauguaucaucagcuaaga

SEQ ID NO: 2176765 - RNA, 19 nt, Artificial Sequence
  Description of Artificial Sequence: Synthetic oligonucleotide
  Antisense strand to SEQ ID NO: 2176764
ucuuagcugaugauacauc

SEQ ID NO: 2176766 - RNA, 19 nt, Artificial Sequence
  Description of Artificial Sequence: Synthetic oligonucleotide
  Sense strand starting at position 723 of SEQ ID NO: 1883210
gaauuacuggccuaaaggu

SEQ ID NO: 2176767 - RNA, 19 nt, Artificial Sequence
  Description of Artificial Sequence: Synthetic oligonucleotide
  Antisense strand to SEQ ID NO: 2176766
accuuuaggccaguaauuc

SEQ ID NO: 2176768 - RNA, 19 nt, Artificial Sequence
  Description of Artificial Sequence: Synthetic oligonucleotide
  Sense strand starting at position 815 of SEQ ID NO: 1883210
gggaacuggccuugggaua

SEQ ID NO: 2176769 - RNA, 19 nt, Artificial Sequence
  Description of Artificial Sequence: Synthetic oligonucleotide
  Antisense strand to SEQ ID NO: 2176768
uaucccaaggccaguuccc

SEQ ID NO: 2176770 - RNA, 19 nt, Artificial Sequence
  Description of Artificial Sequence: Synthetic oligonucleotide
  Sense strand starting at position 816 of SEQ ID NO: 1883210
ggaacuggccuugggauau

SEQ ID NO: 2176771 - RNA, 19 nt, Artificial Sequence
  Description of Artificial Sequence: Synthetic oligonucleotide
  Antisense strand to SEQ ID NO: 2176770
auaucccaaggccaguucc

SEQ ID NO: 2176772 - RNA, 19 nt, Artificial Sequence
  Description of Artificial Sequence: Synthetic oligonucleotide
  Sense strand starting at position 822 of SEQ ID NO: 1883210
ggccuugggauaugaccaa

SEQ ID NO: 2176773 - RNA, 19 nt, Artificial Sequence
  Description of Artificial Sequence: Synthetic oligonucleotide
  Antisense strand to SEQ ID NO: 2176772
uuggucauaucccaaggcc

SEQ ID NO: 2176774 - RNA, 19 nt, Artificial Sequence
  Description of Artificial Sequence: Synthetic oligonucleotide
  Sense strand starting at position 929 of SEQ ID NO: 1883210
ugggauuuguuggaaauag

SEQ ID NO: 2176775 - RNA, 19 nt, Artificial Sequence
  Description of Artificial Sequence: Synthetic oligonucleotide
  Antisense strand to SEQ ID NO: 2176774
cuauuuccaacaaauccca

SEQ ID NO: 2176776 - RNA, 19 nt, Artificial Sequence
  Description of Artificial Sequence: Synthetic oligonucleotide
  Sense strand starting at position 1074 of SEQ ID NO: 1883210
caugaaaugccucaucggu

SEQ ID NO: 2176777 - RNA, 19 nt, Artificial Sequence
  Description of Artificial Sequence: Synthetic oligonucleotide
  Antisense strand to SEQ ID NO: 2176776
accgaugaggcauuucaug

SEQ ID NO: 2176778 - RNA, 19 nt, Artificial Sequence
  Description of Artificial Sequence: Synthetic oligonucleotide
  Sense strand starting at position 1405 of SEQ ID NO: 1883210
cuggccucucugggaaauu

SEQ ID NO: 2176779 - RNA, 19 nt, Artificial Sequence
  Description of Artificial Sequence: Synthetic oligonucleotide
  Antisense strand to SEQ ID NO: 2176778
aauuucccagagaggccag

SEQ ID NO: 2176780 - RNA, 19 nt, Artificial Sequence
  Description of Artificial Sequence: Synthetic oligonucleotide
  Sense strand starting at position 1438 of SEQ ID NO: 1883210
ggagauggguucuuggaau

SEQ ID NO: 2176781 - RNA, 19 nt, Artificial Sequence
  Description of Artificial Sequence: Synthetic oligonucleotide
  Antisense strand to SEQ ID NO: 2176780
auuccaagaacccaucucc

SEQ ID NO: 2176782 - RNA, 19 nt, Artificial Sequence
  Description of Artificial Sequence: Synthetic oligonucleotide
  Sense strand starting at position 1507 of SEQ ID NO: 1883210
ugguuuaaaguggguuuaa

SEQ ID NO: 2176783 - RNA, 19 nt, Artificial Sequence
  Description of Artificial Sequence: Synthetic oligonucleotide
  Antisense strand to SEQ ID NO: 2176782
uuaaacccacuuuaaacca

SEQ ID NO: 2176784 - RNA, 19 nt, Artificial Sequence
  Description of Artificial Sequence: Synthetic oligonucleotide
  Sense strand starting at position 1508 of SEQ ID NO: 1883210
gguuuaaaguggguuuaac

SEQ ID NO: 2176785 - RNA, 19 nt, Artificial Sequence
  Description of Artificial Sequence: Synthetic oligonucleotide
  Antisense strand to SEQ ID NO: 2176784
guuaaacccacuuuaaacc

SEQ ID NO: 2176786 - RNA, 19 nt, Artificial Sequence
  Description of Artificial Sequence: Synthetic oligonucleotide
  Sense strand starting at position 1525 of SEQ ID NO: 1883210
accuucugugguugagaga

SEQ ID NO: 2176787 - RNA, 19 nt, Artificial Sequence
  Description of Artificial Sequence: Synthetic oligonucleotide
  Antisense strand to SEQ ID NO: 2176786
ucucucaaccacagaaggu

SEQ ID NO: 2176788 - RNA, 19 nt, Artificial Sequence
  Description of Artificial Sequence: Synthetic oligonucleotide
  Sense strand starting at position 1627 of SEQ ID NO: 1883210
ggaagugucacuuauggug

SEQ ID NO: 2176789 - RNA, 19 nt, Artificial Sequence
  Description of Artificial Sequence: Synthetic oligonucleotide
  Antisense strand to SEQ ID NO: 2176788
caccauaagugacacuucc

SEQ ID NO: 2176790 - RNA, 19 nt, Artificial Sequence
  Description of Artificial Sequence: Synthetic oligonucleotide
  Sense strand starting at position 1684 of SEQ ID NO: 1883210
gucuuugucggucugugua

SEQ ID NO: 2176791 - RNA, 19 nt, Artificial Sequence
  Description of Artificial Sequence: Synthetic oligonucleotide
  Antisense strand to SEQ ID NO: 2176790
uacacagaccgacaaagac

SEQ ID NO: 2176792 - RNA, 19 nt, Artificial Sequence
  Description of Artificial Sequence: Synthetic oligonucleotide
  Sense strand starting at position 1877 of SEQ ID NO: 1883210
acgggagacucaguugaga

SEQ ID NO: 2176793 - RNA, 19 nt, Artificial Sequence
  Description of Artificial Sequence: Synthetic oligonucleotide
  Antisense strand to SEQ ID NO: 2176792
ucucaacugagucucccgu

SEQ ID NO: 2176794 - RNA, 19 nt, Artificial Sequence
  Description of Artificial Sequence: Synthetic oligonucleotide
  Sense strand starting at position 1879 of SEQ ID NO: 1883210
gggagacucaguugagagu

SEQ ID NO: 2176795 - RNA, 19 nt, Artificial Sequence
  Description of Artificial Sequence: Synthetic oligonucleotide
  Antisense strand to SEQ ID NO: 2176794
acucucaacugagucuccc

SEQ ID NO: 2176796 - RNA, 19 nt, Artificial Sequence
  Description of Artificial Sequence: Synthetic oligonucleotide
  Sense strand starting at position 1979 of SEQ ID NO: 1883210
uugagaauccugggaggcu

SEQ ID NO: 2176797 - RNA, 19 nt, Artificial Sequence
  Description of Artificial Sequence: Synthetic oligonucleotide
  Antisense strand to SEQ ID NO: 2176796
agccucccaggauucucaa

SEQ ID NO: 2176798 - RNA, 19 nt, Artificial Sequence
  Description of Artificial Sequence: Synthetic oligonucleotide
  Sense strand starting at position 2011 of SEQ ID NO: 1883210
guacuuuaagccuagagaa

SEQ ID NO: 2176799 - RNA, 19 nt, Artificial Sequence
  Description of Artificial Sequence: Synthetic oligonucleotide
  Antisense strand to SEQ ID NO: 2176798
uucucuaggcuuaaaguac

SEQ ID NO: 2176800 - RNA, 19 nt, Artificial Sequence
  Description of Artificial Sequence: Synthetic oligonucleotide
  Sense strand starting at position 2013 of SEQ ID NO: 1883210
acuuuaagccuagagaagu

SEQ ID NO: 2176801 - RNA, 19 nt, Artificial Sequence
  Description of Artificial Sequence: Synthetic oligonucleotide
  Antisense strand to SEQ ID NO: 2176800
acuucucuaggcuuaaagu

SEQ ID NO: 2176802 - RNA, 19 nt, Artificial Sequence
  Description of Artificial Sequence: Synthetic oligonucleotide
  Sense strand starting at position 2132 of SEQ ID NO: 1883210
ucccaugucuuucuaagga

SEQ ID NO: 2176803 - RNA, 19 nt, Artificial Sequence
  Description of Artificial Sequence: Synthetic oligonucleotide
  Antisense strand to SEQ ID NO: 2176802
uccuuagaaagacauggga

SEQ ID NO: 2176804 - RNA, 19 nt, Artificial Sequence
  Description of Artificial Sequence: Synthetic oligonucleotide
  Sense strand starting at position 2248 of SEQ ID NO: 1883210
cugacaugaucucuguaac

SEQ ID NO: 2176805 - RNA, 19 nt, Artificial Sequence
  Description of Artificial Sequence: Synthetic oligonucleotide
  Antisense strand to SEQ ID NO: 2176804
guuacagagaucaugucag

SEQ ID NO: 2176806 - RNA, 19 nt, Artificial Sequence
  Description of Artificial Sequence: Synthetic oligonucleotide
  Sense strand starting at position 2249 of SEQ ID NO: 1883210
ugacaugaucucuguaaca

SEQ ID NO: 2176807 - RNA, 19 nt, Artificial Sequence
  Description of Artificial Sequence: Synthetic oligonucleotide
  Antisense strand to SEQ ID NO: 2176806
uguuacagagaucauguca

SEQ ID NO: 2176808 - RNA, 19 nt, Artificial Sequence
  Description of Artificial Sequence: Synthetic oligonucleotide
  Sense strand starting at position 2364 of SEQ ID NO: 1883210
caggucagugcuggauaaa

SEQ ID NO: 2176809 - RNA, 19 nt, Artificial Sequence
  Description of Artificial Sequence: Synthetic oligonucleotide
  Antisense strand to SEQ ID NO: 2176808
uuuauccagcacugaccug

SEQ ID NO: 2176810 - RNA, 19 nt, Artificial Sequence
  Description of Artificial Sequence: Synthetic oligonucleotide
  Sense strand starting at position 2365 of SEQ ID NO: 1883210
aggucagugcuggauaaac

SEQ ID NO: 2176811 - RNA, 19 nt, Artificial Sequence
  Description of Artificial Sequence: Synthetic oligonucleotide
  Antisense strand to SEQ ID NO: 2176810
guuuauccagcacugaccu

SEQ ID NO: 2176812 - RNA, 19 nt, Artificial Sequence
  Description of Artificial Sequence: Synthetic oligonucleotide
  Sense strand starting at position 2430 of SEQ ID NO: 1883210
guaacaagcccucagaaua

SEQ ID NO: 2176813 - RNA, 19 nt, Artificial Sequence
  Description of Artificial Sequence: Synthetic oligonucleotide
  Antisense strand to SEQ ID NO: 2176812
uauucugagggcuuguuac

SEQ ID NO: 2176814 - RNA, 19 nt, Artificial Sequence
  Description of Artificial Sequence: Synthetic oligonucleotide
  Sense strand starting at position 2512 of SEQ ID NO: 1883210
cucuuuaaaugagugaauu

SEQ ID NO: 2176815 - RNA, 19 nt, Artificial Sequence
  Description of Artificial Sequence: Synthetic oligonucleotide
  Antisense strand to SEQ ID NO: 2176814
aauucacucauuuaaagag

SEQ ID NO: 2176816 - RNA, 19 nt, Artificial Sequence
  Description of Artificial Sequence: Synthetic oligonucleotide
  Sense strand starting at position 2655 of SEQ ID NO: 1883210
cccuguccuguuuagaaau

SEQ ID NO: 2176817 - RNA, 19 nt, Artificial Sequence
  Description of Artificial Sequence: Synthetic oligonucleotide
  Antisense strand to SEQ ID NO: 2176816
auuucuaaacaggacaggg

SEQ ID NO: 2176818 - RNA, 19 nt, Artificial Sequence
  Description of Artificial Sequence: Synthetic oligonucleotide
  Sense strand starting at position 3145 of SEQ ID NO: 1883210
acagacaugagccgaaauu

SEQ ID NO: 2176819 - RNA, 19 nt, Artificial Sequence
  Description of Artificial Sequence: Synthetic oligonucleotide
  Antisense strand to SEQ ID NO: 2176818
aauuucggcucaugucugu

SEQ ID NO: 2176820 - RNA, 19 nt, Artificial Sequence
  Description of Artificial Sequence: Synthetic oligonucleotide
  Sense strand starting at position 3156 of SEQ ID NO: 1883210
ccgaaauuagcucauaaua

SEQ ID NO: 2176821 - RNA, 19 nt, Artificial Sequence
  Description of Artificial Sequence: Synthetic oligonucleotide
  Antisense strand to SEQ ID NO: 2176820
uauuaugagcuaauuucgg

SEQ ID NO: 2176822 - RNA, 19 nt, Artificial Sequence
  Description of Artificial Sequence: Synthetic oligonucleotide
  Sense strand starting at position 3485 of SEQ ID NO: 1883210
agaguccauguuuacauua

SEQ ID NO: 2176823 - RNA, 19 nt, Artificial Sequence
  Description of Artificial Sequence: Synthetic oligonucleotide
  Antisense strand to SEQ ID NO: 2176822
uaauguaaacauggacucu

SEQ ID NO: 2176824 - RNA, 19 nt, Artificial Sequence
  Description of Artificial Sequence: Synthetic oligonucleotide
  Sense strand starting at position 3512 of SEQ ID NO: 1883210
auuuacuucuugccuggua

SEQ ID NO: 2176825 - RNA, 19 nt, Artificial Sequence
  Description of Artificial Sequence: Synthetic oligonucleotide
  Antisense strand to SEQ ID NO: 2176824
uaccaggcaagaaguaaau

SEQ ID NO: 2176826 - RNA, 19 nt, Artificial Sequence
  Description of Artificial Sequence: Synthetic oligonucleotide
  Sense strand starting at position 3833 of SEQ ID NO: 1883210
gcaagaauuccugauuauu

SEQ ID NO: 2176827 - RNA, 19 nt, Artificial Sequence
  Description of Artificial Sequence: Synthetic oligonucleotide
  Antisense strand to SEQ ID NO: 2176826
aauaaucaggaauucuugc

SEQ ID NO: 2176828 - RNA, 19 nt, Artificial Sequence
  Description of Artificial Sequence: Synthetic oligonucleotide
  Sense strand starting at position 3866 of SEQ ID NO: 1883210
gacauuggguuccuauaag

SEQ ID NO: 2176829 - RNA, 19 nt, Artificial Sequence
  Description of Artificial Sequence: Synthetic oligonucleotide
  Antisense strand to SEQ ID NO: 2176828
cuuauaggaacccaauguc

SEQ ID NO: 2176830 - RNA, 19 nt, Artificial Sequence
  Description of Artificial Sequence: Synthetic oligonucleotide
  Sense strand starting at position 3901 of SEQ ID NO: 1883210
cugugaaacugguuagggu

SEQ ID NO: 2176831 - RNA, 19 nt, Artificial Sequence
  Description of Artificial Sequence: Synthetic oligonucleotide
  Antisense strand to SEQ ID NO: 2176830
acccuaaccaguuucacag

SEQ ID NO: 2176832 - RNA, 19 nt, Artificial Sequence
  Description of Artificial Sequence: Synthetic oligonucleotide
  Sense strand starting at position 3902 of SEQ ID NO: 1883210
ugugaaacugguuagggua

SEQ ID NO: 2176833 - RNA, 19 nt, Artificial Sequence
  Description of Artificial Sequence: Synthetic oligonucleotide
  Antisense strand to SEQ ID NO: 2176832
uacccuaaccaguuucaca

SEQ ID NO: 2176834 - RNA, 19 nt, Artificial Sequence
  Description of Artificial Sequence: Synthetic oligonucleotide
  Sense strand starting at position 298 of SEQ ID NO: 1883211
cuccgugcagcauuguaau

SEQ ID NO: 2176835 - RNA, 19 nt, Artificial Sequence
  Description of Artificial Sequence: Synthetic oligonucleotide
  Antisense strand to SEQ ID NO: 2176834
auuacaaugcugcacggag

SEQ ID NO: 2176836 - RNA, 19 nt, Artificial Sequence
  Description of Artificial Sequence: Synthetic oligonucleotide
  Sense strand starting at position 300 of SEQ ID NO: 1883211
ccgugcagcauuguaauua

SEQ ID NO: 2176837 - RNA, 19 nt, Artificial Sequence
  Description of Artificial Sequence: Synthetic oligonucleotide
  Antisense strand to SEQ ID NO: 2176836
uaauuacaaugcugcacgg

SEQ ID NO: 2176838 - RNA, 19 nt, Artificial Sequence
  Description of Artificial Sequence: Synthetic oligonucleotide
  Sense strand starting at position 369 of SEQ ID NO: 1883211
acauuaugucacgaacaug

SEQ ID NO: 2176839 - RNA, 19 nt, Artificial Sequence
  Description of Artificial Sequence: Synthetic oligonucleotide
  Antisense strand to SEQ ID NO: 2176838
cauguucgugacauaaugu

SEQ ID NO: 2176840 - RNA, 19 nt, Artificial Sequence
  Description of Artificial Sequence: Synthetic oligonucleotide
  Sense strand starting at position 372 of SEQ ID NO: 1883211
uuaugucacgaacauguaa

SEQ ID NO: 2176841 - RNA, 19 nt, Artificial Sequence
  Description of Artificial Sequence: Synthetic oligonucleotide
  Antisense strand to SEQ ID NO: 2176840
uuacauguucgugacauaa

SEQ ID NO: 2176842 - RNA, 19 nt, Artificial Sequence
  Description of Artificial Sequence: Synthetic oligonucleotide
  Sense strand starting at position 390 of SEQ ID NO: 1883211
auggaauaaucuguggcuu

SEQ ID NO: 2176843 - RNA, 19 nt, Artificial Sequence
  Description of Artificial Sequence: Synthetic oligonucleotide
  Antisense strand to SEQ ID NO: 2176842
aagccacagauuauuccau

SEQ ID NO: 2176844 - RNA, 19 nt, Artificial Sequence
  Description of Artificial Sequence: Synthetic oligonucleotide
  Sense strand starting at position 391 of SEQ ID NO: 1883211
uggaauaaucuguggcuua

SEQ ID NO: 2176845 - RNA, 19 nt, Artificial Sequence
  Description of Artificial Sequence: Synthetic oligonucleotide
  Antisense strand to SEQ ID NO: 2176844
uaagccacagauuauucca

SEQ ID NO: 2176846 - RNA, 19 nt, Artificial Sequence
  Description of Artificial Sequence: Synthetic oligonucleotide
  Sense strand starting at position 422 of SEQ ID NO: 1883211
auggaaagauguccauuau

SEQ ID NO: 2176847 - RNA, 19 nt, Artificial Sequence
  Description of Artificial Sequence: Synthetic oligonucleotide
  Antisense strand to SEQ ID NO: 2176846
auaauggacaucuuuccau

SEQ ID NO: 2176848 - RNA, 19 nt, Artificial Sequence
  Description of Artificial Sequence: Synthetic oligonucleotide
  Sense strand starting at position 468 of SEQ ID NO: 1883211
cgcaguaucagugcuguau

SEQ ID NO: 2176849 - RNA, 19 nt, Artificial Sequence
  Description of Artificial Sequence: Synthetic oligonucleotide
  Antisense strand to SEQ ID NO: 2176848
auacagcacugauacugcg

SEQ ID NO: 2176850 - RNA, 19 nt, Artificial Sequence
  Description of Artificial Sequence: Synthetic oligonucleotide
  Sense strand starting at position 472 of SEQ ID NO: 1883211
guaucagugcuguaugauc

SEQ ID NO: 2176851 - RNA, 19 nt, Artificial Sequence
  Description of Artificial Sequence: Synthetic oligonucleotide
  Antisense strand to SEQ ID NO: 2176850
gaucauacagcacugauac

SEQ ID NO: 2176852 - RNA, 19 nt, Artificial Sequence
  Description of Artificial Sequence: Synthetic oligonucleotide
  Sense strand starting at position 477 of SEQ ID NO: 1883211
agugcuguaugaucucauu

SEQ ID NO: 2176853 - RNA, 19 nt, Artificial Sequence
  Description of Artificial Sequence: Synthetic oligonucleotide
  Antisense strand to SEQ ID NO: 2176852
aaugagaucauacagcacu

SEQ ID NO: 2176854 - RNA, 19 nt, Artificial Sequence
  Description of Artificial Sequence: Synthetic oligonucleotide
  Sense strand starting at position 722 of SEQ ID NO: 1883211
guaauuaaguuuccaagcu

SEQ ID NO: 2176855 - RNA, 19 nt, Artificial Sequence
  Description of Artificial Sequence: Synthetic oligonucleotide
  Antisense strand to SEQ ID NO: 2176854
agcuuggaaacuuaauuac

SEQ ID NO: 2176856 - RNA, 19 nt, Artificial Sequence
  Description of Artificial Sequence: Synthetic oligonucleotide
  Sense strand starting at position 879 of SEQ ID NO: 1883211
ugaggucauuuauaggaaa

SEQ ID NO: 2176857 - RNA, 19 nt, Artificial Sequence
  Description of Artificial Sequence: Synthetic oligonucleotide
  Antisense strand to SEQ ID NO: 2176856
uuuccuauaaaugaccuca

SEQ ID NO: 2176858 - RNA, 19 nt, Artificial Sequence
  Description of Artificial Sequence: Synthetic oligonucleotide
  Sense strand starting at position 1017 of SEQ ID NO: 1883211
aacugcagucucuauggaa

SEQ ID NO: 2176859 - RNA, 19 nt, Artificial Sequence
  Description of Artificial Sequence: Synthetic oligonucleotide
  Antisense strand to SEQ ID NO: 2176858
uuccauagagacugcaguu

SEQ ID NO: 2176860 - RNA, 19 nt, Artificial Sequence
  Description of Artificial Sequence: Synthetic oligonucleotide
  Sense strand starting at position 1161 of SEQ ID NO: 1883211
guggcaucagguuguaaau

SEQ ID NO: 2176861 - RNA, 19 nt, Artificial Sequence
  Description of Artificial Sequence: Synthetic oligonucleotide
  Antisense strand to SEQ ID NO: 2176860
auuuacaaccugaugccac

SEQ ID NO: 2176862 - RNA, 19 nt, Artificial Sequence
  Description of Artificial Sequence: Synthetic oligonucleotide
  Sense strand starting at position 1170 of SEQ ID NO: 1883211
gguuguaaaucaccacaaa

SEQ ID NO: 2176863 - RNA, 19 nt, Artificial Sequence
  Description of Artificial Sequence: Synthetic oligonucleotide
  Antisense strand to SEQ ID NO: 2176862
uuuguggugauuuacaacc

SEQ ID NO: 2176864 - RNA, 19 nt, Artificial Sequence
  Description of Artificial Sequence: Synthetic oligonucleotide
  Sense strand starting at position 1188 of SEQ ID NO: 1883211
agaacacucuuagugaugu

SEQ ID NO: 2176865 - RNA, 19 nt, Artificial Sequence
  Description of Artificial Sequence: Synthetic oligonucleotide
  Antisense strand to SEQ ID NO: 2176864
acaucacuaagaguguucu

SEQ ID NO: 2176866 - RNA, 19 nt, Artificial Sequence
  Description of Artificial Sequence: Synthetic oligonucleotide
  Sense strand starting at position 1243 of SEQ ID NO: 1883211
uuaugagaaugcucacugu

SEQ ID NO: 2176867 - RNA, 19 nt, Artificial Sequence
  Description of Artificial Sequence: Synthetic oligonucleotide
  Antisense strand to SEQ ID NO: 2176866
acagugagcauucucauaa

SEQ ID NO: 2176868 - RNA, 19 nt, Artificial Sequence
  Description of Artificial Sequence: Synthetic oligonucleotide
  Sense strand starting at position 1246 of SEQ ID NO: 1883211
ugagaaugcucacugugaa

SEQ ID NO: 2176869 - RNA, 19 nt, Artificial Sequence
  Description of Artificial Sequence: Synthetic oligonucleotide
  Antisense strand to SEQ ID NO: 2176868
uucacagugagcauucuca

SEQ ID NO: 2176870 - RNA, 19 nt, Artificial Sequence
  Description of Artificial Sequence: Synthetic oligonucleotide
  Sense strand starting at position 1247 of SEQ ID NO: 1883211
gagaaugcucacugugaaa

SEQ ID NO: 2176871 - RNA, 19 nt, Artificial Sequence
  Description of Artificial Sequence: Synthetic oligonucleotide
  Antisense strand to SEQ ID NO: 2176870
uuucacagugagcauucuc

SEQ ID NO: 2176872 - RNA, 19 nt, Artificial Sequence
  Description of Artificial Sequence: Synthetic oligonucleotide
  Sense strand starting at position 1249 of SEQ ID NO: 1883211
gaaugcucacugugaaaga

SEQ ID NO: 2176873 - RNA, 19 nt, Artificial Sequence
  Description of Artificial Sequence: Synthetic oligonucleotide
  Antisense strand to SEQ ID NO: 2176872
ucuuucacagugagcauuc

SEQ ID NO: 2176874 - RNA, 19 nt, Artificial Sequence
  Description of Artificial Sequence: Synthetic oligonucleotide
  Sense strand starting at position 1297 of SEQ ID NO: 1883211
gcauuuagaccugguucuu

SEQ ID NO: 2176875 - RNA, 19 nt, Artificial Sequence
  Description of Artificial Sequence: Synthetic oligonucleotide
  Antisense strand to SEQ ID NO: 2176874
aagaaccaggucuaaaugc

SEQ ID NO: 2176876 - RNA, 19 nt, Artificial Sequence
  Description of Artificial Sequence: Synthetic oligonucleotide
  Sense strand starting at position 1431 of SEQ ID NO: 1883211
cugguuacucuauguuuag

SEQ ID NO: 2176877 - RNA, 19 nt, Artificial Sequence
  Description of Artificial Sequence: Synthetic oligonucleotide
  Antisense strand to SEQ ID NO: 2176876
cuaaacauagaguaaccag

SEQ ID NO: 2176878 - RNA, 19 nt, Artificial Sequence
  Description of Artificial Sequence: Synthetic oligonucleotide
  Sense strand starting at position 1432 of SEQ ID NO: 1883211
ugguuacucuauguuuaga

SEQ ID NO: 2176879 - RNA, 19 nt, Artificial Sequence
  Description of Artificial Sequence: Synthetic oligonucleotide
  Antisense strand to SEQ ID NO: 2176878
ucuaaacauagaguaacca

SEQ ID NO: 2176880 - RNA, 19 nt, Artificial Sequence
  Description of Artificial Sequence: Synthetic oligonucleotide
  Sense strand starting at position 1434 of SEQ ID NO: 1883211
guuacucuauguuuagaaa

SEQ ID NO: 2176881 - RNA, 19 nt, Artificial Sequence
  Description of Artificial Sequence: Synthetic oligonucleotide
  Antisense strand to SEQ ID NO: 2176880
uuucuaaacauagaguaac

SEQ ID NO: 2176882 - RNA, 19 nt, Artificial Sequence
  Description of Artificial Sequence: Synthetic oligonucleotide
  Sense strand starting at position 1461 of SEQ ID NO: 1883211
uuacaaagguuagucuauu

SEQ ID NO: 2176883 - RNA, 19 nt, Artificial Sequence
  Description of Artificial Sequence: Synthetic oligonucleotide
  Antisense strand to SEQ ID NO: 2176882
aauagacuaaccuuuguaa

SEQ ID NO: 2176884 - RNA, 19 nt, Artificial Sequence
  Description of Artificial Sequence: Synthetic oligonucleotide
  Sense strand starting at position 1498 of SEQ ID NO: 1883211
guagcaaccucuccauaga

SEQ ID NO: 2176885 - RNA, 19 nt, Artificial Sequence
  Description of Artificial Sequence: Synthetic oligonucleotide
  Antisense strand to SEQ ID NO: 2176884
ucuauggagagguugcuac

SEQ ID NO: 2176886 - RNA, 19 nt, Artificial Sequence
  Description of Artificial Sequence: Synthetic oligonucleotide
  Sense strand starting at position 1671 of SEQ ID NO: 1883211
auguauauagcaugcuaca

SEQ ID NO: 2176887 - RNA, 19 nt, Artificial Sequence
  Description of Artificial Sequence: Synthetic oligonucleotide
  Antisense strand to SEQ ID NO: 2176886
uguagcaugcuauauacau

SEQ ID NO: 2176888 - RNA, 19 nt, Artificial Sequence
  Description of Artificial Sequence: Synthetic oligonucleotide
  Sense strand starting at position 1746 of SEQ ID NO: 1883211
ugcuguuaaccuugauaga

SEQ ID NO: 2176889 - RNA, 19 nt, Artificial Sequence
  Description of Artificial Sequence: Synthetic oligonucleotide
  Antisense strand to SEQ ID NO: 2176888
ucuaucaagguuaacagca

SEQ ID NO: 2176890 - RNA, 19 nt, Artificial Sequence
  Description of Artificial Sequence: Synthetic oligonucleotide
  Sense strand starting at position 1747 of SEQ ID NO: 1883211
gcuguuaaccuugauagag

SEQ ID NO: 2176891 - RNA, 19 nt, Artificial Sequence
  Description of Artificial Sequence: Synthetic oligonucleotide
  Antisense strand to SEQ ID NO: 2176890
cucuaucaagguuaacagc

SEQ ID NO: 2176892 - RNA, 19 nt, Artificial Sequence
  Description of Artificial Sequence: Synthetic oligonucleotide
  Sense strand starting at position 1782 of SEQ ID NO: 1883211
gccauugcauaagcaauaa

SEQ ID NO: 2176893 - RNA, 19 nt, Artificial Sequence
  Description of Artificial Sequence: Synthetic oligonucleotide
  Antisense strand to SEQ ID NO: 2176892
uuauugcuuaugcaauggc

SEQ ID NO: 2176894 - RNA, 19 nt, Artificial Sequence
  Description of Artificial Sequence: Synthetic oligonucleotide
  Sense strand starting at position 1953 of SEQ ID NO: 1883211
uuagaugguucugugggaa

SEQ ID NO: 2176895 - RNA, 19 nt, Artificial Sequence
  Description of Artificial Sequence: Synthetic oligonucleotide
  Antisense strand to SEQ ID NO: 2176894
uucccacagaaccaucuaa

SEQ ID NO: 2176896 - RNA, 19 nt, Artificial Sequence
  Description of Artificial Sequence: Synthetic oligonucleotide
  Sense strand starting at position 1956 of SEQ ID NO: 1883211
gaugguucugugggaagag

SEQ ID NO: 2176897 - RNA, 19 nt, Artificial Sequence
  Description of Artificial Sequence: Synthetic oligonucleotide
  Antisense strand to SEQ ID NO: 2176896
cucuucccacagaaccauc

SEQ ID NO: 2176898 - RNA, 19 nt, Artificial Sequence
  Description of Artificial Sequence: Synthetic oligonucleotide
  Sense strand starting at position 1971 of SEQ ID NO: 1883211
agagaaggguguucacaau

SEQ ID NO: 2176899 - RNA, 19 nt, Artificial Sequence
  Description of Artificial Sequence: Synthetic oligonucleotide
  Antisense strand to SEQ ID NO: 2176898
auugugaacacccuucucu

SEQ ID NO: 2176900 - RNA, 19 nt, Artificial Sequence
  Description of Artificial Sequence: Synthetic oligonucleotide
  Sense strand starting at position 2073 of SEQ ID NO: 1883211
ggccaucccuggucagauu

SEQ ID NO: 2176901 - RNA, 19 nt, Artificial Sequence
  Description of Artificial Sequence: Synthetic oligonucleotide
  Antisense strand to SEQ ID NO: 2176900
aaucugaccagggauggcc

SEQ ID NO: 2176902 - RNA, 19 nt, Artificial Sequence
  Description of Artificial Sequence: Synthetic oligonucleotide
  Sense strand starting at position 2141 of SEQ ID NO: 1883211
uuaauaaguggcugucaca

SEQ ID NO: 2176903 - RNA, 19 nt, Artificial Sequence
  Description of Artificial Sequence: Synthetic oligonucleotide
  Antisense strand to SEQ ID NO: 2176902
ugugacagccacuuauuaa

SEQ ID NO: 2176904 - RNA, 19 nt, Artificial Sequence
  Description of Artificial Sequence: Synthetic oligonucleotide
  Sense strand starting at position 2163 of SEQ ID NO: 1883211
acuaucaagcaguguuaau

SEQ ID NO: 2176905 - RNA, 19 nt, Artificial Sequence
  Description of Artificial Sequence: Synthetic oligonucleotide
  Antisense strand to SEQ ID NO: 2176904
auuaacacugcuugauagu

SEQ ID NO: 2176906 - RNA, 19 nt, Artificial Sequence
  Description of Artificial Sequence: Synthetic oligonucleotide
  Sense strand starting at position 2218 of SEQ ID NO: 1883211
ucagguacuccuuggagua

SEQ ID NO: 2176907 - RNA, 19 nt, Artificial Sequence
  Description of Artificial Sequence: Synthetic oligonucleotide
  Antisense strand to SEQ ID NO: 2176906
uacuccaaggaguaccuga

SEQ ID NO: 2176908 - RNA, 19 nt, Artificial Sequence
  Description of Artificial Sequence: Synthetic oligonucleotide
  Sense strand starting at position 2219 of SEQ ID NO: 1883211
cagguacuccuuggaguaa

SEQ ID NO: 2176909 - RNA, 19 nt, Artificial Sequence
  Description of Artificial Sequence: Synthetic oligonucleotide
  Antisense strand to SEQ ID NO: 2176908
uuacuccaaggaguaccug

SEQ ID NO: 2176910 - RNA, 19 nt, Artificial Sequence
  Description of Artificial Sequence: Synthetic oligonucleotide
  Sense strand starting at position 2288 of SEQ ID NO: 1883211
aguagaaauccuugucagu

SEQ ID NO: 2176911 - RNA, 19 nt, Artificial Sequence
  Description of Artificial Sequence: Synthetic oligonucleotide
  Antisense strand to SEQ ID NO: 2176910
acugacaaggauuucuacu

SEQ ID NO: 2176912 - RNA, 19 nt, Artificial Sequence
  Description of Artificial Sequence: Synthetic oligonucleotide
  Sense strand starting at position 2304 of SEQ ID NO: 1883211
agucauaaugcaugcauua

SEQ ID NO: 2176913 - RNA, 19 nt, Artificial Sequence
  Description of Artificial Sequence: Synthetic oligonucleotide
  Antisense strand to SEQ ID NO: 2176912
uaaugcaugcauuaugacu

SEQ ID NO: 2176914 - RNA, 19 nt, Artificial Sequence
  Description of Artificial Sequence: Synthetic oligonucleotide
  Sense strand starting at position 246 of SEQ ID NO: 1883212
ugcucacaccuccagagau

SEQ ID NO: 2176915 - RNA, 19 nt, Artificial Sequence
  Description of Artificial Sequence: Synthetic oligonucleotide
  Antisense strand to SEQ ID NO: 2176914
aucucuggaggugugagca

SEQ ID NO: 2176916 - RNA, 19 nt, Artificial Sequence
  Description of Artificial Sequence: Synthetic oligonucleotide
  Sense strand starting at position 968 of SEQ ID NO: 1883212
ccgcccaugcucuguaaau

SEQ ID NO: 2176917 - RNA, 19 nt, Artificial Sequence
  Description of Artificial Sequence: Synthetic oligonucleotide
  Antisense strand to SEQ ID NO: 2176916
auuuacagagcaugggcgg

SEQ ID NO: 2176918 - RNA, 19 nt, Artificial Sequence
  Description of Artificial Sequence: Synthetic oligonucleotide
  Sense strand starting at position 969 of SEQ ID NO: 1883212
cgcccaugcucuguaaauc

SEQ ID NO: 2176919 - RNA, 19 nt, Artificial Sequence
  Description of Artificial Sequence: Synthetic oligonucleotide
  Antisense strand to SEQ ID NO: 2176918
gauuuacagagcaugggcg

SEQ ID NO: 2176920 - RNA, 19 nt, Artificial Sequence
  Description of Artificial Sequence: Synthetic oligonucleotide
  Sense strand starting at position 1199 of SEQ ID NO: 1883212
agcugugucccuggacaca

SEQ ID NO: 2176921 - RNA, 19 nt, Artificial Sequence
  Description of Artificial Sequence: Synthetic oligonucleotide
  Antisense strand to SEQ ID NO: 2176920
uguguccagggacacagcu

SEQ ID NO: 2176922 - RNA, 19 nt, Artificial Sequence
  Description of Artificial Sequence: Synthetic oligonucleotide
  Sense strand starting at position 1325 of SEQ ID NO: 1883212
ucugcugacucauggauga

SEQ ID NO: 2176923 - RNA, 19 nt, Artificial Sequence
  Description of Artificial Sequence: Synthetic oligonucleotide
  Antisense strand to SEQ ID NO: 2176922
ucauccaugagucagcaga

SEQ ID NO: 2176924 - RNA, 19 nt, Artificial Sequence
  Description of Artificial Sequence: Synthetic oligonucleotide
  Sense strand starting at position 1414 of SEQ ID NO: 1883212
gggacaaugucaugagccu

SEQ ID NO: 2176925 - RNA, 19 nt, Artificial Sequence
  Description of Artificial Sequence: Synthetic oligonucleotide
  Antisense strand to SEQ ID NO: 2176924
aggcucaugacauuguccc

SEQ ID NO: 2176926 - RNA, 19 nt, Artificial Sequence
  Description of Artificial Sequence: Synthetic oligonucleotide
  Sense strand starting at position 1420 of SEQ ID NO: 1883212
augucaugagccugagaag

SEQ ID NO: 2176927 - RNA, 19 nt, Artificial Sequence
  Description of Artificial Sequence: Synthetic oligonucleotide
  Antisense strand to SEQ ID NO: 2176926
cuucucaggcucaugacau

SEQ ID NO: 2176928 - RNA, 19 nt, Artificial Sequence
  Description of Artificial Sequence: Synthetic oligonucleotide
  Sense strand starting at position 1507 of SEQ ID NO: 1883212
uggcacuguuccuaauaga

SEQ ID NO: 2176929 - RNA, 19 nt, Artificial Sequence
  Description of Artificial Sequence: Synthetic oligonucleotide
  Antisense strand to SEQ ID NO: 2176928
ucuauuaggaacagugcca

SEQ ID NO: 2176930 - RNA, 19 nt, Artificial Sequence
  Description of Artificial Sequence: Synthetic oligonucleotide
  Sense strand starting at position 1538 of SEQ ID NO: 1883212
guuugagcccuacaaggaa

SEQ ID NO: 2176931 - RNA, 19 nt, Artificial Sequence
  Description of Artificial Sequence: Synthetic oligonucleotide
  Antisense strand to SEQ ID NO: 2176930
uuccuuguagggcucaaac

SEQ ID NO: 2176932 - RNA, 19 nt, Artificial Sequence
  Description of Artificial Sequence: Synthetic oligonucleotide
  Sense strand starting at position 1640 of SEQ ID NO: 1883212
gcuguaacacuguaggagu

SEQ ID NO: 2176933 - RNA, 19 nt, Artificial Sequence
  Description of Artificial Sequence: Synthetic oligonucleotide
  Antisense strand to SEQ ID NO: 2176932
acuccuacaguguuacagc

SEQ ID NO: 2176934 - RNA, 19 nt, Artificial Sequence
  Description of Artificial Sequence: Synthetic oligonucleotide
  Sense strand starting at position 1655 of SEQ ID NO: 1883212
gagucagaaccuggccaau

SEQ ID NO: 2176935 - RNA, 19 nt, Artificial Sequence
  Description of Artificial Sequence: Synthetic oligonucleotide
  Antisense strand to SEQ ID NO: 2176934
auuggccagguucugacuc

SEQ ID NO: 2176936 - RNA, 19 nt, Artificial Sequence
  Description of Artificial Sequence: Synthetic oligonucleotide
  Sense strand starting at position 1868 of SEQ ID NO: 1883212
acggacauaccuuguuauc

SEQ ID NO: 2176937 - RNA, 19 nt, Artificial Sequence
  Description of Artificial Sequence: Synthetic oligonucleotide
  Antisense strand to SEQ ID NO: 2176936
gauaacaagguauguccgu

SEQ ID NO: 2176938 - RNA, 19 nt, Artificial Sequence
  Description of Artificial Sequence: Synthetic oligonucleotide
  Sense strand starting at position 1991 of SEQ ID NO: 1883212
gaugaaaccucggucugca

SEQ ID NO: 2176939 - RNA, 19 nt, Artificial Sequence
  Description of Artificial Sequence: Synthetic oligonucleotide
  Antisense strand to SEQ ID NO: 2176938
ugcagaccgagguuucauc

SEQ ID NO: 2176940 - RNA, 19 nt, Artificial Sequence
  Description of Artificial Sequence: Synthetic oligonucleotide
  Sense strand starting at position 2029 of SEQ ID NO: 1883212
agacauuccuaucuaccga

SEQ ID NO: 2176941 - RNA, 19 nt, Artificial Sequence
  Description of Artificial Sequence: Synthetic oligonucleotide
  Antisense strand to SEQ ID NO: 2176940
ucgguagauaggaaugucu

SEQ ID NO: 2176942 - RNA, 19 nt, Artificial Sequence
  Description of Artificial Sequence: Synthetic oligonucleotide
  Sense strand starting at position 2132 of SEQ ID NO: 1883212
ccuuucuaggcguaaccaa

SEQ ID NO: 2176943 - RNA, 19 nt, Artificial Sequence
  Description of Artificial Sequence: Synthetic oligonucleotide
  Antisense strand to SEQ ID NO: 2176942
uugguuacgccuagaaagg

SEQ ID NO: 2176944 - RNA, 19 nt, Artificial Sequence
  Description of Artificial Sequence: Synthetic oligonucleotide
  Sense strand starting at position 2154 of SEQ ID NO: 1883212
acagcuuauguguauugau

SEQ ID NO: 2176945 - RNA, 19 nt, Artificial Sequence
  Description of Artificial Sequence: Synthetic oligonucleotide
  Antisense strand to SEQ ID NO: 2176944
aucaauacacauaagcugu

SEQ ID NO: 2176946 - RNA, 19 nt, Artificial Sequence
  Description of Artificial Sequence: Synthetic oligonucleotide
  Sense strand starting at position 2461 of SEQ ID NO: 1883212
cgggucauuucacagaaug

SEQ ID NO: 2176947 - RNA, 19 nt, Artificial Sequence
  Description of Artificial Sequence: Synthetic oligonucleotide
  Antisense strand to SEQ ID NO: 2176946
cauucugugaaaugacccg

SEQ ID NO: 2176948 - RNA, 19 nt, Artificial Sequence
  Description of Artificial Sequence: Synthetic oligonucleotide
  Sense strand starting at position 2688 of SEQ ID NO: 1883212
cuguguucagcaggaagaa

SEQ ID NO: 2176949 - RNA, 19 nt, Artificial Sequence
  Description of Artificial Sequence: Synthetic oligonucleotide
  Antisense strand to SEQ ID NO: 2176948
uucuuccugcugaacacag

SEQ ID NO: 2176950 - RNA, 19 nt, Artificial Sequence
  Description of Artificial Sequence: Synthetic oligonucleotide
  Sense strand starting at position 2700 of SEQ ID NO: 1883212
ggaagaaggucugugagug

SEQ ID NO: 2176951 - RNA, 19 nt, Artificial Sequence
  Description of Artificial Sequence: Synthetic oligonucleotide
  Antisense strand to SEQ ID NO: 2176950
cacucacagaccuucuucc

SEQ ID NO: 2176952 - RNA, 19 nt, Artificial Sequence
  Description of Artificial Sequence: Synthetic oligonucleotide
  Sense strand starting at position 2704 of SEQ ID NO: 1883212
gaaggucugugaguggaau

SEQ ID NO: 2176953 - RNA, 19 nt, Artificial Sequence
  Description of Artificial Sequence: Synthetic oligonucleotide
  Antisense strand to SEQ ID NO: 2176952
auuccacucacagaccuuc

SEQ ID NO: 2176954 - RNA, 19 nt, Artificial Sequence
  Description of Artificial Sequence: Synthetic oligonucleotide
  Sense strand starting at position 2705 of SEQ ID NO: 1883212
aaggucugugaguggaaua

SEQ ID NO: 2176955 - RNA, 19 nt, Artificial Sequence
  Description of Artificial Sequence: Synthetic oligonucleotide
  Antisense strand to SEQ ID NO: 2176954
uauuccacucacagaccuu

SEQ ID NO: 2176956 - RNA, 19 nt, Artificial Sequence
  Description of Artificial Sequence: Synthetic oligonucleotide
  Sense strand starting at position 2706 of SEQ ID NO: 1883212
aggucugugaguggaauau

SEQ ID NO: 2176957 - RNA, 19 nt, Artificial Sequence
  Description of Artificial Sequence: Synthetic oligonucleotide
  Antisense strand to SEQ ID NO: 2176956
auauuccacucacagaccu

SEQ ID NO: 2176958 - RNA, 19 nt, Artificial Sequence
  Description of Artificial Sequence: Synthetic oligonucleotide
  Sense strand starting at position 2816 of SEQ ID NO: 1883212
ccgguaaagugggaggaau

SEQ ID NO: 2176959 - RNA, 19 nt, Artificial Sequence
  Description of Artificial Sequence: Synthetic oligonucleotide
  Antisense strand to SEQ ID NO: 2176958
auuccucccacuuuaccgg

SEQ ID NO: 2176960 - RNA, 19 nt, Artificial Sequence
  Description of Artificial Sequence: Synthetic oligonucleotide
  Sense strand starting at position 3016 of SEQ ID NO: 1883212
acaugaguugggugucgga

SEQ ID NO: 2176961 - RNA, 19 nt, Artificial Sequence
  Description of Artificial Sequence: Synthetic oligonucleotide
  Antisense strand to SEQ ID NO: 2176960
uccgacacccaacucaugu

SEQ ID NO: 2176962 - RNA, 19 nt, Artificial Sequence
  Description of Artificial Sequence: Synthetic oligonucleotide
  Sense strand starting at position 3075 of SEQ ID NO: 1883212
ggacuuugcccacauguua

SEQ ID NO: 2176963 - RNA, 19 nt, Artificial Sequence
  Description of Artificial Sequence: Synthetic oligonucleotide
  Antisense strand to SEQ ID NO: 2176962
uaacaugugggcaaagucc

SEQ ID NO: 2176964 - RNA, 19 nt, Artificial Sequence
  Description of Artificial Sequence: Synthetic oligonucleotide
  Sense strand starting at position 3094 of SEQ ID NO: 1883212
cccucuggaucuuucggaa

SEQ ID NO: 2176965 - RNA, 19 nt, Artificial Sequence
  Description of Artificial Sequence: Synthetic oligonucleotide
  Antisense strand to SEQ ID NO: 2176964
uuccgaaagauccagaggg

SEQ ID NO: 2176966 - RNA, 19 nt, Artificial Sequence
  Description of Artificial Sequence: Synthetic oligonucleotide
  Sense strand starting at position 3097 of SEQ ID NO: 1883212
ucuggaucuuucggaacau

SEQ ID NO: 2176967 - RNA, 19 nt, Artificial Sequence
  Description of Artificial Sequence: Synthetic oligonucleotide
  Antisense strand to SEQ ID NO: 2176966
auguuccgaaagauccaga

SEQ ID NO: 2176968 - RNA, 19 nt, Artificial Sequence
  Description of Artificial Sequence: Synthetic oligonucleotide
  Sense strand starting at position 3098 of SEQ ID NO: 1883212
cuggaucuuucggaacauu

SEQ ID NO: 2176969 - RNA, 19 nt, Artificial Sequence
  Description of Artificial Sequence: Synthetic oligonucleotide
  Antisense strand to SEQ ID NO: 2176968
aauguuccgaaagauccag

SEQ ID NO: 2176970 - RNA, 19 nt, Artificial Sequence
  Description of Artificial Sequence: Synthetic oligonucleotide
  Sense strand starting at position 3107 of SEQ ID NO: 1883212
ucggaacauucugcugaau

SEQ ID NO: 2176971 - RNA, 19 nt, Artificial Sequence
  Description of Artificial Sequence: Synthetic oligonucleotide
  Antisense strand to SEQ ID NO: 2176970
auucagcagaauguuccga

SEQ ID NO: 2176972 - RNA, 19 nt, Artificial Sequence
  Description of Artificial Sequence: Synthetic oligonucleotide
  Sense strand starting at position 3109 of SEQ ID NO: 1883212
ggaacauucugcugaauaa

SEQ ID NO: 2176973 - RNA, 19 nt, Artificial Sequence
  Description of Artificial Sequence: Synthetic oligonucleotide
  Antisense strand to SEQ ID NO: 2176972
uuauucagcagaauguucc

SEQ ID NO: 2176974 - RNA, 19 nt, Artificial Sequence
  Description of Artificial Sequence: Synthetic oligonucleotide
  Sense strand starting at position 3451 of SEQ ID NO: 1883212
agguauauucuaugaaacu

SEQ ID NO: 2176975 - RNA, 19 nt, Artificial Sequence
  Description of Artificial Sequence: Synthetic oligonucleotide
  Antisense strand to SEQ ID NO: 2176974
aguuucauagaauauaccu

SEQ ID NO: 2176976 - RNA, 19 nt, Artificial Sequence
  Description of Artificial Sequence: Synthetic oligonucleotide
  Sense strand starting at position 3452 of SEQ ID NO: 1883212
gguauauucuaugaaacuc

SEQ ID NO: 2176977 - RNA, 19 nt, Artificial Sequence
  Description of Artificial Sequence: Synthetic oligonucleotide
  Antisense strand to SEQ ID NO: 2176976
gaguuucauagaauauacc

SEQ ID NO: 2176978 - RNA, 19 nt, Artificial Sequence
  Description of Artificial Sequence: Synthetic oligonucleotide
  Sense strand starting at position 3496 of SEQ ID NO: 1883212
acaaguauuuaagaaguag

SEQ ID NO: 2176979 - RNA, 19 nt, Artificial Sequence
  Description of Artificial Sequence: Synthetic oligonucleotide
  Antisense strand to SEQ ID NO: 2176978
cuacuucuuaaauacuugu

SEQ ID NO: 2176980 - RNA, 19 nt, Artificial Sequence
  Description of Artificial Sequence: Synthetic oligonucleotide
  Sense strand starting at position 3518 of SEQ ID NO: 1883212
ggugcaagguguuucuaaa

SEQ ID NO: 2176981 - RNA, 19 nt, Artificial Sequence
  Description of Artificial Sequence: Synthetic oligonucleotide
  Antisense strand to SEQ ID NO: 2176980
uuuagaaacaccuugcacc

SEQ ID NO: 2176982 - RNA, 19 nt, Artificial Sequence
  Description of Artificial Sequence: Synthetic oligonucleotide
  Sense strand starting at position 3587 of SEQ ID NO: 1883212
ugaggagcuccugaacguu

SEQ ID NO: 2176983 - RNA, 19 nt, Artificial Sequence
  Description of Artificial Sequence: Synthetic oligonucleotide
  Antisense strand to SEQ ID NO: 2176982
aacguucaggagcuccuca

SEQ ID NO: 2176984 - RNA, 19 nt, Artificial Sequence
  Description of Artificial Sequence: Synthetic oligonucleotide
  Sense strand starting at position 3653 of SEQ ID NO: 1883212
ccuucuuaucaagguauga

SEQ ID NO: 2176985 - RNA, 19 nt, Artificial Sequence
  Description of Artificial Sequence: Synthetic oligonucleotide
  Antisense strand to SEQ ID NO: 2176984
ucauaccuugauaagaagg

SEQ ID NO: 2176986 - RNA, 19 nt, Artificial Sequence
  Description of Artificial Sequence: Synthetic oligonucleotide
  Sense strand starting at position 3657 of SEQ ID NO: 1883212
cuuaucaagguaugacuaa

SEQ ID NO: 2176987 - RNA, 19 nt, Artificial Sequence
  Description of Artificial Sequence: Synthetic oligonucleotide
  Antisense strand to SEQ ID NO: 2176986
uuagucauaccuugauaag

SEQ ID NO: 2176988 - RNA, 19 nt, Artificial Sequence
  Description of Artificial Sequence: Synthetic oligonucleotide
  Sense strand starting at position 3974 of SEQ ID NO: 1883212
gcaccuacucuuggguuaa

SEQ ID NO: 2176989 - RNA, 19 nt, Artificial Sequence
  Description of Artificial Sequence: Synthetic oligonucleotide
  Antisense strand to SEQ ID NO: 2176988
uuaacccaagaguaggugc

SEQ ID NO: 2176990 - RNA, 19 nt, Artificial Sequence
  Description of Artificial Sequence: Synthetic oligonucleotide
  Sense strand starting at position 3975 of SEQ ID NO: 1883212
caccuacucuuggguuaag

SEQ ID NO: 2176991 - RNA, 19 nt, Artificial Sequence
  Description of Artificial Sequence: Synthetic oligonucleotide
  Antisense strand to SEQ ID NO: 2176990
cuuaacccaagaguaggug

SEQ ID NO: 2176992 - RNA, 19 nt, Artificial Sequence
  Description of Artificial Sequence: Synthetic oligonucleotide
  Sense strand starting at position 3978 of SEQ ID NO: 1883212
cuacucuuggguuaagcau

SEQ ID NO: 2176993 - RNA, 19 nt, Artificial Sequence
  Description of Artificial Sequence: Synthetic oligonucleotide
  Antisense strand to SEQ ID NO: 2176992
augcuuaacccaagaguag

SEQ ID NO: 2176994 - RNA, 19 nt, Artificial Sequence
  Description of Artificial Sequence: Synthetic oligonucleotide
  Sense strand starting at position 49 of SEQ ID NO: 1883213
accaucuucuagggaauuu

SEQ ID NO: 2176995 - RNA, 19 nt, Artificial Sequence
  Description of Artificial Sequence: Synthetic oligonucleotide
  Antisense strand to SEQ ID NO: 2176994
aaauucccuagaagauggu

SEQ ID NO: 2176996 - RNA, 19 nt, Artificial Sequence
  Description of Artificial Sequence: Synthetic oligonucleotide
  Sense strand starting at position 86 of SEQ ID NO: 1883213
agauucuugugcuuaauau

SEQ ID NO: 2176997 - RNA, 19 nt, Artificial Sequence
  Description of Artificial Sequence: Synthetic oligonucleotide
  Antisense strand to SEQ ID NO: 2176996
auauuaagcacaagaaucu

SEQ ID NO: 2176998 - RNA, 19 nt, Artificial Sequence
  Description of Artificial Sequence: Synthetic oligonucleotide
  Sense strand starting at position 87 of SEQ ID NO: 1883213
gauucuugugcuuaauaug

SEQ ID NO: 2176999 - RNA, 19 nt, Artificial Sequence
  Description of Artificial Sequence: Synthetic oligonucleotide
  Antisense strand to SEQ ID NO: 2176998
cauauuaagcacaagaauc

SEQ ID NO: 2177000 - RNA, 19 nt, Artificial Sequence
  Description of Artificial Sequence: Synthetic oligonucleotide
  Sense strand starting at position 97 of SEQ ID NO: 1883213
cuuaauauguuggcaucau

SEQ ID NO: 2177001 - RNA, 19 nt, Artificial Sequence
  Description of Artificial Sequence: Synthetic oligonucleotide
  Antisense strand to SEQ ID NO: 2177000
augaugccaacauauuaag

SEQ ID NO: 2177002 - RNA, 19 nt, Artificial Sequence
  Description of Artificial Sequence: Synthetic oligonucleotide
  Sense strand starting at position 368 of SEQ ID NO: 1883213
augaaagcucuccaaagcu

SEQ ID NO: 2177003 - RNA, 19 nt, Artificial Sequence
  Description of Artificial Sequence: Synthetic oligonucleotide
  Antisense strand to SEQ ID NO: 2177002
agcuuuggagagcuuucau

SEQ ID NO: 2177004 - RNA, 19 nt, Artificial Sequence
  Description of Artificial Sequence: Synthetic oligonucleotide
  Sense strand starting at position 400 of SEQ ID NO: 1883213
cccgcuucugauugaggga

SEQ ID NO: 2177005 - RNA, 19 nt, Artificial Sequence
  Description of Artificial Sequence: Synthetic oligonucleotide
  Antisense strand to SEQ ID NO: 2177004
ucccucaaucagaagcggg

SEQ ID NO: 2177006 - RNA, 19 nt, Artificial Sequence
  Description of Artificial Sequence: Synthetic oligonucleotide
  Sense strand starting at position 483 of SEQ ID NO: 1883213
gucaguuacacaggaguca

SEQ ID NO: 2177007 - RNA, 19 nt, Artificial Sequence
  Description of Artificial Sequence: Synthetic oligonucleotide
  Antisense strand to SEQ ID NO: 2177006
ugacuccuguguaacugac

SEQ ID NO: 2177008 - RNA, 19 nt, Artificial Sequence
  Description of Artificial Sequence: Synthetic oligonucleotide
  Sense strand starting at position 608 of SEQ ID NO: 1883213
uuaauuccucacugucgaa

SEQ ID NO: 2177009 - RNA, 19 nt, Artificial Sequence
  Description of Artificial Sequence: Synthetic oligonucleotide
  Antisense strand to SEQ ID NO: 2177008
uucgacagugaggaauuaa

SEQ ID NO: 2177010 - RNA, 19 nt, Artificial Sequence
  Description of Artificial Sequence: Synthetic oligonucleotide
  Sense strand starting at position 669 of SEQ ID NO: 1883213
uguuuaccagguuauaaag

SEQ ID NO: 2177011 - RNA, 19 nt, Artificial Sequence
  Description of Artificial Sequence: Synthetic oligonucleotide
  Antisense strand to SEQ ID NO: 2177010
cuuuauaaccugguaaaca

SEQ ID NO: 2177012 - RNA, 19 nt, Artificial Sequence
  Description of Artificial Sequence: Synthetic oligonucleotide
  Sense strand starting at position 763 of SEQ ID NO: 1883213
auccgauccuuaccgaauu

SEQ ID NO: 2177013 - RNA, 19 nt, Artificial Sequence
  Description of Artificial Sequence: Synthetic oligonucleotide
  Antisense strand to SEQ ID NO: 2177012
aauucgguaaggaucggau

SEQ ID NO: 2177014 - RNA, 19 nt, Artificial Sequence
  Description of Artificial Sequence: Synthetic oligonucleotide
  Sense strand starting at position 991 of SEQ ID NO: 1883213
gcugcaggaaucugaaagu

SEQ ID NO: 2177015 - RNA, 19 nt, Artificial Sequence
  Description of Artificial Sequence: Synthetic oligonucleotide
  Antisense strand to SEQ ID NO: 2177014
acuuucagauuccugcagc

SEQ ID NO: 2177016 - RNA, 19 nt, Artificial Sequence
  Description of Artificial Sequence: Synthetic oligonucleotide
  Sense strand starting at position 1049 of SEQ ID NO: 1883213
cagaccuugcccugaggau

SEQ ID NO: 2177017 - RNA, 19 nt, Artificial Sequence
  Description of Artificial Sequence: Synthetic oligonucleotide
  Antisense strand to SEQ ID NO: 2177016
auccucagggcaaggucug

SEQ ID NO: 2177018 - RNA, 19 nt, Artificial Sequence
  Description of Artificial Sequence: Synthetic oligonucleotide
  Sense strand starting at position 1335 of SEQ ID NO: 1883213
cggccuugggaagauucua

SEQ ID NO: 2177019 - RNA, 19 nt, Artificial Sequence
  Description of Artificial Sequence: Synthetic oligonucleotide
  Antisense strand to SEQ ID NO: 2177018
uagaaucuucccaaggccg

SEQ ID NO: 2177020 - RNA, 19 nt, Artificial Sequence
  Description of Artificial Sequence: Synthetic oligonucleotide
  Sense strand starting at position 1890 of SEQ ID NO: 1883213
ggugauugaugcuccugga

SEQ ID NO: 2177021 - RNA, 19 nt, Artificial Sequence
  Description of Artificial Sequence: Synthetic oligonucleotide
  Antisense strand to SEQ ID NO: 2177020
uccaggagcaucaaucacc

SEQ ID NO: 2177022 - RNA, 19 nt, Artificial Sequence
  Description of Artificial Sequence: Synthetic oligonucleotide
  Sense strand starting at position 1918 of SEQ ID NO: 1883213
aaacucugccugugagcua

SEQ ID NO: 2177023 - RNA, 19 nt, Artificial Sequence
  Description of Artificial Sequence: Synthetic oligonucleotide
  Antisense strand to SEQ ID NO: 2177022
uagcucacaggcagaguuu

SEQ ID NO: 2177024 - RNA, 19 nt, Artificial Sequence
  Description of Artificial Sequence: Synthetic oligonucleotide
  Sense strand starting at position 2038 of SEQ ID NO: 1883213
gcagaaaguuuggccgaaa

SEQ ID NO: 2177025 - RNA, 19 nt, Artificial Sequence
  Description of Artificial Sequence: Synthetic oligonucleotide
  Antisense strand to SEQ ID NO: 2177024
uuucggccaaacuuucugc

SEQ ID NO: 2177026 - RNA, 19 nt, Artificial Sequence
  Description of Artificial Sequence: Synthetic oligonucleotide
  Sense strand starting at position 2039 of SEQ ID NO: 1883213
cagaaaguuuggccgaaac

SEQ ID NO: 2177027 - RNA, 19 nt, Artificial Sequence
  Description of Artificial Sequence: Synthetic oligonucleotide
  Antisense strand to SEQ ID NO: 2177026
guuucggccaaacuuucug

SEQ ID NO: 2177028 - RNA, 19 nt, Artificial Sequence
  Description of Artificial Sequence: Synthetic oligonucleotide
  Sense strand starting at position 2041 of SEQ ID NO: 1883213
gaaaguuuggccgaaacuc

SEQ ID NO: 2177029 - RNA, 19 nt, Artificial Sequence
  Description of Artificial Sequence: Synthetic oligonucleotide
  Antisense strand to SEQ ID NO: 2177028
gaguuucggccaaacuuuc

SEQ ID NO: 2177030 - RNA, 19 nt, Artificial Sequence
  Description of Artificial Sequence: Synthetic oligonucleotide
  Sense strand starting at position 2098 of SEQ ID NO: 1883213
aggagaacgcauuguggaa

SEQ ID NO: 2177031 - RNA, 19 nt, Artificial Sequence
  Description of Artificial Sequence: Synthetic oligonucleotide
  Antisense strand to SEQ ID NO: 2177030
uuccacaaugcguucuccu

SEQ ID NO: 2177032 - RNA, 19 nt, Artificial Sequence
  Description of Artificial Sequence: Synthetic oligonucleotide
  Sense strand starting at position 2102 of SEQ ID NO: 1883213
gaacgcauuguggaaguuu

SEQ ID NO: 2177033 - RNA, 19 nt, Artificial Sequence
  Description of Artificial Sequence: Synthetic oligonucleotide
  Antisense strand to SEQ ID NO: 2177032
aaacuuccacaaugcguuc

SEQ ID NO: 2177034 - RNA, 19 nt, Artificial Sequence
  Description of Artificial Sequence: Synthetic oligonucleotide
  Sense strand starting at position 2214 of SEQ ID NO: 1883213
guggaaucuagugaaugug

SEQ ID NO: 2177035 - RNA, 19 nt, Artificial Sequence
  Description of Artificial Sequence: Synthetic oligonucleotide
  Antisense strand to SEQ ID NO: 2177034
cacauucacuagauuccac

SEQ ID NO: 2177036 - RNA, 19 nt, Artificial Sequence
  Description of Artificial Sequence: Synthetic oligonucleotide
  Sense strand starting at position 2217 of SEQ ID NO: 1883213
gaaucuagugaaugugucu

SEQ ID NO: 2177037 - RNA, 19 nt, Artificial Sequence
  Description of Artificial Sequence: Synthetic oligonucleotide
  Antisense strand to SEQ ID NO: 2177036
agacacauucacuagauuc

SEQ ID NO: 2177038 - RNA, 19 nt, Artificial Sequence
  Description of Artificial Sequence: Synthetic oligonucleotide
  Sense strand starting at position 2334 of SEQ ID NO: 1883213
ugaccucucugagcaaaca

SEQ ID NO: 2177039 - RNA, 19 nt, Artificial Sequence
  Description of Artificial Sequence: Synthetic oligonucleotide
  Antisense strand to SEQ ID NO: 2177038
uguuugcucagagagguca

SEQ ID NO: 2177040 - RNA, 19 nt, Artificial Sequence
  Description of Artificial Sequence: Synthetic oligonucleotide
  Sense strand starting at position 2730 of SEQ ID NO: 1883213
cagggcaucaccgguagaa

SEQ ID NO: 2177041 - RNA, 19 nt, Artificial Sequence
  Description of Artificial Sequence: Synthetic oligonucleotide
  Antisense strand to SEQ ID NO: 2177040
uucuaccggugaugcccug

SEQ ID NO: 2177042 - RNA, 19 nt, Artificial Sequence
  Description of Artificial Sequence: Synthetic oligonucleotide
  Sense strand starting at position 2732 of SEQ ID NO: 1883213
gggcaucaccgguagaaca

SEQ ID NO: 2177043 - RNA, 19 nt, Artificial Sequence
  Description of Artificial Sequence: Synthetic oligonucleotide
  Antisense strand to SEQ ID NO: 2177042
uguucuaccggugaugccc

SEQ ID NO: 2177044 - RNA, 19 nt, Artificial Sequence
  Description of Artificial Sequence: Synthetic oligonucleotide
  Sense strand starting at position 3464 of SEQ ID NO: 1883213
guacgagaaucucuagaac

SEQ ID NO: 2177045 - RNA, 19 nt, Artificial Sequence
  Description of Artificial Sequence: Synthetic oligonucleotide
  Antisense strand to SEQ ID NO: 2177044
guucuagagauucucguac

SEQ ID NO: 2177046 - RNA, 19 nt, Artificial Sequence
  Description of Artificial Sequence: Synthetic oligonucleotide
  Sense strand starting at position 3623 of SEQ ID NO: 1883213
cuacuuuggcaagguaaug

SEQ ID NO: 2177047 - RNA, 19 nt, Artificial Sequence
  Description of Artificial Sequence: Synthetic oligonucleotide
  Antisense strand to SEQ ID NO: 2177046
cauuaccuugccaaaguag

SEQ ID NO: 2177048 - RNA, 19 nt, Artificial Sequence
  Description of Artificial Sequence: Synthetic oligonucleotide
  Sense strand starting at position 3633 of SEQ ID NO: 1883213
aagguaaugucucugagcu

SEQ ID NO: 2177049 - RNA, 19 nt, Artificial Sequence
  Description of Artificial Sequence: Synthetic oligonucleotide
  Antisense strand to SEQ ID NO: 2177048
agcucagagacauuaccuu

SEQ ID NO: 2177050 - RNA, 19 nt, Artificial Sequence
  Description of Artificial Sequence: Synthetic oligonucleotide
  Sense strand starting at position 3634 of SEQ ID NO: 1883213
agguaaugucucugagcuc

SEQ ID NO: 2177051 - RNA, 19 nt, Artificial Sequence
  Description of Artificial Sequence: Synthetic oligonucleotide
  Antisense strand to SEQ ID NO: 2177050
gagcucagagacauuaccu

SEQ ID NO: 2177052 - RNA, 19 nt, Artificial Sequence
  Description of Artificial Sequence: Synthetic oligonucleotide
  Sense strand starting at position 3651 of SEQ ID NO: 1883213
uccauuuccucaucgguca

SEQ ID NO: 2177053 - RNA, 19 nt, Artificial Sequence
  Description of Artificial Sequence: Synthetic oligonucleotide
  Antisense strand to SEQ ID NO: 2177052
ugaccgaugaggaaaugga

SEQ ID NO: 2177054 - RNA, 19 nt, Artificial Sequence
  Description of Artificial Sequence: Synthetic oligonucleotide
  Sense strand starting at position 3673 of SEQ ID NO: 1883213
gggagauugcuguggagac

SEQ ID NO: 2177055 - RNA, 19 nt, Artificial Sequence
  Description of Artificial Sequence: Synthetic oligonucleotide
  Antisense strand to SEQ ID NO: 2177054
gucuccacagcaaucuccc

SEQ ID NO: 2177056 - RNA, 19 nt, Artificial Sequence
  Description of Artificial Sequence: Synthetic oligonucleotide
  Sense strand starting at position 3675 of SEQ ID NO: 1883213
gagauugcuguggagacau

SEQ ID NO: 2177057 - RNA, 19 nt, Artificial Sequence
  Description of Artificial Sequence: Synthetic oligonucleotide
  Antisense strand to SEQ ID NO: 2177056
augucuccacagcaaucuc

SEQ ID NO: 2177058 - RNA, 19 nt, Artificial Sequence
  Description of Artificial Sequence: Synthetic oligonucleotide
  Sense strand starting at position 3814 of SEQ ID NO: 1883213
ccacuuauagacuguauga

SEQ ID NO: 2177059 - RNA, 19 nt, Artificial Sequence
  Description of Artificial Sequence: Synthetic oligonucleotide
  Antisense strand to SEQ ID NO: 2177058
ucauacagucuauaagugg

SEQ ID NO: 2177060 - RNA, 19 nt, Artificial Sequence
  Description of Artificial Sequence: Synthetic oligonucleotide
  Sense strand starting at position 3827 of SEQ ID NO: 1883213
guaugagcuugggcacauu

SEQ ID NO: 2177061 - RNA, 19 nt, Artificial Sequence
  Description of Artificial Sequence: Synthetic oligonucleotide
  Antisense strand to SEQ ID NO: 2177060
aaugugcccaagcucauac

SEQ ID NO: 2177062 - RNA, 19 nt, Artificial Sequence
  Description of Artificial Sequence: Synthetic oligonucleotide
  Sense strand starting at position 3830 of SEQ ID NO: 1883213
ugagcuugggcacauuauu

SEQ ID NO: 2177063 - RNA, 19 nt, Artificial Sequence
  Description of Artificial Sequence: Synthetic oligonucleotide
  Antisense strand to SEQ ID NO: 2177062
aauaaugugcccaagcuca

SEQ ID NO: 2177064 - RNA, 19 nt, Artificial Sequence
  Description of Artificial Sequence: Synthetic oligonucleotide
  Sense strand starting at position 3839 of SEQ ID NO: 1883213
gcacauuauuugucucuuu

SEQ ID NO: 2177065 - RNA, 19 nt, Artificial Sequence
  Description of Artificial Sequence: Synthetic oligonucleotide
  Antisense strand to SEQ ID NO: 2177064
aaagagacaaauaaugugc

SEQ ID NO: 2177066 - RNA, 19 nt, Artificial Sequence
  Description of Artificial Sequence: Synthetic oligonucleotide
  Sense strand starting at position 3873 of SEQ ID NO: 1883213
uuauccguaaauggagaua

SEQ ID NO: 2177067 - RNA, 19 nt, Artificial Sequence
  Description of Artificial Sequence: Synthetic oligonucleotide
  Antisense strand to SEQ ID NO: 2177066
uaucuccauuuacggauaa

SEQ ID NO: 2177068 - RNA, 19 nt, Artificial Sequence
  Description of Artificial Sequence: Synthetic oligonucleotide
  Sense strand starting at position 3905 of SEQ ID NO: 1883213
ccaggaaugcugugaaggu

SEQ ID NO: 2177069 - RNA, 19 nt, Artificial Sequence
  Description of Artificial Sequence: Synthetic oligonucleotide
  Antisense strand to SEQ ID NO: 2177068
accuucacagcauuccugg

SEQ ID NO: 2177070 - RNA, 19 nt, Artificial Sequence
  Description of Artificial Sequence: Synthetic oligonucleotide
  Sense strand starting at position 3947 of SEQ ID NO: 1883213
ggcacagucuagucaugaa

SEQ ID NO: 2177071 - RNA, 19 nt, Artificial Sequence
  Description of Artificial Sequence: Synthetic oligonucleotide
  Antisense strand to SEQ ID NO: 2177070
uucaugacuagacugugcc

SEQ ID NO: 2177072 - RNA, 19 nt, Artificial Sequence
  Description of Artificial Sequence: Synthetic oligonucleotide
  Sense strand starting at position 3951 of SEQ ID NO: 1883213
cagucuagucaugaaacga

SEQ ID NO: 2177073 - RNA, 19 nt, Artificial Sequence
  Description of Artificial Sequence: Synthetic oligonucleotide
  Antisense strand to SEQ ID NO: 2177072
ucguuucaugacuagacug

SEQ ID NO: 2177074 - RNA, 19 nt, Artificial Sequence
  Description of Artificial Sequence: Synthetic oligonucleotide
  Sense strand starting at position 35 of SEQ ID NO: 1883214
gagaacuucuuaguuuguu

SEQ ID NO: 2177075 - RNA, 19 nt, Artificial Sequence
  Description of Artificial Sequence: Synthetic oligonucleotide
  Antisense strand to SEQ ID NO: 2177074
aacaaacuaagaaguucuc

SEQ ID NO: 2177076 - RNA, 19 nt, Artificial Sequence
  Description of Artificial Sequence: Synthetic oligonucleotide
  Sense strand starting at position 123 of SEQ ID NO: 1883214
agcagacuugcagagcuua

SEQ ID NO: 2177077 - RNA, 19 nt, Artificial Sequence
  Description of Artificial Sequence: Synthetic oligonucleotide
  Antisense strand to SEQ ID NO: 2177076
uaagcucugcaagucugcu

SEQ ID NO: 2177078 - RNA, 19 nt, Artificial Sequence
  Description of Artificial Sequence: Synthetic oligonucleotide
  Sense strand starting at position 221 of SEQ ID NO: 1883214
guuuacauggcccaaagau

SEQ ID NO: 2177079 - RNA, 19 nt, Artificial Sequence
  Description of Artificial Sequence: Synthetic oligonucleotide
  Antisense strand to SEQ ID NO: 2177078
aucuuugggccauguaaac

SEQ ID NO: 2177080 - RNA, 19 nt, Artificial Sequence
  Description of Artificial Sequence: Synthetic oligonucleotide
  Sense strand starting at position 243 of SEQ ID NO: 1883214
acuuauuuguagcauguaa

SEQ ID NO: 2177081 - RNA, 19 nt, Artificial Sequence
  Description of Artificial Sequence: Synthetic oligonucleotide
  Antisense strand to SEQ ID NO: 2177080
uuacaugcuacaaauaagu

SEQ ID NO: 2177082 - RNA, 19 nt, Artificial Sequence
  Description of Artificial Sequence: Synthetic oligonucleotide
  Sense strand starting at position 294 of SEQ ID NO: 1883214
uguacauaauagucaauga

SEQ ID NO: 2177083 - RNA, 19 nt, Artificial Sequence
  Description of Artificial Sequence: Synthetic oligonucleotide
  Antisense strand to SEQ ID NO: 2177082
ucauugacuauuauguaca

SEQ ID NO: 2177084 - RNA, 19 nt, Artificial Sequence
  Description of Artificial Sequence: Synthetic oligonucleotide
  Sense strand starting at position 333 of SEQ ID NO: 1883214
uuaggaagauugccguaua

SEQ ID NO: 2177085 - RNA, 19 nt, Artificial Sequence
  Description of Artificial Sequence: Synthetic oligonucleotide
  Antisense strand to SEQ ID NO: 2177084
uauacggcaaucuuccuaa

SEQ ID NO: 2177086 - RNA, 19 nt, Artificial Sequence
  Description of Artificial Sequence: Synthetic oligonucleotide
  Sense strand starting at position 336 of SEQ ID NO: 1883214
ggaagauugccguauaauc

SEQ ID NO: 2177087 - RNA, 19 nt, Artificial Sequence
  Description of Artificial Sequence: Synthetic oligonucleotide
  Antisense strand to SEQ ID NO: 2177086
gauuauacggcaaucuucc

SEQ ID NO: 2177088 - RNA, 19 nt, Artificial Sequence
  Description of Artificial Sequence: Synthetic oligonucleotide
  Sense strand starting at position 338 of SEQ ID NO: 1883214
aagauugccguauaaucua

SEQ ID NO: 2177089 - RNA, 19 nt, Artificial Sequence
  Description of Artificial Sequence: Synthetic oligonucleotide
  Antisense strand to SEQ ID NO: 2177088
uagauuauacggcaaucuu

SEQ ID NO: 2177090 - RNA, 19 nt, Artificial Sequence
  Description of Artificial Sequence: Synthetic oligonucleotide
  Sense strand starting at position 341 of SEQ ID NO: 1883214
auugccguauaaucuauua

SEQ ID NO: 2177091 - RNA, 19 nt, Artificial Sequence
  Description of Artificial Sequence: Synthetic oligonucleotide
  Antisense strand to SEQ ID NO: 2177090
uaauagauuauacggcaau

SEQ ID NO: 2177092 - RNA, 19 nt, Artificial Sequence
  Description of Artificial Sequence: Synthetic oligonucleotide
  Sense strand starting at position 353 of SEQ ID NO: 1883214
ucuauuaauuagcuuggua

SEQ ID NO: 2177093 - RNA, 19 nt, Artificial Sequence
  Description of Artificial Sequence: Synthetic oligonucleotide
  Antisense strand to SEQ ID NO: 2177092
uaccaagcuaauuaauaga

SEQ ID NO: 2177094 - RNA, 19 nt, Artificial Sequence
  Description of Artificial Sequence: Synthetic oligonucleotide
  Sense strand starting at position 356 of SEQ ID NO: 1883214
auuaauuagcuugguauca

SEQ ID NO: 2177095 - RNA, 19 nt, Artificial Sequence
  Description of Artificial Sequence: Synthetic oligonucleotide
  Antisense strand to SEQ ID NO: 2177094
ugauaccaagcuaauuaau

SEQ ID NO: 2177096 - RNA, 19 nt, Artificial Sequence
  Description of Artificial Sequence: Synthetic oligonucleotide
  Sense strand starting at position 381 of SEQ ID NO: 1883214
gguucugaauuaucugaau

SEQ ID NO: 2177097 - RNA, 19 nt, Artificial Sequence
  Description of Artificial Sequence: Synthetic oligonucleotide
  Antisense strand to SEQ ID NO: 2177096
auucagauaauucagaacc

SEQ ID NO: 2177098 - RNA, 19 nt, Artificial Sequence
  Description of Artificial Sequence: Synthetic oligonucleotide
  Sense strand starting at position 393 of SEQ ID NO: 1883214
ucugaauaucuuggaaauu

SEQ ID NO: 2177099 - RNA, 19 nt, Artificial Sequence
  Description of Artificial Sequence: Synthetic oligonucleotide
  Antisense strand to SEQ ID NO: 2177098
aauuuccaagauauucaga

SEQ ID NO: 2177100 - RNA, 19 nt, Artificial Sequence
  Description of Artificial Sequence: Synthetic oligonucleotide
  Sense strand starting at position 394 of SEQ ID NO: 1883214
cugaauaucuuggaaauua

SEQ ID NO: 2177101 - RNA, 19 nt, Artificial Sequence
  Description of Artificial Sequence: Synthetic oligonucleotide
  Antisense strand to SEQ ID NO: 2177100
uaauuuccaagauauucag

SEQ ID NO: 2177102 - RNA, 19 nt, Artificial Sequence
  Description of Artificial Sequence: Synthetic oligonucleotide
  Sense strand starting at position 556 of SEQ ID NO: 1883214
ugaauacauuuauggaaac

SEQ ID NO: 2177103 - RNA, 19 nt, Artificial Sequence
  Description of Artificial Sequence: Synthetic oligonucleotide
  Antisense strand to SEQ ID NO: 2177102
guuuccauaaauguauuca

SEQ ID NO: 2177104 - RNA, 19 nt, Artificial Sequence
  Description of Artificial Sequence: Synthetic oligonucleotide
  Sense strand starting at position 618 of SEQ ID NO: 1883214
auugauaaaucagaguaga

SEQ ID NO: 2177105 - RNA, 19 nt, Artificial Sequence
  Description of Artificial Sequence: Synthetic oligonucleotide
  Antisense strand to SEQ ID NO: 2177104
ucuacucugauuuaucaau

SEQ ID NO: 2177106 - RNA, 19 nt, Artificial Sequence
  Description of Artificial Sequence: Synthetic oligonucleotide
  Sense strand starting at position 628 of SEQ ID NO: 1883214
cagaguagacauggcuauu

SEQ ID NO: 2177107 - RNA, 19 nt, Artificial Sequence
  Description of Artificial Sequence: Synthetic oligonucleotide
  Antisense strand to SEQ ID NO: 2177106
aauagccaugucuacucug

SEQ ID NO: 2177108 - RNA, 19 nt, Artificial Sequence
  Description of Artificial Sequence: Synthetic oligonucleotide
  Sense strand starting at position 665 of SEQ ID NO: 1883214
uuaaauuagccuuguuugu

SEQ ID NO: 2177109 - RNA, 19 nt, Artificial Sequence
  Description of Artificial Sequence: Synthetic oligonucleotide
  Antisense strand to SEQ ID NO: 2177108
acaaacaaggcuaauuuaa

SEQ ID NO: 2177110 - RNA, 19 nt, Artificial Sequence
  Description of Artificial Sequence: Synthetic oligonucleotide
  Sense strand starting at position 669 of SEQ ID NO: 1883214
auuagccuuguuugucaaa

SEQ ID NO: 2177111 - RNA, 19 nt, Artificial Sequence
  Description of Artificial Sequence: Synthetic oligonucleotide
  Antisense strand to SEQ ID NO: 2177110
uuugacaaacaaggcuaau

SEQ ID NO: 2177112 - RNA, 19 nt, Artificial Sequence
  Description of Artificial Sequence: Synthetic oligonucleotide
  Sense strand starting at position 950 of SEQ ID NO: 1883214
gcaaaugccuuucugaaua

SEQ ID NO: 2177113 - RNA, 19 nt, Artificial Sequence
  Description of Artificial Sequence: Synthetic oligonucleotide
  Antisense strand to SEQ ID NO: 2177112
uauucagaaaggcauuugc

SEQ ID NO: 2177114 - RNA, 19 nt, Artificial Sequence
  Description of Artificial Sequence: Synthetic oligonucleotide
  Sense strand starting at position 955 of SEQ ID NO: 1883214
ugccuuucugaauaacaga

SEQ ID NO: 2177115 - RNA, 19 nt, Artificial Sequence
  Description of Artificial Sequence: Synthetic oligonucleotide
  Antisense strand to SEQ ID NO: 2177114
ucuguuauucagaaaggca

SEQ ID NO: 2177116 - RNA, 19 nt, Artificial Sequence
  Description of Artificial Sequence: Synthetic oligonucleotide
  Sense strand starting at position 1033 of SEQ ID NO: 1883214
ggucacgacuuaguacaaa

SEQ ID NO: 2177117 - RNA, 19 nt, Artificial Sequence
  Description of Artificial Sequence: Synthetic oligonucleotide
  Antisense strand to SEQ ID NO: 2177116
uuuguacuaagucgugacc

SEQ ID NO: 2177118 - RNA, 19 nt, Artificial Sequence
  Description of Artificial Sequence: Synthetic oligonucleotide
  Sense strand starting at position 1062 of SEQ ID NO: 1883214
ugucauugguucuuguauc

SEQ ID NO: 2177119 - RNA, 19 nt, Artificial Sequence
  Description of Artificial Sequence: Synthetic oligonucleotide
  Antisense strand to SEQ ID NO: 2177118
gauacaagaaccaaugaca

SEQ ID NO: 2177120 - RNA, 19 nt, Artificial Sequence
  Description of Artificial Sequence: Synthetic oligonucleotide
  Sense strand starting at position 1105 of SEQ ID NO: 1883214
ggcauaggauucuuaacug

SEQ ID NO: 2177121 - RNA, 19 nt, Artificial Sequence
  Description of Artificial Sequence: Synthetic oligonucleotide
  Antisense strand to SEQ ID NO: 2177120
caguuaagaauccuaugcc

SEQ ID NO: 2177122 - RNA, 19 nt, Artificial Sequence
  Description of Artificial Sequence: Synthetic oligonucleotide
  Sense strand starting at position 1109 of SEQ ID NO: 1883214
uaggauucuuaacugaguu

SEQ ID NO: 2177123 - RNA, 19 nt, Artificial Sequence
  Description of Artificial Sequence: Synthetic oligonucleotide
  Antisense strand to SEQ ID NO: 2177122
aacucaguuaagaauccua

SEQ ID NO: 2177124 - RNA, 19 nt, Artificial Sequence
  Description of Artificial Sequence: Synthetic oligonucleotide
  Sense strand starting at position 1110 of SEQ ID NO: 1883214
aggauucuuaacugaguug

SEQ ID NO: 2177125 - RNA, 19 nt, Artificial Sequence
  Description of Artificial Sequence: Synthetic oligonucleotide
  Antisense strand to SEQ ID NO: 2177124
caacucaguuaagaauccu

SEQ ID NO: 2177126 - RNA, 19 nt, Artificial Sequence
  Description of Artificial Sequence: Synthetic oligonucleotide
  Sense strand starting at position 1157 of SEQ ID NO: 1883214
acuagcugagcagagauau

SEQ ID NO: 2177127 - RNA, 19 nt, Artificial Sequence
  Description of Artificial Sequence: Synthetic oligonucleotide
  Antisense strand to SEQ ID NO: 2177126
auaucucugcucagcuagu

SEQ ID NO: 2177128 - RNA, 19 nt, Artificial Sequence
  Description of Artificial Sequence: Synthetic oligonucleotide
  Sense strand starting at position 1197 of SEQ ID NO: 1883214
gaacguugcuaucucuaaa

SEQ ID NO: 2177129 - RNA, 19 nt, Artificial Sequence
  Description of Artificial Sequence: Synthetic oligonucleotide
  Antisense strand to SEQ ID NO: 2177128
uuuagagauagcaacguuc

SEQ ID NO: 2177130 - RNA, 19 nt, Artificial Sequence
  Description of Artificial Sequence: Synthetic oligonucleotide
  Sense strand starting at position 1200 of SEQ ID NO: 1883214
cguugcuaucucuaaauua

SEQ ID NO: 2177131 - RNA, 19 nt, Artificial Sequence
  Description of Artificial Sequence: Synthetic oligonucleotide
  Antisense strand to SEQ ID NO: 2177130
uaauuuagagauagcaacg

SEQ ID NO: 2177132 - RNA, 19 nt, Artificial Sequence
  Description of Artificial Sequence: Synthetic oligonucleotide
  Sense strand starting at position 1533 of SEQ ID NO: 1883214
acaggcgucagccauguua

SEQ ID NO: 2177133 - RNA, 19 nt, Artificial Sequence
  Description of Artificial Sequence: Synthetic oligonucleotide
  Antisense strand to SEQ ID NO: 2177132
uaacauggcugacgccugu

SEQ ID NO: 2177134 - RNA, 19 nt, Artificial Sequence
  Description of Artificial Sequence: Synthetic oligonucleotide
  Sense strand starting at position 2113 of SEQ ID NO: 1883214
cgccgauuggugcccuuua

SEQ ID NO: 2177135 - RNA, 19 nt, Artificial Sequence
  Description of Artificial Sequence: Synthetic oligonucleotide
  Antisense strand to SEQ ID NO: 2177134
uaaagggcaccaaucggcg

SEQ ID NO: 2177136 - RNA, 19 nt, Artificial Sequence
  Description of Artificial Sequence: Synthetic oligonucleotide
  Sense strand starting at position 3005 of SEQ ID NO: 1883214
ugacacaacuaggcuuaaa

SEQ ID NO: 2177137 - RNA, 19 nt, Artificial Sequence
  Description of Artificial Sequence: Synthetic oligonucleotide
  Antisense strand to SEQ ID NO: 2177136
uuuaagccuaguuguguca

SEQ ID NO: 2177138 - RNA, 19 nt, Artificial Sequence
  Description of Artificial Sequence: Synthetic oligonucleotide
  Sense strand starting at position 3198 of SEQ ID NO: 1883214
uugugacucacguggauaa

SEQ ID NO: 2177139 - RNA, 19 nt, Artificial Sequence
  Description of Artificial Sequence: Synthetic oligonucleotide
  Antisense strand to SEQ ID NO: 2177138
uuauccacgugagucacaa

SEQ ID NO: 2177140 - RNA, 19 nt, Artificial Sequence
  Description of Artificial Sequence: Synthetic oligonucleotide
  Sense strand starting at position 3199 of SEQ ID NO: 1883214
ugugacucacguggauaaa

SEQ ID NO: 2177141 - RNA, 19 nt, Artificial Sequence
  Description of Artificial Sequence: Synthetic oligonucleotide
  Antisense strand to SEQ ID NO: 2177140
uuuauccacgugagucaca

SEQ ID NO: 2177142 - RNA, 19 nt, Artificial Sequence
  Description of Artificial Sequence: Synthetic oligonucleotide
  Sense strand starting at position 3432 of SEQ ID NO: 1883214
gagagauauuugggcuuuc

SEQ ID NO: 2177143 - RNA, 19 nt, Artificial Sequence
  Description of Artificial Sequence: Synthetic oligonucleotide
  Antisense strand to SEQ ID NO: 2177142
gaaagcccaaauaucucuc

SEQ ID NO: 2177144 - RNA, 19 nt, Artificial Sequence
  Description of Artificial Sequence: Synthetic oligonucleotide
  Sense strand starting at position 3492 of SEQ ID NO: 1883214
gucccauauucuuugauca

SEQ ID NO: 2177145 - RNA, 19 nt, Artificial Sequence
  Description of Artificial Sequence: Synthetic oligonucleotide
  Antisense strand to SEQ ID NO: 2177144
ugaucaaagaauaugggac

SEQ ID NO: 2177146 - RNA, 19 nt, Artificial Sequence
  Description of Artificial Sequence: Synthetic oligonucleotide
  Sense strand starting at position 3714 of SEQ ID NO: 1883214
acuguauauguugaucaag

SEQ ID NO: 2177147 - RNA, 19 nt, Artificial Sequence
  Description of Artificial Sequence: Synthetic oligonucleotide
  Antisense strand to SEQ ID NO: 2177146
cuugaucaacauauacagu

SEQ ID NO: 2177148 - RNA, 19 nt, Artificial Sequence
  Description of Artificial Sequence: Synthetic oligonucleotide
  Sense strand starting at position 3716 of SEQ ID NO: 1883214
uguauauguugaucaagau

SEQ ID NO: 2177149 - RNA, 19 nt, Artificial Sequence
  Description of Artificial Sequence: Synthetic oligonucleotide
  Antisense strand to SEQ ID NO: 2177148
aucuugaucaacauauaca

SEQ ID NO: 2177150 - RNA, 19 nt, Artificial Sequence
  Description of Artificial Sequence: Synthetic oligonucleotide
  Sense strand starting at position 3717 of SEQ ID NO: 1883214
guauauguugaucaagauu

SEQ ID NO: 2177151 - RNA, 19 nt, Artificial Sequence
  Description of Artificial Sequence: Synthetic oligonucleotide
  Antisense strand to SEQ ID NO: 2177150
aaucuugaucaacauauac

SEQ ID NO: 2177152 - RNA, 19 nt, Artificial Sequence
  Description of Artificial Sequence: Synthetic oligonucleotide
  Sense strand starting at position 3818 of SEQ ID NO: 1883214
uccuguguggacugaaauc

SEQ ID NO: 2177153 - RNA, 19 nt, Artificial Sequence
  Description of Artificial Sequence: Synthetic oligonucleotide
  Antisense strand to SEQ ID NO: 2177152
gauuucaguccacacagga

SEQ ID NO: 2177154 - RNA, 19 nt, Artificial Sequence
  Description of Artificial Sequence: Synthetic oligonucleotide
  Sense strand starting at position 332 of SEQ ID NO: 1883215
cgaagugagcacuauacau

SEQ ID NO: 2177155 - RNA, 19 nt, Artificial Sequence
  Description of Artificial Sequence: Synthetic oligonucleotide
  Antisense strand to SEQ ID NO: 2177154
auguauagugcucacuucg

SEQ ID NO: 2177156 - RNA, 19 nt, Artificial Sequence
  Description of Artificial Sequence: Synthetic oligonucleotide
  Sense strand starting at position 406 of SEQ ID NO: 1883215
ccaugagaguuaccauauu

SEQ ID NO: 2177157 - RNA, 19 nt, Artificial Sequence
  Description of Artificial Sequence: Synthetic oligonucleotide
  Antisense strand to SEQ ID NO: 2177156
aauaugguaacucucaugg

SEQ ID NO: 2177158 - RNA, 19 nt, Artificial Sequence
  Description of Artificial Sequence: Synthetic oligonucleotide
  Sense strand starting at position 443 of SEQ ID NO: 1883215
uuacgucugcuccauuuau

SEQ ID NO: 2177159 - RNA, 19 nt, Artificial Sequence
  Description of Artificial Sequence: Synthetic oligonucleotide
  Antisense strand to SEQ ID NO: 2177158
auaaauggagcagacguaa

SEQ ID NO: 2177160 - RNA, 19 nt, Artificial Sequence
  Description of Artificial Sequence: Synthetic oligonucleotide
  Sense strand starting at position 463 of SEQ ID NO: 1883215
ugugcuauuuggucaucuu

SEQ ID NO: 2177161 - RNA, 19 nt, Artificial Sequence
  Description of Artificial Sequence: Synthetic oligonucleotide
  Antisense strand to SEQ ID NO: 2177160
aagaugaccaaauagcaca

SEQ ID NO: 2177162 - RNA, 19 nt, Artificial Sequence
  Description of Artificial Sequence: Synthetic oligonucleotide
  Sense strand starting at position 464 of SEQ ID NO: 1883215
gugcuauuuggucaucuuu

SEQ ID NO: 2177163 - RNA, 19 nt, Artificial Sequence
  Description of Artificial Sequence: Synthetic oligonucleotide
  Antisense strand to SEQ ID NO: 2177162
aaagaugaccaaauagcac

SEQ ID NO: 2177164 - RNA, 19 nt, Artificial Sequence
  Description of Artificial Sequence: Synthetic oligonucleotide
  Sense strand starting at position 598 of SEQ ID NO: 1883215
acuguauucguccagagac

SEQ ID NO: 2177165 - RNA, 19 nt, Artificial Sequence
  Description of Artificial Sequence: Synthetic oligonucleotide
  Antisense strand to SEQ ID NO: 2177164
gucucuggacgaauacagu

SEQ ID NO: 2177166 - RNA, 19 nt, Artificial Sequence
  Description of Artificial Sequence: Synthetic oligonucleotide
  Sense strand starting at position 606 of SEQ ID NO: 1883215
cguccagagaccuauuaug

SEQ ID NO: 2177167 - RNA, 19 nt, Artificial Sequence
  Description of Artificial Sequence: Synthetic oligonucleotide
  Antisense strand to SEQ ID NO: 2177166
cauaauaggucucuggacg

SEQ ID NO: 2177168 - RNA, 19 nt, Artificial Sequence
  Description of Artificial Sequence: Synthetic oligonucleotide
  Sense strand starting at position 661 of SEQ ID NO: 1883215
uguuauugugaacaacaca

SEQ ID NO: 2177169 - RNA, 19 nt, Artificial Sequence
  Description of Artificial Sequence: Synthetic oligonucleotide
  Antisense strand to SEQ ID NO: 2177168
uguguuguucacaauaaca

SEQ ID NO: 2177170 - RNA, 19 nt, Artificial Sequence
  Description of Artificial Sequence: Synthetic oligonucleotide
  Sense strand starting at position 1140 of SEQ ID NO: 1883215
gauggugaugauugagagu

SEQ ID NO: 2177171 - RNA, 19 nt, Artificial Sequence
  Description of Artificial Sequence: Synthetic oligonucleotide
  Antisense strand to SEQ ID NO: 2177170
acucucaaucaucaccauc

SEQ ID NO: 2177172 - RNA, 19 nt, Artificial Sequence
  Description of Artificial Sequence: Synthetic oligonucleotide
  Sense strand starting at position 1189 of SEQ ID NO: 1883215
ccagaagucccagagcaua

SEQ ID NO: 2177173 - RNA, 19 nt, Artificial Sequence
  Description of Artificial Sequence: Synthetic oligonucleotide
  Antisense strand to SEQ ID NO: 2177172
uaugcucugggacuucugg

SEQ ID NO: 2177174 - RNA, 19 nt, Artificial Sequence
  Description of Artificial Sequence: Synthetic oligonucleotide
  Sense strand starting at position 1605 of SEQ ID NO: 1883215
agaacaugccuggagugua

SEQ ID NO: 2177175 - RNA, 19 nt, Artificial Sequence
  Description of Artificial Sequence: Synthetic oligonucleotide
  Antisense strand to SEQ ID NO: 2177174
uacacuccaggcauguucu

SEQ ID NO: 2177176 - RNA, 19 nt, Artificial Sequence
  Description of Artificial Sequence: Synthetic oligonucleotide
  Sense strand starting at position 1643 of SEQ ID NO: 1883215
cugcuuuggaucgagagga

SEQ ID NO: 2177177 - RNA, 19 nt, Artificial Sequence
  Description of Artificial Sequence: Synthetic oligonucleotide
  Antisense strand to SEQ ID NO: 2177176
uccucucgauccaaagcag

SEQ ID NO: 2177178 - RNA, 19 nt, Artificial Sequence
  Description of Artificial Sequence: Synthetic oligonucleotide
  Sense strand starting at position 1675 of SEQ ID NO: 1883215
agggaagccguauaaguau

SEQ ID NO: 2177179 - RNA, 19 nt, Artificial Sequence
  Description of Artificial Sequence: Synthetic oligonucleotide
  Antisense strand to SEQ ID NO: 2177178
auacuuauacggcuucccu

SEQ ID NO: 2177180 - RNA, 19 nt, Artificial Sequence
  Description of Artificial Sequence: Synthetic oligonucleotide
  Sense strand starting at position 1708 of SEQ ID NO: 1883215
guacgcuuugcuucucuca

SEQ ID NO: 2177181 - RNA, 19 nt, Artificial Sequence
  Description of Artificial Sequence: Synthetic oligonucleotide
  Antisense strand to SEQ ID NO: 2177180
ugagagaagcaaagcguac

SEQ ID NO: 2177182 - RNA, 19 nt, Artificial Sequence
  Description of Artificial Sequence: Synthetic oligonucleotide
  Sense strand starting at position 1766 of SEQ ID NO: 1883215
uuauccuggugauuaaaca

SEQ ID NO: 2177183 - RNA, 19 nt, Artificial Sequence
  Description of Artificial Sequence: Synthetic oligonucleotide
  Antisense strand to SEQ ID NO: 2177182
uguuuaaucaccaggauaa

SEQ ID NO: 2177184 - RNA, 19 nt, Artificial Sequence
  Description of Artificial Sequence: Synthetic oligonucleotide
  Sense strand starting at position 1986 of SEQ ID NO: 1883215
cugaguccucuccaagagu

SEQ ID NO: 2177185 - RNA, 19 nt, Artificial Sequence
  Description of Artificial Sequence: Synthetic oligonucleotide
  Antisense strand to SEQ ID NO: 2177184
acucuuggagaggacucag

SEQ ID NO: 2177186 - RNA, 19 nt, Artificial Sequence
  Description of Artificial Sequence: Synthetic oligonucleotide
  Sense strand starting at position 2064 of SEQ ID NO: 1883215
cgcucuuuccuccuugcaa

SEQ ID NO: 2177187 - RNA, 19 nt, Artificial Sequence
  Description of Artificial Sequence: Synthetic oligonucleotide
  Antisense strand to SEQ ID NO: 2177186
uugcaaggaggaaagagcg

SEQ ID NO: 2177188 - RNA, 19 nt, Artificial Sequence
  Description of Artificial Sequence: Synthetic oligonucleotide
  Sense strand starting at position 2195 of SEQ ID NO: 1883215
agauuugguuuccagaaag

SEQ ID NO: 2177189 - RNA, 19 nt, Artificial Sequence
  Description of Artificial Sequence: Synthetic oligonucleotide
  Antisense strand to SEQ ID NO: 2177188
cuuucuggaaaccaaaucu

SEQ ID NO: 2177190 - RNA, 19 nt, Artificial Sequence
  Description of Artificial Sequence: Synthetic oligonucleotide
  Sense strand starting at position 2206 of SEQ ID NO: 1883215
ccagaaagauccuuguccu

SEQ ID NO: 2177191 - RNA, 19 nt, Artificial Sequence
  Description of Artificial Sequence: Synthetic oligonucleotide
  Antisense strand to SEQ ID NO: 2177190
aggacaaggaucuuucugg

SEQ ID NO: 2177192 - RNA, 19 nt, Artificial Sequence
  Description of Artificial Sequence: Synthetic oligonucleotide
  Sense strand starting at position 2298 of SEQ ID NO: 1883215
gagcaacaacgcuaagauu

SEQ ID NO: 2177193 - RNA, 19 nt, Artificial Sequence
  Description of Artificial Sequence: Synthetic oligonucleotide
  Antisense strand to SEQ ID NO: 2177192
aaucuuagcguuguugcuc

SEQ ID NO: 2177194 - RNA, 19 nt, Artificial Sequence
  Description of Artificial Sequence: Synthetic oligonucleotide
  Sense strand starting at position 2328 of SEQ ID NO: 1883215
gucauugaagcagaaaugu

SEQ ID NO: 2177195 - RNA, 19 nt, Artificial Sequence
  Description of Artificial Sequence: Synthetic oligonucleotide
  Antisense strand to SEQ ID NO: 2177194
acauuucugcuucaaugac

SEQ ID NO: 2177196 - RNA, 19 nt, Artificial Sequence
  Description of Artificial Sequence: Synthetic oligonucleotide
  Sense strand starting at position 2586 of SEQ ID NO: 1883215
aucaucguugagcagaauu

SEQ ID NO: 2177197 - RNA, 19 nt, Artificial Sequence
  Description of Artificial Sequence: Synthetic oligonucleotide
  Antisense strand to SEQ ID NO: 2177196
aauucugcucaacgaugau

SEQ ID NO: 2177198 - RNA, 19 nt, Artificial Sequence
  Description of Artificial Sequence: Synthetic oligonucleotide
  Sense strand starting at position 2716 of SEQ ID NO: 1883215
uuuauaugaguuuaccuga

SEQ ID NO: 2177199 - RNA, 19 nt, Artificial Sequence
  Description of Artificial Sequence: Synthetic oligonucleotide
  Antisense strand to SEQ ID NO: 2177198
ucagguaaacucauauaaa

SEQ ID NO: 2177200 - RNA, 19 nt, Artificial Sequence
  Description of Artificial Sequence: Synthetic oligonucleotide
  Sense strand starting at position 2719 of SEQ ID NO: 1883215
auaugaguuuaccugaagu

SEQ ID NO: 2177201 - RNA, 19 nt, Artificial Sequence
  Description of Artificial Sequence: Synthetic oligonucleotide
  Antisense strand to SEQ ID NO: 2177200
acuucagguaaacucauau

SEQ ID NO: 2177202 - RNA, 19 nt, Artificial Sequence
  Description of Artificial Sequence: Synthetic oligonucleotide
  Sense strand starting at position 2812 of SEQ ID NO: 1883215
gcauauacauuugagaaga

SEQ ID NO: 2177203 - RNA, 19 nt, Artificial Sequence
  Description of Artificial Sequence: Synthetic oligonucleotide
  Antisense strand to SEQ ID NO: 2177202
ucuucucaaauguauaugc

SEQ ID NO: 2177204 - RNA, 19 nt, Artificial Sequence
  Description of Artificial Sequence: Synthetic oligonucleotide
  Sense strand starting at position 2946 of SEQ ID NO: 1883215
acgcuuuagcaggaagaau

SEQ ID NO: 2177205 - RNA, 19 nt, Artificial Sequence
  Description of Artificial Sequence: Synthetic oligonucleotide
  Antisense strand to SEQ ID NO: 2177204
auucuuccugcuaaagcgu

SEQ ID NO: 2177206 - RNA, 19 nt, Artificial Sequence
  Description of Artificial Sequence: Synthetic oligonucleotide
  Sense strand starting at position 3034 of SEQ ID NO: 1883215
aaagaaugguggcuacaca

SEQ ID NO: 2177207 - RNA, 19 nt, Artificial Sequence
  Description of Artificial Sequence: Synthetic oligonucleotide
  Antisense strand to SEQ ID NO: 2177206
uguguagccaccauucuuu

SEQ ID NO: 2177208 - RNA, 19 nt, Artificial Sequence
  Description of Artificial Sequence: Synthetic oligonucleotide
  Sense strand starting at position 3070 of SEQ ID NO: 1883215
ccaagaaagcuggguuuaa

SEQ ID NO: 2177209 - RNA, 19 nt, Artificial Sequence
  Description of Artificial Sequence: Synthetic oligonucleotide
  Antisense strand to SEQ ID NO: 2177208
uuaaacccagcuuucuugg

SEQ ID NO: 2177210 - RNA, 19 nt, Artificial Sequence
  Description of Artificial Sequence: Synthetic oligonucleotide
  Sense strand starting at position 3071 of SEQ ID NO: 1883215
caagaaagcuggguuuaaa

SEQ ID NO: 2177211 - RNA, 19 nt, Artificial Sequence
  Description of Artificial Sequence: Synthetic oligonucleotide
  Antisense strand to SEQ ID NO: 2177210
uuuaaacccagcuuucuug

SEQ ID NO: 2177212 - RNA, 19 nt, Artificial Sequence
  Description of Artificial Sequence: Synthetic oligonucleotide
  Sense strand starting at position 3111 of SEQ ID NO: 1883215
aaguaagagcagugacaau

SEQ ID NO: 2177213 - RNA, 19 nt, Artificial Sequence
  Description of Artificial Sequence: Synthetic oligonucleotide
  Antisense strand to SEQ ID NO: 2177212
auugucacugcucuuacuu

SEQ ID NO: 2177214 - RNA, 19 nt, Artificial Sequence
  Description of Artificial Sequence: Synthetic oligonucleotide
  Sense strand starting at position 3125 of SEQ ID NO: 1883215
acaauucccugggcuuaaa

SEQ ID NO: 2177215 - RNA, 19 nt, Artificial Sequence
  Description of Artificial Sequence: Synthetic oligonucleotide
  Antisense strand to SEQ ID NO: 2177214
uuuaagcccagggaauugu

SEQ ID NO: 2177216 - RNA, 19 nt, Artificial Sequence
  Description of Artificial Sequence: Synthetic oligonucleotide
  Sense strand starting at position 3429 of SEQ ID NO: 1883215
gugugauguguguuuagug

SEQ ID NO: 2177217 - RNA, 19 nt, Artificial Sequence
  Description of Artificial Sequence: Synthetic oligonucleotide
  Antisense strand to SEQ ID NO: 2177216
cacuaaacacacaucacac

SEQ ID NO: 2177218 - RNA, 19 nt, Artificial Sequence
  Description of Artificial Sequence: Synthetic oligonucleotide
  Sense strand starting at position 3794 of SEQ ID NO: 1883215
ggugugauaugggucagga

SEQ ID NO: 2177219 - RNA, 19 nt, Artificial Sequence
  Description of Artificial Sequence: Synthetic oligonucleotide
  Antisense strand to SEQ ID NO: 2177218
uccugacccauaucacacc

SEQ ID NO: 2177220 - RNA, 19 nt, Artificial Sequence
  Description of Artificial Sequence: Synthetic oligonucleotide
  Sense strand starting at position 3796 of SEQ ID NO: 1883215
ugugauaugggucaggauu

SEQ ID NO: 2177221 - RNA, 19 nt, Artificial Sequence
  Description of Artificial Sequence: Synthetic oligonucleotide
  Antisense strand to SEQ ID NO: 2177220
aauccugacccauaucaca

SEQ ID NO: 2177222 - RNA, 19 nt, Artificial Sequence
  Description of Artificial Sequence: Synthetic oligonucleotide
  Sense strand starting at position 3879 of SEQ ID NO: 1883215
ggcaucuuggucuaaauaa

SEQ ID NO: 2177223 - RNA, 19 nt, Artificial Sequence
  Description of Artificial Sequence: Synthetic oligonucleotide
  Antisense strand to SEQ ID NO: 2177222
uuauuuagaccaagaugcc

SEQ ID NO: 2177224 - RNA, 19 nt, Artificial Sequence
  Description of Artificial Sequence: Synthetic oligonucleotide
  Sense strand starting at position 3889 of SEQ ID NO: 1883215
ucuaaauaaguuggucuga

SEQ ID NO: 2177225 - RNA, 19 nt, Artificial Sequence
  Description of Artificial Sequence: Synthetic oligonucleotide
  Antisense strand to SEQ ID NO: 2177224
ucagaccaacuuauuuaga

SEQ ID NO: 2177226 - RNA, 19 nt, Artificial Sequence
  Description of Artificial Sequence: Synthetic oligonucleotide
  Sense strand starting at position 3890 of SEQ ID NO: 1883215
cuaaauaaguuggucugaa

SEQ ID NO: 2177227 - RNA, 19 nt, Artificial Sequence
  Description of Artificial Sequence: Synthetic oligonucleotide
  Antisense strand to SEQ ID NO: 2177226
uucagaccaacuuauuuag

SEQ ID NO: 2177228 - RNA, 19 nt, Artificial Sequence
  Description of Artificial Sequence: Synthetic oligonucleotide
  Sense strand starting at position 3891 of SEQ ID NO: 1883215
uaaauaaguuggucugaau

SEQ ID NO: 2177229 - RNA, 19 nt, Artificial Sequence
  Description of Artificial Sequence: Synthetic oligonucleotide
  Antisense strand to SEQ ID NO: 2177228
auucagaccaacuuauuua

SEQ ID NO: 2177230 - RNA, 19 nt, Artificial Sequence
  Description of Artificial Sequence: Synthetic oligonucleotide
  Sense strand starting at position 3898 of SEQ ID NO: 1883215
guuggucugaauuaguaua

SEQ ID NO: 2177231 - RNA, 19 nt, Artificial Sequence
  Description of Artificial Sequence: Synthetic oligonucleotide
  Antisense strand to SEQ ID NO: 2177230
uauacuaauucagaccaac

SEQ ID NO: 2177232 - RNA, 19 nt, Artificial Sequence
  Description of Artificial Sequence: Synthetic oligonucleotide
  Sense strand starting at position 3903 of SEQ ID NO: 1883215
ucugaauuaguauaaguac

SEQ ID NO: 2177233 - RNA, 19 nt, Artificial Sequence
  Description of Artificial Sequence: Synthetic oligonucleotide
  Antisense strand to SEQ ID NO: 2177232
guacuuauacuaauucaga

SEQ ID NO: 2177234 - RNA, 19 nt, Artificial Sequence
  Description of Artificial Sequence: Synthetic oligonucleotide
  Sense strand starting at position 240 of SEQ ID NO: 1883216
uaauaauuggaaugugagu

SEQ ID NO: 2177235 - RNA, 19 nt, Artificial Sequence
  Description of Artificial Sequence: Synthetic oligonucleotide
  Antisense strand to SEQ ID NO: 2177234
acucacauuccaauuauua

SEQ ID NO: 2177236 - RNA, 19 nt, Artificial Sequence
  Description of Artificial Sequence: Synthetic oligonucleotide
  Sense strand starting at position 242 of SEQ ID NO: 1883216
auaauuggaaugugaguca

SEQ ID NO: 2177237 - RNA, 19 nt, Artificial Sequence
  Description of Artificial Sequence: Synthetic oligonucleotide
  Antisense strand to SEQ ID NO: 2177236
ugacucacauuccaauuau

SEQ ID NO: 2177238 - RNA, 19 nt, Artificial Sequence
  Description of Artificial Sequence: Synthetic oligonucleotide
  Sense strand starting at position 247 of SEQ ID NO: 1883216
uggaaugugagucaucuua

SEQ ID NO: 2177239 - RNA, 19 nt, Artificial Sequence
  Description of Artificial Sequence: Synthetic oligonucleotide
  Antisense strand to SEQ ID NO: 2177238
uaagaugacucacauucca

SEQ ID NO: 2177240 - RNA, 19 nt, Artificial Sequence
  Description of Artificial Sequence: Synthetic oligonucleotide
  Sense strand starting at position 249 of SEQ ID NO: 1883216
gaaugugagucaucuuaua

SEQ ID NO: 2177241 - RNA, 19 nt, Artificial Sequence
  Description of Artificial Sequence: Synthetic oligonucleotide
  Antisense strand to SEQ ID NO: 2177240
uauaagaugacucacauuc

SEQ ID NO: 2177242 - RNA, 19 nt, Artificial Sequence
  Description of Artificial Sequence: Synthetic oligonucleotide
  Sense strand starting at position 301 of SEQ ID NO: 1883216
agguuacauuuggaagauu

SEQ ID NO: 2177243 - RNA, 19 nt, Artificial Sequence
  Description of Artificial Sequence: Synthetic oligonucleotide
  Antisense strand to SEQ ID NO: 2177242
aaucuuccaaauguaaccu

SEQ ID NO: 2177244 - RNA, 19 nt, Artificial Sequence
  Description of Artificial Sequence: Synthetic oligonucleotide
  Sense strand starting at position 412 of SEQ ID NO: 1883216
uugauuguucugcauaaca

SEQ ID NO: 2177245 - RNA, 19 nt, Artificial Sequence
  Description of Artificial Sequence: Synthetic oligonucleotide
  Antisense strand to SEQ ID NO: 2177244
uguuaugcagaacaaucaa

SEQ ID NO: 2177246 - RNA, 19 nt, Artificial Sequence
  Description of Artificial Sequence: Synthetic oligonucleotide
  Sense strand starting at position 485 of SEQ ID NO: 1883216
ggaauuuggcccuguaguu

SEQ ID NO: 2177247 - RNA, 19 nt, Artificial Sequence
  Description of Artificial Sequence: Synthetic oligonucleotide
  Antisense strand to SEQ ID NO: 2177246
aacuacagggccaaauucc

SEQ ID NO: 2177248 - RNA, 19 nt, Artificial Sequence
  Description of Artificial Sequence: Synthetic oligonucleotide
  Sense strand starting at position 542 of SEQ ID NO: 1883216
caggcauuuguuugaaagc

SEQ ID NO: 2177249 - RNA, 19 nt, Artificial Sequence
  Description of Artificial Sequence: Synthetic oligonucleotide
  Antisense strand to SEQ ID NO: 2177248
gcuuucaaacaaaugccug

SEQ ID NO: 2177250 - RNA, 19 nt, Artificial Sequence
  Description of Artificial Sequence: Synthetic oligonucleotide
  Sense strand starting at position 717 of SEQ ID NO: 1883216
aaauuuacgguucguaacu

SEQ ID NO: 2177251 - RNA, 19 nt, Artificial Sequence
  Description of Artificial Sequence: Synthetic oligonucleotide
  Antisense strand to SEQ ID NO: 2177250
aguuacgaaccguaaauuu

SEQ ID NO: 2177252 - RNA, 19 nt, Artificial Sequence
  Description of Artificial Sequence: Synthetic oligonucleotide
  Sense strand starting at position 718 of SEQ ID NO: 1883216
aauuuacgguucguaacuu

SEQ ID NO: 2177253 - RNA, 19 nt, Artificial Sequence
  Description of Artificial Sequence: Synthetic oligonucleotide
  Antisense strand to SEQ ID NO: 2177252
aaguuacgaaccguaaauu

SEQ ID NO: 2177254 - RNA, 19 nt, Artificial Sequence
  Description of Artificial Sequence: Synthetic oligonucleotide
  Sense strand starting at position 1182 of SEQ ID NO: 1883216
uuuggagaauuguuaacuc

SEQ ID NO: 2177255 - RNA, 19 nt, Artificial Sequence
  Description of Artificial Sequence: Synthetic oligonucleotide
  Antisense strand to SEQ ID NO: 2177254
gaguuaacaauucuccaaa

SEQ ID NO: 2177256 - RNA, 19 nt, Artificial Sequence
  Description of Artificial Sequence: Synthetic oligonucleotide
  Sense strand starting at position 1216 of SEQ ID NO: 1883216
ugggauaugcuuuaguuua

SEQ ID NO: 2177257 - RNA, 19 nt, Artificial Sequence
  Description of Artificial Sequence: Synthetic oligonucleotide
  Antisense strand to SEQ ID NO: 2177256
uaaacuaaagcauauccca

SEQ ID NO: 2177258 - RNA, 19 nt, Artificial Sequence
  Description of Artificial Sequence: Synthetic oligonucleotide
  Sense strand starting at position 1245 of SEQ ID NO: 1883216
auauccaagagugaucguu

SEQ ID NO: 2177259 - RNA, 19 nt, Artificial Sequence
  Description of Artificial Sequence: Synthetic oligonucleotide
  Antisense strand to SEQ ID NO: 2177258
aacgaucacucuuggauau

SEQ ID NO: 2177260 - RNA, 19 nt, Artificial Sequence
  Description of Artificial Sequence: Synthetic oligonucleotide
  Sense strand starting at position 1251 of SEQ ID NO: 1883216
aagagugaucguuacuuau

SEQ ID NO: 2177261 - RNA, 19 nt, Artificial Sequence
  Description of Artificial Sequence: Synthetic oligonucleotide
  Antisense strand to SEQ ID NO: 2177260
auaaguaacgaucacucuu

SEQ ID NO: 2177262 - RNA, 19 nt, Artificial Sequence
  Description of Artificial Sequence: Synthetic oligonucleotide
  Sense strand starting at position 1253 of SEQ ID NO: 1883216
gagugaucguuacuuauuu

SEQ ID NO: 2177263 - RNA, 19 nt, Artificial Sequence
  Description of Artificial Sequence: Synthetic oligonucleotide
  Antisense strand to SEQ ID NO: 2177262
aaauaaguaacgaucacuc

SEQ ID NO: 2177264 - RNA, 19 nt, Artificial Sequence
  Description of Artificial Sequence: Synthetic oligonucleotide
  Sense strand starting at position 1318 of SEQ ID NO: 1883216
ugcaauaauugacuuauga

SEQ ID NO: 2177265 - RNA, 19 nt, Artificial Sequence
  Description of Artificial Sequence: Synthetic oligonucleotide
  Antisense strand to SEQ ID NO: 2177264
ucauaagucaauuauugca

SEQ ID NO: 2177266 - RNA, 19 nt, Artificial Sequence
  Description of Artificial Sequence: Synthetic oligonucleotide
  Sense strand starting at position 1427 of SEQ ID NO: 1883216
ccuccuuguguccaaagaa

SEQ ID NO: 2177267 - RNA, 19 nt, Artificial Sequence
  Description of Artificial Sequence: Synthetic oligonucleotide
  Antisense strand to SEQ ID NO: 2177266
uucuuuggacacaaggagg

SEQ ID NO: 2177268 - RNA, 19 nt, Artificial Sequence
  Description of Artificial Sequence: Synthetic oligonucleotide
  Sense strand starting at position 1611 of SEQ ID NO: 1883216
cucauuuguccguaccuuu

SEQ ID NO: 2177269 - RNA, 19 nt, Artificial Sequence
  Description of Artificial Sequence: Synthetic oligonucleotide
  Antisense strand to SEQ ID NO: 2177268
aaagguacggacaaaugag

SEQ ID NO: 2177270 - RNA, 19 nt, Artificial Sequence
  Description of Artificial Sequence: Synthetic oligonucleotide
  Sense strand starting at position 1667 of SEQ ID NO: 1883216
uggcaauaacucggaggaa

SEQ ID NO: 2177271 - RNA, 19 nt, Artificial Sequence
  Description of Artificial Sequence: Synthetic oligonucleotide
  Antisense strand to SEQ ID NO: 2177270
uuccuccgaguuauugcca

SEQ ID NO: 2177272 - RNA, 19 nt, Artificial Sequence
  Description of Artificial Sequence: Synthetic oligonucleotide
  Sense strand starting at position 1683 of SEQ ID NO: 1883216
gaacuaguuccagggcaga

SEQ ID NO: 2177273 - RNA, 19 nt, Artificial Sequence
  Description of Artificial Sequence: Synthetic oligonucleotide
  Antisense strand to SEQ ID NO: 2177272
ucugcccuggaacuaguuc

SEQ ID NO: 2177274 - RNA, 19 nt, Artificial Sequence
  Description of Artificial Sequence: Synthetic oligonucleotide
  Sense strand starting at position 1699 of SEQ ID NO: 1883216
agaagaaucucagcuggca

SEQ ID NO: 2177275 - RNA, 19 nt, Artificial Sequence
  Description of Artificial Sequence: Synthetic oligonucleotide
  Antisense strand to SEQ ID NO: 2177274
ugccagcugagauucuucu

SEQ ID NO: 2177276 - RNA, 19 nt, Artificial Sequence
  Description of Artificial Sequence: Synthetic oligonucleotide
  Sense strand starting at position 1827 of SEQ ID NO: 1883216
ucaggauugccucagguga

SEQ ID NO: 2177277 - RNA, 19 nt, Artificial Sequence
  Description of Artificial Sequence: Synthetic oligonucleotide
  Antisense strand to SEQ ID NO: 2177276
ucaccugaggcaauccuga

SEQ ID NO: 2177278 - RNA, 19 nt, Artificial Sequence
  Description of Artificial Sequence: Synthetic oligonucleotide
  Sense strand starting at position 2119 of SEQ ID NO: 1883216
ggauauaacuagcuuagug

SEQ ID NO: 2177279 - RNA, 19 nt, Artificial Sequence
  Description of Artificial Sequence: Synthetic oligonucleotide
  Antisense strand to SEQ ID NO: 2177278
cacuaagcuaguuauaucc

SEQ ID NO: 2177280 - RNA, 19 nt, Artificial Sequence
  Description of Artificial Sequence: Synthetic oligonucleotide
  Sense strand starting at position 2242 of SEQ ID NO: 1883216
uugcuaugacauuaaaugu

SEQ ID NO: 2177281 - RNA, 19 nt, Artificial Sequence
  Description of Artificial Sequence: Synthetic oligonucleotide
  Antisense strand to SEQ ID NO: 2177280
acauuuaaugucauagcaa

SEQ ID NO: 2177282 - RNA, 19 nt, Artificial Sequence
  Description of Artificial Sequence: Synthetic oligonucleotide
  Sense strand starting at position 2416 of SEQ ID NO: 1883216
ugcuauguacuaggaauaa

SEQ ID NO: 2177283 - RNA, 19 nt, Artificial Sequence
  Description of Artificial Sequence: Synthetic oligonucleotide
  Antisense strand to SEQ ID NO: 2177282
uuauuccuaguacauagca

SEQ ID NO: 2177284 - RNA, 19 nt, Artificial Sequence
  Description of Artificial Sequence: Synthetic oligonucleotide
  Sense strand starting at position 2477 of SEQ ID NO: 1883216
ggagaauuaacacgaaugu

SEQ ID NO: 2177285 - RNA, 19 nt, Artificial Sequence
  Description of Artificial Sequence: Synthetic oligonucleotide
  Antisense strand to SEQ ID NO: 2177284
acauucguguuaauucucc

SEQ ID NO: 2177286 - RNA, 19 nt, Artificial Sequence
  Description of Artificial Sequence: Synthetic oligonucleotide
  Sense strand starting at position 2646 of SEQ ID NO: 1883216
gaaccucagagagguuguu

SEQ ID NO: 2177287 - RNA, 19 nt, Artificial Sequence
  Description of Artificial Sequence: Synthetic oligonucleotide
  Antisense strand to SEQ ID NO: 2177286
aacaaccucucugagguuc

SEQ ID NO: 2177288 - RNA, 19 nt, Artificial Sequence
  Description of Artificial Sequence: Synthetic oligonucleotide
  Sense strand starting at position 2763 of SEQ ID NO: 1883216
gagagcuguacuggaaaug

SEQ ID NO: 2177289 - RNA, 19 nt, Artificial Sequence
  Description of Artificial Sequence: Synthetic oligonucleotide
  Antisense strand to SEQ ID NO: 2177288
cauuuccaguacagcucuc

SEQ ID NO: 2177290 - RNA, 19 nt, Artificial Sequence
  Description of Artificial Sequence: Synthetic oligonucleotide
  Sense strand starting at position 2920 of SEQ ID NO: 1883216
cugggaaagguaugcauua

SEQ ID NO: 2177291 - RNA, 19 nt, Artificial Sequence
  Description of Artificial Sequence: Synthetic oligonucleotide
  Antisense strand to SEQ ID NO: 2177290
uaaugcauaccuuucccag

SEQ ID NO: 2177292 - RNA, 19 nt, Artificial Sequence
  Description of Artificial Sequence: Synthetic oligonucleotide
  Sense strand starting at position 2921 of SEQ ID NO: 1883216
ugggaaagguaugcauuaa

SEQ ID NO: 2177293 - RNA, 19 nt, Artificial Sequence
  Description of Artificial Sequence: Synthetic oligonucleotide
  Antisense strand to SEQ ID NO: 2177292
uuaaugcauaccuuuccca

SEQ ID NO: 2177294 - RNA, 19 nt, Artificial Sequence
  Description of Artificial Sequence: Synthetic oligonucleotide
  Sense strand starting at position 2925 of SEQ ID NO: 1883216
aaagguaugcauuaaagua

SEQ ID NO: 2177295 - RNA, 19 nt, Artificial Sequence
  Description of Artificial Sequence: Synthetic oligonucleotide
  Antisense strand to SEQ ID NO: 2177294
uacuuuaaugcauaccuuu

SEQ ID NO: 2177296 - RNA, 19 nt, Artificial Sequence
  Description of Artificial Sequence: Synthetic oligonucleotide
  Sense strand starting at position 3029 of SEQ ID NO: 1883216
uucuuaaaggcauagcuua

SEQ ID NO: 2177297 - RNA, 19 nt, Artificial Sequence
  Description of Artificial Sequence: Synthetic oligonucleotide
  Antisense strand to SEQ ID NO: 2177296
uaagcuaugccuuuaagaa

SEQ ID NO: 2177298 - RNA, 19 nt, Artificial Sequence
  Description of Artificial Sequence: Synthetic oligonucleotide
  Sense strand starting at position 3456 of SEQ ID NO: 1883216
acaagccuuccuuagaagu

SEQ ID NO: 2177299 - RNA, 19 nt, Artificial Sequence
  Description of Artificial Sequence: Synthetic oligonucleotide
  Antisense strand to SEQ ID NO: 2177298
acuucuaaggaaggcuugu

SEQ ID NO: 2177300 - RNA, 19 nt, Artificial Sequence
  Description of Artificial Sequence: Synthetic oligonucleotide
  Sense strand starting at position 3652 of SEQ ID NO: 1883216
ggauacuacugucugaauu

SEQ ID NO: 2177301 - RNA, 19 nt, Artificial Sequence
  Description of Artificial Sequence: Synthetic oligonucleotide
  Antisense strand to SEQ ID NO: 2177300
aauucagacaguaguaucc

SEQ ID NO: 2177302 - RNA, 19 nt, Artificial Sequence
  Description of Artificial Sequence: Synthetic oligonucleotide
  Sense strand starting at position 3741 of SEQ ID NO: 1883216
ggugaagucaugcaaggag

SEQ ID NO: 2177303 - RNA, 19 nt, Artificial Sequence
  Description of Artificial Sequence: Synthetic oligonucleotide
  Antisense strand to SEQ ID NO: 2177302
cuccuugcaugacuucacc

SEQ ID NO: 2177304 - RNA, 19 nt, Artificial Sequence
  Description of Artificial Sequence: Synthetic oligonucleotide
  Sense strand starting at position 3776 of SEQ ID NO: 1883216
uccaguuuagugugauuuc

SEQ ID NO: 2177305 - RNA, 19 nt, Artificial Sequence
  Description of Artificial Sequence: Synthetic oligonucleotide
  Antisense strand to SEQ ID NO: 2177304
gaaaucacacuaaacugga

SEQ ID NO: 2177306 - RNA, 19 nt, Artificial Sequence
  Description of Artificial Sequence: Synthetic oligonucleotide
  Sense strand starting at position 3783 of SEQ ID NO: 1883216
uagugugauuucccuggua

SEQ ID NO: 2177307 - RNA, 19 nt, Artificial Sequence
  Description of Artificial Sequence: Synthetic oligonucleotide
  Antisense strand to SEQ ID NO: 2177306
uaccagggaaaucacacua

SEQ ID NO: 2177308 - RNA, 19 nt, Artificial Sequence
  Description of Artificial Sequence: Synthetic oligonucleotide
  Sense strand starting at position 3785 of SEQ ID NO: 1883216
gugugauuucccugguacc

SEQ ID NO: 2177309 - RNA, 19 nt, Artificial Sequence
  Description of Artificial Sequence: Synthetic oligonucleotide
  Antisense strand to SEQ ID NO: 2177308
gguaccagggaaaucacac

SEQ ID NO: 2177310 - RNA, 19 nt, Artificial Sequence
  Description of Artificial Sequence: Synthetic oligonucleotide
  Sense strand starting at position 3786 of SEQ ID NO: 1883216
ugugauuucccugguaccu

SEQ ID NO: 2177311 - RNA, 19 nt, Artificial Sequence
  Description of Artificial Sequence: Synthetic oligonucleotide
  Antisense strand to SEQ ID NO: 2177310
agguaccagggaaaucaca

SEQ ID NO: 2177312 - RNA, 19 nt, Artificial Sequence
  Description of Artificial Sequence: Synthetic oligonucleotide
  Sense strand starting at position 3888 of SEQ ID NO: 1883216
aagcuucugguauaugaga

SEQ ID NO: 2177313 - RNA, 19 nt, Artificial Sequence
  Description of Artificial Sequence: Synthetic oligonucleotide
  Antisense strand to SEQ ID NO: 2177312
ucucauauaccagaagcuu

SEQ ID NO: 2177314 - RNA, 19 nt, Artificial Sequence
  Description of Artificial Sequence: Synthetic oligonucleotide
  Sense strand starting at position 492 of SEQ ID NO: 1883217
gagucugaagcuugaaaug

SEQ ID NO: 2177315 - RNA, 19 nt, Artificial Sequence
  Description of Artificial Sequence: Synthetic oligonucleotide
  Antisense strand to SEQ ID NO: 2177314
cauuucaagcuucagacuc

SEQ ID NO: 2177316 - RNA, 19 nt, Artificial Sequence
  Description of Artificial Sequence: Synthetic oligonucleotide
  Sense strand starting at position 721 of SEQ ID NO: 1883217
gguaaauuauagccaaauu

SEQ ID NO: 2177317 - RNA, 19 nt, Artificial Sequence
  Description of Artificial Sequence: Synthetic oligonucleotide
  Antisense strand to SEQ ID NO: 2177316
aauuuggcuauaauuuacc

SEQ ID NO: 2177318 - RNA, 19 nt, Artificial Sequence
  Description of Artificial Sequence: Synthetic oligonucleotide
  Sense strand starting at position 909 of SEQ ID NO: 1883217
ggagcuuaugcuggaauac

SEQ ID NO: 2177319 - RNA, 19 nt, Artificial Sequence
  Description of Artificial Sequence: Synthetic oligonucleotide
  Antisense strand to SEQ ID NO: 2177318
guauuccagcauaagcucc

SEQ ID NO: 2177320 - RNA, 19 nt, Artificial Sequence
  Description of Artificial Sequence: Synthetic oligonucleotide
  Sense strand starting at position 975 of SEQ ID NO: 1883217
guugaaugaacauguaaga

SEQ ID NO: 2177321 - RNA, 19 nt, Artificial Sequence
  Description of Artificial Sequence: Synthetic oligonucleotide
  Antisense strand to SEQ ID NO: 2177320
ucuuacauguucauucaac

SEQ ID NO: 2177322 - RNA, 19 nt, Artificial Sequence
  Description of Artificial Sequence: Synthetic oligonucleotide
  Sense strand starting at position 1004 of SEQ ID NO: 1883217
uauuuauagcaugguguca

SEQ ID NO: 2177323 - RNA, 19 nt, Artificial Sequence
  Description of Artificial Sequence: Synthetic oligonucleotide
  Antisense strand to SEQ ID NO: 2177322
ugacaccaugcuauaaaua

SEQ ID NO: 2177324 - RNA, 19 nt, Artificial Sequence
  Description of Artificial Sequence: Synthetic oligonucleotide
  Sense strand starting at position 1274 of SEQ ID NO: 1883217
uggaaauucucuuugucuc

SEQ ID NO: 2177325 - RNA, 19 nt, Artificial Sequence
  Description of Artificial Sequence: Synthetic oligonucleotide
  Antisense strand to SEQ ID NO: 2177324
gagacaaagagaauuucca

SEQ ID NO: 2177326 - RNA, 19 nt, Artificial Sequence
  Description of Artificial Sequence: Synthetic oligonucleotide
  Sense strand starting at position 1275 of SEQ ID NO: 1883217
ggaaauucucuuugucucu

SEQ ID NO: 2177327 - RNA, 19 nt, Artificial Sequence
  Description of Artificial Sequence: Synthetic oligonucleotide
  Antisense strand to SEQ ID NO: 2177326
agagacaaagagaauuucc

SEQ ID NO: 2177328 - RNA, 19 nt, Artificial Sequence
  Description of Artificial Sequence: Synthetic oligonucleotide
  Sense strand starting at position 1322 of SEQ ID NO: 1883217
accauaguuucugugauaa

SEQ ID NO: 2177329 - RNA, 19 nt, Artificial Sequence
  Description of Artificial Sequence: Synthetic oligonucleotide
  Antisense strand to SEQ ID NO: 2177328
uuaucacagaaacuauggu

SEQ ID NO: 2177330 - RNA, 19 nt, Artificial Sequence
  Description of Artificial Sequence: Synthetic oligonucleotide
  Sense strand starting at position 1466 of SEQ ID NO: 1883217
aggguauuguccuuguuac

SEQ ID NO: 2177331 - RNA, 19 nt, Artificial Sequence
  Description of Artificial Sequence: Synthetic oligonucleotide
  Antisense strand to SEQ ID NO: 2177330
guaacaaggacaauacccu

SEQ ID NO: 2177332 - RNA, 19 nt, Artificial Sequence
  Description of Artificial Sequence: Synthetic oligonucleotide
  Sense strand starting at position 1467 of SEQ ID NO: 1883217
ggguauuguccuuguuacc

SEQ ID NO: 2177333 - RNA, 19 nt, Artificial Sequence
  Description of Artificial Sequence: Synthetic oligonucleotide
  Antisense strand to SEQ ID NO: 2177332
gguaacaaggacaauaccc

SEQ ID NO: 2177334 - RNA, 19 nt, Artificial Sequence
  Description of Artificial Sequence: Synthetic oligonucleotide
  Sense strand starting at position 1534 of SEQ ID NO: 1883217
gcauauaaugaaugcccaa

SEQ ID NO: 2177335 - RNA, 19 nt, Artificial Sequence
  Description of Artificial Sequence: Synthetic oligonucleotide
  Antisense strand to SEQ ID NO: 2177334
uugggcauucauuauaugc

SEQ ID NO: 2177336 - RNA, 19 nt, Artificial Sequence
  Description of Artificial Sequence: Synthetic oligonucleotide
  Sense strand starting at position 1545 of SEQ ID NO: 1883217
augcccaaacuguguaaga

SEQ ID NO: 2177337 - RNA, 19 nt, Artificial Sequence
  Description of Artificial Sequence: Synthetic oligonucleotide
  Antisense strand to SEQ ID NO: 2177336
ucuuacacaguuugggcau

SEQ ID NO: 2177338 - RNA, 19 nt, Artificial Sequence
  Description of Artificial Sequence: Synthetic oligonucleotide
  Sense strand starting at position 1547 of SEQ ID NO: 1883217
gcccaaacuguguaagaca

SEQ ID NO: 2177339 - RNA, 19 nt, Artificial Sequence
  Description of Artificial Sequence: Synthetic oligonucleotide
  Antisense strand to SEQ ID NO: 2177338
ugucuuacacaguuugggc

SEQ ID NO: 2177340 - RNA, 19 nt, Artificial Sequence
  Description of Artificial Sequence: Synthetic oligonucleotide
  Sense strand starting at position 1570 of SEQ ID NO: 1883217
caaagaggugcaugagaau

SEQ ID NO: 2177341 - RNA, 19 nt, Artificial Sequence
  Description of Artificial Sequence: Synthetic oligonucleotide
  Antisense strand to SEQ ID NO: 2177340
auucucaugcaccucuuug

SEQ ID NO: 2177342 - RNA, 19 nt, Artificial Sequence
  Description of Artificial Sequence: Synthetic oligonucleotide
  Sense strand starting at position 1573 of SEQ ID NO: 1883217
agaggugcaugagaauuaa

SEQ ID NO: 2177343 - RNA, 19 nt, Artificial Sequence
  Description of Artificial Sequence: Synthetic oligonucleotide
  Antisense strand to SEQ ID NO: 2177342
uuaauucucaugcaccucu

SEQ ID NO: 2177344 - RNA, 19 nt, Artificial Sequence
  Description of Artificial Sequence: Synthetic oligonucleotide
  Sense strand starting at position 1709 of SEQ ID NO: 1883217
gccgcauagagacauaaau

SEQ ID NO: 2177345 - RNA, 19 nt, Artificial Sequence
  Description of Artificial Sequence: Synthetic oligonucleotide
  Antisense strand to SEQ ID NO: 2177344
auuuaugucucuaugcggc

SEQ ID NO: 2177346 - RNA, 19 nt, Artificial Sequence
  Description of Artificial Sequence: Synthetic oligonucleotide
  Sense strand starting at position 1719 of SEQ ID NO: 1883217
gacauaaaucgugaagcua

SEQ ID NO: 2177347 - RNA, 19 nt, Artificial Sequence
  Description of Artificial Sequence: Synthetic oligonucleotide
  Antisense strand to SEQ ID NO: 2177346
uagcuucacgauuuauguc

SEQ ID NO: 2177348 - RNA, 19 nt, Artificial Sequence
  Description of Artificial Sequence: Synthetic oligonucleotide
  Sense strand starting at position 1905 of SEQ ID NO: 1883217
gccauuuguacagacguuu

SEQ ID NO: 2177349 - RNA, 19 nt, Artificial Sequence
  Description of Artificial Sequence: Synthetic oligonucleotide
  Antisense strand to SEQ ID NO: 2177348
aaacgucuguacaaauggc

SEQ ID NO: 2177350 - RNA, 19 nt, Artificial Sequence
  Description of Artificial Sequence: Synthetic oligonucleotide
  Sense strand starting at position 2166 of SEQ ID NO: 1883217
ggacuaaucuuccagagau

SEQ ID NO: 2177351 - RNA, 19 nt, Artificial Sequence
  Description of Artificial Sequence: Synthetic oligonucleotide
  Antisense strand to SEQ ID NO: 2177350
aucucuggaagauuagucc

SEQ ID NO: 2177352 - RNA, 19 nt, Artificial Sequence
  Description of Artificial Sequence: Synthetic oligonucleotide
  Sense strand starting at position 2367 of SEQ ID NO: 1883217
gugggauggugucucacua

SEQ ID NO: 2177353 - RNA, 19 nt, Artificial Sequence
  Description of Artificial Sequence: Synthetic oligonucleotide
  Antisense strand to SEQ ID NO: 2177352
uagugagacaccaucccac

SEQ ID NO: 2177354 - RNA, 19 nt, Artificial Sequence
  Description of Artificial Sequence: Synthetic oligonucleotide
  Sense strand starting at position 2453 of SEQ ID NO: 1883217
ggcugauaggugugaccca

SEQ ID NO: 2177355 - RNA, 19 nt, Artificial Sequence
  Description of Artificial Sequence: Synthetic oligonucleotide
  Antisense strand to SEQ ID NO: 2177354
ugggucacaccuaucagcc

SEQ ID NO: 2177356 - RNA, 19 nt, Artificial Sequence
  Description of Artificial Sequence: Synthetic oligonucleotide
  Sense strand starting at position 2789 of SEQ ID NO: 1883217
uuauaaccuguaugaguuu

SEQ ID NO: 2177357 - RNA, 19 nt, Artificial Sequence
  Description of Artificial Sequence: Synthetic oligonucleotide
  Antisense strand to SEQ ID NO: 2177356
aaacucauacagguuauaa

SEQ ID NO: 2177358 - RNA, 19 nt, Artificial Sequence
  Description of Artificial Sequence: Synthetic oligonucleotide
  Sense strand starting at position 2795 of SEQ ID NO: 1883217
ccuguaugaguuuaaucaa

SEQ ID NO: 2177359 - RNA, 19 nt, Artificial Sequence
  Description of Artificial Sequence: Synthetic oligonucleotide
  Antisense strand to SEQ ID NO: 2177358
uugauuaaacucauacagg

SEQ ID NO: 2177360 - RNA, 19 nt, Artificial Sequence
  Description of Artificial Sequence: Synthetic oligonucleotide
  Sense strand starting at position 2834 of SEQ ID NO: 1883217
auuguuauguuuguuagga

SEQ ID NO: 2177361 - RNA, 19 nt, Artificial Sequence
  Description of Artificial Sequence: Synthetic oligonucleotide
  Antisense strand to SEQ ID NO: 2177360
uccuaacaaacauaacaau

SEQ ID NO: 2177362 - RNA, 19 nt, Artificial Sequence
  Description of Artificial Sequence: Synthetic oligonucleotide
  Sense strand starting at position 2835 of SEQ ID NO: 1883217
uuguuauguuuguuaggaa

SEQ ID NO: 2177363 - RNA, 19 nt, Artificial Sequence
  Description of Artificial Sequence: Synthetic oligonucleotide
  Antisense strand to SEQ ID NO: 2177362
uuccuaacaaacauaacaa

SEQ ID NO: 2177364 - RNA, 19 nt, Artificial Sequence
  Description of Artificial Sequence: Synthetic oligonucleotide
  Sense strand starting at position 3233 of SEQ ID NO: 1883217
uaaugcauguguucugaac

SEQ ID NO: 2177365 - RNA, 19 nt, Artificial Sequence
  Description of Artificial Sequence: Synthetic oligonucleotide
  Antisense strand to SEQ ID NO: 2177364
guucagaacacaugcauua

SEQ ID NO: 2177366 - RNA, 19 nt, Artificial Sequence
  Description of Artificial Sequence: Synthetic oligonucleotide
  Sense strand starting at position 3239 of SEQ ID NO: 1883217
auguguucugaacaaacau

SEQ ID NO: 2177367 - RNA, 19 nt, Artificial Sequence
  Description of Artificial Sequence: Synthetic oligonucleotide
  Antisense strand to SEQ ID NO: 2177366
auguuuguucagaacacau

SEQ ID NO: 2177368 - RNA, 19 nt, Artificial Sequence
  Description of Artificial Sequence: Synthetic oligonucleotide
  Sense strand starting at position 3395 of SEQ ID NO: 1883217
agucuauagucaguggucu

SEQ ID NO: 2177369 - RNA, 19 nt, Artificial Sequence
  Description of Artificial Sequence: Synthetic oligonucleotide
  Antisense strand to SEQ ID NO: 2177368
agaccacugacuauagacu

SEQ ID NO: 2177370 - RNA, 19 nt, Artificial Sequence
  Description of Artificial Sequence: Synthetic oligonucleotide
  Sense strand starting at position 3399 of SEQ ID NO: 1883217
uauagucaguggucucuua

SEQ ID NO: 2177371 - RNA, 19 nt, Artificial Sequence
  Description of Artificial Sequence: Synthetic oligonucleotide
  Antisense strand to SEQ ID NO: 2177370
uaagagaccacugacuaua

SEQ ID NO: 2177372 - RNA, 19 nt, Artificial Sequence
  Description of Artificial Sequence: Synthetic oligonucleotide
  Sense strand starting at position 3421 of SEQ ID NO: 1883217
ggagaaaguuacugaaaua

SEQ ID NO: 2177373 - RNA, 19 nt, Artificial Sequence
  Description of Artificial Sequence: Synthetic oligonucleotide
  Antisense strand to SEQ ID NO: 2177372
uauuucaguaacuuucucc

SEQ ID NO: 2177374 - RNA, 19 nt, Artificial Sequence
  Description of Artificial Sequence: Synthetic oligonucleotide
  Sense strand starting at position 3463 of SEQ ID NO: 1883217
uaguuauggcuguggaaca

SEQ ID NO: 2177375 - RNA, 19 nt, Artificial Sequence
  Description of Artificial Sequence: Synthetic oligonucleotide
  Antisense strand to SEQ ID NO: 2177374
uguuccacagccauaacua

SEQ ID NO: 2177376 - RNA, 19 nt, Artificial Sequence
  Description of Artificial Sequence: Synthetic oligonucleotide
  Sense strand starting at position 3608 of SEQ ID NO: 1883217
auaguauacucuuuaagug

SEQ ID NO: 2177377 - RNA, 19 nt, Artificial Sequence
  Description of Artificial Sequence: Synthetic oligonucleotide
  Antisense strand to SEQ ID NO: 2177376
cacuuaaagaguauacuau

SEQ ID NO: 2177378 - RNA, 19 nt, Artificial Sequence
  Description of Artificial Sequence: Synthetic oligonucleotide
  Sense strand starting at position 3672 of SEQ ID NO: 1883217
guuuccaauucgguaucuu

SEQ ID NO: 2177379 - RNA, 19 nt, Artificial Sequence
  Description of Artificial Sequence: Synthetic oligonucleotide
  Antisense strand to SEQ ID NO: 2177378
aagauaccgaauuggaaac

SEQ ID NO: 2177380 - RNA, 19 nt, Artificial Sequence
  Description of Artificial Sequence: Synthetic oligonucleotide
  Sense strand starting at position 3673 of SEQ ID NO: 1883217
uuuccaauucgguaucuua

SEQ ID NO: 2177381 - RNA, 19 nt, Artificial Sequence
  Description of Artificial Sequence: Synthetic oligonucleotide
  Antisense strand to SEQ ID NO: 2177380
uaagauaccgaauuggaaa

SEQ ID NO: 2177382 - RNA, 19 nt, Artificial Sequence
  Description of Artificial Sequence: Synthetic oligonucleotide
  Sense strand starting at position 3693 of SEQ ID NO: 1883217
ugccacaaagcgucuguua

SEQ ID NO: 2177383 - RNA, 19 nt, Artificial Sequence
  Description of Artificial Sequence: Synthetic oligonucleotide
  Antisense strand to SEQ ID NO: 2177382
uaacagacgcuuuguggca

SEQ ID NO: 2177384 - RNA, 19 nt, Artificial Sequence
  Description of Artificial Sequence: Synthetic oligonucleotide
  Sense strand starting at position 3694 of SEQ ID NO: 1883217
gccacaaagcgucuguuau

SEQ ID NO: 2177385 - RNA, 19 nt, Artificial Sequence
  Description of Artificial Sequence: Synthetic oligonucleotide
  Antisense strand to SEQ ID NO: 2177384
auaacagacgcuuuguggc

SEQ ID NO: 2177386 - RNA, 19 nt, Artificial Sequence
  Description of Artificial Sequence: Synthetic oligonucleotide
  Sense strand starting at position 3695 of SEQ ID NO: 1883217
ccacaaagcgucuguuaug

SEQ ID NO: 2177387 - RNA, 19 nt, Artificial Sequence
  Description of Artificial Sequence: Synthetic oligonucleotide
  Antisense strand to SEQ ID NO: 2177386
cauaacagacgcuuugugg

SEQ ID NO: 2177388 - RNA, 19 nt, Artificial Sequence
  Description of Artificial Sequence: Synthetic oligonucleotide
  Sense strand starting at position 3709 of SEQ ID NO: 1883217
uuaugucagccuuacgauc

SEQ ID NO: 2177389 - RNA, 19 nt, Artificial Sequence
  Description of Artificial Sequence: Synthetic oligonucleotide
  Antisense strand to SEQ ID NO: 2177388
gaucguaaggcugacauaa

SEQ ID NO: 2177390 - RNA, 19 nt, Artificial Sequence
  Description of Artificial Sequence: Synthetic oligonucleotide
  Sense strand starting at position 3747 of SEQ ID NO: 1883217
uugucagugguugugucua

SEQ ID NO: 2177391 - RNA, 19 nt, Artificial Sequence
  Description of Artificial Sequence: Synthetic oligonucleotide
  Antisense strand to SEQ ID NO: 2177390
uagacacaaccacugacaa

SEQ ID NO: 2177392 - RNA, 19 nt, Artificial Sequence
  Description of Artificial Sequence: Synthetic oligonucleotide
  Sense strand starting at position 3788 of SEQ ID NO: 1883217
acguguuugacguccuauc

SEQ ID NO: 2177393 - RNA, 19 nt, Artificial Sequence
  Description of Artificial Sequence: Synthetic oligonucleotide
  Antisense strand to SEQ ID NO: 2177392
gauaggacgucaaacacgu

SEQ ID NO: 2177394 - RNA, 19 nt, Artificial Sequence
  Description of Artificial Sequence: Synthetic oligonucleotide
  Sense strand starting at position 229 of SEQ ID NO: 1883218
uuaaacuaccaucgagacu

SEQ ID NO: 2177395 - RNA, 19 nt, Artificial Sequence
  Description of Artificial Sequence: Synthetic oligonucleotide
  Antisense strand to SEQ ID NO: 2177394
agucucgaugguaguuuaa

SEQ ID NO: 2177396 - RNA, 19 nt, Artificial Sequence
  Description of Artificial Sequence: Synthetic oligonucleotide
  Sense strand starting at position 526 of SEQ ID NO: 1883218
ucuccuuugcagggacaaa

SEQ ID NO: 2177397 - RNA, 19 nt, Artificial Sequence
  Description of Artificial Sequence: Synthetic oligonucleotide
  Antisense strand to SEQ ID NO: 2177396
uuugucccugcaaaggaga

SEQ ID NO: 2177398 - RNA, 19 nt, Artificial Sequence
  Description of Artificial Sequence: Synthetic oligonucleotide
  Sense strand starting at position 762 of SEQ ID NO: 1883218
gcaugcaaccuugaacuua

SEQ ID NO: 2177399 - RNA, 19 nt, Artificial Sequence
  Description of Artificial Sequence: Synthetic oligonucleotide
  Antisense strand to SEQ ID NO: 2177398
uaaguucaagguugcaugc

SEQ ID NO: 2177400 - RNA, 19 nt, Artificial Sequence
  Description of Artificial Sequence: Synthetic oligonucleotide
  Sense strand starting at position 1148 of SEQ ID NO: 1883218
gcauguuuagaacguauuu

SEQ ID NO: 2177401 - RNA, 19 nt, Artificial Sequence
  Description of Artificial Sequence: Synthetic oligonucleotide
  Antisense strand to SEQ ID NO: 2177400
aaauacguucuaaacaugc

SEQ ID NO: 2177402 - RNA, 19 nt, Artificial Sequence
  Description of Artificial Sequence: Synthetic oligonucleotide
  Sense strand starting at position 1175 of SEQ ID NO: 1883218
gauaaauuagucuggccag

SEQ ID NO: 2177403 - RNA, 19 nt, Artificial Sequence
  Description of Artificial Sequence: Synthetic oligonucleotide
  Antisense strand to SEQ ID NO: 2177402
cuggccagacuaauuuauc

SEQ ID NO: 2177404 - RNA, 19 nt, Artificial Sequence
  Description of Artificial Sequence: Synthetic oligonucleotide
  Sense strand starting at position 1178 of SEQ ID NO: 1883218
aaauuagucuggccagaau

SEQ ID NO: 2177405 - RNA, 19 nt, Artificial Sequence
  Description of Artificial Sequence: Synthetic oligonucleotide
  Antisense strand to SEQ ID NO: 2177404
auucuggccagacuaauuu

SEQ ID NO: 2177406 - RNA, 19 nt, Artificial Sequence
  Description of Artificial Sequence: Synthetic oligonucleotide
  Sense strand starting at position 1181 of SEQ ID NO: 1883218
uuagucuggccagaauaua

SEQ ID NO: 2177407 - RNA, 19 nt, Artificial Sequence
  Description of Artificial Sequence: Synthetic oligonucleotide
  Antisense strand to SEQ ID NO: 2177406
uauauucuggccagacuaa

SEQ ID NO: 2177408 - RNA, 19 nt, Artificial Sequence
  Description of Artificial Sequence: Synthetic oligonucleotide
  Sense strand starting at position 1205 of SEQ ID NO: 1883218
guguauauuucuguauaug

SEQ ID NO: 2177409 - RNA, 19 nt, Artificial Sequence
  Description of Artificial Sequence: Synthetic oligonucleotide
  Antisense strand to SEQ ID NO: 2177408
cauauacagaaauauacac

SEQ ID NO: 2177410 - RNA, 19 nt, Artificial Sequence
  Description of Artificial Sequence: Synthetic oligonucleotide
  Sense strand starting at position 1342 of SEQ ID NO: 1883218
cagauaaaugugcaaaggu

SEQ ID NO: 2177411 - RNA, 19 nt, Artificial Sequence
  Description of Artificial Sequence: Synthetic oligonucleotide
  Antisense strand to SEQ ID NO: 2177410
accuuugcacauuuaucug

SEQ ID NO: 2177412 - RNA, 19 nt, Artificial Sequence
  Description of Artificial Sequence: Synthetic oligonucleotide
  Sense strand starting at position 1359 of SEQ ID NO: 1883218
gucauuguacaacaaugua

SEQ ID NO: 2177413 - RNA, 19 nt, Artificial Sequence
  Description of Artificial Sequence: Synthetic oligonucleotide
  Antisense strand to SEQ ID NO: 2177412
uacauuguuguacaaugac

SEQ ID NO: 2177414 - RNA, 19 nt, Artificial Sequence
  Description of Artificial Sequence: Synthetic oligonucleotide
  Sense strand starting at position 1551 of SEQ ID NO: 1883218
aagcaauguguauaagaua

SEQ ID NO: 2177415 - RNA, 19 nt, Artificial Sequence
  Description of Artificial Sequence: Synthetic oligonucleotide
  Antisense strand to SEQ ID NO: 2177414
uaucuuauacacauugcuu

SEQ ID NO: 2177416 - RNA, 19 nt, Artificial Sequence
  Description of Artificial Sequence: Synthetic oligonucleotide
  Sense strand starting at position 1571 of SEQ ID NO: 1883218
auacauuaaguguaugagu

SEQ ID NO: 2177417 - RNA, 19 nt, Artificial Sequence
  Description of Artificial Sequence: Synthetic oligonucleotide
  Antisense strand to SEQ ID NO: 2177416
acucauacacuuaauguau

SEQ ID NO: 2177418 - RNA, 19 nt, Artificial Sequence
  Description of Artificial Sequence: Synthetic oligonucleotide
  Sense strand starting at position 1618 of SEQ ID NO: 1883218
acucaauuaugaguaaugu

SEQ ID NO: 2177419 - RNA, 19 nt, Artificial Sequence
  Description of Artificial Sequence: Synthetic oligonucleotide
  Antisense strand to SEQ ID NO: 2177418
acauuacucauaauugagu

SEQ ID NO: 2177420 - RNA, 19 nt, Artificial Sequence
  Description of Artificial Sequence: Synthetic oligonucleotide
  Sense strand starting at position 1619 of SEQ ID NO: 1883218
cucaauuaugaguaaugug

SEQ ID NO: 2177421 - RNA, 19 nt, Artificial Sequence
  Description of Artificial Sequence: Synthetic oligonucleotide
  Antisense strand to SEQ ID NO: 2177420
cacauuacucauaauugag

SEQ ID NO: 2177422 - RNA, 19 nt, Artificial Sequence
  Description of Artificial Sequence: Synthetic oligonucleotide
  Sense strand starting at position 1659 of SEQ ID NO: 1883218
guguguaauccuuauuaaa

SEQ ID NO: 2177423 - RNA, 19 nt, Artificial Sequence
  Description of Artificial Sequence: Synthetic oligonucleotide
  Antisense strand to SEQ ID NO: 2177422
uuuaauaaggauuacacac

SEQ ID NO: 2177424 - RNA, 19 nt, Artificial Sequence
  Description of Artificial Sequence: Synthetic oligonucleotide
  Sense strand starting at position 2114 of SEQ ID NO: 1883218
acgcaaagucaagaguuga

SEQ ID NO: 2177425 - RNA, 19 nt, Artificial Sequence
  Description of Artificial Sequence: Synthetic oligonucleotide
  Antisense strand to SEQ ID NO: 2177424
ucaacucuugacuuugcgu

SEQ ID NO: 2177426 - RNA, 19 nt, Artificial Sequence
  Description of Artificial Sequence: Synthetic oligonucleotide
  Sense strand starting at position 2122 of SEQ ID NO: 1883218
ucaagaguugagcaacugu

SEQ ID NO: 2177427 - RNA, 19 nt, Artificial Sequence
  Description of Artificial Sequence: Synthetic oligonucleotide
  Antisense strand to SEQ ID NO: 2177426
acaguugcucaacucuuga

SEQ ID NO: 2177428 - RNA, 19 nt, Artificial Sequence
  Description of Artificial Sequence: Synthetic oligonucleotide
  Sense strand starting at position 2359 of SEQ ID NO: 1883218
uauaguccuguguauaaga

SEQ ID NO: 2177429 - RNA, 19 nt, Artificial Sequence
  Description of Artificial Sequence: Synthetic oligonucleotide
  Antisense strand to SEQ ID NO: 2177428
ucuuauacacaggacuaua

SEQ ID NO: 2177430 - RNA, 19 nt, Artificial Sequence
  Description of Artificial Sequence: Synthetic oligonucleotide
  Sense strand starting at position 2361 of SEQ ID NO: 1883218
uaguccuguguauaagaau

SEQ ID NO: 2177431 - RNA, 19 nt, Artificial Sequence
  Description of Artificial Sequence: Synthetic oligonucleotide
  Antisense strand to SEQ ID NO: 2177430
auucuuauacacaggacua

SEQ ID NO: 2177432 - RNA, 19 nt, Artificial Sequence
  Description of Artificial Sequence: Synthetic oligonucleotide
  Sense strand starting at position 2367 of SEQ ID NO: 1883218
uguguauaagaaugaguaa

SEQ ID NO: 2177433 - RNA, 19 nt, Artificial Sequence
  Description of Artificial Sequence: Synthetic oligonucleotide
  Antisense strand to SEQ ID NO: 2177432
uuacucauucuuauacaca

SEQ ID NO: 2177434 - RNA, 19 nt, Artificial Sequence
  Description of Artificial Sequence: Synthetic oligonucleotide
  Sense strand starting at position 2506 of SEQ ID NO: 1883218
auacuuagauguucuuauc

SEQ ID NO: 2177435 - RNA, 19 nt, Artificial Sequence
  Description of Artificial Sequence: Synthetic oligonucleotide
  Antisense strand to SEQ ID NO: 2177434
gauaagaacaucuaaguau

SEQ ID NO: 2177436 - RNA, 19 nt, Artificial Sequence
  Description of Artificial Sequence: Synthetic oligonucleotide
  Sense strand starting at position 2544 of SEQ ID NO: 1883218
ggacuaggaucaguuugau

SEQ ID NO: 2177437 - RNA, 19 nt, Artificial Sequence
  Description of Artificial Sequence: Synthetic oligonucleotide
  Antisense strand to SEQ ID NO: 2177436
aucaaacugauccuagucc

SEQ ID NO: 2177438 - RNA, 19 nt, Artificial Sequence
  Description of Artificial Sequence: Synthetic oligonucleotide
  Sense strand starting at position 2547 of SEQ ID NO: 1883218
cuaggaucaguuugauaac

SEQ ID NO: 2177439 - RNA, 19 nt, Artificial Sequence
  Description of Artificial Sequence: Synthetic oligonucleotide
  Antisense strand to SEQ ID NO: 2177438
guuaucaaacugauccuag

SEQ ID NO: 2177440 - RNA, 19 nt, Artificial Sequence
  Description of Artificial Sequence: Synthetic oligonucleotide
  Sense strand starting at position 2653 of SEQ ID NO: 1883218
ugccuauuuccauguagua

SEQ ID NO: 2177441 - RNA, 19 nt, Artificial Sequence
  Description of Artificial Sequence: Synthetic oligonucleotide
  Antisense strand to SEQ ID NO: 2177440
uacuacauggaaauaggca

SEQ ID NO: 2177442 - RNA, 19 nt, Artificial Sequence
  Description of Artificial Sequence: Synthetic oligonucleotide
  Sense strand starting at position 2676 of SEQ ID NO: 1883218
guugacuuaguauauuacu

SEQ ID NO: 2177443 - RNA, 19 nt, Artificial Sequence
  Description of Artificial Sequence: Synthetic oligonucleotide
  Antisense strand to SEQ ID NO: 2177442
aguaauauacuaagucaac

SEQ ID NO: 2177444 - RNA, 19 nt, Artificial Sequence
  Description of Artificial Sequence: Synthetic oligonucleotide
  Sense strand starting at position 2780 of SEQ ID NO: 1883218
aguacaucugucuaaaguc

SEQ ID NO: 2177445 - RNA, 19 nt, Artificial Sequence
  Description of Artificial Sequence: Synthetic oligonucleotide
  Antisense strand to SEQ ID NO: 2177444
gacuuuagacagauguacu

SEQ ID NO: 2177446 - RNA, 19 nt, Artificial Sequence
  Description of Artificial Sequence: Synthetic oligonucleotide
  Sense strand starting at position 2804 of SEQ ID NO: 1883218
gguauagauagauguagau

SEQ ID NO: 2177447 - RNA, 19 nt, Artificial Sequence
  Description of Artificial Sequence: Synthetic oligonucleotide
  Antisense strand to SEQ ID NO: 2177446
aucuacaucuaucuauacc

SEQ ID NO: 2177448 - RNA, 19 nt, Artificial Sequence
  Description of Artificial Sequence: Synthetic oligonucleotide
  Sense strand starting at position 2810 of SEQ ID NO: 1883218
gauagauguagauguggau

SEQ ID NO: 2177449 - RNA, 19 nt, Artificial Sequence
  Description of Artificial Sequence: Synthetic oligonucleotide
  Antisense strand to SEQ ID NO: 2177448
auccacaucuacaucuauc

SEQ ID NO: 2177450 - RNA, 19 nt, Artificial Sequence
  Description of Artificial Sequence: Synthetic oligonucleotide
  Sense strand starting at position 2965 of SEQ ID NO: 1883218
ucugaaaucguuugaacaa

SEQ ID NO: 2177451 - RNA, 19 nt, Artificial Sequence
  Description of Artificial Sequence: Synthetic oligonucleotide
  Antisense strand to SEQ ID NO: 2177450
uuguucaaacgauuucaga

SEQ ID NO: 2177452 - RNA, 19 nt, Artificial Sequence
  Description of Artificial Sequence: Synthetic oligonucleotide
  Sense strand starting at position 3235 of SEQ ID NO: 1883218
agaggagccugguugauua

SEQ ID NO: 2177453 - RNA, 19 nt, Artificial Sequence
  Description of Artificial Sequence: Synthetic oligonucleotide
  Antisense strand to SEQ ID NO: 2177452
uaaucaaccaggcuccucu

SEQ ID NO: 2177454 - RNA, 19 nt, Artificial Sequence
  Description of Artificial Sequence: Synthetic oligonucleotide
  Sense strand starting at position 3341 of SEQ ID NO: 1883218
ggcuaagauguggacuuau

SEQ ID NO: 2177455 - RNA, 19 nt, Artificial Sequence
  Description of Artificial Sequence: Synthetic oligonucleotide
  Antisense strand to SEQ ID NO: 2177454
auaaguccacaucuuagcc

SEQ ID NO: 2177456 - RNA, 19 nt, Artificial Sequence
  Description of Artificial Sequence: Synthetic oligonucleotide
  Sense strand starting at position 3505 of SEQ ID NO: 1883218
cucauaagacuguggaauu

SEQ ID NO: 2177457 - RNA, 19 nt, Artificial Sequence
  Description of Artificial Sequence: Synthetic oligonucleotide
  Antisense strand to SEQ ID NO: 2177456
aauuccacagucuuaugag

SEQ ID NO: 2177458 - RNA, 19 nt, Artificial Sequence
  Description of Artificial Sequence: Synthetic oligonucleotide
  Sense strand starting at position 3537 of SEQ ID NO: 1883218
uguucuguccucuagaaua

SEQ ID NO: 2177459 - RNA, 19 nt, Artificial Sequence
  Description of Artificial Sequence: Synthetic oligonucleotide
  Antisense strand to SEQ ID NO: 2177458
uauucuagaggacagaaca

SEQ ID NO: 2177460 - RNA, 19 nt, Artificial Sequence
  Description of Artificial Sequence: Synthetic oligonucleotide
  Sense strand starting at position 3539 of SEQ ID NO: 1883218
uucuguccucuagaauaag

SEQ ID NO: 2177461 - RNA, 19 nt, Artificial Sequence
  Description of Artificial Sequence: Synthetic oligonucleotide
  Antisense strand to SEQ ID NO: 2177460
cuuauucuagaggacagaa

SEQ ID NO: 2177462 - RNA, 19 nt, Artificial Sequence
  Description of Artificial Sequence: Synthetic oligonucleotide
  Sense strand starting at position 3564 of SEQ ID NO: 1883218
ccaauuaaaucagugguua

SEQ ID NO: 2177463 - RNA, 19 nt, Artificial Sequence
  Description of Artificial Sequence: Synthetic oligonucleotide
  Antisense strand to SEQ ID NO: 2177462
uaaccacugauuuaauugg

SEQ ID NO: 2177464 - RNA, 19 nt, Artificial Sequence
  Description of Artificial Sequence: Synthetic oligonucleotide
  Sense strand starting at position 3565 of SEQ ID NO: 1883218
caauuaaaucagugguuag

SEQ ID NO: 2177465 - RNA, 19 nt, Artificial Sequence
  Description of Artificial Sequence: Synthetic oligonucleotide
  Antisense strand to SEQ ID NO: 2177464
cuaaccacugauuuaauug

SEQ ID NO: 2177466 - RNA, 19 nt, Artificial Sequence
  Description of Artificial Sequence: Synthetic oligonucleotide
  Sense strand starting at position 3569 of SEQ ID NO: 1883218
uaaaucagugguuaguaua

SEQ ID NO: 2177467 - RNA, 19 nt, Artificial Sequence
  Description of Artificial Sequence: Synthetic oligonucleotide
  Antisense strand to SEQ ID NO: 2177466
uauacuaaccacugauuua

SEQ ID NO: 2177468 - RNA, 19 nt, Artificial Sequence
  Description of Artificial Sequence: Synthetic oligonucleotide
  Sense strand starting at position 3625 of SEQ ID NO: 1883218
caagaugaaggcugucauu

SEQ ID NO: 2177469 - RNA, 19 nt, Artificial Sequence
  Description of Artificial Sequence: Synthetic oligonucleotide
  Antisense strand to SEQ ID NO: 2177468
aaugacagccuucaucuug

SEQ ID NO: 2177470 - RNA, 19 nt, Artificial Sequence
  Description of Artificial Sequence: Synthetic oligonucleotide
  Sense strand starting at position 3921 of SEQ ID NO: 1883218
ucccacuguuguguauuua

SEQ ID NO: 2177471 - RNA, 19 nt, Artificial Sequence
  Description of Artificial Sequence: Synthetic oligonucleotide
  Antisense strand to SEQ ID NO: 2177470
uaaauacacaacaguggga

SEQ ID NO: 2177472 - RNA, 19 nt, Artificial Sequence
  Description of Artificial Sequence: Synthetic oligonucleotide
  Sense strand starting at position 3925 of SEQ ID NO: 1883218
acuguuguguauuuaucua

SEQ ID NO: 2177473 - RNA, 19 nt, Artificial Sequence
  Description of Artificial Sequence: Synthetic oligonucleotide
  Antisense strand to SEQ ID NO: 2177472
uagauaaauacacaacagu

SEQ ID NO: 2177474 - RNA, 19 nt, Artificial Sequence
  Description of Artificial Sequence: Synthetic oligonucleotide
  Sense strand starting at position 196 of SEQ ID NO: 1883220
aaugaugccugagugauga

SEQ ID NO: 2177475 - RNA, 19 nt, Artificial Sequence
  Description of Artificial Sequence: Synthetic oligonucleotide
  Antisense strand to SEQ ID NO: 2177474
ucaucacucaggcaucauu

SEQ ID NO: 2177476 - RNA, 19 nt, Artificial Sequence
  Description of Artificial Sequence: Synthetic oligonucleotide
  Sense strand starting at position 465 of SEQ ID NO: 1883220
gccaaacucauacggguuu

SEQ ID NO: 2177477 - RNA, 19 nt, Artificial Sequence
  Description of Artificial Sequence: Synthetic oligonucleotide
  Antisense strand to SEQ ID NO: 2177476
aaacccguaugaguuuggc

SEQ ID NO: 2177478 - RNA, 19 nt, Artificial Sequence
  Description of Artificial Sequence: Synthetic oligonucleotide
  Sense strand starting at position 482 of SEQ ID NO: 1883220
uuuauuacucagugagcug

SEQ ID NO: 2177479 - RNA, 19 nt, Artificial Sequence
  Description of Artificial Sequence: Synthetic oligonucleotide
  Antisense strand to SEQ ID NO: 2177478
cagcucacugaguaauaaa

SEQ ID NO: 2177480 - RNA, 19 nt, Artificial Sequence
  Description of Artificial Sequence: Synthetic oligonucleotide
  Sense strand starting at position 674 of SEQ ID NO: 1883220
uuuagucuuguuuggaaug

SEQ ID NO: 2177481 - RNA, 19 nt, Artificial Sequence
  Description of Artificial Sequence: Synthetic oligonucleotide
  Antisense strand to SEQ ID NO: 2177480
cauuccaaacaagacuaaa

SEQ ID NO: 2177482 - RNA, 19 nt, Artificial Sequence
  Description of Artificial Sequence: Synthetic oligonucleotide
  Sense strand starting at position 679 of SEQ ID NO: 1883220
ucuuguuuggaauggaaca

SEQ ID NO: 2177483 - RNA, 19 nt, Artificial Sequence
  Description of Artificial Sequence: Synthetic oligonucleotide
  Antisense strand to SEQ ID NO: 2177482
uguuccauuccaaacaaga

SEQ ID NO: 2177484 - RNA, 19 nt, Artificial Sequence
  Description of Artificial Sequence: Synthetic oligonucleotide
  Sense strand starting at position 680 of SEQ ID NO: 1883220
cuuguuuggaauggaacau

SEQ ID NO: 2177485 - RNA, 19 nt, Artificial Sequence
  Description of Artificial Sequence: Synthetic oligonucleotide
  Antisense strand to SEQ ID NO: 2177484
auguuccauuccaaacaag

SEQ ID NO: 2177486 - RNA, 19 nt, Artificial Sequence
  Description of Artificial Sequence: Synthetic oligonucleotide
  Sense strand starting at position 726 of SEQ ID NO: 1883220
uuuacuuugaauggacgau

SEQ ID NO: 2177487 - RNA, 19 nt, Artificial Sequence
  Description of Artificial Sequence: Synthetic oligonucleotide
  Antisense strand to SEQ ID NO: 2177486
aucguccauucaaaguaaa

SEQ ID NO: 2177488 - RNA, 19 nt, Artificial Sequence
  Description of Artificial Sequence: Synthetic oligonucleotide
  Sense strand starting at position 931 of SEQ ID NO: 1883220
acaacauccagugaugugu

SEQ ID NO: 2177489 - RNA, 19 nt, Artificial Sequence
  Description of Artificial Sequence: Synthetic oligonucleotide
  Antisense strand to SEQ ID NO: 2177488
acacaucacuggauguugu

SEQ ID NO: 2177490 - RNA, 19 nt, Artificial Sequence
  Description of Artificial Sequence: Synthetic oligonucleotide
  Sense strand starting at position 1030 of SEQ ID NO: 1883220
gccuaauaaguuugggucu

SEQ ID NO: 2177491 - RNA, 19 nt, Artificial Sequence
  Description of Artificial Sequence: Synthetic oligonucleotide
  Antisense strand to SEQ ID NO: 2177490
agacccaaacuuauuaggc

SEQ ID NO: 2177492 - RNA, 19 nt, Artificial Sequence
  Description of Artificial Sequence: Synthetic oligonucleotide
  Sense strand starting at position 1095 of SEQ ID NO: 1883220
uggagauaauaucauuaag

SEQ ID NO: 2177493 - RNA, 19 nt, Artificial Sequence
  Description of Artificial Sequence: Synthetic oligonucleotide
  Antisense strand to SEQ ID NO: 2177492
cuuaaugauauuaucucca

SEQ ID NO: 2177494 - RNA, 19 nt, Artificial Sequence
  Description of Artificial Sequence: Synthetic oligonucleotide
  Sense strand starting at position 1112 of SEQ ID NO: 1883220
aguuacagauguuauuuga

SEQ ID NO: 2177495 - RNA, 19 nt, Artificial Sequence
  Description of Artificial Sequence: Synthetic oligonucleotide
  Antisense strand to SEQ ID NO: 2177494
ucaaauaacaucuguaacu

SEQ ID NO: 2177496 - RNA, 19 nt, Artificial Sequence
  Description of Artificial Sequence: Synthetic oligonucleotide
  Sense strand starting at position 1309 of SEQ ID NO: 1883220
cugaguucuacuggaaaga

SEQ ID NO: 2177497 - RNA, 19 nt, Artificial Sequence
  Description of Artificial Sequence: Synthetic oligonucleotide
  Antisense strand to SEQ ID NO: 2177496
ucuuuccaguagaacucag

SEQ ID NO: 2177498 - RNA, 19 nt, Artificial Sequence
  Description of Artificial Sequence: Synthetic oligonucleotide
  Sense strand starting at position 1360 of SEQ ID NO: 1883220
uuucuaagugucugguaau

SEQ ID NO: 2177499 - RNA, 19 nt, Artificial Sequence
  Description of Artificial Sequence: Synthetic oligonucleotide
  Antisense strand to SEQ ID NO: 2177498
auuaccagacacuuagaaa

SEQ ID NO: 2177500 - RNA, 19 nt, Artificial Sequence
  Description of Artificial Sequence: Synthetic oligonucleotide
  Sense strand starting at position 1459 of SEQ ID NO: 1883220
acuuauccugcgcagacau

SEQ ID NO: 2177501 - RNA, 19 nt, Artificial Sequence
  Description of Artificial Sequence: Synthetic oligonucleotide
  Antisense strand to SEQ ID NO: 2177500
augucugcgcaggauaagu

SEQ ID NO: 2177502 - RNA, 19 nt, Artificial Sequence
  Description of Artificial Sequence: Synthetic oligonucleotide
  Sense strand starting at position 1648 of SEQ ID NO: 1883220
guuuguuccaaggaguaca

SEQ ID NO: 2177503 - RNA, 19 nt, Artificial Sequence
  Description of Artificial Sequence: Synthetic oligonucleotide
  Antisense strand to SEQ ID NO: 2177502
uguacuccuuggaacaaac

SEQ ID NO: 2177504 - RNA, 19 nt, Artificial Sequence
  Description of Artificial Sequence: Synthetic oligonucleotide
  Sense strand starting at position 3134 of SEQ ID NO: 1883220
caaauuauccugcgggcaa

SEQ ID NO: 2177505 - RNA, 19 nt, Artificial Sequence
  Description of Artificial Sequence: Synthetic oligonucleotide
  Antisense strand to SEQ ID NO: 2177504
uugcccgcaggauaauuug

SEQ ID NO: 2177506 - RNA, 19 nt, Artificial Sequence
  Description of Artificial Sequence: Synthetic oligonucleotide
  Sense strand starting at position 3178 of SEQ ID NO: 1883220
auggcaagucucggauuau

SEQ ID NO: 2177507 - RNA, 19 nt, Artificial Sequence
  Description of Artificial Sequence: Synthetic oligonucleotide
  Antisense strand to SEQ ID NO: 2177506
auaauccgagacuugccau

SEQ ID NO: 2177508 - RNA, 19 nt, Artificial Sequence
  Description of Artificial Sequence: Synthetic oligonucleotide
  Sense strand starting at position 3239 of SEQ ID NO: 1883220
ugcaaauucccagaaugcu

SEQ ID NO: 2177509 - RNA, 19 nt, Artificial Sequence
  Description of Artificial Sequence: Synthetic oligonucleotide
  Antisense strand to SEQ ID NO: 2177508
agcauucugggaauuugca

SEQ ID NO: 2177510 - RNA, 19 nt, Artificial Sequence
  Description of Artificial Sequence: Synthetic oligonucleotide
  Sense strand starting at position 3315 of SEQ ID NO: 1883220
uucgguuugagacaaucgu

SEQ ID NO: 2177511 - RNA, 19 nt, Artificial Sequence
  Description of Artificial Sequence: Synthetic oligonucleotide
  Antisense strand to SEQ ID NO: 2177510
acgauugucucaaaccgaa

SEQ ID NO: 2177512 - RNA, 19 nt, Artificial Sequence
  Description of Artificial Sequence: Synthetic oligonucleotide
  Sense strand starting at position 3319 of SEQ ID NO: 1883220
guuugagacaaucguuucu

SEQ ID NO: 2177513 - RNA, 19 nt, Artificial Sequence
  Description of Artificial Sequence: Synthetic oligonucleotide
  Antisense strand to SEQ ID NO: 2177512
agaaacgauugucucaaac

SEQ ID NO: 2177514 - RNA, 19 nt, Artificial Sequence
  Description of Artificial Sequence: Synthetic oligonucleotide
  Sense strand starting at position 3321 of SEQ ID NO: 1883220
uugagacaaucguuucucu

SEQ ID NO: 2177515 - RNA, 19 nt, Artificial Sequence
  Description of Artificial Sequence: Synthetic oligonucleotide
  Antisense strand to SEQ ID NO: 2177514
agagaaacgauugucucaa

SEQ ID NO: 2177516 - RNA, 19 nt, Artificial Sequence
  Description of Artificial Sequence: Synthetic oligonucleotide
  Sense strand starting at position 3324 of SEQ ID NO: 1883220
agacaaucguuucucucua

SEQ ID NO: 2177517 - RNA, 19 nt, Artificial Sequence
  Description of Artificial Sequence: Synthetic oligonucleotide
  Antisense strand to SEQ ID NO: 2177516
uagagagaaacgauugucu

SEQ ID NO: 2177518 - RNA, 19 nt, Artificial Sequence
  Description of Artificial Sequence: Synthetic oligonucleotide
  Sense strand starting at position 3378 of SEQ ID NO: 1883220
auucguggucucgggaaga

SEQ ID NO: 2177519 - RNA, 19 nt, Artificial Sequence
  Description of Artificial Sequence: Synthetic oligonucleotide
  Antisense strand to SEQ ID NO: 2177518
ucuucccgagaccacgaau

SEQ ID NO: 2177520 - RNA, 19 nt, Artificial Sequence
  Description of Artificial Sequence: Synthetic oligonucleotide
  Sense strand starting at position 3452 of SEQ ID NO: 1883220
cuuaaaucggacuggaacu

SEQ ID NO: 2177521 - RNA, 19 nt, Artificial Sequence
  Description of Artificial Sequence: Synthetic oligonucleotide
  Antisense strand to SEQ ID NO: 2177520
aguuccaguccgauuuaag

SEQ ID NO: 2177522 - RNA, 19 nt, Artificial Sequence
  Description of Artificial Sequence: Synthetic oligonucleotide
  Sense strand starting at position 3472 of SEQ ID NO: 1883220
acuugaugggauuauucgu

SEQ ID NO: 2177523 - RNA, 19 nt, Artificial Sequence
  Description of Artificial Sequence: Synthetic oligonucleotide
  Antisense strand to SEQ ID NO: 2177522
acgaauaaucccaucaagu

SEQ ID NO: 2177524 - RNA, 19 nt, Artificial Sequence
  Description of Artificial Sequence: Synthetic oligonucleotide
  Sense strand starting at position 3477 of SEQ ID NO: 1883220
augggauuauucguuaaau

SEQ ID NO: 2177525 - RNA, 19 nt, Artificial Sequence
  Description of Artificial Sequence: Synthetic oligonucleotide
  Antisense strand to SEQ ID NO: 2177524
auuuaacgaauaaucccau

SEQ ID NO: 2177526 - RNA, 19 nt, Artificial Sequence
  Description of Artificial Sequence: Synthetic oligonucleotide
  Sense strand starting at position 3478 of SEQ ID NO: 1883220
ugggauuauucguuaaaug

SEQ ID NO: 2177527 - RNA, 19 nt, Artificial Sequence
  Description of Artificial Sequence: Synthetic oligonucleotide
  Antisense strand to SEQ ID NO: 2177526
cauuuaacgaauaauccca

SEQ ID NO: 2177528 - RNA, 19 nt, Artificial Sequence
  Description of Artificial Sequence: Synthetic oligonucleotide
  Sense strand starting at position 3479 of SEQ ID NO: 1883220
gggauuauucguuaaaugc

SEQ ID NO: 2177529 - RNA, 19 nt, Artificial Sequence
  Description of Artificial Sequence: Synthetic oligonucleotide
  Antisense strand to SEQ ID NO: 2177528
gcauuuaacgaauaauccc

SEQ ID NO: 2177530 - RNA, 19 nt, Artificial Sequence
  Description of Artificial Sequence: Synthetic oligonucleotide
  Sense strand starting at position 3488 of SEQ ID NO: 1883220
cguuaaaugcgaguguuug

SEQ ID NO: 2177531 - RNA, 19 nt, Artificial Sequence
  Description of Artificial Sequence: Synthetic oligonucleotide
  Antisense strand to SEQ ID NO: 2177530
caaacacucgcauuuaacg

SEQ ID NO: 2177532 - RNA, 19 nt, Artificial Sequence
  Description of Artificial Sequence: Synthetic oligonucleotide
  Sense strand starting at position 3529 of SEQ ID NO: 1883220
gcucgugagaugggaagaa

SEQ ID NO: 2177533 - RNA, 19 nt, Artificial Sequence
  Description of Artificial Sequence: Synthetic oligonucleotide
  Antisense strand to SEQ ID NO: 2177532
uucuucccaucucacgagc

SEQ ID NO: 2177534 - RNA, 19 nt, Artificial Sequence
  Description of Artificial Sequence: Synthetic oligonucleotide
  Sense strand starting at position 3542 of SEQ ID NO: 1883220
gaagaaguuuccgcuggau

SEQ ID NO: 2177535 - RNA, 19 nt, Artificial Sequence
  Description of Artificial Sequence: Synthetic oligonucleotide
  Antisense strand to SEQ ID NO: 2177534
auccagcggaaacuucuuc

SEQ ID NO: 2177536 - RNA, 19 nt, Artificial Sequence
  Description of Artificial Sequence: Synthetic oligonucleotide
  Sense strand starting at position 3544 of SEQ ID NO: 1883220
agaaguuuccgcuggauuc

SEQ ID NO: 2177537 - RNA, 19 nt, Artificial Sequence
  Description of Artificial Sequence: Synthetic oligonucleotide
  Antisense strand to SEQ ID NO: 2177536
gaauccagcggaaacuucu

SEQ ID NO: 2177538 - RNA, 19 nt, Artificial Sequence
  Description of Artificial Sequence: Synthetic oligonucleotide
  Sense strand starting at position 3585 of SEQ ID NO: 1883220
uggaacugugaucgugaca

SEQ ID NO: 2177539 - RNA, 19 nt, Artificial Sequence
  Description of Artificial Sequence: Synthetic oligonucleotide
  Antisense strand to SEQ ID NO: 2177538
ugucacgaucacaguucca

SEQ ID NO: 2177540 - RNA, 19 nt, Artificial Sequence
  Description of Artificial Sequence: Synthetic oligonucleotide
  Sense strand starting at position 3588 of SEQ ID NO: 1883220
aacugugaucgugacaggu

SEQ ID NO: 2177541 - RNA, 19 nt, Artificial Sequence
  Description of Artificial Sequence: Synthetic oligonucleotide
  Antisense strand to SEQ ID NO: 2177540
accugucacgaucacaguu

SEQ ID NO: 2177542 - RNA, 19 nt, Artificial Sequence
  Description of Artificial Sequence: Synthetic oligonucleotide
  Sense strand starting at position 3690 of SEQ ID NO: 1883220
gcuuccuuucgugacgaga

SEQ ID NO: 2177543 - RNA, 19 nt, Artificial Sequence
  Description of Artificial Sequence: Synthetic oligonucleotide
  Antisense strand to SEQ ID NO: 2177542
ucucgucacgaaaggaagc

SEQ ID NO: 2177544 - RNA, 19 nt, Artificial Sequence
  Description of Artificial Sequence: Synthetic oligonucleotide
  Sense strand starting at position 3732 of SEQ ID NO: 1883220
gcccuagcucuguagacua

SEQ ID NO: 2177545 - RNA, 19 nt, Artificial Sequence
  Description of Artificial Sequence: Synthetic oligonucleotide
  Antisense strand to SEQ ID NO: 2177544
uagucuacagagcuagggc

SEQ ID NO: 2177546 - RNA, 19 nt, Artificial Sequence
  Description of Artificial Sequence: Synthetic oligonucleotide
  Sense strand starting at position 3884 of SEQ ID NO: 1883220
guuagaacgcgcucuacau

SEQ ID NO: 2177547 - RNA, 19 nt, Artificial Sequence
  Description of Artificial Sequence: Synthetic oligonucleotide
  Antisense strand to SEQ ID NO: 2177546
auguagagcgcguucuaac

SEQ ID NO: 2177548 - RNA, 19 nt, Artificial Sequence
  Description of Artificial Sequence: Synthetic oligonucleotide
  Sense strand starting at position 3905 of SEQ ID NO: 1883220
gcuuuaaagacagaggucu

SEQ ID NO: 2177549 - RNA, 19 nt, Artificial Sequence
  Description of Artificial Sequence: Synthetic oligonucleotide
  Antisense strand to SEQ ID NO: 2177548
agaccucugucuuuaaagc

SEQ ID NO: 2177550 - RNA, 19 nt, Artificial Sequence
  Description of Artificial Sequence: Synthetic oligonucleotide
  Sense strand starting at position 3913 of SEQ ID NO: 1883220
gacagaggucuagacguga

SEQ ID NO: 2177551 - RNA, 19 nt, Artificial Sequence
  Description of Artificial Sequence: Synthetic oligonucleotide
  Antisense strand to SEQ ID NO: 2177550
ucacgucuagaccucuguc

SEQ ID NO: 2177552 - RNA, 19 nt, Artificial Sequence
  Description of Artificial Sequence: Synthetic oligonucleotide
  Sense strand starting at position 3917 of SEQ ID NO: 1883220
gaggucuagacgugagauc

SEQ ID NO: 2177553 - RNA, 19 nt, Artificial Sequence
  Description of Artificial Sequence: Synthetic oligonucleotide
  Antisense strand to SEQ ID NO: 2177552
gaucucacgucuagaccuc

SEQ ID NO: 2177554 - RNA, 19 nt, Artificial Sequence
  Description of Artificial Sequence: Synthetic oligonucleotide
  Sense strand starting at position 37 of SEQ ID NO: 1883219
gccuaauaaguuugggucu

SEQ ID NO: 2177555 - RNA, 19 nt, Artificial Sequence
  Description of Artificial Sequence: Synthetic oligonucleotide
  Antisense strand to SEQ ID NO: 2177554
agacccaaacuuauuaggc

SEQ ID NO: 2177556 - RNA, 19 nt, Artificial Sequence
  Description of Artificial Sequence: Synthetic oligonucleotide
  Sense strand starting at position 102 of SEQ ID NO: 1883219
uggagauaauaucauuaag

SEQ ID NO: 2177557 - RNA, 19 nt, Artificial Sequence
  Description of Artificial Sequence: Synthetic oligonucleotide
  Antisense strand to SEQ ID NO: 2177556
cuuaaugauauuaucucca

SEQ ID NO: 2177558 - RNA, 19 nt, Artificial Sequence
  Description of Artificial Sequence: Synthetic oligonucleotide
  Sense strand starting at position 119 of SEQ ID NO: 1883219
aguuacagauguuauuuga

SEQ ID NO: 2177559 - RNA, 19 nt, Artificial Sequence
  Description of Artificial Sequence: Synthetic oligonucleotide
  Antisense strand to SEQ ID NO: 2177558
ucaaauaacaucuguaacu

SEQ ID NO: 2177560 - RNA, 19 nt, Artificial Sequence
  Description of Artificial Sequence: Synthetic oligonucleotide
  Sense strand starting at position 211 of SEQ ID NO: 1883219
gagguaacuugugcauugu

SEQ ID NO: 2177561 - RNA, 19 nt, Artificial Sequence
  Description of Artificial Sequence: Synthetic oligonucleotide
  Antisense strand to SEQ ID NO: 2177560
acaaugcacaaguuaccuc

SEQ ID NO: 2177562 - RNA, 19 nt, Artificial Sequence
  Description of Artificial Sequence: Synthetic oligonucleotide
  Sense strand starting at position 316 of SEQ ID NO: 1883219
cugaguucuacuggaaaga

SEQ ID NO: 2177563 - RNA, 19 nt, Artificial Sequence
  Description of Artificial Sequence: Synthetic oligonucleotide
  Antisense strand to SEQ ID NO: 2177562
ucuuuccaguagaacucag

SEQ ID NO: 2177564 - RNA, 19 nt, Artificial Sequence
  Description of Artificial Sequence: Synthetic oligonucleotide
  Sense strand starting at position 366 of SEQ ID NO: 1883219
guuucuaagugucugguaa

SEQ ID NO: 2177565 - RNA, 19 nt, Artificial Sequence
  Description of Artificial Sequence: Synthetic oligonucleotide
  Antisense strand to SEQ ID NO: 2177564
uuaccagacacuuagaaac

SEQ ID NO: 2177566 - RNA, 19 nt, Artificial Sequence
  Description of Artificial Sequence: Synthetic oligonucleotide
  Sense strand starting at position 367 of SEQ ID NO: 1883219
uuucuaagugucugguaau

SEQ ID NO: 2177567 - RNA, 19 nt, Artificial Sequence
  Description of Artificial Sequence: Synthetic oligonucleotide
  Antisense strand to SEQ ID NO: 2177566
auuaccagacacuuagaaa

SEQ ID NO: 2177568 - RNA, 19 nt, Artificial Sequence
  Description of Artificial Sequence: Synthetic oligonucleotide
  Sense strand starting at position 377 of SEQ ID NO: 1883219
ucugguaaucuuugccacu

SEQ ID NO: 2177569 - RNA, 19 nt, Artificial Sequence
  Description of Artificial Sequence: Synthetic oligonucleotide
  Antisense strand to SEQ ID NO: 2177568
aguggcaaagauuaccaga

SEQ ID NO: 2177570 - RNA, 19 nt, Artificial Sequence
  Description of Artificial Sequence: Synthetic oligonucleotide
  Sense strand starting at position 465 of SEQ ID NO: 1883219
cacuuauccugcgcagaca

SEQ ID NO: 2177571 - RNA, 19 nt, Artificial Sequence
  Description of Artificial Sequence: Synthetic oligonucleotide
  Antisense strand to SEQ ID NO: 2177570
ugucugcgcaggauaagug

SEQ ID NO: 2177572 - RNA, 19 nt, Artificial Sequence
  Description of Artificial Sequence: Synthetic oligonucleotide
  Sense strand starting at position 466 of SEQ ID NO: 1883219
acuuauccugcgcagacau

SEQ ID NO: 2177573 - RNA, 19 nt, Artificial Sequence
  Description of Artificial Sequence: Synthetic oligonucleotide
  Antisense strand to SEQ ID NO: 2177572
augucugcgcaggauaagu

SEQ ID NO: 2177574 - RNA, 19 nt, Artificial Sequence
  Description of Artificial Sequence: Synthetic oligonucleotide
  Sense strand starting at position 655 of SEQ ID NO: 1883219
guuuguuccaaggaguaca

SEQ ID NO: 2177575 - RNA, 19 nt, Artificial Sequence
  Description of Artificial Sequence: Synthetic oligonucleotide
  Antisense strand to SEQ ID NO: 2177574
uguacuccuuggaacaaac

SEQ ID NO: 2177576 - RNA, 19 nt, Artificial Sequence
  Description of Artificial Sequence: Synthetic oligonucleotide
  Sense strand starting at position 2141 of SEQ ID NO: 1883219
caaauuauccugcgggcaa

SEQ ID NO: 2177577 - RNA, 19 nt, Artificial Sequence
  Description of Artificial Sequence: Synthetic oligonucleotide
  Antisense strand to SEQ ID NO: 2177576
uugcccgcaggauaauuug

SEQ ID NO: 2177578 - RNA, 19 nt, Artificial Sequence
  Description of Artificial Sequence: Synthetic oligonucleotide
  Sense strand starting at position 2185 of SEQ ID NO: 1883219
auggcaagucucggauuau

SEQ ID NO: 2177579 - RNA, 19 nt, Artificial Sequence
  Description of Artificial Sequence: Synthetic oligonucleotide
  Antisense strand to SEQ ID NO: 2177578
auaauccgagacuugccau

SEQ ID NO: 2177580 - RNA, 19 nt, Artificial Sequence
  Description of Artificial Sequence: Synthetic oligonucleotide
  Sense strand starting at position 2246 of SEQ ID NO: 1883219
ugcaaauucccagaaugcu

SEQ ID NO: 2177581 - RNA, 19 nt, Artificial Sequence
  Description of Artificial Sequence: Synthetic oligonucleotide
  Antisense strand to SEQ ID NO: 2177580
agcauucugggaauuugca

SEQ ID NO: 2177582 - RNA, 19 nt, Artificial Sequence
  Description of Artificial Sequence: Synthetic oligonucleotide
  Sense strand starting at position 2322 of SEQ ID NO: 1883219
uucgguuugagacaaucgu

SEQ ID NO: 2177583 - RNA, 19 nt, Artificial Sequence
  Description of Artificial Sequence: Synthetic oligonucleotide
  Antisense strand to SEQ ID NO: 2177582
acgauugucucaaaccgaa

SEQ ID NO: 2177584 - RNA, 19 nt, Artificial Sequence
  Description of Artificial Sequence: Synthetic oligonucleotide
  Sense strand starting at position 2326 of SEQ ID NO: 1883219
guuugagacaaucguuucu

SEQ ID NO: 2177585 - RNA, 19 nt, Artificial Sequence
  Description of Artificial Sequence: Synthetic oligonucleotide
  Antisense strand to SEQ ID NO: 2177584
agaaacgauugucucaaac

SEQ ID NO: 2177586 - RNA, 19 nt, Artificial Sequence
  Description of Artificial Sequence: Synthetic oligonucleotide
  Sense strand starting at position 2328 of SEQ ID NO: 1883219
uugagacaaucguuucucu

SEQ ID NO: 2177587 - RNA, 19 nt, Artificial Sequence
  Description of Artificial Sequence: Synthetic oligonucleotide
  Antisense strand to SEQ ID NO: 2177586
agagaaacgauugucucaa

SEQ ID NO: 2177588 - RNA, 19 nt, Artificial Sequence
  Description of Artificial Sequence: Synthetic oligonucleotide
  Sense strand starting at position 2331 of SEQ ID NO: 1883219
agacaaucguuucucucua

SEQ ID NO: 2177589 - RNA, 19 nt, Artificial Sequence
  Description of Artificial Sequence: Synthetic oligonucleotide
  Antisense strand to SEQ ID NO: 2177588
uagagagaaacgauugucu

SEQ ID NO: 2177590 - RNA, 19 nt, Artificial Sequence
  Description of Artificial Sequence: Synthetic oligonucleotide
  Sense strand starting at position 2385 of SEQ ID NO: 1883219
auucguggucucgggaaga

SEQ ID NO: 2177591 - RNA, 19 nt, Artificial Sequence
  Description of Artificial Sequence: Synthetic oligonucleotide
  Antisense strand to SEQ ID NO: 2177590
ucuucccgagaccacgaau

SEQ ID NO: 2177592 - RNA, 19 nt, Artificial Sequence
  Description of Artificial Sequence: Synthetic oligonucleotide
  Sense strand starting at position 2459 of SEQ ID NO: 1883219
cuuaaaucggacuggaacu

SEQ ID NO: 2177593 - RNA, 19 nt, Artificial Sequence
  Description of Artificial Sequence: Synthetic oligonucleotide
  Antisense strand to SEQ ID NO: 2177592
aguuccaguccgauuuaag

SEQ ID NO: 2177594 - RNA, 19 nt, Artificial Sequence
  Description of Artificial Sequence: Synthetic oligonucleotide
  Sense strand starting at position 2479 of SEQ ID NO: 1883219
acuugaugggauuauucgu

SEQ ID NO: 2177595 - RNA, 19 nt, Artificial Sequence
  Description of Artificial Sequence: Synthetic oligonucleotide
  Antisense strand to SEQ ID NO: 2177594
acgaauaaucccaucaagu

SEQ ID NO: 2177596 - RNA, 19 nt, Artificial Sequence
  Description of Artificial Sequence: Synthetic oligonucleotide
  Sense strand starting at position 2484 of SEQ ID NO: 1883219
augggauuauucguuaaau

SEQ ID NO: 2177597 - RNA, 19 nt, Artificial Sequence
  Description of Artificial Sequence: Synthetic oligonucleotide
  Antisense strand to SEQ ID NO: 2177596
auuuaacgaauaaucccau

SEQ ID NO: 2177598 - RNA, 19 nt, Artificial Sequence
  Description of Artificial Sequence: Synthetic oligonucleotide
  Sense strand starting at position 2485 of SEQ ID NO: 1883219
ugggauuauucguuaaaug

SEQ ID NO: 2177599 - RNA, 19 nt, Artificial Sequence
  Description of Artificial Sequence: Synthetic oligonucleotide
  Antisense strand to SEQ ID NO: 2177598
cauuuaacgaauaauccca

SEQ ID NO: 2177600 - RNA, 19 nt, Artificial Sequence
  Description of Artificial Sequence: Synthetic oligonucleotide
  Sense strand starting at position 2486 of SEQ ID NO: 1883219
gggauuauucguuaaaugc

SEQ ID NO: 2177601 - RNA, 19 nt, Artificial Sequence
  Description of Artificial Sequence: Synthetic oligonucleotide
  Antisense strand to SEQ ID NO: 2177600
gcauuuaacgaauaauccc

SEQ ID NO: 2177602 - RNA, 19 nt, Artificial Sequence
  Description of Artificial Sequence: Synthetic oligonucleotide
  Sense strand starting at position 2495 of SEQ ID NO: 1883219
cguuaaaugcgaguguuug

SEQ ID NO: 2177603 - RNA, 19 nt, Artificial Sequence
  Description of Artificial Sequence: Synthetic oligonucleotide
  Antisense strand to SEQ ID NO: 2177602
caaacacucgcauuuaacg

SEQ ID NO: 2177604 - RNA, 19 nt, Artificial Sequence
  Description of Artificial Sequence: Synthetic oligonucleotide
  Sense strand starting at position 2536 of SEQ ID NO: 1883219
gcucgugagaugggaagaa

SEQ ID NO: 2177605 - RNA, 19 nt, Artificial Sequence
  Description of Artificial Sequence: Synthetic oligonucleotide
  Antisense strand to SEQ ID NO: 2177604
uucuucccaucucacgagc

SEQ ID NO: 2177606 - RNA, 19 nt, Artificial Sequence
  Description of Artificial Sequence: Synthetic oligonucleotide
  Sense strand starting at position 2549 of SEQ ID NO: 1883219
gaagaaguuuccgcuggau

SEQ ID NO: 2177607 - RNA, 19 nt, Artificial Sequence
  Description of Artificial Sequence: Synthetic oligonucleotide
  Antisense strand to SEQ ID NO: 2177606
auccagcggaaacuucuuc

SEQ ID NO: 2177608 - RNA, 19 nt, Artificial Sequence
  Description of Artificial Sequence: Synthetic oligonucleotide
  Sense strand starting at position 2551 of SEQ ID NO: 1883219
agaaguuuccgcuggauuc

SEQ ID NO: 2177609 - RNA, 19 nt, Artificial Sequence
  Description of Artificial Sequence: Synthetic oligonucleotide
  Antisense strand to SEQ ID NO: 2177608
gaauccagcggaaacuucu

SEQ ID NO: 2177610 - RNA, 19 nt, Artificial Sequence
  Description of Artificial Sequence: Synthetic oligonucleotide
  Sense strand starting at position 2592 of SEQ ID NO: 1883219
uggaacugugaucgugaca

SEQ ID NO: 2177611 - RNA, 19 nt, Artificial Sequence
  Description of Artificial Sequence: Synthetic oligonucleotide
  Antisense strand to SEQ ID NO: 2177610
ugucacgaucacaguucca

SEQ ID NO: 2177612 - RNA, 19 nt, Artificial Sequence
  Description of Artificial Sequence: Synthetic oligonucleotide
  Sense strand starting at position 2595 of SEQ ID NO: 1883219
aacugugaucgugacaggu

SEQ ID NO: 2177613 - RNA, 19 nt, Artificial Sequence
  Description of Artificial Sequence: Synthetic oligonucleotide
  Antisense strand to SEQ ID NO: 2177612
accugucacgaucacaguu

SEQ ID NO: 2177614 - RNA, 19 nt, Artificial Sequence
  Description of Artificial Sequence: Synthetic oligonucleotide
  Sense strand starting at position 2697 of SEQ ID NO: 1883219
gcuuccuuucgugacgaga

SEQ ID NO: 2177615 - RNA, 19 nt, Artificial Sequence
  Description of Artificial Sequence: Synthetic oligonucleotide
  Antisense strand to SEQ ID NO: 2177614
ucucgucacgaaaggaagc

SEQ ID NO: 2177616 - RNA, 19 nt, Artificial Sequence
  Description of Artificial Sequence: Synthetic oligonucleotide
  Sense strand starting at position 2739 of SEQ ID NO: 1883219
gcccuagcucuguagacua

SEQ ID NO: 2177617 - RNA, 19 nt, Artificial Sequence
  Description of Artificial Sequence: Synthetic oligonucleotide
  Antisense strand to SEQ ID NO: 2177616
uagucuacagagcuagggc

SEQ ID NO: 2177618 - RNA, 19 nt, Artificial Sequence
  Description of Artificial Sequence: Synthetic oligonucleotide
  Sense strand starting at position 2891 of SEQ ID NO: 1883219
guuagaacgcgcucuacau

SEQ ID NO: 2177619 - RNA, 19 nt, Artificial Sequence
  Description of Artificial Sequence: Synthetic oligonucleotide
  Antisense strand to SEQ ID NO: 2177618
auguagagcgcguucuaac

SEQ ID NO: 2177620 - RNA, 19 nt, Artificial Sequence
  Description of Artificial Sequence: Synthetic oligonucleotide
  Sense strand starting at position 2912 of SEQ ID NO: 1883219
gcuuuaaagacagaggucu

SEQ ID NO: 2177621 - RNA, 19 nt, Artificial Sequence
  Description of Artificial Sequence: Synthetic oligonucleotide
  Antisense strand to SEQ ID NO: 2177620
agaccucugucuuuaaagc

SEQ ID NO: 2177622 - RNA, 19 nt, Artificial Sequence
  Description of Artificial Sequence: Synthetic oligonucleotide
  Sense strand starting at position 2920 of SEQ ID NO: 1883219
gacagaggucuagacguga

SEQ ID NO: 2177623 - RNA, 19 nt, Artificial Sequence
  Description of Artificial Sequence: Synthetic oligonucleotide
  Antisense strand to SEQ ID NO: 2177622
ucacgucuagaccucuguc

SEQ ID NO: 2177624 - RNA, 19 nt, Artificial Sequence
  Description of Artificial Sequence: Synthetic oligonucleotide
  Sense strand starting at position 2924 of SEQ ID NO: 1883219
gaggucuagacgugagauc

SEQ ID NO: 2177625 - RNA, 19 nt, Artificial Sequence
  Description of Artificial Sequence: Synthetic oligonucleotide
  Antisense strand to SEQ ID NO: 2177624
gaucucacgucuagaccuc

SEQ ID NO: 2177626 - RNA, 19 nt, Artificial Sequence
  Description of Artificial Sequence: Synthetic oligonucleotide
  Sense strand starting at position 3451 of SEQ ID NO: 1883219
gugauccugcgauagggaa

SEQ ID NO: 2177627 - RNA, 19 nt, Artificial Sequence
  Description of Artificial Sequence: Synthetic oligonucleotide
  Antisense strand to SEQ ID NO: 2177626
uucccuaucgcaggaucac

SEQ ID NO: 2177628 - RNA, 19 nt, Artificial Sequence
  Description of Artificial Sequence: Synthetic oligonucleotide
  Sense strand starting at position 3619 of SEQ ID NO: 1883219
ggcuguagaaguuaacuuu

SEQ ID NO: 2177629 - RNA, 19 nt, Artificial Sequence
  Description of Artificial Sequence: Synthetic oligonucleotide
  Antisense strand to SEQ ID NO: 2177628
aaaguuaacuucuacagcc

SEQ ID NO: 2177630 - RNA, 19 nt, Artificial Sequence
  Description of Artificial Sequence: Synthetic oligonucleotide
  Sense strand starting at position 3667 of SEQ ID NO: 1883219
ugggucauugcgggaggaa

SEQ ID NO: 2177631 - RNA, 19 nt, Artificial Sequence
  Description of Artificial Sequence: Synthetic oligonucleotide
  Antisense strand to SEQ ID NO: 2177630
uuccucccgcaaugaccca

SEQ ID NO: 2177632 - RNA, 19 nt, Artificial Sequence
  Description of Artificial Sequence: Synthetic oligonucleotide
  Sense strand starting at position 3668 of SEQ ID NO: 1883219
gggucauugcgggaggaau

SEQ ID NO: 2177633 - RNA, 19 nt, Artificial Sequence
  Description of Artificial Sequence: Synthetic oligonucleotide
  Antisense strand to SEQ ID NO: 2177632
auuccucccgcaaugaccc

SEQ ID NO: 2177634 - RNA, 19 nt, Artificial Sequence
  Description of Artificial Sequence: Synthetic oligonucleotide
  Sense strand starting at position 24 of SEQ ID NO: 1883221
gugagagaagcagguuuau

SEQ ID NO: 2177635 - RNA, 19 nt, Artificial Sequence
  Description of Artificial Sequence: Synthetic oligonucleotide
  Antisense strand to SEQ ID NO: 2177634
auaaaccugcuucucucac

SEQ ID NO: 2177636 - RNA, 19 nt, Artificial Sequence
  Description of Artificial Sequence: Synthetic oligonucleotide
  Sense strand starting at position 43 of SEQ ID NO: 1883221
uugaaauggcuccguucca

SEQ ID NO: 2177637 - RNA, 19 nt, Artificial Sequence
  Description of Artificial Sequence: Synthetic oligonucleotide
  Antisense strand to SEQ ID NO: 2177636
uggaacggagccauuucaa

SEQ ID NO: 2177638 - RNA, 19 nt, Artificial Sequence
  Description of Artificial Sequence: Synthetic oligonucleotide
  Sense strand starting at position 92 of SEQ ID NO: 1883221
gagggccuguccucuguua

SEQ ID NO: 2177639 - RNA, 19 nt, Artificial Sequence
  Description of Artificial Sequence: Synthetic oligonucleotide
  Antisense strand to SEQ ID NO: 2177638
uaacagaggacaggcccuc

SEQ ID NO: 2177640 - RNA, 19 nt, Artificial Sequence
  Description of Artificial Sequence: Synthetic oligonucleotide
  Sense strand starting at position 94 of SEQ ID NO: 1883221
gggccuguccucuguuagu

SEQ ID NO: 2177641 - RNA, 19 nt, Artificial Sequence
  Description of Artificial Sequence: Synthetic oligonucleotide
  Antisense strand to SEQ ID NO: 2177640
acuaacagaggacaggccc

SEQ ID NO: 2177642 - RNA, 19 nt, Artificial Sequence
  Description of Artificial Sequence: Synthetic oligonucleotide
  Sense strand starting at position 105 of SEQ ID NO: 1883221
cuguuagugccucugcuua

SEQ ID NO: 2177643 - RNA, 19 nt, Artificial Sequence
  Description of Artificial Sequence: Synthetic oligonucleotide
  Antisense strand to SEQ ID NO: 2177642
uaagcagaggcacuaacag

SEQ ID NO: 2177644 - RNA, 19 nt, Artificial Sequence
  Description of Artificial Sequence: Synthetic oligonucleotide
  Sense strand starting at position 107 of SEQ ID NO: 1883221
guuagugccucugcuuaca

SEQ ID NO: 2177645 - RNA, 19 nt, Artificial Sequence
  Description of Artificial Sequence: Synthetic oligonucleotide
  Antisense strand to SEQ ID NO: 2177644
uguaagcagaggcacuaac

SEQ ID NO: 2177646 - RNA, 19 nt, Artificial Sequence
  Description of Artificial Sequence: Synthetic oligonucleotide
  Sense strand starting at position 112 of SEQ ID NO: 1883221
ugccucugcuuacaagaaa

SEQ ID NO: 2177647 - RNA, 19 nt, Artificial Sequence
  Description of Artificial Sequence: Synthetic oligonucleotide
  Antisense strand to SEQ ID NO: 2177646
uuucuuguaagcagaggca

SEQ ID NO: 2177648 - RNA, 19 nt, Artificial Sequence
  Description of Artificial Sequence: Synthetic oligonucleotide
  Sense strand starting at position 224 of SEQ ID NO: 1883221
ucaggcugcucauugaaau

SEQ ID NO: 2177649 - RNA, 19 nt, Artificial Sequence
  Description of Artificial Sequence: Synthetic oligonucleotide
  Antisense strand to SEQ ID NO: 2177648
auuucaaugagcagccuga

SEQ ID NO: 2177650 - RNA, 19 nt, Artificial Sequence
  Description of Artificial Sequence: Synthetic oligonucleotide
  Sense strand starting at position 236 of SEQ ID NO: 1883221
uugaaauuaucucugagua

SEQ ID NO: 2177651 - RNA, 19 nt, Artificial Sequence
  Description of Artificial Sequence: Synthetic oligonucleotide
  Antisense strand to SEQ ID NO: 2177650
uacucagagauaauuucaa

SEQ ID NO: 2177652 - RNA, 19 nt, Artificial Sequence
  Description of Artificial Sequence: Synthetic oligonucleotide
  Sense strand starting at position 237 of SEQ ID NO: 1883221
ugaaauuaucucugaguaa

SEQ ID NO: 2177653 - RNA, 19 nt, Artificial Sequence
  Description of Artificial Sequence: Synthetic oligonucleotide
  Antisense strand to SEQ ID NO: 2177652
uuacucagagauaauuuca

SEQ ID NO: 2177654 - RNA, 19 nt, Artificial Sequence
  Description of Artificial Sequence: Synthetic oligonucleotide
  Sense strand starting at position 241 of SEQ ID NO: 1883221
auuaucucugaguaaagug

SEQ ID NO: 2177655 - RNA, 19 nt, Artificial Sequence
  Description of Artificial Sequence: Synthetic oligonucleotide
  Antisense strand to SEQ ID NO: 2177654
cacuuuacucagagauaau

SEQ ID NO: 2177656 - RNA, 19 nt, Artificial Sequence
  Description of Artificial Sequence: Synthetic oligonucleotide
  Sense strand starting at position 260 of SEQ ID NO: 1883221
gccugcacucuuggguuau

SEQ ID NO: 2177657 - RNA, 19 nt, Artificial Sequence
  Description of Artificial Sequence: Synthetic oligonucleotide
  Antisense strand to SEQ ID NO: 2177656
auaacccaagagugcaggc

SEQ ID NO: 2177658 - RNA, 19 nt, Artificial Sequence
  Description of Artificial Sequence: Synthetic oligonucleotide
  Sense strand starting at position 317 of SEQ ID NO: 1883221
ggccacaaauauucuguaa

SEQ ID NO: 2177659 - RNA, 19 nt, Artificial Sequence
  Description of Artificial Sequence: Synthetic oligonucleotide
  Antisense strand to SEQ ID NO: 2177658
uuacagaauauuuguggcc

SEQ ID NO: 2177660 - RNA, 19 nt, Artificial Sequence
  Description of Artificial Sequence: Synthetic oligonucleotide
  Sense strand starting at position 337 of SEQ ID NO: 1883221
uauaauugguguccagcuu

SEQ ID NO: 2177661 - RNA, 19 nt, Artificial Sequence
  Description of Artificial Sequence: Synthetic oligonucleotide
  Antisense strand to SEQ ID NO: 2177660
aagcuggacaccaauuaua

SEQ ID NO: 2177662 - RNA, 19 nt, Artificial Sequence
  Description of Artificial Sequence: Synthetic oligonucleotide
  Sense strand starting at position 343 of SEQ ID NO: 1883221
ugguguccagcuugagaca

SEQ ID NO: 2177663 - RNA, 19 nt, Artificial Sequence
  Description of Artificial Sequence: Synthetic oligonucleotide
  Antisense strand to SEQ ID NO: 2177662
ugucucaagcuggacacca

SEQ ID NO: 2177664 - RNA, 19 nt, Artificial Sequence
  Description of Artificial Sequence: Synthetic oligonucleotide
  Sense strand starting at position 344 of SEQ ID NO: 1883221
gguguccagcuugagacau

SEQ ID NO: 2177665 - RNA, 19 nt, Artificial Sequence
  Description of Artificial Sequence: Synthetic oligonucleotide
  Antisense strand to SEQ ID NO: 2177664
augucucaagcuggacacc

SEQ ID NO: 2177666 - RNA, 19 nt, Artificial Sequence
  Description of Artificial Sequence: Synthetic oligonucleotide
  Sense strand starting at position 470 of SEQ ID NO: 1883221
gugagcaagcguuccucua

SEQ ID NO: 2177667 - RNA, 19 nt, Artificial Sequence
  Description of Artificial Sequence: Synthetic oligonucleotide
  Antisense strand to SEQ ID NO: 2177666
uagaggaacgcuugcucac

SEQ ID NO: 2177668 - RNA, 19 nt, Artificial Sequence
  Description of Artificial Sequence: Synthetic oligonucleotide
  Sense strand starting at position 472 of SEQ ID NO: 1883221
gagcaagcguuccucuaac

SEQ ID NO: 2177669 - RNA, 19 nt, Artificial Sequence
  Description of Artificial Sequence: Synthetic oligonucleotide
  Antisense strand to SEQ ID NO: 2177668
guuagaggaacgcuugcuc

SEQ ID NO: 2177670 - RNA, 19 nt, Artificial Sequence
  Description of Artificial Sequence: Synthetic oligonucleotide
  Sense strand starting at position 733 of SEQ ID NO: 1883221
gggagucuccuguguugau

SEQ ID NO: 2177671 - RNA, 19 nt, Artificial Sequence
  Description of Artificial Sequence: Synthetic oligonucleotide
  Antisense strand to SEQ ID NO: 2177670
aucaacacaggagacuccc

SEQ ID NO: 2177672 - RNA, 19 nt, Artificial Sequence
  Description of Artificial Sequence: Synthetic oligonucleotide
  Sense strand starting at position 734 of SEQ ID NO: 1883221
ggagucuccuguguugaug

SEQ ID NO: 2177673 - RNA, 19 nt, Artificial Sequence
  Description of Artificial Sequence: Synthetic oligonucleotide
  Antisense strand to SEQ ID NO: 2177672
caucaacacaggagacucc

SEQ ID NO: 2177674 - RNA, 19 nt, Artificial Sequence
  Description of Artificial Sequence: Synthetic oligonucleotide
  Sense strand starting at position 748 of SEQ ID NO: 1883221
ugaugucuucuguguugag

SEQ ID NO: 2177675 - RNA, 19 nt, Artificial Sequence
  Description of Artificial Sequence: Synthetic oligonucleotide
  Antisense strand to SEQ ID NO: 2177674
cucaacacagaagacauca

SEQ ID NO: 2177676 - RNA, 19 nt, Artificial Sequence
  Description of Artificial Sequence: Synthetic oligonucleotide
  Sense strand starting at position 749 of SEQ ID NO: 1883221
gaugucuucuguguugagu

SEQ ID NO: 2177677 - RNA, 19 nt, Artificial Sequence
  Description of Artificial Sequence: Synthetic oligonucleotide
  Antisense strand to SEQ ID NO: 2177676
acucaacacagaagacauc

SEQ ID NO: 2177678 - RNA, 19 nt, Artificial Sequence
  Description of Artificial Sequence: Synthetic oligonucleotide
  Sense strand starting at position 755 of SEQ ID NO: 1883221
uucuguguugagugagaga

SEQ ID NO: 2177679 - RNA, 19 nt, Artificial Sequence
  Description of Artificial Sequence: Synthetic oligonucleotide
  Antisense strand to SEQ ID NO: 2177678
ucucucacucaacacagaa

SEQ ID NO: 2177680 - RNA, 19 nt, Artificial Sequence
  Description of Artificial Sequence: Synthetic oligonucleotide
  Sense strand starting at position 776 of SEQ ID NO: 1883221
ggauaaaugguuugagagu

SEQ ID NO: 2177681 - RNA, 19 nt, Artificial Sequence
  Description of Artificial Sequence: Synthetic oligonucleotide
  Antisense strand to SEQ ID NO: 2177680
acucucaaaccauuuaucc

SEQ ID NO: 2177682 - RNA, 19 nt, Artificial Sequence
  Description of Artificial Sequence: Synthetic oligonucleotide
  Sense strand starting at position 777 of SEQ ID NO: 1883221
gauaaaugguuugagaguu

SEQ ID NO: 2177683 - RNA, 19 nt, Artificial Sequence
  Description of Artificial Sequence: Synthetic oligonucleotide
  Antisense strand to SEQ ID NO: 2177682
aacucucaaaccauuuauc

SEQ ID NO: 2177684 - RNA, 19 nt, Artificial Sequence
  Description of Artificial Sequence: Synthetic oligonucleotide
  Sense strand starting at position 873 of SEQ ID NO: 1883221
cgugcuuucgucccacagu

SEQ ID NO: 2177685 - RNA, 19 nt, Artificial Sequence
  Description of Artificial Sequence: Synthetic oligonucleotide
  Antisense strand to SEQ ID NO: 2177684
acugugggacgaaagcacg

SEQ ID NO: 2177686 - RNA, 19 nt, Artificial Sequence
  Description of Artificial Sequence: Synthetic oligonucleotide
  Sense strand starting at position 882 of SEQ ID NO: 1883221
gucccacaguucuuacuga

SEQ ID NO: 2177687 - RNA, 19 nt, Artificial Sequence
  Description of Artificial Sequence: Synthetic oligonucleotide
  Antisense strand to SEQ ID NO: 2177686
ucaguaagaacugugggac

SEQ ID NO: 2177688 - RNA, 19 nt, Artificial Sequence
  Description of Artificial Sequence: Synthetic oligonucleotide
  Sense strand starting at position 1257 of SEQ ID NO: 1883221
ggguguuacaggugucugu

SEQ ID NO: 2177689 - RNA, 19 nt, Artificial Sequence
  Description of Artificial Sequence: Synthetic oligonucleotide
  Antisense strand to SEQ ID NO: 2177688
acagacaccuguaacaccc

SEQ ID NO: 2177690 - RNA, 19 nt, Artificial Sequence
  Description of Artificial Sequence: Synthetic oligonucleotide
  Sense strand starting at position 1404 of SEQ ID NO: 1883221
cgcacugucaacuggagaa

SEQ ID NO: 2177691 - RNA, 19 nt, Artificial Sequence
  Description of Artificial Sequence: Synthetic oligonucleotide
  Antisense strand to SEQ ID NO: 2177690
uucuccaguugacagugcg

SEQ ID NO: 2177692 - RNA, 19 nt, Artificial Sequence
  Description of Artificial Sequence: Synthetic oligonucleotide
  Sense strand starting at position 1797 of SEQ ID NO: 1883221
gaggacuguccagguguca

SEQ ID NO: 2177693 - RNA, 19 nt, Artificial Sequence
  Description of Artificial Sequence: Synthetic oligonucleotide
  Antisense strand to SEQ ID NO: 2177692
ugacaccuggacaguccuc

SEQ ID NO: 2177694 - RNA, 19 nt, Artificial Sequence
  Description of Artificial Sequence: Synthetic oligonucleotide
  Sense strand starting at position 2448 of SEQ ID NO: 1883221
cccgaauguuuccaaagau

SEQ ID NO: 2177695 - RNA, 19 nt, Artificial Sequence
  Description of Artificial Sequence: Synthetic oligonucleotide
  Antisense strand to SEQ ID NO: 2177694
aucuuuggaaacauucggg

SEQ ID NO: 2177696 - RNA, 19 nt, Artificial Sequence
  Description of Artificial Sequence: Synthetic oligonucleotide
  Sense strand starting at position 3079 of SEQ ID NO: 1883221
aggacuuccucagagacag

SEQ ID NO: 2177697 - RNA, 19 nt, Artificial Sequence
  Description of Artificial Sequence: Synthetic oligonucleotide
  Antisense strand to SEQ ID NO: 2177696
cugucucugaggaaguccu

SEQ ID NO: 2177698 - RNA, 19 nt, Artificial Sequence
  Description of Artificial Sequence: Synthetic oligonucleotide
  Sense strand starting at position 3324 of SEQ ID NO: 1883221
agaucuguucucugaggca

SEQ ID NO: 2177699 - RNA, 19 nt, Artificial Sequence
  Description of Artificial Sequence: Synthetic oligonucleotide
  Antisense strand to SEQ ID NO: 2177698
ugccucagagaacagaucu

SEQ ID NO: 2177700 - RNA, 19 nt, Artificial Sequence
  Description of Artificial Sequence: Synthetic oligonucleotide
  Sense strand starting at position 3409 of SEQ ID NO: 1883221
cacggcugucccugacaga

SEQ ID NO: 2177701 - RNA, 19 nt, Artificial Sequence
  Description of Artificial Sequence: Synthetic oligonucleotide
  Antisense strand to SEQ ID NO: 2177700
ucugucagggacagccgug

SEQ ID NO: 2177702 - RNA, 19 nt, Artificial Sequence
  Description of Artificial Sequence: Synthetic oligonucleotide
  Sense strand starting at position 3410 of SEQ ID NO: 1883221
acggcugucccugacagaa

SEQ ID NO: 2177703 - RNA, 19 nt, Artificial Sequence
  Description of Artificial Sequence: Synthetic oligonucleotide
  Antisense strand to SEQ ID NO: 2177702
uucugucagggacagccgu

SEQ ID NO: 2177704 - RNA, 19 nt, Artificial Sequence
  Description of Artificial Sequence: Synthetic oligonucleotide
  Sense strand starting at position 3489 of SEQ ID NO: 1883221
ggguguguuccagauucuu

SEQ ID NO: 2177705 - RNA, 19 nt, Artificial Sequence
  Description of Artificial Sequence: Synthetic oligonucleotide
  Antisense strand to SEQ ID NO: 2177704
aagaaucuggaacacaccc

SEQ ID NO: 2177706 - RNA, 19 nt, Artificial Sequence
  Description of Artificial Sequence: Synthetic oligonucleotide
  Sense strand starting at position 3495 of SEQ ID NO: 1883221
guuccagauucuuucucca

SEQ ID NO: 2177707 - RNA, 19 nt, Artificial Sequence
  Description of Artificial Sequence: Synthetic oligonucleotide
  Antisense strand to SEQ ID NO: 2177706
uggagaaagaaucuggaac

SEQ ID NO: 2177708 - RNA, 19 nt, Artificial Sequence
  Description of Artificial Sequence: Synthetic oligonucleotide
  Sense strand starting at position 3500 of SEQ ID NO: 1883221
agauucuuucuccagcagu

SEQ ID NO: 2177709 - RNA, 19 nt, Artificial Sequence
  Description of Artificial Sequence: Synthetic oligonucleotide
  Antisense strand to SEQ ID NO: 2177708
acugcuggagaaagaaucu

SEQ ID NO: 2177710 - RNA, 19 nt, Artificial Sequence
  Description of Artificial Sequence: Synthetic oligonucleotide
  Sense strand starting at position 3659 of SEQ ID NO: 1883221
gggugcuuuccucggaacu

SEQ ID NO: 2177711 - RNA, 19 nt, Artificial Sequence
  Description of Artificial Sequence: Synthetic oligonucleotide
  Antisense strand to SEQ ID NO: 2177710
aguuccgaggaaagcaccc

SEQ ID NO: 2177712 - RNA, 19 nt, Artificial Sequence
  Description of Artificial Sequence: Synthetic oligonucleotide
  Sense strand starting at position 3808 of SEQ ID NO: 1883221
gcuaauauacacugacaga

SEQ ID NO: 2177713 - RNA, 19 nt, Artificial Sequence
  Description of Artificial Sequence: Synthetic oligonucleotide
  Antisense strand to SEQ ID NO: 2177712
ucugucaguguauauuagc

SEQ ID NO: 2177714 - RNA, 19 nt, Artificial Sequence
  Description of Artificial Sequence: Synthetic oligonucleotide
  Sense strand starting at position 6 of SEQ ID NO: 1883222
aaauguuaaugggucagaa

SEQ ID NO: 2177715 - RNA, 19 nt, Artificial Sequence
  Description of Artificial Sequence: Synthetic oligonucleotide
  Antisense strand to SEQ ID NO: 2177714
uucugacccauuaacauuu

SEQ ID NO: 2177716 - RNA, 19 nt, Artificial Sequence
  Description of Artificial Sequence: Synthetic oligonucleotide
  Sense strand starting at position 10 of SEQ ID NO: 1883222
guuaaugggucagaagauu

SEQ ID NO: 2177717 - RNA, 19 nt, Artificial Sequence
  Description of Artificial Sequence: Synthetic oligonucleotide
  Antisense strand to SEQ ID NO: 2177716
aaucuucugacccauuaac

SEQ ID NO: 2177718 - RNA, 19 nt, Artificial Sequence
  Description of Artificial Sequence: Synthetic oligonucleotide
  Sense strand starting at position 125 of SEQ ID NO: 1883222
agucgacucuaagauuuaa

SEQ ID NO: 2177719 - RNA, 19 nt, Artificial Sequence
  Description of Artificial Sequence: Synthetic oligonucleotide
  Antisense strand to SEQ ID NO: 2177718
uuaaaucuuagagucgacu

SEQ ID NO: 2177720 - RNA, 19 nt, Artificial Sequence
  Description of Artificial Sequence: Synthetic oligonucleotide
  Sense strand starting at position 187 of SEQ ID NO: 1883222
aauaaaguuguaggacaua

SEQ ID NO: 2177721 - RNA, 19 nt, Artificial Sequence
  Description of Artificial Sequence: Synthetic oligonucleotide
  Antisense strand to SEQ ID NO: 2177720
uauguccuacaacuuuauu

SEQ ID NO: 2177722 - RNA, 19 nt, Artificial Sequence
  Description of Artificial Sequence: Synthetic oligonucleotide
  Sense strand starting at position 478 of SEQ ID NO: 1883222
agcagaucuuauccuuuga

SEQ ID NO: 2177723 - RNA, 19 nt, Artificial Sequence
  Description of Artificial Sequence: Synthetic oligonucleotide
  Antisense strand to SEQ ID NO: 2177722
ucaaaggauaagaucugcu

SEQ ID NO: 2177724 - RNA, 19 nt, Artificial Sequence
  Description of Artificial Sequence: Synthetic oligonucleotide
  Sense strand starting at position 561 of SEQ ID NO: 1883222
gugagaaacugccuggaga

SEQ ID NO: 2177725 - RNA, 19 nt, Artificial Sequence
  Description of Artificial Sequence: Synthetic oligonucleotide
  Antisense strand to SEQ ID NO: 2177724
ucuccaggcaguuucucac

SEQ ID NO: 2177726 - RNA, 19 nt, Artificial Sequence
  Description of Artificial Sequence: Synthetic oligonucleotide
  Sense strand starting at position 663 of SEQ ID NO: 1883222
uugugaucguggagaugaa

SEQ ID NO: 2177727 - RNA, 19 nt, Artificial Sequence
  Description of Artificial Sequence: Synthetic oligonucleotide
  Antisense strand to SEQ ID NO: 2177726
uucaucuccacgaucacaa

SEQ ID NO: 2177728 - RNA, 19 nt, Artificial Sequence
  Description of Artificial Sequence: Synthetic oligonucleotide
  Sense strand starting at position 799 of SEQ ID NO: 1883222
guacgugagucuucaauga

SEQ ID NO: 2177729 - RNA, 19 nt, Artificial Sequence
  Description of Artificial Sequence: Synthetic oligonucleotide
  Antisense strand to SEQ ID NO: 2177728
ucauugaagacucacguac

SEQ ID NO: 2177730 - RNA, 19 nt, Artificial Sequence
  Description of Artificial Sequence: Synthetic oligonucleotide
  Sense strand starting at position 850 of SEQ ID NO: 1883222
acaccauauuuccagagua

SEQ ID NO: 2177731 - RNA, 19 nt, Artificial Sequence
  Description of Artificial Sequence: Synthetic oligonucleotide
  Antisense strand to SEQ ID NO: 2177730
uacucuggaaauauggugu

SEQ ID NO: 2177732 - RNA, 19 nt, Artificial Sequence
  Description of Artificial Sequence: Synthetic oligonucleotide
  Sense strand starting at position 865 of SEQ ID NO: 1883222
aguagaguuuauuagaaca

SEQ ID NO: 2177733 - RNA, 19 nt, Artificial Sequence
  Description of Artificial Sequence: Synthetic oligonucleotide
  Antisense strand to SEQ ID NO: 2177732
uguucuaauaaacucuacu

SEQ ID NO: 2177734 - RNA, 19 nt, Artificial Sequence
  Description of Artificial Sequence: Synthetic oligonucleotide
  Sense strand starting at position 948 of SEQ ID NO: 1883222
gcauauacucaaggcaauu

SEQ ID NO: 2177735 - RNA, 19 nt, Artificial Sequence
  Description of Artificial Sequence: Synthetic oligonucleotide
  Antisense strand to SEQ ID NO: 2177734
aauugccuugaguauaugc

SEQ ID NO: 2177736 - RNA, 19 nt, Artificial Sequence
  Description of Artificial Sequence: Synthetic oligonucleotide
  Sense strand starting at position 1042 of SEQ ID NO: 1883222
ugaguagacgguagucgau

SEQ ID NO: 2177737 - RNA, 19 nt, Artificial Sequence
  Description of Artificial Sequence: Synthetic oligonucleotide
  Antisense strand to SEQ ID NO: 2177736
aucgacuaccgucuacuca

SEQ ID NO: 2177738 - RNA, 19 nt, Artificial Sequence
  Description of Artificial Sequence: Synthetic oligonucleotide
  Sense strand starting at position 1044 of SEQ ID NO: 1883222
aguagacgguagucgauau

SEQ ID NO: 2177739 - RNA, 19 nt, Artificial Sequence
  Description of Artificial Sequence: Synthetic oligonucleotide
  Antisense strand to SEQ ID NO: 2177738
auaucgacuaccgucuacu

SEQ ID NO: 2177740 - RNA, 19 nt, Artificial Sequence
  Description of Artificial Sequence: Synthetic oligonucleotide
  Sense strand starting at position 1045 of SEQ ID NO: 1883222
guagacgguagucgauauu

SEQ ID NO: 2177741 - RNA, 19 nt, Artificial Sequence
  Description of Artificial Sequence: Synthetic oligonucleotide
  Antisense strand to SEQ ID NO: 2177740
aauaucgacuaccgucuac

SEQ ID NO: 2177742 - RNA, 19 nt, Artificial Sequence
  Description of Artificial Sequence: Synthetic oligonucleotide
  Sense strand starting at position 1048 of SEQ ID NO: 1883222
gacgguagucgauauucuu

SEQ ID NO: 2177743 - RNA, 19 nt, Artificial Sequence
  Description of Artificial Sequence: Synthetic oligonucleotide
  Antisense strand to SEQ ID NO: 2177742
aagaauaucgacuaccguc

SEQ ID NO: 2177744 - RNA, 19 nt, Artificial Sequence
  Description of Artificial Sequence: Synthetic oligonucleotide
  Sense strand starting at position 1073 of SEQ ID NO: 1883222
guauucuaccucuagauuc

SEQ ID NO: 2177745 - RNA, 19 nt, Artificial Sequence
  Description of Artificial Sequence: Synthetic oligonucleotide
  Antisense strand to SEQ ID NO: 2177744
gaaucuagagguagaauac

SEQ ID NO: 2177746 - RNA, 19 nt, Artificial Sequence
  Description of Artificial Sequence: Synthetic oligonucleotide
  Sense strand starting at position 1148 of SEQ ID NO: 1883222
gcuguaucaccuuggauca

SEQ ID NO: 2177747 - RNA, 19 nt, Artificial Sequence
  Description of Artificial Sequence: Synthetic oligonucleotide
  Antisense strand to SEQ ID NO: 2177746
ugauccaaggugauacagc

SEQ ID NO: 2177748 - RNA, 19 nt, Artificial Sequence
  Description of Artificial Sequence: Synthetic oligonucleotide
  Sense strand starting at position 1627 of SEQ ID NO: 1883222
gcgucuggcccugaacagu

SEQ ID NO: 2177749 - RNA, 19 nt, Artificial Sequence
  Description of Artificial Sequence: Synthetic oligonucleotide
  Antisense strand to SEQ ID NO: 2177748
acuguucagggccagacgc

SEQ ID NO: 2177750 - RNA, 19 nt, Artificial Sequence
  Description of Artificial Sequence: Synthetic oligonucleotide
  Sense strand starting at position 1808 of SEQ ID NO: 1883222
gguagcuucuaagucacua

SEQ ID NO: 2177751 - RNA, 19 nt, Artificial Sequence
  Description of Artificial Sequence: Synthetic oligonucleotide
  Antisense strand to SEQ ID NO: 2177750
uagugacuuagaagcuacc

SEQ ID NO: 2177752 - RNA, 19 nt, Artificial Sequence
  Description of Artificial Sequence: Synthetic oligonucleotide
  Sense strand starting at position 1816 of SEQ ID NO: 1883222
cuaagucacuaauggaaau

SEQ ID NO: 2177753 - RNA, 19 nt, Artificial Sequence
  Description of Artificial Sequence: Synthetic oligonucleotide
  Antisense strand to SEQ ID NO: 2177752
auuuccauuagugacuuag

SEQ ID NO: 2177754 - RNA, 19 nt, Artificial Sequence
  Description of Artificial Sequence: Synthetic oligonucleotide
  Sense strand starting at position 1867 of SEQ ID NO: 1883222
ccuccuuacucccaggaga

SEQ ID NO: 2177755 - RNA, 19 nt, Artificial Sequence
  Description of Artificial Sequence: Synthetic oligonucleotide
  Antisense strand to SEQ ID NO: 2177754
ucuccugggaguaaggagg

SEQ ID NO: 2177756 - RNA, 19 nt, Artificial Sequence
  Description of Artificial Sequence: Synthetic oligonucleotide
  Sense strand starting at position 1869 of SEQ ID NO: 1883222
uccuuacucccaggagaag

SEQ ID NO: 2177757 - RNA, 19 nt, Artificial Sequence
  Description of Artificial Sequence: Synthetic oligonucleotide
  Antisense strand to SEQ ID NO: 2177756
cuucuccugggaguaagga

SEQ ID NO: 2177758 - RNA, 19 nt, Artificial Sequence
  Description of Artificial Sequence: Synthetic oligonucleotide
  Sense strand starting at position 2667 of SEQ ID NO: 1883222
gcggcaguugaguuucuau

SEQ ID NO: 2177759 - RNA, 19 nt, Artificial Sequence
  Description of Artificial Sequence: Synthetic oligonucleotide
  Antisense strand to SEQ ID NO: 2177758
auagaaacucaacugccgc

SEQ ID NO: 2177760 - RNA, 19 nt, Artificial Sequence
  Description of Artificial Sequence: Synthetic oligonucleotide
  Sense strand starting at position 2670 of SEQ ID NO: 1883222
gcaguugaguuucuaugcu

SEQ ID NO: 2177761 - RNA, 19 nt, Artificial Sequence
  Description of Artificial Sequence: Synthetic oligonucleotide
  Antisense strand to SEQ ID NO: 2177760
agcauagaaacucaacugc

SEQ ID NO: 2177762 - RNA, 19 nt, Artificial Sequence
  Description of Artificial Sequence: Synthetic oligonucleotide
  Sense strand starting at position 2674 of SEQ ID NO: 1883222
uugaguuucuaugcuaauu

SEQ ID NO: 2177763 - RNA, 19 nt, Artificial Sequence
  Description of Artificial Sequence: Synthetic oligonucleotide
  Antisense strand to SEQ ID NO: 2177762
aauuagcauagaaacucaa

SEQ ID NO: 2177764 - RNA, 19 nt, Artificial Sequence
  Description of Artificial Sequence: Synthetic oligonucleotide
  Sense strand starting at position 2899 of SEQ ID NO: 1883222
uguccuaaccaguauauga

SEQ ID NO: 2177765 - RNA, 19 nt, Artificial Sequence
  Description of Artificial Sequence: Synthetic oligonucleotide
  Antisense strand to SEQ ID NO: 2177764
ucauauacugguuaggaca

SEQ ID NO: 2177766 - RNA, 19 nt, Artificial Sequence
  Description of Artificial Sequence: Synthetic oligonucleotide
  Sense strand starting at position 2972 of SEQ ID NO: 1883222
agcggacacgugucuugua

SEQ ID NO: 2177767 - RNA, 19 nt, Artificial Sequence
  Description of Artificial Sequence: Synthetic oligonucleotide
  Antisense strand to SEQ ID NO: 2177766
uacaagacacguguccgcu

SEQ ID NO: 2177768 - RNA, 19 nt, Artificial Sequence
  Description of Artificial Sequence: Synthetic oligonucleotide
  Sense strand starting at position 2990 of SEQ ID NO: 1883222
agaguuugaccgugagaaa

SEQ ID NO: 2177769 - RNA, 19 nt, Artificial Sequence
  Description of Artificial Sequence: Synthetic oligonucleotide
  Antisense strand to SEQ ID NO: 2177768
uuucucacggucaaacucu

SEQ ID NO: 2177770 - RNA, 19 nt, Artificial Sequence
  Description of Artificial Sequence: Synthetic oligonucleotide
  Sense strand starting at position 3080 of SEQ ID NO: 1883222
caaagucuguaaucagaug

SEQ ID NO: 2177771 - RNA, 19 nt, Artificial Sequence
  Description of Artificial Sequence: Synthetic oligonucleotide
  Antisense strand to SEQ ID NO: 2177770
caucugauuacagacuuug

SEQ ID NO: 2177772 - RNA, 19 nt, Artificial Sequence
  Description of Artificial Sequence: Synthetic oligonucleotide
  Sense strand starting at position 3085 of SEQ ID NO: 1883222
ucuguaaucagauguggcu

SEQ ID NO: 2177773 - RNA, 19 nt, Artificial Sequence
  Description of Artificial Sequence: Synthetic oligonucleotide
  Antisense strand to SEQ ID NO: 2177772
agccacaucugauuacaga

SEQ ID NO: 2177774 - RNA, 19 nt, Artificial Sequence
  Description of Artificial Sequence: Synthetic oligonucleotide
  Sense strand starting at position 3087 of SEQ ID NO: 1883222
uguaaucagauguggcuau

SEQ ID NO: 2177775 - RNA, 19 nt, Artificial Sequence
  Description of Artificial Sequence: Synthetic oligonucleotide
  Antisense strand to SEQ ID NO: 2177774
auagccacaucugauuaca

SEQ ID NO: 2177776 - RNA, 19 nt, Artificial Sequence
  Description of Artificial Sequence: Synthetic oligonucleotide
  Sense strand starting at position 3292 of SEQ ID NO: 1883222
gggucuacgagcuaagaau

SEQ ID NO: 2177777 - RNA, 19 nt, Artificial Sequence
  Description of Artificial Sequence: Synthetic oligonucleotide
  Antisense strand to SEQ ID NO: 2177776
auucuuagcucguagaccc

SEQ ID NO: 2177778 - RNA, 19 nt, Artificial Sequence
  Description of Artificial Sequence: Synthetic oligonucleotide
  Sense strand starting at position 3298 of SEQ ID NO: 1883222
acgagcuaagaaugucuuu

SEQ ID NO: 2177779 - RNA, 19 nt, Artificial Sequence
  Description of Artificial Sequence: Synthetic oligonucleotide
  Antisense strand to SEQ ID NO: 2177778
aaagacauucuuagcucgu

SEQ ID NO: 2177780 - RNA, 19 nt, Artificial Sequence
  Description of Artificial Sequence: Synthetic oligonucleotide
  Sense strand starting at position 3432 of SEQ ID NO: 1883222
uaugguuauguuugugcca

SEQ ID NO: 2177781 - RNA, 19 nt, Artificial Sequence
  Description of Artificial Sequence: Synthetic oligonucleotide
  Antisense strand to SEQ ID NO: 2177780
uggcacaaacauaaccaua

SEQ ID NO: 2177782 - RNA, 19 nt, Artificial Sequence
  Description of Artificial Sequence: Synthetic oligonucleotide
  Sense strand starting at position 3435 of SEQ ID NO: 1883222
gguuauguuugugccacaa

SEQ ID NO: 2177783 - RNA, 19 nt, Artificial Sequence
  Description of Artificial Sequence: Synthetic oligonucleotide
  Antisense strand to SEQ ID NO: 2177782
uuguggcacaaacauaacc

SEQ ID NO: 2177784 - RNA, 19 nt, Artificial Sequence
  Description of Artificial Sequence: Synthetic oligonucleotide
  Sense strand starting at position 3445 of SEQ ID NO: 1883222
gugccacaaccgugaaguu

SEQ ID NO: 2177785 - RNA, 19 nt, Artificial Sequence
  Description of Artificial Sequence: Synthetic oligonucleotide
  Antisense strand to SEQ ID NO: 2177784
aacuucacgguuguggcac

SEQ ID NO: 2177786 - RNA, 19 nt, Artificial Sequence
  Description of Artificial Sequence: Synthetic oligonucleotide
  Sense strand starting at position 3455 of SEQ ID NO: 1883222
cgugaaguugaguaguugu

SEQ ID NO: 2177787 - RNA, 19 nt, Artificial Sequence
  Description of Artificial Sequence: Synthetic oligonucleotide
  Antisense strand to SEQ ID NO: 2177786
acaacuacucaacuucacg

SEQ ID NO: 2177788 - RNA, 19 nt, Artificial Sequence
  Description of Artificial Sequence: Synthetic oligonucleotide
  Sense strand starting at position 3512 of SEQ ID NO: 1883222
ccaucugucucuuuacaga

SEQ ID NO: 2177789 - RNA, 19 nt, Artificial Sequence
  Description of Artificial Sequence: Synthetic oligonucleotide
  Antisense strand to SEQ ID NO: 2177788
ucuguaaagagacagaugg

SEQ ID NO: 2177790 - RNA, 19 nt, Artificial Sequence
  Description of Artificial Sequence: Synthetic oligonucleotide
  Sense strand starting at position 3607 of SEQ ID NO: 1883222
uguauuguauggguacagu

SEQ ID NO: 2177791 - RNA, 19 nt, Artificial Sequence
  Description of Artificial Sequence: Synthetic oligonucleotide
  Antisense strand to SEQ ID NO: 2177790
acuguacccauacaauaca

SEQ ID NO: 2177792 - RNA, 19 nt, Artificial Sequence
  Description of Artificial Sequence: Synthetic oligonucleotide
  Sense strand starting at position 3621 of SEQ ID NO: 1883222
acaguuguucuuugcuuaa

SEQ ID NO: 2177793 - RNA, 19 nt, Artificial Sequence
  Description of Artificial Sequence: Synthetic oligonucleotide
  Antisense strand to SEQ ID NO: 2177792
uuaagcaaagaacaacugu

SEQ ID NO: 2177794 - RNA, 19 nt, Artificial Sequence
  Description of Artificial Sequence: Synthetic oligonucleotide
  Sense strand starting at position 77 of SEQ ID NO: 1883223
cccuuaacccucgggacua

SEQ ID NO: 2177795 - RNA, 19 nt, Artificial Sequence
  Description of Artificial Sequence: Synthetic oligonucleotide
  Antisense strand to SEQ ID NO: 2177794
uagucccgaggguuaaggg

SEQ ID NO: 2177796 - RNA, 19 nt, Artificial Sequence
  Description of Artificial Sequence: Synthetic oligonucleotide
  Sense strand starting at position 667 of SEQ ID NO: 1883223
ggcccugauuucgggagau

SEQ ID NO: 2177797 - RNA, 19 nt, Artificial Sequence
  Description of Artificial Sequence: Synthetic oligonucleotide
  Antisense strand to SEQ ID NO: 2177796
aucucccgaaaucagggcc

SEQ ID NO: 2177798 - RNA, 19 nt, Artificial Sequence
  Description of Artificial Sequence: Synthetic oligonucleotide
  Sense strand starting at position 1393 of SEQ ID NO: 1883223
guugcagugcgccaguuaa

SEQ ID NO: 2177799 - RNA, 19 nt, Artificial Sequence
  Description of Artificial Sequence: Synthetic oligonucleotide
  Antisense strand to SEQ ID NO: 2177798
uuaacuggcgcacugcaac

SEQ ID NO: 2177800 - RNA, 19 nt, Artificial Sequence
  Description of Artificial Sequence: Synthetic oligonucleotide
  Sense strand starting at position 2128 of SEQ ID NO: 1883223
ugaugugcugcagagcaau

SEQ ID NO: 2177801 - RNA, 19 nt, Artificial Sequence
  Description of Artificial Sequence: Synthetic oligonucleotide
  Antisense strand to SEQ ID NO: 2177800
auugcucugcagcacauca

SEQ ID NO: 2177802 - RNA, 19 nt, Artificial Sequence
  Description of Artificial Sequence: Synthetic oligonucleotide
  Sense strand starting at position 2484 of SEQ ID NO: 1883223
ggugcuguguccugcacuu

SEQ ID NO: 2177803 - RNA, 19 nt, Artificial Sequence
  Description of Artificial Sequence: Synthetic oligonucleotide
  Antisense strand to SEQ ID NO: 2177802
aagugcaggacacagcacc

SEQ ID NO: 2177804 - RNA, 19 nt, Artificial Sequence
  Description of Artificial Sequence: Synthetic oligonucleotide
  Sense strand starting at position 2500 of SEQ ID NO: 1883223
cuuggauguguggguggaa

SEQ ID NO: 2177805 - RNA, 19 nt, Artificial Sequence
  Description of Artificial Sequence: Synthetic oligonucleotide
  Antisense strand to SEQ ID NO: 2177804
uuccacccacacauccaag

SEQ ID NO: 2177806 - RNA, 19 nt, Artificial Sequence
  Description of Artificial Sequence: Synthetic oligonucleotide
  Sense strand starting at position 2574 of SEQ ID NO: 1883223
agccgaaagccuggaaagu

SEQ ID NO: 2177807 - RNA, 19 nt, Artificial Sequence
  Description of Artificial Sequence: Synthetic oligonucleotide
  Antisense strand to SEQ ID NO: 2177806
acuuuccaggcuuucggcu

SEQ ID NO: 2177808 - RNA, 19 nt, Artificial Sequence
  Description of Artificial Sequence: Synthetic oligonucleotide
  Sense strand starting at position 2636 of SEQ ID NO: 1883223
ggaagcuucccagaaagcu

SEQ ID NO: 2177809 - RNA, 19 nt, Artificial Sequence
  Description of Artificial Sequence: Synthetic oligonucleotide
  Antisense strand to SEQ ID NO: 2177808
agcuuucugggaagcuucc

SEQ ID NO: 2177810 - RNA, 19 nt, Artificial Sequence
  Description of Artificial Sequence: Synthetic oligonucleotide
  Sense strand starting at position 2818 of SEQ ID NO: 1883223
ugguuugcccucugggauu

SEQ ID NO: 2177811 - RNA, 19 nt, Artificial Sequence
  Description of Artificial Sequence: Synthetic oligonucleotide
  Antisense strand to SEQ ID NO: 2177810
aaucccagagggcaaacca

SEQ ID NO: 2177812 - RNA, 19 nt, Artificial Sequence
  Description of Artificial Sequence: Synthetic oligonucleotide
  Sense strand starting at position 2854 of SEQ ID NO: 1883223
cggccuuacccuggugaca

SEQ ID NO: 2177813 - RNA, 19 nt, Artificial Sequence
  Description of Artificial Sequence: Synthetic oligonucleotide
  Antisense strand to SEQ ID NO: 2177812
ugucaccaggguaaggccg

SEQ ID NO: 2177814 - RNA, 19 nt, Artificial Sequence
  Description of Artificial Sequence: Synthetic oligonucleotide
  Sense strand starting at position 2856 of SEQ ID NO: 1883223
gccuuacccuggugacauc

SEQ ID NO: 2177815 - RNA, 19 nt, Artificial Sequence
  Description of Artificial Sequence: Synthetic oligonucleotide
  Antisense strand to SEQ ID NO: 2177814
gaugucaccaggguaaggc

SEQ ID NO: 2177816 - RNA, 19 nt, Artificial Sequence
  Description of Artificial Sequence: Synthetic oligonucleotide
  Sense strand starting at position 3286 of SEQ ID NO: 1883223
gccagugcccggcuguaau

SEQ ID NO: 2177817 - RNA, 19 nt, Artificial Sequence
  Description of Artificial Sequence: Synthetic oligonucleotide
  Antisense strand to SEQ ID NO: 2177816
auuacagccgggcacuggc

SEQ ID NO: 2177818 - RNA, 19 nt, Artificial Sequence
  Description of Artificial Sequence: Synthetic oligonucleotide
  Sense strand starting at position 3297 of SEQ ID NO: 1883223
gcuguaauaggcuaugcca

SEQ ID NO: 2177819 - RNA, 19 nt, Artificial Sequence
  Description of Artificial Sequence: Synthetic oligonucleotide
  Antisense strand to SEQ ID NO: 2177818
uggcauagccuauuacagc

SEQ ID NO: 2177820 - RNA, 19 nt, Artificial Sequence
  Description of Artificial Sequence: Synthetic oligonucleotide
  Sense strand starting at position 3393 of SEQ ID NO: 1883223
gccugugucuuccacagag

SEQ ID NO: 2177821 - RNA, 19 nt, Artificial Sequence
  Description of Artificial Sequence: Synthetic oligonucleotide
  Antisense strand to SEQ ID NO: 2177820
cucuguggaagacacaggc

SEQ ID NO: 2177822 - RNA, 19 nt, Artificial Sequence
  Description of Artificial Sequence: Synthetic oligonucleotide
  Sense strand starting at position 3395 of SEQ ID NO: 1883223
cugugucuuccacagaguu

SEQ ID NO: 2177823 - RNA, 19 nt, Artificial Sequence
  Description of Artificial Sequence: Synthetic oligonucleotide
  Antisense strand to SEQ ID NO: 2177822
aacucuguggaagacacag

SEQ ID NO: 2177824 - RNA, 19 nt, Artificial Sequence
  Description of Artificial Sequence: Synthetic oligonucleotide
  Sense strand starting at position 3417 of SEQ ID NO: 1883223
aggagcuggacuuaagcau

SEQ ID NO: 2177825 - RNA, 19 nt, Artificial Sequence
  Description of Artificial Sequence: Synthetic oligonucleotide
  Antisense strand to SEQ ID NO: 2177824
augcuuaaguccagcuccu

SEQ ID NO: 2177826 - RNA, 19 nt, Artificial Sequence
  Description of Artificial Sequence: Synthetic oligonucleotide
  Sense strand starting at position 3715 of SEQ ID NO: 1883223
ggaguaucgcuugagccaa

SEQ ID NO: 2177827 - RNA, 19 nt, Artificial Sequence
  Description of Artificial Sequence: Synthetic oligonucleotide
  Antisense strand to SEQ ID NO: 2177826
uuggcucaagcgauacucc

SEQ ID NO: 2177828 - RNA, 19 nt, Artificial Sequence
  Description of Artificial Sequence: Synthetic oligonucleotide
  Sense strand starting at position 3730 of SEQ ID NO: 1883223
ccaagaguuccaggaaagc

SEQ ID NO: 2177829 - RNA, 19 nt, Artificial Sequence
  Description of Artificial Sequence: Synthetic oligonucleotide
  Antisense strand to SEQ ID NO: 2177828
gcuuuccuggaacucuugg

SEQ ID NO: 2177830 - RNA, 19 nt, Artificial Sequence
  Description of Artificial Sequence: Synthetic oligonucleotide
  Sense strand starting at position 2109 of SEQ ID NO: 1883224
ucccaaggucucugacaga

SEQ ID NO: 2177831 - RNA, 19 nt, Artificial Sequence
  Description of Artificial Sequence: Synthetic oligonucleotide
  Antisense strand to SEQ ID NO: 2177830
ucugucagagaccuuggga

SEQ ID NO: 2177832 - RNA, 19 nt, Artificial Sequence
  Description of Artificial Sequence: Synthetic oligonucleotide
  Sense strand starting at position 2373 of SEQ ID NO: 1883224
ggugguggcuccaggagau

SEQ ID NO: 2177833 - RNA, 19 nt, Artificial Sequence
  Description of Artificial Sequence: Synthetic oligonucleotide
  Antisense strand to SEQ ID NO: 2177832
aucuccuggagccaccacc

SEQ ID NO: 2177834 - RNA, 19 nt, Artificial Sequence
  Description of Artificial Sequence: Synthetic oligonucleotide
  Sense strand starting at position 2521 of SEQ ID NO: 1883224
gguggcggcuccuggaaau

SEQ ID NO: 2177835 - RNA, 19 nt, Artificial Sequence
  Description of Artificial Sequence: Synthetic oligonucleotide
  Antisense strand to SEQ ID NO: 2177834
auuuccaggagccgccacc

SEQ ID NO: 2177836 - RNA, 19 nt, Artificial Sequence
  Description of Artificial Sequence: Synthetic oligonucleotide
  Sense strand starting at position 2759 of SEQ ID NO: 1883224
gcggcuccguuauugagua

SEQ ID NO: 2177837 - RNA, 19 nt, Artificial Sequence
  Description of Artificial Sequence: Synthetic oligonucleotide
  Antisense strand to SEQ ID NO: 2177836
uacucaauaacggagccgc

SEQ ID NO: 2177838 - RNA, 19 nt, Artificial Sequence
  Description of Artificial Sequence: Synthetic oligonucleotide
  Sense strand starting at position 2761 of SEQ ID NO: 1883224
ggcuccguuauugaguaga

SEQ ID NO: 2177839 - RNA, 19 nt, Artificial Sequence
  Description of Artificial Sequence: Synthetic oligonucleotide
  Antisense strand to SEQ ID NO: 2177838
ucuacucaauaacggagcc

SEQ ID NO: 2177840 - RNA, 19 nt, Artificial Sequence
  Description of Artificial Sequence: Synthetic oligonucleotide
  Sense strand starting at position 2763 of SEQ ID NO: 1883224
cuccguuauugaguagaug

SEQ ID NO: 2177841 - RNA, 19 nt, Artificial Sequence
  Description of Artificial Sequence: Synthetic oligonucleotide
  Antisense strand to SEQ ID NO: 2177840
caucuacucaauaacggag

SEQ ID NO: 2177842 - RNA, 19 nt, Artificial Sequence
  Description of Artificial Sequence: Synthetic oligonucleotide
  Sense strand starting at position 2764 of SEQ ID NO: 1883224
uccguuauugaguagauga

SEQ ID NO: 2177843 - RNA, 19 nt, Artificial Sequence
  Description of Artificial Sequence: Synthetic oligonucleotide
  Antisense strand to SEQ ID NO: 2177842
ucaucuacucaauaacgga

SEQ ID NO: 2177844 - RNA, 19 nt, Artificial Sequence
  Description of Artificial Sequence: Synthetic oligonucleotide
  Sense strand starting at position 2766 of SEQ ID NO: 1883224
cguuauugaguagaugaga

SEQ ID NO: 2177845 - RNA, 19 nt, Artificial Sequence
  Description of Artificial Sequence: Synthetic oligonucleotide
  Antisense strand to SEQ ID NO: 2177844
ucucaucuacucaauaacg

SEQ ID NO: 2177846 - RNA, 19 nt, Artificial Sequence
  Description of Artificial Sequence: Synthetic oligonucleotide
  Sense strand starting at position 2771 of SEQ ID NO: 1883224
uugaguagaugagauggaa

SEQ ID NO: 2177847 - RNA, 19 nt, Artificial Sequence
  Description of Artificial Sequence: Synthetic oligonucleotide
  Antisense strand to SEQ ID NO: 2177846
uuccaucucaucuacucaa

SEQ ID NO: 2177848 - RNA, 19 nt, Artificial Sequence
  Description of Artificial Sequence: Synthetic oligonucleotide
  Sense strand starting at position 2973 of SEQ ID NO: 1883224
gcaaauaauacaggaggua

SEQ ID NO: 2177849 - RNA, 19 nt, Artificial Sequence
  Description of Artificial Sequence: Synthetic oligonucleotide
  Antisense strand to SEQ ID NO: 2177848
uaccuccuguauuauuugc

SEQ ID NO: 2177850 - RNA, 19 nt, Artificial Sequence
  Description of Artificial Sequence: Synthetic oligonucleotide
  Sense strand starting at position 2994 of SEQ ID NO: 1883224
uugaacaaauggugaaaua

SEQ ID NO: 2177851 - RNA, 19 nt, Artificial Sequence
  Description of Artificial Sequence: Synthetic oligonucleotide
  Antisense strand to SEQ ID NO: 2177850
uauuucaccauuuguucaa

SEQ ID NO: 2177852 - RNA, 19 nt, Artificial Sequence
  Description of Artificial Sequence: Synthetic oligonucleotide
  Sense strand starting at position 3077 of SEQ ID NO: 1883224
agguuagcaaauggugaaa

SEQ ID NO: 2177853 - RNA, 19 nt, Artificial Sequence
  Description of Artificial Sequence: Synthetic oligonucleotide
  Antisense strand to SEQ ID NO: 2177852
uuucaccauuugcuaaccu

SEQ ID NO: 2177854 - RNA, 19 nt, Artificial Sequence
  Description of Artificial Sequence: Synthetic oligonucleotide
  Sense strand starting at position 3079 of SEQ ID NO: 1883224
guuagcaaauggugaaaua

SEQ ID NO: 2177855 - RNA, 19 nt, Artificial Sequence
  Description of Artificial Sequence: Synthetic oligonucleotide
  Antisense strand to SEQ ID NO: 2177854
uauuucaccauuugcuaac

SEQ ID NO: 2177856 - RNA, 19 nt, Artificial Sequence
  Description of Artificial Sequence: Synthetic oligonucleotide
  Sense strand starting at position 3258 of SEQ ID NO: 1883224
gaagcagggauugguaaau

SEQ ID NO: 2177857 - RNA, 19 nt, Artificial Sequence
  Description of Artificial Sequence: Synthetic oligonucleotide
  Antisense strand to SEQ ID NO: 2177856
auuuaccaaucccugcuuc

SEQ ID NO: 2177858 - RNA, 19 nt, Artificial Sequence
  Description of Artificial Sequence: Synthetic oligonucleotide
  Sense strand starting at position 3264 of SEQ ID NO: 1883224
gggauugguaaaugugaaa

SEQ ID NO: 2177859 - RNA, 19 nt, Artificial Sequence
  Description of Artificial Sequence: Synthetic oligonucleotide
  Antisense strand to SEQ ID NO: 2177858
uuucacauuuaccaauccc

SEQ ID NO: 2177860 - RNA, 19 nt, Artificial Sequence
  Description of Artificial Sequence: Synthetic oligonucleotide
  Sense strand starting at position 3689 of SEQ ID NO: 1883224
gcccaagccucuugucuga

SEQ ID NO: 2177861 - RNA, 19 nt, Artificial Sequence
  Description of Artificial Sequence: Synthetic oligonucleotide
  Antisense strand to SEQ ID NO: 2177860
ucagacaagaggcuugggc

SEQ ID NO: 2177862 - RNA, 19 nt, Artificial Sequence
  Description of Artificial Sequence: Synthetic oligonucleotide
  Sense strand starting at position 3743 of SEQ ID NO: 1883224
ugucacuaaggccagaaua

SEQ ID NO: 2177863 - RNA, 19 nt, Artificial Sequence
  Description of Artificial Sequence: Synthetic oligonucleotide
  Antisense strand to SEQ ID NO: 2177862
uauucuggccuuagugaca

SEQ ID NO: 2177864 - RNA, 19 nt, Artificial Sequence
  Description of Artificial Sequence: Synthetic oligonucleotide
  Sense strand starting at position 3773 of SEQ ID NO: 1883224
ggcacuucuccuugcugga

SEQ ID NO: 2177865 - RNA, 19 nt, Artificial Sequence
  Description of Artificial Sequence: Synthetic oligonucleotide
  Antisense strand to SEQ ID NO: 2177864
uccagcaaggagaagugcc

SEQ ID NO: 2177866 - RNA, 19 nt, Artificial Sequence
  Description of Artificial Sequence: Synthetic oligonucleotide
  Sense strand starting at position 3940 of SEQ ID NO: 1883224
gcaugugaccuugaugugu

SEQ ID NO: 2177867 - RNA, 19 nt, Artificial Sequence
  Description of Artificial Sequence: Synthetic oligonucleotide
  Antisense strand to SEQ ID NO: 2177866
acacaucaaggucacaugc

SEQ ID NO: 2177868 - RNA, 19 nt, Artificial Sequence
  Description of Artificial Sequence: Synthetic oligonucleotide
  Sense strand starting at position 3944 of SEQ ID NO: 1883224
gugaccuugauguguguuu

SEQ ID NO: 2177869 - RNA, 19 nt, Artificial Sequence
  Description of Artificial Sequence: Synthetic oligonucleotide
  Antisense strand to SEQ ID NO: 2177868
aaacacacaucaaggucac

SEQ ID NO: 2177870 - RNA, 19 nt, Artificial Sequence
  Description of Artificial Sequence: Synthetic oligonucleotide
  Sense strand starting at position 3946 of SEQ ID NO: 1883224
gaccuugauguguguuugu

SEQ ID NO: 2177871 - RNA, 19 nt, Artificial Sequence
  Description of Artificial Sequence: Synthetic oligonucleotide
  Antisense strand to SEQ ID NO: 2177870
acaaacacacaucaagguc

SEQ ID NO: 2177872 - RNA, 19 nt, Artificial Sequence
  Description of Artificial Sequence: Synthetic oligonucleotide
  Sense strand starting at position 3965 of SEQ ID NO: 1883224
gcccaugucucaggacaag

SEQ ID NO: 2177873 - RNA, 19 nt, Artificial Sequence
  Description of Artificial Sequence: Synthetic oligonucleotide
  Antisense strand to SEQ ID NO: 2177872
cuuguccugagacaugggc

SEQ ID NO: 2177874 - RNA, 19 nt, Artificial Sequence
  Description of Artificial Sequence: Synthetic oligonucleotide
  Sense strand starting at position 3968 of SEQ ID NO: 1883224
caugucucaggacaaguuu

SEQ ID NO: 2177875 - RNA, 19 nt, Artificial Sequence
  Description of Artificial Sequence: Synthetic oligonucleotide
  Antisense strand to SEQ ID NO: 2177874
aaacuuguccugagacaug

SEQ ID NO: 2177876 - RNA, 19 nt, Artificial Sequence
  Description of Artificial Sequence: Synthetic oligonucleotide
  Sense strand starting at position 246 of SEQ ID NO: 1883225
uggcaaggauuauagaaau

SEQ ID NO: 2177877 - RNA, 19 nt, Artificial Sequence
  Description of Artificial Sequence: Synthetic oligonucleotide
  Antisense strand to SEQ ID NO: 2177876
auuucuauaauccuugcca

SEQ ID NO: 2177878 - RNA, 19 nt, Artificial Sequence
  Description of Artificial Sequence: Synthetic oligonucleotide
  Sense strand starting at position 252 of SEQ ID NO: 1883225
ggauuauagaaauggccca

SEQ ID NO: 2177879 - RNA, 19 nt, Artificial Sequence
  Description of Artificial Sequence: Synthetic oligonucleotide
  Antisense strand to SEQ ID NO: 2177878
ugggccauuucuauaaucc

SEQ ID NO: 2177880 - RNA, 19 nt, Artificial Sequence
  Description of Artificial Sequence: Synthetic oligonucleotide
  Sense strand starting at position 322 of SEQ ID NO: 1883225
ugaaucugccuaugaccua

SEQ ID NO: 2177881 - RNA, 19 nt, Artificial Sequence
  Description of Artificial Sequence: Synthetic oligonucleotide
  Antisense strand to SEQ ID NO: 2177880
uaggucauaggcagauuca

SEQ ID NO: 2177882 - RNA, 19 nt, Artificial Sequence
  Description of Artificial Sequence: Synthetic oligonucleotide
  Sense strand starting at position 390 of SEQ ID NO: 1883225
auguccauccugcaaguau

SEQ ID NO: 2177883 - RNA, 19 nt, Artificial Sequence
  Description of Artificial Sequence: Synthetic oligonucleotide
  Antisense strand to SEQ ID NO: 2177882
auacuugcaggauggacau

SEQ ID NO: 2177884 - RNA, 19 nt, Artificial Sequence
  Description of Artificial Sequence: Synthetic oligonucleotide
  Sense strand starting at position 468 of SEQ ID NO: 1883225
ggguacaaguucucaggau

SEQ ID NO: 2177885 - RNA, 19 nt, Artificial Sequence
  Description of Artificial Sequence: Synthetic oligonucleotide
  Antisense strand to SEQ ID NO: 2177884
auccugagaacuuguaccc

SEQ ID NO: 2177886 - RNA, 19 nt, Artificial Sequence
  Description of Artificial Sequence: Synthetic oligonucleotide
  Sense strand starting at position 505 of SEQ ID NO: 1883225
aggccacagucacuuagau

SEQ ID NO: 2177887 - RNA, 19 nt, Artificial Sequence
  Description of Artificial Sequence: Synthetic oligonucleotide
  Antisense strand to SEQ ID NO: 2177886
aucuaagugacuguggccu

SEQ ID NO: 2177888 - RNA, 19 nt, Artificial Sequence
  Description of Artificial Sequence: Synthetic oligonucleotide
  Sense strand starting at position 605 of SEQ ID NO: 1883225
ggcugcauucuuugagcaa

SEQ ID NO: 2177889 - RNA, 19 nt, Artificial Sequence
  Description of Artificial Sequence: Synthetic oligonucleotide
  Antisense strand to SEQ ID NO: 2177888
uugcucaaagaaugcagcc

SEQ ID NO: 2177890 - RNA, 19 nt, Artificial Sequence
  Description of Artificial Sequence: Synthetic oligonucleotide
  Sense strand starting at position 606 of SEQ ID NO: 1883225
gcugcauucuuugagcaau

SEQ ID NO: 2177891 - RNA, 19 nt, Artificial Sequence
  Description of Artificial Sequence: Synthetic oligonucleotide
  Antisense strand to SEQ ID NO: 2177890
auugcucaaagaaugcagc

SEQ ID NO: 2177892 - RNA, 19 nt, Artificial Sequence
  Description of Artificial Sequence: Synthetic oligonucleotide
  Sense strand starting at position 612 of SEQ ID NO: 1883225
uucuuugagcaauggccaa

SEQ ID NO: 2177893 - RNA, 19 nt, Artificial Sequence
  Description of Artificial Sequence: Synthetic oligonucleotide
  Antisense strand to SEQ ID NO: 2177892
uuggccauugcucaaagaa

SEQ ID NO: 2177894 - RNA, 19 nt, Artificial Sequence
  Description of Artificial Sequence: Synthetic oligonucleotide
  Sense strand starting at position 739 of SEQ ID NO: 1883225
ugagcaaugcuaggguguu

SEQ ID NO: 2177895 - RNA, 19 nt, Artificial Sequence
  Description of Artificial Sequence: Synthetic oligonucleotide
  Antisense strand to SEQ ID NO: 2177894
aacacccuagcauugcuca

SEQ ID NO: 2177896 - RNA, 19 nt, Artificial Sequence
  Description of Artificial Sequence: Synthetic oligonucleotide
  Sense strand starting at position 745 of SEQ ID NO: 1883225
augcuaggguguugggaau

SEQ ID NO: 2177897 - RNA, 19 nt, Artificial Sequence
  Description of Artificial Sequence: Synthetic oligonucleotide
  Antisense strand to SEQ ID NO: 2177896
auucccaacacccuagcau

SEQ ID NO: 2177898 - RNA, 19 nt, Artificial Sequence
  Description of Artificial Sequence: Synthetic oligonucleotide
  Sense strand starting at position 934 of SEQ ID NO: 1883225
gcaugagccaucugugacu

SEQ ID NO: 2177899 - RNA, 19 nt, Artificial Sequence
  Description of Artificial Sequence: Synthetic oligonucleotide
  Antisense strand to SEQ ID NO: 2177898
agucacagauggcucaugc

SEQ ID NO: 2177900 - RNA, 19 nt, Artificial Sequence
  Description of Artificial Sequence: Synthetic oligonucleotide
  Sense strand starting at position 936 of SEQ ID NO: 1883225
augagccaucugugacuua

SEQ ID NO: 2177901 - RNA, 19 nt, Artificial Sequence
  Description of Artificial Sequence: Synthetic oligonucleotide
  Antisense strand to SEQ ID NO: 2177900
uaagucacagauggcucau

SEQ ID NO: 2177902 - RNA, 19 nt, Artificial Sequence
  Description of Artificial Sequence: Synthetic oligonucleotide
  Sense strand starting at position 937 of SEQ ID NO: 1883225
ugagccaucugugacuuaa

SEQ ID NO: 2177903 - RNA, 19 nt, Artificial Sequence
  Description of Artificial Sequence: Synthetic oligonucleotide
  Antisense strand to SEQ ID NO: 2177902
uuaagucacagauggcuca

SEQ ID NO: 2177904 - RNA, 19 nt, Artificial Sequence
  Description of Artificial Sequence: Synthetic oligonucleotide
  Sense strand starting at position 1049 of SEQ ID NO: 1883225
uguagaaacugugcuuauc

SEQ ID NO: 2177905 - RNA, 19 nt, Artificial Sequence
  Description of Artificial Sequence: Synthetic oligonucleotide
  Antisense strand to SEQ ID NO: 2177904
gauaagcacaguuucuaca

SEQ ID NO: 2177906 - RNA, 19 nt, Artificial Sequence
  Description of Artificial Sequence: Synthetic oligonucleotide
  Sense strand starting at position 1052 of SEQ ID NO: 1883225
agaaacugugcuuaucacu

SEQ ID NO: 2177907 - RNA, 19 nt, Artificial Sequence
  Description of Artificial Sequence: Synthetic oligonucleotide
  Antisense strand to SEQ ID NO: 2177906
agugauaagcacaguuucu

SEQ ID NO: 2177908 - RNA, 19 nt, Artificial Sequence
  Description of Artificial Sequence: Synthetic oligonucleotide
  Sense strand starting at position 1080 of SEQ ID NO: 1883225
ugaauaaacacguggguaa

SEQ ID NO: 2177909 - RNA, 19 nt, Artificial Sequence
  Description of Artificial Sequence: Synthetic oligonucleotide
  Antisense strand to SEQ ID NO: 2177908
uuacccacguguuuauuca

SEQ ID NO: 2177910 - RNA, 19 nt, Artificial Sequence
  Description of Artificial Sequence: Synthetic oligonucleotide
  Sense strand starting at position 1081 of SEQ ID NO: 1883225
gaauaaacacguggguaaa

SEQ ID NO: 2177911 - RNA, 19 nt, Artificial Sequence
  Description of Artificial Sequence: Synthetic oligonucleotide
  Antisense strand to SEQ ID NO: 2177910
uuuacccacguguuuauuc

SEQ ID NO: 2177912 - RNA, 19 nt, Artificial Sequence
  Description of Artificial Sequence: Synthetic oligonucleotide
  Sense strand starting at position 1161 of SEQ ID NO: 1883225
cuauauuucuguguguauc

SEQ ID NO: 2177913 - RNA, 19 nt, Artificial Sequence
  Description of Artificial Sequence: Synthetic oligonucleotide
  Antisense strand to SEQ ID NO: 2177912
gauacacacagaaauauag

SEQ ID NO: 2177914 - RNA, 19 nt, Artificial Sequence
  Description of Artificial Sequence: Synthetic oligonucleotide
  Sense strand starting at position 1162 of SEQ ID NO: 1883225
uauauuucuguguguaucu

SEQ ID NO: 2177915 - RNA, 19 nt, Artificial Sequence
  Description of Artificial Sequence: Synthetic oligonucleotide
  Antisense strand to SEQ ID NO: 2177914
agauacacacagaaauaua

SEQ ID NO: 2177916 - RNA, 19 nt, Artificial Sequence
  Description of Artificial Sequence: Synthetic oligonucleotide
  Sense strand starting at position 1163 of SEQ ID NO: 1883225
auauuucuguguguaucuu

SEQ ID NO: 2177917 - RNA, 19 nt, Artificial Sequence
  Description of Artificial Sequence: Synthetic oligonucleotide
  Antisense strand to SEQ ID NO: 2177916
aagauacacacagaaauau

SEQ ID NO: 2177918 - RNA, 19 nt, Artificial Sequence
  Description of Artificial Sequence: Synthetic oligonucleotide
  Sense strand starting at position 1169 of SEQ ID NO: 1883225
cuguguguaucuuuaauuc

SEQ ID NO: 2177919 - RNA, 19 nt, Artificial Sequence
  Description of Artificial Sequence: Synthetic oligonucleotide
  Antisense strand to SEQ ID NO: 2177918
gaauuaaagauacacacag

SEQ ID NO: 2177920 - RNA, 19 nt, Artificial Sequence
  Description of Artificial Sequence: Synthetic oligonucleotide
  Sense strand starting at position 1240 of SEQ ID NO: 1883225
gggagcugcccugauaggu

SEQ ID NO: 2177921 - RNA, 19 nt, Artificial Sequence
  Description of Artificial Sequence: Synthetic oligonucleotide
  Antisense strand to SEQ ID NO: 2177920
accuaucagggcagcuccc

SEQ ID NO: 2177922 - RNA, 19 nt, Artificial Sequence
  Description of Artificial Sequence: Synthetic oligonucleotide
  Sense strand starting at position 1368 of SEQ ID NO: 1883225
gaauccggagcuuguuuaa

SEQ ID NO: 2177923 - RNA, 19 nt, Artificial Sequence
  Description of Artificial Sequence: Synthetic oligonucleotide
  Antisense strand to SEQ ID NO: 2177922
uuaaacaagcuccggauuc

SEQ ID NO: 2177924 - RNA, 19 nt, Artificial Sequence
  Description of Artificial Sequence: Synthetic oligonucleotide
  Sense strand starting at position 1417 of SEQ ID NO: 1883225
gcuggcauccgcugucauu

SEQ ID NO: 2177925 - RNA, 19 nt, Artificial Sequence
  Description of Artificial Sequence: Synthetic oligonucleotide
  Antisense strand to SEQ ID NO: 2177924
aaugacagcggaugccagc

SEQ ID NO: 2177926 - RNA, 19 nt, Artificial Sequence
  Description of Artificial Sequence: Synthetic oligonucleotide
  Sense strand starting at position 1635 of SEQ ID NO: 1883225
gugauuugcuccgguuuca

SEQ ID NO: 2177927 - RNA, 19 nt, Artificial Sequence
  Description of Artificial Sequence: Synthetic oligonucleotide
  Antisense strand to SEQ ID NO: 2177926
ugaaaccggagcaaaucac

SEQ ID NO: 2177928 - RNA, 19 nt, Artificial Sequence
  Description of Artificial Sequence: Synthetic oligonucleotide
  Sense strand starting at position 1667 of SEQ ID NO: 1883225
gcgggaaugcucgggaaga

SEQ ID NO: 2177929 - RNA, 19 nt, Artificial Sequence
  Description of Artificial Sequence: Synthetic oligonucleotide
  Antisense strand to SEQ ID NO: 2177928
ucuucccgagcauucccgc

SEQ ID NO: 2177930 - RNA, 19 nt, Artificial Sequence
  Description of Artificial Sequence: Synthetic oligonucleotide
  Sense strand starting at position 1668 of SEQ ID NO: 1883225
cgggaaugcucgggaagag

SEQ ID NO: 2177931 - RNA, 19 nt, Artificial Sequence
  Description of Artificial Sequence: Synthetic oligonucleotide
  Antisense strand to SEQ ID NO: 2177930
cucuucccgagcauucccg

SEQ ID NO: 2177932 - RNA, 19 nt, Artificial Sequence
  Description of Artificial Sequence: Synthetic oligonucleotide
  Sense strand starting at position 3232 of SEQ ID NO: 1883225
gguccuugguccugaauau

SEQ ID NO: 2177933 - RNA, 19 nt, Artificial Sequence
  Description of Artificial Sequence: Synthetic oligonucleotide
  Antisense strand to SEQ ID NO: 2177932
auauucaggaccaaggacc

SEQ ID NO: 2177934 - RNA, 19 nt, Artificial Sequence
  Description of Artificial Sequence: Synthetic oligonucleotide
  Sense strand starting at position 3233 of SEQ ID NO: 1883225
guccuugguccugaauaua

SEQ ID NO: 2177935 - RNA, 19 nt, Artificial Sequence
  Description of Artificial Sequence: Synthetic oligonucleotide
  Antisense strand to SEQ ID NO: 2177934
uauauucaggaccaaggac

SEQ ID NO: 2177936 - RNA, 19 nt, Artificial Sequence
  Description of Artificial Sequence: Synthetic oligonucleotide
  Sense strand starting at position 3245 of SEQ ID NO: 1883225
gaauauagguuggagaggu

SEQ ID NO: 2177937 - RNA, 19 nt, Artificial Sequence
  Description of Artificial Sequence: Synthetic oligonucleotide
  Antisense strand to SEQ ID NO: 2177936
accucuccaaccuauauuc

SEQ ID NO: 2177938 - RNA, 19 nt, Artificial Sequence
  Description of Artificial Sequence: Synthetic oligonucleotide
  Sense strand starting at position 3272 of SEQ ID NO: 1883225
agaagagguuccuaggagu

SEQ ID NO: 2177939 - RNA, 19 nt, Artificial Sequence
  Description of Artificial Sequence: Synthetic oligonucleotide
  Antisense strand to SEQ ID NO: 2177938
acuccuaggaaccucuucu

SEQ ID NO: 2177940 - RNA, 19 nt, Artificial Sequence
  Description of Artificial Sequence: Synthetic oligonucleotide
  Sense strand starting at position 3366 of SEQ ID NO: 1883225
gagguauugagccgaguag

SEQ ID NO: 2177941 - RNA, 19 nt, Artificial Sequence
  Description of Artificial Sequence: Synthetic oligonucleotide
  Antisense strand to SEQ ID NO: 2177940
cuacucggcucaauaccuc

SEQ ID NO: 2177942 - RNA, 19 nt, Artificial Sequence
  Description of Artificial Sequence: Synthetic oligonucleotide
  Sense strand starting at position 3368 of SEQ ID NO: 1883225
gguauugagccgaguagcu

SEQ ID NO: 2177943 - RNA, 19 nt, Artificial Sequence
  Description of Artificial Sequence: Synthetic oligonucleotide
  Antisense strand to SEQ ID NO: 2177942
agcuacucggcucaauacc

SEQ ID NO: 2177944 - RNA, 19 nt, Artificial Sequence
  Description of Artificial Sequence: Synthetic oligonucleotide
  Sense strand starting at position 3646 of SEQ ID NO: 1883225
gggucaacgucucaucuca

SEQ ID NO: 2177945 - RNA, 19 nt, Artificial Sequence
  Description of Artificial Sequence: Synthetic oligonucleotide
  Antisense strand to SEQ ID NO: 2177944
ugagaugagacguugaccc

SEQ ID NO: 2177946 - RNA, 19 nt, Artificial Sequence
  Description of Artificial Sequence: Synthetic oligonucleotide
  Sense strand starting at position 3657 of SEQ ID NO: 1883225
ucaucucaguccugauguu

SEQ ID NO: 2177947 - RNA, 19 nt, Artificial Sequence
  Description of Artificial Sequence: Synthetic oligonucleotide
  Antisense strand to SEQ ID NO: 2177946
aacaucaggacugagauga

SEQ ID NO: 2177948 - RNA, 19 nt, Artificial Sequence
  Description of Artificial Sequence: Synthetic oligonucleotide
  Sense strand starting at position 3779 of SEQ ID NO: 1883225
aagguaaagcggugaaaga

SEQ ID NO: 2177949 - RNA, 19 nt, Artificial Sequence
  Description of Artificial Sequence: Synthetic oligonucleotide
  Antisense strand to SEQ ID NO: 2177948
ucuuucaccgcuuuaccuu

SEQ ID NO: 2177950 - RNA, 19 nt, Artificial Sequence
  Description of Artificial Sequence: Synthetic oligonucleotide
  Sense strand starting at position 3856 of SEQ ID NO: 1883225
aggugcaaugcuuguauau

SEQ ID NO: 2177951 - RNA, 19 nt, Artificial Sequence
  Description of Artificial Sequence: Synthetic oligonucleotide
  Antisense strand to SEQ ID NO: 2177950
auauacaagcauugcaccu

SEQ ID NO: 2177952 - RNA, 19 nt, Artificial Sequence
  Description of Artificial Sequence: Synthetic oligonucleotide
  Sense strand starting at position 3879 of SEQ ID NO: 1883225
ggagaugugaucugcuaca

SEQ ID NO: 2177953 - RNA, 19 nt, Artificial Sequence
  Description of Artificial Sequence: Synthetic oligonucleotide
  Antisense strand to SEQ ID NO: 2177952
uguagcagaucacaucucc

SEQ ID NO: 2177954 - RNA, 19 nt, Artificial Sequence
  Description of Artificial Sequence: Synthetic oligonucleotide
  Sense strand starting at position 3901 of SEQ ID NO: 1883225
guuugugauaaaggaguaa

SEQ ID NO: 2177955 - RNA, 19 nt, Artificial Sequence
  Description of Artificial Sequence: Synthetic oligonucleotide
  Antisense strand to SEQ ID NO: 2177954
uuacuccuuuaucacaaac

SEQ ID NO: 2177956 - RNA, 19 nt, Artificial Sequence
  Description of Artificial Sequence: Synthetic oligonucleotide
  Sense strand starting at position 66 of SEQ ID NO: 1883226
augggaaauuaacauggau

SEQ ID NO: 2177957 - RNA, 19 nt, Artificial Sequence
  Description of Artificial Sequence: Synthetic oligonucleotide
  Antisense strand to SEQ ID NO: 2177956
auccauguuaauuucccau

SEQ ID NO: 2177958 - RNA, 19 nt, Artificial Sequence
  Description of Artificial Sequence: Synthetic oligonucleotide
  Sense strand starting at position 144 of SEQ ID NO: 1883226
ucaggaucaugucucuuaa

SEQ ID NO: 2177959 - RNA, 19 nt, Artificial Sequence
  Description of Artificial Sequence: Synthetic oligonucleotide
  Antisense strand to SEQ ID NO: 2177958
uuaagagacaugauccuga

SEQ ID NO: 2177960 - RNA, 19 nt, Artificial Sequence
  Description of Artificial Sequence: Synthetic oligonucleotide
  Sense strand starting at position 146 of SEQ ID NO: 1883226
aggaucaugucucuuaaag

SEQ ID NO: 2177961 - RNA, 19 nt, Artificial Sequence
  Description of Artificial Sequence: Synthetic oligonucleotide
  Antisense strand to SEQ ID NO: 2177960
cuuuaagagacaugauccu

SEQ ID NO: 2177962 - RNA, 19 nt, Artificial Sequence
  Description of Artificial Sequence: Synthetic oligonucleotide
  Sense strand starting at position 318 of SEQ ID NO: 1883226
aggugugguccugagccaa

SEQ ID NO: 2177963 - RNA, 19 nt, Artificial Sequence
  Description of Artificial Sequence: Synthetic oligonucleotide
  Antisense strand to SEQ ID NO: 2177962
uuggcucaggaccacaccu

SEQ ID NO: 2177964 - RNA, 19 nt, Artificial Sequence
  Description of Artificial Sequence: Synthetic oligonucleotide
  Sense strand starting at position 385 of SEQ ID NO: 1883226
agauuauccuuagugaauu

SEQ ID NO: 2177965 - RNA, 19 nt, Artificial Sequence
  Description of Artificial Sequence: Synthetic oligonucleotide
  Antisense strand to SEQ ID NO: 2177964
aauucacuaaggauaaucu

SEQ ID NO: 2177966 - RNA, 19 nt, Artificial Sequence
  Description of Artificial Sequence: Synthetic oligonucleotide
  Sense strand starting at position 406 of SEQ ID NO: 1883226
auuuauagaugguggugau

SEQ ID NO: 2177967 - RNA, 19 nt, Artificial Sequence
  Description of Artificial Sequence: Synthetic oligonucleotide
  Antisense strand to SEQ ID NO: 2177966
aucaccaccaucuauaaau

SEQ ID NO: 2177968 - RNA, 19 nt, Artificial Sequence
  Description of Artificial Sequence: Synthetic oligonucleotide
  Sense strand starting at position 407 of SEQ ID NO: 1883226
uuuauagaugguggugaua

SEQ ID NO: 2177969 - RNA, 19 nt, Artificial Sequence
  Description of Artificial Sequence: Synthetic oligonucleotide
  Antisense strand to SEQ ID NO: 2177968
uaucaccaccaucuauaaa

SEQ ID NO: 2177970 - RNA, 19 nt, Artificial Sequence
  Description of Artificial Sequence: Synthetic oligonucleotide
  Sense strand starting at position 512 of SEQ ID NO: 1883226
aaaguaaguuuguugaaga

SEQ ID NO: 2177971 - RNA, 19 nt, Artificial Sequence
  Description of Artificial Sequence: Synthetic oligonucleotide
  Antisense strand to SEQ ID NO: 2177970
ucuucaacaaacuuacuuu

SEQ ID NO: 2177972 - RNA, 19 nt, Artificial Sequence
  Description of Artificial Sequence: Synthetic oligonucleotide
  Sense strand starting at position 523 of SEQ ID NO: 1883226
guugaagaaugagcacaua

SEQ ID NO: 2177973 - RNA, 19 nt, Artificial Sequence
  Description of Artificial Sequence: Synthetic oligonucleotide
  Antisense strand to SEQ ID NO: 2177972
uaugugcucauucuucaac

SEQ ID NO: 2177974 - RNA, 19 nt, Artificial Sequence
  Description of Artificial Sequence: Synthetic oligonucleotide
  Sense strand starting at position 558 of SEQ ID NO: 1883226
gucuuaaauuaccuguaga

SEQ ID NO: 2177975 - RNA, 19 nt, Artificial Sequence
  Description of Artificial Sequence: Synthetic oligonucleotide
  Antisense strand to SEQ ID NO: 2177974
ucuacagguaauuuaagac

SEQ ID NO: 2177976 - RNA, 19 nt, Artificial Sequence
  Description of Artificial Sequence: Synthetic oligonucleotide
  Sense strand starting at position 604 of SEQ ID NO: 1883226
agugaugaccuaugcccua

SEQ ID NO: 2177977 - RNA, 19 nt, Artificial Sequence
  Description of Artificial Sequence: Synthetic oligonucleotide
  Antisense strand to SEQ ID NO: 2177976
uagggcauaggucaucacu

SEQ ID NO: 2177978 - RNA, 19 nt, Artificial Sequence
  Description of Artificial Sequence: Synthetic oligonucleotide
  Sense strand starting at position 651 of SEQ ID NO: 1883226
ggguguuacucauuacaau

SEQ ID NO: 2177979 - RNA, 19 nt, Artificial Sequence
  Description of Artificial Sequence: Synthetic oligonucleotide
  Antisense strand to SEQ ID NO: 2177978
auuguaaugaguaacaccc

SEQ ID NO: 2177980 - RNA, 19 nt, Artificial Sequence
  Description of Artificial Sequence: Synthetic oligonucleotide
  Sense strand starting at position 652 of SEQ ID NO: 1883226
gguguuacucauuacaauc

SEQ ID NO: 2177981 - RNA, 19 nt, Artificial Sequence
  Description of Artificial Sequence: Synthetic oligonucleotide
  Antisense strand to SEQ ID NO: 2177980
gauuguaaugaguaacacc

SEQ ID NO: 2177982 - RNA, 19 nt, Artificial Sequence
  Description of Artificial Sequence: Synthetic oligonucleotide
  Sense strand starting at position 683 of SEQ ID NO: 1883226
uuuguugagugccuaguau

SEQ ID NO: 2177983 - RNA, 19 nt, Artificial Sequence
  Description of Artificial Sequence: Synthetic oligonucleotide
  Antisense strand to SEQ ID NO: 2177982
auacuaggcacucaacaaa

SEQ ID NO: 2177984 - RNA, 19 nt, Artificial Sequence
  Description of Artificial Sequence: Synthetic oligonucleotide
  Sense strand starting at position 714 of SEQ ID NO: 1883226
guuccaagcccugggaaua

SEQ ID NO: 2177985 - RNA, 19 nt, Artificial Sequence
  Description of Artificial Sequence: Synthetic oligonucleotide
  Antisense strand to SEQ ID NO: 2177984
uauucccagggcuuggaac

SEQ ID NO: 2177986 - RNA, 19 nt, Artificial Sequence
  Description of Artificial Sequence: Synthetic oligonucleotide
  Sense strand starting at position 1136 of SEQ ID NO: 1883226
ggauuagacuucccuuaag

SEQ ID NO: 2177987 - RNA, 19 nt, Artificial Sequence
  Description of Artificial Sequence: Synthetic oligonucleotide
  Antisense strand to SEQ ID NO: 2177986
cuuaagggaagucuaaucc

SEQ ID NO: 2177988 - RNA, 19 nt, Artificial Sequence
  Description of Artificial Sequence: Synthetic oligonucleotide
  Sense strand starting at position 1154 of SEQ ID NO: 1883226
gucauucaugccggagguu

SEQ ID NO: 2177989 - RNA, 19 nt, Artificial Sequence
  Description of Artificial Sequence: Synthetic oligonucleotide
  Antisense strand to SEQ ID NO: 2177988
aaccuccggcaugaaugac

SEQ ID NO: 2177990 - RNA, 19 nt, Artificial Sequence
  Description of Artificial Sequence: Synthetic oligonucleotide
  Sense strand starting at position 1290 of SEQ ID NO: 1883226
gaaggcaagucugugugaa

SEQ ID NO: 2177991 - RNA, 19 nt, Artificial Sequence
  Description of Artificial Sequence: Synthetic oligonucleotide
  Antisense strand to SEQ ID NO: 2177990
uucacacagacuugccuuc

SEQ ID NO: 2177992 - RNA, 19 nt, Artificial Sequence
  Description of Artificial Sequence: Synthetic oligonucleotide
  Sense strand starting at position 1291 of SEQ ID NO: 1883226
aaggcaagucugugugaau

SEQ ID NO: 2177993 - RNA, 19 nt, Artificial Sequence
  Description of Artificial Sequence: Synthetic oligonucleotide
  Antisense strand to SEQ ID NO: 2177992
auucacacagacuugccuu

SEQ ID NO: 2177994 - RNA, 19 nt, Artificial Sequence
  Description of Artificial Sequence: Synthetic oligonucleotide
  Sense strand starting at position 1292 of SEQ ID NO: 1883226
aggcaagucugugugaaua

SEQ ID NO: 2177995 - RNA, 19 nt, Artificial Sequence
  Description of Artificial Sequence: Synthetic oligonucleotide
  Antisense strand to SEQ ID NO: 2177994
uauucacacagacuugccu

SEQ ID NO: 2177996 - RNA, 19 nt, Artificial Sequence
  Description of Artificial Sequence: Synthetic oligonucleotide
  Sense strand starting at position 1324 of SEQ ID NO: 1883226
gacucaagauucuaaugug

SEQ ID NO: 2177997 - RNA, 19 nt, Artificial Sequence
  Description of Artificial Sequence: Synthetic oligonucleotide
  Antisense strand to SEQ ID NO: 2177996
cacauuagaaucuugaguc

SEQ ID NO: 2177998 - RNA, 19 nt, Artificial Sequence
  Description of Artificial Sequence: Synthetic oligonucleotide
  Sense strand starting at position 1341 of SEQ ID NO: 1883226
uggauacuacugcggaauu

SEQ ID NO: 2177999 - RNA, 19 nt, Artificial Sequence
  Description of Artificial Sequence: Synthetic oligonucleotide
  Antisense strand to SEQ ID NO: 2177998
aauuccgcaguaguaucca

SEQ ID NO: 2178000 - RNA, 19 nt, Artificial Sequence
  Description of Artificial Sequence: Synthetic oligonucleotide
  Sense strand starting at position 1360 of SEQ ID NO: 1883226
ccuguuaaacgcgcugauu

SEQ ID NO: 2178001 - RNA, 19 nt, Artificial Sequence
  Description of Artificial Sequence: Synthetic oligonucleotide
  Antisense strand to SEQ ID NO: 2178000
aaucagcgcguuuaacagg

SEQ ID NO: 2178002 - RNA, 19 nt, Artificial Sequence
  Description of Artificial Sequence: Synthetic oligonucleotide
  Sense strand starting at position 1362 of SEQ ID NO: 1883226
uguuaaacgcgcugauuua

SEQ ID NO: 2178003 - RNA, 19 nt, Artificial Sequence
  Description of Artificial Sequence: Synthetic oligonucleotide
  Antisense strand to SEQ ID NO: 2178002
uaaaucagcgcguuuaaca

SEQ ID NO: 2178004 - RNA, 19 nt, Artificial Sequence
  Description of Artificial Sequence: Synthetic oligonucleotide
  Sense strand starting at position 1363 of SEQ ID NO: 1883226
guuaaacgcgcugauuuaa

SEQ ID NO: 2178005 - RNA, 19 nt, Artificial Sequence
  Description of Artificial Sequence: Synthetic oligonucleotide
  Antisense strand to SEQ ID NO: 2178004
uuaaaucagcgcguuuaac

SEQ ID NO: 2178006 - RNA, 19 nt, Artificial Sequence
  Description of Artificial Sequence: Synthetic oligonucleotide
  Sense strand starting at position 1378 of SEQ ID NO: 1883226
uuaauaaagucuucgguuu

SEQ ID NO: 2178007 - RNA, 19 nt, Artificial Sequence
  Description of Artificial Sequence: Synthetic oligonucleotide
  Antisense strand to SEQ ID NO: 2178006
aaaccgaagacuuuauuaa

SEQ ID NO: 2178008 - RNA, 19 nt, Artificial Sequence
  Description of Artificial Sequence: Synthetic oligonucleotide
  Sense strand starting at position 1379 of SEQ ID NO: 1883226
uaauaaagucuucgguuua

SEQ ID NO: 2178009 - RNA, 19 nt, Artificial Sequence
  Description of Artificial Sequence: Synthetic oligonucleotide
  Antisense strand to SEQ ID NO: 2178008
uaaaccgaagacuuuauua

SEQ ID NO: 2178010 - RNA, 19 nt, Artificial Sequence
  Description of Artificial Sequence: Synthetic oligonucleotide
  Sense strand starting at position 1384 of SEQ ID NO: 1883226
aagucuucgguuuauccaa

SEQ ID NO: 2178011 - RNA, 19 nt, Artificial Sequence
  Description of Artificial Sequence: Synthetic oligonucleotide
  Antisense strand to SEQ ID NO: 2178010
uuggauaaaccgaagacuu

SEQ ID NO: 2178012 - RNA, 19 nt, Artificial Sequence
  Description of Artificial Sequence: Synthetic oligonucleotide
  Sense strand starting at position 1392 of SEQ ID NO: 1883226
gguuuauccaaacgggcua

SEQ ID NO: 2178013 - RNA, 19 nt, Artificial Sequence
  Description of Artificial Sequence: Synthetic oligonucleotide
  Antisense strand to SEQ ID NO: 2178012
uagcccguuuggauaaacc

SEQ ID NO: 2178014 - RNA, 19 nt, Artificial Sequence
  Description of Artificial Sequence: Synthetic oligonucleotide
  Sense strand starting at position 1462 of SEQ ID NO: 1883226
gguuuccucaaguguucca

SEQ ID NO: 2178015 - RNA, 19 nt, Artificial Sequence
  Description of Artificial Sequence: Synthetic oligonucleotide
  Antisense strand to SEQ ID NO: 2178014
uggaacacuugaggaaacc

SEQ ID NO: 2178016 - RNA, 19 nt, Artificial Sequence
  Description of Artificial Sequence: Synthetic oligonucleotide
  Sense strand starting at position 1491 of SEQ ID NO: 1883226
cagcaagagucaccugcuu

SEQ ID NO: 2178017 - RNA, 19 nt, Artificial Sequence
  Description of Artificial Sequence: Synthetic oligonucleotide
  Antisense strand to SEQ ID NO: 2178016
aagcaggugacucuugcug

SEQ ID NO: 2178018 - RNA, 19 nt, Artificial Sequence
  Description of Artificial Sequence: Synthetic oligonucleotide
  Sense strand starting at position 1698 of SEQ ID NO: 1883226
caaugcaaucugggugguu

SEQ ID NO: 2178019 - RNA, 19 nt, Artificial Sequence
  Description of Artificial Sequence: Synthetic oligonucleotide
  Antisense strand to SEQ ID NO: 2178018
aaccacccagauugcauug

SEQ ID NO: 2178020 - RNA, 19 nt, Artificial Sequence
  Description of Artificial Sequence: Synthetic oligonucleotide
  Sense strand starting at position 1699 of SEQ ID NO: 1883226
aaugcaaucugggugguuu

SEQ ID NO: 2178021 - RNA, 19 nt, Artificial Sequence
  Description of Artificial Sequence: Synthetic oligonucleotide
  Antisense strand to SEQ ID NO: 2178020
aaaccacccagauugcauu

SEQ ID NO: 2178022 - RNA, 19 nt, Artificial Sequence
  Description of Artificial Sequence: Synthetic oligonucleotide
  Sense strand starting at position 2139 of SEQ ID NO: 1883226
cuugaaagguuaccggauu

SEQ ID NO: 2178023 - RNA, 19 nt, Artificial Sequence
  Description of Artificial Sequence: Synthetic oligonucleotide
  Antisense strand to SEQ ID NO: 2178022
aauccgguaaccuuucaag

SEQ ID NO: 2178024 - RNA, 19 nt, Artificial Sequence
  Description of Artificial Sequence: Synthetic oligonucleotide
  Sense strand starting at position 2140 of SEQ ID NO: 1883226
uugaaagguuaccggauuu

SEQ ID NO: 2178025 - RNA, 19 nt, Artificial Sequence
  Description of Artificial Sequence: Synthetic oligonucleotide
  Antisense strand to SEQ ID NO: 2178024
aaauccgguaaccuuucaa

SEQ ID NO: 2178026 - RNA, 19 nt, Artificial Sequence
  Description of Artificial Sequence: Synthetic oligonucleotide
  Sense strand starting at position 2151 of SEQ ID NO: 1883226
ccggauuuguacccggagu

SEQ ID NO: 2178027 - RNA, 19 nt, Artificial Sequence
  Description of Artificial Sequence: Synthetic oligonucleotide
  Antisense strand to SEQ ID NO: 2178026
acuccggguacaaauccgg

SEQ ID NO: 2178028 - RNA, 19 nt, Artificial Sequence
  Description of Artificial Sequence: Synthetic oligonucleotide
  Sense strand starting at position 2152 of SEQ ID NO: 1883226
cggauuuguacccggagug

SEQ ID NO: 2178029 - RNA, 19 nt, Artificial Sequence
  Description of Artificial Sequence: Synthetic oligonucleotide
  Antisense strand to SEQ ID NO: 2178028
cacuccggguacaaauccg

SEQ ID NO: 2178030 - RNA, 19 nt, Artificial Sequence
  Description of Artificial Sequence: Synthetic oligonucleotide
  Sense strand starting at position 2231 of SEQ ID NO: 1883226
acaccuagagccgaauuau

SEQ ID NO: 2178031 - RNA, 19 nt, Artificial Sequence
  Description of Artificial Sequence: Synthetic oligonucleotide
  Antisense strand to SEQ ID NO: 2178030
auaauucggcucuaggugu

SEQ ID NO: 2178032 - RNA, 19 nt, Artificial Sequence
  Description of Artificial Sequence: Synthetic oligonucleotide
  Sense strand starting at position 2752 of SEQ ID NO: 1883226
gcugcuuugcgcgcgauaa

SEQ ID NO: 2178033 - RNA, 19 nt, Artificial Sequence
  Description of Artificial Sequence: Synthetic oligonucleotide
  Antisense strand to SEQ ID NO: 2178032
uuaucgcgcgcaaagcagc

SEQ ID NO: 2178034 - RNA, 19 nt, Artificial Sequence
  Description of Artificial Sequence: Synthetic oligonucleotide
  Sense strand starting at position 2933 of SEQ ID NO: 1883226
gcuguuugcacugaaaguu

SEQ ID NO: 2178035 - RNA, 19 nt, Artificial Sequence
  Description of Artificial Sequence: Synthetic oligonucleotide
  Antisense strand to SEQ ID NO: 2178034
aacuuucagugcaaacagc

SEQ ID NO: 2178036 - RNA, 19 nt, Artificial Sequence
  Description of Artificial Sequence: Synthetic oligonucleotide
  Sense strand starting at position 24 of SEQ ID NO: 1883227
cucaaaucagucugguaga

SEQ ID NO: 2178037 - RNA, 19 nt, Artificial Sequence
  Description of Artificial Sequence: Synthetic oligonucleotide
  Antisense strand to SEQ ID NO: 2178036
ucuaccagacugauuugag

SEQ ID NO: 2178038 - RNA, 19 nt, Artificial Sequence
  Description of Artificial Sequence: Synthetic oligonucleotide
  Sense strand starting at position 118 of SEQ ID NO: 1883227
ugacaauaauagcugugau

SEQ ID NO: 2178039 - RNA, 19 nt, Artificial Sequence
  Description of Artificial Sequence: Synthetic oligonucleotide
  Antisense strand to SEQ ID NO: 2178038
aucacagcuauuauuguca

SEQ ID NO: 2178040 - RNA, 19 nt, Artificial Sequence
  Description of Artificial Sequence: Synthetic oligonucleotide
  Sense strand starting at position 121 of SEQ ID NO: 1883227
caauaauagcugugauggu

SEQ ID NO: 2178041 - RNA, 19 nt, Artificial Sequence
  Description of Artificial Sequence: Synthetic oligonucleotide
  Antisense strand to SEQ ID NO: 2178040
accaucacagcuauuauug

SEQ ID NO: 2178042 - RNA, 19 nt, Artificial Sequence
  Description of Artificial Sequence: Synthetic oligonucleotide
  Sense strand starting at position 483 of SEQ ID NO: 1883227
gugaguuauuacuucuuaa

SEQ ID NO: 2178043 - RNA, 19 nt, Artificial Sequence
  Description of Artificial Sequence: Synthetic oligonucleotide
  Antisense strand to SEQ ID NO: 2178042
uuaagaaguaauaacucac

SEQ ID NO: 2178044 - RNA, 19 nt, Artificial Sequence
  Description of Artificial Sequence: Synthetic oligonucleotide
  Sense strand starting at position 546 of SEQ ID NO: 1883227
ucuagagaacgcugaaaua

SEQ ID NO: 2178045 - RNA, 19 nt, Artificial Sequence
  Description of Artificial Sequence: Synthetic oligonucleotide
  Antisense strand to SEQ ID NO: 2178044
uauuucagcguucucuaga

SEQ ID NO: 2178046 - RNA, 19 nt, Artificial Sequence
  Description of Artificial Sequence: Synthetic oligonucleotide
  Sense strand starting at position 556 of SEQ ID NO: 1883227
gcugaaauacaauggcuaa

SEQ ID NO: 2178047 - RNA, 19 nt, Artificial Sequence
  Description of Artificial Sequence: Synthetic oligonucleotide
  Antisense strand to SEQ ID NO: 2178046
uuagccauuguauuucagc

SEQ ID NO: 2178048 - RNA, 19 nt, Artificial Sequence
  Description of Artificial Sequence: Synthetic oligonucleotide
  Sense strand starting at position 569 of SEQ ID NO: 1883227
ggcuaaugcagggagaguu

SEQ ID NO: 2178049 - RNA, 19 nt, Artificial Sequence
  Description of Artificial Sequence: Synthetic oligonucleotide
  Antisense strand to SEQ ID NO: 2178048
aacucucccugcauuagcc

SEQ ID NO: 2178050 - RNA, 19 nt, Artificial Sequence
  Description of Artificial Sequence: Synthetic oligonucleotide
  Sense strand starting at position 590 of SEQ ID NO: 1883227
cuguguacuggugacucau

SEQ ID NO: 2178051 - RNA, 19 nt, Artificial Sequence
  Description of Artificial Sequence: Synthetic oligonucleotide
  Antisense strand to SEQ ID NO: 2178050
augagucaccaguacacag

SEQ ID NO: 2178052 - RNA, 19 nt, Artificial Sequence
  Description of Artificial Sequence: Synthetic oligonucleotide
  Sense strand starting at position 785 of SEQ ID NO: 1883227
ccuagugaagaauguuaca

SEQ ID NO: 2178053 - RNA, 19 nt, Artificial Sequence
  Description of Artificial Sequence: Synthetic oligonucleotide
  Antisense strand to SEQ ID NO: 2178052
uguaacauucuucacuagg

SEQ ID NO: 2178054 - RNA, 19 nt, Artificial Sequence
  Description of Artificial Sequence: Synthetic oligonucleotide
  Sense strand starting at position 903 of SEQ ID NO: 1883227
aaccucucccagggugaaa

SEQ ID NO: 2178055 - RNA, 19 nt, Artificial Sequence
  Description of Artificial Sequence: Synthetic oligonucleotide
  Antisense strand to SEQ ID NO: 2178054
uuucacccugggagagguu

SEQ ID NO: 2178056 - RNA, 19 nt, Artificial Sequence
  Description of Artificial Sequence: Synthetic oligonucleotide
  Sense strand starting at position 1059 of SEQ ID NO: 1883227
aguaaaucuuaguuccacu

SEQ ID NO: 2178057 - RNA, 19 nt, Artificial Sequence
  Description of Artificial Sequence: Synthetic oligonucleotide
  Antisense strand to SEQ ID NO: 2178056
aguggaacuaagauuuacu

SEQ ID NO: 2178058 - RNA, 19 nt, Artificial Sequence
  Description of Artificial Sequence: Synthetic oligonucleotide
  Sense strand starting at position 1135 of SEQ ID NO: 1883227
agagguuuauuaucagucu

SEQ ID NO: 2178059 - RNA, 19 nt, Artificial Sequence
  Description of Artificial Sequence: Synthetic oligonucleotide
  Antisense strand to SEQ ID NO: 2178058
agacugauaauaaaccucu

SEQ ID NO: 2178060 - RNA, 19 nt, Artificial Sequence
  Description of Artificial Sequence: Synthetic oligonucleotide
  Sense strand starting at position 1138 of SEQ ID NO: 1883227
gguuuauuaucagucuaug

SEQ ID NO: 2178061 - RNA, 19 nt, Artificial Sequence
  Description of Artificial Sequence: Synthetic oligonucleotide
  Antisense strand to SEQ ID NO: 2178060
cauagacugauaauaaacc

SEQ ID NO: 2178062 - RNA, 19 nt, Artificial Sequence
  Description of Artificial Sequence: Synthetic oligonucleotide
  Sense strand starting at position 1371 of SEQ ID NO: 1883227
acauacucucgucaaauga

SEQ ID NO: 2178063 - RNA, 19 nt, Artificial Sequence
  Description of Artificial Sequence: Synthetic oligonucleotide
  Antisense strand to SEQ ID NO: 2178062
ucauuugacgagaguaugu

SEQ ID NO: 2178064 - RNA, 19 nt, Artificial Sequence
  Description of Artificial Sequence: Synthetic oligonucleotide
  Sense strand starting at position 1417 of SEQ ID NO: 1883227
gcaaacuggucuucuauuu

SEQ ID NO: 2178065 - RNA, 19 nt, Artificial Sequence
  Description of Artificial Sequence: Synthetic oligonucleotide
  Antisense strand to SEQ ID NO: 2178064
aaauagaagaccaguuugc

SEQ ID NO: 2178066 - RNA, 19 nt, Artificial Sequence
  Description of Artificial Sequence: Synthetic oligonucleotide
  Sense strand starting at position 1484 of SEQ ID NO: 1883227
gcuugugauuucucuccca

SEQ ID NO: 2178067 - RNA, 19 nt, Artificial Sequence
  Description of Artificial Sequence: Synthetic oligonucleotide
  Antisense strand to SEQ ID NO: 2178066
ugggagagaaaucacaagc

SEQ ID NO: 2178068 - RNA, 19 nt, Artificial Sequence
  Description of Artificial Sequence: Synthetic oligonucleotide
  Sense strand starting at position 1500 of SEQ ID NO: 1883227
ccaagacagugaucucugu

SEQ ID NO: 2178069 - RNA, 19 nt, Artificial Sequence
  Description of Artificial Sequence: Synthetic oligonucleotide
  Antisense strand to SEQ ID NO: 2178068
acagagaucacugucuugg

SEQ ID NO: 2178070 - RNA, 19 nt, Artificial Sequence
  Description of Artificial Sequence: Synthetic oligonucleotide
  Sense strand starting at position 1596 of SEQ ID NO: 1883227
ggaggacuccuacgaugau

SEQ ID NO: 2178071 - RNA, 19 nt, Artificial Sequence
  Description of Artificial Sequence: Synthetic oligonucleotide
  Antisense strand to SEQ ID NO: 2178070
aucaucguaggaguccucc

SEQ ID NO: 2178072 - RNA, 19 nt, Artificial Sequence
  Description of Artificial Sequence: Synthetic oligonucleotide
  Sense strand starting at position 1599 of SEQ ID NO: 1883227
ggacuccuacgaugaucau

SEQ ID NO: 2178073 - RNA, 19 nt, Artificial Sequence
  Description of Artificial Sequence: Synthetic oligonucleotide
  Antisense strand to SEQ ID NO: 2178072
augaucaucguaggagucc

SEQ ID NO: 2178074 - RNA, 19 nt, Artificial Sequence
  Description of Artificial Sequence: Synthetic oligonucleotide
  Sense strand starting at position 1612 of SEQ ID NO: 1883227
gaucaucucgagggugaca

SEQ ID NO: 2178075 - RNA, 19 nt, Artificial Sequence
  Description of Artificial Sequence: Synthetic oligonucleotide
  Antisense strand to SEQ ID NO: 2178074
ugucacccucgagaugauc

SEQ ID NO: 2178076 - RNA, 19 nt, Artificial Sequence
  Description of Artificial Sequence: Synthetic oligonucleotide
  Sense strand starting at position 1740 of SEQ ID NO: 1883227
aagcuaagucgggaggauu

SEQ ID NO: 2178077 - RNA, 19 nt, Artificial Sequence
  Description of Artificial Sequence: Synthetic oligonucleotide
  Antisense strand to SEQ ID NO: 2178076
aauccucccgacuuagcuu

SEQ ID NO: 2178078 - RNA, 19 nt, Artificial Sequence
  Description of Artificial Sequence: Synthetic oligonucleotide
  Sense strand starting at position 2012 of SEQ ID NO: 1883227
cagcucuuugaggguagau

SEQ ID NO: 2178079 - RNA, 19 nt, Artificial Sequence
  Description of Artificial Sequence: Synthetic oligonucleotide
  Antisense strand to SEQ ID NO: 2178078
aucuacccucaaagagcug

SEQ ID NO: 2178080 - RNA, 19 nt, Artificial Sequence
  Description of Artificial Sequence: Synthetic oligonucleotide
  Sense strand starting at position 2394 of SEQ ID NO: 1883227
agauuacacuggcucagau

SEQ ID NO: 2178081 - RNA, 19 nt, Artificial Sequence
  Description of Artificial Sequence: Synthetic oligonucleotide
  Antisense strand to SEQ ID NO: 2178080
aucugagccaguguaaucu

SEQ ID NO: 2178082 - RNA, 19 nt, Artificial Sequence
  Description of Artificial Sequence: Synthetic oligonucleotide
  Sense strand starting at position 2458 of SEQ ID NO: 1883227
uucuaugcauuccugggaa

SEQ ID NO: 2178083 - RNA, 19 nt, Artificial Sequence
  Description of Artificial Sequence: Synthetic oligonucleotide
  Antisense strand to SEQ ID NO: 2178082
uucccaggaaugcauagaa

SEQ ID NO: 2178084 - RNA, 19 nt, Artificial Sequence
  Description of Artificial Sequence: Synthetic oligonucleotide
  Sense strand starting at position 2460 of SEQ ID NO: 1883227
cuaugcauuccugggaaga

SEQ ID NO: 2178085 - RNA, 19 nt, Artificial Sequence
  Description of Artificial Sequence: Synthetic oligonucleotide
  Antisense strand to SEQ ID NO: 2178084
ucuucccaggaaugcauag

SEQ ID NO: 2178086 - RNA, 19 nt, Artificial Sequence
  Description of Artificial Sequence: Synthetic oligonucleotide
  Sense strand starting at position 2461 of SEQ ID NO: 1883227
uaugcauuccugggaagac

SEQ ID NO: 2178087 - RNA, 19 nt, Artificial Sequence
  Description of Artificial Sequence: Synthetic oligonucleotide
  Antisense strand to SEQ ID NO: 2178086
gucuucccaggaaugcaua

SEQ ID NO: 2178088 - RNA, 19 nt, Artificial Sequence
  Description of Artificial Sequence: Synthetic oligonucleotide
  Sense strand starting at position 2470 of SEQ ID NO: 1883227
cugggaagacuuugaaugu

SEQ ID NO: 2178089 - RNA, 19 nt, Artificial Sequence
  Description of Artificial Sequence: Synthetic oligonucleotide
  Antisense strand to SEQ ID NO: 2178088
acauucaaagucuucccag

SEQ ID NO: 2178090 - RNA, 19 nt, Artificial Sequence
  Description of Artificial Sequence: Synthetic oligonucleotide
  Sense strand starting at position 2481 of SEQ ID NO: 1883227
uugaaugugauggguaauu

SEQ ID NO: 2178091 - RNA, 19 nt, Artificial Sequence
  Description of Artificial Sequence: Synthetic oligonucleotide
  Antisense strand to SEQ ID NO: 2178090
aauuacccaucacauucaa

SEQ ID NO: 2178092 - RNA, 19 nt, Artificial Sequence
  Description of Artificial Sequence: Synthetic oligonucleotide
  Sense strand starting at position 2566 of SEQ ID NO: 1883227
cagugaggauguuccugaa

SEQ ID NO: 2178093 - RNA, 19 nt, Artificial Sequence
  Description of Artificial Sequence: Synthetic oligonucleotide
  Antisense strand to SEQ ID NO: 2178092
uucaggaacauccucacug

SEQ ID NO: 2178094 - RNA, 19 nt, Artificial Sequence
  Description of Artificial Sequence: Synthetic oligonucleotide
  Sense strand starting at position 2573 of SEQ ID NO: 1883227
gauguuccugaaugagauu

SEQ ID NO: 2178095 - RNA, 19 nt, Artificial Sequence
  Description of Artificial Sequence: Synthetic oligonucleotide
  Antisense strand to SEQ ID NO: 2178094
aaucucauucaggaacauc

SEQ ID NO: 2178096 - RNA, 19 nt, Artificial Sequence
  Description of Artificial Sequence: Synthetic oligonucleotide
  Sense strand starting at position 2908 of SEQ ID NO: 1883227
gaauuaguagauuggguaa

SEQ ID NO: 2178097 - RNA, 19 nt, Artificial Sequence
  Description of Artificial Sequence: Synthetic oligonucleotide
  Antisense strand to SEQ ID NO: 2178096
uuacccaaucuacuaauuc

SEQ ID NO: 2178098 - RNA, 19 nt, Artificial Sequence
  Description of Artificial Sequence: Synthetic oligonucleotide
  Sense strand starting at position 3293 of SEQ ID NO: 1883227
auaauacuaugggugaguu

SEQ ID NO: 2178099 - RNA, 19 nt, Artificial Sequence
  Description of Artificial Sequence: Synthetic oligonucleotide
  Antisense strand to SEQ ID NO: 2178098
aacucacccauaguauuau

SEQ ID NO: 2178100 - RNA, 19 nt, Artificial Sequence
  Description of Artificial Sequence: Synthetic oligonucleotide
  Sense strand starting at position 3294 of SEQ ID NO: 1883227
uaauacuaugggugaguuu

SEQ ID NO: 2178101 - RNA, 19 nt, Artificial Sequence
  Description of Artificial Sequence: Synthetic oligonucleotide
  Antisense strand to SEQ ID NO: 2178100
aaacucacccauaguauua

SEQ ID NO: 2178102 - RNA, 19 nt, Artificial Sequence
  Description of Artificial Sequence: Synthetic oligonucleotide
  Sense strand starting at position 3343 of SEQ ID NO: 1883227
aaguguauuuagguuguua

SEQ ID NO: 2178103 - RNA, 19 nt, Artificial Sequence
  Description of Artificial Sequence: Synthetic oligonucleotide
  Antisense strand to SEQ ID NO: 2178102
uaacaaccuaaauacacuu

SEQ ID NO: 2178104 - RNA, 19 nt, Artificial Sequence
  Description of Artificial Sequence: Synthetic oligonucleotide
  Sense strand starting at position 3345 of SEQ ID NO: 1883227
guguauuuagguuguuaau

SEQ ID NO: 2178105 - RNA, 19 nt, Artificial Sequence
  Description of Artificial Sequence: Synthetic oligonucleotide
  Antisense strand to SEQ ID NO: 2178104
auuaacaaccuaaauacac

SEQ ID NO: 2178106 - RNA, 19 nt, Artificial Sequence
  Description of Artificial Sequence: Synthetic oligonucleotide
  Sense strand starting at position 3347 of SEQ ID NO: 1883227
guauuuagguuguuaaucu

SEQ ID NO: 2178107 - RNA, 19 nt, Artificial Sequence
  Description of Artificial Sequence: Synthetic oligonucleotide
  Antisense strand to SEQ ID NO: 2178106
agauuaacaaccuaaauac

SEQ ID NO: 2178108 - RNA, 19 nt, Artificial Sequence
  Description of Artificial Sequence: Synthetic oligonucleotide
  Sense strand starting at position 3362 of SEQ ID NO: 1883227
aucuaucuugauugaguuu

SEQ ID NO: 2178109 - RNA, 19 nt, Artificial Sequence
  Description of Artificial Sequence: Synthetic oligonucleotide
  Antisense strand to SEQ ID NO: 2178108
aaacucaaucaagauagau

SEQ ID NO: 2178110 - RNA, 19 nt, Artificial Sequence
  Description of Artificial Sequence: Synthetic oligonucleotide
  Sense strand starting at position 3431 of SEQ ID NO: 1883227
ggcauaaacuucccuuaug

SEQ ID NO: 2178111 - RNA, 19 nt, Artificial Sequence
  Description of Artificial Sequence: Synthetic oligonucleotide
  Antisense strand to SEQ ID NO: 2178110
cauaagggaaguuuaugcc

SEQ ID NO: 2178112 - RNA, 19 nt, Artificial Sequence
  Description of Artificial Sequence: Synthetic oligonucleotide
  Sense strand starting at position 3683 of SEQ ID NO: 1883227
gaauguuuagcucauugau

SEQ ID NO: 2178113 - RNA, 19 nt, Artificial Sequence
  Description of Artificial Sequence: Synthetic oligonucleotide
  Antisense strand to SEQ ID NO: 2178112
aucaaugagcuaaacauuc

SEQ ID NO: 2178114 - RNA, 19 nt, Artificial Sequence
  Description of Artificial Sequence: Synthetic oligonucleotide
  Sense strand starting at position 3685 of SEQ ID NO: 1883227
auguuuagcucauugauuu

SEQ ID NO: 2178115 - RNA, 19 nt, Artificial Sequence
  Description of Artificial Sequence: Synthetic oligonucleotide
  Antisense strand to SEQ ID NO: 2178114
aaaucaaugagcuaaacau

SEQ ID NO: 2178116 - RNA, 19 nt, Artificial Sequence
  Description of Artificial Sequence: Synthetic oligonucleotide
  Sense strand starting at position 95 of SEQ ID NO: 1883228
gaaacuaguggugagcuaa

SEQ ID NO: 2178117 - RNA, 19 nt, Artificial Sequence
  Description of Artificial Sequence: Synthetic oligonucleotide
  Antisense strand to SEQ ID NO: 2178116
uuagcucaccacuaguuuc

SEQ ID NO: 2178118 - RNA, 19 nt, Artificial Sequence
  Description of Artificial Sequence: Synthetic oligonucleotide
  Sense strand starting at position 143 of SEQ ID NO: 1883228
ggguaaagcuaaguauaaa

SEQ ID NO: 2178119 - RNA, 19 nt, Artificial Sequence
  Description of Artificial Sequence: Synthetic oligonucleotide
  Antisense strand to SEQ ID NO: 2178118
uuuauacuuagcuuuaccc

SEQ ID NO: 2178120 - RNA, 19 nt, Artificial Sequence
  Description of Artificial Sequence: Synthetic oligonucleotide
  Sense strand starting at position 529 of SEQ ID NO: 1883228
ccugaugauuggguuuaau

SEQ ID NO: 2178121 - RNA, 19 nt, Artificial Sequence
  Description of Artificial Sequence: Synthetic oligonucleotide
  Antisense strand to SEQ ID NO: 2178120
auuaaacccaaucaucagg

SEQ ID NO: 2178122 - RNA, 19 nt, Artificial Sequence
  Description of Artificial Sequence: Synthetic oligonucleotide
  Sense strand starting at position 824 of SEQ ID NO: 1883228
aguauagucuacuuacuaa

SEQ ID NO: 2178123 - RNA, 19 nt, Artificial Sequence
  Description of Artificial Sequence: Synthetic oligonucleotide
  Antisense strand to SEQ ID NO: 2178122
uuaguaaguagacuauacu

SEQ ID NO: 2178124 - RNA, 19 nt, Artificial Sequence
  Description of Artificial Sequence: Synthetic oligonucleotide
  Sense strand starting at position 884 of SEQ ID NO: 1883228
gaagauaagcaggguaagu

SEQ ID NO: 2178125 - RNA, 19 nt, Artificial Sequence
  Description of Artificial Sequence: Synthetic oligonucleotide
  Antisense strand to SEQ ID NO: 2178124
acuuacccugcuuaucuuc

SEQ ID NO: 2178126 - RNA, 19 nt, Artificial Sequence
  Description of Artificial Sequence: Synthetic oligonucleotide
  Sense strand starting at position 952 of SEQ ID NO: 1883228
guaguaugggcuuuguguu

SEQ ID NO: 2178127 - RNA, 19 nt, Artificial Sequence
  Description of Artificial Sequence: Synthetic oligonucleotide
  Antisense strand to SEQ ID NO: 2178126
aacacaaagcccauacuac

SEQ ID NO: 2178128 - RNA, 19 nt, Artificial Sequence
  Description of Artificial Sequence: Synthetic oligonucleotide
  Sense strand starting at position 1009 of SEQ ID NO: 1883228
ggaauaaugugacugaagu

SEQ ID NO: 2178129 - RNA, 19 nt, Artificial Sequence
  Description of Artificial Sequence: Synthetic oligonucleotide
  Antisense strand to SEQ ID NO: 2178128
acuucagucacauuauucc

SEQ ID NO: 2178130 - RNA, 19 nt, Artificial Sequence
  Description of Artificial Sequence: Synthetic oligonucleotide
  Sense strand starting at position 1010 of SEQ ID NO: 1883228
gaauaaugugacugaagua

SEQ ID NO: 2178131 - RNA, 19 nt, Artificial Sequence
  Description of Artificial Sequence: Synthetic oligonucleotide
  Antisense strand to SEQ ID NO: 2178130
uacuucagucacauuauuc

SEQ ID NO: 2178132 - RNA, 19 nt, Artificial Sequence
  Description of Artificial Sequence: Synthetic oligonucleotide
  Sense strand starting at position 1225 of SEQ ID NO: 1883228
caaauaugccaagauacgu

SEQ ID NO: 2178133 - RNA, 19 nt, Artificial Sequence
  Description of Artificial Sequence: Synthetic oligonucleotide
  Antisense strand to SEQ ID NO: 2178132
acguaucuuggcauauuug

SEQ ID NO: 2178134 - RNA, 19 nt, Artificial Sequence
  Description of Artificial Sequence: Synthetic oligonucleotide
  Sense strand starting at position 1400 of SEQ ID NO: 1883228
agagaaacauugucagcua

SEQ ID NO: 2178135 - RNA, 19 nt, Artificial Sequence
  Description of Artificial Sequence: Synthetic oligonucleotide
  Antisense strand to SEQ ID NO: 2178134
uagcugacaauguuucucu

SEQ ID NO: 2178136 - RNA, 19 nt, Artificial Sequence
  Description of Artificial Sequence: Synthetic oligonucleotide
  Sense strand starting at position 1403 of SEQ ID NO: 1883228
gaaacauugucagcuaaga

SEQ ID NO: 2178137 - RNA, 19 nt, Artificial Sequence
  Description of Artificial Sequence: Synthetic oligonucleotide
  Antisense strand to SEQ ID NO: 2178136
ucuuagcugacaauguuuc

SEQ ID NO: 2178138 - RNA, 19 nt, Artificial Sequence
  Description of Artificial Sequence: Synthetic oligonucleotide
  Sense strand starting at position 1529 of SEQ ID NO: 1883228
auguaaguucuuugaacag

SEQ ID NO: 2178139 - RNA, 19 nt, Artificial Sequence
  Description of Artificial Sequence: Synthetic oligonucleotide
  Antisense strand to SEQ ID NO: 2178138
cuguucaaagaacuuacau

SEQ ID NO: 2178140 - RNA, 19 nt, Artificial Sequence
  Description of Artificial Sequence: Synthetic oligonucleotide
  Sense strand starting at position 1626 of SEQ ID NO: 1883228
uguauugaacaaugauguu

SEQ ID NO: 2178141 - RNA, 19 nt, Artificial Sequence
  Description of Artificial Sequence: Synthetic oligonucleotide
  Antisense strand to SEQ ID NO: 2178140
aacaucauuguucaauaca

SEQ ID NO: 2178142 - RNA, 19 nt, Artificial Sequence
  Description of Artificial Sequence: Synthetic oligonucleotide
  Sense strand starting at position 1646 of SEQ ID NO: 1883228
uuuggaaauccuggcuaag

SEQ ID NO: 2178143 - RNA, 19 nt, Artificial Sequence
  Description of Artificial Sequence: Synthetic oligonucleotide
  Antisense strand to SEQ ID NO: 2178142
cuuagccaggauuuccaaa

SEQ ID NO: 2178144 - RNA, 19 nt, Artificial Sequence
  Description of Artificial Sequence: Synthetic oligonucleotide
  Sense strand starting at position 1648 of SEQ ID NO: 1883228
uggaaauccuggcuaagau

SEQ ID NO: 2178145 - RNA, 19 nt, Artificial Sequence
  Description of Artificial Sequence: Synthetic oligonucleotide
  Antisense strand to SEQ ID NO: 2178144
aucuuagccaggauuucca

SEQ ID NO: 2178146 - RNA, 19 nt, Artificial Sequence
  Description of Artificial Sequence: Synthetic oligonucleotide
  Sense strand starting at position 1755 of SEQ ID NO: 1883228
uggucuguuacagaaaugu

SEQ ID NO: 2178147 - RNA, 19 nt, Artificial Sequence
  Description of Artificial Sequence: Synthetic oligonucleotide
  Antisense strand to SEQ ID NO: 2178146
acauuucuguaacagacca

SEQ ID NO: 2178148 - RNA, 19 nt, Artificial Sequence
  Description of Artificial Sequence: Synthetic oligonucleotide
  Sense strand starting at position 1764 of SEQ ID NO: 1883228
acagaaaugugguccuacu

SEQ ID NO: 2178149 - RNA, 19 nt, Artificial Sequence
  Description of Artificial Sequence: Synthetic oligonucleotide
  Antisense strand to SEQ ID NO: 2178148
aguaggaccacauuucugu

SEQ ID NO: 2178150 - RNA, 19 nt, Artificial Sequence
  Description of Artificial Sequence: Synthetic oligonucleotide
  Sense strand starting at position 1850 of SEQ ID NO: 1883228
gacuccauccuugaguuga

SEQ ID NO: 2178151 - RNA, 19 nt, Artificial Sequence
  Description of Artificial Sequence: Synthetic oligonucleotide
  Antisense strand to SEQ ID NO: 2178150
ucaacucaaggauggaguc

SEQ ID NO: 2178152 - RNA, 19 nt, Artificial Sequence
  Description of Artificial Sequence: Synthetic oligonucleotide
  Sense strand starting at position 1928 of SEQ ID NO: 1883228
gaaauauaucuuggaguau

SEQ ID NO: 2178153 - RNA, 19 nt, Artificial Sequence
  Description of Artificial Sequence: Synthetic oligonucleotide
  Antisense strand to SEQ ID NO: 2178152
auacuccaagauauauuuc

SEQ ID NO: 2178154 - RNA, 19 nt, Artificial Sequence
  Description of Artificial Sequence: Synthetic oligonucleotide
  Sense strand starting at position 1937 of SEQ ID NO: 1883228
cuuggaguauucuucuaga

SEQ ID NO: 2178155 - RNA, 19 nt, Artificial Sequence
  Description of Artificial Sequence: Synthetic oligonucleotide
  Antisense strand to SEQ ID NO: 2178154
ucuagaagaauacuccaag

SEQ ID NO: 2178156 - RNA, 19 nt, Artificial Sequence
  Description of Artificial Sequence: Synthetic oligonucleotide
  Sense strand starting at position 1952 of SEQ ID NO: 1883228
uagacagaacgucagugau

SEQ ID NO: 2178157 - RNA, 19 nt, Artificial Sequence
  Description of Artificial Sequence: Synthetic oligonucleotide
  Antisense strand to SEQ ID NO: 2178156
aucacugacguucugucua

SEQ ID NO: 2178158 - RNA, 19 nt, Artificial Sequence
  Description of Artificial Sequence: Synthetic oligonucleotide
  Sense strand starting at position 1985 of SEQ ID NO: 1883228
agcucaguccaggacuauu

SEQ ID NO: 2178159 - RNA, 19 nt, Artificial Sequence
  Description of Artificial Sequence: Synthetic oligonucleotide
  Antisense strand to SEQ ID NO: 2178158
aauaguccuggacugagcu

SEQ ID NO: 2178160 - RNA, 19 nt, Artificial Sequence
  Description of Artificial Sequence: Synthetic oligonucleotide
  Sense strand starting at position 2018 of SEQ ID NO: 1883228
aggagaguuugauccauca

SEQ ID NO: 2178161 - RNA, 19 nt, Artificial Sequence
  Description of Artificial Sequence: Synthetic oligonucleotide
  Antisense strand to SEQ ID NO: 2178160
ugauggaucaaacucuccu

SEQ ID NO: 2178162 - RNA, 19 nt, Artificial Sequence
  Description of Artificial Sequence: Synthetic oligonucleotide
  Sense strand starting at position 2266 of SEQ ID NO: 1883228
uuaucuuugggugacauua

SEQ ID NO: 2178163 - RNA, 19 nt, Artificial Sequence
  Description of Artificial Sequence: Synthetic oligonucleotide
  Antisense strand to SEQ ID NO: 2178162
uaaugucacccaaagauaa

SEQ ID NO: 2178164 - RNA, 19 nt, Artificial Sequence
  Description of Artificial Sequence: Synthetic oligonucleotide
  Sense strand starting at position 2277 of SEQ ID NO: 1883228
ugacauuagccuuagugau

SEQ ID NO: 2178165 - RNA, 19 nt, Artificial Sequence
  Description of Artificial Sequence: Synthetic oligonucleotide
  Antisense strand to SEQ ID NO: 2178164
aucacuaaggcuaauguca

SEQ ID NO: 2178166 - RNA, 19 nt, Artificial Sequence
  Description of Artificial Sequence: Synthetic oligonucleotide
  Sense strand starting at position 2317 of SEQ ID NO: 1883228
gaugucagggcuuaacuau

SEQ ID NO: 2178167 - RNA, 19 nt, Artificial Sequence
  Description of Artificial Sequence: Synthetic oligonucleotide
  Antisense strand to SEQ ID NO: 2178166
auaguuaagcccugacauc

SEQ ID NO: 2178168 - RNA, 19 nt, Artificial Sequence
  Description of Artificial Sequence: Synthetic oligonucleotide
  Sense strand starting at position 2459 of SEQ ID NO: 1883228
cuauuagagccucagccaa

SEQ ID NO: 2178169 - RNA, 19 nt, Artificial Sequence
  Description of Artificial Sequence: Synthetic oligonucleotide
  Antisense strand to SEQ ID NO: 2178168
uuggcugaggcucuaauag

SEQ ID NO: 2178170 - RNA, 19 nt, Artificial Sequence
  Description of Artificial Sequence: Synthetic oligonucleotide
  Sense strand starting at position 2568 of SEQ ID NO: 1883228
cuagcauuugcuuggcuga

SEQ ID NO: 2178171 - RNA, 19 nt, Artificial Sequence
  Description of Artificial Sequence: Synthetic oligonucleotide
  Antisense strand to SEQ ID NO: 2178170
ucagccaagcaaaugcuag

SEQ ID NO: 2178172 - RNA, 19 nt, Artificial Sequence
  Description of Artificial Sequence: Synthetic oligonucleotide
  Sense strand starting at position 2570 of SEQ ID NO: 1883228
agcauuugcuuggcugauu

SEQ ID NO: 2178173 - RNA, 19 nt, Artificial Sequence
  Description of Artificial Sequence: Synthetic oligonucleotide
  Antisense strand to SEQ ID NO: 2178172
aaucagccaagcaaaugcu

SEQ ID NO: 2178174 - RNA, 19 nt, Artificial Sequence
  Description of Artificial Sequence: Synthetic oligonucleotide
  Sense strand starting at position 2578 of SEQ ID NO: 1883228
cuuggcugauucucaaaga

SEQ ID NO: 2178175 - RNA, 19 nt, Artificial Sequence
  Description of Artificial Sequence: Synthetic oligonucleotide
  Antisense strand to SEQ ID NO: 2178174
ucuuugagaaucagccaag

SEQ ID NO: 2178176 - RNA, 19 nt, Artificial Sequence
  Description of Artificial Sequence: Synthetic oligonucleotide
  Sense strand starting at position 3030 of SEQ ID NO: 1883228
acaagugcuuuauuaaaug

SEQ ID NO: 2178177 - RNA, 19 nt, Artificial Sequence
  Description of Artificial Sequence: Synthetic oligonucleotide
  Antisense strand to SEQ ID NO: 2178176
cauuuaauaaagcacuugu

SEQ ID NO: 2178178 - RNA, 19 nt, Artificial Sequence
  Description of Artificial Sequence: Synthetic oligonucleotide
  Sense strand starting at position 3157 of SEQ ID NO: 1883228
cgaggcuugcauuagaaua

SEQ ID NO: 2178179 - RNA, 19 nt, Artificial Sequence
  Description of Artificial Sequence: Synthetic oligonucleotide
  Antisense strand to SEQ ID NO: 2178178
uauucuaaugcaagccucg

SEQ ID NO: 2178180 - RNA, 19 nt, Artificial Sequence
  Description of Artificial Sequence: Synthetic oligonucleotide
  Sense strand starting at position 3258 of SEQ ID NO: 1883228
auguguuugguggagggau

SEQ ID NO: 2178181 - RNA, 19 nt, Artificial Sequence
  Description of Artificial Sequence: Synthetic oligonucleotide
  Antisense strand to SEQ ID NO: 2178180
aucccuccaccaaacacau

SEQ ID NO: 2178182 - RNA, 19 nt, Artificial Sequence
  Description of Artificial Sequence: Synthetic oligonucleotide
  Sense strand starting at position 3349 of SEQ ID NO: 1883228
guuuaaauuccuuaggucu

SEQ ID NO: 2178183 - RNA, 19 nt, Artificial Sequence
  Description of Artificial Sequence: Synthetic oligonucleotide
  Antisense strand to SEQ ID NO: 2178182
agaccuaaggaauuuaaac

SEQ ID NO: 2178184 - RNA, 19 nt, Artificial Sequence
  Description of Artificial Sequence: Synthetic oligonucleotide
  Sense strand starting at position 3460 of SEQ ID NO: 1883228
cgauuaguguaguuuauuu

SEQ ID NO: 2178185 - RNA, 19 nt, Artificial Sequence
  Description of Artificial Sequence: Synthetic oligonucleotide
  Antisense strand to SEQ ID NO: 2178184
aaauaaacuacacuaaucg

SEQ ID NO: 2178186 - RNA, 19 nt, Artificial Sequence
  Description of Artificial Sequence: Synthetic oligonucleotide
  Sense strand starting at position 3488 of SEQ ID NO: 1883228
aguaacuuaggucaaguua

SEQ ID NO: 2178187 - RNA, 19 nt, Artificial Sequence
  Description of Artificial Sequence: Synthetic oligonucleotide
  Antisense strand to SEQ ID NO: 2178186
uaacuugaccuaaguuacu

SEQ ID NO: 2178188 - RNA, 19 nt, Artificial Sequence
  Description of Artificial Sequence: Synthetic oligonucleotide
  Sense strand starting at position 3607 of SEQ ID NO: 1883228
cuugauaauuaaucaguga

SEQ ID NO: 2178189 - RNA, 19 nt, Artificial Sequence
  Description of Artificial Sequence: Synthetic oligonucleotide
  Antisense strand to SEQ ID NO: 2178188
ucacugauuaauuaucaag

SEQ ID NO: 2178190 - RNA, 19 nt, Artificial Sequence
  Description of Artificial Sequence: Synthetic oligonucleotide
  Sense strand starting at position 3671 of SEQ ID NO: 1883228
ucuguagauguuuaaauuc

SEQ ID NO: 2178191 - RNA, 19 nt, Artificial Sequence
  Description of Artificial Sequence: Synthetic oligonucleotide
  Antisense strand to SEQ ID NO: 2178190
gaauuuaaacaucuacaga

SEQ ID NO: 2178192 - RNA, 19 nt, Artificial Sequence
  Description of Artificial Sequence: Synthetic oligonucleotide
  Sense strand starting at position 3730 of SEQ ID NO: 1883228
ucaagagcuucuuuggaau

SEQ ID NO: 2178193 - RNA, 19 nt, Artificial Sequence
  Description of Artificial Sequence: Synthetic oligonucleotide
  Antisense strand to SEQ ID NO: 2178192
auuccaaagaagcucuuga

SEQ ID NO: 2178194 - RNA, 19 nt, Artificial Sequence
  Description of Artificial Sequence: Synthetic oligonucleotide
  Sense strand starting at position 3800 of SEQ ID NO: 1883228
cuuggaauaugaguuaaug

SEQ ID NO: 2178195 - RNA, 19 nt, Artificial Sequence
  Description of Artificial Sequence: Synthetic oligonucleotide
  Antisense strand to SEQ ID NO: 2178194
cauuaacucauauuccaag

SEQ ID NO: 2178196 - RNA, 19 nt, Artificial Sequence
  Description of Artificial Sequence: Synthetic oligonucleotide
  Sense strand starting at position 279 of SEQ ID NO: 1883229
aagugagggcagcagaauu

SEQ ID NO: 2178197 - RNA, 19 nt, Artificial Sequence
  Description of Artificial Sequence: Synthetic oligonucleotide
  Antisense strand to SEQ ID NO: 2178196
aauucugcugcccucacuu

SEQ ID NO: 2178198 - RNA, 19 nt, Artificial Sequence
  Description of Artificial Sequence: Synthetic oligonucleotide
  Sense strand starting at position 701 of SEQ ID NO: 1883229
cuuuaacaccuggaguagu

SEQ ID NO: 2178199 - RNA, 19 nt, Artificial Sequence
  Description of Artificial Sequence: Synthetic oligonucleotide
  Antisense strand to SEQ ID NO: 2178198
acuacuccagguguuaaag

SEQ ID NO: 2178200 - RNA, 19 nt, Artificial Sequence
  Description of Artificial Sequence: Synthetic oligonucleotide
  Sense strand starting at position 884 of SEQ ID NO: 1883229
uggaaaugcccucacuuua

SEQ ID NO: 2178201 - RNA, 19 nt, Artificial Sequence
  Description of Artificial Sequence: Synthetic oligonucleotide
  Antisense strand to SEQ ID NO: 2178200
uaaagugagggcauuucca

SEQ ID NO: 2178202 - RNA, 19 nt, Artificial Sequence
  Description of Artificial Sequence: Synthetic oligonucleotide
  Sense strand starting at position 894 of SEQ ID NO: 1883229
cucacuuuacugugagaau

SEQ ID NO: 2178203 - RNA, 19 nt, Artificial Sequence
  Description of Artificial Sequence: Synthetic oligonucleotide
  Antisense strand to SEQ ID NO: 2178202
auucucacaguaaagugag

SEQ ID NO: 2178204 - RNA, 19 nt, Artificial Sequence
  Description of Artificial Sequence: Synthetic oligonucleotide
  Sense strand starting at position 903 of SEQ ID NO: 1883229
cugugagaauuguuauauu

SEQ ID NO: 2178205 - RNA, 19 nt, Artificial Sequence
  Description of Artificial Sequence: Synthetic oligonucleotide
  Antisense strand to SEQ ID NO: 2178204
aauauaacaauucucacag

SEQ ID NO: 2178206 - RNA, 19 nt, Artificial Sequence
  Description of Artificial Sequence: Synthetic oligonucleotide
  Sense strand starting at position 957 of SEQ ID NO: 1883229
ucuugauaagagugacuaa

SEQ ID NO: 2178207 - RNA, 19 nt, Artificial Sequence
  Description of Artificial Sequence: Synthetic oligonucleotide
  Antisense strand to SEQ ID NO: 2178206
uuagucacucuuaucaaga

SEQ ID NO: 2178208 - RNA, 19 nt, Artificial Sequence
  Description of Artificial Sequence: Synthetic oligonucleotide
  Sense strand starting at position 960 of SEQ ID NO: 1883229
ugauaagagugacuaaugu

SEQ ID NO: 2178209 - RNA, 19 nt, Artificial Sequence
  Description of Artificial Sequence: Synthetic oligonucleotide
  Antisense strand to SEQ ID NO: 2178208
acauuagucacucuuauca

SEQ ID NO: 2178210 - RNA, 19 nt, Artificial Sequence
  Description of Artificial Sequence: Synthetic oligonucleotide
  Sense strand starting at position 1107 of SEQ ID NO: 1883229
guagaaagguacuuggcaa

SEQ ID NO: 2178211 - RNA, 19 nt, Artificial Sequence
  Description of Artificial Sequence: Synthetic oligonucleotide
  Antisense strand to SEQ ID NO: 2178210
uugccaaguaccuuucuac

SEQ ID NO: 2178212 - RNA, 19 nt, Artificial Sequence
  Description of Artificial Sequence: Synthetic oligonucleotide
  Sense strand starting at position 1265 of SEQ ID NO: 1883229
aguugcuggucucugauuu

SEQ ID NO: 2178213 - RNA, 19 nt, Artificial Sequence
  Description of Artificial Sequence: Synthetic oligonucleotide
  Antisense strand to SEQ ID NO: 2178212
aaaucagagaccagcaacu

SEQ ID NO: 2178214 - RNA, 19 nt, Artificial Sequence
  Description of Artificial Sequence: Synthetic oligonucleotide
  Sense strand starting at position 1390 of SEQ ID NO: 1883229
uucucuccagauugaggua

SEQ ID NO: 2178215 - RNA, 19 nt, Artificial Sequence
  Description of Artificial Sequence: Synthetic oligonucleotide
  Antisense strand to SEQ ID NO: 2178214
uaccucaaucuggagagaa

SEQ ID NO: 2178216 - RNA, 19 nt, Artificial Sequence
  Description of Artificial Sequence: Synthetic oligonucleotide
  Sense strand starting at position 1395 of SEQ ID NO: 1883229
uccagauugagguaauguu

SEQ ID NO: 2178217 - RNA, 19 nt, Artificial Sequence
  Description of Artificial Sequence: Synthetic oligonucleotide
  Antisense strand to SEQ ID NO: 2178216
aacauuaccucaaucugga

SEQ ID NO: 2178218 - RNA, 19 nt, Artificial Sequence
  Description of Artificial Sequence: Synthetic oligonucleotide
  Sense strand starting at position 1403 of SEQ ID NO: 1883229
gagguaauguucuuaagag

SEQ ID NO: 2178219 - RNA, 19 nt, Artificial Sequence
  Description of Artificial Sequence: Synthetic oligonucleotide
  Antisense strand to SEQ ID NO: 2178218
cucuuaagaacauuaccuc

SEQ ID NO: 2178220 - RNA, 19 nt, Artificial Sequence
  Description of Artificial Sequence: Synthetic oligonucleotide
  Sense strand starting at position 1467 of SEQ ID NO: 1883229
ggaagccacuuccuauauu

SEQ ID NO: 2178221 - RNA, 19 nt, Artificial Sequence
  Description of Artificial Sequence: Synthetic oligonucleotide
  Antisense strand to SEQ ID NO: 2178220
aauauaggaaguggcuucc

SEQ ID NO: 2178222 - RNA, 19 nt, Artificial Sequence
  Description of Artificial Sequence: Synthetic oligonucleotide
  Sense strand starting at position 1511 of SEQ ID NO: 1883229
uggagauucugggcucuca

SEQ ID NO: 2178223 - RNA, 19 nt, Artificial Sequence
  Description of Artificial Sequence: Synthetic oligonucleotide
  Antisense strand to SEQ ID NO: 2178222
ugagagcccagaaucucca

SEQ ID NO: 2178224 - RNA, 19 nt, Artificial Sequence
  Description of Artificial Sequence: Synthetic oligonucleotide
  Sense strand starting at position 1723 of SEQ ID NO: 1883229
ugaagacauuucccgcagu

SEQ ID NO: 2178225 - RNA, 19 nt, Artificial Sequence
  Description of Artificial Sequence: Synthetic oligonucleotide
  Antisense strand to SEQ ID NO: 2178224
acugcgggaaaugucuuca

SEQ ID NO: 2178226 - RNA, 19 nt, Artificial Sequence
  Description of Artificial Sequence: Synthetic oligonucleotide
  Sense strand starting at position 1816 of SEQ ID NO: 1883229
agcucuaucccuggauuag

SEQ ID NO: 2178227 - RNA, 19 nt, Artificial Sequence
  Description of Artificial Sequence: Synthetic oligonucleotide
  Antisense strand to SEQ ID NO: 2178226
cuaauccagggauagagcu

SEQ ID NO: 2178228 - RNA, 19 nt, Artificial Sequence
  Description of Artificial Sequence: Synthetic oligonucleotide
  Sense strand starting at position 1877 of SEQ ID NO: 1883229
aguauauuagcucagugaa

SEQ ID NO: 2178229 - RNA, 19 nt, Artificial Sequence
  Description of Artificial Sequence: Synthetic oligonucleotide
  Antisense strand to SEQ ID NO: 2178228
uucacugagcuaauauacu

SEQ ID NO: 2178230 - RNA, 19 nt, Artificial Sequence
  Description of Artificial Sequence: Synthetic oligonucleotide
  Sense strand starting at position 1880 of SEQ ID NO: 1883229
auauuagcucagugaaauc

SEQ ID NO: 2178231 - RNA, 19 nt, Artificial Sequence
  Description of Artificial Sequence: Synthetic oligonucleotide
  Antisense strand to SEQ ID NO: 2178230
gauuucacugagcuaauau

SEQ ID NO: 2178232 - RNA, 19 nt, Artificial Sequence
  Description of Artificial Sequence: Synthetic oligonucleotide
  Sense strand starting at position 1891 of SEQ ID NO: 1883229
gugaaaucucaagguaaac

SEQ ID NO: 2178233 - RNA, 19 nt, Artificial Sequence
  Description of Artificial Sequence: Synthetic oligonucleotide
  Antisense strand to SEQ ID NO: 2178232
guuuaccuugagauuucac

SEQ ID NO: 2178234 - RNA, 19 nt, Artificial Sequence
  Description of Artificial Sequence: Synthetic oligonucleotide
  Sense strand starting at position 1985 of SEQ ID NO: 1883229
guuaucuguacuuaaaggu

SEQ ID NO: 2178235 - RNA, 19 nt, Artificial Sequence
  Description of Artificial Sequence: Synthetic oligonucleotide
  Antisense strand to SEQ ID NO: 2178234
accuuuaaguacagauaac

SEQ ID NO: 2178236 - RNA, 19 nt, Artificial Sequence
  Description of Artificial Sequence: Synthetic oligonucleotide
  Sense strand starting at position 2090 of SEQ ID NO: 1883229
ucucaauuguuuccagaug

SEQ ID NO: 2178237 - RNA, 19 nt, Artificial Sequence
  Description of Artificial Sequence: Synthetic oligonucleotide
  Antisense strand to SEQ ID NO: 2178236
caucuggaaacaauugaga

SEQ ID NO: 2178238 - RNA, 19 nt, Artificial Sequence
  Description of Artificial Sequence: Synthetic oligonucleotide
  Sense strand starting at position 2102 of SEQ ID NO: 1883229
ccagauggcuuaucagacu

SEQ ID NO: 2178239 - RNA, 19 nt, Artificial Sequence
  Description of Artificial Sequence: Synthetic oligonucleotide
  Antisense strand to SEQ ID NO: 2178238
agucugauaagccaucugg

SEQ ID NO: 2178240 - RNA, 19 nt, Artificial Sequence
  Description of Artificial Sequence: Synthetic oligonucleotide
  Sense strand starting at position 2108 of SEQ ID NO: 1883229
ggcuuaucagacugaucaa

SEQ ID NO: 2178241 - RNA, 19 nt, Artificial Sequence
  Description of Artificial Sequence: Synthetic oligonucleotide
  Antisense strand to SEQ ID NO: 2178240
uugaucagucugauaagcc

SEQ ID NO: 2178242 - RNA, 19 nt, Artificial Sequence
  Description of Artificial Sequence: Synthetic oligonucleotide
  Sense strand starting at position 2132 of SEQ ID NO: 1883229
aggugaagccaauauguua

SEQ ID NO: 2178243 - RNA, 19 nt, Artificial Sequence
  Description of Artificial Sequence: Synthetic oligonucleotide
  Antisense strand to SEQ ID NO: 2178242
uaacauauuggcuucaccu

SEQ ID NO: 2178244 - RNA, 19 nt, Artificial Sequence
  Description of Artificial Sequence: Synthetic oligonucleotide
  Sense strand starting at position 2286 of SEQ ID NO: 1883229
auuguuccaguguaugaaa

SEQ ID NO: 2178245 - RNA, 19 nt, Artificial Sequence
  Description of Artificial Sequence: Synthetic oligonucleotide
  Antisense strand to SEQ ID NO: 2178244
uuucauacacuggaacaau

SEQ ID NO: 2178246 - RNA, 19 nt, Artificial Sequence
  Description of Artificial Sequence: Synthetic oligonucleotide
  Sense strand starting at position 2464 of SEQ ID NO: 1883229
gguuauauggcuucgugcu

SEQ ID NO: 2178247 - RNA, 19 nt, Artificial Sequence
  Description of Artificial Sequence: Synthetic oligonucleotide
  Antisense strand to SEQ ID NO: 2178246
agcacgaagccauauaacc

SEQ ID NO: 2178248 - RNA, 19 nt, Artificial Sequence
  Description of Artificial Sequence: Synthetic oligonucleotide
  Sense strand starting at position 2622 of SEQ ID NO: 1883229
ucagcucugaauggauaga

SEQ ID NO: 2178249 - RNA, 19 nt, Artificial Sequence
  Description of Artificial Sequence: Synthetic oligonucleotide
  Antisense strand to SEQ ID NO: 2178248
ucuauccauucagagcuga

SEQ ID NO: 2178250 - RNA, 19 nt, Artificial Sequence
  Description of Artificial Sequence: Synthetic oligonucleotide
  Sense strand starting at position 2638 of SEQ ID NO: 1883229
agaaauugcaugugugaaa

SEQ ID NO: 2178251 - RNA, 19 nt, Artificial Sequence
  Description of Artificial Sequence: Synthetic oligonucleotide
  Antisense strand to SEQ ID NO: 2178250
uuucacacaugcaauuucu

SEQ ID NO: 2178252 - RNA, 19 nt, Artificial Sequence
  Description of Artificial Sequence: Synthetic oligonucleotide
  Sense strand starting at position 2639 of SEQ ID NO: 1883229
gaaauugcaugugugaaau

SEQ ID NO: 2178253 - RNA, 19 nt, Artificial Sequence
  Description of Artificial Sequence: Synthetic oligonucleotide
  Antisense strand to SEQ ID NO: 2178252
auuucacacaugcaauuuc

SEQ ID NO: 2178254 - RNA, 19 nt, Artificial Sequence
  Description of Artificial Sequence: Synthetic oligonucleotide
  Sense strand starting at position 2717 of SEQ ID NO: 1883229
uucuguuuacuguauuaga

SEQ ID NO: 2178255 - RNA, 19 nt, Artificial Sequence
  Description of Artificial Sequence: Synthetic oligonucleotide
  Antisense strand to SEQ ID NO: 2178254
ucuaauacaguaaacagaa

SEQ ID NO: 2178256 - RNA, 19 nt, Artificial Sequence
  Description of Artificial Sequence: Synthetic oligonucleotide
  Sense strand starting at position 2727 of SEQ ID NO: 1883229
uguauuagagcugcgguuu

SEQ ID NO: 2178257 - RNA, 19 nt, Artificial Sequence
  Description of Artificial Sequence: Synthetic oligonucleotide
  Antisense strand to SEQ ID NO: 2178256
aaaccgcagcucuaauaca

SEQ ID NO: 2178258 - RNA, 19 nt, Artificial Sequence
  Description of Artificial Sequence: Synthetic oligonucleotide
  Sense strand starting at position 2923 of SEQ ID NO: 1883229
ccaagagucucuguuaaca

SEQ ID NO: 2178259 - RNA, 19 nt, Artificial Sequence
  Description of Artificial Sequence: Synthetic oligonucleotide
  Antisense strand to SEQ ID NO: 2178258
uguuaacagagacucuugg

SEQ ID NO: 2178260 - RNA, 19 nt, Artificial Sequence
  Description of Artificial Sequence: Synthetic oligonucleotide
  Sense strand starting at position 3073 of SEQ ID NO: 1883229
aaccauuguguuuauagag

SEQ ID NO: 2178261 - RNA, 19 nt, Artificial Sequence
  Description of Artificial Sequence: Synthetic oligonucleotide
  Antisense strand to SEQ ID NO: 2178260
cucuauaaacacaaugguu

SEQ ID NO: 2178262 - RNA, 19 nt, Artificial Sequence
  Description of Artificial Sequence: Synthetic oligonucleotide
  Sense strand starting at position 3197 of SEQ ID NO: 1883229
gagcaacuagagugaucuu

SEQ ID NO: 2178263 - RNA, 19 nt, Artificial Sequence
  Description of Artificial Sequence: Synthetic oligonucleotide
  Antisense strand to SEQ ID NO: 2178262
aagaucacucuaguugcuc

SEQ ID NO: 2178264 - RNA, 19 nt, Artificial Sequence
  Description of Artificial Sequence: Synthetic oligonucleotide
  Sense strand starting at position 3333 of SEQ ID NO: 1883229
ugugguuauguccuucgua

SEQ ID NO: 2178265 - RNA, 19 nt, Artificial Sequence
  Description of Artificial Sequence: Synthetic oligonucleotide
  Antisense strand to SEQ ID NO: 2178264
uacgaaggacauaaccaca

SEQ ID NO: 2178266 - RNA, 19 nt, Artificial Sequence
  Description of Artificial Sequence: Synthetic oligonucleotide
  Sense strand starting at position 3433 of SEQ ID NO: 1883229
acaggugauuucuacccaa

SEQ ID NO: 2178267 - RNA, 19 nt, Artificial Sequence
  Description of Artificial Sequence: Synthetic oligonucleotide
  Antisense strand to SEQ ID NO: 2178266
uuggguagaaaucaccugu

SEQ ID NO: 2178268 - RNA, 19 nt, Artificial Sequence
  Description of Artificial Sequence: Synthetic oligonucleotide
  Sense strand starting at position 3604 of SEQ ID NO: 1883229
aaguguauggacuaaaugu

SEQ ID NO: 2178269 - RNA, 19 nt, Artificial Sequence
  Description of Artificial Sequence: Synthetic oligonucleotide
  Antisense strand to SEQ ID NO: 2178268
acauuuaguccauacacuu

SEQ ID NO: 2178270 - RNA, 19 nt, Artificial Sequence
  Description of Artificial Sequence: Synthetic oligonucleotide
  Sense strand starting at position 3694 of SEQ ID NO: 1883229
ggagcuaauuaggcuuaga

SEQ ID NO: 2178271 - RNA, 19 nt, Artificial Sequence
  Description of Artificial Sequence: Synthetic oligonucleotide
  Antisense strand to SEQ ID NO: 2178270
ucuaagccuaauuagcucc

SEQ ID NO: 2178272 - RNA, 19 nt, Artificial Sequence
  Description of Artificial Sequence: Synthetic oligonucleotide
  Sense strand starting at position 3697 of SEQ ID NO: 1883229
gcuaauuaggcuuagauua

SEQ ID NO: 2178273 - RNA, 19 nt, Artificial Sequence
  Description of Artificial Sequence: Synthetic oligonucleotide
  Antisense strand to SEQ ID NO: 2178272
uaaucuaagccuaauuagc

SEQ ID NO: 2178274 - RNA, 19 nt, Artificial Sequence
  Description of Artificial Sequence: Synthetic oligonucleotide
  Sense strand starting at position 3844 of SEQ ID NO: 1883229
agaguacucucaccagaac

SEQ ID NO: 2178275 - RNA, 19 nt, Artificial Sequence
  Description of Artificial Sequence: Synthetic oligonucleotide
  Antisense strand to SEQ ID NO: 2178274
guucuggugagaguacucu

SEQ ID NO: 2178276 - RNA, 19 nt, Artificial Sequence
  Description of Artificial Sequence: Synthetic oligonucleotide
  Sense strand starting at position 523 of SEQ ID NO: 1883230
ggaagcaccuuugucuaga

SEQ ID NO: 2178277 - RNA, 19 nt, Artificial Sequence
  Description of Artificial Sequence: Synthetic oligonucleotide
  Antisense strand to SEQ ID NO: 2178276
ucuagacaaaggugcuucc

SEQ ID NO: 2178278 - RNA, 19 nt, Artificial Sequence
  Description of Artificial Sequence: Synthetic oligonucleotide
  Sense strand starting at position 524 of SEQ ID NO: 1883230
gaagcaccuuugucuagaa

SEQ ID NO: 2178279 - RNA, 19 nt, Artificial Sequence
  Description of Artificial Sequence: Synthetic oligonucleotide
  Antisense strand to SEQ ID NO: 2178278
uucuagacaaaggugcuuc

SEQ ID NO: 2178280 - RNA, 19 nt, Artificial Sequence
  Description of Artificial Sequence: Synthetic oligonucleotide
  Sense strand starting at position 526 of SEQ ID NO: 1883230
agcaccuuugucuagaaag

SEQ ID NO: 2178281 - RNA, 19 nt, Artificial Sequence
  Description of Artificial Sequence: Synthetic oligonucleotide
  Antisense strand to SEQ ID NO: 2178280
cuuucuagacaaaggugcu

SEQ ID NO: 2178282 - RNA, 19 nt, Artificial Sequence
  Description of Artificial Sequence: Synthetic oligonucleotide
  Sense strand starting at position 688 of SEQ ID NO: 1883230
gcuagauuguaagcaaggu

SEQ ID NO: 2178283 - RNA, 19 nt, Artificial Sequence
  Description of Artificial Sequence: Synthetic oligonucleotide
  Antisense strand to SEQ ID NO: 2178282
accuugcuuacaaucuagc

SEQ ID NO: 2178284 - RNA, 19 nt, Artificial Sequence
  Description of Artificial Sequence: Synthetic oligonucleotide
  Sense strand starting at position 689 of SEQ ID NO: 1883230
cuagauuguaagcaagguu

SEQ ID NO: 2178285 - RNA, 19 nt, Artificial Sequence
  Description of Artificial Sequence: Synthetic oligonucleotide
  Antisense strand to SEQ ID NO: 2178284
aaccuugcuuacaaucuag

SEQ ID NO: 2178286 - RNA, 19 nt, Artificial Sequence
  Description of Artificial Sequence: Synthetic oligonucleotide
  Sense strand starting at position 823 of SEQ ID NO: 1883230
caagauauagccgagcaaa

SEQ ID NO: 2178287 - RNA, 19 nt, Artificial Sequence
  Description of Artificial Sequence: Synthetic oligonucleotide
  Antisense strand to SEQ ID NO: 2178286
uuugcucggcuauaucuug

SEQ ID NO: 2178288 - RNA, 19 nt, Artificial Sequence
  Description of Artificial Sequence: Synthetic oligonucleotide
  Sense strand starting at position 934 of SEQ ID NO: 1883230
acaggaaggucgcuuucuu

SEQ ID NO: 2178289 - RNA, 19 nt, Artificial Sequence
  Description of Artificial Sequence: Synthetic oligonucleotide
  Antisense strand to SEQ ID NO: 2178288
aagaaagcgaccuuccugu

SEQ ID NO: 2178290 - RNA, 19 nt, Artificial Sequence
  Description of Artificial Sequence: Synthetic oligonucleotide
  Sense strand starting at position 983 of SEQ ID NO: 1883230
cacagugcugcucaaagua

SEQ ID NO: 2178291 - RNA, 19 nt, Artificial Sequence
  Description of Artificial Sequence: Synthetic oligonucleotide
  Antisense strand to SEQ ID NO: 2178290
uacuuugagcagcacugug

SEQ ID NO: 2178292 - RNA, 19 nt, Artificial Sequence
  Description of Artificial Sequence: Synthetic oligonucleotide
  Sense strand starting at position 1090 of SEQ ID NO: 1883230
ccauuugugcuauguguug

SEQ ID NO: 2178293 - RNA, 19 nt, Artificial Sequence
  Description of Artificial Sequence: Synthetic oligonucleotide
  Antisense strand to SEQ ID NO: 2178292
caacacauagcacaaaugg

SEQ ID NO: 2178294 - RNA, 19 nt, Artificial Sequence
  Description of Artificial Sequence: Synthetic oligonucleotide
  Sense strand starting at position 1094 of SEQ ID NO: 1883230
uugugcuauguguugcgaa

SEQ ID NO: 2178295 - RNA, 19 nt, Artificial Sequence
  Description of Artificial Sequence: Synthetic oligonucleotide
  Antisense strand to SEQ ID NO: 2178294
uucgcaacacauagcacaa

SEQ ID NO: 2178296 - RNA, 19 nt, Artificial Sequence
  Description of Artificial Sequence: Synthetic oligonucleotide
  Sense strand starting at position 1099 of SEQ ID NO: 1883230
cuauguguugcgaagcgua

SEQ ID NO: 2178297 - RNA, 19 nt, Artificial Sequence
  Description of Artificial Sequence: Synthetic oligonucleotide
  Antisense strand to SEQ ID NO: 2178296
uacgcuucgcaacacauag

SEQ ID NO: 2178298 - RNA, 19 nt, Artificial Sequence
  Description of Artificial Sequence: Synthetic oligonucleotide
  Sense strand starting at position 1138 of SEQ ID NO: 1883230
gucucugaucaugaucauu

SEQ ID NO: 2178299 - RNA, 19 nt, Artificial Sequence
  Description of Artificial Sequence: Synthetic oligonucleotide
  Antisense strand to SEQ ID NO: 2178298
aaugaucaugaucagagac

SEQ ID NO: 2178300 - RNA, 19 nt, Artificial Sequence
  Description of Artificial Sequence: Synthetic oligonucleotide
  Sense strand starting at position 1140 of SEQ ID NO: 1883230
cucugaucaugaucauuag

SEQ ID NO: 2178301 - RNA, 19 nt, Artificial Sequence
  Description of Artificial Sequence: Synthetic oligonucleotide
  Antisense strand to SEQ ID NO: 2178300
cuaaugaucaugaucagag

SEQ ID NO: 2178302 - RNA, 19 nt, Artificial Sequence
  Description of Artificial Sequence: Synthetic oligonucleotide
  Sense strand starting at position 1146 of SEQ ID NO: 1883230
ucaugaucauuagugcuga

SEQ ID NO: 2178303 - RNA, 19 nt, Artificial Sequence
  Description of Artificial Sequence: Synthetic oligonucleotide
  Antisense strand to SEQ ID NO: 2178302
ucagcacuaaugaucauga

SEQ ID NO: 2178304 - RNA, 19 nt, Artificial Sequence
  Description of Artificial Sequence: Synthetic oligonucleotide
  Sense strand starting at position 1151 of SEQ ID NO: 1883230
aucauuagugcugaggcau

SEQ ID NO: 2178305 - RNA, 19 nt, Artificial Sequence
  Description of Artificial Sequence: Synthetic oligonucleotide
  Antisense strand to SEQ ID NO: 2178304
augccucagcacuaaugau

SEQ ID NO: 2178306 - RNA, 19 nt, Artificial Sequence
  Description of Artificial Sequence: Synthetic oligonucleotide
  Sense strand starting at position 1197 of SEQ ID NO: 1883230
cuauguagguaaucuuaga

SEQ ID NO: 2178307 - RNA, 19 nt, Artificial Sequence
  Description of Artificial Sequence: Synthetic oligonucleotide
  Antisense strand to SEQ ID NO: 2178306
ucuaagauuaccuacauag

SEQ ID NO: 2178308 - RNA, 19 nt, Artificial Sequence
  Description of Artificial Sequence: Synthetic oligonucleotide
  Sense strand starting at position 1231 of SEQ ID NO: 1883230
aagucuguuguggaguaga

SEQ ID NO: 2178309 - RNA, 19 nt, Artificial Sequence
  Description of Artificial Sequence: Synthetic oligonucleotide
  Antisense strand to SEQ ID NO: 2178308
ucuacuccacaacagacuu

SEQ ID NO: 2178310 - RNA, 19 nt, Artificial Sequence
  Description of Artificial Sequence: Synthetic oligonucleotide
  Sense strand starting at position 1289 of SEQ ID NO: 1883230
aaguaaugugcgcuuguaa

SEQ ID NO: 2178311 - RNA, 19 nt, Artificial Sequence
  Description of Artificial Sequence: Synthetic oligonucleotide
  Antisense strand to SEQ ID NO: 2178310
uuacaagcgcacauuacuu

SEQ ID NO: 2178312 - RNA, 19 nt, Artificial Sequence
  Description of Artificial Sequence: Synthetic oligonucleotide
  Sense strand starting at position 1290 of SEQ ID NO: 1883230
aguaaugugcgcuuguaac

SEQ ID NO: 2178313 - RNA, 19 nt, Artificial Sequence
  Description of Artificial Sequence: Synthetic oligonucleotide
  Antisense strand to SEQ ID NO: 2178312
guuacaagcgcacauuacu

SEQ ID NO: 2178314 - RNA, 19 nt, Artificial Sequence
  Description of Artificial Sequence: Synthetic oligonucleotide
  Sense strand starting at position 1292 of SEQ ID NO: 1883230
uaaugugcgcuuguaacau

SEQ ID NO: 2178315 - RNA, 19 nt, Artificial Sequence
  Description of Artificial Sequence: Synthetic oligonucleotide
  Antisense strand to SEQ ID NO: 2178314
auguuacaagcgcacauua

SEQ ID NO: 2178316 - RNA, 19 nt, Artificial Sequence
  Description of Artificial Sequence: Synthetic oligonucleotide
  Sense strand starting at position 2373 of SEQ ID NO: 1883230
ggguauuucugcucaaggu

SEQ ID NO: 2178317 - RNA, 19 nt, Artificial Sequence
  Description of Artificial Sequence: Synthetic oligonucleotide
  Antisense strand to SEQ ID NO: 2178316
accuugagcagaaauaccc

SEQ ID NO: 2178318 - RNA, 19 nt, Artificial Sequence
  Description of Artificial Sequence: Synthetic oligonucleotide
  Sense strand starting at position 3242 of SEQ ID NO: 1883230
aggauuagucaccauggcu

SEQ ID NO: 2178319 - RNA, 19 nt, Artificial Sequence
  Description of Artificial Sequence: Synthetic oligonucleotide
  Antisense strand to SEQ ID NO: 2178318
agccauggugacuaauccu

SEQ ID NO: 2178320 - RNA, 19 nt, Artificial Sequence
  Description of Artificial Sequence: Synthetic oligonucleotide
  Sense strand starting at position 3279 of SEQ ID NO: 1883230
caugguuccuaggcagaaa

SEQ ID NO: 2178321 - RNA, 19 nt, Artificial Sequence
  Description of Artificial Sequence: Synthetic oligonucleotide
  Antisense strand to SEQ ID NO: 2178320
uuucugccuaggaaccaug

SEQ ID NO: 2178322 - RNA, 19 nt, Artificial Sequence
  Description of Artificial Sequence: Synthetic oligonucleotide
  Sense strand starting at position 3313 of SEQ ID NO: 1883230
acggguggcuuaucaacua

SEQ ID NO: 2178323 - RNA, 19 nt, Artificial Sequence
  Description of Artificial Sequence: Synthetic oligonucleotide
  Antisense strand to SEQ ID NO: 2178322
uaguugauaagccacccgu

SEQ ID NO: 2178324 - RNA, 19 nt, Artificial Sequence
  Description of Artificial Sequence: Synthetic oligonucleotide
  Sense strand starting at position 3395 of SEQ ID NO: 1883230
guguguuucguagacaaag

SEQ ID NO: 2178325 - RNA, 19 nt, Artificial Sequence
  Description of Artificial Sequence: Synthetic oligonucleotide
  Antisense strand to SEQ ID NO: 2178324
cuuugucuacgaaacacac

SEQ ID NO: 2178326 - RNA, 19 nt, Artificial Sequence
  Description of Artificial Sequence: Synthetic oligonucleotide
  Sense strand starting at position 3493 of SEQ ID NO: 1883230
uggcaucuugguuauauua

SEQ ID NO: 2178327 - RNA, 19 nt, Artificial Sequence
  Description of Artificial Sequence: Synthetic oligonucleotide
  Antisense strand to SEQ ID NO: 2178326
uaauauaaccaagaugcca

SEQ ID NO: 2178328 - RNA, 19 nt, Artificial Sequence
  Description of Artificial Sequence: Synthetic oligonucleotide
  Sense strand starting at position 3526 of SEQ ID NO: 1883230
cguguuucuaucgugaauu

SEQ ID NO: 2178329 - RNA, 19 nt, Artificial Sequence
  Description of Artificial Sequence: Synthetic oligonucleotide
  Antisense strand to SEQ ID NO: 2178328
aauucacgauagaaacacg

SEQ ID NO: 2178330 - RNA, 19 nt, Artificial Sequence
  Description of Artificial Sequence: Synthetic oligonucleotide
  Sense strand starting at position 3534 of SEQ ID NO: 1883230
uaucgugaauucccagacu

SEQ ID NO: 2178331 - RNA, 19 nt, Artificial Sequence
  Description of Artificial Sequence: Synthetic oligonucleotide
  Antisense strand to SEQ ID NO: 2178330
agucugggaauucacgaua

SEQ ID NO: 2178332 - RNA, 19 nt, Artificial Sequence
  Description of Artificial Sequence: Synthetic oligonucleotide
  Sense strand starting at position 3605 of SEQ ID NO: 1883230
gguugauguagaggugcau

SEQ ID NO: 2178333 - RNA, 19 nt, Artificial Sequence
  Description of Artificial Sequence: Synthetic oligonucleotide
  Antisense strand to SEQ ID NO: 2178332
augcaccucuacaucaacc

SEQ ID NO: 2178334 - RNA, 19 nt, Artificial Sequence
  Description of Artificial Sequence: Synthetic oligonucleotide
  Sense strand starting at position 3609 of SEQ ID NO: 1883230
gauguagaggugcaucaaa

SEQ ID NO: 2178335 - RNA, 19 nt, Artificial Sequence
  Description of Artificial Sequence: Synthetic oligonucleotide
  Antisense strand to SEQ ID NO: 2178334
uuugaugcaccucuacauc

SEQ ID NO: 2178336 - RNA, 19 nt, Artificial Sequence
  Description of Artificial Sequence: Synthetic oligonucleotide
  Sense strand starting at position 3675 of SEQ ID NO: 1883230
gcagaaacauggcucauga

SEQ ID NO: 2178337 - RNA, 19 nt, Artificial Sequence
  Description of Artificial Sequence: Synthetic oligonucleotide
  Antisense strand to SEQ ID NO: 2178336
ucaugagccauguuucugc

SEQ ID NO: 2178338 - RNA, 19 nt, Artificial Sequence
  Description of Artificial Sequence: Synthetic oligonucleotide
  Sense strand starting at position 3685 of SEQ ID NO: 1883230
ggcucaugauugucuagaa

SEQ ID NO: 2178339 - RNA, 19 nt, Artificial Sequence
  Description of Artificial Sequence: Synthetic oligonucleotide
  Antisense strand to SEQ ID NO: 2178338
uucuagacaaucaugagcc

SEQ ID NO: 2178340 - RNA, 19 nt, Artificial Sequence
  Description of Artificial Sequence: Synthetic oligonucleotide
  Sense strand starting at position 3686 of SEQ ID NO: 1883230
gcucaugauugucuagaaa

SEQ ID NO: 2178341 - RNA, 19 nt, Artificial Sequence
  Description of Artificial Sequence: Synthetic oligonucleotide
  Antisense strand to SEQ ID NO: 2178340
uuucuagacaaucaugagc

SEQ ID NO: 2178342 - RNA, 19 nt, Artificial Sequence
  Description of Artificial Sequence: Synthetic oligonucleotide
  Sense strand starting at position 3747 of SEQ ID NO: 1883230
ugcagaugcugaucaugau

SEQ ID NO: 2178343 - RNA, 19 nt, Artificial Sequence
  Description of Artificial Sequence: Synthetic oligonucleotide
  Antisense strand to SEQ ID NO: 2178342
aucaugaucagcaucugca

SEQ ID NO: 2178344 - RNA, 19 nt, Artificial Sequence
  Description of Artificial Sequence: Synthetic oligonucleotide
  Sense strand starting at position 3753 of SEQ ID NO: 1883230
ugcugaucaugauuagaaa

SEQ ID NO: 2178345 - RNA, 19 nt, Artificial Sequence
  Description of Artificial Sequence: Synthetic oligonucleotide
  Antisense strand to SEQ ID NO: 2178344
uuucuaaucaugaucagca

SEQ ID NO: 2178346 - RNA, 19 nt, Artificial Sequence
  Description of Artificial Sequence: Synthetic oligonucleotide
  Sense strand starting at position 3807 of SEQ ID NO: 1883230
aaaugauuaucggugguga

SEQ ID NO: 2178347 - RNA, 19 nt, Artificial Sequence
  Description of Artificial Sequence: Synthetic oligonucleotide
  Antisense strand to SEQ ID NO: 2178346
ucaccaccgauaaucauuu

SEQ ID NO: 2178348 - RNA, 19 nt, Artificial Sequence
  Description of Artificial Sequence: Synthetic oligonucleotide
  Sense strand starting at position 3808 of SEQ ID NO: 1883230
aaugauuaucgguggugau

SEQ ID NO: 2178349 - RNA, 19 nt, Artificial Sequence
  Description of Artificial Sequence: Synthetic oligonucleotide
  Antisense strand to SEQ ID NO: 2178348
aucaccaccgauaaucauu

SEQ ID NO: 2178350 - RNA, 19 nt, Artificial Sequence
  Description of Artificial Sequence: Synthetic oligonucleotide
  Sense strand starting at position 3809 of SEQ ID NO: 1883230
augauuaucgguggugaua

SEQ ID NO: 2178351 - RNA, 19 nt, Artificial Sequence
  Description of Artificial Sequence: Synthetic oligonucleotide
  Antisense strand to SEQ ID NO: 2178350
uaucaccaccgauaaucau

SEQ ID NO: 2178352 - RNA, 19 nt, Artificial Sequence
  Description of Artificial Sequence: Synthetic oligonucleotide
  Sense strand starting at position 3825 of SEQ ID NO: 1883230
auaagugaggucgaguagu

SEQ ID NO: 2178353 - RNA, 19 nt, Artificial Sequence
  Description of Artificial Sequence: Synthetic oligonucleotide
  Antisense strand to SEQ ID NO: 2178352
acuacucgaccucacuuau

SEQ ID NO: 2178354 - RNA, 19 nt, Artificial Sequence
  Description of Artificial Sequence: Synthetic oligonucleotide
  Sense strand starting at position 3836 of SEQ ID NO: 1883230
cgaguagucagugccuuuc

SEQ ID NO: 2178355 - RNA, 19 nt, Artificial Sequence
  Description of Artificial Sequence: Synthetic oligonucleotide
  Antisense strand to SEQ ID NO: 2178354
gaaaggcacugacuacucg

SEQ ID NO: 2178356 - RNA, 19 nt, Artificial Sequence
  Description of Artificial Sequence: Synthetic oligonucleotide
  Sense strand starting at position 3867 of SEQ ID NO: 1883231
uaggguuguucucagcauu

SEQ ID NO: 2178357 - RNA, 19 nt, Artificial Sequence
  Description of Artificial Sequence: Synthetic oligonucleotide
  Antisense strand to SEQ ID NO: 2178356
aaugcugagaacaacccua

SEQ ID NO: 2178358 - RNA, 19 nt, Artificial Sequence
  Description of Artificial Sequence: Synthetic oligonucleotide
  Sense strand starting at position 3870 of SEQ ID NO: 1883231
gguuguucucagcauugag

SEQ ID NO: 2178359 - RNA, 19 nt, Artificial Sequence
  Description of Artificial Sequence: Synthetic oligonucleotide
  Antisense strand to SEQ ID NO: 2178358
cucaaugcugagaacaacc

SEQ ID NO: 2178360 - RNA, 19 nt, Artificial Sequence
  Description of Artificial Sequence: Synthetic oligonucleotide
  Sense strand starting at position 3877 of SEQ ID NO: 1883231
cucagcauugaguacaaau

SEQ ID NO: 2178361 - RNA, 19 nt, Artificial Sequence
  Description of Artificial Sequence: Synthetic oligonucleotide
  Antisense strand to SEQ ID NO: 2178360
auuuguacucaaugcugag

SEQ ID NO: 2178362 - RNA, 19 nt, Artificial Sequence
  Description of Artificial Sequence: Synthetic oligonucleotide
  Sense strand starting at position 3921 of SEQ ID NO: 1883231
gguaaaugcgugucggugu

SEQ ID NO: 2178363 - RNA, 19 nt, Artificial Sequence
  Description of Artificial Sequence: Synthetic oligonucleotide
  Antisense strand to SEQ ID NO: 2178362
acaccgacacgcauuuacc

SEQ ID NO: 2178364 - RNA, 19 nt, Artificial Sequence
  Description of Artificial Sequence: Synthetic oligonucleotide
  Sense strand starting at position 187 of SEQ ID NO: 1883232
cgugaaacuguugagcuua

SEQ ID NO: 2178365 - RNA, 19 nt, Artificial Sequence
  Description of Artificial Sequence: Synthetic oligonucleotide
  Antisense strand to SEQ ID NO: 2178364
uaagcucaacaguuucacg

SEQ ID NO: 2178366 - RNA, 19 nt, Artificial Sequence
  Description of Artificial Sequence: Synthetic oligonucleotide
  Sense strand starting at position 189 of SEQ ID NO: 1883232
ugaaacuguugagcuuauu

SEQ ID NO: 2178367 - RNA, 19 nt, Artificial Sequence
  Description of Artificial Sequence: Synthetic oligonucleotide
  Antisense strand to SEQ ID NO: 2178366
aauaagcucaacaguuuca

SEQ ID NO: 2178368 - RNA, 19 nt, Artificial Sequence
  Description of Artificial Sequence: Synthetic oligonucleotide
  Sense strand starting at position 192 of SEQ ID NO: 1883232
aacuguugagcuuauugaa

SEQ ID NO: 2178369 - RNA, 19 nt, Artificial Sequence
  Description of Artificial Sequence: Synthetic oligonucleotide
  Antisense strand to SEQ ID NO: 2178368
uucaauaagcucaacaguu

SEQ ID NO: 2178370 - RNA, 19 nt, Artificial Sequence
  Description of Artificial Sequence: Synthetic oligonucleotide
  Sense strand starting at position 432 of SEQ ID NO: 1883232
gcuaaugaagcuuaaacuu

SEQ ID NO: 2178371 - RNA, 19 nt, Artificial Sequence
  Description of Artificial Sequence: Synthetic oligonucleotide
  Antisense strand to SEQ ID NO: 2178370
aaguuuaagcuucauuagc

SEQ ID NO: 2178372 - RNA, 19 nt, Artificial Sequence
  Description of Artificial Sequence: Synthetic oligonucleotide
  Sense strand starting at position 547 of SEQ ID NO: 1883232
ugagcucucuaagcagaga

SEQ ID NO: 2178373 - RNA, 19 nt, Artificial Sequence
  Description of Artificial Sequence: Synthetic oligonucleotide
  Antisense strand to SEQ ID NO: 2178372
ucucugcuuagagagcuca

SEQ ID NO: 2178374 - RNA, 19 nt, Artificial Sequence
  Description of Artificial Sequence: Synthetic oligonucleotide
  Sense strand starting at position 618 of SEQ ID NO: 1883232
ccugguugguuggcugaaa

SEQ ID NO: 2178375 - RNA, 19 nt, Artificial Sequence
  Description of Artificial Sequence: Synthetic oligonucleotide
  Antisense strand to SEQ ID NO: 2178374
uuucagccaaccaaccagg

SEQ ID NO: 2178376 - RNA, 19 nt, Artificial Sequence
  Description of Artificial Sequence: Synthetic oligonucleotide
  Sense strand starting at position 656 of SEQ ID NO: 1883232
cacagugagugaguagaaa

SEQ ID NO: 2178377 - RNA, 19 nt, Artificial Sequence
  Description of Artificial Sequence: Synthetic oligonucleotide
  Antisense strand to SEQ ID NO: 2178376
uuucuacucacucacugug

SEQ ID NO: 2178378 - RNA, 19 nt, Artificial Sequence
  Description of Artificial Sequence: Synthetic oligonucleotide
  Sense strand starting at position 687 of SEQ ID NO: 1883232
cucuguuguguguagagga

SEQ ID NO: 2178379 - RNA, 19 nt, Artificial Sequence
  Description of Artificial Sequence: Synthetic oligonucleotide
  Antisense strand to SEQ ID NO: 2178378
uccucuacacacaacagag

SEQ ID NO: 2178380 - RNA, 19 nt, Artificial Sequence
  Description of Artificial Sequence: Synthetic oligonucleotide
  Sense strand starting at position 694 of SEQ ID NO: 1883232
guguguagaggacagaauu

SEQ ID NO: 2178381 - RNA, 19 nt, Artificial Sequence
  Description of Artificial Sequence: Synthetic oligonucleotide
  Antisense strand to SEQ ID NO: 2178380
aauucuguccucuacacac

SEQ ID NO: 2178382 - RNA, 19 nt, Artificial Sequence
  Description of Artificial Sequence: Synthetic oligonucleotide
  Sense strand starting at position 722 of SEQ ID NO: 1883232
agggagguuggauguuaga

SEQ ID NO: 2178383 - RNA, 19 nt, Artificial Sequence
  Description of Artificial Sequence: Synthetic oligonucleotide
  Antisense strand to SEQ ID NO: 2178382
ucuaacauccaaccucccu

SEQ ID NO: 2178384 - RNA, 19 nt, Artificial Sequence
  Description of Artificial Sequence: Synthetic oligonucleotide
  Sense strand starting at position 731 of SEQ ID NO: 1883232
ggauguuagaguggaucuu

SEQ ID NO: 2178385 - RNA, 19 nt, Artificial Sequence
  Description of Artificial Sequence: Synthetic oligonucleotide
  Antisense strand to SEQ ID NO: 2178384
aagauccacucuaacaucc

SEQ ID NO: 2178386 - RNA, 19 nt, Artificial Sequence
  Description of Artificial Sequence: Synthetic oligonucleotide
  Sense strand starting at position 732 of SEQ ID NO: 1883232
gauguuagaguggaucuua

SEQ ID NO: 2178387 - RNA, 19 nt, Artificial Sequence
  Description of Artificial Sequence: Synthetic oligonucleotide
  Antisense strand to SEQ ID NO: 2178386
uaagauccacucuaacauc

SEQ ID NO: 2178388 - RNA, 19 nt, Artificial Sequence
  Description of Artificial Sequence: Synthetic oligonucleotide
  Sense strand starting at position 740 of SEQ ID NO: 1883232
aguggaucuuaccuuuaag

SEQ ID NO: 2178389 - RNA, 19 nt, Artificial Sequence
  Description of Artificial Sequence: Synthetic oligonucleotide
  Antisense strand to SEQ ID NO: 2178388
cuuaaagguaagauccacu

SEQ ID NO: 2178390 - RNA, 19 nt, Artificial Sequence
  Description of Artificial Sequence: Synthetic oligonucleotide
  Sense strand starting at position 2053 of SEQ ID NO: 1883232
ggcggugaggucugaccaa

SEQ ID NO: 2178391 - RNA, 19 nt, Artificial Sequence
  Description of Artificial Sequence: Synthetic oligonucleotide
  Antisense strand to SEQ ID NO: 2178390
uuggucagaccucaccgcc

SEQ ID NO: 2178392 - RNA, 19 nt, Artificial Sequence
  Description of Artificial Sequence: Synthetic oligonucleotide
  Sense strand starting at position 2128 of SEQ ID NO: 1883232
uggaacaugcuguaagcuu

SEQ ID NO: 2178393 - RNA, 19 nt, Artificial Sequence
  Description of Artificial Sequence: Synthetic oligonucleotide
  Antisense strand to SEQ ID NO: 2178392
aagcuuacagcauguucca

SEQ ID NO: 2178394 - RNA, 19 nt, Artificial Sequence
  Description of Artificial Sequence: Synthetic oligonucleotide
  Sense strand starting at position 2259 of SEQ ID NO: 1883232
cccugaauuugccaggaua

SEQ ID NO: 2178395 - RNA, 19 nt, Artificial Sequence
  Description of Artificial Sequence: Synthetic oligonucleotide
  Antisense strand to SEQ ID NO: 2178394
uauccuggcaaauucaggg

SEQ ID NO: 2178396 - RNA, 19 nt, Artificial Sequence
  Description of Artificial Sequence: Synthetic oligonucleotide
  Sense strand starting at position 2270 of SEQ ID NO: 1883232
ccaggauaguccucagcaa

SEQ ID NO: 2178397 - RNA, 19 nt, Artificial Sequence
  Description of Artificial Sequence: Synthetic oligonucleotide
  Antisense strand to SEQ ID NO: 2178396
uugcugaggacuauccugg

SEQ ID NO: 2178398 - RNA, 19 nt, Artificial Sequence
  Description of Artificial Sequence: Synthetic oligonucleotide
  Sense strand starting at position 2274 of SEQ ID NO: 1883232
gauaguccucagcaagauu

SEQ ID NO: 2178399 - RNA, 19 nt, Artificial Sequence
  Description of Artificial Sequence: Synthetic oligonucleotide
  Antisense strand to SEQ ID NO: 2178398
aaucuugcugaggacuauc

SEQ ID NO: 2178400 - RNA, 19 nt, Artificial Sequence
  Description of Artificial Sequence: Synthetic oligonucleotide
  Sense strand starting at position 2325 of SEQ ID NO: 1883232
uguaacaagucucagauuu

SEQ ID NO: 2178401 - RNA, 19 nt, Artificial Sequence
  Description of Artificial Sequence: Synthetic oligonucleotide
  Antisense strand to SEQ ID NO: 2178400
aaaucugagacuuguuaca

SEQ ID NO: 2178402 - RNA, 19 nt, Artificial Sequence
  Description of Artificial Sequence: Synthetic oligonucleotide
  Sense strand starting at position 2355 of SEQ ID NO: 1883232
agaugauaacugugucugu

SEQ ID NO: 2178403 - RNA, 19 nt, Artificial Sequence
  Description of Artificial Sequence: Synthetic oligonucleotide
  Antisense strand to SEQ ID NO: 2178402
acagacacaguuaucaucu

SEQ ID NO: 2178404 - RNA, 19 nt, Artificial Sequence
  Description of Artificial Sequence: Synthetic oligonucleotide
  Sense strand starting at position 2356 of SEQ ID NO: 1883232
gaugauaacugugucugua

SEQ ID NO: 2178405 - RNA, 19 nt, Artificial Sequence
  Description of Artificial Sequence: Synthetic oligonucleotide
  Antisense strand to SEQ ID NO: 2178404
uacagacacaguuaucauc

SEQ ID NO: 2178406 - RNA, 19 nt, Artificial Sequence
  Description of Artificial Sequence: Synthetic oligonucleotide
  Sense strand starting at position 2359 of SEQ ID NO: 1883232
gauaacugugucuguagga

SEQ ID NO: 2178407 - RNA, 19 nt, Artificial Sequence
  Description of Artificial Sequence: Synthetic oligonucleotide
  Antisense strand to SEQ ID NO: 2178406
uccuacagacacaguuauc

SEQ ID NO: 2178408 - RNA, 19 nt, Artificial Sequence
  Description of Artificial Sequence: Synthetic oligonucleotide
  Sense strand starting at position 2360 of SEQ ID NO: 1883232
auaacugugucuguaggau

SEQ ID NO: 2178409 - RNA, 19 nt, Artificial Sequence
  Description of Artificial Sequence: Synthetic oligonucleotide
  Antisense strand to SEQ ID NO: 2178408
auccuacagacacaguuau

SEQ ID NO: 2178410 - RNA, 19 nt, Artificial Sequence
  Description of Artificial Sequence: Synthetic oligonucleotide
  Sense strand starting at position 2979 of SEQ ID NO: 1883232
cuuaaagggccagagucau

SEQ ID NO: 2178411 - RNA, 19 nt, Artificial Sequence
  Description of Artificial Sequence: Synthetic oligonucleotide
  Antisense strand to SEQ ID NO: 2178410
augacucuggcccuuuaag

SEQ ID NO: 2178412 - RNA, 19 nt, Artificial Sequence
  Description of Artificial Sequence: Synthetic oligonucleotide
  Sense strand starting at position 3034 of SEQ ID NO: 1883232
gccuccuuacaaugauaug

SEQ ID NO: 2178413 - RNA, 19 nt, Artificial Sequence
  Description of Artificial Sequence: Synthetic oligonucleotide
  Antisense strand to SEQ ID NO: 2178412
cauaucauuguaaggaggc

SEQ ID NO: 2178414 - RNA, 19 nt, Artificial Sequence
  Description of Artificial Sequence: Synthetic oligonucleotide
  Sense strand starting at position 3045 of SEQ ID NO: 1883232
augauaugacuuggcauaa

SEQ ID NO: 2178415 - RNA, 19 nt, Artificial Sequence
  Description of Artificial Sequence: Synthetic oligonucleotide
  Antisense strand to SEQ ID NO: 2178414
uuaugccaagucauaucau

SEQ ID NO: 2178416 - RNA, 19 nt, Artificial Sequence
  Description of Artificial Sequence: Synthetic oligonucleotide
  Sense strand starting at position 3046 of SEQ ID NO: 1883232
ugauaugacuuggcauaaa

SEQ ID NO: 2178417 - RNA, 19 nt, Artificial Sequence
  Description of Artificial Sequence: Synthetic oligonucleotide
  Antisense strand to SEQ ID NO: 2178416
uuuaugccaagucauauca

SEQ ID NO: 2178418 - RNA, 19 nt, Artificial Sequence
  Description of Artificial Sequence: Synthetic oligonucleotide
  Sense strand starting at position 3418 of SEQ ID NO: 1883232
ucuagugaagcagauacua

SEQ ID NO: 2178419 - RNA, 19 nt, Artificial Sequence
  Description of Artificial Sequence: Synthetic oligonucleotide
  Antisense strand to SEQ ID NO: 2178418
uaguaucugcuucacuaga

SEQ ID NO: 2178420 - RNA, 19 nt, Artificial Sequence
  Description of Artificial Sequence: Synthetic oligonucleotide
  Sense strand starting at position 3426 of SEQ ID NO: 1883232
agcagauacuacuucugau

SEQ ID NO: 2178421 - RNA, 19 nt, Artificial Sequence
  Description of Artificial Sequence: Synthetic oligonucleotide
  Antisense strand to SEQ ID NO: 2178420
aucagaaguaguaucugcu

SEQ ID NO: 2178422 - RNA, 19 nt, Artificial Sequence
  Description of Artificial Sequence: Synthetic oligonucleotide
  Sense strand starting at position 3615 of SEQ ID NO: 1883232
gcuuccuuaggauauggua

SEQ ID NO: 2178423 - RNA, 19 nt, Artificial Sequence
  Description of Artificial Sequence: Synthetic oligonucleotide
  Antisense strand to SEQ ID NO: 2178422
uaccauauccuaaggaagc

SEQ ID NO: 2178424 - RNA, 19 nt, Artificial Sequence
  Description of Artificial Sequence: Synthetic oligonucleotide
  Sense strand starting at position 3700 of SEQ ID NO: 1883232
uuucuauugcuaggcagau

SEQ ID NO: 2178425 - RNA, 19 nt, Artificial Sequence
  Description of Artificial Sequence: Synthetic oligonucleotide
  Antisense strand to SEQ ID NO: 2178424
aucugccuagcaauagaaa

SEQ ID NO: 2178426 - RNA, 19 nt, Artificial Sequence
  Description of Artificial Sequence: Synthetic oligonucleotide
  Sense strand starting at position 3701 of SEQ ID NO: 1883232
uucuauugcuaggcagauu

SEQ ID NO: 2178427 - RNA, 19 nt, Artificial Sequence
  Description of Artificial Sequence: Synthetic oligonucleotide
  Antisense strand to SEQ ID NO: 2178426
aaucugccuagcaauagaa

SEQ ID NO: 2178428 - RNA, 19 nt, Artificial Sequence
  Description of Artificial Sequence: Synthetic oligonucleotide
  Sense strand starting at position 3704 of SEQ ID NO: 1883232
uauugcuaggcagauugua

SEQ ID NO: 2178429 - RNA, 19 nt, Artificial Sequence
  Description of Artificial Sequence: Synthetic oligonucleotide
  Antisense strand to SEQ ID NO: 2178428
uacaaucugccuagcaaua

SEQ ID NO: 2178430 - RNA, 19 nt, Artificial Sequence
  Description of Artificial Sequence: Synthetic oligonucleotide
  Sense strand starting at position 3712 of SEQ ID NO: 1883232
ggcagauuguacuuugauu

SEQ ID NO: 2178431 - RNA, 19 nt, Artificial Sequence
  Description of Artificial Sequence: Synthetic oligonucleotide
  Antisense strand to SEQ ID NO: 2178430
aaucaaaguacaaucugcc

SEQ ID NO: 2178432 - RNA, 19 nt, Artificial Sequence
  Description of Artificial Sequence: Synthetic oligonucleotide
  Sense strand starting at position 3739 of SEQ ID NO: 1883232
ggaguaauuuaagacuguu

SEQ ID NO: 2178433 - RNA, 19 nt, Artificial Sequence
  Description of Artificial Sequence: Synthetic oligonucleotide
  Antisense strand to SEQ ID NO: 2178432
aacagucuuaaauuacucc

SEQ ID NO: 2178434 - RNA, 19 nt, Artificial Sequence
  Description of Artificial Sequence: Synthetic oligonucleotide
  Sense strand starting at position 3761 of SEQ ID NO: 1883232
auuguuucucauuggaaau

SEQ ID NO: 2178435 - RNA, 19 nt, Artificial Sequence
  Description of Artificial Sequence: Synthetic oligonucleotide
  Antisense strand to SEQ ID NO: 2178434
auuuccaaugagaaacaau

SEQ ID NO: 2178436 - RNA, 19 nt, Artificial Sequence
  Description of Artificial Sequence: Synthetic oligonucleotide
  Sense strand starting at position 3791 of SEQ ID NO: 1883232
cuuguauaucguugggaga

SEQ ID NO: 2178437 - RNA, 19 nt, Artificial Sequence
  Description of Artificial Sequence: Synthetic oligonucleotide
  Antisense strand to SEQ ID NO: 2178436
ucucccaacgauauacaag

SEQ ID NO: 2178438 - RNA, 19 nt, Artificial Sequence
  Description of Artificial Sequence: Synthetic oligonucleotide
  Sense strand starting at position 3792 of SEQ ID NO: 1883232
uuguauaucguugggagag

SEQ ID NO: 2178439 - RNA, 19 nt, Artificial Sequence
  Description of Artificial Sequence: Synthetic oligonucleotide
  Antisense strand to SEQ ID NO: 2178438
cucucccaacgauauacaa

SEQ ID NO: 2178440 - RNA, 19 nt, Artificial Sequence
  Description of Artificial Sequence: Synthetic oligonucleotide
  Sense strand starting at position 3824 of SEQ ID NO: 1883232
uuguacugcucauugacaa

SEQ ID NO: 2178441 - RNA, 19 nt, Artificial Sequence
  Description of Artificial Sequence: Synthetic oligonucleotide
  Antisense strand to SEQ ID NO: 2178440
uugucaaugagcaguacaa

SEQ ID NO: 2178442 - RNA, 19 nt, Artificial Sequence
  Description of Artificial Sequence: Synthetic oligonucleotide
  Sense strand starting at position 3825 of SEQ ID NO: 1883232
uguacugcucauugacaaa

SEQ ID NO: 2178443 - RNA, 19 nt, Artificial Sequence
  Description of Artificial Sequence: Synthetic oligonucleotide
  Antisense strand to SEQ ID NO: 2178442
uuugucaaugagcaguaca

SEQ ID NO: 2178444 - RNA, 19 nt, Artificial Sequence
  Description of Artificial Sequence: Synthetic oligonucleotide
  Sense strand starting at position 104 of SEQ ID NO: 1883233
ggucacagcaaaugugaga

SEQ ID NO: 2178445 - RNA, 19 nt, Artificial Sequence
  Description of Artificial Sequence: Synthetic oligonucleotide
  Antisense strand to SEQ ID NO: 2178444
ucucacauuugcugugacc

SEQ ID NO: 2178446 - RNA, 19 nt, Artificial Sequence
  Description of Artificial Sequence: Synthetic oligonucleotide
  Sense strand starting at position 141 of SEQ ID NO: 1883233
augugaguucuggaaccca

SEQ ID NO: 2178447 - RNA, 19 nt, Artificial Sequence
  Description of Artificial Sequence: Synthetic oligonucleotide
  Antisense strand to SEQ ID NO: 2178446
uggguuccagaacucacau

SEQ ID NO: 2178448 - RNA, 19 nt, Artificial Sequence
  Description of Artificial Sequence: Synthetic oligonucleotide
  Sense strand starting at position 157 of SEQ ID NO: 1883233
ccagaaagugaucaucugu

SEQ ID NO: 2178449 - RNA, 19 nt, Artificial Sequence
  Description of Artificial Sequence: Synthetic oligonucleotide
  Antisense strand to SEQ ID NO: 2178448
acagaugaucacuuucugg

SEQ ID NO: 2178450 - RNA, 19 nt, Artificial Sequence
  Description of Artificial Sequence: Synthetic oligonucleotide
  Sense strand starting at position 162 of SEQ ID NO: 1883233
aagugaucaucuguaucug

SEQ ID NO: 2178451 - RNA, 19 nt, Artificial Sequence
  Description of Artificial Sequence: Synthetic oligonucleotide
  Antisense strand to SEQ ID NO: 2178450
cagauacagaugaucacuu

SEQ ID NO: 2178452 - RNA, 19 nt, Artificial Sequence
  Description of Artificial Sequence: Synthetic oligonucleotide
  Sense strand starting at position 304 of SEQ ID NO: 1883233
gggccaagugcugaccuaa

SEQ ID NO: 2178453 - RNA, 19 nt, Artificial Sequence
  Description of Artificial Sequence: Synthetic oligonucleotide
  Antisense strand to SEQ ID NO: 2178452
uuaggucagcacuuggccc

SEQ ID NO: 2178454 - RNA, 19 nt, Artificial Sequence
  Description of Artificial Sequence: Synthetic oligonucleotide
  Sense strand starting at position 347 of SEQ ID NO: 1883233
aggccuauggauuagcaaa

SEQ ID NO: 2178455 - RNA, 19 nt, Artificial Sequence
  Description of Artificial Sequence: Synthetic oligonucleotide
  Antisense strand to SEQ ID NO: 2178454
uuugcuaauccauaggccu

SEQ ID NO: 2178456 - RNA, 19 nt, Artificial Sequence
  Description of Artificial Sequence: Synthetic oligonucleotide
  Sense strand starting at position 349 of SEQ ID NO: 1883233
gccuauggauuagcaaaua

SEQ ID NO: 2178457 - RNA, 19 nt, Artificial Sequence
  Description of Artificial Sequence: Synthetic oligonucleotide
  Antisense strand to SEQ ID NO: 2178456
uauuugcuaauccauaggc

SEQ ID NO: 2178458 - RNA, 19 nt, Artificial Sequence
  Description of Artificial Sequence: Synthetic oligonucleotide
  Sense strand starting at position 371 of SEQ ID NO: 1883233
accgaaacaugcuuaugga

SEQ ID NO: 2178459 - RNA, 19 nt, Artificial Sequence
  Description of Artificial Sequence: Synthetic oligonucleotide
  Antisense strand to SEQ ID NO: 2178458
uccauaagcauguuucggu

SEQ ID NO: 2178460 - RNA, 19 nt, Artificial Sequence
  Description of Artificial Sequence: Synthetic oligonucleotide
  Sense strand starting at position 372 of SEQ ID NO: 1883233
ccgaaacaugcuuauggau

SEQ ID NO: 2178461 - RNA, 19 nt, Artificial Sequence
  Description of Artificial Sequence: Synthetic oligonucleotide
  Antisense strand to SEQ ID NO: 2178460
auccauaagcauguuucgg

SEQ ID NO: 2178462 - RNA, 19 nt, Artificial Sequence
  Description of Artificial Sequence: Synthetic oligonucleotide
  Sense strand starting at position 379 of SEQ ID NO: 1883233
augcuuauggauuagcaau

SEQ ID NO: 2178463 - RNA, 19 nt, Artificial Sequence
  Description of Artificial Sequence: Synthetic oligonucleotide
  Antisense strand to SEQ ID NO: 2178462
auugcuaauccauaagcau

SEQ ID NO: 2178464 - RNA, 19 nt, Artificial Sequence
  Description of Artificial Sequence: Synthetic oligonucleotide
  Sense strand starting at position 381 of SEQ ID NO: 1883233
gcuuauggauuagcaauua

SEQ ID NO: 2178465 - RNA, 19 nt, Artificial Sequence
  Description of Artificial Sequence: Synthetic oligonucleotide
  Antisense strand to SEQ ID NO: 2178464
uaauugcuaauccauaagc

SEQ ID NO: 2178466 - RNA, 19 nt, Artificial Sequence
  Description of Artificial Sequence: Synthetic oligonucleotide
  Sense strand starting at position 411 of SEQ ID NO: 1883233
augccuauggauuagcaau

SEQ ID NO: 2178467 - RNA, 19 nt, Artificial Sequence
  Description of Artificial Sequence: Synthetic oligonucleotide
  Antisense strand to SEQ ID NO: 2178466
auugcuaauccauaggcau

SEQ ID NO: 2178468 - RNA, 19 nt, Artificial Sequence
  Description of Artificial Sequence: Synthetic oligonucleotide
  Sense strand starting at position 413 of SEQ ID NO: 1883233
gccuauggauuagcaauua

SEQ ID NO: 2178469 - RNA, 19 nt, Artificial Sequence
  Description of Artificial Sequence: Synthetic oligonucleotide
  Antisense strand to SEQ ID NO: 2178468
uaauugcuaauccauaggc

SEQ ID NO: 2178470 - RNA, 19 nt, Artificial Sequence
  Description of Artificial Sequence: Synthetic oligonucleotide
  Sense strand starting at position 507 of SEQ ID NO: 1883233
ugguguauuggcuaagaaa

SEQ ID NO: 2178471 - RNA, 19 nt, Artificial Sequence
  Description of Artificial Sequence: Synthetic oligonucleotide
  Antisense strand to SEQ ID NO: 2178470
uuucuuagccaauacacca

SEQ ID NO: 2178472 - RNA, 19 nt, Artificial Sequence
  Description of Artificial Sequence: Synthetic oligonucleotide
  Sense strand starting at position 571 of SEQ ID NO: 1883233
uuggaugaguuauuaaugu

SEQ ID NO: 2178473 - RNA, 19 nt, Artificial Sequence
  Description of Artificial Sequence: Synthetic oligonucleotide
  Antisense strand to SEQ ID NO: 2178472
acauuaauaacucauccaa

SEQ ID NO: 2178474 - RNA, 19 nt, Artificial Sequence
  Description of Artificial Sequence: Synthetic oligonucleotide
  Sense strand starting at position 578 of SEQ ID NO: 1883233
aguuauuaaugucucugaa

SEQ ID NO: 2178475 - RNA, 19 nt, Artificial Sequence
  Description of Artificial Sequence: Synthetic oligonucleotide
  Antisense strand to SEQ ID NO: 2178474
uucagagacauuaauaacu

SEQ ID NO: 2178476 - RNA, 19 nt, Artificial Sequence
  Description of Artificial Sequence: Synthetic oligonucleotide
  Sense strand starting at position 684 of SEQ ID NO: 1883233
gguuauuaucaggaaugca

SEQ ID NO: 2178477 - RNA, 19 nt, Artificial Sequence
  Description of Artificial Sequence: Synthetic oligonucleotide
  Antisense strand to SEQ ID NO: 2178476
ugcauuccugauaauaacc

SEQ ID NO: 2178478 - RNA, 19 nt, Artificial Sequence
  Description of Artificial Sequence: Synthetic oligonucleotide
  Sense strand starting at position 740 of SEQ ID NO: 1883233
gcagcugucaagcagaaga

SEQ ID NO: 2178479 - RNA, 19 nt, Artificial Sequence
  Description of Artificial Sequence: Synthetic oligonucleotide
  Antisense strand to SEQ ID NO: 2178478
ucuucugcuugacagcugc

SEQ ID NO: 2178480 - RNA, 19 nt, Artificial Sequence
  Description of Artificial Sequence: Synthetic oligonucleotide
  Sense strand starting at position 763 of SEQ ID NO: 1883233
auugaaagccaguagacuu

SEQ ID NO: 2178481 - RNA, 19 nt, Artificial Sequence
  Description of Artificial Sequence: Synthetic oligonucleotide
  Antisense strand to SEQ ID NO: 2178480
aagucuacuggcuuucaau

SEQ ID NO: 2178482 - RNA, 19 nt, Artificial Sequence
  Description of Artificial Sequence: Synthetic oligonucleotide
  Sense strand starting at position 999 of SEQ ID NO: 1883233
gucacuacuuacucucaga

SEQ ID NO: 2178483 - RNA, 19 nt, Artificial Sequence
  Description of Artificial Sequence: Synthetic oligonucleotide
  Antisense strand to SEQ ID NO: 2178482
ucugagaguaaguagugac

SEQ ID NO: 2178484 - RNA, 19 nt, Artificial Sequence
  Description of Artificial Sequence: Synthetic oligonucleotide
  Sense strand starting at position 1013 of SEQ ID NO: 1883233
ucagauugcucuccagacu

SEQ ID NO: 2178485 - RNA, 19 nt, Artificial Sequence
  Description of Artificial Sequence: Synthetic oligonucleotide
  Antisense strand to SEQ ID NO: 2178484
agucuggagagcaaucuga

SEQ ID NO: 2178486 - RNA, 19 nt, Artificial Sequence
  Description of Artificial Sequence: Synthetic oligonucleotide
  Sense strand starting at position 1495 of SEQ ID NO: 1883233
cauguacuggagugagagu

SEQ ID NO: 2178487 - RNA, 19 nt, Artificial Sequence
  Description of Artificial Sequence: Synthetic oligonucleotide
  Antisense strand to SEQ ID NO: 2178486
acucucacuccaguacaug

SEQ ID NO: 2178488 - RNA, 19 nt, Artificial Sequence
  Description of Artificial Sequence: Synthetic oligonucleotide
  Sense strand starting at position 1551 of SEQ ID NO: 1883233
gaggccucgucaguuauuu

SEQ ID NO: 2178489 - RNA, 19 nt, Artificial Sequence
  Description of Artificial Sequence: Synthetic oligonucleotide
  Antisense strand to SEQ ID NO: 2178488
aaauaacugacgaggccuc

SEQ ID NO: 2178490 - RNA, 19 nt, Artificial Sequence
  Description of Artificial Sequence: Synthetic oligonucleotide
  Sense strand starting at position 1590 of SEQ ID NO: 1883233
caugaaucacuauguacga

SEQ ID NO: 2178491 - RNA, 19 nt, Artificial Sequence
  Description of Artificial Sequence: Synthetic oligonucleotide
  Antisense strand to SEQ ID NO: 2178490
ucguacauagugauucaug

SEQ ID NO: 2178492 - RNA, 19 nt, Artificial Sequence
  Description of Artificial Sequence: Synthetic oligonucleotide
  Sense strand starting at position 1591 of SEQ ID NO: 1883233
augaaucacuauguacgaa

SEQ ID NO: 2178493 - RNA, 19 nt, Artificial Sequence
  Description of Artificial Sequence: Synthetic oligonucleotide
  Antisense strand to SEQ ID NO: 2178492
uucguacauagugauucau

SEQ ID NO: 2178494 - RNA, 19 nt, Artificial Sequence
  Description of Artificial Sequence: Synthetic oligonucleotide
  Sense strand starting at position 1696 of SEQ ID NO: 1883233
aagggaagcguuuggaauu

SEQ ID NO: 2178495 - RNA, 19 nt, Artificial Sequence
  Description of Artificial Sequence: Synthetic oligonucleotide
  Antisense strand to SEQ ID NO: 2178494
aauuccaaacgcuucccuu

SEQ ID NO: 2178496 - RNA, 19 nt, Artificial Sequence
  Description of Artificial Sequence: Synthetic oligonucleotide
  Sense strand starting at position 1721 of SEQ ID NO: 1883233
gucagaaagccugggaacu

SEQ ID NO: 2178497 - RNA, 19 nt, Artificial Sequence
  Description of Artificial Sequence: Synthetic oligonucleotide
  Antisense strand to SEQ ID NO: 2178496
aguucccaggcuuucugac

SEQ ID NO: 2178498 - RNA, 19 nt, Artificial Sequence
  Description of Artificial Sequence: Synthetic oligonucleotide
  Sense strand starting at position 1722 of SEQ ID NO: 1883233
ucagaaagccugggaacua

SEQ ID NO: 2178499 - RNA, 19 nt, Artificial Sequence
  Description of Artificial Sequence: Synthetic oligonucleotide
  Antisense strand to SEQ ID NO: 2178498
uaguucccaggcuuucuga

SEQ ID NO: 2178500 - RNA, 19 nt, Artificial Sequence
  Description of Artificial Sequence: Synthetic oligonucleotide
  Sense strand starting at position 2231 of SEQ ID NO: 1883233
ggacucagauggcugagau

SEQ ID NO: 2178501 - RNA, 19 nt, Artificial Sequence
  Description of Artificial Sequence: Synthetic oligonucleotide
  Antisense strand to SEQ ID NO: 2178500
aucucagccaucugagucc

SEQ ID NO: 2178502 - RNA, 19 nt, Artificial Sequence
  Description of Artificial Sequence: Synthetic oligonucleotide
  Sense strand starting at position 2232 of SEQ ID NO: 1883233
gacucagauggcugagaug

SEQ ID NO: 2178503 - RNA, 19 nt, Artificial Sequence
  Description of Artificial Sequence: Synthetic oligonucleotide
  Antisense strand to SEQ ID NO: 2178502
caucucagccaucugaguc

SEQ ID NO: 2178504 - RNA, 19 nt, Artificial Sequence
  Description of Artificial Sequence: Synthetic oligonucleotide
  Sense strand starting at position 2347 of SEQ ID NO: 1883233
aggugcaaauggucucaga

SEQ ID NO: 2178505 - RNA, 19 nt, Artificial Sequence
  Description of Artificial Sequence: Synthetic oligonucleotide
  Antisense strand to SEQ ID NO: 2178504
ucugagaccauuugcaccu

SEQ ID NO: 2178506 - RNA, 19 nt, Artificial Sequence
  Description of Artificial Sequence: Synthetic oligonucleotide
  Sense strand starting at position 2368 of SEQ ID NO: 1883233
agccaugcacgggagaauu

SEQ ID NO: 2178507 - RNA, 19 nt, Artificial Sequence
  Description of Artificial Sequence: Synthetic oligonucleotide
  Antisense strand to SEQ ID NO: 2178506
aauucucccgugcauggcu

SEQ ID NO: 2178508 - RNA, 19 nt, Artificial Sequence
  Description of Artificial Sequence: Synthetic oligonucleotide
  Sense strand starting at position 2488 of SEQ ID NO: 1883233
ggagaagcaccuugugaac

SEQ ID NO: 2178509 - RNA, 19 nt, Artificial Sequence
  Description of Artificial Sequence: Synthetic oligonucleotide
  Antisense strand to SEQ ID NO: 2178508
guucacaaggugcuucucc

SEQ ID NO: 2178510 - RNA, 19 nt, Artificial Sequence
  Description of Artificial Sequence: Synthetic oligonucleotide
  Sense strand starting at position 2621 of SEQ ID NO: 1883233
caggcaucagaguggacau

SEQ ID NO: 2178511 - RNA, 19 nt, Artificial Sequence
  Description of Artificial Sequence: Synthetic oligonucleotide
  Antisense strand to SEQ ID NO: 2178510
auguccacucugaugccug

SEQ ID NO: 2178512 - RNA, 19 nt, Artificial Sequence
  Description of Artificial Sequence: Synthetic oligonucleotide
  Sense strand starting at position 2622 of SEQ ID NO: 1883233
aggcaucagaguggacaua

SEQ ID NO: 2178513 - RNA, 19 nt, Artificial Sequence
  Description of Artificial Sequence: Synthetic oligonucleotide
  Antisense strand to SEQ ID NO: 2178512
uauguccacucugaugccu

SEQ ID NO: 2178514 - RNA, 19 nt, Artificial Sequence
  Description of Artificial Sequence: Synthetic oligonucleotide
  Sense strand starting at position 3037 of SEQ ID NO: 1883233
uccugcucccuggagacau

SEQ ID NO: 2178515 - RNA, 19 nt, Artificial Sequence
  Description of Artificial Sequence: Synthetic oligonucleotide
  Antisense strand to SEQ ID NO: 2178514
augucuccagggagcagga

SEQ ID NO: 2178516 - RNA, 19 nt, Artificial Sequence
  Description of Artificial Sequence: Synthetic oligonucleotide
  Sense strand starting at position 3102 of SEQ ID NO: 1883233
gccaguugacaccaaucaa

SEQ ID NO: 2178517 - RNA, 19 nt, Artificial Sequence
  Description of Artificial Sequence: Synthetic oligonucleotide
  Antisense strand to SEQ ID NO: 2178516
uugauuggugucaacuggc

SEQ ID NO: 2178518 - RNA, 19 nt, Artificial Sequence
  Description of Artificial Sequence: Synthetic oligonucleotide
  Sense strand starting at position 3379 of SEQ ID NO: 1883233
gggucucuuccucagguau

SEQ ID NO: 2178519 - RNA, 19 nt, Artificial Sequence
  Description of Artificial Sequence: Synthetic oligonucleotide
  Antisense strand to SEQ ID NO: 2178518
auaccugaggaagagaccc

SEQ ID NO: 2178520 - RNA, 19 nt, Artificial Sequence
  Description of Artificial Sequence: Synthetic oligonucleotide
  Sense strand starting at position 3680 of SEQ ID NO: 1883233
gggaaucuguucuccucca

SEQ ID NO: 2178521 - RNA, 19 nt, Artificial Sequence
  Description of Artificial Sequence: Synthetic oligonucleotide
  Antisense strand to SEQ ID NO: 2178520
uggaggagaacagauuccc

SEQ ID NO: 2178522 - RNA, 19 nt, Artificial Sequence
  Description of Artificial Sequence: Synthetic oligonucleotide
  Sense strand starting at position 3681 of SEQ ID NO: 1883233
ggaaucuguucuccuccaa

SEQ ID NO: 2178523 - RNA, 19 nt, Artificial Sequence
  Description of Artificial Sequence: Synthetic oligonucleotide
  Antisense strand to SEQ ID NO: 2178522
uuggaggagaacagauucc

SEQ ID NO: 2178524 - RNA, 19 nt, Artificial Sequence
  Description of Artificial Sequence: Synthetic oligonucleotide
  Sense strand starting at position 183 of SEQ ID NO: 1883234
ggcaacaccucagugagau

SEQ ID NO: 2178525 - RNA, 19 nt, Artificial Sequence
  Description of Artificial Sequence: Synthetic oligonucleotide
  Antisense strand to SEQ ID NO: 2178524
aucucacugagguguugcc

SEQ ID NO: 2178526 - RNA, 19 nt, Artificial Sequence
  Description of Artificial Sequence: Synthetic oligonucleotide
  Sense strand starting at position 184 of SEQ ID NO: 1883234
gcaacaccucagugagaug

SEQ ID NO: 2178527 - RNA, 19 nt, Artificial Sequence
  Description of Artificial Sequence: Synthetic oligonucleotide
  Antisense strand to SEQ ID NO: 2178526
caucucacugagguguugc

SEQ ID NO: 2178528 - RNA, 19 nt, Artificial Sequence
  Description of Artificial Sequence: Synthetic oligonucleotide
  Sense strand starting at position 220 of SEQ ID NO: 1883234
cagaaagaguuacugucua

SEQ ID NO: 2178529 - RNA, 19 nt, Artificial Sequence
  Description of Artificial Sequence: Synthetic oligonucleotide
  Antisense strand to SEQ ID NO: 2178528
uagacaguaacucuuucug

SEQ ID NO: 2178530 - RNA, 19 nt, Artificial Sequence
  Description of Artificial Sequence: Synthetic oligonucleotide
  Sense strand starting at position 225 of SEQ ID NO: 1883234
agaguuacugucuauaaac

SEQ ID NO: 2178531 - RNA, 19 nt, Artificial Sequence
  Description of Artificial Sequence: Synthetic oligonucleotide
  Antisense strand to SEQ ID NO: 2178530
guuuauagacaguaacucu

SEQ ID NO: 2178532 - RNA, 19 nt, Artificial Sequence
  Description of Artificial Sequence: Synthetic oligonucleotide
  Sense strand starting at position 227 of SEQ ID NO: 1883234
aguuacugucuauaaacua

SEQ ID NO: 2178533 - RNA, 19 nt, Artificial Sequence
  Description of Artificial Sequence: Synthetic oligonucleotide
  Antisense strand to SEQ ID NO: 2178532
uaguuuauagacaguaacu

SEQ ID NO: 2178534 - RNA, 19 nt, Artificial Sequence
  Description of Artificial Sequence: Synthetic oligonucleotide
  Sense strand starting at position 422 of SEQ ID NO: 1883234
ggauaaugauugccuuuag

SEQ ID NO: 2178535 - RNA, 19 nt, Artificial Sequence
  Description of Artificial Sequence: Synthetic oligonucleotide
  Antisense strand to SEQ ID NO: 2178534
cuaaaggcaaucauuaucc

SEQ ID NO: 2178536 - RNA, 19 nt, Artificial Sequence
  Description of Artificial Sequence: Synthetic oligonucleotide
  Sense strand starting at position 564 of SEQ ID NO: 1883234
cgcuauuacccauaagaau

SEQ ID NO: 2178537 - RNA, 19 nt, Artificial Sequence
  Description of Artificial Sequence: Synthetic oligonucleotide
  Antisense strand to SEQ ID NO: 2178536
auucuuauggguaauagcg

SEQ ID NO: 2178538 - RNA, 19 nt, Artificial Sequence
  Description of Artificial Sequence: Synthetic oligonucleotide
  Sense strand starting at position 604 of SEQ ID NO: 1883234
gugucuaggagauacuuua

SEQ ID NO: 2178539 - RNA, 19 nt, Artificial Sequence
  Description of Artificial Sequence: Synthetic oligonucleotide
  Antisense strand to SEQ ID NO: 2178538
uaaaguaucuccuagacac

SEQ ID NO: 2178540 - RNA, 19 nt, Artificial Sequence
  Description of Artificial Sequence: Synthetic oligonucleotide
  Sense strand starting at position 826 of SEQ ID NO: 1883234
ggaugccagaagugaugau

SEQ ID NO: 2178541 - RNA, 19 nt, Artificial Sequence
  Description of Artificial Sequence: Synthetic oligonucleotide
  Antisense strand to SEQ ID NO: 2178540
aucaucacuucuggcaucc

SEQ ID NO: 2178542 - RNA, 19 nt, Artificial Sequence
  Description of Artificial Sequence: Synthetic oligonucleotide
  Sense strand starting at position 846 of SEQ ID NO: 1883234
ugcuuuagcgaucauuaaa

SEQ ID NO: 2178543 - RNA, 19 nt, Artificial Sequence
  Description of Artificial Sequence: Synthetic oligonucleotide
  Antisense strand to SEQ ID NO: 2178542
uuuaaugaucgcuaaagca

SEQ ID NO: 2178544 - RNA, 19 nt, Artificial Sequence
  Description of Artificial Sequence: Synthetic oligonucleotide
  Sense strand starting at position 971 of SEQ ID NO: 1883234
cugggauucugaucucauu

SEQ ID NO: 2178545 - RNA, 19 nt, Artificial Sequence
  Description of Artificial Sequence: Synthetic oligonucleotide
  Antisense strand to SEQ ID NO: 2178544
aaugagaucagaaucccag

SEQ ID NO: 2178546 - RNA, 19 nt, Artificial Sequence
  Description of Artificial Sequence: Synthetic oligonucleotide
  Sense strand starting at position 1095 of SEQ ID NO: 1883234
uaguucugcccugacggaa

SEQ ID NO: 2178547 - RNA, 19 nt, Artificial Sequence
  Description of Artificial Sequence: Synthetic oligonucleotide
  Antisense strand to SEQ ID NO: 2178546
uuccgucagggcagaacua

SEQ ID NO: 2178548 - RNA, 19 nt, Artificial Sequence
  Description of Artificial Sequence: Synthetic oligonucleotide
  Sense strand starting at position 1388 of SEQ ID NO: 1883234
gccacaugacacugaaaug

SEQ ID NO: 2178549 - RNA, 19 nt, Artificial Sequence
  Description of Artificial Sequence: Synthetic oligonucleotide
  Antisense strand to SEQ ID NO: 2178548
cauuucagugucauguggc

SEQ ID NO: 2178550 - RNA, 19 nt, Artificial Sequence
  Description of Artificial Sequence: Synthetic oligonucleotide
  Sense strand starting at position 1399 of SEQ ID NO: 1883234
cugaaaugcuaagugaaga

SEQ ID NO: 2178551 - RNA, 19 nt, Artificial Sequence
  Description of Artificial Sequence: Synthetic oligonucleotide
  Antisense strand to SEQ ID NO: 2178550
ucuucacuuagcauuucag

SEQ ID NO: 2178552 - RNA, 19 nt, Artificial Sequence
  Description of Artificial Sequence: Synthetic oligonucleotide
  Sense strand starting at position 1404 of SEQ ID NO: 1883234
augcuaagugaagagcaau

SEQ ID NO: 2178553 - RNA, 19 nt, Artificial Sequence
  Description of Artificial Sequence: Synthetic oligonucleotide
  Antisense strand to SEQ ID NO: 2178552
auugcucuucacuuagcau

SEQ ID NO: 2178554 - RNA, 19 nt, Artificial Sequence
  Description of Artificial Sequence: Synthetic oligonucleotide
  Sense strand starting at position 1718 of SEQ ID NO: 1883234
aagccucauggagguuaaa

SEQ ID NO: 2178555 - RNA, 19 nt, Artificial Sequence
  Description of Artificial Sequence: Synthetic oligonucleotide
  Antisense strand to SEQ ID NO: 2178554
uuuaaccuccaugaggcuu

SEQ ID NO: 2178556 - RNA, 19 nt, Artificial Sequence
  Description of Artificial Sequence: Synthetic oligonucleotide
  Sense strand starting at position 1728 of SEQ ID NO: 1883234
gagguuaaagucuaaugua

SEQ ID NO: 2178557 - RNA, 19 nt, Artificial Sequence
  Description of Artificial Sequence: Synthetic oligonucleotide
  Antisense strand to SEQ ID NO: 2178556
uacauuagacuuuaaccuc

SEQ ID NO: 2178558 - RNA, 19 nt, Artificial Sequence
  Description of Artificial Sequence: Synthetic oligonucleotide
  Sense strand starting at position 1753 of SEQ ID NO: 1883234
guccaaguucgauggagag

SEQ ID NO: 2178559 - RNA, 19 nt, Artificial Sequence
  Description of Artificial Sequence: Synthetic oligonucleotide
  Antisense strand to SEQ ID NO: 2178558
cucuccaucgaacuuggac

SEQ ID NO: 2178560 - RNA, 19 nt, Artificial Sequence
  Description of Artificial Sequence: Synthetic oligonucleotide
  Sense strand starting at position 1976 of SEQ ID NO: 1883234
ccaggagacuuugcuguau

SEQ ID NO: 2178561 - RNA, 19 nt, Artificial Sequence
  Description of Artificial Sequence: Synthetic oligonucleotide
  Antisense strand to SEQ ID NO: 2178560
auacagcaaagucuccugg

SEQ ID NO: 2178562 - RNA, 19 nt, Artificial Sequence
  Description of Artificial Sequence: Synthetic oligonucleotide
  Sense strand starting at position 1980 of SEQ ID NO: 1883234
gagacuuugcuguauaauu

SEQ ID NO: 2178563 - RNA, 19 nt, Artificial Sequence
  Description of Artificial Sequence: Synthetic oligonucleotide
  Antisense strand to SEQ ID NO: 2178562
aauuauacagcaaagucuc

SEQ ID NO: 2178564 - RNA, 19 nt, Artificial Sequence
  Description of Artificial Sequence: Synthetic oligonucleotide
  Sense strand starting at position 1982 of SEQ ID NO: 1883234
gacuuugcuguauaauugu

SEQ ID NO: 2178565 - RNA, 19 nt, Artificial Sequence
  Description of Artificial Sequence: Synthetic oligonucleotide
  Antisense strand to SEQ ID NO: 2178564
acaauuauacagcaaaguc

SEQ ID NO: 2178566 - RNA, 19 nt, Artificial Sequence
  Description of Artificial Sequence: Synthetic oligonucleotide
  Sense strand starting at position 2002 of SEQ ID NO: 1883234
agcuaagcuugagucagaa

SEQ ID NO: 2178567 - RNA, 19 nt, Artificial Sequence
  Description of Artificial Sequence: Synthetic oligonucleotide
  Antisense strand to SEQ ID NO: 2178566
uucugacucaagcuuagcu

SEQ ID NO: 2178568 - RNA, 19 nt, Artificial Sequence
  Description of Artificial Sequence: Synthetic oligonucleotide
  Sense strand starting at position 2004 of SEQ ID NO: 1883234
cuaagcuugagucagaaug

SEQ ID NO: 2178569 - RNA, 19 nt, Artificial Sequence
  Description of Artificial Sequence: Synthetic oligonucleotide
  Antisense strand to SEQ ID NO: 2178568
cauucugacucaagcuuag

SEQ ID NO: 2178570 - RNA, 19 nt, Artificial Sequence
  Description of Artificial Sequence: Synthetic oligonucleotide
  Sense strand starting at position 2065 of SEQ ID NO: 1883234
aaauguauuggcugaggaa

SEQ ID NO: 2178571 - RNA, 19 nt, Artificial Sequence
  Description of Artificial Sequence: Synthetic oligonucleotide
  Antisense strand to SEQ ID NO: 2178570
uuccucagccaauacauuu

SEQ ID NO: 2178572 - RNA, 19 nt, Artificial Sequence
  Description of Artificial Sequence: Synthetic oligonucleotide
  Sense strand starting at position 2297 of SEQ ID NO: 1883234
cacacaagagugugaguau

SEQ ID NO: 2178573 - RNA, 19 nt, Artificial Sequence
  Description of Artificial Sequence: Synthetic oligonucleotide
  Antisense strand to SEQ ID NO: 2178572
auacucacacucuugugug

SEQ ID NO: 2178574 - RNA, 19 nt, Artificial Sequence
  Description of Artificial Sequence: Synthetic oligonucleotide
  Sense strand starting at position 2427 of SEQ ID NO: 1883234
agcguaugugucagagugu

SEQ ID NO: 2178575 - RNA, 19 nt, Artificial Sequence
  Description of Artificial Sequence: Synthetic oligonucleotide
  Antisense strand to SEQ ID NO: 2178574
acacucugacacauacgcu

SEQ ID NO: 2178576 - RNA, 19 nt, Artificial Sequence
  Description of Artificial Sequence: Synthetic oligonucleotide
  Sense strand starting at position 2553 of SEQ ID NO: 1883234
aguguguuaggguauguga

SEQ ID NO: 2178577 - RNA, 19 nt, Artificial Sequence
  Description of Artificial Sequence: Synthetic oligonucleotide
  Antisense strand to SEQ ID NO: 2178576
ucacauacccuaacacacu

SEQ ID NO: 2178578 - RNA, 19 nt, Artificial Sequence
  Description of Artificial Sequence: Synthetic oligonucleotide
  Sense strand starting at position 2725 of SEQ ID NO: 1883234
ugugauagugucagugugu

SEQ ID NO: 2178579 - RNA, 19 nt, Artificial Sequence
  Description of Artificial Sequence: Synthetic oligonucleotide
  Antisense strand to SEQ ID NO: 2178578
acacacugacacuaucaca

SEQ ID NO: 2178580 - RNA, 19 nt, Artificial Sequence
  Description of Artificial Sequence: Synthetic oligonucleotide
  Sense strand starting at position 2839 of SEQ ID NO: 1883234
ugcuuucuucuagagacug

SEQ ID NO: 2178581 - RNA, 19 nt, Artificial Sequence
  Description of Artificial Sequence: Synthetic oligonucleotide
  Antisense strand to SEQ ID NO: 2178580
cagucucuagaagaaagca

SEQ ID NO: 2178582 - RNA, 19 nt, Artificial Sequence
  Description of Artificial Sequence: Synthetic oligonucleotide
  Sense strand starting at position 3021 of SEQ ID NO: 1883234
cuuggucugcuacagacau

SEQ ID NO: 2178583 - RNA, 19 nt, Artificial Sequence
  Description of Artificial Sequence: Synthetic oligonucleotide
  Antisense strand to SEQ ID NO: 2178582
augucuguagcagaccaag

SEQ ID NO: 2178584 - RNA, 19 nt, Artificial Sequence
  Description of Artificial Sequence: Synthetic oligonucleotide
  Sense strand starting at position 3331 of SEQ ID NO: 1883234
gcagcuugucaggaacaag

SEQ ID NO: 2178585 - RNA, 19 nt, Artificial Sequence
  Description of Artificial Sequence: Synthetic oligonucleotide
  Antisense strand to SEQ ID NO: 2178584
cuuguuccugacaagcugc

SEQ ID NO: 2178586 - RNA, 19 nt, Artificial Sequence
  Description of Artificial Sequence: Synthetic oligonucleotide
  Sense strand starting at position 3636 of SEQ ID NO: 1883234
cagugaugcccucaagaga

SEQ ID NO: 2178587 - RNA, 19 nt, Artificial Sequence
  Description of Artificial Sequence: Synthetic oligonucleotide
  Antisense strand to SEQ ID NO: 2178586
ucucuugagggcaucacug

SEQ ID NO: 2178588 - RNA, 19 nt, Artificial Sequence
  Description of Artificial Sequence: Synthetic oligonucleotide
  Sense strand starting at position 3690 of SEQ ID NO: 1883234
uccuaaauggccugugaga

SEQ ID NO: 2178589 - RNA, 19 nt, Artificial Sequence
  Description of Artificial Sequence: Synthetic oligonucleotide
  Antisense strand to SEQ ID NO: 2178588
ucucacaggccauuuagga

SEQ ID NO: 2178590 - RNA, 19 nt, Artificial Sequence
  Description of Artificial Sequence: Synthetic oligonucleotide
  Sense strand starting at position 3692 of SEQ ID NO: 1883234
cuaaauggccugugagaca

SEQ ID NO: 2178591 - RNA, 19 nt, Artificial Sequence
  Description of Artificial Sequence: Synthetic oligonucleotide
  Antisense strand to SEQ ID NO: 2178590
ugucucacaggccauuuag

SEQ ID NO: 2178592 - RNA, 19 nt, Artificial Sequence
  Description of Artificial Sequence: Synthetic oligonucleotide
  Sense strand starting at position 3762 of SEQ ID NO: 1883234
ccugcucaggugcagaaau

SEQ ID NO: 2178593 - RNA, 19 nt, Artificial Sequence
  Description of Artificial Sequence: Synthetic oligonucleotide
  Antisense strand to SEQ ID NO: 2178592
auuucugcaccugagcagg

SEQ ID NO: 2178594 - RNA, 19 nt, Artificial Sequence
  Description of Artificial Sequence: Synthetic oligonucleotide
  Sense strand starting at position 3775 of SEQ ID NO: 1883234
agaaauugaccaggcucuu

SEQ ID NO: 2178595 - RNA, 19 nt, Artificial Sequence
  Description of Artificial Sequence: Synthetic oligonucleotide
  Antisense strand to SEQ ID NO: 2178594
aagagccuggucaauuucu

SEQ ID NO: 2178596 - RNA, 19 nt, Artificial Sequence
  Description of Artificial Sequence: Synthetic oligonucleotide
  Sense strand starting at position 3812 of SEQ ID NO: 1883234
cgcuccuuggaccaauuaa

SEQ ID NO: 2178597 - RNA, 19 nt, Artificial Sequence
  Description of Artificial Sequence: Synthetic oligonucleotide
  Antisense strand to SEQ ID NO: 2178596
uuaauugguccaaggagcg

SEQ ID NO: 2178598 - RNA, 19 nt, Artificial Sequence
  Description of Artificial Sequence: Synthetic oligonucleotide
  Sense strand starting at position 3840 of SEQ ID NO: 1883234
ugcuccucccugcagagau

SEQ ID NO: 2178599 - RNA, 19 nt, Artificial Sequence
  Description of Artificial Sequence: Synthetic oligonucleotide
  Antisense strand to SEQ ID NO: 2178598
aucucugcagggaggagca

SEQ ID NO: 2178600 - RNA, 19 nt, Artificial Sequence
  Description of Artificial Sequence: Synthetic oligonucleotide
  Sense strand starting at position 3879 of SEQ ID NO: 1883234
cuaggagggccucacgauu

SEQ ID NO: 2178601 - RNA, 19 nt, Artificial Sequence
  Description of Artificial Sequence: Synthetic oligonucleotide
  Antisense strand to SEQ ID NO: 2178600
aaucgugaggcccuccuag

SEQ ID NO: 2178602 - RNA, 19 nt, Artificial Sequence
  Description of Artificial Sequence: Synthetic oligonucleotide
  Sense strand starting at position 3911 of SEQ ID NO: 1883234
agcauaaucccaugcauug

SEQ ID NO: 2178603 - RNA, 19 nt, Artificial Sequence
  Description of Artificial Sequence: Synthetic oligonucleotide
  Antisense strand to SEQ ID NO: 2178602
caaugcaugggauuaugcu

SEQ ID NO: 2178604 - RNA, 19 nt, Artificial Sequence
  Description of Artificial Sequence: Synthetic oligonucleotide
  Sense strand starting at position 160 of SEQ ID NO: 1883235
ccacccuuccaagagguau

SEQ ID NO: 2178605 - RNA, 19 nt, Artificial Sequence
  Description of Artificial Sequence: Synthetic oligonucleotide
  Antisense strand to SEQ ID NO: 2178604
auaccucuuggaagggugg

SEQ ID NO: 2178606 - RNA, 19 nt, Artificial Sequence
  Description of Artificial Sequence: Synthetic oligonucleotide
  Sense strand starting at position 180 of SEQ ID NO: 1883235
ugcauuugagcaggaguuu

SEQ ID NO: 2178607 - RNA, 19 nt, Artificial Sequence
  Description of Artificial Sequence: Synthetic oligonucleotide
  Antisense strand to SEQ ID NO: 2178606
aaacuccugcucaaaugca

SEQ ID NO: 2178608 - RNA, 19 nt, Artificial Sequence
  Description of Artificial Sequence: Synthetic oligonucleotide
  Sense strand starting at position 717 of SEQ ID NO: 1883235
ggcaucuucucaguacuaa

SEQ ID NO: 2178609 - RNA, 19 nt, Artificial Sequence
  Description of Artificial Sequence: Synthetic oligonucleotide
  Antisense strand to SEQ ID NO: 2178608
uuaguacugagaagaugcc

SEQ ID NO: 2178610 - RNA, 19 nt, Artificial Sequence
  Description of Artificial Sequence: Synthetic oligonucleotide
  Sense strand starting at position 861 of SEQ ID NO: 1883235
uaguaacauuuccugcgau

SEQ ID NO: 2178611 - RNA, 19 nt, Artificial Sequence
  Description of Artificial Sequence: Synthetic oligonucleotide
  Antisense strand to SEQ ID NO: 2178610
aucgcaggaaauguuacua

SEQ ID NO: 2178612 - RNA, 19 nt, Artificial Sequence
  Description of Artificial Sequence: Synthetic oligonucleotide
  Sense strand starting at position 864 of SEQ ID NO: 1883235
uaacauuuccugcgauguc

SEQ ID NO: 2178613 - RNA, 19 nt, Artificial Sequence
  Description of Artificial Sequence: Synthetic oligonucleotide
  Antisense strand to SEQ ID NO: 2178612
gacaucgcaggaaauguua

SEQ ID NO: 2178614 - RNA, 19 nt, Artificial Sequence
  Description of Artificial Sequence: Synthetic oligonucleotide
  Sense strand starting at position 867 of SEQ ID NO: 1883235
cauuuccugcgaugucaaa

SEQ ID NO: 2178615 - RNA, 19 nt, Artificial Sequence
  Description of Artificial Sequence: Synthetic oligonucleotide
  Antisense strand to SEQ ID NO: 2178614
uuugacaucgcaggaaaug

SEQ ID NO: 2178616 - RNA, 19 nt, Artificial Sequence
  Description of Artificial Sequence: Synthetic oligonucleotide
  Sense strand starting at position 1109 of SEQ ID NO: 1883235
uugcaucugugggcugaaa

SEQ ID NO: 2178617 - RNA, 19 nt, Artificial Sequence
  Description of Artificial Sequence: Synthetic oligonucleotide
  Antisense strand to SEQ ID NO: 2178616
uuucagcccacagaugcaa

SEQ ID NO: 2178618 - RNA, 19 nt, Artificial Sequence
  Description of Artificial Sequence: Synthetic oligonucleotide
  Sense strand starting at position 1257 of SEQ ID NO: 1883235
gccuucugccacuaaauga

SEQ ID NO: 2178619 - RNA, 19 nt, Artificial Sequence
  Description of Artificial Sequence: Synthetic oligonucleotide
  Antisense strand to SEQ ID NO: 2178618
ucauuuaguggcagaaggc

SEQ ID NO: 2178620 - RNA, 19 nt, Artificial Sequence
  Description of Artificial Sequence: Synthetic oligonucleotide
  Sense strand starting at position 1377 of SEQ ID NO: 1883235
cccuauacagcuugagaua

SEQ ID NO: 2178621 - RNA, 19 nt, Artificial Sequence
  Description of Artificial Sequence: Synthetic oligonucleotide
  Antisense strand to SEQ ID NO: 2178620
uaucucaagcuguauaggg

SEQ ID NO: 2178622 - RNA, 19 nt, Artificial Sequence
  Description of Artificial Sequence: Synthetic oligonucleotide
  Sense strand starting at position 1378 of SEQ ID NO: 1883235
ccuauacagcuugagauau

SEQ ID NO: 2178623 - RNA, 19 nt, Artificial Sequence
  Description of Artificial Sequence: Synthetic oligonucleotide
  Antisense strand to SEQ ID NO: 2178622
auaucucaagcuguauagg

SEQ ID NO: 2178624 - RNA, 19 nt, Artificial Sequence
  Description of Artificial Sequence: Synthetic oligonucleotide
  Sense strand starting at position 1402 of SEQ ID NO: 1883235
aaaguaaagccucgaggau

SEQ ID NO: 2178625 - RNA, 19 nt, Artificial Sequence
  Description of Artificial Sequence: Synthetic oligonucleotide
  Antisense strand to SEQ ID NO: 2178624
auccucgaggcuuuacuuu

SEQ ID NO: 2178626 - RNA, 19 nt, Artificial Sequence
  Description of Artificial Sequence: Synthetic oligonucleotide
  Sense strand starting at position 1491 of SEQ ID NO: 1883235
ugccuuucucuccagaaag

SEQ ID NO: 2178627 - RNA, 19 nt, Artificial Sequence
  Description of Artificial Sequence: Synthetic oligonucleotide
  Antisense strand to SEQ ID NO: 2178626
cuuucuggagagaaaggca

SEQ ID NO: 2178628 - RNA, 19 nt, Artificial Sequence
  Description of Artificial Sequence: Synthetic oligonucleotide
  Sense strand starting at position 1635 of SEQ ID NO: 1883235
gcggguauaguuuaacaga

SEQ ID NO: 2178629 - RNA, 19 nt, Artificial Sequence
  Description of Artificial Sequence: Synthetic oligonucleotide
  Antisense strand to SEQ ID NO: 2178628
ucuguuaaacuauacccgc

SEQ ID NO: 2178630 - RNA, 19 nt, Artificial Sequence
  Description of Artificial Sequence: Synthetic oligonucleotide
  Sense strand starting at position 1659 of SEQ ID NO: 1883235
aguugaugaaacuguagga

SEQ ID NO: 2178631 - RNA, 19 nt, Artificial Sequence
  Description of Artificial Sequence: Synthetic oligonucleotide
  Antisense strand to SEQ ID NO: 2178630
uccuacaguuucaucaacu

SEQ ID NO: 2178632 - RNA, 19 nt, Artificial Sequence
  Description of Artificial Sequence: Synthetic oligonucleotide
  Sense strand starting at position 1708 of SEQ ID NO: 1883235
acauuaguucugcagaaau

SEQ ID NO: 2178633 - RNA, 19 nt, Artificial Sequence
  Description of Artificial Sequence: Synthetic oligonucleotide
  Antisense strand to SEQ ID NO: 2178632
auuucugcagaacuaaugu

SEQ ID NO: 2178634 - RNA, 19 nt, Artificial Sequence
  Description of Artificial Sequence: Synthetic oligonucleotide
  Sense strand starting at position 1710 of SEQ ID NO: 1883235
auuaguucugcagaaaugu

SEQ ID NO: 2178635 - RNA, 19 nt, Artificial Sequence
  Description of Artificial Sequence: Synthetic oligonucleotide
  Antisense strand to SEQ ID NO: 2178634
acauuucugcagaacuaau

SEQ ID NO: 2178636 - RNA, 19 nt, Artificial Sequence
  Description of Artificial Sequence: Synthetic oligonucleotide
  Sense strand starting at position 1718 of SEQ ID NO: 1883235
ugcagaaauguuggcaacu

SEQ ID NO: 2178637 - RNA, 19 nt, Artificial Sequence
  Description of Artificial Sequence: Synthetic oligonucleotide
  Antisense strand to SEQ ID NO: 2178636
aguugccaacauuucugca

SEQ ID NO: 2178638 - RNA, 19 nt, Artificial Sequence
  Description of Artificial Sequence: Synthetic oligonucleotide
  Sense strand starting at position 1719 of SEQ ID NO: 1883235
gcagaaauguuggcaacug

SEQ ID NO: 2178639 - RNA, 19 nt, Artificial Sequence
  Description of Artificial Sequence: Synthetic oligonucleotide
  Antisense strand to SEQ ID NO: 2178638
caguugccaacauuucugc

SEQ ID NO: 2178640 - RNA, 19 nt, Artificial Sequence
  Description of Artificial Sequence: Synthetic oligonucleotide
  Sense strand starting at position 1825 of SEQ ID NO: 1883235
ccgaguaacaaguaacagu

SEQ ID NO: 2178641 - RNA, 19 nt, Artificial Sequence
  Description of Artificial Sequence: Synthetic oligonucleotide
  Antisense strand to SEQ ID NO: 2178640
acuguuacuuguuacucgg

SEQ ID NO: 2178642 - RNA, 19 nt, Artificial Sequence
  Description of Artificial Sequence: Synthetic oligonucleotide
  Sense strand starting at position 1895 of SEQ ID NO: 1883235
agauguuagacguguuucu

SEQ ID NO: 2178643 - RNA, 19 nt, Artificial Sequence
  Description of Artificial Sequence: Synthetic oligonucleotide
  Antisense strand to SEQ ID NO: 2178642
agaaacacgucuaacaucu

SEQ ID NO: 2178644 - RNA, 19 nt, Artificial Sequence
  Description of Artificial Sequence: Synthetic oligonucleotide
  Sense strand starting at position 2858 of SEQ ID NO: 1883235
cgggcuuccucccuugaau

SEQ ID NO: 2178645 - RNA, 19 nt, Artificial Sequence
  Description of Artificial Sequence: Synthetic oligonucleotide
  Antisense strand to SEQ ID NO: 2178644
auucaagggaggaagcccg

SEQ ID NO: 2178646 - RNA, 19 nt, Artificial Sequence
  Description of Artificial Sequence: Synthetic oligonucleotide
  Sense strand starting at position 2908 of SEQ ID NO: 1883235
aggacaauaucagacacua

SEQ ID NO: 2178647 - RNA, 19 nt, Artificial Sequence
  Description of Artificial Sequence: Synthetic oligonucleotide
  Antisense strand to SEQ ID NO: 2178646
uagugucugauauuguccu

SEQ ID NO: 2178648 - RNA, 19 nt, Artificial Sequence
  Description of Artificial Sequence: Synthetic oligonucleotide
  Sense strand starting at position 2947 of SEQ ID NO: 1883235
uggccugcucgauauguga

SEQ ID NO: 2178649 - RNA, 19 nt, Artificial Sequence
  Description of Artificial Sequence: Synthetic oligonucleotide
  Antisense strand to SEQ ID NO: 2178648
ucacauaucgagcaggcca

SEQ ID NO: 2178650 - RNA, 19 nt, Artificial Sequence
  Description of Artificial Sequence: Synthetic oligonucleotide
  Sense strand starting at position 2961 of SEQ ID NO: 1883235
ugugaauguggugauaauc

SEQ ID NO: 2178651 - RNA, 19 nt, Artificial Sequence
  Description of Artificial Sequence: Synthetic oligonucleotide
  Antisense strand to SEQ ID NO: 2178650
gauuaucaccacauucaca

SEQ ID NO: 2178652 - RNA, 19 nt, Artificial Sequence
  Description of Artificial Sequence: Synthetic oligonucleotide
  Sense strand starting at position 2981 of SEQ ID NO: 1883235
ggauaaugcccuuaggugu

SEQ ID NO: 2178653 - RNA, 19 nt, Artificial Sequence
  Description of Artificial Sequence: Synthetic oligonucleotide
  Antisense strand to SEQ ID NO: 2178652
acaccuaagggcauuaucc

SEQ ID NO: 2178654 - RNA, 19 nt, Artificial Sequence
  Description of Artificial Sequence: Synthetic oligonucleotide
  Sense strand starting at position 3120 of SEQ ID NO: 1883235
gccaaucuuucugcaauga

SEQ ID NO: 2178655 - RNA, 19 nt, Artificial Sequence
  Description of Artificial Sequence: Synthetic oligonucleotide
  Antisense strand to SEQ ID NO: 2178654
ucauugcagaaagauuggc

SEQ ID NO: 2178656 - RNA, 19 nt, Artificial Sequence
  Description of Artificial Sequence: Synthetic oligonucleotide
  Sense strand starting at position 3169 of SEQ ID NO: 1883235
aguauuucucccugucaau

SEQ ID NO: 2178657 - RNA, 19 nt, Artificial Sequence
  Description of Artificial Sequence: Synthetic oligonucleotide
  Antisense strand to SEQ ID NO: 2178656
auugacagggagaaauacu

SEQ ID NO: 2178658 - RNA, 19 nt, Artificial Sequence
  Description of Artificial Sequence: Synthetic oligonucleotide
  Sense strand starting at position 3228 of SEQ ID NO: 1883235
cucagcauugugugaauua

SEQ ID NO: 2178659 - RNA, 19 nt, Artificial Sequence
  Description of Artificial Sequence: Synthetic oligonucleotide
  Antisense strand to SEQ ID NO: 2178658
uaauucacacaaugcugag

SEQ ID NO: 2178660 - RNA, 19 nt, Artificial Sequence
  Description of Artificial Sequence: Synthetic oligonucleotide
  Sense strand starting at position 3237 of SEQ ID NO: 1883235
gugugaauuacagagaagu

SEQ ID NO: 2178661 - RNA, 19 nt, Artificial Sequence
  Description of Artificial Sequence: Synthetic oligonucleotide
  Antisense strand to SEQ ID NO: 2178660
acuucucuguaauucacac

SEQ ID NO: 2178662 - RNA, 19 nt, Artificial Sequence
  Description of Artificial Sequence: Synthetic oligonucleotide
  Sense strand starting at position 3299 of SEQ ID NO: 1883235
ggguguugaaauggugaug

SEQ ID NO: 2178663 - RNA, 19 nt, Artificial Sequence
  Description of Artificial Sequence: Synthetic oligonucleotide
  Antisense strand to SEQ ID NO: 2178662
caucaccauuucaacaccc

SEQ ID NO: 2178664 - RNA, 19 nt, Artificial Sequence
  Description of Artificial Sequence: Synthetic oligonucleotide
  Sense strand starting at position 3302 of SEQ ID NO: 1883235
uguugaaauggugaugcaa

SEQ ID NO: 2178665 - RNA, 19 nt, Artificial Sequence
  Description of Artificial Sequence: Synthetic oligonucleotide
  Antisense strand to SEQ ID NO: 2178664
uugcaucaccauuucaaca

SEQ ID NO: 2178666 - RNA, 19 nt, Artificial Sequence
  Description of Artificial Sequence: Synthetic oligonucleotide
  Sense strand starting at position 3379 of SEQ ID NO: 1883235
ggaagaaagcauggugagu

SEQ ID NO: 2178667 - RNA, 19 nt, Artificial Sequence
  Description of Artificial Sequence: Synthetic oligonucleotide
  Antisense strand to SEQ ID NO: 2178666
acucaccaugcuuucuucc

SEQ ID NO: 2178668 - RNA, 19 nt, Artificial Sequence
  Description of Artificial Sequence: Synthetic oligonucleotide
  Sense strand starting at position 3443 of SEQ ID NO: 1883235
gaaagaacguucucccuag

SEQ ID NO: 2178669 - RNA, 19 nt, Artificial Sequence
  Description of Artificial Sequence: Synthetic oligonucleotide
  Antisense strand to SEQ ID NO: 2178668
cuagggagaacguucuuuc

SEQ ID NO: 2178670 - RNA, 19 nt, Artificial Sequence
  Description of Artificial Sequence: Synthetic oligonucleotide
  Sense strand starting at position 3444 of SEQ ID NO: 1883235
aaagaacguucucccuaga

SEQ ID NO: 2178671 - RNA, 19 nt, Artificial Sequence
  Description of Artificial Sequence: Synthetic oligonucleotide
  Antisense strand to SEQ ID NO: 2178670
ucuagggagaacguucuuu

SEQ ID NO: 2178672 - RNA, 19 nt, Artificial Sequence
  Description of Artificial Sequence: Synthetic oligonucleotide
  Sense strand starting at position 3447 of SEQ ID NO: 1883235
gaacguucucccuagaaac

SEQ ID NO: 2178673 - RNA, 19 nt, Artificial Sequence
  Description of Artificial Sequence: Synthetic oligonucleotide
  Antisense strand to SEQ ID NO: 2178672
guuucuagggagaacguuc

SEQ ID NO: 2178674 - RNA, 19 nt, Artificial Sequence
  Description of Artificial Sequence: Synthetic oligonucleotide
  Sense strand starting at position 3465 of SEQ ID NO: 1883235
cugagaugguuggccagau

SEQ ID NO: 2178675 - RNA, 19 nt, Artificial Sequence
  Description of Artificial Sequence: Synthetic oligonucleotide
  Antisense strand to SEQ ID NO: 2178674
aucuggccaaccaucucag

SEQ ID NO: 2178676 - RNA, 19 nt, Artificial Sequence
  Description of Artificial Sequence: Synthetic oligonucleotide
  Sense strand starting at position 3469 of SEQ ID NO: 1883235
gaugguuggccagaugauc

SEQ ID NO: 2178677 - RNA, 19 nt, Artificial Sequence
  Description of Artificial Sequence: Synthetic oligonucleotide
  Antisense strand to SEQ ID NO: 2178676
gaucaucuggccaaccauc

SEQ ID NO: 2178678 - RNA, 19 nt, Artificial Sequence
  Description of Artificial Sequence: Synthetic oligonucleotide
  Sense strand starting at position 3573 of SEQ ID NO: 1883235
caguucugagauugcuagu

SEQ ID NO: 2178679 - RNA, 19 nt, Artificial Sequence
  Description of Artificial Sequence: Synthetic oligonucleotide
  Antisense strand to SEQ ID NO: 2178678
acuagcaaucucagaacug

SEQ ID NO: 2178680 - RNA, 19 nt, Artificial Sequence
  Description of Artificial Sequence: Synthetic oligonucleotide
  Sense strand starting at position 3862 of SEQ ID NO: 1883235
ugagaaugccuggaggcaa

SEQ ID NO: 2178681 - RNA, 19 nt, Artificial Sequence
  Description of Artificial Sequence: Synthetic oligonucleotide
  Antisense strand to SEQ ID NO: 2178680
uugccuccaggcauucuca

SEQ ID NO: 2178682 - RNA, 19 nt, Artificial Sequence
  Description of Artificial Sequence: Synthetic oligonucleotide
  Sense strand starting at position 3967 of SEQ ID NO: 1883235
ccuagaucagccggauaga

SEQ ID NO: 2178683 - RNA, 19 nt, Artificial Sequence
  Description of Artificial Sequence: Synthetic oligonucleotide
  Antisense strand to SEQ ID NO: 2178682
ucuauccggcugaucuagg

SEQ ID NO: 2178684 - RNA, 19 nt, Artificial Sequence
  Description of Artificial Sequence: Synthetic oligonucleotide
  Sense strand starting at position 23 of SEQ ID NO: 1883236
gccauucucccauggaaag

SEQ ID NO: 2178685 - RNA, 19 nt, Artificial Sequence
  Description of Artificial Sequence: Synthetic oligonucleotide
  Antisense strand to SEQ ID NO: 2178684
cuuuccaugggagaauggc

SEQ ID NO: 2178686 - RNA, 19 nt, Artificial Sequence
  Description of Artificial Sequence: Synthetic oligonucleotide
  Sense strand starting at position 91 of SEQ ID NO: 1883236
cuuccuugucuccagacua

SEQ ID NO: 2178687 - RNA, 19 nt, Artificial Sequence
  Description of Artificial Sequence: Synthetic oligonucleotide
  Antisense strand to SEQ ID NO: 2178686
uagucuggagacaaggaag

SEQ ID NO: 2178688 - RNA, 19 nt, Artificial Sequence
  Description of Artificial Sequence: Synthetic oligonucleotide
  Sense strand starting at position 121 of SEQ ID NO: 1883236
cuugauauaugcucccaga

SEQ ID NO: 2178689 - RNA, 19 nt, Artificial Sequence
  Description of Artificial Sequence: Synthetic oligonucleotide
  Antisense strand to SEQ ID NO: 2178688
ucugggagcauauaucaag

SEQ ID NO: 2178690 - RNA, 19 nt, Artificial Sequence
  Description of Artificial Sequence: Synthetic oligonucleotide
  Sense strand starting at position 167 of SEQ ID NO: 1883236
acagguaacuccuuguuaa

SEQ ID NO: 2178691 - RNA, 19 nt, Artificial Sequence
  Description of Artificial Sequence: Synthetic oligonucleotide
  Antisense strand to SEQ ID NO: 2178690
uuaacaaggaguuaccugu

SEQ ID NO: 2178692 - RNA, 19 nt, Artificial Sequence
  Description of Artificial Sequence: Synthetic oligonucleotide
  Sense strand starting at position 170 of SEQ ID NO: 1883236
gguaacuccuuguuaaaug

SEQ ID NO: 2178693 - RNA, 19 nt, Artificial Sequence
  Description of Artificial Sequence: Synthetic oligonucleotide
  Antisense strand to SEQ ID NO: 2178692
cauuuaacaaggaguuacc

SEQ ID NO: 2178694 - RNA, 19 nt, Artificial Sequence
  Description of Artificial Sequence: Synthetic oligonucleotide
  Sense strand starting at position 359 of SEQ ID NO: 1883236
gagggugugggcugauuau

SEQ ID NO: 2178695 - RNA, 19 nt, Artificial Sequence
  Description of Artificial Sequence: Synthetic oligonucleotide
  Antisense strand to SEQ ID NO: 2178694
auaaucagcccacacccuc

SEQ ID NO: 2178696 - RNA, 19 nt, Artificial Sequence
  Description of Artificial Sequence: Synthetic oligonucleotide
  Sense strand starting at position 365 of SEQ ID NO: 1883236
gugggcugauuaucaacua

SEQ ID NO: 2178697 - RNA, 19 nt, Artificial Sequence
  Description of Artificial Sequence: Synthetic oligonucleotide
  Antisense strand to SEQ ID NO: 2178696
uaguugauaaucagcccac

SEQ ID NO: 2178698 - RNA, 19 nt, Artificial Sequence
  Description of Artificial Sequence: Synthetic oligonucleotide
  Sense strand starting at position 465 of SEQ ID NO: 1883236
gacuguucgcaggaagaga

SEQ ID NO: 2178699 - RNA, 19 nt, Artificial Sequence
  Description of Artificial Sequence: Synthetic oligonucleotide
  Antisense strand to SEQ ID NO: 2178698
ucucuuccugcgaacaguc

SEQ ID NO: 2178700 - RNA, 19 nt, Artificial Sequence
  Description of Artificial Sequence: Synthetic oligonucleotide
  Sense strand starting at position 549 of SEQ ID NO: 1883236
agagaaaguuaaguucugu

SEQ ID NO: 2178701 - RNA, 19 nt, Artificial Sequence
  Description of Artificial Sequence: Synthetic oligonucleotide
  Antisense strand to SEQ ID NO: 2178700
acagaacuuaacuuucucu

SEQ ID NO: 2178702 - RNA, 19 nt, Artificial Sequence
  Description of Artificial Sequence: Synthetic oligonucleotide
  Sense strand starting at position 596 of SEQ ID NO: 1883236
uuacaacuucgugacuaac

SEQ ID NO: 2178703 - RNA, 19 nt, Artificial Sequence
  Description of Artificial Sequence: Synthetic oligonucleotide
  Antisense strand to SEQ ID NO: 2178702
guuagucacgaaguuguaa

SEQ ID NO: 2178704 - RNA, 19 nt, Artificial Sequence
  Description of Artificial Sequence: Synthetic oligonucleotide
  Sense strand starting at position 599 of SEQ ID NO: 1883236
caacuucgugacuaacagu

SEQ ID NO: 2178705 - RNA, 19 nt, Artificial Sequence
  Description of Artificial Sequence: Synthetic oligonucleotide
  Antisense strand to SEQ ID NO: 2178704
acuguuagucacgaaguug

SEQ ID NO: 2178706 - RNA, 19 nt, Artificial Sequence
  Description of Artificial Sequence: Synthetic oligonucleotide
  Sense strand starting at position 721 of SEQ ID NO: 1883236
acuguucuaguguagagau

SEQ ID NO: 2178707 - RNA, 19 nt, Artificial Sequence
  Description of Artificial Sequence: Synthetic oligonucleotide
  Antisense strand to SEQ ID NO: 2178706
aucucuacacuagaacagu

SEQ ID NO: 2178708 - RNA, 19 nt, Artificial Sequence
  Description of Artificial Sequence: Synthetic oligonucleotide
  Sense strand starting at position 723 of SEQ ID NO: 1883236
uguucuaguguagagaugu

SEQ ID NO: 2178709 - RNA, 19 nt, Artificial Sequence
  Description of Artificial Sequence: Synthetic oligonucleotide
  Antisense strand to SEQ ID NO: 2178708
acaucucuacacuagaaca

SEQ ID NO: 2178710 - RNA, 19 nt, Artificial Sequence
  Description of Artificial Sequence: Synthetic oligonucleotide
  Sense strand starting at position 734 of SEQ ID NO: 1883236
agagaugucuggucucagu

SEQ ID NO: 2178711 - RNA, 19 nt, Artificial Sequence
  Description of Artificial Sequence: Synthetic oligonucleotide
  Antisense strand to SEQ ID NO: 2178710
acugagaccagacaucucu

SEQ ID NO: 2178712 - RNA, 19 nt, Artificial Sequence
  Description of Artificial Sequence: Synthetic oligonucleotide
  Sense strand starting at position 1018 of SEQ ID NO: 1883236
cauccuggcccugauuaga

SEQ ID NO: 2178713 - RNA, 19 nt, Artificial Sequence
  Description of Artificial Sequence: Synthetic oligonucleotide
  Antisense strand to SEQ ID NO: 2178712
ucuaaucagggccaggaug

SEQ ID NO: 2178714 - RNA, 19 nt, Artificial Sequence
  Description of Artificial Sequence: Synthetic oligonucleotide
  Sense strand starting at position 1258 of SEQ ID NO: 1883236
guggaucugcuuuaacauc

SEQ ID NO: 2178715 - RNA, 19 nt, Artificial Sequence
  Description of Artificial Sequence: Synthetic oligonucleotide
  Antisense strand to SEQ ID NO: 2178714
gauguuaaagcagauccac

SEQ ID NO: 2178716 - RNA, 19 nt, Artificial Sequence
  Description of Artificial Sequence: Synthetic oligonucleotide
  Sense strand starting at position 1478 of SEQ ID NO: 1883236
uggaaauauccuuguggga

SEQ ID NO: 2178717 - RNA, 19 nt, Artificial Sequence
  Description of Artificial Sequence: Synthetic oligonucleotide
  Antisense strand to SEQ ID NO: 2178716
ucccacaaggauauuucca

SEQ ID NO: 2178718 - RNA, 19 nt, Artificial Sequence
  Description of Artificial Sequence: Synthetic oligonucleotide
  Sense strand starting at position 1526 of SEQ ID NO: 1883236
uuaucaucauuacugugau

SEQ ID NO: 2178719 - RNA, 19 nt, Artificial Sequence
  Description of Artificial Sequence: Synthetic oligonucleotide
  Antisense strand to SEQ ID NO: 2178718
aucacaguaaugaugauaa

SEQ ID NO: 2178720 - RNA, 19 nt, Artificial Sequence
  Description of Artificial Sequence: Synthetic oligonucleotide
  Sense strand starting at position 1742 of SEQ ID NO: 1883236
uuagaccuccgauaacguu

SEQ ID NO: 2178721 - RNA, 19 nt, Artificial Sequence
  Description of Artificial Sequence: Synthetic oligonucleotide
  Antisense strand to SEQ ID NO: 2178720
aacguuaucggaggucuaa

SEQ ID NO: 2178722 - RNA, 19 nt, Artificial Sequence
  Description of Artificial Sequence: Synthetic oligonucleotide
  Sense strand starting at position 2071 of SEQ ID NO: 1883236
ccaaucaagagacguguua

SEQ ID NO: 2178723 - RNA, 19 nt, Artificial Sequence
  Description of Artificial Sequence: Synthetic oligonucleotide
  Antisense strand to SEQ ID NO: 2178722
uaacacgucucuugauugg

SEQ ID NO: 2178724 - RNA, 19 nt, Artificial Sequence
  Description of Artificial Sequence: Synthetic oligonucleotide
  Sense strand starting at position 2084 of SEQ ID NO: 1883236
guguuauugccgccgaggu

SEQ ID NO: 2178725 - RNA, 19 nt, Artificial Sequence
  Description of Artificial Sequence: Synthetic oligonucleotide
  Antisense strand to SEQ ID NO: 2178724
accucggcggcaauaacac

SEQ ID NO: 2178726 - RNA, 19 nt, Artificial Sequence
  Description of Artificial Sequence: Synthetic oligonucleotide
  Sense strand starting at position 2935 of SEQ ID NO: 1883236
ucugaugcugcuuagcaaa

SEQ ID NO: 2178727 - RNA, 19 nt, Artificial Sequence
  Description of Artificial Sequence: Synthetic oligonucleotide
  Antisense strand to SEQ ID NO: 2178726
uuugcuaagcagcaucaga

SEQ ID NO: 2178728 - RNA, 19 nt, Artificial Sequence
  Description of Artificial Sequence: Synthetic oligonucleotide
  Sense strand starting at position 3012 of SEQ ID NO: 1883236
gguccaaagagguggucau

SEQ ID NO: 2178729 - RNA, 19 nt, Artificial Sequence
  Description of Artificial Sequence: Synthetic oligonucleotide
  Antisense strand to SEQ ID NO: 2178728
augaccaccucuuuggacc

SEQ ID NO: 2178730 - RNA, 19 nt, Artificial Sequence
  Description of Artificial Sequence: Synthetic oligonucleotide
  Sense strand starting at position 3169 of SEQ ID NO: 1883236
guagaagccuaacuagaua

SEQ ID NO: 2178731 - RNA, 19 nt, Artificial Sequence
  Description of Artificial Sequence: Synthetic oligonucleotide
  Antisense strand to SEQ ID NO: 2178730
uaucuaguuaggcuucuac

SEQ ID NO: 2178732 - RNA, 19 nt, Artificial Sequence
  Description of Artificial Sequence: Synthetic oligonucleotide
  Sense strand starting at position 3256 of SEQ ID NO: 1883236
uacuguuucucuguagaga

SEQ ID NO: 2178733 - RNA, 19 nt, Artificial Sequence
  Description of Artificial Sequence: Synthetic oligonucleotide
  Antisense strand to SEQ ID NO: 2178732
ucucuacagagaaacagua

SEQ ID NO: 2178734 - RNA, 19 nt, Artificial Sequence
  Description of Artificial Sequence: Synthetic oligonucleotide
  Sense strand starting at position 3257 of SEQ ID NO: 1883236
acuguuucucuguagagau

SEQ ID NO: 2178735 - RNA, 19 nt, Artificial Sequence
  Description of Artificial Sequence: Synthetic oligonucleotide
  Antisense strand to SEQ ID NO: 2178734
aucucuacagagaaacagu

SEQ ID NO: 2178736 - RNA, 19 nt, Artificial Sequence
  Description of Artificial Sequence: Synthetic oligonucleotide
  Sense strand starting at position 3270 of SEQ ID NO: 1883236
agagauuggauucguagau

SEQ ID NO: 2178737 - RNA, 19 nt, Artificial Sequence
  Description of Artificial Sequence: Synthetic oligonucleotide
  Antisense strand to SEQ ID NO: 2178736
aucuacgaauccaaucucu

SEQ ID NO: 2178738 - RNA, 19 nt, Artificial Sequence
  Description of Artificial Sequence: Synthetic oligonucleotide
  Sense strand starting at position 3271 of SEQ ID NO: 1883236
gagauuggauucguagauu

SEQ ID NO: 2178739 - RNA, 19 nt, Artificial Sequence
  Description of Artificial Sequence: Synthetic oligonucleotide
  Antisense strand to SEQ ID NO: 2178738
aaucuacgaauccaaucuc

SEQ ID NO: 2178740 - RNA, 19 nt, Artificial Sequence
  Description of Artificial Sequence: Synthetic oligonucleotide
  Sense strand starting at position 3277 of SEQ ID NO: 1883236
ggauucguagauuaaacuu

SEQ ID NO: 2178741 - RNA, 19 nt, Artificial Sequence
  Description of Artificial Sequence: Synthetic oligonucleotide
  Antisense strand to SEQ ID NO: 2178740
aaguuuaaucuacgaaucc

SEQ ID NO: 2178742 - RNA, 19 nt, Artificial Sequence
  Description of Artificial Sequence: Synthetic oligonucleotide
  Sense strand starting at position 3323 of SEQ ID NO: 1883236
ccucuuuaacaguagguau

SEQ ID NO: 2178743 - RNA, 19 nt, Artificial Sequence
  Description of Artificial Sequence: Synthetic oligonucleotide
  Antisense strand to SEQ ID NO: 2178742
auaccuacuguuaaagagg

SEQ ID NO: 2178744 - RNA, 19 nt, Artificial Sequence
  Description of Artificial Sequence: Synthetic oligonucleotide
  Sense strand starting at position 3384 of SEQ ID NO: 1883236
auuucucaguuugaaagaa

SEQ ID NO: 2178745 - RNA, 19 nt, Artificial Sequence
  Description of Artificial Sequence: Synthetic oligonucleotide
  Antisense strand to SEQ ID NO: 2178744
uucuuucaaacugagaaau

SEQ ID NO: 2178746 - RNA, 19 nt, Artificial Sequence
  Description of Artificial Sequence: Synthetic oligonucleotide
  Sense strand starting at position 3477 of SEQ ID NO: 1883236
gggaaaugggacgguauca

SEQ ID NO: 2178747 - RNA, 19 nt, Artificial Sequence
  Description of Artificial Sequence: Synthetic oligonucleotide
  Antisense strand to SEQ ID NO: 2178746
ugauaccgucccauuuccc

SEQ ID NO: 2178748 - RNA, 19 nt, Artificial Sequence
  Description of Artificial Sequence: Synthetic oligonucleotide
  Sense strand starting at position 3549 of SEQ ID NO: 1883236
uggucagucagguacuaua

SEQ ID NO: 2178749 - RNA, 19 nt, Artificial Sequence
  Description of Artificial Sequence: Synthetic oligonucleotide
  Antisense strand to SEQ ID NO: 2178748
uauaguaccugacugacca

SEQ ID NO: 2178750 - RNA, 19 nt, Artificial Sequence
  Description of Artificial Sequence: Synthetic oligonucleotide
  Sense strand starting at position 3560 of SEQ ID NO: 1883236
guacuauauuuaguuugca

SEQ ID NO: 2178751 - RNA, 19 nt, Artificial Sequence
  Description of Artificial Sequence: Synthetic oligonucleotide
  Antisense strand to SEQ ID NO: 2178750
ugcaaacuaaauauaguac

SEQ ID NO: 2178752 - RNA, 19 nt, Artificial Sequence
  Description of Artificial Sequence: Synthetic oligonucleotide
  Sense strand starting at position 3674 of SEQ ID NO: 1883236
guaagugucuccuuggaaa

SEQ ID NO: 2178753 - RNA, 19 nt, Artificial Sequence
  Description of Artificial Sequence: Synthetic oligonucleotide
  Antisense strand to SEQ ID NO: 2178752
uuuccaaggagacacuuac

SEQ ID NO: 2178754 - RNA, 19 nt, Artificial Sequence
  Description of Artificial Sequence: Synthetic oligonucleotide
  Sense strand starting at position 3676 of SEQ ID NO: 1883236
aagugucuccuuggaaaga

SEQ ID NO: 2178755 - RNA, 19 nt, Artificial Sequence
  Description of Artificial Sequence: Synthetic oligonucleotide
  Antisense strand to SEQ ID NO: 2178754
ucuuuccaaggagacacuu

SEQ ID NO: 2178756 - RNA, 19 nt, Artificial Sequence
  Description of Artificial Sequence: Synthetic oligonucleotide
  Sense strand starting at position 3701 of SEQ ID NO: 1883236
gauacuguuccaggucaug

SEQ ID NO: 2178757 - RNA, 19 nt, Artificial Sequence
  Description of Artificial Sequence: Synthetic oligonucleotide
  Antisense strand to SEQ ID NO: 2178756
caugaccuggaacaguauc

SEQ ID NO: 2178758 - RNA, 19 nt, Artificial Sequence
  Description of Artificial Sequence: Synthetic oligonucleotide
  Sense strand starting at position 3796 of SEQ ID NO: 1883236
ugguaacuccaccaaguuu

SEQ ID NO: 2178759 - RNA, 19 nt, Artificial Sequence
  Description of Artificial Sequence: Synthetic oligonucleotide
  Antisense strand to SEQ ID NO: 2178758
aaacuugguggaguuacca

SEQ ID NO: 2178760 - RNA, 19 nt, Artificial Sequence
  Description of Artificial Sequence: Synthetic oligonucleotide
  Sense strand starting at position 3803 of SEQ ID NO: 1883236
uccaccaaguuugucuaaa

SEQ ID NO: 2178761 - RNA, 19 nt, Artificial Sequence
  Description of Artificial Sequence: Synthetic oligonucleotide
  Antisense strand to SEQ ID NO: 2178760
uuuagacaaacuuggugga

SEQ ID NO: 2178762 - RNA, 19 nt, Artificial Sequence
  Description of Artificial Sequence: Synthetic oligonucleotide
  Sense strand starting at position 3804 of SEQ ID NO: 1883236
ccaccaaguuugucuaaau

SEQ ID NO: 2178763 - RNA, 19 nt, Artificial Sequence
  Description of Artificial Sequence: Synthetic oligonucleotide
  Antisense strand to SEQ ID NO: 2178762
auuuagacaaacuuggugg

SEQ ID NO: 2178764 - RNA, 19 nt, Artificial Sequence
  Description of Artificial Sequence: Synthetic oligonucleotide
  Sense strand starting at position 176 of SEQ ID NO: 1883237
auucgaccucaucagaagu

SEQ ID NO: 2178765 - RNA, 19 nt, Artificial Sequence
  Description of Artificial Sequence: Synthetic oligonucleotide
  Antisense strand to SEQ ID NO: 2178764
acuucugaugaggucgaau

SEQ ID NO: 2178766 - RNA, 19 nt, Artificial Sequence
  Description of Artificial Sequence: Synthetic oligonucleotide
  Sense strand starting at position 187 of SEQ ID NO: 1883237
ucagaagugucuuccacca

SEQ ID NO: 2178767 - RNA, 19 nt, Artificial Sequence
  Description of Artificial Sequence: Synthetic oligonucleotide
  Antisense strand to SEQ ID NO: 2178766
ugguggaagacacuucuga

SEQ ID NO: 2178768 - RNA, 19 nt, Artificial Sequence
  Description of Artificial Sequence: Synthetic oligonucleotide
  Sense strand starting at position 189 of SEQ ID NO: 1883237
agaagugucuuccaccaac

SEQ ID NO: 2178769 - RNA, 19 nt, Artificial Sequence
  Description of Artificial Sequence: Synthetic oligonucleotide
  Antisense strand to SEQ ID NO: 2178768
guugguggaagacacuucu

SEQ ID NO: 2178770 - RNA, 19 nt, Artificial Sequence
  Description of Artificial Sequence: Synthetic oligonucleotide
  Sense strand starting at position 192 of SEQ ID NO: 1883237
agugucuuccaccaaccau

SEQ ID NO: 2178771 - RNA, 19 nt, Artificial Sequence
  Description of Artificial Sequence: Synthetic oligonucleotide
  Antisense strand to SEQ ID NO: 2178770
augguugguggaagacacu

SEQ ID NO: 2178772 - RNA, 19 nt, Artificial Sequence
  Description of Artificial Sequence: Synthetic oligonucleotide
  Sense strand starting at position 209 of SEQ ID NO: 1883237
auuccaucuugccagaugu

SEQ ID NO: 2178773 - RNA, 19 nt, Artificial Sequence
  Description of Artificial Sequence: Synthetic oligonucleotide
  Antisense strand to SEQ ID NO: 2178772
acaucuggcaagauggaau

SEQ ID NO: 2178774 - RNA, 19 nt, Artificial Sequence
  Description of Artificial Sequence: Synthetic oligonucleotide
  Sense strand starting at position 211 of SEQ ID NO: 1883237
uccaucuugccagauguuu

SEQ ID NO: 2178775 - RNA, 19 nt, Artificial Sequence
  Description of Artificial Sequence: Synthetic oligonucleotide
  Antisense strand to SEQ ID NO: 2178774
aaacaucuggcaagaugga

SEQ ID NO: 2178776 - RNA, 19 nt, Artificial Sequence
  Description of Artificial Sequence: Synthetic oligonucleotide
  Sense strand starting at position 222 of SEQ ID NO: 1883237
agauguuucuguguuacug

SEQ ID NO: 2178777 - RNA, 19 nt, Artificial Sequence
  Description of Artificial Sequence: Synthetic oligonucleotide
  Antisense strand to SEQ ID NO: 2178776
caguaacacagaaacaucu

SEQ ID NO: 2178778 - RNA, 19 nt, Artificial Sequence
  Description of Artificial Sequence: Synthetic oligonucleotide
  Sense strand starting at position 256 of SEQ ID NO: 1883237
acaggaucagcgcaugaga

SEQ ID NO: 2178779 - RNA, 19 nt, Artificial Sequence
  Description of Artificial Sequence: Synthetic oligonucleotide
  Antisense strand to SEQ ID NO: 2178778
ucucaugcgcugauccugu

SEQ ID NO: 2178780 - RNA, 19 nt, Artificial Sequence
  Description of Artificial Sequence: Synthetic oligonucleotide
  Sense strand starting at position 296 of SEQ ID NO: 1883237
agauaugucaggugaccag

SEQ ID NO: 2178781 - RNA, 19 nt, Artificial Sequence
  Description of Artificial Sequence: Synthetic oligonucleotide
  Antisense strand to SEQ ID NO: 2178780
cuggucaccugacauaucu

SEQ ID NO: 2178782 - RNA, 19 nt, Artificial Sequence
  Description of Artificial Sequence: Synthetic oligonucleotide
  Sense strand starting at position 323 of SEQ ID NO: 1883237
agggcaggccgucguuaaa

SEQ ID NO: 2178783 - RNA, 19 nt, Artificial Sequence
  Description of Artificial Sequence: Synthetic oligonucleotide
  Antisense strand to SEQ ID NO: 2178782
uuuaacgacggccugcccu

SEQ ID NO: 2178784 - RNA, 19 nt, Artificial Sequence
  Description of Artificial Sequence: Synthetic oligonucleotide
  Sense strand starting at position 324 of SEQ ID NO: 1883237
gggcaggccgucguuaaau

SEQ ID NO: 2178785 - RNA, 19 nt, Artificial Sequence
  Description of Artificial Sequence: Synthetic oligonucleotide
  Antisense strand to SEQ ID NO: 2178784
auuuaacgacggccugccc

SEQ ID NO: 2178786 - RNA, 19 nt, Artificial Sequence
  Description of Artificial Sequence: Synthetic oligonucleotide
  Sense strand starting at position 644 of SEQ ID NO: 1883237
gacagcauaccacgugaaa

SEQ ID NO: 2178787 - RNA, 19 nt, Artificial Sequence
  Description of Artificial Sequence: Synthetic oligonucleotide
  Antisense strand to SEQ ID NO: 2178786
uuucacgugguaugcuguc

SEQ ID NO: 2178788 - RNA, 19 nt, Artificial Sequence
  Description of Artificial Sequence: Synthetic oligonucleotide
  Sense strand starting at position 858 of SEQ ID NO: 1883237
cugugagaaucugggaagu

SEQ ID NO: 2178789 - RNA, 19 nt, Artificial Sequence
  Description of Artificial Sequence: Synthetic oligonucleotide
  Antisense strand to SEQ ID NO: 2178788
acuucccagauucucacag

SEQ ID NO: 2178790 - RNA, 19 nt, Artificial Sequence
  Description of Artificial Sequence: Synthetic oligonucleotide
  Sense strand starting at position 1211 of SEQ ID NO: 1883237
aucccagagcccuauggau

SEQ ID NO: 2178791 - RNA, 19 nt, Artificial Sequence
  Description of Artificial Sequence: Synthetic oligonucleotide
  Antisense strand to SEQ ID NO: 2178790
auccauagggcucugggau

SEQ ID NO: 2178792 - RNA, 19 nt, Artificial Sequence
  Description of Artificial Sequence: Synthetic oligonucleotide
  Sense strand starting at position 1213 of SEQ ID NO: 1883237
cccagagcccuauggauga

SEQ ID NO: 2178793 - RNA, 19 nt, Artificial Sequence
  Description of Artificial Sequence: Synthetic oligonucleotide
  Antisense strand to SEQ ID NO: 2178792
ucauccauagggcucuggg

SEQ ID NO: 2178794 - RNA, 19 nt, Artificial Sequence
  Description of Artificial Sequence: Synthetic oligonucleotide
  Sense strand starting at position 1248 of SEQ ID NO: 1883237
ucaggauccugggaaagau

SEQ ID NO: 2178795 - RNA, 19 nt, Artificial Sequence
  Description of Artificial Sequence: Synthetic oligonucleotide
  Antisense strand to SEQ ID NO: 2178794
aucuuucccaggauccuga

SEQ ID NO: 2178796 - RNA, 19 nt, Artificial Sequence
  Description of Artificial Sequence: Synthetic oligonucleotide
  Sense strand starting at position 1360 of SEQ ID NO: 1883237
gguuauuaggucuguuaaa

SEQ ID NO: 2178797 - RNA, 19 nt, Artificial Sequence
  Description of Artificial Sequence: Synthetic oligonucleotide
  Antisense strand to SEQ ID NO: 2178796
uuuaacagaccuaauaacc

SEQ ID NO: 2178798 - RNA, 19 nt, Artificial Sequence
  Description of Artificial Sequence: Synthetic oligonucleotide
  Sense strand starting at position 1361 of SEQ ID NO: 1883237
guuauuaggucuguuaaau

SEQ ID NO: 2178799 - RNA, 19 nt, Artificial Sequence
  Description of Artificial Sequence: Synthetic oligonucleotide
  Antisense strand to SEQ ID NO: 2178798
auuuaacagaccuaauaac

SEQ ID NO: 2178800 - RNA, 19 nt, Artificial Sequence
  Description of Artificial Sequence: Synthetic oligonucleotide
  Sense strand starting at position 1370 of SEQ ID NO: 1883237
ucuguuaaaugcuucugga

SEQ ID NO: 2178801 - RNA, 19 nt, Artificial Sequence
  Description of Artificial Sequence: Synthetic oligonucleotide
  Antisense strand to SEQ ID NO: 2178800
uccagaagcauuuaacaga

SEQ ID NO: 2178802 - RNA, 19 nt, Artificial Sequence
  Description of Artificial Sequence: Synthetic oligonucleotide
  Sense strand starting at position 1415 of SEQ ID NO: 1883237
ggaccauuugcuuacgugu

SEQ ID NO: 2178803 - RNA, 19 nt, Artificial Sequence
  Description of Artificial Sequence: Synthetic oligonucleotide
  Antisense strand to SEQ ID NO: 2178802
acacguaagcaaauggucc

SEQ ID NO: 2178804 - RNA, 19 nt, Artificial Sequence
  Description of Artificial Sequence: Synthetic oligonucleotide
  Sense strand starting at position 1418 of SEQ ID NO: 1883237
ccauuugcuuacgugucau

SEQ ID NO: 2178805 - RNA, 19 nt, Artificial Sequence
  Description of Artificial Sequence: Synthetic oligonucleotide
  Antisense strand to SEQ ID NO: 2178804
augacacguaagcaaaugg

SEQ ID NO: 2178806 - RNA, 19 nt, Artificial Sequence
  Description of Artificial Sequence: Synthetic oligonucleotide
  Sense strand starting at position 1560 of SEQ ID NO: 1883237
acuggaaaguccuaauacu

SEQ ID NO: 2178807 - RNA, 19 nt, Artificial Sequence
  Description of Artificial Sequence: Synthetic oligonucleotide
  Antisense strand to SEQ ID NO: 2178806
aguauuaggacuuuccagu

SEQ ID NO: 2178808 - RNA, 19 nt, Artificial Sequence
  Description of Artificial Sequence: Synthetic oligonucleotide
  Sense strand starting at position 1682 of SEQ ID NO: 1883237
aaugcaagguuaucaggau

SEQ ID NO: 2178809 - RNA, 19 nt, Artificial Sequence
  Description of Artificial Sequence: Synthetic oligonucleotide
  Antisense strand to SEQ ID NO: 2178808
auccugauaaccuugcauu

SEQ ID NO: 2178810 - RNA, 19 nt, Artificial Sequence
  Description of Artificial Sequence: Synthetic oligonucleotide
  Sense strand starting at position 2034 of SEQ ID NO: 1883237
cgacgaugccaacacaauu

SEQ ID NO: 2178811 - RNA, 19 nt, Artificial Sequence
  Description of Artificial Sequence: Synthetic oligonucleotide
  Antisense strand to SEQ ID NO: 2178810
aauuguguuggcaucgucg

SEQ ID NO: 2178812 - RNA, 19 nt, Artificial Sequence
  Description of Artificial Sequence: Synthetic oligonucleotide
  Sense strand starting at position 2123 of SEQ ID NO: 1883237
guggcuguggcccauagaa

SEQ ID NO: 2178813 - RNA, 19 nt, Artificial Sequence
  Description of Artificial Sequence: Synthetic oligonucleotide
  Antisense strand to SEQ ID NO: 2178812
uucuaugggccacagccac

SEQ ID NO: 2178814 - RNA, 19 nt, Artificial Sequence
  Description of Artificial Sequence: Synthetic oligonucleotide
  Sense strand starting at position 2125 of SEQ ID NO: 1883237
ggcuguggcccauagaaua

SEQ ID NO: 2178815 - RNA, 19 nt, Artificial Sequence
  Description of Artificial Sequence: Synthetic oligonucleotide
  Antisense strand to SEQ ID NO: 2178814
uauucuaugggccacagcc

SEQ ID NO: 2178816 - RNA, 19 nt, Artificial Sequence
  Description of Artificial Sequence: Synthetic oligonucleotide
  Sense strand starting at position 2266 of SEQ ID NO: 1883237
uccugaacccgacagaguu

SEQ ID NO: 2178817 - RNA, 19 nt, Artificial Sequence
  Description of Artificial Sequence: Synthetic oligonucleotide
  Antisense strand to SEQ ID NO: 2178816
aacucugucggguucagga

SEQ ID NO: 2178818 - RNA, 19 nt, Artificial Sequence
  Description of Artificial Sequence: Synthetic oligonucleotide
  Sense strand starting at position 2356 of SEQ ID NO: 1883237
cugggaauccugcgagcuu

SEQ ID NO: 2178819 - RNA, 19 nt, Artificial Sequence
  Description of Artificial Sequence: Synthetic oligonucleotide
  Antisense strand to SEQ ID NO: 2178818
aagcucgcaggauucccag

SEQ ID NO: 2178820 - RNA, 19 nt, Artificial Sequence
  Description of Artificial Sequence: Synthetic oligonucleotide
  Sense strand starting at position 2422 of SEQ ID NO: 1883237
agaugucuccucggccaaa

SEQ ID NO: 2178821 - RNA, 19 nt, Artificial Sequence
  Description of Artificial Sequence: Synthetic oligonucleotide
  Antisense strand to SEQ ID NO: 2178820
uuuggccgaggagacaucu

SEQ ID NO: 2178822 - RNA, 19 nt, Artificial Sequence
  Description of Artificial Sequence: Synthetic oligonucleotide
  Sense strand starting at position 2656 of SEQ ID NO: 1883237
gggucaggccaccauuaaa

SEQ ID NO: 2178823 - RNA, 19 nt, Artificial Sequence
  Description of Artificial Sequence: Synthetic oligonucleotide
  Antisense strand to SEQ ID NO: 2178822
uuuaaugguggccugaccc

SEQ ID NO: 2178824 - RNA, 19 nt, Artificial Sequence
  Description of Artificial Sequence: Synthetic oligonucleotide
  Sense strand starting at position 3056 of SEQ ID NO: 1883237
uccucaaaggucgaacaau

SEQ ID NO: 2178825 - RNA, 19 nt, Artificial Sequence
  Description of Artificial Sequence: Synthetic oligonucleotide
  Antisense strand to SEQ ID NO: 2178824
auuguucgaccuuugagga

SEQ ID NO: 2178826 - RNA, 19 nt, Artificial Sequence
  Description of Artificial Sequence: Synthetic oligonucleotide
  Sense strand starting at position 3254 of SEQ ID NO: 1883237
cgugcaggccucuauggau

SEQ ID NO: 2178827 - RNA, 19 nt, Artificial Sequence
  Description of Artificial Sequence: Synthetic oligonucleotide
  Antisense strand to SEQ ID NO: 2178826
auccauagaggccugcacg

SEQ ID NO: 2178828 - RNA, 19 nt, Artificial Sequence
  Description of Artificial Sequence: Synthetic oligonucleotide
  Sense strand starting at position 3402 of SEQ ID NO: 1883237
guggaaucugcucagaggu

SEQ ID NO: 2178829 - RNA, 19 nt, Artificial Sequence
  Description of Artificial Sequence: Synthetic oligonucleotide
  Antisense strand to SEQ ID NO: 2178828
accucugagcagauuccac

SEQ ID NO: 2178830 - RNA, 19 nt, Artificial Sequence
  Description of Artificial Sequence: Synthetic oligonucleotide
  Sense strand starting at position 3435 of SEQ ID NO: 1883237
augagaccugcuuaagggu

SEQ ID NO: 2178831 - RNA, 19 nt, Artificial Sequence
  Description of Artificial Sequence: Synthetic oligonucleotide
  Antisense strand to SEQ ID NO: 2178830
acccuuaagcaggucucau

SEQ ID NO: 2178832 - RNA, 19 nt, Artificial Sequence
  Description of Artificial Sequence: Synthetic oligonucleotide
  Sense strand starting at position 3503 of SEQ ID NO: 1883237
ugcagucuaccugaguguu

SEQ ID NO: 2178833 - RNA, 19 nt, Artificial Sequence
  Description of Artificial Sequence: Synthetic oligonucleotide
  Antisense strand to SEQ ID NO: 2178832
aacacucagguagacugca

SEQ ID NO: 2178834 - RNA, 19 nt, Artificial Sequence
  Description of Artificial Sequence: Synthetic oligonucleotide
  Sense strand starting at position 3611 of SEQ ID NO: 1883237
cccagauguuucuugggca

SEQ ID NO: 2178835 - RNA, 19 nt, Artificial Sequence
  Description of Artificial Sequence: Synthetic oligonucleotide
  Antisense strand to SEQ ID NO: 2178834
ugcccaagaaacaucuggg

SEQ ID NO: 2178836 - RNA, 19 nt, Artificial Sequence
  Description of Artificial Sequence: Synthetic oligonucleotide
  Sense strand starting at position 3792 of SEQ ID NO: 1883237
agauguuaccucugucaca

SEQ ID NO: 2178837 - RNA, 19 nt, Artificial Sequence
  Description of Artificial Sequence: Synthetic oligonucleotide
  Antisense strand to SEQ ID NO: 2178836
ugugacagagguaacaucu

SEQ ID NO: 2178838 - RNA, 19 nt, Artificial Sequence
  Description of Artificial Sequence: Synthetic oligonucleotide
  Sense strand starting at position 3841 of SEQ ID NO: 1883237
acuccaucucgucagauga

SEQ ID NO: 2178839 - RNA, 19 nt, Artificial Sequence
  Description of Artificial Sequence: Synthetic oligonucleotide
  Antisense strand to SEQ ID NO: 2178838
ucaucugacgagauggagu

SEQ ID NO: 2178840 - RNA, 19 nt, Artificial Sequence
  Description of Artificial Sequence: Synthetic oligonucleotide
  Sense strand starting at position 3851 of SEQ ID NO: 1883237
gucagaugaucuucuggca

SEQ ID NO: 2178841 - RNA, 19 nt, Artificial Sequence
  Description of Artificial Sequence: Synthetic oligonucleotide
  Antisense strand to SEQ ID NO: 2178840
ugccagaagaucaucugac

SEQ ID NO: 2178842 - RNA, 19 nt, Artificial Sequence
  Description of Artificial Sequence: Synthetic oligonucleotide
  Sense strand starting at position 3968 of SEQ ID NO: 1883237
auggucguguggucucaaa

SEQ ID NO: 2178843 - RNA, 19 nt, Artificial Sequence
  Description of Artificial Sequence: Synthetic oligonucleotide
  Antisense strand to SEQ ID NO: 2178842
uuugagaccacacgaccau

SEQ ID NO: 2178844 - RNA, 19 nt, Artificial Sequence
  Description of Artificial Sequence: Synthetic oligonucleotide
  Sense strand starting at position 91 of SEQ ID NO: 1883240
uuugaaugauuccuaggua

SEQ ID NO: 2178845 - RNA, 19 nt, Artificial Sequence
  Description of Artificial Sequence: Synthetic oligonucleotide
  Antisense strand to SEQ ID NO: 2178844
uaccuaggaaucauucaaa

SEQ ID NO: 2178846 - RNA, 19 nt, Artificial Sequence
  Description of Artificial Sequence: Synthetic oligonucleotide
  Sense strand starting at position 94 of SEQ ID NO: 1883240
gaaugauuccuagguaugc

SEQ ID NO: 2178847 - RNA, 19 nt, Artificial Sequence
  Description of Artificial Sequence: Synthetic oligonucleotide
  Antisense strand to SEQ ID NO: 2178846
gcauaccuaggaaucauuc

SEQ ID NO: 2178848 - RNA, 19 nt, Artificial Sequence
  Description of Artificial Sequence: Synthetic oligonucleotide
  Sense strand starting at position 98 of SEQ ID NO: 1883240
gauuccuagguaugccaga

SEQ ID NO: 2178849 - RNA, 19 nt, Artificial Sequence
  Description of Artificial Sequence: Synthetic oligonucleotide
  Antisense strand to SEQ ID NO: 2178848
ucuggcauaccuaggaauc

SEQ ID NO: 2178850 - RNA, 19 nt, Artificial Sequence
  Description of Artificial Sequence: Synthetic oligonucleotide
  Sense strand starting at position 103 of SEQ ID NO: 1883240
cuagguaugccagaugcca

SEQ ID NO: 2178851 - RNA, 19 nt, Artificial Sequence
  Description of Artificial Sequence: Synthetic oligonucleotide
  Antisense strand to SEQ ID NO: 2178850
uggcaucuggcauaccuag

SEQ ID NO: 2178852 - RNA, 19 nt, Artificial Sequence
  Description of Artificial Sequence: Synthetic oligonucleotide
  Sense strand starting at position 146 of SEQ ID NO: 1883240
gucucaugucuuuggaaga

SEQ ID NO: 2178853 - RNA, 19 nt, Artificial Sequence
  Description of Artificial Sequence: Synthetic oligonucleotide
  Antisense strand to SEQ ID NO: 2178852
ucuuccaaagacaugagac

SEQ ID NO: 2178854 - RNA, 19 nt, Artificial Sequence
  Description of Artificial Sequence: Synthetic oligonucleotide
  Sense strand starting at position 299 of SEQ ID NO: 1883240
agaugagcgcuucauguaa

SEQ ID NO: 2178855 - RNA, 19 nt, Artificial Sequence
  Description of Artificial Sequence: Synthetic oligonucleotide
  Antisense strand to SEQ ID NO: 2178854
uuacaugaagcgcucaucu

SEQ ID NO: 2178856 - RNA, 19 nt, Artificial Sequence
  Description of Artificial Sequence: Synthetic oligonucleotide
  Sense strand starting at position 1584 of SEQ ID NO: 1883240
guugaucgcagagaaauua

SEQ ID NO: 2178857 - RNA, 19 nt, Artificial Sequence
  Description of Artificial Sequence: Synthetic oligonucleotide
  Antisense strand to SEQ ID NO: 2178856
uaauuucucugcgaucaac

SEQ ID NO: 2178858 - RNA, 19 nt, Artificial Sequence
  Description of Artificial Sequence: Synthetic oligonucleotide
  Sense strand starting at position 1803 of SEQ ID NO: 1883240
uuaucuuggccucagaucu

SEQ ID NO: 2178859 - RNA, 19 nt, Artificial Sequence
  Description of Artificial Sequence: Synthetic oligonucleotide
  Antisense strand to SEQ ID NO: 2178858
agaucugaggccaagauaa

SEQ ID NO: 2178860 - RNA, 19 nt, Artificial Sequence
  Description of Artificial Sequence: Synthetic oligonucleotide
  Sense strand starting at position 1907 of SEQ ID NO: 1883240
gggaacccugacgguuaaa

SEQ ID NO: 2178861 - RNA, 19 nt, Artificial Sequence
  Description of Artificial Sequence: Synthetic oligonucleotide
  Antisense strand to SEQ ID NO: 2178860
uuuaaccgucaggguuccc

SEQ ID NO: 2178862 - RNA, 19 nt, Artificial Sequence
  Description of Artificial Sequence: Synthetic oligonucleotide
  Sense strand starting at position 1963 of SEQ ID NO: 1883240
uccagaccuccuugaaugu

SEQ ID NO: 2178863 - RNA, 19 nt, Artificial Sequence
  Description of Artificial Sequence: Synthetic oligonucleotide
  Antisense strand to SEQ ID NO: 2178862
acauucaaggaggucugga

SEQ ID NO: 2178864 - RNA, 19 nt, Artificial Sequence
  Description of Artificial Sequence: Synthetic oligonucleotide
  Sense strand starting at position 2028 of SEQ ID NO: 1883240
auuagugucugcccgauuu

SEQ ID NO: 2178865 - RNA, 19 nt, Artificial Sequence
  Description of Artificial Sequence: Synthetic oligonucleotide
  Antisense strand to SEQ ID NO: 2178864
aaaucgggcagacacuaau

SEQ ID NO: 2178866 - RNA, 19 nt, Artificial Sequence
  Description of Artificial Sequence: Synthetic oligonucleotide
  Sense strand starting at position 2096 of SEQ ID NO: 1883240
agcacucagugaucuaaga

SEQ ID NO: 2178867 - RNA, 19 nt, Artificial Sequence
  Description of Artificial Sequence: Synthetic oligonucleotide
  Antisense strand to SEQ ID NO: 2178866
ucuuagaucacugagugcu

SEQ ID NO: 2178868 - RNA, 19 nt, Artificial Sequence
  Description of Artificial Sequence: Synthetic oligonucleotide
  Sense strand starting at position 2137 of SEQ ID NO: 1883240
uucuuacagcgacaucuau

SEQ ID NO: 2178869 - RNA, 19 nt, Artificial Sequence
  Description of Artificial Sequence: Synthetic oligonucleotide
  Antisense strand to SEQ ID NO: 2178868
auagaugucgcuguaagaa

SEQ ID NO: 2178870 - RNA, 19 nt, Artificial Sequence
  Description of Artificial Sequence: Synthetic oligonucleotide
  Sense strand starting at position 2143 of SEQ ID NO: 1883240
cagcgacaucuaugaggua

SEQ ID NO: 2178871 - RNA, 19 nt, Artificial Sequence
  Description of Artificial Sequence: Synthetic oligonucleotide
  Antisense strand to SEQ ID NO: 2178870
uaccucauagaugucgcug

SEQ ID NO: 2178872 - RNA, 19 nt, Artificial Sequence
  Description of Artificial Sequence: Synthetic oligonucleotide
  Sense strand starting at position 2156 of SEQ ID NO: 1883240
gagguagauuucuaauuau

SEQ ID NO: 2178873 - RNA, 19 nt, Artificial Sequence
  Description of Artificial Sequence: Synthetic oligonucleotide
  Antisense strand to SEQ ID NO: 2178872
auaauuagaaaucuaccuc

SEQ ID NO: 2178874 - RNA, 19 nt, Artificial Sequence
  Description of Artificial Sequence: Synthetic oligonucleotide
  Sense strand starting at position 2709 of SEQ ID NO: 1883240
uucugagaaguaggcuaau

SEQ ID NO: 2178875 - RNA, 19 nt, Artificial Sequence
  Description of Artificial Sequence: Synthetic oligonucleotide
  Antisense strand to SEQ ID NO: 2178874
auuagccuacuucucagaa

SEQ ID NO: 2178876 - RNA, 19 nt, Artificial Sequence
  Description of Artificial Sequence: Synthetic oligonucleotide
  Sense strand starting at position 2715 of SEQ ID NO: 1883240
gaaguaggcuaauuaguuu

SEQ ID NO: 2178877 - RNA, 19 nt, Artificial Sequence
  Description of Artificial Sequence: Synthetic oligonucleotide
  Antisense strand to SEQ ID NO: 2178876
aaacuaauuagccuacuuc

SEQ ID NO: 2178878 - RNA, 19 nt, Artificial Sequence
  Description of Artificial Sequence: Synthetic oligonucleotide
  Sense strand starting at position 2718 of SEQ ID NO: 1883240
guaggcuaauuaguuugaa

SEQ ID NO: 2178879 - RNA, 19 nt, Artificial Sequence
  Description of Artificial Sequence: Synthetic oligonucleotide
  Antisense strand to SEQ ID NO: 2178878
uucaaacuaauuagccuac

SEQ ID NO: 2178880 - RNA, 19 nt, Artificial Sequence
  Description of Artificial Sequence: Synthetic oligonucleotide
  Sense strand starting at position 2721 of SEQ ID NO: 1883240
ggcuaauuaguuugaagug

SEQ ID NO: 2178881 - RNA, 19 nt, Artificial Sequence
  Description of Artificial Sequence: Synthetic oligonucleotide
  Antisense strand to SEQ ID NO: 2178880
cacuucaaacuaauuagcc

SEQ ID NO: 2178882 - RNA, 19 nt, Artificial Sequence
  Description of Artificial Sequence: Synthetic oligonucleotide
  Sense strand starting at position 2788 of SEQ ID NO: 1883240
auugaauaacugcgauaug

SEQ ID NO: 2178883 - RNA, 19 nt, Artificial Sequence
  Description of Artificial Sequence: Synthetic oligonucleotide
  Antisense strand to SEQ ID NO: 2178882
cauaucgcaguuauucaau

SEQ ID NO: 2178884 - RNA, 19 nt, Artificial Sequence
  Description of Artificial Sequence: Synthetic oligonucleotide
  Sense strand starting at position 2791 of SEQ ID NO: 1883240
gaauaacugcgauaugccu

SEQ ID NO: 2178885 - RNA, 19 nt, Artificial Sequence
  Description of Artificial Sequence: Synthetic oligonucleotide
  Antisense strand to SEQ ID NO: 2178884
aggcauaucgcaguuauuc

SEQ ID NO: 2178886 - RNA, 19 nt, Artificial Sequence
  Description of Artificial Sequence: Synthetic oligonucleotide
  Sense strand starting at position 2843 of SEQ ID NO: 1883240
caauaaagaucagucacga

SEQ ID NO: 2178887 - RNA, 19 nt, Artificial Sequence
  Description of Artificial Sequence: Synthetic oligonucleotide
  Antisense strand to SEQ ID NO: 2178886
ucgugacugaucuuuauug

SEQ ID NO: 2178888 - RNA, 19 nt, Artificial Sequence
  Description of Artificial Sequence: Synthetic oligonucleotide
  Sense strand starting at position 2912 of SEQ ID NO: 1883240
agagcugaugcauauccau

SEQ ID NO: 2178889 - RNA, 19 nt, Artificial Sequence
  Description of Artificial Sequence: Synthetic oligonucleotide
  Antisense strand to SEQ ID NO: 2178888
auggauaugcaucagcucu

SEQ ID NO: 2178890 - RNA, 19 nt, Artificial Sequence
  Description of Artificial Sequence: Synthetic oligonucleotide
  Sense strand starting at position 2915 of SEQ ID NO: 1883240
gcugaugcauauccauuaa

SEQ ID NO: 2178891 - RNA, 19 nt, Artificial Sequence
  Description of Artificial Sequence: Synthetic oligonucleotide
  Antisense strand to SEQ ID NO: 2178890
uuaauggauaugcaucagc

SEQ ID NO: 2178892 - RNA, 19 nt, Artificial Sequence
  Description of Artificial Sequence: Synthetic oligonucleotide
  Sense strand starting at position 2939 of SEQ ID NO: 1883240
auaucuuagugagccuuau

SEQ ID NO: 2178893 - RNA, 19 nt, Artificial Sequence
  Description of Artificial Sequence: Synthetic oligonucleotide
  Antisense strand to SEQ ID NO: 2178892
auaaggcucacuaagauau

SEQ ID NO: 2178894 - RNA, 19 nt, Artificial Sequence
  Description of Artificial Sequence: Synthetic oligonucleotide
  Sense strand starting at position 2943 of SEQ ID NO: 1883240
cuuagugagccuuaucuuc

SEQ ID NO: 2178895 - RNA, 19 nt, Artificial Sequence
  Description of Artificial Sequence: Synthetic oligonucleotide
  Antisense strand to SEQ ID NO: 2178894
gaagauaaggcucacuaag

SEQ ID NO: 2178896 - RNA, 19 nt, Artificial Sequence
  Description of Artificial Sequence: Synthetic oligonucleotide
  Sense strand starting at position 2961 of SEQ ID NO: 1883240
caaguuagcagcgagaaga

SEQ ID NO: 2178897 - RNA, 19 nt, Artificial Sequence
  Description of Artificial Sequence: Synthetic oligonucleotide
  Antisense strand to SEQ ID NO: 2178896
ucuucucgcugcuaacuug

SEQ ID NO: 2178898 - RNA, 19 nt, Artificial Sequence
  Description of Artificial Sequence: Synthetic oligonucleotide
  Sense strand starting at position 3065 of SEQ ID NO: 1883240
uaaagauggcagcauguuu

SEQ ID NO: 2178899 - RNA, 19 nt, Artificial Sequence
  Description of Artificial Sequence: Synthetic oligonucleotide
  Antisense strand to SEQ ID NO: 2178898
aaacaugcugccaucuuua

SEQ ID NO: 2178900 - RNA, 19 nt, Artificial Sequence
  Description of Artificial Sequence: Synthetic oligonucleotide
  Sense strand starting at position 3197 of SEQ ID NO: 1883240
acaggaugcucacuguaaa

SEQ ID NO: 2178901 - RNA, 19 nt, Artificial Sequence
  Description of Artificial Sequence: Synthetic oligonucleotide
  Antisense strand to SEQ ID NO: 2178900
uuuacagugagcauccugu

SEQ ID NO: 2178902 - RNA, 19 nt, Artificial Sequence
  Description of Artificial Sequence: Synthetic oligonucleotide
  Sense strand starting at position 3374 of SEQ ID NO: 1883240
cuuuccucugaaggucaua

SEQ ID NO: 2178903 - RNA, 19 nt, Artificial Sequence
  Description of Artificial Sequence: Synthetic oligonucleotide
  Antisense strand to SEQ ID NO: 2178902
uaugaccuucagaggaaag

SEQ ID NO: 2178904 - RNA, 19 nt, Artificial Sequence
  Description of Artificial Sequence: Synthetic oligonucleotide
  Sense strand starting at position 3475 of SEQ ID NO: 1883240
ggaguagugaccuacggua

SEQ ID NO: 2178905 - RNA, 19 nt, Artificial Sequence
  Description of Artificial Sequence: Synthetic oligonucleotide
  Antisense strand to SEQ ID NO: 2178904
uaccguaggucacuacucc

SEQ ID NO: 2178906 - RNA, 19 nt, Artificial Sequence
  Description of Artificial Sequence: Synthetic oligonucleotide
  Sense strand starting at position 3526 of SEQ ID NO: 1883240
uuuagucagguagacuauu

SEQ ID NO: 2178907 - RNA, 19 nt, Artificial Sequence
  Description of Artificial Sequence: Synthetic oligonucleotide
  Antisense strand to SEQ ID NO: 2178906
aauagucuaccugacuaaa

SEQ ID NO: 2178908 - RNA, 19 nt, Artificial Sequence
  Description of Artificial Sequence: Synthetic oligonucleotide
  Sense strand starting at position 3534 of SEQ ID NO: 1883240
gguagacuauucuuuguca

SEQ ID NO: 2178909 - RNA, 19 nt, Artificial Sequence
  Description of Artificial Sequence: Synthetic oligonucleotide
  Antisense strand to SEQ ID NO: 2178908
ugacaaagaauagucuacc

SEQ ID NO: 2178910 - RNA, 19 nt, Artificial Sequence
  Description of Artificial Sequence: Synthetic oligonucleotide
  Sense strand starting at position 3537 of SEQ ID NO: 1883240
agacuauucuuugucagca

SEQ ID NO: 2178911 - RNA, 19 nt, Artificial Sequence
  Description of Artificial Sequence: Synthetic oligonucleotide
  Antisense strand to SEQ ID NO: 2178910
ugcugacaaagaauagucu

SEQ ID NO: 2178912 - RNA, 19 nt, Artificial Sequence
  Description of Artificial Sequence: Synthetic oligonucleotide
  Sense strand starting at position 3628 of SEQ ID NO: 1883240
acaccuggcuuucugaaau

SEQ ID NO: 2178913 - RNA, 19 nt, Artificial Sequence
  Description of Artificial Sequence: Synthetic oligonucleotide
  Antisense strand to SEQ ID NO: 2178912
auuucagaaagccaggugu

SEQ ID NO: 2178914 - RNA, 19 nt, Artificial Sequence
  Description of Artificial Sequence: Synthetic oligonucleotide
  Sense strand starting at position 3634 of SEQ ID NO: 1883240
ggcuuucugaaauggugau

SEQ ID NO: 2178915 - RNA, 19 nt, Artificial Sequence
  Description of Artificial Sequence: Synthetic oligonucleotide
  Antisense strand to SEQ ID NO: 2178914
aucaccauuucagaaagcc

SEQ ID NO: 2178916 - RNA, 19 nt, Artificial Sequence
  Description of Artificial Sequence: Synthetic oligonucleotide
  Sense strand starting at position 3640 of SEQ ID NO: 1883240
cugaaauggugauucugga

SEQ ID NO: 2178917 - RNA, 19 nt, Artificial Sequence
  Description of Artificial Sequence: Synthetic oligonucleotide
  Antisense strand to SEQ ID NO: 2178916
uccagaaucaccauuucag

SEQ ID NO: 2178918 - RNA, 19 nt, Artificial Sequence
  Description of Artificial Sequence: Synthetic oligonucleotide
  Sense strand starting at position 3839 of SEQ ID NO: 1883240
ucaaguaaagguuguacau

SEQ ID NO: 2178919 - RNA, 19 nt, Artificial Sequence
  Description of Artificial Sequence: Synthetic oligonucleotide
  Antisense strand to SEQ ID NO: 2178918
auguacaaccuuuacuuga

SEQ ID NO: 2178920 - RNA, 19 nt, Artificial Sequence
  Description of Artificial Sequence: Synthetic oligonucleotide
  Sense strand starting at position 3914 of SEQ ID NO: 1883240
aaggaacagugcucauaua

SEQ ID NO: 2178921 - RNA, 19 nt, Artificial Sequence
  Description of Artificial Sequence: Synthetic oligonucleotide
  Antisense strand to SEQ ID NO: 2178920
uauaugagcacuguuccuu

SEQ ID NO: 2178922 - RNA, 19 nt, Artificial Sequence
  Description of Artificial Sequence: Synthetic oligonucleotide
  Sense strand starting at position 3953 of SEQ ID NO: 1883240
ucuuguaaagaauacugua

SEQ ID NO: 2178923 - RNA, 19 nt, Artificial Sequence
  Description of Artificial Sequence: Synthetic oligonucleotide
  Antisense strand to SEQ ID NO: 2178922
uacaguauucuuuacaaga

SEQ ID NO: 2178924 - RNA, 19 nt, Artificial Sequence
  Description of Artificial Sequence: Synthetic oligonucleotide
  Sense strand starting at position 89 of SEQ ID NO: 1883239
cauauuuguuuggaugaaa

SEQ ID NO: 2178925 - RNA, 19 nt, Artificial Sequence
  Description of Artificial Sequence: Synthetic oligonucleotide
  Antisense strand to SEQ ID NO: 2178924
uuucauccaaacaaauaug

SEQ ID NO: 2178926 - RNA, 19 nt, Artificial Sequence
  Description of Artificial Sequence: Synthetic oligonucleotide
  Sense strand starting at position 424 of SEQ ID NO: 1883239
gugucucagguccacaaua

SEQ ID NO: 2178927 - RNA, 19 nt, Artificial Sequence
  Description of Artificial Sequence: Synthetic oligonucleotide
  Antisense strand to SEQ ID NO: 2178926
uauuguggaccugagacac

SEQ ID NO: 2178928 - RNA, 19 nt, Artificial Sequence
  Description of Artificial Sequence: Synthetic oligonucleotide
  Sense strand starting at position 426 of SEQ ID NO: 1883239
gucucagguccacaauacu

SEQ ID NO: 2178929 - RNA, 19 nt, Artificial Sequence
  Description of Artificial Sequence: Synthetic oligonucleotide
  Antisense strand to SEQ ID NO: 2178928
aguauuguggaccugagac

SEQ ID NO: 2178930 - RNA, 19 nt, Artificial Sequence
  Description of Artificial Sequence: Synthetic oligonucleotide
  Sense strand starting at position 496 of SEQ ID NO: 1883239
aaauuagguguugguuaaa

SEQ ID NO: 2178931 - RNA, 19 nt, Artificial Sequence
  Description of Artificial Sequence: Synthetic oligonucleotide
  Antisense strand to SEQ ID NO: 2178930
uuuaaccaacaccuaauuu

SEQ ID NO: 2178932 - RNA, 19 nt, Artificial Sequence
  Description of Artificial Sequence: Synthetic oligonucleotide
  Sense strand starting at position 499 of SEQ ID NO: 1883239
uuagguguugguuaaagaa

SEQ ID NO: 2178933 - RNA, 19 nt, Artificial Sequence
  Description of Artificial Sequence: Synthetic oligonucleotide
  Antisense strand to SEQ ID NO: 2178932
uucuuuaaccaacaccuaa

SEQ ID NO: 2178934 - RNA, 19 nt, Artificial Sequence
  Description of Artificial Sequence: Synthetic oligonucleotide
  Sense strand starting at position 673 of SEQ ID NO: 1883239
uuugaaugauuccuaggua

SEQ ID NO: 2178935 - RNA, 19 nt, Artificial Sequence
  Description of Artificial Sequence: Synthetic oligonucleotide
  Antisense strand to SEQ ID NO: 2178934
uaccuaggaaucauucaaa

SEQ ID NO: 2178936 - RNA, 19 nt, Artificial Sequence
  Description of Artificial Sequence: Synthetic oligonucleotide
  Sense strand starting at position 676 of SEQ ID NO: 1883239
gaaugauuccuagguaugc

SEQ ID NO: 2178937 - RNA, 19 nt, Artificial Sequence
  Description of Artificial Sequence: Synthetic oligonucleotide
  Antisense strand to SEQ ID NO: 2178936
gcauaccuaggaaucauuc

SEQ ID NO: 2178938 - RNA, 19 nt, Artificial Sequence
  Description of Artificial Sequence: Synthetic oligonucleotide
  Sense strand starting at position 680 of SEQ ID NO: 1883239
gauuccuagguaugccaga

SEQ ID NO: 2178939 - RNA, 19 nt, Artificial Sequence
  Description of Artificial Sequence: Synthetic oligonucleotide
  Antisense strand to SEQ ID NO: 2178938
ucuggcauaccuaggaauc

SEQ ID NO: 2178940 - RNA, 19 nt, Artificial Sequence
  Description of Artificial Sequence: Synthetic oligonucleotide
  Sense strand starting at position 685 of SEQ ID NO: 1883239
cuagguaugccagaugcca

SEQ ID NO: 2178941 - RNA, 19 nt, Artificial Sequence
  Description of Artificial Sequence: Synthetic oligonucleotide
  Antisense strand to SEQ ID NO: 2178940
uggcaucuggcauaccuag

SEQ ID NO: 2178942 - RNA, 19 nt, Artificial Sequence
  Description of Artificial Sequence: Synthetic oligonucleotide
  Sense strand starting at position 687 of SEQ ID NO: 1883239
agguaugccagaugccaau

SEQ ID NO: 2178943 - RNA, 19 nt, Artificial Sequence
  Description of Artificial Sequence: Synthetic oligonucleotide
  Antisense strand to SEQ ID NO: 2178942
auuggcaucuggcauaccu

SEQ ID NO: 2178944 - RNA, 19 nt, Artificial Sequence
  Description of Artificial Sequence: Synthetic oligonucleotide
  Sense strand starting at position 728 of SEQ ID NO: 1883239
gucucaugucuuuggaaga

SEQ ID NO: 2178945 - RNA, 19 nt, Artificial Sequence
  Description of Artificial Sequence: Synthetic oligonucleotide
  Antisense strand to SEQ ID NO: 2178944
ucuuccaaagacaugagac

SEQ ID NO: 2178946 - RNA, 19 nt, Artificial Sequence
  Description of Artificial Sequence: Synthetic oligonucleotide
  Sense strand starting at position 881 of SEQ ID NO: 1883239
agaugagcgcuucauguaa

SEQ ID NO: 2178947 - RNA, 19 nt, Artificial Sequence
  Description of Artificial Sequence: Synthetic oligonucleotide
  Antisense strand to SEQ ID NO: 2178946
uuacaugaagcgcucaucu

SEQ ID NO: 2178948 - RNA, 19 nt, Artificial Sequence
  Description of Artificial Sequence: Synthetic oligonucleotide
  Sense strand starting at position 1056 of SEQ ID NO: 1883239
cuaggaucguaucccuauu

SEQ ID NO: 2178949 - RNA, 19 nt, Artificial Sequence
  Description of Artificial Sequence: Synthetic oligonucleotide
  Antisense strand to SEQ ID NO: 2178948
aauagggauacgauccuag

SEQ ID NO: 2178950 - RNA, 19 nt, Artificial Sequence
  Description of Artificial Sequence: Synthetic oligonucleotide
  Sense strand starting at position 2166 of SEQ ID NO: 1883239
guugaucgcagagaaauua

SEQ ID NO: 2178951 - RNA, 19 nt, Artificial Sequence
  Description of Artificial Sequence: Synthetic oligonucleotide
  Antisense strand to SEQ ID NO: 2178950
uaauuucucugcgaucaac

SEQ ID NO: 2178952 - RNA, 19 nt, Artificial Sequence
  Description of Artificial Sequence: Synthetic oligonucleotide
  Sense strand starting at position 2385 of SEQ ID NO: 1883239
uuaucuuggccucagaucu

SEQ ID NO: 2178953 - RNA, 19 nt, Artificial Sequence
  Description of Artificial Sequence: Synthetic oligonucleotide
  Antisense strand to SEQ ID NO: 2178952
agaucugaggccaagauaa

SEQ ID NO: 2178954 - RNA, 19 nt, Artificial Sequence
  Description of Artificial Sequence: Synthetic oligonucleotide
  Sense strand starting at position 2489 of SEQ ID NO: 1883239
gggaacccugacgguuaaa

SEQ ID NO: 2178955 - RNA, 19 nt, Artificial Sequence
  Description of Artificial Sequence: Synthetic oligonucleotide
  Antisense strand to SEQ ID NO: 2178954
uuuaaccgucaggguuccc

SEQ ID NO: 2178956 - RNA, 19 nt, Artificial Sequence
  Description of Artificial Sequence: Synthetic oligonucleotide
  Sense strand starting at position 2545 of SEQ ID NO: 1883239
uccagaccuccuugaaugu

SEQ ID NO: 2178957 - RNA, 19 nt, Artificial Sequence
  Description of Artificial Sequence: Synthetic oligonucleotide
  Antisense strand to SEQ ID NO: 2178956
acauucaaggaggucugga

SEQ ID NO: 2178958 - RNA, 19 nt, Artificial Sequence
  Description of Artificial Sequence: Synthetic oligonucleotide
  Sense strand starting at position 2552 of SEQ ID NO: 1883239
cuccuugaaugucuuaagu

SEQ ID NO: 2178959 - RNA, 19 nt, Artificial Sequence
  Description of Artificial Sequence: Synthetic oligonucleotide
  Antisense strand to SEQ ID NO: 2178958
acuuaagacauucaaggag

SEQ ID NO: 2178960 - RNA, 19 nt, Artificial Sequence
  Description of Artificial Sequence: Synthetic oligonucleotide
  Sense strand starting at position 2610 of SEQ ID NO: 1883239
auuagugucugcccgauuu

SEQ ID NO: 2178961 - RNA, 19 nt, Artificial Sequence
  Description of Artificial Sequence: Synthetic oligonucleotide
  Antisense strand to SEQ ID NO: 2178960
aaaucgggcagacacuaau

SEQ ID NO: 2178962 - RNA, 19 nt, Artificial Sequence
  Description of Artificial Sequence: Synthetic oligonucleotide
  Sense strand starting at position 2678 of SEQ ID NO: 1883239
agcacucagugaucuaaga

SEQ ID NO: 2178963 - RNA, 19 nt, Artificial Sequence
  Description of Artificial Sequence: Synthetic oligonucleotide
  Antisense strand to SEQ ID NO: 2178962
ucuuagaucacugagugcu

SEQ ID NO: 2178964 - RNA, 19 nt, Artificial Sequence
  Description of Artificial Sequence: Synthetic oligonucleotide
  Sense strand starting at position 2719 of SEQ ID NO: 1883239
uucuuacagcgacaucuau

SEQ ID NO: 2178965 - RNA, 19 nt, Artificial Sequence
  Description of Artificial Sequence: Synthetic oligonucleotide
  Antisense strand to SEQ ID NO: 2178964
auagaugucgcuguaagaa

SEQ ID NO: 2178966 - RNA, 19 nt, Artificial Sequence
  Description of Artificial Sequence: Synthetic oligonucleotide
  Sense strand starting at position 2725 of SEQ ID NO: 1883239
cagcgacaucuaugaggua

SEQ ID NO: 2178967 - RNA, 19 nt, Artificial Sequence
  Description of Artificial Sequence: Synthetic oligonucleotide
  Antisense strand to SEQ ID NO: 2178966
uaccucauagaugucgcug

SEQ ID NO: 2178968 - RNA, 19 nt, Artificial Sequence
  Description of Artificial Sequence: Synthetic oligonucleotide
  Sense strand starting at position 2738 of SEQ ID NO: 1883239
gagguagauuucuaauuau

SEQ ID NO: 2178969 - RNA, 19 nt, Artificial Sequence
  Description of Artificial Sequence: Synthetic oligonucleotide
  Antisense strand to SEQ ID NO: 2178968
auaauuagaaaucuaccuc

SEQ ID NO: 2178970 - RNA, 19 nt, Artificial Sequence
  Description of Artificial Sequence: Synthetic oligonucleotide
  Sense strand starting at position 3291 of SEQ ID NO: 1883239
uucugagaaguaggcuaau

SEQ ID NO: 2178971 - RNA, 19 nt, Artificial Sequence
  Description of Artificial Sequence: Synthetic oligonucleotide
  Antisense strand to SEQ ID NO: 2178970
auuagccuacuucucagaa

SEQ ID NO: 2178972 - RNA, 19 nt, Artificial Sequence
  Description of Artificial Sequence: Synthetic oligonucleotide
  Sense strand starting at position 3297 of SEQ ID NO: 1883239
gaaguaggcuaauuaguuu

SEQ ID NO: 2178973 - RNA, 19 nt, Artificial Sequence
  Description of Artificial Sequence: Synthetic oligonucleotide
  Antisense strand to SEQ ID NO: 2178972
aaacuaauuagccuacuuc

SEQ ID NO: 2178974 - RNA, 19 nt, Artificial Sequence
  Description of Artificial Sequence: Synthetic oligonucleotide
  Sense strand starting at position 3300 of SEQ ID NO: 1883239
guaggcuaauuaguuugaa

SEQ ID NO: 2178975 - RNA, 19 nt, Artificial Sequence
  Description of Artificial Sequence: Synthetic oligonucleotide
  Antisense strand to SEQ ID NO: 2178974
uucaaacuaauuagccuac

SEQ ID NO: 2178976 - RNA, 19 nt, Artificial Sequence
  Description of Artificial Sequence: Synthetic oligonucleotide
  Sense strand starting at position 3303 of SEQ ID NO: 1883239
ggcuaauuaguuugaagug

SEQ ID NO: 2178977 - RNA, 19 nt, Artificial Sequence
  Description of Artificial Sequence: Synthetic oligonucleotide
  Antisense strand to SEQ ID NO: 2178976
cacuucaaacuaauuagcc

SEQ ID NO: 2178978 - RNA, 19 nt, Artificial Sequence
  Description of Artificial Sequence: Synthetic oligonucleotide
  Sense strand starting at position 3370 of SEQ ID NO: 1883239
auugaauaacugcgauaug

SEQ ID NO: 2178979 - RNA, 19 nt, Artificial Sequence
  Description of Artificial Sequence: Synthetic oligonucleotide
  Antisense strand to SEQ ID NO: 2178978
cauaucgcaguuauucaau

SEQ ID NO: 2178980 - RNA, 19 nt, Artificial Sequence
  Description of Artificial Sequence: Synthetic oligonucleotide
  Sense strand starting at position 3373 of SEQ ID NO: 1883239
gaauaacugcgauaugccu

SEQ ID NO: 2178981 - RNA, 19 nt, Artificial Sequence
  Description of Artificial Sequence: Synthetic oligonucleotide
  Antisense strand to SEQ ID NO: 2178980
aggcauaucgcaguuauuc

SEQ ID NO: 2178982 - RNA, 19 nt, Artificial Sequence
  Description of Artificial Sequence: Synthetic oligonucleotide
  Sense strand starting at position 3425 of SEQ ID NO: 1883239
caauaaagaucagucacga

SEQ ID NO: 2178983 - RNA, 19 nt, Artificial Sequence
  Description of Artificial Sequence: Synthetic oligonucleotide
  Antisense strand to SEQ ID NO: 2178982
ucgugacugaucuuuauug

SEQ ID NO: 2178984 - RNA, 19 nt, Artificial Sequence
  Description of Artificial Sequence: Synthetic oligonucleotide
  Sense strand starting at position 3441 of SEQ ID NO: 1883239
cgaugagauuugcaccaau

SEQ ID NO: 2178985 - RNA, 19 nt, Artificial Sequence
  Description of Artificial Sequence: Synthetic oligonucleotide
  Antisense strand to SEQ ID NO: 2178984
auuggugcaaaucucaucg

SEQ ID NO: 2178986 - RNA, 19 nt, Artificial Sequence
  Description of Artificial Sequence: Synthetic oligonucleotide
  Sense strand starting at position 3494 of SEQ ID NO: 1883239
agagcugaugcauauccau

SEQ ID NO: 2178987 - RNA, 19 nt, Artificial Sequence
  Description of Artificial Sequence: Synthetic oligonucleotide
  Antisense strand to SEQ ID NO: 2178986
auggauaugcaucagcucu

SEQ ID NO: 2178988 - RNA, 19 nt, Artificial Sequence
  Description of Artificial Sequence: Synthetic oligonucleotide
  Sense strand starting at position 3497 of SEQ ID NO: 1883239
gcugaugcauauccauuaa

SEQ ID NO: 2178989 - RNA, 19 nt, Artificial Sequence
  Description of Artificial Sequence: Synthetic oligonucleotide
  Antisense strand to SEQ ID NO: 2178988
uuaauggauaugcaucagc

SEQ ID NO: 2178990 - RNA, 19 nt, Artificial Sequence
  Description of Artificial Sequence: Synthetic oligonucleotide
  Sense strand starting at position 3521 of SEQ ID NO: 1883239
auaucuuagugagccuuau

SEQ ID NO: 2178991 - RNA, 19 nt, Artificial Sequence
  Description of Artificial Sequence: Synthetic oligonucleotide
  Antisense strand to SEQ ID NO: 2178990
auaaggcucacuaagauau

SEQ ID NO: 2178992 - RNA, 19 nt, Artificial Sequence
  Description of Artificial Sequence: Synthetic oligonucleotide
  Sense strand starting at position 3525 of SEQ ID NO: 1883239
cuuagugagccuuaucuuc

SEQ ID NO: 2178993 - RNA, 19 nt, Artificial Sequence
  Description of Artificial Sequence: Synthetic oligonucleotide
  Antisense strand to SEQ ID NO: 2178992
gaagauaaggcucacuaag

SEQ ID NO: 2178994 - RNA, 19 nt, Artificial Sequence
  Description of Artificial Sequence: Synthetic oligonucleotide
  Sense strand starting at position 3543 of SEQ ID NO: 1883239
caaguuagcagcgagaaga

SEQ ID NO: 2178995 - RNA, 19 nt, Artificial Sequence
  Description of Artificial Sequence: Synthetic oligonucleotide
  Antisense strand to SEQ ID NO: 2178994
ucuucucgcugcuaacuug

SEQ ID NO: 2178996 - RNA, 19 nt, Artificial Sequence
  Description of Artificial Sequence: Synthetic oligonucleotide
  Sense strand starting at position 3647 of SEQ ID NO: 1883239
uaaagauggcagcauguuu

SEQ ID NO: 2178997 - RNA, 19 nt, Artificial Sequence
  Description of Artificial Sequence: Synthetic oligonucleotide
  Antisense strand to SEQ ID NO: 2178996
aaacaugcugccaucuuua

SEQ ID NO: 2178998 - RNA, 19 nt, Artificial Sequence
  Description of Artificial Sequence: Synthetic oligonucleotide
  Sense strand starting at position 3756 of SEQ ID NO: 1883239
auuuauugguaauagagcu

SEQ ID NO: 2178999 - RNA, 19 nt, Artificial Sequence
  Description of Artificial Sequence: Synthetic oligonucleotide
  Antisense strand to SEQ ID NO: 2178998
agcucuauuaccaauaaau

SEQ ID NO: 2179000 - RNA, 19 nt, Artificial Sequence
  Description of Artificial Sequence: Synthetic oligonucleotide
  Sense strand starting at position 3779 of SEQ ID NO: 1883239
acaggaugcucacuguaaa

SEQ ID NO: 2179001 - RNA, 19 nt, Artificial Sequence
  Description of Artificial Sequence: Synthetic oligonucleotide
  Antisense strand to SEQ ID NO: 2179000
uuuacagugagcauccugu

SEQ ID NO: 2179002 - RNA, 19 nt, Artificial Sequence
  Description of Artificial Sequence: Synthetic oligonucleotide
  Sense strand starting at position 3956 of SEQ ID NO: 1883239
cuuuccucugaaggucaua

SEQ ID NO: 2179003 - RNA, 19 nt, Artificial Sequence
  Description of Artificial Sequence: Synthetic oligonucleotide
  Antisense strand to SEQ ID NO: 2179002
uaugaccuucagaggaaag

SEQ ID NO: 2179004 - RNA, 19 nt, Artificial Sequence
  Description of Artificial Sequence: Synthetic oligonucleotide
  Sense strand starting at position 124 of SEQ ID NO: 1883238
gguaacaaauaugagaaua

SEQ ID NO: 2179005 - RNA, 19 nt, Artificial Sequence
  Description of Artificial Sequence: Synthetic oligonucleotide
  Antisense strand to SEQ ID NO: 2179004
uauucucauauuuguuacc

SEQ ID NO: 2179006 - RNA, 19 nt, Artificial Sequence
  Description of Artificial Sequence: Synthetic oligonucleotide
  Sense strand starting at position 132 of SEQ ID NO: 1883238
auaugagaauaucuggcuu

SEQ ID NO: 2179007 - RNA, 19 nt, Artificial Sequence
  Description of Artificial Sequence: Synthetic oligonucleotide
  Antisense strand to SEQ ID NO: 2179006
aagccagauauucucauau

SEQ ID NO: 2179008 - RNA, 19 nt, Artificial Sequence
  Description of Artificial Sequence: Synthetic oligonucleotide
  Sense strand starting at position 340 of SEQ ID NO: 1883238
cugauauacugccugaauu

SEQ ID NO: 2179009 - RNA, 19 nt, Artificial Sequence
  Description of Artificial Sequence: Synthetic oligonucleotide
  Antisense strand to SEQ ID NO: 2179008
aauucaggcaguauaucag

SEQ ID NO: 2179010 - RNA, 19 nt, Artificial Sequence
  Description of Artificial Sequence: Synthetic oligonucleotide
  Sense strand starting at position 399 of SEQ ID NO: 1883238
acugucaguuccuuuacuu

SEQ ID NO: 2179011 - RNA, 19 nt, Artificial Sequence
  Description of Artificial Sequence: Synthetic oligonucleotide
  Antisense strand to SEQ ID NO: 2179010
aaguaaaggaacugacagu

SEQ ID NO: 2179012 - RNA, 19 nt, Artificial Sequence
  Description of Artificial Sequence: Synthetic oligonucleotide
  Sense strand starting at position 504 of SEQ ID NO: 1883238
ccaguauuagaguagucuu

SEQ ID NO: 2179013 - RNA, 19 nt, Artificial Sequence
  Description of Artificial Sequence: Synthetic oligonucleotide
  Antisense strand to SEQ ID NO: 2179012
aagacuacucuaauacugg

SEQ ID NO: 2179014 - RNA, 19 nt, Artificial Sequence
  Description of Artificial Sequence: Synthetic oligonucleotide
  Sense strand starting at position 699 of SEQ ID NO: 1883238
gauugcuucugaguaacca

SEQ ID NO: 2179015 - RNA, 19 nt, Artificial Sequence
  Description of Artificial Sequence: Synthetic oligonucleotide
  Antisense strand to SEQ ID NO: 2179014
ugguuacucagaagcaauc

SEQ ID NO: 2179016 - RNA, 19 nt, Artificial Sequence
  Description of Artificial Sequence: Synthetic oligonucleotide
  Sense strand starting at position 700 of SEQ ID NO: 1883238
auugcuucugaguaaccaa

SEQ ID NO: 2179017 - RNA, 19 nt, Artificial Sequence
  Description of Artificial Sequence: Synthetic oligonucleotide
  Antisense strand to SEQ ID NO: 2179016
uugguuacucagaagcaau

SEQ ID NO: 2179018 - RNA, 19 nt, Artificial Sequence
  Description of Artificial Sequence: Synthetic oligonucleotide
  Sense strand starting at position 786 of SEQ ID NO: 1883238
gcuugcucccacugagaau

SEQ ID NO: 2179019 - RNA, 19 nt, Artificial Sequence
  Description of Artificial Sequence: Synthetic oligonucleotide
  Antisense strand to SEQ ID NO: 2179018
auucucagugggagcaagc

SEQ ID NO: 2179020 - RNA, 19 nt, Artificial Sequence
  Description of Artificial Sequence: Synthetic oligonucleotide
  Sense strand starting at position 895 of SEQ ID NO: 1883238
acgcauauuuaagaaucaa

SEQ ID NO: 2179021 - RNA, 19 nt, Artificial Sequence
  Description of Artificial Sequence: Synthetic oligonucleotide
  Antisense strand to SEQ ID NO: 2179020
uugauucuuaaauaugcgu

SEQ ID NO: 2179022 - RNA, 19 nt, Artificial Sequence
  Description of Artificial Sequence: Synthetic oligonucleotide
  Sense strand starting at position 1063 of SEQ ID NO: 1883238
ggcaccuaucaacgccaua

SEQ ID NO: 2179023 - RNA, 19 nt, Artificial Sequence
  Description of Artificial Sequence: Synthetic oligonucleotide
  Antisense strand to SEQ ID NO: 2179022
uauggcguugauaggugcc

SEQ ID NO: 2179024 - RNA, 19 nt, Artificial Sequence
  Description of Artificial Sequence: Synthetic oligonucleotide
  Sense strand starting at position 1076 of SEQ ID NO: 1883238
gccauaucuccagggccaa

SEQ ID NO: 2179025 - RNA, 19 nt, Artificial Sequence
  Description of Artificial Sequence: Synthetic oligonucleotide
  Antisense strand to SEQ ID NO: 2179024
uuggcccuggagauauggc

SEQ ID NO: 2179026 - RNA, 19 nt, Artificial Sequence
  Description of Artificial Sequence: Synthetic oligonucleotide
  Sense strand starting at position 1264 of SEQ ID NO: 1883238
cugcuuucuugccuaagaa

SEQ ID NO: 2179027 - RNA, 19 nt, Artificial Sequence
  Description of Artificial Sequence: Synthetic oligonucleotide
  Antisense strand to SEQ ID NO: 2179026
uucuuaggcaagaaagcag

SEQ ID NO: 2179028 - RNA, 19 nt, Artificial Sequence
  Description of Artificial Sequence: Synthetic oligonucleotide
  Sense strand starting at position 1265 of SEQ ID NO: 1883238
ugcuuucuugccuaagaau

SEQ ID NO: 2179029 - RNA, 19 nt, Artificial Sequence
  Description of Artificial Sequence: Synthetic oligonucleotide
  Antisense strand to SEQ ID NO: 2179028
auucuuaggcaagaaagca

SEQ ID NO: 2179030 - RNA, 19 nt, Artificial Sequence
  Description of Artificial Sequence: Synthetic oligonucleotide
  Sense strand starting at position 1274 of SEQ ID NO: 1883238
gccuaagaauucccuguga

SEQ ID NO: 2179031 - RNA, 19 nt, Artificial Sequence
  Description of Artificial Sequence: Synthetic oligonucleotide
  Antisense strand to SEQ ID NO: 2179030
ucacagggaauucuuaggc

SEQ ID NO: 2179032 - RNA, 19 nt, Artificial Sequence
  Description of Artificial Sequence: Synthetic oligonucleotide
  Sense strand starting at position 1276 of SEQ ID NO: 1883238
cuaagaauucccugugaca

SEQ ID NO: 2179033 - RNA, 19 nt, Artificial Sequence
  Description of Artificial Sequence: Synthetic oligonucleotide
  Antisense strand to SEQ ID NO: 2179032
ugucacagggaauucuuag

SEQ ID NO: 2179034 - RNA, 19 nt, Artificial Sequence
  Description of Artificial Sequence: Synthetic oligonucleotide
  Sense strand starting at position 1332 of SEQ ID NO: 1883238
ucuagaaucuuagaacaag

SEQ ID NO: 2179035 - RNA, 19 nt, Artificial Sequence
  Description of Artificial Sequence: Synthetic oligonucleotide
  Antisense strand to SEQ ID NO: 2179034
cuuguucuaagauucuaga

SEQ ID NO: 2179036 - RNA, 19 nt, Artificial Sequence
  Description of Artificial Sequence: Synthetic oligonucleotide
  Sense strand starting at position 1367 of SEQ ID NO: 1883238
ucauauuuguuuggaugaa

SEQ ID NO: 2179037 - RNA, 19 nt, Artificial Sequence
  Description of Artificial Sequence: Synthetic oligonucleotide
  Antisense strand to SEQ ID NO: 2179036
uucauccaaacaaauauga

SEQ ID NO: 2179038 - RNA, 19 nt, Artificial Sequence
  Description of Artificial Sequence: Synthetic oligonucleotide
  Sense strand starting at position 1368 of SEQ ID NO: 1883238
cauauuuguuuggaugaaa

SEQ ID NO: 2179039 - RNA, 19 nt, Artificial Sequence
  Description of Artificial Sequence: Synthetic oligonucleotide
  Antisense strand to SEQ ID NO: 2179038
uuucauccaaacaaauaug

SEQ ID NO: 2179040 - RNA, 19 nt, Artificial Sequence
  Description of Artificial Sequence: Synthetic oligonucleotide
  Sense strand starting at position 1703 of SEQ ID NO: 1883238
gugucucagguccacaaua

SEQ ID NO: 2179041 - RNA, 19 nt, Artificial Sequence
  Description of Artificial Sequence: Synthetic oligonucleotide
  Antisense strand to SEQ ID NO: 2179040
uauuguggaccugagacac

SEQ ID NO: 2179042 - RNA, 19 nt, Artificial Sequence
  Description of Artificial Sequence: Synthetic oligonucleotide
  Sense strand starting at position 1705 of SEQ ID NO: 1883238
gucucagguccacaauacu

SEQ ID NO: 2179043 - RNA, 19 nt, Artificial Sequence
  Description of Artificial Sequence: Synthetic oligonucleotide
  Antisense strand to SEQ ID NO: 2179042
aguauuguggaccugagac

SEQ ID NO: 2179044 - RNA, 19 nt, Artificial Sequence
  Description of Artificial Sequence: Synthetic oligonucleotide
  Sense strand starting at position 1775 of SEQ ID NO: 1883238
aaauuagguguugguuaaa

SEQ ID NO: 2179045 - RNA, 19 nt, Artificial Sequence
  Description of Artificial Sequence: Synthetic oligonucleotide
  Antisense strand to SEQ ID NO: 2179044
uuuaaccaacaccuaauuu

SEQ ID NO: 2179046 - RNA, 19 nt, Artificial Sequence
  Description of Artificial Sequence: Synthetic oligonucleotide
  Sense strand starting at position 1778 of SEQ ID NO: 1883238
uuagguguugguuaaagaa

SEQ ID NO: 2179047 - RNA, 19 nt, Artificial Sequence
  Description of Artificial Sequence: Synthetic oligonucleotide
  Antisense strand to SEQ ID NO: 2179046
uucuuuaaccaacaccuaa

SEQ ID NO: 2179048 - RNA, 19 nt, Artificial Sequence
  Description of Artificial Sequence: Synthetic oligonucleotide
  Sense strand starting at position 1832 of SEQ ID NO: 1883238
uaugucaguguugguauaa

SEQ ID NO: 2179049 - RNA, 19 nt, Artificial Sequence
  Description of Artificial Sequence: Synthetic oligonucleotide
  Antisense strand to SEQ ID NO: 2179048
uuauaccaacacugacaua

SEQ ID NO: 2179050 - RNA, 19 nt, Artificial Sequence
  Description of Artificial Sequence: Synthetic oligonucleotide
  Sense strand starting at position 1847 of SEQ ID NO: 1883238
auaaaugcguguuuaugaa

SEQ ID NO: 2179051 - RNA, 19 nt, Artificial Sequence
  Description of Artificial Sequence: Synthetic oligonucleotide
  Antisense strand to SEQ ID NO: 2179050
uucauaaacacgcauuuau

SEQ ID NO: 2179052 - RNA, 19 nt, Artificial Sequence
  Description of Artificial Sequence: Synthetic oligonucleotide
  Sense strand starting at position 1952 of SEQ ID NO: 1883238
uuugaaugauuccuaggua

SEQ ID NO: 2179053 - RNA, 19 nt, Artificial Sequence
  Description of Artificial Sequence: Synthetic oligonucleotide
  Antisense strand to SEQ ID NO: 2179052
uaccuaggaaucauucaaa

SEQ ID NO: 2179054 - RNA, 19 nt, Artificial Sequence
  Description of Artificial Sequence: Synthetic oligonucleotide
  Sense strand starting at position 1955 of SEQ ID NO: 1883238
gaaugauuccuagguaugc

SEQ ID NO: 2179055 - RNA, 19 nt, Artificial Sequence
  Description of Artificial Sequence: Synthetic oligonucleotide
  Antisense strand to SEQ ID NO: 2179054
gcauaccuaggaaucauuc

SEQ ID NO: 2179056 - RNA, 19 nt, Artificial Sequence
  Description of Artificial Sequence: Synthetic oligonucleotide
  Sense strand starting at position 1959 of SEQ ID NO: 1883238
gauuccuagguaugccaga

SEQ ID NO: 2179057 - RNA, 19 nt, Artificial Sequence
  Description of Artificial Sequence: Synthetic oligonucleotide
  Antisense strand to SEQ ID NO: 2179056
ucuggcauaccuaggaauc

SEQ ID NO: 2179058 - RNA, 19 nt, Artificial Sequence
  Description of Artificial Sequence: Synthetic oligonucleotide
  Sense strand starting at position 1964 of SEQ ID NO: 1883238
cuagguaugccagaugcca

SEQ ID NO: 2179059 - RNA, 19 nt, Artificial Sequence
  Description of Artificial Sequence: Synthetic oligonucleotide
  Antisense strand to SEQ ID NO: 2179058
uggcaucuggcauaccuag

SEQ ID NO: 2179060 - RNA, 19 nt, Artificial Sequence
  Description of Artificial Sequence: Synthetic oligonucleotide
  Sense strand starting at position 1966 of SEQ ID NO: 1883238
agguaugccagaugccaau

SEQ ID NO: 2179061 - RNA, 19 nt, Artificial Sequence
  Description of Artificial Sequence: Synthetic oligonucleotide
  Antisense strand to SEQ ID NO: 2179060
auuggcaucuggcauaccu

SEQ ID NO: 2179062 - RNA, 19 nt, Artificial Sequence
  Description of Artificial Sequence: Synthetic oligonucleotide
  Sense strand starting at position 2006 of SEQ ID NO: 1883238
cgucucaugucuuuggaag

SEQ ID NO: 2179063 - RNA, 19 nt, Artificial Sequence
  Description of Artificial Sequence: Synthetic oligonucleotide
  Antisense strand to SEQ ID NO: 2179062
cuuccaaagacaugagacg

SEQ ID NO: 2179064 - RNA, 19 nt, Artificial Sequence
  Description of Artificial Sequence: Synthetic oligonucleotide
  Sense strand starting at position 2007 of SEQ ID NO: 1883238
gucucaugucuuuggaaga

SEQ ID NO: 2179065 - RNA, 19 nt, Artificial Sequence
  Description of Artificial Sequence: Synthetic oligonucleotide
  Antisense strand to SEQ ID NO: 2179064
ucuuccaaagacaugagac

SEQ ID NO: 2179066 - RNA, 19 nt, Artificial Sequence
  Description of Artificial Sequence: Synthetic oligonucleotide
  Sense strand starting at position 2160 of SEQ ID NO: 1883238
agaugagcgcuucauguaa

SEQ ID NO: 2179067 - RNA, 19 nt, Artificial Sequence
  Description of Artificial Sequence: Synthetic oligonucleotide
  Antisense strand to SEQ ID NO: 2179066
uuacaugaagcgcucaucu

SEQ ID NO: 2179068 - RNA, 19 nt, Artificial Sequence
  Description of Artificial Sequence: Synthetic oligonucleotide
  Sense strand starting at position 2335 of SEQ ID NO: 1883238
cuaggaucguaucccuauu

SEQ ID NO: 2179069 - RNA, 19 nt, Artificial Sequence
  Description of Artificial Sequence: Synthetic oligonucleotide
  Antisense strand to SEQ ID NO: 2179068
aauagggauacgauccuag

SEQ ID NO: 2179070 - RNA, 19 nt, Artificial Sequence
  Description of Artificial Sequence: Synthetic oligonucleotide
  Sense strand starting at position 3445 of SEQ ID NO: 1883238
guugaucgcagagaaauua

SEQ ID NO: 2179071 - RNA, 19 nt, Artificial Sequence
  Description of Artificial Sequence: Synthetic oligonucleotide
  Antisense strand to SEQ ID NO: 2179070
uaauuucucugcgaucaac

SEQ ID NO: 2179072 - RNA, 19 nt, Artificial Sequence
  Description of Artificial Sequence: Synthetic oligonucleotide
  Sense strand starting at position 3664 of SEQ ID NO: 1883238
uuaucuuggccucagaucu

SEQ ID NO: 2179073 - RNA, 19 nt, Artificial Sequence
  Description of Artificial Sequence: Synthetic oligonucleotide
  Antisense strand to SEQ ID NO: 2179072
agaucugaggccaagauaa

SEQ ID NO: 2179074 - RNA, 19 nt, Artificial Sequence
  Description of Artificial Sequence: Synthetic oligonucleotide
  Sense strand starting at position 3768 of SEQ ID NO: 1883238
gggaacccugacgguuaaa

SEQ ID NO: 2179075 - RNA, 19 nt, Artificial Sequence
  Description of Artificial Sequence: Synthetic oligonucleotide
  Antisense strand to SEQ ID NO: 2179074
uuuaaccgucaggguuccc

SEQ ID NO: 2179076 - RNA, 19 nt, Artificial Sequence
  Description of Artificial Sequence: Synthetic oligonucleotide
  Sense strand starting at position 3824 of SEQ ID NO: 1883238
uccagaccuccuugaaugu

SEQ ID NO: 2179077 - RNA, 19 nt, Artificial Sequence
  Description of Artificial Sequence: Synthetic oligonucleotide
  Antisense strand to SEQ ID NO: 2179076
acauucaaggaggucugga

SEQ ID NO: 2179078 - RNA, 19 nt, Artificial Sequence
  Description of Artificial Sequence: Synthetic oligonucleotide
  Sense strand starting at position 3831 of SEQ ID NO: 1883238
cuccuugaaugucuuaagu

SEQ ID NO: 2179079 - RNA, 19 nt, Artificial Sequence
  Description of Artificial Sequence: Synthetic oligonucleotide
  Antisense strand to SEQ ID NO: 2179078
acuuaagacauucaaggag

SEQ ID NO: 2179080 - RNA, 19 nt, Artificial Sequence
  Description of Artificial Sequence: Synthetic oligonucleotide
  Sense strand starting at position 3889 of SEQ ID NO: 1883238
auuagugucugcccgauuu

SEQ ID NO: 2179081 - RNA, 19 nt, Artificial Sequence
  Description of Artificial Sequence: Synthetic oligonucleotide
  Antisense strand to SEQ ID NO: 2179080
aaaucgggcagacacuaau

SEQ ID NO: 2179082 - RNA, 19 nt, Artificial Sequence
  Description of Artificial Sequence: Synthetic oligonucleotide
  Sense strand starting at position 3957 of SEQ ID NO: 1883238
agcacucagugaucuaaga

SEQ ID NO: 2179083 - RNA, 19 nt, Artificial Sequence
  Description of Artificial Sequence: Synthetic oligonucleotide
  Antisense strand to SEQ ID NO: 2179082
ucuuagaucacugagugcu

SEQ ID NO: 2179084 - RNA, 19 nt, Artificial Sequence
  Description of Artificial Sequence: Synthetic oligonucleotide
  Sense strand starting at position 129 of SEQ ID NO: 1883241
augucuuugguauagaaac

SEQ ID NO: 2179085 - RNA, 19 nt, Artificial Sequence
  Description of Artificial Sequence: Synthetic oligonucleotide
  Antisense strand to SEQ ID NO: 2179084
guuucuauaccaaagacau

SEQ ID NO: 2179086 - RNA, 19 nt, Artificial Sequence
  Description of Artificial Sequence: Synthetic oligonucleotide
  Sense strand starting at position 156 of SEQ ID NO: 1883241
augugugaucuuuaacuaa

SEQ ID NO: 2179087 - RNA, 19 nt, Artificial Sequence
  Description of Artificial Sequence: Synthetic oligonucleotide
  Antisense strand to SEQ ID NO: 2179086
uuaguuaaagaucacacau

SEQ ID NO: 2179088 - RNA, 19 nt, Artificial Sequence
  Description of Artificial Sequence: Synthetic oligonucleotide
  Sense strand starting at position 159 of SEQ ID NO: 1883241
ugugaucuuuaacuaagaa

SEQ ID NO: 2179089 - RNA, 19 nt, Artificial Sequence
  Description of Artificial Sequence: Synthetic oligonucleotide
  Antisense strand to SEQ ID NO: 2179088
uucuuaguuaaagaucaca

SEQ ID NO: 2179090 - RNA, 19 nt, Artificial Sequence
  Description of Artificial Sequence: Synthetic oligonucleotide
  Sense strand starting at position 359 of SEQ ID NO: 1883241
uggcuuauccuugacacau

SEQ ID NO: 2179091 - RNA, 19 nt, Artificial Sequence
  Description of Artificial Sequence: Synthetic oligonucleotide
  Antisense strand to SEQ ID NO: 2179090
augugucaaggauaagcca

SEQ ID NO: 2179092 - RNA, 19 nt, Artificial Sequence
  Description of Artificial Sequence: Synthetic oligonucleotide
  Sense strand starting at position 422 of SEQ ID NO: 1883241
agaacauugucacuaaggu

SEQ ID NO: 2179093 - RNA, 19 nt, Artificial Sequence
  Description of Artificial Sequence: Synthetic oligonucleotide
  Antisense strand to SEQ ID NO: 2179092
accuuagugacaauguucu

SEQ ID NO: 2179094 - RNA, 19 nt, Artificial Sequence
  Description of Artificial Sequence: Synthetic oligonucleotide
  Sense strand starting at position 423 of SEQ ID NO: 1883241
gaacauugucacuaagguc

SEQ ID NO: 2179095 - RNA, 19 nt, Artificial Sequence
  Description of Artificial Sequence: Synthetic oligonucleotide
  Antisense strand to SEQ ID NO: 2179094
gaccuuagugacaauguuc

SEQ ID NO: 2179096 - RNA, 19 nt, Artificial Sequence
  Description of Artificial Sequence: Synthetic oligonucleotide
  Sense strand starting at position 468 of SEQ ID NO: 1883241
uuaaguuugaugcauugga

SEQ ID NO: 2179097 - RNA, 19 nt, Artificial Sequence
  Description of Artificial Sequence: Synthetic oligonucleotide
  Antisense strand to SEQ ID NO: 2179096
uccaaugcaucaaacuuaa

SEQ ID NO: 2179098 - RNA, 19 nt, Artificial Sequence
  Description of Artificial Sequence: Synthetic oligonucleotide
  Sense strand starting at position 548 of SEQ ID NO: 1883241
ccauaaauuugauaaggca

SEQ ID NO: 2179099 - RNA, 19 nt, Artificial Sequence
  Description of Artificial Sequence: Synthetic oligonucleotide
  Antisense strand to SEQ ID NO: 2179098
ugccuuaucaaauuuaugg

SEQ ID NO: 2179100 - RNA, 19 nt, Artificial Sequence
  Description of Artificial Sequence: Synthetic oligonucleotide
  Sense strand starting at position 654 of SEQ ID NO: 1883241
gcauucuuucuagauaguc

SEQ ID NO: 2179101 - RNA, 19 nt, Artificial Sequence
  Description of Artificial Sequence: Synthetic oligonucleotide
  Antisense strand to SEQ ID NO: 2179100
gacuaucuagaaagaaugc

SEQ ID NO: 2179102 - RNA, 19 nt, Artificial Sequence
  Description of Artificial Sequence: Synthetic oligonucleotide
  Sense strand starting at position 971 of SEQ ID NO: 1883241
ucauuagcccuagagaacu

SEQ ID NO: 2179103 - RNA, 19 nt, Artificial Sequence
  Description of Artificial Sequence: Synthetic oligonucleotide
  Antisense strand to SEQ ID NO: 2179102
aguucucuagggcuaauga

SEQ ID NO: 2179104 - RNA, 19 nt, Artificial Sequence
  Description of Artificial Sequence: Synthetic oligonucleotide
  Sense strand starting at position 1003 of SEQ ID NO: 1883241
cuggaucuaucacuggcaa

SEQ ID NO: 2179105 - RNA, 19 nt, Artificial Sequence
  Description of Artificial Sequence: Synthetic oligonucleotide
  Antisense strand to SEQ ID NO: 2179104
uugccagugauagauccag

SEQ ID NO: 2179106 - RNA, 19 nt, Artificial Sequence
  Description of Artificial Sequence: Synthetic oligonucleotide
  Sense strand starting at position 1229 of SEQ ID NO: 1883241
aaguacuggucagcaacaa

SEQ ID NO: 2179107 - RNA, 19 nt, Artificial Sequence
  Description of Artificial Sequence: Synthetic oligonucleotide
  Antisense strand to SEQ ID NO: 2179106
uuguugcugaccaguacuu

SEQ ID NO: 2179108 - RNA, 19 nt, Artificial Sequence
  Description of Artificial Sequence: Synthetic oligonucleotide
  Sense strand starting at position 1230 of SEQ ID NO: 1883241
aguacuggucagcaacaaa

SEQ ID NO: 2179109 - RNA, 19 nt, Artificial Sequence
  Description of Artificial Sequence: Synthetic oligonucleotide
  Antisense strand to SEQ ID NO: 2179108
uuuguugcugaccaguacu

SEQ ID NO: 2179110 - RNA, 19 nt, Artificial Sequence
  Description of Artificial Sequence: Synthetic oligonucleotide
  Sense strand starting at position 1374 of SEQ ID NO: 1883241
gaggaaguaugaguuauua

SEQ ID NO: 2179111 - RNA, 19 nt, Artificial Sequence
  Description of Artificial Sequence: Synthetic oligonucleotide
  Antisense strand to SEQ ID NO: 2179110
uaauaacucauacuuccuc

SEQ ID NO: 2179112 - RNA, 19 nt, Artificial Sequence
  Description of Artificial Sequence: Synthetic oligonucleotide
  Sense strand starting at position 1871 of SEQ ID NO: 1883241
agcaaagguuuacuccaua

SEQ ID NO: 2179113 - RNA, 19 nt, Artificial Sequence
  Description of Artificial Sequence: Synthetic oligonucleotide
  Antisense strand to SEQ ID NO: 2179112
uauggaguaaaccuuugcu

SEQ ID NO: 2179114 - RNA, 19 nt, Artificial Sequence
  Description of Artificial Sequence: Synthetic oligonucleotide
  Sense strand starting at position 1876 of SEQ ID NO: 1883241
agguuuacuccauagagca

SEQ ID NO: 2179115 - RNA, 19 nt, Artificial Sequence
  Description of Artificial Sequence: Synthetic oligonucleotide
  Antisense strand to SEQ ID NO: 2179114
ugcucuauggaguaaaccu

SEQ ID NO: 2179116 - RNA, 19 nt, Artificial Sequence
  Description of Artificial Sequence: Synthetic oligonucleotide
  Sense strand starting at position 1948 of SEQ ID NO: 1883241
uugggcuugggugaauaua

SEQ ID NO: 2179117 - RNA, 19 nt, Artificial Sequence
  Description of Artificial Sequence: Synthetic oligonucleotide
  Antisense strand to SEQ ID NO: 2179116
uauauucacccaagcccaa

SEQ ID NO: 2179118 - RNA, 19 nt, Artificial Sequence
  Description of Artificial Sequence: Synthetic oligonucleotide
  Sense strand starting at position 1977 of SEQ ID NO: 1883241
ucuguauaucuacauaugu

SEQ ID NO: 2179119 - RNA, 19 nt, Artificial Sequence
  Description of Artificial Sequence: Synthetic oligonucleotide
  Antisense strand to SEQ ID NO: 2179118
acauauguagauauacaga

SEQ ID NO: 2179120 - RNA, 19 nt, Artificial Sequence
  Description of Artificial Sequence: Synthetic oligonucleotide
  Sense strand starting at position 2457 of SEQ ID NO: 1883241
cacugaugucauuacccga

SEQ ID NO: 2179121 - RNA, 19 nt, Artificial Sequence
  Description of Artificial Sequence: Synthetic oligonucleotide
  Antisense strand to SEQ ID NO: 2179120
ucggguaaugacaucagug

SEQ ID NO: 2179122 - RNA, 19 nt, Artificial Sequence
  Description of Artificial Sequence: Synthetic oligonucleotide
  Sense strand starting at position 2460 of SEQ ID NO: 1883241
ugaugucauuacccgaaag

SEQ ID NO: 2179123 - RNA, 19 nt, Artificial Sequence
  Description of Artificial Sequence: Synthetic oligonucleotide
  Antisense strand to SEQ ID NO: 2179122
cuuucggguaaugacauca

SEQ ID NO: 2179124 - RNA, 19 nt, Artificial Sequence
  Description of Artificial Sequence: Synthetic oligonucleotide
  Sense strand starting at position 2462 of SEQ ID NO: 1883241
augucauuacccgaaagcu

SEQ ID NO: 2179125 - RNA, 19 nt, Artificial Sequence
  Description of Artificial Sequence: Synthetic oligonucleotide
  Antisense strand to SEQ ID NO: 2179124
agcuuucggguaaugacau

SEQ ID NO: 2179126 - RNA, 19 nt, Artificial Sequence
  Description of Artificial Sequence: Synthetic oligonucleotide
  Sense strand starting at position 2643 of SEQ ID NO: 1883241
gggcauuugucaucauugu

SEQ ID NO: 2179127 - RNA, 19 nt, Artificial Sequence
  Description of Artificial Sequence: Synthetic oligonucleotide
  Antisense strand to SEQ ID NO: 2179126
acaaugaugacaaaugccc

SEQ ID NO: 2179128 - RNA, 19 nt, Artificial Sequence
  Description of Artificial Sequence: Synthetic oligonucleotide
  Sense strand starting at position 2775 of SEQ ID NO: 1883241
guauucaugugacuuggga

SEQ ID NO: 2179129 - RNA, 19 nt, Artificial Sequence
  Description of Artificial Sequence: Synthetic oligonucleotide
  Antisense strand to SEQ ID NO: 2179128
ucccaagucacaugaauac

SEQ ID NO: 2179130 - RNA, 19 nt, Artificial Sequence
  Description of Artificial Sequence: Synthetic oligonucleotide
  Sense strand starting at position 2860 of SEQ ID NO: 1883241
gugaggaugguggaguuua

SEQ ID NO: 2179131 - RNA, 19 nt, Artificial Sequence
  Description of Artificial Sequence: Synthetic oligonucleotide
  Antisense strand to SEQ ID NO: 2179130
uaaacuccaccauccucac

SEQ ID NO: 2179132 - RNA, 19 nt, Artificial Sequence
  Description of Artificial Sequence: Synthetic oligonucleotide
  Sense strand starting at position 2871 of SEQ ID NO: 1883241
ggaguuuaguggagagaca

SEQ ID NO: 2179133 - RNA, 19 nt, Artificial Sequence
  Description of Artificial Sequence: Synthetic oligonucleotide
  Antisense strand to SEQ ID NO: 2179132
ugucucuccacuaaacucc

SEQ ID NO: 2179134 - RNA, 19 nt, Artificial Sequence
  Description of Artificial Sequence: Synthetic oligonucleotide
  Sense strand starting at position 3004 of SEQ ID NO: 1883241
gcuguucagccagaaagag

SEQ ID NO: 2179135 - RNA, 19 nt, Artificial Sequence
  Description of Artificial Sequence: Synthetic oligonucleotide
  Antisense strand to SEQ ID NO: 2179134
cucuuucuggcugaacagc

SEQ ID NO: 2179136 - RNA, 19 nt, Artificial Sequence
  Description of Artificial Sequence: Synthetic oligonucleotide
  Sense strand starting at position 3025 of SEQ ID NO: 1883241
ccaaguuggugauuauaac

SEQ ID NO: 2179137 - RNA, 19 nt, Artificial Sequence
  Description of Artificial Sequence: Synthetic oligonucleotide
  Antisense strand to SEQ ID NO: 2179136
guuauaaucaccaacuugg

SEQ ID NO: 2179138 - RNA, 19 nt, Artificial Sequence
  Description of Artificial Sequence: Synthetic oligonucleotide
  Sense strand starting at position 3026 of SEQ ID NO: 1883241
caaguuggugauuauaacu

SEQ ID NO: 2179139 - RNA, 19 nt, Artificial Sequence
  Description of Artificial Sequence: Synthetic oligonucleotide
  Antisense strand to SEQ ID NO: 2179138
aguuauaaucaccaacuug

SEQ ID NO: 2179140 - RNA, 19 nt, Artificial Sequence
  Description of Artificial Sequence: Synthetic oligonucleotide
  Sense strand starting at position 3034 of SEQ ID NO: 1883241
ugauuauaacuugggcauu

SEQ ID NO: 2179141 - RNA, 19 nt, Artificial Sequence
  Description of Artificial Sequence: Synthetic oligonucleotide
  Antisense strand to SEQ ID NO: 2179140
aaugcccaaguuauaauca

SEQ ID NO: 2179142 - RNA, 19 nt, Artificial Sequence
  Description of Artificial Sequence: Synthetic oligonucleotide
  Sense strand starting at position 3146 of SEQ ID NO: 1883241
ugcuuaaacugauuagacu

SEQ ID NO: 2179143 - RNA, 19 nt, Artificial Sequence
  Description of Artificial Sequence: Synthetic oligonucleotide
  Antisense strand to SEQ ID NO: 2179142
agucuaaucaguuuaagca

SEQ ID NO: 2179144 - RNA, 19 nt, Artificial Sequence
  Description of Artificial Sequence: Synthetic oligonucleotide
  Sense strand starting at position 3153 of SEQ ID NO: 1883241
acugauuagacucggaucu

SEQ ID NO: 2179145 - RNA, 19 nt, Artificial Sequence
  Description of Artificial Sequence: Synthetic oligonucleotide
  Antisense strand to SEQ ID NO: 2179144
agauccgagucuaaucagu

SEQ ID NO: 2179146 - RNA, 19 nt, Artificial Sequence
  Description of Artificial Sequence: Synthetic oligonucleotide
  Sense strand starting at position 3328 of SEQ ID NO: 1883241
aguguuagauaaccacaga

SEQ ID NO: 2179147 - RNA, 19 nt, Artificial Sequence
  Description of Artificial Sequence: Synthetic oligonucleotide
  Antisense strand to SEQ ID NO: 2179146
ucugugguuaucuaacacu

SEQ ID NO: 2179148 - RNA, 19 nt, Artificial Sequence
  Description of Artificial Sequence: Synthetic oligonucleotide
  Sense strand starting at position 3360 of SEQ ID NO: 1883241
guaugcuuugaguauaauu

SEQ ID NO: 2179149 - RNA, 19 nt, Artificial Sequence
  Description of Artificial Sequence: Synthetic oligonucleotide
  Antisense strand to SEQ ID NO: 2179148
aauuauacucaaagcauac

SEQ ID NO: 2179150 - RNA, 19 nt, Artificial Sequence
  Description of Artificial Sequence: Synthetic oligonucleotide
  Sense strand starting at position 3381 of SEQ ID NO: 1883241
auguaucuugcaggaugaa

SEQ ID NO: 2179151 - RNA, 19 nt, Artificial Sequence
  Description of Artificial Sequence: Synthetic oligonucleotide
  Antisense strand to SEQ ID NO: 2179150
uucauccugcaagauacau

SEQ ID NO: 2179152 - RNA, 19 nt, Artificial Sequence
  Description of Artificial Sequence: Synthetic oligonucleotide
  Sense strand starting at position 3382 of SEQ ID NO: 1883241
uguaucuugcaggaugaau

SEQ ID NO: 2179153 - RNA, 19 nt, Artificial Sequence
  Description of Artificial Sequence: Synthetic oligonucleotide
  Antisense strand to SEQ ID NO: 2179152
auucauccugcaagauaca

SEQ ID NO: 2179154 - RNA, 19 nt, Artificial Sequence
  Description of Artificial Sequence: Synthetic oligonucleotide
  Sense strand starting at position 3391 of SEQ ID NO: 1883241
caggaugaauuugaggauu

SEQ ID NO: 2179155 - RNA, 19 nt, Artificial Sequence
  Description of Artificial Sequence: Synthetic oligonucleotide
  Antisense strand to SEQ ID NO: 2179154
aauccucaaauucauccug

SEQ ID NO: 2179156 - RNA, 19 nt, Artificial Sequence
  Description of Artificial Sequence: Synthetic oligonucleotide
  Sense strand starting at position 3393 of SEQ ID NO: 1883241
ggaugaauuugaggauuau

SEQ ID NO: 2179157 - RNA, 19 nt, Artificial Sequence
  Description of Artificial Sequence: Synthetic oligonucleotide
  Antisense strand to SEQ ID NO: 2179156
auaauccucaaauucaucc

SEQ ID NO: 2179158 - RNA, 19 nt, Artificial Sequence
  Description of Artificial Sequence: Synthetic oligonucleotide
  Sense strand starting at position 3450 of SEQ ID NO: 1883241
uuuaauaggccucaguaaa

SEQ ID NO: 2179159 - RNA, 19 nt, Artificial Sequence
  Description of Artificial Sequence: Synthetic oligonucleotide
  Antisense strand to SEQ ID NO: 2179158
uuuacugaggccuauuaaa

SEQ ID NO: 2179160 - RNA, 19 nt, Artificial Sequence
  Description of Artificial Sequence: Synthetic oligonucleotide
  Sense strand starting at position 3675 of SEQ ID NO: 1883241
cugacaaugcuauggagaa

SEQ ID NO: 2179161 - RNA, 19 nt, Artificial Sequence
  Description of Artificial Sequence: Synthetic oligonucleotide
  Antisense strand to SEQ ID NO: 2179160
uucuccauagcauugucag

SEQ ID NO: 2179162 - RNA, 19 nt, Artificial Sequence
  Description of Artificial Sequence: Synthetic oligonucleotide
  Sense strand starting at position 3912 of SEQ ID NO: 1883241
gauugauaugugcaaaugu

SEQ ID NO: 2179163 - RNA, 19 nt, Artificial Sequence
  Description of Artificial Sequence: Synthetic oligonucleotide
  Antisense strand to SEQ ID NO: 2179162
acauuugcacauaucaauc

SEQ ID NO: 2179164 - RNA, 19 nt, Artificial Sequence
  Description of Artificial Sequence: Synthetic oligonucleotide
  Sense strand starting at position 62 of SEQ ID NO: 1883242
ucaccauugucaguguacu

SEQ ID NO: 2179165 - RNA, 19 nt, Artificial Sequence
  Description of Artificial Sequence: Synthetic oligonucleotide
  Antisense strand to SEQ ID NO: 2179164
aguacacugacaaugguga

SEQ ID NO: 2179166 - RNA, 19 nt, Artificial Sequence
  Description of Artificial Sequence: Synthetic oligonucleotide
  Sense strand starting at position 88 of SEQ ID NO: 1883242
ucucaaaucucagugggaa

SEQ ID NO: 2179167 - RNA, 19 nt, Artificial Sequence
  Description of Artificial Sequence: Synthetic oligonucleotide
  Antisense strand to SEQ ID NO: 2179166
uucccacugagauuugaga

SEQ ID NO: 2179168 - RNA, 19 nt, Artificial Sequence
  Description of Artificial Sequence: Synthetic oligonucleotide
  Sense strand starting at position 89 of SEQ ID NO: 1883242
cucaaaucucagugggaaa

SEQ ID NO: 2179169 - RNA, 19 nt, Artificial Sequence
  Description of Artificial Sequence: Synthetic oligonucleotide
  Antisense strand to SEQ ID NO: 2179168
uuucccacugagauuugag

SEQ ID NO: 2179170 - RNA, 19 nt, Artificial Sequence
  Description of Artificial Sequence: Synthetic oligonucleotide
  Sense strand starting at position 205 of SEQ ID NO: 1883242
ggaccucuuuaugcuggaa

SEQ ID NO: 2179171 - RNA, 19 nt, Artificial Sequence
  Description of Artificial Sequence: Synthetic oligonucleotide
  Antisense strand to SEQ ID NO: 2179170
uuccagcauaaagaggucc

SEQ ID NO: 2179172 - RNA, 19 nt, Artificial Sequence
  Description of Artificial Sequence: Synthetic oligonucleotide
  Sense strand starting at position 208 of SEQ ID NO: 1883242
ccucuuuaugcuggaaucu

SEQ ID NO: 2179173 - RNA, 19 nt, Artificial Sequence
  Description of Artificial Sequence: Synthetic oligonucleotide
  Antisense strand to SEQ ID NO: 2179172
agauuccagcauaaagagg

SEQ ID NO: 2179174 - RNA, 19 nt, Artificial Sequence
  Description of Artificial Sequence: Synthetic oligonucleotide
  Sense strand starting at position 346 of SEQ ID NO: 1883242
uugauuaugucucauuuag

SEQ ID NO: 2179175 - RNA, 19 nt, Artificial Sequence
  Description of Artificial Sequence: Synthetic oligonucleotide
  Antisense strand to SEQ ID NO: 2179174
cuaaaugagacauaaucaa

SEQ ID NO: 2179176 - RNA, 19 nt, Artificial Sequence
  Description of Artificial Sequence: Synthetic oligonucleotide
  Sense strand starting at position 690 of SEQ ID NO: 1883242
ccagaaguucgagauugca

SEQ ID NO: 2179177 - RNA, 19 nt, Artificial Sequence
  Description of Artificial Sequence: Synthetic oligonucleotide
  Antisense strand to SEQ ID NO: 2179176
ugcaaucucgaacuucugg

SEQ ID NO: 2179178 - RNA, 19 nt, Artificial Sequence
  Description of Artificial Sequence: Synthetic oligonucleotide
  Sense strand starting at position 970 of SEQ ID NO: 1883242
agggcaaucuacuugauau

SEQ ID NO: 2179179 - RNA, 19 nt, Artificial Sequence
  Description of Artificial Sequence: Synthetic oligonucleotide
  Antisense strand to SEQ ID NO: 2179178
auaucaaguagauugcccu

SEQ ID NO: 2179180 - RNA, 19 nt, Artificial Sequence
  Description of Artificial Sequence: Synthetic oligonucleotide
  Sense strand starting at position 971 of SEQ ID NO: 1883242
gggcaaucuacuugauaug

SEQ ID NO: 2179181 - RNA, 19 nt, Artificial Sequence
  Description of Artificial Sequence: Synthetic oligonucleotide
  Antisense strand to SEQ ID NO: 2179180
cauaucaaguagauugccc

SEQ ID NO: 2179182 - RNA, 19 nt, Artificial Sequence
  Description of Artificial Sequence: Synthetic oligonucleotide
  Sense strand starting at position 1280 of SEQ ID NO: 1883242
ccuggcuuaccugaagaau

SEQ ID NO: 2179183 - RNA, 19 nt, Artificial Sequence
  Description of Artificial Sequence: Synthetic oligonucleotide
  Antisense strand to SEQ ID NO: 2179182
auucuucagguaagccagg

SEQ ID NO: 2179184 - RNA, 19 nt, Artificial Sequence
  Description of Artificial Sequence: Synthetic oligonucleotide
  Sense strand starting at position 2256 of SEQ ID NO: 1883242
aguuguguuccauauugga

SEQ ID NO: 2179185 - RNA, 19 nt, Artificial Sequence
  Description of Artificial Sequence: Synthetic oligonucleotide
  Antisense strand to SEQ ID NO: 2179184
uccaauauggaacacaacu

SEQ ID NO: 2179186 - RNA, 19 nt, Artificial Sequence
  Description of Artificial Sequence: Synthetic oligonucleotide
  Sense strand starting at position 2261 of SEQ ID NO: 1883242
uguuccauauuggaauuua

SEQ ID NO: 2179187 - RNA, 19 nt, Artificial Sequence
  Description of Artificial Sequence: Synthetic oligonucleotide
  Antisense strand to SEQ ID NO: 2179186
uaaauuccaauauggaaca

SEQ ID NO: 2179188 - RNA, 19 nt, Artificial Sequence
  Description of Artificial Sequence: Synthetic oligonucleotide
  Sense strand starting at position 2320 of SEQ ID NO: 1883242
ugucaagagcaauaacuau

SEQ ID NO: 2179189 - RNA, 19 nt, Artificial Sequence
  Description of Artificial Sequence: Synthetic oligonucleotide
  Antisense strand to SEQ ID NO: 2179188
auaguuauugcucuugaca

SEQ ID NO: 2179190 - RNA, 19 nt, Artificial Sequence
  Description of Artificial Sequence: Synthetic oligonucleotide
  Sense strand starting at position 2388 of SEQ ID NO: 1883242
agcuaauagcauuagugaa

SEQ ID NO: 2179191 - RNA, 19 nt, Artificial Sequence
  Description of Artificial Sequence: Synthetic oligonucleotide
  Antisense strand to SEQ ID NO: 2179190
uucacuaaugcuauuagcu

SEQ ID NO: 2179192 - RNA, 19 nt, Artificial Sequence
  Description of Artificial Sequence: Synthetic oligonucleotide
  Sense strand starting at position 2390 of SEQ ID NO: 1883242
cuaauagcauuagugaaag

SEQ ID NO: 2179193 - RNA, 19 nt, Artificial Sequence
  Description of Artificial Sequence: Synthetic oligonucleotide
  Antisense strand to SEQ ID NO: 2179192
cuuucacuaaugcuauuag

SEQ ID NO: 2179194 - RNA, 19 nt, Artificial Sequence
  Description of Artificial Sequence: Synthetic oligonucleotide
  Sense strand starting at position 2408 of SEQ ID NO: 1883242
gagaacacugccugagcaa

SEQ ID NO: 2179195 - RNA, 19 nt, Artificial Sequence
  Description of Artificial Sequence: Synthetic oligonucleotide
  Antisense strand to SEQ ID NO: 2179194
uugcucaggcaguguucuc

SEQ ID NO: 2179196 - RNA, 19 nt, Artificial Sequence
  Description of Artificial Sequence: Synthetic oligonucleotide
  Sense strand starting at position 2409 of SEQ ID NO: 1883242
agaacacugccugagcaau

SEQ ID NO: 2179197 - RNA, 19 nt, Artificial Sequence
  Description of Artificial Sequence: Synthetic oligonucleotide
  Antisense strand to SEQ ID NO: 2179196
auugcucaggcaguguucu

SEQ ID NO: 2179198 - RNA, 19 nt, Artificial Sequence
  Description of Artificial Sequence: Synthetic oligonucleotide
  Sense strand starting at position 2559 of SEQ ID NO: 1883242
ccuguuaucccggugcuuu

SEQ ID NO: 2179199 - RNA, 19 nt, Artificial Sequence
  Description of Artificial Sequence: Synthetic oligonucleotide
  Antisense strand to SEQ ID NO: 2179198
aaagcaccgggauaacagg

SEQ ID NO: 2179200 - RNA, 19 nt, Artificial Sequence
  Description of Artificial Sequence: Synthetic oligonucleotide
  Sense strand starting at position 2573 of SEQ ID NO: 1883242
gcuuuaggaggcugaagua

SEQ ID NO: 2179201 - RNA, 19 nt, Artificial Sequence
  Description of Artificial Sequence: Synthetic oligonucleotide
  Antisense strand to SEQ ID NO: 2179200
uacuucagccuccuaaagc

SEQ ID NO: 2179202 - RNA, 19 nt, Artificial Sequence
  Description of Artificial Sequence: Synthetic oligonucleotide
  Sense strand starting at position 2685 of SEQ ID NO: 1883242
agcguaacucaagagaauu

SEQ ID NO: 2179203 - RNA, 19 nt, Artificial Sequence
  Description of Artificial Sequence: Synthetic oligonucleotide
  Antisense strand to SEQ ID NO: 2179202
aauucucuugaguuacgcu

SEQ ID NO: 2179204 - RNA, 19 nt, Artificial Sequence
  Description of Artificial Sequence: Synthetic oligonucleotide
  Sense strand starting at position 2708 of SEQ ID NO: 1883242
ggcggucuugccucguuau

SEQ ID NO: 2179205 - RNA, 19 nt, Artificial Sequence
  Description of Artificial Sequence: Synthetic oligonucleotide
  Antisense strand to SEQ ID NO: 2179204
auaacgaggcaagaccgcc

SEQ ID NO: 2179206 - RNA, 19 nt, Artificial Sequence
  Description of Artificial Sequence: Synthetic oligonucleotide
  Sense strand starting at position 2719 of SEQ ID NO: 1883242
cucguuauccuggcguuua

SEQ ID NO: 2179207 - RNA, 19 nt, Artificial Sequence
  Description of Artificial Sequence: Synthetic oligonucleotide
  Antisense strand to SEQ ID NO: 2179206
uaaacgccaggauaacgag

SEQ ID NO: 2179208 - RNA, 19 nt, Artificial Sequence
  Description of Artificial Sequence: Synthetic oligonucleotide
  Sense strand starting at position 2722 of SEQ ID NO: 1883242
guuauccuggcguuuacuu

SEQ ID NO: 2179209 - RNA, 19 nt, Artificial Sequence
  Description of Artificial Sequence: Synthetic oligonucleotide
  Antisense strand to SEQ ID NO: 2179208
aaguaaacgccaggauaac

SEQ ID NO: 2179210 - RNA, 19 nt, Artificial Sequence
  Description of Artificial Sequence: Synthetic oligonucleotide
  Sense strand starting at position 2955 of SEQ ID NO: 1883242
aaguauugugaauaaugca

SEQ ID NO: 2179211 - RNA, 19 nt, Artificial Sequence
  Description of Artificial Sequence: Synthetic oligonucleotide
  Antisense strand to SEQ ID NO: 2179210
ugcauuauucacaauacuu

SEQ ID NO: 2179212 - RNA, 19 nt, Artificial Sequence
  Description of Artificial Sequence: Synthetic oligonucleotide
  Sense strand starting at position 3003 of SEQ ID NO: 1883242
cuggaagugaugugcccua

SEQ ID NO: 2179213 - RNA, 19 nt, Artificial Sequence
  Description of Artificial Sequence: Synthetic oligonucleotide
  Antisense strand to SEQ ID NO: 2179212
uagggcacaucacuuccag

SEQ ID NO: 2179214 - RNA, 19 nt, Artificial Sequence
  Description of Artificial Sequence: Synthetic oligonucleotide
  Sense strand starting at position 3008 of SEQ ID NO: 1883242
agugaugugcccuagauug

SEQ ID NO: 2179215 - RNA, 19 nt, Artificial Sequence
  Description of Artificial Sequence: Synthetic oligonucleotide
  Antisense strand to SEQ ID NO: 2179214
caaucuagggcacaucacu

SEQ ID NO: 2179216 - RNA, 19 nt, Artificial Sequence
  Description of Artificial Sequence: Synthetic oligonucleotide
  Sense strand starting at position 3010 of SEQ ID NO: 1883242
ugaugugcccuagauugau

SEQ ID NO: 2179217 - RNA, 19 nt, Artificial Sequence
  Description of Artificial Sequence: Synthetic oligonucleotide
  Antisense strand to SEQ ID NO: 2179216
aucaaucuagggcacauca

SEQ ID NO: 2179218 - RNA, 19 nt, Artificial Sequence
  Description of Artificial Sequence: Synthetic oligonucleotide
  Sense strand starting at position 3014 of SEQ ID NO: 1883242
gugcccuagauugauagua

SEQ ID NO: 2179219 - RNA, 19 nt, Artificial Sequence
  Description of Artificial Sequence: Synthetic oligonucleotide
  Antisense strand to SEQ ID NO: 2179218
uacuaucaaucuagggcac

SEQ ID NO: 2179220 - RNA, 19 nt, Artificial Sequence
  Description of Artificial Sequence: Synthetic oligonucleotide
  Sense strand starting at position 3036 of SEQ ID NO: 1883242
ggaaucuauuuguauaccu

SEQ ID NO: 2179221 - RNA, 19 nt, Artificial Sequence
  Description of Artificial Sequence: Synthetic oligonucleotide
  Antisense strand to SEQ ID NO: 2179220
agguauacaaauagauucc

SEQ ID NO: 2179222 - RNA, 19 nt, Artificial Sequence
  Description of Artificial Sequence: Synthetic oligonucleotide
  Sense strand starting at position 3043 of SEQ ID NO: 1883242
auuuguauaccucgcagau

SEQ ID NO: 2179223 - RNA, 19 nt, Artificial Sequence
  Description of Artificial Sequence: Synthetic oligonucleotide
  Antisense strand to SEQ ID NO: 2179222
aucugcgagguauacaaau

SEQ ID NO: 2179224 - RNA, 19 nt, Artificial Sequence
  Description of Artificial Sequence: Synthetic oligonucleotide
  Sense strand starting at position 3047 of SEQ ID NO: 1883242
guauaccucgcagauuauu

SEQ ID NO: 2179225 - RNA, 19 nt, Artificial Sequence
  Description of Artificial Sequence: Synthetic oligonucleotide
  Antisense strand to SEQ ID NO: 2179224
aauaaucugcgagguauac

SEQ ID NO: 2179226 - RNA, 19 nt, Artificial Sequence
  Description of Artificial Sequence: Synthetic oligonucleotide
  Sense strand starting at position 3058 of SEQ ID NO: 1883242
agauuauuaugugugagug

SEQ ID NO: 2179227 - RNA, 19 nt, Artificial Sequence
  Description of Artificial Sequence: Synthetic oligonucleotide
  Antisense strand to SEQ ID NO: 2179226
cacucacacauaauaaucu

SEQ ID NO: 2179228 - RNA, 19 nt, Artificial Sequence
  Description of Artificial Sequence: Synthetic oligonucleotide
  Sense strand starting at position 3070 of SEQ ID NO: 1883242
gugaguguauuguucauuu

SEQ ID NO: 2179229 - RNA, 19 nt, Artificial Sequence
  Description of Artificial Sequence: Synthetic oligonucleotide
  Antisense strand to SEQ ID NO: 2179228
aaaugaacaauacacucac

SEQ ID NO: 2179230 - RNA, 19 nt, Artificial Sequence
  Description of Artificial Sequence: Synthetic oligonucleotide
  Sense strand starting at position 3743 of SEQ ID NO: 1883242
cuguuacaggauuagugau

SEQ ID NO: 2179231 - RNA, 19 nt, Artificial Sequence
  Description of Artificial Sequence: Synthetic oligonucleotide
  Antisense strand to SEQ ID NO: 2179230
aucacuaauccuguaacag

SEQ ID NO: 2179232 - RNA, 19 nt, Artificial Sequence
  Description of Artificial Sequence: Synthetic oligonucleotide
  Sense strand starting at position 3756 of SEQ ID NO: 1883242
agugauuccauguguauua

SEQ ID NO: 2179233 - RNA, 19 nt, Artificial Sequence
  Description of Artificial Sequence: Synthetic oligonucleotide
  Antisense strand to SEQ ID NO: 2179232
uaauacacauggaaucacu

SEQ ID NO: 2179234 - RNA, 19 nt, Artificial Sequence
  Description of Artificial Sequence: Synthetic oligonucleotide
  Sense strand starting at position 3757 of SEQ ID NO: 1883242
gugauuccauguguauuaa

SEQ ID NO: 2179235 - RNA, 19 nt, Artificial Sequence
  Description of Artificial Sequence: Synthetic oligonucleotide
  Antisense strand to SEQ ID NO: 2179234
uuaauacacauggaaucac

SEQ ID NO: 2179236 - RNA, 19 nt, Artificial Sequence
  Description of Artificial Sequence: Synthetic oligonucleotide
  Sense strand starting at position 3758 of SEQ ID NO: 1883242
ugauuccauguguauuaau

SEQ ID NO: 2179237 - RNA, 19 nt, Artificial Sequence
  Description of Artificial Sequence: Synthetic oligonucleotide
  Antisense strand to SEQ ID NO: 2179236
auuaauacacauggaauca

SEQ ID NO: 2179238 - RNA, 19 nt, Artificial Sequence
  Description of Artificial Sequence: Synthetic oligonucleotide
  Sense strand starting at position 3780 of SEQ ID NO: 1883242
agcacauuaucuguuccau

SEQ ID NO: 2179239 - RNA, 19 nt, Artificial Sequence
  Description of Artificial Sequence: Synthetic oligonucleotide
  Antisense strand to SEQ ID NO: 2179238
auggaacagauaaugugcu

SEQ ID NO: 2179240 - RNA, 19 nt, Artificial Sequence
  Description of Artificial Sequence: Synthetic oligonucleotide
  Sense strand starting at position 3853 of SEQ ID NO: 1883242
uuucuuuggcaguaaguuu

SEQ ID NO: 2179241 - RNA, 19 nt, Artificial Sequence
  Description of Artificial Sequence: Synthetic oligonucleotide
  Antisense strand to SEQ ID NO: 2179240
aaacuuacugccaaagaaa

SEQ ID NO: 2179242 - RNA, 19 nt, Artificial Sequence
  Description of Artificial Sequence: Synthetic oligonucleotide
  Sense strand starting at position 3983 of SEQ ID NO: 1883242
uuaagucuugcauaguuau

SEQ ID NO: 2179243 - RNA, 19 nt, Artificial Sequence
  Description of Artificial Sequence: Synthetic oligonucleotide
  Antisense strand to SEQ ID NO: 2179242
auaacuaugcaagacuuaa

SEQ ID NO: 2179244 - RNA, 19 nt, Artificial Sequence
  Description of Artificial Sequence: Synthetic oligonucleotide
  Sense strand starting at position 36 of SEQ ID NO: 1883243
ugaggagaguugccuuuaa

SEQ ID NO: 2179245 - RNA, 19 nt, Artificial Sequence
  Description of Artificial Sequence: Synthetic oligonucleotide
  Antisense strand to SEQ ID NO: 2179244
uuaaaggcaacucuccuca

SEQ ID NO: 2179246 - RNA, 19 nt, Artificial Sequence
  Description of Artificial Sequence: Synthetic oligonucleotide
  Sense strand starting at position 240 of SEQ ID NO: 1883243
ccgagucauccacaccaaa

SEQ ID NO: 2179247 - RNA, 19 nt, Artificial Sequence
  Description of Artificial Sequence: Synthetic oligonucleotide
  Antisense strand to SEQ ID NO: 2179246
uuugguguggaugacucgg

SEQ ID NO: 2179248 - RNA, 19 nt, Artificial Sequence
  Description of Artificial Sequence: Synthetic oligonucleotide
  Sense strand starting at position 348 of SEQ ID NO: 1883243
acgacuaccuuccuggaaa

SEQ ID NO: 2179249 - RNA, 19 nt, Artificial Sequence
  Description of Artificial Sequence: Synthetic oligonucleotide
  Antisense strand to SEQ ID NO: 2179248
uuuccaggaagguagucgu

SEQ ID NO: 2179250 - RNA, 19 nt, Artificial Sequence
  Description of Artificial Sequence: Synthetic oligonucleotide
  Sense strand starting at position 550 of SEQ ID NO: 1883243
uaauuagugguagaguaga

SEQ ID NO: 2179251 - RNA, 19 nt, Artificial Sequence
  Description of Artificial Sequence: Synthetic oligonucleotide
  Antisense strand to SEQ ID NO: 2179250
ucuacucuaccacuaauua

SEQ ID NO: 2179252 - RNA, 19 nt, Artificial Sequence
  Description of Artificial Sequence: Synthetic oligonucleotide
  Sense strand starting at position 576 of SEQ ID NO: 1883243
cccagaucugauugcagaa

SEQ ID NO: 2179253 - RNA, 19 nt, Artificial Sequence
  Description of Artificial Sequence: Synthetic oligonucleotide
  Antisense strand to SEQ ID NO: 2179252
uucugcaaucagaucuggg

SEQ ID NO: 2179254 - RNA, 19 nt, Artificial Sequence
  Description of Artificial Sequence: Synthetic oligonucleotide
  Sense strand starting at position 628 of SEQ ID NO: 1883243
cuguuuggucaagaaugga

SEQ ID NO: 2179255 - RNA, 19 nt, Artificial Sequence
  Description of Artificial Sequence: Synthetic oligonucleotide
  Antisense strand to SEQ ID NO: 2179254
uccauucuugaccaaacag

SEQ ID NO: 2179256 - RNA, 19 nt, Artificial Sequence
  Description of Artificial Sequence: Synthetic oligonucleotide
  Sense strand starting at position 642 of SEQ ID NO: 1883243
auggaagacucauugcaug

SEQ ID NO: 2179257 - RNA, 19 nt, Artificial Sequence
  Description of Artificial Sequence: Synthetic oligonucleotide
  Antisense strand to SEQ ID NO: 2179256
caugcaaugagucuuccau

SEQ ID NO: 2179258 - RNA, 19 nt, Artificial Sequence
  Description of Artificial Sequence: Synthetic oligonucleotide
  Sense strand starting at position 887 of SEQ ID NO: 1883243
aguauaacaucugcucaga

SEQ ID NO: 2179259 - RNA, 19 nt, Artificial Sequence
  Description of Artificial Sequence: Synthetic oligonucleotide
  Antisense strand to SEQ ID NO: 2179258
ucugagcagauguuauacu

SEQ ID NO: 2179260 - RNA, 19 nt, Artificial Sequence
  Description of Artificial Sequence: Synthetic oligonucleotide
  Sense strand starting at position 1166 of SEQ ID NO: 1883243
gugauagugcaggaugaua

SEQ ID NO: 2179261 - RNA, 19 nt, Artificial Sequence
  Description of Artificial Sequence: Synthetic oligonucleotide
  Antisense strand to SEQ ID NO: 2179260
uaucauccugcacuaucac

SEQ ID NO: 2179262 - RNA, 19 nt, Artificial Sequence
  Description of Artificial Sequence: Synthetic oligonucleotide
  Sense strand starting at position 1168 of SEQ ID NO: 1883243
gauagugcaggaugauaua

SEQ ID NO: 2179263 - RNA, 19 nt, Artificial Sequence
  Description of Artificial Sequence: Synthetic oligonucleotide
  Antisense strand to SEQ ID NO: 2179262
uauaucauccugcacuauc

SEQ ID NO: 2179264 - RNA, 19 nt, Artificial Sequence
  Description of Artificial Sequence: Synthetic oligonucleotide
  Sense strand starting at position 1197 of SEQ ID NO: 1883243
gggacaucucauggaguac

SEQ ID NO: 2179265 - RNA, 19 nt, Artificial Sequence
  Description of Artificial Sequence: Synthetic oligonucleotide
  Antisense strand to SEQ ID NO: 2179264
guacuccaugagauguccc

SEQ ID NO: 2179266 - RNA, 19 nt, Artificial Sequence
  Description of Artificial Sequence: Synthetic oligonucleotide
  Sense strand starting at position 1335 of SEQ ID NO: 1883243
acaguuaauagauggaagu

SEQ ID NO: 2179267 - RNA, 19 nt, Artificial Sequence
  Description of Artificial Sequence: Synthetic oligonucleotide
  Antisense strand to SEQ ID NO: 2179266
acuuccaucuauuaacugu

SEQ ID NO: 2179268 - RNA, 19 nt, Artificial Sequence
  Description of Artificial Sequence: Synthetic oligonucleotide
  Sense strand starting at position 1348 of SEQ ID NO: 1883243
ggaagucaugcuuaugcaa

SEQ ID NO: 2179269 - RNA, 19 nt, Artificial Sequence
  Description of Artificial Sequence: Synthetic oligonucleotide
  Antisense strand to SEQ ID NO: 2179268
uugcauaagcaugacuucc

SEQ ID NO: 2179270 - RNA, 19 nt, Artificial Sequence
  Description of Artificial Sequence: Synthetic oligonucleotide
  Sense strand starting at position 1397 of SEQ ID NO: 1883243
ccagcaauggcugaaacau

SEQ ID NO: 2179271 - RNA, 19 nt, Artificial Sequence
  Description of Artificial Sequence: Synthetic oligonucleotide
  Antisense strand to SEQ ID NO: 2179270
auguuucagccauugcugg

SEQ ID NO: 2179272 - RNA, 19 nt, Artificial Sequence
  Description of Artificial Sequence: Synthetic oligonucleotide
  Sense strand starting at position 1691 of SEQ ID NO: 1883243
gcgggcucugccucacauu

SEQ ID NO: 2179273 - RNA, 19 nt, Artificial Sequence
  Description of Artificial Sequence: Synthetic oligonucleotide
  Antisense strand to SEQ ID NO: 2179272
aaugugaggcagagcccgc

SEQ ID NO: 2179274 - RNA, 19 nt, Artificial Sequence
  Description of Artificial Sequence: Synthetic oligonucleotide
  Sense strand starting at position 1722 of SEQ ID NO: 1883243
uggaguuugaguugacaga

SEQ ID NO: 2179275 - RNA, 19 nt, Artificial Sequence
  Description of Artificial Sequence: Synthetic oligonucleotide
  Antisense strand to SEQ ID NO: 2179274
ucugucaacucaaacucca

SEQ ID NO: 2179276 - RNA, 19 nt, Artificial Sequence
  Description of Artificial Sequence: Synthetic oligonucleotide
  Sense strand starting at position 1821 of SEQ ID NO: 1883243
gcugccucugaauagacaa

SEQ ID NO: 2179277 - RNA, 19 nt, Artificial Sequence
  Description of Artificial Sequence: Synthetic oligonucleotide
  Antisense strand to SEQ ID NO: 2179276
uugucuauucagaggcagc

SEQ ID NO: 2179278 - RNA, 19 nt, Artificial Sequence
  Description of Artificial Sequence: Synthetic oligonucleotide
  Sense strand starting at position 1909 of SEQ ID NO: 1883243
acauauucugugggaaaua

SEQ ID NO: 2179279 - RNA, 19 nt, Artificial Sequence
  Description of Artificial Sequence: Synthetic oligonucleotide
  Antisense strand to SEQ ID NO: 2179278
uauuucccacagaauaugu

SEQ ID NO: 2179280 - RNA, 19 nt, Artificial Sequence
  Description of Artificial Sequence: Synthetic oligonucleotide
  Sense strand starting at position 1988 of SEQ ID NO: 1883243
ccucuuggcaucugaagga

SEQ ID NO: 2179281 - RNA, 19 nt, Artificial Sequence
  Description of Artificial Sequence: Synthetic oligonucleotide
  Antisense strand to SEQ ID NO: 2179280
uccuucagaugccaagagg

SEQ ID NO: 2179282 - RNA, 19 nt, Artificial Sequence
  Description of Artificial Sequence: Synthetic oligonucleotide
  Sense strand starting at position 2007 of SEQ ID NO: 1883243
ggagauucagcagggaacu

SEQ ID NO: 2179283 - RNA, 19 nt, Artificial Sequence
  Description of Artificial Sequence: Synthetic oligonucleotide
  Antisense strand to SEQ ID NO: 2179282
aguucccugcugaaucucc

SEQ ID NO: 2179284 - RNA, 19 nt, Artificial Sequence
  Description of Artificial Sequence: Synthetic oligonucleotide
  Sense strand starting at position 2027 of SEQ ID NO: 1883243
acaucuaacuguguagaaa

SEQ ID NO: 2179285 - RNA, 19 nt, Artificial Sequence
  Description of Artificial Sequence: Synthetic oligonucleotide
  Antisense strand to SEQ ID NO: 2179284
uuucuacacaguuagaugu

SEQ ID NO: 2179286 - RNA, 19 nt, Artificial Sequence
  Description of Artificial Sequence: Synthetic oligonucleotide
  Sense strand starting at position 2267 of SEQ ID NO: 1883243
auuagaaguucugugacau

SEQ ID NO: 2179287 - RNA, 19 nt, Artificial Sequence
  Description of Artificial Sequence: Synthetic oligonucleotide
  Antisense strand to SEQ ID NO: 2179286
augucacagaacuucuaau

SEQ ID NO: 2179288 - RNA, 19 nt, Artificial Sequence
  Description of Artificial Sequence: Synthetic oligonucleotide
  Sense strand starting at position 2268 of SEQ ID NO: 1883243
uuagaaguucugugacaua

SEQ ID NO: 2179289 - RNA, 19 nt, Artificial Sequence
  Description of Artificial Sequence: Synthetic oligonucleotide
  Antisense strand to SEQ ID NO: 2179288
uaugucacagaacuucuaa

SEQ ID NO: 2179290 - RNA, 19 nt, Artificial Sequence
  Description of Artificial Sequence: Synthetic oligonucleotide
  Sense strand starting at position 2326 of SEQ ID NO: 1883243
cauuguuguccugagagga

SEQ ID NO: 2179291 - RNA, 19 nt, Artificial Sequence
  Description of Artificial Sequence: Synthetic oligonucleotide
  Antisense strand to SEQ ID NO: 2179290
uccucucaggacaacaaug

SEQ ID NO: 2179292 - RNA, 19 nt, Artificial Sequence
  Description of Artificial Sequence: Synthetic oligonucleotide
  Sense strand starting at position 2566 of SEQ ID NO: 1883243
acaguaacacuugguuaau

SEQ ID NO: 2179293 - RNA, 19 nt, Artificial Sequence
  Description of Artificial Sequence: Synthetic oligonucleotide
  Antisense strand to SEQ ID NO: 2179292
auuaaccaaguguuacugu

SEQ ID NO: 2179294 - RNA, 19 nt, Artificial Sequence
  Description of Artificial Sequence: Synthetic oligonucleotide
  Sense strand starting at position 2567 of SEQ ID NO: 1883243
caguaacacuugguuaaug

SEQ ID NO: 2179295 - RNA, 19 nt, Artificial Sequence
  Description of Artificial Sequence: Synthetic oligonucleotide
  Antisense strand to SEQ ID NO: 2179294
cauuaaccaaguguuacug

SEQ ID NO: 2179296 - RNA, 19 nt, Artificial Sequence
  Description of Artificial Sequence: Synthetic oligonucleotide
  Sense strand starting at position 2591 of SEQ ID NO: 1883243
acucucuuggcagauacuu

SEQ ID NO: 2179297 - RNA, 19 nt, Artificial Sequence
  Description of Artificial Sequence: Synthetic oligonucleotide
  Antisense strand to SEQ ID NO: 2179296
aaguaucugccaagagagu

SEQ ID NO: 2179298 - RNA, 19 nt, Artificial Sequence
  Description of Artificial Sequence: Synthetic oligonucleotide
  Sense strand starting at position 2643 of SEQ ID NO: 1883243
aaaugaggauugccagauu

SEQ ID NO: 2179299 - RNA, 19 nt, Artificial Sequence
  Description of Artificial Sequence: Synthetic oligonucleotide
  Antisense strand to SEQ ID NO: 2179298
aaucuggcaauccucauuu

SEQ ID NO: 2179300 - RNA, 19 nt, Artificial Sequence
  Description of Artificial Sequence: Synthetic oligonucleotide
  Sense strand starting at position 2646 of SEQ ID NO: 1883243
ugaggauugccagauucug

SEQ ID NO: 2179301 - RNA, 19 nt, Artificial Sequence
  Description of Artificial Sequence: Synthetic oligonucleotide
  Antisense strand to SEQ ID NO: 2179300
cagaaucuggcaauccuca

SEQ ID NO: 2179302 - RNA, 19 nt, Artificial Sequence
  Description of Artificial Sequence: Synthetic oligonucleotide
  Sense strand starting at position 2790 of SEQ ID NO: 1883243
aagugaaacaugugaguag

SEQ ID NO: 2179303 - RNA, 19 nt, Artificial Sequence
  Description of Artificial Sequence: Synthetic oligonucleotide
  Antisense strand to SEQ ID NO: 2179302
cuacucacauguuucacuu

SEQ ID NO: 2179304 - RNA, 19 nt, Artificial Sequence
  Description of Artificial Sequence: Synthetic oligonucleotide
  Sense strand starting at position 2794 of SEQ ID NO: 1883243
gaaacaugugaguagccaa

SEQ ID NO: 2179305 - RNA, 19 nt, Artificial Sequence
  Description of Artificial Sequence: Synthetic oligonucleotide
  Antisense strand to SEQ ID NO: 2179304
uuggcuacucacauguuuc

SEQ ID NO: 2179306 - RNA, 19 nt, Artificial Sequence
  Description of Artificial Sequence: Synthetic oligonucleotide
  Sense strand starting at position 3069 of SEQ ID NO: 1883243
uggcuuccuggucaggaaa

SEQ ID NO: 2179307 - RNA, 19 nt, Artificial Sequence
  Description of Artificial Sequence: Synthetic oligonucleotide
  Antisense strand to SEQ ID NO: 2179306
uuuccugaccaggaagcca

SEQ ID NO: 2179308 - RNA, 19 nt, Artificial Sequence
  Description of Artificial Sequence: Synthetic oligonucleotide
  Sense strand starting at position 3120 of SEQ ID NO: 1883243
agaacaucuucuucuggua

SEQ ID NO: 2179309 - RNA, 19 nt, Artificial Sequence
  Description of Artificial Sequence: Synthetic oligonucleotide
  Antisense strand to SEQ ID NO: 2179308
uaccagaagaagauguucu

SEQ ID NO: 2179310 - RNA, 19 nt, Artificial Sequence
  Description of Artificial Sequence: Synthetic oligonucleotide
  Sense strand starting at position 3181 of SEQ ID NO: 1883243
uuuagugagaguuaucuga

SEQ ID NO: 2179311 - RNA, 19 nt, Artificial Sequence
  Description of Artificial Sequence: Synthetic oligonucleotide
  Antisense strand to SEQ ID NO: 2179310
ucagauaacucucacuaaa

SEQ ID NO: 2179312 - RNA, 19 nt, Artificial Sequence
  Description of Artificial Sequence: Synthetic oligonucleotide
  Sense strand starting at position 3183 of SEQ ID NO: 1883243
uagugagaguuaucugaac

SEQ ID NO: 2179313 - RNA, 19 nt, Artificial Sequence
  Description of Artificial Sequence: Synthetic oligonucleotide
  Antisense strand to SEQ ID NO: 2179312
guucagauaacucucacua

SEQ ID NO: 2179314 - RNA, 19 nt, Artificial Sequence
  Description of Artificial Sequence: Synthetic oligonucleotide
  Sense strand starting at position 3185 of SEQ ID NO: 1883243
gugagaguuaucugaacaa

SEQ ID NO: 2179315 - RNA, 19 nt, Artificial Sequence
  Description of Artificial Sequence: Synthetic oligonucleotide
  Antisense strand to SEQ ID NO: 2179314
uuguucagauaacucucac

SEQ ID NO: 2179316 - RNA, 19 nt, Artificial Sequence
  Description of Artificial Sequence: Synthetic oligonucleotide
  Sense strand starting at position 3517 of SEQ ID NO: 1883243
gaguuacugccuuauuaug

SEQ ID NO: 2179317 - RNA, 19 nt, Artificial Sequence
  Description of Artificial Sequence: Synthetic oligonucleotide
  Antisense strand to SEQ ID NO: 2179316
cauaauaaggcaguaacuc

SEQ ID NO: 2179318 - RNA, 19 nt, Artificial Sequence
  Description of Artificial Sequence: Synthetic oligonucleotide
  Sense strand starting at position 3598 of SEQ ID NO: 1883243
ucauuaagauaagcaugau

SEQ ID NO: 2179319 - RNA, 19 nt, Artificial Sequence
  Description of Artificial Sequence: Synthetic oligonucleotide
  Antisense strand to SEQ ID NO: 2179318
aucaugcuuaucuuaauga

SEQ ID NO: 2179320 - RNA, 19 nt, Artificial Sequence
  Description of Artificial Sequence: Synthetic oligonucleotide
  Sense strand starting at position 3706 of SEQ ID NO: 1883243
uuuagauauccagguuaaa

SEQ ID NO: 2179321 - RNA, 19 nt, Artificial Sequence
  Description of Artificial Sequence: Synthetic oligonucleotide
  Antisense strand to SEQ ID NO: 2179320
uuuaaccuggauaucuaaa

SEQ ID NO: 2179322 - RNA, 19 nt, Artificial Sequence
  Description of Artificial Sequence: Synthetic oligonucleotide
  Sense strand starting at position 3784 of SEQ ID NO: 1883243
gggagaugcaucgaaagca

SEQ ID NO: 2179323 - RNA, 19 nt, Artificial Sequence
  Description of Artificial Sequence: Synthetic oligonucleotide
  Antisense strand to SEQ ID NO: 2179322
ugcuuucgaugcaucuccc

SEQ ID NO: 2179324 - RNA, 19 nt, Artificial Sequence
  Description of Artificial Sequence: Synthetic oligonucleotide
  Sense strand starting at position 299 of SEQ ID NO: 1883244
gccuguuaugcuguccacu

SEQ ID NO: 2179325 - RNA, 19 nt, Artificial Sequence
  Description of Artificial Sequence: Synthetic oligonucleotide
  Antisense strand to SEQ ID NO: 2179324
aguggacagcauaacaggc

SEQ ID NO: 2179326 - RNA, 19 nt, Artificial Sequence
  Description of Artificial Sequence: Synthetic oligonucleotide
  Sense strand starting at position 366 of SEQ ID NO: 1883244
guuacaaagucccuacuau

SEQ ID NO: 2179327 - RNA, 19 nt, Artificial Sequence
  Description of Artificial Sequence: Synthetic oligonucleotide
  Antisense strand to SEQ ID NO: 2179326
auaguagggacuuuguaac

SEQ ID NO: 2179328 - RNA, 19 nt, Artificial Sequence
  Description of Artificial Sequence: Synthetic oligonucleotide
  Sense strand starting at position 387 of SEQ ID NO: 1883244
gucaguaacuauucuacac

SEQ ID NO: 2179329 - RNA, 19 nt, Artificial Sequence
  Description of Artificial Sequence: Synthetic oligonucleotide
  Antisense strand to SEQ ID NO: 2179328
guguagaauaguuacugac

SEQ ID NO: 2179330 - RNA, 19 nt, Artificial Sequence
  Description of Artificial Sequence: Synthetic oligonucleotide
  Sense strand starting at position 608 of SEQ ID NO: 1883244
ggcuuaaacaacggauguu

SEQ ID NO: 2179331 - RNA, 19 nt, Artificial Sequence
  Description of Artificial Sequence: Synthetic oligonucleotide
  Antisense strand to SEQ ID NO: 2179330
aacauccguuguuuaagcc

SEQ ID NO: 2179332 - RNA, 19 nt, Artificial Sequence
  Description of Artificial Sequence: Synthetic oligonucleotide
  Sense strand starting at position 673 of SEQ ID NO: 1883244
agauuugguucuuggaaga

SEQ ID NO: 2179333 - RNA, 19 nt, Artificial Sequence
  Description of Artificial Sequence: Synthetic oligonucleotide
  Antisense strand to SEQ ID NO: 2179332
ucuuccaagaaccaaaucu

SEQ ID NO: 2179334 - RNA, 19 nt, Artificial Sequence
  Description of Artificial Sequence: Synthetic oligonucleotide
  Sense strand starting at position 686 of SEQ ID NO: 1883244
ggaagauccucuuucuggu

SEQ ID NO: 2179335 - RNA, 19 nt, Artificial Sequence
  Description of Artificial Sequence: Synthetic oligonucleotide
  Antisense strand to SEQ ID NO: 2179334
accagaaagaggaucuucc

SEQ ID NO: 2179336 - RNA, 19 nt, Artificial Sequence
  Description of Artificial Sequence: Synthetic oligonucleotide
  Sense strand starting at position 692 of SEQ ID NO: 1883244
uccucuuucugguuuauag

SEQ ID NO: 2179337 - RNA, 19 nt, Artificial Sequence
  Description of Artificial Sequence: Synthetic oligonucleotide
  Antisense strand to SEQ ID NO: 2179336
cuauaaaccagaaagagga

SEQ ID NO: 2179338 - RNA, 19 nt, Artificial Sequence
  Description of Artificial Sequence: Synthetic oligonucleotide
  Sense strand starting at position 747 of SEQ ID NO: 1883244
gguguaugugaggaaaucu

SEQ ID NO: 2179339 - RNA, 19 nt, Artificial Sequence
  Description of Artificial Sequence: Synthetic oligonucleotide
  Antisense strand to SEQ ID NO: 2179338
agauuuccucacauacacc

SEQ ID NO: 2179340 - RNA, 19 nt, Artificial Sequence
  Description of Artificial Sequence: Synthetic oligonucleotide
  Sense strand starting at position 755 of SEQ ID NO: 1883244
ugaggaaaucucugucuuc

SEQ ID NO: 2179341 - RNA, 19 nt, Artificial Sequence
  Description of Artificial Sequence: Synthetic oligonucleotide
  Antisense strand to SEQ ID NO: 2179340
gaagacagagauuuccuca

SEQ ID NO: 2179342 - RNA, 19 nt, Artificial Sequence
  Description of Artificial Sequence: Synthetic oligonucleotide
  Sense strand starting at position 1068 of SEQ ID NO: 1883244
ugaguugggucagucauga

SEQ ID NO: 2179343 - RNA, 19 nt, Artificial Sequence
  Description of Artificial Sequence: Synthetic oligonucleotide
  Antisense strand to SEQ ID NO: 2179342
ucaugacugacccaacuca

SEQ ID NO: 2179344 - RNA, 19 nt, Artificial Sequence
  Description of Artificial Sequence: Synthetic oligonucleotide
  Sense strand starting at position 1073 of SEQ ID NO: 1883244
ugggucagucaugauaauu

SEQ ID NO: 2179345 - RNA, 19 nt, Artificial Sequence
  Description of Artificial Sequence: Synthetic oligonucleotide
  Antisense strand to SEQ ID NO: 2179344
aauuaucaugacugaccca

SEQ ID NO: 2179346 - RNA, 19 nt, Artificial Sequence
  Description of Artificial Sequence: Synthetic oligonucleotide
  Sense strand starting at position 1219 of SEQ ID NO: 1883244
gugaucuguggcgugugaa

SEQ ID NO: 2179347 - RNA, 19 nt, Artificial Sequence
  Description of Artificial Sequence: Synthetic oligonucleotide
  Antisense strand to SEQ ID NO: 2179346
uucacacgccacagaucac

SEQ ID NO: 2179348 - RNA, 19 nt, Artificial Sequence
  Description of Artificial Sequence: Synthetic oligonucleotide
  Sense strand starting at position 1761 of SEQ ID NO: 1883244
uucucugugucacuuacaa

SEQ ID NO: 2179349 - RNA, 19 nt, Artificial Sequence
  Description of Artificial Sequence: Synthetic oligonucleotide
  Antisense strand to SEQ ID NO: 2179348
uuguaagugacacagagaa

SEQ ID NO: 2179350 - RNA, 19 nt, Artificial Sequence
  Description of Artificial Sequence: Synthetic oligonucleotide
  Sense strand starting at position 1777 of SEQ ID NO: 1883244
caaccaaagugccugagau

SEQ ID NO: 2179351 - RNA, 19 nt, Artificial Sequence
  Description of Artificial Sequence: Synthetic oligonucleotide
  Antisense strand to SEQ ID NO: 2179350
aucucaggcacuuugguug

SEQ ID NO: 2179352 - RNA, 19 nt, Artificial Sequence
  Description of Artificial Sequence: Synthetic oligonucleotide
  Sense strand starting at position 1778 of SEQ ID NO: 1883244
aaccaaagugccugagaua

SEQ ID NO: 2179353 - RNA, 19 nt, Artificial Sequence
  Description of Artificial Sequence: Synthetic oligonucleotide
  Antisense strand to SEQ ID NO: 2179352
uaucucaggcacuuugguu

SEQ ID NO: 2179354 - RNA, 19 nt, Artificial Sequence
  Description of Artificial Sequence: Synthetic oligonucleotide
  Sense strand starting at position 1779 of SEQ ID NO: 1883244
accaaagugccugagauau

SEQ ID NO: 2179355 - RNA, 19 nt, Artificial Sequence
  Description of Artificial Sequence: Synthetic oligonucleotide
  Antisense strand to SEQ ID NO: 2179354
auaucucaggcacuuuggu

SEQ ID NO: 2179356 - RNA, 19 nt, Artificial Sequence
  Description of Artificial Sequence: Synthetic oligonucleotide
  Sense strand starting at position 1821 of SEQ ID NO: 1883244
uucuccucaccuugaggaa

SEQ ID NO: 2179357 - RNA, 19 nt, Artificial Sequence
  Description of Artificial Sequence: Synthetic oligonucleotide
  Antisense strand to SEQ ID NO: 2179356
uuccucaaggugaggagaa

SEQ ID NO: 2179358 - RNA, 19 nt, Artificial Sequence
  Description of Artificial Sequence: Synthetic oligonucleotide
  Sense strand starting at position 2099 of SEQ ID NO: 1883244
gcccauuggcucuucguua

SEQ ID NO: 2179359 - RNA, 19 nt, Artificial Sequence
  Description of Artificial Sequence: Synthetic oligonucleotide
  Antisense strand to SEQ ID NO: 2179358
uaacgaagagccaaugggc

SEQ ID NO: 2179360 - RNA, 19 nt, Artificial Sequence
  Description of Artificial Sequence: Synthetic oligonucleotide
  Sense strand starting at position 2517 of SEQ ID NO: 1883244
cagaaauaugaaggucgau

SEQ ID NO: 2179361 - RNA, 19 nt, Artificial Sequence
  Description of Artificial Sequence: Synthetic oligonucleotide
  Antisense strand to SEQ ID NO: 2179360
aucgaccuucauauuucug

SEQ ID NO: 2179362 - RNA, 19 nt, Artificial Sequence
  Description of Artificial Sequence: Synthetic oligonucleotide
  Sense strand starting at position 2523 of SEQ ID NO: 1883244
uaugaaggucgaugcaaau

SEQ ID NO: 2179363 - RNA, 19 nt, Artificial Sequence
  Description of Artificial Sequence: Synthetic oligonucleotide
  Antisense strand to SEQ ID NO: 2179362
auuugcaucgaccuucaua

SEQ ID NO: 2179364 - RNA, 19 nt, Artificial Sequence
  Description of Artificial Sequence: Synthetic oligonucleotide
  Sense strand starting at position 2574 of SEQ ID NO: 1883244
uuguuugggagucaacuga

SEQ ID NO: 2179365 - RNA, 19 nt, Artificial Sequence
  Description of Artificial Sequence: Synthetic oligonucleotide
  Antisense strand to SEQ ID NO: 2179364
ucaguugacucccaaacaa

SEQ ID NO: 2179366 - RNA, 19 nt, Artificial Sequence
  Description of Artificial Sequence: Synthetic oligonucleotide
  Sense strand starting at position 2597 of SEQ ID NO: 1883244
augcuuugaagccagugaa

SEQ ID NO: 2179367 - RNA, 19 nt, Artificial Sequence
  Description of Artificial Sequence: Synthetic oligonucleotide
  Antisense strand to SEQ ID NO: 2179366
uucacuggcuucaaagcau

SEQ ID NO: 2179368 - RNA, 19 nt, Artificial Sequence
  Description of Artificial Sequence: Synthetic oligonucleotide
  Sense strand starting at position 2672 of SEQ ID NO: 1883244
ccaauuaaugcugagccau

SEQ ID NO: 2179369 - RNA, 19 nt, Artificial Sequence
  Description of Artificial Sequence: Synthetic oligonucleotide
  Antisense strand to SEQ ID NO: 2179368
auggcucagcauuaauugg

SEQ ID NO: 2179370 - RNA, 19 nt, Artificial Sequence
  Description of Artificial Sequence: Synthetic oligonucleotide
  Sense strand starting at position 2701 of SEQ ID NO: 1883244
cgaagcugccaggaucuau

SEQ ID NO: 2179371 - RNA, 19 nt, Artificial Sequence
  Description of Artificial Sequence: Synthetic oligonucleotide
  Antisense strand to SEQ ID NO: 2179370
auagauccuggcagcuucg

SEQ ID NO: 2179372 - RNA, 19 nt, Artificial Sequence
  Description of Artificial Sequence: Synthetic oligonucleotide
  Sense strand starting at position 2801 of SEQ ID NO: 1883244
gacuuaaguggugagcuuu

SEQ ID NO: 2179373 - RNA, 19 nt, Artificial Sequence
  Description of Artificial Sequence: Synthetic oligonucleotide
  Antisense strand to SEQ ID NO: 2179372
aaagcucaccacuuaaguc

SEQ ID NO: 2179374 - RNA, 19 nt, Artificial Sequence
  Description of Artificial Sequence: Synthetic oligonucleotide
  Sense strand starting at position 3060 of SEQ ID NO: 1883244
ucacaacagugcuugaaau

SEQ ID NO: 2179375 - RNA, 19 nt, Artificial Sequence
  Description of Artificial Sequence: Synthetic oligonucleotide
  Antisense strand to SEQ ID NO: 2179374
auuucaagcacuguuguga

SEQ ID NO: 2179376 - RNA, 19 nt, Artificial Sequence
  Description of Artificial Sequence: Synthetic oligonucleotide
  Sense strand starting at position 3155 of SEQ ID NO: 1883244
ccuuauagguuuguuauuu

SEQ ID NO: 2179377 - RNA, 19 nt, Artificial Sequence
  Description of Artificial Sequence: Synthetic oligonucleotide
  Antisense strand to SEQ ID NO: 2179376
aaauaacaaaccuauaagg

SEQ ID NO: 2179378 - RNA, 19 nt, Artificial Sequence
  Description of Artificial Sequence: Synthetic oligonucleotide
  Sense strand starting at position 3185 of SEQ ID NO: 1883244
aggcuuuauccugagcuca

SEQ ID NO: 2179379 - RNA, 19 nt, Artificial Sequence
  Description of Artificial Sequence: Synthetic oligonucleotide
  Antisense strand to SEQ ID NO: 2179378
ugagcucaggauaaagccu

SEQ ID NO: 2179380 - RNA, 19 nt, Artificial Sequence
  Description of Artificial Sequence: Synthetic oligonucleotide
  Sense strand starting at position 3187 of SEQ ID NO: 1883244
gcuuuauccugagcucaaa

SEQ ID NO: 2179381 - RNA, 19 nt, Artificial Sequence
  Description of Artificial Sequence: Synthetic oligonucleotide
  Antisense strand to SEQ ID NO: 2179380
uuugagcucaggauaaagc

SEQ ID NO: 2179382 - RNA, 19 nt, Artificial Sequence
  Description of Artificial Sequence: Synthetic oligonucleotide
  Sense strand starting at position 3222 of SEQ ID NO: 1883244
aggauaacccacugagcau

SEQ ID NO: 2179383 - RNA, 19 nt, Artificial Sequence
  Description of Artificial Sequence: Synthetic oligonucleotide
  Antisense strand to SEQ ID NO: 2179382
augcucaguggguuauccu

SEQ ID NO: 2179384 - RNA, 19 nt, Artificial Sequence
  Description of Artificial Sequence: Synthetic oligonucleotide
  Sense strand starting at position 3351 of SEQ ID NO: 1883244
gagugaauccuguggaaca

SEQ ID NO: 2179385 - RNA, 19 nt, Artificial Sequence
  Description of Artificial Sequence: Synthetic oligonucleotide
  Antisense strand to SEQ ID NO: 2179384
uguuccacaggauucacuc

SEQ ID NO: 2179386 - RNA, 19 nt, Artificial Sequence
  Description of Artificial Sequence: Synthetic oligonucleotide
  Sense strand starting at position 3487 of SEQ ID NO: 1883244
auacaccucguuuaucaga

SEQ ID NO: 2179387 - RNA, 19 nt, Artificial Sequence
  Description of Artificial Sequence: Synthetic oligonucleotide
  Antisense strand to SEQ ID NO: 2179386
ucugauaaacgagguguau

SEQ ID NO: 2179388 - RNA, 19 nt, Artificial Sequence
  Description of Artificial Sequence: Synthetic oligonucleotide
  Sense strand starting at position 3489 of SEQ ID NO: 1883244
acaccucguuuaucagauu

SEQ ID NO: 2179389 - RNA, 19 nt, Artificial Sequence
  Description of Artificial Sequence: Synthetic oligonucleotide
  Antisense strand to SEQ ID NO: 2179388
aaucugauaaacgaggugu

SEQ ID NO: 2179390 - RNA, 19 nt, Artificial Sequence
  Description of Artificial Sequence: Synthetic oligonucleotide
  Sense strand starting at position 3497 of SEQ ID NO: 1883244
uuuaucagauucgccuaua

SEQ ID NO: 2179391 - RNA, 19 nt, Artificial Sequence
  Description of Artificial Sequence: Synthetic oligonucleotide
  Antisense strand to SEQ ID NO: 2179390
uauaggcgaaucugauaaa

SEQ ID NO: 2179392 - RNA, 19 nt, Artificial Sequence
  Description of Artificial Sequence: Synthetic oligonucleotide
  Sense strand starting at position 3498 of SEQ ID NO: 1883244
uuaucagauucgccuauau

SEQ ID NO: 2179393 - RNA, 19 nt, Artificial Sequence
  Description of Artificial Sequence: Synthetic oligonucleotide
  Antisense strand to SEQ ID NO: 2179392
auauaggcgaaucugauaa

SEQ ID NO: 2179394 - RNA, 19 nt, Artificial Sequence
  Description of Artificial Sequence: Synthetic oligonucleotide
  Sense strand starting at position 3500 of SEQ ID NO: 1883244
aucagauucgccuauauuc

SEQ ID NO: 2179395 - RNA, 19 nt, Artificial Sequence
  Description of Artificial Sequence: Synthetic oligonucleotide
  Antisense strand to SEQ ID NO: 2179394
gaauauaggcgaaucugau

SEQ ID NO: 2179396 - RNA, 19 nt, Artificial Sequence
  Description of Artificial Sequence: Synthetic oligonucleotide
  Sense strand starting at position 3891 of SEQ ID NO: 1883244
gaucuaagcuuccuagguu

SEQ ID NO: 2179397 - RNA, 19 nt, Artificial Sequence
  Description of Artificial Sequence: Synthetic oligonucleotide
  Antisense strand to SEQ ID NO: 2179396
aaccuaggaagcuuagauc

SEQ ID NO: 2179398 - RNA, 19 nt, Artificial Sequence
  Description of Artificial Sequence: Synthetic oligonucleotide
  Sense strand starting at position 3900 of SEQ ID NO: 1883244
uuccuagguuuggcauaua

SEQ ID NO: 2179399 - RNA, 19 nt, Artificial Sequence
  Description of Artificial Sequence: Synthetic oligonucleotide
  Antisense strand to SEQ ID NO: 2179398
uauaugccaaaccuaggaa

SEQ ID NO: 2179400 - RNA, 19 nt, Artificial Sequence
  Description of Artificial Sequence: Synthetic oligonucleotide
  Sense strand starting at position 3903 of SEQ ID NO: 1883244
cuagguuuggcauauaguu

SEQ ID NO: 2179401 - RNA, 19 nt, Artificial Sequence
  Description of Artificial Sequence: Synthetic oligonucleotide
  Antisense strand to SEQ ID NO: 2179400
aacuauaugccaaaccuag

SEQ ID NO: 2179402 - RNA, 19 nt, Artificial Sequence
  Description of Artificial Sequence: Synthetic oligonucleotide
  Sense strand starting at position 3905 of SEQ ID NO: 1883244
agguuuggcauauaguuua

SEQ ID NO: 2179403 - RNA, 19 nt, Artificial Sequence
  Description of Artificial Sequence: Synthetic oligonucleotide
  Antisense strand to SEQ ID NO: 2179402
uaaacuauaugccaaaccu

SEQ ID NO: 2179404 - RNA, 19 nt, Artificial Sequence
  Description of Artificial Sequence: Synthetic oligonucleotide
  Sense strand starting at position 6 of SEQ ID NO: 1883245
caagucagcuccucgauuu

SEQ ID NO: 2179405 - RNA, 19 nt, Artificial Sequence
  Description of Artificial Sequence: Synthetic oligonucleotide
  Antisense strand to SEQ ID NO: 2179404
aaaucgaggagcugacuug

SEQ ID NO: 2179406 - RNA, 19 nt, Artificial Sequence
  Description of Artificial Sequence: Synthetic oligonucleotide
  Sense strand starting at position 16 of SEQ ID NO: 1883245
ccucgauuugccugaugac

SEQ ID NO: 2179407 - RNA, 19 nt, Artificial Sequence
  Description of Artificial Sequence: Synthetic oligonucleotide
  Antisense strand to SEQ ID NO: 2179406
gucaucaggcaaaucgagg

SEQ ID NO: 2179408 - RNA, 19 nt, Artificial Sequence
  Description of Artificial Sequence: Synthetic oligonucleotide
  Sense strand starting at position 23 of SEQ ID NO: 1883245
uugccugaugacgaugaau

SEQ ID NO: 2179409 - RNA, 19 nt, Artificial Sequence
  Description of Artificial Sequence: Synthetic oligonucleotide
  Antisense strand to SEQ ID NO: 2179408
auucaucgucaucaggcaa

SEQ ID NO: 2179410 - RNA, 19 nt, Artificial Sequence
  Description of Artificial Sequence: Synthetic oligonucleotide
  Sense strand starting at position 25 of SEQ ID NO: 1883245
gccugaugacgaugaauau

SEQ ID NO: 2179411 - RNA, 19 nt, Artificial Sequence
  Description of Artificial Sequence: Synthetic oligonucleotide
  Antisense strand to SEQ ID NO: 2179410
auauucaucgucaucaggc

SEQ ID NO: 2179412 - RNA, 19 nt, Artificial Sequence
  Description of Artificial Sequence: Synthetic oligonucleotide
  Sense strand starting at position 86 of SEQ ID NO: 1883245
acaggcuggcucuaacaua

SEQ ID NO: 2179413 - RNA, 19 nt, Artificial Sequence
  Description of Artificial Sequence: Synthetic oligonucleotide
  Antisense strand to SEQ ID NO: 2179412
uauguuagagccagccugu

SEQ ID NO: 2179414 - RNA, 19 nt, Artificial Sequence
  Description of Artificial Sequence: Synthetic oligonucleotide
  Sense strand starting at position 173 of SEQ ID NO: 1883245
auuacugaacuuuguuuga

SEQ ID NO: 2179415 - RNA, 19 nt, Artificial Sequence
  Description of Artificial Sequence: Synthetic oligonucleotide
  Antisense strand to SEQ ID NO: 2179414
ucaaacaaaguucaguaau

SEQ ID NO: 2179416 - RNA, 19 nt, Artificial Sequence
  Description of Artificial Sequence: Synthetic oligonucleotide
  Sense strand starting at position 343 of SEQ ID NO: 1883245
agaagauaauuguucugau

SEQ ID NO: 2179417 - RNA, 19 nt, Artificial Sequence
  Description of Artificial Sequence: Synthetic oligonucleotide
  Antisense strand to SEQ ID NO: 2179416
aucagaacaauuaucuucu

SEQ ID NO: 2179418 - RNA, 19 nt, Artificial Sequence
  Description of Artificial Sequence: Synthetic oligonucleotide
  Sense strand starting at position 344 of SEQ ID NO: 1883245
gaagauaauuguucugaug

SEQ ID NO: 2179419 - RNA, 19 nt, Artificial Sequence
  Description of Artificial Sequence: Synthetic oligonucleotide
  Antisense strand to SEQ ID NO: 2179418
caucagaacaauuaucuuc

SEQ ID NO: 2179420 - RNA, 19 nt, Artificial Sequence
  Description of Artificial Sequence: Synthetic oligonucleotide
  Sense strand starting at position 353 of SEQ ID NO: 1883245
uguucugaugacuagcaga

SEQ ID NO: 2179421 - RNA, 19 nt, Artificial Sequence
  Description of Artificial Sequence: Synthetic oligonucleotide
  Antisense strand to SEQ ID NO: 2179420
ucugcuagucaucagaaca

SEQ ID NO: 2179422 - RNA, 19 nt, Artificial Sequence
  Description of Artificial Sequence: Synthetic oligonucleotide
  Sense strand starting at position 408 of SEQ ID NO: 1883245
cuuucuguuauuugugagu

SEQ ID NO: 2179423 - RNA, 19 nt, Artificial Sequence
  Description of Artificial Sequence: Synthetic oligonucleotide
  Antisense strand to SEQ ID NO: 2179422
acucacaaauaacagaaag

SEQ ID NO: 2179424 - RNA, 19 nt, Artificial Sequence
  Description of Artificial Sequence: Synthetic oligonucleotide
  Sense strand starting at position 413 of SEQ ID NO: 1883245
uguuauuugugagucuaau

SEQ ID NO: 2179425 - RNA, 19 nt, Artificial Sequence
  Description of Artificial Sequence: Synthetic oligonucleotide
  Antisense strand to SEQ ID NO: 2179424
auuagacucacaaauaaca

SEQ ID NO: 2179426 - RNA, 19 nt, Artificial Sequence
  Description of Artificial Sequence: Synthetic oligonucleotide
  Sense strand starting at position 433 of SEQ ID NO: 1883245
acucuaguuggucaauuaa

SEQ ID NO: 2179427 - RNA, 19 nt, Artificial Sequence
  Description of Artificial Sequence: Synthetic oligonucleotide
  Antisense strand to SEQ ID NO: 2179426
uuaauugaccaacuagagu

SEQ ID NO: 2179428 - RNA, 19 nt, Artificial Sequence
  Description of Artificial Sequence: Synthetic oligonucleotide
  Sense strand starting at position 952 of SEQ ID NO: 1883245
uuuauuaugcuagaaguug

SEQ ID NO: 2179429 - RNA, 19 nt, Artificial Sequence
  Description of Artificial Sequence: Synthetic oligonucleotide
  Antisense strand to SEQ ID NO: 2179428
caacuucuagcauaauaaa

SEQ ID NO: 2179430 - RNA, 19 nt, Artificial Sequence
  Description of Artificial Sequence: Synthetic oligonucleotide
  Sense strand starting at position 961 of SEQ ID NO: 1883245
cuagaaguuguaugagauu

SEQ ID NO: 2179431 - RNA, 19 nt, Artificial Sequence
  Description of Artificial Sequence: Synthetic oligonucleotide
  Antisense strand to SEQ ID NO: 2179430
aaucucauacaacuucuag

SEQ ID NO: 2179432 - RNA, 19 nt, Artificial Sequence
  Description of Artificial Sequence: Synthetic oligonucleotide
  Sense strand starting at position 967 of SEQ ID NO: 1883245
guuguaugagauuaucuga

SEQ ID NO: 2179433 - RNA, 19 nt, Artificial Sequence
  Description of Artificial Sequence: Synthetic oligonucleotide
  Antisense strand to SEQ ID NO: 2179432
ucagauaaucucauacaac

SEQ ID NO: 2179434 - RNA, 19 nt, Artificial Sequence
  Description of Artificial Sequence: Synthetic oligonucleotide
  Sense strand starting at position 970 of SEQ ID NO: 1883245
guaugagauuaucugagua

SEQ ID NO: 2179435 - RNA, 19 nt, Artificial Sequence
  Description of Artificial Sequence: Synthetic oligonucleotide
  Antisense strand to SEQ ID NO: 2179434
uacucagauaaucucauac

SEQ ID NO: 2179436 - RNA, 19 nt, Artificial Sequence
  Description of Artificial Sequence: Synthetic oligonucleotide
  Sense strand starting at position 1224 of SEQ ID NO: 1883245
ggguauuuaugccugugau

SEQ ID NO: 2179437 - RNA, 19 nt, Artificial Sequence
  Description of Artificial Sequence: Synthetic oligonucleotide
  Antisense strand to SEQ ID NO: 2179436
aucacaggcauaaauaccc

SEQ ID NO: 2179438 - RNA, 19 nt, Artificial Sequence
  Description of Artificial Sequence: Synthetic oligonucleotide
  Sense strand starting at position 1225 of SEQ ID NO: 1883245
gguauuuaugccugugaug

SEQ ID NO: 2179439 - RNA, 19 nt, Artificial Sequence
  Description of Artificial Sequence: Synthetic oligonucleotide
  Antisense strand to SEQ ID NO: 2179438
caucacaggcauaaauacc

SEQ ID NO: 2179440 - RNA, 19 nt, Artificial Sequence
  Description of Artificial Sequence: Synthetic oligonucleotide
  Sense strand starting at position 1379 of SEQ ID NO: 1883245
uuugucugauuuguuugua

SEQ ID NO: 2179441 - RNA, 19 nt, Artificial Sequence
  Description of Artificial Sequence: Synthetic oligonucleotide
  Antisense strand to SEQ ID NO: 2179440
uacaaacaaaucagacaaa

SEQ ID NO: 2179442 - RNA, 19 nt, Artificial Sequence
  Description of Artificial Sequence: Synthetic oligonucleotide
  Sense strand starting at position 1382 of SEQ ID NO: 1883245
gucugauuuguuuguacca

SEQ ID NO: 2179443 - RNA, 19 nt, Artificial Sequence
  Description of Artificial Sequence: Synthetic oligonucleotide
  Antisense strand to SEQ ID NO: 2179442
ugguacaaacaaaucagac

SEQ ID NO: 2179444 - RNA, 19 nt, Artificial Sequence
  Description of Artificial Sequence: Synthetic oligonucleotide
  Sense strand starting at position 1649 of SEQ ID NO: 1883245
ggauccaaacauugguuua

SEQ ID NO: 2179445 - RNA, 19 nt, Artificial Sequence
  Description of Artificial Sequence: Synthetic oligonucleotide
  Antisense strand to SEQ ID NO: 2179444
uaaaccaauguuuggaucc

SEQ ID NO: 2179446 - RNA, 19 nt, Artificial Sequence
  Description of Artificial Sequence: Synthetic oligonucleotide
  Sense strand starting at position 1790 of SEQ ID NO: 1883245
aggcuugaacuccacuaau

SEQ ID NO: 2179447 - RNA, 19 nt, Artificial Sequence
  Description of Artificial Sequence: Synthetic oligonucleotide
  Antisense strand to SEQ ID NO: 2179446
auuaguggaguucaagccu

SEQ ID NO: 2179448 - RNA, 19 nt, Artificial Sequence
  Description of Artificial Sequence: Synthetic oligonucleotide
  Sense strand starting at position 2037 of SEQ ID NO: 1883245
aucagaucucgugagaggu

SEQ ID NO: 2179449 - RNA, 19 nt, Artificial Sequence
  Description of Artificial Sequence: Synthetic oligonucleotide
  Antisense strand to SEQ ID NO: 2179448
accucucacgagaucugau

SEQ ID NO: 2179450 - RNA, 19 nt, Artificial Sequence
  Description of Artificial Sequence: Synthetic oligonucleotide
  Sense strand starting at position 2047 of SEQ ID NO: 1883245
gugagagguacucacuauc

SEQ ID NO: 2179451 - RNA, 19 nt, Artificial Sequence
  Description of Artificial Sequence: Synthetic oligonucleotide
  Antisense strand to SEQ ID NO: 2179450
gauagugaguaccucucac

SEQ ID NO: 2179452 - RNA, 19 nt, Artificial Sequence
  Description of Artificial Sequence: Synthetic oligonucleotide
  Sense strand starting at position 2228 of SEQ ID NO: 1883245
ucacguauuuccuuuacau

SEQ ID NO: 2179453 - RNA, 19 nt, Artificial Sequence
  Description of Artificial Sequence: Synthetic oligonucleotide
  Antisense strand to SEQ ID NO: 2179452
auguaaaggaaauacguga

SEQ ID NO: 2179454 - RNA, 19 nt, Artificial Sequence
  Description of Artificial Sequence: Synthetic oligonucleotide
  Sense strand starting at position 2239 of SEQ ID NO: 1883245
cuuuacaucagguggagua

SEQ ID NO: 2179455 - RNA, 19 nt, Artificial Sequence
  Description of Artificial Sequence: Synthetic oligonucleotide
  Antisense strand to SEQ ID NO: 2179454
uacuccaccugauguaaag

SEQ ID NO: 2179456 - RNA, 19 nt, Artificial Sequence
  Description of Artificial Sequence: Synthetic oligonucleotide
  Sense strand starting at position 2240 of SEQ ID NO: 1883245
uuuacaucagguggaguaa

SEQ ID NO: 2179457 - RNA, 19 nt, Artificial Sequence
  Description of Artificial Sequence: Synthetic oligonucleotide
  Antisense strand to SEQ ID NO: 2179456
uuacuccaccugauguaaa

SEQ ID NO: 2179458 - RNA, 19 nt, Artificial Sequence
  Description of Artificial Sequence: Synthetic oligonucleotide
  Sense strand starting at position 2258 of SEQ ID NO: 1883245
aaagaacaggugugugaaa

SEQ ID NO: 2179459 - RNA, 19 nt, Artificial Sequence
  Description of Artificial Sequence: Synthetic oligonucleotide
  Antisense strand to SEQ ID NO: 2179458
uuucacacaccuguucuuu

SEQ ID NO: 2179460 - RNA, 19 nt, Artificial Sequence
  Description of Artificial Sequence: Synthetic oligonucleotide
  Sense strand starting at position 2260 of SEQ ID NO: 1883245
agaacaggugugugaaaga

SEQ ID NO: 2179461 - RNA, 19 nt, Artificial Sequence
  Description of Artificial Sequence: Synthetic oligonucleotide
  Antisense strand to SEQ ID NO: 2179460
ucuuucacacaccuguucu

SEQ ID NO: 2179462 - RNA, 19 nt, Artificial Sequence
  Description of Artificial Sequence: Synthetic oligonucleotide
  Sense strand starting at position 2289 of SEQ ID NO: 1883245
aucauuaagcgauacuuaa

SEQ ID NO: 2179463 - RNA, 19 nt, Artificial Sequence
  Description of Artificial Sequence: Synthetic oligonucleotide
  Antisense strand to SEQ ID NO: 2179462
uuaaguaucgcuuaaugau

SEQ ID NO: 2179464 - RNA, 19 nt, Artificial Sequence
  Description of Artificial Sequence: Synthetic oligonucleotide
  Sense strand starting at position 2772 of SEQ ID NO: 1883245
aguagcuaaggugaucaaa

SEQ ID NO: 2179465 - RNA, 19 nt, Artificial Sequence
  Description of Artificial Sequence: Synthetic oligonucleotide
  Antisense strand to SEQ ID NO: 2179464
uuugaucaccuuagcuacu

SEQ ID NO: 2179466 - RNA, 19 nt, Artificial Sequence
  Description of Artificial Sequence: Synthetic oligonucleotide
  Sense strand starting at position 2803 of SEQ ID NO: 1883245
ucagcaauuaaguggaaag

SEQ ID NO: 2179467 - RNA, 19 nt, Artificial Sequence
  Description of Artificial Sequence: Synthetic oligonucleotide
  Antisense strand to SEQ ID NO: 2179466
cuuuccacuuaauugcuga

SEQ ID NO: 2179468 - RNA, 19 nt, Artificial Sequence
  Description of Artificial Sequence: Synthetic oligonucleotide
  Sense strand starting at position 2991 of SEQ ID NO: 1883245
gaguuauaccuuuaugcag

SEQ ID NO: 2179469 - RNA, 19 nt, Artificial Sequence
  Description of Artificial Sequence: Synthetic oligonucleotide
  Antisense strand to SEQ ID NO: 2179468
cugcauaaagguauaacuc

SEQ ID NO: 2179470 - RNA, 19 nt, Artificial Sequence
  Description of Artificial Sequence: Synthetic oligonucleotide
  Sense strand starting at position 3054 of SEQ ID NO: 1883245
acauaacugguuuggagau

SEQ ID NO: 2179471 - RNA, 19 nt, Artificial Sequence
  Description of Artificial Sequence: Synthetic oligonucleotide
  Antisense strand to SEQ ID NO: 2179470
aucuccaaaccaguuaugu

SEQ ID NO: 2179472 - RNA, 19 nt, Artificial Sequence
  Description of Artificial Sequence: Synthetic oligonucleotide
  Sense strand starting at position 3074 of SEQ ID NO: 1883245
uguugaaaugacugaucuc

SEQ ID NO: 2179473 - RNA, 19 nt, Artificial Sequence
  Description of Artificial Sequence: Synthetic oligonucleotide
  Antisense strand to SEQ ID NO: 2179472
gagaucagucauuucaaca

SEQ ID NO: 2179474 - RNA, 19 nt, Artificial Sequence
  Description of Artificial Sequence: Synthetic oligonucleotide
  Sense strand starting at position 3241 of SEQ ID NO: 1883245
uuauacaucuaguugagaa

SEQ ID NO: 2179475 - RNA, 19 nt, Artificial Sequence
  Description of Artificial Sequence: Synthetic oligonucleotide
  Antisense strand to SEQ ID NO: 2179474
uucucaacuagauguauaa

SEQ ID NO: 2179476 - RNA, 19 nt, Artificial Sequence
  Description of Artificial Sequence: Synthetic oligonucleotide
  Sense strand starting at position 3616 of SEQ ID NO: 1883245
cuggaacccugauuauauu

SEQ ID NO: 2179477 - RNA, 19 nt, Artificial Sequence
  Description of Artificial Sequence: Synthetic oligonucleotide
  Antisense strand to SEQ ID NO: 2179476
aauauaaucaggguuccag

SEQ ID NO: 2179478 - RNA, 19 nt, Artificial Sequence
  Description of Artificial Sequence: Synthetic oligonucleotide
  Sense strand starting at position 3667 of SEQ ID NO: 1883245
agcagaaucugggaauuug

SEQ ID NO: 2179479 - RNA, 19 nt, Artificial Sequence
  Description of Artificial Sequence: Synthetic oligonucleotide
  Antisense strand to SEQ ID NO: 2179478
caaauucccagauucugcu

SEQ ID NO: 2179480 - RNA, 19 nt, Artificial Sequence
  Description of Artificial Sequence: Synthetic oligonucleotide
  Sense strand starting at position 3815 of SEQ ID NO: 1883245
uguaaauuagguuaacucu

SEQ ID NO: 2179481 - RNA, 19 nt, Artificial Sequence
  Description of Artificial Sequence: Synthetic oligonucleotide
  Antisense strand to SEQ ID NO: 2179480
agaguuaaccuaauuuaca

SEQ ID NO: 2179482 - RNA, 19 nt, Artificial Sequence
  Description of Artificial Sequence: Synthetic oligonucleotide
  Sense strand starting at position 3821 of SEQ ID NO: 1883245
uuagguuaacucuaagcuu

SEQ ID NO: 2179483 - RNA, 19 nt, Artificial Sequence
  Description of Artificial Sequence: Synthetic oligonucleotide
  Antisense strand to SEQ ID NO: 2179482
aagcuuagaguuaaccuaa

SEQ ID NO: 2179484 - RNA, 19 nt, Artificial Sequence
  Description of Artificial Sequence: Synthetic oligonucleotide
  Sense strand starting at position 140 of SEQ ID NO: 1883246
auaugcugcuucuuuagaa

SEQ ID NO: 2179485 - RNA, 19 nt, Artificial Sequence
  Description of Artificial Sequence: Synthetic oligonucleotide
  Antisense strand to SEQ ID NO: 2179484
uucuaaagaagcagcauau

SEQ ID NO: 2179486 - RNA, 19 nt, Artificial Sequence
  Description of Artificial Sequence: Synthetic oligonucleotide
  Sense strand starting at position 234 of SEQ ID NO: 1883246
cuugcuggguucucuagaa

SEQ ID NO: 2179487 - RNA, 19 nt, Artificial Sequence
  Description of Artificial Sequence: Synthetic oligonucleotide
  Antisense strand to SEQ ID NO: 2179486
uucuagagaacccagcaag

SEQ ID NO: 2179488 - RNA, 19 nt, Artificial Sequence
  Description of Artificial Sequence: Synthetic oligonucleotide
  Sense strand starting at position 581 of SEQ ID NO: 1883246
gucuuucuuggacaacaca

SEQ ID NO: 2179489 - RNA, 19 nt, Artificial Sequence
  Description of Artificial Sequence: Synthetic oligonucleotide
  Antisense strand to SEQ ID NO: 2179488
uguguuguccaagaaagac

SEQ ID NO: 2179490 - RNA, 19 nt, Artificial Sequence
  Description of Artificial Sequence: Synthetic oligonucleotide
  Sense strand starting at position 605 of SEQ ID NO: 1883246
ucaauuaauuaugcaggaa

SEQ ID NO: 2179491 - RNA, 19 nt, Artificial Sequence
  Description of Artificial Sequence: Synthetic oligonucleotide
  Antisense strand to SEQ ID NO: 2179490
uuccugcauaauuaauuga

SEQ ID NO: 2179492 - RNA, 19 nt, Artificial Sequence
  Description of Artificial Sequence: Synthetic oligonucleotide
  Sense strand starting at position 608 of SEQ ID NO: 1883246
auuaauuaugcaggaaugu

SEQ ID NO: 2179493 - RNA, 19 nt, Artificial Sequence
  Description of Artificial Sequence: Synthetic oligonucleotide
  Antisense strand to SEQ ID NO: 2179492
acauuccugcauaauuaau

SEQ ID NO: 2179494 - RNA, 19 nt, Artificial Sequence
  Description of Artificial Sequence: Synthetic oligonucleotide
  Sense strand starting at position 609 of SEQ ID NO: 1883246
uuaauuaugcaggaaugua

SEQ ID NO: 2179495 - RNA, 19 nt, Artificial Sequence
  Description of Artificial Sequence: Synthetic oligonucleotide
  Antisense strand to SEQ ID NO: 2179494
uacauuccugcauaauuaa

SEQ ID NO: 2179496 - RNA, 19 nt, Artificial Sequence
  Description of Artificial Sequence: Synthetic oligonucleotide
  Sense strand starting at position 666 of SEQ ID NO: 1883246
ggaaaccucgacuggugau

SEQ ID NO: 2179497 - RNA, 19 nt, Artificial Sequence
  Description of Artificial Sequence: Synthetic oligonucleotide
  Antisense strand to SEQ ID NO: 2179496
aucaccagucgagguuucc

SEQ ID NO: 2179498 - RNA, 19 nt, Artificial Sequence
  Description of Artificial Sequence: Synthetic oligonucleotide
  Sense strand starting at position 706 of SEQ ID NO: 1883246
gcccguauuccacauagga

SEQ ID NO: 2179499 - RNA, 19 nt, Artificial Sequence
  Description of Artificial Sequence: Synthetic oligonucleotide
  Antisense strand to SEQ ID NO: 2179498
uccuauguggaauacgggc

SEQ ID NO: 2179500 - RNA, 19 nt, Artificial Sequence
  Description of Artificial Sequence: Synthetic oligonucleotide
  Sense strand starting at position 898 of SEQ ID NO: 1883246
gaaguuauuugauaugcca

SEQ ID NO: 2179501 - RNA, 19 nt, Artificial Sequence
  Description of Artificial Sequence: Synthetic oligonucleotide
  Antisense strand to SEQ ID NO: 2179500
uggcauaucaaauaacuuc

SEQ ID NO: 2179502 - RNA, 19 nt, Artificial Sequence
  Description of Artificial Sequence: Synthetic oligonucleotide
  Sense strand starting at position 940 of SEQ ID NO: 1883246
uuaugaaguuuguucucuu

SEQ ID NO: 2179503 - RNA, 19 nt, Artificial Sequence
  Description of Artificial Sequence: Synthetic oligonucleotide
  Antisense strand to SEQ ID NO: 2179502
aagagaacaaacuucauaa

SEQ ID NO: 2179504 - RNA, 19 nt, Artificial Sequence
  Description of Artificial Sequence: Synthetic oligonucleotide
  Sense strand starting at position 1002 of SEQ ID NO: 1883246
uuauuacucuaguuggaug

SEQ ID NO: 2179505 - RNA, 19 nt, Artificial Sequence
  Description of Artificial Sequence: Synthetic oligonucleotide
  Antisense strand to SEQ ID NO: 2179504
cauccaacuagaguaauaa

SEQ ID NO: 2179506 - RNA, 19 nt, Artificial Sequence
  Description of Artificial Sequence: Synthetic oligonucleotide
  Sense strand starting at position 1460 of SEQ ID NO: 1883246
ccuggucauuucucuguca

SEQ ID NO: 2179507 - RNA, 19 nt, Artificial Sequence
  Description of Artificial Sequence: Synthetic oligonucleotide
  Antisense strand to SEQ ID NO: 2179506
ugacagagaaaugaccagg

SEQ ID NO: 2179508 - RNA, 19 nt, Artificial Sequence
  Description of Artificial Sequence: Synthetic oligonucleotide
  Sense strand starting at position 1462 of SEQ ID NO: 1883246
uggucauuucucugucaca

SEQ ID NO: 2179509 - RNA, 19 nt, Artificial Sequence
  Description of Artificial Sequence: Synthetic oligonucleotide
  Antisense strand to SEQ ID NO: 2179508
ugugacagagaaaugacca

SEQ ID NO: 2179510 - RNA, 19 nt, Artificial Sequence
  Description of Artificial Sequence: Synthetic oligonucleotide
  Sense strand starting at position 1553 of SEQ ID NO: 1883246
gagauuaaagccugacgcu

SEQ ID NO: 2179511 - RNA, 19 nt, Artificial Sequence
  Description of Artificial Sequence: Synthetic oligonucleotide
  Antisense strand to SEQ ID NO: 2179510
agcgucaggcuuuaaucuc

SEQ ID NO: 2179512 - RNA, 19 nt, Artificial Sequence
  Description of Artificial Sequence: Synthetic oligonucleotide
  Sense strand starting at position 1554 of SEQ ID NO: 1883246
agauuaaagccugacgcua

SEQ ID NO: 2179513 - RNA, 19 nt, Artificial Sequence
  Description of Artificial Sequence: Synthetic oligonucleotide
  Antisense strand to SEQ ID NO: 2179512
uagcgucaggcuuuaaucu

SEQ ID NO: 2179514 - RNA, 19 nt, Artificial Sequence
  Description of Artificial Sequence: Synthetic oligonucleotide
  Sense strand starting at position 1783 of SEQ ID NO: 1883246
agguuaacucgauggccau

SEQ ID NO: 2179515 - RNA, 19 nt, Artificial Sequence
  Description of Artificial Sequence: Synthetic oligonucleotide
  Antisense strand to SEQ ID NO: 2179514
auggccaucgaguuaaccu

SEQ ID NO: 2179516 - RNA, 19 nt, Artificial Sequence
  Description of Artificial Sequence: Synthetic oligonucleotide
  Sense strand starting at position 1834 of SEQ ID NO: 1883246
gggaguagccuuugacaca

SEQ ID NO: 2179517 - RNA, 19 nt, Artificial Sequence
  Description of Artificial Sequence: Synthetic oligonucleotide
  Antisense strand to SEQ ID NO: 2179516
ugugucaaaggcuacuccc

SEQ ID NO: 2179518 - RNA, 19 nt, Artificial Sequence
  Description of Artificial Sequence: Synthetic oligonucleotide
  Sense strand starting at position 1883 of SEQ ID NO: 1883246
ggaagaacucggcaccauu

SEQ ID NO: 2179519 - RNA, 19 nt, Artificial Sequence
  Description of Artificial Sequence: Synthetic oligonucleotide
  Antisense strand to SEQ ID NO: 2179518
aauggugccgaguucuucc

SEQ ID NO: 2179520 - RNA, 19 nt, Artificial Sequence
  Description of Artificial Sequence: Synthetic oligonucleotide
  Sense strand starting at position 1957 of SEQ ID NO: 1883246
cuaacauuugcgugacucu

SEQ ID NO: 2179521 - RNA, 19 nt, Artificial Sequence
  Description of Artificial Sequence: Synthetic oligonucleotide
  Antisense strand to SEQ ID NO: 2179520
agagucacgcaaauguuag

SEQ ID NO: 2179522 - RNA, 19 nt, Artificial Sequence
  Description of Artificial Sequence: Synthetic oligonucleotide
  Sense strand starting at position 1974 of SEQ ID NO: 1883246
cucgacuguucccuagacu

SEQ ID NO: 2179523 - RNA, 19 nt, Artificial Sequence
  Description of Artificial Sequence: Synthetic oligonucleotide
  Antisense strand to SEQ ID NO: 2179522
agucuagggaacagucgag

SEQ ID NO: 2179524 - RNA, 19 nt, Artificial Sequence
  Description of Artificial Sequence: Synthetic oligonucleotide
  Sense strand starting at position 1975 of SEQ ID NO: 1883246
ucgacuguucccuagacuc

SEQ ID NO: 2179525 - RNA, 19 nt, Artificial Sequence
  Description of Artificial Sequence: Synthetic oligonucleotide
  Antisense strand to SEQ ID NO: 2179524
gagucuagggaacagucga

SEQ ID NO: 2179526 - RNA, 19 nt, Artificial Sequence
  Description of Artificial Sequence: Synthetic oligonucleotide
  Sense strand starting at position 2102 of SEQ ID NO: 1883246
ucagauguccgccauaauu

SEQ ID NO: 2179527 - RNA, 19 nt, Artificial Sequence
  Description of Artificial Sequence: Synthetic oligonucleotide
  Antisense strand to SEQ ID NO: 2179526
aauuauggcggacaucuga

SEQ ID NO: 2179528 - RNA, 19 nt, Artificial Sequence
  Description of Artificial Sequence: Synthetic oligonucleotide
  Sense strand starting at position 2219 of SEQ ID NO: 1883246
accaguaaugcugacccaa

SEQ ID NO: 2179529 - RNA, 19 nt, Artificial Sequence
  Description of Artificial Sequence: Synthetic oligonucleotide
  Antisense strand to SEQ ID NO: 2179528
uugggucagcauuacuggu

SEQ ID NO: 2179530 - RNA, 19 nt, Artificial Sequence
  Description of Artificial Sequence: Synthetic oligonucleotide
  Sense strand starting at position 2266 of SEQ ID NO: 1883246
agacacagcuuucuguuau

SEQ ID NO: 2179531 - RNA, 19 nt, Artificial Sequence
  Description of Artificial Sequence: Synthetic oligonucleotide
  Antisense strand to SEQ ID NO: 2179530
auaacagaaagcugugucu

SEQ ID NO: 2179532 - RNA, 19 nt, Artificial Sequence
  Description of Artificial Sequence: Synthetic oligonucleotide
  Sense strand starting at position 2287 of SEQ ID NO: 1883246
ggugaaacuuaggagaaau

SEQ ID NO: 2179533 - RNA, 19 nt, Artificial Sequence
  Description of Artificial Sequence: Synthetic oligonucleotide
  Antisense strand to SEQ ID NO: 2179532
auuucuccuaaguuucacc

SEQ ID NO: 2179534 - RNA, 19 nt, Artificial Sequence
  Description of Artificial Sequence: Synthetic oligonucleotide
  Sense strand starting at position 2355 of SEQ ID NO: 1883246
gucagaucuguuuaucagu

SEQ ID NO: 2179535 - RNA, 19 nt, Artificial Sequence
  Description of Artificial Sequence: Synthetic oligonucleotide
  Antisense strand to SEQ ID NO: 2179534
acugauaaacagaucugac

SEQ ID NO: 2179536 - RNA, 19 nt, Artificial Sequence
  Description of Artificial Sequence: Synthetic oligonucleotide
  Sense strand starting at position 2434 of SEQ ID NO: 1883246
aagguaguaucugcaaaua

SEQ ID NO: 2179537 - RNA, 19 nt, Artificial Sequence
  Description of Artificial Sequence: Synthetic oligonucleotide
  Antisense strand to SEQ ID NO: 2179536
uauuugcagauacuaccuu

SEQ ID NO: 2179538 - RNA, 19 nt, Artificial Sequence
  Description of Artificial Sequence: Synthetic oligonucleotide
  Sense strand starting at position 2604 of SEQ ID NO: 1883246
cuaauauuccaagguaaug

SEQ ID NO: 2179539 - RNA, 19 nt, Artificial Sequence
  Description of Artificial Sequence: Synthetic oligonucleotide
  Antisense strand to SEQ ID NO: 2179538
cauuaccuuggaauauuag

SEQ ID NO: 2179540 - RNA, 19 nt, Artificial Sequence
  Description of Artificial Sequence: Synthetic oligonucleotide
  Sense strand starting at position 3048 of SEQ ID NO: 1883246
acugaauucuaugcaaagu

SEQ ID NO: 2179541 - RNA, 19 nt, Artificial Sequence
  Description of Artificial Sequence: Synthetic oligonucleotide
  Antisense strand to SEQ ID NO: 2179540
acuuugcauagaauucagu

SEQ ID NO: 2179542 - RNA, 19 nt, Artificial Sequence
  Description of Artificial Sequence: Synthetic oligonucleotide
  Sense strand starting at position 3185 of SEQ ID NO: 1883246
ccucauagcuggguuuaca

SEQ ID NO: 2179543 - RNA, 19 nt, Artificial Sequence
  Description of Artificial Sequence: Synthetic oligonucleotide
  Antisense strand to SEQ ID NO: 2179542
uguaaacccagcuaugagg

SEQ ID NO: 2179544 - RNA, 19 nt, Artificial Sequence
  Description of Artificial Sequence: Synthetic oligonucleotide
  Sense strand starting at position 3481 of SEQ ID NO: 1883246
augccuguugagugaugaa

SEQ ID NO: 2179545 - RNA, 19 nt, Artificial Sequence
  Description of Artificial Sequence: Synthetic oligonucleotide
  Antisense strand to SEQ ID NO: 2179544
uucaucacucaacaggcau

SEQ ID NO: 2179546 - RNA, 19 nt, Artificial Sequence
  Description of Artificial Sequence: Synthetic oligonucleotide
  Sense strand starting at position 3624 of SEQ ID NO: 1883246
ucagaagacuugccucagu

SEQ ID NO: 2179547 - RNA, 19 nt, Artificial Sequence
  Description of Artificial Sequence: Synthetic oligonucleotide
  Antisense strand to SEQ ID NO: 2179546
acugaggcaagucuucuga

SEQ ID NO: 2179548 - RNA, 19 nt, Artificial Sequence
  Description of Artificial Sequence: Synthetic oligonucleotide
  Sense strand starting at position 3627 of SEQ ID NO: 1883246
gaagacuugccucagugua

SEQ ID NO: 2179549 - RNA, 19 nt, Artificial Sequence
  Description of Artificial Sequence: Synthetic oligonucleotide
  Antisense strand to SEQ ID NO: 2179548
uacacugaggcaagucuuc

SEQ ID NO: 2179550 - RNA, 19 nt, Artificial Sequence
  Description of Artificial Sequence: Synthetic oligonucleotide
  Sense strand starting at position 3629 of SEQ ID NO: 1883246
agacuugccucaguguaag

SEQ ID NO: 2179551 - RNA, 19 nt, Artificial Sequence
  Description of Artificial Sequence: Synthetic oligonucleotide
  Antisense strand to SEQ ID NO: 2179550
cuuacacugaggcaagucu

SEQ ID NO: 2179552 - RNA, 19 nt, Artificial Sequence
  Description of Artificial Sequence: Synthetic oligonucleotide
  Sense strand starting at position 3651 of SEQ ID NO: 1883246
gcauuuaaaugauagucca

SEQ ID NO: 2179553 - RNA, 19 nt, Artificial Sequence
  Description of Artificial Sequence: Synthetic oligonucleotide
  Antisense strand to SEQ ID NO: 2179552
uggacuaucauuuaaaugc

SEQ ID NO: 2179554 - RNA, 19 nt, Artificial Sequence
  Description of Artificial Sequence: Synthetic oligonucleotide
  Sense strand starting at position 3723 of SEQ ID NO: 1883246
aaacuaguuugaccagguu

SEQ ID NO: 2179555 - RNA, 19 nt, Artificial Sequence
  Description of Artificial Sequence: Synthetic oligonucleotide
  Antisense strand to SEQ ID NO: 2179554
aaccuggucaaacuaguuu

SEQ ID NO: 2179556 - RNA, 19 nt, Artificial Sequence
  Description of Artificial Sequence: Synthetic oligonucleotide
  Sense strand starting at position 3788 of SEQ ID NO: 1883246
aagugauuaagagguguga

SEQ ID NO: 2179557 - RNA, 19 nt, Artificial Sequence
  Description of Artificial Sequence: Synthetic oligonucleotide
  Antisense strand to SEQ ID NO: 2179556
ucacaccucuuaaucacuu

SEQ ID NO: 2179558 - RNA, 19 nt, Artificial Sequence
  Description of Artificial Sequence: Synthetic oligonucleotide
  Sense strand starting at position 3911 of SEQ ID NO: 1883246
uugauuauacuguaaugcu

SEQ ID NO: 2179559 - RNA, 19 nt, Artificial Sequence
  Description of Artificial Sequence: Synthetic oligonucleotide
  Antisense strand to SEQ ID NO: 2179558
agcauuacaguauaaucaa

SEQ ID NO: 2179560 - RNA, 19 nt, Artificial Sequence
  Description of Artificial Sequence: Synthetic oligonucleotide
  Sense strand starting at position 3940 of SEQ ID NO: 1883246
acauaaggcuucucuugaa

SEQ ID NO: 2179561 - RNA, 19 nt, Artificial Sequence
  Description of Artificial Sequence: Synthetic oligonucleotide
  Antisense strand to SEQ ID NO: 2179560
uucaagagaagccuuaugu

SEQ ID NO: 2179562 - RNA, 19 nt, Artificial Sequence
  Description of Artificial Sequence: Synthetic oligonucleotide
  Sense strand starting at position 3960 of SEQ ID NO: 1883246
augucuuugugcucuauuu

SEQ ID NO: 2179563 - RNA, 19 nt, Artificial Sequence
  Description of Artificial Sequence: Synthetic oligonucleotide
  Antisense strand to SEQ ID NO: 2179562
aaauagagcacaaagacau

SEQ ID NO: 2179564 - RNA, 19 nt, Artificial Sequence
  Description of Artificial Sequence: Synthetic oligonucleotide
  Sense strand starting at position 41 of SEQ ID NO: 1883247
uugugaguucgggcagugu

SEQ ID NO: 2179565 - RNA, 19 nt, Artificial Sequence
  Description of Artificial Sequence: Synthetic oligonucleotide
  Antisense strand to SEQ ID NO: 2179564
acacugcccgaacucacaa

SEQ ID NO: 2179566 - RNA, 19 nt, Artificial Sequence
  Description of Artificial Sequence: Synthetic oligonucleotide
  Sense strand starting at position 43 of SEQ ID NO: 1883247
gugaguucgggcaguguca

SEQ ID NO: 2179567 - RNA, 19 nt, Artificial Sequence
  Description of Artificial Sequence: Synthetic oligonucleotide
  Antisense strand to SEQ ID NO: 2179566
ugacacugcccgaacucac

SEQ ID NO: 2179568 - RNA, 19 nt, Artificial Sequence
  Description of Artificial Sequence: Synthetic oligonucleotide
  Sense strand starting at position 52 of SEQ ID NO: 1883247
ggcagugucacugacuaag

SEQ ID NO: 2179569 - RNA, 19 nt, Artificial Sequence
  Description of Artificial Sequence: Synthetic oligonucleotide
  Antisense strand to SEQ ID NO: 2179568
cuuagucagugacacugcc

SEQ ID NO: 2179570 - RNA, 19 nt, Artificial Sequence
  Description of Artificial Sequence: Synthetic oligonucleotide
  Sense strand starting at position 94 of SEQ ID NO: 1883247
ucaugagcauccucguaau

SEQ ID NO: 2179571 - RNA, 19 nt, Artificial Sequence
  Description of Artificial Sequence: Synthetic oligonucleotide
  Antisense strand to SEQ ID NO: 2179570
auuacgaggaugcucauga

SEQ ID NO: 2179572 - RNA, 19 nt, Artificial Sequence
  Description of Artificial Sequence: Synthetic oligonucleotide
  Sense strand starting at position 157 of SEQ ID NO: 1883247
uccuuucugcucgauuaaa

SEQ ID NO: 2179573 - RNA, 19 nt, Artificial Sequence
  Description of Artificial Sequence: Synthetic oligonucleotide
  Antisense strand to SEQ ID NO: 2179572
uuuaaucgagcagaaagga

SEQ ID NO: 2179574 - RNA, 19 nt, Artificial Sequence
  Description of Artificial Sequence: Synthetic oligonucleotide
  Sense strand starting at position 206 of SEQ ID NO: 1883247
cgguggugugagggugaaa

SEQ ID NO: 2179575 - RNA, 19 nt, Artificial Sequence
  Description of Artificial Sequence: Synthetic oligonucleotide
  Antisense strand to SEQ ID NO: 2179574
uuucacccucacaccaccg

SEQ ID NO: 2179576 - RNA, 19 nt, Artificial Sequence
  Description of Artificial Sequence: Synthetic oligonucleotide
  Sense strand starting at position 208 of SEQ ID NO: 1883247
guggugugagggugaaaga

SEQ ID NO: 2179577 - RNA, 19 nt, Artificial Sequence
  Description of Artificial Sequence: Synthetic oligonucleotide
  Antisense strand to SEQ ID NO: 2179576
ucuuucacccucacaccac

SEQ ID NO: 2179578 - RNA, 19 nt, Artificial Sequence
  Description of Artificial Sequence: Synthetic oligonucleotide
  Sense strand starting at position 211 of SEQ ID NO: 1883247
gugugagggugaaagaauu

SEQ ID NO: 2179579 - RNA, 19 nt, Artificial Sequence
  Description of Artificial Sequence: Synthetic oligonucleotide
  Antisense strand to SEQ ID NO: 2179578
aauucuuucacccucacac

SEQ ID NO: 2179580 - RNA, 19 nt, Artificial Sequence
  Description of Artificial Sequence: Synthetic oligonucleotide
  Sense strand starting at position 316 of SEQ ID NO: 1883247
agaagcugacugugaagaa

SEQ ID NO: 2179581 - RNA, 19 nt, Artificial Sequence
  Description of Artificial Sequence: Synthetic oligonucleotide
  Antisense strand to SEQ ID NO: 2179580
uucuucacagucagcuucu

SEQ ID NO: 2179582 - RNA, 19 nt, Artificial Sequence
  Description of Artificial Sequence: Synthetic oligonucleotide
  Sense strand starting at position 684 of SEQ ID NO: 1883247
cugagcgauguccaggauu

SEQ ID NO: 2179583 - RNA, 19 nt, Artificial Sequence
  Description of Artificial Sequence: Synthetic oligonucleotide
  Antisense strand to SEQ ID NO: 2179582
aauccuggacaucgcucag

SEQ ID NO: 2179584 - RNA, 19 nt, Artificial Sequence
  Description of Artificial Sequence: Synthetic oligonucleotide
  Sense strand starting at position 756 of SEQ ID NO: 1883247
gagaauugcagaggaagca

SEQ ID NO: 2179585 - RNA, 19 nt, Artificial Sequence
  Description of Artificial Sequence: Synthetic oligonucleotide
  Antisense strand to SEQ ID NO: 2179584
ugcuuccucugcaauucuc

SEQ ID NO: 2179586 - RNA, 19 nt, Artificial Sequence
  Description of Artificial Sequence: Synthetic oligonucleotide
  Sense strand starting at position 843 of SEQ ID NO: 1883247
uaugaucagguuugggauu

SEQ ID NO: 2179587 - RNA, 19 nt, Artificial Sequence
  Description of Artificial Sequence: Synthetic oligonucleotide
  Antisense strand to SEQ ID NO: 2179586
aaucccaaaccugaucaua

SEQ ID NO: 2179588 - RNA, 19 nt, Artificial Sequence
  Description of Artificial Sequence: Synthetic oligonucleotide
  Sense strand starting at position 913 of SEQ ID NO: 1883247
acaugagugucuccaugga

SEQ ID NO: 2179589 - RNA, 19 nt, Artificial Sequence
  Description of Artificial Sequence: Synthetic oligonucleotide
  Antisense strand to SEQ ID NO: 2179588
uccauggagacacucaugu

SEQ ID NO: 2179590 - RNA, 19 nt, Artificial Sequence
  Description of Artificial Sequence: Synthetic oligonucleotide
  Sense strand starting at position 917 of SEQ ID NO: 1883247
gagugucuccauggaagua

SEQ ID NO: 2179591 - RNA, 19 nt, Artificial Sequence
  Description of Artificial Sequence: Synthetic oligonucleotide
  Antisense strand to SEQ ID NO: 2179590
uacuuccauggagacacuc

SEQ ID NO: 2179592 - RNA, 19 nt, Artificial Sequence
  Description of Artificial Sequence: Synthetic oligonucleotide
  Sense strand starting at position 918 of SEQ ID NO: 1883247
agugucuccauggaaguaa

SEQ ID NO: 2179593 - RNA, 19 nt, Artificial Sequence
  Description of Artificial Sequence: Synthetic oligonucleotide
  Antisense strand to SEQ ID NO: 2179592
uuacuuccauggagacacu

SEQ ID NO: 2179594 - RNA, 19 nt, Artificial Sequence
  Description of Artificial Sequence: Synthetic oligonucleotide
  Sense strand starting at position 959 of SEQ ID NO: 1883247
gagcaacucucuucuguga

SEQ ID NO: 2179595 - RNA, 19 nt, Artificial Sequence
  Description of Artificial Sequence: Synthetic oligonucleotide
  Antisense strand to SEQ ID NO: 2179594
ucacagaagagaguugcuc

SEQ ID NO: 2179596 - RNA, 19 nt, Artificial Sequence
  Description of Artificial Sequence: Synthetic oligonucleotide
  Sense strand starting at position 982 of SEQ ID NO: 1883247
gucugauuccuacaugacc

SEQ ID NO: 2179597 - RNA, 19 nt, Artificial Sequence
  Description of Artificial Sequence: Synthetic oligonucleotide
  Antisense strand to SEQ ID NO: 2179596
ggucauguaggaaucagac

SEQ ID NO: 2179598 - RNA, 19 nt, Artificial Sequence
  Description of Artificial Sequence: Synthetic oligonucleotide
  Sense strand starting at position 1080 of SEQ ID NO: 1883247
acaucuagugccuagauaa

SEQ ID NO: 2179599 - RNA, 19 nt, Artificial Sequence
  Description of Artificial Sequence: Synthetic oligonucleotide
  Antisense strand to SEQ ID NO: 2179598
uuaucuaggcacuagaugu

SEQ ID NO: 2179600 - RNA, 19 nt, Artificial Sequence
  Description of Artificial Sequence: Synthetic oligonucleotide
  Sense strand starting at position 1534 of SEQ ID NO: 1883247
uguguaauagcacacaaau

SEQ ID NO: 2179601 - RNA, 19 nt, Artificial Sequence
  Description of Artificial Sequence: Synthetic oligonucleotide
  Antisense strand to SEQ ID NO: 2179600
auuugugugcuauuacaca

SEQ ID NO: 2179602 - RNA, 19 nt, Artificial Sequence
  Description of Artificial Sequence: Synthetic oligonucleotide
  Sense strand starting at position 1607 of SEQ ID NO: 1883247
augaguaucuuaccuaccu

SEQ ID NO: 2179603 - RNA, 19 nt, Artificial Sequence
  Description of Artificial Sequence: Synthetic oligonucleotide
  Antisense strand to SEQ ID NO: 2179602
agguagguaagauacucau

SEQ ID NO: 2179604 - RNA, 19 nt, Artificial Sequence
  Description of Artificial Sequence: Synthetic oligonucleotide
  Sense strand starting at position 1608 of SEQ ID NO: 1883247
ugaguaucuuaccuaccuu

SEQ ID NO: 2179605 - RNA, 19 nt, Artificial Sequence
  Description of Artificial Sequence: Synthetic oligonucleotide
  Antisense strand to SEQ ID NO: 2179604
aagguagguaagauacuca

SEQ ID NO: 2179606 - RNA, 19 nt, Artificial Sequence
  Description of Artificial Sequence: Synthetic oligonucleotide
  Sense strand starting at position 1697 of SEQ ID NO: 1883247
acuccaacugcccgagauu

SEQ ID NO: 2179607 - RNA, 19 nt, Artificial Sequence
  Description of Artificial Sequence: Synthetic oligonucleotide
  Antisense strand to SEQ ID NO: 2179606
aaucucgggcaguuggagu

SEQ ID NO: 2179608 - RNA, 19 nt, Artificial Sequence
  Description of Artificial Sequence: Synthetic oligonucleotide
  Sense strand starting at position 1708 of SEQ ID NO: 1883247
ccgagauucccagagaagc

SEQ ID NO: 2179609 - RNA, 19 nt, Artificial Sequence
  Description of Artificial Sequence: Synthetic oligonucleotide
  Antisense strand to SEQ ID NO: 2179608
gcuucucugggaaucucgg

SEQ ID NO: 2179610 - RNA, 19 nt, Artificial Sequence
  Description of Artificial Sequence: Synthetic oligonucleotide
  Sense strand starting at position 1973 of SEQ ID NO: 1883247
uccugcugguuauuuguaa

SEQ ID NO: 2179611 - RNA, 19 nt, Artificial Sequence
  Description of Artificial Sequence: Synthetic oligonucleotide
  Antisense strand to SEQ ID NO: 2179610
uuacaaauaaccagcagga

SEQ ID NO: 2179612 - RNA, 19 nt, Artificial Sequence
  Description of Artificial Sequence: Synthetic oligonucleotide
  Sense strand starting at position 2029 of SEQ ID NO: 1883247
gugauucccugcucacauc

SEQ ID NO: 2179613 - RNA, 19 nt, Artificial Sequence
  Description of Artificial Sequence: Synthetic oligonucleotide
  Antisense strand to SEQ ID NO: 2179612
gaugugagcagggaaucac

SEQ ID NO: 2179614 - RNA, 19 nt, Artificial Sequence
  Description of Artificial Sequence: Synthetic oligonucleotide
  Sense strand starting at position 2101 of SEQ ID NO: 1883247
cugccuucuaucggagacu

SEQ ID NO: 2179615 - RNA, 19 nt, Artificial Sequence
  Description of Artificial Sequence: Synthetic oligonucleotide
  Antisense strand to SEQ ID NO: 2179614
agucuccgauagaaggcag

SEQ ID NO: 2179616 - RNA, 19 nt, Artificial Sequence
  Description of Artificial Sequence: Synthetic oligonucleotide
  Sense strand starting at position 2340 of SEQ ID NO: 1883247
agguuaaacucugucaaau

SEQ ID NO: 2179617 - RNA, 19 nt, Artificial Sequence
  Description of Artificial Sequence: Synthetic oligonucleotide
  Antisense strand to SEQ ID NO: 2179616
auuugacagaguuuaaccu

SEQ ID NO: 2179618 - RNA, 19 nt, Artificial Sequence
  Description of Artificial Sequence: Synthetic oligonucleotide
  Sense strand starting at position 2379 of SEQ ID NO: 1883247
acuucuguugaaugaaaug

SEQ ID NO: 2179619 - RNA, 19 nt, Artificial Sequence
  Description of Artificial Sequence: Synthetic oligonucleotide
  Antisense strand to SEQ ID NO: 2179618
cauuucauucaacagaagu

SEQ ID NO: 2179620 - RNA, 19 nt, Artificial Sequence
  Description of Artificial Sequence: Synthetic oligonucleotide
  Sense strand starting at position 2384 of SEQ ID NO: 1883247
uguugaaugaaaugauugu

SEQ ID NO: 2179621 - RNA, 19 nt, Artificial Sequence
  Description of Artificial Sequence: Synthetic oligonucleotide
  Antisense strand to SEQ ID NO: 2179620
acaaucauuucauucaaca

SEQ ID NO: 2179622 - RNA, 19 nt, Artificial Sequence
  Description of Artificial Sequence: Synthetic oligonucleotide
  Sense strand starting at position 2478 of SEQ ID NO: 1883247
ggugccuuggccugaauuu

SEQ ID NO: 2179623 - RNA, 19 nt, Artificial Sequence
  Description of Artificial Sequence: Synthetic oligonucleotide
  Antisense strand to SEQ ID NO: 2179622
aaauucaggccaaggcacc

SEQ ID NO: 2179624 - RNA, 19 nt, Artificial Sequence
  Description of Artificial Sequence: Synthetic oligonucleotide
  Sense strand starting at position 2580 of SEQ ID NO: 1883247
uuuaaacccuuuguuaagu

SEQ ID NO: 2179625 - RNA, 19 nt, Artificial Sequence
  Description of Artificial Sequence: Synthetic oligonucleotide
  Antisense strand to SEQ ID NO: 2179624
acuuaacaaaggguuuaaa

SEQ ID NO: 2179626 - RNA, 19 nt, Artificial Sequence
  Description of Artificial Sequence: Synthetic oligonucleotide
  Sense strand starting at position 3086 of SEQ ID NO: 1883247
agcacugacucaucagaac

SEQ ID NO: 2179627 - RNA, 19 nt, Artificial Sequence
  Description of Artificial Sequence: Synthetic oligonucleotide
  Antisense strand to SEQ ID NO: 2179626
guucugaugagucagugcu

SEQ ID NO: 2179628 - RNA, 19 nt, Artificial Sequence
  Description of Artificial Sequence: Synthetic oligonucleotide
  Sense strand starting at position 3089 of SEQ ID NO: 1883247
acugacucaucagaacaga

SEQ ID NO: 2179629 - RNA, 19 nt, Artificial Sequence
  Description of Artificial Sequence: Synthetic oligonucleotide
  Antisense strand to SEQ ID NO: 2179628
ucuguucugaugagucagu

SEQ ID NO: 2179630 - RNA, 19 nt, Artificial Sequence
  Description of Artificial Sequence: Synthetic oligonucleotide
  Sense strand starting at position 3125 of SEQ ID NO: 1883247
cagcaaggucuagaagguu

SEQ ID NO: 2179631 - RNA, 19 nt, Artificial Sequence
  Description of Artificial Sequence: Synthetic oligonucleotide
  Antisense strand to SEQ ID NO: 2179630
aaccuucuagaccuugcug

SEQ ID NO: 2179632 - RNA, 19 nt, Artificial Sequence
  Description of Artificial Sequence: Synthetic oligonucleotide
  Sense strand starting at position 3342 of SEQ ID NO: 1883247
ccagaaauggccugguucu

SEQ ID NO: 2179633 - RNA, 19 nt, Artificial Sequence
  Description of Artificial Sequence: Synthetic oligonucleotide
  Antisense strand to SEQ ID NO: 2179632
agaaccaggccauuucugg

SEQ ID NO: 2179634 - RNA, 19 nt, Artificial Sequence
  Description of Artificial Sequence: Synthetic oligonucleotide
  Sense strand starting at position 3391 of SEQ ID NO: 1883247
gguguuggcacucauaguc

SEQ ID NO: 2179635 - RNA, 19 nt, Artificial Sequence
  Description of Artificial Sequence: Synthetic oligonucleotide
  Antisense strand to SEQ ID NO: 2179634
gacuaugagugccaacacc

SEQ ID NO: 2179636 - RNA, 19 nt, Artificial Sequence
  Description of Artificial Sequence: Synthetic oligonucleotide
  Sense strand starting at position 3401 of SEQ ID NO: 1883247
cucauagucuuguugaaca

SEQ ID NO: 2179637 - RNA, 19 nt, Artificial Sequence
  Description of Artificial Sequence: Synthetic oligonucleotide
  Antisense strand to SEQ ID NO: 2179636
uguucaacaagacuaugag

SEQ ID NO: 2179638 - RNA, 19 nt, Artificial Sequence
  Description of Artificial Sequence: Synthetic oligonucleotide
  Sense strand starting at position 3647 of SEQ ID NO: 1883247
acucuuguugccuagucua

SEQ ID NO: 2179639 - RNA, 19 nt, Artificial Sequence
  Description of Artificial Sequence: Synthetic oligonucleotide
  Antisense strand to SEQ ID NO: 2179638
uagacuaggcaacaagagu

SEQ ID NO: 2179640 - RNA, 19 nt, Artificial Sequence
  Description of Artificial Sequence: Synthetic oligonucleotide
  Sense strand starting at position 3914 of SEQ ID NO: 1883247
ccagacagcugcuucuuua

SEQ ID NO: 2179641 - RNA, 19 nt, Artificial Sequence
  Description of Artificial Sequence: Synthetic oligonucleotide
  Antisense strand to SEQ ID NO: 2179640
uaaagaagcagcugucugg

SEQ ID NO: 2179642 - RNA, 19 nt, Artificial Sequence
  Description of Artificial Sequence: Synthetic oligonucleotide
  Sense strand starting at position 3968 of SEQ ID NO: 1883247
cuuauagaggccuguuuaa

SEQ ID NO: 2179643 - RNA, 19 nt, Artificial Sequence
  Description of Artificial Sequence: Synthetic oligonucleotide
  Antisense strand to SEQ ID NO: 2179642
uuaaacaggccucuauaag

SEQ ID NO: 2179644 - RNA, 19 nt, Artificial Sequence
  Description of Artificial Sequence: Synthetic oligonucleotide
  Sense strand starting at position 64 of SEQ ID NO: 1883248
gcaggaaguagugauggau

SEQ ID NO: 2179645 - RNA, 19 nt, Artificial Sequence
  Description of Artificial Sequence: Synthetic oligonucleotide
  Antisense strand to SEQ ID NO: 2179644
auccaucacuacuuccugc

SEQ ID NO: 2179646 - RNA, 19 nt, Artificial Sequence
  Description of Artificial Sequence: Synthetic oligonucleotide
  Sense strand starting at position 76 of SEQ ID NO: 1883248
gauggaugcccuggacuga

SEQ ID NO: 2179647 - RNA, 19 nt, Artificial Sequence
  Description of Artificial Sequence: Synthetic oligonucleotide
  Antisense strand to SEQ ID NO: 2179646
ucaguccagggcauccauc

SEQ ID NO: 2179648 - RNA, 19 nt, Artificial Sequence
  Description of Artificial Sequence: Synthetic oligonucleotide
  Sense strand starting at position 156 of SEQ ID NO: 1883248
gggauugaccucggacuga

SEQ ID NO: 2179649 - RNA, 19 nt, Artificial Sequence
  Description of Artificial Sequence: Synthetic oligonucleotide
  Antisense strand to SEQ ID NO: 2179648
ucaguccgaggucaauccc

SEQ ID NO: 2179650 - RNA, 19 nt, Artificial Sequence
  Description of Artificial Sequence: Synthetic oligonucleotide
  Sense strand starting at position 315 of SEQ ID NO: 1883248
ggugaugugaaguggaaua

SEQ ID NO: 2179651 - RNA, 19 nt, Artificial Sequence
  Description of Artificial Sequence: Synthetic oligonucleotide
  Antisense strand to SEQ ID NO: 2179650
uauuccacuucacaucacc

SEQ ID NO: 2179652 - RNA, 19 nt, Artificial Sequence
  Description of Artificial Sequence: Synthetic oligonucleotide
  Sense strand starting at position 448 of SEQ ID NO: 1883248
cauccaggauguguuaaga

SEQ ID NO: 2179653 - RNA, 19 nt, Artificial Sequence
  Description of Artificial Sequence: Synthetic oligonucleotide
  Antisense strand to SEQ ID NO: 2179652
ucuuaacacauccuggaug

SEQ ID NO: 2179654 - RNA, 19 nt, Artificial Sequence
  Description of Artificial Sequence: Synthetic oligonucleotide
  Sense strand starting at position 836 of SEQ ID NO: 1883248
uguuauucucaccgaugga

SEQ ID NO: 2179655 - RNA, 19 nt, Artificial Sequence
  Description of Artificial Sequence: Synthetic oligonucleotide
  Antisense strand to SEQ ID NO: 2179654
uccaucggugagaauaaca

SEQ ID NO: 2179656 - RNA, 19 nt, Artificial Sequence
  Description of Artificial Sequence: Synthetic oligonucleotide
  Sense strand starting at position 837 of SEQ ID NO: 1883248
guuauucucaccgauggau

SEQ ID NO: 2179657 - RNA, 19 nt, Artificial Sequence
  Description of Artificial Sequence: Synthetic oligonucleotide
  Antisense strand to SEQ ID NO: 2179656
auccaucggugagaauaac

SEQ ID NO: 2179658 - RNA, 19 nt, Artificial Sequence
  Description of Artificial Sequence: Synthetic oligonucleotide
  Sense strand starting at position 839 of SEQ ID NO: 1883248
uauucucaccgauggauau

SEQ ID NO: 2179659 - RNA, 19 nt, Artificial Sequence
  Description of Artificial Sequence: Synthetic oligonucleotide
  Antisense strand to SEQ ID NO: 2179658
auauccaucggugagaaua

SEQ ID NO: 2179660 - RNA, 19 nt, Artificial Sequence
  Description of Artificial Sequence: Synthetic oligonucleotide
  Sense strand starting at position 840 of SEQ ID NO: 1883248
auucucaccgauggauauu

SEQ ID NO: 2179661 - RNA, 19 nt, Artificial Sequence
  Description of Artificial Sequence: Synthetic oligonucleotide
  Antisense strand to SEQ ID NO: 2179660
aauauccaucggugagaau

SEQ ID NO: 2179662 - RNA, 19 nt, Artificial Sequence
  Description of Artificial Sequence: Synthetic oligonucleotide
  Sense strand starting at position 899 of SEQ ID NO: 1883248
aucugagaugaaugcgaau

SEQ ID NO: 2179663 - RNA, 19 nt, Artificial Sequence
  Description of Artificial Sequence: Synthetic oligonucleotide
  Antisense strand to SEQ ID NO: 2179662
auucgcauucaucucagau

SEQ ID NO: 2179664 - RNA, 19 nt, Artificial Sequence
  Description of Artificial Sequence: Synthetic oligonucleotide
  Sense strand starting at position 901 of SEQ ID NO: 1883248
cugagaugaaugcgaauug

SEQ ID NO: 2179665 - RNA, 19 nt, Artificial Sequence
  Description of Artificial Sequence: Synthetic oligonucleotide
  Antisense strand to SEQ ID NO: 2179664
caauucgcauucaucucag

SEQ ID NO: 2179666 - RNA, 19 nt, Artificial Sequence
  Description of Artificial Sequence: Synthetic oligonucleotide
  Sense strand starting at position 990 of SEQ ID NO: 1883248
gaaaucaguuucgagauuu

SEQ ID NO: 2179667 - RNA, 19 nt, Artificial Sequence
  Description of Artificial Sequence: Synthetic oligonucleotide
  Antisense strand to SEQ ID NO: 2179666
aaaucucgaaacugauuuc

SEQ ID NO: 2179668 - RNA, 19 nt, Artificial Sequence
  Description of Artificial Sequence: Synthetic oligonucleotide
  Sense strand starting at position 1267 of SEQ ID NO: 1883248
gauuauucccagggaccgu

SEQ ID NO: 2179669 - RNA, 19 nt, Artificial Sequence
  Description of Artificial Sequence: Synthetic oligonucleotide
  Antisense strand to SEQ ID NO: 2179668
acggucccugggaauaauc

SEQ ID NO: 2179670 - RNA, 19 nt, Artificial Sequence
  Description of Artificial Sequence: Synthetic oligonucleotide
  Sense strand starting at position 1641 of SEQ ID NO: 1883248
gagauuuacgguggcgcua

SEQ ID NO: 2179671 - RNA, 19 nt, Artificial Sequence
  Description of Artificial Sequence: Synthetic oligonucleotide
  Antisense strand to SEQ ID NO: 2179670
uagcgccaccguaaaucuc

SEQ ID NO: 2179672 - RNA, 19 nt, Artificial Sequence
  Description of Artificial Sequence: Synthetic oligonucleotide
  Sense strand starting at position 2548 of SEQ ID NO: 1883248
ggagagugcggacgagaau

SEQ ID NO: 2179673 - RNA, 19 nt, Artificial Sequence
  Description of Artificial Sequence: Synthetic oligonucleotide
  Antisense strand to SEQ ID NO: 2179672
auucucguccgcacucucc

SEQ ID NO: 2179674 - RNA, 19 nt, Artificial Sequence
  Description of Artificial Sequence: Synthetic oligonucleotide
  Sense strand starting at position 2801 of SEQ ID NO: 1883248
ucguuuaacggcgauuuca

SEQ ID NO: 2179675 - RNA, 19 nt, Artificial Sequence
  Description of Artificial Sequence: Synthetic oligonucleotide
  Antisense strand to SEQ ID NO: 2179674
ugaaaucgccguuaaacga

SEQ ID NO: 2179676 - RNA, 19 nt, Artificial Sequence
  Description of Artificial Sequence: Synthetic oligonucleotide
  Sense strand starting at position 2921 of SEQ ID NO: 1883248
aggagugagucucuuuaca

SEQ ID NO: 2179677 - RNA, 19 nt, Artificial Sequence
  Description of Artificial Sequence: Synthetic oligonucleotide
  Antisense strand to SEQ ID NO: 2179676
uguaaagagacucacuccu

SEQ ID NO: 2179678 - RNA, 19 nt, Artificial Sequence
  Description of Artificial Sequence: Synthetic oligonucleotide
  Sense strand starting at position 2923 of SEQ ID NO: 1883248
gagugagucucuuuacacu

SEQ ID NO: 2179679 - RNA, 19 nt, Artificial Sequence
  Description of Artificial Sequence: Synthetic oligonucleotide
  Antisense strand to SEQ ID NO: 2179678
aguguaaagagacucacuc

SEQ ID NO: 2179680 - RNA, 19 nt, Artificial Sequence
  Description of Artificial Sequence: Synthetic oligonucleotide
  Sense strand starting at position 2953 of SEQ ID NO: 1883248
uuuguuauugauuaacgga

SEQ ID NO: 2179681 - RNA, 19 nt, Artificial Sequence
  Description of Artificial Sequence: Synthetic oligonucleotide
  Antisense strand to SEQ ID NO: 2179680
uccguuaaucaauaacaaa

SEQ ID NO: 2179682 - RNA, 19 nt, Artificial Sequence
  Description of Artificial Sequence: Synthetic oligonucleotide
  Sense strand starting at position 3038 of SEQ ID NO: 1883248
uugccuucugcagauaauu

SEQ ID NO: 2179683 - RNA, 19 nt, Artificial Sequence
  Description of Artificial Sequence: Synthetic oligonucleotide
  Antisense strand to SEQ ID NO: 2179682
aauuaucugcagaaggcaa

SEQ ID NO: 2179684 - RNA, 19 nt, Artificial Sequence
  Description of Artificial Sequence: Synthetic oligonucleotide
  Sense strand starting at position 3079 of SEQ ID NO: 1883248
ucaauaacaguuugucuga

SEQ ID NO: 2179685 - RNA, 19 nt, Artificial Sequence
  Description of Artificial Sequence: Synthetic oligonucleotide
  Antisense strand to SEQ ID NO: 2179684
ucagacaaacuguuauuga

SEQ ID NO: 2179686 - RNA, 19 nt, Artificial Sequence
  Description of Artificial Sequence: Synthetic oligonucleotide
  Sense strand starting at position 3086 of SEQ ID NO: 1883248
caguuugucugagcugaga

SEQ ID NO: 2179687 - RNA, 19 nt, Artificial Sequence
  Description of Artificial Sequence: Synthetic oligonucleotide
  Antisense strand to SEQ ID NO: 2179686
ucucagcucagacaaacug

SEQ ID NO: 2179688 - RNA, 19 nt, Artificial Sequence
  Description of Artificial Sequence: Synthetic oligonucleotide
  Sense strand starting at position 3088 of SEQ ID NO: 1883248
guuugucugagcugagaag

SEQ ID NO: 2179689 - RNA, 19 nt, Artificial Sequence
  Description of Artificial Sequence: Synthetic oligonucleotide
  Antisense strand to SEQ ID NO: 2179688
cuucucagcucagacaaac

SEQ ID NO: 2179690 - RNA, 19 nt, Artificial Sequence
  Description of Artificial Sequence: Synthetic oligonucleotide
  Sense strand starting at position 3239 of SEQ ID NO: 1883248
cuagaugaauucguacaca

SEQ ID NO: 2179691 - RNA, 19 nt, Artificial Sequence
  Description of Artificial Sequence: Synthetic oligonucleotide
  Antisense strand to SEQ ID NO: 2179690
uguguacgaauucaucuag

SEQ ID NO: 2179692 - RNA, 19 nt, Artificial Sequence
  Description of Artificial Sequence: Synthetic oligonucleotide
  Sense strand starting at position 3254 of SEQ ID NO: 1883248
cacagauaccagcguauuu

SEQ ID NO: 2179693 - RNA, 19 nt, Artificial Sequence
  Description of Artificial Sequence: Synthetic oligonucleotide
  Antisense strand to SEQ ID NO: 2179692
aaauacgcugguaucugug

SEQ ID NO: 2179694 - RNA, 19 nt, Artificial Sequence
  Description of Artificial Sequence: Synthetic oligonucleotide
  Sense strand starting at position 3395 of SEQ ID NO: 1883248
ccauucucaucuuuaggga

SEQ ID NO: 2179695 - RNA, 19 nt, Artificial Sequence
  Description of Artificial Sequence: Synthetic oligonucleotide
  Antisense strand to SEQ ID NO: 2179694
ucccuaaagaugagaaugg

SEQ ID NO: 2179696 - RNA, 19 nt, Artificial Sequence
  Description of Artificial Sequence: Synthetic oligonucleotide
  Sense strand starting at position 3404 of SEQ ID NO: 1883248
ucuuuagggaucugcuaag

SEQ ID NO: 2179697 - RNA, 19 nt, Artificial Sequence
  Description of Artificial Sequence: Synthetic oligonucleotide
  Antisense strand to SEQ ID NO: 2179696
cuuagcagaucccuaaaga

SEQ ID NO: 2179698 - RNA, 19 nt, Artificial Sequence
  Description of Artificial Sequence: Synthetic oligonucleotide
  Sense strand starting at position 3410 of SEQ ID NO: 1883248
gggaucugcuaagcuagaa

SEQ ID NO: 2179699 - RNA, 19 nt, Artificial Sequence
  Description of Artificial Sequence: Synthetic oligonucleotide
  Antisense strand to SEQ ID NO: 2179698
uucuagcuuagcagauccc

SEQ ID NO: 2179700 - RNA, 19 nt, Artificial Sequence
  Description of Artificial Sequence: Synthetic oligonucleotide
  Sense strand starting at position 3442 of SEQ ID NO: 1883248
ugcagaugaccguggauca

SEQ ID NO: 2179701 - RNA, 19 nt, Artificial Sequence
  Description of Artificial Sequence: Synthetic oligonucleotide
  Antisense strand to SEQ ID NO: 2179700
ugauccacggucaucugca

SEQ ID NO: 2179702 - RNA, 19 nt, Artificial Sequence
  Description of Artificial Sequence: Synthetic oligonucleotide
  Sense strand starting at position 3449 of SEQ ID NO: 1883248
gaccguggaucaccugaaa

SEQ ID NO: 2179703 - RNA, 19 nt, Artificial Sequence
  Description of Artificial Sequence: Synthetic oligonucleotide
  Antisense strand to SEQ ID NO: 2179702
uuucaggugauccacgguc

SEQ ID NO: 2179704 - RNA, 19 nt, Artificial Sequence
  Description of Artificial Sequence: Synthetic oligonucleotide
  Sense strand starting at position 3519 of SEQ ID NO: 1883248
ucugaaugguuggcaaaga

SEQ ID NO: 2179705 - RNA, 19 nt, Artificial Sequence
  Description of Artificial Sequence: Synthetic oligonucleotide
  Antisense strand to SEQ ID NO: 2179704
ucuuugccaaccauucaga

SEQ ID NO: 2179706 - RNA, 19 nt, Artificial Sequence
  Description of Artificial Sequence: Synthetic oligonucleotide
  Sense strand starting at position 3566 of SEQ ID NO: 1883248
ugcaguagcugccugauuu

SEQ ID NO: 2179707 - RNA, 19 nt, Artificial Sequence
  Description of Artificial Sequence: Synthetic oligonucleotide
  Antisense strand to SEQ ID NO: 2179706
aaaucaggcagcuacugca

SEQ ID NO: 2179708 - RNA, 19 nt, Artificial Sequence
  Description of Artificial Sequence: Synthetic oligonucleotide
  Sense strand starting at position 3654 of SEQ ID NO: 1883248
auagaaucuucuccaguga

SEQ ID NO: 2179709 - RNA, 19 nt, Artificial Sequence
  Description of Artificial Sequence: Synthetic oligonucleotide
  Antisense strand to SEQ ID NO: 2179708
ucacuggagaagauucuau

SEQ ID NO: 2179710 - RNA, 19 nt, Artificial Sequence
  Description of Artificial Sequence: Synthetic oligonucleotide
  Sense strand starting at position 3693 of SEQ ID NO: 1883248
gcggauugagcuagugcau

SEQ ID NO: 2179711 - RNA, 19 nt, Artificial Sequence
  Description of Artificial Sequence: Synthetic oligonucleotide
  Antisense strand to SEQ ID NO: 2179710
augcacuagcucaauccgc

SEQ ID NO: 2179712 - RNA, 19 nt, Artificial Sequence
  Description of Artificial Sequence: Synthetic oligonucleotide
  Sense strand starting at position 3786 of SEQ ID NO: 1883248
acauuuguccauugcuauu

SEQ ID NO: 2179713 - RNA, 19 nt, Artificial Sequence
  Description of Artificial Sequence: Synthetic oligonucleotide
  Antisense strand to SEQ ID NO: 2179712
aauagcaauggacaaaugu

SEQ ID NO: 2179714 - RNA, 19 nt, Artificial Sequence
  Description of Artificial Sequence: Synthetic oligonucleotide
  Sense strand starting at position 3893 of SEQ ID NO: 1883248
aaagaaauguauucugguu

SEQ ID NO: 2179715 - RNA, 19 nt, Artificial Sequence
  Description of Artificial Sequence: Synthetic oligonucleotide
  Antisense strand to SEQ ID NO: 2179714
aaccagaauacauuucuuu

SEQ ID NO: 2179716 - RNA, 19 nt, Artificial Sequence
  Description of Artificial Sequence: Synthetic oligonucleotide
  Sense strand starting at position 3898 of SEQ ID NO: 1883248
aauguauucugguuaagua

SEQ ID NO: 2179717 - RNA, 19 nt, Artificial Sequence
  Description of Artificial Sequence: Synthetic oligonucleotide
  Antisense strand to SEQ ID NO: 2179716
uacuuaaccagaauacauu

SEQ ID NO: 2179718 - RNA, 19 nt, Artificial Sequence
  Description of Artificial Sequence: Synthetic oligonucleotide
  Sense strand starting at position 3899 of SEQ ID NO: 1883248
auguauucugguuaaguaa

SEQ ID NO: 2179719 - RNA, 19 nt, Artificial Sequence
  Description of Artificial Sequence: Synthetic oligonucleotide
  Antisense strand to SEQ ID NO: 2179718
uuacuuaaccagaauacau

SEQ ID NO: 2179720 - RNA, 19 nt, Artificial Sequence
  Description of Artificial Sequence: Synthetic oligonucleotide
  Sense strand starting at position 3933 of SEQ ID NO: 1883248
agaccaaggucugugugua

SEQ ID NO: 2179721 - RNA, 19 nt, Artificial Sequence
  Description of Artificial Sequence: Synthetic oligonucleotide
  Antisense strand to SEQ ID NO: 2179720
uacacacagaccuuggucu

SEQ ID NO: 2179722 - RNA, 19 nt, Artificial Sequence
  Description of Artificial Sequence: Synthetic oligonucleotide
  Sense strand starting at position 3951 of SEQ ID NO: 1883248
augucucuccagcaggaaa

SEQ ID NO: 2179723 - RNA, 19 nt, Artificial Sequence
  Description of Artificial Sequence: Synthetic oligonucleotide
  Antisense strand to SEQ ID NO: 2179722
uuuccugcuggagagacau

SEQ ID NO: 2179724 - RNA, 19 nt, Artificial Sequence
  Description of Artificial Sequence: Synthetic oligonucleotide
  Sense strand starting at position 142 of SEQ ID NO: 1883249
aggucuuaucuuuauauuc

SEQ ID NO: 2179725 - RNA, 19 nt, Artificial Sequence
  Description of Artificial Sequence: Synthetic oligonucleotide
  Antisense strand to SEQ ID NO: 2179724
gaauauaaagauaagaccu

SEQ ID NO: 2179726 - RNA, 19 nt, Artificial Sequence
  Description of Artificial Sequence: Synthetic oligonucleotide
  Sense strand starting at position 155 of SEQ ID NO: 1883249
auauuccaguucguuauuu

SEQ ID NO: 2179727 - RNA, 19 nt, Artificial Sequence
  Description of Artificial Sequence: Synthetic oligonucleotide
  Antisense strand to SEQ ID NO: 2179726
aaauaacgaacuggaauau

SEQ ID NO: 2179728 - RNA, 19 nt, Artificial Sequence
  Description of Artificial Sequence: Synthetic oligonucleotide
  Sense strand starting at position 586 of SEQ ID NO: 1883249
cggccuagccaagacaauu

SEQ ID NO: 2179729 - RNA, 19 nt, Artificial Sequence
  Description of Artificial Sequence: Synthetic oligonucleotide
  Antisense strand to SEQ ID NO: 2179728
aauugucuuggcuaggccg

SEQ ID NO: 2179730 - RNA, 19 nt, Artificial Sequence
  Description of Artificial Sequence: Synthetic oligonucleotide
  Sense strand starting at position 623 of SEQ ID NO: 1883249
ggcuauuacauguaaggca

SEQ ID NO: 2179731 - RNA, 19 nt, Artificial Sequence
  Description of Artificial Sequence: Synthetic oligonucleotide
  Antisense strand to SEQ ID NO: 2179730
ugccuuacauguaauagcc

SEQ ID NO: 2179732 - RNA, 19 nt, Artificial Sequence
  Description of Artificial Sequence: Synthetic oligonucleotide
  Sense strand starting at position 697 of SEQ ID NO: 1883249
ucaaaugucuuguuugaau

SEQ ID NO: 2179733 - RNA, 19 nt, Artificial Sequence
  Description of Artificial Sequence: Synthetic oligonucleotide
  Antisense strand to SEQ ID NO: 2179732
auucaaacaagacauuuga

SEQ ID NO: 2179734 - RNA, 19 nt, Artificial Sequence
  Description of Artificial Sequence: Synthetic oligonucleotide
  Sense strand starting at position 744 of SEQ ID NO: 1883249
uuuaauaaacugugugacu

SEQ ID NO: 2179735 - RNA, 19 nt, Artificial Sequence
  Description of Artificial Sequence: Synthetic oligonucleotide
  Antisense strand to SEQ ID NO: 2179734
agucacacaguuuauuaaa

SEQ ID NO: 2179736 - RNA, 19 nt, Artificial Sequence
  Description of Artificial Sequence: Synthetic oligonucleotide
  Sense strand starting at position 802 of SEQ ID NO: 1883249
aucugaguuccaugacccu

SEQ ID NO: 2179737 - RNA, 19 nt, Artificial Sequence
  Description of Artificial Sequence: Synthetic oligonucleotide
  Antisense strand to SEQ ID NO: 2179736
agggucauggaacucagau

SEQ ID NO: 2179738 - RNA, 19 nt, Artificial Sequence
  Description of Artificial Sequence: Synthetic oligonucleotide
  Sense strand starting at position 849 of SEQ ID NO: 1883249
cuaccauugcaucaaggua

SEQ ID NO: 2179739 - RNA, 19 nt, Artificial Sequence
  Description of Artificial Sequence: Synthetic oligonucleotide
  Antisense strand to SEQ ID NO: 2179738
uaccuugaugcaaugguag

SEQ ID NO: 2179740 - RNA, 19 nt, Artificial Sequence
  Description of Artificial Sequence: Synthetic oligonucleotide
  Sense strand starting at position 935 of SEQ ID NO: 1883249
agggauuauuauucuuauc

SEQ ID NO: 2179741 - RNA, 19 nt, Artificial Sequence
  Description of Artificial Sequence: Synthetic oligonucleotide
  Antisense strand to SEQ ID NO: 2179740
gauaagaauaauaaucccu

SEQ ID NO: 2179742 - RNA, 19 nt, Artificial Sequence
  Description of Artificial Sequence: Synthetic oligonucleotide
  Sense strand starting at position 945 of SEQ ID NO: 1883249
auucuuauccuguagauga

SEQ ID NO: 2179743 - RNA, 19 nt, Artificial Sequence
  Description of Artificial Sequence: Synthetic oligonucleotide
  Antisense strand to SEQ ID NO: 2179742
ucaucuacaggauaagaau

SEQ ID NO: 2179744 - RNA, 19 nt, Artificial Sequence
  Description of Artificial Sequence: Synthetic oligonucleotide
  Sense strand starting at position 1108 of SEQ ID NO: 1883249
acacaauuauuguuugaug

SEQ ID NO: 2179745 - RNA, 19 nt, Artificial Sequence
  Description of Artificial Sequence: Synthetic oligonucleotide
  Antisense strand to SEQ ID NO: 2179744
caucaaacaauaauugugu

SEQ ID NO: 2179746 - RNA, 19 nt, Artificial Sequence
  Description of Artificial Sequence: Synthetic oligonucleotide
  Sense strand starting at position 1110 of SEQ ID NO: 1883249
acaauuauuguuugaugac

SEQ ID NO: 2179747 - RNA, 19 nt, Artificial Sequence
  Description of Artificial Sequence: Synthetic oligonucleotide
  Antisense strand to SEQ ID NO: 2179746
gucaucaaacaauaauugu

SEQ ID NO: 2179748 - RNA, 19 nt, Artificial Sequence
  Description of Artificial Sequence: Synthetic oligonucleotide
  Sense strand starting at position 1151 of SEQ ID NO: 1883249
ccacguggccuauaguaaa

SEQ ID NO: 2179749 - RNA, 19 nt, Artificial Sequence
  Description of Artificial Sequence: Synthetic oligonucleotide
  Antisense strand to SEQ ID NO: 2179748
uuuacuauaggccacgugg

SEQ ID NO: 2179750 - RNA, 19 nt, Artificial Sequence
  Description of Artificial Sequence: Synthetic oligonucleotide
  Sense strand starting at position 1174 of SEQ ID NO: 1883249
gacucaguugccuagcaga

SEQ ID NO: 2179751 - RNA, 19 nt, Artificial Sequence
  Description of Artificial Sequence: Synthetic oligonucleotide
  Antisense strand to SEQ ID NO: 2179750
ucugcuaggcaacugaguc

SEQ ID NO: 2179752 - RNA, 19 nt, Artificial Sequence
  Description of Artificial Sequence: Synthetic oligonucleotide
  Sense strand starting at position 1192 of SEQ ID NO: 1883249
aauguauguggcuauuauu

SEQ ID NO: 2179753 - RNA, 19 nt, Artificial Sequence
  Description of Artificial Sequence: Synthetic oligonucleotide
  Antisense strand to SEQ ID NO: 2179752
aauaauagccacauacauu

SEQ ID NO: 2179754 - RNA, 19 nt, Artificial Sequence
  Description of Artificial Sequence: Synthetic oligonucleotide
  Sense strand starting at position 1198 of SEQ ID NO: 1883249
uguggcuauuauuuaaagu

SEQ ID NO: 2179755 - RNA, 19 nt, Artificial Sequence
  Description of Artificial Sequence: Synthetic oligonucleotide
  Antisense strand to SEQ ID NO: 2179754
acuuuaaauaauagccaca

SEQ ID NO: 2179756 - RNA, 19 nt, Artificial Sequence
  Description of Artificial Sequence: Synthetic oligonucleotide
  Sense strand starting at position 1336 of SEQ ID NO: 1883249
gugagaucuugauccuauu

SEQ ID NO: 2179757 - RNA, 19 nt, Artificial Sequence
  Description of Artificial Sequence: Synthetic oligonucleotide
  Antisense strand to SEQ ID NO: 2179756
aauaggaucaagaucucac

SEQ ID NO: 2179758 - RNA, 19 nt, Artificial Sequence
  Description of Artificial Sequence: Synthetic oligonucleotide
  Sense strand starting at position 1404 of SEQ ID NO: 1883249
gcaagaucccgucaaucuu

SEQ ID NO: 2179759 - RNA, 19 nt, Artificial Sequence
  Description of Artificial Sequence: Synthetic oligonucleotide
  Antisense strand to SEQ ID NO: 2179758
aagauugacgggaucuugc

SEQ ID NO: 2179760 - RNA, 19 nt, Artificial Sequence
  Description of Artificial Sequence: Synthetic oligonucleotide
  Sense strand starting at position 1509 of SEQ ID NO: 1883249
auauuugccugacuuuagu

SEQ ID NO: 2179761 - RNA, 19 nt, Artificial Sequence
  Description of Artificial Sequence: Synthetic oligonucleotide
  Antisense strand to SEQ ID NO: 2179760
acuaaagucaggcaaauau

SEQ ID NO: 2179762 - RNA, 19 nt, Artificial Sequence
  Description of Artificial Sequence: Synthetic oligonucleotide
  Sense strand starting at position 1630 of SEQ ID NO: 1883249
gcccuuucccuagcgaagu

SEQ ID NO: 2179763 - RNA, 19 nt, Artificial Sequence
  Description of Artificial Sequence: Synthetic oligonucleotide
  Antisense strand to SEQ ID NO: 2179762
acuucgcuagggaaagggc

SEQ ID NO: 2179764 - RNA, 19 nt, Artificial Sequence
  Description of Artificial Sequence: Synthetic oligonucleotide
  Sense strand starting at position 2503 of SEQ ID NO: 1883249
gggugcugucguaguugga

SEQ ID NO: 2179765 - RNA, 19 nt, Artificial Sequence
  Description of Artificial Sequence: Synthetic oligonucleotide
  Antisense strand to SEQ ID NO: 2179764
uccaacuacgacagcaccc

SEQ ID NO: 2179766 - RNA, 19 nt, Artificial Sequence
  Description of Artificial Sequence: Synthetic oligonucleotide
  Sense strand starting at position 2610 of SEQ ID NO: 1883249
gcuggaucaggaugaggua

SEQ ID NO: 2179767 - RNA, 19 nt, Artificial Sequence
  Description of Artificial Sequence: Synthetic oligonucleotide
  Antisense strand to SEQ ID NO: 2179766
uaccucauccugauccagc

SEQ ID NO: 2179768 - RNA, 19 nt, Artificial Sequence
  Description of Artificial Sequence: Synthetic oligonucleotide
  Sense strand starting at position 2663 of SEQ ID NO: 1883249
cacgccagcccguuagauu

SEQ ID NO: 2179769 - RNA, 19 nt, Artificial Sequence
  Description of Artificial Sequence: Synthetic oligonucleotide
  Antisense strand to SEQ ID NO: 2179768
aaucuaacgggcuggcgug

SEQ ID NO: 2179770 - RNA, 19 nt, Artificial Sequence
  Description of Artificial Sequence: Synthetic oligonucleotide
  Sense strand starting at position 2670 of SEQ ID NO: 1883249
gcccguuagauugcaaguu

SEQ ID NO: 2179771 - RNA, 19 nt, Artificial Sequence
  Description of Artificial Sequence: Synthetic oligonucleotide
  Antisense strand to SEQ ID NO: 2179770
aacuugcaaucuaacgggc

SEQ ID NO: 2179772 - RNA, 19 nt, Artificial Sequence
  Description of Artificial Sequence: Synthetic oligonucleotide
  Sense strand starting at position 2805 of SEQ ID NO: 1883249
ggaggaaggagcugacuuu

SEQ ID NO: 2179773 - RNA, 19 nt, Artificial Sequence
  Description of Artificial Sequence: Synthetic oligonucleotide
  Antisense strand to SEQ ID NO: 2179772
aaagucagcuccuuccucc

SEQ ID NO: 2179774 - RNA, 19 nt, Artificial Sequence
  Description of Artificial Sequence: Synthetic oligonucleotide
  Sense strand starting at position 3005 of SEQ ID NO: 1883249
uggagaggugcauaccauu

SEQ ID NO: 2179775 - RNA, 19 nt, Artificial Sequence
  Description of Artificial Sequence: Synthetic oligonucleotide
  Antisense strand to SEQ ID NO: 2179774
aaugguaugcaccucucca

SEQ ID NO: 2179776 - RNA, 19 nt, Artificial Sequence
  Description of Artificial Sequence: Synthetic oligonucleotide
  Sense strand starting at position 3209 of SEQ ID NO: 1883249
uccuuuauacaauggaagu

SEQ ID NO: 2179777 - RNA, 19 nt, Artificial Sequence
  Description of Artificial Sequence: Synthetic oligonucleotide
  Antisense strand to SEQ ID NO: 2179776
acuuccauuguauaaagga

SEQ ID NO: 2179778 - RNA, 19 nt, Artificial Sequence
  Description of Artificial Sequence: Synthetic oligonucleotide
  Sense strand starting at position 3277 of SEQ ID NO: 1883249
aauuguaggugcuuaauaa

SEQ ID NO: 2179779 - RNA, 19 nt, Artificial Sequence
  Description of Artificial Sequence: Synthetic oligonucleotide
  Antisense strand to SEQ ID NO: 2179778
uuauuaagcaccuacaauu

SEQ ID NO: 2179780 - RNA, 19 nt, Artificial Sequence
  Description of Artificial Sequence: Synthetic oligonucleotide
  Sense strand starting at position 3278 of SEQ ID NO: 1883249
auuguaggugcuuaauaag

SEQ ID NO: 2179781 - RNA, 19 nt, Artificial Sequence
  Description of Artificial Sequence: Synthetic oligonucleotide
  Antisense strand to SEQ ID NO: 2179780
cuuauuaagcaccuacaau

SEQ ID NO: 2179782 - RNA, 19 nt, Artificial Sequence
  Description of Artificial Sequence: Synthetic oligonucleotide
  Sense strand starting at position 3351 of SEQ ID NO: 1883249
accagaauuuguuagacug

SEQ ID NO: 2179783 - RNA, 19 nt, Artificial Sequence
  Description of Artificial Sequence: Synthetic oligonucleotide
  Antisense strand to SEQ ID NO: 2179782
cagucuaacaaauucuggu

SEQ ID NO: 2179784 - RNA, 19 nt, Artificial Sequence
  Description of Artificial Sequence: Synthetic oligonucleotide
  Sense strand starting at position 3358 of SEQ ID NO: 1883249
uuuguuagacuguaggauu

SEQ ID NO: 2179785 - RNA, 19 nt, Artificial Sequence
  Description of Artificial Sequence: Synthetic oligonucleotide
  Antisense strand to SEQ ID NO: 2179784
aauccuacagucuaacaaa

SEQ ID NO: 2179786 - RNA, 19 nt, Artificial Sequence
  Description of Artificial Sequence: Synthetic oligonucleotide
  Sense strand starting at position 3374 of SEQ ID NO: 1883249
auuguaugguaguuuaaac

SEQ ID NO: 2179787 - RNA, 19 nt, Artificial Sequence
  Description of Artificial Sequence: Synthetic oligonucleotide
  Antisense strand to SEQ ID NO: 2179786
guuuaaacuaccauacaau

SEQ ID NO: 2179788 - RNA, 19 nt, Artificial Sequence
  Description of Artificial Sequence: Synthetic oligonucleotide
  Sense strand starting at position 3440 of SEQ ID NO: 1883249
gcccuuuguggacaagaga

SEQ ID NO: 2179789 - RNA, 19 nt, Artificial Sequence
  Description of Artificial Sequence: Synthetic oligonucleotide
  Antisense strand to SEQ ID NO: 2179788
ucucuuguccacaaagggc

SEQ ID NO: 2179790 - RNA, 19 nt, Artificial Sequence
  Description of Artificial Sequence: Synthetic oligonucleotide
  Sense strand starting at position 3587 of SEQ ID NO: 1883249
agauuccagguuugagauu

SEQ ID NO: 2179791 - RNA, 19 nt, Artificial Sequence
  Description of Artificial Sequence: Synthetic oligonucleotide
  Antisense strand to SEQ ID NO: 2179790
aaucucaaaccuggaaucu

SEQ ID NO: 2179792 - RNA, 19 nt, Artificial Sequence
  Description of Artificial Sequence: Synthetic oligonucleotide
  Sense strand starting at position 3588 of SEQ ID NO: 1883249
gauuccagguuugagauuu

SEQ ID NO: 2179793 - RNA, 19 nt, Artificial Sequence
  Description of Artificial Sequence: Synthetic oligonucleotide
  Antisense strand to SEQ ID NO: 2179792
aaaucucaaaccuggaauc

SEQ ID NO: 2179794 - RNA, 19 nt, Artificial Sequence
  Description of Artificial Sequence: Synthetic oligonucleotide
  Sense strand starting at position 3769 of SEQ ID NO: 1883249
ggcuuaacaccuggauauu

SEQ ID NO: 2179795 - RNA, 19 nt, Artificial Sequence
  Description of Artificial Sequence: Synthetic oligonucleotide
  Antisense strand to SEQ ID NO: 2179794
aauauccagguguuaagcc

SEQ ID NO: 2179796 - RNA, 19 nt, Artificial Sequence
  Description of Artificial Sequence: Synthetic oligonucleotide
  Sense strand starting at position 3770 of SEQ ID NO: 1883249
gcuuaacaccuggauauua

SEQ ID NO: 2179797 - RNA, 19 nt, Artificial Sequence
  Description of Artificial Sequence: Synthetic oligonucleotide
  Antisense strand to SEQ ID NO: 2179796
uaauauccagguguuaagc

SEQ ID NO: 2179798 - RNA, 19 nt, Artificial Sequence
  Description of Artificial Sequence: Synthetic oligonucleotide
  Sense strand starting at position 3924 of SEQ ID NO: 1883249
gaugccagagugcauaaua

SEQ ID NO: 2179799 - RNA, 19 nt, Artificial Sequence
  Description of Artificial Sequence: Synthetic oligonucleotide
  Antisense strand to SEQ ID NO: 2179798
uauuaugcacucuggcauc

SEQ ID NO: 2179800 - RNA, 19 nt, Artificial Sequence
  Description of Artificial Sequence: Synthetic oligonucleotide
  Sense strand starting at position 3953 of SEQ ID NO: 1883249
aucagagucacuuggagua

SEQ ID NO: 2179801 - RNA, 19 nt, Artificial Sequence
  Description of Artificial Sequence: Synthetic oligonucleotide
  Antisense strand to SEQ ID NO: 2179800
uacuccaagugacucugau

SEQ ID NO: 2179802 - RNA, 19 nt, Artificial Sequence
  Description of Artificial Sequence: Synthetic oligonucleotide
  Sense strand starting at position 3983 of SEQ ID NO: 1883249
auguaaauugcuggaccaa

SEQ ID NO: 2179803 - RNA, 19 nt, Artificial Sequence
  Description of Artificial Sequence: Synthetic oligonucleotide
  Antisense strand to SEQ ID NO: 2179802
uugguccagcaauuuacau

SEQ ID NO: 2179804 - RNA, 19 nt, Artificial Sequence
  Description of Artificial Sequence: Synthetic oligonucleotide
  Sense strand starting at position 148 of SEQ ID NO: 1883250
acuacaugauuugaauaag

SEQ ID NO: 2179805 - RNA, 19 nt, Artificial Sequence
  Description of Artificial Sequence: Synthetic oligonucleotide
  Antisense strand to SEQ ID NO: 2179804
cuuauucaaaucauguagu

SEQ ID NO: 2179806 - RNA, 19 nt, Artificial Sequence
  Description of Artificial Sequence: Synthetic oligonucleotide
  Sense strand starting at position 493 of SEQ ID NO: 1883250
ugguauucaguggaguaaa

SEQ ID NO: 2179807 - RNA, 19 nt, Artificial Sequence
  Description of Artificial Sequence: Synthetic oligonucleotide
  Antisense strand to SEQ ID NO: 2179806
uuuacuccacugaauacca

SEQ ID NO: 2179808 - RNA, 19 nt, Artificial Sequence
  Description of Artificial Sequence: Synthetic oligonucleotide
  Sense strand starting at position 543 of SEQ ID NO: 1883250
aaugaagauugacagaaga

SEQ ID NO: 2179809 - RNA, 19 nt, Artificial Sequence
  Description of Artificial Sequence: Synthetic oligonucleotide
  Antisense strand to SEQ ID NO: 2179808
ucuucugucaaucuucauu

SEQ ID NO: 2179810 - RNA, 19 nt, Artificial Sequence
  Description of Artificial Sequence: Synthetic oligonucleotide
  Sense strand starting at position 556 of SEQ ID NO: 1883250
agaagaaacuugcuuaugu

SEQ ID NO: 2179811 - RNA, 19 nt, Artificial Sequence
  Description of Artificial Sequence: Synthetic oligonucleotide
  Antisense strand to SEQ ID NO: 2179810
acauaagcaaguuucuucu

SEQ ID NO: 2179812 - RNA, 19 nt, Artificial Sequence
  Description of Artificial Sequence: Synthetic oligonucleotide
  Sense strand starting at position 557 of SEQ ID NO: 1883250
gaagaaacuugcuuauguc

SEQ ID NO: 2179813 - RNA, 19 nt, Artificial Sequence
  Description of Artificial Sequence: Synthetic oligonucleotide
  Antisense strand to SEQ ID NO: 2179812
gacauaagcaaguuucuuc

SEQ ID NO: 2179814 - RNA, 19 nt, Artificial Sequence
  Description of Artificial Sequence: Synthetic oligonucleotide
  Sense strand starting at position 596 of SEQ ID NO: 1883250
acagauuauguuggaucau

SEQ ID NO: 2179815 - RNA, 19 nt, Artificial Sequence
  Description of Artificial Sequence: Synthetic oligonucleotide
  Antisense strand to SEQ ID NO: 2179814
augauccaacauaaucugu

SEQ ID NO: 2179816 - RNA, 19 nt, Artificial Sequence
  Description of Artificial Sequence: Synthetic oligonucleotide
  Sense strand starting at position 615 of SEQ ID NO: 1883250
uguggaacauauguguaau

SEQ ID NO: 2179817 - RNA, 19 nt, Artificial Sequence
  Description of Artificial Sequence: Synthetic oligonucleotide
  Antisense strand to SEQ ID NO: 2179816
auuacacauauguuccaca

SEQ ID NO: 2179818 - RNA, 19 nt, Artificial Sequence
  Description of Artificial Sequence: Synthetic oligonucleotide
  Sense strand starting at position 621 of SEQ ID NO: 1883250
acauauguguaauuggaaa

SEQ ID NO: 2179819 - RNA, 19 nt, Artificial Sequence
  Description of Artificial Sequence: Synthetic oligonucleotide
  Antisense strand to SEQ ID NO: 2179818
uuuccaauuacacauaugu

SEQ ID NO: 2179820 - RNA, 19 nt, Artificial Sequence
  Description of Artificial Sequence: Synthetic oligonucleotide
  Sense strand starting at position 720 of SEQ ID NO: 1883250
gggaaauauuuacaguaca

SEQ ID NO: 2179821 - RNA, 19 nt, Artificial Sequence
  Description of Artificial Sequence: Synthetic oligonucleotide
  Antisense strand to SEQ ID NO: 2179820
uguacuguaaauauuuccc

SEQ ID NO: 2179822 - RNA, 19 nt, Artificial Sequence
  Description of Artificial Sequence: Synthetic oligonucleotide
  Sense strand starting at position 833 of SEQ ID NO: 1883250
agaauaagugugcaugcau

SEQ ID NO: 2179823 - RNA, 19 nt, Artificial Sequence
  Description of Artificial Sequence: Synthetic oligonucleotide
  Antisense strand to SEQ ID NO: 2179822
augcaugcacacuuauucu

SEQ ID NO: 2179824 - RNA, 19 nt, Artificial Sequence
  Description of Artificial Sequence: Synthetic oligonucleotide
  Sense strand starting at position 965 of SEQ ID NO: 1883250
aguugaauucgucaauaag

SEQ ID NO: 2179825 - RNA, 19 nt, Artificial Sequence
  Description of Artificial Sequence: Synthetic oligonucleotide
  Antisense strand to SEQ ID NO: 2179824
cuuauugacgaauucaacu

SEQ ID NO: 2179826 - RNA, 19 nt, Artificial Sequence
  Description of Artificial Sequence: Synthetic oligonucleotide
  Sense strand starting at position 968 of SEQ ID NO: 1883250
ugaauucgucaauaaguug

SEQ ID NO: 2179827 - RNA, 19 nt, Artificial Sequence
  Description of Artificial Sequence: Synthetic oligonucleotide
  Antisense strand to SEQ ID NO: 2179826
caacuuauugacgaauuca

SEQ ID NO: 2179828 - RNA, 19 nt, Artificial Sequence
  Description of Artificial Sequence: Synthetic oligonucleotide
  Sense strand starting at position 974 of SEQ ID NO: 1883250
cgucaauaaguugaaguaa

SEQ ID NO: 2179829 - RNA, 19 nt, Artificial Sequence
  Description of Artificial Sequence: Synthetic oligonucleotide
  Antisense strand to SEQ ID NO: 2179828
uuacuucaacuuauugacg

SEQ ID NO: 2179830 - RNA, 19 nt, Artificial Sequence
  Description of Artificial Sequence: Synthetic oligonucleotide
  Sense strand starting at position 1004 of SEQ ID NO: 1883250
ccuuucugacuugagcuau

SEQ ID NO: 2179831 - RNA, 19 nt, Artificial Sequence
  Description of Artificial Sequence: Synthetic oligonucleotide
  Antisense strand to SEQ ID NO: 2179830
auagcucaagucagaaagg

SEQ ID NO: 2179832 - RNA, 19 nt, Artificial Sequence
  Description of Artificial Sequence: Synthetic oligonucleotide
  Sense strand starting at position 1137 of SEQ ID NO: 1883250
gccuucuaugaauagguaa

SEQ ID NO: 2179833 - RNA, 19 nt, Artificial Sequence
  Description of Artificial Sequence: Synthetic oligonucleotide
  Antisense strand to SEQ ID NO: 2179832
uuaccuauucauagaaggc

SEQ ID NO: 2179834 - RNA, 19 nt, Artificial Sequence
  Description of Artificial Sequence: Synthetic oligonucleotide
  Sense strand starting at position 1188 of SEQ ID NO: 1883250
aguacaaaguuucucauua

SEQ ID NO: 2179835 - RNA, 19 nt, Artificial Sequence
  Description of Artificial Sequence: Synthetic oligonucleotide
  Antisense strand to SEQ ID NO: 2179834
uaaugagaaacuuuguacu

SEQ ID NO: 2179836 - RNA, 19 nt, Artificial Sequence
  Description of Artificial Sequence: Synthetic oligonucleotide
  Sense strand starting at position 1189 of SEQ ID NO: 1883250
guacaaaguuucucauuac

SEQ ID NO: 2179837 - RNA, 19 nt, Artificial Sequence
  Description of Artificial Sequence: Synthetic oligonucleotide
  Antisense strand to SEQ ID NO: 2179836
guaaugagaaacuuuguac

SEQ ID NO: 2179838 - RNA, 19 nt, Artificial Sequence
  Description of Artificial Sequence: Synthetic oligonucleotide
  Sense strand starting at position 1377 of SEQ ID NO: 1883250
cuaugucuacuuuagaagu

SEQ ID NO: 2179839 - RNA, 19 nt, Artificial Sequence
  Description of Artificial Sequence: Synthetic oligonucleotide
  Antisense strand to SEQ ID NO: 2179838
acuucuaaaguagacauag

SEQ ID NO: 2179840 - RNA, 19 nt, Artificial Sequence
  Description of Artificial Sequence: Synthetic oligonucleotide
  Sense strand starting at position 1388 of SEQ ID NO: 1883250
uuagaaguuuaguuacuca

SEQ ID NO: 2179841 - RNA, 19 nt, Artificial Sequence
  Description of Artificial Sequence: Synthetic oligonucleotide
  Antisense strand to SEQ ID NO: 2179840
ugaguaacuaaacuucuaa

SEQ ID NO: 2179842 - RNA, 19 nt, Artificial Sequence
  Description of Artificial Sequence: Synthetic oligonucleotide
  Sense strand starting at position 1494 of SEQ ID NO: 1883250
agacuacauccugagcuua

SEQ ID NO: 2179843 - RNA, 19 nt, Artificial Sequence
  Description of Artificial Sequence: Synthetic oligonucleotide
  Antisense strand to SEQ ID NO: 2179842
uaagcucaggauguagucu

SEQ ID NO: 2179844 - RNA, 19 nt, Artificial Sequence
  Description of Artificial Sequence: Synthetic oligonucleotide
  Sense strand starting at position 1499 of SEQ ID NO: 1883250
acauccugagcuuauauga

SEQ ID NO: 2179845 - RNA, 19 nt, Artificial Sequence
  Description of Artificial Sequence: Synthetic oligonucleotide
  Antisense strand to SEQ ID NO: 2179844
ucauauaagcucaggaugu

SEQ ID NO: 2179846 - RNA, 19 nt, Artificial Sequence
  Description of Artificial Sequence: Synthetic oligonucleotide
  Sense strand starting at position 1550 of SEQ ID NO: 1883250
gacccuuauugaucaugag

SEQ ID NO: 2179847 - RNA, 19 nt, Artificial Sequence
  Description of Artificial Sequence: Synthetic oligonucleotide
  Antisense strand to SEQ ID NO: 2179846
cucaugaucaauaaggguc

SEQ ID NO: 2179848 - RNA, 19 nt, Artificial Sequence
  Description of Artificial Sequence: Synthetic oligonucleotide
  Sense strand starting at position 1551 of SEQ ID NO: 1883250
acccuuauugaucaugagu

SEQ ID NO: 2179849 - RNA, 19 nt, Artificial Sequence
  Description of Artificial Sequence: Synthetic oligonucleotide
  Antisense strand to SEQ ID NO: 2179848
acucaugaucaauaagggu

SEQ ID NO: 2179850 - RNA, 19 nt, Artificial Sequence
  Description of Artificial Sequence: Synthetic oligonucleotide
  Sense strand starting at position 1554 of SEQ ID NO: 1883250
cuuauugaucaugaguuua

SEQ ID NO: 2179851 - RNA, 19 nt, Artificial Sequence
  Description of Artificial Sequence: Synthetic oligonucleotide
  Antisense strand to SEQ ID NO: 2179850
uaaacucaugaucaauaag

SEQ ID NO: 2179852 - RNA, 19 nt, Artificial Sequence
  Description of Artificial Sequence: Synthetic oligonucleotide
  Sense strand starting at position 1744 of SEQ ID NO: 1883250
uuaaaucuccaguauguga

SEQ ID NO: 2179853 - RNA, 19 nt, Artificial Sequence
  Description of Artificial Sequence: Synthetic oligonucleotide
  Antisense strand to SEQ ID NO: 2179852
ucacauacuggagauuuaa

SEQ ID NO: 2179854 - RNA, 19 nt, Artificial Sequence
  Description of Artificial Sequence: Synthetic oligonucleotide
  Sense strand starting at position 1746 of SEQ ID NO: 1883250
aaaucuccaguaugugaga

SEQ ID NO: 2179855 - RNA, 19 nt, Artificial Sequence
  Description of Artificial Sequence: Synthetic oligonucleotide
  Antisense strand to SEQ ID NO: 2179854
ucucacauacuggagauuu

SEQ ID NO: 2179856 - RNA, 19 nt, Artificial Sequence
  Description of Artificial Sequence: Synthetic oligonucleotide
  Sense strand starting at position 1785 of SEQ ID NO: 1883250
aauugaguuugagcuugga

SEQ ID NO: 2179857 - RNA, 19 nt, Artificial Sequence
  Description of Artificial Sequence: Synthetic oligonucleotide
  Antisense strand to SEQ ID NO: 2179856
uccaagcucaaacucaauu

SEQ ID NO: 2179858 - RNA, 19 nt, Artificial Sequence
  Description of Artificial Sequence: Synthetic oligonucleotide
  Sense strand starting at position 2059 of SEQ ID NO: 1883250
acagaauaauugcuuuaga

SEQ ID NO: 2179859 - RNA, 19 nt, Artificial Sequence
  Description of Artificial Sequence: Synthetic oligonucleotide
  Antisense strand to SEQ ID NO: 2179858
ucuaaagcaauuauucugu

SEQ ID NO: 2179860 - RNA, 19 nt, Artificial Sequence
  Description of Artificial Sequence: Synthetic oligonucleotide
  Sense strand starting at position 2136 of SEQ ID NO: 1883250
gcuggaugccauuauugau

SEQ ID NO: 2179861 - RNA, 19 nt, Artificial Sequence
  Description of Artificial Sequence: Synthetic oligonucleotide
  Antisense strand to SEQ ID NO: 2179860
aucaauaauggcauccagc

SEQ ID NO: 2179862 - RNA, 19 nt, Artificial Sequence
  Description of Artificial Sequence: Synthetic oligonucleotide
  Sense strand starting at position 2148 of SEQ ID NO: 1883250
uauugaugugaaggcacau

SEQ ID NO: 2179863 - RNA, 19 nt, Artificial Sequence
  Description of Artificial Sequence: Synthetic oligonucleotide
  Antisense strand to SEQ ID NO: 2179862
augugccuucacaucaaua

SEQ ID NO: 2179864 - RNA, 19 nt, Artificial Sequence
  Description of Artificial Sequence: Synthetic oligonucleotide
  Sense strand starting at position 2299 of SEQ ID NO: 1883250
uucguauuuauucguauca

SEQ ID NO: 2179865 - RNA, 19 nt, Artificial Sequence
  Description of Artificial Sequence: Synthetic oligonucleotide
  Antisense strand to SEQ ID NO: 2179864
ugauacgaauaaauacgaa

SEQ ID NO: 2179866 - RNA, 19 nt, Artificial Sequence
  Description of Artificial Sequence: Synthetic oligonucleotide
  Sense strand starting at position 2300 of SEQ ID NO: 1883250
ucguauuuauucguaucaa

SEQ ID NO: 2179867 - RNA, 19 nt, Artificial Sequence
  Description of Artificial Sequence: Synthetic oligonucleotide
  Antisense strand to SEQ ID NO: 2179866
uugauacgaauaaauacga

SEQ ID NO: 2179868 - RNA, 19 nt, Artificial Sequence
  Description of Artificial Sequence: Synthetic oligonucleotide
  Sense strand starting at position 2480 of SEQ ID NO: 1883250
cuuugacauuugucuaugu

SEQ ID NO: 2179869 - RNA, 19 nt, Artificial Sequence
  Description of Artificial Sequence: Synthetic oligonucleotide
  Antisense strand to SEQ ID NO: 2179868
acauagacaaaugucaaag

SEQ ID NO: 2179870 - RNA, 19 nt, Artificial Sequence
  Description of Artificial Sequence: Synthetic oligonucleotide
  Sense strand starting at position 2491 of SEQ ID NO: 1883250
gucuaugugggccaggauu

SEQ ID NO: 2179871 - RNA, 19 nt, Artificial Sequence
  Description of Artificial Sequence: Synthetic oligonucleotide
  Antisense strand to SEQ ID NO: 2179870
aauccuggcccacauagac

SEQ ID NO: 2179872 - RNA, 19 nt, Artificial Sequence
  Description of Artificial Sequence: Synthetic oligonucleotide
  Sense strand starting at position 2785 of SEQ ID NO: 1883250
uggaauauguaucuagaau

SEQ ID NO: 2179873 - RNA, 19 nt, Artificial Sequence
  Description of Artificial Sequence: Synthetic oligonucleotide
  Antisense strand to SEQ ID NO: 2179872
auucuagauacauauucca

SEQ ID NO: 2179874 - RNA, 19 nt, Artificial Sequence
  Description of Artificial Sequence: Synthetic oligonucleotide
  Sense strand starting at position 2979 of SEQ ID NO: 1883250
augucacuuagguaaaguu

SEQ ID NO: 2179875 - RNA, 19 nt, Artificial Sequence
  Description of Artificial Sequence: Synthetic oligonucleotide
  Antisense strand to SEQ ID NO: 2179874
aacuuuaccuaagugacau

SEQ ID NO: 2179876 - RNA, 19 nt, Artificial Sequence
  Description of Artificial Sequence: Synthetic oligonucleotide
  Sense strand starting at position 3051 of SEQ ID NO: 1883250
uaugcagguguauaaauau

SEQ ID NO: 2179877 - RNA, 19 nt, Artificial Sequence
  Description of Artificial Sequence: Synthetic oligonucleotide
  Antisense strand to SEQ ID NO: 2179876
auauuuauacaccugcaua

SEQ ID NO: 2179878 - RNA, 19 nt, Artificial Sequence
  Description of Artificial Sequence: Synthetic oligonucleotide
  Sense strand starting at position 3651 of SEQ ID NO: 1883250
uuugauuuauaggagcuaa

SEQ ID NO: 2179879 - RNA, 19 nt, Artificial Sequence
  Description of Artificial Sequence: Synthetic oligonucleotide
  Antisense strand to SEQ ID NO: 2179878
uuagcuccuauaaaucaaa

SEQ ID NO: 2179880 - RNA, 19 nt, Artificial Sequence
  Description of Artificial Sequence: Synthetic oligonucleotide
  Sense strand starting at position 3777 of SEQ ID NO: 1883250
guacucacaguuuacauaa

SEQ ID NO: 2179881 - RNA, 19 nt, Artificial Sequence
  Description of Artificial Sequence: Synthetic oligonucleotide
  Antisense strand to SEQ ID NO: 2179880
uuauguaaacugugaguac

SEQ ID NO: 2179882 - RNA, 19 nt, Artificial Sequence
  Description of Artificial Sequence: Synthetic oligonucleotide
  Sense strand starting at position 3803 of SEQ ID NO: 1883250
ugagaagguauggguaauc

SEQ ID NO: 2179883 - RNA, 19 nt, Artificial Sequence
  Description of Artificial Sequence: Synthetic oligonucleotide
  Antisense strand to SEQ ID NO: 2179882
gauuacccauaccuucuca

SEQ ID NO: 2179884 - RNA, 19 nt, Artificial Sequence
  Description of Artificial Sequence: Synthetic oligonucleotide
  Sense strand starting at position 315 of SEQ ID NO: 1883251
aucugagauucuuucugug

SEQ ID NO: 2179885 - RNA, 19 nt, Artificial Sequence
  Description of Artificial Sequence: Synthetic oligonucleotide
  Antisense strand to SEQ ID NO: 2179884
cacagaaagaaucucagau

SEQ ID NO: 2179886 - RNA, 19 nt, Artificial Sequence
  Description of Artificial Sequence: Synthetic oligonucleotide
  Sense strand starting at position 317 of SEQ ID NO: 1883251
cugagauucuuucugugga

SEQ ID NO: 2179887 - RNA, 19 nt, Artificial Sequence
  Description of Artificial Sequence: Synthetic oligonucleotide
  Antisense strand to SEQ ID NO: 2179886
uccacagaaagaaucucag

SEQ ID NO: 2179888 - RNA, 19 nt, Artificial Sequence
  Description of Artificial Sequence: Synthetic oligonucleotide
  Sense strand starting at position 319 of SEQ ID NO: 1883251
gagauucuuucuguggaac

SEQ ID NO: 2179889 - RNA, 19 nt, Artificial Sequence
  Description of Artificial Sequence: Synthetic oligonucleotide
  Antisense strand to SEQ ID NO: 2179888
guuccacagaaagaaucuc

SEQ ID NO: 2179890 - RNA, 19 nt, Artificial Sequence
  Description of Artificial Sequence: Synthetic oligonucleotide
  Sense strand starting at position 320 of SEQ ID NO: 1883251
agauucuuucuguggaaca

SEQ ID NO: 2179891 - RNA, 19 nt, Artificial Sequence
  Description of Artificial Sequence: Synthetic oligonucleotide
  Antisense strand to SEQ ID NO: 2179890
uguuccacagaaagaaucu

SEQ ID NO: 2179892 - RNA, 19 nt, Artificial Sequence
  Description of Artificial Sequence: Synthetic oligonucleotide
  Sense strand starting at position 430 of SEQ ID NO: 1883251
gcaaaucagcccuacuaug

SEQ ID NO: 2179893 - RNA, 19 nt, Artificial Sequence
  Description of Artificial Sequence: Synthetic oligonucleotide
  Antisense strand to SEQ ID NO: 2179892
cauaguagggcugauuugc

SEQ ID NO: 2179894 - RNA, 19 nt, Artificial Sequence
  Description of Artificial Sequence: Synthetic oligonucleotide
  Sense strand starting at position 946 of SEQ ID NO: 1883251
ggccuaccugccuaggaau

SEQ ID NO: 2179895 - RNA, 19 nt, Artificial Sequence
  Description of Artificial Sequence: Synthetic oligonucleotide
  Antisense strand to SEQ ID NO: 2179894
auuccuaggcagguaggcc

SEQ ID NO: 2179896 - RNA, 19 nt, Artificial Sequence
  Description of Artificial Sequence: Synthetic oligonucleotide
  Sense strand starting at position 948 of SEQ ID NO: 1883251
ccuaccugccuaggaauaa

SEQ ID NO: 2179897 - RNA, 19 nt, Artificial Sequence
  Description of Artificial Sequence: Synthetic oligonucleotide
  Antisense strand to SEQ ID NO: 2179896
uuauuccuaggcagguagg

SEQ ID NO: 2179898 - RNA, 19 nt, Artificial Sequence
  Description of Artificial Sequence: Synthetic oligonucleotide
  Sense strand starting at position 1170 of SEQ ID NO: 1883251
cccucuacucccgagauaa

SEQ ID NO: 2179899 - RNA, 19 nt, Artificial Sequence
  Description of Artificial Sequence: Synthetic oligonucleotide
  Antisense strand to SEQ ID NO: 2179898
uuaucucgggaguagaggg

SEQ ID NO: 2179900 - RNA, 19 nt, Artificial Sequence
  Description of Artificial Sequence: Synthetic oligonucleotide
  Sense strand starting at position 1172 of SEQ ID NO: 1883251
cucuacucccgagauaauu

SEQ ID NO: 2179901 - RNA, 19 nt, Artificial Sequence
  Description of Artificial Sequence: Synthetic oligonucleotide
  Antisense strand to SEQ ID NO: 2179900
aauuaucucgggaguagag

SEQ ID NO: 2179902 - RNA, 19 nt, Artificial Sequence
  Description of Artificial Sequence: Synthetic oligonucleotide
  Sense strand starting at position 1567 of SEQ ID NO: 1883251
ugaggaacuuuguuacuaa

SEQ ID NO: 2179903 - RNA, 19 nt, Artificial Sequence
  Description of Artificial Sequence: Synthetic oligonucleotide
  Antisense strand to SEQ ID NO: 2179902
uuaguaacaaaguuccuca

SEQ ID NO: 2179904 - RNA, 19 nt, Artificial Sequence
  Description of Artificial Sequence: Synthetic oligonucleotide
  Sense strand starting at position 1570 of SEQ ID NO: 1883251
ggaacuuuguuacuaaaua

SEQ ID NO: 2179905 - RNA, 19 nt, Artificial Sequence
  Description of Artificial Sequence: Synthetic oligonucleotide
  Antisense strand to SEQ ID NO: 2179904
uauuuaguaacaaaguucc

SEQ ID NO: 2179906 - RNA, 19 nt, Artificial Sequence
  Description of Artificial Sequence: Synthetic oligonucleotide
  Sense strand starting at position 1837 of SEQ ID NO: 1883251
uuuaaacuuugguugaagu

SEQ ID NO: 2179907 - RNA, 19 nt, Artificial Sequence
  Description of Artificial Sequence: Synthetic oligonucleotide
  Antisense strand to SEQ ID NO: 2179906
acuucaaccaaaguuuaaa

SEQ ID NO: 2179908 - RNA, 19 nt, Artificial Sequence
  Description of Artificial Sequence: Synthetic oligonucleotide
  Sense strand starting at position 1866 of SEQ ID NO: 1883251
gguggagacuuacuuauag

SEQ ID NO: 2179909 - RNA, 19 nt, Artificial Sequence
  Description of Artificial Sequence: Synthetic oligonucleotide
  Antisense strand to SEQ ID NO: 2179908
cuauaaguaagucuccacc

SEQ ID NO: 2179910 - RNA, 19 nt, Artificial Sequence
  Description of Artificial Sequence: Synthetic oligonucleotide
  Sense strand starting at position 1958 of SEQ ID NO: 1883251
gugauccagcuguaaccau

SEQ ID NO: 2179911 - RNA, 19 nt, Artificial Sequence
  Description of Artificial Sequence: Synthetic oligonucleotide
  Antisense strand to SEQ ID NO: 2179910
augguuacagcuggaucac

SEQ ID NO: 2179912 - RNA, 19 nt, Artificial Sequence
  Description of Artificial Sequence: Synthetic oligonucleotide
  Sense strand starting at position 2005 of SEQ ID NO: 1883251
agcugaacuguccaugaug

SEQ ID NO: 2179913 - RNA, 19 nt, Artificial Sequence
  Description of Artificial Sequence: Synthetic oligonucleotide
  Antisense strand to SEQ ID NO: 2179912
caucauggacaguucagcu

SEQ ID NO: 2179914 - RNA, 19 nt, Artificial Sequence
  Description of Artificial Sequence: Synthetic oligonucleotide
  Sense strand starting at position 2008 of SEQ ID NO: 1883251
ugaacuguccaugauguca

SEQ ID NO: 2179915 - RNA, 19 nt, Artificial Sequence
  Description of Artificial Sequence: Synthetic oligonucleotide
  Antisense strand to SEQ ID NO: 2179914
ugacaucauggacaguuca

SEQ ID NO: 2179916 - RNA, 19 nt, Artificial Sequence
  Description of Artificial Sequence: Synthetic oligonucleotide
  Sense strand starting at position 2169 of SEQ ID NO: 1883251
uguaaauucuaggcuuaaa

SEQ ID NO: 2179917 - RNA, 19 nt, Artificial Sequence
  Description of Artificial Sequence: Synthetic oligonucleotide
  Antisense strand to SEQ ID NO: 2179916
uuuaagccuagaauuuaca

SEQ ID NO: 2179918 - RNA, 19 nt, Artificial Sequence
  Description of Artificial Sequence: Synthetic oligonucleotide
  Sense strand starting at position 2242 of SEQ ID NO: 1883251
ccuuuaagaccauggacua

SEQ ID NO: 2179919 - RNA, 19 nt, Artificial Sequence
  Description of Artificial Sequence: Synthetic oligonucleotide
  Antisense strand to SEQ ID NO: 2179918
uaguccauggucuuaaagg

SEQ ID NO: 2179920 - RNA, 19 nt, Artificial Sequence
  Description of Artificial Sequence: Synthetic oligonucleotide
  Sense strand starting at position 2366 of SEQ ID NO: 1883251
agaggagccuuggcuaaua

SEQ ID NO: 2179921 - RNA, 19 nt, Artificial Sequence
  Description of Artificial Sequence: Synthetic oligonucleotide
  Antisense strand to SEQ ID NO: 2179920
uauuagccaaggcuccucu

SEQ ID NO: 2179922 - RNA, 19 nt, Artificial Sequence
  Description of Artificial Sequence: Synthetic oligonucleotide
  Sense strand starting at position 2486 of SEQ ID NO: 1883251
cugugugucagaguuguuu

SEQ ID NO: 2179923 - RNA, 19 nt, Artificial Sequence
  Description of Artificial Sequence: Synthetic oligonucleotide
  Antisense strand to SEQ ID NO: 2179922
aaacaacucugacacacag

SEQ ID NO: 2179924 - RNA, 19 nt, Artificial Sequence
  Description of Artificial Sequence: Synthetic oligonucleotide
  Sense strand starting at position 2605 of SEQ ID NO: 1883251
cugugaagacccuacuguu

SEQ ID NO: 2179925 - RNA, 19 nt, Artificial Sequence
  Description of Artificial Sequence: Synthetic oligonucleotide
  Antisense strand to SEQ ID NO: 2179924
aacaguagggucuucacag

SEQ ID NO: 2179926 - RNA, 19 nt, Artificial Sequence
  Description of Artificial Sequence: Synthetic oligonucleotide
  Sense strand starting at position 2624 of SEQ ID NO: 1883251
agugguaguugacugacua

SEQ ID NO: 2179927 - RNA, 19 nt, Artificial Sequence
  Description of Artificial Sequence: Synthetic oligonucleotide
  Antisense strand to SEQ ID NO: 2179926
uagucagucaacuaccacu

SEQ ID NO: 2179928 - RNA, 19 nt, Artificial Sequence
  Description of Artificial Sequence: Synthetic oligonucleotide
  Sense strand starting at position 2628 of SEQ ID NO: 1883251
guaguugacugacuaauaa

SEQ ID NO: 2179929 - RNA, 19 nt, Artificial Sequence
  Description of Artificial Sequence: Synthetic oligonucleotide
  Antisense strand to SEQ ID NO: 2179928
uuauuagucagucaacuac

SEQ ID NO: 2179930 - RNA, 19 nt, Artificial Sequence
  Description of Artificial Sequence: Synthetic oligonucleotide
  Sense strand starting at position 2643 of SEQ ID NO: 1883251
auaaauagcccauggguau

SEQ ID NO: 2179931 - RNA, 19 nt, Artificial Sequence
  Description of Artificial Sequence: Synthetic oligonucleotide
  Antisense strand to SEQ ID NO: 2179930
auacccaugggcuauuuau

SEQ ID NO: 2179932 - RNA, 19 nt, Artificial Sequence
  Description of Artificial Sequence: Synthetic oligonucleotide
  Sense strand starting at position 2667 of SEQ ID NO: 1883251
gugguagugguauaauuau

SEQ ID NO: 2179933 - RNA, 19 nt, Artificial Sequence
  Description of Artificial Sequence: Synthetic oligonucleotide
  Antisense strand to SEQ ID NO: 2179932
auaauuauaccacuaccac

SEQ ID NO: 2179934 - RNA, 19 nt, Artificial Sequence
  Description of Artificial Sequence: Synthetic oligonucleotide
  Sense strand starting at position 2695 of SEQ ID NO: 1883251
guugguguuuaacugagaa

SEQ ID NO: 2179935 - RNA, 19 nt, Artificial Sequence
  Description of Artificial Sequence: Synthetic oligonucleotide
  Antisense strand to SEQ ID NO: 2179934
uucucaguuaaacaccaac

SEQ ID NO: 2179936 - RNA, 19 nt, Artificial Sequence
  Description of Artificial Sequence: Synthetic oligonucleotide
  Sense strand starting at position 2744 of SEQ ID NO: 1883251
agugcaauggcucaggauu

SEQ ID NO: 2179937 - RNA, 19 nt, Artificial Sequence
  Description of Artificial Sequence: Synthetic oligonucleotide
  Antisense strand to SEQ ID NO: 2179936
aauccugagccauugcacu

SEQ ID NO: 2179938 - RNA, 19 nt, Artificial Sequence
  Description of Artificial Sequence: Synthetic oligonucleotide
  Sense strand starting at position 2954 of SEQ ID NO: 1883251
gaucauggcuaagucuuaa

SEQ ID NO: 2179939 - RNA, 19 nt, Artificial Sequence
  Description of Artificial Sequence: Synthetic oligonucleotide
  Antisense strand to SEQ ID NO: 2179938
uuaagacuuagccaugauc

SEQ ID NO: 2179940 - RNA, 19 nt, Artificial Sequence
  Description of Artificial Sequence: Synthetic oligonucleotide
  Sense strand starting at position 2993 of SEQ ID NO: 1883251
cagagaaagcuguauucuc

SEQ ID NO: 2179941 - RNA, 19 nt, Artificial Sequence
  Description of Artificial Sequence: Synthetic oligonucleotide
  Antisense strand to SEQ ID NO: 2179940
gagaauacagcuuucucug

SEQ ID NO: 2179942 - RNA, 19 nt, Artificial Sequence
  Description of Artificial Sequence: Synthetic oligonucleotide
  Sense strand starting at position 3081 of SEQ ID NO: 1883251
agaguuaucuuugucaaug

SEQ ID NO: 2179943 - RNA, 19 nt, Artificial Sequence
  Description of Artificial Sequence: Synthetic oligonucleotide
  Antisense strand to SEQ ID NO: 2179942
cauugacaaagauaacucu

SEQ ID NO: 2179944 - RNA, 19 nt, Artificial Sequence
  Description of Artificial Sequence: Synthetic oligonucleotide
  Sense strand starting at position 3360 of SEQ ID NO: 1883251
ucuuauaguggaggcuaaa

SEQ ID NO: 2179945 - RNA, 19 nt, Artificial Sequence
  Description of Artificial Sequence: Synthetic oligonucleotide
  Antisense strand to SEQ ID NO: 2179944
uuuagccuccacuauaaga

SEQ ID NO: 2179946 - RNA, 19 nt, Artificial Sequence
  Description of Artificial Sequence: Synthetic oligonucleotide
  Sense strand starting at position 3387 of SEQ ID NO: 1883251
gucaguaucagugauccca

SEQ ID NO: 2179947 - RNA, 19 nt, Artificial Sequence
  Description of Artificial Sequence: Synthetic oligonucleotide
  Antisense strand to SEQ ID NO: 2179946
ugggaucacugauacugac

SEQ ID NO: 2179948 - RNA, 19 nt, Artificial Sequence
  Description of Artificial Sequence: Synthetic oligonucleotide
  Sense strand starting at position 3549 of SEQ ID NO: 1883251
ggugcauguaauuguauuu

SEQ ID NO: 2179949 - RNA, 19 nt, Artificial Sequence
  Description of Artificial Sequence: Synthetic oligonucleotide
  Antisense strand to SEQ ID NO: 2179948
aaauacaauuacaugcacc

SEQ ID NO: 2179950 - RNA, 19 nt, Artificial Sequence
  Description of Artificial Sequence: Synthetic oligonucleotide
  Sense strand starting at position 3748 of SEQ ID NO: 1883251
ucauaauauuauccgguau

SEQ ID NO: 2179951 - RNA, 19 nt, Artificial Sequence
  Description of Artificial Sequence: Synthetic oligonucleotide
  Antisense strand to SEQ ID NO: 2179950
auaccggauaauauuauga

SEQ ID NO: 2179952 - RNA, 19 nt, Artificial Sequence
  Description of Artificial Sequence: Synthetic oligonucleotide
  Sense strand starting at position 3792 of SEQ ID NO: 1883251
ugguacagaauacgucaua

SEQ ID NO: 2179953 - RNA, 19 nt, Artificial Sequence
  Description of Artificial Sequence: Synthetic oligonucleotide
  Antisense strand to SEQ ID NO: 2179952
uaugacguauucuguacca

SEQ ID NO: 2179954 - RNA, 19 nt, Artificial Sequence
  Description of Artificial Sequence: Synthetic oligonucleotide
  Sense strand starting at position 3793 of SEQ ID NO: 1883251
gguacagaauacgucauaa

SEQ ID NO: 2179955 - RNA, 19 nt, Artificial Sequence
  Description of Artificial Sequence: Synthetic oligonucleotide
  Antisense strand to SEQ ID NO: 2179954
uuaugacguauucuguacc

SEQ ID NO: 2179956 - RNA, 19 nt, Artificial Sequence
  Description of Artificial Sequence: Synthetic oligonucleotide
  Sense strand starting at position 3795 of SEQ ID NO: 1883251
uacagaauacgucauaagu

SEQ ID NO: 2179957 - RNA, 19 nt, Artificial Sequence
  Description of Artificial Sequence: Synthetic oligonucleotide
  Antisense strand to SEQ ID NO: 2179956
acuuaugacguauucugua

SEQ ID NO: 2179958 - RNA, 19 nt, Artificial Sequence
  Description of Artificial Sequence: Synthetic oligonucleotide
  Sense strand starting at position 3801 of SEQ ID NO: 1883251
auacgucauaagugaauug

SEQ ID NO: 2179959 - RNA, 19 nt, Artificial Sequence
  Description of Artificial Sequence: Synthetic oligonucleotide
  Antisense strand to SEQ ID NO: 2179958
caauucacuuaugacguau

SEQ ID NO: 2179960 - RNA, 19 nt, Artificial Sequence
  Description of Artificial Sequence: Synthetic oligonucleotide
  Sense strand starting at position 3810 of SEQ ID NO: 1883251
aagugaauugcagaucuua

SEQ ID NO: 2179961 - RNA, 19 nt, Artificial Sequence
  Description of Artificial Sequence: Synthetic oligonucleotide
  Antisense strand to SEQ ID NO: 2179960
uaagaucugcaauucacuu

SEQ ID NO: 2179962 - RNA, 19 nt, Artificial Sequence
  Description of Artificial Sequence: Synthetic oligonucleotide
  Sense strand starting at position 3818 of SEQ ID NO: 1883251
ugcagaucuuagccaacaa

SEQ ID NO: 2179963 - RNA, 19 nt, Artificial Sequence
  Description of Artificial Sequence: Synthetic oligonucleotide
  Antisense strand to SEQ ID NO: 2179962
uuguuggcuaagaucugca

SEQ ID NO: 2179964 - RNA, 19 nt, Artificial Sequence
  Description of Artificial Sequence: Synthetic oligonucleotide
  Sense strand starting at position 69 of SEQ ID NO: 1883252
aguaaugcgauauauaaga

SEQ ID NO: 2179965 - RNA, 19 nt, Artificial Sequence
  Description of Artificial Sequence: Synthetic oligonucleotide
  Antisense strand to SEQ ID NO: 2179964
ucuuauauaucgcauuacu

SEQ ID NO: 2179966 - RNA, 19 nt, Artificial Sequence
  Description of Artificial Sequence: Synthetic oligonucleotide
  Sense strand starting at position 194 of SEQ ID NO: 1883252
gagcuugugagucagaaag

SEQ ID NO: 2179967 - RNA, 19 nt, Artificial Sequence
  Description of Artificial Sequence: Synthetic oligonucleotide
  Antisense strand to SEQ ID NO: 2179966
cuuucugacucacaagcuc

SEQ ID NO: 2179968 - RNA, 19 nt, Artificial Sequence
  Description of Artificial Sequence: Synthetic oligonucleotide
  Sense strand starting at position 447 of SEQ ID NO: 1883252
gcauuuauugagugcacac

SEQ ID NO: 2179969 - RNA, 19 nt, Artificial Sequence
  Description of Artificial Sequence: Synthetic oligonucleotide
  Antisense strand to SEQ ID NO: 2179968
gugugcacucaauaaaugc

SEQ ID NO: 2179970 - RNA, 19 nt, Artificial Sequence
  Description of Artificial Sequence: Synthetic oligonucleotide
  Sense strand starting at position 458 of SEQ ID NO: 1883252
gugcacacugucuacuaaa

SEQ ID NO: 2179971 - RNA, 19 nt, Artificial Sequence
  Description of Artificial Sequence: Synthetic oligonucleotide
  Antisense strand to SEQ ID NO: 2179970
uuuaguagacagugugcac

SEQ ID NO: 2179972 - RNA, 19 nt, Artificial Sequence
  Description of Artificial Sequence: Synthetic oligonucleotide
  Sense strand starting at position 515 of SEQ ID NO: 1883252
agguaccuguucccaaaga

SEQ ID NO: 2179973 - RNA, 19 nt, Artificial Sequence
  Description of Artificial Sequence: Synthetic oligonucleotide
  Antisense strand to SEQ ID NO: 2179972
ucuuugggaacagguaccu

SEQ ID NO: 2179974 - RNA, 19 nt, Artificial Sequence
  Description of Artificial Sequence: Synthetic oligonucleotide
  Sense strand starting at position 531 of SEQ ID NO: 1883252
agaccauagccuuagguuu

SEQ ID NO: 2179975 - RNA, 19 nt, Artificial Sequence
  Description of Artificial Sequence: Synthetic oligonucleotide
  Antisense strand to SEQ ID NO: 2179974
aaaccuaaggcuauggucu

SEQ ID NO: 2179976 - RNA, 19 nt, Artificial Sequence
  Description of Artificial Sequence: Synthetic oligonucleotide
  Sense strand starting at position 666 of SEQ ID NO: 1883252
uggcaacgagccuaugaau

SEQ ID NO: 2179977 - RNA, 19 nt, Artificial Sequence
  Description of Artificial Sequence: Synthetic oligonucleotide
  Antisense strand to SEQ ID NO: 2179976
auucauaggcucguugcca

SEQ ID NO: 2179978 - RNA, 19 nt, Artificial Sequence
  Description of Artificial Sequence: Synthetic oligonucleotide
  Sense strand starting at position 966 of SEQ ID NO: 1883252
gccuuugucagugaauaga

SEQ ID NO: 2179979 - RNA, 19 nt, Artificial Sequence
  Description of Artificial Sequence: Synthetic oligonucleotide
  Antisense strand to SEQ ID NO: 2179978
ucuauucacugacaaaggc

SEQ ID NO: 2179980 - RNA, 19 nt, Artificial Sequence
  Description of Artificial Sequence: Synthetic oligonucleotide
  Sense strand starting at position 1046 of SEQ ID NO: 1883252
ggugcuauuagugcucuuu

SEQ ID NO: 2179981 - RNA, 19 nt, Artificial Sequence
  Description of Artificial Sequence: Synthetic oligonucleotide
  Antisense strand to SEQ ID NO: 2179980
aaagagcacuaauagcacc

SEQ ID NO: 2179982 - RNA, 19 nt, Artificial Sequence
  Description of Artificial Sequence: Synthetic oligonucleotide
  Sense strand starting at position 1303 of SEQ ID NO: 1883252
acuagaaauccaugagcug

SEQ ID NO: 2179983 - RNA, 19 nt, Artificial Sequence
  Description of Artificial Sequence: Synthetic oligonucleotide
  Antisense strand to SEQ ID NO: 2179982
cagcucauggauuucuagu

SEQ ID NO: 2179984 - RNA, 19 nt, Artificial Sequence
  Description of Artificial Sequence: Synthetic oligonucleotide
  Sense strand starting at position 1352 of SEQ ID NO: 1883252
augugaauccugcaucuua

SEQ ID NO: 2179985 - RNA, 19 nt, Artificial Sequence
  Description of Artificial Sequence: Synthetic oligonucleotide
  Antisense strand to SEQ ID NO: 2179984
uaagaugcaggauucacau

SEQ ID NO: 2179986 - RNA, 19 nt, Artificial Sequence
  Description of Artificial Sequence: Synthetic oligonucleotide
  Sense strand starting at position 1455 of SEQ ID NO: 1883252
guuauaaucguagaacuug

SEQ ID NO: 2179987 - RNA, 19 nt, Artificial Sequence
  Description of Artificial Sequence: Synthetic oligonucleotide
  Antisense strand to SEQ ID NO: 2179986
caaguucuacgauuauaac

SEQ ID NO: 2179988 - RNA, 19 nt, Artificial Sequence
  Description of Artificial Sequence: Synthetic oligonucleotide
  Sense strand starting at position 1467 of SEQ ID NO: 1883252
gaacuuguaccauagugua

SEQ ID NO: 2179989 - RNA, 19 nt, Artificial Sequence
  Description of Artificial Sequence: Synthetic oligonucleotide
  Antisense strand to SEQ ID NO: 2179988
uacacuaugguacaaguuc

SEQ ID NO: 2179990 - RNA, 19 nt, Artificial Sequence
  Description of Artificial Sequence: Synthetic oligonucleotide
  Sense strand starting at position 1472 of SEQ ID NO: 1883252
uguaccauaguguaagaaa

SEQ ID NO: 2179991 - RNA, 19 nt, Artificial Sequence
  Description of Artificial Sequence: Synthetic oligonucleotide
  Antisense strand to SEQ ID NO: 2179990
uuucuuacacuaugguaca

SEQ ID NO: 2179992 - RNA, 19 nt, Artificial Sequence
  Description of Artificial Sequence: Synthetic oligonucleotide
  Sense strand starting at position 1534 of SEQ ID NO: 1883252
uggcaucuaccugaugauc

SEQ ID NO: 2179993 - RNA, 19 nt, Artificial Sequence
  Description of Artificial Sequence: Synthetic oligonucleotide
  Antisense strand to SEQ ID NO: 2179992
gaucaucagguagaugcca

SEQ ID NO: 2179994 - RNA, 19 nt, Artificial Sequence
  Description of Artificial Sequence: Synthetic oligonucleotide
  Sense strand starting at position 1699 of SEQ ID NO: 1883252
aaagaacugugguuaggua

SEQ ID NO: 2179995 - RNA, 19 nt, Artificial Sequence
  Description of Artificial Sequence: Synthetic oligonucleotide
  Antisense strand to SEQ ID NO: 2179994
uaccuaaccacaguucuuu

SEQ ID NO: 2179996 - RNA, 19 nt, Artificial Sequence
  Description of Artificial Sequence: Synthetic oligonucleotide
  Sense strand starting at position 1700 of SEQ ID NO: 1883252
aagaacugugguuagguau

SEQ ID NO: 2179997 - RNA, 19 nt, Artificial Sequence
  Description of Artificial Sequence: Synthetic oligonucleotide
  Antisense strand to SEQ ID NO: 2179996
auaccuaaccacaguucuu

SEQ ID NO: 2179998 - RNA, 19 nt, Artificial Sequence
  Description of Artificial Sequence: Synthetic oligonucleotide
  Sense strand starting at position 1787 of SEQ ID NO: 1883252
ggagcuuccuauuugcaac

SEQ ID NO: 2179999 - RNA, 19 nt, Artificial Sequence
  Description of Artificial Sequence: Synthetic oligonucleotide
  Antisense strand to SEQ ID NO: 2179998
guugcaaauaggaagcucc

SEQ ID NO: 2180000 - RNA, 19 nt, Artificial Sequence
  Description of Artificial Sequence: Synthetic oligonucleotide
  Sense strand starting at position 1810 of SEQ ID NO: 1883252
gagauuaguguugaaugcu

SEQ ID NO: 2180001 - RNA, 19 nt, Artificial Sequence
  Description of Artificial Sequence: Synthetic oligonucleotide
  Antisense strand to SEQ ID NO: 2180000
agcauucaacacuaaucuc

SEQ ID NO: 2180002 - RNA, 19 nt, Artificial Sequence
  Description of Artificial Sequence: Synthetic oligonucleotide
  Sense strand starting at position 2000 of SEQ ID NO: 1883252
uuggguuucccuggagacu

SEQ ID NO: 2180003 - RNA, 19 nt, Artificial Sequence
  Description of Artificial Sequence: Synthetic oligonucleotide
  Antisense strand to SEQ ID NO: 2180002
agucuccagggaaacccaa

SEQ ID NO: 2180004 - RNA, 19 nt, Artificial Sequence
  Description of Artificial Sequence: Synthetic oligonucleotide
  Sense strand starting at position 2009 of SEQ ID NO: 1883252
ccuggagacuccuuuauaa

SEQ ID NO: 2180005 - RNA, 19 nt, Artificial Sequence
  Description of Artificial Sequence: Synthetic oligonucleotide
  Antisense strand to SEQ ID NO: 2180004
uuauaaaggagucuccagg

SEQ ID NO: 2180006 - RNA, 19 nt, Artificial Sequence
  Description of Artificial Sequence: Synthetic oligonucleotide
  Sense strand starting at position 2067 of SEQ ID NO: 1883252
ucuguuauacgggaauccu

SEQ ID NO: 2180007 - RNA, 19 nt, Artificial Sequence
  Description of Artificial Sequence: Synthetic oligonucleotide
  Antisense strand to SEQ ID NO: 2180006
aggauucccguauaacaga

SEQ ID NO: 2180008 - RNA, 19 nt, Artificial Sequence
  Description of Artificial Sequence: Synthetic oligonucleotide
  Sense strand starting at position 2551 of SEQ ID NO: 1883252
ggucguguuaaggagaaca

SEQ ID NO: 2180009 - RNA, 19 nt, Artificial Sequence
  Description of Artificial Sequence: Synthetic oligonucleotide
  Antisense strand to SEQ ID NO: 2180008
uguucuccuuaacacgacc

SEQ ID NO: 2180010 - RNA, 19 nt, Artificial Sequence
  Description of Artificial Sequence: Synthetic oligonucleotide
  Sense strand starting at position 2553 of SEQ ID NO: 1883252
ucguguuaaggagaacaga

SEQ ID NO: 2180011 - RNA, 19 nt, Artificial Sequence
  Description of Artificial Sequence: Synthetic oligonucleotide
  Antisense strand to SEQ ID NO: 2180010
ucuguucuccuuaacacga

SEQ ID NO: 2180012 - RNA, 19 nt, Artificial Sequence
  Description of Artificial Sequence: Synthetic oligonucleotide
  Sense strand starting at position 3236 of SEQ ID NO: 1883252
gagacuguauggccaacaa

SEQ ID NO: 2180013 - RNA, 19 nt, Artificial Sequence
  Description of Artificial Sequence: Synthetic oligonucleotide
  Antisense strand to SEQ ID NO: 2180012
uuguuggccauacagucuc

SEQ ID NO: 2180014 - RNA, 19 nt, Artificial Sequence
  Description of Artificial Sequence: Synthetic oligonucleotide
  Sense strand starting at position 3314 of SEQ ID NO: 1883252
gacauagguccugguuaag

SEQ ID NO: 2180015 - RNA, 19 nt, Artificial Sequence
  Description of Artificial Sequence: Synthetic oligonucleotide
  Antisense strand to SEQ ID NO: 2180014
cuuaaccaggaccuauguc

SEQ ID NO: 2180016 - RNA, 19 nt, Artificial Sequence
  Description of Artificial Sequence: Synthetic oligonucleotide
  Sense strand starting at position 3345 of SEQ ID NO: 1883252
gacacugugcuugaguuga

SEQ ID NO: 2180017 - RNA, 19 nt, Artificial Sequence
  Description of Artificial Sequence: Synthetic oligonucleotide
  Antisense strand to SEQ ID NO: 2180016
ucaacucaagcacaguguc

SEQ ID NO: 2180018 - RNA, 19 nt, Artificial Sequence
  Description of Artificial Sequence: Synthetic oligonucleotide
  Sense strand starting at position 3396 of SEQ ID NO: 1883252
agaggauccucacauuuag

SEQ ID NO: 2180019 - RNA, 19 nt, Artificial Sequence
  Description of Artificial Sequence: Synthetic oligonucleotide
  Antisense strand to SEQ ID NO: 2180018
cuaaaugugaggauccucu

SEQ ID NO: 2180020 - RNA, 19 nt, Artificial Sequence
  Description of Artificial Sequence: Synthetic oligonucleotide
  Sense strand starting at position 3402 of SEQ ID NO: 1883252
uccucacauuuagagauga

SEQ ID NO: 2180021 - RNA, 19 nt, Artificial Sequence
  Description of Artificial Sequence: Synthetic oligonucleotide
  Antisense strand to SEQ ID NO: 2180020
ucaucucuaaaugugagga

SEQ ID NO: 2180022 - RNA, 19 nt, Artificial Sequence
  Description of Artificial Sequence: Synthetic oligonucleotide
  Sense strand starting at position 3496 of SEQ ID NO: 1883252
aacggagugguucagaaug

SEQ ID NO: 2180023 - RNA, 19 nt, Artificial Sequence
  Description of Artificial Sequence: Synthetic oligonucleotide
  Antisense strand to SEQ ID NO: 2180022
cauucugaaccacuccguu

SEQ ID NO: 2180024 - RNA, 19 nt, Artificial Sequence
  Description of Artificial Sequence: Synthetic oligonucleotide
  Sense strand starting at position 3511 of SEQ ID NO: 1883252
aaugaaaggcuaugaaguu

SEQ ID NO: 2180025 - RNA, 19 nt, Artificial Sequence
  Description of Artificial Sequence: Synthetic oligonucleotide
  Antisense strand to SEQ ID NO: 2180024
aacuucauagccuuucauu

SEQ ID NO: 2180026 - RNA, 19 nt, Artificial Sequence
  Description of Artificial Sequence: Synthetic oligonucleotide
  Sense strand starting at position 3541 of SEQ ID NO: 1883252
acaggaagucauuggagcu

SEQ ID NO: 2180027 - RNA, 19 nt, Artificial Sequence
  Description of Artificial Sequence: Synthetic oligonucleotide
  Antisense strand to SEQ ID NO: 2180026
agcuccaaugacuuccugu

SEQ ID NO: 2180028 - RNA, 19 nt, Artificial Sequence
  Description of Artificial Sequence: Synthetic oligonucleotide
  Sense strand starting at position 3548 of SEQ ID NO: 1883252
gucauuggagcucauccua

SEQ ID NO: 2180029 - RNA, 19 nt, Artificial Sequence
  Description of Artificial Sequence: Synthetic oligonucleotide
  Antisense strand to SEQ ID NO: 2180028
uaggaugagcuccaaugac

SEQ ID NO: 2180030 - RNA, 19 nt, Artificial Sequence
  Description of Artificial Sequence: Synthetic oligonucleotide
  Sense strand starting at position 3627 of SEQ ID NO: 1883252
ggcucagguggacauugau

SEQ ID NO: 2180031 - RNA, 19 nt, Artificial Sequence
  Description of Artificial Sequence: Synthetic oligonucleotide
  Antisense strand to SEQ ID NO: 2180030
aucaauguccaccugagcc

SEQ ID NO: 2180032 - RNA, 19 nt, Artificial Sequence
  Description of Artificial Sequence: Synthetic oligonucleotide
  Sense strand starting at position 3630 of SEQ ID NO: 1883252
ucagguggacauugaugua

SEQ ID NO: 2180033 - RNA, 19 nt, Artificial Sequence
  Description of Artificial Sequence: Synthetic oligonucleotide
  Antisense strand to SEQ ID NO: 2180032
uacaucaauguccaccuga

SEQ ID NO: 2180034 - RNA, 19 nt, Artificial Sequence
  Description of Artificial Sequence: Synthetic oligonucleotide
  Sense strand starting at position 3868 of SEQ ID NO: 1883252
aguagagaccagugagagu

SEQ ID NO: 2180035 - RNA, 19 nt, Artificial Sequence
  Description of Artificial Sequence: Synthetic oligonucleotide
  Antisense strand to SEQ ID NO: 2180034
acucucacuggucucuacu

SEQ ID NO: 2180036 - RNA, 19 nt, Artificial Sequence
  Description of Artificial Sequence: Synthetic oligonucleotide
  Sense strand starting at position 3877 of SEQ ID NO: 1883252
cagugagaguuuccuaaac

SEQ ID NO: 2180037 - RNA, 19 nt, Artificial Sequence
  Description of Artificial Sequence: Synthetic oligonucleotide
  Antisense strand to SEQ ID NO: 2180036
guuuaggaaacucucacug

SEQ ID NO: 2180038 - RNA, 19 nt, Artificial Sequence
  Description of Artificial Sequence: Synthetic oligonucleotide
  Sense strand starting at position 3904 of SEQ ID NO: 1883252
aggguagaaugcuuggaca

SEQ ID NO: 2180039 - RNA, 19 nt, Artificial Sequence
  Description of Artificial Sequence: Synthetic oligonucleotide
  Antisense strand to SEQ ID NO: 2180038
uguccaagcauucuacccu

SEQ ID NO: 2180040 - RNA, 19 nt, Artificial Sequence
  Description of Artificial Sequence: Synthetic oligonucleotide
  Sense strand starting at position 3906 of SEQ ID NO: 1883252
gguagaaugcuuggacauu

SEQ ID NO: 2180041 - RNA, 19 nt, Artificial Sequence
  Description of Artificial Sequence: Synthetic oligonucleotide
  Antisense strand to SEQ ID NO: 2180040
aauguccaagcauucuacc

SEQ ID NO: 2180042 - RNA, 19 nt, Artificial Sequence
  Description of Artificial Sequence: Synthetic oligonucleotide
  Sense strand starting at position 3927 of SEQ ID NO: 1883252
uagguugaucgugaacucu

SEQ ID NO: 2180043 - RNA, 19 nt, Artificial Sequence
  Description of Artificial Sequence: Synthetic oligonucleotide
  Antisense strand to SEQ ID NO: 2180042
agaguucacgaucaaccua

SEQ ID NO: 2180044 - RNA, 19 nt, Artificial Sequence
  Description of Artificial Sequence: Synthetic oligonucleotide
  Sense strand starting at position 641 of SEQ ID NO: 1883253
uuggaacugagcuguucuu

SEQ ID NO: 2180045 - RNA, 19 nt, Artificial Sequence
  Description of Artificial Sequence: Synthetic oligonucleotide
  Antisense strand to SEQ ID NO: 2180044
aagaacagcucaguuccaa

SEQ ID NO: 2180046 - RNA, 19 nt, Artificial Sequence
  Description of Artificial Sequence: Synthetic oligonucleotide
  Sense strand starting at position 708 of SEQ ID NO: 1883253
ccacacaaugguugacuau

SEQ ID NO: 2180047 - RNA, 19 nt, Artificial Sequence
  Description of Artificial Sequence: Synthetic oligonucleotide
  Antisense strand to SEQ ID NO: 2180046
auagucaaccauugugugg

SEQ ID NO: 2180048 - RNA, 19 nt, Artificial Sequence
  Description of Artificial Sequence: Synthetic oligonucleotide
  Sense strand starting at position 721 of SEQ ID NO: 1883253
gacuaugacuugggauaaa

SEQ ID NO: 2180049 - RNA, 19 nt, Artificial Sequence
  Description of Artificial Sequence: Synthetic oligonucleotide
  Antisense strand to SEQ ID NO: 2180048
uuuaucccaagucauaguc

SEQ ID NO: 2180050 - RNA, 19 nt, Artificial Sequence
  Description of Artificial Sequence: Synthetic oligonucleotide
  Sense strand starting at position 853 of SEQ ID NO: 1883253
ggaggaacauuugaggcaa

SEQ ID NO: 2180051 - RNA, 19 nt, Artificial Sequence
  Description of Artificial Sequence: Synthetic oligonucleotide
  Antisense strand to SEQ ID NO: 2180050
uugccucaaauguuccucc

SEQ ID NO: 2180052 - RNA, 19 nt, Artificial Sequence
  Description of Artificial Sequence: Synthetic oligonucleotide
  Sense strand starting at position 1084 of SEQ ID NO: 1883253
gcucacaagacaggugaaa

SEQ ID NO: 2180053 - RNA, 19 nt, Artificial Sequence
  Description of Artificial Sequence: Synthetic oligonucleotide
  Antisense strand to SEQ ID NO: 2180052
uuucaccugucuugugagc

SEQ ID NO: 2180054 - RNA, 19 nt, Artificial Sequence
  Description of Artificial Sequence: Synthetic oligonucleotide
  Sense strand starting at position 1241 of SEQ ID NO: 1883253
gcgguuuccaucuaugaaa

SEQ ID NO: 2180055 - RNA, 19 nt, Artificial Sequence
  Description of Artificial Sequence: Synthetic oligonucleotide
  Antisense strand to SEQ ID NO: 2180054
uuucauagauggaaaccgc

SEQ ID NO: 2180056 - RNA, 19 nt, Artificial Sequence
  Description of Artificial Sequence: Synthetic oligonucleotide
  Sense strand starting at position 1243 of SEQ ID NO: 1883253
gguuuccaucuaugaaauc

SEQ ID NO: 2180057 - RNA, 19 nt, Artificial Sequence
  Description of Artificial Sequence: Synthetic oligonucleotide
  Antisense strand to SEQ ID NO: 2180056
gauuucauagauggaaacc

SEQ ID NO: 2180058 - RNA, 19 nt, Artificial Sequence
  Description of Artificial Sequence: Synthetic oligonucleotide
  Sense strand starting at position 1279 of SEQ ID NO: 1883253
caaagugcuuuccauggau

SEQ ID NO: 2180059 - RNA, 19 nt, Artificial Sequence
  Description of Artificial Sequence: Synthetic oligonucleotide
  Antisense strand to SEQ ID NO: 2180058
auccauggaaagcacuuug

SEQ ID NO: 2180060 - RNA, 19 nt, Artificial Sequence
  Description of Artificial Sequence: Synthetic oligonucleotide
  Sense strand starting at position 1340 of SEQ ID NO: 1883253
aggcaaguucuaugugcuu

SEQ ID NO: 2180061 - RNA, 19 nt, Artificial Sequence
  Description of Artificial Sequence: Synthetic oligonucleotide
  Antisense strand to SEQ ID NO: 2180060
aagcacauagaacuugccu

SEQ ID NO: 2180062 - RNA, 19 nt, Artificial Sequence
  Description of Artificial Sequence: Synthetic oligonucleotide
  Sense strand starting at position 1345 of SEQ ID NO: 1883253
aguucuaugugcuuugaug

SEQ ID NO: 2180063 - RNA, 19 nt, Artificial Sequence
  Description of Artificial Sequence: Synthetic oligonucleotide
  Antisense strand to SEQ ID NO: 2180062
caucaaagcacauagaacu

SEQ ID NO: 2180064 - RNA, 19 nt, Artificial Sequence
  Description of Artificial Sequence: Synthetic oligonucleotide
  Sense strand starting at position 1353 of SEQ ID NO: 1883253
gugcuuugaugccuagcaa

SEQ ID NO: 2180065 - RNA, 19 nt, Artificial Sequence
  Description of Artificial Sequence: Synthetic oligonucleotide
  Antisense strand to SEQ ID NO: 2180064
uugcuaggcaucaaagcac

SEQ ID NO: 2180066 - RNA, 19 nt, Artificial Sequence
  Description of Artificial Sequence: Synthetic oligonucleotide
  Sense strand starting at position 1564 of SEQ ID NO: 1883253
ggagcuacuugcucuuuaa

SEQ ID NO: 2180067 - RNA, 19 nt, Artificial Sequence
  Description of Artificial Sequence: Synthetic oligonucleotide
  Antisense strand to SEQ ID NO: 2180066
uuaaagagcaaguagcucc

SEQ ID NO: 2180068 - RNA, 19 nt, Artificial Sequence
  Description of Artificial Sequence: Synthetic oligonucleotide
  Sense strand starting at position 1606 of SEQ ID NO: 1883253
ucugccauggcuuaggaaa

SEQ ID NO: 2180069 - RNA, 19 nt, Artificial Sequence
  Description of Artificial Sequence: Synthetic oligonucleotide
  Antisense strand to SEQ ID NO: 2180068
uuuccuaagccauggcaga

SEQ ID NO: 2180070 - RNA, 19 nt, Artificial Sequence
  Description of Artificial Sequence: Synthetic oligonucleotide
  Sense strand starting at position 1835 of SEQ ID NO: 1883253
ccugguucucagugaugug

SEQ ID NO: 2180071 - RNA, 19 nt, Artificial Sequence
  Description of Artificial Sequence: Synthetic oligonucleotide
  Antisense strand to SEQ ID NO: 2180070
cacaucacugagaaccagg

SEQ ID NO: 2180072 - RNA, 19 nt, Artificial Sequence
  Description of Artificial Sequence: Synthetic oligonucleotide
  Sense strand starting at position 1836 of SEQ ID NO: 1883253
cugguucucagugaugugu

SEQ ID NO: 2180073 - RNA, 19 nt, Artificial Sequence
  Description of Artificial Sequence: Synthetic oligonucleotide
  Antisense strand to SEQ ID NO: 2180072
acacaucacugagaaccag

SEQ ID NO: 2180074 - RNA, 19 nt, Artificial Sequence
  Description of Artificial Sequence: Synthetic oligonucleotide
  Sense strand starting at position 1840 of SEQ ID NO: 1883253
uucucagugauguguagag

SEQ ID NO: 2180075 - RNA, 19 nt, Artificial Sequence
  Description of Artificial Sequence: Synthetic oligonucleotide
  Antisense strand to SEQ ID NO: 2180074
cucuacacaucacugagaa

SEQ ID NO: 2180076 - RNA, 19 nt, Artificial Sequence
  Description of Artificial Sequence: Synthetic oligonucleotide
  Sense strand starting at position 1842 of SEQ ID NO: 1883253
cucagugauguguagaggu

SEQ ID NO: 2180077 - RNA, 19 nt, Artificial Sequence
  Description of Artificial Sequence: Synthetic oligonucleotide
  Antisense strand to SEQ ID NO: 2180076
accucuacacaucacugag

SEQ ID NO: 2180078 - RNA, 19 nt, Artificial Sequence
  Description of Artificial Sequence: Synthetic oligonucleotide
  Sense strand starting at position 1991 of SEQ ID NO: 1883253
ggauuuaucugacaagcaa

SEQ ID NO: 2180079 - RNA, 19 nt, Artificial Sequence
  Description of Artificial Sequence: Synthetic oligonucleotide
  Antisense strand to SEQ ID NO: 2180078
uugcuugucagauaaaucc

SEQ ID NO: 2180080 - RNA, 19 nt, Artificial Sequence
  Description of Artificial Sequence: Synthetic oligonucleotide
  Sense strand starting at position 2215 of SEQ ID NO: 1883253
cuugcugucagcggacaaa

SEQ ID NO: 2180081 - RNA, 19 nt, Artificial Sequence
  Description of Artificial Sequence: Synthetic oligonucleotide
  Antisense strand to SEQ ID NO: 2180080
uuuguccgcugacagcaag

SEQ ID NO: 2180082 - RNA, 19 nt, Artificial Sequence
  Description of Artificial Sequence: Synthetic oligonucleotide
  Sense strand starting at position 2256 of SEQ ID NO: 1883253
cuuccugccuggucagauu

SEQ ID NO: 2180083 - RNA, 19 nt, Artificial Sequence
  Description of Artificial Sequence: Synthetic oligonucleotide
  Antisense strand to SEQ ID NO: 2180082
aaucugaccaggcaggaag

SEQ ID NO: 2180084 - RNA, 19 nt, Artificial Sequence
  Description of Artificial Sequence: Synthetic oligonucleotide
  Sense strand starting at position 2333 of SEQ ID NO: 1883253
auaggaugugccugugaau

SEQ ID NO: 2180085 - RNA, 19 nt, Artificial Sequence
  Description of Artificial Sequence: Synthetic oligonucleotide
  Antisense strand to SEQ ID NO: 2180084
auucacaggcacauccuau

SEQ ID NO: 2180086 - RNA, 19 nt, Artificial Sequence
  Description of Artificial Sequence: Synthetic oligonucleotide
  Sense strand starting at position 2336 of SEQ ID NO: 1883253
ggaugugccugugaauuug

SEQ ID NO: 2180087 - RNA, 19 nt, Artificial Sequence
  Description of Artificial Sequence: Synthetic oligonucleotide
  Antisense strand to SEQ ID NO: 2180086
caaauucacaggcacaucc

SEQ ID NO: 2180088 - RNA, 19 nt, Artificial Sequence
  Description of Artificial Sequence: Synthetic oligonucleotide
  Sense strand starting at position 2342 of SEQ ID NO: 1883253
gccugugaauuugcuuuga

SEQ ID NO: 2180089 - RNA, 19 nt, Artificial Sequence
  Description of Artificial Sequence: Synthetic oligonucleotide
  Antisense strand to SEQ ID NO: 2180088
ucaaagcaaauucacaggc

SEQ ID NO: 2180090 - RNA, 19 nt, Artificial Sequence
  Description of Artificial Sequence: Synthetic oligonucleotide
  Sense strand starting at position 2347 of SEQ ID NO: 1883253
ugaauuugcuuugaggaaa

SEQ ID NO: 2180091 - RNA, 19 nt, Artificial Sequence
  Description of Artificial Sequence: Synthetic oligonucleotide
  Antisense strand to SEQ ID NO: 2180090
uuuccucaaagcaaauuca

SEQ ID NO: 2180092 - RNA, 19 nt, Artificial Sequence
  Description of Artificial Sequence: Synthetic oligonucleotide
  Sense strand starting at position 2462 of SEQ ID NO: 1883253
aagagcugagcaugugaau

SEQ ID NO: 2180093 - RNA, 19 nt, Artificial Sequence
  Description of Artificial Sequence: Synthetic oligonucleotide
  Antisense strand to SEQ ID NO: 2180092
auucacaugcucagcucuu

SEQ ID NO: 2180094 - RNA, 19 nt, Artificial Sequence
  Description of Artificial Sequence: Synthetic oligonucleotide
  Sense strand starting at position 2471 of SEQ ID NO: 1883253
gcaugugaauaaccucaua

SEQ ID NO: 2180095 - RNA, 19 nt, Artificial Sequence
  Description of Artificial Sequence: Synthetic oligonucleotide
  Antisense strand to SEQ ID NO: 2180094
uaugagguuauucacaugc

SEQ ID NO: 2180096 - RNA, 19 nt, Artificial Sequence
  Description of Artificial Sequence: Synthetic oligonucleotide
  Sense strand starting at position 2778 of SEQ ID NO: 1883253
aggugaaucccuugaaacc

SEQ ID NO: 2180097 - RNA, 19 nt, Artificial Sequence
  Description of Artificial Sequence: Synthetic oligonucleotide
  Antisense strand to SEQ ID NO: 2180096
gguuucaagggauucaccu

SEQ ID NO: 2180098 - RNA, 19 nt, Artificial Sequence
  Description of Artificial Sequence: Synthetic oligonucleotide
  Sense strand starting at position 3238 of SEQ ID NO: 1883253
caucauguagccugggaaa

SEQ ID NO: 2180099 - RNA, 19 nt, Artificial Sequence
  Description of Artificial Sequence: Synthetic oligonucleotide
  Antisense strand to SEQ ID NO: 2180098
uuucccaggcuacaugaug

SEQ ID NO: 2180100 - RNA, 19 nt, Artificial Sequence
  Description of Artificial Sequence: Synthetic oligonucleotide
  Sense strand starting at position 3240 of SEQ ID NO: 1883253
ucauguagccugggaaaug

SEQ ID NO: 2180101 - RNA, 19 nt, Artificial Sequence
  Description of Artificial Sequence: Synthetic oligonucleotide
  Antisense strand to SEQ ID NO: 2180100
cauuucccaggcuacauga

SEQ ID NO: 2180102 - RNA, 19 nt, Artificial Sequence
  Description of Artificial Sequence: Synthetic oligonucleotide
  Sense strand starting at position 3368 of SEQ ID NO: 1883253
ugguaaguguguccucaug

SEQ ID NO: 2180103 - RNA, 19 nt, Artificial Sequence
  Description of Artificial Sequence: Synthetic oligonucleotide
  Antisense strand to SEQ ID NO: 2180102
caugaggacacacuuacca

SEQ ID NO: 2180104 - RNA, 19 nt, Artificial Sequence
  Description of Artificial Sequence: Synthetic oligonucleotide
  Sense strand starting at position 3370 of SEQ ID NO: 1883253
guaaguguguccucauggu

SEQ ID NO: 2180105 - RNA, 19 nt, Artificial Sequence
  Description of Artificial Sequence: Synthetic oligonucleotide
  Antisense strand to SEQ ID NO: 2180104
accaugaggacacacuuac

SEQ ID NO: 2180106 - RNA, 19 nt, Artificial Sequence
  Description of Artificial Sequence: Synthetic oligonucleotide
  Sense strand starting at position 3440 of SEQ ID NO: 1883253
cacaaaugcgaaugggaaa

SEQ ID NO: 2180107 - RNA, 19 nt, Artificial Sequence
  Description of Artificial Sequence: Synthetic oligonucleotide
  Antisense strand to SEQ ID NO: 2180106
uuucccauucgcauuugug

SEQ ID NO: 2180108 - RNA, 19 nt, Artificial Sequence
  Description of Artificial Sequence: Synthetic oligonucleotide
  Sense strand starting at position 3483 of SEQ ID NO: 1883253
gaagcaaguccaugauaga

SEQ ID NO: 2180109 - RNA, 19 nt, Artificial Sequence
  Description of Artificial Sequence: Synthetic oligonucleotide
  Antisense strand to SEQ ID NO: 2180108
ucuaucauggacuugcuuc

SEQ ID NO: 2180110 - RNA, 19 nt, Artificial Sequence
  Description of Artificial Sequence: Synthetic oligonucleotide
  Sense strand starting at position 3592 of SEQ ID NO: 1883253
uuucuuuaccuaugagucu

SEQ ID NO: 2180111 - RNA, 19 nt, Artificial Sequence
  Description of Artificial Sequence: Synthetic oligonucleotide
  Antisense strand to SEQ ID NO: 2180110
agacucauagguaaagaaa

SEQ ID NO: 2180112 - RNA, 19 nt, Artificial Sequence
  Description of Artificial Sequence: Synthetic oligonucleotide
  Sense strand starting at position 3708 of SEQ ID NO: 1883253
auagguuccuccugagaaa

SEQ ID NO: 2180113 - RNA, 19 nt, Artificial Sequence
  Description of Artificial Sequence: Synthetic oligonucleotide
  Antisense strand to SEQ ID NO: 2180112
uuucucaggaggaaccuau

SEQ ID NO: 2180114 - RNA, 19 nt, Artificial Sequence
  Description of Artificial Sequence: Synthetic oligonucleotide
  Sense strand starting at position 3711 of SEQ ID NO: 1883253
gguuccuccugagaaauag

SEQ ID NO: 2180115 - RNA, 19 nt, Artificial Sequence
  Description of Artificial Sequence: Synthetic oligonucleotide
  Antisense strand to SEQ ID NO: 2180114
cuauuucucaggaggaacc

SEQ ID NO: 2180116 - RNA, 19 nt, Artificial Sequence
  Description of Artificial Sequence: Synthetic oligonucleotide
  Sense strand starting at position 3757 of SEQ ID NO: 1883253
uguacuagauacuuaugaa

SEQ ID NO: 2180117 - RNA, 19 nt, Artificial Sequence
  Description of Artificial Sequence: Synthetic oligonucleotide
  Antisense strand to SEQ ID NO: 2180116
uucauaaguaucuaguaca

SEQ ID NO: 2180118 - RNA, 19 nt, Artificial Sequence
  Description of Artificial Sequence: Synthetic oligonucleotide
  Sense strand starting at position 3760 of SEQ ID NO: 1883253
acuagauacuuaugaagug

SEQ ID NO: 2180119 - RNA, 19 nt, Artificial Sequence
  Description of Artificial Sequence: Synthetic oligonucleotide
  Antisense strand to SEQ ID NO: 2180118
cacuucauaaguaucuagu

SEQ ID NO: 2180120 - RNA, 19 nt, Artificial Sequence
  Description of Artificial Sequence: Synthetic oligonucleotide
  Sense strand starting at position 3853 of SEQ ID NO: 1883253
gcagaaagguaacaaauau

SEQ ID NO: 2180121 - RNA, 19 nt, Artificial Sequence
  Description of Artificial Sequence: Synthetic oligonucleotide
  Antisense strand to SEQ ID NO: 2180120
auauuuguuaccuuucugc

SEQ ID NO: 2180122 - RNA, 19 nt, Artificial Sequence
  Description of Artificial Sequence: Synthetic oligonucleotide
  Sense strand starting at position 3928 of SEQ ID NO: 1883253
agacaugacuuguacauau

SEQ ID NO: 2180123 - RNA, 19 nt, Artificial Sequence
  Description of Artificial Sequence: Synthetic oligonucleotide
  Antisense strand to SEQ ID NO: 2180122
auauguacaagucaugucu

SEQ ID NO: 2180124 - RNA, 19 nt, Artificial Sequence
  Description of Artificial Sequence: Synthetic oligonucleotide
  Sense strand starting at position 543 of SEQ ID NO: 1883254
ggaacuaucuugccacuaa

SEQ ID NO: 2180125 - RNA, 19 nt, Artificial Sequence
  Description of Artificial Sequence: Synthetic oligonucleotide
  Antisense strand to SEQ ID NO: 2180124
uuaguggcaagauaguucc

SEQ ID NO: 2180126 - RNA, 19 nt, Artificial Sequence
  Description of Artificial Sequence: Synthetic oligonucleotide
  Sense strand starting at position 580 of SEQ ID NO: 1883254
ggcugauuacccuauccaa

SEQ ID NO: 2180127 - RNA, 19 nt, Artificial Sequence
  Description of Artificial Sequence: Synthetic oligonucleotide
  Antisense strand to SEQ ID NO: 2180126
uuggauaggguaaucagcc

SEQ ID NO: 2180128 - RNA, 19 nt, Artificial Sequence
  Description of Artificial Sequence: Synthetic oligonucleotide
  Sense strand starting at position 679 of SEQ ID NO: 1883254
acaaguguagcugguauuu

SEQ ID NO: 2180129 - RNA, 19 nt, Artificial Sequence
  Description of Artificial Sequence: Synthetic oligonucleotide
  Antisense strand to SEQ ID NO: 2180128
aaauaccagcuacacuugu

SEQ ID NO: 2180130 - RNA, 19 nt, Artificial Sequence
  Description of Artificial Sequence: Synthetic oligonucleotide
  Sense strand starting at position 760 of SEQ ID NO: 1883254
uggauagaacugugcugaa

SEQ ID NO: 2180131 - RNA, 19 nt, Artificial Sequence
  Description of Artificial Sequence: Synthetic oligonucleotide
  Antisense strand to SEQ ID NO: 2180130
uucagcacaguucuaucca

SEQ ID NO: 2180132 - RNA, 19 nt, Artificial Sequence
  Description of Artificial Sequence: Synthetic oligonucleotide
  Sense strand starting at position 815 of SEQ ID NO: 1883254
gugcuuagaggcuaacaaa

SEQ ID NO: 2180133 - RNA, 19 nt, Artificial Sequence
  Description of Artificial Sequence: Synthetic oligonucleotide
  Antisense strand to SEQ ID NO: 2180132
uuuguuagccucuaagcac

SEQ ID NO: 2180134 - RNA, 19 nt, Artificial Sequence
  Description of Artificial Sequence: Synthetic oligonucleotide
  Sense strand starting at position 1052 of SEQ ID NO: 1883254
gucacaguauuuguaaagu

SEQ ID NO: 2180135 - RNA, 19 nt, Artificial Sequence
  Description of Artificial Sequence: Synthetic oligonucleotide
  Antisense strand to SEQ ID NO: 2180134
acuuuacaaauacugugac

SEQ ID NO: 2180136 - RNA, 19 nt, Artificial Sequence
  Description of Artificial Sequence: Synthetic oligonucleotide
  Sense strand starting at position 1058 of SEQ ID NO: 1883254
guauuuguaaaguggguuu

SEQ ID NO: 2180137 - RNA, 19 nt, Artificial Sequence
  Description of Artificial Sequence: Synthetic oligonucleotide
  Antisense strand to SEQ ID NO: 2180136
aaacccacuuuacaaauac

SEQ ID NO: 2180138 - RNA, 19 nt, Artificial Sequence
  Description of Artificial Sequence: Synthetic oligonucleotide
  Sense strand starting at position 1137 of SEQ ID NO: 1883254
ugguaauaacaaugcaaau

SEQ ID NO: 2180139 - RNA, 19 nt, Artificial Sequence
  Description of Artificial Sequence: Synthetic oligonucleotide
  Antisense strand to SEQ ID NO: 2180138
auuugcauuguuauuacca

SEQ ID NO: 2180140 - RNA, 19 nt, Artificial Sequence
  Description of Artificial Sequence: Synthetic oligonucleotide
  Sense strand starting at position 1171 of SEQ ID NO: 1883254
ggaaacuucuaagauuuga

SEQ ID NO: 2180141 - RNA, 19 nt, Artificial Sequence
  Description of Artificial Sequence: Synthetic oligonucleotide
  Antisense strand to SEQ ID NO: 2180140
ucaaaucuuagaaguuucc

SEQ ID NO: 2180142 - RNA, 19 nt, Artificial Sequence
  Description of Artificial Sequence: Synthetic oligonucleotide
  Sense strand starting at position 1188 of SEQ ID NO: 1883254
gagcuagaauuacuuaagu

SEQ ID NO: 2180143 - RNA, 19 nt, Artificial Sequence
  Description of Artificial Sequence: Synthetic oligonucleotide
  Antisense strand to SEQ ID NO: 2180142
acuuaaguaauucuagcuc

SEQ ID NO: 2180144 - RNA, 19 nt, Artificial Sequence
  Description of Artificial Sequence: Synthetic oligonucleotide
  Sense strand starting at position 1354 of SEQ ID NO: 1883254
gcacaaaguaagugauuga

SEQ ID NO: 2180145 - RNA, 19 nt, Artificial Sequence
  Description of Artificial Sequence: Synthetic oligonucleotide
  Antisense strand to SEQ ID NO: 2180144
ucaaucacuuacuuugugc

SEQ ID NO: 2180146 - RNA, 19 nt, Artificial Sequence
  Description of Artificial Sequence: Synthetic oligonucleotide
  Sense strand starting at position 1600 of SEQ ID NO: 1883254
gguguuauguaauuugcca

SEQ ID NO: 2180147 - RNA, 19 nt, Artificial Sequence
  Description of Artificial Sequence: Synthetic oligonucleotide
  Antisense strand to SEQ ID NO: 2180146
uggcaaauuacauaacacc

SEQ ID NO: 2180148 - RNA, 19 nt, Artificial Sequence
  Description of Artificial Sequence: Synthetic oligonucleotide
  Sense strand starting at position 1727 of SEQ ID NO: 1883254
guguaacucugacuggaua

SEQ ID NO: 2180149 - RNA, 19 nt, Artificial Sequence
  Description of Artificial Sequence: Synthetic oligonucleotide
  Antisense strand to SEQ ID NO: 2180148
uauccagucagaguuacac

SEQ ID NO: 2180150 - RNA, 19 nt, Artificial Sequence
  Description of Artificial Sequence: Synthetic oligonucleotide
  Sense strand starting at position 1728 of SEQ ID NO: 1883254
uguaacucugacuggauaa

SEQ ID NO: 2180151 - RNA, 19 nt, Artificial Sequence
  Description of Artificial Sequence: Synthetic oligonucleotide
  Antisense strand to SEQ ID NO: 2180150
uuauccagucagaguuaca

SEQ ID NO: 2180152 - RNA, 19 nt, Artificial Sequence
  Description of Artificial Sequence: Synthetic oligonucleotide
  Sense strand starting at position 1729 of SEQ ID NO: 1883254
guaacucugacuggauaag

SEQ ID NO: 2180153 - RNA, 19 nt, Artificial Sequence
  Description of Artificial Sequence: Synthetic oligonucleotide
  Antisense strand to SEQ ID NO: 2180152
cuuauccagucagaguuac

SEQ ID NO: 2180154 - RNA, 19 nt, Artificial Sequence
  Description of Artificial Sequence: Synthetic oligonucleotide
  Sense strand starting at position 1752 of SEQ ID NO: 1883254
cacaaaugacucugaguug

SEQ ID NO: 2180155 - RNA, 19 nt, Artificial Sequence
  Description of Artificial Sequence: Synthetic oligonucleotide
  Antisense strand to SEQ ID NO: 2180154
caacucagagucauuugug

SEQ ID NO: 2180156 - RNA, 19 nt, Artificial Sequence
  Description of Artificial Sequence: Synthetic oligonucleotide
  Sense strand starting at position 1755 of SEQ ID NO: 1883254
aaaugacucugaguuguac

SEQ ID NO: 2180157 - RNA, 19 nt, Artificial Sequence
  Description of Artificial Sequence: Synthetic oligonucleotide
  Antisense strand to SEQ ID NO: 2180156
guacaacucagagucauuu

SEQ ID NO: 2180158 - RNA, 19 nt, Artificial Sequence
  Description of Artificial Sequence: Synthetic oligonucleotide
  Sense strand starting at position 1896 of SEQ ID NO: 1883254
gagacugcguaauuucuau

SEQ ID NO: 2180159 - RNA, 19 nt, Artificial Sequence
  Description of Artificial Sequence: Synthetic oligonucleotide
  Antisense strand to SEQ ID NO: 2180158
auagaaauuacgcagucuc

SEQ ID NO: 2180160 - RNA, 19 nt, Artificial Sequence
  Description of Artificial Sequence: Synthetic oligonucleotide
  Sense strand starting at position 2075 of SEQ ID NO: 1883254
cagauaucgcgagacucac

SEQ ID NO: 2180161 - RNA, 19 nt, Artificial Sequence
  Description of Artificial Sequence: Synthetic oligonucleotide
  Antisense strand to SEQ ID NO: 2180160
gugagucucgcgauaucug

SEQ ID NO: 2180162 - RNA, 19 nt, Artificial Sequence
  Description of Artificial Sequence: Synthetic oligonucleotide
  Sense strand starting at position 2233 of SEQ ID NO: 1883254
ugaguuugaaauuguugag

SEQ ID NO: 2180163 - RNA, 19 nt, Artificial Sequence
  Description of Artificial Sequence: Synthetic oligonucleotide
  Antisense strand to SEQ ID NO: 2180162
cucaacaauuucaaacuca

SEQ ID NO: 2180164 - RNA, 19 nt, Artificial Sequence
  Description of Artificial Sequence: Synthetic oligonucleotide
  Sense strand starting at position 2437 of SEQ ID NO: 1883254
caaauuauggugcaguuua

SEQ ID NO: 2180165 - RNA, 19 nt, Artificial Sequence
  Description of Artificial Sequence: Synthetic oligonucleotide
  Antisense strand to SEQ ID NO: 2180164
uaaacugcaccauaauuug

SEQ ID NO: 2180166 - RNA, 19 nt, Artificial Sequence
  Description of Artificial Sequence: Synthetic oligonucleotide
  Sense strand starting at position 2481 of SEQ ID NO: 1883254
aacucaagguggguuuaaa

SEQ ID NO: 2180167 - RNA, 19 nt, Artificial Sequence
  Description of Artificial Sequence: Synthetic oligonucleotide
  Antisense strand to SEQ ID NO: 2180166
uuuaaacccaccuugaguu

SEQ ID NO: 2180168 - RNA, 19 nt, Artificial Sequence
  Description of Artificial Sequence: Synthetic oligonucleotide
  Sense strand starting at position 2522 of SEQ ID NO: 1883254
ugguauagucuugagcaca

SEQ ID NO: 2180169 - RNA, 19 nt, Artificial Sequence
  Description of Artificial Sequence: Synthetic oligonucleotide
  Antisense strand to SEQ ID NO: 2180168
ugugcucaagacuauacca

SEQ ID NO: 2180170 - RNA, 19 nt, Artificial Sequence
  Description of Artificial Sequence: Synthetic oligonucleotide
  Sense strand starting at position 2651 of SEQ ID NO: 1883254
uuauuuaacuugucuggca

SEQ ID NO: 2180171 - RNA, 19 nt, Artificial Sequence
  Description of Artificial Sequence: Synthetic oligonucleotide
  Antisense strand to SEQ ID NO: 2180170
ugccagacaaguuaaauaa

SEQ ID NO: 2180172 - RNA, 19 nt, Artificial Sequence
  Description of Artificial Sequence: Synthetic oligonucleotide
  Sense strand starting at position 2701 of SEQ ID NO: 1883254
accagaagugacuguaaua

SEQ ID NO: 2180173 - RNA, 19 nt, Artificial Sequence
  Description of Artificial Sequence: Synthetic oligonucleotide
  Antisense strand to SEQ ID NO: 2180172
uauuacagucacuucuggu

SEQ ID NO: 2180174 - RNA, 19 nt, Artificial Sequence
  Description of Artificial Sequence: Synthetic oligonucleotide
  Sense strand starting at position 2727 of SEQ ID NO: 1883254
aggguugacacucaucagu

SEQ ID NO: 2180175 - RNA, 19 nt, Artificial Sequence
  Description of Artificial Sequence: Synthetic oligonucleotide
  Antisense strand to SEQ ID NO: 2180174
acugaugagugucaacccu

SEQ ID NO: 2180176 - RNA, 19 nt, Artificial Sequence
  Description of Artificial Sequence: Synthetic oligonucleotide
  Sense strand starting at position 2730 of SEQ ID NO: 1883254
guugacacucaucaguuaa

SEQ ID NO: 2180177 - RNA, 19 nt, Artificial Sequence
  Description of Artificial Sequence: Synthetic oligonucleotide
  Antisense strand to SEQ ID NO: 2180176
uuaacugaugagugucaac

SEQ ID NO: 2180178 - RNA, 19 nt, Artificial Sequence
  Description of Artificial Sequence: Synthetic oligonucleotide
  Sense strand starting at position 2759 of SEQ ID NO: 1883254
guaaguucucugcagggaa

SEQ ID NO: 2180179 - RNA, 19 nt, Artificial Sequence
  Description of Artificial Sequence: Synthetic oligonucleotide
  Antisense strand to SEQ ID NO: 2180178
uucccugcagagaacuuac

SEQ ID NO: 2180180 - RNA, 19 nt, Artificial Sequence
  Description of Artificial Sequence: Synthetic oligonucleotide
  Sense strand starting at position 2761 of SEQ ID NO: 1883254
aaguucucugcagggaaga

SEQ ID NO: 2180181 - RNA, 19 nt, Artificial Sequence
  Description of Artificial Sequence: Synthetic oligonucleotide
  Antisense strand to SEQ ID NO: 2180180
ucuucccugcagagaacuu

SEQ ID NO: 2180182 - RNA, 19 nt, Artificial Sequence
  Description of Artificial Sequence: Synthetic oligonucleotide
  Sense strand starting at position 2848 of SEQ ID NO: 1883254
gugaguuaauaauuacaca

SEQ ID NO: 2180183 - RNA, 19 nt, Artificial Sequence
  Description of Artificial Sequence: Synthetic oligonucleotide
  Antisense strand to SEQ ID NO: 2180182
uguguaauuauuaacucac

SEQ ID NO: 2180184 - RNA, 19 nt, Artificial Sequence
  Description of Artificial Sequence: Synthetic oligonucleotide
  Sense strand starting at position 2876 of SEQ ID NO: 1883254
auguaugacugggcuuaga

SEQ ID NO: 2180185 - RNA, 19 nt, Artificial Sequence
  Description of Artificial Sequence: Synthetic oligonucleotide
  Antisense strand to SEQ ID NO: 2180184
ucuaagcccagucauacau

SEQ ID NO: 2180186 - RNA, 19 nt, Artificial Sequence
  Description of Artificial Sequence: Synthetic oligonucleotide
  Sense strand starting at position 2924 of SEQ ID NO: 1883254
gugauccuucuacauucua

SEQ ID NO: 2180187 - RNA, 19 nt, Artificial Sequence
  Description of Artificial Sequence: Synthetic oligonucleotide
  Antisense strand to SEQ ID NO: 2180186
uagaauguagaaggaucac

SEQ ID NO: 2180188 - RNA, 19 nt, Artificial Sequence
  Description of Artificial Sequence: Synthetic oligonucleotide
  Sense strand starting at position 3090 of SEQ ID NO: 1883254
accuuuaagcaugguagaa

SEQ ID NO: 2180189 - RNA, 19 nt, Artificial Sequence
  Description of Artificial Sequence: Synthetic oligonucleotide
  Antisense strand to SEQ ID NO: 2180188
uucuaccaugcuuaaaggu

SEQ ID NO: 2180190 - RNA, 19 nt, Artificial Sequence
  Description of Artificial Sequence: Synthetic oligonucleotide
  Sense strand starting at position 3373 of SEQ ID NO: 1883254
uggcuucuugauuaccaaa

SEQ ID NO: 2180191 - RNA, 19 nt, Artificial Sequence
  Description of Artificial Sequence: Synthetic oligonucleotide
  Antisense strand to SEQ ID NO: 2180190
uuugguaaucaagaagcca

SEQ ID NO: 2180192 - RNA, 19 nt, Artificial Sequence
  Description of Artificial Sequence: Synthetic oligonucleotide
  Sense strand starting at position 3463 of SEQ ID NO: 1883254
agaggagucuauccuucuu

SEQ ID NO: 2180193 - RNA, 19 nt, Artificial Sequence
  Description of Artificial Sequence: Synthetic oligonucleotide
  Antisense strand to SEQ ID NO: 2180192
aagaaggauagacuccucu

SEQ ID NO: 2180194 - RNA, 19 nt, Artificial Sequence
  Description of Artificial Sequence: Synthetic oligonucleotide
  Sense strand starting at position 3509 of SEQ ID NO: 1883254
gcaccuguuguguugcaca

SEQ ID NO: 2180195 - RNA, 19 nt, Artificial Sequence
  Description of Artificial Sequence: Synthetic oligonucleotide
  Antisense strand to SEQ ID NO: 2180194
ugugcaacacaacaggugc

SEQ ID NO: 2180196 - RNA, 19 nt, Artificial Sequence
  Description of Artificial Sequence: Synthetic oligonucleotide
  Sense strand starting at position 3632 of SEQ ID NO: 1883254
acucauugccuggaucagu

SEQ ID NO: 2180197 - RNA, 19 nt, Artificial Sequence
  Description of Artificial Sequence: Synthetic oligonucleotide
  Antisense strand to SEQ ID NO: 2180196
acugauccaggcaaugagu

SEQ ID NO: 2180198 - RNA, 19 nt, Artificial Sequence
  Description of Artificial Sequence: Synthetic oligonucleotide
  Sense strand starting at position 3653 of SEQ ID NO: 1883254
uucucaauggaggguaauu

SEQ ID NO: 2180199 - RNA, 19 nt, Artificial Sequence
  Description of Artificial Sequence: Synthetic oligonucleotide
  Antisense strand to SEQ ID NO: 2180198
aauuacccuccauugagaa

SEQ ID NO: 2180200 - RNA, 19 nt, Artificial Sequence
  Description of Artificial Sequence: Synthetic oligonucleotide
  Sense strand starting at position 3734 of SEQ ID NO: 1883254
uacuauaggcaucaaguga

SEQ ID NO: 2180201 - RNA, 19 nt, Artificial Sequence
  Description of Artificial Sequence: Synthetic oligonucleotide
  Antisense strand to SEQ ID NO: 2180200
ucacuugaugccuauagua

SEQ ID NO: 2180202 - RNA, 19 nt, Artificial Sequence
  Description of Artificial Sequence: Synthetic oligonucleotide
  Sense strand starting at position 3739 of SEQ ID NO: 1883254
uaggcaucaagugaguaga

SEQ ID NO: 2180203 - RNA, 19 nt, Artificial Sequence
  Description of Artificial Sequence: Synthetic oligonucleotide
  Antisense strand to SEQ ID NO: 2180202
ucuacucacuugaugccua

SEQ ID NO: 2180204 - RNA, 19 nt, Artificial Sequence
  Description of Artificial Sequence: Synthetic oligonucleotide
  Sense strand starting at position 25 of SEQ ID NO: 1883255
cgagcacaugguuaacaga

SEQ ID NO: 2180205 - RNA, 19 nt, Artificial Sequence
  Description of Artificial Sequence: Synthetic oligonucleotide
  Antisense strand to SEQ ID NO: 2180204
ucuguuaaccaugugcucg

SEQ ID NO: 2180206 - RNA, 19 nt, Artificial Sequence
  Description of Artificial Sequence: Synthetic oligonucleotide
  Sense strand starting at position 48 of SEQ ID NO: 1883255
gcuccagagccagaauguu

SEQ ID NO: 2180207 - RNA, 19 nt, Artificial Sequence
  Description of Artificial Sequence: Synthetic oligonucleotide
  Antisense strand to SEQ ID NO: 2180206
aacauucuggcucuggagc

SEQ ID NO: 2180208 - RNA, 19 nt, Artificial Sequence
  Description of Artificial Sequence: Synthetic oligonucleotide
  Sense strand starting at position 173 of SEQ ID NO: 1883255
ccuuguugugaggaucaca

SEQ ID NO: 2180209 - RNA, 19 nt, Artificial Sequence
  Description of Artificial Sequence: Synthetic oligonucleotide
  Antisense strand to SEQ ID NO: 2180208
ugugauccucacaacaagg

SEQ ID NO: 2180210 - RNA, 19 nt, Artificial Sequence
  Description of Artificial Sequence: Synthetic oligonucleotide
  Sense strand starting at position 236 of SEQ ID NO: 1883255
agaggaucuugcuuuguag

SEQ ID NO: 2180211 - RNA, 19 nt, Artificial Sequence
  Description of Artificial Sequence: Synthetic oligonucleotide
  Antisense strand to SEQ ID NO: 2180210
cuacaaagcaagauccucu

SEQ ID NO: 2180212 - RNA, 19 nt, Artificial Sequence
  Description of Artificial Sequence: Synthetic oligonucleotide
  Sense strand starting at position 400 of SEQ ID NO: 1883255
uguagugauggaggguuau

SEQ ID NO: 2180213 - RNA, 19 nt, Artificial Sequence
  Description of Artificial Sequence: Synthetic oligonucleotide
  Antisense strand to SEQ ID NO: 2180212
auaacccuccaucacuaca

SEQ ID NO: 2180214 - RNA, 19 nt, Artificial Sequence
  Description of Artificial Sequence: Synthetic oligonucleotide
  Sense strand starting at position 406 of SEQ ID NO: 1883255
gauggaggguuaucacuau

SEQ ID NO: 2180215 - RNA, 19 nt, Artificial Sequence
  Description of Artificial Sequence: Synthetic oligonucleotide
  Antisense strand to SEQ ID NO: 2180214
auagugauaacccuccauc

SEQ ID NO: 2180216 - RNA, 19 nt, Artificial Sequence
  Description of Artificial Sequence: Synthetic oligonucleotide
  Sense strand starting at position 410 of SEQ ID NO: 1883255
gaggguuaucacuauguug

SEQ ID NO: 2180217 - RNA, 19 nt, Artificial Sequence
  Description of Artificial Sequence: Synthetic oligonucleotide
  Antisense strand to SEQ ID NO: 2180216
caacauagugauaacccuc

SEQ ID NO: 2180218 - RNA, 19 nt, Artificial Sequence
  Description of Artificial Sequence: Synthetic oligonucleotide
  Sense strand starting at position 552 of SEQ ID NO: 1883255
gcaucuggaggaugugaaa

SEQ ID NO: 2180219 - RNA, 19 nt, Artificial Sequence
  Description of Artificial Sequence: Synthetic oligonucleotide
  Antisense strand to SEQ ID NO: 2180218
uuucacauccuccagaugc

SEQ ID NO: 2180220 - RNA, 19 nt, Artificial Sequence
  Description of Artificial Sequence: Synthetic oligonucleotide
  Sense strand starting at position 904 of SEQ ID NO: 1883255
cuucgauaaugaguucucu

SEQ ID NO: 2180221 - RNA, 19 nt, Artificial Sequence
  Description of Artificial Sequence: Synthetic oligonucleotide
  Antisense strand to SEQ ID NO: 2180220
agagaacucauuaucgaag

SEQ ID NO: 2180222 - RNA, 19 nt, Artificial Sequence
  Description of Artificial Sequence: Synthetic oligonucleotide
  Sense strand starting at position 908 of SEQ ID NO: 1883255
gauaaugaguucucuguca

SEQ ID NO: 2180223 - RNA, 19 nt, Artificial Sequence
  Description of Artificial Sequence: Synthetic oligonucleotide
  Antisense strand to SEQ ID NO: 2180222
ugacagagaacucauuauc

SEQ ID NO: 2180224 - RNA, 19 nt, Artificial Sequence
  Description of Artificial Sequence: Synthetic oligonucleotide
  Sense strand starting at position 1163 of SEQ ID NO: 1883255
caggcuaguccugauugua

SEQ ID NO: 2180225 - RNA, 19 nt, Artificial Sequence
  Description of Artificial Sequence: Synthetic oligonucleotide
  Antisense strand to SEQ ID NO: 2180224
uacaaucaggacuagccug

SEQ ID NO: 2180226 - RNA, 19 nt, Artificial Sequence
  Description of Artificial Sequence: Synthetic oligonucleotide
  Sense strand starting at position 1297 of SEQ ID NO: 1883255
ugacccuugcuagaacaua

SEQ ID NO: 2180227 - RNA, 19 nt, Artificial Sequence
  Description of Artificial Sequence: Synthetic oligonucleotide
  Antisense strand to SEQ ID NO: 2180226
uauguucuagcaaggguca

SEQ ID NO: 2180228 - RNA, 19 nt, Artificial Sequence
  Description of Artificial Sequence: Synthetic oligonucleotide
  Sense strand starting at position 1349 of SEQ ID NO: 1883255
ucagcaguaucuuuaaaug

SEQ ID NO: 2180229 - RNA, 19 nt, Artificial Sequence
  Description of Artificial Sequence: Synthetic oligonucleotide
  Antisense strand to SEQ ID NO: 2180228
cauuuaaagauacugcuga

SEQ ID NO: 2180230 - RNA, 19 nt, Artificial Sequence
  Description of Artificial Sequence: Synthetic oligonucleotide
  Sense strand starting at position 1401 of SEQ ID NO: 1883255
ugcccugauuucuuuggua

SEQ ID NO: 2180231 - RNA, 19 nt, Artificial Sequence
  Description of Artificial Sequence: Synthetic oligonucleotide
  Antisense strand to SEQ ID NO: 2180230
uaccaaagaaaucagggca

SEQ ID NO: 2180232 - RNA, 19 nt, Artificial Sequence
  Description of Artificial Sequence: Synthetic oligonucleotide
  Sense strand starting at position 1427 of SEQ ID NO: 1883255
agccuagggcuccaaacau

SEQ ID NO: 2180233 - RNA, 19 nt, Artificial Sequence
  Description of Artificial Sequence: Synthetic oligonucleotide
  Antisense strand to SEQ ID NO: 2180232
auguuuggagcccuaggcu

SEQ ID NO: 2180234 - RNA, 19 nt, Artificial Sequence
  Description of Artificial Sequence: Synthetic oligonucleotide
  Sense strand starting at position 1449 of SEQ ID NO: 1883255
cuucucuguagggaguauu

SEQ ID NO: 2180235 - RNA, 19 nt, Artificial Sequence
  Description of Artificial Sequence: Synthetic oligonucleotide
  Antisense strand to SEQ ID NO: 2180234
aauacucccuacagagaag

SEQ ID NO: 2180236 - RNA, 19 nt, Artificial Sequence
  Description of Artificial Sequence: Synthetic oligonucleotide
  Sense strand starting at position 1588 of SEQ ID NO: 1883255
guuuaaauggugcauugau

SEQ ID NO: 2180237 - RNA, 19 nt, Artificial Sequence
  Description of Artificial Sequence: Synthetic oligonucleotide
  Antisense strand to SEQ ID NO: 2180236
aucaaugcaccauuuaaac

SEQ ID NO: 2180238 - RNA, 19 nt, Artificial Sequence
  Description of Artificial Sequence: Synthetic oligonucleotide
  Sense strand starting at position 1598 of SEQ ID NO: 1883255
ugcauugauuuaggauuua

SEQ ID NO: 2180239 - RNA, 19 nt, Artificial Sequence
  Description of Artificial Sequence: Synthetic oligonucleotide
  Antisense strand to SEQ ID NO: 2180238
uaaauccuaaaucaaugca

SEQ ID NO: 2180240 - RNA, 19 nt, Artificial Sequence
  Description of Artificial Sequence: Synthetic oligonucleotide
  Sense strand starting at position 1626 of SEQ ID NO: 1883255
uggagaugguuucucauca

SEQ ID NO: 2180241 - RNA, 19 nt, Artificial Sequence
  Description of Artificial Sequence: Synthetic oligonucleotide
  Antisense strand to SEQ ID NO: 2180240
ugaugagaaaccaucucca

SEQ ID NO: 2180242 - RNA, 19 nt, Artificial Sequence
  Description of Artificial Sequence: Synthetic oligonucleotide
  Sense strand starting at position 1627 of SEQ ID NO: 1883255
ggagaugguuucucaucag

SEQ ID NO: 2180243 - RNA, 19 nt, Artificial Sequence
  Description of Artificial Sequence: Synthetic oligonucleotide
  Antisense strand to SEQ ID NO: 2180242
cugaugagaaaccaucucc

SEQ ID NO: 2180244 - RNA, 19 nt, Artificial Sequence
  Description of Artificial Sequence: Synthetic oligonucleotide
  Sense strand starting at position 1757 of SEQ ID NO: 1883255
uuuaucucuguuuaccaga

SEQ ID NO: 2180245 - RNA, 19 nt, Artificial Sequence
  Description of Artificial Sequence: Synthetic oligonucleotide
  Antisense strand to SEQ ID NO: 2180244
ucugguaaacagagauaaa

SEQ ID NO: 2180246 - RNA, 19 nt, Artificial Sequence
  Description of Artificial Sequence: Synthetic oligonucleotide
  Sense strand starting at position 1927 of SEQ ID NO: 1883255
ccuauuuauugagagcuua

SEQ ID NO: 2180247 - RNA, 19 nt, Artificial Sequence
  Description of Artificial Sequence: Synthetic oligonucleotide
  Antisense strand to SEQ ID NO: 2180246
uaagcucucaauaaauagg

SEQ ID NO: 2180248 - RNA, 19 nt, Artificial Sequence
  Description of Artificial Sequence: Synthetic oligonucleotide
  Sense strand starting at position 2041 of SEQ ID NO: 1883255
aauugcucugcagaggauu

SEQ ID NO: 2180249 - RNA, 19 nt, Artificial Sequence
  Description of Artificial Sequence: Synthetic oligonucleotide
  Antisense strand to SEQ ID NO: 2180248
aauccucugcagagcaauu

SEQ ID NO: 2180250 - RNA, 19 nt, Artificial Sequence
  Description of Artificial Sequence: Synthetic oligonucleotide
  Sense strand starting at position 2079 of SEQ ID NO: 1883255
ggaaguguaaacugggaca

SEQ ID NO: 2180251 - RNA, 19 nt, Artificial Sequence
  Description of Artificial Sequence: Synthetic oligonucleotide
  Antisense strand to SEQ ID NO: 2180250
ugucccaguuuacacuucc

SEQ ID NO: 2180252 - RNA, 19 nt, Artificial Sequence
  Description of Artificial Sequence: Synthetic oligonucleotide
  Sense strand starting at position 2092 of SEQ ID NO: 1883255
gggacaggcucuguaaaga

SEQ ID NO: 2180253 - RNA, 19 nt, Artificial Sequence
  Description of Artificial Sequence: Synthetic oligonucleotide
  Antisense strand to SEQ ID NO: 2180252
ucuuuacagagccuguccc

SEQ ID NO: 2180254 - RNA, 19 nt, Artificial Sequence
  Description of Artificial Sequence: Synthetic oligonucleotide
  Sense strand starting at position 2097 of SEQ ID NO: 1883255
aggcucuguaaagagcaau

SEQ ID NO: 2180255 - RNA, 19 nt, Artificial Sequence
  Description of Artificial Sequence: Synthetic oligonucleotide
  Antisense strand to SEQ ID NO: 2180254
auugcucuuuacagagccu

SEQ ID NO: 2180256 - RNA, 19 nt, Artificial Sequence
  Description of Artificial Sequence: Synthetic oligonucleotide
  Sense strand starting at position 2111 of SEQ ID NO: 1883255
gcaauugggcaauagcuau

SEQ ID NO: 2180257 - RNA, 19 nt, Artificial Sequence
  Description of Artificial Sequence: Synthetic oligonucleotide
  Antisense strand to SEQ ID NO: 2180256
auagcuauugcccaauugc

SEQ ID NO: 2180258 - RNA, 19 nt, Artificial Sequence
  Description of Artificial Sequence: Synthetic oligonucleotide
  Sense strand starting at position 2219 of SEQ ID NO: 1883255
cucauauguguacaaggau

SEQ ID NO: 2180259 - RNA, 19 nt, Artificial Sequence
  Description of Artificial Sequence: Synthetic oligonucleotide
  Antisense strand to SEQ ID NO: 2180258
auccuuguacacauaugag

SEQ ID NO: 2180260 - RNA, 19 nt, Artificial Sequence
  Description of Artificial Sequence: Synthetic oligonucleotide
  Sense strand starting at position 2222 of SEQ ID NO: 1883255
auauguguacaaggauauu

SEQ ID NO: 2180261 - RNA, 19 nt, Artificial Sequence
  Description of Artificial Sequence: Synthetic oligonucleotide
  Antisense strand to SEQ ID NO: 2180260
aauauccuuguacacauau

SEQ ID NO: 2180262 - RNA, 19 nt, Artificial Sequence
  Description of Artificial Sequence: Synthetic oligonucleotide
  Sense strand starting at position 2305 of SEQ ID NO: 1883255
aguguaucccuacaauaga

SEQ ID NO: 2180263 - RNA, 19 nt, Artificial Sequence
  Description of Artificial Sequence: Synthetic oligonucleotide
  Antisense strand to SEQ ID NO: 2180262
ucuauuguagggauacacu

SEQ ID NO: 2180264 - RNA, 19 nt, Artificial Sequence
  Description of Artificial Sequence: Synthetic oligonucleotide
  Sense strand starting at position 2523 of SEQ ID NO: 1883255
aagacuauuugagaaagua

SEQ ID NO: 2180265 - RNA, 19 nt, Artificial Sequence
  Description of Artificial Sequence: Synthetic oligonucleotide
  Antisense strand to SEQ ID NO: 2180264
uacuuucucaaauagucuu

SEQ ID NO: 2180266 - RNA, 19 nt, Artificial Sequence
  Description of Artificial Sequence: Synthetic oligonucleotide
  Sense strand starting at position 2549 of SEQ ID NO: 1883255
gaguuaccuccagggacua

SEQ ID NO: 2180267 - RNA, 19 nt, Artificial Sequence
  Description of Artificial Sequence: Synthetic oligonucleotide
  Antisense strand to SEQ ID NO: 2180266
uagucccuggagguaacuc

SEQ ID NO: 2180268 - RNA, 19 nt, Artificial Sequence
  Description of Artificial Sequence: Synthetic oligonucleotide
  Sense strand starting at position 2620 of SEQ ID NO: 1883255
uuguauaaccuuugguauc

SEQ ID NO: 2180269 - RNA, 19 nt, Artificial Sequence
  Description of Artificial Sequence: Synthetic oligonucleotide
  Antisense strand to SEQ ID NO: 2180268
gauaccaaagguuauacaa

SEQ ID NO: 2180270 - RNA, 19 nt, Artificial Sequence
  Description of Artificial Sequence: Synthetic oligonucleotide
  Sense strand starting at position 2622 of SEQ ID NO: 1883255
guauaaccuuugguaucuu

SEQ ID NO: 2180271 - RNA, 19 nt, Artificial Sequence
  Description of Artificial Sequence: Synthetic oligonucleotide
  Antisense strand to SEQ ID NO: 2180270
aagauaccaaagguuauac

SEQ ID NO: 2180272 - RNA, 19 nt, Artificial Sequence
  Description of Artificial Sequence: Synthetic oligonucleotide
  Sense strand starting at position 2652 of SEQ ID NO: 1883255
ugcacugauuauuccagaa

SEQ ID NO: 2180273 - RNA, 19 nt, Artificial Sequence
  Description of Artificial Sequence: Synthetic oligonucleotide
  Antisense strand to SEQ ID NO: 2180272
uucuggaauaaucagugca

SEQ ID NO: 2180274 - RNA, 19 nt, Artificial Sequence
  Description of Artificial Sequence: Synthetic oligonucleotide
  Sense strand starting at position 2664 of SEQ ID NO: 1883255
uccagaacauacguuaaau

SEQ ID NO: 2180275 - RNA, 19 nt, Artificial Sequence
  Description of Artificial Sequence: Synthetic oligonucleotide
  Antisense strand to SEQ ID NO: 2180274
auuuaacguauguucugga

SEQ ID NO: 2180276 - RNA, 19 nt, Artificial Sequence
  Description of Artificial Sequence: Synthetic oligonucleotide
  Sense strand starting at position 2870 of SEQ ID NO: 1883255
gucauuauaugauucuuac

SEQ ID NO: 2180277 - RNA, 19 nt, Artificial Sequence
  Description of Artificial Sequence: Synthetic oligonucleotide
  Antisense strand to SEQ ID NO: 2180276
guaagaaucauauaaugac

SEQ ID NO: 2180278 - RNA, 19 nt, Artificial Sequence
  Description of Artificial Sequence: Synthetic oligonucleotide
  Sense strand starting at position 3072 of SEQ ID NO: 1883255
uuucuuuauccauauguug

SEQ ID NO: 2180279 - RNA, 19 nt, Artificial Sequence
  Description of Artificial Sequence: Synthetic oligonucleotide
  Antisense strand to SEQ ID NO: 2180278
caacauauggauaaagaaa

SEQ ID NO: 2180280 - RNA, 19 nt, Artificial Sequence
  Description of Artificial Sequence: Synthetic oligonucleotide
  Sense strand starting at position 3267 of SEQ ID NO: 1883255
cacuauuguccauaguagu

SEQ ID NO: 2180281 - RNA, 19 nt, Artificial Sequence
  Description of Artificial Sequence: Synthetic oligonucleotide
  Antisense strand to SEQ ID NO: 2180280
acuacuauggacaauagug

SEQ ID NO: 2180282 - RNA, 19 nt, Artificial Sequence
  Description of Artificial Sequence: Synthetic oligonucleotide
  Sense strand starting at position 3738 of SEQ ID NO: 1883255
uuugguucuuugucaugaa

SEQ ID NO: 2180283 - RNA, 19 nt, Artificial Sequence
  Description of Artificial Sequence: Synthetic oligonucleotide
  Antisense strand to SEQ ID NO: 2180282
uucaugacaaagaaccaaa

SEQ ID NO: 2180284 - RNA, 19 nt, Artificial Sequence
  Description of Artificial Sequence: Synthetic oligonucleotide
  Sense strand starting at position 100 of SEQ ID NO: 1883256
agagcuacaugagucgaaa

SEQ ID NO: 2180285 - RNA, 19 nt, Artificial Sequence
  Description of Artificial Sequence: Synthetic oligonucleotide
  Antisense strand to SEQ ID NO: 2180284
uuucgacucauguagcucu

SEQ ID NO: 2180286 - RNA, 19 nt, Artificial Sequence
  Description of Artificial Sequence: Synthetic oligonucleotide
  Sense strand starting at position 103 of SEQ ID NO: 1883256
gcuacaugagucgaaagua

SEQ ID NO: 2180287 - RNA, 19 nt, Artificial Sequence
  Description of Artificial Sequence: Synthetic oligonucleotide
  Antisense strand to SEQ ID NO: 2180286
uacuuucgacucauguagc

SEQ ID NO: 2180288 - RNA, 19 nt, Artificial Sequence
  Description of Artificial Sequence: Synthetic oligonucleotide
  Sense strand starting at position 206 of SEQ ID NO: 1883256
agggcauuccagcauuaaa

SEQ ID NO: 2180289 - RNA, 19 nt, Artificial Sequence
  Description of Artificial Sequence: Synthetic oligonucleotide
  Antisense strand to SEQ ID NO: 2180288
uuuaaugcuggaaugcccu

SEQ ID NO: 2180290 - RNA, 19 nt, Artificial Sequence
  Description of Artificial Sequence: Synthetic oligonucleotide
  Sense strand starting at position 310 of SEQ ID NO: 1883256
ucaaguaacgauggaguuu

SEQ ID NO: 2180291 - RNA, 19 nt, Artificial Sequence
  Description of Artificial Sequence: Synthetic oligonucleotide
  Antisense strand to SEQ ID NO: 2180290
aaacuccaucguuacuuga

SEQ ID NO: 2180292 - RNA, 19 nt, Artificial Sequence
  Description of Artificial Sequence: Synthetic oligonucleotide
  Sense strand starting at position 383 of SEQ ID NO: 1883256
ucugaauguugaucuuuag

SEQ ID NO: 2180293 - RNA, 19 nt, Artificial Sequence
  Description of Artificial Sequence: Synthetic oligonucleotide
  Antisense strand to SEQ ID NO: 2180292
cuaaagaucaacauucaga

SEQ ID NO: 2180294 - RNA, 19 nt, Artificial Sequence
  Description of Artificial Sequence: Synthetic oligonucleotide
  Sense strand starting at position 386 of SEQ ID NO: 1883256
gaauguugaucuuuagauu

SEQ ID NO: 2180295 - RNA, 19 nt, Artificial Sequence
  Description of Artificial Sequence: Synthetic oligonucleotide
  Antisense strand to SEQ ID NO: 2180294
aaucuaaagaucaacauuc

SEQ ID NO: 2180296 - RNA, 19 nt, Artificial Sequence
  Description of Artificial Sequence: Synthetic oligonucleotide
  Sense strand starting at position 509 of SEQ ID NO: 1883256
uccaaagaagugugaacaa

SEQ ID NO: 2180297 - RNA, 19 nt, Artificial Sequence
  Description of Artificial Sequence: Synthetic oligonucleotide
  Antisense strand to SEQ ID NO: 2180296
uuguucacacuucuuugga

SEQ ID NO: 2180298 - RNA, 19 nt, Artificial Sequence
  Description of Artificial Sequence: Synthetic oligonucleotide
  Sense strand starting at position 520 of SEQ ID NO: 1883256
gugaacaacucccuaggaa

SEQ ID NO: 2180299 - RNA, 19 nt, Artificial Sequence
  Description of Artificial Sequence: Synthetic oligonucleotide
  Antisense strand to SEQ ID NO: 2180298
uuccuagggaguuguucac

SEQ ID NO: 2180300 - RNA, 19 nt, Artificial Sequence
  Description of Artificial Sequence: Synthetic oligonucleotide
  Sense strand starting at position 610 of SEQ ID NO: 1883256
gaagucaaagcaugagagu

SEQ ID NO: 2180301 - RNA, 19 nt, Artificial Sequence
  Description of Artificial Sequence: Synthetic oligonucleotide
  Antisense strand to SEQ ID NO: 2180300
acucucaugcuuugacuuc

SEQ ID NO: 2180302 - RNA, 19 nt, Artificial Sequence
  Description of Artificial Sequence: Synthetic oligonucleotide
  Sense strand starting at position 714 of SEQ ID NO: 1883256
ggacaugcacagugagaaa

SEQ ID NO: 2180303 - RNA, 19 nt, Artificial Sequence
  Description of Artificial Sequence: Synthetic oligonucleotide
  Antisense strand to SEQ ID NO: 2180302
uuucucacugugcaugucc

SEQ ID NO: 2180304 - RNA, 19 nt, Artificial Sequence
  Description of Artificial Sequence: Synthetic oligonucleotide
  Sense strand starting at position 965 of SEQ ID NO: 1883256
aguauagaaguaugcaaau

SEQ ID NO: 2180305 - RNA, 19 nt, Artificial Sequence
  Description of Artificial Sequence: Synthetic oligonucleotide
  Antisense strand to SEQ ID NO: 2180304
auuugcauacuucuauacu

SEQ ID NO: 2180306 - RNA, 19 nt, Artificial Sequence
  Description of Artificial Sequence: Synthetic oligonucleotide
  Sense strand starting at position 1067 of SEQ ID NO: 1883256
cagagaauacugugcagaa

SEQ ID NO: 2180307 - RNA, 19 nt, Artificial Sequence
  Description of Artificial Sequence: Synthetic oligonucleotide
  Antisense strand to SEQ ID NO: 2180306
uucugcacaguauucucug

SEQ ID NO: 2180308 - RNA, 19 nt, Artificial Sequence
  Description of Artificial Sequence: Synthetic oligonucleotide
  Sense strand starting at position 1068 of SEQ ID NO: 1883256
agagaauacugugcagaau

SEQ ID NO: 2180309 - RNA, 19 nt, Artificial Sequence
  Description of Artificial Sequence: Synthetic oligonucleotide
  Antisense strand to SEQ ID NO: 2180308
auucugcacaguauucucu

SEQ ID NO: 2180310 - RNA, 19 nt, Artificial Sequence
  Description of Artificial Sequence: Synthetic oligonucleotide
  Sense strand starting at position 1071 of SEQ ID NO: 1883256
gaauacugugcagaauuau

SEQ ID NO: 2180311 - RNA, 19 nt, Artificial Sequence
  Description of Artificial Sequence: Synthetic oligonucleotide
  Antisense strand to SEQ ID NO: 2180310
auaauucugcacaguauuc

SEQ ID NO: 2180312 - RNA, 19 nt, Artificial Sequence
  Description of Artificial Sequence: Synthetic oligonucleotide
  Sense strand starting at position 1147 of SEQ ID NO: 1883256
ugcugucauuaauuugauu

SEQ ID NO: 2180313 - RNA, 19 nt, Artificial Sequence
  Description of Artificial Sequence: Synthetic oligonucleotide
  Antisense strand to SEQ ID NO: 2180312
aaucaaauuaaugacagca

SEQ ID NO: 2180314 - RNA, 19 nt, Artificial Sequence
  Description of Artificial Sequence: Synthetic oligonucleotide
  Sense strand starting at position 1160 of SEQ ID NO: 1883256
uugauuguaucuucugaca

SEQ ID NO: 2180315 - RNA, 19 nt, Artificial Sequence
  Description of Artificial Sequence: Synthetic oligonucleotide
  Antisense strand to SEQ ID NO: 2180314
ugucagaagauacaaucaa

SEQ ID NO: 2180316 - RNA, 19 nt, Artificial Sequence
  Description of Artificial Sequence: Synthetic oligonucleotide
  Sense strand starting at position 1302 of SEQ ID NO: 1883256
ugucauuaguacucaauga

SEQ ID NO: 2180317 - RNA, 19 nt, Artificial Sequence
  Description of Artificial Sequence: Synthetic oligonucleotide
  Antisense strand to SEQ ID NO: 2180316
ucauugaguacuaaugaca

SEQ ID NO: 2180318 - RNA, 19 nt, Artificial Sequence
  Description of Artificial Sequence: Synthetic oligonucleotide
  Sense strand starting at position 1423 of SEQ ID NO: 1883256
ucagaugcauguccuauuu

SEQ ID NO: 2180319 - RNA, 19 nt, Artificial Sequence
  Description of Artificial Sequence: Synthetic oligonucleotide
  Antisense strand to SEQ ID NO: 2180318
aaauaggacaugcaucuga

SEQ ID NO: 2180320 - RNA, 19 nt, Artificial Sequence
  Description of Artificial Sequence: Synthetic oligonucleotide
  Sense strand starting at position 1478 of SEQ ID NO: 1883256
ccgacagaggcaugaacau

SEQ ID NO: 2180321 - RNA, 19 nt, Artificial Sequence
  Description of Artificial Sequence: Synthetic oligonucleotide
  Antisense strand to SEQ ID NO: 2180320
auguucaugccucugucgg

SEQ ID NO: 2180322 - RNA, 19 nt, Artificial Sequence
  Description of Artificial Sequence: Synthetic oligonucleotide
  Sense strand starting at position 1755 of SEQ ID NO: 1883256
ugcuguauugucuuuccga

SEQ ID NO: 2180323 - RNA, 19 nt, Artificial Sequence
  Description of Artificial Sequence: Synthetic oligonucleotide
  Antisense strand to SEQ ID NO: 2180322
ucggaaagacaauacagca

SEQ ID NO: 2180324 - RNA, 19 nt, Artificial Sequence
  Description of Artificial Sequence: Synthetic oligonucleotide
  Sense strand starting at position 1938 of SEQ ID NO: 1883256
agucaaaucgagcaucuga

SEQ ID NO: 2180325 - RNA, 19 nt, Artificial Sequence
  Description of Artificial Sequence: Synthetic oligonucleotide
  Antisense strand to SEQ ID NO: 2180324
ucagaugcucgauuugacu

SEQ ID NO: 2180326 - RNA, 19 nt, Artificial Sequence
  Description of Artificial Sequence: Synthetic oligonucleotide
  Sense strand starting at position 1964 of SEQ ID NO: 1883256
cacuguuggcguucagcga

SEQ ID NO: 2180327 - RNA, 19 nt, Artificial Sequence
  Description of Artificial Sequence: Synthetic oligonucleotide
  Antisense strand to SEQ ID NO: 2180326
ucgcugaacgccaacagug

SEQ ID NO: 2180328 - RNA, 19 nt, Artificial Sequence
  Description of Artificial Sequence: Synthetic oligonucleotide
  Sense strand starting at position 2271 of SEQ ID NO: 1883256
agccucguuccagagggaa

SEQ ID NO: 2180329 - RNA, 19 nt, Artificial Sequence
  Description of Artificial Sequence: Synthetic oligonucleotide
  Antisense strand to SEQ ID NO: 2180328
uucccucuggaacgaggcu

SEQ ID NO: 2180330 - RNA, 19 nt, Artificial Sequence
  Description of Artificial Sequence: Synthetic oligonucleotide
  Sense strand starting at position 2476 of SEQ ID NO: 1883256
guuguuucuggacaaauau

SEQ ID NO: 2180331 - RNA, 19 nt, Artificial Sequence
  Description of Artificial Sequence: Synthetic oligonucleotide
  Antisense strand to SEQ ID NO: 2180330
auauuuguccagaaacaac

SEQ ID NO: 2180332 - RNA, 19 nt, Artificial Sequence
  Description of Artificial Sequence: Synthetic oligonucleotide
  Sense strand starting at position 2545 of SEQ ID NO: 1883256
ggacuauauuaagcuaagu

SEQ ID NO: 2180333 - RNA, 19 nt, Artificial Sequence
  Description of Artificial Sequence: Synthetic oligonucleotide
  Antisense strand to SEQ ID NO: 2180332
acuuagcuuaauauagucc

SEQ ID NO: 2180334 - RNA, 19 nt, Artificial Sequence
  Description of Artificial Sequence: Synthetic oligonucleotide
  Sense strand starting at position 2719 of SEQ ID NO: 1883256
ugggcaaauaauugguaua

SEQ ID NO: 2180335 - RNA, 19 nt, Artificial Sequence
  Description of Artificial Sequence: Synthetic oligonucleotide
  Antisense strand to SEQ ID NO: 2180334
uauaccaauuauuugccca

SEQ ID NO: 2180336 - RNA, 19 nt, Artificial Sequence
  Description of Artificial Sequence: Synthetic oligonucleotide
  Sense strand starting at position 2720 of SEQ ID NO: 1883256
gggcaaauaauugguauaa

SEQ ID NO: 2180337 - RNA, 19 nt, Artificial Sequence
  Description of Artificial Sequence: Synthetic oligonucleotide
  Antisense strand to SEQ ID NO: 2180336
uuauaccaauuauuugccc

SEQ ID NO: 2180338 - RNA, 19 nt, Artificial Sequence
  Description of Artificial Sequence: Synthetic oligonucleotide
  Sense strand starting at position 2721 of SEQ ID NO: 1883256
ggcaaauaauugguauaaa

SEQ ID NO: 2180339 - RNA, 19 nt, Artificial Sequence
  Description of Artificial Sequence: Synthetic oligonucleotide
  Antisense strand to SEQ ID NO: 2180338
uuuauaccaauuauuugcc

SEQ ID NO: 2180340 - RNA, 19 nt, Artificial Sequence
  Description of Artificial Sequence: Synthetic oligonucleotide
  Sense strand starting at position 2887 of SEQ ID NO: 1883256
gagauaaaggcuuguggag

SEQ ID NO: 2180341 - RNA, 19 nt, Artificial Sequence
  Description of Artificial Sequence: Synthetic oligonucleotide
  Antisense strand to SEQ ID NO: 2180340
cuccacaagccuuuaucuc

SEQ ID NO: 2180342 - RNA, 19 nt, Artificial Sequence
  Description of Artificial Sequence: Synthetic oligonucleotide
  Sense strand starting at position 3028 of SEQ ID NO: 1883256
accacugcuggguaauuau

SEQ ID NO: 2180343 - RNA, 19 nt, Artificial Sequence
  Description of Artificial Sequence: Synthetic oligonucleotide
  Antisense strand to SEQ ID NO: 2180342
auaauuacccagcaguggu

SEQ ID NO: 2180344 - RNA, 19 nt, Artificial Sequence
  Description of Artificial Sequence: Synthetic oligonucleotide
  Sense strand starting at position 3035 of SEQ ID NO: 1883256
cuggguaauuauccaaaga

SEQ ID NO: 2180345 - RNA, 19 nt, Artificial Sequence
  Description of Artificial Sequence: Synthetic oligonucleotide
  Antisense strand to SEQ ID NO: 2180344
ucuuuggauaauuacccag

SEQ ID NO: 2180346 - RNA, 19 nt, Artificial Sequence
  Description of Artificial Sequence: Synthetic oligonucleotide
  Sense strand starting at position 3257 of SEQ ID NO: 1883256
ggaggaugcuggguuaaau

SEQ ID NO: 2180347 - RNA, 19 nt, Artificial Sequence
  Description of Artificial Sequence: Synthetic oligonucleotide
  Antisense strand to SEQ ID NO: 2180346
auuuaacccagcauccucc

SEQ ID NO: 2180348 - RNA, 19 nt, Artificial Sequence
  Description of Artificial Sequence: Synthetic oligonucleotide
  Sense strand starting at position 3314 of SEQ ID NO: 1883256
cacucauauguuggagauu

SEQ ID NO: 2180349 - RNA, 19 nt, Artificial Sequence
  Description of Artificial Sequence: Synthetic oligonucleotide
  Antisense strand to SEQ ID NO: 2180348
aaucuccaacauaugagug

SEQ ID NO: 2180350 - RNA, 19 nt, Artificial Sequence
  Description of Artificial Sequence: Synthetic oligonucleotide
  Sense strand starting at position 3343 of SEQ ID NO: 1883256
gguggagcucauggauaua

SEQ ID NO: 2180351 - RNA, 19 nt, Artificial Sequence
  Description of Artificial Sequence: Synthetic oligonucleotide
  Antisense strand to SEQ ID NO: 2180350
uauauccaugagcuccacc

SEQ ID NO: 2180352 - RNA, 19 nt, Artificial Sequence
  Description of Artificial Sequence: Synthetic oligonucleotide
  Sense strand starting at position 3415 of SEQ ID NO: 1883256
uagagaguaguuuguuaac

SEQ ID NO: 2180353 - RNA, 19 nt, Artificial Sequence
  Description of Artificial Sequence: Synthetic oligonucleotide
  Antisense strand to SEQ ID NO: 2180352
guuaacaaacuacucucua

SEQ ID NO: 2180354 - RNA, 19 nt, Artificial Sequence
  Description of Artificial Sequence: Synthetic oligonucleotide
  Sense strand starting at position 3466 of SEQ ID NO: 1883256
agugcuagugugcuauagu

SEQ ID NO: 2180355 - RNA, 19 nt, Artificial Sequence
  Description of Artificial Sequence: Synthetic oligonucleotide
  Antisense strand to SEQ ID NO: 2180354
acuauagcacacuagcacu

SEQ ID NO: 2180356 - RNA, 19 nt, Artificial Sequence
  Description of Artificial Sequence: Synthetic oligonucleotide
  Sense strand starting at position 3477 of SEQ ID NO: 1883256
gcuauaguccuguaggaua

SEQ ID NO: 2180357 - RNA, 19 nt, Artificial Sequence
  Description of Artificial Sequence: Synthetic oligonucleotide
  Antisense strand to SEQ ID NO: 2180356
uauccuacaggacuauagc

SEQ ID NO: 2180358 - RNA, 19 nt, Artificial Sequence
  Description of Artificial Sequence: Synthetic oligonucleotide
  Sense strand starting at position 3482 of SEQ ID NO: 1883256
aguccuguaggauaaccau

SEQ ID NO: 2180359 - RNA, 19 nt, Artificial Sequence
  Description of Artificial Sequence: Synthetic oligonucleotide
  Antisense strand to SEQ ID NO: 2180358
augguuauccuacaggacu

SEQ ID NO: 2180360 - RNA, 19 nt, Artificial Sequence
  Description of Artificial Sequence: Synthetic oligonucleotide
  Sense strand starting at position 3578 of SEQ ID NO: 1883256
aaguauuuggugcgaugua

SEQ ID NO: 2180361 - RNA, 19 nt, Artificial Sequence
  Description of Artificial Sequence: Synthetic oligonucleotide
  Antisense strand to SEQ ID NO: 2180360
uacaucgcaccaaauacuu

SEQ ID NO: 2180362 - RNA, 19 nt, Artificial Sequence
  Description of Artificial Sequence: Synthetic oligonucleotide
  Sense strand starting at position 3600 of SEQ ID NO: 1883256
acuaaucauccugguuuga

SEQ ID NO: 2180363 - RNA, 19 nt, Artificial Sequence
  Description of Artificial Sequence: Synthetic oligonucleotide
  Antisense strand to SEQ ID NO: 2180362
ucaaaccaggaugauuagu

SEQ ID NO: 2180364 - RNA, 19 nt, Artificial Sequence
  Description of Artificial Sequence: Synthetic oligonucleotide
  Sense strand starting at position 317 of SEQ ID NO: 1883257
aaauauggugguuagcauu

SEQ ID NO: 2180365 - RNA, 19 nt, Artificial Sequence
  Description of Artificial Sequence: Synthetic oligonucleotide
  Antisense strand to SEQ ID NO: 2180364
aaugcuaaccaccauauuu

SEQ ID NO: 2180366 - RNA, 19 nt, Artificial Sequence
  Description of Artificial Sequence: Synthetic oligonucleotide
  Sense strand starting at position 324 of SEQ ID NO: 1883257
gugguuagcauuugugaaa

SEQ ID NO: 2180367 - RNA, 19 nt, Artificial Sequence
  Description of Artificial Sequence: Synthetic oligonucleotide
  Antisense strand to SEQ ID NO: 2180366
uuucacaaaugcuaaccac

SEQ ID NO: 2180368 - RNA, 19 nt, Artificial Sequence
  Description of Artificial Sequence: Synthetic oligonucleotide
  Sense strand starting at position 440 of SEQ ID NO: 1883257
agagcauuagcgggcaaua

SEQ ID NO: 2180369 - RNA, 19 nt, Artificial Sequence
  Description of Artificial Sequence: Synthetic oligonucleotide
  Antisense strand to SEQ ID NO: 2180368
uauugcccgcuaaugcucu

SEQ ID NO: 2180370 - RNA, 19 nt, Artificial Sequence
  Description of Artificial Sequence: Synthetic oligonucleotide
  Sense strand starting at position 442 of SEQ ID NO: 1883257
agcauuagcgggcaauaga

SEQ ID NO: 2180371 - RNA, 19 nt, Artificial Sequence
  Description of Artificial Sequence: Synthetic oligonucleotide
  Antisense strand to SEQ ID NO: 2180370
ucuauugcccgcuaaugcu

SEQ ID NO: 2180372 - RNA, 19 nt, Artificial Sequence
  Description of Artificial Sequence: Synthetic oligonucleotide
  Sense strand starting at position 465 of SEQ ID NO: 1883257
cuucaaguggccgacagau

SEQ ID NO: 2180373 - RNA, 19 nt, Artificial Sequence
  Description of Artificial Sequence: Synthetic oligonucleotide
  Antisense strand to SEQ ID NO: 2180372
aucugucggccacuugaag

SEQ ID NO: 2180374 - RNA, 19 nt, Artificial Sequence
  Description of Artificial Sequence: Synthetic oligonucleotide
  Sense strand starting at position 473 of SEQ ID NO: 1883257
ggccgacagauguguauuu

SEQ ID NO: 2180375 - RNA, 19 nt, Artificial Sequence
  Description of Artificial Sequence: Synthetic oligonucleotide
  Antisense strand to SEQ ID NO: 2180374
aaauacacaucugucggcc

SEQ ID NO: 2180376 - RNA, 19 nt, Artificial Sequence
  Description of Artificial Sequence: Synthetic oligonucleotide
  Sense strand starting at position 482 of SEQ ID NO: 1883257
auguguauuucuguccauu

SEQ ID NO: 2180377 - RNA, 19 nt, Artificial Sequence
  Description of Artificial Sequence: Synthetic oligonucleotide
  Antisense strand to SEQ ID NO: 2180376
aauggacagaaauacacau

SEQ ID NO: 2180378 - RNA, 19 nt, Artificial Sequence
  Description of Artificial Sequence: Synthetic oligonucleotide
  Sense strand starting at position 484 of SEQ ID NO: 1883257
guguauuucuguccauuaa

SEQ ID NO: 2180379 - RNA, 19 nt, Artificial Sequence
  Description of Artificial Sequence: Synthetic oligonucleotide
  Antisense strand to SEQ ID NO: 2180378
uuaauggacagaaauacac

SEQ ID NO: 2180380 - RNA, 19 nt, Artificial Sequence
  Description of Artificial Sequence: Synthetic oligonucleotide
  Sense strand starting at position 584 of SEQ ID NO: 1883257
uguaaacuuuagcuccaga

SEQ ID NO: 2180381 - RNA, 19 nt, Artificial Sequence
  Description of Artificial Sequence: Synthetic oligonucleotide
  Antisense strand to SEQ ID NO: 2180380
ucuggagcuaaaguuuaca

SEQ ID NO: 2180382 - RNA, 19 nt, Artificial Sequence
  Description of Artificial Sequence: Synthetic oligonucleotide
  Sense strand starting at position 761 of SEQ ID NO: 1883257
gaagucuauuugugggaga

SEQ ID NO: 2180383 - RNA, 19 nt, Artificial Sequence
  Description of Artificial Sequence: Synthetic oligonucleotide
  Antisense strand to SEQ ID NO: 2180382
ucucccacaaauagacuuc

SEQ ID NO: 2180384 - RNA, 19 nt, Artificial Sequence
  Description of Artificial Sequence: Synthetic oligonucleotide
  Sense strand starting at position 762 of SEQ ID NO: 1883257
aagucuauuugugggagaa

SEQ ID NO: 2180385 - RNA, 19 nt, Artificial Sequence
  Description of Artificial Sequence: Synthetic oligonucleotide
  Antisense strand to SEQ ID NO: 2180384
uucucccacaaauagacuu

SEQ ID NO: 2180386 - RNA, 19 nt, Artificial Sequence
  Description of Artificial Sequence: Synthetic oligonucleotide
  Sense strand starting at position 1117 of SEQ ID NO: 1883257
agacucuuuccauacuguu

SEQ ID NO: 2180387 - RNA, 19 nt, Artificial Sequence
  Description of Artificial Sequence: Synthetic oligonucleotide
  Antisense strand to SEQ ID NO: 2180386
aacaguauggaaagagucu

SEQ ID NO: 2180388 - RNA, 19 nt, Artificial Sequence
  Description of Artificial Sequence: Synthetic oligonucleotide
  Sense strand starting at position 1132 of SEQ ID NO: 1883257
uguuguagugaucauauag

SEQ ID NO: 2180389 - RNA, 19 nt, Artificial Sequence
  Description of Artificial Sequence: Synthetic oligonucleotide
  Antisense strand to SEQ ID NO: 2180388
cuauaugaucacuacaaca

SEQ ID NO: 2180390 - RNA, 19 nt, Artificial Sequence
  Description of Artificial Sequence: Synthetic oligonucleotide
  Sense strand starting at position 1158 of SEQ ID NO: 1883257
ggucaccagcaucaugaau

SEQ ID NO: 2180391 - RNA, 19 nt, Artificial Sequence
  Description of Artificial Sequence: Synthetic oligonucleotide
  Antisense strand to SEQ ID NO: 2180390
auucaugaugcuggugacc

SEQ ID NO: 2180392 - RNA, 19 nt, Artificial Sequence
  Description of Artificial Sequence: Synthetic oligonucleotide
  Sense strand starting at position 1196 of SEQ ID NO: 1883257
gugguucugagaggugaca

SEQ ID NO: 2180393 - RNA, 19 nt, Artificial Sequence
  Description of Artificial Sequence: Synthetic oligonucleotide
  Antisense strand to SEQ ID NO: 2180392
ugucaccucucagaaccac

SEQ ID NO: 2180394 - RNA, 19 nt, Artificial Sequence
  Description of Artificial Sequence: Synthetic oligonucleotide
  Sense strand starting at position 1853 of SEQ ID NO: 1883257
cggccuuuacgagcuguaa

SEQ ID NO: 2180395 - RNA, 19 nt, Artificial Sequence
  Description of Artificial Sequence: Synthetic oligonucleotide
  Antisense strand to SEQ ID NO: 2180394
uuacagcucguaaaggccg

SEQ ID NO: 2180396 - RNA, 19 nt, Artificial Sequence
  Description of Artificial Sequence: Synthetic oligonucleotide
  Sense strand starting at position 2156 of SEQ ID NO: 1883257
cuuaaaguguauuugccau

SEQ ID NO: 2180397 - RNA, 19 nt, Artificial Sequence
  Description of Artificial Sequence: Synthetic oligonucleotide
  Antisense strand to SEQ ID NO: 2180396
auggcaaauacacuuuaag

SEQ ID NO: 2180398 - RNA, 19 nt, Artificial Sequence
  Description of Artificial Sequence: Synthetic oligonucleotide
  Sense strand starting at position 2235 of SEQ ID NO: 1883257
guuguaagcaaacagugaa

SEQ ID NO: 2180399 - RNA, 19 nt, Artificial Sequence
  Description of Artificial Sequence: Synthetic oligonucleotide
  Antisense strand to SEQ ID NO: 2180398
uucacuguuugcuuacaac

SEQ ID NO: 2180400 - RNA, 19 nt, Artificial Sequence
  Description of Artificial Sequence: Synthetic oligonucleotide
  Sense strand starting at position 2406 of SEQ ID NO: 1883257
uuuagucuauucguaaaga

SEQ ID NO: 2180401 - RNA, 19 nt, Artificial Sequence
  Description of Artificial Sequence: Synthetic oligonucleotide
  Antisense strand to SEQ ID NO: 2180400
ucuuuacgaauagacuaaa

SEQ ID NO: 2180402 - RNA, 19 nt, Artificial Sequence
  Description of Artificial Sequence: Synthetic oligonucleotide
  Sense strand starting at position 2545 of SEQ ID NO: 1883257
ccacgucaguucucuaaga

SEQ ID NO: 2180403 - RNA, 19 nt, Artificial Sequence
  Description of Artificial Sequence: Synthetic oligonucleotide
  Antisense strand to SEQ ID NO: 2180402
ucuuagagaacugacgugg

SEQ ID NO: 2180404 - RNA, 19 nt, Artificial Sequence
  Description of Artificial Sequence: Synthetic oligonucleotide
  Sense strand starting at position 2546 of SEQ ID NO: 1883257
cacgucaguucucuaagau

SEQ ID NO: 2180405 - RNA, 19 nt, Artificial Sequence
  Description of Artificial Sequence: Synthetic oligonucleotide
  Antisense strand to SEQ ID NO: 2180404
aucuuagagaacugacgug

SEQ ID NO: 2180406 - RNA, 19 nt, Artificial Sequence
  Description of Artificial Sequence: Synthetic oligonucleotide
  Sense strand starting at position 2547 of SEQ ID NO: 1883257
acgucaguucucuaagaug

SEQ ID NO: 2180407 - RNA, 19 nt, Artificial Sequence
  Description of Artificial Sequence: Synthetic oligonucleotide
  Antisense strand to SEQ ID NO: 2180406
caucuuagagaacugacgu

SEQ ID NO: 2180408 - RNA, 19 nt, Artificial Sequence
  Description of Artificial Sequence: Synthetic oligonucleotide
  Sense strand starting at position 2556 of SEQ ID NO: 1883257
cucuaagauggaugccuaa

SEQ ID NO: 2180409 - RNA, 19 nt, Artificial Sequence
  Description of Artificial Sequence: Synthetic oligonucleotide
  Antisense strand to SEQ ID NO: 2180408
uuaggcauccaucuuagag

SEQ ID NO: 2180410 - RNA, 19 nt, Artificial Sequence
  Description of Artificial Sequence: Synthetic oligonucleotide
  Sense strand starting at position 2905 of SEQ ID NO: 1883257
gguaaagccgugcuucgua

SEQ ID NO: 2180411 - RNA, 19 nt, Artificial Sequence
  Description of Artificial Sequence: Synthetic oligonucleotide
  Antisense strand to SEQ ID NO: 2180410
uacgaagcacggcuuuacc

SEQ ID NO: 2180412 - RNA, 19 nt, Artificial Sequence
  Description of Artificial Sequence: Synthetic oligonucleotide
  Sense strand starting at position 2926 of SEQ ID NO: 1883257
cuguuacaguucuugaaag

SEQ ID NO: 2180413 - RNA, 19 nt, Artificial Sequence
  Description of Artificial Sequence: Synthetic oligonucleotide
  Antisense strand to SEQ ID NO: 2180412
cuuucaagaacuguaacag

SEQ ID NO: 2180414 - RNA, 19 nt, Artificial Sequence
  Description of Artificial Sequence: Synthetic oligonucleotide
  Sense strand starting at position 2928 of SEQ ID NO: 1883257
guuacaguucuugaaagcu

SEQ ID NO: 2180415 - RNA, 19 nt, Artificial Sequence
  Description of Artificial Sequence: Synthetic oligonucleotide
  Antisense strand to SEQ ID NO: 2180414
agcuuucaagaacuguaac

SEQ ID NO: 2180416 - RNA, 19 nt, Artificial Sequence
  Description of Artificial Sequence: Synthetic oligonucleotide
  Sense strand starting at position 2985 of SEQ ID NO: 1883257
aucgaaaguucugcccuca

SEQ ID NO: 2180417 - RNA, 19 nt, Artificial Sequence
  Description of Artificial Sequence: Synthetic oligonucleotide
  Antisense strand to SEQ ID NO: 2180416
ugagggcagaacuuucgau

SEQ ID NO: 2180418 - RNA, 19 nt, Artificial Sequence
  Description of Artificial Sequence: Synthetic oligonucleotide
  Sense strand starting at position 3040 of SEQ ID NO: 1883257
aagcgaagaguugagcaua

SEQ ID NO: 2180419 - RNA, 19 nt, Artificial Sequence
  Description of Artificial Sequence: Synthetic oligonucleotide
  Antisense strand to SEQ ID NO: 2180418
uaugcucaacucuucgcuu

SEQ ID NO: 2180420 - RNA, 19 nt, Artificial Sequence
  Description of Artificial Sequence: Synthetic oligonucleotide
  Sense strand starting at position 3043 of SEQ ID NO: 1883257
cgaagaguugagcauacuu

SEQ ID NO: 2180421 - RNA, 19 nt, Artificial Sequence
  Description of Artificial Sequence: Synthetic oligonucleotide
  Antisense strand to SEQ ID NO: 2180420
aaguaugcucaacucuucg

SEQ ID NO: 2180422 - RNA, 19 nt, Artificial Sequence
  Description of Artificial Sequence: Synthetic oligonucleotide
  Sense strand starting at position 3045 of SEQ ID NO: 1883257
aagaguugagcauacuuua

SEQ ID NO: 2180423 - RNA, 19 nt, Artificial Sequence
  Description of Artificial Sequence: Synthetic oligonucleotide
  Antisense strand to SEQ ID NO: 2180422
uaaaguaugcucaacucuu

SEQ ID NO: 2180424 - RNA, 19 nt, Artificial Sequence
  Description of Artificial Sequence: Synthetic oligonucleotide
  Sense strand starting at position 3275 of SEQ ID NO: 1883257
uuuguaaauggcugguuua

SEQ ID NO: 2180425 - RNA, 19 nt, Artificial Sequence
  Description of Artificial Sequence: Synthetic oligonucleotide
  Antisense strand to SEQ ID NO: 2180424
uaaaccagccauuuacaaa

SEQ ID NO: 2180426 - RNA, 19 nt, Artificial Sequence
  Description of Artificial Sequence: Synthetic oligonucleotide
  Sense strand starting at position 3276 of SEQ ID NO: 1883257
uuguaaauggcugguuuau

SEQ ID NO: 2180427 - RNA, 19 nt, Artificial Sequence
  Description of Artificial Sequence: Synthetic oligonucleotide
  Antisense strand to SEQ ID NO: 2180426
auaaaccagccauuuacaa

SEQ ID NO: 2180428 - RNA, 19 nt, Artificial Sequence
  Description of Artificial Sequence: Synthetic oligonucleotide
  Sense strand starting at position 3278 of SEQ ID NO: 1883257
guaaauggcugguuuauuu

SEQ ID NO: 2180429 - RNA, 19 nt, Artificial Sequence
  Description of Artificial Sequence: Synthetic oligonucleotide
  Antisense strand to SEQ ID NO: 2180428
aaauaaaccagccauuuac

SEQ ID NO: 2180430 - RNA, 19 nt, Artificial Sequence
  Description of Artificial Sequence: Synthetic oligonucleotide
  Sense strand starting at position 3308 of SEQ ID NO: 1883257
uccauaaacuuguuguaaa

SEQ ID NO: 2180431 - RNA, 19 nt, Artificial Sequence
  Description of Artificial Sequence: Synthetic oligonucleotide
  Antisense strand to SEQ ID NO: 2180430
uuuacaacaaguuuaugga

SEQ ID NO: 2180432 - RNA, 19 nt, Artificial Sequence
  Description of Artificial Sequence: Synthetic oligonucleotide
  Sense strand starting at position 3319 of SEQ ID NO: 1883257
guuguaaaccaucaaugau

SEQ ID NO: 2180433 - RNA, 19 nt, Artificial Sequence
  Description of Artificial Sequence: Synthetic oligonucleotide
  Antisense strand to SEQ ID NO: 2180432
aucauugaugguuuacaac

SEQ ID NO: 2180434 - RNA, 19 nt, Artificial Sequence
  Description of Artificial Sequence: Synthetic oligonucleotide
  Sense strand starting at position 3675 of SEQ ID NO: 1883257
caacgaagucaguaugauc

SEQ ID NO: 2180435 - RNA, 19 nt, Artificial Sequence
  Description of Artificial Sequence: Synthetic oligonucleotide
  Antisense strand to SEQ ID NO: 2180434
gaucauacugacuucguug

SEQ ID NO: 2180436 - RNA, 19 nt, Artificial Sequence
  Description of Artificial Sequence: Synthetic oligonucleotide
  Sense strand starting at position 3753 of SEQ ID NO: 1883257
ugcaaauauguuggaaugu

SEQ ID NO: 2180437 - RNA, 19 nt, Artificial Sequence
  Description of Artificial Sequence: Synthetic oligonucleotide
  Antisense strand to SEQ ID NO: 2180436
acauuccaacauauuugca

SEQ ID NO: 2180438 - RNA, 19 nt, Artificial Sequence
  Description of Artificial Sequence: Synthetic oligonucleotide
  Sense strand starting at position 3762 of SEQ ID NO: 1883257
guuggaauguaguucaguu

SEQ ID NO: 2180439 - RNA, 19 nt, Artificial Sequence
  Description of Artificial Sequence: Synthetic oligonucleotide
  Antisense strand to SEQ ID NO: 2180438
aacugaacuacauuccaac

SEQ ID NO: 2180440 - RNA, 19 nt, Artificial Sequence
  Description of Artificial Sequence: Synthetic oligonucleotide
  Sense strand starting at position 3812 of SEQ ID NO: 1883257
ugaggaggcuucuuauaug

SEQ ID NO: 2180441 - RNA, 19 nt, Artificial Sequence
  Description of Artificial Sequence: Synthetic oligonucleotide
  Antisense strand to SEQ ID NO: 2180440
cauauaagaagccuccuca

SEQ ID NO: 2180442 - RNA, 19 nt, Artificial Sequence
  Description of Artificial Sequence: Synthetic oligonucleotide
  Sense strand starting at position 3818 of SEQ ID NO: 1883257
ggcuucuuauaugcagaaa

SEQ ID NO: 2180443 - RNA, 19 nt, Artificial Sequence
  Description of Artificial Sequence: Synthetic oligonucleotide
  Antisense strand to SEQ ID NO: 2180442
uuucugcauauaagaagcc

SEQ ID NO: 2180444 - RNA, 19 nt, Artificial Sequence
  Description of Artificial Sequence: Synthetic oligonucleotide
  Sense strand starting at position 34 of SEQ ID NO: 1883258
aguaaagacuuucuaugag

SEQ ID NO: 2180445 - RNA, 19 nt, Artificial Sequence
  Description of Artificial Sequence: Synthetic oligonucleotide
  Antisense strand to SEQ ID NO: 2180444
cucauagaaagucuuuacu

SEQ ID NO: 2180446 - RNA, 19 nt, Artificial Sequence
  Description of Artificial Sequence: Synthetic oligonucleotide
  Sense strand starting at position 99 of SEQ ID NO: 1883258
guaauaaagggauguguuu

SEQ ID NO: 2180447 - RNA, 19 nt, Artificial Sequence
  Description of Artificial Sequence: Synthetic oligonucleotide
  Antisense strand to SEQ ID NO: 2180446
aaacacaucccuuuauuac

SEQ ID NO: 2180448 - RNA, 19 nt, Artificial Sequence
  Description of Artificial Sequence: Synthetic oligonucleotide
  Sense strand starting at position 642 of SEQ ID NO: 1883258
guggacucucggcagauaa

SEQ ID NO: 2180449 - RNA, 19 nt, Artificial Sequence
  Description of Artificial Sequence: Synthetic oligonucleotide
  Antisense strand to SEQ ID NO: 2180448
uuaucugccgagaguccac

SEQ ID NO: 2180450 - RNA, 19 nt, Artificial Sequence
  Description of Artificial Sequence: Synthetic oligonucleotide
  Sense strand starting at position 660 of SEQ ID NO: 1883258
agaguuaaugaaugagggu

SEQ ID NO: 2180451 - RNA, 19 nt, Artificial Sequence
  Description of Artificial Sequence: Synthetic oligonucleotide
  Antisense strand to SEQ ID NO: 2180450
acccucauucauuaacucu

SEQ ID NO: 2180452 - RNA, 19 nt, Artificial Sequence
  Description of Artificial Sequence: Synthetic oligonucleotide
  Sense strand starting at position 681 of SEQ ID NO: 1883258
aagcaagagccagagugau

SEQ ID NO: 2180453 - RNA, 19 nt, Artificial Sequence
  Description of Artificial Sequence: Synthetic oligonucleotide
  Antisense strand to SEQ ID NO: 2180452
aucacucuggcucuugcuu

SEQ ID NO: 2180454 - RNA, 19 nt, Artificial Sequence
  Description of Artificial Sequence: Synthetic oligonucleotide
  Sense strand starting at position 774 of SEQ ID NO: 1883258
cuaagaauauaagcaagua

SEQ ID NO: 2180455 - RNA, 19 nt, Artificial Sequence
  Description of Artificial Sequence: Synthetic oligonucleotide
  Antisense strand to SEQ ID NO: 2180454
uacuugcuuauauucuuag

SEQ ID NO: 2180456 - RNA, 19 nt, Artificial Sequence
  Description of Artificial Sequence: Synthetic oligonucleotide
  Sense strand starting at position 901 of SEQ ID NO: 1883258
caagcaaaugggugaaguu

SEQ ID NO: 2180457 - RNA, 19 nt, Artificial Sequence
  Description of Artificial Sequence: Synthetic oligonucleotide
  Antisense strand to SEQ ID NO: 2180456
aacuucacccauuugcuug

SEQ ID NO: 2180458 - RNA, 19 nt, Artificial Sequence
  Description of Artificial Sequence: Synthetic oligonucleotide
  Sense strand starting at position 902 of SEQ ID NO: 1883258
aagcaaaugggugaaguuu

SEQ ID NO: 2180459 - RNA, 19 nt, Artificial Sequence
  Description of Artificial Sequence: Synthetic oligonucleotide
  Antisense strand to SEQ ID NO: 2180458
aaacuucacccauuugcuu

SEQ ID NO: 2180460 - RNA, 19 nt, Artificial Sequence
  Description of Artificial Sequence: Synthetic oligonucleotide
  Sense strand starting at position 1016 of SEQ ID NO: 1883258
cuauuacauuauguagaga

SEQ ID NO: 2180461 - RNA, 19 nt, Artificial Sequence
  Description of Artificial Sequence: Synthetic oligonucleotide
  Antisense strand to SEQ ID NO: 2180460
ucucuacauaauguaauag

SEQ ID NO: 2180462 - RNA, 19 nt, Artificial Sequence
  Description of Artificial Sequence: Synthetic oligonucleotide
  Sense strand starting at position 1090 of SEQ ID NO: 1883258
gagcuucuacaauguagaa

SEQ ID NO: 2180463 - RNA, 19 nt, Artificial Sequence
  Description of Artificial Sequence: Synthetic oligonucleotide
  Antisense strand to SEQ ID NO: 2180462
uucuacauuguagaagcuc

SEQ ID NO: 2180464 - RNA, 19 nt, Artificial Sequence
  Description of Artificial Sequence: Synthetic oligonucleotide
  Sense strand starting at position 1309 of SEQ ID NO: 1883258
gagcaauaguagucugaug

SEQ ID NO: 2180465 - RNA, 19 nt, Artificial Sequence
  Description of Artificial Sequence: Synthetic oligonucleotide
  Antisense strand to SEQ ID NO: 2180464
caucagacuacuauugcuc

SEQ ID NO: 2180466 - RNA, 19 nt, Artificial Sequence
  Description of Artificial Sequence: Synthetic oligonucleotide
  Sense strand starting at position 1336 of SEQ ID NO: 1883258
uugccuaaagauugaacuu

SEQ ID NO: 2180467 - RNA, 19 nt, Artificial Sequence
  Description of Artificial Sequence: Synthetic oligonucleotide
  Antisense strand to SEQ ID NO: 2180466
aaguucaaucuuuaggcaa

SEQ ID NO: 2180468 - RNA, 19 nt, Artificial Sequence
  Description of Artificial Sequence: Synthetic oligonucleotide
  Sense strand starting at position 1364 of SEQ ID NO: 1883258
ucagauacugauugccaga

SEQ ID NO: 2180469 - RNA, 19 nt, Artificial Sequence
  Description of Artificial Sequence: Synthetic oligonucleotide
  Antisense strand to SEQ ID NO: 2180468
ucuggcaaucaguaucuga

SEQ ID NO: 2180470 - RNA, 19 nt, Artificial Sequence
  Description of Artificial Sequence: Synthetic oligonucleotide
  Sense strand starting at position 1366 of SEQ ID NO: 1883258
agauacugauugccagaca

SEQ ID NO: 2180471 - RNA, 19 nt, Artificial Sequence
  Description of Artificial Sequence: Synthetic oligonucleotide
  Antisense strand to SEQ ID NO: 2180470
ugucuggcaaucaguaucu

SEQ ID NO: 2180472 - RNA, 19 nt, Artificial Sequence
  Description of Artificial Sequence: Synthetic oligonucleotide
  Sense strand starting at position 1436 of SEQ ID NO: 1883258
ggaauuucuuugcaaugaa

SEQ ID NO: 2180473 - RNA, 19 nt, Artificial Sequence
  Description of Artificial Sequence: Synthetic oligonucleotide
  Antisense strand to SEQ ID NO: 2180472
uucauugcaaagaaauucc

SEQ ID NO: 2180474 - RNA, 19 nt, Artificial Sequence
  Description of Artificial Sequence: Synthetic oligonucleotide
  Sense strand starting at position 1717 of SEQ ID NO: 1883258
ggaugauguauauguguga

SEQ ID NO: 2180475 - RNA, 19 nt, Artificial Sequence
  Description of Artificial Sequence: Synthetic oligonucleotide
  Antisense strand to SEQ ID NO: 2180474
ucacacauauacaucaucc

SEQ ID NO: 2180476 - RNA, 19 nt, Artificial Sequence
  Description of Artificial Sequence: Synthetic oligonucleotide
  Sense strand starting at position 1718 of SEQ ID NO: 1883258
gaugauguauaugugugaa

SEQ ID NO: 2180477 - RNA, 19 nt, Artificial Sequence
  Description of Artificial Sequence: Synthetic oligonucleotide
  Antisense strand to SEQ ID NO: 2180476
uucacacauauacaucauc

SEQ ID NO: 2180478 - RNA, 19 nt, Artificial Sequence
  Description of Artificial Sequence: Synthetic oligonucleotide
  Sense strand starting at position 1936 of SEQ ID NO: 1883258
caaagagagucagugacuu

SEQ ID NO: 2180479 - RNA, 19 nt, Artificial Sequence
  Description of Artificial Sequence: Synthetic oligonucleotide
  Antisense strand to SEQ ID NO: 2180478
aagucacugacucucuuug

SEQ ID NO: 2180480 - RNA, 19 nt, Artificial Sequence
  Description of Artificial Sequence: Synthetic oligonucleotide
  Sense strand starting at position 2069 of SEQ ID NO: 1883258
agaggagauucgccuuaaa

SEQ ID NO: 2180481 - RNA, 19 nt, Artificial Sequence
  Description of Artificial Sequence: Synthetic oligonucleotide
  Antisense strand to SEQ ID NO: 2180480
uuuaaggcgaaucuccucu

SEQ ID NO: 2180482 - RNA, 19 nt, Artificial Sequence
  Description of Artificial Sequence: Synthetic oligonucleotide
  Sense strand starting at position 2101 of SEQ ID NO: 1883258
ccuagcagucccugaaaga

SEQ ID NO: 2180483 - RNA, 19 nt, Artificial Sequence
  Description of Artificial Sequence: Synthetic oligonucleotide
  Antisense strand to SEQ ID NO: 2180482
ucuuucagggacugcuagg

SEQ ID NO: 2180484 - RNA, 19 nt, Artificial Sequence
  Description of Artificial Sequence: Synthetic oligonucleotide
  Sense strand starting at position 2102 of SEQ ID NO: 1883258
cuagcagucccugaaagaa

SEQ ID NO: 2180485 - RNA, 19 nt, Artificial Sequence
  Description of Artificial Sequence: Synthetic oligonucleotide
  Antisense strand to SEQ ID NO: 2180484
uucuuucagggacugcuag

SEQ ID NO: 2180486 - RNA, 19 nt, Artificial Sequence
  Description of Artificial Sequence: Synthetic oligonucleotide
  Sense strand starting at position 2168 of SEQ ID NO: 1883258
cagugagcgcuugugcauu

SEQ ID NO: 2180487 - RNA, 19 nt, Artificial Sequence
  Description of Artificial Sequence: Synthetic oligonucleotide
  Antisense strand to SEQ ID NO: 2180486
aaugcacaagcgcucacug

SEQ ID NO: 2180488 - RNA, 19 nt, Artificial Sequence
  Description of Artificial Sequence: Synthetic oligonucleotide
  Sense strand starting at position 2259 of SEQ ID NO: 1883258
aggagcuaauaucuggaua

SEQ ID NO: 2180489 - RNA, 19 nt, Artificial Sequence
  Description of Artificial Sequence: Synthetic oligonucleotide
  Antisense strand to SEQ ID NO: 2180488
uauccagauauuagcuccu

SEQ ID NO: 2180490 - RNA, 19 nt, Artificial Sequence
  Description of Artificial Sequence: Synthetic oligonucleotide
  Sense strand starting at position 2260 of SEQ ID NO: 1883258
ggagcuaauaucuggauau

SEQ ID NO: 2180491 - RNA, 19 nt, Artificial Sequence
  Description of Artificial Sequence: Synthetic oligonucleotide
  Antisense strand to SEQ ID NO: 2180490
auauccagauauuagcucc

SEQ ID NO: 2180492 - RNA, 19 nt, Artificial Sequence
  Description of Artificial Sequence: Synthetic oligonucleotide
  Sense strand starting at position 2264 of SEQ ID NO: 1883258
cuaauaucuggauauuguc

SEQ ID NO: 2180493 - RNA, 19 nt, Artificial Sequence
  Description of Artificial Sequence: Synthetic oligonucleotide
  Antisense strand to SEQ ID NO: 2180492
gacaauauccagauauuag

SEQ ID NO: 2180494 - RNA, 19 nt, Artificial Sequence
  Description of Artificial Sequence: Synthetic oligonucleotide
  Sense strand starting at position 2272 of SEQ ID NO: 1883258
uggauauuguccucacuca

SEQ ID NO: 2180495 - RNA, 19 nt, Artificial Sequence
  Description of Artificial Sequence: Synthetic oligonucleotide
  Antisense strand to SEQ ID NO: 2180494
ugagugaggacaauaucca

SEQ ID NO: 2180496 - RNA, 19 nt, Artificial Sequence
  Description of Artificial Sequence: Synthetic oligonucleotide
  Sense strand starting at position 2273 of SEQ ID NO: 1883258
ggauauuguccucacucau

SEQ ID NO: 2180497 - RNA, 19 nt, Artificial Sequence
  Description of Artificial Sequence: Synthetic oligonucleotide
  Antisense strand to SEQ ID NO: 2180496
augagugaggacaauaucc

SEQ ID NO: 2180498 - RNA, 19 nt, Artificial Sequence
  Description of Artificial Sequence: Synthetic oligonucleotide
  Sense strand starting at position 2292 of SEQ ID NO: 1883258
ccuguuuguuaguugauuu

SEQ ID NO: 2180499 - RNA, 19 nt, Artificial Sequence
  Description of Artificial Sequence: Synthetic oligonucleotide
  Antisense strand to SEQ ID NO: 2180498
aaaucaacuaacaaacagg

SEQ ID NO: 2180500 - RNA, 19 nt, Artificial Sequence
  Description of Artificial Sequence: Synthetic oligonucleotide
  Sense strand starting at position 2359 of SEQ ID NO: 1883258
ggagaugagucucccaaac

SEQ ID NO: 2180501 - RNA, 19 nt, Artificial Sequence
  Description of Artificial Sequence: Synthetic oligonucleotide
  Antisense strand to SEQ ID NO: 2180500
guuugggagacucaucucc

SEQ ID NO: 2180502 - RNA, 19 nt, Artificial Sequence
  Description of Artificial Sequence: Synthetic oligonucleotide
  Sense strand starting at position 2412 of SEQ ID NO: 1883258
uaaacuaagcucugggagu

SEQ ID NO: 2180503 - RNA, 19 nt, Artificial Sequence
  Description of Artificial Sequence: Synthetic oligonucleotide
  Antisense strand to SEQ ID NO: 2180502
acucccagagcuuaguuua

SEQ ID NO: 2180504 - RNA, 19 nt, Artificial Sequence
  Description of Artificial Sequence: Synthetic oligonucleotide
  Sense strand starting at position 2414 of SEQ ID NO: 1883258
aacuaagcucugggaguaa

SEQ ID NO: 2180505 - RNA, 19 nt, Artificial Sequence
  Description of Artificial Sequence: Synthetic oligonucleotide
  Antisense strand to SEQ ID NO: 2180504
uuacucccagagcuuaguu

SEQ ID NO: 2180506 - RNA, 19 nt, Artificial Sequence
  Description of Artificial Sequence: Synthetic oligonucleotide
  Sense strand starting at position 2418 of SEQ ID NO: 1883258
aagcucugggaguaaucuu

SEQ ID NO: 2180507 - RNA, 19 nt, Artificial Sequence
  Description of Artificial Sequence: Synthetic oligonucleotide
  Antisense strand to SEQ ID NO: 2180506
aagauuacucccagagcuu

SEQ ID NO: 2180508 - RNA, 19 nt, Artificial Sequence
  Description of Artificial Sequence: Synthetic oligonucleotide
  Sense strand starting at position 2428 of SEQ ID NO: 1883258
aguaaucuucuaugagaag

SEQ ID NO: 2180509 - RNA, 19 nt, Artificial Sequence
  Description of Artificial Sequence: Synthetic oligonucleotide
  Antisense strand to SEQ ID NO: 2180508
cuucucauagaagauuacu

SEQ ID NO: 2180510 - RNA, 19 nt, Artificial Sequence
  Description of Artificial Sequence: Synthetic oligonucleotide
  Sense strand starting at position 2495 of SEQ ID NO: 1883258
aguauagccuuacuuaaag

SEQ ID NO: 2180511 - RNA, 19 nt, Artificial Sequence
  Description of Artificial Sequence: Synthetic oligonucleotide
  Antisense strand to SEQ ID NO: 2180510
cuuuaaguaaggcuauacu

SEQ ID NO: 2180512 - RNA, 19 nt, Artificial Sequence
  Description of Artificial Sequence: Synthetic oligonucleotide
  Sense strand starting at position 2811 of SEQ ID NO: 1883258
uuacuauaggcugauguuu

SEQ ID NO: 2180513 - RNA, 19 nt, Artificial Sequence
  Description of Artificial Sequence: Synthetic oligonucleotide
  Antisense strand to SEQ ID NO: 2180512
aaacaucagccuauaguaa

SEQ ID NO: 2180514 - RNA, 19 nt, Artificial Sequence
  Description of Artificial Sequence: Synthetic oligonucleotide
  Sense strand starting at position 2816 of SEQ ID NO: 1883258
auaggcugauguuugauaa

SEQ ID NO: 2180515 - RNA, 19 nt, Artificial Sequence
  Description of Artificial Sequence: Synthetic oligonucleotide
  Antisense strand to SEQ ID NO: 2180514
uuaucaaacaucagccuau

SEQ ID NO: 2180516 - RNA, 19 nt, Artificial Sequence
  Description of Artificial Sequence: Synthetic oligonucleotide
  Sense strand starting at position 3114 of SEQ ID NO: 1883258
gucacaucucuuuaaggcu

SEQ ID NO: 2180517 - RNA, 19 nt, Artificial Sequence
  Description of Artificial Sequence: Synthetic oligonucleotide
  Antisense strand to SEQ ID NO: 2180516
agccuuaaagagaugugac

SEQ ID NO: 2180518 - RNA, 19 nt, Artificial Sequence
  Description of Artificial Sequence: Synthetic oligonucleotide
  Sense strand starting at position 3523 of SEQ ID NO: 1883258
ugaggaugguuuguaagau

SEQ ID NO: 2180519 - RNA, 19 nt, Artificial Sequence
  Description of Artificial Sequence: Synthetic oligonucleotide
  Antisense strand to SEQ ID NO: 2180518
aucuuacaaaccauccuca

SEQ ID NO: 2180520 - RNA, 19 nt, Artificial Sequence
  Description of Artificial Sequence: Synthetic oligonucleotide
  Sense strand starting at position 3571 of SEQ ID NO: 1883258
uuuccuuaugauuggacuu

SEQ ID NO: 2180521 - RNA, 19 nt, Artificial Sequence
  Description of Artificial Sequence: Synthetic oligonucleotide
  Antisense strand to SEQ ID NO: 2180520
aaguccaaucauaaggaaa

SEQ ID NO: 2180522 - RNA, 19 nt, Artificial Sequence
  Description of Artificial Sequence: Synthetic oligonucleotide
  Sense strand starting at position 3889 of SEQ ID NO: 1883258
augagcauguacucaugaa

SEQ ID NO: 2180523 - RNA, 19 nt, Artificial Sequence
  Description of Artificial Sequence: Synthetic oligonucleotide
  Antisense strand to SEQ ID NO: 2180522
uucaugaguacaugcucau

SEQ ID NO: 2180524 - RNA, 19 nt, Artificial Sequence
  Description of Artificial Sequence: Synthetic oligonucleotide
  Sense strand starting at position 37 of SEQ ID NO: 1883259
gcagucauccaguaugaug

SEQ ID NO: 2180525 - RNA, 19 nt, Artificial Sequence
  Description of Artificial Sequence: Synthetic oligonucleotide
  Antisense strand to SEQ ID NO: 2180524
caucauacuggaugacugc

SEQ ID NO: 2180526 - RNA, 19 nt, Artificial Sequence
  Description of Artificial Sequence: Synthetic oligonucleotide
  Sense strand starting at position 72 of SEQ ID NO: 1883259
aaggauccaugggauuaaa

SEQ ID NO: 2180527 - RNA, 19 nt, Artificial Sequence
  Description of Artificial Sequence: Synthetic oligonucleotide
  Antisense strand to SEQ ID NO: 2180526
uuuaaucccauggauccuu

SEQ ID NO: 2180528 - RNA, 19 nt, Artificial Sequence
  Description of Artificial Sequence: Synthetic oligonucleotide
  Sense strand starting at position 92 of SEQ ID NO: 1883259
aggucagauuguguggauu

SEQ ID NO: 2180529 - RNA, 19 nt, Artificial Sequence
  Description of Artificial Sequence: Synthetic oligonucleotide
  Antisense strand to SEQ ID NO: 2180528
aauccacacaaucugaccu

SEQ ID NO: 2180530 - RNA, 19 nt, Artificial Sequence
  Description of Artificial Sequence: Synthetic oligonucleotide
  Sense strand starting at position 100 of SEQ ID NO: 1883259
uuguguggauuucagauga

SEQ ID NO: 2180531 - RNA, 19 nt, Artificial Sequence
  Description of Artificial Sequence: Synthetic oligonucleotide
  Antisense strand to SEQ ID NO: 2180530
ucaucugaaauccacacaa

SEQ ID NO: 2180532 - RNA, 19 nt, Artificial Sequence
  Description of Artificial Sequence: Synthetic oligonucleotide
  Sense strand starting at position 139 of SEQ ID NO: 1883259
ccgccauaauuugcacaaa

SEQ ID NO: 2180533 - RNA, 19 nt, Artificial Sequence
  Description of Artificial Sequence: Synthetic oligonucleotide
  Antisense strand to SEQ ID NO: 2180532
uuugugcaaauuauggcgg

SEQ ID NO: 2180534 - RNA, 19 nt, Artificial Sequence
  Description of Artificial Sequence: Synthetic oligonucleotide
  Sense strand starting at position 204 of SEQ ID NO: 1883259
ucgggagauuaaucagacu

SEQ ID NO: 2180535 - RNA, 19 nt, Artificial Sequence
  Description of Artificial Sequence: Synthetic oligonucleotide
  Antisense strand to SEQ ID NO: 2180534
agucugauuaaucucccga

SEQ ID NO: 2180536 - RNA, 19 nt, Artificial Sequence
  Description of Artificial Sequence: Synthetic oligonucleotide
  Sense strand starting at position 1995 of SEQ ID NO: 1883259
gaguuugaggagcauugau

SEQ ID NO: 2180537 - RNA, 19 nt, Artificial Sequence
  Description of Artificial Sequence: Synthetic oligonucleotide
  Antisense strand to SEQ ID NO: 2180536
aucaaugcuccucaaacuc

SEQ ID NO: 2180538 - RNA, 19 nt, Artificial Sequence
  Description of Artificial Sequence: Synthetic oligonucleotide
  Sense strand starting at position 2077 of SEQ ID NO: 1883259
uugucaagaacuuggugaa

SEQ ID NO: 2180539 - RNA, 19 nt, Artificial Sequence
  Description of Artificial Sequence: Synthetic oligonucleotide
  Antisense strand to SEQ ID NO: 2180538
uucaccaaguucuugacaa

SEQ ID NO: 2180540 - RNA, 19 nt, Artificial Sequence
  Description of Artificial Sequence: Synthetic oligonucleotide
  Sense strand starting at position 2084 of SEQ ID NO: 1883259
gaacuuggugaagguuuaa

SEQ ID NO: 2180541 - RNA, 19 nt, Artificial Sequence
  Description of Artificial Sequence: Synthetic oligonucleotide
  Antisense strand to SEQ ID NO: 2180540
uuaaaccuucaccaaguuc

SEQ ID NO: 2180542 - RNA, 19 nt, Artificial Sequence
  Description of Artificial Sequence: Synthetic oligonucleotide
  Sense strand starting at position 2362 of SEQ ID NO: 1883259
ucccaauuauggcuaguua

SEQ ID NO: 2180543 - RNA, 19 nt, Artificial Sequence
  Description of Artificial Sequence: Synthetic oligonucleotide
  Antisense strand to SEQ ID NO: 2180542
uaacuagccauaauuggga

SEQ ID NO: 2180544 - RNA, 19 nt, Artificial Sequence
  Description of Artificial Sequence: Synthetic oligonucleotide
  Sense strand starting at position 2363 of SEQ ID NO: 1883259
cccaauuauggcuaguuaa

SEQ ID NO: 2180545 - RNA, 19 nt, Artificial Sequence
  Description of Artificial Sequence: Synthetic oligonucleotide
  Antisense strand to SEQ ID NO: 2180544
uuaacuagccauaauuggg

SEQ ID NO: 2180546 - RNA, 19 nt, Artificial Sequence
  Description of Artificial Sequence: Synthetic oligonucleotide
  Sense strand starting at position 2371 of SEQ ID NO: 1883259
uggcuaguuaaaggaauga

SEQ ID NO: 2180547 - RNA, 19 nt, Artificial Sequence
  Description of Artificial Sequence: Synthetic oligonucleotide
  Antisense strand to SEQ ID NO: 2180546
ucauuccuuuaacuagcca

SEQ ID NO: 2180548 - RNA, 19 nt, Artificial Sequence
  Description of Artificial Sequence: Synthetic oligonucleotide
  Sense strand starting at position 2499 of SEQ ID NO: 1883259
uggauccugagaugaucuu

SEQ ID NO: 2180549 - RNA, 19 nt, Artificial Sequence
  Description of Artificial Sequence: Synthetic oligonucleotide
  Antisense strand to SEQ ID NO: 2180548
aagaucaucucaggaucca

SEQ ID NO: 2180550 - RNA, 19 nt, Artificial Sequence
  Description of Artificial Sequence: Synthetic oligonucleotide
  Sense strand starting at position 2587 of SEQ ID NO: 1883259
auguguguuacgcacauuu

SEQ ID NO: 2180551 - RNA, 19 nt, Artificial Sequence
  Description of Artificial Sequence: Synthetic oligonucleotide
  Antisense strand to SEQ ID NO: 2180550
aaaugugcguaacacacau

SEQ ID NO: 2180552 - RNA, 19 nt, Artificial Sequence
  Description of Artificial Sequence: Synthetic oligonucleotide
  Sense strand starting at position 2589 of SEQ ID NO: 1883259
guguguuacgcacauuuau

SEQ ID NO: 2180553 - RNA, 19 nt, Artificial Sequence
  Description of Artificial Sequence: Synthetic oligonucleotide
  Antisense strand to SEQ ID NO: 2180552
auaaaugugcguaacacac

SEQ ID NO: 2180554 - RNA, 19 nt, Artificial Sequence
  Description of Artificial Sequence: Synthetic oligonucleotide
  Sense strand starting at position 2601 of SEQ ID NO: 1883259
cauuuauccugugaggaac

SEQ ID NO: 2180555 - RNA, 19 nt, Artificial Sequence
  Description of Artificial Sequence: Synthetic oligonucleotide
  Antisense strand to SEQ ID NO: 2180554
guuccucacaggauaaaug

SEQ ID NO: 2180556 - RNA, 19 nt, Artificial Sequence
  Description of Artificial Sequence: Synthetic oligonucleotide
  Sense strand starting at position 2661 of SEQ ID NO: 1883259
gccagagguugaguauguu

SEQ ID NO: 2180557 - RNA, 19 nt, Artificial Sequence
  Description of Artificial Sequence: Synthetic oligonucleotide
  Antisense strand to SEQ ID NO: 2180556
aacauacucaaccucuggc

SEQ ID NO: 2180558 - RNA, 19 nt, Artificial Sequence
  Description of Artificial Sequence: Synthetic oligonucleotide
  Sense strand starting at position 2808 of SEQ ID NO: 1883259
gcuugauacugaucaguuu

SEQ ID NO: 2180559 - RNA, 19 nt, Artificial Sequence
  Description of Artificial Sequence: Synthetic oligonucleotide
  Antisense strand to SEQ ID NO: 2180558
aaacugaucaguaucaagc

SEQ ID NO: 2180560 - RNA, 19 nt, Artificial Sequence
  Description of Artificial Sequence: Synthetic oligonucleotide
  Sense strand starting at position 2852 of SEQ ID NO: 1883259
aaggaaaucgauugccuca

SEQ ID NO: 2180561 - RNA, 19 nt, Artificial Sequence
  Description of Artificial Sequence: Synthetic oligonucleotide
  Antisense strand to SEQ ID NO: 2180560
ugaggcaaucgauuuccuu

SEQ ID NO: 2180562 - RNA, 19 nt, Artificial Sequence
  Description of Artificial Sequence: Synthetic oligonucleotide
  Sense strand starting at position 2854 of SEQ ID NO: 1883259
ggaaaucgauugccucaca

SEQ ID NO: 2180563 - RNA, 19 nt, Artificial Sequence
  Description of Artificial Sequence: Synthetic oligonucleotide
  Antisense strand to SEQ ID NO: 2180562
ugugaggcaaucgauuucc

SEQ ID NO: 2180564 - RNA, 19 nt, Artificial Sequence
  Description of Artificial Sequence: Synthetic oligonucleotide
  Sense strand starting at position 2894 of SEQ ID NO: 1883259
gaggcauccaggugcagua

SEQ ID NO: 2180565 - RNA, 19 nt, Artificial Sequence
  Description of Artificial Sequence: Synthetic oligonucleotide
  Antisense strand to SEQ ID NO: 2180564
uacugcaccuggaugccuc

SEQ ID NO: 2180566 - RNA, 19 nt, Artificial Sequence
  Description of Artificial Sequence: Synthetic oligonucleotide
  Sense strand starting at position 2901 of SEQ ID NO: 1883259
ccaggugcaguauaauuau

SEQ ID NO: 2180567 - RNA, 19 nt, Artificial Sequence
  Description of Artificial Sequence: Synthetic oligonucleotide
  Antisense strand to SEQ ID NO: 2180566
auaauuauacugcaccugg

SEQ ID NO: 2180568 - RNA, 19 nt, Artificial Sequence
  Description of Artificial Sequence: Synthetic oligonucleotide
  Sense strand starting at position 2907 of SEQ ID NO: 1883259
gcaguauaauuaucaguuc

SEQ ID NO: 2180569 - RNA, 19 nt, Artificial Sequence
  Description of Artificial Sequence: Synthetic oligonucleotide
  Antisense strand to SEQ ID NO: 2180568
gaacugauaauuauacugc

SEQ ID NO: 2180570 - RNA, 19 nt, Artificial Sequence
  Description of Artificial Sequence: Synthetic oligonucleotide
  Sense strand starting at position 2933 of SEQ ID NO: 1883259
uuaucauagacgugaguuc

SEQ ID NO: 2180571 - RNA, 19 nt, Artificial Sequence
  Description of Artificial Sequence: Synthetic oligonucleotide
  Antisense strand to SEQ ID NO: 2180570
gaacucacgucuaugauaa

SEQ ID NO: 2180572 - RNA, 19 nt, Artificial Sequence
  Description of Artificial Sequence: Synthetic oligonucleotide
  Sense strand starting at position 2940 of SEQ ID NO: 1883259
agacgugaguucuuuccau

SEQ ID NO: 2180573 - RNA, 19 nt, Artificial Sequence
  Description of Artificial Sequence: Synthetic oligonucleotide
  Antisense strand to SEQ ID NO: 2180572
auggaaagaacucacgucu

SEQ ID NO: 2180574 - RNA, 19 nt, Artificial Sequence
  Description of Artificial Sequence: Synthetic oligonucleotide
  Sense strand starting at position 3052 of SEQ ID NO: 1883259
aagcuuugugcuccauguu

SEQ ID NO: 2180575 - RNA, 19 nt, Artificial Sequence
  Description of Artificial Sequence: Synthetic oligonucleotide
  Antisense strand to SEQ ID NO: 2180574
aacauggagcacaaagcuu

SEQ ID NO: 2180576 - RNA, 19 nt, Artificial Sequence
  Description of Artificial Sequence: Synthetic oligonucleotide
  Sense strand starting at position 3067 of SEQ ID NO: 1883259
uguucaugucagcaagggu

SEQ ID NO: 2180577 - RNA, 19 nt, Artificial Sequence
  Description of Artificial Sequence: Synthetic oligonucleotide
  Antisense strand to SEQ ID NO: 2180576
acccuugcugacaugaaca

SEQ ID NO: 2180578 - RNA, 19 nt, Artificial Sequence
  Description of Artificial Sequence: Synthetic oligonucleotide
  Sense strand starting at position 3074 of SEQ ID NO: 1883259
gucagcaagggugagaaau

SEQ ID NO: 2180579 - RNA, 19 nt, Artificial Sequence
  Description of Artificial Sequence: Synthetic oligonucleotide
  Antisense strand to SEQ ID NO: 2180578
auuucucacccuugcugac

SEQ ID NO: 2180580 - RNA, 19 nt, Artificial Sequence
  Description of Artificial Sequence: Synthetic oligonucleotide
  Sense strand starting at position 3095 of SEQ ID NO: 1883259
uuaccugaagcauguaaau

SEQ ID NO: 2180581 - RNA, 19 nt, Artificial Sequence
  Description of Artificial Sequence: Synthetic oligonucleotide
  Antisense strand to SEQ ID NO: 2180580
auuuacaugcuucagguaa

SEQ ID NO: 2180582 - RNA, 19 nt, Artificial Sequence
  Description of Artificial Sequence: Synthetic oligonucleotide
  Sense strand starting at position 3104 of SEQ ID NO: 1883259
gcauguaaauuacugaagu

SEQ ID NO: 2180583 - RNA, 19 nt, Artificial Sequence
  Description of Artificial Sequence: Synthetic oligonucleotide
  Antisense strand to SEQ ID NO: 2180582
acuucaguaauuuacaugc

SEQ ID NO: 2180584 - RNA, 19 nt, Artificial Sequence
  Description of Artificial Sequence: Synthetic oligonucleotide
  Sense strand starting at position 3159 of SEQ ID NO: 1883259
ggcaaaugaccaugcuuaa

SEQ ID NO: 2180585 - RNA, 19 nt, Artificial Sequence
  Description of Artificial Sequence: Synthetic oligonucleotide
  Antisense strand to SEQ ID NO: 2180584
uuaagcauggucauuugcc

SEQ ID NO: 2180586 - RNA, 19 nt, Artificial Sequence
  Description of Artificial Sequence: Synthetic oligonucleotide
  Sense strand starting at position 3203 of SEQ ID NO: 1883259
cuacgagcugauugggaua

SEQ ID NO: 2180587 - RNA, 19 nt, Artificial Sequence
  Description of Artificial Sequence: Synthetic oligonucleotide
  Antisense strand to SEQ ID NO: 2180586
uaucccaaucagcucguag

SEQ ID NO: 2180588 - RNA, 19 nt, Artificial Sequence
  Description of Artificial Sequence: Synthetic oligonucleotide
  Sense strand starting at position 3288 of SEQ ID NO: 1883259
acagauaggcucuguuauu

SEQ ID NO: 2180589 - RNA, 19 nt, Artificial Sequence
  Description of Artificial Sequence: Synthetic oligonucleotide
  Antisense strand to SEQ ID NO: 2180588
aauaacagagccuaucugu

SEQ ID NO: 2180590 - RNA, 19 nt, Artificial Sequence
  Description of Artificial Sequence: Synthetic oligonucleotide
  Sense strand starting at position 3289 of SEQ ID NO: 1883259
cagauaggcucuguuauua

SEQ ID NO: 2180591 - RNA, 19 nt, Artificial Sequence
  Description of Artificial Sequence: Synthetic oligonucleotide
  Antisense strand to SEQ ID NO: 2180590
uaauaacagagccuaucug

SEQ ID NO: 2180592 - RNA, 19 nt, Artificial Sequence
  Description of Artificial Sequence: Synthetic oligonucleotide
  Sense strand starting at position 3297 of SEQ ID NO: 1883259
cucuguuauuagucauagu

SEQ ID NO: 2180593 - RNA, 19 nt, Artificial Sequence
  Description of Artificial Sequence: Synthetic oligonucleotide
  Antisense strand to SEQ ID NO: 2180592
acuaugacuaauaacagag

SEQ ID NO: 2180594 - RNA, 19 nt, Artificial Sequence
  Description of Artificial Sequence: Synthetic oligonucleotide
  Sense strand starting at position 3298 of SEQ ID NO: 1883259
ucuguuauuagucauagug

SEQ ID NO: 2180595 - RNA, 19 nt, Artificial Sequence
  Description of Artificial Sequence: Synthetic oligonucleotide
  Antisense strand to SEQ ID NO: 2180594
cacuaugacuaauaacaga

SEQ ID NO: 2180596 - RNA, 19 nt, Artificial Sequence
  Description of Artificial Sequence: Synthetic oligonucleotide
  Sense strand starting at position 3620 of SEQ ID NO: 1883259
aagucuauuugccaggaau

SEQ ID NO: 2180597 - RNA, 19 nt, Artificial Sequence
  Description of Artificial Sequence: Synthetic oligonucleotide
  Antisense strand to SEQ ID NO: 2180596
auuccuggcaaauagacuu

SEQ ID NO: 2180598 - RNA, 19 nt, Artificial Sequence
  Description of Artificial Sequence: Synthetic oligonucleotide
  Sense strand starting at position 3634 of SEQ ID NO: 1883259
ggaauaaugcuacauucuu

SEQ ID NO: 2180599 - RNA, 19 nt, Artificial Sequence
  Description of Artificial Sequence: Synthetic oligonucleotide
  Antisense strand to SEQ ID NO: 2180598
aagaauguagcauuauucc

SEQ ID NO: 2180600 - RNA, 19 nt, Artificial Sequence
  Description of Artificial Sequence: Synthetic oligonucleotide
  Sense strand starting at position 3677 of SEQ ID NO: 1883259
guacuauugaugcaggauu

SEQ ID NO: 2180601 - RNA, 19 nt, Artificial Sequence
  Description of Artificial Sequence: Synthetic oligonucleotide
  Antisense strand to SEQ ID NO: 2180600
aauccugcaucaauaguac

SEQ ID NO: 2180602 - RNA, 19 nt, Artificial Sequence
  Description of Artificial Sequence: Synthetic oligonucleotide
  Sense strand starting at position 3950 of SEQ ID NO: 1883259
gguauuacagcauguuaac

SEQ ID NO: 2180603 - RNA, 19 nt, Artificial Sequence
  Description of Artificial Sequence: Synthetic oligonucleotide
  Antisense strand to SEQ ID NO: 2180602
guuaacaugcuguaauacc

SEQ ID NO: 2180604 - RNA, 19 nt, Artificial Sequence
  Description of Artificial Sequence: Synthetic oligonucleotide
  Sense strand starting at position 583 of SEQ ID NO: 1883260
ccuugauuauaccuuuagu

SEQ ID NO: 2180605 - RNA, 19 nt, Artificial Sequence
  Description of Artificial Sequence: Synthetic oligonucleotide
  Antisense strand to SEQ ID NO: 2180604
acuaaagguauaaucaagg

SEQ ID NO: 2180606 - RNA, 19 nt, Artificial Sequence
  Description of Artificial Sequence: Synthetic oligonucleotide
  Sense strand starting at position 779 of SEQ ID NO: 1883260
ucagcuagguaugcagaaa

SEQ ID NO: 2180607 - RNA, 19 nt, Artificial Sequence
  Description of Artificial Sequence: Synthetic oligonucleotide
  Antisense strand to SEQ ID NO: 2180606
uuucugcauaccuagcuga

SEQ ID NO: 2180608 - RNA, 19 nt, Artificial Sequence
  Description of Artificial Sequence: Synthetic oligonucleotide
  Sense strand starting at position 1312 of SEQ ID NO: 1883260
gaugucaggguguggaaau

SEQ ID NO: 2180609 - RNA, 19 nt, Artificial Sequence
  Description of Artificial Sequence: Synthetic oligonucleotide
  Antisense strand to SEQ ID NO: 2180608
auuuccacacccugacauc

SEQ ID NO: 2180610 - RNA, 19 nt, Artificial Sequence
  Description of Artificial Sequence: Synthetic oligonucleotide
  Sense strand starting at position 1313 of SEQ ID NO: 1883260
augucaggguguggaaaua

SEQ ID NO: 2180611 - RNA, 19 nt, Artificial Sequence
  Description of Artificial Sequence: Synthetic oligonucleotide
  Antisense strand to SEQ ID NO: 2180610
uauuuccacacccugacau

SEQ ID NO: 2180612 - RNA, 19 nt, Artificial Sequence
  Description of Artificial Sequence: Synthetic oligonucleotide
  Sense strand starting at position 2291 of SEQ ID NO: 1883260
gaggccugacuauaguaau

SEQ ID NO: 2180613 - RNA, 19 nt, Artificial Sequence
  Description of Artificial Sequence: Synthetic oligonucleotide
  Antisense strand to SEQ ID NO: 2180612
auuacuauagucaggccuc

SEQ ID NO: 2180614 - RNA, 19 nt, Artificial Sequence
  Description of Artificial Sequence: Synthetic oligonucleotide
  Sense strand starting at position 2294 of SEQ ID NO: 1883260
gccugacuauaguaaucua

SEQ ID NO: 2180615 - RNA, 19 nt, Artificial Sequence
  Description of Artificial Sequence: Synthetic oligonucleotide
  Antisense strand to SEQ ID NO: 2180614
uagauuacuauagucaggc

SEQ ID NO: 2180616 - RNA, 19 nt, Artificial Sequence
  Description of Artificial Sequence: Synthetic oligonucleotide
  Sense strand starting at position 2323 of SEQ ID NO: 1883260
ugaauaucauuagggaaac

SEQ ID NO: 2180617 - RNA, 19 nt, Artificial Sequence
  Description of Artificial Sequence: Synthetic oligonucleotide
  Antisense strand to SEQ ID NO: 2180616
guuucccuaaugauauuca

SEQ ID NO: 2180618 - RNA, 19 nt, Artificial Sequence
  Description of Artificial Sequence: Synthetic oligonucleotide
  Sense strand starting at position 2468 of SEQ ID NO: 1883260
gccacaauauagguacaua

SEQ ID NO: 2180619 - RNA, 19 nt, Artificial Sequence
  Description of Artificial Sequence: Synthetic oligonucleotide
  Antisense strand to SEQ ID NO: 2180618
uauguaccuauauuguggc

SEQ ID NO: 2180620 - RNA, 19 nt, Artificial Sequence
  Description of Artificial Sequence: Synthetic oligonucleotide
  Sense strand starting at position 2550 of SEQ ID NO: 1883260
ugguaauggagcugcaaua

SEQ ID NO: 2180621 - RNA, 19 nt, Artificial Sequence
  Description of Artificial Sequence: Synthetic oligonucleotide
  Antisense strand to SEQ ID NO: 2180620
uauugcagcuccauuacca

SEQ ID NO: 2180622 - RNA, 19 nt, Artificial Sequence
  Description of Artificial Sequence: Synthetic oligonucleotide
  Sense strand starting at position 2591 of SEQ ID NO: 1883260
ggucaauuauuguauggaa

SEQ ID NO: 2180623 - RNA, 19 nt, Artificial Sequence
  Description of Artificial Sequence: Synthetic oligonucleotide
  Antisense strand to SEQ ID NO: 2180622
uuccauacaauaauugacc

SEQ ID NO: 2180624 - RNA, 19 nt, Artificial Sequence
  Description of Artificial Sequence: Synthetic oligonucleotide
  Sense strand starting at position 2607 of SEQ ID NO: 1883260
gaauaugacugaggucaua

SEQ ID NO: 2180625 - RNA, 19 nt, Artificial Sequence
  Description of Artificial Sequence: Synthetic oligonucleotide
  Antisense strand to SEQ ID NO: 2180624
uaugaccucagucauauuc

SEQ ID NO: 2180626 - RNA, 19 nt, Artificial Sequence
  Description of Artificial Sequence: Synthetic oligonucleotide
  Sense strand starting at position 2640 of SEQ ID NO: 1883260
acuaaaugauagugacaua

SEQ ID NO: 2180627 - RNA, 19 nt, Artificial Sequence
  Description of Artificial Sequence: Synthetic oligonucleotide
  Antisense strand to SEQ ID NO: 2180626
uaugucacuaucauuuagu

SEQ ID NO: 2180628 - RNA, 19 nt, Artificial Sequence
  Description of Artificial Sequence: Synthetic oligonucleotide
  Sense strand starting at position 2651 of SEQ ID NO: 1883260
gugacauaucaguaugcuc

SEQ ID NO: 2180629 - RNA, 19 nt, Artificial Sequence
  Description of Artificial Sequence: Synthetic oligonucleotide
  Antisense strand to SEQ ID NO: 2180628
gagcauacugauaugucac

SEQ ID NO: 2180630 - RNA, 19 nt, Artificial Sequence
  Description of Artificial Sequence: Synthetic oligonucleotide
  Sense strand starting at position 2656 of SEQ ID NO: 1883260
auaucaguaugcuccucua

SEQ ID NO: 2180631 - RNA, 19 nt, Artificial Sequence
  Description of Artificial Sequence: Synthetic oligonucleotide
  Antisense strand to SEQ ID NO: 2180630
uagaggagcauacugauau

SEQ ID NO: 2180632 - RNA, 19 nt, Artificial Sequence
  Description of Artificial Sequence: Synthetic oligonucleotide
  Sense strand starting at position 2659 of SEQ ID NO: 1883260
ucaguaugcuccucuacau

SEQ ID NO: 2180633 - RNA, 19 nt, Artificial Sequence
  Description of Artificial Sequence: Synthetic oligonucleotide
  Antisense strand to SEQ ID NO: 2180632
auguagaggagcauacuga

SEQ ID NO: 2180634 - RNA, 19 nt, Artificial Sequence
  Description of Artificial Sequence: Synthetic oligonucleotide
  Sense strand starting at position 2705 of SEQ ID NO: 1883260
uguauugagagcuaggcaa

SEQ ID NO: 2180635 - RNA, 19 nt, Artificial Sequence
  Description of Artificial Sequence: Synthetic oligonucleotide
  Antisense strand to SEQ ID NO: 2180634
uugccuagcucucaauaca

SEQ ID NO: 2180636 - RNA, 19 nt, Artificial Sequence
  Description of Artificial Sequence: Synthetic oligonucleotide
  Sense strand starting at position 2788 of SEQ ID NO: 1883260
ggguguuucucaguaggug

SEQ ID NO: 2180637 - RNA, 19 nt, Artificial Sequence
  Description of Artificial Sequence: Synthetic oligonucleotide
  Antisense strand to SEQ ID NO: 2180636
caccuacugagaaacaccc

SEQ ID NO: 2180638 - RNA, 19 nt, Artificial Sequence
  Description of Artificial Sequence: Synthetic oligonucleotide
  Sense strand starting at position 2995 of SEQ ID NO: 1883260
uggagaggucagcagguaa

SEQ ID NO: 2180639 - RNA, 19 nt, Artificial Sequence
  Description of Artificial Sequence: Synthetic oligonucleotide
  Antisense strand to SEQ ID NO: 2180638
uuaccugcugaccucucca

SEQ ID NO: 2180640 - RNA, 19 nt, Artificial Sequence
  Description of Artificial Sequence: Synthetic oligonucleotide
  Sense strand starting at position 3109 of SEQ ID NO: 1883260
agcaguauugcugacagca

SEQ ID NO: 2180641 - RNA, 19 nt, Artificial Sequence
  Description of Artificial Sequence: Synthetic oligonucleotide
  Antisense strand to SEQ ID NO: 2180640
ugcugucagcaauacugcu

SEQ ID NO: 2180642 - RNA, 19 nt, Artificial Sequence
  Description of Artificial Sequence: Synthetic oligonucleotide
  Sense strand starting at position 3160 of SEQ ID NO: 1883260
cuaucucaguaguuggaau

SEQ ID NO: 2180643 - RNA, 19 nt, Artificial Sequence
  Description of Artificial Sequence: Synthetic oligonucleotide
  Antisense strand to SEQ ID NO: 2180642
auuccaacuacugagauag

SEQ ID NO: 2180644 - RNA, 19 nt, Artificial Sequence
  Description of Artificial Sequence: Synthetic oligonucleotide
  Sense strand starting at position 3162 of SEQ ID NO: 1883260
aucucaguaguuggaauau

SEQ ID NO: 2180645 - RNA, 19 nt, Artificial Sequence
  Description of Artificial Sequence: Synthetic oligonucleotide
  Antisense strand to SEQ ID NO: 2180644
auauuccaacuacugagau

SEQ ID NO: 2180646 - RNA, 19 nt, Artificial Sequence
  Description of Artificial Sequence: Synthetic oligonucleotide
  Sense strand starting at position 3717 of SEQ ID NO: 1883260
uucccacauuuauguaagu

SEQ ID NO: 2180647 - RNA, 19 nt, Artificial Sequence
  Description of Artificial Sequence: Synthetic oligonucleotide
  Antisense strand to SEQ ID NO: 2180646
acuuacauaaaugugggaa

SEQ ID NO: 2180648 - RNA, 19 nt, Artificial Sequence
  Description of Artificial Sequence: Synthetic oligonucleotide
  Sense strand starting at position 3726 of SEQ ID NO: 1883260
uuauguaaguuggauuuga

SEQ ID NO: 2180649 - RNA, 19 nt, Artificial Sequence
  Description of Artificial Sequence: Synthetic oligonucleotide
  Antisense strand to SEQ ID NO: 2180648
ucaaauccaacuuacauaa

SEQ ID NO: 2180650 - RNA, 19 nt, Artificial Sequence
  Description of Artificial Sequence: Synthetic oligonucleotide
  Sense strand starting at position 3786 of SEQ ID NO: 1883260
uauuuauuguguuugugca

SEQ ID NO: 2180651 - RNA, 19 nt, Artificial Sequence
  Description of Artificial Sequence: Synthetic oligonucleotide
  Antisense strand to SEQ ID NO: 2180650
ugcacaaacacaauaaaua

SEQ ID NO: 2180652 - RNA, 19 nt, Artificial Sequence
  Description of Artificial Sequence: Synthetic oligonucleotide
  Sense strand starting at position 3787 of SEQ ID NO: 1883260
auuuauuguguuugugcau

SEQ ID NO: 2180653 - RNA, 19 nt, Artificial Sequence
  Description of Artificial Sequence: Synthetic oligonucleotide
  Antisense strand to SEQ ID NO: 2180652
augcacaaacacaauaaau

SEQ ID NO: 2180654 - RNA, 19 nt, Artificial Sequence
  Description of Artificial Sequence: Synthetic oligonucleotide
  Sense strand starting at position 3790 of SEQ ID NO: 1883260
uauuguguuugugcaugga

SEQ ID NO: 2180655 - RNA, 19 nt, Artificial Sequence
  Description of Artificial Sequence: Synthetic oligonucleotide
  Antisense strand to SEQ ID NO: 2180654
uccaugcacaaacacaaua

SEQ ID NO: 2180656 - RNA, 19 nt, Artificial Sequence
  Description of Artificial Sequence: Synthetic oligonucleotide
  Sense strand starting at position 3793 of SEQ ID NO: 1883260
uguguuugugcauggauga

SEQ ID NO: 2180657 - RNA, 19 nt, Artificial Sequence
  Description of Artificial Sequence: Synthetic oligonucleotide
  Antisense strand to SEQ ID NO: 2180656
ucauccaugcacaaacaca

SEQ ID NO: 2180658 - RNA, 19 nt, Artificial Sequence
  Description of Artificial Sequence: Synthetic oligonucleotide
  Sense strand starting at position 3823 of SEQ ID NO: 1883260
agguacuguaaguguaaau

SEQ ID NO: 2180659 - RNA, 19 nt, Artificial Sequence
  Description of Artificial Sequence: Synthetic oligonucleotide
  Antisense strand to SEQ ID NO: 2180658
auuuacacuuacaguaccu

SEQ ID NO: 2180660 - RNA, 19 nt, Artificial Sequence
  Description of Artificial Sequence: Synthetic oligonucleotide
  Sense strand starting at position 3855 of SEQ ID NO: 1883260
gcagcuguguucuguggaa

SEQ ID NO: 2180661 - RNA, 19 nt, Artificial Sequence
  Description of Artificial Sequence: Synthetic oligonucleotide
  Antisense strand to SEQ ID NO: 2180660
uuccacagaacacagcugc

SEQ ID NO: 2180662 - RNA, 19 nt, Artificial Sequence
  Description of Artificial Sequence: Synthetic oligonucleotide
  Sense strand starting at position 3859 of SEQ ID NO: 1883260
cuguguucuguggaagcuu

SEQ ID NO: 2180663 - RNA, 19 nt, Artificial Sequence
  Description of Artificial Sequence: Synthetic oligonucleotide
  Antisense strand to SEQ ID NO: 2180662
aagcuuccacagaacacag

SEQ ID NO: 2180664 - RNA, 19 nt, Artificial Sequence
  Description of Artificial Sequence: Synthetic oligonucleotide
  Sense strand starting at position 3893 of SEQ ID NO: 1883260
agucuauaacugugcuguu

SEQ ID NO: 2180665 - RNA, 19 nt, Artificial Sequence
  Description of Artificial Sequence: Synthetic oligonucleotide
  Antisense strand to SEQ ID NO: 2180664
aacagcacaguuauagacu

SEQ ID NO: 2180666 - RNA, 19 nt, Artificial Sequence
  Description of Artificial Sequence: Synthetic oligonucleotide
  Sense strand starting at position 3902 of SEQ ID NO: 1883260
cugugcuguucagugagau

SEQ ID NO: 2180667 - RNA, 19 nt, Artificial Sequence
  Description of Artificial Sequence: Synthetic oligonucleotide
  Antisense strand to SEQ ID NO: 2180666
aucucacugaacagcacag

SEQ ID NO: 2180668 - RNA, 19 nt, Artificial Sequence
  Description of Artificial Sequence: Synthetic oligonucleotide
  Sense strand starting at position 3903 of SEQ ID NO: 1883260
ugugcuguucagugagaua

SEQ ID NO: 2180669 - RNA, 19 nt, Artificial Sequence
  Description of Artificial Sequence: Synthetic oligonucleotide
  Antisense strand to SEQ ID NO: 2180668
uaucucacugaacagcaca

SEQ ID NO: 2180670 - RNA, 19 nt, Artificial Sequence
  Description of Artificial Sequence: Synthetic oligonucleotide
  Sense strand starting at position 3932 of SEQ ID NO: 1883260
acguauggcuauugagaac

SEQ ID NO: 2180671 - RNA, 19 nt, Artificial Sequence
  Description of Artificial Sequence: Synthetic oligonucleotide
  Antisense strand to SEQ ID NO: 2180670
guucucaauagccauacgu

SEQ ID NO: 2180672 - RNA, 19 nt, Artificial Sequence
  Description of Artificial Sequence: Synthetic oligonucleotide
  Sense strand starting at position 3950 of SEQ ID NO: 1883260
cuugaaauccagcaaguca

SEQ ID NO: 2180673 - RNA, 19 nt, Artificial Sequence
  Description of Artificial Sequence: Synthetic oligonucleotide
  Antisense strand to SEQ ID NO: 2180672
ugacuugcuggauuucaag

SEQ ID NO: 2180674 - RNA, 19 nt, Artificial Sequence
  Description of Artificial Sequence: Synthetic oligonucleotide
  Sense strand starting at position 132 of SEQ ID NO: 1883261
aaaccuguuccagguaaug

SEQ ID NO: 2180675 - RNA, 19 nt, Artificial Sequence
  Description of Artificial Sequence: Synthetic oligonucleotide
  Antisense strand to SEQ ID NO: 2180674
cauuaccuggaacagguuu

SEQ ID NO: 2180676 - RNA, 19 nt, Artificial Sequence
  Description of Artificial Sequence: Synthetic oligonucleotide
  Sense strand starting at position 151 of SEQ ID NO: 1883261
ugauguuauacaugauagg

SEQ ID NO: 2180677 - RNA, 19 nt, Artificial Sequence
  Description of Artificial Sequence: Synthetic oligonucleotide
  Antisense strand to SEQ ID NO: 2180676
ccuaucauguauaacauca

SEQ ID NO: 2180678 - RNA, 19 nt, Artificial Sequence
  Description of Artificial Sequence: Synthetic oligonucleotide
  Sense strand starting at position 236 of SEQ ID NO: 1883261
gaauguuagguaggagaug

SEQ ID NO: 2180679 - RNA, 19 nt, Artificial Sequence
  Description of Artificial Sequence: Synthetic oligonucleotide
  Antisense strand to SEQ ID NO: 2180678
caucuccuaccuaacauuc

SEQ ID NO: 2180680 - RNA, 19 nt, Artificial Sequence
  Description of Artificial Sequence: Synthetic oligonucleotide
  Sense strand starting at position 314 of SEQ ID NO: 1883261
ccgacucuugcacacgaaa

SEQ ID NO: 2180681 - RNA, 19 nt, Artificial Sequence
  Description of Artificial Sequence: Synthetic oligonucleotide
  Antisense strand to SEQ ID NO: 2180680
uuucgugugcaagagucgg

SEQ ID NO: 2180682 - RNA, 19 nt, Artificial Sequence
  Description of Artificial Sequence: Synthetic oligonucleotide
  Sense strand starting at position 328 of SEQ ID NO: 1883261
cgaaacagguuauccaagu

SEQ ID NO: 2180683 - RNA, 19 nt, Artificial Sequence
  Description of Artificial Sequence: Synthetic oligonucleotide
  Antisense strand to SEQ ID NO: 2180682
acuuggauaaccuguuucg

SEQ ID NO: 2180684 - RNA, 19 nt, Artificial Sequence
  Description of Artificial Sequence: Synthetic oligonucleotide
  Sense strand starting at position 379 of SEQ ID NO: 1883261
acccuuuccguggacauaa

SEQ ID NO: 2180685 - RNA, 19 nt, Artificial Sequence
  Description of Artificial Sequence: Synthetic oligonucleotide
  Antisense strand to SEQ ID NO: 2180684
uuauguccacggaaagggu

SEQ ID NO: 2180686 - RNA, 19 nt, Artificial Sequence
  Description of Artificial Sequence: Synthetic oligonucleotide
  Sense strand starting at position 387 of SEQ ID NO: 1883261
cguggacauaaucaugcau

SEQ ID NO: 2180687 - RNA, 19 nt, Artificial Sequence
  Description of Artificial Sequence: Synthetic oligonucleotide
  Antisense strand to SEQ ID NO: 2180686
augcaugauuauguccacg

SEQ ID NO: 2180688 - RNA, 19 nt, Artificial Sequence
  Description of Artificial Sequence: Synthetic oligonucleotide
  Sense strand starting at position 431 of SEQ ID NO: 1883261
ugaacagaucaguaugcca

SEQ ID NO: 2180689 - RNA, 19 nt, Artificial Sequence
  Description of Artificial Sequence: Synthetic oligonucleotide
  Antisense strand to SEQ ID NO: 2180688
uggcauacugaucuguuca

SEQ ID NO: 2180690 - RNA, 19 nt, Artificial Sequence
  Description of Artificial Sequence: Synthetic oligonucleotide
  Sense strand starting at position 483 of SEQ ID NO: 1883261
ccuugacuuucuguacauu

SEQ ID NO: 2180691 - RNA, 19 nt, Artificial Sequence
  Description of Artificial Sequence: Synthetic oligonucleotide
  Antisense strand to SEQ ID NO: 2180690
aauguacagaaagucaagg

SEQ ID NO: 2180692 - RNA, 19 nt, Artificial Sequence
  Description of Artificial Sequence: Synthetic oligonucleotide
  Sense strand starting at position 505 of SEQ ID NO: 1883261
aguauuaaagaauggugua

SEQ ID NO: 2180693 - RNA, 19 nt, Artificial Sequence
  Description of Artificial Sequence: Synthetic oligonucleotide
  Antisense strand to SEQ ID NO: 2180692
uacaccauucuuuaauacu

SEQ ID NO: 2180694 - RNA, 19 nt, Artificial Sequence
  Description of Artificial Sequence: Synthetic oligonucleotide
  Sense strand starting at position 506 of SEQ ID NO: 1883261
guauuaaagaaugguguag

SEQ ID NO: 2180695 - RNA, 19 nt, Artificial Sequence
  Description of Artificial Sequence: Synthetic oligonucleotide
  Antisense strand to SEQ ID NO: 2180694
cuacaccauucuuuaauac

SEQ ID NO: 2180696 - RNA, 19 nt, Artificial Sequence
  Description of Artificial Sequence: Synthetic oligonucleotide
  Sense strand starting at position 640 of SEQ ID NO: 1883261
gaaaguuagacgcauaguu

SEQ ID NO: 2180697 - RNA, 19 nt, Artificial Sequence
  Description of Artificial Sequence: Synthetic oligonucleotide
  Antisense strand to SEQ ID NO: 2180696
aacuaugcgucuaacuuuc

SEQ ID NO: 2180698 - RNA, 19 nt, Artificial Sequence
  Description of Artificial Sequence: Synthetic oligonucleotide
  Sense strand starting at position 642 of SEQ ID NO: 1883261
aaguuagacgcauaguucu

SEQ ID NO: 2180699 - RNA, 19 nt, Artificial Sequence
  Description of Artificial Sequence: Synthetic oligonucleotide
  Antisense strand to SEQ ID NO: 2180698
agaacuaugcgucuaacuu

SEQ ID NO: 2180700 - RNA, 19 nt, Artificial Sequence
  Description of Artificial Sequence: Synthetic oligonucleotide
  Sense strand starting at position 663 of SEQ ID NO: 1883261
gaaaguggugccuaagaau

SEQ ID NO: 2180701 - RNA, 19 nt, Artificial Sequence
  Description of Artificial Sequence: Synthetic oligonucleotide
  Antisense strand to SEQ ID NO: 2180700
auucuuaggcaccacuuuc

SEQ ID NO: 2180702 - RNA, 19 nt, Artificial Sequence
  Description of Artificial Sequence: Synthetic oligonucleotide
  Sense strand starting at position 674 of SEQ ID NO: 1883261
cuaagaauaguaugucaau

SEQ ID NO: 2180703 - RNA, 19 nt, Artificial Sequence
  Description of Artificial Sequence: Synthetic oligonucleotide
  Antisense strand to SEQ ID NO: 2180702
auugacauacuauucuuag

SEQ ID NO: 2180704 - RNA, 19 nt, Artificial Sequence
  Description of Artificial Sequence: Synthetic oligonucleotide
  Sense strand starting at position 792 of SEQ ID NO: 1883261
aaucgcucucaagaguacu

SEQ ID NO: 2180705 - RNA, 19 nt, Artificial Sequence
  Description of Artificial Sequence: Synthetic oligonucleotide
  Antisense strand to SEQ ID NO: 2180704
aguacucuugagagcgauu

SEQ ID NO: 2180706 - RNA, 19 nt, Artificial Sequence
  Description of Artificial Sequence: Synthetic oligonucleotide
  Sense strand starting at position 901 of SEQ ID NO: 1883261
gcuccaagguaauuccaua

SEQ ID NO: 2180707 - RNA, 19 nt, Artificial Sequence
  Description of Artificial Sequence: Synthetic oligonucleotide
  Antisense strand to SEQ ID NO: 2180706
uauggaauuaccuuggagc

SEQ ID NO: 2180708 - RNA, 19 nt, Artificial Sequence
  Description of Artificial Sequence: Synthetic oligonucleotide
  Sense strand starting at position 978 of SEQ ID NO: 1883261
cucugaaugccuuacagaa

SEQ ID NO: 2180709 - RNA, 19 nt, Artificial Sequence
  Description of Artificial Sequence: Synthetic oligonucleotide
  Antisense strand to SEQ ID NO: 2180708
uucuguaaggcauucagag

SEQ ID NO: 2180710 - RNA, 19 nt, Artificial Sequence
  Description of Artificial Sequence: Synthetic oligonucleotide
  Sense strand starting at position 1143 of SEQ ID NO: 1883261
ugucucugccuagaauacu

SEQ ID NO: 2180711 - RNA, 19 nt, Artificial Sequence
  Description of Artificial Sequence: Synthetic oligonucleotide
  Antisense strand to SEQ ID NO: 2180710
aguauucuaggcagagaca

SEQ ID NO: 2180712 - RNA, 19 nt, Artificial Sequence
  Description of Artificial Sequence: Synthetic oligonucleotide
  Sense strand starting at position 1793 of SEQ ID NO: 1883261
ccgagauuucggcagcgug

SEQ ID NO: 2180713 - RNA, 19 nt, Artificial Sequence
  Description of Artificial Sequence: Synthetic oligonucleotide
  Antisense strand to SEQ ID NO: 2180712
cacgcugccgaaaucucgg

SEQ ID NO: 2180714 - RNA, 19 nt, Artificial Sequence
  Description of Artificial Sequence: Synthetic oligonucleotide
  Sense strand starting at position 1807 of SEQ ID NO: 1883261
gcgugcugagcuucaucaa

SEQ ID NO: 2180715 - RNA, 19 nt, Artificial Sequence
  Description of Artificial Sequence: Synthetic oligonucleotide
  Antisense strand to SEQ ID NO: 2180714
uugaugaagcucagcacgc

SEQ ID NO: 2180716 - RNA, 19 nt, Artificial Sequence
  Description of Artificial Sequence: Synthetic oligonucleotide
  Sense strand starting at position 1895 of SEQ ID NO: 1883261
ccugcuggacuuugaaauc

SEQ ID NO: 2180717 - RNA, 19 nt, Artificial Sequence
  Description of Artificial Sequence: Synthetic oligonucleotide
  Antisense strand to SEQ ID NO: 2180716
gauuucaaaguccagcagg

SEQ ID NO: 2180718 - RNA, 19 nt, Artificial Sequence
  Description of Artificial Sequence: Synthetic oligonucleotide
  Sense strand starting at position 2349 of SEQ ID NO: 1883261
gauguuacauuaguguuga

SEQ ID NO: 2180719 - RNA, 19 nt, Artificial Sequence
  Description of Artificial Sequence: Synthetic oligonucleotide
  Antisense strand to SEQ ID NO: 2180718
ucaacacuaauguaacauc

SEQ ID NO: 2180720 - RNA, 19 nt, Artificial Sequence
  Description of Artificial Sequence: Synthetic oligonucleotide
  Sense strand starting at position 2362 of SEQ ID NO: 1883261
uguugagacucuuuggauc

SEQ ID NO: 2180721 - RNA, 19 nt, Artificial Sequence
  Description of Artificial Sequence: Synthetic oligonucleotide
  Antisense strand to SEQ ID NO: 2180720
gauccaaagagucucaaca

SEQ ID NO: 2180722 - RNA, 19 nt, Artificial Sequence
  Description of Artificial Sequence: Synthetic oligonucleotide
  Sense strand starting at position 3124 of SEQ ID NO: 1883261
gcaggauaccuggguguga

SEQ ID NO: 2180723 - RNA, 19 nt, Artificial Sequence
  Description of Artificial Sequence: Synthetic oligonucleotide
  Antisense strand to SEQ ID NO: 2180722
ucacacccagguauccugc

SEQ ID NO: 2180724 - RNA, 19 nt, Artificial Sequence
  Description of Artificial Sequence: Synthetic oligonucleotide
  Sense strand starting at position 3125 of SEQ ID NO: 1883261
caggauaccugggugugau

SEQ ID NO: 2180725 - RNA, 19 nt, Artificial Sequence
  Description of Artificial Sequence: Synthetic oligonucleotide
  Antisense strand to SEQ ID NO: 2180724
aucacacccagguauccug

SEQ ID NO: 2180726 - RNA, 19 nt, Artificial Sequence
  Description of Artificial Sequence: Synthetic oligonucleotide
  Sense strand starting at position 3126 of SEQ ID NO: 1883261
aggauaccugggugugauu

SEQ ID NO: 2180727 - RNA, 19 nt, Artificial Sequence
  Description of Artificial Sequence: Synthetic oligonucleotide
  Antisense strand to SEQ ID NO: 2180726
aaucacacccagguauccu

SEQ ID NO: 2180728 - RNA, 19 nt, Artificial Sequence
  Description of Artificial Sequence: Synthetic oligonucleotide
  Sense strand starting at position 3162 of SEQ ID NO: 1883261
gagugaguguacuugaaua

SEQ ID NO: 2180729 - RNA, 19 nt, Artificial Sequence
  Description of Artificial Sequence: Synthetic oligonucleotide
  Antisense strand to SEQ ID NO: 2180728
uauucaaguacacucacuc

SEQ ID NO: 2180730 - RNA, 19 nt, Artificial Sequence
  Description of Artificial Sequence: Synthetic oligonucleotide
  Sense strand starting at position 3164 of SEQ ID NO: 1883261
gugaguguacuugaauaac

SEQ ID NO: 2180731 - RNA, 19 nt, Artificial Sequence
  Description of Artificial Sequence: Synthetic oligonucleotide
  Antisense strand to SEQ ID NO: 2180730
guuauucaaguacacucac

SEQ ID NO: 2180732 - RNA, 19 nt, Artificial Sequence
  Description of Artificial Sequence: Synthetic oligonucleotide
  Sense strand starting at position 3233 of SEQ ID NO: 1883261
accugugugcauuacucaa

SEQ ID NO: 2180733 - RNA, 19 nt, Artificial Sequence
  Description of Artificial Sequence: Synthetic oligonucleotide
  Antisense strand to SEQ ID NO: 2180732
uugaguaaugcacacaggu

SEQ ID NO: 2180734 - RNA, 19 nt, Artificial Sequence
  Description of Artificial Sequence: Synthetic oligonucleotide
  Sense strand starting at position 3278 of SEQ ID NO: 1883261
gugcuuucucccgaagaag

SEQ ID NO: 2180735 - RNA, 19 nt, Artificial Sequence
  Description of Artificial Sequence: Synthetic oligonucleotide
  Antisense strand to SEQ ID NO: 2180734
cuucuucgggagaaagcac

SEQ ID NO: 2180736 - RNA, 19 nt, Artificial Sequence
  Description of Artificial Sequence: Synthetic oligonucleotide
  Sense strand starting at position 3725 of SEQ ID NO: 1883261
ggugauggucuugaauagu

SEQ ID NO: 2180737 - RNA, 19 nt, Artificial Sequence
  Description of Artificial Sequence: Synthetic oligonucleotide
  Antisense strand to SEQ ID NO: 2180736
acuauucaagaccaucacc

SEQ ID NO: 2180738 - RNA, 19 nt, Artificial Sequence
  Description of Artificial Sequence: Synthetic oligonucleotide
  Sense strand starting at position 3728 of SEQ ID NO: 1883261
gauggucuugaauaguuua

SEQ ID NO: 2180739 - RNA, 19 nt, Artificial Sequence
  Description of Artificial Sequence: Synthetic oligonucleotide
  Antisense strand to SEQ ID NO: 2180738
uaaacuauucaagaccauc

SEQ ID NO: 2180740 - RNA, 19 nt, Artificial Sequence
  Description of Artificial Sequence: Synthetic oligonucleotide
  Sense strand starting at position 3731 of SEQ ID NO: 1883261
ggucuugaauaguuuaggu

SEQ ID NO: 2180741 - RNA, 19 nt, Artificial Sequence
  Description of Artificial Sequence: Synthetic oligonucleotide
  Antisense strand to SEQ ID NO: 2180740
accuaaacuauucaagacc

SEQ ID NO: 2180742 - RNA, 19 nt, Artificial Sequence
  Description of Artificial Sequence: Synthetic oligonucleotide
  Sense strand starting at position 3736 of SEQ ID NO: 1883261
ugaauaguuuagguagguu

SEQ ID NO: 2180743 - RNA, 19 nt, Artificial Sequence
  Description of Artificial Sequence: Synthetic oligonucleotide
  Antisense strand to SEQ ID NO: 2180742
aaccuaccuaaacuauuca

SEQ ID NO: 2180744 - RNA, 19 nt, Artificial Sequence
  Description of Artificial Sequence: Synthetic oligonucleotide
  Sense strand starting at position 3739 of SEQ ID NO: 1883261
auaguuuagguagguuauu

SEQ ID NO: 2180745 - RNA, 19 nt, Artificial Sequence
  Description of Artificial Sequence: Synthetic oligonucleotide
  Antisense strand to SEQ ID NO: 2180744
aauaaccuaccuaaacuau

SEQ ID NO: 2180746 - RNA, 19 nt, Artificial Sequence
  Description of Artificial Sequence: Synthetic oligonucleotide
  Sense strand starting at position 3744 of SEQ ID NO: 1883261
uuagguagguuauugaaag

SEQ ID NO: 2180747 - RNA, 19 nt, Artificial Sequence
  Description of Artificial Sequence: Synthetic oligonucleotide
  Antisense strand to SEQ ID NO: 2180746
cuuucaauaaccuaccuaa

SEQ ID NO: 2180748 - RNA, 19 nt, Artificial Sequence
  Description of Artificial Sequence: Synthetic oligonucleotide
  Sense strand starting at position 3928 of SEQ ID NO: 1883261
cauguauguggacacgauu

SEQ ID NO: 2180749 - RNA, 19 nt, Artificial Sequence
  Description of Artificial Sequence: Synthetic oligonucleotide
  Antisense strand to SEQ ID NO: 2180748
aaucguguccacauacaug

SEQ ID NO: 2180750 - RNA, 19 nt, Artificial Sequence
  Description of Artificial Sequence: Synthetic oligonucleotide
  Sense strand starting at position 3931 of SEQ ID NO: 1883261
guauguggacacgauuaaa

SEQ ID NO: 2180751 - RNA, 19 nt, Artificial Sequence
  Description of Artificial Sequence: Synthetic oligonucleotide
  Antisense strand to SEQ ID NO: 2180750
uuuaaucguguccacauac

SEQ ID NO: 2180752 - RNA, 19 nt, Artificial Sequence
  Description of Artificial Sequence: Synthetic oligonucleotide
  Sense strand starting at position 3968 of SEQ ID NO: 1883261
cuccauuguggguagggaa

SEQ ID NO: 2180753 - RNA, 19 nt, Artificial Sequence
  Description of Artificial Sequence: Synthetic oligonucleotide
  Antisense strand to SEQ ID NO: 2180752
uucccuacccacaauggag

SEQ ID NO: 2180754 - RNA, 19 nt, Artificial Sequence
  Description of Artificial Sequence: Synthetic oligonucleotide
  Sense strand starting at position 42 of SEQ ID NO: 1883262
uuccuuucucauugaagga

SEQ ID NO: 2180755 - RNA, 19 nt, Artificial Sequence
  Description of Artificial Sequence: Synthetic oligonucleotide
  Antisense strand to SEQ ID NO: 2180754
uccuucaaugagaaaggaa

SEQ ID NO: 2180756 - RNA, 19 nt, Artificial Sequence
  Description of Artificial Sequence: Synthetic oligonucleotide
  Sense strand starting at position 46 of SEQ ID NO: 1883262
uuucucauugaaggauuaa

SEQ ID NO: 2180757 - RNA, 19 nt, Artificial Sequence
  Description of Artificial Sequence: Synthetic oligonucleotide
  Antisense strand to SEQ ID NO: 2180756
uuaauccuucaaugagaaa

SEQ ID NO: 2180758 - RNA, 19 nt, Artificial Sequence
  Description of Artificial Sequence: Synthetic oligonucleotide
  Sense strand starting at position 76 of SEQ ID NO: 1883262
uaaccacagucguuaagaa

SEQ ID NO: 2180759 - RNA, 19 nt, Artificial Sequence
  Description of Artificial Sequence: Synthetic oligonucleotide
  Antisense strand to SEQ ID NO: 2180758
uucuuaacgacugugguua

SEQ ID NO: 2180760 - RNA, 19 nt, Artificial Sequence
  Description of Artificial Sequence: Synthetic oligonucleotide
  Sense strand starting at position 118 of SEQ ID NO: 1883262
aagugcagacuguauuaaa

SEQ ID NO: 2180761 - RNA, 19 nt, Artificial Sequence
  Description of Artificial Sequence: Synthetic oligonucleotide
  Antisense strand to SEQ ID NO: 2180760
uuuaauacagucugcacuu

SEQ ID NO: 2180762 - RNA, 19 nt, Artificial Sequence
  Description of Artificial Sequence: Synthetic oligonucleotide
  Sense strand starting at position 197 of SEQ ID NO: 1883262
acaaaucagucugucucaa

SEQ ID NO: 2180763 - RNA, 19 nt, Artificial Sequence
  Description of Artificial Sequence: Synthetic oligonucleotide
  Antisense strand to SEQ ID NO: 2180762
uugagacagacugauuugu

SEQ ID NO: 2180764 - RNA, 19 nt, Artificial Sequence
  Description of Artificial Sequence: Synthetic oligonucleotide
  Sense strand starting at position 228 of SEQ ID NO: 1883262
ucagaucugcaguacugaa

SEQ ID NO: 2180765 - RNA, 19 nt, Artificial Sequence
  Description of Artificial Sequence: Synthetic oligonucleotide
  Antisense strand to SEQ ID NO: 2180764
uucaguacugcagaucuga

SEQ ID NO: 2180766 - RNA, 19 nt, Artificial Sequence
  Description of Artificial Sequence: Synthetic oligonucleotide
  Sense strand starting at position 248 of SEQ ID NO: 1883262
cagagugcaucauucugaa

SEQ ID NO: 2180767 - RNA, 19 nt, Artificial Sequence
  Description of Artificial Sequence: Synthetic oligonucleotide
  Antisense strand to SEQ ID NO: 2180766
uucagaaugaugcacucug

SEQ ID NO: 2180768 - RNA, 19 nt, Artificial Sequence
  Description of Artificial Sequence: Synthetic oligonucleotide
  Sense strand starting at position 318 of SEQ ID NO: 1883262
uugagauugcaacauucua

SEQ ID NO: 2180769 - RNA, 19 nt, Artificial Sequence
  Description of Artificial Sequence: Synthetic oligonucleotide
  Antisense strand to SEQ ID NO: 2180768
uagaauguugcaaucucaa

SEQ ID NO: 2180770 - RNA, 19 nt, Artificial Sequence
  Description of Artificial Sequence: Synthetic oligonucleotide
  Sense strand starting at position 581 of SEQ ID NO: 1883262
auacguaggaagugaucua

SEQ ID NO: 2180771 - RNA, 19 nt, Artificial Sequence
  Description of Artificial Sequence: Synthetic oligonucleotide
  Antisense strand to SEQ ID NO: 2180770
uagaucacuuccuacguau

SEQ ID NO: 2180772 - RNA, 19 nt, Artificial Sequence
  Description of Artificial Sequence: Synthetic oligonucleotide
  Sense strand starting at position 582 of SEQ ID NO: 1883262
uacguaggaagugaucuau

SEQ ID NO: 2180773 - RNA, 19 nt, Artificial Sequence
  Description of Artificial Sequence: Synthetic oligonucleotide
  Antisense strand to SEQ ID NO: 2180772
auagaucacuuccuacgua

SEQ ID NO: 2180774 - RNA, 19 nt, Artificial Sequence
  Description of Artificial Sequence: Synthetic oligonucleotide
  Sense strand starting at position 628 of SEQ ID NO: 1883262
uuacauuucucugauagga

SEQ ID NO: 2180775 - RNA, 19 nt, Artificial Sequence
  Description of Artificial Sequence: Synthetic oligonucleotide
  Antisense strand to SEQ ID NO: 2180774
uccuaucagagaaauguaa

SEQ ID NO: 2180776 - RNA, 19 nt, Artificial Sequence
  Description of Artificial Sequence: Synthetic oligonucleotide
  Sense strand starting at position 630 of SEQ ID NO: 1883262
acauuucucugauaggaug

SEQ ID NO: 2180777 - RNA, 19 nt, Artificial Sequence
  Description of Artificial Sequence: Synthetic oligonucleotide
  Antisense strand to SEQ ID NO: 2180776
cauccuaucagagaaaugu

SEQ ID NO: 2180778 - RNA, 19 nt, Artificial Sequence
  Description of Artificial Sequence: Synthetic oligonucleotide
  Sense strand starting at position 801 of SEQ ID NO: 1883262
guacaauauuauccuuagu

SEQ ID NO: 2180779 - RNA, 19 nt, Artificial Sequence
  Description of Artificial Sequence: Synthetic oligonucleotide
  Antisense strand to SEQ ID NO: 2180778
acuaaggauaauauuguac

SEQ ID NO: 2180780 - RNA, 19 nt, Artificial Sequence
  Description of Artificial Sequence: Synthetic oligonucleotide
  Sense strand starting at position 809 of SEQ ID NO: 1883262
uuauccuuagugcaaagaa

SEQ ID NO: 2180781 - RNA, 19 nt, Artificial Sequence
  Description of Artificial Sequence: Synthetic oligonucleotide
  Antisense strand to SEQ ID NO: 2180780
uucuuugcacuaaggauaa

SEQ ID NO: 2180782 - RNA, 19 nt, Artificial Sequence
  Description of Artificial Sequence: Synthetic oligonucleotide
  Sense strand starting at position 866 of SEQ ID NO: 1883262
gcauguuauugauccaagg

SEQ ID NO: 2180783 - RNA, 19 nt, Artificial Sequence
  Description of Artificial Sequence: Synthetic oligonucleotide
  Antisense strand to SEQ ID NO: 2180782
ccuuggaucaauaacaugc

SEQ ID NO: 2180784 - RNA, 19 nt, Artificial Sequence
  Description of Artificial Sequence: Synthetic oligonucleotide
  Sense strand starting at position 988 of SEQ ID NO: 1883262
ggaaaugucuagguauaac

SEQ ID NO: 2180785 - RNA, 19 nt, Artificial Sequence
  Description of Artificial Sequence: Synthetic oligonucleotide
  Antisense strand to SEQ ID NO: 2180784
guuauaccuagacauuucc

SEQ ID NO: 2180786 - RNA, 19 nt, Artificial Sequence
  Description of Artificial Sequence: Synthetic oligonucleotide
  Sense strand starting at position 1207 of SEQ ID NO: 1883262
ggguguggaagauguagua

SEQ ID NO: 2180787 - RNA, 19 nt, Artificial Sequence
  Description of Artificial Sequence: Synthetic oligonucleotide
  Antisense strand to SEQ ID NO: 2180786
uacuacaucuuccacaccc

SEQ ID NO: 2180788 - RNA, 19 nt, Artificial Sequence
  Description of Artificial Sequence: Synthetic oligonucleotide
  Sense strand starting at position 1370 of SEQ ID NO: 1883262
gaaacuauuagcgguggaa

SEQ ID NO: 2180789 - RNA, 19 nt, Artificial Sequence
  Description of Artificial Sequence: Synthetic oligonucleotide
  Antisense strand to SEQ ID NO: 2180788
uuccaccgcuaauaguuuc

SEQ ID NO: 2180790 - RNA, 19 nt, Artificial Sequence
  Description of Artificial Sequence: Synthetic oligonucleotide
  Sense strand starting at position 1372 of SEQ ID NO: 1883262
aacuauuagcgguggaaga

SEQ ID NO: 2180791 - RNA, 19 nt, Artificial Sequence
  Description of Artificial Sequence: Synthetic oligonucleotide
  Antisense strand to SEQ ID NO: 2180790
ucuuccaccgcuaauaguu

SEQ ID NO: 2180792 - RNA, 19 nt, Artificial Sequence
  Description of Artificial Sequence: Synthetic oligonucleotide
  Sense strand starting at position 1993 of SEQ ID NO: 1883262
augcgcaaugcuuuccuua

SEQ ID NO: 2180793 - RNA, 19 nt, Artificial Sequence
  Description of Artificial Sequence: Synthetic oligonucleotide
  Antisense strand to SEQ ID NO: 2180792
uaaggaaagcauugcgcau

SEQ ID NO: 2180794 - RNA, 19 nt, Artificial Sequence
  Description of Artificial Sequence: Synthetic oligonucleotide
  Sense strand starting at position 2035 of SEQ ID NO: 1883262
gugcguuuagggaguuaca

SEQ ID NO: 2180795 - RNA, 19 nt, Artificial Sequence
  Description of Artificial Sequence: Synthetic oligonucleotide
  Antisense strand to SEQ ID NO: 2180794
uguaacucccuaaacgcac

SEQ ID NO: 2180796 - RNA, 19 nt, Artificial Sequence
  Description of Artificial Sequence: Synthetic oligonucleotide
  Sense strand starting at position 2252 of SEQ ID NO: 1883262
gaggcaaugcgauaacugu

SEQ ID NO: 2180797 - RNA, 19 nt, Artificial Sequence
  Description of Artificial Sequence: Synthetic oligonucleotide
  Antisense strand to SEQ ID NO: 2180796
acaguuaucgcauugccuc

SEQ ID NO: 2180798 - RNA, 19 nt, Artificial Sequence
  Description of Artificial Sequence: Synthetic oligonucleotide
  Sense strand starting at position 2258 of SEQ ID NO: 1883262
augcgauaacuguggaacu

SEQ ID NO: 2180799 - RNA, 19 nt, Artificial Sequence
  Description of Artificial Sequence: Synthetic oligonucleotide
  Antisense strand to SEQ ID NO: 2180798
aguuccacaguuaucgcau

SEQ ID NO: 2180800 - RNA, 19 nt, Artificial Sequence
  Description of Artificial Sequence: Synthetic oligonucleotide
  Sense strand starting at position 2260 of SEQ ID NO: 1883262
gcgauaacuguggaacugu

SEQ ID NO: 2180801 - RNA, 19 nt, Artificial Sequence
  Description of Artificial Sequence: Synthetic oligonucleotide
  Antisense strand to SEQ ID NO: 2180800
acaguuccacaguuaucgc

SEQ ID NO: 2180802 - RNA, 19 nt, Artificial Sequence
  Description of Artificial Sequence: Synthetic oligonucleotide
  Sense strand starting at position 2269 of SEQ ID NO: 1883262
guggaacugucauccgaca

SEQ ID NO: 2180803 - RNA, 19 nt, Artificial Sequence
  Description of Artificial Sequence: Synthetic oligonucleotide
  Antisense strand to SEQ ID NO: 2180802
ugucggaugacaguuccac

SEQ ID NO: 2180804 - RNA, 19 nt, Artificial Sequence
  Description of Artificial Sequence: Synthetic oligonucleotide
  Sense strand starting at position 2271 of SEQ ID NO: 1883262
ggaacugucauccgacauu

SEQ ID NO: 2180805 - RNA, 19 nt, Artificial Sequence
  Description of Artificial Sequence: Synthetic oligonucleotide
  Antisense strand to SEQ ID NO: 2180804
aaugucggaugacaguucc

SEQ ID NO: 2180806 - RNA, 19 nt, Artificial Sequence
  Description of Artificial Sequence: Synthetic oligonucleotide
  Sense strand starting at position 2474 of SEQ ID NO: 1883262
guuccaguccaacaagacu

SEQ ID NO: 2180807 - RNA, 19 nt, Artificial Sequence
  Description of Artificial Sequence: Synthetic oligonucleotide
  Antisense strand to SEQ ID NO: 2180806
agucuuguuggacuggaac

SEQ ID NO: 2180808 - RNA, 19 nt, Artificial Sequence
  Description of Artificial Sequence: Synthetic oligonucleotide
  Sense strand starting at position 2680 of SEQ ID NO: 1883262
cugggagugccugauuauu

SEQ ID NO: 2180809 - RNA, 19 nt, Artificial Sequence
  Description of Artificial Sequence: Synthetic oligonucleotide
  Antisense strand to SEQ ID NO: 2180808
aauaaucaggcacucccag

SEQ ID NO: 2180810 - RNA, 19 nt, Artificial Sequence
  Description of Artificial Sequence: Synthetic oligonucleotide
  Sense strand starting at position 2685 of SEQ ID NO: 1883262
agugccugauuauuuguaa

SEQ ID NO: 2180811 - RNA, 19 nt, Artificial Sequence
  Description of Artificial Sequence: Synthetic oligonucleotide
  Antisense strand to SEQ ID NO: 2180810
uuacaaauaaucaggcacu

SEQ ID NO: 2180812 - RNA, 19 nt, Artificial Sequence
  Description of Artificial Sequence: Synthetic oligonucleotide
  Sense strand starting at position 2686 of SEQ ID NO: 1883262
gugccugauuauuuguaau

SEQ ID NO: 2180813 - RNA, 19 nt, Artificial Sequence
  Description of Artificial Sequence: Synthetic oligonucleotide
  Antisense strand to SEQ ID NO: 2180812
auuacaaauaaucaggcac

SEQ ID NO: 2180814 - RNA, 19 nt, Artificial Sequence
  Description of Artificial Sequence: Synthetic oligonucleotide
  Sense strand starting at position 2688 of SEQ ID NO: 1883262
gccugauuauuuguaaugu

SEQ ID NO: 2180815 - RNA, 19 nt, Artificial Sequence
  Description of Artificial Sequence: Synthetic oligonucleotide
  Antisense strand to SEQ ID NO: 2180814
acauuacaaauaaucaggc

SEQ ID NO: 2180816 - RNA, 19 nt, Artificial Sequence
  Description of Artificial Sequence: Synthetic oligonucleotide
  Sense strand starting at position 2730 of SEQ ID NO: 1883262
ucggaaggcacagaucuua

SEQ ID NO: 2180817 - RNA, 19 nt, Artificial Sequence
  Description of Artificial Sequence: Synthetic oligonucleotide
  Antisense strand to SEQ ID NO: 2180816
uaagaucugugccuuccga

SEQ ID NO: 2180818 - RNA, 19 nt, Artificial Sequence
  Description of Artificial Sequence: Synthetic oligonucleotide
  Sense strand starting at position 2788 of SEQ ID NO: 1883262
gggucugaugcagagcaaa

SEQ ID NO: 2180819 - RNA, 19 nt, Artificial Sequence
  Description of Artificial Sequence: Synthetic oligonucleotide
  Antisense strand to SEQ ID NO: 2180818
uuugcucugcaucagaccc

SEQ ID NO: 2180820 - RNA, 19 nt, Artificial Sequence
  Description of Artificial Sequence: Synthetic oligonucleotide
  Sense strand starting at position 2827 of SEQ ID NO: 1883262
augaaugagucaucuaacu

SEQ ID NO: 2180821 - RNA, 19 nt, Artificial Sequence
  Description of Artificial Sequence: Synthetic oligonucleotide
  Antisense strand to SEQ ID NO: 2180820
aguuagaugacucauucau

SEQ ID NO: 2180822 - RNA, 19 nt, Artificial Sequence
  Description of Artificial Sequence: Synthetic oligonucleotide
  Sense strand starting at position 2852 of SEQ ID NO: 1883262
uuuacuguugaggaaguga

SEQ ID NO: 2180823 - RNA, 19 nt, Artificial Sequence
  Description of Artificial Sequence: Synthetic oligonucleotide
  Antisense strand to SEQ ID NO: 2180822
ucacuuccucaacaguaaa

SEQ ID NO: 2180824 - RNA, 19 nt, Artificial Sequence
  Description of Artificial Sequence: Synthetic oligonucleotide
  Sense strand starting at position 2876 of SEQ ID NO: 1883262
cagaaaggcuguguugauu

SEQ ID NO: 2180825 - RNA, 19 nt, Artificial Sequence
  Description of Artificial Sequence: Synthetic oligonucleotide
  Antisense strand to SEQ ID NO: 2180824
aaucaacacagccuuucug

SEQ ID NO: 2180826 - RNA, 19 nt, Artificial Sequence
  Description of Artificial Sequence: Synthetic oligonucleotide
  Sense strand starting at position 3373 of SEQ ID NO: 1883262
gcauucguuacgcaauuua

SEQ ID NO: 2180827 - RNA, 19 nt, Artificial Sequence
  Description of Artificial Sequence: Synthetic oligonucleotide
  Antisense strand to SEQ ID NO: 2180826
uaaauugcguaacgaaugc

SEQ ID NO: 2180828 - RNA, 19 nt, Artificial Sequence
  Description of Artificial Sequence: Synthetic oligonucleotide
  Sense strand starting at position 3588 of SEQ ID NO: 1883262
ggguauuaacagugaaaca

SEQ ID NO: 2180829 - RNA, 19 nt, Artificial Sequence
  Description of Artificial Sequence: Synthetic oligonucleotide
  Antisense strand to SEQ ID NO: 2180828
uguuucacuguuaauaccc

SEQ ID NO: 2180830 - RNA, 19 nt, Artificial Sequence
  Description of Artificial Sequence: Synthetic oligonucleotide
  Sense strand starting at position 3724 of SEQ ID NO: 1883262
gggccaauguuuccugaug

SEQ ID NO: 2180831 - RNA, 19 nt, Artificial Sequence
  Description of Artificial Sequence: Synthetic oligonucleotide
  Antisense strand to SEQ ID NO: 2180830
caucaggaaacauuggccc

SEQ ID NO: 2180832 - RNA, 19 nt, Artificial Sequence
  Description of Artificial Sequence: Synthetic oligonucleotide
  Sense strand starting at position 3866 of SEQ ID NO: 1883262
ucagauuaccuccggaaac

SEQ ID NO: 2180833 - RNA, 19 nt, Artificial Sequence
  Description of Artificial Sequence: Synthetic oligonucleotide
  Antisense strand to SEQ ID NO: 2180832
guuuccggagguaaucuga

SEQ ID NO: 2180834 - RNA, 19 nt, Artificial Sequence
  Description of Artificial Sequence: Synthetic oligonucleotide
  Sense strand starting at position 47 of SEQ ID NO: 1883263
ugggucuuucuacagucau

SEQ ID NO: 2180835 - RNA, 19 nt, Artificial Sequence
  Description of Artificial Sequence: Synthetic oligonucleotide
  Antisense strand to SEQ ID NO: 2180834
augacuguagaaagaccca

SEQ ID NO: 2180836 - RNA, 19 nt, Artificial Sequence
  Description of Artificial Sequence: Synthetic oligonucleotide
  Sense strand starting at position 77 of SEQ ID NO: 1883263
uuugccugccuagaauauu

SEQ ID NO: 2180837 - RNA, 19 nt, Artificial Sequence
  Description of Artificial Sequence: Synthetic oligonucleotide
  Antisense strand to SEQ ID NO: 2180836
aauauucuaggcaggcaaa

SEQ ID NO: 2180838 - RNA, 19 nt, Artificial Sequence
  Description of Artificial Sequence: Synthetic oligonucleotide
  Sense strand starting at position 80 of SEQ ID NO: 1883263
gccugccuagaauauuauu

SEQ ID NO: 2180839 - RNA, 19 nt, Artificial Sequence
  Description of Artificial Sequence: Synthetic oligonucleotide
  Antisense strand to SEQ ID NO: 2180838
aauaauauucuaggcaggc

SEQ ID NO: 2180840 - RNA, 19 nt, Artificial Sequence
  Description of Artificial Sequence: Synthetic oligonucleotide
  Sense strand starting at position 98 of SEQ ID NO: 1883263
uugucaugccaucauauuc

SEQ ID NO: 2180841 - RNA, 19 nt, Artificial Sequence
  Description of Artificial Sequence: Synthetic oligonucleotide
  Antisense strand to SEQ ID NO: 2180840
gaauaugauggcaugacaa

SEQ ID NO: 2180842 - RNA, 19 nt, Artificial Sequence
  Description of Artificial Sequence: Synthetic oligonucleotide
  Sense strand starting at position 162 of SEQ ID NO: 1883263
uucugaauacuucgaaauu

SEQ ID NO: 2180843 - RNA, 19 nt, Artificial Sequence
  Description of Artificial Sequence: Synthetic oligonucleotide
  Antisense strand to SEQ ID NO: 2180842
aauuucgaaguauucagaa

SEQ ID NO: 2180844 - RNA, 19 nt, Artificial Sequence
  Description of Artificial Sequence: Synthetic oligonucleotide
  Sense strand starting at position 332 of SEQ ID NO: 1883263
uuaauaguaugucugaaug

SEQ ID NO: 2180845 - RNA, 19 nt, Artificial Sequence
  Description of Artificial Sequence: Synthetic oligonucleotide
  Antisense strand to SEQ ID NO: 2180844
cauucagacauacuauuaa

SEQ ID NO: 2180846 - RNA, 19 nt, Artificial Sequence
  Description of Artificial Sequence: Synthetic oligonucleotide
  Sense strand starting at position 996 of SEQ ID NO: 1883263
agugucauacuggagcauu

SEQ ID NO: 2180847 - RNA, 19 nt, Artificial Sequence
  Description of Artificial Sequence: Synthetic oligonucleotide
  Antisense strand to SEQ ID NO: 2180846
aaugcuccaguaugacacu

SEQ ID NO: 2180848 - RNA, 19 nt, Artificial Sequence
  Description of Artificial Sequence: Synthetic oligonucleotide
  Sense strand starting at position 1097 of SEQ ID NO: 1883263
ugugaagcuacagguuaau

SEQ ID NO: 2180849 - RNA, 19 nt, Artificial Sequence
  Description of Artificial Sequence: Synthetic oligonucleotide
  Antisense strand to SEQ ID NO: 2180848
auuaaccuguagcuucaca

SEQ ID NO: 2180850 - RNA, 19 nt, Artificial Sequence
  Description of Artificial Sequence: Synthetic oligonucleotide
  Sense strand starting at position 1106 of SEQ ID NO: 1883263
acagguuaaucugucaaua

SEQ ID NO: 2180851 - RNA, 19 nt, Artificial Sequence
  Description of Artificial Sequence: Synthetic oligonucleotide
  Antisense strand to SEQ ID NO: 2180850
uauugacagauuaaccugu

SEQ ID NO: 2180852 - RNA, 19 nt, Artificial Sequence
  Description of Artificial Sequence: Synthetic oligonucleotide
  Sense strand starting at position 1217 of SEQ ID NO: 1883263
uuuggugucugauuuagca

SEQ ID NO: 2180853 - RNA, 19 nt, Artificial Sequence
  Description of Artificial Sequence: Synthetic oligonucleotide
  Antisense strand to SEQ ID NO: 2180852
ugcuaaaucagacaccaaa

SEQ ID NO: 2180854 - RNA, 19 nt, Artificial Sequence
  Description of Artificial Sequence: Synthetic oligonucleotide
  Sense strand starting at position 1221 of SEQ ID NO: 1883263
gugucugauuuagcaauca

SEQ ID NO: 2180855 - RNA, 19 nt, Artificial Sequence
  Description of Artificial Sequence: Synthetic oligonucleotide
  Antisense strand to SEQ ID NO: 2180854
ugauugcuaaaucagacac

SEQ ID NO: 2180856 - RNA, 19 nt, Artificial Sequence
  Description of Artificial Sequence: Synthetic oligonucleotide
  Sense strand starting at position 1246 of SEQ ID NO: 1883263
aguaaucugucuuccauug

SEQ ID NO: 2180857 - RNA, 19 nt, Artificial Sequence
  Description of Artificial Sequence: Synthetic oligonucleotide
  Antisense strand to SEQ ID NO: 2180856
caauggaagacagauuacu

SEQ ID NO: 2180858 - RNA, 19 nt, Artificial Sequence
  Description of Artificial Sequence: Synthetic oligonucleotide
  Sense strand starting at position 1251 of SEQ ID NO: 1883263
ucugucuuccauugacuau

SEQ ID NO: 2180859 - RNA, 19 nt, Artificial Sequence
  Description of Artificial Sequence: Synthetic oligonucleotide
  Antisense strand to SEQ ID NO: 2180858
auagucaauggaagacaga

SEQ ID NO: 2180860 - RNA, 19 nt, Artificial Sequence
  Description of Artificial Sequence: Synthetic oligonucleotide
  Sense strand starting at position 1323 of SEQ ID NO: 1883263
uggaguuaaaucugaguua

SEQ ID NO: 2180861 - RNA, 19 nt, Artificial Sequence
  Description of Artificial Sequence: Synthetic oligonucleotide
  Antisense strand to SEQ ID NO: 2180860
uaacucagauuuaacucca

SEQ ID NO: 2180862 - RNA, 19 nt, Artificial Sequence
  Description of Artificial Sequence: Synthetic oligonucleotide
  Sense strand starting at position 1352 of SEQ ID NO: 1883263
cacuaugauuuguaugaga

SEQ ID NO: 2180863 - RNA, 19 nt, Artificial Sequence
  Description of Artificial Sequence: Synthetic oligonucleotide
  Antisense strand to SEQ ID NO: 2180862
ucucauacaaaucauagug

SEQ ID NO: 2180864 - RNA, 19 nt, Artificial Sequence
  Description of Artificial Sequence: Synthetic oligonucleotide
  Sense strand starting at position 1355 of SEQ ID NO: 1883263
uaugauuuguaugagaguc

SEQ ID NO: 2180865 - RNA, 19 nt, Artificial Sequence
  Description of Artificial Sequence: Synthetic oligonucleotide
  Antisense strand to SEQ ID NO: 2180864
gacucucauacaaaucaua

SEQ ID NO: 2180866 - RNA, 19 nt, Artificial Sequence
  Description of Artificial Sequence: Synthetic oligonucleotide
  Sense strand starting at position 1368 of SEQ ID NO: 1883263
agagucauaucuuuaacug

SEQ ID NO: 2180867 - RNA, 19 nt, Artificial Sequence
  Description of Artificial Sequence: Synthetic oligonucleotide
  Antisense strand to SEQ ID NO: 2180866
caguuaaagauaugacucu

SEQ ID NO: 2180868 - RNA, 19 nt, Artificial Sequence
  Description of Artificial Sequence: Synthetic oligonucleotide
  Sense strand starting at position 1591 of SEQ ID NO: 1883263
uuuguaaggaaaugaguau

SEQ ID NO: 2180869 - RNA, 19 nt, Artificial Sequence
  Description of Artificial Sequence: Synthetic oligonucleotide
  Antisense strand to SEQ ID NO: 2180868
auacucauuuccuuacaaa

SEQ ID NO: 2180870 - RNA, 19 nt, Artificial Sequence
  Description of Artificial Sequence: Synthetic oligonucleotide
  Sense strand starting at position 1614 of SEQ ID NO: 1883263
ggaaauagacccuguaacu

SEQ ID NO: 2180871 - RNA, 19 nt, Artificial Sequence
  Description of Artificial Sequence: Synthetic oligonucleotide
  Antisense strand to SEQ ID NO: 2180870
aguuacagggucuauuucc

SEQ ID NO: 2180872 - RNA, 19 nt, Artificial Sequence
  Description of Artificial Sequence: Synthetic oligonucleotide
  Sense strand starting at position 1645 of SEQ ID NO: 1883263
gagcuuaguguggauguaa

SEQ ID NO: 2180873 - RNA, 19 nt, Artificial Sequence
  Description of Artificial Sequence: Synthetic oligonucleotide
  Antisense strand to SEQ ID NO: 2180872
uuacauccacacuaagcuc

SEQ ID NO: 2180874 - RNA, 19 nt, Artificial Sequence
  Description of Artificial Sequence: Synthetic oligonucleotide
  Sense strand starting at position 1799 of SEQ ID NO: 1883263
agggaacccuccuuacauu

SEQ ID NO: 2180875 - RNA, 19 nt, Artificial Sequence
  Description of Artificial Sequence: Synthetic oligonucleotide
  Antisense strand to SEQ ID NO: 2180874
aauguaaggaggguucccu

SEQ ID NO: 2180876 - RNA, 19 nt, Artificial Sequence
  Description of Artificial Sequence: Synthetic oligonucleotide
  Sense strand starting at position 1996 of SEQ ID NO: 1883263
cuguaugucccaggaggau

SEQ ID NO: 2180877 - RNA, 19 nt, Artificial Sequence
  Description of Artificial Sequence: Synthetic oligonucleotide
  Antisense strand to SEQ ID NO: 2180876
auccuccugggacauacag

SEQ ID NO: 2180878 - RNA, 19 nt, Artificial Sequence
  Description of Artificial Sequence: Synthetic oligonucleotide
  Sense strand starting at position 2285 of SEQ ID NO: 1883263
gcugucauagccuugccua

SEQ ID NO: 2180879 - RNA, 19 nt, Artificial Sequence
  Description of Artificial Sequence: Synthetic oligonucleotide
  Antisense strand to SEQ ID NO: 2180878
uaggcaaggcuaugacagc

SEQ ID NO: 2180880 - RNA, 19 nt, Artificial Sequence
  Description of Artificial Sequence: Synthetic oligonucleotide
  Sense strand starting at position 2829 of SEQ ID NO: 1883263
uuaagacaaguuugugaau

SEQ ID NO: 2180881 - RNA, 19 nt, Artificial Sequence
  Description of Artificial Sequence: Synthetic oligonucleotide
  Antisense strand to SEQ ID NO: 2180880
auucacaaacuugucuuaa

SEQ ID NO: 2180882 - RNA, 19 nt, Artificial Sequence
  Description of Artificial Sequence: Synthetic oligonucleotide
  Sense strand starting at position 2979 of SEQ ID NO: 1883263
cgaggaguugggcagauca

SEQ ID NO: 2180883 - RNA, 19 nt, Artificial Sequence
  Description of Artificial Sequence: Synthetic oligonucleotide
  Antisense strand to SEQ ID NO: 2180882
ugaucugcccaacuccucg

SEQ ID NO: 2180884 - RNA, 19 nt, Artificial Sequence
  Description of Artificial Sequence: Synthetic oligonucleotide
  Sense strand starting at position 3111 of SEQ ID NO: 1883263
gaggcuauugcacaagaau

SEQ ID NO: 2180885 - RNA, 19 nt, Artificial Sequence
  Description of Artificial Sequence: Synthetic oligonucleotide
  Antisense strand to SEQ ID NO: 2180884
auucuugugcaauagccuc

SEQ ID NO: 2180886 - RNA, 19 nt, Artificial Sequence
  Description of Artificial Sequence: Synthetic oligonucleotide
  Sense strand starting at position 3386 of SEQ ID NO: 1883263
uggagauacuggcccaauu

SEQ ID NO: 2180887 - RNA, 19 nt, Artificial Sequence
  Description of Artificial Sequence: Synthetic oligonucleotide
  Antisense strand to SEQ ID NO: 2180886
aauugggccaguaucucca

SEQ ID NO: 2180888 - RNA, 19 nt, Artificial Sequence
  Description of Artificial Sequence: Synthetic oligonucleotide
  Sense strand starting at position 3734 of SEQ ID NO: 1883263
cuugaaaccugaguuugua

SEQ ID NO: 2180889 - RNA, 19 nt, Artificial Sequence
  Description of Artificial Sequence: Synthetic oligonucleotide
  Antisense strand to SEQ ID NO: 2180888
uacaaacucagguuucaag

SEQ ID NO: 2180890 - RNA, 19 nt, Artificial Sequence
  Description of Artificial Sequence: Synthetic oligonucleotide
  Sense strand starting at position 3737 of SEQ ID NO: 1883263
gaaaccugaguuuguagga

SEQ ID NO: 2180891 - RNA, 19 nt, Artificial Sequence
  Description of Artificial Sequence: Synthetic oligonucleotide
  Antisense strand to SEQ ID NO: 2180890
uccuacaaacucagguuuc

SEQ ID NO: 2180892 - RNA, 19 nt, Artificial Sequence
  Description of Artificial Sequence: Synthetic oligonucleotide
  Sense strand starting at position 3738 of SEQ ID NO: 1883263
aaaccugaguuuguaggaa

SEQ ID NO: 2180893 - RNA, 19 nt, Artificial Sequence
  Description of Artificial Sequence: Synthetic oligonucleotide
  Antisense strand to SEQ ID NO: 2180892
uuccuacaaacucagguuu

SEQ ID NO: 2180894 - RNA, 19 nt, Artificial Sequence
  Description of Artificial Sequence: Synthetic oligonucleotide
  Sense strand starting at position 3755 of SEQ ID NO: 1883263
aauagaugcucuucgugaa

SEQ ID NO: 2180895 - RNA, 19 nt, Artificial Sequence
  Description of Artificial Sequence: Synthetic oligonucleotide
  Antisense strand to SEQ ID NO: 2180894
uucacgaagagcaucuauu

SEQ ID NO: 2180896 - RNA, 19 nt, Artificial Sequence
  Description of Artificial Sequence: Synthetic oligonucleotide
  Sense strand starting at position 3759 of SEQ ID NO: 1883263
gaugcucuucgugaaauca

SEQ ID NO: 2180897 - RNA, 19 nt, Artificial Sequence
  Description of Artificial Sequence: Synthetic oligonucleotide
  Antisense strand to SEQ ID NO: 2180896
ugauuucacgaagagcauc

SEQ ID NO: 2180898 - RNA, 19 nt, Artificial Sequence
  Description of Artificial Sequence: Synthetic oligonucleotide
  Sense strand starting at position 3804 of SEQ ID NO: 1883263
aagucagugcaugagugaa

SEQ ID NO: 2180899 - RNA, 19 nt, Artificial Sequence
  Description of Artificial Sequence: Synthetic oligonucleotide
  Antisense strand to SEQ ID NO: 2180898
uucacucaugcacugacuu

SEQ ID NO: 2180900 - RNA, 19 nt, Artificial Sequence
  Description of Artificial Sequence: Synthetic oligonucleotide
  Sense strand starting at position 3806 of SEQ ID NO: 1883263
gucagugcaugagugaaga

SEQ ID NO: 2180901 - RNA, 19 nt, Artificial Sequence
  Description of Artificial Sequence: Synthetic oligonucleotide
  Antisense strand to SEQ ID NO: 2180900
ucuucacucaugcacugac

SEQ ID NO: 2180902 - RNA, 19 nt, Artificial Sequence
  Description of Artificial Sequence: Synthetic oligonucleotide
  Sense strand starting at position 3835 of SEQ ID NO: 1883263
auccaagaauugcuaauga

SEQ ID NO: 2180903 - RNA, 19 nt, Artificial Sequence
  Description of Artificial Sequence: Synthetic oligonucleotide
  Antisense strand to SEQ ID NO: 2180902
ucauuagcaauucuuggau

SEQ ID NO: 2180904 - RNA, 19 nt, Artificial Sequence
  Description of Artificial Sequence: Synthetic oligonucleotide
  Sense strand starting at position 3867 of SEQ ID NO: 1883263
ggaagaguacguuagguuu

SEQ ID NO: 2180905 - RNA, 19 nt, Artificial Sequence
  Description of Artificial Sequence: Synthetic oligonucleotide
  Antisense strand to SEQ ID NO: 2180904
aaaccuaacguacucuucc

SEQ ID NO: 2180906 - RNA, 19 nt, Artificial Sequence
  Description of Artificial Sequence: Synthetic oligonucleotide
  Sense strand starting at position 3870 of SEQ ID NO: 1883263
agaguacguuagguuuaag

SEQ ID NO: 2180907 - RNA, 19 nt, Artificial Sequence
  Description of Artificial Sequence: Synthetic oligonucleotide
  Antisense strand to SEQ ID NO: 2180906
cuuaaaccuaacguacucu

SEQ ID NO: 2180908 - RNA, 19 nt, Artificial Sequence
  Description of Artificial Sequence: Synthetic oligonucleotide
  Sense strand starting at position 3878 of SEQ ID NO: 1883263
uuagguuuaaggugauauu

SEQ ID NO: 2180909 - RNA, 19 nt, Artificial Sequence
  Description of Artificial Sequence: Synthetic oligonucleotide
  Antisense strand to SEQ ID NO: 2180908
aauaucaccuuaaaccuaa

SEQ ID NO: 2180910 - RNA, 19 nt, Artificial Sequence
  Description of Artificial Sequence: Synthetic oligonucleotide
  Sense strand starting at position 3888 of SEQ ID NO: 1883263
ggugauauuacaggugaga

SEQ ID NO: 2180911 - RNA, 19 nt, Artificial Sequence
  Description of Artificial Sequence: Synthetic oligonucleotide
  Antisense strand to SEQ ID NO: 2180910
ucucaccuguaauaucacc

SEQ ID NO: 2180912 - RNA, 19 nt, Artificial Sequence
  Description of Artificial Sequence: Synthetic oligonucleotide
  Sense strand starting at position 3890 of SEQ ID NO: 1883263
ugauauuacaggugagagu

SEQ ID NO: 2180913 - RNA, 19 nt, Artificial Sequence
  Description of Artificial Sequence: Synthetic oligonucleotide
  Antisense strand to SEQ ID NO: 2180912
acucucaccuguaauauca

SEQ ID NO: 2180914 - RNA, 19 nt, Artificial Sequence
  Description of Artificial Sequence: Synthetic oligonucleotide
  Sense strand starting at position 413 of SEQ ID NO: 1883264
aauguucugugugcauuua

SEQ ID NO: 2180915 - RNA, 19 nt, Artificial Sequence
  Description of Artificial Sequence: Synthetic oligonucleotide
  Antisense strand to SEQ ID NO: 2180914
uaaaugcacacagaacauu

SEQ ID NO: 2180916 - RNA, 19 nt, Artificial Sequence
  Description of Artificial Sequence: Synthetic oligonucleotide
  Sense strand starting at position 421 of SEQ ID NO: 1883264
gugugcauuuacucauuaa

SEQ ID NO: 2180917 - RNA, 19 nt, Artificial Sequence
  Description of Artificial Sequence: Synthetic oligonucleotide
  Antisense strand to SEQ ID NO: 2180916
uuaaugaguaaaugcacac

SEQ ID NO: 2180918 - RNA, 19 nt, Artificial Sequence
  Description of Artificial Sequence: Synthetic oligonucleotide
  Sense strand starting at position 644 of SEQ ID NO: 1883264
ggucauugccaggaacuuu

SEQ ID NO: 2180919 - RNA, 19 nt, Artificial Sequence
  Description of Artificial Sequence: Synthetic oligonucleotide
  Antisense strand to SEQ ID NO: 2180918
aaaguuccuggcaaugacc

SEQ ID NO: 2180920 - RNA, 19 nt, Artificial Sequence
  Description of Artificial Sequence: Synthetic oligonucleotide
  Sense strand starting at position 658 of SEQ ID NO: 1883264
acuuuaugguuagcuagaa

SEQ ID NO: 2180921 - RNA, 19 nt, Artificial Sequence
  Description of Artificial Sequence: Synthetic oligonucleotide
  Antisense strand to SEQ ID NO: 2180920
uucuagcuaaccauaaagu

SEQ ID NO: 2180922 - RNA, 19 nt, Artificial Sequence
  Description of Artificial Sequence: Synthetic oligonucleotide
  Sense strand starting at position 810 of SEQ ID NO: 1883264
auguuuguggagcaauuga

SEQ ID NO: 2180923 - RNA, 19 nt, Artificial Sequence
  Description of Artificial Sequence: Synthetic oligonucleotide
  Antisense strand to SEQ ID NO: 2180922
ucaauugcuccacaaacau

SEQ ID NO: 2180924 - RNA, 19 nt, Artificial Sequence
  Description of Artificial Sequence: Synthetic oligonucleotide
  Sense strand starting at position 833 of SEQ ID NO: 1883264
aaauaaacaguguggugaa

SEQ ID NO: 2180925 - RNA, 19 nt, Artificial Sequence
  Description of Artificial Sequence: Synthetic oligonucleotide
  Antisense strand to SEQ ID NO: 2180924
uucaccacacuguuuauuu

SEQ ID NO: 2180926 - RNA, 19 nt, Artificial Sequence
  Description of Artificial Sequence: Synthetic oligonucleotide
  Sense strand starting at position 873 of SEQ ID NO: 1883264
agcauauguuuaccuagaa

SEQ ID NO: 2180927 - RNA, 19 nt, Artificial Sequence
  Description of Artificial Sequence: Synthetic oligonucleotide
  Antisense strand to SEQ ID NO: 2180926
uucuagguaaacauaugcu

SEQ ID NO: 2180928 - RNA, 19 nt, Artificial Sequence
  Description of Artificial Sequence: Synthetic oligonucleotide
  Sense strand starting at position 874 of SEQ ID NO: 1883264
gcauauguuuaccuagaag

SEQ ID NO: 2180929 - RNA, 19 nt, Artificial Sequence
  Description of Artificial Sequence: Synthetic oligonucleotide
  Antisense strand to SEQ ID NO: 2180928
cuucuagguaaacauaugc

SEQ ID NO: 2180930 - RNA, 19 nt, Artificial Sequence
  Description of Artificial Sequence: Synthetic oligonucleotide
  Sense strand starting at position 894 of SEQ ID NO: 1883264
ugugaagaauuguuuccag

SEQ ID NO: 2180931 - RNA, 19 nt, Artificial Sequence
  Description of Artificial Sequence: Synthetic oligonucleotide
  Antisense strand to SEQ ID NO: 2180930
cuggaaacaauucuucaca

SEQ ID NO: 2180932 - RNA, 19 nt, Artificial Sequence
  Description of Artificial Sequence: Synthetic oligonucleotide
  Sense strand starting at position 897 of SEQ ID NO: 1883264
gaagaauuguuuccagauu

SEQ ID NO: 2180933 - RNA, 19 nt, Artificial Sequence
  Description of Artificial Sequence: Synthetic oligonucleotide
  Antisense strand to SEQ ID NO: 2180932
aaucuggaaacaauucuuc

SEQ ID NO: 2180934 - RNA, 19 nt, Artificial Sequence
  Description of Artificial Sequence: Synthetic oligonucleotide
  Sense strand starting at position 1062 of SEQ ID NO: 1883264
acauauaagccaugguauu

SEQ ID NO: 2180935 - RNA, 19 nt, Artificial Sequence
  Description of Artificial Sequence: Synthetic oligonucleotide
  Antisense strand to SEQ ID NO: 2180934
aauaccauggcuuauaugu

SEQ ID NO: 2180936 - RNA, 19 nt, Artificial Sequence
  Description of Artificial Sequence: Synthetic oligonucleotide
  Sense strand starting at position 1180 of SEQ ID NO: 1883264
ucaaauacugucugacuga

SEQ ID NO: 2180937 - RNA, 19 nt, Artificial Sequence
  Description of Artificial Sequence: Synthetic oligonucleotide
  Antisense strand to SEQ ID NO: 2180936
ucagucagacaguauuuga

SEQ ID NO: 2180938 - RNA, 19 nt, Artificial Sequence
  Description of Artificial Sequence: Synthetic oligonucleotide
  Sense strand starting at position 1344 of SEQ ID NO: 1883264
uguggaagucauugagauu

SEQ ID NO: 2180939 - RNA, 19 nt, Artificial Sequence
  Description of Artificial Sequence: Synthetic oligonucleotide
  Antisense strand to SEQ ID NO: 2180938
aaucucaaugacuuccaca

SEQ ID NO: 2180940 - RNA, 19 nt, Artificial Sequence
  Description of Artificial Sequence: Synthetic oligonucleotide
  Sense strand starting at position 1347 of SEQ ID NO: 1883264
ggaagucauugagauuuac

SEQ ID NO: 2180941 - RNA, 19 nt, Artificial Sequence
  Description of Artificial Sequence: Synthetic oligonucleotide
  Antisense strand to SEQ ID NO: 2180940
guaaaucucaaugacuucc

SEQ ID NO: 2180942 - RNA, 19 nt, Artificial Sequence
  Description of Artificial Sequence: Synthetic oligonucleotide
  Sense strand starting at position 1489 of SEQ ID NO: 1883264
gucguuuguggagucuuua

SEQ ID NO: 2180943 - RNA, 19 nt, Artificial Sequence
  Description of Artificial Sequence: Synthetic oligonucleotide
  Antisense strand to SEQ ID NO: 2180942
uaaagacuccacaaacgac

SEQ ID NO: 2180944 - RNA, 19 nt, Artificial Sequence
  Description of Artificial Sequence: Synthetic oligonucleotide
  Sense strand starting at position 1626 of SEQ ID NO: 1883264
cugcuaccacgguaagaaa

SEQ ID NO: 2180945 - RNA, 19 nt, Artificial Sequence
  Description of Artificial Sequence: Synthetic oligonucleotide
  Antisense strand to SEQ ID NO: 2180944
uuucuuaccgugguagcag

SEQ ID NO: 2180946 - RNA, 19 nt, Artificial Sequence
  Description of Artificial Sequence: Synthetic oligonucleotide
  Sense strand starting at position 1741 of SEQ ID NO: 1883264
uuugaaaccucaguacaag

SEQ ID NO: 2180947 - RNA, 19 nt, Artificial Sequence
  Description of Artificial Sequence: Synthetic oligonucleotide
  Antisense strand to SEQ ID NO: 2180946
cuuguacugagguuucaaa

SEQ ID NO: 2180948 - RNA, 19 nt, Artificial Sequence
  Description of Artificial Sequence: Synthetic oligonucleotide
  Sense strand starting at position 1776 of SEQ ID NO: 1883264
cguguaagaaccgaucaac

SEQ ID NO: 2180949 - RNA, 19 nt, Artificial Sequence
  Description of Artificial Sequence: Synthetic oligonucleotide
  Antisense strand to SEQ ID NO: 2180948
guugaucgguucuuacacg

SEQ ID NO: 2180950 - RNA, 19 nt, Artificial Sequence
  Description of Artificial Sequence: Synthetic oligonucleotide
  Sense strand starting at position 1824 of SEQ ID NO: 1883264
gaacuacagcguuagauaa

SEQ ID NO: 2180951 - RNA, 19 nt, Artificial Sequence
  Description of Artificial Sequence: Synthetic oligonucleotide
  Antisense strand to SEQ ID NO: 2180950
uuaucuaacgcuguaguuc

SEQ ID NO: 2180952 - RNA, 19 nt, Artificial Sequence
  Description of Artificial Sequence: Synthetic oligonucleotide
  Sense strand starting at position 2067 of SEQ ID NO: 1883264
ccaauaauagcguaauaac

SEQ ID NO: 2180953 - RNA, 19 nt, Artificial Sequence
  Description of Artificial Sequence: Synthetic oligonucleotide
  Antisense strand to SEQ ID NO: 2180952
guuauuacgcuauuauugg

SEQ ID NO: 2180954 - RNA, 19 nt, Artificial Sequence
  Description of Artificial Sequence: Synthetic oligonucleotide
  Sense strand starting at position 2464 of SEQ ID NO: 1883264
ggccgaugugcugccuauu

SEQ ID NO: 2180955 - RNA, 19 nt, Artificial Sequence
  Description of Artificial Sequence: Synthetic oligonucleotide
  Antisense strand to SEQ ID NO: 2180954
aauaggcagcacaucggcc

SEQ ID NO: 2180956 - RNA, 19 nt, Artificial Sequence
  Description of Artificial Sequence: Synthetic oligonucleotide
  Sense strand starting at position 2515 of SEQ ID NO: 1883264
cggguguuccuagaggaug

SEQ ID NO: 2180957 - RNA, 19 nt, Artificial Sequence
  Description of Artificial Sequence: Synthetic oligonucleotide
  Antisense strand to SEQ ID NO: 2180956
cauccucuaggaacacccg

SEQ ID NO: 2180958 - RNA, 19 nt, Artificial Sequence
  Description of Artificial Sequence: Synthetic oligonucleotide
  Sense strand starting at position 2814 of SEQ ID NO: 1883264
cugaaagugacugguagua

SEQ ID NO: 2180959 - RNA, 19 nt, Artificial Sequence
  Description of Artificial Sequence: Synthetic oligonucleotide
  Antisense strand to SEQ ID NO: 2180958
uacuaccagucacuuucag

SEQ ID NO: 2180960 - RNA, 19 nt, Artificial Sequence
  Description of Artificial Sequence: Synthetic oligonucleotide
  Sense strand starting at position 3199 of SEQ ID NO: 1883264
gugacuuaucaaggcuaga

SEQ ID NO: 2180961 - RNA, 19 nt, Artificial Sequence
  Description of Artificial Sequence: Synthetic oligonucleotide
  Antisense strand to SEQ ID NO: 2180960
ucuagccuugauaagucac

SEQ ID NO: 2180962 - RNA, 19 nt, Artificial Sequence
  Description of Artificial Sequence: Synthetic oligonucleotide
  Sense strand starting at position 3204 of SEQ ID NO: 1883264
uuaucaaggcuagacuauu

SEQ ID NO: 2180963 - RNA, 19 nt, Artificial Sequence
  Description of Artificial Sequence: Synthetic oligonucleotide
  Antisense strand to SEQ ID NO: 2180962
aauagucuagccuugauaa

SEQ ID NO: 2180964 - RNA, 19 nt, Artificial Sequence
  Description of Artificial Sequence: Synthetic oligonucleotide
  Sense strand starting at position 3212 of SEQ ID NO: 1883264
gcuagacuauuccucagaa

SEQ ID NO: 2180965 - RNA, 19 nt, Artificial Sequence
  Description of Artificial Sequence: Synthetic oligonucleotide
  Antisense strand to SEQ ID NO: 2180964
uucugaggaauagucuagc

SEQ ID NO: 2180966 - RNA, 19 nt, Artificial Sequence
  Description of Artificial Sequence: Synthetic oligonucleotide
  Sense strand starting at position 3238 of SEQ ID NO: 1883264
ugugaaucagaauacuguu

SEQ ID NO: 2180967 - RNA, 19 nt, Artificial Sequence
  Description of Artificial Sequence: Synthetic oligonucleotide
  Antisense strand to SEQ ID NO: 2180966
aacaguauucugauucaca

SEQ ID NO: 2180968 - RNA, 19 nt, Artificial Sequence
  Description of Artificial Sequence: Synthetic oligonucleotide
  Sense strand starting at position 3331 of SEQ ID NO: 1883264
cgcaucaucccagaaacuu

SEQ ID NO: 2180969 - RNA, 19 nt, Artificial Sequence
  Description of Artificial Sequence: Synthetic oligonucleotide
  Antisense strand to SEQ ID NO: 2180968
aaguuucugggaugaugcg

SEQ ID NO: 2180970 - RNA, 19 nt, Artificial Sequence
  Description of Artificial Sequence: Synthetic oligonucleotide
  Sense strand starting at position 3340 of SEQ ID NO: 1883264
ccagaaacuucgucugaca

SEQ ID NO: 2180971 - RNA, 19 nt, Artificial Sequence
  Description of Artificial Sequence: Synthetic oligonucleotide
  Antisense strand to SEQ ID NO: 2180970
ugucagacgaaguuucugg

SEQ ID NO: 2180972 - RNA, 19 nt, Artificial Sequence
  Description of Artificial Sequence: Synthetic oligonucleotide
  Sense strand starting at position 3398 of SEQ ID NO: 1883264
gacaguugugcacacagaa

SEQ ID NO: 2180973 - RNA, 19 nt, Artificial Sequence
  Description of Artificial Sequence: Synthetic oligonucleotide
  Antisense strand to SEQ ID NO: 2180972
uucugugugcacaacuguc

SEQ ID NO: 2180974 - RNA, 19 nt, Artificial Sequence
  Description of Artificial Sequence: Synthetic oligonucleotide
  Sense strand starting at position 3500 of SEQ ID NO: 1883264
gacaaagugugauucgaua

SEQ ID NO: 2180975 - RNA, 19 nt, Artificial Sequence
  Description of Artificial Sequence: Synthetic oligonucleotide
  Antisense strand to SEQ ID NO: 2180974
uaucgaaucacacuuuguc

SEQ ID NO: 2180976 - RNA, 19 nt, Artificial Sequence
  Description of Artificial Sequence: Synthetic oligonucleotide
  Sense strand starting at position 3513 of SEQ ID NO: 1883264
ucgauacacugaucucaug

SEQ ID NO: 2180977 - RNA, 19 nt, Artificial Sequence
  Description of Artificial Sequence: Synthetic oligonucleotide
  Antisense strand to SEQ ID NO: 2180976
caugagaucaguguaucga

SEQ ID NO: 2180978 - RNA, 19 nt, Artificial Sequence
  Description of Artificial Sequence: Synthetic oligonucleotide
  Sense strand starting at position 3595 of SEQ ID NO: 1883264
cugauacuccaauaggcuu

SEQ ID NO: 2180979 - RNA, 19 nt, Artificial Sequence
  Description of Artificial Sequence: Synthetic oligonucleotide
  Antisense strand to SEQ ID NO: 2180978
aagccuauuggaguaucag

SEQ ID NO: 2180980 - RNA, 19 nt, Artificial Sequence
  Description of Artificial Sequence: Synthetic oligonucleotide
  Sense strand starting at position 3626 of SEQ ID NO: 1883264
cagaguggauucuuuaucu

SEQ ID NO: 2180981 - RNA, 19 nt, Artificial Sequence
  Description of Artificial Sequence: Synthetic oligonucleotide
  Antisense strand to SEQ ID NO: 2180980
agauaaagaauccacucug

SEQ ID NO: 2180982 - RNA, 19 nt, Artificial Sequence
  Description of Artificial Sequence: Synthetic oligonucleotide
  Sense strand starting at position 3630 of SEQ ID NO: 1883264
guggauucuuuaucugaaa

SEQ ID NO: 2180983 - RNA, 19 nt, Artificial Sequence
  Description of Artificial Sequence: Synthetic oligonucleotide
  Antisense strand to SEQ ID NO: 2180982
uuucagauaaagaauccac

SEQ ID NO: 2180984 - RNA, 19 nt, Artificial Sequence
  Description of Artificial Sequence: Synthetic oligonucleotide
  Sense strand starting at position 3631 of SEQ ID NO: 1883264
uggauucuuuaucugaaau

SEQ ID NO: 2180985 - RNA, 19 nt, Artificial Sequence
  Description of Artificial Sequence: Synthetic oligonucleotide
  Antisense strand to SEQ ID NO: 2180984
auuucagauaaagaaucca

SEQ ID NO: 2180986 - RNA, 19 nt, Artificial Sequence
  Description of Artificial Sequence: Synthetic oligonucleotide
  Sense strand starting at position 3717 of SEQ ID NO: 1883264
gcaucugcccaugaaauca

SEQ ID NO: 2180987 - RNA, 19 nt, Artificial Sequence
  Description of Artificial Sequence: Synthetic oligonucleotide
  Antisense strand to SEQ ID NO: 2180986
ugauuucaugggcagaugc

SEQ ID NO: 2180988 - RNA, 19 nt, Artificial Sequence
  Description of Artificial Sequence: Synthetic oligonucleotide
  Sense strand starting at position 3831 of SEQ ID NO: 1883264
gccaucuugccuguuagca

SEQ ID NO: 2180989 - RNA, 19 nt, Artificial Sequence
  Description of Artificial Sequence: Synthetic oligonucleotide
  Antisense strand to SEQ ID NO: 2180988
ugcuaacaggcaagauggc

SEQ ID NO: 2180990 - RNA, 19 nt, Artificial Sequence
  Description of Artificial Sequence: Synthetic oligonucleotide
  Sense strand starting at position 3879 of SEQ ID NO: 1883264
cggcauugauucccuauuu

SEQ ID NO: 2180991 - RNA, 19 nt, Artificial Sequence
  Description of Artificial Sequence: Synthetic oligonucleotide
  Antisense strand to SEQ ID NO: 2180990
aaauagggaaucaaugccg

SEQ ID NO: 2180992 - RNA, 19 nt, Artificial Sequence
  Description of Artificial Sequence: Synthetic oligonucleotide
  Sense strand starting at position 3907 of SEQ ID NO: 1883264
guccuugaauccuuuauga

SEQ ID NO: 2180993 - RNA, 19 nt, Artificial Sequence
  Description of Artificial Sequence: Synthetic oligonucleotide
  Antisense strand to SEQ ID NO: 2180992
ucauaaaggauucaaggac

SEQ ID NO: 2180994 - RNA, 19 nt, Artificial Sequence
  Description of Artificial Sequence: Synthetic oligonucleotide
  Sense strand starting at position 532 of SEQ ID NO: 1883265
aguagaugaucuccauuaa

SEQ ID NO: 2180995 - RNA, 19 nt, Artificial Sequence
  Description of Artificial Sequence: Synthetic oligonucleotide
  Antisense strand to SEQ ID NO: 2180994
uuaauggagaucaucuacu

SEQ ID NO: 2180996 - RNA, 19 nt, Artificial Sequence
  Description of Artificial Sequence: Synthetic oligonucleotide
  Sense strand starting at position 658 of SEQ ID NO: 1883265
gagcguuuccaggagacac

SEQ ID NO: 2180997 - RNA, 19 nt, Artificial Sequence
  Description of Artificial Sequence: Synthetic oligonucleotide
  Antisense strand to SEQ ID NO: 2180996
gugucuccuggaaacgcuc

SEQ ID NO: 2180998 - RNA, 19 nt, Artificial Sequence
  Description of Artificial Sequence: Synthetic oligonucleotide
  Sense strand starting at position 669 of SEQ ID NO: 1883265
ggagacaccucauuguaac

SEQ ID NO: 2180999 - RNA, 19 nt, Artificial Sequence
  Description of Artificial Sequence: Synthetic oligonucleotide
  Antisense strand to SEQ ID NO: 2180998
guuacaaugaggugucucc

SEQ ID NO: 2181000 - RNA, 19 nt, Artificial Sequence
  Description of Artificial Sequence: Synthetic oligonucleotide
  Sense strand starting at position 1117 of SEQ ID NO: 1883265
ucauccagauuccuaguua

SEQ ID NO: 2181001 - RNA, 19 nt, Artificial Sequence
  Description of Artificial Sequence: Synthetic oligonucleotide
  Antisense strand to SEQ ID NO: 2181000
uaacuaggaaucuggauga

SEQ ID NO: 2181002 - RNA, 19 nt, Artificial Sequence
  Description of Artificial Sequence: Synthetic oligonucleotide
  Sense strand starting at position 1121 of SEQ ID NO: 1883265
ccagauuccuaguuaaagg

SEQ ID NO: 2181003 - RNA, 19 nt, Artificial Sequence
  Description of Artificial Sequence: Synthetic oligonucleotide
  Antisense strand to SEQ ID NO: 2181002
ccuuuaacuaggaaucugg

SEQ ID NO: 2181004 - RNA, 19 nt, Artificial Sequence
  Description of Artificial Sequence: Synthetic oligonucleotide
  Sense strand starting at position 1250 of SEQ ID NO: 1883265
accugaaguuuacuggaga

SEQ ID NO: 2181005 - RNA, 19 nt, Artificial Sequence
  Description of Artificial Sequence: Synthetic oligonucleotide
  Antisense strand to SEQ ID NO: 2181004
ucuccaguaaacuucaggu

SEQ ID NO: 2181006 - RNA, 19 nt, Artificial Sequence
  Description of Artificial Sequence: Synthetic oligonucleotide
  Sense strand starting at position 1253 of SEQ ID NO: 1883265
ugaaguuuacuggagaguc

SEQ ID NO: 2181007 - RNA, 19 nt, Artificial Sequence
  Description of Artificial Sequence: Synthetic oligonucleotide
  Antisense strand to SEQ ID NO: 2181006
gacucuccaguaaacuuca

SEQ ID NO: 2181008 - RNA, 19 nt, Artificial Sequence
  Description of Artificial Sequence: Synthetic oligonucleotide
  Sense strand starting at position 1462 of SEQ ID NO: 1883265
gugcacugugguggagaaa

SEQ ID NO: 2181009 - RNA, 19 nt, Artificial Sequence
  Description of Artificial Sequence: Synthetic oligonucleotide
  Antisense strand to SEQ ID NO: 2181008
uuucuccaccacagugcac

SEQ ID NO: 2181010 - RNA, 19 nt, Artificial Sequence
  Description of Artificial Sequence: Synthetic oligonucleotide
  Sense strand starting at position 1584 of SEQ ID NO: 1883265
gcagaccuaucuucugaua

SEQ ID NO: 2181011 - RNA, 19 nt, Artificial Sequence
  Description of Artificial Sequence: Synthetic oligonucleotide
  Antisense strand to SEQ ID NO: 2181010
uaucagaagauaggucugc

SEQ ID NO: 2181012 - RNA, 19 nt, Artificial Sequence
  Description of Artificial Sequence: Synthetic oligonucleotide
  Sense strand starting at position 1894 of SEQ ID NO: 1883265
gguaauccacgugagcuua

SEQ ID NO: 2181013 - RNA, 19 nt, Artificial Sequence
  Description of Artificial Sequence: Synthetic oligonucleotide
  Antisense strand to SEQ ID NO: 2181012
uaagcucacguggauuacc

SEQ ID NO: 2181014 - RNA, 19 nt, Artificial Sequence
  Description of Artificial Sequence: Synthetic oligonucleotide
  Sense strand starting at position 1936 of SEQ ID NO: 1883265
gcgggcuuuacucacauca

SEQ ID NO: 2181015 - RNA, 19 nt, Artificial Sequence
  Description of Artificial Sequence: Synthetic oligonucleotide
  Antisense strand to SEQ ID NO: 2181014
ugaugugaguaaagcccgc

SEQ ID NO: 2181016 - RNA, 19 nt, Artificial Sequence
  Description of Artificial Sequence: Synthetic oligonucleotide
  Sense strand starting at position 2189 of SEQ ID NO: 1883265
ccugauucuccuggagucu

SEQ ID NO: 2181017 - RNA, 19 nt, Artificial Sequence
  Description of Artificial Sequence: Synthetic oligonucleotide
  Antisense strand to SEQ ID NO: 2181016
agacuccaggagaaucagg

SEQ ID NO: 2181018 - RNA, 19 nt, Artificial Sequence
  Description of Artificial Sequence: Synthetic oligonucleotide
  Sense strand starting at position 2687 of SEQ ID NO: 1883265
cuguaaucacauuguccaa

SEQ ID NO: 2181019 - RNA, 19 nt, Artificial Sequence
  Description of Artificial Sequence: Synthetic oligonucleotide
  Antisense strand to SEQ ID NO: 2181018
uuggacaaugugauuacag

SEQ ID NO: 2181020 - RNA, 19 nt, Artificial Sequence
  Description of Artificial Sequence: Synthetic oligonucleotide
  Sense strand starting at position 2689 of SEQ ID NO: 1883265
guaaucacauuguccaaga

SEQ ID NO: 2181021 - RNA, 19 nt, Artificial Sequence
  Description of Artificial Sequence: Synthetic oligonucleotide
  Antisense strand to SEQ ID NO: 2181020
ucuuggacaaugugauuac

SEQ ID NO: 2181022 - RNA, 19 nt, Artificial Sequence
  Description of Artificial Sequence: Synthetic oligonucleotide
  Sense strand starting at position 2702 of SEQ ID NO: 1883265
ccaagaugucuuggaccca

SEQ ID NO: 2181023 - RNA, 19 nt, Artificial Sequence
  Description of Artificial Sequence: Synthetic oligonucleotide
  Antisense strand to SEQ ID NO: 2181022
uggguccaagacaucuugg

SEQ ID NO: 2181024 - RNA, 19 nt, Artificial Sequence
  Description of Artificial Sequence: Synthetic oligonucleotide
  Sense strand starting at position 2788 of SEQ ID NO: 1883265
agggcuaauguguaauucu

SEQ ID NO: 2181025 - RNA, 19 nt, Artificial Sequence
  Description of Artificial Sequence: Synthetic oligonucleotide
  Antisense strand to SEQ ID NO: 2181024
agaauuacacauuagcccu

SEQ ID NO: 2181026 - RNA, 19 nt, Artificial Sequence
  Description of Artificial Sequence: Synthetic oligonucleotide
  Sense strand starting at position 2791 of SEQ ID NO: 1883265
gcuaauguguaauucuaag

SEQ ID NO: 2181027 - RNA, 19 nt, Artificial Sequence
  Description of Artificial Sequence: Synthetic oligonucleotide
  Antisense strand to SEQ ID NO: 2181026
cuuagaauuacacauuagc

SEQ ID NO: 2181028 - RNA, 19 nt, Artificial Sequence
  Description of Artificial Sequence: Synthetic oligonucleotide
  Sense strand starting at position 2797 of SEQ ID NO: 1883265
guguaauucuaagugagac

SEQ ID NO: 2181029 - RNA, 19 nt, Artificial Sequence
  Description of Artificial Sequence: Synthetic oligonucleotide
  Antisense strand to SEQ ID NO: 2181028
gucucacuuagaauuacac

SEQ ID NO: 2181030 - RNA, 19 nt, Artificial Sequence
  Description of Artificial Sequence: Synthetic oligonucleotide
  Sense strand starting at position 2862 of SEQ ID NO: 1883265
guuuaccuuugacauuuau

SEQ ID NO: 2181031 - RNA, 19 nt, Artificial Sequence
  Description of Artificial Sequence: Synthetic oligonucleotide
  Antisense strand to SEQ ID NO: 2181030
auaaaugucaaagguaaac

SEQ ID NO: 2181032 - RNA, 19 nt, Artificial Sequence
  Description of Artificial Sequence: Synthetic oligonucleotide
  Sense strand starting at position 2886 of SEQ ID NO: 1883265
cuugguggagucggugaaa

SEQ ID NO: 2181033 - RNA, 19 nt, Artificial Sequence
  Description of Artificial Sequence: Synthetic oligonucleotide
  Antisense strand to SEQ ID NO: 2181032
uuucaccgacuccaccaag

SEQ ID NO: 2181034 - RNA, 19 nt, Artificial Sequence
  Description of Artificial Sequence: Synthetic oligonucleotide
  Sense strand starting at position 3005 of SEQ ID NO: 1883265
cugcuuggcgaguuguaca

SEQ ID NO: 2181035 - RNA, 19 nt, Artificial Sequence
  Description of Artificial Sequence: Synthetic oligonucleotide
  Antisense strand to SEQ ID NO: 2181034
uguacaacucgccaagcag

SEQ ID NO: 2181036 - RNA, 19 nt, Artificial Sequence
  Description of Artificial Sequence: Synthetic oligonucleotide
  Sense strand starting at position 3243 of SEQ ID NO: 1883265
ugauccaguuaucucugua

SEQ ID NO: 2181037 - RNA, 19 nt, Artificial Sequence
  Description of Artificial Sequence: Synthetic oligonucleotide
  Antisense strand to SEQ ID NO: 2181036
uacagagauaacuggauca

SEQ ID NO: 2181038 - RNA, 19 nt, Artificial Sequence
  Description of Artificial Sequence: Synthetic oligonucleotide
  Sense strand starting at position 3247 of SEQ ID NO: 1883265
ccaguuaucucuguaucuu

SEQ ID NO: 2181039 - RNA, 19 nt, Artificial Sequence
  Description of Artificial Sequence: Synthetic oligonucleotide
  Antisense strand to SEQ ID NO: 2181038
aagauacagagauaacugg

SEQ ID NO: 2181040 - RNA, 19 nt, Artificial Sequence
  Description of Artificial Sequence: Synthetic oligonucleotide
  Sense strand starting at position 3373 of SEQ ID NO: 1883265
gagccuagauagcuaagau

SEQ ID NO: 2181041 - RNA, 19 nt, Artificial Sequence
  Description of Artificial Sequence: Synthetic oligonucleotide
  Antisense strand to SEQ ID NO: 2181040
aucuuagcuaucuaggcuc

SEQ ID NO: 2181042 - RNA, 19 nt, Artificial Sequence
  Description of Artificial Sequence: Synthetic oligonucleotide
  Sense strand starting at position 3468 of SEQ ID NO: 1883265
ucauuuaugucuguuccuu

SEQ ID NO: 2181043 - RNA, 19 nt, Artificial Sequence
  Description of Artificial Sequence: Synthetic oligonucleotide
  Antisense strand to SEQ ID NO: 2181042
aaggaacagacauaaauga

SEQ ID NO: 2181044 - RNA, 19 nt, Artificial Sequence
  Description of Artificial Sequence: Synthetic oligonucleotide
  Sense strand starting at position 3541 of SEQ ID NO: 1883265
ggccuuaaaucagugagau

SEQ ID NO: 2181045 - RNA, 19 nt, Artificial Sequence
  Description of Artificial Sequence: Synthetic oligonucleotide
  Antisense strand to SEQ ID NO: 2181044
aucucacugauuuaaggcc

SEQ ID NO: 2181046 - RNA, 19 nt, Artificial Sequence
  Description of Artificial Sequence: Synthetic oligonucleotide
  Sense strand starting at position 3542 of SEQ ID NO: 1883265
gccuuaaaucagugagaug

SEQ ID NO: 2181047 - RNA, 19 nt, Artificial Sequence
  Description of Artificial Sequence: Synthetic oligonucleotide
  Antisense strand to SEQ ID NO: 2181046
caucucacugauuuaaggc

SEQ ID NO: 2181048 - RNA, 19 nt, Artificial Sequence
  Description of Artificial Sequence: Synthetic oligonucleotide
  Sense strand starting at position 3607 of SEQ ID NO: 1883265
augcuauuuguaggcauca

SEQ ID NO: 2181049 - RNA, 19 nt, Artificial Sequence
  Description of Artificial Sequence: Synthetic oligonucleotide
  Antisense strand to SEQ ID NO: 2181048
ugaugccuacaaauagcau

SEQ ID NO: 2181050 - RNA, 19 nt, Artificial Sequence
  Description of Artificial Sequence: Synthetic oligonucleotide
  Sense strand starting at position 3609 of SEQ ID NO: 1883265
gcuauuuguaggcaucagu

SEQ ID NO: 2181051 - RNA, 19 nt, Artificial Sequence
  Description of Artificial Sequence: Synthetic oligonucleotide
  Antisense strand to SEQ ID NO: 2181050
acugaugccuacaaauagc

SEQ ID NO: 2181052 - RNA, 19 nt, Artificial Sequence
  Description of Artificial Sequence: Synthetic oligonucleotide
  Sense strand starting at position 3690 of SEQ ID NO: 1883265
auugucaaauccuugucau

SEQ ID NO: 2181053 - RNA, 19 nt, Artificial Sequence
  Description of Artificial Sequence: Synthetic oligonucleotide
  Antisense strand to SEQ ID NO: 2181052
augacaaggauuugacaau

SEQ ID NO: 2181054 - RNA, 19 nt, Artificial Sequence
  Description of Artificial Sequence: Synthetic oligonucleotide
  Sense strand starting at position 3691 of SEQ ID NO: 1883265
uugucaaauccuugucauu

SEQ ID NO: 2181055 - RNA, 19 nt, Artificial Sequence
  Description of Artificial Sequence: Synthetic oligonucleotide
  Antisense strand to SEQ ID NO: 2181054
aaugacaaggauuugacaa

SEQ ID NO: 2181056 - RNA, 19 nt, Artificial Sequence
  Description of Artificial Sequence: Synthetic oligonucleotide
  Sense strand starting at position 3693 of SEQ ID NO: 1883265
gucaaauccuugucauuau

SEQ ID NO: 2181057 - RNA, 19 nt, Artificial Sequence
  Description of Artificial Sequence: Synthetic oligonucleotide
  Antisense strand to SEQ ID NO: 2181056
auaaugacaaggauuugac

SEQ ID NO: 2181058 - RNA, 19 nt, Artificial Sequence
  Description of Artificial Sequence: Synthetic oligonucleotide
  Sense strand starting at position 3738 of SEQ ID NO: 1883265
uuucguaauuugcuaaaug

SEQ ID NO: 2181059 - RNA, 19 nt, Artificial Sequence
  Description of Artificial Sequence: Synthetic oligonucleotide
  Antisense strand to SEQ ID NO: 2181058
cauuuagcaaauuacgaaa

SEQ ID NO: 2181060 - RNA, 19 nt, Artificial Sequence
  Description of Artificial Sequence: Synthetic oligonucleotide
  Sense strand starting at position 3757 of SEQ ID NO: 1883265
gguauagcaucuucuguaa

SEQ ID NO: 2181061 - RNA, 19 nt, Artificial Sequence
  Description of Artificial Sequence: Synthetic oligonucleotide
  Antisense strand to SEQ ID NO: 2181060
uuacagaagaugcuauacc

SEQ ID NO: 2181062 - RNA, 19 nt, Artificial Sequence
  Description of Artificial Sequence: Synthetic oligonucleotide
  Sense strand starting at position 3772 of SEQ ID NO: 1883265
guaauuagauacuuaggau

SEQ ID NO: 2181063 - RNA, 19 nt, Artificial Sequence
  Description of Artificial Sequence: Synthetic oligonucleotide
  Antisense strand to SEQ ID NO: 2181062
auccuaaguaucuaauuac

SEQ ID NO: 2181064 - RNA, 19 nt, Artificial Sequence
  Description of Artificial Sequence: Synthetic oligonucleotide
  Sense strand starting at position 3779 of SEQ ID NO: 1883265
gauacuuaggauugguguu

SEQ ID NO: 2181065 - RNA, 19 nt, Artificial Sequence
  Description of Artificial Sequence: Synthetic oligonucleotide
  Antisense strand to SEQ ID NO: 2181064
aacaccaauccuaaguauc

SEQ ID NO: 2181066 - RNA, 19 nt, Artificial Sequence
  Description of Artificial Sequence: Synthetic oligonucleotide
  Sense strand starting at position 3826 of SEQ ID NO: 1883265
uacagaguuugauugagca

SEQ ID NO: 2181067 - RNA, 19 nt, Artificial Sequence
  Description of Artificial Sequence: Synthetic oligonucleotide
  Antisense strand to SEQ ID NO: 2181066
ugcucaaucaaacucugua

SEQ ID NO: 2181068 - RNA, 19 nt, Artificial Sequence
  Description of Artificial Sequence: Synthetic oligonucleotide
  Sense strand starting at position 3874 of SEQ ID NO: 1883265
agaacuagaaccgguucua

SEQ ID NO: 2181069 - RNA, 19 nt, Artificial Sequence
  Description of Artificial Sequence: Synthetic oligonucleotide
  Antisense strand to SEQ ID NO: 2181068
uagaaccgguucuaguucu

SEQ ID NO: 2181070 - RNA, 19 nt, Artificial Sequence
  Description of Artificial Sequence: Synthetic oligonucleotide
  Sense strand starting at position 3970 of SEQ ID NO: 1883265
ggguuaccgcucugauuug

SEQ ID NO: 2181071 - RNA, 19 nt, Artificial Sequence
  Description of Artificial Sequence: Synthetic oligonucleotide
  Antisense strand to SEQ ID NO: 2181070
caaaucagagcgguaaccc

SEQ ID NO: 2181072 - RNA, 19 nt, Artificial Sequence
  Description of Artificial Sequence: Synthetic oligonucleotide
  Sense strand starting at position 3977 of SEQ ID NO: 1883265
cgcucugauuugccuuauu

SEQ ID NO: 2181073 - RNA, 19 nt, Artificial Sequence
  Description of Artificial Sequence: Synthetic oligonucleotide
  Antisense strand to SEQ ID NO: 2181072
aauaaggcaaaucagagcg

SEQ ID NO: 2181074 - RNA, 19 nt, Artificial Sequence
  Description of Artificial Sequence: Synthetic oligonucleotide
  Sense strand starting at position 53 of SEQ ID NO: 1883266
cucugugugccauagaauc

SEQ ID NO: 2181075 - RNA, 19 nt, Artificial Sequence
  Description of Artificial Sequence: Synthetic oligonucleotide
  Antisense strand to SEQ ID NO: 2181074
gauucuauggcacacagag

SEQ ID NO: 2181076 - RNA, 19 nt, Artificial Sequence
  Description of Artificial Sequence: Synthetic oligonucleotide
  Sense strand starting at position 160 of SEQ ID NO: 1883266
aucgaucaaugcuuagauc

SEQ ID NO: 2181077 - RNA, 19 nt, Artificial Sequence
  Description of Artificial Sequence: Synthetic oligonucleotide
  Antisense strand to SEQ ID NO: 2181076
gaucuaagcauugaucgau

SEQ ID NO: 2181078 - RNA, 19 nt, Artificial Sequence
  Description of Artificial Sequence: Synthetic oligonucleotide
  Sense strand starting at position 161 of SEQ ID NO: 1883266
ucgaucaaugcuuagaucu

SEQ ID NO: 2181079 - RNA, 19 nt, Artificial Sequence
  Description of Artificial Sequence: Synthetic oligonucleotide
  Antisense strand to SEQ ID NO: 2181078
agaucuaagcauugaucga

SEQ ID NO: 2181080 - RNA, 19 nt, Artificial Sequence
  Description of Artificial Sequence: Synthetic oligonucleotide
  Sense strand starting at position 248 of SEQ ID NO: 1883266
gccuuaaggccugaaauca

SEQ ID NO: 2181081 - RNA, 19 nt, Artificial Sequence
  Description of Artificial Sequence: Synthetic oligonucleotide
  Antisense strand to SEQ ID NO: 2181080
ugauuucaggccuuaaggc

SEQ ID NO: 2181082 - RNA, 19 nt, Artificial Sequence
  Description of Artificial Sequence: Synthetic oligonucleotide
  Sense strand starting at position 329 of SEQ ID NO: 1883266
gugggauaacguggugaca

SEQ ID NO: 2181083 - RNA, 19 nt, Artificial Sequence
  Description of Artificial Sequence: Synthetic oligonucleotide
  Antisense strand to SEQ ID NO: 2181082
ugucaccacguuaucccac

SEQ ID NO: 2181084 - RNA, 19 nt, Artificial Sequence
  Description of Artificial Sequence: Synthetic oligonucleotide
  Sense strand starting at position 332 of SEQ ID NO: 1883266
ggauaacguggugacaaua

SEQ ID NO: 2181085 - RNA, 19 nt, Artificial Sequence
  Description of Artificial Sequence: Synthetic oligonucleotide
  Antisense strand to SEQ ID NO: 2181084
uauugucaccacguuaucc

SEQ ID NO: 2181086 - RNA, 19 nt, Artificial Sequence
  Description of Artificial Sequence: Synthetic oligonucleotide
  Sense strand starting at position 380 of SEQ ID NO: 1883266
auuagcuauaugggaauga

SEQ ID NO: 2181087 - RNA, 19 nt, Artificial Sequence
  Description of Artificial Sequence: Synthetic oligonucleotide
  Antisense strand to SEQ ID NO: 2181086
ucauucccauauagcuaau

SEQ ID NO: 2181088 - RNA, 19 nt, Artificial Sequence
  Description of Artificial Sequence: Synthetic oligonucleotide
  Sense strand starting at position 390 of SEQ ID NO: 1883266
ugggaaugagccugugauc

SEQ ID NO: 2181089 - RNA, 19 nt, Artificial Sequence
  Description of Artificial Sequence: Synthetic oligonucleotide
  Antisense strand to SEQ ID NO: 2181088
gaucacaggcucauuccca

SEQ ID NO: 2181090 - RNA, 19 nt, Artificial Sequence
  Description of Artificial Sequence: Synthetic oligonucleotide
  Sense strand starting at position 427 of SEQ ID NO: 1883266
guugcuucuguagauugaa

SEQ ID NO: 2181091 - RNA, 19 nt, Artificial Sequence
  Description of Artificial Sequence: Synthetic oligonucleotide
  Antisense strand to SEQ ID NO: 2181090
uucaaucuacagaagcaac

SEQ ID NO: 2181092 - RNA, 19 nt, Artificial Sequence
  Description of Artificial Sequence: Synthetic oligonucleotide
  Sense strand starting at position 430 of SEQ ID NO: 1883266
gcuucuguagauugaagag

SEQ ID NO: 2181093 - RNA, 19 nt, Artificial Sequence
  Description of Artificial Sequence: Synthetic oligonucleotide
  Antisense strand to SEQ ID NO: 2181092
cucuucaaucuacagaagc

SEQ ID NO: 2181094 - RNA, 19 nt, Artificial Sequence
  Description of Artificial Sequence: Synthetic oligonucleotide
  Sense strand starting at position 439 of SEQ ID NO: 1883266
gauugaagagcuggaauug

SEQ ID NO: 2181095 - RNA, 19 nt, Artificial Sequence
  Description of Artificial Sequence: Synthetic oligonucleotide
  Antisense strand to SEQ ID NO: 2181094
caauuccagcucuucaauc

SEQ ID NO: 2181096 - RNA, 19 nt, Artificial Sequence
  Description of Artificial Sequence: Synthetic oligonucleotide
  Sense strand starting at position 635 of SEQ ID NO: 1883266
guacaagggugacuaagau

SEQ ID NO: 2181097 - RNA, 19 nt, Artificial Sequence
  Description of Artificial Sequence: Synthetic oligonucleotide
  Antisense strand to SEQ ID NO: 2181096
aucuuagucacccuuguac

SEQ ID NO: 2181098 - RNA, 19 nt, Artificial Sequence
  Description of Artificial Sequence: Synthetic oligonucleotide
  Sense strand starting at position 877 of SEQ ID NO: 1883266
ugggcucugagaugagauu

SEQ ID NO: 2181099 - RNA, 19 nt, Artificial Sequence
  Description of Artificial Sequence: Synthetic oligonucleotide
  Antisense strand to SEQ ID NO: 2181098
aaucucaucucagagccca

SEQ ID NO: 2181100 - RNA, 19 nt, Artificial Sequence
  Description of Artificial Sequence: Synthetic oligonucleotide
  Sense strand starting at position 1191 of SEQ ID NO: 1883266
uccagcuuggccuagacau

SEQ ID NO: 2181101 - RNA, 19 nt, Artificial Sequence
  Description of Artificial Sequence: Synthetic oligonucleotide
  Antisense strand to SEQ ID NO: 2181100
augucuaggccaagcugga

SEQ ID NO: 2181102 - RNA, 19 nt, Artificial Sequence
  Description of Artificial Sequence: Synthetic oligonucleotide
  Sense strand starting at position 1405 of SEQ ID NO: 1883266
accugucugcgcuuuguga

SEQ ID NO: 2181103 - RNA, 19 nt, Artificial Sequence
  Description of Artificial Sequence: Synthetic oligonucleotide
  Antisense strand to SEQ ID NO: 2181102
ucacaaagcgcagacaggu

SEQ ID NO: 2181104 - RNA, 19 nt, Artificial Sequence
  Description of Artificial Sequence: Synthetic oligonucleotide
  Sense strand starting at position 1406 of SEQ ID NO: 1883266
ccugucugcgcuuugugau

SEQ ID NO: 2181105 - RNA, 19 nt, Artificial Sequence
  Description of Artificial Sequence: Synthetic oligonucleotide
  Antisense strand to SEQ ID NO: 2181104
aucacaaagcgcagacagg

SEQ ID NO: 2181106 - RNA, 19 nt, Artificial Sequence
  Description of Artificial Sequence: Synthetic oligonucleotide
  Sense strand starting at position 1419 of SEQ ID NO: 1883266
ugugauuagauaugagcaa

SEQ ID NO: 2181107 - RNA, 19 nt, Artificial Sequence
  Description of Artificial Sequence: Synthetic oligonucleotide
  Antisense strand to SEQ ID NO: 2181106
uugcucauaucuaaucaca

SEQ ID NO: 2181108 - RNA, 19 nt, Artificial Sequence
  Description of Artificial Sequence: Synthetic oligonucleotide
  Sense strand starting at position 1471 of SEQ ID NO: 1883266
uggugugucagguaaacug

SEQ ID NO: 2181109 - RNA, 19 nt, Artificial Sequence
  Description of Artificial Sequence: Synthetic oligonucleotide
  Antisense strand to SEQ ID NO: 2181108
caguuuaccugacacacca

SEQ ID NO: 2181110 - RNA, 19 nt, Artificial Sequence
  Description of Artificial Sequence: Synthetic oligonucleotide
  Sense strand starting at position 1701 of SEQ ID NO: 1883266
ccuuaaauuccagggauuc

SEQ ID NO: 2181111 - RNA, 19 nt, Artificial Sequence
  Description of Artificial Sequence: Synthetic oligonucleotide
  Antisense strand to SEQ ID NO: 2181110
gaaucccuggaauuuaagg

SEQ ID NO: 2181112 - RNA, 19 nt, Artificial Sequence
  Description of Artificial Sequence: Synthetic oligonucleotide
  Sense strand starting at position 2174 of SEQ ID NO: 1883266
ugaggcaguguuuauguaa

SEQ ID NO: 2181113 - RNA, 19 nt, Artificial Sequence
  Description of Artificial Sequence: Synthetic oligonucleotide
  Antisense strand to SEQ ID NO: 2181112
uuacauaaacacugccuca

SEQ ID NO: 2181114 - RNA, 19 nt, Artificial Sequence
  Description of Artificial Sequence: Synthetic oligonucleotide
  Sense strand starting at position 2496 of SEQ ID NO: 1883266
ggcucugcccaagaaugua

SEQ ID NO: 2181115 - RNA, 19 nt, Artificial Sequence
  Description of Artificial Sequence: Synthetic oligonucleotide
  Antisense strand to SEQ ID NO: 2181114
uacauucuugggcagagcc

SEQ ID NO: 2181116 - RNA, 19 nt, Artificial Sequence
  Description of Artificial Sequence: Synthetic oligonucleotide
  Sense strand starting at position 2768 of SEQ ID NO: 1883266
aguagaaauggcugggaca

SEQ ID NO: 2181117 - RNA, 19 nt, Artificial Sequence
  Description of Artificial Sequence: Synthetic oligonucleotide
  Antisense strand to SEQ ID NO: 2181116
ugucccagccauuucuacu

SEQ ID NO: 2181118 - RNA, 19 nt, Artificial Sequence
  Description of Artificial Sequence: Synthetic oligonucleotide
  Sense strand starting at position 2868 of SEQ ID NO: 1883266
ugguguccacuugauaugu

SEQ ID NO: 2181119 - RNA, 19 nt, Artificial Sequence
  Description of Artificial Sequence: Synthetic oligonucleotide
  Antisense strand to SEQ ID NO: 2181118
acauaucaaguggacacca

SEQ ID NO: 2181120 - RNA, 19 nt, Artificial Sequence
  Description of Artificial Sequence: Synthetic oligonucleotide
  Sense strand starting at position 2884 of SEQ ID NO: 1883266
uguuuauaaggguggaaua

SEQ ID NO: 2181121 - RNA, 19 nt, Artificial Sequence
  Description of Artificial Sequence: Synthetic oligonucleotide
  Antisense strand to SEQ ID NO: 2181120
uauuccacccuuauaaaca

SEQ ID NO: 2181122 - RNA, 19 nt, Artificial Sequence
  Description of Artificial Sequence: Synthetic oligonucleotide
  Sense strand starting at position 2885 of SEQ ID NO: 1883266
guuuauaaggguggaauaa

SEQ ID NO: 2181123 - RNA, 19 nt, Artificial Sequence
  Description of Artificial Sequence: Synthetic oligonucleotide
  Antisense strand to SEQ ID NO: 2181122
uuauuccacccuuauaaac

SEQ ID NO: 2181124 - RNA, 19 nt, Artificial Sequence
  Description of Artificial Sequence: Synthetic oligonucleotide
  Sense strand starting at position 2966 of SEQ ID NO: 1883266
agcaucaugcuaugaaaug

SEQ ID NO: 2181125 - RNA, 19 nt, Artificial Sequence
  Description of Artificial Sequence: Synthetic oligonucleotide
  Antisense strand to SEQ ID NO: 2181124
cauuucauagcaugaugcu

SEQ ID NO: 2181126 - RNA, 19 nt, Artificial Sequence
  Description of Artificial Sequence: Synthetic oligonucleotide
  Sense strand starting at position 3101 of SEQ ID NO: 1883266
gggagagguucuccuuucu

SEQ ID NO: 2181127 - RNA, 19 nt, Artificial Sequence
  Description of Artificial Sequence: Synthetic oligonucleotide
  Antisense strand to SEQ ID NO: 2181126
agaaaggagaaccucuccc

SEQ ID NO: 2181128 - RNA, 19 nt, Artificial Sequence
  Description of Artificial Sequence: Synthetic oligonucleotide
  Sense strand starting at position 3133 of SEQ ID NO: 1883266
acagaaauguguuuacauu

SEQ ID NO: 2181129 - RNA, 19 nt, Artificial Sequence
  Description of Artificial Sequence: Synthetic oligonucleotide
  Antisense strand to SEQ ID NO: 2181128
aauguaaacacauuucugu

SEQ ID NO: 2181130 - RNA, 19 nt, Artificial Sequence
  Description of Artificial Sequence: Synthetic oligonucleotide
  Sense strand starting at position 3174 of SEQ ID NO: 1883266
uuggcuuugcuccaaggaa

SEQ ID NO: 2181131 - RNA, 19 nt, Artificial Sequence
  Description of Artificial Sequence: Synthetic oligonucleotide
  Antisense strand to SEQ ID NO: 2181130
uuccuuggagcaaagccaa

SEQ ID NO: 2181132 - RNA, 19 nt, Artificial Sequence
  Description of Artificial Sequence: Synthetic oligonucleotide
  Sense strand starting at position 3209 of SEQ ID NO: 1883266
agaaguagcuuuguuuaaa

SEQ ID NO: 2181133 - RNA, 19 nt, Artificial Sequence
  Description of Artificial Sequence: Synthetic oligonucleotide
  Antisense strand to SEQ ID NO: 2181132
uuuaaacaaagcuacuucu

SEQ ID NO: 2181134 - RNA, 19 nt, Artificial Sequence
  Description of Artificial Sequence: Synthetic oligonucleotide
  Sense strand starting at position 3219 of SEQ ID NO: 1883266
uuguuuaaacaguggagaa

SEQ ID NO: 2181135 - RNA, 19 nt, Artificial Sequence
  Description of Artificial Sequence: Synthetic oligonucleotide
  Antisense strand to SEQ ID NO: 2181134
uucuccacuguuuaaacaa

SEQ ID NO: 2181136 - RNA, 19 nt, Artificial Sequence
  Description of Artificial Sequence: Synthetic oligonucleotide
  Sense strand starting at position 3220 of SEQ ID NO: 1883266
uguuuaaacaguggagaaa

SEQ ID NO: 2181137 - RNA, 19 nt, Artificial Sequence
  Description of Artificial Sequence: Synthetic oligonucleotide
  Antisense strand to SEQ ID NO: 2181136
uuucuccacuguuuaaaca

SEQ ID NO: 2181138 - RNA, 19 nt, Artificial Sequence
  Description of Artificial Sequence: Synthetic oligonucleotide
  Sense strand starting at position 3303 of SEQ ID NO: 1883266
acacaagcgcuauaaacau

SEQ ID NO: 2181139 - RNA, 19 nt, Artificial Sequence
  Description of Artificial Sequence: Synthetic oligonucleotide
  Antisense strand to SEQ ID NO: 2181138
auguuuauagcgcuugugu

SEQ ID NO: 2181140 - RNA, 19 nt, Artificial Sequence
  Description of Artificial Sequence: Synthetic oligonucleotide
  Sense strand starting at position 3319 of SEQ ID NO: 1883266
cauacacugucaucgauga

SEQ ID NO: 2181141 - RNA, 19 nt, Artificial Sequence
  Description of Artificial Sequence: Synthetic oligonucleotide
  Antisense strand to SEQ ID NO: 2181140
ucaucgaugacaguguaug

SEQ ID NO: 2181142 - RNA, 19 nt, Artificial Sequence
  Description of Artificial Sequence: Synthetic oligonucleotide
  Sense strand starting at position 3320 of SEQ ID NO: 1883266
auacacugucaucgaugaa

SEQ ID NO: 2181143 - RNA, 19 nt, Artificial Sequence
  Description of Artificial Sequence: Synthetic oligonucleotide
  Antisense strand to SEQ ID NO: 2181142
uucaucgaugacaguguau

SEQ ID NO: 2181144 - RNA, 19 nt, Artificial Sequence
  Description of Artificial Sequence: Synthetic oligonucleotide
  Sense strand starting at position 3507 of SEQ ID NO: 1883266
aauccugagcacuggaaga

SEQ ID NO: 2181145 - RNA, 19 nt, Artificial Sequence
  Description of Artificial Sequence: Synthetic oligonucleotide
  Antisense strand to SEQ ID NO: 2181144
ucuuccagugcucaggauu

SEQ ID NO: 2181146 - RNA, 19 nt, Artificial Sequence
  Description of Artificial Sequence: Synthetic oligonucleotide
  Sense strand starting at position 3520 of SEQ ID NO: 1883266
ggaagaauacgcuggauac

SEQ ID NO: 2181147 - RNA, 19 nt, Artificial Sequence
  Description of Artificial Sequence: Synthetic oligonucleotide
  Antisense strand to SEQ ID NO: 2181146
guauccagcguauucuucc

SEQ ID NO: 2181148 - RNA, 19 nt, Artificial Sequence
  Description of Artificial Sequence: Synthetic oligonucleotide
  Sense strand starting at position 3521 of SEQ ID NO: 1883266
gaagaauacgcuggauacu

SEQ ID NO: 2181149 - RNA, 19 nt, Artificial Sequence
  Description of Artificial Sequence: Synthetic oligonucleotide
  Antisense strand to SEQ ID NO: 2181148
aguauccagcguauucuuc

SEQ ID NO: 2181150 - RNA, 19 nt, Artificial Sequence
  Description of Artificial Sequence: Synthetic oligonucleotide
  Sense strand starting at position 3625 of SEQ ID NO: 1883266
gcagaaagugcugagaucu

SEQ ID NO: 2181151 - RNA, 19 nt, Artificial Sequence
  Description of Artificial Sequence: Synthetic oligonucleotide
  Antisense strand to SEQ ID NO: 2181150
agaucucagcacuuucugc

SEQ ID NO: 2181152 - RNA, 19 nt, Artificial Sequence
  Description of Artificial Sequence: Synthetic oligonucleotide
  Sense strand starting at position 3717 of SEQ ID NO: 1883266
ugcgguaauaagggaagaa

SEQ ID NO: 2181153 - RNA, 19 nt, Artificial Sequence
  Description of Artificial Sequence: Synthetic oligonucleotide
  Antisense strand to SEQ ID NO: 2181152
uucuucccuuauuaccgca

SEQ ID NO: 2181154 - RNA, 19 nt, Artificial Sequence
  Description of Artificial Sequence: Synthetic oligonucleotide
  Sense strand starting at position 3 of SEQ ID NO: 1883267
acagaucuuggcugcuaaa

SEQ ID NO: 2181155 - RNA, 19 nt, Artificial Sequence
  Description of Artificial Sequence: Synthetic oligonucleotide
  Antisense strand to SEQ ID NO: 2181154
uuuagcagccaagaucugu

SEQ ID NO: 2181156 - RNA, 19 nt, Artificial Sequence
  Description of Artificial Sequence: Synthetic oligonucleotide
  Sense strand starting at position 41 of SEQ ID NO: 1883267
ugcucucuaccaggguaaa

SEQ ID NO: 2181157 - RNA, 19 nt, Artificial Sequence
  Description of Artificial Sequence: Synthetic oligonucleotide
  Antisense strand to SEQ ID NO: 2181156
uuuacccugguagagagca

SEQ ID NO: 2181158 - RNA, 19 nt, Artificial Sequence
  Description of Artificial Sequence: Synthetic oligonucleotide
  Sense strand starting at position 42 of SEQ ID NO: 1883267
gcucucuaccaggguaaau

SEQ ID NO: 2181159 - RNA, 19 nt, Artificial Sequence
  Description of Artificial Sequence: Synthetic oligonucleotide
  Antisense strand to SEQ ID NO: 2181158
auuuacccugguagagagc

SEQ ID NO: 2181160 - RNA, 19 nt, Artificial Sequence
  Description of Artificial Sequence: Synthetic oligonucleotide
  Sense strand starting at position 166 of SEQ ID NO: 1883267
aggucaaugacuggcugau

SEQ ID NO: 2181161 - RNA, 19 nt, Artificial Sequence
  Description of Artificial Sequence: Synthetic oligonucleotide
  Antisense strand to SEQ ID NO: 2181160
aucagccagucauugaccu

SEQ ID NO: 2181162 - RNA, 19 nt, Artificial Sequence
  Description of Artificial Sequence: Synthetic oligonucleotide
  Sense strand starting at position 333 of SEQ ID NO: 1883267
uggucuauuuaucugguuu

SEQ ID NO: 2181163 - RNA, 19 nt, Artificial Sequence
  Description of Artificial Sequence: Synthetic oligonucleotide
  Antisense strand to SEQ ID NO: 2181162
aaaccagauaaauagacca

SEQ ID NO: 2181164 - RNA, 19 nt, Artificial Sequence
  Description of Artificial Sequence: Synthetic oligonucleotide
  Sense strand starting at position 427 of SEQ ID NO: 1883267
uggcgcucugcuucuuaga

SEQ ID NO: 2181165 - RNA, 19 nt, Artificial Sequence
  Description of Artificial Sequence: Synthetic oligonucleotide
  Antisense strand to SEQ ID NO: 2181164
ucuaagaagcagagcgcca

SEQ ID NO: 2181166 - RNA, 19 nt, Artificial Sequence
  Description of Artificial Sequence: Synthetic oligonucleotide
  Sense strand starting at position 434 of SEQ ID NO: 1883267
cugcuucuuagagaggacu

SEQ ID NO: 2181167 - RNA, 19 nt, Artificial Sequence
  Description of Artificial Sequence: Synthetic oligonucleotide
  Antisense strand to SEQ ID NO: 2181166
aguccucucuaagaagcag

SEQ ID NO: 2181168 - RNA, 19 nt, Artificial Sequence
  Description of Artificial Sequence: Synthetic oligonucleotide
  Sense strand starting at position 436 of SEQ ID NO: 1883267
gcuucuuagagaggacucu

SEQ ID NO: 2181169 - RNA, 19 nt, Artificial Sequence
  Description of Artificial Sequence: Synthetic oligonucleotide
  Antisense strand to SEQ ID NO: 2181168
agaguccucucuaagaagc

SEQ ID NO: 2181170 - RNA, 19 nt, Artificial Sequence
  Description of Artificial Sequence: Synthetic oligonucleotide
  Sense strand starting at position 817 of SEQ ID NO: 1883267
ucauguccugacugauaua

SEQ ID NO: 2181171 - RNA, 19 nt, Artificial Sequence
  Description of Artificial Sequence: Synthetic oligonucleotide
  Antisense strand to SEQ ID NO: 2181170
uauaucagucaggacauga

SEQ ID NO: 2181172 - RNA, 19 nt, Artificial Sequence
  Description of Artificial Sequence: Synthetic oligonucleotide
  Sense strand starting at position 822 of SEQ ID NO: 1883267
uccugacugauauacggua

SEQ ID NO: 2181173 - RNA, 19 nt, Artificial Sequence
  Description of Artificial Sequence: Synthetic oligonucleotide
  Antisense strand to SEQ ID NO: 2181172
uaccguauaucagucagga

SEQ ID NO: 2181174 - RNA, 19 nt, Artificial Sequence
  Description of Artificial Sequence: Synthetic oligonucleotide
  Sense strand starting at position 851 of SEQ ID NO: 1883267
gcgagugaguacucauuug

SEQ ID NO: 2181175 - RNA, 19 nt, Artificial Sequence
  Description of Artificial Sequence: Synthetic oligonucleotide
  Antisense strand to SEQ ID NO: 2181174
caaaugaguacucacucgc

SEQ ID NO: 2181176 - RNA, 19 nt, Artificial Sequence
  Description of Artificial Sequence: Synthetic oligonucleotide
  Sense strand starting at position 1304 of SEQ ID NO: 1883267
gaauaaaucugaguuccug

SEQ ID NO: 2181177 - RNA, 19 nt, Artificial Sequence
  Description of Artificial Sequence: Synthetic oligonucleotide
  Antisense strand to SEQ ID NO: 2181176
caggaacucagauuuauuc

SEQ ID NO: 2181178 - RNA, 19 nt, Artificial Sequence
  Description of Artificial Sequence: Synthetic oligonucleotide
  Sense strand starting at position 1329 of SEQ ID NO: 1883267
ugaauacaaucuguuuaga

SEQ ID NO: 2181179 - RNA, 19 nt, Artificial Sequence
  Description of Artificial Sequence: Synthetic oligonucleotide
  Antisense strand to SEQ ID NO: 2181178
ucuaaacagauuguauuca

SEQ ID NO: 2181180 - RNA, 19 nt, Artificial Sequence
  Description of Artificial Sequence: Synthetic oligonucleotide
  Sense strand starting at position 1801 of SEQ ID NO: 1883267
aacagugagcauugugaua

SEQ ID NO: 2181181 - RNA, 19 nt, Artificial Sequence
  Description of Artificial Sequence: Synthetic oligonucleotide
  Antisense strand to SEQ ID NO: 2181180
uaucacaaugcucacuguu

SEQ ID NO: 2181182 - RNA, 19 nt, Artificial Sequence
  Description of Artificial Sequence: Synthetic oligonucleotide
  Sense strand starting at position 1821 of SEQ ID NO: 1883267
gagauaauacagugucaca

SEQ ID NO: 2181183 - RNA, 19 nt, Artificial Sequence
  Description of Artificial Sequence: Synthetic oligonucleotide
  Antisense strand to SEQ ID NO: 2181182
ugugacacuguauuaucuc

SEQ ID NO: 2181184 - RNA, 19 nt, Artificial Sequence
  Description of Artificial Sequence: Synthetic oligonucleotide
  Sense strand starting at position 1875 of SEQ ID NO: 1883267
ucgagaucauccuugaacc

SEQ ID NO: 2181185 - RNA, 19 nt, Artificial Sequence
  Description of Artificial Sequence: Synthetic oligonucleotide
  Antisense strand to SEQ ID NO: 2181184
gguucaaggaugaucucga

SEQ ID NO: 2181186 - RNA, 19 nt, Artificial Sequence
  Description of Artificial Sequence: Synthetic oligonucleotide
  Sense strand starting at position 1876 of SEQ ID NO: 1883267
cgagaucauccuugaacca

SEQ ID NO: 2181187 - RNA, 19 nt, Artificial Sequence
  Description of Artificial Sequence: Synthetic oligonucleotide
  Antisense strand to SEQ ID NO: 2181186
ugguucaaggaugaucucg

SEQ ID NO: 2181188 - RNA, 19 nt, Artificial Sequence
  Description of Artificial Sequence: Synthetic oligonucleotide
  Sense strand starting at position 1989 of SEQ ID NO: 1883267
aguggucuagacugagaca

SEQ ID NO: 2181189 - RNA, 19 nt, Artificial Sequence
  Description of Artificial Sequence: Synthetic oligonucleotide
  Antisense strand to SEQ ID NO: 2181188
ugucucagucuagaccacu

SEQ ID NO: 2181190 - RNA, 19 nt, Artificial Sequence
  Description of Artificial Sequence: Synthetic oligonucleotide
  Sense strand starting at position 2160 of SEQ ID NO: 1883267
agguuucucuagcuagaaa

SEQ ID NO: 2181191 - RNA, 19 nt, Artificial Sequence
  Description of Artificial Sequence: Synthetic oligonucleotide
  Antisense strand to SEQ ID NO: 2181190
uuucuagcuagagaaaccu

SEQ ID NO: 2181192 - RNA, 19 nt, Artificial Sequence
  Description of Artificial Sequence: Synthetic oligonucleotide
  Sense strand starting at position 2190 of SEQ ID NO: 1883267
caaggaaucgaauguaauc

SEQ ID NO: 2181193 - RNA, 19 nt, Artificial Sequence
  Description of Artificial Sequence: Synthetic oligonucleotide
  Antisense strand to SEQ ID NO: 2181192
gauuacauucgauuccuug

SEQ ID NO: 2181194 - RNA, 19 nt, Artificial Sequence
  Description of Artificial Sequence: Synthetic oligonucleotide
  Sense strand starting at position 2195 of SEQ ID NO: 1883267
aaucgaauguaauccuagu

SEQ ID NO: 2181195 - RNA, 19 nt, Artificial Sequence
  Description of Artificial Sequence: Synthetic oligonucleotide
  Antisense strand to SEQ ID NO: 2181194
acuaggauuacauucgauu

SEQ ID NO: 2181196 - RNA, 19 nt, Artificial Sequence
  Description of Artificial Sequence: Synthetic oligonucleotide
  Sense strand starting at position 2201 of SEQ ID NO: 1883267
auguaauccuaguucuaau

SEQ ID NO: 2181197 - RNA, 19 nt, Artificial Sequence
  Description of Artificial Sequence: Synthetic oligonucleotide
  Antisense strand to SEQ ID NO: 2181196
auuagaacuaggauuacau

SEQ ID NO: 2181198 - RNA, 19 nt, Artificial Sequence
  Description of Artificial Sequence: Synthetic oligonucleotide
  Sense strand starting at position 2239 of SEQ ID NO: 1883267
uccaguuacuguccacaga

SEQ ID NO: 2181199 - RNA, 19 nt, Artificial Sequence
  Description of Artificial Sequence: Synthetic oligonucleotide
  Antisense strand to SEQ ID NO: 2181198
ucuguggacaguaacugga

SEQ ID NO: 2181200 - RNA, 19 nt, Artificial Sequence
  Description of Artificial Sequence: Synthetic oligonucleotide
  Sense strand starting at position 2469 of SEQ ID NO: 1883267
ggaugacauaagugagguu

SEQ ID NO: 2181201 - RNA, 19 nt, Artificial Sequence
  Description of Artificial Sequence: Synthetic oligonucleotide
  Antisense strand to SEQ ID NO: 2181200
aaccucacuuaugucaucc

SEQ ID NO: 2181202 - RNA, 19 nt, Artificial Sequence
  Description of Artificial Sequence: Synthetic oligonucleotide
  Sense strand starting at position 2743 of SEQ ID NO: 1883267
agcagagugauaggagcuu

SEQ ID NO: 2181203 - RNA, 19 nt, Artificial Sequence
  Description of Artificial Sequence: Synthetic oligonucleotide
  Antisense strand to SEQ ID NO: 2181202
aagcuccuaucacucugcu

SEQ ID NO: 2181204 - RNA, 19 nt, Artificial Sequence
  Description of Artificial Sequence: Synthetic oligonucleotide
  Sense strand starting at position 2763 of SEQ ID NO: 1883267
gagaaaucgcagcacagau

SEQ ID NO: 2181205 - RNA, 19 nt, Artificial Sequence
  Description of Artificial Sequence: Synthetic oligonucleotide
  Antisense strand to SEQ ID NO: 2181204
aucugugcugcgauuucuc

SEQ ID NO: 2181206 - RNA, 19 nt, Artificial Sequence
  Description of Artificial Sequence: Synthetic oligonucleotide
  Sense strand starting at position 2831 of SEQ ID NO: 1883267
ggaagugaggcuuaguaag

SEQ ID NO: 2181207 - RNA, 19 nt, Artificial Sequence
  Description of Artificial Sequence: Synthetic oligonucleotide
  Antisense strand to SEQ ID NO: 2181206
cuuacuaagccucacuucc

SEQ ID NO: 2181208 - RNA, 19 nt, Artificial Sequence
  Description of Artificial Sequence: Synthetic oligonucleotide
  Sense strand starting at position 2857 of SEQ ID NO: 1883267
ccuuaagucuuggcucaca

SEQ ID NO: 2181209 - RNA, 19 nt, Artificial Sequence
  Description of Artificial Sequence: Synthetic oligonucleotide
  Antisense strand to SEQ ID NO: 2181208
ugugagccaagacuuaagg

SEQ ID NO: 2181210 - RNA, 19 nt, Artificial Sequence
  Description of Artificial Sequence: Synthetic oligonucleotide
  Sense strand starting at position 2926 of SEQ ID NO: 1883267
uccugaagccaugaguaaa

SEQ ID NO: 2181211 - RNA, 19 nt, Artificial Sequence
  Description of Artificial Sequence: Synthetic oligonucleotide
  Antisense strand to SEQ ID NO: 2181210
uuuacucauggcuucagga

SEQ ID NO: 2181212 - RNA, 19 nt, Artificial Sequence
  Description of Artificial Sequence: Synthetic oligonucleotide
  Sense strand starting at position 3018 of SEQ ID NO: 1883267
gugauugaauuugaaugaa

SEQ ID NO: 2181213 - RNA, 19 nt, Artificial Sequence
  Description of Artificial Sequence: Synthetic oligonucleotide
  Antisense strand to SEQ ID NO: 2181212
uucauucaaauucaaucac

SEQ ID NO: 2181214 - RNA, 19 nt, Artificial Sequence
  Description of Artificial Sequence: Synthetic oligonucleotide
  Sense strand starting at position 3253 of SEQ ID NO: 1883267
agacauacaugugcacaua

SEQ ID NO: 2181215 - RNA, 19 nt, Artificial Sequence
  Description of Artificial Sequence: Synthetic oligonucleotide
  Antisense strand to SEQ ID NO: 2181214
uaugugcacauguaugucu

SEQ ID NO: 2181216 - RNA, 19 nt, Artificial Sequence
  Description of Artificial Sequence: Synthetic oligonucleotide
  Sense strand starting at position 3360 of SEQ ID NO: 1883267
gucgauucuaccugggaga

SEQ ID NO: 2181217 - RNA, 19 nt, Artificial Sequence
  Description of Artificial Sequence: Synthetic oligonucleotide
  Antisense strand to SEQ ID NO: 2181216
ucucccagguagaaucgac

SEQ ID NO: 2181218 - RNA, 19 nt, Artificial Sequence
  Description of Artificial Sequence: Synthetic oligonucleotide
  Sense strand starting at position 3361 of SEQ ID NO: 1883267
ucgauucuaccugggagaa

SEQ ID NO: 2181219 - RNA, 19 nt, Artificial Sequence
  Description of Artificial Sequence: Synthetic oligonucleotide
  Antisense strand to SEQ ID NO: 2181218
uucucccagguagaaucga

SEQ ID NO: 2181220 - RNA, 19 nt, Artificial Sequence
  Description of Artificial Sequence: Synthetic oligonucleotide
  Sense strand starting at position 3362 of SEQ ID NO: 1883267
cgauucuaccugggagaac

SEQ ID NO: 2181221 - RNA, 19 nt, Artificial Sequence
  Description of Artificial Sequence: Synthetic oligonucleotide
  Antisense strand to SEQ ID NO: 2181220
guucucccagguagaaucg

SEQ ID NO: 2181222 - RNA, 19 nt, Artificial Sequence
  Description of Artificial Sequence: Synthetic oligonucleotide
  Sense strand starting at position 3424 of SEQ ID NO: 1883267
cuuaguucugcccaguaaa

SEQ ID NO: 2181223 - RNA, 19 nt, Artificial Sequence
  Description of Artificial Sequence: Synthetic oligonucleotide
  Antisense strand to SEQ ID NO: 2181222
uuuacugggcagaacuaag

SEQ ID NO: 2181224 - RNA, 19 nt, Artificial Sequence
  Description of Artificial Sequence: Synthetic oligonucleotide
  Sense strand starting at position 3474 of SEQ ID NO: 1883267
aacacauugugagcuuaga

SEQ ID NO: 2181225 - RNA, 19 nt, Artificial Sequence
  Description of Artificial Sequence: Synthetic oligonucleotide
  Antisense strand to SEQ ID NO: 2181224
ucuaagcucacaauguguu

SEQ ID NO: 2181226 - RNA, 19 nt, Artificial Sequence
  Description of Artificial Sequence: Synthetic oligonucleotide
  Sense strand starting at position 3532 of SEQ ID NO: 1883267
uggugugacgauuaaagua

SEQ ID NO: 2181227 - RNA, 19 nt, Artificial Sequence
  Description of Artificial Sequence: Synthetic oligonucleotide
  Antisense strand to SEQ ID NO: 2181226
uacuuuaaucgucacacca

SEQ ID NO: 2181228 - RNA, 19 nt, Artificial Sequence
  Description of Artificial Sequence: Synthetic oligonucleotide
  Sense strand starting at position 3540 of SEQ ID NO: 1883267
cgauuaaaguauuccacua

SEQ ID NO: 2181229 - RNA, 19 nt, Artificial Sequence
  Description of Artificial Sequence: Synthetic oligonucleotide
  Antisense strand to SEQ ID NO: 2181228
uaguggaauacuuuaaucg

SEQ ID NO: 2181230 - RNA, 19 nt, Artificial Sequence
  Description of Artificial Sequence: Synthetic oligonucleotide
  Sense strand starting at position 3683 of SEQ ID NO: 1883267
ccagguguacaagaucauu

SEQ ID NO: 2181231 - RNA, 19 nt, Artificial Sequence
  Description of Artificial Sequence: Synthetic oligonucleotide
  Antisense strand to SEQ ID NO: 2181230
aaugaucuuguacaccugg

SEQ ID NO: 2181232 - RNA, 19 nt, Artificial Sequence
  Description of Artificial Sequence: Synthetic oligonucleotide
  Sense strand starting at position 3792 of SEQ ID NO: 1883267
agguaaucagaauguguuu

SEQ ID NO: 2181233 - RNA, 19 nt, Artificial Sequence
  Description of Artificial Sequence: Synthetic oligonucleotide
  Antisense strand to SEQ ID NO: 2181232
aaacacauucugauuaccu

SEQ ID NO: 2181234 - RNA, 19 nt, Artificial Sequence
  Description of Artificial Sequence: Synthetic oligonucleotide
  Sense strand starting at position 209 of SEQ ID NO: 1883268
uaugaagauagugguagua

SEQ ID NO: 2181235 - RNA, 19 nt, Artificial Sequence
  Description of Artificial Sequence: Synthetic oligonucleotide
  Antisense strand to SEQ ID NO: 2181234
uacuaccacuaucuucaua

SEQ ID NO: 2181236 - RNA, 19 nt, Artificial Sequence
  Description of Artificial Sequence: Synthetic oligonucleotide
  Sense strand starting at position 342 of SEQ ID NO: 1883268
aagucuagaugucuggaau

SEQ ID NO: 2181237 - RNA, 19 nt, Artificial Sequence
  Description of Artificial Sequence: Synthetic oligonucleotide
  Antisense strand to SEQ ID NO: 2181236
auuccagacaucuagacuu

SEQ ID NO: 2181238 - RNA, 19 nt, Artificial Sequence
  Description of Artificial Sequence: Synthetic oligonucleotide
  Sense strand starting at position 343 of SEQ ID NO: 1883268
agucuagaugucuggaaug

SEQ ID NO: 2181239 - RNA, 19 nt, Artificial Sequence
  Description of Artificial Sequence: Synthetic oligonucleotide
  Antisense strand to SEQ ID NO: 2181238
cauuccagacaucuagacu

SEQ ID NO: 2181240 - RNA, 19 nt, Artificial Sequence
  Description of Artificial Sequence: Synthetic oligonucleotide
  Sense strand starting at position 345 of SEQ ID NO: 1883268
ucuagaugucuggaaugca

SEQ ID NO: 2181241 - RNA, 19 nt, Artificial Sequence
  Description of Artificial Sequence: Synthetic oligonucleotide
  Antisense strand to SEQ ID NO: 2181240
ugcauuccagacaucuaga

SEQ ID NO: 2181242 - RNA, 19 nt, Artificial Sequence
  Description of Artificial Sequence: Synthetic oligonucleotide
  Sense strand starting at position 417 of SEQ ID NO: 1883268
ugcaaaucacuguaacaga

SEQ ID NO: 2181243 - RNA, 19 nt, Artificial Sequence
  Description of Artificial Sequence: Synthetic oligonucleotide
  Antisense strand to SEQ ID NO: 2181242
ucuguuacagugauuugca

SEQ ID NO: 2181244 - RNA, 19 nt, Artificial Sequence
  Description of Artificial Sequence: Synthetic oligonucleotide
  Sense strand starting at position 475 of SEQ ID NO: 1883268
ggaagaacaccgugugaga

SEQ ID NO: 2181245 - RNA, 19 nt, Artificial Sequence
  Description of Artificial Sequence: Synthetic oligonucleotide
  Antisense strand to SEQ ID NO: 2181244
ucucacacgguguucuucc

SEQ ID NO: 2181246 - RNA, 19 nt, Artificial Sequence
  Description of Artificial Sequence: Synthetic oligonucleotide
  Sense strand starting at position 515 of SEQ ID NO: 1883268
ggugcacucaugcauaaga

SEQ ID NO: 2181247 - RNA, 19 nt, Artificial Sequence
  Description of Artificial Sequence: Synthetic oligonucleotide
  Antisense strand to SEQ ID NO: 2181246
ucuuaugcaugagugcacc

SEQ ID NO: 2181248 - RNA, 19 nt, Artificial Sequence
  Description of Artificial Sequence: Synthetic oligonucleotide
  Sense strand starting at position 589 of SEQ ID NO: 1883268
guuccuaagcaggaugaau

SEQ ID NO: 2181249 - RNA, 19 nt, Artificial Sequence
  Description of Artificial Sequence: Synthetic oligonucleotide
  Antisense strand to SEQ ID NO: 2181248
auucauccugcuuaggaac

SEQ ID NO: 2181250 - RNA, 19 nt, Artificial Sequence
  Description of Artificial Sequence: Synthetic oligonucleotide
  Sense strand starting at position 591 of SEQ ID NO: 1883268
uccuaagcaggaugaauua

SEQ ID NO: 2181251 - RNA, 19 nt, Artificial Sequence
  Description of Artificial Sequence: Synthetic oligonucleotide
  Antisense strand to SEQ ID NO: 2181250
uaauucauccugcuuagga

SEQ ID NO: 2181252 - RNA, 19 nt, Artificial Sequence
  Description of Artificial Sequence: Synthetic oligonucleotide
  Sense strand starting at position 638 of SEQ ID NO: 1883268
guacauugauagguuuaga

SEQ ID NO: 2181253 - RNA, 19 nt, Artificial Sequence
  Description of Artificial Sequence: Synthetic oligonucleotide
  Antisense strand to SEQ ID NO: 2181252
ucuaaaccuaucaauguac

SEQ ID NO: 2181254 - RNA, 19 nt, Artificial Sequence
  Description of Artificial Sequence: Synthetic oligonucleotide
  Sense strand starting at position 648 of SEQ ID NO: 1883268
agguuuagauaagcaaaua

SEQ ID NO: 2181255 - RNA, 19 nt, Artificial Sequence
  Description of Artificial Sequence: Synthetic oligonucleotide
  Antisense strand to SEQ ID NO: 2181254
uauuugcuuaucuaaaccu

SEQ ID NO: 2181256 - RNA, 19 nt, Artificial Sequence
  Description of Artificial Sequence: Synthetic oligonucleotide
  Sense strand starting at position 713 of SEQ ID NO: 1883268
aauugaaguucuuuagaga

SEQ ID NO: 2181257 - RNA, 19 nt, Artificial Sequence
  Description of Artificial Sequence: Synthetic oligonucleotide
  Antisense strand to SEQ ID NO: 2181256
ucucuaaagaacuucaauu

SEQ ID NO: 2181258 - RNA, 19 nt, Artificial Sequence
  Description of Artificial Sequence: Synthetic oligonucleotide
  Sense strand starting at position 789 of SEQ ID NO: 1883268
gagauucuggcaggaacuu

SEQ ID NO: 2181259 - RNA, 19 nt, Artificial Sequence
  Description of Artificial Sequence: Synthetic oligonucleotide
  Antisense strand to SEQ ID NO: 2181258
aaguuccugccagaaucuc

SEQ ID NO: 2181260 - RNA, 19 nt, Artificial Sequence
  Description of Artificial Sequence: Synthetic oligonucleotide
  Sense strand starting at position 916 of SEQ ID NO: 1883268
uggauucacuggucuggga

SEQ ID NO: 2181261 - RNA, 19 nt, Artificial Sequence
  Description of Artificial Sequence: Synthetic oligonucleotide
  Antisense strand to SEQ ID NO: 2181260
ucccagaccagugaaucca

SEQ ID NO: 2181262 - RNA, 19 nt, Artificial Sequence
  Description of Artificial Sequence: Synthetic oligonucleotide
  Sense strand starting at position 1127 of SEQ ID NO: 1883268
ugugcuacacaguauagau

SEQ ID NO: 2181263 - RNA, 19 nt, Artificial Sequence
  Description of Artificial Sequence: Synthetic oligonucleotide
  Antisense strand to SEQ ID NO: 2181262
aucuauacuguguagcaca

SEQ ID NO: 2181264 - RNA, 19 nt, Artificial Sequence
  Description of Artificial Sequence: Synthetic oligonucleotide
  Sense strand starting at position 1294 of SEQ ID NO: 1883268
augauagccucauugacau

SEQ ID NO: 2181265 - RNA, 19 nt, Artificial Sequence
  Description of Artificial Sequence: Synthetic oligonucleotide
  Antisense strand to SEQ ID NO: 2181264
augucaaugaggcuaucau

SEQ ID NO: 2181266 - RNA, 19 nt, Artificial Sequence
  Description of Artificial Sequence: Synthetic oligonucleotide
  Sense strand starting at position 1979 of SEQ ID NO: 1883268
agaggacgcccuuauucuu

SEQ ID NO: 2181267 - RNA, 19 nt, Artificial Sequence
  Description of Artificial Sequence: Synthetic oligonucleotide
  Antisense strand to SEQ ID NO: 2181266
aagaauaagggcguccucu

SEQ ID NO: 2181268 - RNA, 19 nt, Artificial Sequence
  Description of Artificial Sequence: Synthetic oligonucleotide
  Sense strand starting at position 2001 of SEQ ID NO: 1883268
gcagauacugcagagaugu

SEQ ID NO: 2181269 - RNA, 19 nt, Artificial Sequence
  Description of Artificial Sequence: Synthetic oligonucleotide
  Antisense strand to SEQ ID NO: 2181268
acaucucugcaguaucugc

SEQ ID NO: 2181270 - RNA, 19 nt, Artificial Sequence
  Description of Artificial Sequence: Synthetic oligonucleotide
  Sense strand starting at position 2023 of SEQ ID NO: 1883268
ugugguuuccaauacagaa

SEQ ID NO: 2181271 - RNA, 19 nt, Artificial Sequence
  Description of Artificial Sequence: Synthetic oligonucleotide
  Antisense strand to SEQ ID NO: 2181270
uucuguauuggaaaccaca

SEQ ID NO: 2181272 - RNA, 19 nt, Artificial Sequence
  Description of Artificial Sequence: Synthetic oligonucleotide
  Sense strand starting at position 2252 of SEQ ID NO: 1883268
gaguuaugagggcauguua

SEQ ID NO: 2181273 - RNA, 19 nt, Artificial Sequence
  Description of Artificial Sequence: Synthetic oligonucleotide
  Antisense strand to SEQ ID NO: 2181272
uaacaugcccucauaacuc

SEQ ID NO: 2181274 - RNA, 19 nt, Artificial Sequence
  Description of Artificial Sequence: Synthetic oligonucleotide
  Sense strand starting at position 2259 of SEQ ID NO: 1883268
gagggcauguuacuugaaa

SEQ ID NO: 2181275 - RNA, 19 nt, Artificial Sequence
  Description of Artificial Sequence: Synthetic oligonucleotide
  Antisense strand to SEQ ID NO: 2181274
uuucaaguaacaugcccuc

SEQ ID NO: 2181276 - RNA, 19 nt, Artificial Sequence
  Description of Artificial Sequence: Synthetic oligonucleotide
  Sense strand starting at position 2260 of SEQ ID NO: 1883268
agggcauguuacuugaaac

SEQ ID NO: 2181277 - RNA, 19 nt, Artificial Sequence
  Description of Artificial Sequence: Synthetic oligonucleotide
  Antisense strand to SEQ ID NO: 2181276
guuucaaguaacaugcccu

SEQ ID NO: 2181278 - RNA, 19 nt, Artificial Sequence
  Description of Artificial Sequence: Synthetic oligonucleotide
  Sense strand starting at position 2261 of SEQ ID NO: 1883268
gggcauguuacuugaaaca

SEQ ID NO: 2181279 - RNA, 19 nt, Artificial Sequence
  Description of Artificial Sequence: Synthetic oligonucleotide
  Antisense strand to SEQ ID NO: 2181278
uguuucaaguaacaugccc

SEQ ID NO: 2181280 - RNA, 19 nt, Artificial Sequence
  Description of Artificial Sequence: Synthetic oligonucleotide
  Sense strand starting at position 2343 of SEQ ID NO: 1883268
uuaagacagugucuauaau

SEQ ID NO: 2181281 - RNA, 19 nt, Artificial Sequence
  Description of Artificial Sequence: Synthetic oligonucleotide
  Antisense strand to SEQ ID NO: 2181280
auuauagacacugucuuaa

SEQ ID NO: 2181282 - RNA, 19 nt, Artificial Sequence
  Description of Artificial Sequence: Synthetic oligonucleotide
  Sense strand starting at position 2605 of SEQ ID NO: 1883268
ugugcaaauuuaucugugu

SEQ ID NO: 2181283 - RNA, 19 nt, Artificial Sequence
  Description of Artificial Sequence: Synthetic oligonucleotide
  Antisense strand to SEQ ID NO: 2181282
acacagauaaauuugcaca

SEQ ID NO: 2181284 - RNA, 19 nt, Artificial Sequence
  Description of Artificial Sequence: Synthetic oligonucleotide
  Sense strand starting at position 2606 of SEQ ID NO: 1883268
gugcaaauuuaucugugua

SEQ ID NO: 2181285 - RNA, 19 nt, Artificial Sequence
  Description of Artificial Sequence: Synthetic oligonucleotide
  Antisense strand to SEQ ID NO: 2181284
uacacagauaaauuugcac

SEQ ID NO: 2181286 - RNA, 19 nt, Artificial Sequence
  Description of Artificial Sequence: Synthetic oligonucleotide
  Sense strand starting at position 2608 of SEQ ID NO: 1883268
gcaaauuuaucuguguauc

SEQ ID NO: 2181287 - RNA, 19 nt, Artificial Sequence
  Description of Artificial Sequence: Synthetic oligonucleotide
  Antisense strand to SEQ ID NO: 2181286
gauacacagauaaauuugc

SEQ ID NO: 2181288 - RNA, 19 nt, Artificial Sequence
  Description of Artificial Sequence: Synthetic oligonucleotide
  Sense strand starting at position 2801 of SEQ ID NO: 1883268
guaguuuaucuauauacug

SEQ ID NO: 2181289 - RNA, 19 nt, Artificial Sequence
  Description of Artificial Sequence: Synthetic oligonucleotide
  Antisense strand to SEQ ID NO: 2181288
caguauauagauaaacuac

SEQ ID NO: 2181290 - RNA, 19 nt, Artificial Sequence
  Description of Artificial Sequence: Synthetic oligonucleotide
  Sense strand starting at position 2810 of SEQ ID NO: 1883268
cuauauacuguuugauauc

SEQ ID NO: 2181291 - RNA, 19 nt, Artificial Sequence
  Description of Artificial Sequence: Synthetic oligonucleotide
  Antisense strand to SEQ ID NO: 2181290
gauaucaaacaguauauag

SEQ ID NO: 2181292 - RNA, 19 nt, Artificial Sequence
  Description of Artificial Sequence: Synthetic oligonucleotide
  Sense strand starting at position 2838 of SEQ ID NO: 1883268
agguuauaucaaggucacu

SEQ ID NO: 2181293 - RNA, 19 nt, Artificial Sequence
  Description of Artificial Sequence: Synthetic oligonucleotide
  Antisense strand to SEQ ID NO: 2181292
agugaccuugauauaaccu

SEQ ID NO: 2181294 - RNA, 19 nt, Artificial Sequence
  Description of Artificial Sequence: Synthetic oligonucleotide
  Sense strand starting at position 2887 of SEQ ID NO: 1883268
ccauauuauggauaugcua

SEQ ID NO: 2181295 - RNA, 19 nt, Artificial Sequence
  Description of Artificial Sequence: Synthetic oligonucleotide
  Antisense strand to SEQ ID NO: 2181294
uagcauauccauaauaugg

SEQ ID NO: 2181296 - RNA, 19 nt, Artificial Sequence
  Description of Artificial Sequence: Synthetic oligonucleotide
  Sense strand starting at position 3006 of SEQ ID NO: 1883268
augggcauuucuguuuauu

SEQ ID NO: 2181297 - RNA, 19 nt, Artificial Sequence
  Description of Artificial Sequence: Synthetic oligonucleotide
  Antisense strand to SEQ ID NO: 2181296
aauaaacagaaaugcccau

SEQ ID NO: 2181298 - RNA, 19 nt, Artificial Sequence
  Description of Artificial Sequence: Synthetic oligonucleotide
  Sense strand starting at position 3046 of SEQ ID NO: 1883268
uuaggauuagccugguaaa

SEQ ID NO: 2181299 - RNA, 19 nt, Artificial Sequence
  Description of Artificial Sequence: Synthetic oligonucleotide
  Antisense strand to SEQ ID NO: 2181298
uuuaccaggcuaauccuaa

SEQ ID NO: 2181300 - RNA, 19 nt, Artificial Sequence
  Description of Artificial Sequence: Synthetic oligonucleotide
  Sense strand starting at position 3047 of SEQ ID NO: 1883268
uaggauuagccugguaaac

SEQ ID NO: 2181301 - RNA, 19 nt, Artificial Sequence
  Description of Artificial Sequence: Synthetic oligonucleotide
  Antisense strand to SEQ ID NO: 2181300
guuuaccaggcuaauccua

SEQ ID NO: 2181302 - RNA, 19 nt, Artificial Sequence
  Description of Artificial Sequence: Synthetic oligonucleotide
  Sense strand starting at position 3185 of SEQ ID NO: 1883268
gcauuauuggauuacuaac

SEQ ID NO: 2181303 - RNA, 19 nt, Artificial Sequence
  Description of Artificial Sequence: Synthetic oligonucleotide
  Antisense strand to SEQ ID NO: 2181302
guuaguaauccaauaaugc

SEQ ID NO: 2181304 - RNA, 19 nt, Artificial Sequence
  Description of Artificial Sequence: Synthetic oligonucleotide
  Sense strand starting at position 3272 of SEQ ID NO: 1883268
ugaucauggucuuuaauag

SEQ ID NO: 2181305 - RNA, 19 nt, Artificial Sequence
  Description of Artificial Sequence: Synthetic oligonucleotide
  Antisense strand to SEQ ID NO: 2181304
cuauuaaagaccaugauca

SEQ ID NO: 2181306 - RNA, 19 nt, Artificial Sequence
  Description of Artificial Sequence: Synthetic oligonucleotide
  Sense strand starting at position 3273 of SEQ ID NO: 1883268
gaucauggucuuuaauagu

SEQ ID NO: 2181307 - RNA, 19 nt, Artificial Sequence
  Description of Artificial Sequence: Synthetic oligonucleotide
  Antisense strand to SEQ ID NO: 2181306
acuauuaaagaccaugauc

SEQ ID NO: 2181308 - RNA, 19 nt, Artificial Sequence
  Description of Artificial Sequence: Synthetic oligonucleotide
  Sense strand starting at position 3417 of SEQ ID NO: 1883268
uggcauaauuaguuaugga

SEQ ID NO: 2181309 - RNA, 19 nt, Artificial Sequence
  Description of Artificial Sequence: Synthetic oligonucleotide
  Antisense strand to SEQ ID NO: 2181308
uccauaacuaauuaugcca

SEQ ID NO: 2181310 - RNA, 19 nt, Artificial Sequence
  Description of Artificial Sequence: Synthetic oligonucleotide
  Sense strand starting at position 3418 of SEQ ID NO: 1883268
ggcauaauuaguuauggac

SEQ ID NO: 2181311 - RNA, 19 nt, Artificial Sequence
  Description of Artificial Sequence: Synthetic oligonucleotide
  Antisense strand to SEQ ID NO: 2181310
guccauaacuaauuaugcc

SEQ ID NO: 2181312 - RNA, 19 nt, Artificial Sequence
  Description of Artificial Sequence: Synthetic oligonucleotide
  Sense strand starting at position 3651 of SEQ ID NO: 1883268
uuauuagcagaguauucua

SEQ ID NO: 2181313 - RNA, 19 nt, Artificial Sequence
  Description of Artificial Sequence: Synthetic oligonucleotide
  Antisense strand to SEQ ID NO: 2181312
uagaauacucugcuaauaa

SEQ ID NO: 2181314 - RNA, 19 nt, Artificial Sequence
  Description of Artificial Sequence: Synthetic oligonucleotide
  Sense strand starting at position 461 of SEQ ID NO: 1883269
ucuggaugaucccuucuua

SEQ ID NO: 2181315 - RNA, 19 nt, Artificial Sequence
  Description of Artificial Sequence: Synthetic oligonucleotide
  Antisense strand to SEQ ID NO: 2181314
uaagaagggaucauccaga

SEQ ID NO: 2181316 - RNA, 19 nt, Artificial Sequence
  Description of Artificial Sequence: Synthetic oligonucleotide
  Sense strand starting at position 522 of SEQ ID NO: 1883269
guguguuugggcaagcugu

SEQ ID NO: 2181317 - RNA, 19 nt, Artificial Sequence
  Description of Artificial Sequence: Synthetic oligonucleotide
  Antisense strand to SEQ ID NO: 2181316
acagcuugcccaaacacac

SEQ ID NO: 2181318 - RNA, 19 nt, Artificial Sequence
  Description of Artificial Sequence: Synthetic oligonucleotide
  Sense strand starting at position 601 of SEQ ID NO: 1883269
gcggccaaucaagagauaa

SEQ ID NO: 2181319 - RNA, 19 nt, Artificial Sequence
  Description of Artificial Sequence: Synthetic oligonucleotide
  Antisense strand to SEQ ID NO: 2181318
uuaucucuugauuggccgc

SEQ ID NO: 2181320 - RNA, 19 nt, Artificial Sequence
  Description of Artificial Sequence: Synthetic oligonucleotide
  Sense strand starting at position 765 of SEQ ID NO: 1883269
gguccaugggaaggauuau

SEQ ID NO: 2181321 - RNA, 19 nt, Artificial Sequence
  Description of Artificial Sequence: Synthetic oligonucleotide
  Antisense strand to SEQ ID NO: 2181320
auaauccuucccauggacc

SEQ ID NO: 2181322 - RNA, 19 nt, Artificial Sequence
  Description of Artificial Sequence: Synthetic oligonucleotide
  Sense strand starting at position 1213 of SEQ ID NO: 1883269
cuggguaguagagaucagu

SEQ ID NO: 2181323 - RNA, 19 nt, Artificial Sequence
  Description of Artificial Sequence: Synthetic oligonucleotide
  Antisense strand to SEQ ID NO: 2181322
acugaucucuacuacccag

SEQ ID NO: 2181324 - RNA, 19 nt, Artificial Sequence
  Description of Artificial Sequence: Synthetic oligonucleotide
  Sense strand starting at position 1216 of SEQ ID NO: 1883269
gguaguagagaucaguuag

SEQ ID NO: 2181325 - RNA, 19 nt, Artificial Sequence
  Description of Artificial Sequence: Synthetic oligonucleotide
  Antisense strand to SEQ ID NO: 2181324
cuaacugaucucuacuacc

SEQ ID NO: 2181326 - RNA, 19 nt, Artificial Sequence
  Description of Artificial Sequence: Synthetic oligonucleotide
  Sense strand starting at position 1302 of SEQ ID NO: 1883269
caaagucaugccuaaagug

SEQ ID NO: 2181327 - RNA, 19 nt, Artificial Sequence
  Description of Artificial Sequence: Synthetic oligonucleotide
  Antisense strand to SEQ ID NO: 2181326
cacuuuaggcaugacuuug

SEQ ID NO: 2181328 - RNA, 19 nt, Artificial Sequence
  Description of Artificial Sequence: Synthetic oligonucleotide
  Sense strand starting at position 1402 of SEQ ID NO: 1883269
agacaaagccuuuagcauu

SEQ ID NO: 2181329 - RNA, 19 nt, Artificial Sequence
  Description of Artificial Sequence: Synthetic oligonucleotide
  Antisense strand to SEQ ID NO: 2181328
aaugcuaaaggcuuugucu

SEQ ID NO: 2181330 - RNA, 19 nt, Artificial Sequence
  Description of Artificial Sequence: Synthetic oligonucleotide
  Sense strand starting at position 1485 of SEQ ID NO: 1883269
gauaucaaaguguauguca

SEQ ID NO: 2181331 - RNA, 19 nt, Artificial Sequence
  Description of Artificial Sequence: Synthetic oligonucleotide
  Antisense strand to SEQ ID NO: 2181330
ugacauacacuuugauauc

SEQ ID NO: 2181332 - RNA, 19 nt, Artificial Sequence
  Description of Artificial Sequence: Synthetic oligonucleotide
  Sense strand starting at position 1488 of SEQ ID NO: 1883269
aucaaaguguaugucaaua

SEQ ID NO: 2181333 - RNA, 19 nt, Artificial Sequence
  Description of Artificial Sequence: Synthetic oligonucleotide
  Antisense strand to SEQ ID NO: 2181332
uauugacauacacuuugau

SEQ ID NO: 2181334 - RNA, 19 nt, Artificial Sequence
  Description of Artificial Sequence: Synthetic oligonucleotide
  Sense strand starting at position 1493 of SEQ ID NO: 1883269
aguguaugucaauaaguca

SEQ ID NO: 2181335 - RNA, 19 nt, Artificial Sequence
  Description of Artificial Sequence: Synthetic oligonucleotide
  Antisense strand to SEQ ID NO: 2181334
ugacuuauugacauacacu

SEQ ID NO: 2181336 - RNA, 19 nt, Artificial Sequence
  Description of Artificial Sequence: Synthetic oligonucleotide
  Sense strand starting at position 1617 of SEQ ID NO: 1883269
aaagcagcuguagaguaau

SEQ ID NO: 2181337 - RNA, 19 nt, Artificial Sequence
  Description of Artificial Sequence: Synthetic oligonucleotide
  Antisense strand to SEQ ID NO: 2181336
auuacucuacagcugcuuu

SEQ ID NO: 2181338 - RNA, 19 nt, Artificial Sequence
  Description of Artificial Sequence: Synthetic oligonucleotide
  Sense strand starting at position 1628 of SEQ ID NO: 1883269
agaguaaucugauccucuc

SEQ ID NO: 2181339 - RNA, 19 nt, Artificial Sequence
  Description of Artificial Sequence: Synthetic oligonucleotide
  Antisense strand to SEQ ID NO: 2181338
gagaggaucagauuacucu

SEQ ID NO: 2181340 - RNA, 19 nt, Artificial Sequence
  Description of Artificial Sequence: Synthetic oligonucleotide
  Sense strand starting at position 1718 of SEQ ID NO: 1883269
uucugucuggcugaaggaa

SEQ ID NO: 2181341 - RNA, 19 nt, Artificial Sequence
  Description of Artificial Sequence: Synthetic oligonucleotide
  Antisense strand to SEQ ID NO: 2181340
uuccuucagccagacagaa

SEQ ID NO: 2181342 - RNA, 19 nt, Artificial Sequence
  Description of Artificial Sequence: Synthetic oligonucleotide
  Sense strand starting at position 1845 of SEQ ID NO: 1883269
aaugcugccgugucuaaca

SEQ ID NO: 2181343 - RNA, 19 nt, Artificial Sequence
  Description of Artificial Sequence: Synthetic oligonucleotide
  Antisense strand to SEQ ID NO: 2181342
uguuagacacggcagcauu

SEQ ID NO: 2181344 - RNA, 19 nt, Artificial Sequence
  Description of Artificial Sequence: Synthetic oligonucleotide
  Sense strand starting at position 2102 of SEQ ID NO: 1883269
cugugacuccucuaaacag

SEQ ID NO: 2181345 - RNA, 19 nt, Artificial Sequence
  Description of Artificial Sequence: Synthetic oligonucleotide
  Antisense strand to SEQ ID NO: 2181344
cuguuuagaggagucacag

SEQ ID NO: 2181346 - RNA, 19 nt, Artificial Sequence
  Description of Artificial Sequence: Synthetic oligonucleotide
  Sense strand starting at position 2291 of SEQ ID NO: 1883269
gguauuauucuagggacau

SEQ ID NO: 2181347 - RNA, 19 nt, Artificial Sequence
  Description of Artificial Sequence: Synthetic oligonucleotide
  Antisense strand to SEQ ID NO: 2181346
augucccuagaauaauacc

SEQ ID NO: 2181348 - RNA, 19 nt, Artificial Sequence
  Description of Artificial Sequence: Synthetic oligonucleotide
  Sense strand starting at position 2297 of SEQ ID NO: 1883269
auucuagggacauguagau

SEQ ID NO: 2181349 - RNA, 19 nt, Artificial Sequence
  Description of Artificial Sequence: Synthetic oligonucleotide
  Antisense strand to SEQ ID NO: 2181348
aucuacaugucccuagaau

SEQ ID NO: 2181350 - RNA, 19 nt, Artificial Sequence
  Description of Artificial Sequence: Synthetic oligonucleotide
  Sense strand starting at position 2375 of SEQ ID NO: 1883269
cuucuaaauggauggucau

SEQ ID NO: 2181351 - RNA, 19 nt, Artificial Sequence
  Description of Artificial Sequence: Synthetic oligonucleotide
  Antisense strand to SEQ ID NO: 2181350
augaccauccauuuagaag

SEQ ID NO: 2181352 - RNA, 19 nt, Artificial Sequence
  Description of Artificial Sequence: Synthetic oligonucleotide
  Sense strand starting at position 2376 of SEQ ID NO: 1883269
uucuaaauggauggucaua

SEQ ID NO: 2181353 - RNA, 19 nt, Artificial Sequence
  Description of Artificial Sequence: Synthetic oligonucleotide
  Antisense strand to SEQ ID NO: 2181352
uaugaccauccauuuagaa

SEQ ID NO: 2181354 - RNA, 19 nt, Artificial Sequence
  Description of Artificial Sequence: Synthetic oligonucleotide
  Sense strand starting at position 2399 of SEQ ID NO: 1883269
augugaugucuguaucaaa

SEQ ID NO: 2181355 - RNA, 19 nt, Artificial Sequence
  Description of Artificial Sequence: Synthetic oligonucleotide
  Antisense strand to SEQ ID NO: 2181354
uuugauacagacaucacau

SEQ ID NO: 2181356 - RNA, 19 nt, Artificial Sequence
  Description of Artificial Sequence: Synthetic oligonucleotide
  Sense strand starting at position 2577 of SEQ ID NO: 1883269
gaaggcaguaggugaaauu

SEQ ID NO: 2181357 - RNA, 19 nt, Artificial Sequence
  Description of Artificial Sequence: Synthetic oligonucleotide
  Antisense strand to SEQ ID NO: 2181356
aauuucaccuacugccuuc

SEQ ID NO: 2181358 - RNA, 19 nt, Artificial Sequence
  Description of Artificial Sequence: Synthetic oligonucleotide
  Sense strand starting at position 2641 of SEQ ID NO: 1883269
gaaggcgucagagagguaa

SEQ ID NO: 2181359 - RNA, 19 nt, Artificial Sequence
  Description of Artificial Sequence: Synthetic oligonucleotide
  Antisense strand to SEQ ID NO: 2181358
uuaccucucugacgccuuc

SEQ ID NO: 2181360 - RNA, 19 nt, Artificial Sequence
  Description of Artificial Sequence: Synthetic oligonucleotide
  Sense strand starting at position 2768 of SEQ ID NO: 1883269
cagaaaguagguuagugua

SEQ ID NO: 2181361 - RNA, 19 nt, Artificial Sequence
  Description of Artificial Sequence: Synthetic oligonucleotide
  Antisense strand to SEQ ID NO: 2181360
uacacuaaccuacuuucug

SEQ ID NO: 2181362 - RNA, 19 nt, Artificial Sequence
  Description of Artificial Sequence: Synthetic oligonucleotide
  Sense strand starting at position 2785 of SEQ ID NO: 1883269
uaguuauaucaugagguau

SEQ ID NO: 2181363 - RNA, 19 nt, Artificial Sequence
  Description of Artificial Sequence: Synthetic oligonucleotide
  Antisense strand to SEQ ID NO: 2181362
auaccucaugauauaacua

SEQ ID NO: 2181364 - RNA, 19 nt, Artificial Sequence
  Description of Artificial Sequence: Synthetic oligonucleotide
  Sense strand starting at position 2804 of SEQ ID NO: 1883269
auaggaaagcaugguauga

SEQ ID NO: 2181365 - RNA, 19 nt, Artificial Sequence
  Description of Artificial Sequence: Synthetic oligonucleotide
  Antisense strand to SEQ ID NO: 2181364
ucauaccaugcuuuccuau

SEQ ID NO: 2181366 - RNA, 19 nt, Artificial Sequence
  Description of Artificial Sequence: Synthetic oligonucleotide
  Sense strand starting at position 2839 of SEQ ID NO: 1883269
ggcugcauuggauauucua

SEQ ID NO: 2181367 - RNA, 19 nt, Artificial Sequence
  Description of Artificial Sequence: Synthetic oligonucleotide
  Antisense strand to SEQ ID NO: 2181366
uagaauauccaaugcagcc

SEQ ID NO: 2181368 - RNA, 19 nt, Artificial Sequence
  Description of Artificial Sequence: Synthetic oligonucleotide
  Sense strand starting at position 3181 of SEQ ID NO: 1883269
aggcaaaugacuugguaaa

SEQ ID NO: 2181369 - RNA, 19 nt, Artificial Sequence
  Description of Artificial Sequence: Synthetic oligonucleotide
  Antisense strand to SEQ ID NO: 2181368
uuuaccaagucauuugccu

SEQ ID NO: 2181370 - RNA, 19 nt, Artificial Sequence
  Description of Artificial Sequence: Synthetic oligonucleotide
  Sense strand starting at position 3427 of SEQ ID NO: 1883269
ccauguuucugauuugugu

SEQ ID NO: 2181371 - RNA, 19 nt, Artificial Sequence
  Description of Artificial Sequence: Synthetic oligonucleotide
  Antisense strand to SEQ ID NO: 2181370
acacaaaucagaaacaugg

SEQ ID NO: 2181372 - RNA, 19 nt, Artificial Sequence
  Description of Artificial Sequence: Synthetic oligonucleotide
  Sense strand starting at position 3459 of SEQ ID NO: 1883269
uggguuccuuaaccaagaa

SEQ ID NO: 2181373 - RNA, 19 nt, Artificial Sequence
  Description of Artificial Sequence: Synthetic oligonucleotide
  Antisense strand to SEQ ID NO: 2181372
uucuugguuaaggaaccca

SEQ ID NO: 2181374 - RNA, 19 nt, Artificial Sequence
  Description of Artificial Sequence: Synthetic oligonucleotide
  Sense strand starting at position 3495 of SEQ ID NO: 1883269
gcagguuagauuggagaug

SEQ ID NO: 2181375 - RNA, 19 nt, Artificial Sequence
  Description of Artificial Sequence: Synthetic oligonucleotide
  Antisense strand to SEQ ID NO: 2181374
caucuccaaucuaaccugc

SEQ ID NO: 2181376 - RNA, 19 nt, Artificial Sequence
  Description of Artificial Sequence: Synthetic oligonucleotide
  Sense strand starting at position 3513 of SEQ ID NO: 1883269
gacaauggagcuuaaguuu

SEQ ID NO: 2181377 - RNA, 19 nt, Artificial Sequence
  Description of Artificial Sequence: Synthetic oligonucleotide
  Antisense strand to SEQ ID NO: 2181376
aaacuuaagcuccauuguc

SEQ ID NO: 2181378 - RNA, 19 nt, Artificial Sequence
  Description of Artificial Sequence: Synthetic oligonucleotide
  Sense strand starting at position 3516 of SEQ ID NO: 1883269
aauggagcuuaaguuugau

SEQ ID NO: 2181379 - RNA, 19 nt, Artificial Sequence
  Description of Artificial Sequence: Synthetic oligonucleotide
  Antisense strand to SEQ ID NO: 2181378
aucaaacuuaagcuccauu

SEQ ID NO: 2181380 - RNA, 19 nt, Artificial Sequence
  Description of Artificial Sequence: Synthetic oligonucleotide
  Sense strand starting at position 3714 of SEQ ID NO: 1883269
gaugaauguuaaguguaga

SEQ ID NO: 2181381 - RNA, 19 nt, Artificial Sequence
  Description of Artificial Sequence: Synthetic oligonucleotide
  Antisense strand to SEQ ID NO: 2181380
ucuacacuuaacauucauc

SEQ ID NO: 2181382 - RNA, 19 nt, Artificial Sequence
  Description of Artificial Sequence: Synthetic oligonucleotide
  Sense strand starting at position 3715 of SEQ ID NO: 1883269
augaauguuaaguguagac

SEQ ID NO: 2181383 - RNA, 19 nt, Artificial Sequence
  Description of Artificial Sequence: Synthetic oligonucleotide
  Antisense strand to SEQ ID NO: 2181382
gucuacacuuaacauucau

SEQ ID NO: 2181384 - RNA, 19 nt, Artificial Sequence
  Description of Artificial Sequence: Synthetic oligonucleotide
  Sense strand starting at position 3717 of SEQ ID NO: 1883269
gaauguuaaguguagacac

SEQ ID NO: 2181385 - RNA, 19 nt, Artificial Sequence
  Description of Artificial Sequence: Synthetic oligonucleotide
  Antisense strand to SEQ ID NO: 2181384
gugucuacacuuaacauuc

SEQ ID NO: 2181386 - RNA, 19 nt, Artificial Sequence
  Description of Artificial Sequence: Synthetic oligonucleotide
  Sense strand starting at position 3874 of SEQ ID NO: 1883269
guuaacaguugacuaucua

SEQ ID NO: 2181387 - RNA, 19 nt, Artificial Sequence
  Description of Artificial Sequence: Synthetic oligonucleotide
  Antisense strand to SEQ ID NO: 2181386
uagauagucaacuguuaac

SEQ ID NO: 2181388 - RNA, 19 nt, Artificial Sequence
  Description of Artificial Sequence: Synthetic oligonucleotide
  Sense strand starting at position 3878 of SEQ ID NO: 1883269
acaguugacuaucuagaac

SEQ ID NO: 2181389 - RNA, 19 nt, Artificial Sequence
  Description of Artificial Sequence: Synthetic oligonucleotide
  Antisense strand to SEQ ID NO: 2181388
guucuagauagucaacugu

SEQ ID NO: 2181390 - RNA, 19 nt, Artificial Sequence
  Description of Artificial Sequence: Synthetic oligonucleotide
  Sense strand starting at position 3881 of SEQ ID NO: 1883269
guugacuaucuagaacuuu

SEQ ID NO: 2181391 - RNA, 19 nt, Artificial Sequence
  Description of Artificial Sequence: Synthetic oligonucleotide
  Antisense strand to SEQ ID NO: 2181390
aaaguucuagauagucaac

SEQ ID NO: 2181392 - RNA, 19 nt, Artificial Sequence
  Description of Artificial Sequence: Synthetic oligonucleotide
  Sense strand starting at position 3914 of SEQ ID NO: 1883269
ggguauauaguacagugua

SEQ ID NO: 2181393 - RNA, 19 nt, Artificial Sequence
  Description of Artificial Sequence: Synthetic oligonucleotide
  Antisense strand to SEQ ID NO: 2181392
uacacuguacuauauaccc

SEQ ID NO: 2181394 - RNA, 19 nt, Artificial Sequence
  Description of Artificial Sequence: Synthetic oligonucleotide
  Sense strand starting at position 131 of SEQ ID NO: 1883270
gcagcuugccgcuuagcaa

SEQ ID NO: 2181395 - RNA, 19 nt, Artificial Sequence
  Description of Artificial Sequence: Synthetic oligonucleotide
  Antisense strand to SEQ ID NO: 2181394
uugcuaagcggcaagcugc

SEQ ID NO: 2181396 - RNA, 19 nt, Artificial Sequence
  Description of Artificial Sequence: Synthetic oligonucleotide
  Sense strand starting at position 171 of SEQ ID NO: 1883270
gggaaagcgugucuuaaug

SEQ ID NO: 2181397 - RNA, 19 nt, Artificial Sequence
  Description of Artificial Sequence: Synthetic oligonucleotide
  Antisense strand to SEQ ID NO: 2181396
cauuaagacacgcuuuccc

SEQ ID NO: 2181398 - RNA, 19 nt, Artificial Sequence
  Description of Artificial Sequence: Synthetic oligonucleotide
  Sense strand starting at position 178 of SEQ ID NO: 1883270
cgugucuuaauggacagua

SEQ ID NO: 2181399 - RNA, 19 nt, Artificial Sequence
  Description of Artificial Sequence: Synthetic oligonucleotide
  Antisense strand to SEQ ID NO: 2181398
uacuguccauuaagacacg

SEQ ID NO: 2181400 - RNA, 19 nt, Artificial Sequence
  Description of Artificial Sequence: Synthetic oligonucleotide
  Sense strand starting at position 505 of SEQ ID NO: 1883270
ggucucuaacuggaaaggu

SEQ ID NO: 2181401 - RNA, 19 nt, Artificial Sequence
  Description of Artificial Sequence: Synthetic oligonucleotide
  Antisense strand to SEQ ID NO: 2181400
accuuuccaguuagagacc

SEQ ID NO: 2181402 - RNA, 19 nt, Artificial Sequence
  Description of Artificial Sequence: Synthetic oligonucleotide
  Sense strand starting at position 584 of SEQ ID NO: 1883270
ccauuaauugagcgccuaa

SEQ ID NO: 2181403 - RNA, 19 nt, Artificial Sequence
  Description of Artificial Sequence: Synthetic oligonucleotide
  Antisense strand to SEQ ID NO: 2181402
uuaggcgcucaauuaaugg

SEQ ID NO: 2181404 - RNA, 19 nt, Artificial Sequence
  Description of Artificial Sequence: Synthetic oligonucleotide
  Sense strand starting at position 659 of SEQ ID NO: 1883270
gggacagguuggucaauaa

SEQ ID NO: 2181405 - RNA, 19 nt, Artificial Sequence
  Description of Artificial Sequence: Synthetic oligonucleotide
  Antisense strand to SEQ ID NO: 2181404
uuauugaccaaccuguccc

SEQ ID NO: 2181406 - RNA, 19 nt, Artificial Sequence
  Description of Artificial Sequence: Synthetic oligonucleotide
  Sense strand starting at position 875 of SEQ ID NO: 1883270
agugacuuuaugcggagaa

SEQ ID NO: 2181407 - RNA, 19 nt, Artificial Sequence
  Description of Artificial Sequence: Synthetic oligonucleotide
  Antisense strand to SEQ ID NO: 2181406
uucuccgcauaaagucacu

SEQ ID NO: 2181408 - RNA, 19 nt, Artificial Sequence
  Description of Artificial Sequence: Synthetic oligonucleotide
  Sense strand starting at position 877 of SEQ ID NO: 1883270
ugacuuuaugcggagaaac

SEQ ID NO: 2181409 - RNA, 19 nt, Artificial Sequence
  Description of Artificial Sequence: Synthetic oligonucleotide
  Antisense strand to SEQ ID NO: 2181408
guuucuccgcauaaaguca

SEQ ID NO: 2181410 - RNA, 19 nt, Artificial Sequence
  Description of Artificial Sequence: Synthetic oligonucleotide
  Sense strand starting at position 879 of SEQ ID NO: 1883270
acuuuaugcggagaaacuu

SEQ ID NO: 2181411 - RNA, 19 nt, Artificial Sequence
  Description of Artificial Sequence: Synthetic oligonucleotide
  Antisense strand to SEQ ID NO: 2181410
aaguuucuccgcauaaagu

SEQ ID NO: 2181412 - RNA, 19 nt, Artificial Sequence
  Description of Artificial Sequence: Synthetic oligonucleotide
  Sense strand starting at position 2031 of SEQ ID NO: 1883270
gacagaguuuccgcaacag

SEQ ID NO: 2181413 - RNA, 19 nt, Artificial Sequence
  Description of Artificial Sequence: Synthetic oligonucleotide
  Antisense strand to SEQ ID NO: 2181412
cuguugcggaaacucuguc

SEQ ID NO: 2181414 - RNA, 19 nt, Artificial Sequence
  Description of Artificial Sequence: Synthetic oligonucleotide
  Sense strand starting at position 2228 of SEQ ID NO: 1883270
agcggugucgccgcacaaa

SEQ ID NO: 2181415 - RNA, 19 nt, Artificial Sequence
  Description of Artificial Sequence: Synthetic oligonucleotide
  Antisense strand to SEQ ID NO: 2181414
uuugugcggcgacaccgcu

SEQ ID NO: 2181416 - RNA, 19 nt, Artificial Sequence
  Description of Artificial Sequence: Synthetic oligonucleotide
  Sense strand starting at position 2282 of SEQ ID NO: 1883270
cgagaaguccucuguucag

SEQ ID NO: 2181417 - RNA, 19 nt, Artificial Sequence
  Description of Artificial Sequence: Synthetic oligonucleotide
  Antisense strand to SEQ ID NO: 2181416
cugaacagaggacuucucg

SEQ ID NO: 2181418 - RNA, 19 nt, Artificial Sequence
  Description of Artificial Sequence: Synthetic oligonucleotide
  Sense strand starting at position 2442 of SEQ ID NO: 1883270
agugacauuucggugccuu

SEQ ID NO: 2181419 - RNA, 19 nt, Artificial Sequence
  Description of Artificial Sequence: Synthetic oligonucleotide
  Antisense strand to SEQ ID NO: 2181418
aaggcaccgaaaugucacu

SEQ ID NO: 2181420 - RNA, 19 nt, Artificial Sequence
  Description of Artificial Sequence: Synthetic oligonucleotide
  Sense strand starting at position 2443 of SEQ ID NO: 1883270
gugacauuucggugccuuu

SEQ ID NO: 2181421 - RNA, 19 nt, Artificial Sequence
  Description of Artificial Sequence: Synthetic oligonucleotide
  Antisense strand to SEQ ID NO: 2181420
aaaggcaccgaaaugucac

SEQ ID NO: 2181422 - RNA, 19 nt, Artificial Sequence
  Description of Artificial Sequence: Synthetic oligonucleotide
  Sense strand starting at position 2571 of SEQ ID NO: 1883270
gcgaaauaaccguagacag

SEQ ID NO: 2181423 - RNA, 19 nt, Artificial Sequence
  Description of Artificial Sequence: Synthetic oligonucleotide
  Antisense strand to SEQ ID NO: 2181422
cugucuacgguuauuucgc

SEQ ID NO: 2181424 - RNA, 19 nt, Artificial Sequence
  Description of Artificial Sequence: Synthetic oligonucleotide
  Sense strand starting at position 2614 of SEQ ID NO: 1883270
gccagugaugcuggaauuc

SEQ ID NO: 2181425 - RNA, 19 nt, Artificial Sequence
  Description of Artificial Sequence: Synthetic oligonucleotide
  Antisense strand to SEQ ID NO: 2181424
gaauuccagcaucacuggc

SEQ ID NO: 2181426 - RNA, 19 nt, Artificial Sequence
  Description of Artificial Sequence: Synthetic oligonucleotide
  Sense strand starting at position 2680 of SEQ ID NO: 1883270
uaauuuggcuaugagaaag

SEQ ID NO: 2181427 - RNA, 19 nt, Artificial Sequence
  Description of Artificial Sequence: Synthetic oligonucleotide
  Antisense strand to SEQ ID NO: 2181426
cuuucucauagccaaauua

SEQ ID NO: 2181428 - RNA, 19 nt, Artificial Sequence
  Description of Artificial Sequence: Synthetic oligonucleotide
  Sense strand starting at position 2706 of SEQ ID NO: 1883270
agaaguggccaguguccaa

SEQ ID NO: 2181429 - RNA, 19 nt, Artificial Sequence
  Description of Artificial Sequence: Synthetic oligonucleotide
  Antisense strand to SEQ ID NO: 2181428
uuggacacuggccacuucu

SEQ ID NO: 2181430 - RNA, 19 nt, Artificial Sequence
  Description of Artificial Sequence: Synthetic oligonucleotide
  Sense strand starting at position 2713 of SEQ ID NO: 1883270
gccaguguccaauggguga

SEQ ID NO: 2181431 - RNA, 19 nt, Artificial Sequence
  Description of Artificial Sequence: Synthetic oligonucleotide
  Antisense strand to SEQ ID NO: 2181430
ucacccauuggacacuggc

SEQ ID NO: 2181432 - RNA, 19 nt, Artificial Sequence
  Description of Artificial Sequence: Synthetic oligonucleotide
  Sense strand starting at position 2842 of SEQ ID NO: 1883270
gugcucuacugagucugaa

SEQ ID NO: 2181433 - RNA, 19 nt, Artificial Sequence
  Description of Artificial Sequence: Synthetic oligonucleotide
  Antisense strand to SEQ ID NO: 2181432
uucagacucaguagagcac

SEQ ID NO: 2181434 - RNA, 19 nt, Artificial Sequence
  Description of Artificial Sequence: Synthetic oligonucleotide
  Sense strand starting at position 2906 of SEQ ID NO: 1883270
ugacaauuccuuugcauug

SEQ ID NO: 2181435 - RNA, 19 nt, Artificial Sequence
  Description of Artificial Sequence: Synthetic oligonucleotide
  Antisense strand to SEQ ID NO: 2181434
caaugcaaaggaauuguca

SEQ ID NO: 2181436 - RNA, 19 nt, Artificial Sequence
  Description of Artificial Sequence: Synthetic oligonucleotide
  Sense strand starting at position 3071 of SEQ ID NO: 1883270
uuccaaauaucugugguau

SEQ ID NO: 2181437 - RNA, 19 nt, Artificial Sequence
  Description of Artificial Sequence: Synthetic oligonucleotide
  Antisense strand to SEQ ID NO: 2181436
auaccacagauauuuggaa

SEQ ID NO: 2181438 - RNA, 19 nt, Artificial Sequence
  Description of Artificial Sequence: Synthetic oligonucleotide
  Sense strand starting at position 3072 of SEQ ID NO: 1883270
uccaaauaucugugguaua

SEQ ID NO: 2181439 - RNA, 19 nt, Artificial Sequence
  Description of Artificial Sequence: Synthetic oligonucleotide
  Antisense strand to SEQ ID NO: 2181438
uauaccacagauauuugga

SEQ ID NO: 2181440 - RNA, 19 nt, Artificial Sequence
  Description of Artificial Sequence: Synthetic oligonucleotide
  Sense strand starting at position 3097 of SEQ ID NO: 1883270
agguuaaauguuuguuucu

SEQ ID NO: 2181441 - RNA, 19 nt, Artificial Sequence
  Description of Artificial Sequence: Synthetic oligonucleotide
  Antisense strand to SEQ ID NO: 2181440
agaaacaaacauuuaaccu

SEQ ID NO: 2181442 - RNA, 19 nt, Artificial Sequence
  Description of Artificial Sequence: Synthetic oligonucleotide
  Sense strand starting at position 3098 of SEQ ID NO: 1883270
gguuaaauguuuguuucuu

SEQ ID NO: 2181443 - RNA, 19 nt, Artificial Sequence
  Description of Artificial Sequence: Synthetic oligonucleotide
  Antisense strand to SEQ ID NO: 2181442
aagaaacaaacauuuaacc

SEQ ID NO: 2181444 - RNA, 19 nt, Artificial Sequence
  Description of Artificial Sequence: Synthetic oligonucleotide
  Sense strand starting at position 3112 of SEQ ID NO: 1883270
uucuuugaccugugcuaac

SEQ ID NO: 2181445 - RNA, 19 nt, Artificial Sequence
  Description of Artificial Sequence: Synthetic oligonucleotide
  Antisense strand to SEQ ID NO: 2181444
guuagcacaggucaaagaa

SEQ ID NO: 2181446 - RNA, 19 nt, Artificial Sequence
  Description of Artificial Sequence: Synthetic oligonucleotide
  Sense strand starting at position 3122 of SEQ ID NO: 1883270
ugugcuaacuuggcauuaa

SEQ ID NO: 2181447 - RNA, 19 nt, Artificial Sequence
  Description of Artificial Sequence: Synthetic oligonucleotide
  Antisense strand to SEQ ID NO: 2181446
uuaaugccaaguuagcaca

SEQ ID NO: 2181448 - RNA, 19 nt, Artificial Sequence
  Description of Artificial Sequence: Synthetic oligonucleotide
  Sense strand starting at position 3152 of SEQ ID NO: 1883270
auaggaagguuguauauuu

SEQ ID NO: 2181449 - RNA, 19 nt, Artificial Sequence
  Description of Artificial Sequence: Synthetic oligonucleotide
  Antisense strand to SEQ ID NO: 2181448
aaauauacaaccuuccuau

SEQ ID NO: 2181450 - RNA, 19 nt, Artificial Sequence
  Description of Artificial Sequence: Synthetic oligonucleotide
  Sense strand starting at position 3238 of SEQ ID NO: 1883270
uccuguagucaugagcuuu

SEQ ID NO: 2181451 - RNA, 19 nt, Artificial Sequence
  Description of Artificial Sequence: Synthetic oligonucleotide
  Antisense strand to SEQ ID NO: 2181450
aaagcucaugacuacagga

SEQ ID NO: 2181452 - RNA, 19 nt, Artificial Sequence
  Description of Artificial Sequence: Synthetic oligonucleotide
  Sense strand starting at position 3276 of SEQ ID NO: 1883270
gagccagugcuacaaauau

SEQ ID NO: 2181453 - RNA, 19 nt, Artificial Sequence
  Description of Artificial Sequence: Synthetic oligonucleotide
  Antisense strand to SEQ ID NO: 2181452
auauuuguagcacuggcuc

SEQ ID NO: 2181454 - RNA, 19 nt, Artificial Sequence
  Description of Artificial Sequence: Synthetic oligonucleotide
  Sense strand starting at position 3285 of SEQ ID NO: 1883270
cuacaaauauaaggauaga

SEQ ID NO: 2181455 - RNA, 19 nt, Artificial Sequence
  Description of Artificial Sequence: Synthetic oligonucleotide
  Antisense strand to SEQ ID NO: 2181454
ucuauccuuauauuuguag

SEQ ID NO: 2181456 - RNA, 19 nt, Artificial Sequence
  Description of Artificial Sequence: Synthetic oligonucleotide
  Sense strand starting at position 3470 of SEQ ID NO: 1883270
cugccaucugaauaaaggu

SEQ ID NO: 2181457 - RNA, 19 nt, Artificial Sequence
  Description of Artificial Sequence: Synthetic oligonucleotide
  Antisense strand to SEQ ID NO: 2181456
accuuuauucagauggcag

SEQ ID NO: 2181458 - RNA, 19 nt, Artificial Sequence
  Description of Artificial Sequence: Synthetic oligonucleotide
  Sense strand starting at position 3479 of SEQ ID NO: 1883270
gaauaaagguuauauggau

SEQ ID NO: 2181459 - RNA, 19 nt, Artificial Sequence
  Description of Artificial Sequence: Synthetic oligonucleotide
  Antisense strand to SEQ ID NO: 2181458
auccauauaaccuuuauuc

SEQ ID NO: 2181460 - RNA, 19 nt, Artificial Sequence
  Description of Artificial Sequence: Synthetic oligonucleotide
  Sense strand starting at position 3558 of SEQ ID NO: 1883270
uuaugugaguuagcgaauu

SEQ ID NO: 2181461 - RNA, 19 nt, Artificial Sequence
  Description of Artificial Sequence: Synthetic oligonucleotide
  Antisense strand to SEQ ID NO: 2181460
aauucgcuaacucacauaa

SEQ ID NO: 2181462 - RNA, 19 nt, Artificial Sequence
  Description of Artificial Sequence: Synthetic oligonucleotide
  Sense strand starting at position 3560 of SEQ ID NO: 1883270
augugaguuagcgaauuaa

SEQ ID NO: 2181463 - RNA, 19 nt, Artificial Sequence
  Description of Artificial Sequence: Synthetic oligonucleotide
  Antisense strand to SEQ ID NO: 2181462
uuaauucgcuaacucacau

SEQ ID NO: 2181464 - RNA, 19 nt, Artificial Sequence
  Description of Artificial Sequence: Synthetic oligonucleotide
  Sense strand starting at position 3728 of SEQ ID NO: 1883270
uggguaucaccucaaaucu

SEQ ID NO: 2181465 - RNA, 19 nt, Artificial Sequence
  Description of Artificial Sequence: Synthetic oligonucleotide
  Antisense strand to SEQ ID NO: 2181464
agauuugaggugauaccca

SEQ ID NO: 2181466 - RNA, 19 nt, Artificial Sequence
  Description of Artificial Sequence: Synthetic oligonucleotide
  Sense strand starting at position 3810 of SEQ ID NO: 1883270
gaaggcugcucuuuccaga

SEQ ID NO: 2181467 - RNA, 19 nt, Artificial Sequence
  Description of Artificial Sequence: Synthetic oligonucleotide
  Antisense strand to SEQ ID NO: 2181466
ucuggaaagagcagccuuc

SEQ ID NO: 2181468 - RNA, 19 nt, Artificial Sequence
  Description of Artificial Sequence: Synthetic oligonucleotide
  Sense strand starting at position 3883 of SEQ ID NO: 1883270
uacuuuaauccaggugaug

SEQ ID NO: 2181469 - RNA, 19 nt, Artificial Sequence
  Description of Artificial Sequence: Synthetic oligonucleotide
  Antisense strand to SEQ ID NO: 2181468
caucaccuggauuaaagua

SEQ ID NO: 2181470 - RNA, 19 nt, Artificial Sequence
  Description of Artificial Sequence: Synthetic oligonucleotide
  Sense strand starting at position 3885 of SEQ ID NO: 1883270
cuuuaauccaggugaugga

SEQ ID NO: 2181471 - RNA, 19 nt, Artificial Sequence
  Description of Artificial Sequence: Synthetic oligonucleotide
  Antisense strand to SEQ ID NO: 2181470
uccaucaccuggauuaaag

SEQ ID NO: 2181472 - RNA, 19 nt, Artificial Sequence
  Description of Artificial Sequence: Synthetic oligonucleotide
  Sense strand starting at position 3907 of SEQ ID NO: 1883270
gcacguguaguguuagcaa

SEQ ID NO: 2181473 - RNA, 19 nt, Artificial Sequence
  Description of Artificial Sequence: Synthetic oligonucleotide
  Antisense strand to SEQ ID NO: 2181472
uugcuaacacuacacgugc

SEQ ID NO: 2181474 - RNA, 19 nt, Artificial Sequence
  Description of Artificial Sequence: Synthetic oligonucleotide
  Sense strand starting at position 672 of SEQ ID NO: 1883271
gcuuuagagcuguaaggag

SEQ ID NO: 2181475 - RNA, 19 nt, Artificial Sequence
  Description of Artificial Sequence: Synthetic oligonucleotide
  Antisense strand to SEQ ID NO: 2181474
cuccuuacagcucuaaagc

SEQ ID NO: 2181476 - RNA, 19 nt, Artificial Sequence
  Description of Artificial Sequence: Synthetic oligonucleotide
  Sense strand starting at position 702 of SEQ ID NO: 1883271
aauuaaugaguugagcuuu

SEQ ID NO: 2181477 - RNA, 19 nt, Artificial Sequence
  Description of Artificial Sequence: Synthetic oligonucleotide
  Antisense strand to SEQ ID NO: 2181476
aaagcucaacucauuaauu

SEQ ID NO: 2181478 - RNA, 19 nt, Artificial Sequence
  Description of Artificial Sequence: Synthetic oligonucleotide
  Sense strand starting at position 742 of SEQ ID NO: 1883271
aggcuaccgagguaaagau

SEQ ID NO: 2181479 - RNA, 19 nt, Artificial Sequence
  Description of Artificial Sequence: Synthetic oligonucleotide
  Antisense strand to SEQ ID NO: 2181478
aucuuuaccucgguagccu

SEQ ID NO: 2181480 - RNA, 19 nt, Artificial Sequence
  Description of Artificial Sequence: Synthetic oligonucleotide
  Sense strand starting at position 1072 of SEQ ID NO: 1883271
cgcugccuuccuguuauga

SEQ ID NO: 2181481 - RNA, 19 nt, Artificial Sequence
  Description of Artificial Sequence: Synthetic oligonucleotide
  Antisense strand to SEQ ID NO: 2181480
ucauaacaggaaggcagcg

SEQ ID NO: 2181482 - RNA, 19 nt, Artificial Sequence
  Description of Artificial Sequence: Synthetic oligonucleotide
  Sense strand starting at position 1104 of SEQ ID NO: 1883271
cuacacuauuggucaucua

SEQ ID NO: 2181483 - RNA, 19 nt, Artificial Sequence
  Description of Artificial Sequence: Synthetic oligonucleotide
  Antisense strand to SEQ ID NO: 2181482
uagaugaccaauaguguag

SEQ ID NO: 2181484 - RNA, 19 nt, Artificial Sequence
  Description of Artificial Sequence: Synthetic oligonucleotide
  Sense strand starting at position 1188 of SEQ ID NO: 1883271
ccacuaugauggucacaac

SEQ ID NO: 2181485 - RNA, 19 nt, Artificial Sequence
  Description of Artificial Sequence: Synthetic oligonucleotide
  Antisense strand to SEQ ID NO: 2181484
guugugaccaucauagugg

SEQ ID NO: 2181486 - RNA, 19 nt, Artificial Sequence
  Description of Artificial Sequence: Synthetic oligonucleotide
  Sense strand starting at position 1208 of SEQ ID NO: 1883271
uuuacuuacugguuaagac

SEQ ID NO: 2181487 - RNA, 19 nt, Artificial Sequence
  Description of Artificial Sequence: Synthetic oligonucleotide
  Antisense strand to SEQ ID NO: 2181486
gucuuaaccaguaaguaaa

SEQ ID NO: 2181488 - RNA, 19 nt, Artificial Sequence
  Description of Artificial Sequence: Synthetic oligonucleotide
  Sense strand starting at position 1209 of SEQ ID NO: 1883271
uuacuuacugguuaagacu

SEQ ID NO: 2181489 - RNA, 19 nt, Artificial Sequence
  Description of Artificial Sequence: Synthetic oligonucleotide
  Antisense strand to SEQ ID NO: 2181488
agucuuaaccaguaaguaa

SEQ ID NO: 2181490 - RNA, 19 nt, Artificial Sequence
  Description of Artificial Sequence: Synthetic oligonucleotide
  Sense strand starting at position 1612 of SEQ ID NO: 1883271
ccagcugaugauuaguauu

SEQ ID NO: 2181491 - RNA, 19 nt, Artificial Sequence
  Description of Artificial Sequence: Synthetic oligonucleotide
  Antisense strand to SEQ ID NO: 2181490
aauacuaaucaucagcugg

SEQ ID NO: 2181492 - RNA, 19 nt, Artificial Sequence
  Description of Artificial Sequence: Synthetic oligonucleotide
  Sense strand starting at position 1646 of SEQ ID NO: 1883271
acagaucuguauuaauuug

SEQ ID NO: 2181493 - RNA, 19 nt, Artificial Sequence
  Description of Artificial Sequence: Synthetic oligonucleotide
  Antisense strand to SEQ ID NO: 2181492
caaauuaauacagaucugu

SEQ ID NO: 2181494 - RNA, 19 nt, Artificial Sequence
  Description of Artificial Sequence: Synthetic oligonucleotide
  Sense strand starting at position 2112 of SEQ ID NO: 1883271
augagauaugauuguuuga

SEQ ID NO: 2181495 - RNA, 19 nt, Artificial Sequence
  Description of Artificial Sequence: Synthetic oligonucleotide
  Antisense strand to SEQ ID NO: 2181494
ucaaacaaucauaucucau

SEQ ID NO: 2181496 - RNA, 19 nt, Artificial Sequence
  Description of Artificial Sequence: Synthetic oligonucleotide
  Sense strand starting at position 2499 of SEQ ID NO: 1883271
ugcugaguacuugauauga

SEQ ID NO: 2181497 - RNA, 19 nt, Artificial Sequence
  Description of Artificial Sequence: Synthetic oligonucleotide
  Antisense strand to SEQ ID NO: 2181496
ucauaucaaguacucagca

SEQ ID NO: 2181498 - RNA, 19 nt, Artificial Sequence
  Description of Artificial Sequence: Synthetic oligonucleotide
  Sense strand starting at position 2762 of SEQ ID NO: 1883271
ggacuaugguguccagaga

SEQ ID NO: 2181499 - RNA, 19 nt, Artificial Sequence
  Description of Artificial Sequence: Synthetic oligonucleotide
  Antisense strand to SEQ ID NO: 2181498
ucucuggacaccauagucc

SEQ ID NO: 2181500 - RNA, 19 nt, Artificial Sequence
  Description of Artificial Sequence: Synthetic oligonucleotide
  Sense strand starting at position 2763 of SEQ ID NO: 1883271
gacuaugguguccagagau

SEQ ID NO: 2181501 - RNA, 19 nt, Artificial Sequence
  Description of Artificial Sequence: Synthetic oligonucleotide
  Antisense strand to SEQ ID NO: 2181500
aucucuggacaccauaguc

SEQ ID NO: 2181502 - RNA, 19 nt, Artificial Sequence
  Description of Artificial Sequence: Synthetic oligonucleotide
  Sense strand starting at position 2824 of SEQ ID NO: 1883271
gguguuggacucugaauag

SEQ ID NO: 2181503 - RNA, 19 nt, Artificial Sequence
  Description of Artificial Sequence: Synthetic oligonucleotide
  Antisense strand to SEQ ID NO: 2181502
cuauucagaguccaacacc

SEQ ID NO: 2181504 - RNA, 19 nt, Artificial Sequence
  Description of Artificial Sequence: Synthetic oligonucleotide
  Sense strand starting at position 2897 of SEQ ID NO: 1883271
ugaagaugcuaagugauga

SEQ ID NO: 2181505 - RNA, 19 nt, Artificial Sequence
  Description of Artificial Sequence: Synthetic oligonucleotide
  Antisense strand to SEQ ID NO: 2181504
ucaucacuuagcaucuuca

SEQ ID NO: 2181506 - RNA, 19 nt, Artificial Sequence
  Description of Artificial Sequence: Synthetic oligonucleotide
  Sense strand starting at position 2928 of SEQ ID NO: 1883271
cuuggaauggcucagccau

SEQ ID NO: 2181507 - RNA, 19 nt, Artificial Sequence
  Description of Artificial Sequence: Synthetic oligonucleotide
  Antisense strand to SEQ ID NO: 2181506
auggcugagccauuccaag

SEQ ID NO: 2181508 - RNA, 19 nt, Artificial Sequence
  Description of Artificial Sequence: Synthetic oligonucleotide
  Sense strand starting at position 2940 of SEQ ID NO: 1883271
cagccauggccauaugagu

SEQ ID NO: 2181509 - RNA, 19 nt, Artificial Sequence
  Description of Artificial Sequence: Synthetic oligonucleotide
  Antisense strand to SEQ ID NO: 2181508
acucauauggccauggcug

SEQ ID NO: 2181510 - RNA, 19 nt, Artificial Sequence
  Description of Artificial Sequence: Synthetic oligonucleotide
  Sense strand starting at position 2971 of SEQ ID NO: 1883271
ucaagugucaugggaaggu

SEQ ID NO: 2181511 - RNA, 19 nt, Artificial Sequence
  Description of Artificial Sequence: Synthetic oligonucleotide
  Antisense strand to SEQ ID NO: 2181510
accuucccaugacacuuga

SEQ ID NO: 2181512 - RNA, 19 nt, Artificial Sequence
  Description of Artificial Sequence: Synthetic oligonucleotide
  Sense strand starting at position 2975 of SEQ ID NO: 1883271
gugucaugggaaggugaau

SEQ ID NO: 2181513 - RNA, 19 nt, Artificial Sequence
  Description of Artificial Sequence: Synthetic oligonucleotide
  Antisense strand to SEQ ID NO: 2181512
auucaccuucccaugacac

SEQ ID NO: 2181514 - RNA, 19 nt, Artificial Sequence
  Description of Artificial Sequence: Synthetic oligonucleotide
  Sense strand starting at position 3003 of SEQ ID NO: 1883271
gggaccaaugccugacagu

SEQ ID NO: 2181515 - RNA, 19 nt, Artificial Sequence
  Description of Artificial Sequence: Synthetic oligonucleotide
  Antisense strand to SEQ ID NO: 2181514
acugucaggcauugguccc

SEQ ID NO: 2181516 - RNA, 19 nt, Artificial Sequence
  Description of Artificial Sequence: Synthetic oligonucleotide
  Sense strand starting at position 3004 of SEQ ID NO: 1883271
ggaccaaugccugacaguu

SEQ ID NO: 2181517 - RNA, 19 nt, Artificial Sequence
  Description of Artificial Sequence: Synthetic oligonucleotide
  Antisense strand to SEQ ID NO: 2181516
aacugucaggcauuggucc

SEQ ID NO: 2181518 - RNA, 19 nt, Artificial Sequence
  Description of Artificial Sequence: Synthetic oligonucleotide
  Sense strand starting at position 3186 of SEQ ID NO: 1883271
ccaacaaacuuguugagua

SEQ ID NO: 2181519 - RNA, 19 nt, Artificial Sequence
  Description of Artificial Sequence: Synthetic oligonucleotide
  Antisense strand to SEQ ID NO: 2181518
uacucaacaaguuuguugg

SEQ ID NO: 2181520 - RNA, 19 nt, Artificial Sequence
  Description of Artificial Sequence: Synthetic oligonucleotide
  Sense strand starting at position 3190 of SEQ ID NO: 1883271
caaacuuguugaguaagua

SEQ ID NO: 2181521 - RNA, 19 nt, Artificial Sequence
  Description of Artificial Sequence: Synthetic oligonucleotide
  Antisense strand to SEQ ID NO: 2181520
uacuuacucaacaaguuug

SEQ ID NO: 2181522 - RNA, 19 nt, Artificial Sequence
  Description of Artificial Sequence: Synthetic oligonucleotide
  Sense strand starting at position 3191 of SEQ ID NO: 1883271
aaacuuguugaguaaguag

SEQ ID NO: 2181523 - RNA, 19 nt, Artificial Sequence
  Description of Artificial Sequence: Synthetic oligonucleotide
  Antisense strand to SEQ ID NO: 2181522
cuacuuacucaacaaguuu

SEQ ID NO: 2181524 - RNA, 19 nt, Artificial Sequence
  Description of Artificial Sequence: Synthetic oligonucleotide
  Sense strand starting at position 3259 of SEQ ID NO: 1883271
cagucaaaugaguggcuaa

SEQ ID NO: 2181525 - RNA, 19 nt, Artificial Sequence
  Description of Artificial Sequence: Synthetic oligonucleotide
  Antisense strand to SEQ ID NO: 2181524
uuagccacucauuugacug

SEQ ID NO: 2181526 - RNA, 19 nt, Artificial Sequence
  Description of Artificial Sequence: Synthetic oligonucleotide
  Sense strand starting at position 3355 of SEQ ID NO: 1883271
gguugugggauuugucagu

SEQ ID NO: 2181527 - RNA, 19 nt, Artificial Sequence
  Description of Artificial Sequence: Synthetic oligonucleotide
  Antisense strand to SEQ ID NO: 2181526
acugacaaaucccacaacc

SEQ ID NO: 2181528 - RNA, 19 nt, Artificial Sequence
  Description of Artificial Sequence: Synthetic oligonucleotide
  Sense strand starting at position 3408 of SEQ ID NO: 1883271
ggcuuugugacagaagaug

SEQ ID NO: 2181529 - RNA, 19 nt, Artificial Sequence
  Description of Artificial Sequence: Synthetic oligonucleotide
  Antisense strand to SEQ ID NO: 2181528
caucuucugucacaaagcc

SEQ ID NO: 2181530 - RNA, 19 nt, Artificial Sequence
  Description of Artificial Sequence: Synthetic oligonucleotide
  Sense strand starting at position 3460 of SEQ ID NO: 1883271
gucauaugucaagagucau

SEQ ID NO: 2181531 - RNA, 19 nt, Artificial Sequence
  Description of Artificial Sequence: Synthetic oligonucleotide
  Antisense strand to SEQ ID NO: 2181530
augacucuugacauaugac

SEQ ID NO: 2181532 - RNA, 19 nt, Artificial Sequence
  Description of Artificial Sequence: Synthetic oligonucleotide
  Sense strand starting at position 3473 of SEQ ID NO: 1883271
agucauaaugcaggaguga

SEQ ID NO: 2181533 - RNA, 19 nt, Artificial Sequence
  Description of Artificial Sequence: Synthetic oligonucleotide
  Antisense strand to SEQ ID NO: 2181532
ucacuccugcauuaugacu

SEQ ID NO: 2181534 - RNA, 19 nt, Artificial Sequence
  Description of Artificial Sequence: Synthetic oligonucleotide
  Sense strand starting at position 3474 of SEQ ID NO: 1883271
gucauaaugcaggagugaa

SEQ ID NO: 2181535 - RNA, 19 nt, Artificial Sequence
  Description of Artificial Sequence: Synthetic oligonucleotide
  Antisense strand to SEQ ID NO: 2181534
uucacuccugcauuaugac

SEQ ID NO: 2181536 - RNA, 19 nt, Artificial Sequence
  Description of Artificial Sequence: Synthetic oligonucleotide
  Sense strand starting at position 3554 of SEQ ID NO: 1883271
ggagacuuaugguugaguc

SEQ ID NO: 2181537 - RNA, 19 nt, Artificial Sequence
  Description of Artificial Sequence: Synthetic oligonucleotide
  Antisense strand to SEQ ID NO: 2181536
gacucaaccauaagucucc

SEQ ID NO: 2181538 - RNA, 19 nt, Artificial Sequence
  Description of Artificial Sequence: Synthetic oligonucleotide
  Sense strand starting at position 3555 of SEQ ID NO: 1883271
gagacuuaugguugaguca

SEQ ID NO: 2181539 - RNA, 19 nt, Artificial Sequence
  Description of Artificial Sequence: Synthetic oligonucleotide
  Antisense strand to SEQ ID NO: 2181538
ugacucaaccauaagucuc

SEQ ID NO: 2181540 - RNA, 19 nt, Artificial Sequence
  Description of Artificial Sequence: Synthetic oligonucleotide
  Sense strand starting at position 3753 of SEQ ID NO: 1883271
cuccaaaguccugaggcua

SEQ ID NO: 2181541 - RNA, 19 nt, Artificial Sequence
  Description of Artificial Sequence: Synthetic oligonucleotide
  Antisense strand to SEQ ID NO: 2181540
uagccucaggacuuuggag

SEQ ID NO: 2181542 - RNA, 19 nt, Artificial Sequence
  Description of Artificial Sequence: Synthetic oligonucleotide
  Sense strand starting at position 3765 of SEQ ID NO: 1883271
gaggcuacuuccucuggga

SEQ ID NO: 2181543 - RNA, 19 nt, Artificial Sequence
  Description of Artificial Sequence: Synthetic oligonucleotide
  Antisense strand to SEQ ID NO: 2181542
ucccagaggaaguagccuc

SEQ ID NO: 2181544 - RNA, 19 nt, Artificial Sequence
  Description of Artificial Sequence: Synthetic oligonucleotide
  Sense strand starting at position 3767 of SEQ ID NO: 1883271
ggcuacuuccucugggaag

SEQ ID NO: 2181545 - RNA, 19 nt, Artificial Sequence
  Description of Artificial Sequence: Synthetic oligonucleotide
  Antisense strand to SEQ ID NO: 2181544
cuucccagaggaaguagcc

SEQ ID NO: 2181546 - RNA, 19 nt, Artificial Sequence
  Description of Artificial Sequence: Synthetic oligonucleotide
  Sense strand starting at position 3850 of SEQ ID NO: 1883271
gucauagcaccagaagcuu

SEQ ID NO: 2181547 - RNA, 19 nt, Artificial Sequence
  Description of Artificial Sequence: Synthetic oligonucleotide
  Antisense strand to SEQ ID NO: 2181546
aagcuucuggugcuaugac

SEQ ID NO: 2181548 - RNA, 19 nt, Artificial Sequence
  Description of Artificial Sequence: Synthetic oligonucleotide
  Sense strand starting at position 3861 of SEQ ID NO: 1883271
agaagcuuugacuagcaau

SEQ ID NO: 2181549 - RNA, 19 nt, Artificial Sequence
  Description of Artificial Sequence: Synthetic oligonucleotide
  Antisense strand to SEQ ID NO: 2181548
auugcuagucaaagcuucu

SEQ ID NO: 2181550 - RNA, 19 nt, Artificial Sequence
  Description of Artificial Sequence: Synthetic oligonucleotide
  Sense strand starting at position 3895 of SEQ ID NO: 1883271
cuggguucccuaugagauu

SEQ ID NO: 2181551 - RNA, 19 nt, Artificial Sequence
  Description of Artificial Sequence: Synthetic oligonucleotide
  Antisense strand to SEQ ID NO: 2181550
aaucucauagggaacccag

SEQ ID NO: 2181552 - RNA, 19 nt, Artificial Sequence
  Description of Artificial Sequence: Synthetic oligonucleotide
  Sense strand starting at position 3981 of SEQ ID NO: 1883271
ccaggauacucccuugaag

SEQ ID NO: 2181553 - RNA, 19 nt, Artificial Sequence
  Description of Artificial Sequence: Synthetic oligonucleotide
  Antisense strand to SEQ ID NO: 2181552
cuucaagggaguauccugg

SEQ ID NO: 2181554 - RNA, 19 nt, Artificial Sequence
  Description of Artificial Sequence: Synthetic oligonucleotide
  Sense strand starting at position 79 of SEQ ID NO: 1883272
cuguaugcuagugaggaaa

SEQ ID NO: 2181555 - RNA, 19 nt, Artificial Sequence
  Description of Artificial Sequence: Synthetic oligonucleotide
  Antisense strand to SEQ ID NO: 2181554
uuuccucacuagcauacag

SEQ ID NO: 2181556 - RNA, 19 nt, Artificial Sequence
  Description of Artificial Sequence: Synthetic oligonucleotide
  Sense strand starting at position 145 of SEQ ID NO: 1883272
aaaggugaacucuggugau

SEQ ID NO: 2181557 - RNA, 19 nt, Artificial Sequence
  Description of Artificial Sequence: Synthetic oligonucleotide
  Antisense strand to SEQ ID NO: 2181556
aucaccagaguucaccuuu

SEQ ID NO: 2181558 - RNA, 19 nt, Artificial Sequence
  Description of Artificial Sequence: Synthetic oligonucleotide
  Sense strand starting at position 160 of SEQ ID NO: 1883272
ugaugcacucucugauaga

SEQ ID NO: 2181559 - RNA, 19 nt, Artificial Sequence
  Description of Artificial Sequence: Synthetic oligonucleotide
  Antisense strand to SEQ ID NO: 2181558
ucuaucagagagugcauca

SEQ ID NO: 2181560 - RNA, 19 nt, Artificial Sequence
  Description of Artificial Sequence: Synthetic oligonucleotide
  Sense strand starting at position 270 of SEQ ID NO: 1883272
aguaguguugaucaggaag

SEQ ID NO: 2181561 - RNA, 19 nt, Artificial Sequence
  Description of Artificial Sequence: Synthetic oligonucleotide
  Antisense strand to SEQ ID NO: 2181560
cuuccugaucaacacuacu

SEQ ID NO: 2181562 - RNA, 19 nt, Artificial Sequence
  Description of Artificial Sequence: Synthetic oligonucleotide
  Sense strand starting at position 358 of SEQ ID NO: 1883272
cagaaaugcagugguggaa

SEQ ID NO: 2181563 - RNA, 19 nt, Artificial Sequence
  Description of Artificial Sequence: Synthetic oligonucleotide
  Antisense strand to SEQ ID NO: 2181562
uuccaccacugcauuucug

SEQ ID NO: 2181564 - RNA, 19 nt, Artificial Sequence
  Description of Artificial Sequence: Synthetic oligonucleotide
  Sense strand starting at position 434 of SEQ ID NO: 1883272
uagagauuccugugucaga

SEQ ID NO: 2181565 - RNA, 19 nt, Artificial Sequence
  Description of Artificial Sequence: Synthetic oligonucleotide
  Antisense strand to SEQ ID NO: 2181564
ucugacacaggaaucucua

SEQ ID NO: 2181566 - RNA, 19 nt, Artificial Sequence
  Description of Artificial Sequence: Synthetic oligonucleotide
  Sense strand starting at position 435 of SEQ ID NO: 1883272
agagauuccugugucagac

SEQ ID NO: 2181567 - RNA, 19 nt, Artificial Sequence
  Description of Artificial Sequence: Synthetic oligonucleotide
  Antisense strand to SEQ ID NO: 2181566
gucugacacaggaaucucu

SEQ ID NO: 2181568 - RNA, 19 nt, Artificial Sequence
  Description of Artificial Sequence: Synthetic oligonucleotide
  Sense strand starting at position 443 of SEQ ID NO: 1883272
cugugucagacagaguuga

SEQ ID NO: 2181569 - RNA, 19 nt, Artificial Sequence
  Description of Artificial Sequence: Synthetic oligonucleotide
  Antisense strand to SEQ ID NO: 2181568
ucaacucugucugacacag

SEQ ID NO: 2181570 - RNA, 19 nt, Artificial Sequence
  Description of Artificial Sequence: Synthetic oligonucleotide
  Sense strand starting at position 467 of SEQ ID NO: 1883272
agagacaccuucuugaguu

SEQ ID NO: 2181571 - RNA, 19 nt, Artificial Sequence
  Description of Artificial Sequence: Synthetic oligonucleotide
  Antisense strand to SEQ ID NO: 2181570
aacucaagaaggugucucu

SEQ ID NO: 2181572 - RNA, 19 nt, Artificial Sequence
  Description of Artificial Sequence: Synthetic oligonucleotide
  Sense strand starting at position 725 of SEQ ID NO: 1883272
gggccugacuacucuugaa

SEQ ID NO: 2181573 - RNA, 19 nt, Artificial Sequence
  Description of Artificial Sequence: Synthetic oligonucleotide
  Antisense strand to SEQ ID NO: 2181572
uucaagaguagucaggccc

SEQ ID NO: 2181574 - RNA, 19 nt, Artificial Sequence
  Description of Artificial Sequence: Synthetic oligonucleotide
  Sense strand starting at position 895 of SEQ ID NO: 1883272
uaagaauuagcugggcaag

SEQ ID NO: 2181575 - RNA, 19 nt, Artificial Sequence
  Description of Artificial Sequence: Synthetic oligonucleotide
  Antisense strand to SEQ ID NO: 2181574
cuugcccagcuaauucuua

SEQ ID NO: 2181576 - RNA, 19 nt, Artificial Sequence
  Description of Artificial Sequence: Synthetic oligonucleotide
  Sense strand starting at position 1035 of SEQ ID NO: 1883272
guaagaacaugucucuaaa

SEQ ID NO: 2181577 - RNA, 19 nt, Artificial Sequence
  Description of Artificial Sequence: Synthetic oligonucleotide
  Antisense strand to SEQ ID NO: 2181576
uuuagagacauguucuuac

SEQ ID NO: 2181578 - RNA, 19 nt, Artificial Sequence
  Description of Artificial Sequence: Synthetic oligonucleotide
  Sense strand starting at position 1334 of SEQ ID NO: 1883272
uugggagauugucuaauuc

SEQ ID NO: 2181579 - RNA, 19 nt, Artificial Sequence
  Description of Artificial Sequence: Synthetic oligonucleotide
  Antisense strand to SEQ ID NO: 2181578
gaauuagacaaucucccaa

SEQ ID NO: 2181580 - RNA, 19 nt, Artificial Sequence
  Description of Artificial Sequence: Synthetic oligonucleotide
  Sense strand starting at position 1346 of SEQ ID NO: 1883272
cuaauucuggcagaaaguc

SEQ ID NO: 2181581 - RNA, 19 nt, Artificial Sequence
  Description of Artificial Sequence: Synthetic oligonucleotide
  Antisense strand to SEQ ID NO: 2181580
gacuuucugccagaauuag

SEQ ID NO: 2181582 - RNA, 19 nt, Artificial Sequence
  Description of Artificial Sequence: Synthetic oligonucleotide
  Sense strand starting at position 1368 of SEQ ID NO: 1883272
agcuuugagggauggugaa

SEQ ID NO: 2181583 - RNA, 19 nt, Artificial Sequence
  Description of Artificial Sequence: Synthetic oligonucleotide
  Antisense strand to SEQ ID NO: 2181582
uucaccaucccucaaagcu

SEQ ID NO: 2181584 - RNA, 19 nt, Artificial Sequence
  Description of Artificial Sequence: Synthetic oligonucleotide
  Sense strand starting at position 1411 of SEQ ID NO: 1883272
ggaugcccucuugagacuu

SEQ ID NO: 2181585 - RNA, 19 nt, Artificial Sequence
  Description of Artificial Sequence: Synthetic oligonucleotide
  Antisense strand to SEQ ID NO: 2181584
aagucucaagagggcaucc

SEQ ID NO: 2181586 - RNA, 19 nt, Artificial Sequence
  Description of Artificial Sequence: Synthetic oligonucleotide
  Sense strand starting at position 1549 of SEQ ID NO: 1883272
cucuuuaaucgaugacaaa

SEQ ID NO: 2181587 - RNA, 19 nt, Artificial Sequence
  Description of Artificial Sequence: Synthetic oligonucleotide
  Antisense strand to SEQ ID NO: 2181586
uuugucaucgauuaaagag

SEQ ID NO: 2181588 - RNA, 19 nt, Artificial Sequence
  Description of Artificial Sequence: Synthetic oligonucleotide
  Sense strand starting at position 1579 of SEQ ID NO: 1883272
uagggcugugggcagaaau

SEQ ID NO: 2181589 - RNA, 19 nt, Artificial Sequence
  Description of Artificial Sequence: Synthetic oligonucleotide
  Antisense strand to SEQ ID NO: 2181588
auuucugcccacagcccua

SEQ ID NO: 2181590 - RNA, 19 nt, Artificial Sequence
  Description of Artificial Sequence: Synthetic oligonucleotide
  Sense strand starting at position 1959 of SEQ ID NO: 1883272
aggaaauggaguugcuuua

SEQ ID NO: 2181591 - RNA, 19 nt, Artificial Sequence
  Description of Artificial Sequence: Synthetic oligonucleotide
  Antisense strand to SEQ ID NO: 2181590
uaaagcaacuccauuuccu

SEQ ID NO: 2181592 - RNA, 19 nt, Artificial Sequence
  Description of Artificial Sequence: Synthetic oligonucleotide
  Sense strand starting at position 2254 of SEQ ID NO: 1883272
guggauuucugagaauaua

SEQ ID NO: 2181593 - RNA, 19 nt, Artificial Sequence
  Description of Artificial Sequence: Synthetic oligonucleotide
  Antisense strand to SEQ ID NO: 2181592
uauauucucagaaauccac

SEQ ID NO: 2181594 - RNA, 19 nt, Artificial Sequence
  Description of Artificial Sequence: Synthetic oligonucleotide
  Sense strand starting at position 2296 of SEQ ID NO: 1883272
cuugauuguguaggaaaug

SEQ ID NO: 2181595 - RNA, 19 nt, Artificial Sequence
  Description of Artificial Sequence: Synthetic oligonucleotide
  Antisense strand to SEQ ID NO: 2181594
cauuuccuacacaaucaag

SEQ ID NO: 2181596 - RNA, 19 nt, Artificial Sequence
  Description of Artificial Sequence: Synthetic oligonucleotide
  Sense strand starting at position 2305 of SEQ ID NO: 1883272
guaggaaauggaugcaaua

SEQ ID NO: 2181597 - RNA, 19 nt, Artificial Sequence
  Description of Artificial Sequence: Synthetic oligonucleotide
  Antisense strand to SEQ ID NO: 2181596
uauugcauccauuuccuac

SEQ ID NO: 2181598 - RNA, 19 nt, Artificial Sequence
  Description of Artificial Sequence: Synthetic oligonucleotide
  Sense strand starting at position 2348 of SEQ ID NO: 1883272
gguagacauugucuuggau

SEQ ID NO: 2181599 - RNA, 19 nt, Artificial Sequence
  Description of Artificial Sequence: Synthetic oligonucleotide
  Antisense strand to SEQ ID NO: 2181598
auccaagacaaugucuacc

SEQ ID NO: 2181600 - RNA, 19 nt, Artificial Sequence
  Description of Artificial Sequence: Synthetic oligonucleotide
  Sense strand starting at position 2484 of SEQ ID NO: 1883272
augugaccuuucuugagau

SEQ ID NO: 2181601 - RNA, 19 nt, Artificial Sequence
  Description of Artificial Sequence: Synthetic oligonucleotide
  Antisense strand to SEQ ID NO: 2181600
aucucaagaaaggucacau

SEQ ID NO: 2181602 - RNA, 19 nt, Artificial Sequence
  Description of Artificial Sequence: Synthetic oligonucleotide
  Sense strand starting at position 2589 of SEQ ID NO: 1883272
cccacuagacagugaucau

SEQ ID NO: 2181603 - RNA, 19 nt, Artificial Sequence
  Description of Artificial Sequence: Synthetic oligonucleotide
  Antisense strand to SEQ ID NO: 2181602
augaucacugucuaguggg

SEQ ID NO: 2181604 - RNA, 19 nt, Artificial Sequence
  Description of Artificial Sequence: Synthetic oligonucleotide
  Sense strand starting at position 2654 of SEQ ID NO: 1883272
uggcauagugcuuaacaaa

SEQ ID NO: 2181605 - RNA, 19 nt, Artificial Sequence
  Description of Artificial Sequence: Synthetic oligonucleotide
  Antisense strand to SEQ ID NO: 2181604
uuuguuaagcacuaugcca

SEQ ID NO: 2181606 - RNA, 19 nt, Artificial Sequence
  Description of Artificial Sequence: Synthetic oligonucleotide
  Sense strand starting at position 2686 of SEQ ID NO: 1883272
gagagcucagagugaauaa

SEQ ID NO: 2181607 - RNA, 19 nt, Artificial Sequence
  Description of Artificial Sequence: Synthetic oligonucleotide
  Antisense strand to SEQ ID NO: 2181606
uuauucacucugagcucuc

SEQ ID NO: 2181608 - RNA, 19 nt, Artificial Sequence
  Description of Artificial Sequence: Synthetic oligonucleotide
  Sense strand starting at position 2824 of SEQ ID NO: 1883272
uuguacuagcagggagaaa

SEQ ID NO: 2181609 - RNA, 19 nt, Artificial Sequence
  Description of Artificial Sequence: Synthetic oligonucleotide
  Antisense strand to SEQ ID NO: 2181608
uuucucccugcuaguacaa

SEQ ID NO: 2181610 - RNA, 19 nt, Artificial Sequence
  Description of Artificial Sequence: Synthetic oligonucleotide
  Sense strand starting at position 2969 of SEQ ID NO: 1883272
gaucuuguuguagauaaua

SEQ ID NO: 2181611 - RNA, 19 nt, Artificial Sequence
  Description of Artificial Sequence: Synthetic oligonucleotide
  Antisense strand to SEQ ID NO: 2181610
uauuaucuacaacaagauc

SEQ ID NO: 2181612 - RNA, 19 nt, Artificial Sequence
  Description of Artificial Sequence: Synthetic oligonucleotide
  Sense strand starting at position 3020 of SEQ ID NO: 1883272
ugaagauucucaguccuuu

SEQ ID NO: 2181613 - RNA, 19 nt, Artificial Sequence
  Description of Artificial Sequence: Synthetic oligonucleotide
  Antisense strand to SEQ ID NO: 2181612
aaaggacugagaaucuuca

SEQ ID NO: 2181614 - RNA, 19 nt, Artificial Sequence
  Description of Artificial Sequence: Synthetic oligonucleotide
  Sense strand starting at position 3147 of SEQ ID NO: 1883272
ccugacagguuuccaaaca

SEQ ID NO: 2181615 - RNA, 19 nt, Artificial Sequence
  Description of Artificial Sequence: Synthetic oligonucleotide
  Antisense strand to SEQ ID NO: 2181614
uguuuggaaaccugucagg

SEQ ID NO: 2181616 - RNA, 19 nt, Artificial Sequence
  Description of Artificial Sequence: Synthetic oligonucleotide
  Sense strand starting at position 3220 of SEQ ID NO: 1883272
gcaauagagugguuuggaa

SEQ ID NO: 2181617 - RNA, 19 nt, Artificial Sequence
  Description of Artificial Sequence: Synthetic oligonucleotide
  Antisense strand to SEQ ID NO: 2181616
uuccaaaccacucuauugc

SEQ ID NO: 2181618 - RNA, 19 nt, Artificial Sequence
  Description of Artificial Sequence: Synthetic oligonucleotide
  Sense strand starting at position 3222 of SEQ ID NO: 1883272
aauagagugguuuggaaga

SEQ ID NO: 2181619 - RNA, 19 nt, Artificial Sequence
  Description of Artificial Sequence: Synthetic oligonucleotide
  Antisense strand to SEQ ID NO: 2181618
ucuuccaaaccacucuauu

SEQ ID NO: 2181620 - RNA, 19 nt, Artificial Sequence
  Description of Artificial Sequence: Synthetic oligonucleotide
  Sense strand starting at position 3294 of SEQ ID NO: 1883272
auuugagagcuuuguccuu

SEQ ID NO: 2181621 - RNA, 19 nt, Artificial Sequence
  Description of Artificial Sequence: Synthetic oligonucleotide
  Antisense strand to SEQ ID NO: 2181620
aaggacaaagcucucaaau

SEQ ID NO: 2181622 - RNA, 19 nt, Artificial Sequence
  Description of Artificial Sequence: Synthetic oligonucleotide
  Sense strand starting at position 3311 of SEQ ID NO: 1883272
uucuguaugccugaaugag

SEQ ID NO: 2181623 - RNA, 19 nt, Artificial Sequence
  Description of Artificial Sequence: Synthetic oligonucleotide
  Antisense strand to SEQ ID NO: 2181622
cucauucaggcauacagaa

SEQ ID NO: 2181624 - RNA, 19 nt, Artificial Sequence
  Description of Artificial Sequence: Synthetic oligonucleotide
  Sense strand starting at position 3354 of SEQ ID NO: 1883272
gaaugagggugcuccagaa

SEQ ID NO: 2181625 - RNA, 19 nt, Artificial Sequence
  Description of Artificial Sequence: Synthetic oligonucleotide
  Antisense strand to SEQ ID NO: 2181624
uucuggagcacccucauuc

SEQ ID NO: 2181626 - RNA, 19 nt, Artificial Sequence
  Description of Artificial Sequence: Synthetic oligonucleotide
  Sense strand starting at position 3528 of SEQ ID NO: 1883272
gagauucaugagugagggu

SEQ ID NO: 2181627 - RNA, 19 nt, Artificial Sequence
  Description of Artificial Sequence: Synthetic oligonucleotide
  Antisense strand to SEQ ID NO: 2181626
acccucacucaugaaucuc

SEQ ID NO: 2181628 - RNA, 19 nt, Artificial Sequence
  Description of Artificial Sequence: Synthetic oligonucleotide
  Sense strand starting at position 3661 of SEQ ID NO: 1883272
aucuaaauugguggacuuu

SEQ ID NO: 2181629 - RNA, 19 nt, Artificial Sequence
  Description of Artificial Sequence: Synthetic oligonucleotide
  Antisense strand to SEQ ID NO: 2181628
aaaguccaccaauuuagau

SEQ ID NO: 2181630 - RNA, 19 nt, Artificial Sequence
  Description of Artificial Sequence: Synthetic oligonucleotide
  Sense strand starting at position 3789 of SEQ ID NO: 1883272
cuccaucugcaauaugagu

SEQ ID NO: 2181631 - RNA, 19 nt, Artificial Sequence
  Description of Artificial Sequence: Synthetic oligonucleotide
  Antisense strand to SEQ ID NO: 2181630
acucauauugcagauggag

SEQ ID NO: 2181632 - RNA, 19 nt, Artificial Sequence
  Description of Artificial Sequence: Synthetic oligonucleotide
  Sense strand starting at position 3803 of SEQ ID NO: 1883272
ugaguucuuccugauucua

SEQ ID NO: 2181633 - RNA, 19 nt, Artificial Sequence
  Description of Artificial Sequence: Synthetic oligonucleotide
  Antisense strand to SEQ ID NO: 2181632
uagaaucaggaagaacuca

SEQ ID NO: 2181634 - RNA, 19 nt, Artificial Sequence
  Description of Artificial Sequence: Synthetic oligonucleotide
  Sense strand starting at position 425 of SEQ ID NO: 1883273
aaucaagugcaguggaaua

SEQ ID NO: 2181635 - RNA, 19 nt, Artificial Sequence
  Description of Artificial Sequence: Synthetic oligonucleotide
  Antisense strand to SEQ ID NO: 2181634
uauuccacugcacuugauu

SEQ ID NO: 2181636 - RNA, 19 nt, Artificial Sequence
  Description of Artificial Sequence: Synthetic oligonucleotide
  Sense strand starting at position 539 of SEQ ID NO: 1883273
aagugucaagguuaugaga

SEQ ID NO: 2181637 - RNA, 19 nt, Artificial Sequence
  Description of Artificial Sequence: Synthetic oligonucleotide
  Antisense strand to SEQ ID NO: 2181636
ucucauaaccuugacacuu

SEQ ID NO: 2181638 - RNA, 19 nt, Artificial Sequence
  Description of Artificial Sequence: Synthetic oligonucleotide
  Sense strand starting at position 638 of SEQ ID NO: 1883273
augcacuuacugugaagaa

SEQ ID NO: 2181639 - RNA, 19 nt, Artificial Sequence
  Description of Artificial Sequence: Synthetic oligonucleotide
  Antisense strand to SEQ ID NO: 2181638
uucuucacaguaagugcau

SEQ ID NO: 2181640 - RNA, 19 nt, Artificial Sequence
  Description of Artificial Sequence: Synthetic oligonucleotide
  Sense strand starting at position 935 of SEQ ID NO: 1883273
ucuuguaaaugccugagaa

SEQ ID NO: 2181641 - RNA, 19 nt, Artificial Sequence
  Description of Artificial Sequence: Synthetic oligonucleotide
  Antisense strand to SEQ ID NO: 2181640
uucucaggcauuuacaaga

SEQ ID NO: 2181642 - RNA, 19 nt, Artificial Sequence
  Description of Artificial Sequence: Synthetic oligonucleotide
  Sense strand starting at position 936 of SEQ ID NO: 1883273
cuuguaaaugccugagaag

SEQ ID NO: 2181643 - RNA, 19 nt, Artificial Sequence
  Description of Artificial Sequence: Synthetic oligonucleotide
  Antisense strand to SEQ ID NO: 2181642
cuucucaggcauuuacaag

SEQ ID NO: 2181644 - RNA, 19 nt, Artificial Sequence
  Description of Artificial Sequence: Synthetic oligonucleotide
  Sense strand starting at position 1234 of SEQ ID NO: 1883273
ucacauucgcuguaugauc

SEQ ID NO: 2181645 - RNA, 19 nt, Artificial Sequence
  Description of Artificial Sequence: Synthetic oligonucleotide
  Antisense strand to SEQ ID NO: 2181644
gaucauacagcgaauguga

SEQ ID NO: 2181646 - RNA, 19 nt, Artificial Sequence
  Description of Artificial Sequence: Synthetic oligonucleotide
  Sense strand starting at position 1243 of SEQ ID NO: 1883273
cuguaugauccuggacaag

SEQ ID NO: 2181647 - RNA, 19 nt, Artificial Sequence
  Description of Artificial Sequence: Synthetic oligonucleotide
  Antisense strand to SEQ ID NO: 2181646
cuuguccaggaucauacag

SEQ ID NO: 2181648 - RNA, 19 nt, Artificial Sequence
  Description of Artificial Sequence: Synthetic oligonucleotide
  Sense strand starting at position 1286 of SEQ ID NO: 1883273
cugucugcuggguaaauua

SEQ ID NO: 2181649 - RNA, 19 nt, Artificial Sequence
  Description of Artificial Sequence: Synthetic oligonucleotide
  Antisense strand to SEQ ID NO: 2181648
uaauuuacccagcagacag

SEQ ID NO: 2181650 - RNA, 19 nt, Artificial Sequence
  Description of Artificial Sequence: Synthetic oligonucleotide
  Sense strand starting at position 1329 of SEQ ID NO: 1883273
ggugguggugcggauuaga

SEQ ID NO: 2181651 - RNA, 19 nt, Artificial Sequence
  Description of Artificial Sequence: Synthetic oligonucleotide
  Antisense strand to SEQ ID NO: 2181650
ucuaauccgcaccaccacc

SEQ ID NO: 2181652 - RNA, 19 nt, Artificial Sequence
  Description of Artificial Sequence: Synthetic oligonucleotide
  Sense strand starting at position 1338 of SEQ ID NO: 1883273
gcggauuagagagaauugu

SEQ ID NO: 2181653 - RNA, 19 nt, Artificial Sequence
  Description of Artificial Sequence: Synthetic oligonucleotide
  Antisense strand to SEQ ID NO: 2181652
acaauucucucuaauccgc

SEQ ID NO: 2181654 - RNA, 19 nt, Artificial Sequence
  Description of Artificial Sequence: Synthetic oligonucleotide
  Sense strand starting at position 1348 of SEQ ID NO: 1883273
gagaauugugcaggauguc

SEQ ID NO: 2181655 - RNA, 19 nt, Artificial Sequence
  Description of Artificial Sequence: Synthetic oligonucleotide
  Antisense strand to SEQ ID NO: 2181654
gacauccugcacaauucuc

SEQ ID NO: 2181656 - RNA, 19 nt, Artificial Sequence
  Description of Artificial Sequence: Synthetic oligonucleotide
  Sense strand starting at position 1349 of SEQ ID NO: 1883273
agaauugugcaggauguca

SEQ ID NO: 2181657 - RNA, 19 nt, Artificial Sequence
  Description of Artificial Sequence: Synthetic oligonucleotide
  Antisense strand to SEQ ID NO: 2181656
ugacauccugcacaauucu

SEQ ID NO: 2181658 - RNA, 19 nt, Artificial Sequence
  Description of Artificial Sequence: Synthetic oligonucleotide
  Sense strand starting at position 1360 of SEQ ID NO: 1883273
ggaugucagguacagugau

SEQ ID NO: 2181659 - RNA, 19 nt, Artificial Sequence
  Description of Artificial Sequence: Synthetic oligonucleotide
  Antisense strand to SEQ ID NO: 2181658
aucacuguaccugacaucc

SEQ ID NO: 2181660 - RNA, 19 nt, Artificial Sequence
  Description of Artificial Sequence: Synthetic oligonucleotide
  Sense strand starting at position 1372 of SEQ ID NO: 1883273
cagugauaguuucuagacu

SEQ ID NO: 2181661 - RNA, 19 nt, Artificial Sequence
  Description of Artificial Sequence: Synthetic oligonucleotide
  Antisense strand to SEQ ID NO: 2181660
agucuagaaacuaucacug

SEQ ID NO: 2181662 - RNA, 19 nt, Artificial Sequence
  Description of Artificial Sequence: Synthetic oligonucleotide
  Sense strand starting at position 1402 of SEQ ID NO: 1883273
ggaagucagccucauaauc

SEQ ID NO: 2181663 - RNA, 19 nt, Artificial Sequence
  Description of Artificial Sequence: Synthetic oligonucleotide
  Antisense strand to SEQ ID NO: 2181662
gauuaugaggcugacuucc

SEQ ID NO: 2181664 - RNA, 19 nt, Artificial Sequence
  Description of Artificial Sequence: Synthetic oligonucleotide
  Sense strand starting at position 1423 of SEQ ID NO: 1883273
uugggaaucuccuuaucaa

SEQ ID NO: 2181665 - RNA, 19 nt, Artificial Sequence
  Description of Artificial Sequence: Synthetic oligonucleotide
  Antisense strand to SEQ ID NO: 2181664
uugauaaggagauucccaa

SEQ ID NO: 2181666 - RNA, 19 nt, Artificial Sequence
  Description of Artificial Sequence: Synthetic oligonucleotide
  Sense strand starting at position 1665 of SEQ ID NO: 1883273
ggcgaaaugucuccugauu

SEQ ID NO: 2181667 - RNA, 19 nt, Artificial Sequence
  Description of Artificial Sequence: Synthetic oligonucleotide
  Antisense strand to SEQ ID NO: 2181666
aaucaggagacauuucgcc

SEQ ID NO: 2181668 - RNA, 19 nt, Artificial Sequence
  Description of Artificial Sequence: Synthetic oligonucleotide
  Sense strand starting at position 2414 of SEQ ID NO: 1883273
ugcucacaugacugaacaa

SEQ ID NO: 2181669 - RNA, 19 nt, Artificial Sequence
  Description of Artificial Sequence: Synthetic oligonucleotide
  Antisense strand to SEQ ID NO: 2181668
uuguucagucaugugagca

SEQ ID NO: 2181670 - RNA, 19 nt, Artificial Sequence
  Description of Artificial Sequence: Synthetic oligonucleotide
  Sense strand starting at position 2435 of SEQ ID NO: 1883273
auauguggagcaugaaauu

SEQ ID NO: 2181671 - RNA, 19 nt, Artificial Sequence
  Description of Artificial Sequence: Synthetic oligonucleotide
  Antisense strand to SEQ ID NO: 2181670
aauuucaugcuccacauau

SEQ ID NO: 2181672 - RNA, 19 nt, Artificial Sequence
  Description of Artificial Sequence: Synthetic oligonucleotide
  Sense strand starting at position 2503 of SEQ ID NO: 1883273
cccuacuuuccugggaguu

SEQ ID NO: 2181673 - RNA, 19 nt, Artificial Sequence
  Description of Artificial Sequence: Synthetic oligonucleotide
  Antisense strand to SEQ ID NO: 2181672
aacucccaggaaaguaggg

SEQ ID NO: 2181674 - RNA, 19 nt, Artificial Sequence
  Description of Artificial Sequence: Synthetic oligonucleotide
  Sense strand starting at position 2504 of SEQ ID NO: 1883273
ccuacuuuccugggaguua

SEQ ID NO: 2181675 - RNA, 19 nt, Artificial Sequence
  Description of Artificial Sequence: Synthetic oligonucleotide
  Antisense strand to SEQ ID NO: 2181674
uaacucccaggaaaguagg

SEQ ID NO: 2181676 - RNA, 19 nt, Artificial Sequence
  Description of Artificial Sequence: Synthetic oligonucleotide
  Sense strand starting at position 2540 of SEQ ID NO: 1883273
ggagauuccacgcagcuau

SEQ ID NO: 2181677 - RNA, 19 nt, Artificial Sequence
  Description of Artificial Sequence: Synthetic oligonucleotide
  Antisense strand to SEQ ID NO: 2181676
auagcugcguggaaucucc

SEQ ID NO: 2181678 - RNA, 19 nt, Artificial Sequence
  Description of Artificial Sequence: Synthetic oligonucleotide
  Sense strand starting at position 2563 of SEQ ID NO: 1883273
ucugcucucuuguuagaaa

SEQ ID NO: 2181679 - RNA, 19 nt, Artificial Sequence
  Description of Artificial Sequence: Synthetic oligonucleotide
  Antisense strand to SEQ ID NO: 2181678
uuucuaacaagagagcaga

SEQ ID NO: 2181680 - RNA, 19 nt, Artificial Sequence
  Description of Artificial Sequence: Synthetic oligonucleotide
  Sense strand starting at position 2739 of SEQ ID NO: 1883273
uguuaaaucuugcugacug

SEQ ID NO: 2181681 - RNA, 19 nt, Artificial Sequence
  Description of Artificial Sequence: Synthetic oligonucleotide
  Antisense strand to SEQ ID NO: 2181680
cagucagcaagauuuaaca

SEQ ID NO: 2181682 - RNA, 19 nt, Artificial Sequence
  Description of Artificial Sequence: Synthetic oligonucleotide
  Sense strand starting at position 2741 of SEQ ID NO: 1883273
uuaaaucuugcugacugau

SEQ ID NO: 2181683 - RNA, 19 nt, Artificial Sequence
  Description of Artificial Sequence: Synthetic oligonucleotide
  Antisense strand to SEQ ID NO: 2181682
aucagucagcaagauuuaa

SEQ ID NO: 2181684 - RNA, 19 nt, Artificial Sequence
  Description of Artificial Sequence: Synthetic oligonucleotide
  Sense strand starting at position 2900 of SEQ ID NO: 1883273
gaccuaugagcagagcauu

SEQ ID NO: 2181685 - RNA, 19 nt, Artificial Sequence
  Description of Artificial Sequence: Synthetic oligonucleotide
  Antisense strand to SEQ ID NO: 2181684
aaugcucugcucauagguc

SEQ ID NO: 2181686 - RNA, 19 nt, Artificial Sequence
  Description of Artificial Sequence: Synthetic oligonucleotide
  Sense strand starting at position 3108 of SEQ ID NO: 1883273
gcaccuucuccugggaaau

SEQ ID NO: 2181687 - RNA, 19 nt, Artificial Sequence
  Description of Artificial Sequence: Synthetic oligonucleotide
  Antisense strand to SEQ ID NO: 2181686
auuucccaggagaaggugc

SEQ ID NO: 2181688 - RNA, 19 nt, Artificial Sequence
  Description of Artificial Sequence: Synthetic oligonucleotide
  Sense strand starting at position 3142 of SEQ ID NO: 1883273
ggcccuaaguaucuauuaa

SEQ ID NO: 2181689 - RNA, 19 nt, Artificial Sequence
  Description of Artificial Sequence: Synthetic oligonucleotide
  Antisense strand to SEQ ID NO: 2181688
uuaauagauacuuagggcc

SEQ ID NO: 2181690 - RNA, 19 nt, Artificial Sequence
  Description of Artificial Sequence: Synthetic oligonucleotide
  Sense strand starting at position 3218 of SEQ ID NO: 1883273
gauugcugcggugauuaca

SEQ ID NO: 2181691 - RNA, 19 nt, Artificial Sequence
  Description of Artificial Sequence: Synthetic oligonucleotide
  Antisense strand to SEQ ID NO: 2181690
uguaaucaccgcagcaauc

SEQ ID NO: 2181692 - RNA, 19 nt, Artificial Sequence
  Description of Artificial Sequence: Synthetic oligonucleotide
  Sense strand starting at position 3352 of SEQ ID NO: 1883273
ucaaucaauuuggaaaggu

SEQ ID NO: 2181693 - RNA, 19 nt, Artificial Sequence
  Description of Artificial Sequence: Synthetic oligonucleotide
  Antisense strand to SEQ ID NO: 2181692
accuuuccaaauugauuga

SEQ ID NO: 2181694 - RNA, 19 nt, Artificial Sequence
  Description of Artificial Sequence: Synthetic oligonucleotide
  Sense strand starting at position 3396 of SEQ ID NO: 1883273
gguuaaaugugugcccaua

SEQ ID NO: 2181695 - RNA, 19 nt, Artificial Sequence
  Description of Artificial Sequence: Synthetic oligonucleotide
  Antisense strand to SEQ ID NO: 2181694
uaugggcacacauuuaacc

SEQ ID NO: 2181696 - RNA, 19 nt, Artificial Sequence
  Description of Artificial Sequence: Synthetic oligonucleotide
  Sense strand starting at position 3398 of SEQ ID NO: 1883273
uuaaaugugugcccauaac

SEQ ID NO: 2181697 - RNA, 19 nt, Artificial Sequence
  Description of Artificial Sequence: Synthetic oligonucleotide
  Antisense strand to SEQ ID NO: 2181696
guuaugggcacacauuuaa

SEQ ID NO: 2181698 - RNA, 19 nt, Artificial Sequence
  Description of Artificial Sequence: Synthetic oligonucleotide
  Sense strand starting at position 3605 of SEQ ID NO: 1883273
cuuugaggucuuugaucag

SEQ ID NO: 2181699 - RNA, 19 nt, Artificial Sequence
  Description of Artificial Sequence: Synthetic oligonucleotide
  Antisense strand to SEQ ID NO: 2181698
cugaucaaagaccucaaag

SEQ ID NO: 2181700 - RNA, 19 nt, Artificial Sequence
  Description of Artificial Sequence: Synthetic oligonucleotide
  Sense strand starting at position 3617 of SEQ ID NO: 1883273
ugaucagccuuucccugaa

SEQ ID NO: 2181701 - RNA, 19 nt, Artificial Sequence
  Description of Artificial Sequence: Synthetic oligonucleotide
  Antisense strand to SEQ ID NO: 2181700
uucagggaaaggcugauca

SEQ ID NO: 2181702 - RNA, 19 nt, Artificial Sequence
  Description of Artificial Sequence: Synthetic oligonucleotide
  Sense strand starting at position 3680 of SEQ ID NO: 1883273
gccuuaaucugacucagug

SEQ ID NO: 2181703 - RNA, 19 nt, Artificial Sequence
  Description of Artificial Sequence: Synthetic oligonucleotide
  Antisense strand to SEQ ID NO: 2181702
cacugagucagauuaaggc

SEQ ID NO: 2181704 - RNA, 19 nt, Artificial Sequence
  Description of Artificial Sequence: Synthetic oligonucleotide
  Sense strand starting at position 3798 of SEQ ID NO: 1883273
gucccacaccugugaacau

SEQ ID NO: 2181705 - RNA, 19 nt, Artificial Sequence
  Description of Artificial Sequence: Synthetic oligonucleotide
  Antisense strand to SEQ ID NO: 2181704
auguucacaggugugggac

SEQ ID NO: 2181706 - RNA, 19 nt, Artificial Sequence
  Description of Artificial Sequence: Synthetic oligonucleotide
  Sense strand starting at position 3828 of SEQ ID NO: 1883273
ucacauugccagggugaaa

SEQ ID NO: 2181707 - RNA, 19 nt, Artificial Sequence
  Description of Artificial Sequence: Synthetic oligonucleotide
  Antisense strand to SEQ ID NO: 2181706
uuucacccuggcaauguga

SEQ ID NO: 2181708 - RNA, 19 nt, Artificial Sequence
  Description of Artificial Sequence: Synthetic oligonucleotide
  Sense strand starting at position 3874 of SEQ ID NO: 1883273
ucuugcgaucuacaaagaa

SEQ ID NO: 2181709 - RNA, 19 nt, Artificial Sequence
  Description of Artificial Sequence: Synthetic oligonucleotide
  Antisense strand to SEQ ID NO: 2181708
uucuuuguagaucgcaaga

SEQ ID NO: 2181710 - RNA, 19 nt, Artificial Sequence
  Description of Artificial Sequence: Synthetic oligonucleotide
  Sense strand starting at position 3901 of SEQ ID NO: 1883273
ugggcaaaucgugauggaa

SEQ ID NO: 2181711 - RNA, 19 nt, Artificial Sequence
  Description of Artificial Sequence: Synthetic oligonucleotide
  Antisense strand to SEQ ID NO: 2181710
uuccaucacgauuugccca

SEQ ID NO: 2181712 - RNA, 19 nt, Artificial Sequence
  Description of Artificial Sequence: Synthetic oligonucleotide
  Sense strand starting at position 3904 of SEQ ID NO: 1883273
gcaaaucgugauggaagaa

SEQ ID NO: 2181713 - RNA, 19 nt, Artificial Sequence
  Description of Artificial Sequence: Synthetic oligonucleotide
  Antisense strand to SEQ ID NO: 2181712
uucuuccaucacgauuugc

SEQ ID NO: 2181714 - RNA, 19 nt, Artificial Sequence
  Description of Artificial Sequence: Synthetic oligonucleotide
  Sense strand starting at position 106 of SEQ ID NO: 1883274
ucuuuauauuuggcuguca

SEQ ID NO: 2181715 - RNA, 19 nt, Artificial Sequence
  Description of Artificial Sequence: Synthetic oligonucleotide
  Antisense strand to SEQ ID NO: 2181714
ugacagccaaauauaaaga

SEQ ID NO: 2181716 - RNA, 19 nt, Artificial Sequence
  Description of Artificial Sequence: Synthetic oligonucleotide
  Sense strand starting at position 107 of SEQ ID NO: 1883274
cuuuauauuuggcugucaa

SEQ ID NO: 2181717 - RNA, 19 nt, Artificial Sequence
  Description of Artificial Sequence: Synthetic oligonucleotide
  Antisense strand to SEQ ID NO: 2181716
uugacagccaaauauaaag

SEQ ID NO: 2181718 - RNA, 19 nt, Artificial Sequence
  Description of Artificial Sequence: Synthetic oligonucleotide
  Sense strand starting at position 108 of SEQ ID NO: 1883274
uuuauauuuggcugucaac

SEQ ID NO: 2181719 - RNA, 19 nt, Artificial Sequence
  Description of Artificial Sequence: Synthetic oligonucleotide
  Antisense strand to SEQ ID NO: 2181718
guugacagccaaauauaaa

SEQ ID NO: 2181720 - RNA, 19 nt, Artificial Sequence
  Description of Artificial Sequence: Synthetic oligonucleotide
  Sense strand starting at position 154 of SEQ ID NO: 1883274
gcuuguuugcguucauugu

SEQ ID NO: 2181721 - RNA, 19 nt, Artificial Sequence
  Description of Artificial Sequence: Synthetic oligonucleotide
  Antisense strand to SEQ ID NO: 2181720
acaaugaacgcaaacaagc

SEQ ID NO: 2181722 - RNA, 19 nt, Artificial Sequence
  Description of Artificial Sequence: Synthetic oligonucleotide
  Sense strand starting at position 180 of SEQ ID NO: 1883274
guuugugcagcaucuagua

SEQ ID NO: 2181723 - RNA, 19 nt, Artificial Sequence
  Description of Artificial Sequence: Synthetic oligonucleotide
  Antisense strand to SEQ ID NO: 2181722
uacuagaugcugcacaaac

SEQ ID NO: 2181724 - RNA, 19 nt, Artificial Sequence
  Description of Artificial Sequence: Synthetic oligonucleotide
  Sense strand starting at position 218 of SEQ ID NO: 1883274
caccaaauuugggaaaugu

SEQ ID NO: 2181725 - RNA, 19 nt, Artificial Sequence
  Description of Artificial Sequence: Synthetic oligonucleotide
  Antisense strand to SEQ ID NO: 2181724
acauuucccaaauuuggug

SEQ ID NO: 2181726 - RNA, 19 nt, Artificial Sequence
  Description of Artificial Sequence: Synthetic oligonucleotide
  Sense strand starting at position 332 of SEQ ID NO: 1883274
cuaacaggacacuguuaau

SEQ ID NO: 2181727 - RNA, 19 nt, Artificial Sequence
  Description of Artificial Sequence: Synthetic oligonucleotide
  Antisense strand to SEQ ID NO: 2181726
auuaacaguguccuguuag

SEQ ID NO: 2181728 - RNA, 19 nt, Artificial Sequence
  Description of Artificial Sequence: Synthetic oligonucleotide
  Sense strand starting at position 376 of SEQ ID NO: 1883274
ggacaaucuuuauugcucu

SEQ ID NO: 2181729 - RNA, 19 nt, Artificial Sequence
  Description of Artificial Sequence: Synthetic oligonucleotide
  Antisense strand to SEQ ID NO: 2181728
agagcaauaaagauugucc

SEQ ID NO: 2181730 - RNA, 19 nt, Artificial Sequence
  Description of Artificial Sequence: Synthetic oligonucleotide
  Sense strand starting at position 387 of SEQ ID NO: 1883274
auugcucuauauuugaguu

SEQ ID NO: 2181731 - RNA, 19 nt, Artificial Sequence
  Description of Artificial Sequence: Synthetic oligonucleotide
  Antisense strand to SEQ ID NO: 2181730
aacucaaauauagagcaau

SEQ ID NO: 2181732 - RNA, 19 nt, Artificial Sequence
  Description of Artificial Sequence: Synthetic oligonucleotide
  Sense strand starting at position 616 of SEQ ID NO: 1883274
auuucuuuaucugucaguu

SEQ ID NO: 2181733 - RNA, 19 nt, Artificial Sequence
  Description of Artificial Sequence: Synthetic oligonucleotide
  Antisense strand to SEQ ID NO: 2181732
aacugacagauaaagaaau

SEQ ID NO: 2181734 - RNA, 19 nt, Artificial Sequence
  Description of Artificial Sequence: Synthetic oligonucleotide
  Sense strand starting at position 710 of SEQ ID NO: 1883274
ucuuuacauguuggauaau

SEQ ID NO: 2181735 - RNA, 19 nt, Artificial Sequence
  Description of Artificial Sequence: Synthetic oligonucleotide
  Antisense strand to SEQ ID NO: 2181734
auuauccaacauguaaaga

SEQ ID NO: 2181736 - RNA, 19 nt, Artificial Sequence
  Description of Artificial Sequence: Synthetic oligonucleotide
  Sense strand starting at position 733 of SEQ ID NO: 1883274
gacagaacguuaguaucau

SEQ ID NO: 2181737 - RNA, 19 nt, Artificial Sequence
  Description of Artificial Sequence: Synthetic oligonucleotide
  Antisense strand to SEQ ID NO: 2181736
augauacuaacguucuguc

SEQ ID NO: 2181738 - RNA, 19 nt, Artificial Sequence
  Description of Artificial Sequence: Synthetic oligonucleotide
  Sense strand starting at position 741 of SEQ ID NO: 1883274
guuaguaucauggauguua

SEQ ID NO: 2181739 - RNA, 19 nt, Artificial Sequence
  Description of Artificial Sequence: Synthetic oligonucleotide
  Antisense strand to SEQ ID NO: 2181738
uaacauccaugauacuaac

SEQ ID NO: 2181740 - RNA, 19 nt, Artificial Sequence
  Description of Artificial Sequence: Synthetic oligonucleotide
  Sense strand starting at position 743 of SEQ ID NO: 1883274
uaguaucauggauguuaac

SEQ ID NO: 2181741 - RNA, 19 nt, Artificial Sequence
  Description of Artificial Sequence: Synthetic oligonucleotide
  Antisense strand to SEQ ID NO: 2181740
guuaacauccaugauacua

SEQ ID NO: 2181742 - RNA, 19 nt, Artificial Sequence
  Description of Artificial Sequence: Synthetic oligonucleotide
  Sense strand starting at position 814 of SEQ ID NO: 1883274
cagguaauauucuuaguug

SEQ ID NO: 2181743 - RNA, 19 nt, Artificial Sequence
  Description of Artificial Sequence: Synthetic oligonucleotide
  Antisense strand to SEQ ID NO: 2181742
caacuaagaauauuaccug

SEQ ID NO: 2181744 - RNA, 19 nt, Artificial Sequence
  Description of Artificial Sequence: Synthetic oligonucleotide
  Sense strand starting at position 932 of SEQ ID NO: 1883274
cagucagugauaugaugga

SEQ ID NO: 2181745 - RNA, 19 nt, Artificial Sequence
  Description of Artificial Sequence: Synthetic oligonucleotide
  Antisense strand to SEQ ID NO: 2181744
uccaucauaucacugacug

SEQ ID NO: 2181746 - RNA, 19 nt, Artificial Sequence
  Description of Artificial Sequence: Synthetic oligonucleotide
  Sense strand starting at position 1119 of SEQ ID NO: 1883274
cugucugagccaugaagac

SEQ ID NO: 2181747 - RNA, 19 nt, Artificial Sequence
  Description of Artificial Sequence: Synthetic oligonucleotide
  Antisense strand to SEQ ID NO: 2181746
gucuucauggcucagacag

SEQ ID NO: 2181748 - RNA, 19 nt, Artificial Sequence
  Description of Artificial Sequence: Synthetic oligonucleotide
  Sense strand starting at position 1139 of SEQ ID NO: 1883274
acacuuagcccaggcuaaa

SEQ ID NO: 2181749 - RNA, 19 nt, Artificial Sequence
  Description of Artificial Sequence: Synthetic oligonucleotide
  Antisense strand to SEQ ID NO: 2181748
uuuagccugggcuaagugu

SEQ ID NO: 2181750 - RNA, 19 nt, Artificial Sequence
  Description of Artificial Sequence: Synthetic oligonucleotide
  Sense strand starting at position 1175 of SEQ ID NO: 1883274
cuuacuuguccagauccau

SEQ ID NO: 2181751 - RNA, 19 nt, Artificial Sequence
  Description of Artificial Sequence: Synthetic oligonucleotide
  Antisense strand to SEQ ID NO: 2181750
auggaucuggacaaguaag

SEQ ID NO: 2181752 - RNA, 19 nt, Artificial Sequence
  Description of Artificial Sequence: Synthetic oligonucleotide
  Sense strand starting at position 1295 of SEQ ID NO: 1883274
uuguaugcagggugaagaa

SEQ ID NO: 2181753 - RNA, 19 nt, Artificial Sequence
  Description of Artificial Sequence: Synthetic oligonucleotide
  Antisense strand to SEQ ID NO: 2181752
uucuucacccugcauacaa

SEQ ID NO: 2181754 - RNA, 19 nt, Artificial Sequence
  Description of Artificial Sequence: Synthetic oligonucleotide
  Sense strand starting at position 1324 of SEQ ID NO: 1883274
agggucuuagucuauuaua

SEQ ID NO: 2181755 - RNA, 19 nt, Artificial Sequence
  Description of Artificial Sequence: Synthetic oligonucleotide
  Antisense strand to SEQ ID NO: 2181754
uauaauagacuaagacccu

SEQ ID NO: 2181756 - RNA, 19 nt, Artificial Sequence
  Description of Artificial Sequence: Synthetic oligonucleotide
  Sense strand starting at position 1637 of SEQ ID NO: 1883274
ggcaauuaaucugcagaau

SEQ ID NO: 2181757 - RNA, 19 nt, Artificial Sequence
  Description of Artificial Sequence: Synthetic oligonucleotide
  Antisense strand to SEQ ID NO: 2181756
auucugcagauuaauugcc

SEQ ID NO: 2181758 - RNA, 19 nt, Artificial Sequence
  Description of Artificial Sequence: Synthetic oligonucleotide
  Sense strand starting at position 1638 of SEQ ID NO: 1883274
gcaauuaaucugcagaaug

SEQ ID NO: 2181759 - RNA, 19 nt, Artificial Sequence
  Description of Artificial Sequence: Synthetic oligonucleotide
  Antisense strand to SEQ ID NO: 2181758
cauucugcagauuaauugc

SEQ ID NO: 2181760 - RNA, 19 nt, Artificial Sequence
  Description of Artificial Sequence: Synthetic oligonucleotide
  Sense strand starting at position 1648 of SEQ ID NO: 1883274
ugcagaauggcacaaugau

SEQ ID NO: 2181761 - RNA, 19 nt, Artificial Sequence
  Description of Artificial Sequence: Synthetic oligonucleotide
  Antisense strand to SEQ ID NO: 2181760
aucauugugccauucugca

SEQ ID NO: 2181762 - RNA, 19 nt, Artificial Sequence
  Description of Artificial Sequence: Synthetic oligonucleotide
  Sense strand starting at position 1878 of SEQ ID NO: 1883274
aauuaagaguagcuuguaa

SEQ ID NO: 2181763 - RNA, 19 nt, Artificial Sequence
  Description of Artificial Sequence: Synthetic oligonucleotide
  Antisense strand to SEQ ID NO: 2181762
uuacaagcuacucuuaauu

SEQ ID NO: 2181764 - RNA, 19 nt, Artificial Sequence
  Description of Artificial Sequence: Synthetic oligonucleotide
  Sense strand starting at position 1901 of SEQ ID NO: 1883274
accucagaguagucucaca

SEQ ID NO: 2181765 - RNA, 19 nt, Artificial Sequence
  Description of Artificial Sequence: Synthetic oligonucleotide
  Antisense strand to SEQ ID NO: 2181764
ugugagacuacucugaggu

SEQ ID NO: 2181766 - RNA, 19 nt, Artificial Sequence
  Description of Artificial Sequence: Synthetic oligonucleotide
  Sense strand starting at position 1992 of SEQ ID NO: 1883274
gcagaagucacauguggag

SEQ ID NO: 2181767 - RNA, 19 nt, Artificial Sequence
  Description of Artificial Sequence: Synthetic oligonucleotide
  Antisense strand to SEQ ID NO: 2181766
cuccacaugugacuucugc

SEQ ID NO: 2181768 - RNA, 19 nt, Artificial Sequence
  Description of Artificial Sequence: Synthetic oligonucleotide
  Sense strand starting at position 2378 of SEQ ID NO: 1883274
auuuguaggugacaugaga

SEQ ID NO: 2181769 - RNA, 19 nt, Artificial Sequence
  Description of Artificial Sequence: Synthetic oligonucleotide
  Antisense strand to SEQ ID NO: 2181768
ucucaugucaccuacaaau

SEQ ID NO: 2181770 - RNA, 19 nt, Artificial Sequence
  Description of Artificial Sequence: Synthetic oligonucleotide
  Sense strand starting at position 2544 of SEQ ID NO: 1883274
auugccaagucuucugaga

SEQ ID NO: 2181771 - RNA, 19 nt, Artificial Sequence
  Description of Artificial Sequence: Synthetic oligonucleotide
  Antisense strand to SEQ ID NO: 2181770
ucucagaagacuuggcaau

SEQ ID NO: 2181772 - RNA, 19 nt, Artificial Sequence
  Description of Artificial Sequence: Synthetic oligonucleotide
  Sense strand starting at position 2648 of SEQ ID NO: 1883274
cucucagcugauugaaaga

SEQ ID NO: 2181773 - RNA, 19 nt, Artificial Sequence
  Description of Artificial Sequence: Synthetic oligonucleotide
  Antisense strand to SEQ ID NO: 2181772
ucuuucaaucagcugagag

SEQ ID NO: 2181774 - RNA, 19 nt, Artificial Sequence
  Description of Artificial Sequence: Synthetic oligonucleotide
  Sense strand starting at position 2674 of SEQ ID NO: 1883274
ggaacaugaugugucugua

SEQ ID NO: 2181775 - RNA, 19 nt, Artificial Sequence
  Description of Artificial Sequence: Synthetic oligonucleotide
  Antisense strand to SEQ ID NO: 2181774
uacagacacaucauguucc

SEQ ID NO: 2181776 - RNA, 19 nt, Artificial Sequence
  Description of Artificial Sequence: Synthetic oligonucleotide
  Sense strand starting at position 2677 of SEQ ID NO: 1883274
acaugaugugucuguagaa

SEQ ID NO: 2181777 - RNA, 19 nt, Artificial Sequence
  Description of Artificial Sequence: Synthetic oligonucleotide
  Antisense strand to SEQ ID NO: 2181776
uucuacagacacaucaugu

SEQ ID NO: 2181778 - RNA, 19 nt, Artificial Sequence
  Description of Artificial Sequence: Synthetic oligonucleotide
  Sense strand starting at position 2678 of SEQ ID NO: 1883274
caugaugugucuguagaac

SEQ ID NO: 2181779 - RNA, 19 nt, Artificial Sequence
  Description of Artificial Sequence: Synthetic oligonucleotide
  Antisense strand to SEQ ID NO: 2181778
guucuacagacacaucaug

SEQ ID NO: 2181780 - RNA, 19 nt, Artificial Sequence
  Description of Artificial Sequence: Synthetic oligonucleotide
  Sense strand starting at position 2997 of SEQ ID NO: 1883274
auaguauggaacugguaua

SEQ ID NO: 2181781 - RNA, 19 nt, Artificial Sequence
  Description of Artificial Sequence: Synthetic oligonucleotide
  Antisense strand to SEQ ID NO: 2181780
uauaccaguuccauacuau

SEQ ID NO: 2181782 - RNA, 19 nt, Artificial Sequence
  Description of Artificial Sequence: Synthetic oligonucleotide
  Sense strand starting at position 3252 of SEQ ID NO: 1883274
ggaggaucuuucucagucu

SEQ ID NO: 2181783 - RNA, 19 nt, Artificial Sequence
  Description of Artificial Sequence: Synthetic oligonucleotide
  Antisense strand to SEQ ID NO: 2181782
agacugagaaagauccucc

SEQ ID NO: 2181784 - RNA, 19 nt, Artificial Sequence
  Description of Artificial Sequence: Synthetic oligonucleotide
  Sense strand starting at position 3255 of SEQ ID NO: 1883274
ggaucuuucucagucugau

SEQ ID NO: 2181785 - RNA, 19 nt, Artificial Sequence
  Description of Artificial Sequence: Synthetic oligonucleotide
  Antisense strand to SEQ ID NO: 2181784
aucagacugagaaagaucc

SEQ ID NO: 2181786 - RNA, 19 nt, Artificial Sequence
  Description of Artificial Sequence: Synthetic oligonucleotide
  Sense strand starting at position 3486 of SEQ ID NO: 1883274
aagugugaauggucuuaga

SEQ ID NO: 2181787 - RNA, 19 nt, Artificial Sequence
  Description of Artificial Sequence: Synthetic oligonucleotide
  Antisense strand to SEQ ID NO: 2181786
ucuaagaccauucacacuu

SEQ ID NO: 2181788 - RNA, 19 nt, Artificial Sequence
  Description of Artificial Sequence: Synthetic oligonucleotide
  Sense strand starting at position 3620 of SEQ ID NO: 1883274
gcuagaucaccagagguca

SEQ ID NO: 2181789 - RNA, 19 nt, Artificial Sequence
  Description of Artificial Sequence: Synthetic oligonucleotide
  Antisense strand to SEQ ID NO: 2181788
ugaccucuggugaucuagc

SEQ ID NO: 2181790 - RNA, 19 nt, Artificial Sequence
  Description of Artificial Sequence: Synthetic oligonucleotide
  Sense strand starting at position 3884 of SEQ ID NO: 1883274
uuacuugucagguggacaa

SEQ ID NO: 2181791 - RNA, 19 nt, Artificial Sequence
  Description of Artificial Sequence: Synthetic oligonucleotide
  Antisense strand to SEQ ID NO: 2181790
uuguccaccugacaaguaa

SEQ ID NO: 2181792 - RNA, 19 nt, Artificial Sequence
  Description of Artificial Sequence: Synthetic oligonucleotide
  Sense strand starting at position 3899 of SEQ ID NO: 1883274
acaacaguucagugaggga

SEQ ID NO: 2181793 - RNA, 19 nt, Artificial Sequence
  Description of Artificial Sequence: Synthetic oligonucleotide
  Antisense strand to SEQ ID NO: 2181792
ucccucacugaacuguugu

SEQ ID NO: 2181794 - RNA, 19 nt, Artificial Sequence
  Description of Artificial Sequence: Synthetic oligonucleotide
  Sense strand starting at position 39 of SEQ ID NO: 1883275
ucaauuacguuuccuaaug

SEQ ID NO: 2181795 - RNA, 19 nt, Artificial Sequence
  Description of Artificial Sequence: Synthetic oligonucleotide
  Antisense strand to SEQ ID NO: 2181794
cauuaggaaacguaauuga

SEQ ID NO: 2181796 - RNA, 19 nt, Artificial Sequence
  Description of Artificial Sequence: Synthetic oligonucleotide
  Sense strand starting at position 213 of SEQ ID NO: 1883275
guagguucugaauggcaaa

SEQ ID NO: 2181797 - RNA, 19 nt, Artificial Sequence
  Description of Artificial Sequence: Synthetic oligonucleotide
  Antisense strand to SEQ ID NO: 2181796
uuugccauucagaaccuac

SEQ ID NO: 2181798 - RNA, 19 nt, Artificial Sequence
  Description of Artificial Sequence: Synthetic oligonucleotide
  Sense strand starting at position 258 of SEQ ID NO: 1883275
aaugguugccuugagacaa

SEQ ID NO: 2181799 - RNA, 19 nt, Artificial Sequence
  Description of Artificial Sequence: Synthetic oligonucleotide
  Antisense strand to SEQ ID NO: 2181798
uugucucaaggcaaccauu

SEQ ID NO: 2181800 - RNA, 19 nt, Artificial Sequence
  Description of Artificial Sequence: Synthetic oligonucleotide
  Sense strand starting at position 475 of SEQ ID NO: 1883275
cucaguuaauaguucuaga

SEQ ID NO: 2181801 - RNA, 19 nt, Artificial Sequence
  Description of Artificial Sequence: Synthetic oligonucleotide
  Antisense strand to SEQ ID NO: 2181800
ucuagaacuauuaacugag

SEQ ID NO: 2181802 - RNA, 19 nt, Artificial Sequence
  Description of Artificial Sequence: Synthetic oligonucleotide
  Sense strand starting at position 494 of SEQ ID NO: 1883275
gccagcuaccuccaggaua

SEQ ID NO: 2181803 - RNA, 19 nt, Artificial Sequence
  Description of Artificial Sequence: Synthetic oligonucleotide
  Antisense strand to SEQ ID NO: 2181802
uauccuggagguagcuggc

SEQ ID NO: 2181804 - RNA, 19 nt, Artificial Sequence
  Description of Artificial Sequence: Synthetic oligonucleotide
  Sense strand starting at position 516 of SEQ ID NO: 1883275
ucaguugaauauguccuaa

SEQ ID NO: 2181805 - RNA, 19 nt, Artificial Sequence
  Description of Artificial Sequence: Synthetic oligonucleotide
  Antisense strand to SEQ ID NO: 2181804
uuaggacauauucaacuga

SEQ ID NO: 2181806 - RNA, 19 nt, Artificial Sequence
  Description of Artificial Sequence: Synthetic oligonucleotide
  Sense strand starting at position 518 of SEQ ID NO: 1883275
aguugaauauguccuaaua

SEQ ID NO: 2181807 - RNA, 19 nt, Artificial Sequence
  Description of Artificial Sequence: Synthetic oligonucleotide
  Antisense strand to SEQ ID NO: 2181806
uauuaggacauauucaacu

SEQ ID NO: 2181808 - RNA, 19 nt, Artificial Sequence
  Description of Artificial Sequence: Synthetic oligonucleotide
  Sense strand starting at position 578 of SEQ ID NO: 1883275
ugucccuguccuuaaucaa

SEQ ID NO: 2181809 - RNA, 19 nt, Artificial Sequence
  Description of Artificial Sequence: Synthetic oligonucleotide
  Antisense strand to SEQ ID NO: 2181808
uugauuaaggacagggaca

SEQ ID NO: 2181810 - RNA, 19 nt, Artificial Sequence
  Description of Artificial Sequence: Synthetic oligonucleotide
  Sense strand starting at position 634 of SEQ ID NO: 1883275
accaucaacucagugugua

SEQ ID NO: 2181811 - RNA, 19 nt, Artificial Sequence
  Description of Artificial Sequence: Synthetic oligonucleotide
  Antisense strand to SEQ ID NO: 2181810
uacacacugaguugauggu

SEQ ID NO: 2181812 - RNA, 19 nt, Artificial Sequence
  Description of Artificial Sequence: Synthetic oligonucleotide
  Sense strand starting at position 646 of SEQ ID NO: 1883275
guguguagggcagaaacuu

SEQ ID NO: 2181813 - RNA, 19 nt, Artificial Sequence
  Description of Artificial Sequence: Synthetic oligonucleotide
  Antisense strand to SEQ ID NO: 2181812
aaguuucugcccuacacac

SEQ ID NO: 2181814 - RNA, 19 nt, Artificial Sequence
  Description of Artificial Sequence: Synthetic oligonucleotide
  Sense strand starting at position 836 of SEQ ID NO: 1883275
gagugcugaccuuaugcua

SEQ ID NO: 2181815 - RNA, 19 nt, Artificial Sequence
  Description of Artificial Sequence: Synthetic oligonucleotide
  Antisense strand to SEQ ID NO: 2181814
uagcauaaggucagcacuc

SEQ ID NO: 2181816 - RNA, 19 nt, Artificial Sequence
  Description of Artificial Sequence: Synthetic oligonucleotide
  Sense strand starting at position 922 of SEQ ID NO: 1883275
uuacguguuagugaggaag

SEQ ID NO: 2181817 - RNA, 19 nt, Artificial Sequence
  Description of Artificial Sequence: Synthetic oligonucleotide
  Antisense strand to SEQ ID NO: 2181816
cuuccucacuaacacguaa

SEQ ID NO: 2181818 - RNA, 19 nt, Artificial Sequence
  Description of Artificial Sequence: Synthetic oligonucleotide
  Sense strand starting at position 1014 of SEQ ID NO: 1883275
gggcucugacaggguuaga

SEQ ID NO: 2181819 - RNA, 19 nt, Artificial Sequence
  Description of Artificial Sequence: Synthetic oligonucleotide
  Antisense strand to SEQ ID NO: 2181818
ucuaacccugucagagccc

SEQ ID NO: 2181820 - RNA, 19 nt, Artificial Sequence
  Description of Artificial Sequence: Synthetic oligonucleotide
  Sense strand starting at position 1023 of SEQ ID NO: 1883275
caggguuagagugagugau

SEQ ID NO: 2181821 - RNA, 19 nt, Artificial Sequence
  Description of Artificial Sequence: Synthetic oligonucleotide
  Antisense strand to SEQ ID NO: 2181820
aucacucacucuaacccug

SEQ ID NO: 2181822 - RNA, 19 nt, Artificial Sequence
  Description of Artificial Sequence: Synthetic oligonucleotide
  Sense strand starting at position 1027 of SEQ ID NO: 1883275
guuagagugagugaugcuu

SEQ ID NO: 2181823 - RNA, 19 nt, Artificial Sequence
  Description of Artificial Sequence: Synthetic oligonucleotide
  Antisense strand to SEQ ID NO: 2181822
aagcaucacucacucuaac

SEQ ID NO: 2181824 - RNA, 19 nt, Artificial Sequence
  Description of Artificial Sequence: Synthetic oligonucleotide
  Sense strand starting at position 1438 of SEQ ID NO: 1883275
caaacauucuggguagcuu

SEQ ID NO: 2181825 - RNA, 19 nt, Artificial Sequence
  Description of Artificial Sequence: Synthetic oligonucleotide
  Antisense strand to SEQ ID NO: 2181824
aagcuacccagaauguuug

SEQ ID NO: 2181826 - RNA, 19 nt, Artificial Sequence
  Description of Artificial Sequence: Synthetic oligonucleotide
  Sense strand starting at position 1546 of SEQ ID NO: 1883275
ccaggaugucugcaacaga

SEQ ID NO: 2181827 - RNA, 19 nt, Artificial Sequence
  Description of Artificial Sequence: Synthetic oligonucleotide
  Antisense strand to SEQ ID NO: 2181826
ucuguugcagacauccugg

SEQ ID NO: 2181828 - RNA, 19 nt, Artificial Sequence
  Description of Artificial Sequence: Synthetic oligonucleotide
  Sense strand starting at position 1644 of SEQ ID NO: 1883275
uuuguuauaggucacugua

SEQ ID NO: 2181829 - RNA, 19 nt, Artificial Sequence
  Description of Artificial Sequence: Synthetic oligonucleotide
  Antisense strand to SEQ ID NO: 2181828
uacagugaccuauaacaaa

SEQ ID NO: 2181830 - RNA, 19 nt, Artificial Sequence
  Description of Artificial Sequence: Synthetic oligonucleotide
  Sense strand starting at position 1646 of SEQ ID NO: 1883275
uguuauaggucacuguaag

SEQ ID NO: 2181831 - RNA, 19 nt, Artificial Sequence
  Description of Artificial Sequence: Synthetic oligonucleotide
  Antisense strand to SEQ ID NO: 2181830
cuuacagugaccuauaaca

SEQ ID NO: 2181832 - RNA, 19 nt, Artificial Sequence
  Description of Artificial Sequence: Synthetic oligonucleotide
  Sense strand starting at position 1755 of SEQ ID NO: 1883275
aacugcuauguugagugua

SEQ ID NO: 2181833 - RNA, 19 nt, Artificial Sequence
  Description of Artificial Sequence: Synthetic oligonucleotide
  Antisense strand to SEQ ID NO: 2181832
uacacucaacauagcaguu

SEQ ID NO: 2181834 - RNA, 19 nt, Artificial Sequence
  Description of Artificial Sequence: Synthetic oligonucleotide
  Sense strand starting at position 1760 of SEQ ID NO: 1883275
cuauguugaguguaaaccu

SEQ ID NO: 2181835 - RNA, 19 nt, Artificial Sequence
  Description of Artificial Sequence: Synthetic oligonucleotide
  Antisense strand to SEQ ID NO: 2181834
agguuuacacucaacauag

SEQ ID NO: 2181836 - RNA, 19 nt, Artificial Sequence
  Description of Artificial Sequence: Synthetic oligonucleotide
  Sense strand starting at position 1857 of SEQ ID NO: 1883275
uuaaucuagcucuaagaug

SEQ ID NO: 2181837 - RNA, 19 nt, Artificial Sequence
  Description of Artificial Sequence: Synthetic oligonucleotide
  Antisense strand to SEQ ID NO: 2181836
caucuuagagcuagauuaa

SEQ ID NO: 2181838 - RNA, 19 nt, Artificial Sequence
  Description of Artificial Sequence: Synthetic oligonucleotide
  Sense strand starting at position 1921 of SEQ ID NO: 1883275
ggucauauucuggaugucu

SEQ ID NO: 2181839 - RNA, 19 nt, Artificial Sequence
  Description of Artificial Sequence: Synthetic oligonucleotide
  Antisense strand to SEQ ID NO: 2181838
agacauccagaauaugacc

SEQ ID NO: 2181840 - RNA, 19 nt, Artificial Sequence
  Description of Artificial Sequence: Synthetic oligonucleotide
  Sense strand starting at position 1923 of SEQ ID NO: 1883275
ucauauucuggaugucuuu

SEQ ID NO: 2181841 - RNA, 19 nt, Artificial Sequence
  Description of Artificial Sequence: Synthetic oligonucleotide
  Antisense strand to SEQ ID NO: 2181840
aaagacauccagaauauga

SEQ ID NO: 2181842 - RNA, 19 nt, Artificial Sequence
  Description of Artificial Sequence: Synthetic oligonucleotide
  Sense strand starting at position 2003 of SEQ ID NO: 1883275
uguuauggaugauuccaaa

SEQ ID NO: 2181843 - RNA, 19 nt, Artificial Sequence
  Description of Artificial Sequence: Synthetic oligonucleotide
  Antisense strand to SEQ ID NO: 2181842
uuuggaaucauccauaaca

SEQ ID NO: 2181844 - RNA, 19 nt, Artificial Sequence
  Description of Artificial Sequence: Synthetic oligonucleotide
  Sense strand starting at position 2026 of SEQ ID NO: 1883275
uggcuaugcaacuggaaga

SEQ ID NO: 2181845 - RNA, 19 nt, Artificial Sequence
  Description of Artificial Sequence: Synthetic oligonucleotide
  Antisense strand to SEQ ID NO: 2181844
ucuuccaguugcauagcca

SEQ ID NO: 2181846 - RNA, 19 nt, Artificial Sequence
  Description of Artificial Sequence: Synthetic oligonucleotide
  Sense strand starting at position 2027 of SEQ ID NO: 1883275
ggcuaugcaacuggaagaa

SEQ ID NO: 2181847 - RNA, 19 nt, Artificial Sequence
  Description of Artificial Sequence: Synthetic oligonucleotide
  Antisense strand to SEQ ID NO: 2181846
uucuuccaguugcauagcc

SEQ ID NO: 2181848 - RNA, 19 nt, Artificial Sequence
  Description of Artificial Sequence: Synthetic oligonucleotide
  Sense strand starting at position 2040 of SEQ ID NO: 1883275
gaagaauggaguuggccau

SEQ ID NO: 2181849 - RNA, 19 nt, Artificial Sequence
  Description of Artificial Sequence: Synthetic oligonucleotide
  Antisense strand to SEQ ID NO: 2181848
auggccaacuccauucuuc

SEQ ID NO: 2181850 - RNA, 19 nt, Artificial Sequence
  Description of Artificial Sequence: Synthetic oligonucleotide
  Sense strand starting at position 2044 of SEQ ID NO: 1883275
aauggaguuggccauuacu

SEQ ID NO: 2181851 - RNA, 19 nt, Artificial Sequence
  Description of Artificial Sequence: Synthetic oligonucleotide
  Antisense strand to SEQ ID NO: 2181850
aguaauggccaacuccauu

SEQ ID NO: 2181852 - RNA, 19 nt, Artificial Sequence
  Description of Artificial Sequence: Synthetic oligonucleotide
  Sense strand starting at position 2121 of SEQ ID NO: 1883275
aaaugcuaaguuugaguua

SEQ ID NO: 2181853 - RNA, 19 nt, Artificial Sequence
  Description of Artificial Sequence: Synthetic oligonucleotide
  Antisense strand to SEQ ID NO: 2181852
uaacucaaacuuagcauuu

SEQ ID NO: 2181854 - RNA, 19 nt, Artificial Sequence
  Description of Artificial Sequence: Synthetic oligonucleotide
  Sense strand starting at position 2157 of SEQ ID NO: 1883275
uggagagguucaguagaca

SEQ ID NO: 2181855 - RNA, 19 nt, Artificial Sequence
  Description of Artificial Sequence: Synthetic oligonucleotide
  Antisense strand to SEQ ID NO: 2181854
ugucuacugaaccucucca

SEQ ID NO: 2181856 - RNA, 19 nt, Artificial Sequence
  Description of Artificial Sequence: Synthetic oligonucleotide
  Sense strand starting at position 2288 of SEQ ID NO: 1883275
uagauaauggcgugaauag

SEQ ID NO: 2181857 - RNA, 19 nt, Artificial Sequence
  Description of Artificial Sequence: Synthetic oligonucleotide
  Antisense strand to SEQ ID NO: 2181856
cuauucacgccauuaucua

SEQ ID NO: 2181858 - RNA, 19 nt, Artificial Sequence
  Description of Artificial Sequence: Synthetic oligonucleotide
  Sense strand starting at position 2396 of SEQ ID NO: 1883275
guaacagcucaaggaguaa

SEQ ID NO: 2181859 - RNA, 19 nt, Artificial Sequence
  Description of Artificial Sequence: Synthetic oligonucleotide
  Antisense strand to SEQ ID NO: 2181858
uuacuccuugagcuguuac

SEQ ID NO: 2181860 - RNA, 19 nt, Artificial Sequence
  Description of Artificial Sequence: Synthetic oligonucleotide
  Sense strand starting at position 3172 of SEQ ID NO: 1883275
cuuuauuaccguuaaguau

SEQ ID NO: 2181861 - RNA, 19 nt, Artificial Sequence
  Description of Artificial Sequence: Synthetic oligonucleotide
  Antisense strand to SEQ ID NO: 2181860
auacuuaacgguaauaaag

SEQ ID NO: 2181862 - RNA, 19 nt, Artificial Sequence
  Description of Artificial Sequence: Synthetic oligonucleotide
  Sense strand starting at position 3295 of SEQ ID NO: 1883275
uguuacuucugacuaaguc

SEQ ID NO: 2181863 - RNA, 19 nt, Artificial Sequence
  Description of Artificial Sequence: Synthetic oligonucleotide
  Antisense strand to SEQ ID NO: 2181862
gacuuagucagaaguaaca

SEQ ID NO: 2181864 - RNA, 19 nt, Artificial Sequence
  Description of Artificial Sequence: Synthetic oligonucleotide
  Sense strand starting at position 3296 of SEQ ID NO: 1883275
guuacuucugacuaagucu

SEQ ID NO: 2181865 - RNA, 19 nt, Artificial Sequence
  Description of Artificial Sequence: Synthetic oligonucleotide
  Antisense strand to SEQ ID NO: 2181864
agacuuagucagaaguaac

SEQ ID NO: 2181866 - RNA, 19 nt, Artificial Sequence
  Description of Artificial Sequence: Synthetic oligonucleotide
  Sense strand starting at position 3429 of SEQ ID NO: 1883275
uuguaaguugccuccguau

SEQ ID NO: 2181867 - RNA, 19 nt, Artificial Sequence
  Description of Artificial Sequence: Synthetic oligonucleotide
  Antisense strand to SEQ ID NO: 2181866
auacggaggcaacuuacaa

SEQ ID NO: 2181868 - RNA, 19 nt, Artificial Sequence
  Description of Artificial Sequence: Synthetic oligonucleotide
  Sense strand starting at position 3482 of SEQ ID NO: 1883275
ccuuuauucuggucuggau

SEQ ID NO: 2181869 - RNA, 19 nt, Artificial Sequence
  Description of Artificial Sequence: Synthetic oligonucleotide
  Antisense strand to SEQ ID NO: 2181868
auccagaccagaauaaagg

SEQ ID NO: 2181870 - RNA, 19 nt, Artificial Sequence
  Description of Artificial Sequence: Synthetic oligonucleotide
  Sense strand starting at position 3580 of SEQ ID NO: 1883275
cagagucuagcauguagau

SEQ ID NO: 2181871 - RNA, 19 nt, Artificial Sequence
  Description of Artificial Sequence: Synthetic oligonucleotide
  Antisense strand to SEQ ID NO: 2181870
aucuacaugcuagacucug

SEQ ID NO: 2181872 - RNA, 19 nt, Artificial Sequence
  Description of Artificial Sequence: Synthetic oligonucleotide
  Sense strand starting at position 3885 of SEQ ID NO: 1883275
agguuacauugagucaaca

SEQ ID NO: 2181873 - RNA, 19 nt, Artificial Sequence
  Description of Artificial Sequence: Synthetic oligonucleotide
  Antisense strand to SEQ ID NO: 2181872
uguugacucaauguaaccu

SEQ ID NO: 2181874 - RNA, 19 nt, Artificial Sequence
  Description of Artificial Sequence: Synthetic oligonucleotide
  Sense strand starting at position 189 of SEQ ID NO: 1883276
uugggauguugucuacacu

SEQ ID NO: 2181875 - RNA, 19 nt, Artificial Sequence
  Description of Artificial Sequence: Synthetic oligonucleotide
  Antisense strand to SEQ ID NO: 2181874
aguguagacaacaucccaa

SEQ ID NO: 2181876 - RNA, 19 nt, Artificial Sequence
  Description of Artificial Sequence: Synthetic oligonucleotide
  Sense strand starting at position 377 of SEQ ID NO: 1883276
gcuucuugaccauggcauu

SEQ ID NO: 2181877 - RNA, 19 nt, Artificial Sequence
  Description of Artificial Sequence: Synthetic oligonucleotide
  Antisense strand to SEQ ID NO: 2181876
aaugccauggucaagaagc

SEQ ID NO: 2181878 - RNA, 19 nt, Artificial Sequence
  Description of Artificial Sequence: Synthetic oligonucleotide
  Sense strand starting at position 444 of SEQ ID NO: 1883276
aaugcagauuuagagucau

SEQ ID NO: 2181879 - RNA, 19 nt, Artificial Sequence
  Description of Artificial Sequence: Synthetic oligonucleotide
  Antisense strand to SEQ ID NO: 2181878
augacucuaaaucugcauu

SEQ ID NO: 2181880 - RNA, 19 nt, Artificial Sequence
  Description of Artificial Sequence: Synthetic oligonucleotide
  Sense strand starting at position 899 of SEQ ID NO: 1883276
ggguaaucugcauauccau

SEQ ID NO: 2181881 - RNA, 19 nt, Artificial Sequence
  Description of Artificial Sequence: Synthetic oligonucleotide
  Antisense strand to SEQ ID NO: 2181880
auggauaugcagauuaccc

SEQ ID NO: 2181882 - RNA, 19 nt, Artificial Sequence
  Description of Artificial Sequence: Synthetic oligonucleotide
  Sense strand starting at position 1001 of SEQ ID NO: 1883276
uguuaauggucaucaccau

SEQ ID NO: 2181883 - RNA, 19 nt, Artificial Sequence
  Description of Artificial Sequence: Synthetic oligonucleotide
  Antisense strand to SEQ ID NO: 2181882
auggugaugaccauuaaca

SEQ ID NO: 2181884 - RNA, 19 nt, Artificial Sequence
  Description of Artificial Sequence: Synthetic oligonucleotide
  Sense strand starting at position 1002 of SEQ ID NO: 1883276
guuaauggucaucaccaua

SEQ ID NO: 2181885 - RNA, 19 nt, Artificial Sequence
  Description of Artificial Sequence: Synthetic oligonucleotide
  Antisense strand to SEQ ID NO: 2181884
uauggugaugaccauuaac

SEQ ID NO: 2181886 - RNA, 19 nt, Artificial Sequence
  Description of Artificial Sequence: Synthetic oligonucleotide
  Sense strand starting at position 1047 of SEQ ID NO: 1883276
uccugcuaguuccuaugua

SEQ ID NO: 2181887 - RNA, 19 nt, Artificial Sequence
  Description of Artificial Sequence: Synthetic oligonucleotide
  Antisense strand to SEQ ID NO: 2181886
uacauaggaacuagcagga

SEQ ID NO: 2181888 - RNA, 19 nt, Artificial Sequence
  Description of Artificial Sequence: Synthetic oligonucleotide
  Sense strand starting at position 1137 of SEQ ID NO: 1883276
caguucuacugagucugua

SEQ ID NO: 2181889 - RNA, 19 nt, Artificial Sequence
  Description of Artificial Sequence: Synthetic oligonucleotide
  Antisense strand to SEQ ID NO: 2181888
uacagacucaguagaacug

SEQ ID NO: 2181890 - RNA, 19 nt, Artificial Sequence
  Description of Artificial Sequence: Synthetic oligonucleotide
  Sense strand starting at position 1140 of SEQ ID NO: 1883276
uucuacugagucuguauuu

SEQ ID NO: 2181891 - RNA, 19 nt, Artificial Sequence
  Description of Artificial Sequence: Synthetic oligonucleotide
  Antisense strand to SEQ ID NO: 2181890
aaauacagacucaguagaa

SEQ ID NO: 2181892 - RNA, 19 nt, Artificial Sequence
  Description of Artificial Sequence: Synthetic oligonucleotide
  Sense strand starting at position 1499 of SEQ ID NO: 1883276
ugacacuacugguuugaaa

SEQ ID NO: 2181893 - RNA, 19 nt, Artificial Sequence
  Description of Artificial Sequence: Synthetic oligonucleotide
  Antisense strand to SEQ ID NO: 2181892
uuucaaaccaguaguguca

SEQ ID NO: 2181894 - RNA, 19 nt, Artificial Sequence
  Description of Artificial Sequence: Synthetic oligonucleotide
  Sense strand starting at position 1501 of SEQ ID NO: 1883276
acacuacugguuugaaauc

SEQ ID NO: 2181895 - RNA, 19 nt, Artificial Sequence
  Description of Artificial Sequence: Synthetic oligonucleotide
  Antisense strand to SEQ ID NO: 2181894
gauuucaaaccaguagugu

SEQ ID NO: 2181896 - RNA, 19 nt, Artificial Sequence
  Description of Artificial Sequence: Synthetic oligonucleotide
  Sense strand starting at position 1510 of SEQ ID NO: 1883276
guuugaaauccaugcuuag

SEQ ID NO: 2181897 - RNA, 19 nt, Artificial Sequence
  Description of Artificial Sequence: Synthetic oligonucleotide
  Antisense strand to SEQ ID NO: 2181896
cuaagcauggauuucaaac

SEQ ID NO: 2181898 - RNA, 19 nt, Artificial Sequence
  Description of Artificial Sequence: Synthetic oligonucleotide
  Sense strand starting at position 2037 of SEQ ID NO: 1883276
cuaagaaagcguugaguuc

SEQ ID NO: 2181899 - RNA, 19 nt, Artificial Sequence
  Description of Artificial Sequence: Synthetic oligonucleotide
  Antisense strand to SEQ ID NO: 2181898
gaacucaacgcuuucuuag

SEQ ID NO: 2181900 - RNA, 19 nt, Artificial Sequence
  Description of Artificial Sequence: Synthetic oligonucleotide
  Sense strand starting at position 2342 of SEQ ID NO: 1883276
cccuauuagggauguuucu

SEQ ID NO: 2181901 - RNA, 19 nt, Artificial Sequence
  Description of Artificial Sequence: Synthetic oligonucleotide
  Antisense strand to SEQ ID NO: 2181900
agaaacaucccuaauaggg

SEQ ID NO: 2181902 - RNA, 19 nt, Artificial Sequence
  Description of Artificial Sequence: Synthetic oligonucleotide
  Sense strand starting at position 2373 of SEQ ID NO: 1883276
gguuauaucgcagaugacu

SEQ ID NO: 2181903 - RNA, 19 nt, Artificial Sequence
  Description of Artificial Sequence: Synthetic oligonucleotide
  Antisense strand to SEQ ID NO: 2181902
agucaucugcgauauaacc

SEQ ID NO: 2181904 - RNA, 19 nt, Artificial Sequence
  Description of Artificial Sequence: Synthetic oligonucleotide
  Sense strand starting at position 2384 of SEQ ID NO: 1883276
agaugacucaugcgauaac

SEQ ID NO: 2181905 - RNA, 19 nt, Artificial Sequence
  Description of Artificial Sequence: Synthetic oligonucleotide
  Antisense strand to SEQ ID NO: 2181904
guuaucgcaugagucaucu

SEQ ID NO: 2181906 - RNA, 19 nt, Artificial Sequence
  Description of Artificial Sequence: Synthetic oligonucleotide
  Sense strand starting at position 2387 of SEQ ID NO: 1883276
ugacucaugcgauaacaca

SEQ ID NO: 2181907 - RNA, 19 nt, Artificial Sequence
  Description of Artificial Sequence: Synthetic oligonucleotide
  Antisense strand to SEQ ID NO: 2181906
uguguuaucgcaugaguca

SEQ ID NO: 2181908 - RNA, 19 nt, Artificial Sequence
  Description of Artificial Sequence: Synthetic oligonucleotide
  Sense strand starting at position 2541 of SEQ ID NO: 1883276
ccaauuaaguccgucgagu

SEQ ID NO: 2181909 - RNA, 19 nt, Artificial Sequence
  Description of Artificial Sequence: Synthetic oligonucleotide
  Antisense strand to SEQ ID NO: 2181908
acucgacggacuuaauugg

SEQ ID NO: 2181910 - RNA, 19 nt, Artificial Sequence
  Description of Artificial Sequence: Synthetic oligonucleotide
  Sense strand starting at position 2554 of SEQ ID NO: 1883276
ucgagugcuauuugcagau

SEQ ID NO: 2181911 - RNA, 19 nt, Artificial Sequence
  Description of Artificial Sequence: Synthetic oligonucleotide
  Antisense strand to SEQ ID NO: 2181910
aucugcaaauagcacucga

SEQ ID NO: 2181912 - RNA, 19 nt, Artificial Sequence
  Description of Artificial Sequence: Synthetic oligonucleotide
  Sense strand starting at position 2556 of SEQ ID NO: 1883276
gagugcuauuugcagauga

SEQ ID NO: 2181913 - RNA, 19 nt, Artificial Sequence
  Description of Artificial Sequence: Synthetic oligonucleotide
  Antisense strand to SEQ ID NO: 2181912
ucaucugcaaauagcacuc

SEQ ID NO: 2181914 - RNA, 19 nt, Artificial Sequence
  Description of Artificial Sequence: Synthetic oligonucleotide
  Sense strand starting at position 2581 of SEQ ID NO: 1883276
ggaauugugcuggaguugu

SEQ ID NO: 2181915 - RNA, 19 nt, Artificial Sequence
  Description of Artificial Sequence: Synthetic oligonucleotide
  Antisense strand to SEQ ID NO: 2181914
acaacuccagcacaauucc

SEQ ID NO: 2181916 - RNA, 19 nt, Artificial Sequence
  Description of Artificial Sequence: Synthetic oligonucleotide
  Sense strand starting at position 2594 of SEQ ID NO: 1883276
aguuguguccggccucauu

SEQ ID NO: 2181917 - RNA, 19 nt, Artificial Sequence
  Description of Artificial Sequence: Synthetic oligonucleotide
  Antisense strand to SEQ ID NO: 2181916
aaugaggccggacacaacu

SEQ ID NO: 2181918 - RNA, 19 nt, Artificial Sequence
  Description of Artificial Sequence: Synthetic oligonucleotide
  Sense strand starting at position 2597 of SEQ ID NO: 1883276
uguguccggccucauuaaa

SEQ ID NO: 2181919 - RNA, 19 nt, Artificial Sequence
  Description of Artificial Sequence: Synthetic oligonucleotide
  Antisense strand to SEQ ID NO: 2181918
uuuaaugaggccggacaca

SEQ ID NO: 2181920 - RNA, 19 nt, Artificial Sequence
  Description of Artificial Sequence: Synthetic oligonucleotide
  Sense strand starting at position 2650 of SEQ ID NO: 1883276
ggcuguucuguggcuguua

SEQ ID NO: 2181921 - RNA, 19 nt, Artificial Sequence
  Description of Artificial Sequence: Synthetic oligonucleotide
  Antisense strand to SEQ ID NO: 2181920
uaacagccacagaacagcc

SEQ ID NO: 2181922 - RNA, 19 nt, Artificial Sequence
  Description of Artificial Sequence: Synthetic oligonucleotide
  Sense strand starting at position 2658 of SEQ ID NO: 1883276
uguggcuguuagucauuaa

SEQ ID NO: 2181923 - RNA, 19 nt, Artificial Sequence
  Description of Artificial Sequence: Synthetic oligonucleotide
  Antisense strand to SEQ ID NO: 2181922
uuaaugacuaacagccaca

SEQ ID NO: 2181924 - RNA, 19 nt, Artificial Sequence
  Description of Artificial Sequence: Synthetic oligonucleotide
  Sense strand starting at position 2659 of SEQ ID NO: 1883276
guggcuguuagucauuaau

SEQ ID NO: 2181925 - RNA, 19 nt, Artificial Sequence
  Description of Artificial Sequence: Synthetic oligonucleotide
  Antisense strand to SEQ ID NO: 2181924
auuaaugacuaacagccac

SEQ ID NO: 2181926 - RNA, 19 nt, Artificial Sequence
  Description of Artificial Sequence: Synthetic oligonucleotide
  Sense strand starting at position 2661 of SEQ ID NO: 1883276
ggcuguuagucauuaauca

SEQ ID NO: 2181927 - RNA, 19 nt, Artificial Sequence
  Description of Artificial Sequence: Synthetic oligonucleotide
  Antisense strand to SEQ ID NO: 2181926
ugauuaaugacuaacagcc

SEQ ID NO: 2181928 - RNA, 19 nt, Artificial Sequence
  Description of Artificial Sequence: Synthetic oligonucleotide
  Sense strand starting at position 2662 of SEQ ID NO: 1883276
gcuguuagucauuaaucac

SEQ ID NO: 2181929 - RNA, 19 nt, Artificial Sequence
  Description of Artificial Sequence: Synthetic oligonucleotide
  Antisense strand to SEQ ID NO: 2181928
gugauuaaugacuaacagc

SEQ ID NO: 2181930 - RNA, 19 nt, Artificial Sequence
  Description of Artificial Sequence: Synthetic oligonucleotide
  Sense strand starting at position 2665 of SEQ ID NO: 1883276
guuagucauuaaucaccau

SEQ ID NO: 2181931 - RNA, 19 nt, Artificial Sequence
  Description of Artificial Sequence: Synthetic oligonucleotide
  Antisense strand to SEQ ID NO: 2181930
auggugauuaaugacuaac

SEQ ID NO: 2181932 - RNA, 19 nt, Artificial Sequence
  Description of Artificial Sequence: Synthetic oligonucleotide
  Sense strand starting at position 2705 of SEQ ID NO: 1883276
cgaggagccuguucacaug

SEQ ID NO: 2181933 - RNA, 19 nt, Artificial Sequence
  Description of Artificial Sequence: Synthetic oligonucleotide
  Antisense strand to SEQ ID NO: 2181932
caugugaacaggcuccucg

SEQ ID NO: 2181934 - RNA, 19 nt, Artificial Sequence
  Description of Artificial Sequence: Synthetic oligonucleotide
  Sense strand starting at position 2966 of SEQ ID NO: 1883276
uuuauauucuggcccgaug

SEQ ID NO: 2181935 - RNA, 19 nt, Artificial Sequence
  Description of Artificial Sequence: Synthetic oligonucleotide
  Antisense strand to SEQ ID NO: 2181934
caucgggccagaauauaaa

SEQ ID NO: 2181936 - RNA, 19 nt, Artificial Sequence
  Description of Artificial Sequence: Synthetic oligonucleotide
  Sense strand starting at position 3186 of SEQ ID NO: 1883276
ucuggaucugucugcagaa

SEQ ID NO: 2181937 - RNA, 19 nt, Artificial Sequence
  Description of Artificial Sequence: Synthetic oligonucleotide
  Antisense strand to SEQ ID NO: 2181936
uucugcagacagauccaga

SEQ ID NO: 2181938 - RNA, 19 nt, Artificial Sequence
  Description of Artificial Sequence: Synthetic oligonucleotide
  Sense strand starting at position 3187 of SEQ ID NO: 1883276
cuggaucugucugcagaau

SEQ ID NO: 2181939 - RNA, 19 nt, Artificial Sequence
  Description of Artificial Sequence: Synthetic oligonucleotide
  Antisense strand to SEQ ID NO: 2181938
auucugcagacagauccag

SEQ ID NO: 2181940 - RNA, 19 nt, Artificial Sequence
  Description of Artificial Sequence: Synthetic oligonucleotide
  Sense strand starting at position 3188 of SEQ ID NO: 1883276
uggaucugucugcagaauc

SEQ ID NO: 2181941 - RNA, 19 nt, Artificial Sequence
  Description of Artificial Sequence: Synthetic oligonucleotide
  Antisense strand to SEQ ID NO: 2181940
gauucugcagacagaucca

SEQ ID NO: 2181942 - RNA, 19 nt, Artificial Sequence
  Description of Artificial Sequence: Synthetic oligonucleotide
  Sense strand starting at position 3412 of SEQ ID NO: 1883276
cccauauuguggcugggaa

SEQ ID NO: 2181943 - RNA, 19 nt, Artificial Sequence
  Description of Artificial Sequence: Synthetic oligonucleotide
  Antisense strand to SEQ ID NO: 2181942
uucccagccacaauauggg

SEQ ID NO: 2181944 - RNA, 19 nt, Artificial Sequence
  Description of Artificial Sequence: Synthetic oligonucleotide
  Sense strand starting at position 3723 of SEQ ID NO: 1883276
ccuuaacuccaaggauuga

SEQ ID NO: 2181945 - RNA, 19 nt, Artificial Sequence
  Description of Artificial Sequence: Synthetic oligonucleotide
  Antisense strand to SEQ ID NO: 2181944
ucaauccuuggaguuaagg

SEQ ID NO: 2181946 - RNA, 19 nt, Artificial Sequence
  Description of Artificial Sequence: Synthetic oligonucleotide
  Sense strand starting at position 3738 of SEQ ID NO: 1883276
uugacuugagggcaucauu

SEQ ID NO: 2181947 - RNA, 19 nt, Artificial Sequence
  Description of Artificial Sequence: Synthetic oligonucleotide
  Antisense strand to SEQ ID NO: 2181946
aaugaugcccucaagucaa

SEQ ID NO: 2181948 - RNA, 19 nt, Artificial Sequence
  Description of Artificial Sequence: Synthetic oligonucleotide
  Sense strand starting at position 3769 of SEQ ID NO: 1883276
gggaguugguagagaugga

SEQ ID NO: 2181949 - RNA, 19 nt, Artificial Sequence
  Description of Artificial Sequence: Synthetic oligonucleotide
  Antisense strand to SEQ ID NO: 2181948
uccaucucuaccaacuccc

SEQ ID NO: 2181950 - RNA, 19 nt, Artificial Sequence
  Description of Artificial Sequence: Synthetic oligonucleotide
  Sense strand starting at position 3854 of SEQ ID NO: 1883276
gaguccuuagugugagucu

SEQ ID NO: 2181951 - RNA, 19 nt, Artificial Sequence
  Description of Artificial Sequence: Synthetic oligonucleotide
  Antisense strand to SEQ ID NO: 2181950
agacucacacuaaggacuc

SEQ ID NO: 2181952 - RNA, 19 nt, Artificial Sequence
  Description of Artificial Sequence: Synthetic oligonucleotide
  Sense strand starting at position 3922 of SEQ ID NO: 1883276
agaagaaagucuucugcaa

SEQ ID NO: 2181953 - RNA, 19 nt, Artificial Sequence
  Description of Artificial Sequence: Synthetic oligonucleotide
  Antisense strand to SEQ ID NO: 2181952
uugcagaagacuuucuucu

SEQ ID NO: 2181954 - RNA, 19 nt, Artificial Sequence
  Description of Artificial Sequence: Synthetic oligonucleotide
  Sense strand starting at position 14 of SEQ ID NO: 1883277
agacuccugcccuagcaaa

SEQ ID NO: 2181955 - RNA, 19 nt, Artificial Sequence
  Description of Artificial Sequence: Synthetic oligonucleotide
  Antisense strand to SEQ ID NO: 2181954
uuugcuagggcaggagucu

SEQ ID NO: 2181956 - RNA, 19 nt, Artificial Sequence
  Description of Artificial Sequence: Synthetic oligonucleotide
  Sense strand starting at position 487 of SEQ ID NO: 1883277
ggccuacacccacaugauu

SEQ ID NO: 2181957 - RNA, 19 nt, Artificial Sequence
  Description of Artificial Sequence: Synthetic oligonucleotide
  Antisense strand to SEQ ID NO: 2181956
aaucauguggguguaggcc

SEQ ID NO: 2181958 - RNA, 19 nt, Artificial Sequence
  Description of Artificial Sequence: Synthetic oligonucleotide
  Sense strand starting at position 944 of SEQ ID NO: 1883277
aguaucagaccauauguuu

SEQ ID NO: 2181959 - RNA, 19 nt, Artificial Sequence
  Description of Artificial Sequence: Synthetic oligonucleotide
  Antisense strand to SEQ ID NO: 2181958
aaacauauggucugauacu

SEQ ID NO: 2181960 - RNA, 19 nt, Artificial Sequence
  Description of Artificial Sequence: Synthetic oligonucleotide
  Sense strand starting at position 957 of SEQ ID NO: 1883277
auguuuagugcugaacauu

SEQ ID NO: 2181961 - RNA, 19 nt, Artificial Sequence
  Description of Artificial Sequence: Synthetic oligonucleotide
  Antisense strand to SEQ ID NO: 2181960
aauguucagcacuaaacau

SEQ ID NO: 2181962 - RNA, 19 nt, Artificial Sequence
  Description of Artificial Sequence: Synthetic oligonucleotide
  Sense strand starting at position 1101 of SEQ ID NO: 1883277
cagaaaucuguucgaguca

SEQ ID NO: 2181963 - RNA, 19 nt, Artificial Sequence
  Description of Artificial Sequence: Synthetic oligonucleotide
  Antisense strand to SEQ ID NO: 2181962
ugacucgaacagauuucug

SEQ ID NO: 2181964 - RNA, 19 nt, Artificial Sequence
  Description of Artificial Sequence: Synthetic oligonucleotide
  Sense strand starting at position 1113 of SEQ ID NO: 1883277
cgagucauuccuuauuacu

SEQ ID NO: 2181965 - RNA, 19 nt, Artificial Sequence
  Description of Artificial Sequence: Synthetic oligonucleotide
  Antisense strand to SEQ ID NO: 2181964
aguaauaaggaaugacucg

SEQ ID NO: 2181966 - RNA, 19 nt, Artificial Sequence
  Description of Artificial Sequence: Synthetic oligonucleotide
  Sense strand starting at position 1115 of SEQ ID NO: 1883277
agucauuccuuauuacuga

SEQ ID NO: 2181967 - RNA, 19 nt, Artificial Sequence
  Description of Artificial Sequence: Synthetic oligonucleotide
  Antisense strand to SEQ ID NO: 2181966
ucaguaauaaggaaugacu

SEQ ID NO: 2181968 - RNA, 19 nt, Artificial Sequence
  Description of Artificial Sequence: Synthetic oligonucleotide
  Sense strand starting at position 1150 of SEQ ID NO: 1883277
aaacaucuaguauggaguu

SEQ ID NO: 2181969 - RNA, 19 nt, Artificial Sequence
  Description of Artificial Sequence: Synthetic oligonucleotide
  Antisense strand to SEQ ID NO: 2181968
aacuccauacuagauguuu

SEQ ID NO: 2181970 - RNA, 19 nt, Artificial Sequence
  Description of Artificial Sequence: Synthetic oligonucleotide
  Sense strand starting at position 1156 of SEQ ID NO: 1883277
cuaguauggaguugguauu

SEQ ID NO: 2181971 - RNA, 19 nt, Artificial Sequence
  Description of Artificial Sequence: Synthetic oligonucleotide
  Antisense strand to SEQ ID NO: 2181970
aauaccaacuccauacuag

SEQ ID NO: 2181972 - RNA, 19 nt, Artificial Sequence
  Description of Artificial Sequence: Synthetic oligonucleotide
  Sense strand starting at position 1166 of SEQ ID NO: 1883277
guugguauuguauauaaca

SEQ ID NO: 2181973 - RNA, 19 nt, Artificial Sequence
  Description of Artificial Sequence: Synthetic oligonucleotide
  Antisense strand to SEQ ID NO: 2181972
uguuauauacaauaccaac

SEQ ID NO: 2181974 - RNA, 19 nt, Artificial Sequence
  Description of Artificial Sequence: Synthetic oligonucleotide
  Sense strand starting at position 1206 of SEQ ID NO: 1883277
auagucaucuaaguagaaa

SEQ ID NO: 2181975 - RNA, 19 nt, Artificial Sequence
  Description of Artificial Sequence: Synthetic oligonucleotide
  Antisense strand to SEQ ID NO: 2181974
uuucuacuuagaugacuau

SEQ ID NO: 2181976 - RNA, 19 nt, Artificial Sequence
  Description of Artificial Sequence: Synthetic oligonucleotide
  Sense strand starting at position 1325 of SEQ ID NO: 1883277
cagucuuaccuggaguuag

SEQ ID NO: 2181977 - RNA, 19 nt, Artificial Sequence
  Description of Artificial Sequence: Synthetic oligonucleotide
  Antisense strand to SEQ ID NO: 2181976
cuaacuccagguaagacug

SEQ ID NO: 2181978 - RNA, 19 nt, Artificial Sequence
  Description of Artificial Sequence: Synthetic oligonucleotide
  Sense strand starting at position 1350 of SEQ ID NO: 1883277
ggacucucucaagguuauu

SEQ ID NO: 2181979 - RNA, 19 nt, Artificial Sequence
  Description of Artificial Sequence: Synthetic oligonucleotide
  Antisense strand to SEQ ID NO: 2181978
aauaaccuugagagagucc

SEQ ID NO: 2181980 - RNA, 19 nt, Artificial Sequence
  Description of Artificial Sequence: Synthetic oligonucleotide
  Sense strand starting at position 1463 of SEQ ID NO: 1883277
ccacuaugacaggguuuau

SEQ ID NO: 2181981 - RNA, 19 nt, Artificial Sequence
  Description of Artificial Sequence: Synthetic oligonucleotide
  Antisense strand to SEQ ID NO: 2181980
auaaacccugucauagugg

SEQ ID NO: 2181982 - RNA, 19 nt, Artificial Sequence
  Description of Artificial Sequence: Synthetic oligonucleotide
  Sense strand starting at position 1497 of SEQ ID NO: 1883277
ccucaaguggcuggaaaua

SEQ ID NO: 2181983 - RNA, 19 nt, Artificial Sequence
  Description of Artificial Sequence: Synthetic oligonucleotide
  Antisense strand to SEQ ID NO: 2181982
uauuuccagccacuugagg

SEQ ID NO: 2181984 - RNA, 19 nt, Artificial Sequence
  Description of Artificial Sequence: Synthetic oligonucleotide
  Sense strand starting at position 2738 of SEQ ID NO: 1883277
guugcauuccuccacacau

SEQ ID NO: 2181985 - RNA, 19 nt, Artificial Sequence
  Description of Artificial Sequence: Synthetic oligonucleotide
  Antisense strand to SEQ ID NO: 2181984
auguguggaggaaugcaac

SEQ ID NO: 2181986 - RNA, 19 nt, Artificial Sequence
  Description of Artificial Sequence: Synthetic oligonucleotide
  Sense strand starting at position 2858 of SEQ ID NO: 1883277
ugaaauugauguguguuua

SEQ ID NO: 2181987 - RNA, 19 nt, Artificial Sequence
  Description of Artificial Sequence: Synthetic oligonucleotide
  Antisense strand to SEQ ID NO: 2181986
uaaacacacaucaauuuca

SEQ ID NO: 2181988 - RNA, 19 nt, Artificial Sequence
  Description of Artificial Sequence: Synthetic oligonucleotide
  Sense strand starting at position 2859 of SEQ ID NO: 1883277
gaaauugauguguguuuau

SEQ ID NO: 2181989 - RNA, 19 nt, Artificial Sequence
  Description of Artificial Sequence: Synthetic oligonucleotide
  Antisense strand to SEQ ID NO: 2181988
auaaacacacaucaauuuc

SEQ ID NO: 2181990 - RNA, 19 nt, Artificial Sequence
  Description of Artificial Sequence: Synthetic oligonucleotide
  Sense strand starting at position 3005 of SEQ ID NO: 1883277
cgaauugaagugugaccua

SEQ ID NO: 2181991 - RNA, 19 nt, Artificial Sequence
  Description of Artificial Sequence: Synthetic oligonucleotide
  Antisense strand to SEQ ID NO: 2181990
uaggucacacuucaauucg

SEQ ID NO: 2181992 - RNA, 19 nt, Artificial Sequence
  Description of Artificial Sequence: Synthetic oligonucleotide
  Sense strand starting at position 3008 of SEQ ID NO: 1883277
auugaagugugaccuaagu

SEQ ID NO: 2181993 - RNA, 19 nt, Artificial Sequence
  Description of Artificial Sequence: Synthetic oligonucleotide
  Antisense strand to SEQ ID NO: 2181992
acuuaggucacacuucaau

SEQ ID NO: 2181994 - RNA, 19 nt, Artificial Sequence
  Description of Artificial Sequence: Synthetic oligonucleotide
  Sense strand starting at position 3010 of SEQ ID NO: 1883277
ugaagugugaccuaagugu

SEQ ID NO: 2181995 - RNA, 19 nt, Artificial Sequence
  Description of Artificial Sequence: Synthetic oligonucleotide
  Antisense strand to SEQ ID NO: 2181994
acacuuaggucacacuuca

SEQ ID NO: 2181996 - RNA, 19 nt, Artificial Sequence
  Description of Artificial Sequence: Synthetic oligonucleotide
  Sense strand starting at position 3041 of SEQ ID NO: 1883277
uucgaaugcuuaguauuua

SEQ ID NO: 2181997 - RNA, 19 nt, Artificial Sequence
  Description of Artificial Sequence: Synthetic oligonucleotide
  Antisense strand to SEQ ID NO: 2181996
uaaauacuaagcauucgaa

SEQ ID NO: 2181998 - RNA, 19 nt, Artificial Sequence
  Description of Artificial Sequence: Synthetic oligonucleotide
  Sense strand starting at position 3122 of SEQ ID NO: 1883277
uugauaucuuggguuaaau

SEQ ID NO: 2181999 - RNA, 19 nt, Artificial Sequence
  Description of Artificial Sequence: Synthetic oligonucleotide
  Antisense strand to SEQ ID NO: 2181998
auuuaacccaagauaucaa

SEQ ID NO: 2182000 - RNA, 19 nt, Artificial Sequence
  Description of Artificial Sequence: Synthetic oligonucleotide
  Sense strand starting at position 3175 of SEQ ID NO: 1883277
acuuuauguggccacgaga

SEQ ID NO: 2182001 - RNA, 19 nt, Artificial Sequence
  Description of Artificial Sequence: Synthetic oligonucleotide
  Antisense strand to SEQ ID NO: 2182000
ucucguggccacauaaagu

SEQ ID NO: 2182002 - RNA, 19 nt, Artificial Sequence
  Description of Artificial Sequence: Synthetic oligonucleotide
  Sense strand starting at position 3301 of SEQ ID NO: 1883277
uauuauguguugucaggaa

SEQ ID NO: 2182003 - RNA, 19 nt, Artificial Sequence
  Description of Artificial Sequence: Synthetic oligonucleotide
  Antisense strand to SEQ ID NO: 2182002
uuccugacaacacauaaua

SEQ ID NO: 2182004 - RNA, 19 nt, Artificial Sequence
  Description of Artificial Sequence: Synthetic oligonucleotide
  Sense strand starting at position 3368 of SEQ ID NO: 1883277
guuucucucacagggaaga

SEQ ID NO: 2182005 - RNA, 19 nt, Artificial Sequence
  Description of Artificial Sequence: Synthetic oligonucleotide
  Antisense strand to SEQ ID NO: 2182004
ucuucccugugagagaaac

SEQ ID NO: 2182006 - RNA, 19 nt, Artificial Sequence
  Description of Artificial Sequence: Synthetic oligonucleotide
  Sense strand starting at position 3369 of SEQ ID NO: 1883277
uuucucucacagggaagau

SEQ ID NO: 2182007 - RNA, 19 nt, Artificial Sequence
  Description of Artificial Sequence: Synthetic oligonucleotide
  Antisense strand to SEQ ID NO: 2182006
aucuucccugugagagaaa

SEQ ID NO: 2182008 - RNA, 19 nt, Artificial Sequence
  Description of Artificial Sequence: Synthetic oligonucleotide
  Sense strand starting at position 3393 of SEQ ID NO: 1883277
agaggaaaugugugcuauu

SEQ ID NO: 2182009 - RNA, 19 nt, Artificial Sequence
  Description of Artificial Sequence: Synthetic oligonucleotide
  Antisense strand to SEQ ID NO: 2182008
aauagcacacauuuccucu

SEQ ID NO: 2182010 - RNA, 19 nt, Artificial Sequence
  Description of Artificial Sequence: Synthetic oligonucleotide
  Sense strand starting at position 3438 of SEQ ID NO: 1883277
acuguuaaauggccagaaa

SEQ ID NO: 2182011 - RNA, 19 nt, Artificial Sequence
  Description of Artificial Sequence: Synthetic oligonucleotide
  Antisense strand to SEQ ID NO: 2182010
uuucuggccauuuaacagu

SEQ ID NO: 2182012 - RNA, 19 nt, Artificial Sequence
  Description of Artificial Sequence: Synthetic oligonucleotide
  Sense strand starting at position 3439 of SEQ ID NO: 1883277
cuguuaaauggccagaaau

SEQ ID NO: 2182013 - RNA, 19 nt, Artificial Sequence
  Description of Artificial Sequence: Synthetic oligonucleotide
  Antisense strand to SEQ ID NO: 2182012
auuucuggccauuuaacag

SEQ ID NO: 2182014 - RNA, 19 nt, Artificial Sequence
  Description of Artificial Sequence: Synthetic oligonucleotide
  Sense strand starting at position 3471 of SEQ ID NO: 1883277
cacuuauugguuuguacag

SEQ ID NO: 2182015 - RNA, 19 nt, Artificial Sequence
  Description of Artificial Sequence: Synthetic oligonucleotide
  Antisense strand to SEQ ID NO: 2182014
cuguacaaaccaauaagug

SEQ ID NO: 2182016 - RNA, 19 nt, Artificial Sequence
  Description of Artificial Sequence: Synthetic oligonucleotide
  Sense strand starting at position 3499 of SEQ ID NO: 1883277
gaagguuagcauuaguuuc

SEQ ID NO: 2182017 - RNA, 19 nt, Artificial Sequence
  Description of Artificial Sequence: Synthetic oligonucleotide
  Antisense strand to SEQ ID NO: 2182016
gaaacuaaugcuaaccuuc

SEQ ID NO: 2182018 - RNA, 19 nt, Artificial Sequence
  Description of Artificial Sequence: Synthetic oligonucleotide
  Sense strand starting at position 3559 of SEQ ID NO: 1883277
gacuguguauuagucaaug

SEQ ID NO: 2182019 - RNA, 19 nt, Artificial Sequence
  Description of Artificial Sequence: Synthetic oligonucleotide
  Antisense strand to SEQ ID NO: 2182018
cauugacuaauacacaguc

SEQ ID NO: 2182020 - RNA, 19 nt, Artificial Sequence
  Description of Artificial Sequence: Synthetic oligonucleotide
  Sense strand starting at position 3564 of SEQ ID NO: 1883277
uguauuagucaauggguca

SEQ ID NO: 2182021 - RNA, 19 nt, Artificial Sequence
  Description of Artificial Sequence: Synthetic oligonucleotide
  Antisense strand to SEQ ID NO: 2182020
ugacccauugacuaauaca

SEQ ID NO: 2182022 - RNA, 19 nt, Artificial Sequence
  Description of Artificial Sequence: Synthetic oligonucleotide
  Sense strand starting at position 3632 of SEQ ID NO: 1883277
ucaguucuuagugaguuaa

SEQ ID NO: 2182023 - RNA, 19 nt, Artificial Sequence
  Description of Artificial Sequence: Synthetic oligonucleotide
  Antisense strand to SEQ ID NO: 2182022
uuaacucacuaagaacuga

SEQ ID NO: 2182024 - RNA, 19 nt, Artificial Sequence
  Description of Artificial Sequence: Synthetic oligonucleotide
  Sense strand starting at position 3634 of SEQ ID NO: 1883277
aguucuuagugaguuaaca

SEQ ID NO: 2182025 - RNA, 19 nt, Artificial Sequence
  Description of Artificial Sequence: Synthetic oligonucleotide
  Antisense strand to SEQ ID NO: 2182024
uguuaacucacuaagaacu

SEQ ID NO: 2182026 - RNA, 19 nt, Artificial Sequence
  Description of Artificial Sequence: Synthetic oligonucleotide
  Sense strand starting at position 3736 of SEQ ID NO: 1883277
gugaguauccagcaucaga

SEQ ID NO: 2182027 - RNA, 19 nt, Artificial Sequence
  Description of Artificial Sequence: Synthetic oligonucleotide
  Antisense strand to SEQ ID NO: 2182026
ucugaugcuggauacucac

SEQ ID NO: 2182028 - RNA, 19 nt, Artificial Sequence
  Description of Artificial Sequence: Synthetic oligonucleotide
  Sense strand starting at position 3775 of SEQ ID NO: 1883277
cugccaaaguuacuggauu

SEQ ID NO: 2182029 - RNA, 19 nt, Artificial Sequence
  Description of Artificial Sequence: Synthetic oligonucleotide
  Antisense strand to SEQ ID NO: 2182028
aauccaguaacuuuggcag

SEQ ID NO: 2182030 - RNA, 19 nt, Artificial Sequence
  Description of Artificial Sequence: Synthetic oligonucleotide
  Sense strand starting at position 3968 of SEQ ID NO: 1883277
gagcaagugcuggacaagu

SEQ ID NO: 2182031 - RNA, 19 nt, Artificial Sequence
  Description of Artificial Sequence: Synthetic oligonucleotide
  Antisense strand to SEQ ID NO: 2182030
acuuguccagcacuugcuc

SEQ ID NO: 2182032 - RNA, 19 nt, Artificial Sequence
  Description of Artificial Sequence: Synthetic oligonucleotide
  Sense strand starting at position 3978 of SEQ ID NO: 1883277
uggacaaguguguauaugu

SEQ ID NO: 2182033 - RNA, 19 nt, Artificial Sequence
  Description of Artificial Sequence: Synthetic oligonucleotide
  Antisense strand to SEQ ID NO: 2182032
acauauacacacuugucca

SEQ ID NO: 2182034 - RNA, 19 nt, Artificial Sequence
  Description of Artificial Sequence: Synthetic oligonucleotide
  Sense strand starting at position 38 of SEQ ID NO: 1883278
uugccauuuagcugggagu

SEQ ID NO: 2182035 - RNA, 19 nt, Artificial Sequence
  Description of Artificial Sequence: Synthetic oligonucleotide
  Antisense strand to SEQ ID NO: 2182034
acucccagcuaaauggcaa

SEQ ID NO: 2182036 - RNA, 19 nt, Artificial Sequence
  Description of Artificial Sequence: Synthetic oligonucleotide
  Sense strand starting at position 39 of SEQ ID NO: 1883278
ugccauuuagcugggagua

SEQ ID NO: 2182037 - RNA, 19 nt, Artificial Sequence
  Description of Artificial Sequence: Synthetic oligonucleotide
  Antisense strand to SEQ ID NO: 2182036
uacucccagcuaaauggca

SEQ ID NO: 2182038 - RNA, 19 nt, Artificial Sequence
  Description of Artificial Sequence: Synthetic oligonucleotide
  Sense strand starting at position 44 of SEQ ID NO: 1883278
uuuagcugggaguaaucaa

SEQ ID NO: 2182039 - RNA, 19 nt, Artificial Sequence
  Description of Artificial Sequence: Synthetic oligonucleotide
  Antisense strand to SEQ ID NO: 2182038
uugauuacucccagcuaaa

SEQ ID NO: 2182040 - RNA, 19 nt, Artificial Sequence
  Description of Artificial Sequence: Synthetic oligonucleotide
  Sense strand starting at position 341 of SEQ ID NO: 1883278
agagaaaggcccugucaag

SEQ ID NO: 2182041 - RNA, 19 nt, Artificial Sequence
  Description of Artificial Sequence: Synthetic oligonucleotide
  Antisense strand to SEQ ID NO: 2182040
cuugacagggccuuucucu

SEQ ID NO: 2182042 - RNA, 19 nt, Artificial Sequence
  Description of Artificial Sequence: Synthetic oligonucleotide
  Sense strand starting at position 770 of SEQ ID NO: 1883278
cccuauguuuggguugaga

SEQ ID NO: 2182043 - RNA, 19 nt, Artificial Sequence
  Description of Artificial Sequence: Synthetic oligonucleotide
  Antisense strand to SEQ ID NO: 2182042
ucucaacccaaacauaggg

SEQ ID NO: 2182044 - RNA, 19 nt, Artificial Sequence
  Description of Artificial Sequence: Synthetic oligonucleotide
  Sense strand starting at position 772 of SEQ ID NO: 1883278
cuauguuuggguugagauc

SEQ ID NO: 2182045 - RNA, 19 nt, Artificial Sequence
  Description of Artificial Sequence: Synthetic oligonucleotide
  Antisense strand to SEQ ID NO: 2182044
gaucucaacccaaacauag

SEQ ID NO: 2182046 - RNA, 19 nt, Artificial Sequence
  Description of Artificial Sequence: Synthetic oligonucleotide
  Sense strand starting at position 773 of SEQ ID NO: 1883278
uauguuuggguugagaucu

SEQ ID NO: 2182047 - RNA, 19 nt, Artificial Sequence
  Description of Artificial Sequence: Synthetic oligonucleotide
  Antisense strand to SEQ ID NO: 2182046
agaucucaacccaaacaua

SEQ ID NO: 2182048 - RNA, 19 nt, Artificial Sequence
  Description of Artificial Sequence: Synthetic oligonucleotide
  Sense strand starting at position 784 of SEQ ID NO: 1883278
ugagaucugucccugaguu

SEQ ID NO: 2182049 - RNA, 19 nt, Artificial Sequence
  Description of Artificial Sequence: Synthetic oligonucleotide
  Antisense strand to SEQ ID NO: 2182048
aacucagggacagaucuca

SEQ ID NO: 2182050 - RNA, 19 nt, Artificial Sequence
  Description of Artificial Sequence: Synthetic oligonucleotide
  Sense strand starting at position 785 of SEQ ID NO: 1883278
gagaucugucccugaguua

SEQ ID NO: 2182051 - RNA, 19 nt, Artificial Sequence
  Description of Artificial Sequence: Synthetic oligonucleotide
  Antisense strand to SEQ ID NO: 2182050
uaacucagggacagaucuc

SEQ ID NO: 2182052 - RNA, 19 nt, Artificial Sequence
  Description of Artificial Sequence: Synthetic oligonucleotide
  Sense strand starting at position 786 of SEQ ID NO: 1883278
agaucugucccugaguuaa

SEQ ID NO: 2182053 - RNA, 19 nt, Artificial Sequence
  Description of Artificial Sequence: Synthetic oligonucleotide
  Antisense strand to SEQ ID NO: 2182052
uuaacucagggacagaucu

SEQ ID NO: 2182054 - RNA, 19 nt, Artificial Sequence
  Description of Artificial Sequence: Synthetic oligonucleotide
  Sense strand starting at position 915 of SEQ ID NO: 1883278
cugcuauuacaaugaagca

SEQ ID NO: 2182055 - RNA, 19 nt, Artificial Sequence
  Description of Artificial Sequence: Synthetic oligonucleotide
  Antisense strand to SEQ ID NO: 2182054
ugcuucauuguaauagcag

SEQ ID NO: 2182056 - RNA, 19 nt, Artificial Sequence
  Description of Artificial Sequence: Synthetic oligonucleotide
  Sense strand starting at position 1037 of SEQ ID NO: 1883278
ggaaauagguucucacagu

SEQ ID NO: 2182057 - RNA, 19 nt, Artificial Sequence
  Description of Artificial Sequence: Synthetic oligonucleotide
  Antisense strand to SEQ ID NO: 2182056
acugugagaaccuauuucc

SEQ ID NO: 2182058 - RNA, 19 nt, Artificial Sequence
  Description of Artificial Sequence: Synthetic oligonucleotide
  Sense strand starting at position 1047 of SEQ ID NO: 1883278
ucucacaguguuuaaguaa

SEQ ID NO: 2182059 - RNA, 19 nt, Artificial Sequence
  Description of Artificial Sequence: Synthetic oligonucleotide
  Antisense strand to SEQ ID NO: 2182058
uuacuuaaacacugugaga

SEQ ID NO: 2182060 - RNA, 19 nt, Artificial Sequence
  Description of Artificial Sequence: Synthetic oligonucleotide
  Sense strand starting at position 1075 of SEQ ID NO: 1883278
gugccucagagguagucaa

SEQ ID NO: 2182061 - RNA, 19 nt, Artificial Sequence
  Description of Artificial Sequence: Synthetic oligonucleotide
  Antisense strand to SEQ ID NO: 2182060
uugacuaccucugaggcac

SEQ ID NO: 2182062 - RNA, 19 nt, Artificial Sequence
  Description of Artificial Sequence: Synthetic oligonucleotide
  Sense strand starting at position 1195 of SEQ ID NO: 1883278
ugaguaucagcucaucuac

SEQ ID NO: 2182063 - RNA, 19 nt, Artificial Sequence
  Description of Artificial Sequence: Synthetic oligonucleotide
  Antisense strand to SEQ ID NO: 2182062
guagaugagcugauacuca

SEQ ID NO: 2182064 - RNA, 19 nt, Artificial Sequence
  Description of Artificial Sequence: Synthetic oligonucleotide
  Sense strand starting at position 1527 of SEQ ID NO: 1883278
caggguugcccugaggauu

SEQ ID NO: 2182065 - RNA, 19 nt, Artificial Sequence
  Description of Artificial Sequence: Synthetic oligonucleotide
  Antisense strand to SEQ ID NO: 2182064
aauccucagggcaacccug

SEQ ID NO: 2182066 - RNA, 19 nt, Artificial Sequence
  Description of Artificial Sequence: Synthetic oligonucleotide
  Sense strand starting at position 1530 of SEQ ID NO: 1883278
gguugcccugaggauugaa

SEQ ID NO: 2182067 - RNA, 19 nt, Artificial Sequence
  Description of Artificial Sequence: Synthetic oligonucleotide
  Antisense strand to SEQ ID NO: 2182066
uucaauccucagggcaacc

SEQ ID NO: 2182068 - RNA, 19 nt, Artificial Sequence
  Description of Artificial Sequence: Synthetic oligonucleotide
  Sense strand starting at position 1533 of SEQ ID NO: 1883278
ugcccugaggauugaauaa

SEQ ID NO: 2182069 - RNA, 19 nt, Artificial Sequence
  Description of Artificial Sequence: Synthetic oligonucleotide
  Antisense strand to SEQ ID NO: 2182068
uuauucaauccucagggca

SEQ ID NO: 2182070 - RNA, 19 nt, Artificial Sequence
  Description of Artificial Sequence: Synthetic oligonucleotide
  Sense strand starting at position 1592 of SEQ ID NO: 1883278
guguaagcacucuauagau

SEQ ID NO: 2182071 - RNA, 19 nt, Artificial Sequence
  Description of Artificial Sequence: Synthetic oligonucleotide
  Antisense strand to SEQ ID NO: 2182070
aucuauagagugcuuacac

SEQ ID NO: 2182072 - RNA, 19 nt, Artificial Sequence
  Description of Artificial Sequence: Synthetic oligonucleotide
  Sense strand starting at position 1594 of SEQ ID NO: 1883278
guaagcacucuauagaugu

SEQ ID NO: 2182073 - RNA, 19 nt, Artificial Sequence
  Description of Artificial Sequence: Synthetic oligonucleotide
  Antisense strand to SEQ ID NO: 2182072
acaucuauagagugcuuac

SEQ ID NO: 2182074 - RNA, 19 nt, Artificial Sequence
  Description of Artificial Sequence: Synthetic oligonucleotide
  Sense strand starting at position 1691 of SEQ ID NO: 1883278
uccuuuguccacuaaugua

SEQ ID NO: 2182075 - RNA, 19 nt, Artificial Sequence
  Description of Artificial Sequence: Synthetic oligonucleotide
  Antisense strand to SEQ ID NO: 2182074
uacauuaguggacaaagga

SEQ ID NO: 2182076 - RNA, 19 nt, Artificial Sequence
  Description of Artificial Sequence: Synthetic oligonucleotide
  Sense strand starting at position 1721 of SEQ ID NO: 1883278
cggagaaacucagcaguga

SEQ ID NO: 2182077 - RNA, 19 nt, Artificial Sequence
  Description of Artificial Sequence: Synthetic oligonucleotide
  Antisense strand to SEQ ID NO: 2182076
ucacugcugaguuucuccg

SEQ ID NO: 2182078 - RNA, 19 nt, Artificial Sequence
  Description of Artificial Sequence: Synthetic oligonucleotide
  Sense strand starting at position 1893 of SEQ ID NO: 1883278
aggagucagcugugauuga

SEQ ID NO: 2182079 - RNA, 19 nt, Artificial Sequence
  Description of Artificial Sequence: Synthetic oligonucleotide
  Antisense strand to SEQ ID NO: 2182078
ucaaucacagcugacuccu

SEQ ID NO: 2182080 - RNA, 19 nt, Artificial Sequence
  Description of Artificial Sequence: Synthetic oligonucleotide
  Sense strand starting at position 1903 of SEQ ID NO: 1883278
ugugauugauccuucucca

SEQ ID NO: 2182081 - RNA, 19 nt, Artificial Sequence
  Description of Artificial Sequence: Synthetic oligonucleotide
  Antisense strand to SEQ ID NO: 2182080
uggagaaggaucaaucaca

SEQ ID NO: 2182082 - RNA, 19 nt, Artificial Sequence
  Description of Artificial Sequence: Synthetic oligonucleotide
  Sense strand starting at position 2022 of SEQ ID NO: 1883278
gggaaauuccaccgaggug

SEQ ID NO: 2182083 - RNA, 19 nt, Artificial Sequence
  Description of Artificial Sequence: Synthetic oligonucleotide
  Antisense strand to SEQ ID NO: 2182082
caccucgguggaauuuccc

SEQ ID NO: 2182084 - RNA, 19 nt, Artificial Sequence
  Description of Artificial Sequence: Synthetic oligonucleotide
  Sense strand starting at position 2025 of SEQ ID NO: 1883278
aaauuccaccgaggugaaa

SEQ ID NO: 2182085 - RNA, 19 nt, Artificial Sequence
  Description of Artificial Sequence: Synthetic oligonucleotide
  Antisense strand to SEQ ID NO: 2182084
uuucaccucgguggaauuu

SEQ ID NO: 2182086 - RNA, 19 nt, Artificial Sequence
  Description of Artificial Sequence: Synthetic oligonucleotide
  Sense strand starting at position 2098 of SEQ ID NO: 1883278
guggaaguaacuugucuaa

SEQ ID NO: 2182087 - RNA, 19 nt, Artificial Sequence
  Description of Artificial Sequence: Synthetic oligonucleotide
  Antisense strand to SEQ ID NO: 2182086
uuagacaaguuacuuccac

SEQ ID NO: 2182088 - RNA, 19 nt, Artificial Sequence
  Description of Artificial Sequence: Synthetic oligonucleotide
  Sense strand starting at position 2100 of SEQ ID NO: 1883278
ggaaguaacuugucuaaag

SEQ ID NO: 2182089 - RNA, 19 nt, Artificial Sequence
  Description of Artificial Sequence: Synthetic oligonucleotide
  Antisense strand to SEQ ID NO: 2182088
cuuuagacaaguuacuucc

SEQ ID NO: 2182090 - RNA, 19 nt, Artificial Sequence
  Description of Artificial Sequence: Synthetic oligonucleotide
  Sense strand starting at position 2101 of SEQ ID NO: 1883278
gaaguaacuugucuaaaga

SEQ ID NO: 2182091 - RNA, 19 nt, Artificial Sequence
  Description of Artificial Sequence: Synthetic oligonucleotide
  Antisense strand to SEQ ID NO: 2182090
ucuuuagacaaguuacuuc

SEQ ID NO: 2182092 - RNA, 19 nt, Artificial Sequence
  Description of Artificial Sequence: Synthetic oligonucleotide
  Sense strand starting at position 2136 of SEQ ID NO: 1883278
gggucauuucagggcuguu

SEQ ID NO: 2182093 - RNA, 19 nt, Artificial Sequence
  Description of Artificial Sequence: Synthetic oligonucleotide
  Antisense strand to SEQ ID NO: 2182092
aacagcccugaaaugaccc

SEQ ID NO: 2182094 - RNA, 19 nt, Artificial Sequence
  Description of Artificial Sequence: Synthetic oligonucleotide
  Sense strand starting at position 2187 of SEQ ID NO: 1883278
ucccucaguugucuagaga

SEQ ID NO: 2182095 - RNA, 19 nt, Artificial Sequence
  Description of Artificial Sequence: Synthetic oligonucleotide
  Antisense strand to SEQ ID NO: 2182094
ucucuagacaacugaggga

SEQ ID NO: 2182096 - RNA, 19 nt, Artificial Sequence
  Description of Artificial Sequence: Synthetic oligonucleotide
  Sense strand starting at position 2188 of SEQ ID NO: 1883278
cccucaguugucuagagac

SEQ ID NO: 2182097 - RNA, 19 nt, Artificial Sequence
  Description of Artificial Sequence: Synthetic oligonucleotide
  Antisense strand to SEQ ID NO: 2182096
gucucuagacaacugaggg

SEQ ID NO: 2182098 - RNA, 19 nt, Artificial Sequence
  Description of Artificial Sequence: Synthetic oligonucleotide
  Sense strand starting at position 2190 of SEQ ID NO: 1883278
cucaguugucuagagacca

SEQ ID NO: 2182099 - RNA, 19 nt, Artificial Sequence
  Description of Artificial Sequence: Synthetic oligonucleotide
  Antisense strand to SEQ ID NO: 2182098
uggucucuagacaacugag

SEQ ID NO: 2182100 - RNA, 19 nt, Artificial Sequence
  Description of Artificial Sequence: Synthetic oligonucleotide
  Sense strand starting at position 2973 of SEQ ID NO: 1883278
acacauugguuucuuuaca

SEQ ID NO: 2182101 - RNA, 19 nt, Artificial Sequence
  Description of Artificial Sequence: Synthetic oligonucleotide
  Antisense strand to SEQ ID NO: 2182100
uguaaagaaaccaaugugu

SEQ ID NO: 2182102 - RNA, 19 nt, Artificial Sequence
  Description of Artificial Sequence: Synthetic oligonucleotide
  Sense strand starting at position 3105 of SEQ ID NO: 1883278
ucccaaauugcuuauagag

SEQ ID NO: 2182103 - RNA, 19 nt, Artificial Sequence
  Description of Artificial Sequence: Synthetic oligonucleotide
  Antisense strand to SEQ ID NO: 2182102
cucuauaagcaauuuggga

SEQ ID NO: 2182104 - RNA, 19 nt, Artificial Sequence
  Description of Artificial Sequence: Synthetic oligonucleotide
  Sense strand starting at position 3349 of SEQ ID NO: 1883278
gucaucuugggacagugaa

SEQ ID NO: 2182105 - RNA, 19 nt, Artificial Sequence
  Description of Artificial Sequence: Synthetic oligonucleotide
  Antisense strand to SEQ ID NO: 2182104
uucacugucccaagaugac

SEQ ID NO: 2182106 - RNA, 19 nt, Artificial Sequence
  Description of Artificial Sequence: Synthetic oligonucleotide
  Sense strand starting at position 3391 of SEQ ID NO: 1883278
caggacuucugagcugacu

SEQ ID NO: 2182107 - RNA, 19 nt, Artificial Sequence
  Description of Artificial Sequence: Synthetic oligonucleotide
  Antisense strand to SEQ ID NO: 2182106
agucagcucagaaguccug

SEQ ID NO: 2182108 - RNA, 19 nt, Artificial Sequence
  Description of Artificial Sequence: Synthetic oligonucleotide
  Sense strand starting at position 3428 of SEQ ID NO: 1883278
ugcuuuauugacuauguca

SEQ ID NO: 2182109 - RNA, 19 nt, Artificial Sequence
  Description of Artificial Sequence: Synthetic oligonucleotide
  Antisense strand to SEQ ID NO: 2182108
ugacauagucaauaaagca

SEQ ID NO: 2182110 - RNA, 19 nt, Artificial Sequence
  Description of Artificial Sequence: Synthetic oligonucleotide
  Sense strand starting at position 3474 of SEQ ID NO: 1883278
gcucuuagucucuauuaua

SEQ ID NO: 2182111 - RNA, 19 nt, Artificial Sequence
  Description of Artificial Sequence: Synthetic oligonucleotide
  Antisense strand to SEQ ID NO: 2182110
uauaauagagacuaagagc

SEQ ID NO: 2182112 - RNA, 19 nt, Artificial Sequence
  Description of Artificial Sequence: Synthetic oligonucleotide
  Sense strand starting at position 3571 of SEQ ID NO: 1883278
uuuaaaggaugagacuaaa

SEQ ID NO: 2182113 - RNA, 19 nt, Artificial Sequence
  Description of Artificial Sequence: Synthetic oligonucleotide
  Antisense strand to SEQ ID NO: 2182112
uuuagucucauccuuuaaa

SEQ ID NO: 2182114 - RNA, 19 nt, Artificial Sequence
  Description of Artificial Sequence: Synthetic oligonucleotide
  Sense strand starting at position 5 of SEQ ID NO: 1883279
caaugugaugcuggugaau

SEQ ID NO: 2182115 - RNA, 19 nt, Artificial Sequence
  Description of Artificial Sequence: Synthetic oligonucleotide
  Antisense strand to SEQ ID NO: 2182114
auucaccagcaucacauug

SEQ ID NO: 2182116 - RNA, 19 nt, Artificial Sequence
  Description of Artificial Sequence: Synthetic oligonucleotide
  Sense strand starting at position 41 of SEQ ID NO: 1883279
acgugaggcccuuagacua

SEQ ID NO: 2182117 - RNA, 19 nt, Artificial Sequence
  Description of Artificial Sequence: Synthetic oligonucleotide
  Antisense strand to SEQ ID NO: 2182116
uagucuaagggccucacgu

SEQ ID NO: 2182118 - RNA, 19 nt, Artificial Sequence
  Description of Artificial Sequence: Synthetic oligonucleotide
  Sense strand starting at position 48 of SEQ ID NO: 1883279
gcccuuagacuaggagaca

SEQ ID NO: 2182119 - RNA, 19 nt, Artificial Sequence
  Description of Artificial Sequence: Synthetic oligonucleotide
  Antisense strand to SEQ ID NO: 2182118
ugucuccuagucuaagggc

SEQ ID NO: 2182120 - RNA, 19 nt, Artificial Sequence
  Description of Artificial Sequence: Synthetic oligonucleotide
  Sense strand starting at position 173 of SEQ ID NO: 1883279
acguacaguuuaucuagaa

SEQ ID NO: 2182121 - RNA, 19 nt, Artificial Sequence
  Description of Artificial Sequence: Synthetic oligonucleotide
  Antisense strand to SEQ ID NO: 2182120
uucuagauaaacuguacgu

SEQ ID NO: 2182122 - RNA, 19 nt, Artificial Sequence
  Description of Artificial Sequence: Synthetic oligonucleotide
  Sense strand starting at position 174 of SEQ ID NO: 1883279
cguacaguuuaucuagaaa

SEQ ID NO: 2182123 - RNA, 19 nt, Artificial Sequence
  Description of Artificial Sequence: Synthetic oligonucleotide
  Antisense strand to SEQ ID NO: 2182122
uuucuagauaaacuguacg

SEQ ID NO: 2182124 - RNA, 19 nt, Artificial Sequence
  Description of Artificial Sequence: Synthetic oligonucleotide
  Sense strand starting at position 269 of SEQ ID NO: 1883279
aggaaacuuuccuuggcuu

SEQ ID NO: 2182125 - RNA, 19 nt, Artificial Sequence
  Description of Artificial Sequence: Synthetic oligonucleotide
  Antisense strand to SEQ ID NO: 2182124
aagccaaggaaaguuuccu

SEQ ID NO: 2182126 - RNA, 19 nt, Artificial Sequence
  Description of Artificial Sequence: Synthetic oligonucleotide
  Sense strand starting at position 270 of SEQ ID NO: 1883279
ggaaacuuuccuuggcuuu

SEQ ID NO: 2182127 - RNA, 19 nt, Artificial Sequence
  Description of Artificial Sequence: Synthetic oligonucleotide
  Antisense strand to SEQ ID NO: 2182126
aaagccaaggaaaguuucc

SEQ ID NO: 2182128 - RNA, 19 nt, Artificial Sequence
  Description of Artificial Sequence: Synthetic oligonucleotide
  Sense strand starting at position 449 of SEQ ID NO: 1883279
ugaugcuaaucuguacauu

SEQ ID NO: 2182129 - RNA, 19 nt, Artificial Sequence
  Description of Artificial Sequence: Synthetic oligonucleotide
  Antisense strand to SEQ ID NO: 2182128
aauguacagauuagcauca

SEQ ID NO: 2182130 - RNA, 19 nt, Artificial Sequence
  Description of Artificial Sequence: Synthetic oligonucleotide
  Sense strand starting at position 450 of SEQ ID NO: 1883279
gaugcuaaucuguacauug

SEQ ID NO: 2182131 - RNA, 19 nt, Artificial Sequence
  Description of Artificial Sequence: Synthetic oligonucleotide
  Antisense strand to SEQ ID NO: 2182130
caauguacagauuagcauc

SEQ ID NO: 2182132 - RNA, 19 nt, Artificial Sequence
  Description of Artificial Sequence: Synthetic oligonucleotide
  Sense strand starting at position 452 of SEQ ID NO: 1883279
ugcuaaucuguacauugaa

SEQ ID NO: 2182133 - RNA, 19 nt, Artificial Sequence
  Description of Artificial Sequence: Synthetic oligonucleotide
  Antisense strand to SEQ ID NO: 2182132
uucaauguacagauuagca

SEQ ID NO: 2182134 - RNA, 19 nt, Artificial Sequence
  Description of Artificial Sequence: Synthetic oligonucleotide
  Sense strand starting at position 485 of SEQ ID NO: 1883279
ucagcugugcuauaggaaa

SEQ ID NO: 2182135 - RNA, 19 nt, Artificial Sequence
  Description of Artificial Sequence: Synthetic oligonucleotide
  Antisense strand to SEQ ID NO: 2182134
uuuccuauagcacagcuga

SEQ ID NO: 2182136 - RNA, 19 nt, Artificial Sequence
  Description of Artificial Sequence: Synthetic oligonucleotide
  Sense strand starting at position 521 of SEQ ID NO: 1883279
gccaguaccuuaucaagga

SEQ ID NO: 2182137 - RNA, 19 nt, Artificial Sequence
  Description of Artificial Sequence: Synthetic oligonucleotide
  Antisense strand to SEQ ID NO: 2182136
uccuugauaagguacuggc

SEQ ID NO: 2182138 - RNA, 19 nt, Artificial Sequence
  Description of Artificial Sequence: Synthetic oligonucleotide
  Sense strand starting at position 838 of SEQ ID NO: 1883279
gaaccagguucggccuaau

SEQ ID NO: 2182139 - RNA, 19 nt, Artificial Sequence
  Description of Artificial Sequence: Synthetic oligonucleotide
  Antisense strand to SEQ ID NO: 2182138
auuaggccgaaccugguuc

SEQ ID NO: 2182140 - RNA, 19 nt, Artificial Sequence
  Description of Artificial Sequence: Synthetic oligonucleotide
  Sense strand starting at position 848 of SEQ ID NO: 1883279
cggccuaaugcagaaggaa

SEQ ID NO: 2182141 - RNA, 19 nt, Artificial Sequence
  Description of Artificial Sequence: Synthetic oligonucleotide
  Antisense strand to SEQ ID NO: 2182140
uuccuucugcauuaggccg

SEQ ID NO: 2182142 - RNA, 19 nt, Artificial Sequence
  Description of Artificial Sequence: Synthetic oligonucleotide
  Sense strand starting at position 1123 of SEQ ID NO: 1883279
uguggucuucucgcgugaa

SEQ ID NO: 2182143 - RNA, 19 nt, Artificial Sequence
  Description of Artificial Sequence: Synthetic oligonucleotide
  Antisense strand to SEQ ID NO: 2182142
uucacgcgagaagaccaca

SEQ ID NO: 2182144 - RNA, 19 nt, Artificial Sequence
  Description of Artificial Sequence: Synthetic oligonucleotide
  Sense strand starting at position 1125 of SEQ ID NO: 1883279
uggucuucucgcgugaauu

SEQ ID NO: 2182145 - RNA, 19 nt, Artificial Sequence
  Description of Artificial Sequence: Synthetic oligonucleotide
  Antisense strand to SEQ ID NO: 2182144
aauucacgcgagaagacca

SEQ ID NO: 2182146 - RNA, 19 nt, Artificial Sequence
  Description of Artificial Sequence: Synthetic oligonucleotide
  Sense strand starting at position 1140 of SEQ ID NO: 1883279
aauugauggcgucaucgaa

SEQ ID NO: 2182147 - RNA, 19 nt, Artificial Sequence
  Description of Artificial Sequence: Synthetic oligonucleotide
  Antisense strand to SEQ ID NO: 2182146
uucgaugacgccaucaauu

SEQ ID NO: 2182148 - RNA, 19 nt, Artificial Sequence
  Description of Artificial Sequence: Synthetic oligonucleotide
  Sense strand starting at position 1826 of SEQ ID NO: 1883279
ggaucugucaggugcaaag

SEQ ID NO: 2182149 - RNA, 19 nt, Artificial Sequence
  Description of Artificial Sequence: Synthetic oligonucleotide
  Antisense strand to SEQ ID NO: 2182148
cuuugcaccugacagaucc

SEQ ID NO: 2182150 - RNA, 19 nt, Artificial Sequence
  Description of Artificial Sequence: Synthetic oligonucleotide
  Sense strand starting at position 1943 of SEQ ID NO: 1883279
cgaauccuaccuugaaacu

SEQ ID NO: 2182151 - RNA, 19 nt, Artificial Sequence
  Description of Artificial Sequence: Synthetic oligonucleotide
  Antisense strand to SEQ ID NO: 2182150
aguuucaagguaggauucg

SEQ ID NO: 2182152 - RNA, 19 nt, Artificial Sequence
  Description of Artificial Sequence: Synthetic oligonucleotide
  Sense strand starting at position 2002 of SEQ ID NO: 1883279
aguaaauaaugguuuccuu

SEQ ID NO: 2182153 - RNA, 19 nt, Artificial Sequence
  Description of Artificial Sequence: Synthetic oligonucleotide
  Antisense strand to SEQ ID NO: 2182152
aaggaaaccauuauuuacu

SEQ ID NO: 2182154 - RNA, 19 nt, Artificial Sequence
  Description of Artificial Sequence: Synthetic oligonucleotide
  Sense strand starting at position 2031 of SEQ ID NO: 1883279
ggcaauuaggagugggaga

SEQ ID NO: 2182155 - RNA, 19 nt, Artificial Sequence
  Description of Artificial Sequence: Synthetic oligonucleotide
  Antisense strand to SEQ ID NO: 2182154
ucucccacuccuaauugcc

SEQ ID NO: 2182156 - RNA, 19 nt, Artificial Sequence
  Description of Artificial Sequence: Synthetic oligonucleotide
  Sense strand starting at position 2087 of SEQ ID NO: 1883279
uuggcauccucuguaauuu

SEQ ID NO: 2182157 - RNA, 19 nt, Artificial Sequence
  Description of Artificial Sequence: Synthetic oligonucleotide
  Antisense strand to SEQ ID NO: 2182156
aaauuacagaggaugccaa

SEQ ID NO: 2182158 - RNA, 19 nt, Artificial Sequence
  Description of Artificial Sequence: Synthetic oligonucleotide
  Sense strand starting at position 2241 of SEQ ID NO: 1883279
ggcuguauccggagccagu

SEQ ID NO: 2182159 - RNA, 19 nt, Artificial Sequence
  Description of Artificial Sequence: Synthetic oligonucleotide
  Antisense strand to SEQ ID NO: 2182158
acuggcuccggauacagcc

SEQ ID NO: 2182160 - RNA, 19 nt, Artificial Sequence
  Description of Artificial Sequence: Synthetic oligonucleotide
  Sense strand starting at position 2327 of SEQ ID NO: 1883279
gaggaagcgaguuguagau

SEQ ID NO: 2182161 - RNA, 19 nt, Artificial Sequence
  Description of Artificial Sequence: Synthetic oligonucleotide
  Antisense strand to SEQ ID NO: 2182160
aucuacaacucgcuuccuc

SEQ ID NO: 2182162 - RNA, 19 nt, Artificial Sequence
  Description of Artificial Sequence: Synthetic oligonucleotide
  Sense strand starting at position 2593 of SEQ ID NO: 1883279
guauauuacagguaaggca

SEQ ID NO: 2182163 - RNA, 19 nt, Artificial Sequence
  Description of Artificial Sequence: Synthetic oligonucleotide
  Antisense strand to SEQ ID NO: 2182162
ugccuuaccuguaauauac

SEQ ID NO: 2182164 - RNA, 19 nt, Artificial Sequence
  Description of Artificial Sequence: Synthetic oligonucleotide
  Sense strand starting at position 2675 of SEQ ID NO: 1883279
gcagauucugcugaacauc

SEQ ID NO: 2182165 - RNA, 19 nt, Artificial Sequence
  Description of Artificial Sequence: Synthetic oligonucleotide
  Antisense strand to SEQ ID NO: 2182164
gauguucagcagaaucugc

SEQ ID NO: 2182166 - RNA, 19 nt, Artificial Sequence
  Description of Artificial Sequence: Synthetic oligonucleotide
  Sense strand starting at position 2746 of SEQ ID NO: 1883279
ucaguaaccacgggaaaga

SEQ ID NO: 2182167 - RNA, 19 nt, Artificial Sequence
  Description of Artificial Sequence: Synthetic oligonucleotide
  Antisense strand to SEQ ID NO: 2182166
ucuuucccgugguuacuga

SEQ ID NO: 2182168 - RNA, 19 nt, Artificial Sequence
  Description of Artificial Sequence: Synthetic oligonucleotide
  Sense strand starting at position 2804 of SEQ ID NO: 1883279
cacuuaguaguccaagaug

SEQ ID NO: 2182169 - RNA, 19 nt, Artificial Sequence
  Description of Artificial Sequence: Synthetic oligonucleotide
  Antisense strand to SEQ ID NO: 2182168
caucuuggacuacuaagug

SEQ ID NO: 2182170 - RNA, 19 nt, Artificial Sequence
  Description of Artificial Sequence: Synthetic oligonucleotide
  Sense strand starting at position 2882 of SEQ ID NO: 1883279
acuggugcuccucauugau

SEQ ID NO: 2182171 - RNA, 19 nt, Artificial Sequence
  Description of Artificial Sequence: Synthetic oligonucleotide
  Antisense strand to SEQ ID NO: 2182170
aucaaugaggagcaccagu

SEQ ID NO: 2182172 - RNA, 19 nt, Artificial Sequence
  Description of Artificial Sequence: Synthetic oligonucleotide
  Sense strand starting at position 3035 of SEQ ID NO: 1883279
guaccaguucuugauggca

SEQ ID NO: 2182173 - RNA, 19 nt, Artificial Sequence
  Description of Artificial Sequence: Synthetic oligonucleotide
  Antisense strand to SEQ ID NO: 2182172
ugccaucaagaacugguac

SEQ ID NO: 2182174 - RNA, 19 nt, Artificial Sequence
  Description of Artificial Sequence: Synthetic oligonucleotide
  Sense strand starting at position 3076 of SEQ ID NO: 1883279
gcuaauuugggaugcucuu

SEQ ID NO: 2182175 - RNA, 19 nt, Artificial Sequence
  Description of Artificial Sequence: Synthetic oligonucleotide
  Antisense strand to SEQ ID NO: 2182174
aagagcaucccaaauuagc

SEQ ID NO: 2182176 - RNA, 19 nt, Artificial Sequence
  Description of Artificial Sequence: Synthetic oligonucleotide
  Sense strand starting at position 3508 of SEQ ID NO: 1883279
guugacuuacgucaaucaa

SEQ ID NO: 2182177 - RNA, 19 nt, Artificial Sequence
  Description of Artificial Sequence: Synthetic oligonucleotide
  Antisense strand to SEQ ID NO: 2182176
uugauugacguaagucaac

SEQ ID NO: 2182178 - RNA, 19 nt, Artificial Sequence
  Description of Artificial Sequence: Synthetic oligonucleotide
  Sense strand starting at position 3686 of SEQ ID NO: 1883279
gcuuuaugucuuuaugaac

SEQ ID NO: 2182179 - RNA, 19 nt, Artificial Sequence
  Description of Artificial Sequence: Synthetic oligonucleotide
  Antisense strand to SEQ ID NO: 2182178
guucauaaagacauaaagc

SEQ ID NO: 2182180 - RNA, 19 nt, Artificial Sequence
  Description of Artificial Sequence: Synthetic oligonucleotide
  Sense strand starting at position 3718 of SEQ ID NO: 1883279
gcuguugugaugcuuguuu

SEQ ID NO: 2182181 - RNA, 19 nt, Artificial Sequence
  Description of Artificial Sequence: Synthetic oligonucleotide
  Antisense strand to SEQ ID NO: 2182180
aaacaagcaucacaacagc

SEQ ID NO: 2182182 - RNA, 19 nt, Artificial Sequence
  Description of Artificial Sequence: Synthetic oligonucleotide
  Sense strand starting at position 3802 of SEQ ID NO: 1883279
ccaucaucugcuuacaugu

SEQ ID NO: 2182183 - RNA, 19 nt, Artificial Sequence
  Description of Artificial Sequence: Synthetic oligonucleotide
  Antisense strand to SEQ ID NO: 2182182
acauguaagcagaugaugg

SEQ ID NO: 2182184 - RNA, 19 nt, Artificial Sequence
  Description of Artificial Sequence: Synthetic oligonucleotide
  Sense strand starting at position 3864 of SEQ ID NO: 1883279
uuagaaagguaacucuauu

SEQ ID NO: 2182185 - RNA, 19 nt, Artificial Sequence
  Description of Artificial Sequence: Synthetic oligonucleotide
  Antisense strand to SEQ ID NO: 2182184
aauagaguuaccuuucuaa

SEQ ID NO: 2182186 - RNA, 19 nt, Artificial Sequence
  Description of Artificial Sequence: Synthetic oligonucleotide
  Sense strand starting at position 3935 of SEQ ID NO: 1883279
uuggucaugucauuggacu

SEQ ID NO: 2182187 - RNA, 19 nt, Artificial Sequence
  Description of Artificial Sequence: Synthetic oligonucleotide
  Antisense strand to SEQ ID NO: 2182186
aguccaaugacaugaccaa

SEQ ID NO: 2182188 - RNA, 19 nt, Artificial Sequence
  Description of Artificial Sequence: Synthetic oligonucleotide
  Sense strand starting at position 3943 of SEQ ID NO: 1883279
gucauuggacuccagcauu

SEQ ID NO: 2182189 - RNA, 19 nt, Artificial Sequence
  Description of Artificial Sequence: Synthetic oligonucleotide
  Antisense strand to SEQ ID NO: 2182188
aaugcuggaguccaaugac

SEQ ID NO: 2182190 - RNA, 19 nt, Artificial Sequence
  Description of Artificial Sequence: Synthetic oligonucleotide
  Sense strand starting at position 3946 of SEQ ID NO: 1883279
auuggacuccagcauuagu

SEQ ID NO: 2182191 - RNA, 19 nt, Artificial Sequence
  Description of Artificial Sequence: Synthetic oligonucleotide
  Antisense strand to SEQ ID NO: 2182190
acuaaugcuggaguccaau

SEQ ID NO: 2182192 - RNA, 19 nt, Artificial Sequence
  Description of Artificial Sequence: Synthetic oligonucleotide
  Sense strand starting at position 3968 of SEQ ID NO: 1883279
gguaguugauaaccauauu

SEQ ID NO: 2182193 - RNA, 19 nt, Artificial Sequence
  Description of Artificial Sequence: Synthetic oligonucleotide
  Antisense strand to SEQ ID NO: 2182192
aauaugguuaucaacuacc

SEQ ID NO: 2182194 - RNA, 19 nt, Artificial Sequence
  Description of Artificial Sequence: Synthetic oligonucleotide
  Sense strand starting at position 237 of SEQ ID NO: 1883280
aauuuaaugucguugacga

SEQ ID NO: 2182195 - RNA, 19 nt, Artificial Sequence
  Description of Artificial Sequence: Synthetic oligonucleotide
  Antisense strand to SEQ ID NO: 2182194
ucgucaacgacauuaaauu

SEQ ID NO: 2182196 - RNA, 19 nt, Artificial Sequence
  Description of Artificial Sequence: Synthetic oligonucleotide
  Sense strand starting at position 238 of SEQ ID NO: 1883280
auuuaaugucguugacgau

SEQ ID NO: 2182197 - RNA, 19 nt, Artificial Sequence
  Description of Artificial Sequence: Synthetic oligonucleotide
  Antisense strand to SEQ ID NO: 2182196
aucgucaacgacauuaaau

SEQ ID NO: 2182198 - RNA, 19 nt, Artificial Sequence
  Description of Artificial Sequence: Synthetic oligonucleotide
  Sense strand starting at position 242 of SEQ ID NO: 1883280
aaugucguugacgauuaga

SEQ ID NO: 2182199 - RNA, 19 nt, Artificial Sequence
  Description of Artificial Sequence: Synthetic oligonucleotide
  Antisense strand to SEQ ID NO: 2182198
ucuaaucgucaacgacauu

SEQ ID NO: 2182200 - RNA, 19 nt, Artificial Sequence
  Description of Artificial Sequence: Synthetic oligonucleotide
  Sense strand starting at position 332 of SEQ ID NO: 1883280
auggauaagugauugaguu

SEQ ID NO: 2182201 - RNA, 19 nt, Artificial Sequence
  Description of Artificial Sequence: Synthetic oligonucleotide
  Antisense strand to SEQ ID NO: 2182200
aacucaaucacuuauccau

SEQ ID NO: 2182202 - RNA, 19 nt, Artificial Sequence
  Description of Artificial Sequence: Synthetic oligonucleotide
  Sense strand starting at position 333 of SEQ ID NO: 1883280
uggauaagugauugaguua

SEQ ID NO: 2182203 - RNA, 19 nt, Artificial Sequence
  Description of Artificial Sequence: Synthetic oligonucleotide
  Antisense strand to SEQ ID NO: 2182202
uaacucaaucacuuaucca

SEQ ID NO: 2182204 - RNA, 19 nt, Artificial Sequence
  Description of Artificial Sequence: Synthetic oligonucleotide
  Sense strand starting at position 345 of SEQ ID NO: 1883280
ugaguuaauaaauacguga

SEQ ID NO: 2182205 - RNA, 19 nt, Artificial Sequence
  Description of Artificial Sequence: Synthetic oligonucleotide
  Antisense strand to SEQ ID NO: 2182204
ucacguauuuauuaacuca

SEQ ID NO: 2182206 - RNA, 19 nt, Artificial Sequence
  Description of Artificial Sequence: Synthetic oligonucleotide
  Sense strand starting at position 348 of SEQ ID NO: 1883280
guuaauaaauacgugauca

SEQ ID NO: 2182207 - RNA, 19 nt, Artificial Sequence
  Description of Artificial Sequence: Synthetic oligonucleotide
  Antisense strand to SEQ ID NO: 2182206
ugaucacguauuuauuaac

SEQ ID NO: 2182208 - RNA, 19 nt, Artificial Sequence
  Description of Artificial Sequence: Synthetic oligonucleotide
  Sense strand starting at position 350 of SEQ ID NO: 1883280
uaauaaauacgugaucagu

SEQ ID NO: 2182209 - RNA, 19 nt, Artificial Sequence
  Description of Artificial Sequence: Synthetic oligonucleotide
  Antisense strand to SEQ ID NO: 2182208
acugaucacguauuuauua

SEQ ID NO: 2182210 - RNA, 19 nt, Artificial Sequence
  Description of Artificial Sequence: Synthetic oligonucleotide
  Sense strand starting at position 352 of SEQ ID NO: 1883280
auaaauacgugaucaguuc

SEQ ID NO: 2182211 - RNA, 19 nt, Artificial Sequence
  Description of Artificial Sequence: Synthetic oligonucleotide
  Antisense strand to SEQ ID NO: 2182210
gaacugaucacguauuuau

SEQ ID NO: 2182212 - RNA, 19 nt, Artificial Sequence
  Description of Artificial Sequence: Synthetic oligonucleotide
  Sense strand starting at position 367 of SEQ ID NO: 1883280
guuccaaauggguaacauu

SEQ ID NO: 2182213 - RNA, 19 nt, Artificial Sequence
  Description of Artificial Sequence: Synthetic oligonucleotide
  Antisense strand to SEQ ID NO: 2182212
aauguuacccauuuggaac

SEQ ID NO: 2182214 - RNA, 19 nt, Artificial Sequence
  Description of Artificial Sequence: Synthetic oligonucleotide
  Sense strand starting at position 400 of SEQ ID NO: 1883280
ggagauaaguaguccagug

SEQ ID NO: 2182215 - RNA, 19 nt, Artificial Sequence
  Description of Artificial Sequence: Synthetic oligonucleotide
  Antisense strand to SEQ ID NO: 2182214
cacuggacuacuuaucucc

SEQ ID NO: 2182216 - RNA, 19 nt, Artificial Sequence
  Description of Artificial Sequence: Synthetic oligonucleotide
  Sense strand starting at position 402 of SEQ ID NO: 1883280
agauaaguaguccaguguu

SEQ ID NO: 2182217 - RNA, 19 nt, Artificial Sequence
  Description of Artificial Sequence: Synthetic oligonucleotide
  Antisense strand to SEQ ID NO: 2182216
aacacuggacuacuuaucu

SEQ ID NO: 2182218 - RNA, 19 nt, Artificial Sequence
  Description of Artificial Sequence: Synthetic oligonucleotide
  Sense strand starting at position 423 of SEQ ID NO: 1883280
ggagcuaagugguuauucu

SEQ ID NO: 2182219 - RNA, 19 nt, Artificial Sequence
  Description of Artificial Sequence: Synthetic oligonucleotide
  Antisense strand to SEQ ID NO: 2182218
agaauaaccacuuagcucc

SEQ ID NO: 2182220 - RNA, 19 nt, Artificial Sequence
  Description of Artificial Sequence: Synthetic oligonucleotide
  Sense strand starting at position 424 of SEQ ID NO: 1883280
gagcuaagugguuauucuu

SEQ ID NO: 2182221 - RNA, 19 nt, Artificial Sequence
  Description of Artificial Sequence: Synthetic oligonucleotide
  Antisense strand to SEQ ID NO: 2182220
aagaauaaccacuuagcuc

SEQ ID NO: 2182222 - RNA, 19 nt, Artificial Sequence
  Description of Artificial Sequence: Synthetic oligonucleotide
  Sense strand starting at position 922 of SEQ ID NO: 1883280
ggucuaagaauguggacuu

SEQ ID NO: 2182223 - RNA, 19 nt, Artificial Sequence
  Description of Artificial Sequence: Synthetic oligonucleotide
  Antisense strand to SEQ ID NO: 2182222
aaguccacauucuuagacc

SEQ ID NO: 2182224 - RNA, 19 nt, Artificial Sequence
  Description of Artificial Sequence: Synthetic oligonucleotide
  Sense strand starting at position 1103 of SEQ ID NO: 1883280
agauaauaagcuuggguua

SEQ ID NO: 2182225 - RNA, 19 nt, Artificial Sequence
  Description of Artificial Sequence: Synthetic oligonucleotide
  Antisense strand to SEQ ID NO: 2182224
uaacccaagcuuauuaucu

SEQ ID NO: 2182226 - RNA, 19 nt, Artificial Sequence
  Description of Artificial Sequence: Synthetic oligonucleotide
  Sense strand starting at position 1115 of SEQ ID NO: 1883280
uggguuaggcguccgaagu

SEQ ID NO: 2182227 - RNA, 19 nt, Artificial Sequence
  Description of Artificial Sequence: Synthetic oligonucleotide
  Antisense strand to SEQ ID NO: 2182226
acuucggacgccuaaccca

SEQ ID NO: 2182228 - RNA, 19 nt, Artificial Sequence
  Description of Artificial Sequence: Synthetic oligonucleotide
  Sense strand starting at position 1177 of SEQ ID NO: 1883280
ccagcuagacuugaguaga

SEQ ID NO: 2182229 - RNA, 19 nt, Artificial Sequence
  Description of Artificial Sequence: Synthetic oligonucleotide
  Antisense strand to SEQ ID NO: 2182228
ucuacucaagucuagcugg

SEQ ID NO: 2182230 - RNA, 19 nt, Artificial Sequence
  Description of Artificial Sequence: Synthetic oligonucleotide
  Sense strand starting at position 1358 of SEQ ID NO: 1883280
cuaacagaucuugagcgua

SEQ ID NO: 2182231 - RNA, 19 nt, Artificial Sequence
  Description of Artificial Sequence: Synthetic oligonucleotide
  Antisense strand to SEQ ID NO: 2182230
uacgcucaagaucuguuag

SEQ ID NO: 2182232 - RNA, 19 nt, Artificial Sequence
  Description of Artificial Sequence: Synthetic oligonucleotide
  Sense strand starting at position 2467 of SEQ ID NO: 1883280
uuguuuauuuccucgcuuu

SEQ ID NO: 2182233 - RNA, 19 nt, Artificial Sequence
  Description of Artificial Sequence: Synthetic oligonucleotide
  Antisense strand to SEQ ID NO: 2182232
aaagcgaggaaauaaacaa

SEQ ID NO: 2182234 - RNA, 19 nt, Artificial Sequence
  Description of Artificial Sequence: Synthetic oligonucleotide
  Sense strand starting at position 2542 of SEQ ID NO: 1883280
ggagacauacgguguagca

SEQ ID NO: 2182235 - RNA, 19 nt, Artificial Sequence
  Description of Artificial Sequence: Synthetic oligonucleotide
  Antisense strand to SEQ ID NO: 2182234
ugcuacaccguaugucucc

SEQ ID NO: 2182236 - RNA, 19 nt, Artificial Sequence
  Description of Artificial Sequence: Synthetic oligonucleotide
  Sense strand starting at position 2552 of SEQ ID NO: 1883280
gguguagcacgauggaaau

SEQ ID NO: 2182237 - RNA, 19 nt, Artificial Sequence
  Description of Artificial Sequence: Synthetic oligonucleotide
  Antisense strand to SEQ ID NO: 2182236
auuuccaucgugcuacacc

SEQ ID NO: 2182238 - RNA, 19 nt, Artificial Sequence
  Description of Artificial Sequence: Synthetic oligonucleotide
  Sense strand starting at position 2600 of SEQ ID NO: 1883280
ggaucuucucauggauaac

SEQ ID NO: 2182239 - RNA, 19 nt, Artificial Sequence
  Description of Artificial Sequence: Synthetic oligonucleotide
  Antisense strand to SEQ ID NO: 2182238
guuauccaugagaagaucc

SEQ ID NO: 2182240 - RNA, 19 nt, Artificial Sequence
  Description of Artificial Sequence: Synthetic oligonucleotide
  Sense strand starting at position 2609 of SEQ ID NO: 1883280
cauggauaaccuugagguc

SEQ ID NO: 2182241 - RNA, 19 nt, Artificial Sequence
  Description of Artificial Sequence: Synthetic oligonucleotide
  Antisense strand to SEQ ID NO: 2182240
gaccucaagguuauccaug

SEQ ID NO: 2182242 - RNA, 19 nt, Artificial Sequence
  Description of Artificial Sequence: Synthetic oligonucleotide
  Sense strand starting at position 2697 of SEQ ID NO: 1883280
ucaugucuuguagauucua

SEQ ID NO: 2182243 - RNA, 19 nt, Artificial Sequence
  Description of Artificial Sequence: Synthetic oligonucleotide
  Antisense strand to SEQ ID NO: 2182242
uagaaucuacaagacauga

SEQ ID NO: 2182244 - RNA, 19 nt, Artificial Sequence
  Description of Artificial Sequence: Synthetic oligonucleotide
  Sense strand starting at position 2733 of SEQ ID NO: 1883280
uggugugaagagcaguuau

SEQ ID NO: 2182245 - RNA, 19 nt, Artificial Sequence
  Description of Artificial Sequence: Synthetic oligonucleotide
  Antisense strand to SEQ ID NO: 2182244
auaacugcucuucacacca

SEQ ID NO: 2182246 - RNA, 19 nt, Artificial Sequence
  Description of Artificial Sequence: Synthetic oligonucleotide
  Sense strand starting at position 2810 of SEQ ID NO: 1883280
cuuugaaagagaugugcuu

SEQ ID NO: 2182247 - RNA, 19 nt, Artificial Sequence
  Description of Artificial Sequence: Synthetic oligonucleotide
  Antisense strand to SEQ ID NO: 2182246
aagcacaucucuuucaaag

SEQ ID NO: 2182248 - RNA, 19 nt, Artificial Sequence
  Description of Artificial Sequence: Synthetic oligonucleotide
  Sense strand starting at position 2934 of SEQ ID NO: 1883280
guggcuauuccugugccau

SEQ ID NO: 2182249 - RNA, 19 nt, Artificial Sequence
  Description of Artificial Sequence: Synthetic oligonucleotide
  Antisense strand to SEQ ID NO: 2182248
auggcacaggaauagccac

SEQ ID NO: 2182250 - RNA, 19 nt, Artificial Sequence
  Description of Artificial Sequence: Synthetic oligonucleotide
  Sense strand starting at position 2978 of SEQ ID NO: 1883280
guaugucucagggagaacu

SEQ ID NO: 2182251 - RNA, 19 nt, Artificial Sequence
  Description of Artificial Sequence: Synthetic oligonucleotide
  Antisense strand to SEQ ID NO: 2182250
aguucucccugagacauac

SEQ ID NO: 2182252 - RNA, 19 nt, Artificial Sequence
  Description of Artificial Sequence: Synthetic oligonucleotide
  Sense strand starting at position 3001 of SEQ ID NO: 1883280
gcaagaugagucugucaaa

SEQ ID NO: 2182253 - RNA, 19 nt, Artificial Sequence
  Description of Artificial Sequence: Synthetic oligonucleotide
  Antisense strand to SEQ ID NO: 2182252
uuugacagacucaucuugc

SEQ ID NO: 2182254 - RNA, 19 nt, Artificial Sequence
  Description of Artificial Sequence: Synthetic oligonucleotide
  Sense strand starting at position 3288 of SEQ ID NO: 1883280
ggugaaacccugcauauac

SEQ ID NO: 2182255 - RNA, 19 nt, Artificial Sequence
  Description of Artificial Sequence: Synthetic oligonucleotide
  Antisense strand to SEQ ID NO: 2182254
guauaugcaggguuucacc

SEQ ID NO: 2182256 - RNA, 19 nt, Artificial Sequence
  Description of Artificial Sequence: Synthetic oligonucleotide
  Sense strand starting at position 3500 of SEQ ID NO: 1883280
agaucuggaugagaacauu

SEQ ID NO: 2182257 - RNA, 19 nt, Artificial Sequence
  Description of Artificial Sequence: Synthetic oligonucleotide
  Antisense strand to SEQ ID NO: 2182256
aauguucucauccagaucu

SEQ ID NO: 2182258 - RNA, 19 nt, Artificial Sequence
  Description of Artificial Sequence: Synthetic oligonucleotide
  Sense strand starting at position 3578 of SEQ ID NO: 1883280
cagugacuuguccagagcu

SEQ ID NO: 2182259 - RNA, 19 nt, Artificial Sequence
  Description of Artificial Sequence: Synthetic oligonucleotide
  Antisense strand to SEQ ID NO: 2182258
agcucuggacaagucacug

SEQ ID NO: 2182260 - RNA, 19 nt, Artificial Sequence
  Description of Artificial Sequence: Synthetic oligonucleotide
  Sense strand starting at position 3700 of SEQ ID NO: 1883280
gaugaagacgcuuacauuc

SEQ ID NO: 2182261 - RNA, 19 nt, Artificial Sequence
  Description of Artificial Sequence: Synthetic oligonucleotide
  Antisense strand to SEQ ID NO: 2182260
gaauguaagcgucuucauc

SEQ ID NO: 2182262 - RNA, 19 nt, Artificial Sequence
  Description of Artificial Sequence: Synthetic oligonucleotide
  Sense strand starting at position 3859 of SEQ ID NO: 1883280
ugaccuuagaagugguaua

SEQ ID NO: 2182263 - RNA, 19 nt, Artificial Sequence
  Description of Artificial Sequence: Synthetic oligonucleotide
  Antisense strand to SEQ ID NO: 2182262
uauaccacuucuaagguca

SEQ ID NO: 2182264 - RNA, 19 nt, Artificial Sequence
  Description of Artificial Sequence: Synthetic oligonucleotide
  Sense strand starting at position 3864 of SEQ ID NO: 1883280
uuagaagugguauaccagu

SEQ ID NO: 2182265 - RNA, 19 nt, Artificial Sequence
  Description of Artificial Sequence: Synthetic oligonucleotide
  Antisense strand to SEQ ID NO: 2182264
acugguauaccacuucuaa

SEQ ID NO: 2182266 - RNA, 19 nt, Artificial Sequence
  Description of Artificial Sequence: Synthetic oligonucleotide
  Sense strand starting at position 3872 of SEQ ID NO: 1883280
gguauaccaguuugagaag

SEQ ID NO: 2182267 - RNA, 19 nt, Artificial Sequence
  Description of Artificial Sequence: Synthetic oligonucleotide
  Antisense strand to SEQ ID NO: 2182266
cuucucaaacugguauacc

SEQ ID NO: 2182268 - RNA, 19 nt, Artificial Sequence
  Description of Artificial Sequence: Synthetic oligonucleotide
  Sense strand starting at position 3898 of SEQ ID NO: 1883280
agcuauaaacgguguagau

SEQ ID NO: 2182269 - RNA, 19 nt, Artificial Sequence
  Description of Artificial Sequence: Synthetic oligonucleotide
  Antisense strand to SEQ ID NO: 2182268
aucuacaccguuuauagcu

SEQ ID NO: 2182270 - RNA, 19 nt, Artificial Sequence
  Description of Artificial Sequence: Synthetic oligonucleotide
  Sense strand starting at position 3900 of SEQ ID NO: 1883280
cuauaaacgguguagauaa

SEQ ID NO: 2182271 - RNA, 19 nt, Artificial Sequence
  Description of Artificial Sequence: Synthetic oligonucleotide
  Antisense strand to SEQ ID NO: 2182270
uuaucuacaccguuuauag

SEQ ID NO: 2182272 - RNA, 19 nt, Artificial Sequence
  Description of Artificial Sequence: Synthetic oligonucleotide
  Sense strand starting at position 3961 of SEQ ID NO: 1883280
augacuuaagaguguuacu

SEQ ID NO: 2182273 - RNA, 19 nt, Artificial Sequence
  Description of Artificial Sequence: Synthetic oligonucleotide
  Antisense strand to SEQ ID NO: 2182272
aguaacacucuuaagucau

SEQ ID NO: 2182274 - RNA, 19 nt, Artificial Sequence
  Description of Artificial Sequence: Synthetic oligonucleotide
  Sense strand starting at position 693 of SEQ ID NO: 1883281
gguuccugacaugagucua

SEQ ID NO: 2182275 - RNA, 19 nt, Artificial Sequence
  Description of Artificial Sequence: Synthetic oligonucleotide
  Antisense strand to SEQ ID NO: 2182274
uagacucaugucaggaacc

SEQ ID NO: 2182276 - RNA, 19 nt, Artificial Sequence
  Description of Artificial Sequence: Synthetic oligonucleotide
  Sense strand starting at position 919 of SEQ ID NO: 1883281
uugguuuaccuuuauguca

SEQ ID NO: 2182277 - RNA, 19 nt, Artificial Sequence
  Description of Artificial Sequence: Synthetic oligonucleotide
  Antisense strand to SEQ ID NO: 2182276
ugacauaaagguaaaccaa

SEQ ID NO: 2182278 - RNA, 19 nt, Artificial Sequence
  Description of Artificial Sequence: Synthetic oligonucleotide
  Sense strand starting at position 974 of SEQ ID NO: 1883281
ugauuaguuagucaggugu

SEQ ID NO: 2182279 - RNA, 19 nt, Artificial Sequence
  Description of Artificial Sequence: Synthetic oligonucleotide
  Antisense strand to SEQ ID NO: 2182278
acaccugacuaacuaauca

SEQ ID NO: 2182280 - RNA, 19 nt, Artificial Sequence
  Description of Artificial Sequence: Synthetic oligonucleotide
  Sense strand starting at position 982 of SEQ ID NO: 1883281
uagucagguguauagcuaa

SEQ ID NO: 2182281 - RNA, 19 nt, Artificial Sequence
  Description of Artificial Sequence: Synthetic oligonucleotide
  Antisense strand to SEQ ID NO: 2182280
uuagcuauacaccugacua

SEQ ID NO: 2182282 - RNA, 19 nt, Artificial Sequence
  Description of Artificial Sequence: Synthetic oligonucleotide
  Sense strand starting at position 985 of SEQ ID NO: 1883281
ucagguguauagcuaaaca

SEQ ID NO: 2182283 - RNA, 19 nt, Artificial Sequence
  Description of Artificial Sequence: Synthetic oligonucleotide
  Antisense strand to SEQ ID NO: 2182282
uguuuagcuauacaccuga

SEQ ID NO: 2182284 - RNA, 19 nt, Artificial Sequence
  Description of Artificial Sequence: Synthetic oligonucleotide
  Sense strand starting at position 1101 of SEQ ID NO: 1883281
auguaaagccaaggauaga

SEQ ID NO: 2182285 - RNA, 19 nt, Artificial Sequence
  Description of Artificial Sequence: Synthetic oligonucleotide
  Antisense strand to SEQ ID NO: 2182284
ucuauccuuggcuuuacau

SEQ ID NO: 2182286 - RNA, 19 nt, Artificial Sequence
  Description of Artificial Sequence: Synthetic oligonucleotide
  Sense strand starting at position 1154 of SEQ ID NO: 1883281
ugagguugugaugguuaac

SEQ ID NO: 2182287 - RNA, 19 nt, Artificial Sequence
  Description of Artificial Sequence: Synthetic oligonucleotide
  Antisense strand to SEQ ID NO: 2182286
guuaaccaucacaaccuca

SEQ ID NO: 2182288 - RNA, 19 nt, Artificial Sequence
  Description of Artificial Sequence: Synthetic oligonucleotide
  Sense strand starting at position 1157 of SEQ ID NO: 1883281
gguugugaugguuaacaag

SEQ ID NO: 2182289 - RNA, 19 nt, Artificial Sequence
  Description of Artificial Sequence: Synthetic oligonucleotide
  Antisense strand to SEQ ID NO: 2182288
cuuguuaaccaucacaacc

SEQ ID NO: 2182290 - RNA, 19 nt, Artificial Sequence
  Description of Artificial Sequence: Synthetic oligonucleotide
  Sense strand starting at position 1709 of SEQ ID NO: 1883281
ugugguugccaauacuuua

SEQ ID NO: 2182291 - RNA, 19 nt, Artificial Sequence
  Description of Artificial Sequence: Synthetic oligonucleotide
  Antisense strand to SEQ ID NO: 2182290
uaaaguauuggcaaccaca

SEQ ID NO: 2182292 - RNA, 19 nt, Artificial Sequence
  Description of Artificial Sequence: Synthetic oligonucleotide
  Sense strand starting at position 1717 of SEQ ID NO: 1883281
ccaauacuuuauguuguau

SEQ ID NO: 2182293 - RNA, 19 nt, Artificial Sequence
  Description of Artificial Sequence: Synthetic oligonucleotide
  Antisense strand to SEQ ID NO: 2182292
auacaacauaaaguauugg

SEQ ID NO: 2182294 - RNA, 19 nt, Artificial Sequence
  Description of Artificial Sequence: Synthetic oligonucleotide
  Sense strand starting at position 1723 of SEQ ID NO: 1883281
cuuuauguuguauggaaau

SEQ ID NO: 2182295 - RNA, 19 nt, Artificial Sequence
  Description of Artificial Sequence: Synthetic oligonucleotide
  Antisense strand to SEQ ID NO: 2182294
auuuccauacaacauaaag

SEQ ID NO: 2182296 - RNA, 19 nt, Artificial Sequence
  Description of Artificial Sequence: Synthetic oligonucleotide
  Sense strand starting at position 2118 of SEQ ID NO: 1883281
uggaaaugcaaaggugauu

SEQ ID NO: 2182297 - RNA, 19 nt, Artificial Sequence
  Description of Artificial Sequence: Synthetic oligonucleotide
  Antisense strand to SEQ ID NO: 2182296
aaucaccuuugcauuucca

SEQ ID NO: 2182298 - RNA, 19 nt, Artificial Sequence
  Description of Artificial Sequence: Synthetic oligonucleotide
  Sense strand starting at position 2290 of SEQ ID NO: 1883281
guaaauaaauagucagcuu

SEQ ID NO: 2182299 - RNA, 19 nt, Artificial Sequence
  Description of Artificial Sequence: Synthetic oligonucleotide
  Antisense strand to SEQ ID NO: 2182298
aagcugacuauuuauuuac

SEQ ID NO: 2182300 - RNA, 19 nt, Artificial Sequence
  Description of Artificial Sequence: Synthetic oligonucleotide
  Sense strand starting at position 2388 of SEQ ID NO: 1883281
acaguuagaaauuguuagu

SEQ ID NO: 2182301 - RNA, 19 nt, Artificial Sequence
  Description of Artificial Sequence: Synthetic oligonucleotide
  Antisense strand to SEQ ID NO: 2182300
acuaacaauuucuaacugu

SEQ ID NO: 2182302 - RNA, 19 nt, Artificial Sequence
  Description of Artificial Sequence: Synthetic oligonucleotide
  Sense strand starting at position 2393 of SEQ ID NO: 1883281
uagaaauuguuagugucau

SEQ ID NO: 2182303 - RNA, 19 nt, Artificial Sequence
  Description of Artificial Sequence: Synthetic oligonucleotide
  Antisense strand to SEQ ID NO: 2182302
augacacuaacaauuucua

SEQ ID NO: 2182304 - RNA, 19 nt, Artificial Sequence
  Description of Artificial Sequence: Synthetic oligonucleotide
  Sense strand starting at position 2447 of SEQ ID NO: 1883281
uuauuugugugcccuaagu

SEQ ID NO: 2182305 - RNA, 19 nt, Artificial Sequence
  Description of Artificial Sequence: Synthetic oligonucleotide
  Antisense strand to SEQ ID NO: 2182304
acuuagggcacacaaauaa

SEQ ID NO: 2182306 - RNA, 19 nt, Artificial Sequence
  Description of Artificial Sequence: Synthetic oligonucleotide
  Sense strand starting at position 2449 of SEQ ID NO: 1883281
auuugugugcccuaaguga

SEQ ID NO: 2182307 - RNA, 19 nt, Artificial Sequence
  Description of Artificial Sequence: Synthetic oligonucleotide
  Antisense strand to SEQ ID NO: 2182306
ucacuuagggcacacaaau

SEQ ID NO: 2182308 - RNA, 19 nt, Artificial Sequence
  Description of Artificial Sequence: Synthetic oligonucleotide
  Sense strand starting at position 2585 of SEQ ID NO: 1883281
ugcaguguuggauaauaca

SEQ ID NO: 2182309 - RNA, 19 nt, Artificial Sequence
  Description of Artificial Sequence: Synthetic oligonucleotide
  Antisense strand to SEQ ID NO: 2182308
uguauuauccaacacugca

SEQ ID NO: 2182310 - RNA, 19 nt, Artificial Sequence
  Description of Artificial Sequence: Synthetic oligonucleotide
  Sense strand starting at position 2689 of SEQ ID NO: 1883281
ugucucauggcuuauaucu

SEQ ID NO: 2182311 - RNA, 19 nt, Artificial Sequence
  Description of Artificial Sequence: Synthetic oligonucleotide
  Antisense strand to SEQ ID NO: 2182310
agauauaagccaugagaca

SEQ ID NO: 2182312 - RNA, 19 nt, Artificial Sequence
  Description of Artificial Sequence: Synthetic oligonucleotide
  Sense strand starting at position 2783 of SEQ ID NO: 1883281
gguuucuaaugacugcaau

SEQ ID NO: 2182313 - RNA, 19 nt, Artificial Sequence
  Description of Artificial Sequence: Synthetic oligonucleotide
  Antisense strand to SEQ ID NO: 2182312
auugcagucauuagaaacc

SEQ ID NO: 2182314 - RNA, 19 nt, Artificial Sequence
  Description of Artificial Sequence: Synthetic oligonucleotide
  Sense strand starting at position 2786 of SEQ ID NO: 1883281
uucuaaugacugcaaugau

SEQ ID NO: 2182315 - RNA, 19 nt, Artificial Sequence
  Description of Artificial Sequence: Synthetic oligonucleotide
  Antisense strand to SEQ ID NO: 2182314
aucauugcagucauuagaa

SEQ ID NO: 2182316 - RNA, 19 nt, Artificial Sequence
  Description of Artificial Sequence: Synthetic oligonucleotide
  Sense strand starting at position 3128 of SEQ ID NO: 1883281
gggauaugcagcugguaca

SEQ ID NO: 2182317 - RNA, 19 nt, Artificial Sequence
  Description of Artificial Sequence: Synthetic oligonucleotide
  Antisense strand to SEQ ID NO: 2182316
uguaccagcugcauauccc

SEQ ID NO: 2182318 - RNA, 19 nt, Artificial Sequence
  Description of Artificial Sequence: Synthetic oligonucleotide
  Sense strand starting at position 3138 of SEQ ID NO: 1883281
gcugguacagcguucaagu

SEQ ID NO: 2182319 - RNA, 19 nt, Artificial Sequence
  Description of Artificial Sequence: Synthetic oligonucleotide
  Antisense strand to SEQ ID NO: 2182318
acuugaacgcuguaccagc

SEQ ID NO: 2182320 - RNA, 19 nt, Artificial Sequence
  Description of Artificial Sequence: Synthetic oligonucleotide
  Sense strand starting at position 3206 of SEQ ID NO: 1883281
cccugcagugagcaauaau

SEQ ID NO: 2182321 - RNA, 19 nt, Artificial Sequence
  Description of Artificial Sequence: Synthetic oligonucleotide
  Antisense strand to SEQ ID NO: 2182320
auuauugcucacugcaggg

SEQ ID NO: 2182322 - RNA, 19 nt, Artificial Sequence
  Description of Artificial Sequence: Synthetic oligonucleotide
  Sense strand starting at position 3267 of SEQ ID NO: 1883281
aaauguucccguuaaguua

SEQ ID NO: 2182323 - RNA, 19 nt, Artificial Sequence
  Description of Artificial Sequence: Synthetic oligonucleotide
  Antisense strand to SEQ ID NO: 2182322
uaacuuaacgggaacauuu

SEQ ID NO: 2182324 - RNA, 19 nt, Artificial Sequence
  Description of Artificial Sequence: Synthetic oligonucleotide
  Sense strand starting at position 3289 of SEQ ID NO: 1883281
uuugaaagucacugacaac

SEQ ID NO: 2182325 - RNA, 19 nt, Artificial Sequence
  Description of Artificial Sequence: Synthetic oligonucleotide
  Antisense strand to SEQ ID NO: 2182324
guugucagugacuuucaaa

SEQ ID NO: 2182326 - RNA, 19 nt, Artificial Sequence
  Description of Artificial Sequence: Synthetic oligonucleotide
  Sense strand starting at position 3541 of SEQ ID NO: 1883281
cuguguguccauuagauug

SEQ ID NO: 2182327 - RNA, 19 nt, Artificial Sequence
  Description of Artificial Sequence: Synthetic oligonucleotide
  Antisense strand to SEQ ID NO: 2182326
caaucuaauggacacacag

SEQ ID NO: 2182328 - RNA, 19 nt, Artificial Sequence
  Description of Artificial Sequence: Synthetic oligonucleotide
  Sense strand starting at position 3575 of SEQ ID NO: 1883281
caguuuaacguccaaggaa

SEQ ID NO: 2182329 - RNA, 19 nt, Artificial Sequence
  Description of Artificial Sequence: Synthetic oligonucleotide
  Antisense strand to SEQ ID NO: 2182328
uuccuuggacguuaaacug

SEQ ID NO: 2182330 - RNA, 19 nt, Artificial Sequence
  Description of Artificial Sequence: Synthetic oligonucleotide
  Sense strand starting at position 3619 of SEQ ID NO: 1883281
cucauagcuguugauauga

SEQ ID NO: 2182331 - RNA, 19 nt, Artificial Sequence
  Description of Artificial Sequence: Synthetic oligonucleotide
  Antisense strand to SEQ ID NO: 2182330
ucauaucaacagcuaugag

SEQ ID NO: 2182332 - RNA, 19 nt, Artificial Sequence
  Description of Artificial Sequence: Synthetic oligonucleotide
  Sense strand starting at position 3684 of SEQ ID NO: 1883281
augguaugcaaccgagaaa

SEQ ID NO: 2182333 - RNA, 19 nt, Artificial Sequence
  Description of Artificial Sequence: Synthetic oligonucleotide
  Antisense strand to SEQ ID NO: 2182332
uuucucgguugcauaccau

SEQ ID NO: 2182334 - RNA, 19 nt, Artificial Sequence
  Description of Artificial Sequence: Synthetic oligonucleotide
  Sense strand starting at position 3685 of SEQ ID NO: 1883281
ugguaugcaaccgagaaau

SEQ ID NO: 2182335 - RNA, 19 nt, Artificial Sequence
  Description of Artificial Sequence: Synthetic oligonucleotide
  Antisense strand to SEQ ID NO: 2182334
auuucucgguugcauacca

SEQ ID NO: 2182336 - RNA, 19 nt, Artificial Sequence
  Description of Artificial Sequence: Synthetic oligonucleotide
  Sense strand starting at position 3687 of SEQ ID NO: 1883281
guaugcaaccgagaaauua

SEQ ID NO: 2182337 - RNA, 19 nt, Artificial Sequence
  Description of Artificial Sequence: Synthetic oligonucleotide
  Antisense strand to SEQ ID NO: 2182336
uaauuucucgguugcauac

SEQ ID NO: 2182338 - RNA, 19 nt, Artificial Sequence
  Description of Artificial Sequence: Synthetic oligonucleotide
  Sense strand starting at position 3699 of SEQ ID NO: 1883281
gaaauuaucgugugaauag

SEQ ID NO: 2182339 - RNA, 19 nt, Artificial Sequence
  Description of Artificial Sequence: Synthetic oligonucleotide
  Antisense strand to SEQ ID NO: 2182338
cuauucacacgauaauuuc

SEQ ID NO: 2182340 - RNA, 19 nt, Artificial Sequence
  Description of Artificial Sequence: Synthetic oligonucleotide
  Sense strand starting at position 3706 of SEQ ID NO: 1883281
ucgugugaauaguuagaag

SEQ ID NO: 2182341 - RNA, 19 nt, Artificial Sequence
  Description of Artificial Sequence: Synthetic oligonucleotide
  Antisense strand to SEQ ID NO: 2182340
cuucuaacuauucacacga

SEQ ID NO: 2182342 - RNA, 19 nt, Artificial Sequence
  Description of Artificial Sequence: Synthetic oligonucleotide
  Sense strand starting at position 3717 of SEQ ID NO: 1883281
guuagaaguaauugaguag

SEQ ID NO: 2182343 - RNA, 19 nt, Artificial Sequence
  Description of Artificial Sequence: Synthetic oligonucleotide
  Antisense strand to SEQ ID NO: 2182342
cuacucaauuacuucuaac

SEQ ID NO: 2182344 - RNA, 19 nt, Artificial Sequence
  Description of Artificial Sequence: Synthetic oligonucleotide
  Sense strand starting at position 3720 of SEQ ID NO: 1883281
agaaguaauugaguagcuu

SEQ ID NO: 2182345 - RNA, 19 nt, Artificial Sequence
  Description of Artificial Sequence: Synthetic oligonucleotide
  Antisense strand to SEQ ID NO: 2182344
aagcuacucaauuacuucu

SEQ ID NO: 2182346 - RNA, 19 nt, Artificial Sequence
  Description of Artificial Sequence: Synthetic oligonucleotide
  Sense strand starting at position 3721 of SEQ ID NO: 1883281
gaaguaauugaguagcuua

SEQ ID NO: 2182347 - RNA, 19 nt, Artificial Sequence
  Description of Artificial Sequence: Synthetic oligonucleotide
  Antisense strand to SEQ ID NO: 2182346
uaagcuacucaauuacuuc

SEQ ID NO: 2182348 - RNA, 19 nt, Artificial Sequence
  Description of Artificial Sequence: Synthetic oligonucleotide
  Sense strand starting at position 3849 of SEQ ID NO: 1883281
gccaguuccgccuuacacu

SEQ ID NO: 2182349 - RNA, 19 nt, Artificial Sequence
  Description of Artificial Sequence: Synthetic oligonucleotide
  Antisense strand to SEQ ID NO: 2182348
aguguaaggcggaacuggc

SEQ ID NO: 2182350 - RNA, 19 nt, Artificial Sequence
  Description of Artificial Sequence: Synthetic oligonucleotide
  Sense strand starting at position 3881 of SEQ ID NO: 1883281
gacaauuguugagcacuuu

SEQ ID NO: 2182351 - RNA, 19 nt, Artificial Sequence
  Description of Artificial Sequence: Synthetic oligonucleotide
  Antisense strand to SEQ ID NO: 2182350
aaagugcucaacaauuguc

SEQ ID NO: 2182352 - RNA, 19 nt, Artificial Sequence
  Description of Artificial Sequence: Synthetic oligonucleotide
  Sense strand starting at position 3966 of SEQ ID NO: 1883281
acaauugaaugagagacau

SEQ ID NO: 2182353 - RNA, 19 nt, Artificial Sequence
  Description of Artificial Sequence: Synthetic oligonucleotide
  Antisense strand to SEQ ID NO: 2182352
augucucucauucaauugu

SEQ ID NO: 2182354 - RNA, 19 nt, Artificial Sequence
  Description of Artificial Sequence: Synthetic oligonucleotide
  Sense strand starting at position 257 of SEQ ID NO: 1883282
agguaccuuuaguuuacaa

SEQ ID NO: 2182355 - RNA, 19 nt, Artificial Sequence
  Description of Artificial Sequence: Synthetic oligonucleotide
  Antisense strand to SEQ ID NO: 2182354
uuguaaacuaaagguaccu

SEQ ID NO: 2182356 - RNA, 19 nt, Artificial Sequence
  Description of Artificial Sequence: Synthetic oligonucleotide
  Sense strand starting at position 259 of SEQ ID NO: 1883282
guaccuuuaguuuacaaau

SEQ ID NO: 2182357 - RNA, 19 nt, Artificial Sequence
  Description of Artificial Sequence: Synthetic oligonucleotide
  Antisense strand to SEQ ID NO: 2182356
auuuguaaacuaaagguac

SEQ ID NO: 2182358 - RNA, 19 nt, Artificial Sequence
  Description of Artificial Sequence: Synthetic oligonucleotide
  Sense strand starting at position 294 of SEQ ID NO: 1883282
auggaauauugccuccuuu

SEQ ID NO: 2182359 - RNA, 19 nt, Artificial Sequence
  Description of Artificial Sequence: Synthetic oligonucleotide
  Antisense strand to SEQ ID NO: 2182358
aaaggaggcaauauuccau

SEQ ID NO: 2182360 - RNA, 19 nt, Artificial Sequence
  Description of Artificial Sequence: Synthetic oligonucleotide
  Sense strand starting at position 392 of SEQ ID NO: 1883282
gaaugaauacauugugugu

SEQ ID NO: 2182361 - RNA, 19 nt, Artificial Sequence
  Description of Artificial Sequence: Synthetic oligonucleotide
  Antisense strand to SEQ ID NO: 2182360
acacacaauguauucauuc

SEQ ID NO: 2182362 - RNA, 19 nt, Artificial Sequence
  Description of Artificial Sequence: Synthetic oligonucleotide
  Sense strand starting at position 439 of SEQ ID NO: 1883282
aguagagcucuccauagca

SEQ ID NO: 2182363 - RNA, 19 nt, Artificial Sequence
  Description of Artificial Sequence: Synthetic oligonucleotide
  Antisense strand to SEQ ID NO: 2182362
ugcuauggagagcucuacu

SEQ ID NO: 2182364 - RNA, 19 nt, Artificial Sequence
  Description of Artificial Sequence: Synthetic oligonucleotide
  Sense strand starting at position 505 of SEQ ID NO: 1883282
gacacacugguauguagua

SEQ ID NO: 2182365 - RNA, 19 nt, Artificial Sequence
  Description of Artificial Sequence: Synthetic oligonucleotide
  Antisense strand to SEQ ID NO: 2182364
uacuacauaccaguguguc

SEQ ID NO: 2182366 - RNA, 19 nt, Artificial Sequence
  Description of Artificial Sequence: Synthetic oligonucleotide
  Sense strand starting at position 558 of SEQ ID NO: 1883282
uugcucauuugggaaacaa

SEQ ID NO: 2182367 - RNA, 19 nt, Artificial Sequence
  Description of Artificial Sequence: Synthetic oligonucleotide
  Antisense strand to SEQ ID NO: 2182366
uuguuucccaaaugagcaa

SEQ ID NO: 2182368 - RNA, 19 nt, Artificial Sequence
  Description of Artificial Sequence: Synthetic oligonucleotide
  Sense strand starting at position 702 of SEQ ID NO: 1883282
gagaguuugucagcaguca

SEQ ID NO: 2182369 - RNA, 19 nt, Artificial Sequence
  Description of Artificial Sequence: Synthetic oligonucleotide
  Antisense strand to SEQ ID NO: 2182368
ugacugcugacaaacucuc

SEQ ID NO: 2182370 - RNA, 19 nt, Artificial Sequence
  Description of Artificial Sequence: Synthetic oligonucleotide
  Sense strand starting at position 703 of SEQ ID NO: 1883282
agaguuugucagcagucaa

SEQ ID NO: 2182371 - RNA, 19 nt, Artificial Sequence
  Description of Artificial Sequence: Synthetic oligonucleotide
  Antisense strand to SEQ ID NO: 2182370
uugacugcugacaaacucu

SEQ ID NO: 2182372 - RNA, 19 nt, Artificial Sequence
  Description of Artificial Sequence: Synthetic oligonucleotide
  Sense strand starting at position 767 of SEQ ID NO: 1883282
ugauuacuccauugcaaga

SEQ ID NO: 2182373 - RNA, 19 nt, Artificial Sequence
  Description of Artificial Sequence: Synthetic oligonucleotide
  Antisense strand to SEQ ID NO: 2182372
ucuugcaauggaguaauca

SEQ ID NO: 2182374 - RNA, 19 nt, Artificial Sequence
  Description of Artificial Sequence: Synthetic oligonucleotide
  Sense strand starting at position 780 of SEQ ID NO: 1883282
gcaagaacccuugagcucu

SEQ ID NO: 2182375 - RNA, 19 nt, Artificial Sequence
  Description of Artificial Sequence: Synthetic oligonucleotide
  Antisense strand to SEQ ID NO: 2182374
agagcucaaggguucuugc

SEQ ID NO: 2182376 - RNA, 19 nt, Artificial Sequence
  Description of Artificial Sequence: Synthetic oligonucleotide
  Sense strand starting at position 907 of SEQ ID NO: 1883282
ugguaaauaucaguguagu

SEQ ID NO: 2182377 - RNA, 19 nt, Artificial Sequence
  Description of Artificial Sequence: Synthetic oligonucleotide
  Antisense strand to SEQ ID NO: 2182376
acuacacugauauuuacca

SEQ ID NO: 2182378 - RNA, 19 nt, Artificial Sequence
  Description of Artificial Sequence: Synthetic oligonucleotide
  Sense strand starting at position 908 of SEQ ID NO: 1883282
gguaaauaucaguguaguu

SEQ ID NO: 2182379 - RNA, 19 nt, Artificial Sequence
  Description of Artificial Sequence: Synthetic oligonucleotide
  Antisense strand to SEQ ID NO: 2182378
aacuacacugauauuuacc

SEQ ID NO: 2182380 - RNA, 19 nt, Artificial Sequence
  Description of Artificial Sequence: Synthetic oligonucleotide
  Sense strand starting at position 968 of SEQ ID NO: 1883282
ccucuaguucuacagcuua

SEQ ID NO: 2182381 - RNA, 19 nt, Artificial Sequence
  Description of Artificial Sequence: Synthetic oligonucleotide
  Antisense strand to SEQ ID NO: 2182380
uaagcuguagaacuagagg

SEQ ID NO: 2182382 - RNA, 19 nt, Artificial Sequence
  Description of Artificial Sequence: Synthetic oligonucleotide
  Sense strand starting at position 1064 of SEQ ID NO: 1883282
uuaguuauguuacucagaa

SEQ ID NO: 2182383 - RNA, 19 nt, Artificial Sequence
  Description of Artificial Sequence: Synthetic oligonucleotide
  Antisense strand to SEQ ID NO: 2182382
uucugaguaacauaacuaa

SEQ ID NO: 2182384 - RNA, 19 nt, Artificial Sequence
  Description of Artificial Sequence: Synthetic oligonucleotide
  Sense strand starting at position 1245 of SEQ ID NO: 1883282
ugcucacuuggcuaaauua

SEQ ID NO: 2182385 - RNA, 19 nt, Artificial Sequence
  Description of Artificial Sequence: Synthetic oligonucleotide
  Antisense strand to SEQ ID NO: 2182384
uaauuuagccaagugagca

SEQ ID NO: 2182386 - RNA, 19 nt, Artificial Sequence
  Description of Artificial Sequence: Synthetic oligonucleotide
  Sense strand starting at position 1260 of SEQ ID NO: 1883282
auuacaaccugaguaaugu

SEQ ID NO: 2182387 - RNA, 19 nt, Artificial Sequence
  Description of Artificial Sequence: Synthetic oligonucleotide
  Antisense strand to SEQ ID NO: 2182386
acauuacucagguuguaau

SEQ ID NO: 2182388 - RNA, 19 nt, Artificial Sequence
  Description of Artificial Sequence: Synthetic oligonucleotide
  Sense strand starting at position 1353 of SEQ ID NO: 1883282
augucuagcugaguucuaa

SEQ ID NO: 2182389 - RNA, 19 nt, Artificial Sequence
  Description of Artificial Sequence: Synthetic oligonucleotide
  Antisense strand to SEQ ID NO: 2182388
uuagaacucagcuagacau

SEQ ID NO: 2182390 - RNA, 19 nt, Artificial Sequence
  Description of Artificial Sequence: Synthetic oligonucleotide
  Sense strand starting at position 1423 of SEQ ID NO: 1883282
uauaguaggguccauauau

SEQ ID NO: 2182391 - RNA, 19 nt, Artificial Sequence
  Description of Artificial Sequence: Synthetic oligonucleotide
  Antisense strand to SEQ ID NO: 2182390
auauauggacccuacuaua

SEQ ID NO: 2182392 - RNA, 19 nt, Artificial Sequence
  Description of Artificial Sequence: Synthetic oligonucleotide
  Sense strand starting at position 1432 of SEQ ID NO: 1883282
guccauauaugucugagca

SEQ ID NO: 2182393 - RNA, 19 nt, Artificial Sequence
  Description of Artificial Sequence: Synthetic oligonucleotide
  Antisense strand to SEQ ID NO: 2182392
ugcucagacauauauggac

SEQ ID NO: 2182394 - RNA, 19 nt, Artificial Sequence
  Description of Artificial Sequence: Synthetic oligonucleotide
  Sense strand starting at position 1433 of SEQ ID NO: 1883282
uccauauaugucugagcau

SEQ ID NO: 2182395 - RNA, 19 nt, Artificial Sequence
  Description of Artificial Sequence: Synthetic oligonucleotide
  Antisense strand to SEQ ID NO: 2182394
augcucagacauauaugga

SEQ ID NO: 2182396 - RNA, 19 nt, Artificial Sequence
  Description of Artificial Sequence: Synthetic oligonucleotide
  Sense strand starting at position 1531 of SEQ ID NO: 1883282
uaucaaaguugagcaaaga

SEQ ID NO: 2182397 - RNA, 19 nt, Artificial Sequence
  Description of Artificial Sequence: Synthetic oligonucleotide
  Antisense strand to SEQ ID NO: 2182396
ucuuugcucaacuuugaua

SEQ ID NO: 2182398 - RNA, 19 nt, Artificial Sequence
  Description of Artificial Sequence: Synthetic oligonucleotide
  Sense strand starting at position 1558 of SEQ ID NO: 1883282
acuuuagugguauggaaca

SEQ ID NO: 2182399 - RNA, 19 nt, Artificial Sequence
  Description of Artificial Sequence: Synthetic oligonucleotide
  Antisense strand to SEQ ID NO: 2182398
uguuccauaccacuaaagu

SEQ ID NO: 2182400 - RNA, 19 nt, Artificial Sequence
  Description of Artificial Sequence: Synthetic oligonucleotide
  Sense strand starting at position 1560 of SEQ ID NO: 1883282
uuuagugguauggaacauu

SEQ ID NO: 2182401 - RNA, 19 nt, Artificial Sequence
  Description of Artificial Sequence: Synthetic oligonucleotide
  Antisense strand to SEQ ID NO: 2182400
aauguuccauaccacuaaa

SEQ ID NO: 2182402 - RNA, 19 nt, Artificial Sequence
  Description of Artificial Sequence: Synthetic oligonucleotide
  Sense strand starting at position 1626 of SEQ ID NO: 1883282
ucaauccuugucugagcau

SEQ ID NO: 2182403 - RNA, 19 nt, Artificial Sequence
  Description of Artificial Sequence: Synthetic oligonucleotide
  Antisense strand to SEQ ID NO: 2182402
augcucagacaaggauuga

SEQ ID NO: 2182404 - RNA, 19 nt, Artificial Sequence
  Description of Artificial Sequence: Synthetic oligonucleotide
  Sense strand starting at position 1632 of SEQ ID NO: 1883282
cuugucugagcauaggaau

SEQ ID NO: 2182405 - RNA, 19 nt, Artificial Sequence
  Description of Artificial Sequence: Synthetic oligonucleotide
  Antisense strand to SEQ ID NO: 2182404
auuccuaugcucagacaag

SEQ ID NO: 2182406 - RNA, 19 nt, Artificial Sequence
  Description of Artificial Sequence: Synthetic oligonucleotide
  Sense strand starting at position 1691 of SEQ ID NO: 1883282
ucauauaucuggccugaaa

SEQ ID NO: 2182407 - RNA, 19 nt, Artificial Sequence
  Description of Artificial Sequence: Synthetic oligonucleotide
  Antisense strand to SEQ ID NO: 2182406
uuucaggccagauauauga

SEQ ID NO: 2182408 - RNA, 19 nt, Artificial Sequence
  Description of Artificial Sequence: Synthetic oligonucleotide
  Sense strand starting at position 1693 of SEQ ID NO: 1883282
auauaucuggccugaaaca

SEQ ID NO: 2182409 - RNA, 19 nt, Artificial Sequence
  Description of Artificial Sequence: Synthetic oligonucleotide
  Antisense strand to SEQ ID NO: 2182408
uguuucaggccagauauau

SEQ ID NO: 2182410 - RNA, 19 nt, Artificial Sequence
  Description of Artificial Sequence: Synthetic oligonucleotide
  Sense strand starting at position 1922 of SEQ ID NO: 1883282
gcaauuagaucuuuaagau

SEQ ID NO: 2182411 - RNA, 19 nt, Artificial Sequence
  Description of Artificial Sequence: Synthetic oligonucleotide
  Antisense strand to SEQ ID NO: 2182410
aucuuaaagaucuaauugc

SEQ ID NO: 2182412 - RNA, 19 nt, Artificial Sequence
  Description of Artificial Sequence: Synthetic oligonucleotide
  Sense strand starting at position 1978 of SEQ ID NO: 1883282
gcaacaaagucuccagcau

SEQ ID NO: 2182413 - RNA, 19 nt, Artificial Sequence
  Description of Artificial Sequence: Synthetic oligonucleotide
  Antisense strand to SEQ ID NO: 2182412
augcuggagacuuuguugc

SEQ ID NO: 2182414 - RNA, 19 nt, Artificial Sequence
  Description of Artificial Sequence: Synthetic oligonucleotide
  Sense strand starting at position 2057 of SEQ ID NO: 1883282
auuagaaacuuuguugugu

SEQ ID NO: 2182415 - RNA, 19 nt, Artificial Sequence
  Description of Artificial Sequence: Synthetic oligonucleotide
  Antisense strand to SEQ ID NO: 2182414
acacaacaaaguuucuaau

SEQ ID NO: 2182416 - RNA, 19 nt, Artificial Sequence
  Description of Artificial Sequence: Synthetic oligonucleotide
  Sense strand starting at position 2120 of SEQ ID NO: 1883282
uggcuuuagaaagaucugu

SEQ ID NO: 2182417 - RNA, 19 nt, Artificial Sequence
  Description of Artificial Sequence: Synthetic oligonucleotide
  Antisense strand to SEQ ID NO: 2182416
acagaucuuucuaaagcca

SEQ ID NO: 2182418 - RNA, 19 nt, Artificial Sequence
  Description of Artificial Sequence: Synthetic oligonucleotide
  Sense strand starting at position 2128 of SEQ ID NO: 1883282
gaaagaucuguccagggcu

SEQ ID NO: 2182419 - RNA, 19 nt, Artificial Sequence
  Description of Artificial Sequence: Synthetic oligonucleotide
  Antisense strand to SEQ ID NO: 2182418
agcccuggacagaucuuuc

SEQ ID NO: 2182420 - RNA, 19 nt, Artificial Sequence
  Description of Artificial Sequence: Synthetic oligonucleotide
  Sense strand starting at position 2253 of SEQ ID NO: 1883282
uugugaaguguugaauaau

SEQ ID NO: 2182421 - RNA, 19 nt, Artificial Sequence
  Description of Artificial Sequence: Synthetic oligonucleotide
  Antisense strand to SEQ ID NO: 2182420
auuauucaacacuucacaa

SEQ ID NO: 2182422 - RNA, 19 nt, Artificial Sequence
  Description of Artificial Sequence: Synthetic oligonucleotide
  Sense strand starting at position 2429 of SEQ ID NO: 1883282
auuguuugcugagcaacaa

SEQ ID NO: 2182423 - RNA, 19 nt, Artificial Sequence
  Description of Artificial Sequence: Synthetic oligonucleotide
  Antisense strand to SEQ ID NO: 2182422
uuguugcucagcaaacaau

SEQ ID NO: 2182424 - RNA, 19 nt, Artificial Sequence
  Description of Artificial Sequence: Synthetic oligonucleotide
  Sense strand starting at position 2430 of SEQ ID NO: 1883282
uuguuugcugagcaacaau

SEQ ID NO: 2182425 - RNA, 19 nt, Artificial Sequence
  Description of Artificial Sequence: Synthetic oligonucleotide
  Antisense strand to SEQ ID NO: 2182424
auuguugcucagcaaacaa

SEQ ID NO: 2182426 - RNA, 19 nt, Artificial Sequence
  Description of Artificial Sequence: Synthetic oligonucleotide
  Sense strand starting at position 2479 of SEQ ID NO: 1883282
ucagauuccucucugaugu

SEQ ID NO: 2182427 - RNA, 19 nt, Artificial Sequence
  Description of Artificial Sequence: Synthetic oligonucleotide
  Antisense strand to SEQ ID NO: 2182426
acaucagagaggaaucuga

SEQ ID NO: 2182428 - RNA, 19 nt, Artificial Sequence
  Description of Artificial Sequence: Synthetic oligonucleotide
  Sense strand starting at position 2576 of SEQ ID NO: 1883282
gggaaacuucugugaguuu

SEQ ID NO: 2182429 - RNA, 19 nt, Artificial Sequence
  Description of Artificial Sequence: Synthetic oligonucleotide
  Antisense strand to SEQ ID NO: 2182428
aaacucacagaaguuuccc

SEQ ID NO: 2182430 - RNA, 19 nt, Artificial Sequence
  Description of Artificial Sequence: Synthetic oligonucleotide
  Sense strand starting at position 2587 of SEQ ID NO: 1883282
gugaguuucgcgcuuguuc

SEQ ID NO: 2182431 - RNA, 19 nt, Artificial Sequence
  Description of Artificial Sequence: Synthetic oligonucleotide
  Antisense strand to SEQ ID NO: 2182430
gaacaagcgcgaaacucac

SEQ ID NO: 2182432 - RNA, 19 nt, Artificial Sequence
  Description of Artificial Sequence: Synthetic oligonucleotide
  Sense strand starting at position 3463 of SEQ ID NO: 1883282
gcccuauggccagacgagu

SEQ ID NO: 2182433 - RNA, 19 nt, Artificial Sequence
  Description of Artificial Sequence: Synthetic oligonucleotide
  Antisense strand to SEQ ID NO: 2182432
acucgucuggccauagggc

SEQ ID NO: 2182434 - RNA, 19 nt, Artificial Sequence
  Description of Artificial Sequence: Synthetic oligonucleotide
  Sense strand starting at position 36 of SEQ ID NO: 1883283
caacaauuguacguaugaa

SEQ ID NO: 2182435 - RNA, 19 nt, Artificial Sequence
  Description of Artificial Sequence: Synthetic oligonucleotide
  Antisense strand to SEQ ID NO: 2182434
uucauacguacaauuguug

SEQ ID NO: 2182436 - RNA, 19 nt, Artificial Sequence
  Description of Artificial Sequence: Synthetic oligonucleotide
  Sense strand starting at position 89 of SEQ ID NO: 1883283
auguuauaagaguaugcaa

SEQ ID NO: 2182437 - RNA, 19 nt, Artificial Sequence
  Description of Artificial Sequence: Synthetic oligonucleotide
  Antisense strand to SEQ ID NO: 2182436
uugcauacucuuauaacau

SEQ ID NO: 2182438 - RNA, 19 nt, Artificial Sequence
  Description of Artificial Sequence: Synthetic oligonucleotide
  Sense strand starting at position 178 of SEQ ID NO: 1883283
gaagauuggguaggaguca

SEQ ID NO: 2182439 - RNA, 19 nt, Artificial Sequence
  Description of Artificial Sequence: Synthetic oligonucleotide
  Antisense strand to SEQ ID NO: 2182438
ugacuccuacccaaucuuc

SEQ ID NO: 2182440 - RNA, 19 nt, Artificial Sequence
  Description of Artificial Sequence: Synthetic oligonucleotide
  Sense strand starting at position 229 of SEQ ID NO: 1883283
gauggugucauaggagagu

SEQ ID NO: 2182441 - RNA, 19 nt, Artificial Sequence
  Description of Artificial Sequence: Synthetic oligonucleotide
  Antisense strand to SEQ ID NO: 2182440
acucuccuaugacaccauc

SEQ ID NO: 2182442 - RNA, 19 nt, Artificial Sequence
  Description of Artificial Sequence: Synthetic oligonucleotide
  Sense strand starting at position 296 of SEQ ID NO: 1883283
guuggaagguggaagaauu

SEQ ID NO: 2182443 - RNA, 19 nt, Artificial Sequence
  Description of Artificial Sequence: Synthetic oligonucleotide
  Antisense strand to SEQ ID NO: 2182442
aauucuuccaccuuccaac

SEQ ID NO: 2182444 - RNA, 19 nt, Artificial Sequence
  Description of Artificial Sequence: Synthetic oligonucleotide
  Sense strand starting at position 364 of SEQ ID NO: 1883283
agucauagauaaguaacau

SEQ ID NO: 2182445 - RNA, 19 nt, Artificial Sequence
  Description of Artificial Sequence: Synthetic oligonucleotide
  Antisense strand to SEQ ID NO: 2182444
auguuacuuaucuaugacu

SEQ ID NO: 2182446 - RNA, 19 nt, Artificial Sequence
  Description of Artificial Sequence: Synthetic oligonucleotide
  Sense strand starting at position 466 of SEQ ID NO: 1883283
ugauaucaccagugaccca

SEQ ID NO: 2182447 - RNA, 19 nt, Artificial Sequence
  Description of Artificial Sequence: Synthetic oligonucleotide
  Antisense strand to SEQ ID NO: 2182446
ugggucacuggugauauca

SEQ ID NO: 2182448 - RNA, 19 nt, Artificial Sequence
  Description of Artificial Sequence: Synthetic oligonucleotide
  Sense strand starting at position 784 of SEQ ID NO: 1883283
gaagguuuaggaugacucu

SEQ ID NO: 2182449 - RNA, 19 nt, Artificial Sequence
  Description of Artificial Sequence: Synthetic oligonucleotide
  Antisense strand to SEQ ID NO: 2182448
agagucauccuaaaccuuc

SEQ ID NO: 2182450 - RNA, 19 nt, Artificial Sequence
  Description of Artificial Sequence: Synthetic oligonucleotide
  Sense strand starting at position 813 of SEQ ID NO: 1883283
aggauuguuauguauagca

SEQ ID NO: 2182451 - RNA, 19 nt, Artificial Sequence
  Description of Artificial Sequence: Synthetic oligonucleotide
  Antisense strand to SEQ ID NO: 2182450
ugcuauacauaacaauccu

SEQ ID NO: 2182452 - RNA, 19 nt, Artificial Sequence
  Description of Artificial Sequence: Synthetic oligonucleotide
  Sense strand starting at position 815 of SEQ ID NO: 1883283
gauuguuauguauagcaaa

SEQ ID NO: 2182453 - RNA, 19 nt, Artificial Sequence
  Description of Artificial Sequence: Synthetic oligonucleotide
  Antisense strand to SEQ ID NO: 2182452
uuugcuauacauaacaauc

SEQ ID NO: 2182454 - RNA, 19 nt, Artificial Sequence
  Description of Artificial Sequence: Synthetic oligonucleotide
  Sense strand starting at position 835 of SEQ ID NO: 1883283
gcagucauguguaugagug

SEQ ID NO: 2182455 - RNA, 19 nt, Artificial Sequence
  Description of Artificial Sequence: Synthetic oligonucleotide
  Antisense strand to SEQ ID NO: 2182454
cacucauacacaugacugc

SEQ ID NO: 2182456 - RNA, 19 nt, Artificial Sequence
  Description of Artificial Sequence: Synthetic oligonucleotide
  Sense strand starting at position 905 of SEQ ID NO: 1883283
auuugacuagcuugcuauu

SEQ ID NO: 2182457 - RNA, 19 nt, Artificial Sequence
  Description of Artificial Sequence: Synthetic oligonucleotide
  Antisense strand to SEQ ID NO: 2182456
aauagcaagcuagucaaau

SEQ ID NO: 2182458 - RNA, 19 nt, Artificial Sequence
  Description of Artificial Sequence: Synthetic oligonucleotide
  Sense strand starting at position 1226 of SEQ ID NO: 1883283
ucaggugaauccuucuaca

SEQ ID NO: 2182459 - RNA, 19 nt, Artificial Sequence
  Description of Artificial Sequence: Synthetic oligonucleotide
  Antisense strand to SEQ ID NO: 2182458
uguagaaggauucaccuga

SEQ ID NO: 2182460 - RNA, 19 nt, Artificial Sequence
  Description of Artificial Sequence: Synthetic oligonucleotide
  Sense strand starting at position 1351 of SEQ ID NO: 1883283
ucauuccugggcugagaca

SEQ ID NO: 2182461 - RNA, 19 nt, Artificial Sequence
  Description of Artificial Sequence: Synthetic oligonucleotide
  Antisense strand to SEQ ID NO: 2182460
ugucucagcccaggaauga

SEQ ID NO: 2182462 - RNA, 19 nt, Artificial Sequence
  Description of Artificial Sequence: Synthetic oligonucleotide
  Sense strand starting at position 1476 of SEQ ID NO: 1883283
ugauuaaugccacagugau

SEQ ID NO: 2182463 - RNA, 19 nt, Artificial Sequence
  Description of Artificial Sequence: Synthetic oligonucleotide
  Antisense strand to SEQ ID NO: 2182462
aucacuguggcauuaauca

SEQ ID NO: 2182464 - RNA, 19 nt, Artificial Sequence
  Description of Artificial Sequence: Synthetic oligonucleotide
  Sense strand starting at position 1492 of SEQ ID NO: 1883283
gauagacucccagguaaug

SEQ ID NO: 2182465 - RNA, 19 nt, Artificial Sequence
  Description of Artificial Sequence: Synthetic oligonucleotide
  Antisense strand to SEQ ID NO: 2182464
cauuaccugggagucuauc

SEQ ID NO: 2182466 - RNA, 19 nt, Artificial Sequence
  Description of Artificial Sequence: Synthetic oligonucleotide
  Sense strand starting at position 1539 of SEQ ID NO: 1883283
acaagaugauugccugacu

SEQ ID NO: 2182467 - RNA, 19 nt, Artificial Sequence
  Description of Artificial Sequence: Synthetic oligonucleotide
  Antisense strand to SEQ ID NO: 2182466
agucaggcaaucaucuugu

SEQ ID NO: 2182468 - RNA, 19 nt, Artificial Sequence
  Description of Artificial Sequence: Synthetic oligonucleotide
  Sense strand starting at position 1544 of SEQ ID NO: 1883283
augauugccugacuauaaa

SEQ ID NO: 2182469 - RNA, 19 nt, Artificial Sequence
  Description of Artificial Sequence: Synthetic oligonucleotide
  Antisense strand to SEQ ID NO: 2182468
uuuauagucaggcaaucau

SEQ ID NO: 2182470 - RNA, 19 nt, Artificial Sequence
  Description of Artificial Sequence: Synthetic oligonucleotide
  Sense strand starting at position 1836 of SEQ ID NO: 1883283
ugcaguacuuauuuagguu

SEQ ID NO: 2182471 - RNA, 19 nt, Artificial Sequence
  Description of Artificial Sequence: Synthetic oligonucleotide
  Antisense strand to SEQ ID NO: 2182470
aaccuaaauaaguacugca

SEQ ID NO: 2182472 - RNA, 19 nt, Artificial Sequence
  Description of Artificial Sequence: Synthetic oligonucleotide
  Sense strand starting at position 1859 of SEQ ID NO: 1883283
aguagauaggaucaguguu

SEQ ID NO: 2182473 - RNA, 19 nt, Artificial Sequence
  Description of Artificial Sequence: Synthetic oligonucleotide
  Antisense strand to SEQ ID NO: 2182472
aacacugauccuaucuacu

SEQ ID NO: 2182474 - RNA, 19 nt, Artificial Sequence
  Description of Artificial Sequence: Synthetic oligonucleotide
  Sense strand starting at position 1861 of SEQ ID NO: 1883283
uagauaggaucaguguuag

SEQ ID NO: 2182475 - RNA, 19 nt, Artificial Sequence
  Description of Artificial Sequence: Synthetic oligonucleotide
  Antisense strand to SEQ ID NO: 2182474
cuaacacugauccuaucua

SEQ ID NO: 2182476 - RNA, 19 nt, Artificial Sequence
  Description of Artificial Sequence: Synthetic oligonucleotide
  Sense strand starting at position 1980 of SEQ ID NO: 1883283
uucaaucugcgagcguuua

SEQ ID NO: 2182477 - RNA, 19 nt, Artificial Sequence
  Description of Artificial Sequence: Synthetic oligonucleotide
  Antisense strand to SEQ ID NO: 2182476
uaaacgcucgcagauugaa

SEQ ID NO: 2182478 - RNA, 19 nt, Artificial Sequence
  Description of Artificial Sequence: Synthetic oligonucleotide
  Sense strand starting at position 2122 of SEQ ID NO: 1883283
ucauaaaugguaugaccuu

SEQ ID NO: 2182479 - RNA, 19 nt, Artificial Sequence
  Description of Artificial Sequence: Synthetic oligonucleotide
  Antisense strand to SEQ ID NO: 2182478
aaggucauaccauuuauga

SEQ ID NO: 2182480 - RNA, 19 nt, Artificial Sequence
  Description of Artificial Sequence: Synthetic oligonucleotide
  Sense strand starting at position 2289 of SEQ ID NO: 1883283
ggaucuugaggccagaagu

SEQ ID NO: 2182481 - RNA, 19 nt, Artificial Sequence
  Description of Artificial Sequence: Synthetic oligonucleotide
  Antisense strand to SEQ ID NO: 2182480
acuucuggccucaagaucc

SEQ ID NO: 2182482 - RNA, 19 nt, Artificial Sequence
  Description of Artificial Sequence: Synthetic oligonucleotide
  Sense strand starting at position 2572 of SEQ ID NO: 1883283
gcaucagcacaugaauuaa

SEQ ID NO: 2182483 - RNA, 19 nt, Artificial Sequence
  Description of Artificial Sequence: Synthetic oligonucleotide
  Antisense strand to SEQ ID NO: 2182482
uuaauucaugugcugaugc

SEQ ID NO: 2182484 - RNA, 19 nt, Artificial Sequence
  Description of Artificial Sequence: Synthetic oligonucleotide
  Sense strand starting at position 2583 of SEQ ID NO: 1883283
ugaauuaagacucgaaguc

SEQ ID NO: 2182485 - RNA, 19 nt, Artificial Sequence
  Description of Artificial Sequence: Synthetic oligonucleotide
  Antisense strand to SEQ ID NO: 2182484
gacuucgagucuuaauuca

SEQ ID NO: 2182486 - RNA, 19 nt, Artificial Sequence
  Description of Artificial Sequence: Synthetic oligonucleotide
  Sense strand starting at position 2603 of SEQ ID NO: 1883283
ucucuuacaccagggaauu

SEQ ID NO: 2182487 - RNA, 19 nt, Artificial Sequence
  Description of Artificial Sequence: Synthetic oligonucleotide
  Antisense strand to SEQ ID NO: 2182486
aauucccugguguaagaga

SEQ ID NO: 2182488 - RNA, 19 nt, Artificial Sequence
  Description of Artificial Sequence: Synthetic oligonucleotide
  Sense strand starting at position 2722 of SEQ ID NO: 1883283
acaagacaacguugaucaa

SEQ ID NO: 2182489 - RNA, 19 nt, Artificial Sequence
  Description of Artificial Sequence: Synthetic oligonucleotide
  Antisense strand to SEQ ID NO: 2182488
uugaucaacguugucuugu

SEQ ID NO: 2182490 - RNA, 19 nt, Artificial Sequence
  Description of Artificial Sequence: Synthetic oligonucleotide
  Sense strand starting at position 2725 of SEQ ID NO: 1883283
agacaacguugaucaacuu

SEQ ID NO: 2182491 - RNA, 19 nt, Artificial Sequence
  Description of Artificial Sequence: Synthetic oligonucleotide
  Antisense strand to SEQ ID NO: 2182490
aaguugaucaacguugucu

SEQ ID NO: 2182492 - RNA, 19 nt, Artificial Sequence
  Description of Artificial Sequence: Synthetic oligonucleotide
  Sense strand starting at position 2819 of SEQ ID NO: 1883283
ggagcuuggacuuaauccu

SEQ ID NO: 2182493 - RNA, 19 nt, Artificial Sequence
  Description of Artificial Sequence: Synthetic oligonucleotide
  Antisense strand to SEQ ID NO: 2182492
aggauuaaguccaagcucc

SEQ ID NO: 2182494 - RNA, 19 nt, Artificial Sequence
  Description of Artificial Sequence: Synthetic oligonucleotide
  Sense strand starting at position 3196 of SEQ ID NO: 1883283
ggaggauucuggcugaaga

SEQ ID NO: 2182495 - RNA, 19 nt, Artificial Sequence
  Description of Artificial Sequence: Synthetic oligonucleotide
  Antisense strand to SEQ ID NO: 2182494
ucuucagccagaauccucc

SEQ ID NO: 2182496 - RNA, 19 nt, Artificial Sequence
  Description of Artificial Sequence: Synthetic oligonucleotide
  Sense strand starting at position 3197 of SEQ ID NO: 1883283
gaggauucuggcugaagag

SEQ ID NO: 2182497 - RNA, 19 nt, Artificial Sequence
  Description of Artificial Sequence: Synthetic oligonucleotide
  Antisense strand to SEQ ID NO: 2182496
cucuucagccagaauccuc

SEQ ID NO: 2182498 - RNA, 19 nt, Artificial Sequence
  Description of Artificial Sequence: Synthetic oligonucleotide
  Sense strand starting at position 3344 of SEQ ID NO: 1883283
cugugagauuccuugaaga

SEQ ID NO: 2182499 - RNA, 19 nt, Artificial Sequence
  Description of Artificial Sequence: Synthetic oligonucleotide
  Antisense strand to SEQ ID NO: 2182498
ucuucaaggaaucucacag

SEQ ID NO: 2182500 - RNA, 19 nt, Artificial Sequence
  Description of Artificial Sequence: Synthetic oligonucleotide
  Sense strand starting at position 3394 of SEQ ID NO: 1883283
ggaaguaugacaugguuau

SEQ ID NO: 2182501 - RNA, 19 nt, Artificial Sequence
  Description of Artificial Sequence: Synthetic oligonucleotide
  Antisense strand to SEQ ID NO: 2182500
auaaccaugucauacuucc

SEQ ID NO: 2182502 - RNA, 19 nt, Artificial Sequence
  Description of Artificial Sequence: Synthetic oligonucleotide
  Sense strand starting at position 3395 of SEQ ID NO: 1883283
gaaguaugacaugguuauu

SEQ ID NO: 2182503 - RNA, 19 nt, Artificial Sequence
  Description of Artificial Sequence: Synthetic oligonucleotide
  Antisense strand to SEQ ID NO: 2182502
aauaaccaugucauacuuc

SEQ ID NO: 2182504 - RNA, 19 nt, Artificial Sequence
  Description of Artificial Sequence: Synthetic oligonucleotide
  Sense strand starting at position 3398 of SEQ ID NO: 1883283
guaugacaugguuauuauu

SEQ ID NO: 2182505 - RNA, 19 nt, Artificial Sequence
  Description of Artificial Sequence: Synthetic oligonucleotide
  Antisense strand to SEQ ID NO: 2182504
aauaauaaccaugucauac

SEQ ID NO: 2182506 - RNA, 19 nt, Artificial Sequence
  Description of Artificial Sequence: Synthetic oligonucleotide
  Sense strand starting at position 3572 of SEQ ID NO: 1883283
aacugucaugaaugguauu

SEQ ID NO: 2182507 - RNA, 19 nt, Artificial Sequence
  Description of Artificial Sequence: Synthetic oligonucleotide
  Antisense strand to SEQ ID NO: 2182506
aauaccauucaugacaguu

SEQ ID NO: 2182508 - RNA, 19 nt, Artificial Sequence
  Description of Artificial Sequence: Synthetic oligonucleotide
  Sense strand starting at position 3733 of SEQ ID NO: 1883283
gaauuucuguuguuuguau

SEQ ID NO: 2182509 - RNA, 19 nt, Artificial Sequence
  Description of Artificial Sequence: Synthetic oligonucleotide
  Antisense strand to SEQ ID NO: 2182508
auacaaacaacagaaauuc

SEQ ID NO: 2182510 - RNA, 19 nt, Artificial Sequence
  Description of Artificial Sequence: Synthetic oligonucleotide
  Sense strand starting at position 3774 of SEQ ID NO: 1883283
guuauagcagccuagauga

SEQ ID NO: 2182511 - RNA, 19 nt, Artificial Sequence
  Description of Artificial Sequence: Synthetic oligonucleotide
  Antisense strand to SEQ ID NO: 2182510
ucaucuaggcugcuauaac

SEQ ID NO: 2182512 - RNA, 19 nt, Artificial Sequence
  Description of Artificial Sequence: Synthetic oligonucleotide
  Sense strand starting at position 3932 of SEQ ID NO: 1883283
cggaaacacuaccuaauau

SEQ ID NO: 2182513 - RNA, 19 nt, Artificial Sequence
  Description of Artificial Sequence: Synthetic oligonucleotide
  Antisense strand to SEQ ID NO: 2182512
auauuagguaguguuuccg

SEQ ID NO: 2182514 - RNA, 19 nt, Artificial Sequence
  Description of Artificial Sequence: Synthetic oligonucleotide
  Sense strand starting at position 10 of SEQ ID NO: 1883285
uguaauaguaucuagaggu

SEQ ID NO: 2182515 - RNA, 19 nt, Artificial Sequence
  Description of Artificial Sequence: Synthetic oligonucleotide
  Antisense strand to SEQ ID NO: 2182514
accucuagauacuauuaca

SEQ ID NO: 2182516 - RNA, 19 nt, Artificial Sequence
  Description of Artificial Sequence: Synthetic oligonucleotide
  Sense strand starting at position 14 of SEQ ID NO: 1883285
auaguaucuagagguaaag

SEQ ID NO: 2182517 - RNA, 19 nt, Artificial Sequence
  Description of Artificial Sequence: Synthetic oligonucleotide
  Antisense strand to SEQ ID NO: 2182516
cuuuaccucuagauacuau

SEQ ID NO: 2182518 - RNA, 19 nt, Artificial Sequence
  Description of Artificial Sequence: Synthetic oligonucleotide
  Sense strand starting at position 28 of SEQ ID NO: 1883285
uaaagccuucgggaguauu

SEQ ID NO: 2182519 - RNA, 19 nt, Artificial Sequence
  Description of Artificial Sequence: Synthetic oligonucleotide
  Antisense strand to SEQ ID NO: 2182518
aauacucccgaaggcuuua

SEQ ID NO: 2182520 - RNA, 19 nt, Artificial Sequence
  Description of Artificial Sequence: Synthetic oligonucleotide
  Sense strand starting at position 58 of SEQ ID NO: 1883285
aggucgugagggugagaau

SEQ ID NO: 2182521 - RNA, 19 nt, Artificial Sequence
  Description of Artificial Sequence: Synthetic oligonucleotide
  Antisense strand to SEQ ID NO: 2182520
auucucacccucacgaccu

SEQ ID NO: 2182522 - RNA, 19 nt, Artificial Sequence
  Description of Artificial Sequence: Synthetic oligonucleotide
  Sense strand starting at position 59 of SEQ ID NO: 1883285
ggucgugagggugagaauu

SEQ ID NO: 2182523 - RNA, 19 nt, Artificial Sequence
  Description of Artificial Sequence: Synthetic oligonucleotide
  Antisense strand to SEQ ID NO: 2182522
aauucucacccucacgacc

SEQ ID NO: 2182524 - RNA, 19 nt, Artificial Sequence
  Description of Artificial Sequence: Synthetic oligonucleotide
  Sense strand starting at position 85 of SEQ ID NO: 1883285
gagaaacagugcccuuaua

SEQ ID NO: 2182525 - RNA, 19 nt, Artificial Sequence
  Description of Artificial Sequence: Synthetic oligonucleotide
  Antisense strand to SEQ ID NO: 2182524
uauaagggcacuguuucuc

SEQ ID NO: 2182526 - RNA, 19 nt, Artificial Sequence
  Description of Artificial Sequence: Synthetic oligonucleotide
  Sense strand starting at position 790 of SEQ ID NO: 1883285
acagguacuuauguguaua

SEQ ID NO: 2182527 - RNA, 19 nt, Artificial Sequence
  Description of Artificial Sequence: Synthetic oligonucleotide
  Antisense strand to SEQ ID NO: 2182526
uauacacauaaguaccugu

SEQ ID NO: 2182528 - RNA, 19 nt, Artificial Sequence
  Description of Artificial Sequence: Synthetic oligonucleotide
  Sense strand starting at position 792 of SEQ ID NO: 1883285
agguacuuauguguauaaa

SEQ ID NO: 2182529 - RNA, 19 nt, Artificial Sequence
  Description of Artificial Sequence: Synthetic oligonucleotide
  Antisense strand to SEQ ID NO: 2182528
uuuauacacauaaguaccu

SEQ ID NO: 2182530 - RNA, 19 nt, Artificial Sequence
  Description of Artificial Sequence: Synthetic oligonucleotide
  Sense strand starting at position 793 of SEQ ID NO: 1883285
gguacuuauguguauaaau

SEQ ID NO: 2182531 - RNA, 19 nt, Artificial Sequence
  Description of Artificial Sequence: Synthetic oligonucleotide
  Antisense strand to SEQ ID NO: 2182530
auuuauacacauaaguacc

SEQ ID NO: 2182532 - RNA, 19 nt, Artificial Sequence
  Description of Artificial Sequence: Synthetic oligonucleotide
  Sense strand starting at position 816 of SEQ ID NO: 1883285
guuaaauguuucucaaacc

SEQ ID NO: 2182533 - RNA, 19 nt, Artificial Sequence
  Description of Artificial Sequence: Synthetic oligonucleotide
  Antisense strand to SEQ ID NO: 2182532
gguuugagaaacauuuaac

SEQ ID NO: 2182534 - RNA, 19 nt, Artificial Sequence
  Description of Artificial Sequence: Synthetic oligonucleotide
  Sense strand starting at position 897 of SEQ ID NO: 1883285
cugaaugcaaagugguauu

SEQ ID NO: 2182535 - RNA, 19 nt, Artificial Sequence
  Description of Artificial Sequence: Synthetic oligonucleotide
  Antisense strand to SEQ ID NO: 2182534
aauaccacuuugcauucag

SEQ ID NO: 2182536 - RNA, 19 nt, Artificial Sequence
  Description of Artificial Sequence: Synthetic oligonucleotide
  Sense strand starting at position 920 of SEQ ID NO: 1883285
gugguucucaagcaaauga

SEQ ID NO: 2182537 - RNA, 19 nt, Artificial Sequence
  Description of Artificial Sequence: Synthetic oligonucleotide
  Antisense strand to SEQ ID NO: 2182536
ucauuugcuugagaaccac

SEQ ID NO: 2182538 - RNA, 19 nt, Artificial Sequence
  Description of Artificial Sequence: Synthetic oligonucleotide
  Sense strand starting at position 969 of SEQ ID NO: 1883285
gagaaauuagguugcacaa

SEQ ID NO: 2182539 - RNA, 19 nt, Artificial Sequence
  Description of Artificial Sequence: Synthetic oligonucleotide
  Antisense strand to SEQ ID NO: 2182538
uugugcaaccuaauuucuc

SEQ ID NO: 2182540 - RNA, 19 nt, Artificial Sequence
  Description of Artificial Sequence: Synthetic oligonucleotide
  Sense strand starting at position 1223 of SEQ ID NO: 1883285
guugaaaucccuuauuaug

SEQ ID NO: 2182541 - RNA, 19 nt, Artificial Sequence
  Description of Artificial Sequence: Synthetic oligonucleotide
  Antisense strand to SEQ ID NO: 2182540
cauaauaagggauuucaac

SEQ ID NO: 2182542 - RNA, 19 nt, Artificial Sequence
  Description of Artificial Sequence: Synthetic oligonucleotide
  Sense strand starting at position 1346 of SEQ ID NO: 1883285
gggauaaacccuugacuuu

SEQ ID NO: 2182543 - RNA, 19 nt, Artificial Sequence
  Description of Artificial Sequence: Synthetic oligonucleotide
  Antisense strand to SEQ ID NO: 2182542
aaagucaaggguuuauccc

SEQ ID NO: 2182544 - RNA, 19 nt, Artificial Sequence
  Description of Artificial Sequence: Synthetic oligonucleotide
  Sense strand starting at position 1595 of SEQ ID NO: 1883285
agagacugcuggcuacaaa

SEQ ID NO: 2182545 - RNA, 19 nt, Artificial Sequence
  Description of Artificial Sequence: Synthetic oligonucleotide
  Antisense strand to SEQ ID NO: 2182544
uuuguagccagcagucucu

SEQ ID NO: 2182546 - RNA, 19 nt, Artificial Sequence
  Description of Artificial Sequence: Synthetic oligonucleotide
  Sense strand starting at position 1596 of SEQ ID NO: 1883285
gagacugcuggcuacaaau

SEQ ID NO: 2182547 - RNA, 19 nt, Artificial Sequence
  Description of Artificial Sequence: Synthetic oligonucleotide
  Antisense strand to SEQ ID NO: 2182546
auuuguagccagcagucuc

SEQ ID NO: 2182548 - RNA, 19 nt, Artificial Sequence
  Description of Artificial Sequence: Synthetic oligonucleotide
  Sense strand starting at position 1606 of SEQ ID NO: 1883285
gcuacaaaucuuggauaau

SEQ ID NO: 2182549 - RNA, 19 nt, Artificial Sequence
  Description of Artificial Sequence: Synthetic oligonucleotide
  Antisense strand to SEQ ID NO: 2182548
auuauccaagauuuguagc

SEQ ID NO: 2182550 - RNA, 19 nt, Artificial Sequence
  Description of Artificial Sequence: Synthetic oligonucleotide
  Sense strand starting at position 1615 of SEQ ID NO: 1883285
cuuggauaauucccugaga

SEQ ID NO: 2182551 - RNA, 19 nt, Artificial Sequence
  Description of Artificial Sequence: Synthetic oligonucleotide
  Antisense strand to SEQ ID NO: 2182550
ucucagggaauuauccaag

SEQ ID NO: 2182552 - RNA, 19 nt, Artificial Sequence
  Description of Artificial Sequence: Synthetic oligonucleotide
  Sense strand starting at position 1678 of SEQ ID NO: 1883285
ggaaaugccuggcuaacau

SEQ ID NO: 2182553 - RNA, 19 nt, Artificial Sequence
  Description of Artificial Sequence: Synthetic oligonucleotide
  Antisense strand to SEQ ID NO: 2182552
auguuagccaggcauuucc

SEQ ID NO: 2182554 - RNA, 19 nt, Artificial Sequence
  Description of Artificial Sequence: Synthetic oligonucleotide
  Sense strand starting at position 2107 of SEQ ID NO: 1883285
ggguaagugcaauagaauu

SEQ ID NO: 2182555 - RNA, 19 nt, Artificial Sequence
  Description of Artificial Sequence: Synthetic oligonucleotide
  Antisense strand to SEQ ID NO: 2182554
aauucuauugcacuuaccc

SEQ ID NO: 2182556 - RNA, 19 nt, Artificial Sequence
  Description of Artificial Sequence: Synthetic oligonucleotide
  Sense strand starting at position 2219 of SEQ ID NO: 1883285
agaagagcugaauguaaua

SEQ ID NO: 2182557 - RNA, 19 nt, Artificial Sequence
  Description of Artificial Sequence: Synthetic oligonucleotide
  Antisense strand to SEQ ID NO: 2182556
uauuacauucagcucuucu

SEQ ID NO: 2182558 - RNA, 19 nt, Artificial Sequence
  Description of Artificial Sequence: Synthetic oligonucleotide
  Sense strand starting at position 2230 of SEQ ID NO: 1883285
auguaauaguccuugguua

SEQ ID NO: 2182559 - RNA, 19 nt, Artificial Sequence
  Description of Artificial Sequence: Synthetic oligonucleotide
  Antisense strand to SEQ ID NO: 2182558
uaaccaaggacuauuacau

SEQ ID NO: 2182560 - RNA, 19 nt, Artificial Sequence
  Description of Artificial Sequence: Synthetic oligonucleotide
  Sense strand starting at position 2669 of SEQ ID NO: 1883285
ugguauuucugauacaaac

SEQ ID NO: 2182561 - RNA, 19 nt, Artificial Sequence
  Description of Artificial Sequence: Synthetic oligonucleotide
  Antisense strand to SEQ ID NO: 2182560
guuuguaucagaaauacca

SEQ ID NO: 2182562 - RNA, 19 nt, Artificial Sequence
  Description of Artificial Sequence: Synthetic oligonucleotide
  Sense strand starting at position 2731 of SEQ ID NO: 1883285
uggauuucuucugaguaac

SEQ ID NO: 2182563 - RNA, 19 nt, Artificial Sequence
  Description of Artificial Sequence: Synthetic oligonucleotide
  Antisense strand to SEQ ID NO: 2182562
guuacucagaagaaaucca

SEQ ID NO: 2182564 - RNA, 19 nt, Artificial Sequence
  Description of Artificial Sequence: Synthetic oligonucleotide
  Sense strand starting at position 2785 of SEQ ID NO: 1883285
cacagagucucaguaauug

SEQ ID NO: 2182565 - RNA, 19 nt, Artificial Sequence
  Description of Artificial Sequence: Synthetic oligonucleotide
  Antisense strand to SEQ ID NO: 2182564
caauuacugagacucugug

SEQ ID NO: 2182566 - RNA, 19 nt, Artificial Sequence
  Description of Artificial Sequence: Synthetic oligonucleotide
  Sense strand starting at position 2794 of SEQ ID NO: 1883285
ucaguaauuggcuacaugu

SEQ ID NO: 2182567 - RNA, 19 nt, Artificial Sequence
  Description of Artificial Sequence: Synthetic oligonucleotide
  Antisense strand to SEQ ID NO: 2182566
acauguagccaauuacuga

SEQ ID NO: 2182568 - RNA, 19 nt, Artificial Sequence
  Description of Artificial Sequence: Synthetic oligonucleotide
  Sense strand starting at position 2796 of SEQ ID NO: 1883285
aguaauuggcuacauguua

SEQ ID NO: 2182569 - RNA, 19 nt, Artificial Sequence
  Description of Artificial Sequence: Synthetic oligonucleotide
  Antisense strand to SEQ ID NO: 2182568
uaacauguagccaauuacu

SEQ ID NO: 2182570 - RNA, 19 nt, Artificial Sequence
  Description of Artificial Sequence: Synthetic oligonucleotide
  Sense strand starting at position 2825 of SEQ ID NO: 1883285
auuaauugauagccugcaa

SEQ ID NO: 2182571 - RNA, 19 nt, Artificial Sequence
  Description of Artificial Sequence: Synthetic oligonucleotide
  Antisense strand to SEQ ID NO: 2182570
uugcaggcuaucaauuaau

SEQ ID NO: 2182572 - RNA, 19 nt, Artificial Sequence
  Description of Artificial Sequence: Synthetic oligonucleotide
  Sense strand starting at position 2829 of SEQ ID NO: 1883285
auugauagccugcaacaau

SEQ ID NO: 2182573 - RNA, 19 nt, Artificial Sequence
  Description of Artificial Sequence: Synthetic oligonucleotide
  Antisense strand to SEQ ID NO: 2182572
auuguugcaggcuaucaau

SEQ ID NO: 2182574 - RNA, 19 nt, Artificial Sequence
  Description of Artificial Sequence: Synthetic oligonucleotide
  Sense strand starting at position 3016 of SEQ ID NO: 1883285
ucuuuauagugacugaaug

SEQ ID NO: 2182575 - RNA, 19 nt, Artificial Sequence
  Description of Artificial Sequence: Synthetic oligonucleotide
  Antisense strand to SEQ ID NO: 2182574
cauucagucacuauaaaga

SEQ ID NO: 2182576 - RNA, 19 nt, Artificial Sequence
  Description of Artificial Sequence: Synthetic oligonucleotide
  Sense strand starting at position 3017 of SEQ ID NO: 1883285
cuuuauagugacugaauga

SEQ ID NO: 2182577 - RNA, 19 nt, Artificial Sequence
  Description of Artificial Sequence: Synthetic oligonucleotide
  Antisense strand to SEQ ID NO: 2182576
ucauucagucacuauaaag

SEQ ID NO: 2182578 - RNA, 19 nt, Artificial Sequence
  Description of Artificial Sequence: Synthetic oligonucleotide
  Sense strand starting at position 3378 of SEQ ID NO: 1883285
cuaauacacugauugaguu

SEQ ID NO: 2182579 - RNA, 19 nt, Artificial Sequence
  Description of Artificial Sequence: Synthetic oligonucleotide
  Antisense strand to SEQ ID NO: 2182578
aacucaaucaguguauuag

SEQ ID NO: 2182580 - RNA, 19 nt, Artificial Sequence
  Description of Artificial Sequence: Synthetic oligonucleotide
  Sense strand starting at position 3477 of SEQ ID NO: 1883285
cuacuuccugauggcauua

SEQ ID NO: 2182581 - RNA, 19 nt, Artificial Sequence
  Description of Artificial Sequence: Synthetic oligonucleotide
  Antisense strand to SEQ ID NO: 2182580
uaaugccaucaggaaguag

SEQ ID NO: 2182582 - RNA, 19 nt, Artificial Sequence
  Description of Artificial Sequence: Synthetic oligonucleotide
  Sense strand starting at position 3500 of SEQ ID NO: 1883285
gggagagcuguuuaugcua

SEQ ID NO: 2182583 - RNA, 19 nt, Artificial Sequence
  Description of Artificial Sequence: Synthetic oligonucleotide
  Antisense strand to SEQ ID NO: 2182582
uagcauaaacagcucuccc

SEQ ID NO: 2182584 - RNA, 19 nt, Artificial Sequence
  Description of Artificial Sequence: Synthetic oligonucleotide
  Sense strand starting at position 3744 of SEQ ID NO: 1883285
cuuaacugugcccagauaa

SEQ ID NO: 2182585 - RNA, 19 nt, Artificial Sequence
  Description of Artificial Sequence: Synthetic oligonucleotide
  Antisense strand to SEQ ID NO: 2182584
uuaucugggcacaguuaag

SEQ ID NO: 2182586 - RNA, 19 nt, Artificial Sequence
  Description of Artificial Sequence: Synthetic oligonucleotide
  Sense strand starting at position 3819 of SEQ ID NO: 1883285
agaaaucacuagguacagu

SEQ ID NO: 2182587 - RNA, 19 nt, Artificial Sequence
  Description of Artificial Sequence: Synthetic oligonucleotide
  Antisense strand to SEQ ID NO: 2182586
acuguaccuagugauuucu

SEQ ID NO: 2182588 - RNA, 19 nt, Artificial Sequence
  Description of Artificial Sequence: Synthetic oligonucleotide
  Sense strand starting at position 3841 of SEQ ID NO: 1883285
ugggaagcuuguuucuuga

SEQ ID NO: 2182589 - RNA, 19 nt, Artificial Sequence
  Description of Artificial Sequence: Synthetic oligonucleotide
  Antisense strand to SEQ ID NO: 2182588
ucaagaaacaagcuuccca

SEQ ID NO: 2182590 - RNA, 19 nt, Artificial Sequence
  Description of Artificial Sequence: Synthetic oligonucleotide
  Sense strand starting at position 3843 of SEQ ID NO: 1883285
ggaagcuuguuucuugaaa

SEQ ID NO: 2182591 - RNA, 19 nt, Artificial Sequence
  Description of Artificial Sequence: Synthetic oligonucleotide
  Antisense strand to SEQ ID NO: 2182590
uuucaagaaacaagcuucc

SEQ ID NO: 2182592 - RNA, 19 nt, Artificial Sequence
  Description of Artificial Sequence: Synthetic oligonucleotide
  Sense strand starting at position 3844 of SEQ ID NO: 1883285
gaagcuuguuucuugaaag

SEQ ID NO: 2182593 - RNA, 19 nt, Artificial Sequence
  Description of Artificial Sequence: Synthetic oligonucleotide
  Antisense strand to SEQ ID NO: 2182592
cuuucaagaaacaagcuuc

SEQ ID NO: 2182594 - RNA, 19 nt, Artificial Sequence
  Description of Artificial Sequence: Synthetic oligonucleotide
  Sense strand starting at position 91 of SEQ ID NO: 1883284
ggagucaauuacuuagcaa

SEQ ID NO: 2182595 - RNA, 19 nt, Artificial Sequence
  Description of Artificial Sequence: Synthetic oligonucleotide
  Antisense strand to SEQ ID NO: 2182594
uugcuaaguaauugacucc

SEQ ID NO: 2182596 - RNA, 19 nt, Artificial Sequence
  Description of Artificial Sequence: Synthetic oligonucleotide
  Sense strand starting at position 129 of SEQ ID NO: 1883284
aggccuguacuagacuuua

SEQ ID NO: 2182597 - RNA, 19 nt, Artificial Sequence
  Description of Artificial Sequence: Synthetic oligonucleotide
  Antisense strand to SEQ ID NO: 2182596
uaaagucuaguacaggccu

SEQ ID NO: 2182598 - RNA, 19 nt, Artificial Sequence
  Description of Artificial Sequence: Synthetic oligonucleotide
  Sense strand starting at position 267 of SEQ ID NO: 1883284
augaucuggcuauggagaa

SEQ ID NO: 2182599 - RNA, 19 nt, Artificial Sequence
  Description of Artificial Sequence: Synthetic oligonucleotide
  Antisense strand to SEQ ID NO: 2182598
uucuccauagccagaucau

SEQ ID NO: 2182600 - RNA, 19 nt, Artificial Sequence
  Description of Artificial Sequence: Synthetic oligonucleotide
  Sense strand starting at position 318 of SEQ ID NO: 1883284
acacauaaucuggguccaa

SEQ ID NO: 2182601 - RNA, 19 nt, Artificial Sequence
  Description of Artificial Sequence: Synthetic oligonucleotide
  Antisense strand to SEQ ID NO: 2182600
uuggacccagauuaugugu

SEQ ID NO: 2182602 - RNA, 19 nt, Artificial Sequence
  Description of Artificial Sequence: Synthetic oligonucleotide
  Sense strand starting at position 399 of SEQ ID NO: 1883284
agggauguuguccaugaca

SEQ ID NO: 2182603 - RNA, 19 nt, Artificial Sequence
  Description of Artificial Sequence: Synthetic oligonucleotide
  Antisense strand to SEQ ID NO: 2182602
ugucauggacaacaucccu

SEQ ID NO: 2182604 - RNA, 19 nt, Artificial Sequence
  Description of Artificial Sequence: Synthetic oligonucleotide
  Sense strand starting at position 401 of SEQ ID NO: 1883284
ggauguuguccaugacaua

SEQ ID NO: 2182605 - RNA, 19 nt, Artificial Sequence
  Description of Artificial Sequence: Synthetic oligonucleotide
  Antisense strand to SEQ ID NO: 2182604
uaugucauggacaacaucc

SEQ ID NO: 2182606 - RNA, 19 nt, Artificial Sequence
  Description of Artificial Sequence: Synthetic oligonucleotide
  Sense strand starting at position 402 of SEQ ID NO: 1883284
gauguuguccaugacauag

SEQ ID NO: 2182607 - RNA, 19 nt, Artificial Sequence
  Description of Artificial Sequence: Synthetic oligonucleotide
  Antisense strand to SEQ ID NO: 2182606
cuaugucauggacaacauc

SEQ ID NO: 2182608 - RNA, 19 nt, Artificial Sequence
  Description of Artificial Sequence: Synthetic oligonucleotide
  Sense strand starting at position 753 of SEQ ID NO: 1883284
auguuuauguccucugaaa

SEQ ID NO: 2182609 - RNA, 19 nt, Artificial Sequence
  Description of Artificial Sequence: Synthetic oligonucleotide
  Antisense strand to SEQ ID NO: 2182608
uuucagaggacauaaacau

SEQ ID NO: 2182610 - RNA, 19 nt, Artificial Sequence
  Description of Artificial Sequence: Synthetic oligonucleotide
  Sense strand starting at position 800 of SEQ ID NO: 1883284
uguaauaguaucuagaggu

SEQ ID NO: 2182611 - RNA, 19 nt, Artificial Sequence
  Description of Artificial Sequence: Synthetic oligonucleotide
  Antisense strand to SEQ ID NO: 2182610
accucuagauacuauuaca

SEQ ID NO: 2182612 - RNA, 19 nt, Artificial Sequence
  Description of Artificial Sequence: Synthetic oligonucleotide
  Sense strand starting at position 804 of SEQ ID NO: 1883284
auaguaucuagagguaaag

SEQ ID NO: 2182613 - RNA, 19 nt, Artificial Sequence
  Description of Artificial Sequence: Synthetic oligonucleotide
  Antisense strand to SEQ ID NO: 2182612
cuuuaccucuagauacuau

SEQ ID NO: 2182614 - RNA, 19 nt, Artificial Sequence
  Description of Artificial Sequence: Synthetic oligonucleotide
  Sense strand starting at position 818 of SEQ ID NO: 1883284
uaaagccuucgggaguauu

SEQ ID NO: 2182615 - RNA, 19 nt, Artificial Sequence
  Description of Artificial Sequence: Synthetic oligonucleotide
  Antisense strand to SEQ ID NO: 2182614
aauacucccgaaggcuuua

SEQ ID NO: 2182616 - RNA, 19 nt, Artificial Sequence
  Description of Artificial Sequence: Synthetic oligonucleotide
  Sense strand starting at position 848 of SEQ ID NO: 1883284
aggucgugagggugagaau

SEQ ID NO: 2182617 - RNA, 19 nt, Artificial Sequence
  Description of Artificial Sequence: Synthetic oligonucleotide
  Antisense strand to SEQ ID NO: 2182616
auucucacccucacgaccu

SEQ ID NO: 2182618 - RNA, 19 nt, Artificial Sequence
  Description of Artificial Sequence: Synthetic oligonucleotide
  Sense strand starting at position 849 of SEQ ID NO: 1883284
ggucgugagggugagaauu

SEQ ID NO: 2182619 - RNA, 19 nt, Artificial Sequence
  Description of Artificial Sequence: Synthetic oligonucleotide
  Antisense strand to SEQ ID NO: 2182618
aauucucacccucacgacc

SEQ ID NO: 2182620 - RNA, 19 nt, Artificial Sequence
  Description of Artificial Sequence: Synthetic oligonucleotide
  Sense strand starting at position 875 of SEQ ID NO: 1883284
gagaaacagugcccuuaua

SEQ ID NO: 2182621 - RNA, 19 nt, Artificial Sequence
  Description of Artificial Sequence: Synthetic oligonucleotide
  Antisense strand to SEQ ID NO: 2182620
uauaagggcacuguuucuc

SEQ ID NO: 2182622 - RNA, 19 nt, Artificial Sequence
  Description of Artificial Sequence: Synthetic oligonucleotide
  Sense strand starting at position 1580 of SEQ ID NO: 1883284
acagguacuuauguguaua

SEQ ID NO: 2182623 - RNA, 19 nt, Artificial Sequence
  Description of Artificial Sequence: Synthetic oligonucleotide
  Antisense strand to SEQ ID NO: 2182622
uauacacauaaguaccugu

SEQ ID NO: 2182624 - RNA, 19 nt, Artificial Sequence
  Description of Artificial Sequence: Synthetic oligonucleotide
  Sense strand starting at position 1582 of SEQ ID NO: 1883284
agguacuuauguguauaaa

SEQ ID NO: 2182625 - RNA, 19 nt, Artificial Sequence
  Description of Artificial Sequence: Synthetic oligonucleotide
  Antisense strand to SEQ ID NO: 2182624
uuuauacacauaaguaccu

SEQ ID NO: 2182626 - RNA, 19 nt, Artificial Sequence
  Description of Artificial Sequence: Synthetic oligonucleotide
  Sense strand starting at position 1583 of SEQ ID NO: 1883284
gguacuuauguguauaaau

SEQ ID NO: 2182627 - RNA, 19 nt, Artificial Sequence
  Description of Artificial Sequence: Synthetic oligonucleotide
  Antisense strand to SEQ ID NO: 2182626
auuuauacacauaaguacc

SEQ ID NO: 2182628 - RNA, 19 nt, Artificial Sequence
  Description of Artificial Sequence: Synthetic oligonucleotide
  Sense strand starting at position 1606 of SEQ ID NO: 1883284
guuaaauguuucucaaacc

SEQ ID NO: 2182629 - RNA, 19 nt, Artificial Sequence
  Description of Artificial Sequence: Synthetic oligonucleotide
  Antisense strand to SEQ ID NO: 2182628
gguuugagaaacauuuaac

SEQ ID NO: 2182630 - RNA, 19 nt, Artificial Sequence
  Description of Artificial Sequence: Synthetic oligonucleotide
  Sense strand starting at position 1687 of SEQ ID NO: 1883284
cugaaugcaaagugguauu

SEQ ID NO: 2182631 - RNA, 19 nt, Artificial Sequence
  Description of Artificial Sequence: Synthetic oligonucleotide
  Antisense strand to SEQ ID NO: 2182630
aauaccacuuugcauucag

SEQ ID NO: 2182632 - RNA, 19 nt, Artificial Sequence
  Description of Artificial Sequence: Synthetic oligonucleotide
  Sense strand starting at position 1710 of SEQ ID NO: 1883284
gugguucucaagcaaauga

SEQ ID NO: 2182633 - RNA, 19 nt, Artificial Sequence
  Description of Artificial Sequence: Synthetic oligonucleotide
  Antisense strand to SEQ ID NO: 2182632
ucauuugcuugagaaccac

SEQ ID NO: 2182634 - RNA, 19 nt, Artificial Sequence
  Description of Artificial Sequence: Synthetic oligonucleotide
  Sense strand starting at position 1759 of SEQ ID NO: 1883284
gagaaauuagguugcacaa

SEQ ID NO: 2182635 - RNA, 19 nt, Artificial Sequence
  Description of Artificial Sequence: Synthetic oligonucleotide
  Antisense strand to SEQ ID NO: 2182634
uugugcaaccuaauuucuc

SEQ ID NO: 2182636 - RNA, 19 nt, Artificial Sequence
  Description of Artificial Sequence: Synthetic oligonucleotide
  Sense strand starting at position 2013 of SEQ ID NO: 1883284
guugaaaucccuuauuaug

SEQ ID NO: 2182637 - RNA, 19 nt, Artificial Sequence
  Description of Artificial Sequence: Synthetic oligonucleotide
  Antisense strand to SEQ ID NO: 2182636
cauaauaagggauuucaac

SEQ ID NO: 2182638 - RNA, 19 nt, Artificial Sequence
  Description of Artificial Sequence: Synthetic oligonucleotide
  Sense strand starting at position 2136 of SEQ ID NO: 1883284
gggauaaacccuugacuuu

SEQ ID NO: 2182639 - RNA, 19 nt, Artificial Sequence
  Description of Artificial Sequence: Synthetic oligonucleotide
  Antisense strand to SEQ ID NO: 2182638
aaagucaaggguuuauccc

SEQ ID NO: 2182640 - RNA, 19 nt, Artificial Sequence
  Description of Artificial Sequence: Synthetic oligonucleotide
  Sense strand starting at position 2385 of SEQ ID NO: 1883284
agagacugcuggcuacaaa

SEQ ID NO: 2182641 - RNA, 19 nt, Artificial Sequence
  Description of Artificial Sequence: Synthetic oligonucleotide
  Antisense strand to SEQ ID NO: 2182640
uuuguagccagcagucucu

SEQ ID NO: 2182642 - RNA, 19 nt, Artificial Sequence
  Description of Artificial Sequence: Synthetic oligonucleotide
  Sense strand starting at position 2386 of SEQ ID NO: 1883284
gagacugcuggcuacaaau

SEQ ID NO: 2182643 - RNA, 19 nt, Artificial Sequence
  Description of Artificial Sequence: Synthetic oligonucleotide
  Antisense strand to SEQ ID NO: 2182642
auuuguagccagcagucuc

SEQ ID NO: 2182644 - RNA, 19 nt, Artificial Sequence
  Description of Artificial Sequence: Synthetic oligonucleotide
  Sense strand starting at position 2396 of SEQ ID NO: 1883284
gcuacaaaucuuggauaau

SEQ ID NO: 2182645 - RNA, 19 nt, Artificial Sequence
  Description of Artificial Sequence: Synthetic oligonucleotide
  Antisense strand to SEQ ID NO: 2182644
auuauccaagauuuguagc

SEQ ID NO: 2182646 - RNA, 19 nt, Artificial Sequence
  Description of Artificial Sequence: Synthetic oligonucleotide
  Sense strand starting at position 2405 of SEQ ID NO: 1883284
cuuggauaauucccugaga

SEQ ID NO: 2182647 - RNA, 19 nt, Artificial Sequence
  Description of Artificial Sequence: Synthetic oligonucleotide
  Antisense strand to SEQ ID NO: 2182646
ucucagggaauuauccaag

SEQ ID NO: 2182648 - RNA, 19 nt, Artificial Sequence
  Description of Artificial Sequence: Synthetic oligonucleotide
  Sense strand starting at position 2468 of SEQ ID NO: 1883284
ggaaaugccuggcuaacau

SEQ ID NO: 2182649 - RNA, 19 nt, Artificial Sequence
  Description of Artificial Sequence: Synthetic oligonucleotide
  Antisense strand to SEQ ID NO: 2182648
auguuagccaggcauuucc

SEQ ID NO: 2182650 - RNA, 19 nt, Artificial Sequence
  Description of Artificial Sequence: Synthetic oligonucleotide
  Sense strand starting at position 2897 of SEQ ID NO: 1883284
ggguaagugcaauagaauu

SEQ ID NO: 2182651 - RNA, 19 nt, Artificial Sequence
  Description of Artificial Sequence: Synthetic oligonucleotide
  Antisense strand to SEQ ID NO: 2182650
aauucuauugcacuuaccc

SEQ ID NO: 2182652 - RNA, 19 nt, Artificial Sequence
  Description of Artificial Sequence: Synthetic oligonucleotide
  Sense strand starting at position 3009 of SEQ ID NO: 1883284
agaagagcugaauguaaua

SEQ ID NO: 2182653 - RNA, 19 nt, Artificial Sequence
  Description of Artificial Sequence: Synthetic oligonucleotide
  Antisense strand to SEQ ID NO: 2182652
uauuacauucagcucuucu

SEQ ID NO: 2182654 - RNA, 19 nt, Artificial Sequence
  Description of Artificial Sequence: Synthetic oligonucleotide
  Sense strand starting at position 3020 of SEQ ID NO: 1883284
auguaauaguccuugguua

SEQ ID NO: 2182655 - RNA, 19 nt, Artificial Sequence
  Description of Artificial Sequence: Synthetic oligonucleotide
  Antisense strand to SEQ ID NO: 2182654
uaaccaaggacuauuacau

SEQ ID NO: 2182656 - RNA, 19 nt, Artificial Sequence
  Description of Artificial Sequence: Synthetic oligonucleotide
  Sense strand starting at position 3459 of SEQ ID NO: 1883284
ugguauuucugauacaaac

SEQ ID NO: 2182657 - RNA, 19 nt, Artificial Sequence
  Description of Artificial Sequence: Synthetic oligonucleotide
  Antisense strand to SEQ ID NO: 2182656
guuuguaucagaaauacca

SEQ ID NO: 2182658 - RNA, 19 nt, Artificial Sequence
  Description of Artificial Sequence: Synthetic oligonucleotide
  Sense strand starting at position 3521 of SEQ ID NO: 1883284
uggauuucuucugaguaac

SEQ ID NO: 2182659 - RNA, 19 nt, Artificial Sequence
  Description of Artificial Sequence: Synthetic oligonucleotide
  Antisense strand to SEQ ID NO: 2182658
guuacucagaagaaaucca

SEQ ID NO: 2182660 - RNA, 19 nt, Artificial Sequence
  Description of Artificial Sequence: Synthetic oligonucleotide
  Sense strand starting at position 3575 of SEQ ID NO: 1883284
cacagagucucaguaauug

SEQ ID NO: 2182661 - RNA, 19 nt, Artificial Sequence
  Description of Artificial Sequence: Synthetic oligonucleotide
  Antisense strand to SEQ ID NO: 2182660
caauuacugagacucugug

SEQ ID NO: 2182662 - RNA, 19 nt, Artificial Sequence
  Description of Artificial Sequence: Synthetic oligonucleotide
  Sense strand starting at position 3584 of SEQ ID NO: 1883284
ucaguaauuggcuacaugu

SEQ ID NO: 2182663 - RNA, 19 nt, Artificial Sequence
  Description of Artificial Sequence: Synthetic oligonucleotide
  Antisense strand to SEQ ID NO: 2182662
acauguagccaauuacuga

SEQ ID NO: 2182664 - RNA, 19 nt, Artificial Sequence
  Description of Artificial Sequence: Synthetic oligonucleotide
  Sense strand starting at position 3586 of SEQ ID NO: 1883284
aguaauuggcuacauguua

SEQ ID NO: 2182665 - RNA, 19 nt, Artificial Sequence
  Description of Artificial Sequence: Synthetic oligonucleotide
  Antisense strand to SEQ ID NO: 2182664
uaacauguagccaauuacu

SEQ ID NO: 2182666 - RNA, 19 nt, Artificial Sequence
  Description of Artificial Sequence: Synthetic oligonucleotide
  Sense strand starting at position 3615 of SEQ ID NO: 1883284
auuaauugauagccugcaa

SEQ ID NO: 2182667 - RNA, 19 nt, Artificial Sequence
  Description of Artificial Sequence: Synthetic oligonucleotide
  Antisense strand to SEQ ID NO: 2182666
uugcaggcuaucaauuaau

SEQ ID NO: 2182668 - RNA, 19 nt, Artificial Sequence
  Description of Artificial Sequence: Synthetic oligonucleotide
  Sense strand starting at position 3619 of SEQ ID NO: 1883284
auugauagccugcaacaau

SEQ ID NO: 2182669 - RNA, 19 nt, Artificial Sequence
  Description of Artificial Sequence: Synthetic oligonucleotide
  Antisense strand to SEQ ID NO: 2182668
auuguugcaggcuaucaau

SEQ ID NO: 2182670 - RNA, 19 nt, Artificial Sequence
  Description of Artificial Sequence: Synthetic oligonucleotide
  Sense strand starting at position 3806 of SEQ ID NO: 1883284
ucuuuauagugacugaaug

SEQ ID NO: 2182671 - RNA, 19 nt, Artificial Sequence
  Description of Artificial Sequence: Synthetic oligonucleotide
  Antisense strand to SEQ ID NO: 2182670
cauucagucacuauaaaga

SEQ ID NO: 2182672 - RNA, 19 nt, Artificial Sequence
  Description of Artificial Sequence: Synthetic oligonucleotide
  Sense strand starting at position 3807 of SEQ ID NO: 1883284
cuuuauagugacugaauga

SEQ ID NO: 2182673 - RNA, 19 nt, Artificial Sequence
  Description of Artificial Sequence: Synthetic oligonucleotide
  Antisense strand to SEQ ID NO: 2182672
ucauucagucacuauaaag

SEQ ID NO: 2182674 - RNA, 19 nt, Artificial Sequence
  Description of Artificial Sequence: Synthetic oligonucleotide
  Sense strand starting at position 132 of SEQ ID NO: 1883286
ugaugaaauuuacauagcu

SEQ ID NO: 2182675 - RNA, 19 nt, Artificial Sequence
  Description of Artificial Sequence: Synthetic oligonucleotide
  Antisense strand to SEQ ID NO: 2182674
agcuauguaaauuucauca

SEQ ID NO: 2182676 - RNA, 19 nt, Artificial Sequence
  Description of Artificial Sequence: Synthetic oligonucleotide
  Sense strand starting at position 326 of SEQ ID NO: 1883286
agagacaauugucucuaca

SEQ ID NO: 2182677 - RNA, 19 nt, Artificial Sequence
  Description of Artificial Sequence: Synthetic oligonucleotide
  Antisense strand to SEQ ID NO: 2182676
uguagagacaauugucucu

SEQ ID NO: 2182678 - RNA, 19 nt, Artificial Sequence
  Description of Artificial Sequence: Synthetic oligonucleotide
  Sense strand starting at position 409 of SEQ ID NO: 1883286
aggcaaaucugauuauauc

SEQ ID NO: 2182679 - RNA, 19 nt, Artificial Sequence
  Description of Artificial Sequence: Synthetic oligonucleotide
  Antisense strand to SEQ ID NO: 2182678
gauauaaucagauuugccu

SEQ ID NO: 2182680 - RNA, 19 nt, Artificial Sequence
  Description of Artificial Sequence: Synthetic oligonucleotide
  Sense strand starting at position 607 of SEQ ID NO: 1883286
caguuuaaugugugauaga

SEQ ID NO: 2182681 - RNA, 19 nt, Artificial Sequence
  Description of Artificial Sequence: Synthetic oligonucleotide
  Antisense strand to SEQ ID NO: 2182680
ucuaucacacauuaaacug

SEQ ID NO: 2182682 - RNA, 19 nt, Artificial Sequence
  Description of Artificial Sequence: Synthetic oligonucleotide
  Sense strand starting at position 614 of SEQ ID NO: 1883286
augugugauagaggagaca

SEQ ID NO: 2182683 - RNA, 19 nt, Artificial Sequence
  Description of Artificial Sequence: Synthetic oligonucleotide
  Antisense strand to SEQ ID NO: 2182682
ugucuccucuaucacacau

SEQ ID NO: 2182684 - RNA, 19 nt, Artificial Sequence
  Description of Artificial Sequence: Synthetic oligonucleotide
  Sense strand starting at position 800 of SEQ ID NO: 1883286
guaaauaggaguuagccaa

SEQ ID NO: 2182685 - RNA, 19 nt, Artificial Sequence
  Description of Artificial Sequence: Synthetic oligonucleotide
  Antisense strand to SEQ ID NO: 2182684
uuggcuaacuccuauuuac

SEQ ID NO: 2182686 - RNA, 19 nt, Artificial Sequence
  Description of Artificial Sequence: Synthetic oligonucleotide
  Sense strand starting at position 1164 of SEQ ID NO: 1883286
aguaaauguugcccuauuu

SEQ ID NO: 2182687 - RNA, 19 nt, Artificial Sequence
  Description of Artificial Sequence: Synthetic oligonucleotide
  Antisense strand to SEQ ID NO: 2182686
aaauagggcaacauuuacu

SEQ ID NO: 2182688 - RNA, 19 nt, Artificial Sequence
  Description of Artificial Sequence: Synthetic oligonucleotide
  Sense strand starting at position 1196 of SEQ ID NO: 1883286
gucacagugcuguaacaaa

SEQ ID NO: 2182689 - RNA, 19 nt, Artificial Sequence
  Description of Artificial Sequence: Synthetic oligonucleotide
  Antisense strand to SEQ ID NO: 2182688
uuuguuacagcacugugac

SEQ ID NO: 2182690 - RNA, 19 nt, Artificial Sequence
  Description of Artificial Sequence: Synthetic oligonucleotide
  Sense strand starting at position 1224 of SEQ ID NO: 1883286
gaugucagcgauuaacaca

SEQ ID NO: 2182691 - RNA, 19 nt, Artificial Sequence
  Description of Artificial Sequence: Synthetic oligonucleotide
  Antisense strand to SEQ ID NO: 2182690
uguguuaaucgcugacauc

SEQ ID NO: 2182692 - RNA, 19 nt, Artificial Sequence
  Description of Artificial Sequence: Synthetic oligonucleotide
  Sense strand starting at position 1272 of SEQ ID NO: 1883286
auaggcaguucuucuggaa

SEQ ID NO: 2182693 - RNA, 19 nt, Artificial Sequence
  Description of Artificial Sequence: Synthetic oligonucleotide
  Antisense strand to SEQ ID NO: 2182692
uuccagaagaacugccuau

SEQ ID NO: 2182694 - RNA, 19 nt, Artificial Sequence
  Description of Artificial Sequence: Synthetic oligonucleotide
  Sense strand starting at position 1276 of SEQ ID NO: 1883286
gcaguucuucuggaagacu

SEQ ID NO: 2182695 - RNA, 19 nt, Artificial Sequence
  Description of Artificial Sequence: Synthetic oligonucleotide
  Antisense strand to SEQ ID NO: 2182694
agucuuccagaagaacugc

SEQ ID NO: 2182696 - RNA, 19 nt, Artificial Sequence
  Description of Artificial Sequence: Synthetic oligonucleotide
  Sense strand starting at position 1420 of SEQ ID NO: 1883286
aaguguccugccuaagaau

SEQ ID NO: 2182697 - RNA, 19 nt, Artificial Sequence
  Description of Artificial Sequence: Synthetic oligonucleotide
  Antisense strand to SEQ ID NO: 2182696
auucuuaggcaggacacuu

SEQ ID NO: 2182698 - RNA, 19 nt, Artificial Sequence
  Description of Artificial Sequence: Synthetic oligonucleotide
  Sense strand starting at position 1434 of SEQ ID NO: 1883286
agaauaacuuagcccagau

SEQ ID NO: 2182699 - RNA, 19 nt, Artificial Sequence
  Description of Artificial Sequence: Synthetic oligonucleotide
  Antisense strand to SEQ ID NO: 2182698
aucugggcuaaguuauucu

SEQ ID NO: 2182700 - RNA, 19 nt, Artificial Sequence
  Description of Artificial Sequence: Synthetic oligonucleotide
  Sense strand starting at position 1529 of SEQ ID NO: 1883286
guaaacaagucaucauucu

SEQ ID NO: 2182701 - RNA, 19 nt, Artificial Sequence
  Description of Artificial Sequence: Synthetic oligonucleotide
  Antisense strand to SEQ ID NO: 2182700
agaaugaugacuuguuuac

SEQ ID NO: 2182702 - RNA, 19 nt, Artificial Sequence
  Description of Artificial Sequence: Synthetic oligonucleotide
  Sense strand starting at position 1800 of SEQ ID NO: 1883286
acagcugacugcuuagaga

SEQ ID NO: 2182703 - RNA, 19 nt, Artificial Sequence
  Description of Artificial Sequence: Synthetic oligonucleotide
  Antisense strand to SEQ ID NO: 2182702
ucucuaagcagucagcugu

SEQ ID NO: 2182704 - RNA, 19 nt, Artificial Sequence
  Description of Artificial Sequence: Synthetic oligonucleotide
  Sense strand starting at position 1814 of SEQ ID NO: 1883286
agagauauaucagaaugaa

SEQ ID NO: 2182705 - RNA, 19 nt, Artificial Sequence
  Description of Artificial Sequence: Synthetic oligonucleotide
  Antisense strand to SEQ ID NO: 2182704
uucauucugauauaucucu

SEQ ID NO: 2182706 - RNA, 19 nt, Artificial Sequence
  Description of Artificial Sequence: Synthetic oligonucleotide
  Sense strand starting at position 1841 of SEQ ID NO: 1883286
ggagucaucugauuauagc

SEQ ID NO: 2182707 - RNA, 19 nt, Artificial Sequence
  Description of Artificial Sequence: Synthetic oligonucleotide
  Antisense strand to SEQ ID NO: 2182706
gcuauaaucagaugacucc

SEQ ID NO: 2182708 - RNA, 19 nt, Artificial Sequence
  Description of Artificial Sequence: Synthetic oligonucleotide
  Sense strand starting at position 1842 of SEQ ID NO: 1883286
gagucaucugauuauagca

SEQ ID NO: 2182709 - RNA, 19 nt, Artificial Sequence
  Description of Artificial Sequence: Synthetic oligonucleotide
  Antisense strand to SEQ ID NO: 2182708
ugcuauaaucagaugacuc

SEQ ID NO: 2182710 - RNA, 19 nt, Artificial Sequence
  Description of Artificial Sequence: Synthetic oligonucleotide
  Sense strand starting at position 1850 of SEQ ID NO: 1883286
ugauuauagcaauggugaa

SEQ ID NO: 2182711 - RNA, 19 nt, Artificial Sequence
  Description of Artificial Sequence: Synthetic oligonucleotide
  Antisense strand to SEQ ID NO: 2182710
uucaccauugcuauaauca

SEQ ID NO: 2182712 - RNA, 19 nt, Artificial Sequence
  Description of Artificial Sequence: Synthetic oligonucleotide
  Sense strand starting at position 2035 of SEQ ID NO: 1883286
aggacagucugggugacau

SEQ ID NO: 2182713 - RNA, 19 nt, Artificial Sequence
  Description of Artificial Sequence: Synthetic oligonucleotide
  Antisense strand to SEQ ID NO: 2182712
augucacccagacuguccu

SEQ ID NO: 2182714 - RNA, 19 nt, Artificial Sequence
  Description of Artificial Sequence: Synthetic oligonucleotide
  Sense strand starting at position 2037 of SEQ ID NO: 1883286
gacagucugggugacauau

SEQ ID NO: 2182715 - RNA, 19 nt, Artificial Sequence
  Description of Artificial Sequence: Synthetic oligonucleotide
  Antisense strand to SEQ ID NO: 2182714
auaugucacccagacuguc

SEQ ID NO: 2182716 - RNA, 19 nt, Artificial Sequence
  Description of Artificial Sequence: Synthetic oligonucleotide
  Sense strand starting at position 2107 of SEQ ID NO: 1883286
agaauuguuucugucagac

SEQ ID NO: 2182717 - RNA, 19 nt, Artificial Sequence
  Description of Artificial Sequence: Synthetic oligonucleotide
  Antisense strand to SEQ ID NO: 2182716
gucugacagaaacaauucu

SEQ ID NO: 2182718 - RNA, 19 nt, Artificial Sequence
  Description of Artificial Sequence: Synthetic oligonucleotide
  Sense strand starting at position 2178 of SEQ ID NO: 1883286
ugaguugggcauuaucauu

SEQ ID NO: 2182719 - RNA, 19 nt, Artificial Sequence
  Description of Artificial Sequence: Synthetic oligonucleotide
  Antisense strand to SEQ ID NO: 2182718
aaugauaaugcccaacuca

SEQ ID NO: 2182720 - RNA, 19 nt, Artificial Sequence
  Description of Artificial Sequence: Synthetic oligonucleotide
  Sense strand starting at position 2461 of SEQ ID NO: 1883286
agauuuauauuagaagggu

SEQ ID NO: 2182721 - RNA, 19 nt, Artificial Sequence
  Description of Artificial Sequence: Synthetic oligonucleotide
  Antisense strand to SEQ ID NO: 2182720
acccuucuaauauaaaucu

SEQ ID NO: 2182722 - RNA, 19 nt, Artificial Sequence
  Description of Artificial Sequence: Synthetic oligonucleotide
  Sense strand starting at position 2682 of SEQ ID NO: 1883286
ccaugugcagguuauugaa

SEQ ID NO: 2182723 - RNA, 19 nt, Artificial Sequence
  Description of Artificial Sequence: Synthetic oligonucleotide
  Antisense strand to SEQ ID NO: 2182722
uucaauaaccugcacaugg

SEQ ID NO: 2182724 - RNA, 19 nt, Artificial Sequence
  Description of Artificial Sequence: Synthetic oligonucleotide
  Sense strand starting at position 2690 of SEQ ID NO: 1883286
agguuauugaauuggaauc

SEQ ID NO: 2182725 - RNA, 19 nt, Artificial Sequence
  Description of Artificial Sequence: Synthetic oligonucleotide
  Antisense strand to SEQ ID NO: 2182724
gauuccaauucaauaaccu

SEQ ID NO: 2182726 - RNA, 19 nt, Artificial Sequence
  Description of Artificial Sequence: Synthetic oligonucleotide
  Sense strand starting at position 2691 of SEQ ID NO: 1883286
gguuauugaauuggaaucu

SEQ ID NO: 2182727 - RNA, 19 nt, Artificial Sequence
  Description of Artificial Sequence: Synthetic oligonucleotide
  Antisense strand to SEQ ID NO: 2182726
agauuccaauucaauaacc

SEQ ID NO: 2182728 - RNA, 19 nt, Artificial Sequence
  Description of Artificial Sequence: Synthetic oligonucleotide
  Sense strand starting at position 3044 of SEQ ID NO: 1883286
uugagaaauugcuuguaau

SEQ ID NO: 2182729 - RNA, 19 nt, Artificial Sequence
  Description of Artificial Sequence: Synthetic oligonucleotide
  Antisense strand to SEQ ID NO: 2182728
auuacaagcaauuucucaa

SEQ ID NO: 2182730 - RNA, 19 nt, Artificial Sequence
  Description of Artificial Sequence: Synthetic oligonucleotide
  Sense strand starting at position 3045 of SEQ ID NO: 1883286
ugagaaauugcuuguaauu

SEQ ID NO: 2182731 - RNA, 19 nt, Artificial Sequence
  Description of Artificial Sequence: Synthetic oligonucleotide
  Antisense strand to SEQ ID NO: 2182730
aauuacaagcaauuucuca

SEQ ID NO: 2182732 - RNA, 19 nt, Artificial Sequence
  Description of Artificial Sequence: Synthetic oligonucleotide
  Sense strand starting at position 3110 of SEQ ID NO: 1883286
gaaauuguucgucauccaa

SEQ ID NO: 2182733 - RNA, 19 nt, Artificial Sequence
  Description of Artificial Sequence: Synthetic oligonucleotide
  Antisense strand to SEQ ID NO: 2182732
uuggaugacgaacaauuuc

SEQ ID NO: 2182734 - RNA, 19 nt, Artificial Sequence
  Description of Artificial Sequence: Synthetic oligonucleotide
  Sense strand starting at position 3219 of SEQ ID NO: 1883286
cuagucuuacaaugguaau

SEQ ID NO: 2182735 - RNA, 19 nt, Artificial Sequence
  Description of Artificial Sequence: Synthetic oligonucleotide
  Antisense strand to SEQ ID NO: 2182734
auuaccauuguaagacuag

SEQ ID NO: 2182736 - RNA, 19 nt, Artificial Sequence
  Description of Artificial Sequence: Synthetic oligonucleotide
  Sense strand starting at position 3252 of SEQ ID NO: 1883286
ggaacagcuagauguacua

SEQ ID NO: 2182737 - RNA, 19 nt, Artificial Sequence
  Description of Artificial Sequence: Synthetic oligonucleotide
  Antisense strand to SEQ ID NO: 2182736
uaguacaucuagcuguucc

SEQ ID NO: 2182738 - RNA, 19 nt, Artificial Sequence
  Description of Artificial Sequence: Synthetic oligonucleotide
  Sense strand starting at position 3262 of SEQ ID NO: 1883286
gauguacuacuuuguuaag

SEQ ID NO: 2182739 - RNA, 19 nt, Artificial Sequence
  Description of Artificial Sequence: Synthetic oligonucleotide
  Antisense strand to SEQ ID NO: 2182738
cuuaacaaaguaguacauc

SEQ ID NO: 2182740 - RNA, 19 nt, Artificial Sequence
  Description of Artificial Sequence: Synthetic oligonucleotide
  Sense strand starting at position 3274 of SEQ ID NO: 1883286
uguuaaguagagcacuauu

SEQ ID NO: 2182741 - RNA, 19 nt, Artificial Sequence
  Description of Artificial Sequence: Synthetic oligonucleotide
  Antisense strand to SEQ ID NO: 2182740
aauagugcucuacuuaaca

SEQ ID NO: 2182742 - RNA, 19 nt, Artificial Sequence
  Description of Artificial Sequence: Synthetic oligonucleotide
  Sense strand starting at position 3383 of SEQ ID NO: 1883286
guaguugcacuuuaugaau

SEQ ID NO: 2182743 - RNA, 19 nt, Artificial Sequence
  Description of Artificial Sequence: Synthetic oligonucleotide
  Antisense strand to SEQ ID NO: 2182742
auucauaaagugcaacuac

SEQ ID NO: 2182744 - RNA, 19 nt, Artificial Sequence
  Description of Artificial Sequence: Synthetic oligonucleotide
  Sense strand starting at position 3519 of SEQ ID NO: 1883286
cugaacuuccagugauauc

SEQ ID NO: 2182745 - RNA, 19 nt, Artificial Sequence
  Description of Artificial Sequence: Synthetic oligonucleotide
  Antisense strand to SEQ ID NO: 2182744
gauaucacuggaaguucag

SEQ ID NO: 2182746 - RNA, 19 nt, Artificial Sequence
  Description of Artificial Sequence: Synthetic oligonucleotide
  Sense strand starting at position 3552 of SEQ ID NO: 1883286
acaguucuguuaucacaca

SEQ ID NO: 2182747 - RNA, 19 nt, Artificial Sequence
  Description of Artificial Sequence: Synthetic oligonucleotide
  Antisense strand to SEQ ID NO: 2182746
ugugugauaacagaacugu

SEQ ID NO: 2182748 - RNA, 19 nt, Artificial Sequence
  Description of Artificial Sequence: Synthetic oligonucleotide
  Sense strand starting at position 3756 of SEQ ID NO: 1883286
cugacaaauuuggaccuua

SEQ ID NO: 2182749 - RNA, 19 nt, Artificial Sequence
  Description of Artificial Sequence: Synthetic oligonucleotide
  Antisense strand to SEQ ID NO: 2182748
uaagguccaaauuugucag

SEQ ID NO: 2182750 - RNA, 19 nt, Artificial Sequence
  Description of Artificial Sequence: Synthetic oligonucleotide
  Sense strand starting at position 3764 of SEQ ID NO: 1883286
uuuggaccuuagcuaauua

SEQ ID NO: 2182751 - RNA, 19 nt, Artificial Sequence
  Description of Artificial Sequence: Synthetic oligonucleotide
  Antisense strand to SEQ ID NO: 2182750
uaauuagcuaagguccaaa

SEQ ID NO: 2182752 - RNA, 19 nt, Artificial Sequence
  Description of Artificial Sequence: Synthetic oligonucleotide
  Sense strand starting at position 3916 of SEQ ID NO: 1883286
gccuucugaccugauauau

SEQ ID NO: 2182753 - RNA, 19 nt, Artificial Sequence
  Description of Artificial Sequence: Synthetic oligonucleotide
  Antisense strand to SEQ ID NO: 2182752
auauaucaggucagaaggc

SEQ ID NO: 2182754 - RNA, 19 nt, Artificial Sequence
  Description of Artificial Sequence: Synthetic oligonucleotide
  Sense strand starting at position 5 of SEQ ID NO: 1883287
agagcuuauaggugggaau

SEQ ID NO: 2182755 - RNA, 19 nt, Artificial Sequence
  Description of Artificial Sequence: Synthetic oligonucleotide
  Antisense strand to SEQ ID NO: 2182754
auucccaccuauaagcucu

SEQ ID NO: 2182756 - RNA, 19 nt, Artificial Sequence
  Description of Artificial Sequence: Synthetic oligonucleotide
  Sense strand starting at position 6 of SEQ ID NO: 1883287
gagcuuauaggugggaaua

SEQ ID NO: 2182757 - RNA, 19 nt, Artificial Sequence
  Description of Artificial Sequence: Synthetic oligonucleotide
  Antisense strand to SEQ ID NO: 2182756
uauucccaccuauaagcuc

SEQ ID NO: 2182758 - RNA, 19 nt, Artificial Sequence
  Description of Artificial Sequence: Synthetic oligonucleotide
  Sense strand starting at position 7 of SEQ ID NO: 1883287
agcuuauaggugggaauag

SEQ ID NO: 2182759 - RNA, 19 nt, Artificial Sequence
  Description of Artificial Sequence: Synthetic oligonucleotide
  Antisense strand to SEQ ID NO: 2182758
cuauucccaccuauaagcu

SEQ ID NO: 2182760 - RNA, 19 nt, Artificial Sequence
  Description of Artificial Sequence: Synthetic oligonucleotide
  Sense strand starting at position 84 of SEQ ID NO: 1883287
agaauaucagaauguugug

SEQ ID NO: 2182761 - RNA, 19 nt, Artificial Sequence
  Description of Artificial Sequence: Synthetic oligonucleotide
  Antisense strand to SEQ ID NO: 2182760
cacaacauucugauauucu

SEQ ID NO: 2182762 - RNA, 19 nt, Artificial Sequence
  Description of Artificial Sequence: Synthetic oligonucleotide
  Sense strand starting at position 467 of SEQ ID NO: 1883287
ugaacaagcgagugauaua

SEQ ID NO: 2182763 - RNA, 19 nt, Artificial Sequence
  Description of Artificial Sequence: Synthetic oligonucleotide
  Antisense strand to SEQ ID NO: 2182762
uauaucacucgcuuguuca

SEQ ID NO: 2182764 - RNA, 19 nt, Artificial Sequence
  Description of Artificial Sequence: Synthetic oligonucleotide
  Sense strand starting at position 478 of SEQ ID NO: 1883287
gugauauaccaauggcaau

SEQ ID NO: 2182765 - RNA, 19 nt, Artificial Sequence
  Description of Artificial Sequence: Synthetic oligonucleotide
  Antisense strand to SEQ ID NO: 2182764
auugccauugguauaucac

SEQ ID NO: 2182766 - RNA, 19 nt, Artificial Sequence
  Description of Artificial Sequence: Synthetic oligonucleotide
  Sense strand starting at position 516 of SEQ ID NO: 1883287
gggagugugcaagauaguu

SEQ ID NO: 2182767 - RNA, 19 nt, Artificial Sequence
  Description of Artificial Sequence: Synthetic oligonucleotide
  Antisense strand to SEQ ID NO: 2182766
aacuaucuugcacacuccc

SEQ ID NO: 2182768 - RNA, 19 nt, Artificial Sequence
  Description of Artificial Sequence: Synthetic oligonucleotide
  Sense strand starting at position 580 of SEQ ID NO: 1883287
ccuugaauguuauuaaaug

SEQ ID NO: 2182769 - RNA, 19 nt, Artificial Sequence
  Description of Artificial Sequence: Synthetic oligonucleotide
  Antisense strand to SEQ ID NO: 2182768
cauuuaauaacauucaagg

SEQ ID NO: 2182770 - RNA, 19 nt, Artificial Sequence
  Description of Artificial Sequence: Synthetic oligonucleotide
  Sense strand starting at position 820 of SEQ ID NO: 1883287
aaugucaaacugugaaaga

SEQ ID NO: 2182771 - RNA, 19 nt, Artificial Sequence
  Description of Artificial Sequence: Synthetic oligonucleotide
  Antisense strand to SEQ ID NO: 2182770
ucuuucacaguuugacauu

SEQ ID NO: 2182772 - RNA, 19 nt, Artificial Sequence
  Description of Artificial Sequence: Synthetic oligonucleotide
  Sense strand starting at position 944 of SEQ ID NO: 1883287
ggacauauuuaacagguuu

SEQ ID NO: 2182773 - RNA, 19 nt, Artificial Sequence
  Description of Artificial Sequence: Synthetic oligonucleotide
  Antisense strand to SEQ ID NO: 2182772
aaaccuguuaaauaugucc

SEQ ID NO: 2182774 - RNA, 19 nt, Artificial Sequence
  Description of Artificial Sequence: Synthetic oligonucleotide
  Sense strand starting at position 1520 of SEQ ID NO: 1883287
cuaaguucucagcagagau

SEQ ID NO: 2182775 - RNA, 19 nt, Artificial Sequence
  Description of Artificial Sequence: Synthetic oligonucleotide
  Antisense strand to SEQ ID NO: 2182774
aucucugcugagaacuuag

SEQ ID NO: 2182776 - RNA, 19 nt, Artificial Sequence
  Description of Artificial Sequence: Synthetic oligonucleotide
  Sense strand starting at position 1545 of SEQ ID NO: 1883287
uugagucacagugauguga

SEQ ID NO: 2182777 - RNA, 19 nt, Artificial Sequence
  Description of Artificial Sequence: Synthetic oligonucleotide
  Antisense strand to SEQ ID NO: 2182776
ucacaucacugugacucaa

SEQ ID NO: 2182778 - RNA, 19 nt, Artificial Sequence
  Description of Artificial Sequence: Synthetic oligonucleotide
  Sense strand starting at position 1592 of SEQ ID NO: 1883287
uagaguugucuuggagaag

SEQ ID NO: 2182779 - RNA, 19 nt, Artificial Sequence
  Description of Artificial Sequence: Synthetic oligonucleotide
  Antisense strand to SEQ ID NO: 2182778
cuucuccaagacaacucua

SEQ ID NO: 2182780 - RNA, 19 nt, Artificial Sequence
  Description of Artificial Sequence: Synthetic oligonucleotide
  Sense strand starting at position 1793 of SEQ ID NO: 1883287
ucaaauguagggugagaga

SEQ ID NO: 2182781 - RNA, 19 nt, Artificial Sequence
  Description of Artificial Sequence: Synthetic oligonucleotide
  Antisense strand to SEQ ID NO: 2182780
ucucucacccuacauuuga

SEQ ID NO: 2182782 - RNA, 19 nt, Artificial Sequence
  Description of Artificial Sequence: Synthetic oligonucleotide
  Sense strand starting at position 2086 of SEQ ID NO: 1883287
uuaucaagacuauguaaug

SEQ ID NO: 2182783 - RNA, 19 nt, Artificial Sequence
  Description of Artificial Sequence: Synthetic oligonucleotide
  Antisense strand to SEQ ID NO: 2182782
cauuacauagucuugauaa

SEQ ID NO: 2182784 - RNA, 19 nt, Artificial Sequence
  Description of Artificial Sequence: Synthetic oligonucleotide
  Sense strand starting at position 2101 of SEQ ID NO: 1883287
aaugaaacccuauguugga

SEQ ID NO: 2182785 - RNA, 19 nt, Artificial Sequence
  Description of Artificial Sequence: Synthetic oligonucleotide
  Antisense strand to SEQ ID NO: 2182784
uccaacauaggguuucauu

SEQ ID NO: 2182786 - RNA, 19 nt, Artificial Sequence
  Description of Artificial Sequence: Synthetic oligonucleotide
  Sense strand starting at position 2115 of SEQ ID NO: 1883287
uuggaagaagucuaugucu

SEQ ID NO: 2182787 - RNA, 19 nt, Artificial Sequence
  Description of Artificial Sequence: Synthetic oligonucleotide
  Antisense strand to SEQ ID NO: 2182786
agacauagacuucuuccaa

SEQ ID NO: 2182788 - RNA, 19 nt, Artificial Sequence
  Description of Artificial Sequence: Synthetic oligonucleotide
  Sense strand starting at position 2117 of SEQ ID NO: 1883287
ggaagaagucuaugucuau

SEQ ID NO: 2182789 - RNA, 19 nt, Artificial Sequence
  Description of Artificial Sequence: Synthetic oligonucleotide
  Antisense strand to SEQ ID NO: 2182788
auagacauagacuucuucc

SEQ ID NO: 2182790 - RNA, 19 nt, Artificial Sequence
  Description of Artificial Sequence: Synthetic oligonucleotide
  Sense strand starting at position 2118 of SEQ ID NO: 1883287
gaagaagucuaugucuaua

SEQ ID NO: 2182791 - RNA, 19 nt, Artificial Sequence
  Description of Artificial Sequence: Synthetic oligonucleotide
  Antisense strand to SEQ ID NO: 2182790
uauagacauagacuucuuc

SEQ ID NO: 2182792 - RNA, 19 nt, Artificial Sequence
  Description of Artificial Sequence: Synthetic oligonucleotide
  Sense strand starting at position 2120 of SEQ ID NO: 1883287
agaagucuaugucuauaca

SEQ ID NO: 2182793 - RNA, 19 nt, Artificial Sequence
  Description of Artificial Sequence: Synthetic oligonucleotide
  Antisense strand to SEQ ID NO: 2182792
uguauagacauagacuucu

SEQ ID NO: 2182794 - RNA, 19 nt, Artificial Sequence
  Description of Artificial Sequence: Synthetic oligonucleotide
  Sense strand starting at position 2123 of SEQ ID NO: 1883287
agucuaugucuauacaauu

SEQ ID NO: 2182795 - RNA, 19 nt, Artificial Sequence
  Description of Artificial Sequence: Synthetic oligonucleotide
  Antisense strand to SEQ ID NO: 2182794
aauuguauagacauagacu

SEQ ID NO: 2182796 - RNA, 19 nt, Artificial Sequence
  Description of Artificial Sequence: Synthetic oligonucleotide
  Sense strand starting at position 2136 of SEQ ID NO: 1883287
acaauuagucuugaaagca

SEQ ID NO: 2182797 - RNA, 19 nt, Artificial Sequence
  Description of Artificial Sequence: Synthetic oligonucleotide
  Antisense strand to SEQ ID NO: 2182796
ugcuuucaagacuaauugu

SEQ ID NO: 2182798 - RNA, 19 nt, Artificial Sequence
  Description of Artificial Sequence: Synthetic oligonucleotide
  Sense strand starting at position 2279 of SEQ ID NO: 1883287
guaauaaggagugagccau

SEQ ID NO: 2182799 - RNA, 19 nt, Artificial Sequence
  Description of Artificial Sequence: Synthetic oligonucleotide
  Antisense strand to SEQ ID NO: 2182798
auggcucacuccuuauuac

SEQ ID NO: 2182800 - RNA, 19 nt, Artificial Sequence
  Description of Artificial Sequence: Synthetic oligonucleotide
  Sense strand starting at position 2349 of SEQ ID NO: 1883287
uggagacauuucugaagau

SEQ ID NO: 2182801 - RNA, 19 nt, Artificial Sequence
  Description of Artificial Sequence: Synthetic oligonucleotide
  Antisense strand to SEQ ID NO: 2182800
aucuucagaaaugucucca

SEQ ID NO: 2182802 - RNA, 19 nt, Artificial Sequence
  Description of Artificial Sequence: Synthetic oligonucleotide
  Sense strand starting at position 2350 of SEQ ID NO: 1883287
ggagacauuucugaagauu

SEQ ID NO: 2182803 - RNA, 19 nt, Artificial Sequence
  Description of Artificial Sequence: Synthetic oligonucleotide
  Antisense strand to SEQ ID NO: 2182802
aaucuucagaaaugucucc

SEQ ID NO: 2182804 - RNA, 19 nt, Artificial Sequence
  Description of Artificial Sequence: Synthetic oligonucleotide
  Sense strand starting at position 2358 of SEQ ID NO: 1883287
uucugaagauugcuagacu

SEQ ID NO: 2182805 - RNA, 19 nt, Artificial Sequence
  Description of Artificial Sequence: Synthetic oligonucleotide
  Antisense strand to SEQ ID NO: 2182804
agucuagcaaucuucagaa

SEQ ID NO: 2182806 - RNA, 19 nt, Artificial Sequence
  Description of Artificial Sequence: Synthetic oligonucleotide
  Sense strand starting at position 2676 of SEQ ID NO: 1883287
aggaguuccauuggcaaac

SEQ ID NO: 2182807 - RNA, 19 nt, Artificial Sequence
  Description of Artificial Sequence: Synthetic oligonucleotide
  Antisense strand to SEQ ID NO: 2182806
guuugccaauggaacuccu

SEQ ID NO: 2182808 - RNA, 19 nt, Artificial Sequence
  Description of Artificial Sequence: Synthetic oligonucleotide
  Sense strand starting at position 2807 of SEQ ID NO: 1883287
gcggaaaguauccaucaca

SEQ ID NO: 2182809 - RNA, 19 nt, Artificial Sequence
  Description of Artificial Sequence: Synthetic oligonucleotide
  Antisense strand to SEQ ID NO: 2182808
ugugauggauacuuuccgc

SEQ ID NO: 2182810 - RNA, 19 nt, Artificial Sequence
  Description of Artificial Sequence: Synthetic oligonucleotide
  Sense strand starting at position 2982 of SEQ ID NO: 1883287
uaucauuagcucugggaca

SEQ ID NO: 2182811 - RNA, 19 nt, Artificial Sequence
  Description of Artificial Sequence: Synthetic oligonucleotide
  Antisense strand to SEQ ID NO: 2182810
ugucccagagcuaaugaua

SEQ ID NO: 2182812 - RNA, 19 nt, Artificial Sequence
  Description of Artificial Sequence: Synthetic oligonucleotide
  Sense strand starting at position 2984 of SEQ ID NO: 1883287
ucauuagcucugggacaaa

SEQ ID NO: 2182813 - RNA, 19 nt, Artificial Sequence
  Description of Artificial Sequence: Synthetic oligonucleotide
  Antisense strand to SEQ ID NO: 2182812
uuugucccagagcuaauga

SEQ ID NO: 2182814 - RNA, 19 nt, Artificial Sequence
  Description of Artificial Sequence: Synthetic oligonucleotide
  Sense strand starting at position 3017 of SEQ ID NO: 1883287
ucauauuucuggcuugcuu

SEQ ID NO: 2182815 - RNA, 19 nt, Artificial Sequence
  Description of Artificial Sequence: Synthetic oligonucleotide
  Antisense strand to SEQ ID NO: 2182814
aagcaagccagaaauauga

SEQ ID NO: 2182816 - RNA, 19 nt, Artificial Sequence
  Description of Artificial Sequence: Synthetic oligonucleotide
  Sense strand starting at position 3118 of SEQ ID NO: 1883287
aaggaaaucuuaguucugu

SEQ ID NO: 2182817 - RNA, 19 nt, Artificial Sequence
  Description of Artificial Sequence: Synthetic oligonucleotide
  Antisense strand to SEQ ID NO: 2182816
acagaacuaagauuuccuu

SEQ ID NO: 2182818 - RNA, 19 nt, Artificial Sequence
  Description of Artificial Sequence: Synthetic oligonucleotide
  Sense strand starting at position 3119 of SEQ ID NO: 1883287
aggaaaucuuaguucugua

SEQ ID NO: 2182819 - RNA, 19 nt, Artificial Sequence
  Description of Artificial Sequence: Synthetic oligonucleotide
  Antisense strand to SEQ ID NO: 2182818
uacagaacuaagauuuccu

SEQ ID NO: 2182820 - RNA, 19 nt, Artificial Sequence
  Description of Artificial Sequence: Synthetic oligonucleotide
  Sense strand starting at position 3124 of SEQ ID NO: 1883287
aucuuaguucuguaacaga

SEQ ID NO: 2182821 - RNA, 19 nt, Artificial Sequence
  Description of Artificial Sequence: Synthetic oligonucleotide
  Antisense strand to SEQ ID NO: 2182820
ucuguuacagaacuaagau

SEQ ID NO: 2182822 - RNA, 19 nt, Artificial Sequence
  Description of Artificial Sequence: Synthetic oligonucleotide
  Sense strand starting at position 3266 of SEQ ID NO: 1883287
gaugaacuucugugauaaa

SEQ ID NO: 2182823 - RNA, 19 nt, Artificial Sequence
  Description of Artificial Sequence: Synthetic oligonucleotide
  Antisense strand to SEQ ID NO: 2182822
uuuaucacagaaguucauc

SEQ ID NO: 2182824 - RNA, 19 nt, Artificial Sequence
  Description of Artificial Sequence: Synthetic oligonucleotide
  Sense strand starting at position 3341 of SEQ ID NO: 1883287
auguaucugguagaaugua

SEQ ID NO: 2182825 - RNA, 19 nt, Artificial Sequence
  Description of Artificial Sequence: Synthetic oligonucleotide
  Antisense strand to SEQ ID NO: 2182824
uacauucuaccagauacau

SEQ ID NO: 2182826 - RNA, 19 nt, Artificial Sequence
  Description of Artificial Sequence: Synthetic oligonucleotide
  Sense strand starting at position 3384 of SEQ ID NO: 1883287
guggcuuauuucuucuuua

SEQ ID NO: 2182827 - RNA, 19 nt, Artificial Sequence
  Description of Artificial Sequence: Synthetic oligonucleotide
  Antisense strand to SEQ ID NO: 2182826
uaaagaagaaauaagccac

SEQ ID NO: 2182828 - RNA, 19 nt, Artificial Sequence
  Description of Artificial Sequence: Synthetic oligonucleotide
  Sense strand starting at position 3517 of SEQ ID NO: 1883287
aguguaugcuaauuuauuc

SEQ ID NO: 2182829 - RNA, 19 nt, Artificial Sequence
  Description of Artificial Sequence: Synthetic oligonucleotide
  Antisense strand to SEQ ID NO: 2182828
gaauaaauuagcauacacu

SEQ ID NO: 2182830 - RNA, 19 nt, Artificial Sequence
  Description of Artificial Sequence: Synthetic oligonucleotide
  Sense strand starting at position 3553 of SEQ ID NO: 1883287
guuacaugacaaugguaua

SEQ ID NO: 2182831 - RNA, 19 nt, Artificial Sequence
  Description of Artificial Sequence: Synthetic oligonucleotide
  Antisense strand to SEQ ID NO: 2182830
uauaccauugucauguaac

SEQ ID NO: 2182832 - RNA, 19 nt, Artificial Sequence
  Description of Artificial Sequence: Synthetic oligonucleotide
  Sense strand starting at position 3930 of SEQ ID NO: 1883287
uuaugagaagccuaacuuc

SEQ ID NO: 2182833 - RNA, 19 nt, Artificial Sequence
  Description of Artificial Sequence: Synthetic oligonucleotide
  Antisense strand to SEQ ID NO: 2182832
gaaguuaggcuucucauaa

SEQ ID NO: 2182834 - RNA, 19 nt, Artificial Sequence
  Description of Artificial Sequence: Synthetic oligonucleotide
  Sense strand starting at position 9 of SEQ ID NO: 1883288
cagugaccuccaugagacu

SEQ ID NO: 2182835 - RNA, 19 nt, Artificial Sequence
  Description of Artificial Sequence: Synthetic oligonucleotide
  Antisense strand to SEQ ID NO: 2182834
agucucauggaggucacug

SEQ ID NO: 2182836 - RNA, 19 nt, Artificial Sequence
  Description of Artificial Sequence: Synthetic oligonucleotide
  Sense strand starting at position 77 of SEQ ID NO: 1883288
gccaguaccacgugauaag

SEQ ID NO: 2182837 - RNA, 19 nt, Artificial Sequence
  Description of Artificial Sequence: Synthetic oligonucleotide
  Antisense strand to SEQ ID NO: 2182836
cuuaucacgugguacuggc

SEQ ID NO: 2182838 - RNA, 19 nt, Artificial Sequence
  Description of Artificial Sequence: Synthetic oligonucleotide
  Sense strand starting at position 78 of SEQ ID NO: 1883288
ccaguaccacgugauaaga

SEQ ID NO: 2182839 - RNA, 19 nt, Artificial Sequence
  Description of Artificial Sequence: Synthetic oligonucleotide
  Antisense strand to SEQ ID NO: 2182838
ucuuaucacgugguacugg

SEQ ID NO: 2182840 - RNA, 19 nt, Artificial Sequence
  Description of Artificial Sequence: Synthetic oligonucleotide
  Sense strand starting at position 206 of SEQ ID NO: 1883288
ggaugacuguaguuaauag

SEQ ID NO: 2182841 - RNA, 19 nt, Artificial Sequence
  Description of Artificial Sequence: Synthetic oligonucleotide
  Antisense strand to SEQ ID NO: 2182840
cuauuaacuacagucaucc

SEQ ID NO: 2182842 - RNA, 19 nt, Artificial Sequence
  Description of Artificial Sequence: Synthetic oligonucleotide
  Sense strand starting at position 308 of SEQ ID NO: 1883288
gcuaauuaucccgaucuga

SEQ ID NO: 2182843 - RNA, 19 nt, Artificial Sequence
  Description of Artificial Sequence: Synthetic oligonucleotide
  Antisense strand to SEQ ID NO: 2182842
ucagaucgggauaauuagc

SEQ ID NO: 2182844 - RNA, 19 nt, Artificial Sequence
  Description of Artificial Sequence: Synthetic oligonucleotide
  Sense strand starting at position 316 of SEQ ID NO: 1883288
ucccgaucugaucaccaua

SEQ ID NO: 2182845 - RNA, 19 nt, Artificial Sequence
  Description of Artificial Sequence: Synthetic oligonucleotide
  Antisense strand to SEQ ID NO: 2182844
uauggugaucagaucggga

SEQ ID NO: 2182846 - RNA, 19 nt, Artificial Sequence
  Description of Artificial Sequence: Synthetic oligonucleotide
  Sense strand starting at position 467 of SEQ ID NO: 1883288
agagcagacgcuugaagaa

SEQ ID NO: 2182847 - RNA, 19 nt, Artificial Sequence
  Description of Artificial Sequence: Synthetic oligonucleotide
  Antisense strand to SEQ ID NO: 2182846
uucuucaagcgucugcucu

SEQ ID NO: 2182848 - RNA, 19 nt, Artificial Sequence
  Description of Artificial Sequence: Synthetic oligonucleotide
  Sense strand starting at position 550 of SEQ ID NO: 1883288
agaggauuacgugagccaa

SEQ ID NO: 2182849 - RNA, 19 nt, Artificial Sequence
  Description of Artificial Sequence: Synthetic oligonucleotide
  Antisense strand to SEQ ID NO: 2182848
uuggcucacguaauccucu

SEQ ID NO: 2182850 - RNA, 19 nt, Artificial Sequence
  Description of Artificial Sequence: Synthetic oligonucleotide
  Sense strand starting at position 702 of SEQ ID NO: 1883288
ggaaacgcgccuuaggaau

SEQ ID NO: 2182851 - RNA, 19 nt, Artificial Sequence
  Description of Artificial Sequence: Synthetic oligonucleotide
  Antisense strand to SEQ ID NO: 2182850
auuccuaaggcgcguuucc

SEQ ID NO: 2182852 - RNA, 19 nt, Artificial Sequence
  Description of Artificial Sequence: Synthetic oligonucleotide
  Sense strand starting at position 1195 of SEQ ID NO: 1883288
ugauauugaugcccaagca

SEQ ID NO: 2182853 - RNA, 19 nt, Artificial Sequence
  Description of Artificial Sequence: Synthetic oligonucleotide
  Antisense strand to SEQ ID NO: 2182852
ugcuugggcaucaauauca

SEQ ID NO: 2182854 - RNA, 19 nt, Artificial Sequence
  Description of Artificial Sequence: Synthetic oligonucleotide
  Sense strand starting at position 1254 of SEQ ID NO: 1883288
uuaggcaaguccucgaguu

SEQ ID NO: 2182855 - RNA, 19 nt, Artificial Sequence
  Description of Artificial Sequence: Synthetic oligonucleotide
  Antisense strand to SEQ ID NO: 2182854
aacucgaggacuugccuaa

SEQ ID NO: 2182856 - RNA, 19 nt, Artificial Sequence
  Description of Artificial Sequence: Synthetic oligonucleotide
  Sense strand starting at position 1255 of SEQ ID NO: 1883288
uaggcaaguccucgaguuu

SEQ ID NO: 2182857 - RNA, 19 nt, Artificial Sequence
  Description of Artificial Sequence: Synthetic oligonucleotide
  Antisense strand to SEQ ID NO: 2182856
aaacucgaggacuugccua

SEQ ID NO: 2182858 - RNA, 19 nt, Artificial Sequence
  Description of Artificial Sequence: Synthetic oligonucleotide
  Sense strand starting at position 1256 of SEQ ID NO: 1883288
aggcaaguccucgaguuug

SEQ ID NO: 2182859 - RNA, 19 nt, Artificial Sequence
  Description of Artificial Sequence: Synthetic oligonucleotide
  Antisense strand to SEQ ID NO: 2182858
caaacucgaggacuugccu

SEQ ID NO: 2182860 - RNA, 19 nt, Artificial Sequence
  Description of Artificial Sequence: Synthetic oligonucleotide
  Sense strand starting at position 1261 of SEQ ID NO: 1883288
aguccucgaguuugaaaga

SEQ ID NO: 2182861 - RNA, 19 nt, Artificial Sequence
  Description of Artificial Sequence: Synthetic oligonucleotide
  Antisense strand to SEQ ID NO: 2182860
ucuuucaaacucgaggacu

SEQ ID NO: 2182862 - RNA, 19 nt, Artificial Sequence
  Description of Artificial Sequence: Synthetic oligonucleotide
  Sense strand starting at position 1300 of SEQ ID NO: 1883288
guggcuaacacauggacau

SEQ ID NO: 2182863 - RNA, 19 nt, Artificial Sequence
  Description of Artificial Sequence: Synthetic oligonucleotide
  Antisense strand to SEQ ID NO: 2182862
auguccauguguuagccac

SEQ ID NO: 2182864 - RNA, 19 nt, Artificial Sequence
  Description of Artificial Sequence: Synthetic oligonucleotide
  Sense strand starting at position 1428 of SEQ ID NO: 1883288
cccuaauccucucugaggu

SEQ ID NO: 2182865 - RNA, 19 nt, Artificial Sequence
  Description of Artificial Sequence: Synthetic oligonucleotide
  Antisense strand to SEQ ID NO: 2182864
accucagagaggauuaggg

SEQ ID NO: 2182866 - RNA, 19 nt, Artificial Sequence
  Description of Artificial Sequence: Synthetic oligonucleotide
  Sense strand starting at position 1429 of SEQ ID NO: 1883288
ccuaauccucucugagguu

SEQ ID NO: 2182867 - RNA, 19 nt, Artificial Sequence
  Description of Artificial Sequence: Synthetic oligonucleotide
  Antisense strand to SEQ ID NO: 2182866
aaccucagagaggauuagg

SEQ ID NO: 2182868 - RNA, 19 nt, Artificial Sequence
  Description of Artificial Sequence: Synthetic oligonucleotide
  Sense strand starting at position 1520 of SEQ ID NO: 1883288
gcaguugccaguucugguu

SEQ ID NO: 2182869 - RNA, 19 nt, Artificial Sequence
  Description of Artificial Sequence: Synthetic oligonucleotide
  Antisense strand to SEQ ID NO: 2182868
aaccagaacuggcaacugc

SEQ ID NO: 2182870 - RNA, 19 nt, Artificial Sequence
  Description of Artificial Sequence: Synthetic oligonucleotide
  Sense strand starting at position 2133 of SEQ ID NO: 1883288
gauuguuaauguuuaaagg

SEQ ID NO: 2182871 - RNA, 19 nt, Artificial Sequence
  Description of Artificial Sequence: Synthetic oligonucleotide
  Antisense strand to SEQ ID NO: 2182870
ccuuuaaacauuaacaauc

SEQ ID NO: 2182872 - RNA, 19 nt, Artificial Sequence
  Description of Artificial Sequence: Synthetic oligonucleotide
  Sense strand starting at position 2181 of SEQ ID NO: 1883288
cagguugcucaauggacaa

SEQ ID NO: 2182873 - RNA, 19 nt, Artificial Sequence
  Description of Artificial Sequence: Synthetic oligonucleotide
  Antisense strand to SEQ ID NO: 2182872
uuguccauugagcaaccug

SEQ ID NO: 2182874 - RNA, 19 nt, Artificial Sequence
  Description of Artificial Sequence: Synthetic oligonucleotide
  Sense strand starting at position 2318 of SEQ ID NO: 1883288
ugcauaaccuugcugcaau

SEQ ID NO: 2182875 - RNA, 19 nt, Artificial Sequence
  Description of Artificial Sequence: Synthetic oligonucleotide
  Antisense strand to SEQ ID NO: 2182874
auugcagcaagguuaugca

SEQ ID NO: 2182876 - RNA, 19 nt, Artificial Sequence
  Description of Artificial Sequence: Synthetic oligonucleotide
  Sense strand starting at position 2486 of SEQ ID NO: 1883288
auuccauguucuccuuuga

SEQ ID NO: 2182877 - RNA, 19 nt, Artificial Sequence
  Description of Artificial Sequence: Synthetic oligonucleotide
  Antisense strand to SEQ ID NO: 2182876
ucaaaggagaacauggaau

SEQ ID NO: 2182878 - RNA, 19 nt, Artificial Sequence
  Description of Artificial Sequence: Synthetic oligonucleotide
  Sense strand starting at position 2602 of SEQ ID NO: 1883288
auggaacgaugcuaacaaa

SEQ ID NO: 2182879 - RNA, 19 nt, Artificial Sequence
  Description of Artificial Sequence: Synthetic oligonucleotide
  Antisense strand to SEQ ID NO: 2182878
uuuguuagcaucguuccau

SEQ ID NO: 2182880 - RNA, 19 nt, Artificial Sequence
  Description of Artificial Sequence: Synthetic oligonucleotide
  Sense strand starting at position 2626 of SEQ ID NO: 1883288
ugaugaucauucuuuagua

SEQ ID NO: 2182881 - RNA, 19 nt, Artificial Sequence
  Description of Artificial Sequence: Synthetic oligonucleotide
  Antisense strand to SEQ ID NO: 2182880
uacuaaagaaugaucauca

SEQ ID NO: 2182882 - RNA, 19 nt, Artificial Sequence
  Description of Artificial Sequence: Synthetic oligonucleotide
  Sense strand starting at position 2627 of SEQ ID NO: 1883288
gaugaucauucuuuaguag

SEQ ID NO: 2182883 - RNA, 19 nt, Artificial Sequence
  Description of Artificial Sequence: Synthetic oligonucleotide
  Antisense strand to SEQ ID NO: 2182882
cuacuaaagaaugaucauc

SEQ ID NO: 2182884 - RNA, 19 nt, Artificial Sequence
  Description of Artificial Sequence: Synthetic oligonucleotide
  Sense strand starting at position 2724 of SEQ ID NO: 1883288
ugcccauugauuggugacu

SEQ ID NO: 2182885 - RNA, 19 nt, Artificial Sequence
  Description of Artificial Sequence: Synthetic oligonucleotide
  Antisense strand to SEQ ID NO: 2182884
agucaccaaucaaugggca

SEQ ID NO: 2182886 - RNA, 19 nt, Artificial Sequence
  Description of Artificial Sequence: Synthetic oligonucleotide
  Sense strand starting at position 2737 of SEQ ID NO: 1883288
gugacucuaucuccaucua

SEQ ID NO: 2182887 - RNA, 19 nt, Artificial Sequence
  Description of Artificial Sequence: Synthetic oligonucleotide
  Antisense strand to SEQ ID NO: 2182886
uagauggagauagagucac

SEQ ID NO: 2182888 - RNA, 19 nt, Artificial Sequence
  Description of Artificial Sequence: Synthetic oligonucleotide
  Sense strand starting at position 3183 of SEQ ID NO: 1883288
uggccaauguuuguauuua

SEQ ID NO: 2182889 - RNA, 19 nt, Artificial Sequence
  Description of Artificial Sequence: Synthetic oligonucleotide
  Antisense strand to SEQ ID NO: 2182888
uaaauacaaacauuggcca

SEQ ID NO: 2182890 - RNA, 19 nt, Artificial Sequence
  Description of Artificial Sequence: Synthetic oligonucleotide
  Sense strand starting at position 3209 of SEQ ID NO: 1883288
aucaaauaugugugcuacu

SEQ ID NO: 2182891 - RNA, 19 nt, Artificial Sequence
  Description of Artificial Sequence: Synthetic oligonucleotide
  Antisense strand to SEQ ID NO: 2182890
aguagcacacauauuugau

SEQ ID NO: 2182892 - RNA, 19 nt, Artificial Sequence
  Description of Artificial Sequence: Synthetic oligonucleotide
  Sense strand starting at position 3318 of SEQ ID NO: 1883288
gccaguggaucacugugaa

SEQ ID NO: 2182893 - RNA, 19 nt, Artificial Sequence
  Description of Artificial Sequence: Synthetic oligonucleotide
  Antisense strand to SEQ ID NO: 2182892
uucacagugauccacuggc

SEQ ID NO: 2182894 - RNA, 19 nt, Artificial Sequence
  Description of Artificial Sequence: Synthetic oligonucleotide
  Sense strand starting at position 3321 of SEQ ID NO: 1883288
aguggaucacugugaauac

SEQ ID NO: 2182895 - RNA, 19 nt, Artificial Sequence
  Description of Artificial Sequence: Synthetic oligonucleotide
  Antisense strand to SEQ ID NO: 2182894
guauucacagugauccacu

SEQ ID NO: 2182896 - RNA, 19 nt, Artificial Sequence
  Description of Artificial Sequence: Synthetic oligonucleotide
  Sense strand starting at position 3357 of SEQ ID NO: 1883288
ugaagauagcauugaauca

SEQ ID NO: 2182897 - RNA, 19 nt, Artificial Sequence
  Description of Artificial Sequence: Synthetic oligonucleotide
  Antisense strand to SEQ ID NO: 2182896
ugauucaaugcuaucuuca

SEQ ID NO: 2182898 - RNA, 19 nt, Artificial Sequence
  Description of Artificial Sequence: Synthetic oligonucleotide
  Sense strand starting at position 3482 of SEQ ID NO: 1883288
aggcaacaaugaguaguua

SEQ ID NO: 2182899 - RNA, 19 nt, Artificial Sequence
  Description of Artificial Sequence: Synthetic oligonucleotide
  Antisense strand to SEQ ID NO: 2182898
uaacuacucauuguugccu

SEQ ID NO: 2182900 - RNA, 19 nt, Artificial Sequence
  Description of Artificial Sequence: Synthetic oligonucleotide
  Sense strand starting at position 3565 of SEQ ID NO: 1883288
uggagaguccuauguauca

SEQ ID NO: 2182901 - RNA, 19 nt, Artificial Sequence
  Description of Artificial Sequence: Synthetic oligonucleotide
  Antisense strand to SEQ ID NO: 2182900
ugauacauaggacucucca

SEQ ID NO: 2182902 - RNA, 19 nt, Artificial Sequence
  Description of Artificial Sequence: Synthetic oligonucleotide
  Sense strand starting at position 3583 of SEQ ID NO: 1883288
aucagaaacguuugcacaa

SEQ ID NO: 2182903 - RNA, 19 nt, Artificial Sequence
  Description of Artificial Sequence: Synthetic oligonucleotide
  Antisense strand to SEQ ID NO: 2182902
uugugcaaacguuucugau

SEQ ID NO: 2182904 - RNA, 19 nt, Artificial Sequence
  Description of Artificial Sequence: Synthetic oligonucleotide
  Sense strand starting at position 3628 of SEQ ID NO: 1883288
aaugacagccuaugugaau

SEQ ID NO: 2182905 - RNA, 19 nt, Artificial Sequence
  Description of Artificial Sequence: Synthetic oligonucleotide
  Antisense strand to SEQ ID NO: 2182904
auucacauaggcugucauu

SEQ ID NO: 2182906 - RNA, 19 nt, Artificial Sequence
  Description of Artificial Sequence: Synthetic oligonucleotide
  Sense strand starting at position 3784 of SEQ ID NO: 1883288
gggagaagcuguucacaga

SEQ ID NO: 2182907 - RNA, 19 nt, Artificial Sequence
  Description of Artificial Sequence: Synthetic oligonucleotide
  Antisense strand to SEQ ID NO: 2182906
ucugugaacagcuucuccc

SEQ ID NO: 2182908 - RNA, 19 nt, Artificial Sequence
  Description of Artificial Sequence: Synthetic oligonucleotide
  Sense strand starting at position 3857 of SEQ ID NO: 1883288
gagaacaaaucauggagga

SEQ ID NO: 2182909 - RNA, 19 nt, Artificial Sequence
  Description of Artificial Sequence: Synthetic oligonucleotide
  Antisense strand to SEQ ID NO: 2182908
uccuccaugauuuguucuc

SEQ ID NO: 2182910 - RNA, 19 nt, Artificial Sequence
  Description of Artificial Sequence: Synthetic oligonucleotide
  Sense strand starting at position 3892 of SEQ ID NO: 1883288
caauaagacuggcugguau

SEQ ID NO: 2182911 - RNA, 19 nt, Artificial Sequence
  Description of Artificial Sequence: Synthetic oligonucleotide
  Antisense strand to SEQ ID NO: 2182910
auaccagccagucuuauug

SEQ ID NO: 2182912 - RNA, 19 nt, Artificial Sequence
  Description of Artificial Sequence: Synthetic oligonucleotide
  Sense strand starting at position 3977 of SEQ ID NO: 1883288
gaccucucugcaggaguaa

SEQ ID NO: 2182913 - RNA, 19 nt, Artificial Sequence
  Description of Artificial Sequence: Synthetic oligonucleotide
  Antisense strand to SEQ ID NO: 2182912
uuacuccugcagagagguc

SEQ ID NO: 2182914 - RNA, 19 nt, Artificial Sequence
  Description of Artificial Sequence: Synthetic oligonucleotide
  Sense strand starting at position 191 of SEQ ID NO: 1883289
gcaguuaacuuaugccuca

SEQ ID NO: 2182915 - RNA, 19 nt, Artificial Sequence
  Description of Artificial Sequence: Synthetic oligonucleotide
  Antisense strand to SEQ ID NO: 2182914
ugaggcauaaguuaacugc

SEQ ID NO: 2182916 - RNA, 19 nt, Artificial Sequence
  Description of Artificial Sequence: Synthetic oligonucleotide
  Sense strand starting at position 196 of SEQ ID NO: 1883289
uaacuuaugccucagugag

SEQ ID NO: 2182917 - RNA, 19 nt, Artificial Sequence
  Description of Artificial Sequence: Synthetic oligonucleotide
  Antisense strand to SEQ ID NO: 2182916
cucacugaggcauaaguua

SEQ ID NO: 2182918 - RNA, 19 nt, Artificial Sequence
  Description of Artificial Sequence: Synthetic oligonucleotide
  Sense strand starting at position 198 of SEQ ID NO: 1883289
acuuaugccucagugagca

SEQ ID NO: 2182919 - RNA, 19 nt, Artificial Sequence
  Description of Artificial Sequence: Synthetic oligonucleotide
  Antisense strand to SEQ ID NO: 2182918
ugcucacugaggcauaagu

SEQ ID NO: 2182920 - RNA, 19 nt, Artificial Sequence
  Description of Artificial Sequence: Synthetic oligonucleotide
  Sense strand starting at position 318 of SEQ ID NO: 1883289
cagggucaguguuggaauc

SEQ ID NO: 2182921 - RNA, 19 nt, Artificial Sequence
  Description of Artificial Sequence: Synthetic oligonucleotide
  Antisense strand to SEQ ID NO: 2182920
gauuccaacacugacccug

SEQ ID NO: 2182922 - RNA, 19 nt, Artificial Sequence
  Description of Artificial Sequence: Synthetic oligonucleotide
  Sense strand starting at position 320 of SEQ ID NO: 1883289
gggucaguguuggaaucca

SEQ ID NO: 2182923 - RNA, 19 nt, Artificial Sequence
  Description of Artificial Sequence: Synthetic oligonucleotide
  Antisense strand to SEQ ID NO: 2182922
uggauuccaacacugaccc

SEQ ID NO: 2182924 - RNA, 19 nt, Artificial Sequence
  Description of Artificial Sequence: Synthetic oligonucleotide
  Sense strand starting at position 347 of SEQ ID NO: 1883289
gacucugacuaaggagauu

SEQ ID NO: 2182925 - RNA, 19 nt, Artificial Sequence
  Description of Artificial Sequence: Synthetic oligonucleotide
  Antisense strand to SEQ ID NO: 2182924
aaucuccuuagucagaguc

SEQ ID NO: 2182926 - RNA, 19 nt, Artificial Sequence
  Description of Artificial Sequence: Synthetic oligonucleotide
  Sense strand starting at position 356 of SEQ ID NO: 1883289
uaaggagauucuccauugu

SEQ ID NO: 2182927 - RNA, 19 nt, Artificial Sequence
  Description of Artificial Sequence: Synthetic oligonucleotide
  Antisense strand to SEQ ID NO: 2182926
acaauggagaaucuccuua

SEQ ID NO: 2182928 - RNA, 19 nt, Artificial Sequence
  Description of Artificial Sequence: Synthetic oligonucleotide
  Sense strand starting at position 394 of SEQ ID NO: 1883289
gcugaagggucucagauga

SEQ ID NO: 2182929 - RNA, 19 nt, Artificial Sequence
  Description of Artificial Sequence: Synthetic oligonucleotide
  Antisense strand to SEQ ID NO: 2182928
ucaucugagacccuucagc

SEQ ID NO: 2182930 - RNA, 19 nt, Artificial Sequence
  Description of Artificial Sequence: Synthetic oligonucleotide
  Sense strand starting at position 418 of SEQ ID NO: 1883289
augaaugaguaucagugaa

SEQ ID NO: 2182931 - RNA, 19 nt, Artificial Sequence
  Description of Artificial Sequence: Synthetic oligonucleotide
  Antisense strand to SEQ ID NO: 2182930
uucacugauacucauucau

SEQ ID NO: 2182932 - RNA, 19 nt, Artificial Sequence
  Description of Artificial Sequence: Synthetic oligonucleotide
  Sense strand starting at position 420 of SEQ ID NO: 1883289
gaaugaguaucagugaaug

SEQ ID NO: 2182933 - RNA, 19 nt, Artificial Sequence
  Description of Artificial Sequence: Synthetic oligonucleotide
  Antisense strand to SEQ ID NO: 2182932
cauucacugauacucauuc

SEQ ID NO: 2182934 - RNA, 19 nt, Artificial Sequence
  Description of Artificial Sequence: Synthetic oligonucleotide
  Sense strand starting at position 422 of SEQ ID NO: 1883289
augaguaucagugaauguc

SEQ ID NO: 2182935 - RNA, 19 nt, Artificial Sequence
  Description of Artificial Sequence: Synthetic oligonucleotide
  Antisense strand to SEQ ID NO: 2182934
gacauucacugauacucau

SEQ ID NO: 2182936 - RNA, 19 nt, Artificial Sequence
  Description of Artificial Sequence: Synthetic oligonucleotide
  Sense strand starting at position 461 of SEQ ID NO: 1883289
uuuaaaugaggcuaugcaa

SEQ ID NO: 2182937 - RNA, 19 nt, Artificial Sequence
  Description of Artificial Sequence: Synthetic oligonucleotide
  Antisense strand to SEQ ID NO: 2182936
uugcauagccucauuuaaa

SEQ ID NO: 2182938 - RNA, 19 nt, Artificial Sequence
  Description of Artificial Sequence: Synthetic oligonucleotide
  Sense strand starting at position 502 of SEQ ID NO: 1883289
ccucucugucucuaaggaa

SEQ ID NO: 2182939 - RNA, 19 nt, Artificial Sequence
  Description of Artificial Sequence: Synthetic oligonucleotide
  Antisense strand to SEQ ID NO: 2182938
uuccuuagagacagagagg

SEQ ID NO: 2182940 - RNA, 19 nt, Artificial Sequence
  Description of Artificial Sequence: Synthetic oligonucleotide
  Sense strand starting at position 905 of SEQ ID NO: 1883289
gagcuaaaggcauaaguga

SEQ ID NO: 2182941 - RNA, 19 nt, Artificial Sequence
  Description of Artificial Sequence: Synthetic oligonucleotide
  Antisense strand to SEQ ID NO: 2182940
ucacuuaugccuuuagcuc

SEQ ID NO: 2182942 - RNA, 19 nt, Artificial Sequence
  Description of Artificial Sequence: Synthetic oligonucleotide
  Sense strand starting at position 948 of SEQ ID NO: 1883289
acauauauguuguguauuc

SEQ ID NO: 2182943 - RNA, 19 nt, Artificial Sequence
  Description of Artificial Sequence: Synthetic oligonucleotide
  Antisense strand to SEQ ID NO: 2182942
gaauacacaacauauaugu

SEQ ID NO: 2182944 - RNA, 19 nt, Artificial Sequence
  Description of Artificial Sequence: Synthetic oligonucleotide
  Sense strand starting at position 1063 of SEQ ID NO: 1883289
ggaccaagugaauguacau

SEQ ID NO: 2182945 - RNA, 19 nt, Artificial Sequence
  Description of Artificial Sequence: Synthetic oligonucleotide
  Antisense strand to SEQ ID NO: 2182944
auguacauucacuuggucc

SEQ ID NO: 2182946 - RNA, 19 nt, Artificial Sequence
  Description of Artificial Sequence: Synthetic oligonucleotide
  Sense strand starting at position 1093 of SEQ ID NO: 1883289
ugaugaaugucucauguca

SEQ ID NO: 2182947 - RNA, 19 nt, Artificial Sequence
  Description of Artificial Sequence: Synthetic oligonucleotide
  Antisense strand to SEQ ID NO: 2182946
ugacaugagacauucauca

SEQ ID NO: 2182948 - RNA, 19 nt, Artificial Sequence
  Description of Artificial Sequence: Synthetic oligonucleotide
  Sense strand starting at position 1155 of SEQ ID NO: 1883289
acauguugucaggauggcu

SEQ ID NO: 2182949 - RNA, 19 nt, Artificial Sequence
  Description of Artificial Sequence: Synthetic oligonucleotide
  Antisense strand to SEQ ID NO: 2182948
agccauccugacaacaugu

SEQ ID NO: 2182950 - RNA, 19 nt, Artificial Sequence
  Description of Artificial Sequence: Synthetic oligonucleotide
  Sense strand starting at position 1158 of SEQ ID NO: 1883289
uguugucaggauggcuuaa

SEQ ID NO: 2182951 - RNA, 19 nt, Artificial Sequence
  Description of Artificial Sequence: Synthetic oligonucleotide
  Antisense strand to SEQ ID NO: 2182950
uuaagccauccugacaaca

SEQ ID NO: 2182952 - RNA, 19 nt, Artificial Sequence
  Description of Artificial Sequence: Synthetic oligonucleotide
  Sense strand starting at position 1170 of SEQ ID NO: 1883289
ggcuuaagguugugucaug

SEQ ID NO: 2182953 - RNA, 19 nt, Artificial Sequence
  Description of Artificial Sequence: Synthetic oligonucleotide
  Antisense strand to SEQ ID NO: 2182952
caugacacaaccuuaagcc

SEQ ID NO: 2182954 - RNA, 19 nt, Artificial Sequence
  Description of Artificial Sequence: Synthetic oligonucleotide
  Sense strand starting at position 1193 of SEQ ID NO: 1883289
cuugcuuaaccuuggcaaa

SEQ ID NO: 2182955 - RNA, 19 nt, Artificial Sequence
  Description of Artificial Sequence: Synthetic oligonucleotide
  Antisense strand to SEQ ID NO: 2182954
uuugccaagguuaagcaag

SEQ ID NO: 2182956 - RNA, 19 nt, Artificial Sequence
  Description of Artificial Sequence: Synthetic oligonucleotide
  Sense strand starting at position 1306 of SEQ ID NO: 1883289
uucgcuucuugcucagagu

SEQ ID NO: 2182957 - RNA, 19 nt, Artificial Sequence
  Description of Artificial Sequence: Synthetic oligonucleotide
  Antisense strand to SEQ ID NO: 2182956
acucugagcaagaagcgaa

SEQ ID NO: 2182958 - RNA, 19 nt, Artificial Sequence
  Description of Artificial Sequence: Synthetic oligonucleotide
  Sense strand starting at position 1557 of SEQ ID NO: 1883289
ucuguaggguuccuccaua

SEQ ID NO: 2182959 - RNA, 19 nt, Artificial Sequence
  Description of Artificial Sequence: Synthetic oligonucleotide
  Antisense strand to SEQ ID NO: 2182958
uauggaggaacccuacaga

SEQ ID NO: 2182960 - RNA, 19 nt, Artificial Sequence
  Description of Artificial Sequence: Synthetic oligonucleotide
  Sense strand starting at position 1595 of SEQ ID NO: 1883289
gcccucucugaggacagau

SEQ ID NO: 2182961 - RNA, 19 nt, Artificial Sequence
  Description of Artificial Sequence: Synthetic oligonucleotide
  Antisense strand to SEQ ID NO: 2182960
aucuguccucagagagggc

SEQ ID NO: 2182962 - RNA, 19 nt, Artificial Sequence
  Description of Artificial Sequence: Synthetic oligonucleotide
  Sense strand starting at position 1607 of SEQ ID NO: 1883289
gacagauuaucuggugacc

SEQ ID NO: 2182963 - RNA, 19 nt, Artificial Sequence
  Description of Artificial Sequence: Synthetic oligonucleotide
  Antisense strand to SEQ ID NO: 2182962
ggucaccagauaaucuguc

SEQ ID NO: 2182964 - RNA, 19 nt, Artificial Sequence
  Description of Artificial Sequence: Synthetic oligonucleotide
  Sense strand starting at position 1609 of SEQ ID NO: 1883289
cagauuaucuggugaccuu

SEQ ID NO: 2182965 - RNA, 19 nt, Artificial Sequence
  Description of Artificial Sequence: Synthetic oligonucleotide
  Antisense strand to SEQ ID NO: 2182964
aaggucaccagauaaucug

SEQ ID NO: 2182966 - RNA, 19 nt, Artificial Sequence
  Description of Artificial Sequence: Synthetic oligonucleotide
  Sense strand starting at position 1695 of SEQ ID NO: 1883289
gugggugagcgauggaaca

SEQ ID NO: 2182967 - RNA, 19 nt, Artificial Sequence
  Description of Artificial Sequence: Synthetic oligonucleotide
  Antisense strand to SEQ ID NO: 2182966
uguuccaucgcucacccac

SEQ ID NO: 2182968 - RNA, 19 nt, Artificial Sequence
  Description of Artificial Sequence: Synthetic oligonucleotide
  Sense strand starting at position 2214 of SEQ ID NO: 1883289
ggauaugggucucucaggu

SEQ ID NO: 2182969 - RNA, 19 nt, Artificial Sequence
  Description of Artificial Sequence: Synthetic oligonucleotide
  Antisense strand to SEQ ID NO: 2182968
accugagagacccauaucc

SEQ ID NO: 2182970 - RNA, 19 nt, Artificial Sequence
  Description of Artificial Sequence: Synthetic oligonucleotide
  Sense strand starting at position 347 of SEQ ID NO: 1883290
cuagacuagugacaaauga

SEQ ID NO: 2182971 - RNA, 19 nt, Artificial Sequence
  Description of Artificial Sequence: Synthetic oligonucleotide
  Antisense strand to SEQ ID NO: 2182970
ucauuugucacuagucuag

SEQ ID NO: 2182972 - RNA, 19 nt, Artificial Sequence
  Description of Artificial Sequence: Synthetic oligonucleotide
  Sense strand starting at position 419 of SEQ ID NO: 1883290
gaguguaagcuggguucga

SEQ ID NO: 2182973 - RNA, 19 nt, Artificial Sequence
  Description of Artificial Sequence: Synthetic oligonucleotide
  Antisense strand to SEQ ID NO: 2182972
ucgaacccagcuuacacuc

SEQ ID NO: 2182974 - RNA, 19 nt, Artificial Sequence
  Description of Artificial Sequence: Synthetic oligonucleotide
  Sense strand starting at position 1059 of SEQ ID NO: 1883290
ggaggauugcguugacgag

SEQ ID NO: 2182975 - RNA, 19 nt, Artificial Sequence
  Description of Artificial Sequence: Synthetic oligonucleotide
  Antisense strand to SEQ ID NO: 2182974
cucgucaacgcaauccucc

SEQ ID NO: 2182976 - RNA, 19 nt, Artificial Sequence
  Description of Artificial Sequence: Synthetic oligonucleotide
  Sense strand starting at position 1060 of SEQ ID NO: 1883290
gaggauugcguugacgaga

SEQ ID NO: 2182977 - RNA, 19 nt, Artificial Sequence
  Description of Artificial Sequence: Synthetic oligonucleotide
  Antisense strand to SEQ ID NO: 2182976
ucucgucaacgcaauccuc

SEQ ID NO: 2182978 - RNA, 19 nt, Artificial Sequence
  Description of Artificial Sequence: Synthetic oligonucleotide
  Sense strand starting at position 1071 of SEQ ID NO: 1883290
ugacgagacucuuauuuau

SEQ ID NO: 2182979 - RNA, 19 nt, Artificial Sequence
  Description of Artificial Sequence: Synthetic oligonucleotide
  Antisense strand to SEQ ID NO: 2182978
auaaauaagagucucguca

SEQ ID NO: 2182980 - RNA, 19 nt, Artificial Sequence
  Description of Artificial Sequence: Synthetic oligonucleotide
  Sense strand starting at position 1107 of SEQ ID NO: 1883290
ggaauuugcaguugcacau

SEQ ID NO: 2182981 - RNA, 19 nt, Artificial Sequence
  Description of Artificial Sequence: Synthetic oligonucleotide
  Antisense strand to SEQ ID NO: 2182980
augugcaacugcaaauucc

SEQ ID NO: 2182982 - RNA, 19 nt, Artificial Sequence
  Description of Artificial Sequence: Synthetic oligonucleotide
  Sense strand starting at position 1698 of SEQ ID NO: 1883290
ugguguaaauucccgaauc

SEQ ID NO: 2182983 - RNA, 19 nt, Artificial Sequence
  Description of Artificial Sequence: Synthetic oligonucleotide
  Antisense strand to SEQ ID NO: 2182982
gauucgggaauuuacacca

SEQ ID NO: 2182984 - RNA, 19 nt, Artificial Sequence
  Description of Artificial Sequence: Synthetic oligonucleotide
  Sense strand starting at position 1740 of SEQ ID NO: 1883290
ggaauucccgaguaagcug

SEQ ID NO: 2182985 - RNA, 19 nt, Artificial Sequence
  Description of Artificial Sequence: Synthetic oligonucleotide
  Antisense strand to SEQ ID NO: 2182984
cagcuuacucgggaauucc

SEQ ID NO: 2182986 - RNA, 19 nt, Artificial Sequence
  Description of Artificial Sequence: Synthetic oligonucleotide
  Sense strand starting at position 1769 of SEQ ID NO: 1883290
cggagaggucgucggacuu

SEQ ID NO: 2182987 - RNA, 19 nt, Artificial Sequence
  Description of Artificial Sequence: Synthetic oligonucleotide
  Antisense strand to SEQ ID NO: 2182986
aaguccgacgaccucuccg

SEQ ID NO: 2182988 - RNA, 19 nt, Artificial Sequence
  Description of Artificial Sequence: Synthetic oligonucleotide
  Sense strand starting at position 1770 of SEQ ID NO: 1883290
ggagaggucgucggacuuu

SEQ ID NO: 2182989 - RNA, 19 nt, Artificial Sequence
  Description of Artificial Sequence: Synthetic oligonucleotide
  Antisense strand to SEQ ID NO: 2182988
aaaguccgacgaccucucc

SEQ ID NO: 2182990 - RNA, 19 nt, Artificial Sequence
  Description of Artificial Sequence: Synthetic oligonucleotide
  Sense strand starting at position 2117 of SEQ ID NO: 1883290
aaacgagauuuaggagaag

SEQ ID NO: 2182991 - RNA, 19 nt, Artificial Sequence
  Description of Artificial Sequence: Synthetic oligonucleotide
  Antisense strand to SEQ ID NO: 2182990
cuucuccuaaaucucguuu

SEQ ID NO: 2182992 - RNA, 19 nt, Artificial Sequence
  Description of Artificial Sequence: Synthetic oligonucleotide
  Sense strand starting at position 2154 of SEQ ID NO: 1883290
gccugaccugcuugauaau

SEQ ID NO: 2182993 - RNA, 19 nt, Artificial Sequence
  Description of Artificial Sequence: Synthetic oligonucleotide
  Antisense strand to SEQ ID NO: 2182992
auuaucaagcaggucaggc

SEQ ID NO: 2182994 - RNA, 19 nt, Artificial Sequence
  Description of Artificial Sequence: Synthetic oligonucleotide
  Sense strand starting at position 2155 of SEQ ID NO: 1883290
ccugaccugcuugauaaua

SEQ ID NO: 2182995 - RNA, 19 nt, Artificial Sequence
  Description of Artificial Sequence: Synthetic oligonucleotide
  Antisense strand to SEQ ID NO: 2182994
uauuaucaagcaggucagg

SEQ ID NO: 2182996 - RNA, 19 nt, Artificial Sequence
  Description of Artificial Sequence: Synthetic oligonucleotide
  Sense strand starting at position 2193 of SEQ ID NO: 1883290
ggaagagccuuucuugcca

SEQ ID NO: 2182997 - RNA, 19 nt, Artificial Sequence
  Description of Artificial Sequence: Synthetic oligonucleotide
  Antisense strand to SEQ ID NO: 2182996
uggcaagaaaggcucuucc

SEQ ID NO: 2182998 - RNA, 19 nt, Artificial Sequence
  Description of Artificial Sequence: Synthetic oligonucleotide
  Sense strand starting at position 2216 of SEQ ID NO: 1883290
uuggcaaguauccgugaua

SEQ ID NO: 2182999 - RNA, 19 nt, Artificial Sequence
  Description of Artificial Sequence: Synthetic oligonucleotide
  Antisense strand to SEQ ID NO: 2182998
uaucacggauacuugccaa

SEQ ID NO: 2183000 - RNA, 19 nt, Artificial Sequence
  Description of Artificial Sequence: Synthetic oligonucleotide
  Sense strand starting at position 2217 of SEQ ID NO: 1883290
uggcaaguauccgugauaa

SEQ ID NO: 2183001 - RNA, 19 nt, Artificial Sequence
  Description of Artificial Sequence: Synthetic oligonucleotide
  Antisense strand to SEQ ID NO: 2183000
uuaucacggauacuugcca

SEQ ID NO: 2183002 - RNA, 19 nt, Artificial Sequence
  Description of Artificial Sequence: Synthetic oligonucleotide
  Sense strand starting at position 2219 of SEQ ID NO: 1883290
gcaaguauccgugauaaug

SEQ ID NO: 2183003 - RNA, 19 nt, Artificial Sequence
  Description of Artificial Sequence: Synthetic oligonucleotide
  Antisense strand to SEQ ID NO: 2183002
cauuaucacggauacuugc

SEQ ID NO: 2183004 - RNA, 19 nt, Artificial Sequence
  Description of Artificial Sequence: Synthetic oligonucleotide
  Sense strand starting at position 2243 of SEQ ID NO: 1883290
gggacaaagagucggcuuu

SEQ ID NO: 2183005 - RNA, 19 nt, Artificial Sequence
  Description of Artificial Sequence: Synthetic oligonucleotide
  Antisense strand to SEQ ID NO: 2183004
aaagccgacucuuuguccc

SEQ ID NO: 2183006 - RNA, 19 nt, Artificial Sequence
  Description of Artificial Sequence: Synthetic oligonucleotide
  Sense strand starting at position 2245 of SEQ ID NO: 1883290
gacaaagagucggcuuugu

SEQ ID NO: 2183007 - RNA, 19 nt, Artificial Sequence
  Description of Artificial Sequence: Synthetic oligonucleotide
  Antisense strand to SEQ ID NO: 2183006
acaaagccgacucuuuguc

SEQ ID NO: 2183008 - RNA, 19 nt, Artificial Sequence
  Description of Artificial Sequence: Synthetic oligonucleotide
  Sense strand starting at position 2310 of SEQ ID NO: 1883290
aggagagguucugaaucau

SEQ ID NO: 2183009 - RNA, 19 nt, Artificial Sequence
  Description of Artificial Sequence: Synthetic oligonucleotide
  Antisense strand to SEQ ID NO: 2183008
augauucagaaccucuccu

SEQ ID NO: 2183010 - RNA, 19 nt, Artificial Sequence
  Description of Artificial Sequence: Synthetic oligonucleotide
  Sense strand starting at position 2316 of SEQ ID NO: 1883290
gguucugaaucaucacauu

SEQ ID NO: 2183011 - RNA, 19 nt, Artificial Sequence
  Description of Artificial Sequence: Synthetic oligonucleotide
  Antisense strand to SEQ ID NO: 2183010
aaugugaugauucagaacc

SEQ ID NO: 2183012 - RNA, 19 nt, Artificial Sequence
  Description of Artificial Sequence: Synthetic oligonucleotide
  Sense strand starting at position 2366 of SEQ ID NO: 1883290
ggaagugugugggccuaga

SEQ ID NO: 2183013 - RNA, 19 nt, Artificial Sequence
  Description of Artificial Sequence: Synthetic oligonucleotide
  Antisense strand to SEQ ID NO: 2183012
ucuaggcccacacacuucc

SEQ ID NO: 2183014 - RNA, 19 nt, Artificial Sequence
  Description of Artificial Sequence: Synthetic oligonucleotide
  Sense strand starting at position 2462 of SEQ ID NO: 1883290
gaccuagaagaaugucagu

SEQ ID NO: 2183015 - RNA, 19 nt, Artificial Sequence
  Description of Artificial Sequence: Synthetic oligonucleotide
  Antisense strand to SEQ ID NO: 2183014
acugacauucuucuagguc

SEQ ID NO: 2183016 - RNA, 19 nt, Artificial Sequence
  Description of Artificial Sequence: Synthetic oligonucleotide
  Sense strand starting at position 2467 of SEQ ID NO: 1883290
agaagaaugucagugugaa

SEQ ID NO: 2183017 - RNA, 19 nt, Artificial Sequence
  Description of Artificial Sequence: Synthetic oligonucleotide
  Antisense strand to SEQ ID NO: 2183016
uucacacugacauucuucu

SEQ ID NO: 2183018 - RNA, 19 nt, Artificial Sequence
  Description of Artificial Sequence: Synthetic oligonucleotide
  Sense strand starting at position 2468 of SEQ ID NO: 1883290
gaagaaugucagugugaag

SEQ ID NO: 2183019 - RNA, 19 nt, Artificial Sequence
  Description of Artificial Sequence: Synthetic oligonucleotide
  Antisense strand to SEQ ID NO: 2183018
cuucacacugacauucuuc

SEQ ID NO: 2183020 - RNA, 19 nt, Artificial Sequence
  Description of Artificial Sequence: Synthetic oligonucleotide
  Sense strand starting at position 2475 of SEQ ID NO: 1883290
gucagugugaagcauugga

SEQ ID NO: 2183021 - RNA, 19 nt, Artificial Sequence
  Description of Artificial Sequence: Synthetic oligonucleotide
  Antisense strand to SEQ ID NO: 2183020
uccaaugcuucacacugac

SEQ ID NO: 2183022 - RNA, 19 nt, Artificial Sequence
  Description of Artificial Sequence: Synthetic oligonucleotide
  Sense strand starting at position 2479 of SEQ ID NO: 1883290
gugugaagcauuggaguuu

SEQ ID NO: 2183023 - RNA, 19 nt, Artificial Sequence
  Description of Artificial Sequence: Synthetic oligonucleotide
  Antisense strand to SEQ ID NO: 2183022
aaacuccaaugcuucacac

SEQ ID NO: 2183024 - RNA, 19 nt, Artificial Sequence
  Description of Artificial Sequence: Synthetic oligonucleotide
  Sense strand starting at position 2549 of SEQ ID NO: 1883290
caguauguccuuggucuca

SEQ ID NO: 2183025 - RNA, 19 nt, Artificial Sequence
  Description of Artificial Sequence: Synthetic oligonucleotide
  Antisense strand to SEQ ID NO: 2183024
ugagaccaaggacauacug

SEQ ID NO: 2183026 - RNA, 19 nt, Artificial Sequence
  Description of Artificial Sequence: Synthetic oligonucleotide
  Sense strand starting at position 2734 of SEQ ID NO: 1883290
acugguuugcagugauuug

SEQ ID NO: 2183027 - RNA, 19 nt, Artificial Sequence
  Description of Artificial Sequence: Synthetic oligonucleotide
  Antisense strand to SEQ ID NO: 2183026
caaaucacugcaaaccagu

SEQ ID NO: 2183028 - RNA, 19 nt, Artificial Sequence
  Description of Artificial Sequence: Synthetic oligonucleotide
  Sense strand starting at position 2741 of SEQ ID NO: 1883290
ugcagugauuugguuuguu

SEQ ID NO: 2183029 - RNA, 19 nt, Artificial Sequence
  Description of Artificial Sequence: Synthetic oligonucleotide
  Antisense strand to SEQ ID NO: 2183028
aacaaaccaaaucacugca

SEQ ID NO: 2183030 - RNA, 19 nt, Artificial Sequence
  Description of Artificial Sequence: Synthetic oligonucleotide
  Sense strand starting at position 2830 of SEQ ID NO: 1883290
uucuuucuacuuggaagau

SEQ ID NO: 2183031 - RNA, 19 nt, Artificial Sequence
  Description of Artificial Sequence: Synthetic oligonucleotide
  Antisense strand to SEQ ID NO: 2183030
aucuuccaaguagaaagaa

SEQ ID NO: 2183032 - RNA, 19 nt, Artificial Sequence
  Description of Artificial Sequence: Synthetic oligonucleotide
  Sense strand starting at position 2908 of SEQ ID NO: 1883290
aguuuauguucuccuugga

SEQ ID NO: 2183033 - RNA, 19 nt, Artificial Sequence
  Description of Artificial Sequence: Synthetic oligonucleotide
  Antisense strand to SEQ ID NO: 2183032
uccaaggagaacauaaacu

SEQ ID NO: 2183034 - RNA, 19 nt, Artificial Sequence
  Description of Artificial Sequence: Synthetic oligonucleotide
  Sense strand starting at position 2911 of SEQ ID NO: 1883290
uuauguucuccuuggagac

SEQ ID NO: 2183035 - RNA, 19 nt, Artificial Sequence
  Description of Artificial Sequence: Synthetic oligonucleotide
  Antisense strand to SEQ ID NO: 2183034
gucuccaaggagaacauaa

SEQ ID NO: 2183036 - RNA, 19 nt, Artificial Sequence
  Description of Artificial Sequence: Synthetic oligonucleotide
  Sense strand starting at position 2912 of SEQ ID NO: 1883290
uauguucuccuuggagacu

SEQ ID NO: 2183037 - RNA, 19 nt, Artificial Sequence
  Description of Artificial Sequence: Synthetic oligonucleotide
  Antisense strand to SEQ ID NO: 2183036
agucuccaaggagaacaua

SEQ ID NO: 2183038 - RNA, 19 nt, Artificial Sequence
  Description of Artificial Sequence: Synthetic oligonucleotide
  Sense strand starting at position 3603 of SEQ ID NO: 1883290
ccgaguuuauguucuacuu

SEQ ID NO: 2183039 - RNA, 19 nt, Artificial Sequence
  Description of Artificial Sequence: Synthetic oligonucleotide
  Antisense strand to SEQ ID NO: 2183038
aaguagaacauaaacucgg

SEQ ID NO: 2183040 - RNA, 19 nt, Artificial Sequence
  Description of Artificial Sequence: Synthetic oligonucleotide
  Sense strand starting at position 3610 of SEQ ID NO: 1883290
uauguucuacuuggaagau

SEQ ID NO: 2183041 - RNA, 19 nt, Artificial Sequence
  Description of Artificial Sequence: Synthetic oligonucleotide
  Antisense strand to SEQ ID NO: 2183040
aucuuccaaguagaacaua

SEQ ID NO: 2183042 - RNA, 19 nt, Artificial Sequence
  Description of Artificial Sequence: Synthetic oligonucleotide
  Sense strand starting at position 3659 of SEQ ID NO: 1883290
cucuucuggugacugagau

SEQ ID NO: 2183043 - RNA, 19 nt, Artificial Sequence
  Description of Artificial Sequence: Synthetic oligonucleotide
  Antisense strand to SEQ ID NO: 2183042
aucucagucaccagaagag

SEQ ID NO: 2183044 - RNA, 19 nt, Artificial Sequence
  Description of Artificial Sequence: Synthetic oligonucleotide
  Sense strand starting at position 3690 of SEQ ID NO: 1883290
acguuagaauguuagauuu

SEQ ID NO: 2183045 - RNA, 19 nt, Artificial Sequence
  Description of Artificial Sequence: Synthetic oligonucleotide
  Antisense strand to SEQ ID NO: 2183044
aaaucuaacauucuaacgu

SEQ ID NO: 2183046 - RNA, 19 nt, Artificial Sequence
  Description of Artificial Sequence: Synthetic oligonucleotide
  Sense strand starting at position 3805 of SEQ ID NO: 1883290
ugaucugcuucugcagaau

SEQ ID NO: 2183047 - RNA, 19 nt, Artificial Sequence
  Description of Artificial Sequence: Synthetic oligonucleotide
  Antisense strand to SEQ ID NO: 2183046
auucugcagaagcagauca

SEQ ID NO: 2183048 - RNA, 19 nt, Artificial Sequence
  Description of Artificial Sequence: Synthetic oligonucleotide
  Sense strand starting at position 3808 of SEQ ID NO: 1883290
ucugcuucugcagaaucua

SEQ ID NO: 2183049 - RNA, 19 nt, Artificial Sequence
  Description of Artificial Sequence: Synthetic oligonucleotide
  Antisense strand to SEQ ID NO: 2183048
uagauucugcagaagcaga

SEQ ID NO: 2183050 - RNA, 19 nt, Artificial Sequence
  Description of Artificial Sequence: Synthetic oligonucleotide
  Sense strand starting at position 481 of SEQ ID NO: 1883291
gcccucuggccauggaaga

SEQ ID NO: 2183051 - RNA, 19 nt, Artificial Sequence
  Description of Artificial Sequence: Synthetic oligonucleotide
  Antisense strand to SEQ ID NO: 2183050
ucuuccauggccagagggc

SEQ ID NO: 2183052 - RNA, 19 nt, Artificial Sequence
  Description of Artificial Sequence: Synthetic oligonucleotide
  Sense strand starting at position 689 of SEQ ID NO: 1883291
ugcugucuccuccaugaga

SEQ ID NO: 2183053 - RNA, 19 nt, Artificial Sequence
  Description of Artificial Sequence: Synthetic oligonucleotide
  Antisense strand to SEQ ID NO: 2183052
ucucauggaggagacagca

SEQ ID NO: 2183054 - RNA, 19 nt, Artificial Sequence
  Description of Artificial Sequence: Synthetic oligonucleotide
  Sense strand starting at position 796 of SEQ ID NO: 1883291
acugaugggcuuugagauu

SEQ ID NO: 2183055 - RNA, 19 nt, Artificial Sequence
  Description of Artificial Sequence: Synthetic oligonucleotide
  Antisense strand to SEQ ID NO: 2183054
aaucucaaagcccaucagu

SEQ ID NO: 2183056 - RNA, 19 nt, Artificial Sequence
  Description of Artificial Sequence: Synthetic oligonucleotide
  Sense strand starting at position 805 of SEQ ID NO: 1883291
cuuugagauuuagaacacu

SEQ ID NO: 2183057 - RNA, 19 nt, Artificial Sequence
  Description of Artificial Sequence: Synthetic oligonucleotide
  Antisense strand to SEQ ID NO: 2183056
aguguucuaaaucucaaag

SEQ ID NO: 2183058 - RNA, 19 nt, Artificial Sequence
  Description of Artificial Sequence: Synthetic oligonucleotide
  Sense strand starting at position 871 of SEQ ID NO: 1883291
ugaucagcucaagauaggu

SEQ ID NO: 2183059 - RNA, 19 nt, Artificial Sequence
  Description of Artificial Sequence: Synthetic oligonucleotide
  Antisense strand to SEQ ID NO: 2183058
accuaucuugagcugauca

SEQ ID NO: 2183060 - RNA, 19 nt, Artificial Sequence
  Description of Artificial Sequence: Synthetic oligonucleotide
  Sense strand starting at position 879 of SEQ ID NO: 1883291
ucaagauaggucugagguu

SEQ ID NO: 2183061 - RNA, 19 nt, Artificial Sequence
  Description of Artificial Sequence: Synthetic oligonucleotide
  Antisense strand to SEQ ID NO: 2183060
aaccucagaccuaucuuga

SEQ ID NO: 2183062 - RNA, 19 nt, Artificial Sequence
  Description of Artificial Sequence: Synthetic oligonucleotide
  Sense strand starting at position 902 of SEQ ID NO: 1883291
cuggacaucaaguguguga

SEQ ID NO: 2183063 - RNA, 19 nt, Artificial Sequence
  Description of Artificial Sequence: Synthetic oligonucleotide
  Antisense strand to SEQ ID NO: 2183062
ucacacacuugauguccag

SEQ ID NO: 2183064 - RNA, 19 nt, Artificial Sequence
  Description of Artificial Sequence: Synthetic oligonucleotide
  Sense strand starting at position 904 of SEQ ID NO: 1883291
ggacaucaagugugugaca

SEQ ID NO: 2183065 - RNA, 19 nt, Artificial Sequence
  Description of Artificial Sequence: Synthetic oligonucleotide
  Antisense strand to SEQ ID NO: 2183064
ugucacacacuugaugucc

SEQ ID NO: 2183066 - RNA, 19 nt, Artificial Sequence
  Description of Artificial Sequence: Synthetic oligonucleotide
  Sense strand starting at position 1111 of SEQ ID NO: 1883291
ucaggaggccucugauguu

SEQ ID NO: 2183067 - RNA, 19 nt, Artificial Sequence
  Description of Artificial Sequence: Synthetic oligonucleotide
  Antisense strand to SEQ ID NO: 2183066
aacaucagaggccuccuga

SEQ ID NO: 2183068 - RNA, 19 nt, Artificial Sequence
  Description of Artificial Sequence: Synthetic oligonucleotide
  Sense strand starting at position 1118 of SEQ ID NO: 1883291
gccucugauguuugaagga

SEQ ID NO: 2183069 - RNA, 19 nt, Artificial Sequence
  Description of Artificial Sequence: Synthetic oligonucleotide
  Antisense strand to SEQ ID NO: 2183068
uccuucaaacaucagaggc

SEQ ID NO: 2183070 - RNA, 19 nt, Artificial Sequence
  Description of Artificial Sequence: Synthetic oligonucleotide
  Sense strand starting at position 1274 of SEQ ID NO: 1883291
cgacauuugccgcaagggu

SEQ ID NO: 2183071 - RNA, 19 nt, Artificial Sequence
  Description of Artificial Sequence: Synthetic oligonucleotide
  Antisense strand to SEQ ID NO: 2183070
acccuugcggcaaaugucg

SEQ ID NO: 2183072 - RNA, 19 nt, Artificial Sequence
  Description of Artificial Sequence: Synthetic oligonucleotide
  Sense strand starting at position 1325 of SEQ ID NO: 1883291
acagaaguucuaggagagu

SEQ ID NO: 2183073 - RNA, 19 nt, Artificial Sequence
  Description of Artificial Sequence: Synthetic oligonucleotide
  Antisense strand to SEQ ID NO: 2183072
acucuccuagaacuucugu

SEQ ID NO: 2183074 - RNA, 19 nt, Artificial Sequence
  Description of Artificial Sequence: Synthetic oligonucleotide
  Sense strand starting at position 1371 of SEQ ID NO: 1883291
ugguaauuaagucaggugu

SEQ ID NO: 2183075 - RNA, 19 nt, Artificial Sequence
  Description of Artificial Sequence: Synthetic oligonucleotide
  Antisense strand to SEQ ID NO: 2183074
acaccugacuuaauuacca

SEQ ID NO: 2183076 - RNA, 19 nt, Artificial Sequence
  Description of Artificial Sequence: Synthetic oligonucleotide
  Sense strand starting at position 1390 of SEQ ID NO: 1883291
cgugaugaauuacuaacaa

SEQ ID NO: 2183077 - RNA, 19 nt, Artificial Sequence
  Description of Artificial Sequence: Synthetic oligonucleotide
  Antisense strand to SEQ ID NO: 2183076
uuguuaguaauucaucacg

SEQ ID NO: 2183078 - RNA, 19 nt, Artificial Sequence
  Description of Artificial Sequence: Synthetic oligonucleotide
  Sense strand starting at position 1412 of SEQ ID NO: 1883291
ggcauucuguucuuaaacu

SEQ ID NO: 2183079 - RNA, 19 nt, Artificial Sequence
  Description of Artificial Sequence: Synthetic oligonucleotide
  Antisense strand to SEQ ID NO: 2183078
aguuuaagaacagaaugcc

SEQ ID NO: 2183080 - RNA, 19 nt, Artificial Sequence
  Description of Artificial Sequence: Synthetic oligonucleotide
  Sense strand starting at position 1491 of SEQ ID NO: 1883291
gcagaagcucuauaaguuc

SEQ ID NO: 2183081 - RNA, 19 nt, Artificial Sequence
  Description of Artificial Sequence: Synthetic oligonucleotide
  Antisense strand to SEQ ID NO: 2183080
gaacuuauagagcuucugc

SEQ ID NO: 2183082 - RNA, 19 nt, Artificial Sequence
  Description of Artificial Sequence: Synthetic oligonucleotide
  Sense strand starting at position 1500 of SEQ ID NO: 1883291
cuauaaguuccugagccuu

SEQ ID NO: 2183083 - RNA, 19 nt, Artificial Sequence
  Description of Artificial Sequence: Synthetic oligonucleotide
  Antisense strand to SEQ ID NO: 2183082
aaggcucaggaacuuauag

SEQ ID NO: 2183084 - RNA, 19 nt, Artificial Sequence
  Description of Artificial Sequence: Synthetic oligonucleotide
  Sense strand starting at position 1890 of SEQ ID NO: 1883291
ucggaaguuucugugaauu

SEQ ID NO: 2183085 - RNA, 19 nt, Artificial Sequence
  Description of Artificial Sequence: Synthetic oligonucleotide
  Antisense strand to SEQ ID NO: 2183084
aauucacagaaacuuccga

SEQ ID NO: 2183086 - RNA, 19 nt, Artificial Sequence
  Description of Artificial Sequence: Synthetic oligonucleotide
  Sense strand starting at position 1900 of SEQ ID NO: 1883291
cugugaauucucgagcucu

SEQ ID NO: 2183087 - RNA, 19 nt, Artificial Sequence
  Description of Artificial Sequence: Synthetic oligonucleotide
  Antisense strand to SEQ ID NO: 2183086
agagcucgagaauucacag

SEQ ID NO: 2183088 - RNA, 19 nt, Artificial Sequence
  Description of Artificial Sequence: Synthetic oligonucleotide
  Sense strand starting at position 1929 of SEQ ID NO: 1883291
cgggacuggacucaguauu

SEQ ID NO: 2183089 - RNA, 19 nt, Artificial Sequence
  Description of Artificial Sequence: Synthetic oligonucleotide
  Antisense strand to SEQ ID NO: 2183088
aauacugaguccagucccg

SEQ ID NO: 2183090 - RNA, 19 nt, Artificial Sequence
  Description of Artificial Sequence: Synthetic oligonucleotide
  Sense strand starting at position 2048 of SEQ ID NO: 1883291
uuacgugaguccucuauuu

SEQ ID NO: 2183091 - RNA, 19 nt, Artificial Sequence
  Description of Artificial Sequence: Synthetic oligonucleotide
  Antisense strand to SEQ ID NO: 2183090
aaauagaggacucacguaa

SEQ ID NO: 2183092 - RNA, 19 nt, Artificial Sequence
  Description of Artificial Sequence: Synthetic oligonucleotide
  Sense strand starting at position 2066 of SEQ ID NO: 1883291
uagucaucagaucguccua

SEQ ID NO: 2183093 - RNA, 19 nt, Artificial Sequence
  Description of Artificial Sequence: Synthetic oligonucleotide
  Antisense strand to SEQ ID NO: 2183092
uaggacgaucugaugacua

SEQ ID NO: 2183094 - RNA, 19 nt, Artificial Sequence
  Description of Artificial Sequence: Synthetic oligonucleotide
  Sense strand starting at position 2073 of SEQ ID NO: 1883291
cagaucguccuaugagaau

SEQ ID NO: 2183095 - RNA, 19 nt, Artificial Sequence
  Description of Artificial Sequence: Synthetic oligonucleotide
  Antisense strand to SEQ ID NO: 2183094
auucucauaggacgaucug

SEQ ID NO: 2183096 - RNA, 19 nt, Artificial Sequence
  Description of Artificial Sequence: Synthetic oligonucleotide
  Sense strand starting at position 2334 of SEQ ID NO: 1883291
caugcacguccuuggagau

SEQ ID NO: 2183097 - RNA, 19 nt, Artificial Sequence
  Description of Artificial Sequence: Synthetic oligonucleotide
  Antisense strand to SEQ ID NO: 2183096
aucuccaaggacgugcaug

SEQ ID NO: 2183098 - RNA, 19 nt, Artificial Sequence
  Description of Artificial Sequence: Synthetic oligonucleotide
  Sense strand starting at position 2335 of SEQ ID NO: 1883291
augcacguccuuggagauu

SEQ ID NO: 2183099 - RNA, 19 nt, Artificial Sequence
  Description of Artificial Sequence: Synthetic oligonucleotide
  Antisense strand to SEQ ID NO: 2183098
aaucuccaaggacgugcau

SEQ ID NO: 2183100 - RNA, 19 nt, Artificial Sequence
  Description of Artificial Sequence: Synthetic oligonucleotide
  Sense strand starting at position 2364 of SEQ ID NO: 1883291
aggagucauuccuuagcug

SEQ ID NO: 2183101 - RNA, 19 nt, Artificial Sequence
  Description of Artificial Sequence: Synthetic oligonucleotide
  Antisense strand to SEQ ID NO: 2183100
cagcuaaggaaugacuccu

SEQ ID NO: 2183102 - RNA, 19 nt, Artificial Sequence
  Description of Artificial Sequence: Synthetic oligonucleotide
  Sense strand starting at position 2365 of SEQ ID NO: 1883291
ggagucauuccuuagcugu

SEQ ID NO: 2183103 - RNA, 19 nt, Artificial Sequence
  Description of Artificial Sequence: Synthetic oligonucleotide
  Antisense strand to SEQ ID NO: 2183102
acagcuaaggaaugacucc

SEQ ID NO: 2183104 - RNA, 19 nt, Artificial Sequence
  Description of Artificial Sequence: Synthetic oligonucleotide
  Sense strand starting at position 2869 of SEQ ID NO: 1883291
ggagcuucgaccuggaaau

SEQ ID NO: 2183105 - RNA, 19 nt, Artificial Sequence
  Description of Artificial Sequence: Synthetic oligonucleotide
  Antisense strand to SEQ ID NO: 2183104
auuuccaggucgaagcucc

SEQ ID NO: 2183106 - RNA, 19 nt, Artificial Sequence
  Description of Artificial Sequence: Synthetic oligonucleotide
  Sense strand starting at position 2870 of SEQ ID NO: 1883291
gagcuucgaccuggaaaua

SEQ ID NO: 2183107 - RNA, 19 nt, Artificial Sequence
  Description of Artificial Sequence: Synthetic oligonucleotide
  Antisense strand to SEQ ID NO: 2183106
uauuuccaggucgaagcuc

SEQ ID NO: 2183108 - RNA, 19 nt, Artificial Sequence
  Description of Artificial Sequence: Synthetic oligonucleotide
  Sense strand starting at position 2871 of SEQ ID NO: 1883291
agcuucgaccuggaaauaa

SEQ ID NO: 2183109 - RNA, 19 nt, Artificial Sequence
  Description of Artificial Sequence: Synthetic oligonucleotide
  Antisense strand to SEQ ID NO: 2183108
uuauuuccaggucgaagcu

SEQ ID NO: 2183110 - RNA, 19 nt, Artificial Sequence
  Description of Artificial Sequence: Synthetic oligonucleotide
  Sense strand starting at position 2931 of SEQ ID NO: 1883291
ggucuuauccauuagguuu

SEQ ID NO: 2183111 - RNA, 19 nt, Artificial Sequence
  Description of Artificial Sequence: Synthetic oligonucleotide
  Antisense strand to SEQ ID NO: 2183110
aaaccuaauggauaagacc

SEQ ID NO: 2183112 - RNA, 19 nt, Artificial Sequence
  Description of Artificial Sequence: Synthetic oligonucleotide
  Sense strand starting at position 2943 of SEQ ID NO: 1883291
uagguuuaaugcguuauuu

SEQ ID NO: 2183113 - RNA, 19 nt, Artificial Sequence
  Description of Artificial Sequence: Synthetic oligonucleotide
  Antisense strand to SEQ ID NO: 2183112
aaauaacgcauuaaaccua

SEQ ID NO: 2183114 - RNA, 19 nt, Artificial Sequence
  Description of Artificial Sequence: Synthetic oligonucleotide
  Sense strand starting at position 2945 of SEQ ID NO: 1883291
gguuuaaugcguuauuuau

SEQ ID NO: 2183115 - RNA, 19 nt, Artificial Sequence
  Description of Artificial Sequence: Synthetic oligonucleotide
  Antisense strand to SEQ ID NO: 2183114
auaaauaacgcauuaaacc

SEQ ID NO: 2183116 - RNA, 19 nt, Artificial Sequence
  Description of Artificial Sequence: Synthetic oligonucleotide
  Sense strand starting at position 3160 of SEQ ID NO: 1883291
gggcuaaauuaauccugca

SEQ ID NO: 2183117 - RNA, 19 nt, Artificial Sequence
  Description of Artificial Sequence: Synthetic oligonucleotide
  Antisense strand to SEQ ID NO: 2183116
ugcaggauuaauuuagccc

SEQ ID NO: 2183118 - RNA, 19 nt, Artificial Sequence
  Description of Artificial Sequence: Synthetic oligonucleotide
  Sense strand starting at position 3447 of SEQ ID NO: 1883291
aaaggucagcagcagaauu

SEQ ID NO: 2183119 - RNA, 19 nt, Artificial Sequence
  Description of Artificial Sequence: Synthetic oligonucleotide
  Antisense strand to SEQ ID NO: 2183118
aauucugcugcugaccuuu

SEQ ID NO: 2183120 - RNA, 19 nt, Artificial Sequence
  Description of Artificial Sequence: Synthetic oligonucleotide
  Sense strand starting at position 3542 of SEQ ID NO: 1883291
gaauguuccaugggagcag

SEQ ID NO: 2183121 - RNA, 19 nt, Artificial Sequence
  Description of Artificial Sequence: Synthetic oligonucleotide
  Antisense strand to SEQ ID NO: 2183120
cugcucccauggaacauuc

SEQ ID NO: 2183122 - RNA, 19 nt, Artificial Sequence
  Description of Artificial Sequence: Synthetic oligonucleotide
  Sense strand starting at position 3563 of SEQ ID NO: 1883291
cagcguguccuugaaagga

SEQ ID NO: 2183123 - RNA, 19 nt, Artificial Sequence
  Description of Artificial Sequence: Synthetic oligonucleotide
  Antisense strand to SEQ ID NO: 2183122
uccuuucaaggacacgcug

SEQ ID NO: 2183124 - RNA, 19 nt, Artificial Sequence
  Description of Artificial Sequence: Synthetic oligonucleotide
  Sense strand starting at position 3744 of SEQ ID NO: 1883291
gccuuugaaccugguggaa

SEQ ID NO: 2183125 - RNA, 19 nt, Artificial Sequence
  Description of Artificial Sequence: Synthetic oligonucleotide
  Antisense strand to SEQ ID NO: 2183124
uuccaccagguucaaaggc

SEQ ID NO: 2183126 - RNA, 19 nt, Artificial Sequence
  Description of Artificial Sequence: Synthetic oligonucleotide
  Sense strand starting at position 3785 of SEQ ID NO: 1883291
agguuucacguaugcagaa

SEQ ID NO: 2183127 - RNA, 19 nt, Artificial Sequence
  Description of Artificial Sequence: Synthetic oligonucleotide
  Antisense strand to SEQ ID NO: 2183126
uucugcauacgugaaaccu

SEQ ID NO: 2183128 - RNA, 19 nt, Artificial Sequence
  Description of Artificial Sequence: Synthetic oligonucleotide
  Sense strand starting at position 3786 of SEQ ID NO: 1883291
gguuucacguaugcagaaa

SEQ ID NO: 2183129 - RNA, 19 nt, Artificial Sequence
  Description of Artificial Sequence: Synthetic oligonucleotide
  Antisense strand to SEQ ID NO: 2183128
uuucugcauacgugaaacc

SEQ ID NO: 2183130 - RNA, 19 nt, Artificial Sequence
  Description of Artificial Sequence: Synthetic oligonucleotide
  Sense strand starting at position 29 of SEQ ID NO: 1883292
ugagauaauccuggauucu

SEQ ID NO: 2183131 - RNA, 19 nt, Artificial Sequence
  Description of Artificial Sequence: Synthetic oligonucleotide
  Antisense strand to SEQ ID NO: 2183130
agaauccaggauuaucuca

SEQ ID NO: 2183132 - RNA, 19 nt, Artificial Sequence
  Description of Artificial Sequence: Synthetic oligonucleotide
  Sense strand starting at position 38 of SEQ ID NO: 1883292
ccuggauucuaaccuuagu

SEQ ID NO: 2183133 - RNA, 19 nt, Artificial Sequence
  Description of Artificial Sequence: Synthetic oligonucleotide
  Antisense strand to SEQ ID NO: 2183132
acuaagguuagaauccagg

SEQ ID NO: 2183134 - RNA, 19 nt, Artificial Sequence
  Description of Artificial Sequence: Synthetic oligonucleotide
  Sense strand starting at position 41 of SEQ ID NO: 1883292
ggauucuaaccuuagucuu

SEQ ID NO: 2183135 - RNA, 19 nt, Artificial Sequence
  Description of Artificial Sequence: Synthetic oligonucleotide
  Antisense strand to SEQ ID NO: 2183134
aagacuaagguuagaaucc

SEQ ID NO: 2183136 - RNA, 19 nt, Artificial Sequence
  Description of Artificial Sequence: Synthetic oligonucleotide
  Sense strand starting at position 51 of SEQ ID NO: 1883292
cuuagucuugcggcugagu

SEQ ID NO: 2183137 - RNA, 19 nt, Artificial Sequence
  Description of Artificial Sequence: Synthetic oligonucleotide
  Antisense strand to SEQ ID NO: 2183136
acucagccgcaagacuaag

SEQ ID NO: 2183138 - RNA, 19 nt, Artificial Sequence
  Description of Artificial Sequence: Synthetic oligonucleotide
  Sense strand starting at position 350 of SEQ ID NO: 1883292
agcugugaaacugggauaa

SEQ ID NO: 2183139 - RNA, 19 nt, Artificial Sequence
  Description of Artificial Sequence: Synthetic oligonucleotide
  Antisense strand to SEQ ID NO: 2183138
uuaucccaguuucacagcu

SEQ ID NO: 2183140 - RNA, 19 nt, Artificial Sequence
  Description of Artificial Sequence: Synthetic oligonucleotide
  Sense strand starting at position 369 of SEQ ID NO: 1883292
caaagcuuccuuuguagag

SEQ ID NO: 2183141 - RNA, 19 nt, Artificial Sequence
  Description of Artificial Sequence: Synthetic oligonucleotide
  Antisense strand to SEQ ID NO: 2183140
cucuacaaaggaagcuuug

SEQ ID NO: 2183142 - RNA, 19 nt, Artificial Sequence
  Description of Artificial Sequence: Synthetic oligonucleotide
  Sense strand starting at position 466 of SEQ ID NO: 1883292
ugcuucuuugaggaacuga

SEQ ID NO: 2183143 - RNA, 19 nt, Artificial Sequence
  Description of Artificial Sequence: Synthetic oligonucleotide
  Antisense strand to SEQ ID NO: 2183142
ucaguuccucaaagaagca

SEQ ID NO: 2183144 - RNA, 19 nt, Artificial Sequence
  Description of Artificial Sequence: Synthetic oligonucleotide
  Sense strand starting at position 503 of SEQ ID NO: 1883292
cauugugguguugaaagau

SEQ ID NO: 2183145 - RNA, 19 nt, Artificial Sequence
  Description of Artificial Sequence: Synthetic oligonucleotide
  Antisense strand to SEQ ID NO: 2183144
aucuuucaacaccacaaug

SEQ ID NO: 2183146 - RNA, 19 nt, Artificial Sequence
  Description of Artificial Sequence: Synthetic oligonucleotide
  Sense strand starting at position 592 of SEQ ID NO: 1883292
gcacuuuacugggugagga

SEQ ID NO: 2183147 - RNA, 19 nt, Artificial Sequence
  Description of Artificial Sequence: Synthetic oligonucleotide
  Antisense strand to SEQ ID NO: 2183146
uccucacccaguaaagugc

SEQ ID NO: 2183148 - RNA, 19 nt, Artificial Sequence
  Description of Artificial Sequence: Synthetic oligonucleotide
  Sense strand starting at position 593 of SEQ ID NO: 1883292
cacuuuacugggugaggaa

SEQ ID NO: 2183149 - RNA, 19 nt, Artificial Sequence
  Description of Artificial Sequence: Synthetic oligonucleotide
  Antisense strand to SEQ ID NO: 2183148
uuccucacccaguaaagug

SEQ ID NO: 2183150 - RNA, 19 nt, Artificial Sequence
  Description of Artificial Sequence: Synthetic oligonucleotide
  Sense strand starting at position 699 of SEQ ID NO: 1883292
gguccuggcauugauugua

SEQ ID NO: 2183151 - RNA, 19 nt, Artificial Sequence
  Description of Artificial Sequence: Synthetic oligonucleotide
  Antisense strand to SEQ ID NO: 2183150
uacaaucaaugccaggacc

SEQ ID NO: 2183152 - RNA, 19 nt, Artificial Sequence
  Description of Artificial Sequence: Synthetic oligonucleotide
  Sense strand starting at position 758 of SEQ ID NO: 1883292
acggguuaggaguaguaag

SEQ ID NO: 2183153 - RNA, 19 nt, Artificial Sequence
  Description of Artificial Sequence: Synthetic oligonucleotide
  Antisense strand to SEQ ID NO: 2183152
cuuacuacuccuaacccgu

SEQ ID NO: 2183154 - RNA, 19 nt, Artificial Sequence
  Description of Artificial Sequence: Synthetic oligonucleotide
  Sense strand starting at position 769 of SEQ ID NO: 1883292
guaguaagaguucaggaug

SEQ ID NO: 2183155 - RNA, 19 nt, Artificial Sequence
  Description of Artificial Sequence: Synthetic oligonucleotide
  Antisense strand to SEQ ID NO: 2183154
cauccugaacucuuacuac

SEQ ID NO: 2183156 - RNA, 19 nt, Artificial Sequence
  Description of Artificial Sequence: Synthetic oligonucleotide
  Sense strand starting at position 780 of SEQ ID NO: 1883292
ucaggaugauugccagguu

SEQ ID NO: 2183157 - RNA, 19 nt, Artificial Sequence
  Description of Artificial Sequence: Synthetic oligonucleotide
  Antisense strand to SEQ ID NO: 2183156
aaccuggcaaucauccuga

SEQ ID NO: 2183158 - RNA, 19 nt, Artificial Sequence
  Description of Artificial Sequence: Synthetic oligonucleotide
  Sense strand starting at position 802 of SEQ ID NO: 1883292
cgugaauaauggguccaua

SEQ ID NO: 2183159 - RNA, 19 nt, Artificial Sequence
  Description of Artificial Sequence: Synthetic oligonucleotide
  Antisense strand to SEQ ID NO: 2183158
uauggacccauuauucacg

SEQ ID NO: 2183160 - RNA, 19 nt, Artificial Sequence
  Description of Artificial Sequence: Synthetic oligonucleotide
  Sense strand starting at position 841 of SEQ ID NO: 1883292
guagaaugugaccaggugu

SEQ ID NO: 2183161 - RNA, 19 nt, Artificial Sequence
  Description of Artificial Sequence: Synthetic oligonucleotide
  Antisense strand to SEQ ID NO: 2183160
acaccuggucacauucuac

SEQ ID NO: 2183162 - RNA, 19 nt, Artificial Sequence
  Description of Artificial Sequence: Synthetic oligonucleotide
  Sense strand starting at position 1177 of SEQ ID NO: 1883292
guuguagggagagguugau

SEQ ID NO: 2183163 - RNA, 19 nt, Artificial Sequence
  Description of Artificial Sequence: Synthetic oligonucleotide
  Antisense strand to SEQ ID NO: 2183162
aucaaccucucccuacaac

SEQ ID NO: 2183164 - RNA, 19 nt, Artificial Sequence
  Description of Artificial Sequence: Synthetic oligonucleotide
  Sense strand starting at position 1186 of SEQ ID NO: 1883292
agagguugauucucaggua

SEQ ID NO: 2183165 - RNA, 19 nt, Artificial Sequence
  Description of Artificial Sequence: Synthetic oligonucleotide
  Antisense strand to SEQ ID NO: 2183164
uaccugagaaucaaccucu

SEQ ID NO: 2183166 - RNA, 19 nt, Artificial Sequence
  Description of Artificial Sequence: Synthetic oligonucleotide
  Sense strand starting at position 1244 of SEQ ID NO: 1883292
aauuaaguuccuggguuau

SEQ ID NO: 2183167 - RNA, 19 nt, Artificial Sequence
  Description of Artificial Sequence: Synthetic oligonucleotide
  Antisense strand to SEQ ID NO: 2183166
auaacccaggaacuuaauu

SEQ ID NO: 2183168 - RNA, 19 nt, Artificial Sequence
  Description of Artificial Sequence: Synthetic oligonucleotide
  Sense strand starting at position 2119 of SEQ ID NO: 1883292
cgauguauuagguaaggug

SEQ ID NO: 2183169 - RNA, 19 nt, Artificial Sequence
  Description of Artificial Sequence: Synthetic oligonucleotide
  Antisense strand to SEQ ID NO: 2183168
caccuuaccuaauacaucg

SEQ ID NO: 2183170 - RNA, 19 nt, Artificial Sequence
  Description of Artificial Sequence: Synthetic oligonucleotide
  Sense strand starting at position 2151 of SEQ ID NO: 1883292
ugccgucugucauuuaauu

SEQ ID NO: 2183171 - RNA, 19 nt, Artificial Sequence
  Description of Artificial Sequence: Synthetic oligonucleotide
  Antisense strand to SEQ ID NO: 2183170
aauuaaaugacagacggca

SEQ ID NO: 2183172 - RNA, 19 nt, Artificial Sequence
  Description of Artificial Sequence: Synthetic oligonucleotide
  Sense strand starting at position 2216 of SEQ ID NO: 1883292
ggccaagaauugucaagug

SEQ ID NO: 2183173 - RNA, 19 nt, Artificial Sequence
  Description of Artificial Sequence: Synthetic oligonucleotide
  Antisense strand to SEQ ID NO: 2183172
cacuugacaauucuuggcc

SEQ ID NO: 2183174 - RNA, 19 nt, Artificial Sequence
  Description of Artificial Sequence: Synthetic oligonucleotide
  Sense strand starting at position 2318 of SEQ ID NO: 1883292
guacucagaguguaaguga

SEQ ID NO: 2183175 - RNA, 19 nt, Artificial Sequence
  Description of Artificial Sequence: Synthetic oligonucleotide
  Antisense strand to SEQ ID NO: 2183174
ucacuuacacucugaguac

SEQ ID NO: 2183176 - RNA, 19 nt, Artificial Sequence
  Description of Artificial Sequence: Synthetic oligonucleotide
  Sense strand starting at position 2379 of SEQ ID NO: 1883292
auagcaucccauuggaaac

SEQ ID NO: 2183177 - RNA, 19 nt, Artificial Sequence
  Description of Artificial Sequence: Synthetic oligonucleotide
  Antisense strand to SEQ ID NO: 2183176
guuuccaaugggaugcuau

SEQ ID NO: 2183178 - RNA, 19 nt, Artificial Sequence
  Description of Artificial Sequence: Synthetic oligonucleotide
  Sense strand starting at position 2522 of SEQ ID NO: 1883292
ggugauggguuuccaaauc

SEQ ID NO: 2183179 - RNA, 19 nt, Artificial Sequence
  Description of Artificial Sequence: Synthetic oligonucleotide
  Antisense strand to SEQ ID NO: 2183178
gauuuggaaacccaucacc

SEQ ID NO: 2183180 - RNA, 19 nt, Artificial Sequence
  Description of Artificial Sequence: Synthetic oligonucleotide
  Sense strand starting at position 2704 of SEQ ID NO: 1883292
ugggcaaccuucuuccaga

SEQ ID NO: 2183181 - RNA, 19 nt, Artificial Sequence
  Description of Artificial Sequence: Synthetic oligonucleotide
  Antisense strand to SEQ ID NO: 2183180
ucuggaagaagguugccca

SEQ ID NO: 2183182 - RNA, 19 nt, Artificial Sequence
  Description of Artificial Sequence: Synthetic oligonucleotide
  Sense strand starting at position 3106 of SEQ ID NO: 1883292
uacagaguuugcuuagaga

SEQ ID NO: 2183183 - RNA, 19 nt, Artificial Sequence
  Description of Artificial Sequence: Synthetic oligonucleotide
  Antisense strand to SEQ ID NO: 2183182
ucucuaagcaaacucugua

SEQ ID NO: 2183184 - RNA, 19 nt, Artificial Sequence
  Description of Artificial Sequence: Synthetic oligonucleotide
  Sense strand starting at position 3170 of SEQ ID NO: 1883292
ucauuaugccgagaccuag

SEQ ID NO: 2183185 - RNA, 19 nt, Artificial Sequence
  Description of Artificial Sequence: Synthetic oligonucleotide
  Antisense strand to SEQ ID NO: 2183184
cuaggucucggcauaauga

SEQ ID NO: 2183186 - RNA, 19 nt, Artificial Sequence
  Description of Artificial Sequence: Synthetic oligonucleotide
  Sense strand starting at position 3190 of SEQ ID NO: 1883292
gagucucuucuggacucaa

SEQ ID NO: 2183187 - RNA, 19 nt, Artificial Sequence
  Description of Artificial Sequence: Synthetic oligonucleotide
  Antisense strand to SEQ ID NO: 2183186
uugaguccagaagagacuc

SEQ ID NO: 2183188 - RNA, 19 nt, Artificial Sequence
  Description of Artificial Sequence: Synthetic oligonucleotide
  Sense strand starting at position 3201 of SEQ ID NO: 1883292
ggacucaaaugugugcaaa

SEQ ID NO: 2183189 - RNA, 19 nt, Artificial Sequence
  Description of Artificial Sequence: Synthetic oligonucleotide
  Antisense strand to SEQ ID NO: 2183188
uuugcacacauuugagucc

SEQ ID NO: 2183190 - RNA, 19 nt, Artificial Sequence
  Description of Artificial Sequence: Synthetic oligonucleotide
  Sense strand starting at position 3238 of SEQ ID NO: 1883292
ggaaaccagccauaguuau

SEQ ID NO: 2183191 - RNA, 19 nt, Artificial Sequence
  Description of Artificial Sequence: Synthetic oligonucleotide
  Antisense strand to SEQ ID NO: 2183190
auaacuauggcugguuucc

SEQ ID NO: 2183192 - RNA, 19 nt, Artificial Sequence
  Description of Artificial Sequence: Synthetic oligonucleotide
  Sense strand starting at position 3273 of SEQ ID NO: 1883292
cugugagcacauuauuaaa

SEQ ID NO: 2183193 - RNA, 19 nt, Artificial Sequence
  Description of Artificial Sequence: Synthetic oligonucleotide
  Antisense strand to SEQ ID NO: 2183192
uuuaauaaugugcucacag

SEQ ID NO: 2183194 - RNA, 19 nt, Artificial Sequence
  Description of Artificial Sequence: Synthetic oligonucleotide
  Sense strand starting at position 3332 of SEQ ID NO: 1883292
gaguucugauuaguaaauu

SEQ ID NO: 2183195 - RNA, 19 nt, Artificial Sequence
  Description of Artificial Sequence: Synthetic oligonucleotide
  Antisense strand to SEQ ID NO: 2183194
aauuuacuaaucagaacuc

SEQ ID NO: 2183196 - RNA, 19 nt, Artificial Sequence
  Description of Artificial Sequence: Synthetic oligonucleotide
  Sense strand starting at position 3365 of SEQ ID NO: 1883292
uguguucuuagugaucaaa

SEQ ID NO: 2183197 - RNA, 19 nt, Artificial Sequence
  Description of Artificial Sequence: Synthetic oligonucleotide
  Antisense strand to SEQ ID NO: 2183196
uuugaucacuaagaacaca

SEQ ID NO: 2183198 - RNA, 19 nt, Artificial Sequence
  Description of Artificial Sequence: Synthetic oligonucleotide
  Sense strand starting at position 3386 of SEQ ID NO: 1883292
cuagauugucuccaaagca

SEQ ID NO: 2183199 - RNA, 19 nt, Artificial Sequence
  Description of Artificial Sequence: Synthetic oligonucleotide
  Antisense strand to SEQ ID NO: 2183198
ugcuuuggagacaaucuag

SEQ ID NO: 2183200 - RNA, 19 nt, Artificial Sequence
  Description of Artificial Sequence: Synthetic oligonucleotide
  Sense strand starting at position 3438 of SEQ ID NO: 1883292
cugcucaugcucuagaauu

SEQ ID NO: 2183201 - RNA, 19 nt, Artificial Sequence
  Description of Artificial Sequence: Synthetic oligonucleotide
  Antisense strand to SEQ ID NO: 2183200
aauucuagagcaugagcag

SEQ ID NO: 2183202 - RNA, 19 nt, Artificial Sequence
  Description of Artificial Sequence: Synthetic oligonucleotide
  Sense strand starting at position 3564 of SEQ ID NO: 1883292
uugcaaugauguuuagaug

SEQ ID NO: 2183203 - RNA, 19 nt, Artificial Sequence
  Description of Artificial Sequence: Synthetic oligonucleotide
  Antisense strand to SEQ ID NO: 2183202
caucuaaacaucauugcaa

SEQ ID NO: 2183204 - RNA, 19 nt, Artificial Sequence
  Description of Artificial Sequence: Synthetic oligonucleotide
  Sense strand starting at position 3565 of SEQ ID NO: 1883292
ugcaaugauguuuagaugu

SEQ ID NO: 2183205 - RNA, 19 nt, Artificial Sequence
  Description of Artificial Sequence: Synthetic oligonucleotide
  Antisense strand to SEQ ID NO: 2183204
acaucuaaacaucauugca

SEQ ID NO: 2183206 - RNA, 19 nt, Artificial Sequence
  Description of Artificial Sequence: Synthetic oligonucleotide
  Sense strand starting at position 3694 of SEQ ID NO: 1883292
agagcuaguguguaauaga

SEQ ID NO: 2183207 - RNA, 19 nt, Artificial Sequence
  Description of Artificial Sequence: Synthetic oligonucleotide
  Antisense strand to SEQ ID NO: 2183206
ucuauuacacacuagcucu

SEQ ID NO: 2183208 - RNA, 19 nt, Artificial Sequence
  Description of Artificial Sequence: Synthetic oligonucleotide
  Sense strand starting at position 3703 of SEQ ID NO: 1883292
guguaauagagcuaagauu

SEQ ID NO: 2183209 - RNA, 19 nt, Artificial Sequence
  Description of Artificial Sequence: Synthetic oligonucleotide
  Antisense strand to SEQ ID NO: 2183208
aaucuuagcucuauuacac

SEQ ID NO: 2183210 - RNA, 19 nt, Artificial Sequence
  Description of Artificial Sequence: Synthetic oligonucleotide
  Sense strand starting at position 341 of SEQ ID NO: 1883293
aggcauuacuugguagaug

SEQ ID NO: 2183211 - RNA, 19 nt, Artificial Sequence
  Description of Artificial Sequence: Synthetic oligonucleotide
  Antisense strand to SEQ ID NO: 2183210
caucuaccaaguaaugccu

SEQ ID NO: 2183212 - RNA, 19 nt, Artificial Sequence
  Description of Artificial Sequence: Synthetic oligonucleotide
  Sense strand starting at position 549 of SEQ ID NO: 1883293
auauucuuguaagugaaug

SEQ ID NO: 2183213 - RNA, 19 nt, Artificial Sequence
  Description of Artificial Sequence: Synthetic oligonucleotide
  Antisense strand to SEQ ID NO: 2183212
cauucacuuacaagaauau

SEQ ID NO: 2183214 - RNA, 19 nt, Artificial Sequence
  Description of Artificial Sequence: Synthetic oligonucleotide
  Sense strand starting at position 554 of SEQ ID NO: 1883293
cuuguaagugaaugaaaga

SEQ ID NO: 2183215 - RNA, 19 nt, Artificial Sequence
  Description of Artificial Sequence: Synthetic oligonucleotide
  Antisense strand to SEQ ID NO: 2183214
ucuuucauucacuuacaag

SEQ ID NO: 2183216 - RNA, 19 nt, Artificial Sequence
  Description of Artificial Sequence: Synthetic oligonucleotide
  Sense strand starting at position 570 of SEQ ID NO: 1883293
agaauaaaugcaugcagga

SEQ ID NO: 2183217 - RNA, 19 nt, Artificial Sequence
  Description of Artificial Sequence: Synthetic oligonucleotide
  Antisense strand to SEQ ID NO: 2183216
uccugcaugcauuuauucu

SEQ ID NO: 2183218 - RNA, 19 nt, Artificial Sequence
  Description of Artificial Sequence: Synthetic oligonucleotide
  Sense strand starting at position 585 of SEQ ID NO: 1883293
aggaaaggcugccuugaau

SEQ ID NO: 2183219 - RNA, 19 nt, Artificial Sequence
  Description of Artificial Sequence: Synthetic oligonucleotide
  Antisense strand to SEQ ID NO: 2183218
auucaaggcagccuuuccu

SEQ ID NO: 2183220 - RNA, 19 nt, Artificial Sequence
  Description of Artificial Sequence: Synthetic oligonucleotide
  Sense strand starting at position 674 of SEQ ID NO: 1883293
gcucuaguaggagaaguuu

SEQ ID NO: 2183221 - RNA, 19 nt, Artificial Sequence
  Description of Artificial Sequence: Synthetic oligonucleotide
  Antisense strand to SEQ ID NO: 2183220
aaacuucuccuacuagagc

SEQ ID NO: 2183222 - RNA, 19 nt, Artificial Sequence
  Description of Artificial Sequence: Synthetic oligonucleotide
  Sense strand starting at position 875 of SEQ ID NO: 1883293
guucuccagugauccuaau

SEQ ID NO: 2183223 - RNA, 19 nt, Artificial Sequence
  Description of Artificial Sequence: Synthetic oligonucleotide
  Antisense strand to SEQ ID NO: 2183222
auuaggaucacuggagaac

SEQ ID NO: 2183224 - RNA, 19 nt, Artificial Sequence
  Description of Artificial Sequence: Synthetic oligonucleotide
  Sense strand starting at position 1026 of SEQ ID NO: 1883293
auuauaggucugggaaugu

SEQ ID NO: 2183225 - RNA, 19 nt, Artificial Sequence
  Description of Artificial Sequence: Synthetic oligonucleotide
  Antisense strand to SEQ ID NO: 2183224
acauucccagaccuauaau

SEQ ID NO: 2183226 - RNA, 19 nt, Artificial Sequence
  Description of Artificial Sequence: Synthetic oligonucleotide
  Sense strand starting at position 1039 of SEQ ID NO: 1883293
gaauguagguuuguucuga

SEQ ID NO: 2183227 - RNA, 19 nt, Artificial Sequence
  Description of Artificial Sequence: Synthetic oligonucleotide
  Antisense strand to SEQ ID NO: 2183226
ucagaacaaaccuacauuc

SEQ ID NO: 2183228 - RNA, 19 nt, Artificial Sequence
  Description of Artificial Sequence: Synthetic oligonucleotide
  Sense strand starting at position 1040 of SEQ ID NO: 1883293
aauguagguuuguucugaa

SEQ ID NO: 2183229 - RNA, 19 nt, Artificial Sequence
  Description of Artificial Sequence: Synthetic oligonucleotide
  Antisense strand to SEQ ID NO: 2183228
uucagaacaaaccuacauu

SEQ ID NO: 2183230 - RNA, 19 nt, Artificial Sequence
  Description of Artificial Sequence: Synthetic oligonucleotide
  Sense strand starting at position 1048 of SEQ ID NO: 1883293
uuuguucugaaaggaaaug

SEQ ID NO: 2183231 - RNA, 19 nt, Artificial Sequence
  Description of Artificial Sequence: Synthetic oligonucleotide
  Antisense strand to SEQ ID NO: 2183230
cauuuccuuucagaacaaa

SEQ ID NO: 2183232 - RNA, 19 nt, Artificial Sequence
  Description of Artificial Sequence: Synthetic oligonucleotide
  Sense strand starting at position 1065 of SEQ ID NO: 1883293
ugagaagugucagcaaaua

SEQ ID NO: 2183233 - RNA, 19 nt, Artificial Sequence
  Description of Artificial Sequence: Synthetic oligonucleotide
  Antisense strand to SEQ ID NO: 2183232
uauuugcugacacuucuca

SEQ ID NO: 2183234 - RNA, 19 nt, Artificial Sequence
  Description of Artificial Sequence: Synthetic oligonucleotide
  Sense strand starting at position 1113 of SEQ ID NO: 1883293
cgugaaauccucuaagguc

SEQ ID NO: 2183235 - RNA, 19 nt, Artificial Sequence
  Description of Artificial Sequence: Synthetic oligonucleotide
  Antisense strand to SEQ ID NO: 2183234
gaccuuagaggauuucacg

SEQ ID NO: 2183236 - RNA, 19 nt, Artificial Sequence
  Description of Artificial Sequence: Synthetic oligonucleotide
  Sense strand starting at position 1121 of SEQ ID NO: 1883293
ccucuaaggucagucacau

SEQ ID NO: 2183237 - RNA, 19 nt, Artificial Sequence
  Description of Artificial Sequence: Synthetic oligonucleotide
  Antisense strand to SEQ ID NO: 2183236
augugacugaccuuagagg

SEQ ID NO: 2183238 - RNA, 19 nt, Artificial Sequence
  Description of Artificial Sequence: Synthetic oligonucleotide
  Sense strand starting at position 1191 of SEQ ID NO: 1883293
gagccauaagacugcaagu

SEQ ID NO: 2183239 - RNA, 19 nt, Artificial Sequence
  Description of Artificial Sequence: Synthetic oligonucleotide
  Antisense strand to SEQ ID NO: 2183238
acuugcagucuuauggcuc

SEQ ID NO: 2183240 - RNA, 19 nt, Artificial Sequence
  Description of Artificial Sequence: Synthetic oligonucleotide
  Sense strand starting at position 1193 of SEQ ID NO: 1883293
gccauaagacugcaaguua

SEQ ID NO: 2183241 - RNA, 19 nt, Artificial Sequence
  Description of Artificial Sequence: Synthetic oligonucleotide
  Antisense strand to SEQ ID NO: 2183240
uaacuugcagucuuauggc

SEQ ID NO: 2183242 - RNA, 19 nt, Artificial Sequence
  Description of Artificial Sequence: Synthetic oligonucleotide
  Sense strand starting at position 2187 of SEQ ID NO: 1883293
uaaugacugugucucaaag

SEQ ID NO: 2183243 - RNA, 19 nt, Artificial Sequence
  Description of Artificial Sequence: Synthetic oligonucleotide
  Antisense strand to SEQ ID NO: 2183242
cuuugagacacagucauua

SEQ ID NO: 2183244 - RNA, 19 nt, Artificial Sequence
  Description of Artificial Sequence: Synthetic oligonucleotide
  Sense strand starting at position 2220 of SEQ ID NO: 1883293
auaaaugagcaauguguuu

SEQ ID NO: 2183245 - RNA, 19 nt, Artificial Sequence
  Description of Artificial Sequence: Synthetic oligonucleotide
  Antisense strand to SEQ ID NO: 2183244
aaacacauugcucauuuau

SEQ ID NO: 2183246 - RNA, 19 nt, Artificial Sequence
  Description of Artificial Sequence: Synthetic oligonucleotide
  Sense strand starting at position 2246 of SEQ ID NO: 1883293
acaguaucggugagugagu

SEQ ID NO: 2183247 - RNA, 19 nt, Artificial Sequence
  Description of Artificial Sequence: Synthetic oligonucleotide
  Antisense strand to SEQ ID NO: 2183246
acucacucaccgauacugu

SEQ ID NO: 2183248 - RNA, 19 nt, Artificial Sequence
  Description of Artificial Sequence: Synthetic oligonucleotide
  Sense strand starting at position 2274 of SEQ ID NO: 1883293
uuugaacugguuuaucagu

SEQ ID NO: 2183249 - RNA, 19 nt, Artificial Sequence
  Description of Artificial Sequence: Synthetic oligonucleotide
  Antisense strand to SEQ ID NO: 2183248
acugauaaaccaguucaaa

SEQ ID NO: 2183250 - RNA, 19 nt, Artificial Sequence
  Description of Artificial Sequence: Synthetic oligonucleotide
  Sense strand starting at position 2279 of SEQ ID NO: 1883293
acugguuuaucaguuccau

SEQ ID NO: 2183251 - RNA, 19 nt, Artificial Sequence
  Description of Artificial Sequence: Synthetic oligonucleotide
  Antisense strand to SEQ ID NO: 2183250
auggaacugauaaaccagu

SEQ ID NO: 2183252 - RNA, 19 nt, Artificial Sequence
  Description of Artificial Sequence: Synthetic oligonucleotide
  Sense strand starting at position 2291 of SEQ ID NO: 1883293
guuccaucgcaugcaguau

SEQ ID NO: 2183253 - RNA, 19 nt, Artificial Sequence
  Description of Artificial Sequence: Synthetic oligonucleotide
  Antisense strand to SEQ ID NO: 2183252
auacugcaugcgauggaac

SEQ ID NO: 2183254 - RNA, 19 nt, Artificial Sequence
  Description of Artificial Sequence: Synthetic oligonucleotide
  Sense strand starting at position 2437 of SEQ ID NO: 1883293
agcacuucugacugaaaga

SEQ ID NO: 2183255 - RNA, 19 nt, Artificial Sequence
  Description of Artificial Sequence: Synthetic oligonucleotide
  Antisense strand to SEQ ID NO: 2183254
ucuuucagucagaagugcu

SEQ ID NO: 2183256 - RNA, 19 nt, Artificial Sequence
  Description of Artificial Sequence: Synthetic oligonucleotide
  Sense strand starting at position 2651 of SEQ ID NO: 1883293
ggaccugagcuuugcaaac

SEQ ID NO: 2183257 - RNA, 19 nt, Artificial Sequence
  Description of Artificial Sequence: Synthetic oligonucleotide
  Antisense strand to SEQ ID NO: 2183256
guuugcaaagcucaggucc

SEQ ID NO: 2183258 - RNA, 19 nt, Artificial Sequence
  Description of Artificial Sequence: Synthetic oligonucleotide
  Sense strand starting at position 3110 of SEQ ID NO: 1883293
gucucuuggccugagaaca

SEQ ID NO: 2183259 - RNA, 19 nt, Artificial Sequence
  Description of Artificial Sequence: Synthetic oligonucleotide
  Antisense strand to SEQ ID NO: 2183258
uguucucaggccaagagac

SEQ ID NO: 2183260 - RNA, 19 nt, Artificial Sequence
  Description of Artificial Sequence: Synthetic oligonucleotide
  Sense strand starting at position 3330 of SEQ ID NO: 1883293
ucccuugugcuugaugaga

SEQ ID NO: 2183261 - RNA, 19 nt, Artificial Sequence
  Description of Artificial Sequence: Synthetic oligonucleotide
  Antisense strand to SEQ ID NO: 2183260
ucucaucaagcacaaggga

SEQ ID NO: 2183262 - RNA, 19 nt, Artificial Sequence
  Description of Artificial Sequence: Synthetic oligonucleotide
  Sense strand starting at position 3404 of SEQ ID NO: 1883293
aggcauugaggcuggaaca

SEQ ID NO: 2183263 - RNA, 19 nt, Artificial Sequence
  Description of Artificial Sequence: Synthetic oligonucleotide
  Antisense strand to SEQ ID NO: 2183262
uguuccagccucaaugccu

SEQ ID NO: 2183264 - RNA, 19 nt, Artificial Sequence
  Description of Artificial Sequence: Synthetic oligonucleotide
  Sense strand starting at position 3517 of SEQ ID NO: 1883293
ccagcaugucacugagaca

SEQ ID NO: 2183265 - RNA, 19 nt, Artificial Sequence
  Description of Artificial Sequence: Synthetic oligonucleotide
  Antisense strand to SEQ ID NO: 2183264
ugucucagugacaugcugg

SEQ ID NO: 2183266 - RNA, 19 nt, Artificial Sequence
  Description of Artificial Sequence: Synthetic oligonucleotide
  Sense strand starting at position 3566 of SEQ ID NO: 1883293
ucggguuaccuugauguua

SEQ ID NO: 2183267 - RNA, 19 nt, Artificial Sequence
  Description of Artificial Sequence: Synthetic oligonucleotide
  Antisense strand to SEQ ID NO: 2183266
uaacaucaagguaacccga

SEQ ID NO: 2183268 - RNA, 19 nt, Artificial Sequence
  Description of Artificial Sequence: Synthetic oligonucleotide
  Sense strand starting at position 3664 of SEQ ID NO: 1883293
cugggaacaccuugauugu

SEQ ID NO: 2183269 - RNA, 19 nt, Artificial Sequence
  Description of Artificial Sequence: Synthetic oligonucleotide
  Antisense strand to SEQ ID NO: 2183268
acaaucaagguguucccag

SEQ ID NO: 2183270 - RNA, 19 nt, Artificial Sequence
  Description of Artificial Sequence: Synthetic oligonucleotide
  Sense strand starting at position 3681 of SEQ ID NO: 1883293
guagguauucauggaggca

SEQ ID NO: 2183271 - RNA, 19 nt, Artificial Sequence
  Description of Artificial Sequence: Synthetic oligonucleotide
  Antisense strand to SEQ ID NO: 2183270
ugccuccaugaauaccuac

SEQ ID NO: 2183272 - RNA, 19 nt, Artificial Sequence
  Description of Artificial Sequence: Synthetic oligonucleotide
  Sense strand starting at position 3684 of SEQ ID NO: 1883293
gguauucauggaggcacaa

SEQ ID NO: 2183273 - RNA, 19 nt, Artificial Sequence
  Description of Artificial Sequence: Synthetic oligonucleotide
  Antisense strand to SEQ ID NO: 2183272
uugugccuccaugaauacc

SEQ ID NO: 2183274 - RNA, 19 nt, Artificial Sequence
  Description of Artificial Sequence: Synthetic oligonucleotide
  Sense strand starting at position 3714 of SEQ ID NO: 1883293
ggagaaaggcaauggugua

SEQ ID NO: 2183275 - RNA, 19 nt, Artificial Sequence
  Description of Artificial Sequence: Synthetic oligonucleotide
  Antisense strand to SEQ ID NO: 2183274
uacaccauugccuuucucc

SEQ ID NO: 2183276 - RNA, 19 nt, Artificial Sequence
  Description of Artificial Sequence: Synthetic oligonucleotide
  Sense strand starting at position 3715 of SEQ ID NO: 1883293
gagaaaggcaaugguguau

SEQ ID NO: 2183277 - RNA, 19 nt, Artificial Sequence
  Description of Artificial Sequence: Synthetic oligonucleotide
  Antisense strand to SEQ ID NO: 2183276
auacaccauugccuuucuc

SEQ ID NO: 2183278 - RNA, 19 nt, Artificial Sequence
  Description of Artificial Sequence: Synthetic oligonucleotide
  Sense strand starting at position 3742 of SEQ ID NO: 1883293
cugaauaggacuugacagu

SEQ ID NO: 2183279 - RNA, 19 nt, Artificial Sequence
  Description of Artificial Sequence: Synthetic oligonucleotide
  Antisense strand to SEQ ID NO: 2183278
acugucaaguccuauucag

SEQ ID NO: 2183280 - RNA, 19 nt, Artificial Sequence
  Description of Artificial Sequence: Synthetic oligonucleotide
  Sense strand starting at position 3864 of SEQ ID NO: 1883293
uggugaguuccucaugguc

SEQ ID NO: 2183281 - RNA, 19 nt, Artificial Sequence
  Description of Artificial Sequence: Synthetic oligonucleotide
  Antisense strand to SEQ ID NO: 2183280
gaccaugaggaacucacca

SEQ ID NO: 2183282 - RNA, 19 nt, Artificial Sequence
  Description of Artificial Sequence: Synthetic oligonucleotide
  Sense strand starting at position 3867 of SEQ ID NO: 1883293
ugaguuccucauggucaca

SEQ ID NO: 2183283 - RNA, 19 nt, Artificial Sequence
  Description of Artificial Sequence: Synthetic oligonucleotide
  Antisense strand to SEQ ID NO: 2183282
ugugaccaugaggaacuca

SEQ ID NO: 2183284 - RNA, 19 nt, Artificial Sequence
  Description of Artificial Sequence: Synthetic oligonucleotide
  Sense strand starting at position 3869 of SEQ ID NO: 1883293
aguuccucauggucacaua

SEQ ID NO: 2183285 - RNA, 19 nt, Artificial Sequence
  Description of Artificial Sequence: Synthetic oligonucleotide
  Antisense strand to SEQ ID NO: 2183284
uaugugaccaugaggaacu

SEQ ID NO: 2183286 - RNA, 19 nt, Artificial Sequence
  Description of Artificial Sequence: Synthetic oligonucleotide
  Sense strand starting at position 3885 of SEQ ID NO: 1883293
auagcuaaguguuuagaag

SEQ ID NO: 2183287 - RNA, 19 nt, Artificial Sequence
  Description of Artificial Sequence: Synthetic oligonucleotide
  Antisense strand to SEQ ID NO: 2183286
cuucuaaacacuuagcuau

SEQ ID NO: 2183288 - RNA, 19 nt, Artificial Sequence
  Description of Artificial Sequence: Synthetic oligonucleotide
  Sense strand starting at position 3962 of SEQ ID NO: 1883293
aucucauaugcagaugguu

SEQ ID NO: 2183289 - RNA, 19 nt, Artificial Sequence
  Description of Artificial Sequence: Synthetic oligonucleotide
  Antisense strand to SEQ ID NO: 2183288
aaccaucugcauaugagau

SEQ ID NO: 2183290 - RNA, 19 nt, Artificial Sequence
  Description of Artificial Sequence: Synthetic oligonucleotide
  Sense strand starting at position 12 of SEQ ID NO: 1883294
uaugaaaucgcauguaucu

SEQ ID NO: 2183291 - RNA, 19 nt, Artificial Sequence
  Description of Artificial Sequence: Synthetic oligonucleotide
  Antisense strand to SEQ ID NO: 2183290
agauacaugcgauuucaua

SEQ ID NO: 2183292 - RNA, 19 nt, Artificial Sequence
  Description of Artificial Sequence: Synthetic oligonucleotide
  Sense strand starting at position 21 of SEQ ID NO: 1883294
gcauguaucucucauuguc

SEQ ID NO: 2183293 - RNA, 19 nt, Artificial Sequence
  Description of Artificial Sequence: Synthetic oligonucleotide
  Antisense strand to SEQ ID NO: 2183292
gacaaugagagauacaugc

SEQ ID NO: 2183294 - RNA, 19 nt, Artificial Sequence
  Description of Artificial Sequence: Synthetic oligonucleotide
  Sense strand starting at position 1718 of SEQ ID NO: 1883294
gcgguuauuccaggagcuc

SEQ ID NO: 2183295 - RNA, 19 nt, Artificial Sequence
  Description of Artificial Sequence: Synthetic oligonucleotide
  Antisense strand to SEQ ID NO: 2183294
gagcuccuggaauaaccgc

SEQ ID NO: 2183296 - RNA, 19 nt, Artificial Sequence
  Description of Artificial Sequence: Synthetic oligonucleotide
  Sense strand starting at position 1719 of SEQ ID NO: 1883294
cgguuauuccaggagcuca

SEQ ID NO: 2183297 - RNA, 19 nt, Artificial Sequence
  Description of Artificial Sequence: Synthetic oligonucleotide
  Antisense strand to SEQ ID NO: 2183296
ugagcuccuggaauaaccg

SEQ ID NO: 2183298 - RNA, 19 nt, Artificial Sequence
  Description of Artificial Sequence: Synthetic oligonucleotide
  Sense strand starting at position 2271 of SEQ ID NO: 1883294
guugcaacugcgugacuua

SEQ ID NO: 2183299 - RNA, 19 nt, Artificial Sequence
  Description of Artificial Sequence: Synthetic oligonucleotide
  Antisense strand to SEQ ID NO: 2183298
uaagucacgcaguugcaac

SEQ ID NO: 2183300 - RNA, 19 nt, Artificial Sequence
  Description of Artificial Sequence: Synthetic oligonucleotide
  Sense strand starting at position 2319 of SEQ ID NO: 1883294
ccgcgauaguagucacgga

SEQ ID NO: 2183301 - RNA, 19 nt, Artificial Sequence
  Description of Artificial Sequence: Synthetic oligonucleotide
  Antisense strand to SEQ ID NO: 2183300
uccgugacuacuaucgcgg

SEQ ID NO: 2183302 - RNA, 19 nt, Artificial Sequence
  Description of Artificial Sequence: Synthetic oligonucleotide
  Sense strand starting at position 2320 of SEQ ID NO: 1883294
cgcgauaguagucacggaa

SEQ ID NO: 2183303 - RNA, 19 nt, Artificial Sequence
  Description of Artificial Sequence: Synthetic oligonucleotide
  Antisense strand to SEQ ID NO: 2183302
uuccgugacuacuaucgcg

SEQ ID NO: 2183304 - RNA, 19 nt, Artificial Sequence
  Description of Artificial Sequence: Synthetic oligonucleotide
  Sense strand starting at position 2323 of SEQ ID NO: 1883294
gauaguagucacggaaaua

SEQ ID NO: 2183305 - RNA, 19 nt, Artificial Sequence
  Description of Artificial Sequence: Synthetic oligonucleotide
  Antisense strand to SEQ ID NO: 2183304
uauuuccgugacuacuauc

SEQ ID NO: 2183306 - RNA, 19 nt, Artificial Sequence
  Description of Artificial Sequence: Synthetic oligonucleotide
  Sense strand starting at position 2776 of SEQ ID NO: 1883294
acaauaaguucggcucuuu

SEQ ID NO: 2183307 - RNA, 19 nt, Artificial Sequence
  Description of Artificial Sequence: Synthetic oligonucleotide
  Antisense strand to SEQ ID NO: 2183306
aaagagccgaacuuauugu

SEQ ID NO: 2183308 - RNA, 19 nt, Artificial Sequence
  Description of Artificial Sequence: Synthetic oligonucleotide
  Sense strand starting at position 2953 of SEQ ID NO: 1883294
uucuuuggccggugcagaa

SEQ ID NO: 2183309 - RNA, 19 nt, Artificial Sequence
  Description of Artificial Sequence: Synthetic oligonucleotide
  Antisense strand to SEQ ID NO: 2183308
uucugcaccggccaaagaa

SEQ ID NO: 2183310 - RNA, 19 nt, Artificial Sequence
  Description of Artificial Sequence: Synthetic oligonucleotide
  Sense strand starting at position 3081 of SEQ ID NO: 1883294
gcguaugguccuggagucu

SEQ ID NO: 2183311 - RNA, 19 nt, Artificial Sequence
  Description of Artificial Sequence: Synthetic oligonucleotide
  Antisense strand to SEQ ID NO: 2183310
agacuccaggaccauacgc

SEQ ID NO: 2183312 - RNA, 19 nt, Artificial Sequence
  Description of Artificial Sequence: Synthetic oligonucleotide
  Sense strand starting at position 3164 of SEQ ID NO: 1883294
gugguaacugcacauaagu

SEQ ID NO: 2183313 - RNA, 19 nt, Artificial Sequence
  Description of Artificial Sequence: Synthetic oligonucleotide
  Antisense strand to SEQ ID NO: 2183312
acuuaugugcaguuaccac

SEQ ID NO: 2183314 - RNA, 19 nt, Artificial Sequence
  Description of Artificial Sequence: Synthetic oligonucleotide
  Sense strand starting at position 3216 of SEQ ID NO: 1883294
uccugaguuucgccaaguu

SEQ ID NO: 2183315 - RNA, 19 nt, Artificial Sequence
  Description of Artificial Sequence: Synthetic oligonucleotide
  Antisense strand to SEQ ID NO: 2183314
aacuuggcgaaacucagga

SEQ ID NO: 2183316 - RNA, 19 nt, Artificial Sequence
  Description of Artificial Sequence: Synthetic oligonucleotide
  Sense strand starting at position 3756 of SEQ ID NO: 1883294
gcacuaugugcaggugaca

SEQ ID NO: 2183317 - RNA, 19 nt, Artificial Sequence
  Description of Artificial Sequence: Synthetic oligonucleotide
  Antisense strand to SEQ ID NO: 2183316
ugucaccugcacauagugc

SEQ ID NO: 2183318 - RNA, 19 nt, Artificial Sequence
  Description of Artificial Sequence: Synthetic oligonucleotide
  Sense strand starting at position 37 of SEQ ID NO: 1883295
aauagaaauguugguauuc

SEQ ID NO: 2183319 - RNA, 19 nt, Artificial Sequence
  Description of Artificial Sequence: Synthetic oligonucleotide
  Antisense strand to SEQ ID NO: 2183318
gaauaccaacauuucuauu

SEQ ID NO: 2183320 - RNA, 19 nt, Artificial Sequence
  Description of Artificial Sequence: Synthetic oligonucleotide
  Sense strand starting at position 207 of SEQ ID NO: 1883295
aguauuaauguggacaucu

SEQ ID NO: 2183321 - RNA, 19 nt, Artificial Sequence
  Description of Artificial Sequence: Synthetic oligonucleotide
  Antisense strand to SEQ ID NO: 2183320
agauguccacauuaauacu

SEQ ID NO: 2183322 - RNA, 19 nt, Artificial Sequence
  Description of Artificial Sequence: Synthetic oligonucleotide
  Sense strand starting at position 249 of SEQ ID NO: 1883295
ucagguuaucagggauggu

SEQ ID NO: 2183323 - RNA, 19 nt, Artificial Sequence
  Description of Artificial Sequence: Synthetic oligonucleotide
  Antisense strand to SEQ ID NO: 2183322
accaucccugauaaccuga

SEQ ID NO: 2183324 - RNA, 19 nt, Artificial Sequence
  Description of Artificial Sequence: Synthetic oligonucleotide
  Sense strand starting at position 250 of SEQ ID NO: 1883295
cagguuaucagggaugguu

SEQ ID NO: 2183325 - RNA, 19 nt, Artificial Sequence
  Description of Artificial Sequence: Synthetic oligonucleotide
  Antisense strand to SEQ ID NO: 2183324
aaccaucccugauaaccug

SEQ ID NO: 2183326 - RNA, 19 nt, Artificial Sequence
  Description of Artificial Sequence: Synthetic oligonucleotide
  Sense strand starting at position 252 of SEQ ID NO: 1883295
gguuaucagggaugguuaa

SEQ ID NO: 2183327 - RNA, 19 nt, Artificial Sequence
  Description of Artificial Sequence: Synthetic oligonucleotide
  Antisense strand to SEQ ID NO: 2183326
uuaaccaucccugauaacc

SEQ ID NO: 2183328 - RNA, 19 nt, Artificial Sequence
  Description of Artificial Sequence: Synthetic oligonucleotide
  Sense strand starting at position 299 of SEQ ID NO: 1883295
ugucuuaaugcaugaaauu

SEQ ID NO: 2183329 - RNA, 19 nt, Artificial Sequence
  Description of Artificial Sequence: Synthetic oligonucleotide
  Antisense strand to SEQ ID NO: 2183328
aauuucaugcauuaagaca

SEQ ID NO: 2183330 - RNA, 19 nt, Artificial Sequence
  Description of Artificial Sequence: Synthetic oligonucleotide
  Sense strand starting at position 300 of SEQ ID NO: 1883295
gucuuaaugcaugaaauua

SEQ ID NO: 2183331 - RNA, 19 nt, Artificial Sequence
  Description of Artificial Sequence: Synthetic oligonucleotide
  Antisense strand to SEQ ID NO: 2183330
uaauuucaugcauuaagac

SEQ ID NO: 2183332 - RNA, 19 nt, Artificial Sequence
  Description of Artificial Sequence: Synthetic oligonucleotide
  Sense strand starting at position 317 of SEQ ID NO: 1883295
uaauaauaguuccugggau

SEQ ID NO: 2183333 - RNA, 19 nt, Artificial Sequence
  Description of Artificial Sequence: Synthetic oligonucleotide
  Antisense strand to SEQ ID NO: 2183332
aucccaggaacuauuauua

SEQ ID NO: 2183334 - RNA, 19 nt, Artificial Sequence
  Description of Artificial Sequence: Synthetic oligonucleotide
  Sense strand starting at position 319 of SEQ ID NO: 1883295
auaauaguuccugggauau

SEQ ID NO: 2183335 - RNA, 19 nt, Artificial Sequence
  Description of Artificial Sequence: Synthetic oligonucleotide
  Antisense strand to SEQ ID NO: 2183334
auaucccaggaacuauuau

SEQ ID NO: 2183336 - RNA, 19 nt, Artificial Sequence
  Description of Artificial Sequence: Synthetic oligonucleotide
  Sense strand starting at position 565 of SEQ ID NO: 1883295
ggaaauugucauugggacc

SEQ ID NO: 2183337 - RNA, 19 nt, Artificial Sequence
  Description of Artificial Sequence: Synthetic oligonucleotide
  Antisense strand to SEQ ID NO: 2183336
ggucccaaugacaauuucc

SEQ ID NO: 2183338 - RNA, 19 nt, Artificial Sequence
  Description of Artificial Sequence: Synthetic oligonucleotide
  Sense strand starting at position 605 of SEQ ID NO: 1883295
aagagagcucugugaggaa

SEQ ID NO: 2183339 - RNA, 19 nt, Artificial Sequence
  Description of Artificial Sequence: Synthetic oligonucleotide
  Antisense strand to SEQ ID NO: 2183338
uuccucacagagcucucuu

SEQ ID NO: 2183340 - RNA, 19 nt, Artificial Sequence
  Description of Artificial Sequence: Synthetic oligonucleotide
  Sense strand starting at position 651 of SEQ ID NO: 1883295
cggaaaucccugcauaaua

SEQ ID NO: 2183341 - RNA, 19 nt, Artificial Sequence
  Description of Artificial Sequence: Synthetic oligonucleotide
  Antisense strand to SEQ ID NO: 2183340
uauuaugcagggauuuccg

SEQ ID NO: 2183342 - RNA, 19 nt, Artificial Sequence
  Description of Artificial Sequence: Synthetic oligonucleotide
  Sense strand starting at position 719 of SEQ ID NO: 1883295
cauuaugaagugggauagu

SEQ ID NO: 2183343 - RNA, 19 nt, Artificial Sequence
  Description of Artificial Sequence: Synthetic oligonucleotide
  Antisense strand to SEQ ID NO: 2183342
acuaucccacuucauaaug

SEQ ID NO: 2183344 - RNA, 19 nt, Artificial Sequence
  Description of Artificial Sequence: Synthetic oligonucleotide
  Sense strand starting at position 745 of SEQ ID NO: 1883295
cugagaugcaguuauaggu

SEQ ID NO: 2183345 - RNA, 19 nt, Artificial Sequence
  Description of Artificial Sequence: Synthetic oligonucleotide
  Antisense strand to SEQ ID NO: 2183344
accuauaacugcaucucag

SEQ ID NO: 2183346 - RNA, 19 nt, Artificial Sequence
  Description of Artificial Sequence: Synthetic oligonucleotide
  Sense strand starting at position 751 of SEQ ID NO: 1883295
ugcaguuauagguauacag

SEQ ID NO: 2183347 - RNA, 19 nt, Artificial Sequence
  Description of Artificial Sequence: Synthetic oligonucleotide
  Antisense strand to SEQ ID NO: 2183346
cuguauaccuauaacugca

SEQ ID NO: 2183348 - RNA, 19 nt, Artificial Sequence
  Description of Artificial Sequence: Synthetic oligonucleotide
  Sense strand starting at position 1150 of SEQ ID NO: 1883295
uuaugugcacuuugaaaga

SEQ ID NO: 2183349 - RNA, 19 nt, Artificial Sequence
  Description of Artificial Sequence: Synthetic oligonucleotide
  Antisense strand to SEQ ID NO: 2183348
ucuuucaaagugcacauaa

SEQ ID NO: 2183350 - RNA, 19 nt, Artificial Sequence
  Description of Artificial Sequence: Synthetic oligonucleotide
  Sense strand starting at position 1868 of SEQ ID NO: 1883295
ggcagucccguugucuuua

SEQ ID NO: 2183351 - RNA, 19 nt, Artificial Sequence
  Description of Artificial Sequence: Synthetic oligonucleotide
  Antisense strand to SEQ ID NO: 2183350
uaaagacaacgggacugcc

SEQ ID NO: 2183352 - RNA, 19 nt, Artificial Sequence
  Description of Artificial Sequence: Synthetic oligonucleotide
  Sense strand starting at position 2319 of SEQ ID NO: 1883295
uuuaaugagggcgguaaua

SEQ ID NO: 2183353 - RNA, 19 nt, Artificial Sequence
  Description of Artificial Sequence: Synthetic oligonucleotide
  Antisense strand to SEQ ID NO: 2183352
uauuaccgcccucauuaaa

SEQ ID NO: 2183354 - RNA, 19 nt, Artificial Sequence
  Description of Artificial Sequence: Synthetic oligonucleotide
  Sense strand starting at position 2321 of SEQ ID NO: 1883295
uaaugagggcgguaauaga

SEQ ID NO: 2183355 - RNA, 19 nt, Artificial Sequence
  Description of Artificial Sequence: Synthetic oligonucleotide
  Antisense strand to SEQ ID NO: 2183354
ucuauuaccgcccucauua

SEQ ID NO: 2183356 - RNA, 19 nt, Artificial Sequence
  Description of Artificial Sequence: Synthetic oligonucleotide
  Sense strand starting at position 2352 of SEQ ID NO: 1883295
ggaggaggugcuuagcagu

SEQ ID NO: 2183357 - RNA, 19 nt, Artificial Sequence
  Description of Artificial Sequence: Synthetic oligonucleotide
  Antisense strand to SEQ ID NO: 2183356
acugcuaagcaccuccucc

SEQ ID NO: 2183358 - RNA, 19 nt, Artificial Sequence
  Description of Artificial Sequence: Synthetic oligonucleotide
  Sense strand starting at position 2427 of SEQ ID NO: 1883295
gggcgugaugaaugaaauu

SEQ ID NO: 2183359 - RNA, 19 nt, Artificial Sequence
  Description of Artificial Sequence: Synthetic oligonucleotide
  Antisense strand to SEQ ID NO: 2183358
aauuucauucaucacgccc

SEQ ID NO: 2183360 - RNA, 19 nt, Artificial Sequence
  Description of Artificial Sequence: Synthetic oligonucleotide
  Sense strand starting at position 2512 of SEQ ID NO: 1883295
auguguuagcaggagaaag

SEQ ID NO: 2183361 - RNA, 19 nt, Artificial Sequence
  Description of Artificial Sequence: Synthetic oligonucleotide
  Antisense strand to SEQ ID NO: 2183360
cuuucuccugcuaacacau

SEQ ID NO: 2183362 - RNA, 19 nt, Artificial Sequence
  Description of Artificial Sequence: Synthetic oligonucleotide
  Sense strand starting at position 2611 of SEQ ID NO: 1883295
cucucucgccauuaaagaa

SEQ ID NO: 2183363 - RNA, 19 nt, Artificial Sequence
  Description of Artificial Sequence: Synthetic oligonucleotide
  Antisense strand to SEQ ID NO: 2183362
uucuuuaauggcgagagag

SEQ ID NO: 2183364 - RNA, 19 nt, Artificial Sequence
  Description of Artificial Sequence: Synthetic oligonucleotide
  Sense strand starting at position 2917 of SEQ ID NO: 1883295
gcaguuguagcuguucuua

SEQ ID NO: 2183365 - RNA, 19 nt, Artificial Sequence
  Description of Artificial Sequence: Synthetic oligonucleotide
  Antisense strand to SEQ ID NO: 2183364
uaagaacagcuacaacugc

SEQ ID NO: 2183366 - RNA, 19 nt, Artificial Sequence
  Description of Artificial Sequence: Synthetic oligonucleotide
  Sense strand starting at position 3231 of SEQ ID NO: 1883295
aucugucuuagacgauaag

SEQ ID NO: 2183367 - RNA, 19 nt, Artificial Sequence
  Description of Artificial Sequence: Synthetic oligonucleotide
  Antisense strand to SEQ ID NO: 2183366
cuuaucgucuaagacagau

SEQ ID NO: 2183368 - RNA, 19 nt, Artificial Sequence
  Description of Artificial Sequence: Synthetic oligonucleotide
  Sense strand starting at position 3232 of SEQ ID NO: 1883295
ucugucuuagacgauaaga

SEQ ID NO: 2183369 - RNA, 19 nt, Artificial Sequence
  Description of Artificial Sequence: Synthetic oligonucleotide
  Antisense strand to SEQ ID NO: 2183368
ucuuaucgucuaagacaga

SEQ ID NO: 2183370 - RNA, 19 nt, Artificial Sequence
  Description of Artificial Sequence: Synthetic oligonucleotide
  Sense strand starting at position 3390 of SEQ ID NO: 1883295
uugccuuuaguuuaaugau

SEQ ID NO: 2183371 - RNA, 19 nt, Artificial Sequence
  Description of Artificial Sequence: Synthetic oligonucleotide
  Antisense strand to SEQ ID NO: 2183370
aucauuaaacuaaaggcaa

SEQ ID NO: 2183372 - RNA, 19 nt, Artificial Sequence
  Description of Artificial Sequence: Synthetic oligonucleotide
  Sense strand starting at position 3533 of SEQ ID NO: 1883295
ucuacucuccuggaguaua

SEQ ID NO: 2183373 - RNA, 19 nt, Artificial Sequence
  Description of Artificial Sequence: Synthetic oligonucleotide
  Antisense strand to SEQ ID NO: 2183372
uauacuccaggagaguaga

SEQ ID NO: 2183374 - RNA, 19 nt, Artificial Sequence
  Description of Artificial Sequence: Synthetic oligonucleotide
  Sense strand starting at position 3538 of SEQ ID NO: 1883295
ucuccuggaguauaaagua

SEQ ID NO: 2183375 - RNA, 19 nt, Artificial Sequence
  Description of Artificial Sequence: Synthetic oligonucleotide
  Antisense strand to SEQ ID NO: 2183374
uacuuuauacuccaggaga

SEQ ID NO: 2183376 - RNA, 19 nt, Artificial Sequence
  Description of Artificial Sequence: Synthetic oligonucleotide
  Sense strand starting at position 3554 of SEQ ID NO: 1883295
guacaauuagccugggaga

SEQ ID NO: 2183377 - RNA, 19 nt, Artificial Sequence
  Description of Artificial Sequence: Synthetic oligonucleotide
  Antisense strand to SEQ ID NO: 2183376
ucucccaggcuaauuguac

SEQ ID NO: 2183378 - RNA, 19 nt, Artificial Sequence
  Description of Artificial Sequence: Synthetic oligonucleotide
  Sense strand starting at position 3555 of SEQ ID NO: 1883295
uacaauuagccugggagaa

SEQ ID NO: 2183379 - RNA, 19 nt, Artificial Sequence
  Description of Artificial Sequence: Synthetic oligonucleotide
  Antisense strand to SEQ ID NO: 2183378
uucucccaggcuaauugua

SEQ ID NO: 2183380 - RNA, 19 nt, Artificial Sequence
  Description of Artificial Sequence: Synthetic oligonucleotide
  Sense strand starting at position 3556 of SEQ ID NO: 1883295
acaauuagccugggagaau

SEQ ID NO: 2183381 - RNA, 19 nt, Artificial Sequence
  Description of Artificial Sequence: Synthetic oligonucleotide
  Antisense strand to SEQ ID NO: 2183380
auucucccaggcuaauugu

SEQ ID NO: 2183382 - RNA, 19 nt, Artificial Sequence
  Description of Artificial Sequence: Synthetic oligonucleotide
  Sense strand starting at position 3659 of SEQ ID NO: 1883295
uguaaacuuucugcagaau

SEQ ID NO: 2183383 - RNA, 19 nt, Artificial Sequence
  Description of Artificial Sequence: Synthetic oligonucleotide
  Antisense strand to SEQ ID NO: 2183382
auucugcagaaaguuuaca

SEQ ID NO: 2183384 - RNA, 19 nt, Artificial Sequence
  Description of Artificial Sequence: Synthetic oligonucleotide
  Sense strand starting at position 3660 of SEQ ID NO: 1883295
guaaacuuucugcagaauu

SEQ ID NO: 2183385 - RNA, 19 nt, Artificial Sequence
  Description of Artificial Sequence: Synthetic oligonucleotide
  Antisense strand to SEQ ID NO: 2183384
aauucugcagaaaguuuac

SEQ ID NO: 2183386 - RNA, 19 nt, Artificial Sequence
  Description of Artificial Sequence: Synthetic oligonucleotide
  Sense strand starting at position 3693 of SEQ ID NO: 1883295
aauggauauuuaugaagug

SEQ ID NO: 2183387 - RNA, 19 nt, Artificial Sequence
  Description of Artificial Sequence: Synthetic oligonucleotide
  Antisense strand to SEQ ID NO: 2183386
cacuucauaaauauccauu

SEQ ID NO: 2183388 - RNA, 19 nt, Artificial Sequence
  Description of Artificial Sequence: Synthetic oligonucleotide
  Sense strand starting at position 3732 of SEQ ID NO: 1883295
gaugcucaccagcaaguua

SEQ ID NO: 2183389 - RNA, 19 nt, Artificial Sequence
  Description of Artificial Sequence: Synthetic oligonucleotide
  Antisense strand to SEQ ID NO: 2183388
uaacuugcuggugagcauc

SEQ ID NO: 2183390 - RNA, 19 nt, Artificial Sequence
  Description of Artificial Sequence: Synthetic oligonucleotide
  Sense strand starting at position 3745 of SEQ ID NO: 1883295
aaguuaugcgcugaagaau

SEQ ID NO: 2183391 - RNA, 19 nt, Artificial Sequence
  Description of Artificial Sequence: Synthetic oligonucleotide
  Antisense strand to SEQ ID NO: 2183390
auucuucagcgcauaacuu

SEQ ID NO: 2183392 - RNA, 19 nt, Artificial Sequence
  Description of Artificial Sequence: Synthetic oligonucleotide
  Sense strand starting at position 3873 of SEQ ID NO: 1883295
cuuagauugcagugaugag

SEQ ID NO: 2183393 - RNA, 19 nt, Artificial Sequence
  Description of Artificial Sequence: Synthetic oligonucleotide
  Antisense strand to SEQ ID NO: 2183392
cucaucacugcaaucuaag

SEQ ID NO: 2183394 - RNA, 19 nt, Artificial Sequence
  Description of Artificial Sequence: Synthetic oligonucleotide
  Sense strand starting at position 3874 of SEQ ID NO: 1883295
uuagauugcagugaugagu

SEQ ID NO: 2183395 - RNA, 19 nt, Artificial Sequence
  Description of Artificial Sequence: Synthetic oligonucleotide
  Antisense strand to SEQ ID NO: 2183394
acucaucacugcaaucuaa

SEQ ID NO: 2183396 - RNA, 19 nt, Artificial Sequence
  Description of Artificial Sequence: Synthetic oligonucleotide
  Sense strand starting at position 3906 of SEQ ID NO: 1883295
agguuugauguccacuuua

SEQ ID NO: 2183397 - RNA, 19 nt, Artificial Sequence
  Description of Artificial Sequence: Synthetic oligonucleotide
  Antisense strand to SEQ ID NO: 2183396
uaaaguggacaucaaaccu

SEQ ID NO: 2183398 - RNA, 19 nt, Artificial Sequence
  Description of Artificial Sequence: Synthetic oligonucleotide
  Sense strand starting at position 28 of SEQ ID NO: 1883296
agauaaauugcuuagguca

SEQ ID NO: 2183399 - RNA, 19 nt, Artificial Sequence
  Description of Artificial Sequence: Synthetic oligonucleotide
  Antisense strand to SEQ ID NO: 2183398
ugaccuaagcaauuuaucu

SEQ ID NO: 2183400 - RNA, 19 nt, Artificial Sequence
  Description of Artificial Sequence: Synthetic oligonucleotide
  Sense strand starting at position 33 of SEQ ID NO: 1883296
aauugcuuaggucacagaa

SEQ ID NO: 2183401 - RNA, 19 nt, Artificial Sequence
  Description of Artificial Sequence: Synthetic oligonucleotide
  Antisense strand to SEQ ID NO: 2183400
uucugugaccuaagcaauu

SEQ ID NO: 2183402 - RNA, 19 nt, Artificial Sequence
  Description of Artificial Sequence: Synthetic oligonucleotide
  Sense strand starting at position 58 of SEQ ID NO: 1883296
gaagcuuucgaagagguca

SEQ ID NO: 2183403 - RNA, 19 nt, Artificial Sequence
  Description of Artificial Sequence: Synthetic oligonucleotide
  Antisense strand to SEQ ID NO: 2183402
ugaccucuucgaaagcuuc

SEQ ID NO: 2183404 - RNA, 19 nt, Artificial Sequence
  Description of Artificial Sequence: Synthetic oligonucleotide
  Sense strand starting at position 69 of SEQ ID NO: 1883296
agaggucauguguaaauga

SEQ ID NO: 2183405 - RNA, 19 nt, Artificial Sequence
  Description of Artificial Sequence: Synthetic oligonucleotide
  Antisense strand to SEQ ID NO: 2183404
ucauuuacacaugaccucu

SEQ ID NO: 2183406 - RNA, 19 nt, Artificial Sequence
  Description of Artificial Sequence: Synthetic oligonucleotide
  Sense strand starting at position 394 of SEQ ID NO: 1883296
aauaguuggcuguacuaua

SEQ ID NO: 2183407 - RNA, 19 nt, Artificial Sequence
  Description of Artificial Sequence: Synthetic oligonucleotide
  Antisense strand to SEQ ID NO: 2183406
uauaguacagccaacuauu

SEQ ID NO: 2183408 - RNA, 19 nt, Artificial Sequence
  Description of Artificial Sequence: Synthetic oligonucleotide
  Sense strand starting at position 399 of SEQ ID NO: 1883296
uuggcuguacuauauuauu

SEQ ID NO: 2183409 - RNA, 19 nt, Artificial Sequence
  Description of Artificial Sequence: Synthetic oligonucleotide
  Antisense strand to SEQ ID NO: 2183408
aauaauauaguacagccaa

SEQ ID NO: 2183410 - RNA, 19 nt, Artificial Sequence
  Description of Artificial Sequence: Synthetic oligonucleotide
  Sense strand starting at position 577 of SEQ ID NO: 1883296
cagagauuauggccuguag

SEQ ID NO: 2183411 - RNA, 19 nt, Artificial Sequence
  Description of Artificial Sequence: Synthetic oligonucleotide
  Antisense strand to SEQ ID NO: 2183410
cuacaggccauaaucucug

SEQ ID NO: 2183412 - RNA, 19 nt, Artificial Sequence
  Description of Artificial Sequence: Synthetic oligonucleotide
  Sense strand starting at position 579 of SEQ ID NO: 1883296
gagauuauggccuguagau

SEQ ID NO: 2183413 - RNA, 19 nt, Artificial Sequence
  Description of Artificial Sequence: Synthetic oligonucleotide
  Antisense strand to SEQ ID NO: 2183412
aucuacaggccauaaucuc

SEQ ID NO: 2183414 - RNA, 19 nt, Artificial Sequence
  Description of Artificial Sequence: Synthetic oligonucleotide
  Sense strand starting at position 722 of SEQ ID NO: 1883296
aguauaaacguugaaaggu

SEQ ID NO: 2183415 - RNA, 19 nt, Artificial Sequence
  Description of Artificial Sequence: Synthetic oligonucleotide
  Antisense strand to SEQ ID NO: 2183414
accuuucaacguuuauacu

SEQ ID NO: 2183416 - RNA, 19 nt, Artificial Sequence
  Description of Artificial Sequence: Synthetic oligonucleotide
  Sense strand starting at position 731 of SEQ ID NO: 1883296
guugaaaggugaucugaag

SEQ ID NO: 2183417 - RNA, 19 nt, Artificial Sequence
  Description of Artificial Sequence: Synthetic oligonucleotide
  Antisense strand to SEQ ID NO: 2183416
cuucagaucaccuuucaac

SEQ ID NO: 2183418 - RNA, 19 nt, Artificial Sequence
  Description of Artificial Sequence: Synthetic oligonucleotide
  Sense strand starting at position 759 of SEQ ID NO: 1883296
acuagugauugcccagaag

SEQ ID NO: 2183419 - RNA, 19 nt, Artificial Sequence
  Description of Artificial Sequence: Synthetic oligonucleotide
  Antisense strand to SEQ ID NO: 2183418
cuucugggcaaucacuagu

SEQ ID NO: 2183420 - RNA, 19 nt, Artificial Sequence
  Description of Artificial Sequence: Synthetic oligonucleotide
  Sense strand starting at position 941 of SEQ ID NO: 1883296
aguauaagugccucgcacu

SEQ ID NO: 2183421 - RNA, 19 nt, Artificial Sequence
  Description of Artificial Sequence: Synthetic oligonucleotide
  Antisense strand to SEQ ID NO: 2183420
agugcgaggcacuuauacu

SEQ ID NO: 2183422 - RNA, 19 nt, Artificial Sequence
  Description of Artificial Sequence: Synthetic oligonucleotide
  Sense strand starting at position 1055 of SEQ ID NO: 1883296
cuagaaugauaagucccua

SEQ ID NO: 2183423 - RNA, 19 nt, Artificial Sequence
  Description of Artificial Sequence: Synthetic oligonucleotide
  Antisense strand to SEQ ID NO: 2183422
uagggacuuaucauucuag

SEQ ID NO: 2183424 - RNA, 19 nt, Artificial Sequence
  Description of Artificial Sequence: Synthetic oligonucleotide
  Sense strand starting at position 1124 of SEQ ID NO: 1883296
agucaacccucaguaagua

SEQ ID NO: 2183425 - RNA, 19 nt, Artificial Sequence
  Description of Artificial Sequence: Synthetic oligonucleotide
  Antisense strand to SEQ ID NO: 2183424
uacuuacugaggguugacu

SEQ ID NO: 2183426 - RNA, 19 nt, Artificial Sequence
  Description of Artificial Sequence: Synthetic oligonucleotide
  Sense strand starting at position 1175 of SEQ ID NO: 1883296
ucgggucccauagagauua

SEQ ID NO: 2183427 - RNA, 19 nt, Artificial Sequence
  Description of Artificial Sequence: Synthetic oligonucleotide
  Antisense strand to SEQ ID NO: 2183426
uaaucucuaugggacccga

SEQ ID NO: 2183428 - RNA, 19 nt, Artificial Sequence
  Description of Artificial Sequence: Synthetic oligonucleotide
  Sense strand starting at position 1191 of SEQ ID NO: 1883296
uuaaguaacuuguccuuga

SEQ ID NO: 2183429 - RNA, 19 nt, Artificial Sequence
  Description of Artificial Sequence: Synthetic oligonucleotide
  Antisense strand to SEQ ID NO: 2183428
ucaaggacaaguuacuuaa

SEQ ID NO: 2183430 - RNA, 19 nt, Artificial Sequence
  Description of Artificial Sequence: Synthetic oligonucleotide
  Sense strand starting at position 1196 of SEQ ID NO: 1883296
uaacuuguccuugaucgua

SEQ ID NO: 2183431 - RNA, 19 nt, Artificial Sequence
  Description of Artificial Sequence: Synthetic oligonucleotide
  Antisense strand to SEQ ID NO: 2183430
uacgaucaaggacaaguua

SEQ ID NO: 2183432 - RNA, 19 nt, Artificial Sequence
  Description of Artificial Sequence: Synthetic oligonucleotide
  Sense strand starting at position 1214 of SEQ ID NO: 1883296
acaaguaauaaguggcaga

SEQ ID NO: 2183433 - RNA, 19 nt, Artificial Sequence
  Description of Artificial Sequence: Synthetic oligonucleotide
  Antisense strand to SEQ ID NO: 2183432
ucugccacuuauuacuugu

SEQ ID NO: 2183434 - RNA, 19 nt, Artificial Sequence
  Description of Artificial Sequence: Synthetic oligonucleotide
  Sense strand starting at position 1269 of SEQ ID NO: 1883296
gugguuacaccagaguugu

SEQ ID NO: 2183435 - RNA, 19 nt, Artificial Sequence
  Description of Artificial Sequence: Synthetic oligonucleotide
  Antisense strand to SEQ ID NO: 2183434
acaacucugguguaaccac

SEQ ID NO: 2183436 - RNA, 19 nt, Artificial Sequence
  Description of Artificial Sequence: Synthetic oligonucleotide
  Sense strand starting at position 1285 of SEQ ID NO: 1883296
uguaauauuguaggcaaga

SEQ ID NO: 2183437 - RNA, 19 nt, Artificial Sequence
  Description of Artificial Sequence: Synthetic oligonucleotide
  Antisense strand to SEQ ID NO: 2183436
ucuugccuacaauauuaca

SEQ ID NO: 2183438 - RNA, 19 nt, Artificial Sequence
  Description of Artificial Sequence: Synthetic oligonucleotide
  Sense strand starting at position 1286 of SEQ ID NO: 1883296
guaauauuguaggcaagag

SEQ ID NO: 2183439 - RNA, 19 nt, Artificial Sequence
  Description of Artificial Sequence: Synthetic oligonucleotide
  Antisense strand to SEQ ID NO: 2183438
cucuugccuacaauauuac

SEQ ID NO: 2183440 - RNA, 19 nt, Artificial Sequence
  Description of Artificial Sequence: Synthetic oligonucleotide
  Sense strand starting at position 1353 of SEQ ID NO: 1883296
ccucgaauuggugaugacu

SEQ ID NO: 2183441 - RNA, 19 nt, Artificial Sequence
  Description of Artificial Sequence: Synthetic oligonucleotide
  Antisense strand to SEQ ID NO: 2183440
agucaucaccaauucgagg

SEQ ID NO: 2183442 - RNA, 19 nt, Artificial Sequence
  Description of Artificial Sequence: Synthetic oligonucleotide
  Sense strand starting at position 1386 of SEQ ID NO: 1883296
gcugaaagggcucaaucua

SEQ ID NO: 2183443 - RNA, 19 nt, Artificial Sequence
  Description of Artificial Sequence: Synthetic oligonucleotide
  Antisense strand to SEQ ID NO: 2183442
uagauugagcccuuucagc

SEQ ID NO: 2183444 - RNA, 19 nt, Artificial Sequence
  Description of Artificial Sequence: Synthetic oligonucleotide
  Sense strand starting at position 1425 of SEQ ID NO: 1883296
uuuggcuuauggguaaaca

SEQ ID NO: 2183445 - RNA, 19 nt, Artificial Sequence
  Description of Artificial Sequence: Synthetic oligonucleotide
  Antisense strand to SEQ ID NO: 2183444
uguuuacccauaagccaaa

SEQ ID NO: 2183446 - RNA, 19 nt, Artificial Sequence
  Description of Artificial Sequence: Synthetic oligonucleotide
  Sense strand starting at position 1514 of SEQ ID NO: 1883296
gucuuaauccacgauccuu

SEQ ID NO: 2183447 - RNA, 19 nt, Artificial Sequence
  Description of Artificial Sequence: Synthetic oligonucleotide
  Antisense strand to SEQ ID NO: 2183446
aaggaucguggauuaagac

SEQ ID NO: 2183448 - RNA, 19 nt, Artificial Sequence
  Description of Artificial Sequence: Synthetic oligonucleotide
  Sense strand starting at position 1698 of SEQ ID NO: 1883296
agaauagggucagcucuuu

SEQ ID NO: 2183449 - RNA, 19 nt, Artificial Sequence
  Description of Artificial Sequence: Synthetic oligonucleotide
  Antisense strand to SEQ ID NO: 2183448
aaagagcugacccuauucu

SEQ ID NO: 2183450 - RNA, 19 nt, Artificial Sequence
  Description of Artificial Sequence: Synthetic oligonucleotide
  Sense strand starting at position 2427 of SEQ ID NO: 1883296
gaauucguccugcagaauc

SEQ ID NO: 2183451 - RNA, 19 nt, Artificial Sequence
  Description of Artificial Sequence: Synthetic oligonucleotide
  Antisense strand to SEQ ID NO: 2183450
gauucugcaggacgaauuc

SEQ ID NO: 2183452 - RNA, 19 nt, Artificial Sequence
  Description of Artificial Sequence: Synthetic oligonucleotide
  Sense strand starting at position 3162 of SEQ ID NO: 1883296
cugauauuauuaccaguua

SEQ ID NO: 2183453 - RNA, 19 nt, Artificial Sequence
  Description of Artificial Sequence: Synthetic oligonucleotide
  Antisense strand to SEQ ID NO: 2183452
uaacugguaauaauaucag

SEQ ID NO: 2183454 - RNA, 19 nt, Artificial Sequence
  Description of Artificial Sequence: Synthetic oligonucleotide
  Sense strand starting at position 3222 of SEQ ID NO: 1883296
uggauaaaucgagguucug

SEQ ID NO: 2183455 - RNA, 19 nt, Artificial Sequence
  Description of Artificial Sequence: Synthetic oligonucleotide
  Antisense strand to SEQ ID NO: 2183454
cagaaccucgauuuaucca

SEQ ID NO: 2183456 - RNA, 19 nt, Artificial Sequence
  Description of Artificial Sequence: Synthetic oligonucleotide
  Sense strand starting at position 3249 of SEQ ID NO: 1883296
ugccaaggaaucgaguaau

SEQ ID NO: 2183457 - RNA, 19 nt, Artificial Sequence
  Description of Artificial Sequence: Synthetic oligonucleotide
  Antisense strand to SEQ ID NO: 2183456
auuacucgauuccuuggca

SEQ ID NO: 2183458 - RNA, 19 nt, Artificial Sequence
  Description of Artificial Sequence: Synthetic oligonucleotide
  Sense strand starting at position 3270 of SEQ ID NO: 1883296
uguuucuugaaguaggaga

SEQ ID NO: 2183459 - RNA, 19 nt, Artificial Sequence
  Description of Artificial Sequence: Synthetic oligonucleotide
  Antisense strand to SEQ ID NO: 2183458
ucuccuacuucaagaaaca

SEQ ID NO: 2183460 - RNA, 19 nt, Artificial Sequence
  Description of Artificial Sequence: Synthetic oligonucleotide
  Sense strand starting at position 3295 of SEQ ID NO: 1883296
gaaugucaggaguguguaa

SEQ ID NO: 2183461 - RNA, 19 nt, Artificial Sequence
  Description of Artificial Sequence: Synthetic oligonucleotide
  Antisense strand to SEQ ID NO: 2183460
uuacacacuccugacauuc

SEQ ID NO: 2183462 - RNA, 19 nt, Artificial Sequence
  Description of Artificial Sequence: Synthetic oligonucleotide
  Sense strand starting at position 3371 of SEQ ID NO: 1883296
augauaaacuuugcaaggu

SEQ ID NO: 2183463 - RNA, 19 nt, Artificial Sequence
  Description of Artificial Sequence: Synthetic oligonucleotide
  Antisense strand to SEQ ID NO: 2183462
accuugcaaaguuuaucau

SEQ ID NO: 2183464 - RNA, 19 nt, Artificial Sequence
  Description of Artificial Sequence: Synthetic oligonucleotide
  Sense strand starting at position 3480 of SEQ ID NO: 1883296
cuuuaugucucaguaaaua

SEQ ID NO: 2183465 - RNA, 19 nt, Artificial Sequence
  Description of Artificial Sequence: Synthetic oligonucleotide
  Antisense strand to SEQ ID NO: 2183464
uauuuacugagacauaaag

SEQ ID NO: 2183466 - RNA, 19 nt, Artificial Sequence
  Description of Artificial Sequence: Synthetic oligonucleotide
  Sense strand starting at position 3616 of SEQ ID NO: 1883296
gggacauaggagugcuuaa

SEQ ID NO: 2183467 - RNA, 19 nt, Artificial Sequence
  Description of Artificial Sequence: Synthetic oligonucleotide
  Antisense strand to SEQ ID NO: 2183466
uuaagcacuccuauguccc

SEQ ID NO: 2183468 - RNA, 19 nt, Artificial Sequence
  Description of Artificial Sequence: Synthetic oligonucleotide
  Sense strand starting at position 3649 of SEQ ID NO: 1883296
cguuaagaauccuugagaa

SEQ ID NO: 2183469 - RNA, 19 nt, Artificial Sequence
  Description of Artificial Sequence: Synthetic oligonucleotide
  Antisense strand to SEQ ID NO: 2183468
uucucaaggauucuuaacg

SEQ ID NO: 2183470 - RNA, 19 nt, Artificial Sequence
  Description of Artificial Sequence: Synthetic oligonucleotide
  Sense strand starting at position 3680 of SEQ ID NO: 1883296
ugauauuaccagugaccaa

SEQ ID NO: 2183471 - RNA, 19 nt, Artificial Sequence
  Description of Artificial Sequence: Synthetic oligonucleotide
  Antisense strand to SEQ ID NO: 2183470
uuggucacugguaauauca

SEQ ID NO: 2183472 - RNA, 19 nt, Artificial Sequence
  Description of Artificial Sequence: Synthetic oligonucleotide
  Sense strand starting at position 3851 of SEQ ID NO: 1883296
guuugaaaccacugcuaag

SEQ ID NO: 2183473 - RNA, 19 nt, Artificial Sequence
  Description of Artificial Sequence: Synthetic oligonucleotide
  Antisense strand to SEQ ID NO: 2183472
cuuagcagugguuucaaac

SEQ ID NO: 2183474 - RNA, 19 nt, Artificial Sequence
  Description of Artificial Sequence: Synthetic oligonucleotide
  Sense strand starting at position 3869 of SEQ ID NO: 1883296
ggagguagcagguauaguu

SEQ ID NO: 2183475 - RNA, 19 nt, Artificial Sequence
  Description of Artificial Sequence: Synthetic oligonucleotide
  Antisense strand to SEQ ID NO: 2183474
aacuauaccugcuaccucc

SEQ ID NO: 2183476 - RNA, 19 nt, Artificial Sequence
  Description of Artificial Sequence: Synthetic oligonucleotide
  Sense strand starting at position 3980 of SEQ ID NO: 1883296
uucugcucuuuaucaggaa

SEQ ID NO: 2183477 - RNA, 19 nt, Artificial Sequence
  Description of Artificial Sequence: Synthetic oligonucleotide
  Antisense strand to SEQ ID NO: 2183476
uuccugauaaagagcagaa

SEQ ID NO: 2183478 - RNA, 19 nt, Artificial Sequence
  Description of Artificial Sequence: Synthetic oligonucleotide
  Sense strand starting at position 188 of SEQ ID NO: 1883297
gccauaaacaauggugagu

SEQ ID NO: 2183479 - RNA, 19 nt, Artificial Sequence
  Description of Artificial Sequence: Synthetic oligonucleotide
  Antisense strand to SEQ ID NO: 2183478
acucaccauuguuuauggc

SEQ ID NO: 2183480 - RNA, 19 nt, Artificial Sequence
  Description of Artificial Sequence: Synthetic oligonucleotide
  Sense strand starting at position 237 of SEQ ID NO: 1883297
uggaaaucguucucaguaa

SEQ ID NO: 2183481 - RNA, 19 nt, Artificial Sequence
  Description of Artificial Sequence: Synthetic oligonucleotide
  Antisense strand to SEQ ID NO: 2183480
uuacugagaacgauuucca

SEQ ID NO: 2183482 - RNA, 19 nt, Artificial Sequence
  Description of Artificial Sequence: Synthetic oligonucleotide
  Sense strand starting at position 386 of SEQ ID NO: 1883297
gagggauaugccuguagaa

SEQ ID NO: 2183483 - RNA, 19 nt, Artificial Sequence
  Description of Artificial Sequence: Synthetic oligonucleotide
  Antisense strand to SEQ ID NO: 2183482
uucuacaggcauaucccuc

SEQ ID NO: 2183484 - RNA, 19 nt, Artificial Sequence
  Description of Artificial Sequence: Synthetic oligonucleotide
  Sense strand starting at position 388 of SEQ ID NO: 1883297
gggauaugccuguagaagu

SEQ ID NO: 2183485 - RNA, 19 nt, Artificial Sequence
  Description of Artificial Sequence: Synthetic oligonucleotide
  Antisense strand to SEQ ID NO: 2183484
acuucuacaggcauauccc

SEQ ID NO: 2183486 - RNA, 19 nt, Artificial Sequence
  Description of Artificial Sequence: Synthetic oligonucleotide
  Sense strand starting at position 444 of SEQ ID NO: 1883297
uauccuacggcauaguaua

SEQ ID NO: 2183487 - RNA, 19 nt, Artificial Sequence
  Description of Artificial Sequence: Synthetic oligonucleotide
  Antisense strand to SEQ ID NO: 2183486
uauacuaugccguaggaua

SEQ ID NO: 2183488 - RNA, 19 nt, Artificial Sequence
  Description of Artificial Sequence: Synthetic oligonucleotide
  Sense strand starting at position 482 of SEQ ID NO: 1883297
gcuauugaacagugagaaa

SEQ ID NO: 2183489 - RNA, 19 nt, Artificial Sequence
  Description of Artificial Sequence: Synthetic oligonucleotide
  Antisense strand to SEQ ID NO: 2183488
uuucucacuguucaauagc

SEQ ID NO: 2183490 - RNA, 19 nt, Artificial Sequence
  Description of Artificial Sequence: Synthetic oligonucleotide
  Sense strand starting at position 562 of SEQ ID NO: 1883297
aaggauuaauguucccaga

SEQ ID NO: 2183491 - RNA, 19 nt, Artificial Sequence
  Description of Artificial Sequence: Synthetic oligonucleotide
  Antisense strand to SEQ ID NO: 2183490
ucugggaacauuaauccuu

SEQ ID NO: 2183492 - RNA, 19 nt, Artificial Sequence
  Description of Artificial Sequence: Synthetic oligonucleotide
  Sense strand starting at position 564 of SEQ ID NO: 1883297
ggauuaauguucccagaug

SEQ ID NO: 2183493 - RNA, 19 nt, Artificial Sequence
  Description of Artificial Sequence: Synthetic oligonucleotide
  Antisense strand to SEQ ID NO: 2183492
caucugggaacauuaaucc

SEQ ID NO: 2183494 - RNA, 19 nt, Artificial Sequence
  Description of Artificial Sequence: Synthetic oligonucleotide
  Sense strand starting at position 646 of SEQ ID NO: 1883297
ggaaaucucuuacuuguuc

SEQ ID NO: 2183495 - RNA, 19 nt, Artificial Sequence
  Description of Artificial Sequence: Synthetic oligonucleotide
  Antisense strand to SEQ ID NO: 2183494
gaacaaguaagagauuucc

SEQ ID NO: 2183496 - RNA, 19 nt, Artificial Sequence
  Description of Artificial Sequence: Synthetic oligonucleotide
  Sense strand starting at position 695 of SEQ ID NO: 1883297
uucuguuaucugugaagag

SEQ ID NO: 2183497 - RNA, 19 nt, Artificial Sequence
  Description of Artificial Sequence: Synthetic oligonucleotide
  Antisense strand to SEQ ID NO: 2183496
cucuucacagauaacagaa

SEQ ID NO: 2183498 - RNA, 19 nt, Artificial Sequence
  Description of Artificial Sequence: Synthetic oligonucleotide
  Sense strand starting at position 734 of SEQ ID NO: 1883297
uuggaugguugcuuuagga

SEQ ID NO: 2183499 - RNA, 19 nt, Artificial Sequence
  Description of Artificial Sequence: Synthetic oligonucleotide
  Antisense strand to SEQ ID NO: 2183498
uccuaaagcaaccauccaa

SEQ ID NO: 2183500 - RNA, 19 nt, Artificial Sequence
  Description of Artificial Sequence: Synthetic oligonucleotide
  Sense strand starting at position 754 of SEQ ID NO: 1883297
ugaccucccuuggcuuaaa

SEQ ID NO: 2183501 - RNA, 19 nt, Artificial Sequence
  Description of Artificial Sequence: Synthetic oligonucleotide
  Antisense strand to SEQ ID NO: 2183500
uuuaagccaagggagguca

SEQ ID NO: 2183502 - RNA, 19 nt, Artificial Sequence
  Description of Artificial Sequence: Synthetic oligonucleotide
  Sense strand starting at position 785 of SEQ ID NO: 1883297
ggauaacaucucugcauga

SEQ ID NO: 2183503 - RNA, 19 nt, Artificial Sequence
  Description of Artificial Sequence: Synthetic oligonucleotide
  Antisense strand to SEQ ID NO: 2183502
ucaugcagagauguuaucc

SEQ ID NO: 2183504 - RNA, 19 nt, Artificial Sequence
  Description of Artificial Sequence: Synthetic oligonucleotide
  Sense strand starting at position 949 of SEQ ID NO: 1883297
gucaguuugucauuugaua

SEQ ID NO: 2183505 - RNA, 19 nt, Artificial Sequence
  Description of Artificial Sequence: Synthetic oligonucleotide
  Antisense strand to SEQ ID NO: 2183504
uaucaaaugacaaacugac

SEQ ID NO: 2183506 - RNA, 19 nt, Artificial Sequence
  Description of Artificial Sequence: Synthetic oligonucleotide
  Sense strand starting at position 973 of SEQ ID NO: 1883297
uagaguuugcaguaaauua

SEQ ID NO: 2183507 - RNA, 19 nt, Artificial Sequence
  Description of Artificial Sequence: Synthetic oligonucleotide
  Antisense strand to SEQ ID NO: 2183506
uaauuuacugcaaacucua

SEQ ID NO: 2183508 - RNA, 19 nt, Artificial Sequence
  Description of Artificial Sequence: Synthetic oligonucleotide
  Sense strand starting at position 1036 of SEQ ID NO: 1883297
guacuuuaguuccuuaaga

SEQ ID NO: 2183509 - RNA, 19 nt, Artificial Sequence
  Description of Artificial Sequence: Synthetic oligonucleotide
  Antisense strand to SEQ ID NO: 2183508
ucuuaaggaacuaaaguac

SEQ ID NO: 2183510 - RNA, 19 nt, Artificial Sequence
  Description of Artificial Sequence: Synthetic oligonucleotide
  Sense strand starting at position 1295 of SEQ ID NO: 1883297
gggaaugaguauccugucu

SEQ ID NO: 2183511 - RNA, 19 nt, Artificial Sequence
  Description of Artificial Sequence: Synthetic oligonucleotide
  Antisense strand to SEQ ID NO: 2183510
agacaggauacucauuccc

SEQ ID NO: 2183512 - RNA, 19 nt, Artificial Sequence
  Description of Artificial Sequence: Synthetic oligonucleotide
  Sense strand starting at position 1524 of SEQ ID NO: 1883297
gcucucuagcaagaggaau

SEQ ID NO: 2183513 - RNA, 19 nt, Artificial Sequence
  Description of Artificial Sequence: Synthetic oligonucleotide
  Antisense strand to SEQ ID NO: 2183512
auuccucuugcuagagagc

SEQ ID NO: 2183514 - RNA, 19 nt, Artificial Sequence
  Description of Artificial Sequence: Synthetic oligonucleotide
  Sense strand starting at position 1580 of SEQ ID NO: 1883297
ugugccugacucuaagauu

SEQ ID NO: 2183515 - RNA, 19 nt, Artificial Sequence
  Description of Artificial Sequence: Synthetic oligonucleotide
  Antisense strand to SEQ ID NO: 2183514
aaucuuagagucaggcaca

SEQ ID NO: 2183516 - RNA, 19 nt, Artificial Sequence
  Description of Artificial Sequence: Synthetic oligonucleotide
  Sense strand starting at position 2020 of SEQ ID NO: 1883297
gagaguuuaccauguggac

SEQ ID NO: 2183517 - RNA, 19 nt, Artificial Sequence
  Description of Artificial Sequence: Synthetic oligonucleotide
  Antisense strand to SEQ ID NO: 2183516
guccacaugguaaacucuc

SEQ ID NO: 2183518 - RNA, 19 nt, Artificial Sequence
  Description of Artificial Sequence: Synthetic oligonucleotide
  Sense strand starting at position 2067 of SEQ ID NO: 1883297
uggguuuguccuuaaccac

SEQ ID NO: 2183519 - RNA, 19 nt, Artificial Sequence
  Description of Artificial Sequence: Synthetic oligonucleotide
  Antisense strand to SEQ ID NO: 2183518
gugguuaaggacaaaccca

SEQ ID NO: 2183520 - RNA, 19 nt, Artificial Sequence
  Description of Artificial Sequence: Synthetic oligonucleotide
  Sense strand starting at position 2198 of SEQ ID NO: 1883297
ugggcgugggcagaagaau

SEQ ID NO: 2183521 - RNA, 19 nt, Artificial Sequence
  Description of Artificial Sequence: Synthetic oligonucleotide
  Antisense strand to SEQ ID NO: 2183520
auucuucugcccacgccca
